United States Patent Application Publication US 2014/0004565 A1 - sequence listing, part 36

SEQ ID NO: 806459 - RNA, 19 nt, Artificial Sequence
  Description of Artificial Sequence: Synthetic oligonucleotide
guacuggacccagagaugg

SEQ ID NO: 806460 - RNA, 19 nt, Artificial Sequence
  Description of Artificial Sequence: Synthetic oligonucleotide
caugauacugugcacuuuc

SEQ ID NO: 806461 - RNA, 19 nt, Artificial Sequence
  Description of Artificial Sequence: Synthetic oligonucleotide
ccagaugaaauaaucacac

SEQ ID NO: 806462 - RNA, 19 nt, Artificial Sequence
  Description of Artificial Sequence: Synthetic oligonucleotide
acauuguaacccagaagcc

SEQ ID NO: 806463 - RNA, 19 nt, Artificial Sequence
  Description of Artificial Sequence: Synthetic oligonucleotide
caggcucggaugaaaaggg

SEQ ID NO: 806464 - RNA, 19 nt, Artificial Sequence
  Description of Artificial Sequence: Synthetic oligonucleotide
cagcgggucaaugagaggg

SEQ ID NO: 806465 - RNA, 19 nt, Artificial Sequence
  Description of Artificial Sequence: Synthetic oligonucleotide
acaaccccgggccuugacc

SEQ ID NO: 806466 - RNA, 19 nt, Artificial Sequence
  Description of Artificial Sequence: Synthetic oligonucleotide
cacaccaauggguuagggg

SEQ ID NO: 806467 - RNA, 19 nt, Artificial Sequence
  Description of Artificial Sequence: Synthetic oligonucleotide
augaaauaaucacaccaau

SEQ ID NO: 806468 - RNA, 19 nt, Artificial Sequence
  Description of Artificial Sequence: Synthetic oligonucleotide
augcuacgcaaacagccac

SEQ ID NO: 806469 - RNA, 19 nt, Artificial Sequence
  Description of Artificial Sequence: Synthetic oligonucleotide
auuauuaaugugggacggg

SEQ ID NO: 806470 - RNA, 19 nt, Artificial Sequence
  Description of Artificial Sequence: Synthetic oligonucleotide
ucggaugaaaagggaaagg

SEQ ID NO: 806471 - RNA, 19 nt, Artificial Sequence
  Description of Artificial Sequence: Synthetic oligonucleotide
ucaaagggaggccgauggg

SEQ ID NO: 806472 - RNA, 19 nt, Artificial Sequence
  Description of Artificial Sequence: Synthetic oligonucleotide
uucgcugagagugcgcagg

SEQ ID NO: 806473 - RNA, 19 nt, Artificial Sequence
  Description of Artificial Sequence: Synthetic oligonucleotide
aaguaggcagcacccucuc

SEQ ID NO: 806474 - RNA, 19 nt, Artificial Sequence
  Description of Artificial Sequence: Synthetic oligonucleotide
aaugcuacgcaaacagcca

SEQ ID NO: 806475 - RNA, 19 nt, Artificial Sequence
  Description of Artificial Sequence: Synthetic oligonucleotide
guaguagucuuccugugca

SEQ ID NO: 806476 - RNA, 19 nt, Artificial Sequence
  Description of Artificial Sequence: Synthetic oligonucleotide
guaaggggcagcaaagagc

SEQ ID NO: 806477 - RNA, 19 nt, Artificial Sequence
  Description of Artificial Sequence: Synthetic oligonucleotide
uucaccucaaagccaggcu

SEQ ID NO: 806478 - RNA, 19 nt, Artificial Sequence
  Description of Artificial Sequence: Synthetic oligonucleotide
acaaugcuacgcaaacagc

SEQ ID NO: 806479 - RNA, 19 nt, Artificial Sequence
  Description of Artificial Sequence: Synthetic oligonucleotide
ggcguauucgcugagagug

SEQ ID NO: 806480 - RNA, 19 nt, Artificial Sequence
  Description of Artificial Sequence: Synthetic oligonucleotide
ucuacagcggcuugucgcu

SEQ ID NO: 806481 - RNA, 19 nt, Artificial Sequence
  Description of Artificial Sequence: Synthetic oligonucleotide
cuggugacgaaggacuucg

SEQ ID NO: 806482 - RNA, 19 nt, Artificial Sequence
  Description of Artificial Sequence: Synthetic oligonucleotide
gucaaugagagggugcacc

SEQ ID NO: 806483 - RNA, 19 nt, Artificial Sequence
  Description of Artificial Sequence: Synthetic oligonucleotide
uauucgcugagagugcgca

SEQ ID NO: 806484 - RNA, 19 nt, Artificial Sequence
  Description of Artificial Sequence: Synthetic oligonucleotide
agggguucuagcucacuag

SEQ ID NO: 806485 - RNA, 19 nt, Artificial Sequence
  Description of Artificial Sequence: Synthetic oligonucleotide
uccgggugaggugagaccc

SEQ ID NO: 806486 - RNA, 19 nt, Artificial Sequence
  Description of Artificial Sequence: Synthetic oligonucleotide
gaaccgggcugacugacug

SEQ ID NO: 806487 - RNA, 19 nt, Artificial Sequence
  Description of Artificial Sequence: Synthetic oligonucleotide
acuccaccggcgcacggcc

SEQ ID NO: 806488 - RNA, 19 nt, Artificial Sequence
  Description of Artificial Sequence: Synthetic oligonucleotide
ugauggggagucacguuga

SEQ ID NO: 806489 - RNA, 19 nt, Artificial Sequence
  Description of Artificial Sequence: Synthetic oligonucleotide
aaggggcgcacauugccga

SEQ ID NO: 806490 - RNA, 19 nt, Artificial Sequence
  Description of Artificial Sequence: Synthetic oligonucleotide
ggggucauugcccagggcc

SEQ ID NO: 806491 - RNA, 19 nt, Artificial Sequence
  Description of Artificial Sequence: Synthetic oligonucleotide
auaaucacaccaauggguu

SEQ ID NO: 806492 - RNA, 19 nt, Artificial Sequence
  Description of Artificial Sequence: Synthetic oligonucleotide
aggacuucguucucgugca

SEQ ID NO: 806493 - RNA, 19 nt, Artificial Sequence
  Description of Artificial Sequence: Synthetic oligonucleotide
ugggacauuguaacccaga

SEQ ID NO: 806494 - RNA, 19 nt, Artificial Sequence
  Description of Artificial Sequence: Synthetic oligonucleotide
ugggcauagaggagaagaa

SEQ ID NO: 806495 - RNA, 19 nt, Artificial Sequence
  Description of Artificial Sequence: Synthetic oligonucleotide
caaggggcgcacauugccg

SEQ ID NO: 806496 - RNA, 19 nt, Artificial Sequence
  Description of Artificial Sequence: Synthetic oligonucleotide
ucgugucuggugcugguga

SEQ ID NO: 806497 - RNA, 19 nt, Artificial Sequence
  Description of Artificial Sequence: Synthetic oligonucleotide
auccgggugaggugagacc

SEQ ID NO: 806498 - RNA, 19 nt, Artificial Sequence
  Description of Artificial Sequence: Synthetic oligonucleotide
aaugugggacgggcaaggg

SEQ ID NO: 806499 - RNA, 19 nt, Artificial Sequence
  Description of Artificial Sequence: Synthetic oligonucleotide
caaggucuggaugaaggag

SEQ ID NO: 806500 - RNA, 19 nt, Artificial Sequence
  Description of Artificial Sequence: Synthetic oligonucleotide
ugcuacgcaaacagccaca

SEQ ID NO: 806501 - RNA, 19 nt, Artificial Sequence
  Description of Artificial Sequence: Synthetic oligonucleotide
acucuccggggucucauag

SEQ ID NO: 806502 - RNA, 19 nt, Artificial Sequence
  Description of Artificial Sequence: Synthetic oligonucleotide
ucuucgugucuggugcugg

SEQ ID NO: 806503 - RNA, 19 nt, Artificial Sequence
  Description of Artificial Sequence: Synthetic oligonucleotide
aaccgggcugacugacugg

SEQ ID NO: 806504 - RNA, 19 nt, Artificial Sequence
  Description of Artificial Sequence: Synthetic oligonucleotide
gagagggugcaccgaggcg

SEQ ID NO: 806505 - RNA, 19 nt, Artificial Sequence
  Description of Artificial Sequence: Synthetic oligonucleotide
gggguucuagcucacuagg

SEQ ID NO: 806506 - RNA, 19 nt, Artificial Sequence
  Description of Artificial Sequence: Synthetic oligonucleotide
agagggaccugguccauga

SEQ ID NO: 806507 - RNA, 19 nt, Artificial Sequence
  Description of Artificial Sequence: Synthetic oligonucleotide
ucuuucucgcgcucgcgcu

SEQ ID NO: 806508 - RNA, 19 nt, Artificial Sequence
  Description of Artificial Sequence: Synthetic oligonucleotide
cagcucagcggacugugcg

SEQ ID NO: 806509 - RNA, 19 nt, Artificial Sequence
  Description of Artificial Sequence: Synthetic oligonucleotide
auuggagcagagagggagg

SEQ ID NO: 806510 - RNA, 19 nt, Artificial Sequence
  Description of Artificial Sequence: Synthetic oligonucleotide
aggucggcgcgcuucuugg

SEQ ID NO: 806511 - RNA, 19 nt, Artificial Sequence
  Description of Artificial Sequence: Synthetic oligonucleotide
ugcgauugccaggagacau

SEQ ID NO: 806512 - RNA, 19 nt, Artificial Sequence
  Description of Artificial Sequence: Synthetic oligonucleotide
guucuacagcggcuugucg

SEQ ID NO: 806513 - RNA, 19 nt, Artificial Sequence
  Description of Artificial Sequence: Synthetic oligonucleotide
ggcgcugccaggcucaaag

SEQ ID NO: 806514 - RNA, 19 nt, Artificial Sequence
  Description of Artificial Sequence: Synthetic oligonucleotide
guacaggucgcugcgcgcg

SEQ ID NO: 806515 - RNA, 19 nt, Artificial Sequence
  Description of Artificial Sequence: Synthetic oligonucleotide
uccgcacacaaccccgggc

SEQ ID NO: 806516 - RNA, 19 nt, Artificial Sequence
  Description of Artificial Sequence: Synthetic oligonucleotide
gugaggucgggcguauucg

SEQ ID NO: 806517 - RNA, 19 nt, Artificial Sequence
  Description of Artificial Sequence: Synthetic oligonucleotide
uguaacccagaagccccgg

SEQ ID NO: 806518 - RNA, 19 nt, Artificial Sequence
  Description of Artificial Sequence: Synthetic oligonucleotide
ucacaccaauggguuaggg

SEQ ID NO: 806519 - RNA, 19 nt, Artificial Sequence
  Description of Artificial Sequence: Synthetic oligonucleotide
uucucgugcagagggugag

SEQ ID NO: 806520 - RNA, 19 nt, Artificial Sequence
  Description of Artificial Sequence: Synthetic oligonucleotide
ugacuggcguggcugggca

SEQ ID NO: 806521 - RNA, 19 nt, Artificial Sequence
  Description of Artificial Sequence: Synthetic oligonucleotide
cccaccuccgcacacaacc

SEQ ID NO: 806522 - RNA, 19 nt, Artificial Sequence
  Description of Artificial Sequence: Synthetic oligonucleotide
auagcagguucuacagcgg

SEQ ID NO: 806523 - RNA, 19 nt, Artificial Sequence
  Description of Artificial Sequence: Synthetic oligonucleotide
cuucucgcgcucccgcucg

SEQ ID NO: 806524 - RNA, 19 nt, Artificial Sequence
  Description of Artificial Sequence: Synthetic oligonucleotide
ugccaggagacaugacgug

SEQ ID NO: 806525 - RNA, 19 nt, Artificial Sequence
  Description of Artificial Sequence: Synthetic oligonucleotide
ucuggauagcagguucuac

SEQ ID NO: 806526 - RNA, 19 nt, Artificial Sequence
  Description of Artificial Sequence: Synthetic oligonucleotide
agacaugacgugaggucgg

SEQ ID NO: 806527 - RNA, 19 nt, Artificial Sequence
  Description of Artificial Sequence: Synthetic oligonucleotide
agcacacaaugcuacgcaa

SEQ ID NO: 806528 - RNA, 19 nt, Artificial Sequence
  Description of Artificial Sequence: Synthetic oligonucleotide
uccggggucucauagucuu

SEQ ID NO: 806529 - RNA, 19 nt, Artificial Sequence
  Description of Artificial Sequence: Synthetic oligonucleotide
ggaggucacguucacgggc

SEQ ID NO: 806530 - RNA, 19 nt, Artificial Sequence
  Description of Artificial Sequence: Synthetic oligonucleotide
aggucgggcguauucgcug

SEQ ID NO: 806531 - RNA, 19 nt, Artificial Sequence
  Description of Artificial Sequence: Synthetic oligonucleotide
cuccgcguaagacauguca

SEQ ID NO: 806532 - RNA, 19 nt, Artificial Sequence
  Description of Artificial Sequence: Synthetic oligonucleotide
agcugggucgcugcuguac

SEQ ID NO: 806533 - RNA, 19 nt, Artificial Sequence
  Description of Artificial Sequence: Synthetic oligonucleotide
gacaugacgugaggucggg

SEQ ID NO: 806534 - RNA, 19 nt, Artificial Sequence
  Description of Artificial Sequence: Synthetic oligonucleotide
augacgugaggucgggcgu

SEQ ID NO: 806535 - RNA, 19 nt, Artificial Sequence
  Description of Artificial Sequence: Synthetic oligonucleotide
aggggugguugcgauugcc

SEQ ID NO: 806536 - RNA, 19 nt, Artificial Sequence
  Description of Artificial Sequence: Synthetic oligonucleotide
ugcagcucagcggacugug

SEQ ID NO: 806537 - RNA, 19 nt, Artificial Sequence
  Description of Artificial Sequence: Synthetic oligonucleotide
agcgccaagcgcugcagcu

SEQ ID NO: 806538 - RNA, 19 nt, Artificial Sequence
  Description of Artificial Sequence: Synthetic oligonucleotide
acaugucagggcgcagggc

SEQ ID NO: 806539 - RNA, 19 nt, Artificial Sequence
  Description of Artificial Sequence: Synthetic oligonucleotide
agggaggccgaugggguac

SEQ ID NO: 806540 - RNA, 19 nt, Artificial Sequence
  Description of Artificial Sequence: Synthetic oligonucleotide
gggcacuguagccacggcg

SEQ ID NO: 806541 - RNA, 19 nt, Artificial Sequence
  Description of Artificial Sequence: Synthetic oligonucleotide
ccaggcucggaugaaaagg

SEQ ID NO: 806542 - RNA, 19 nt, Artificial Sequence
  Description of Artificial Sequence: Synthetic oligonucleotide
auucgcugagagugcgcag

SEQ ID NO: 806543 - RNA, 19 nt, Artificial Sequence
  Description of Artificial Sequence: Synthetic oligonucleotide
gauccgggugaggugagac

SEQ ID NO: 806544 - RNA, 19 nt, Artificial Sequence
  Description of Artificial Sequence: Synthetic oligonucleotide
ugagacccugaggccagcg

SEQ ID NO: 806545 - RNA, 19 nt, Artificial Sequence
  Description of Artificial Sequence: Synthetic oligonucleotide
auagaaggggugguugcga

SEQ ID NO: 806546 - RNA, 19 nt, Artificial Sequence
  Description of Artificial Sequence: Synthetic oligonucleotide
guaagacaugucagggcgc

SEQ ID NO: 806547 - RNA, 19 nt, Artificial Sequence
  Description of Artificial Sequence: Synthetic oligonucleotide
ugaaccgggcugacugacu

SEQ ID NO: 806548 - RNA, 19 nt, Artificial Sequence
  Description of Artificial Sequence: Synthetic oligonucleotide
agccgcuccgcguaagaca

SEQ ID NO: 806549 - RNA, 19 nt, Artificial Sequence
  Description of Artificial Sequence: Synthetic oligonucleotide
ggcaggucccgguaagggg

SEQ ID NO: 806550 - RNA, 19 nt, Artificial Sequence
  Description of Artificial Sequence: Synthetic oligonucleotide
ggcacuguagccacggcgc

SEQ ID NO: 806551 - RNA, 19 nt, Artificial Sequence
  Description of Artificial Sequence: Synthetic oligonucleotide
aaccccgggccuugaccuc

SEQ ID NO: 806552 - RNA, 19 nt, Artificial Sequence
  Description of Artificial Sequence: Synthetic oligonucleotide
gaaguacaggucgcugcgc

SEQ ID NO: 806553 - RNA, 19 nt, Artificial Sequence
  Description of Artificial Sequence: Synthetic oligonucleotide
ucuagcucacuaggcuuca

SEQ ID NO: 806554 - RNA, 19 nt, Artificial Sequence
  Description of Artificial Sequence: Synthetic oligonucleotide
gugguugcgauugccagga

SEQ ID NO: 806555 - RNA, 19 nt, Artificial Sequence
  Description of Artificial Sequence: Synthetic oligonucleotide
cugggacauuguaacccag

SEQ ID NO: 806556 - RNA, 19 nt, Artificial Sequence
  Description of Artificial Sequence: Synthetic oligonucleotide
uugaaccgggcugacugac

SEQ ID NO: 806557 - RNA, 19 nt, Artificial Sequence
  Description of Artificial Sequence: Synthetic oligonucleotide
acaugacgugaggucgggc

SEQ ID NO: 806558 - RNA, 19 nt, Artificial Sequence
  Description of Artificial Sequence: Synthetic oligonucleotide
aaagagcaucauauagaua

SEQ ID NO: 806559 - RNA, 19 nt, Artificial Sequence
  Description of Artificial Sequence: Synthetic oligonucleotide
ggauagcagguucuacagc

SEQ ID NO: 806560 - RNA, 19 nt, Artificial Sequence
  Description of Artificial Sequence: Synthetic oligonucleotide
ugcaaguaggcagcacccu

SEQ ID NO: 806561 - RNA, 19 nt, Artificial Sequence
  Description of Artificial Sequence: Synthetic oligonucleotide
cacccuugccacuucccac

SEQ ID NO: 806562 - RNA, 19 nt, Artificial Sequence
  Description of Artificial Sequence: Synthetic oligonucleotide
accuccgcacacaaccccg

SEQ ID NO: 806563 - RNA, 19 nt, Artificial Sequence
  Description of Artificial Sequence: Synthetic oligonucleotide
ggauugggcauagaggaga

SEQ ID NO: 806564 - RNA, 19 nt, Artificial Sequence
  Description of Artificial Sequence: Synthetic oligonucleotide
aagacaugucagggcgcag

SEQ ID NO: 806565 - RNA, 19 nt, Artificial Sequence
  Description of Artificial Sequence: Synthetic oligonucleotide
cuucguucucgugcagagg

SEQ ID NO: 806566 - RNA, 19 nt, Artificial Sequence
  Description of Artificial Sequence: Synthetic oligonucleotide
gucggcgcgcuucuuggcc

SEQ ID NO: 806567 - RNA, 19 nt, Artificial Sequence
  Description of Artificial Sequence: Synthetic oligonucleotide
agucuucgugucuggugcu

SEQ ID NO: 806568 - RNA, 19 nt, Artificial Sequence
  Description of Artificial Sequence: Synthetic oligonucleotide
gcguaagacaugucagggc

SEQ ID NO: 806569 - RNA, 19 nt, Artificial Sequence
  Description of Artificial Sequence: Synthetic oligonucleotide
ugugcgugcauggccugca

SEQ ID NO: 806570 - RNA, 19 nt, Artificial Sequence
  Description of Artificial Sequence: Synthetic oligonucleotide
uucgugucuggugcuggug

SEQ ID NO: 806571 - RNA, 19 nt, Artificial Sequence
  Description of Artificial Sequence: Synthetic oligonucleotide
uccaccggcgcacggcccu

SEQ ID NO: 806572 - RNA, 19 nt, Artificial Sequence
  Description of Artificial Sequence: Synthetic oligonucleotide
uacaggucgcugcgcgcgc

SEQ ID NO: 806573 - RNA, 19 nt, Artificial Sequence
  Description of Artificial Sequence: Synthetic oligonucleotide
agggaccugguccaugaua

SEQ ID NO: 806574 - RNA, 19 nt, Artificial Sequence
  Description of Artificial Sequence: Synthetic oligonucleotide
aggauugggcauagaggag

SEQ ID NO: 806575 - RNA, 19 nt, Artificial Sequence
  Description of Artificial Sequence: Synthetic oligonucleotide
gggucauugcccagggccg

SEQ ID NO: 806576 - RNA, 19 nt, Artificial Sequence
  Description of Artificial Sequence: Synthetic oligonucleotide
uugaagccgcgguccaggu

SEQ ID NO: 806577 - RNA, 19 nt, Artificial Sequence
  Description of Artificial Sequence: Synthetic oligonucleotide
guugaaccgggcugacuga

SEQ ID NO: 806578 - RNA, 19 nt, Artificial Sequence
  Description of Artificial Sequence: Synthetic oligonucleotide
ccgcguaagacaugucagg

SEQ ID NO: 806579 - RNA, 19 nt, Artificial Sequence
  Description of Artificial Sequence: Synthetic oligonucleotide
gguugcgauugccaggaga

SEQ ID NO: 806580 - RNA, 19 nt, Artificial Sequence
  Description of Artificial Sequence: Synthetic oligonucleotide
gggacauuguaacccagaa

SEQ ID NO: 806581 - RNA, 19 nt, Artificial Sequence
  Description of Artificial Sequence: Synthetic oligonucleotide
gggucucauagucuucgug

SEQ ID NO: 806582 - RNA, 19 nt, Artificial Sequence
  Description of Artificial Sequence: Synthetic oligonucleotide
gcgcgcacgaguugaagcc

SEQ ID NO: 806583 - RNA, 19 nt, Artificial Sequence
  Description of Artificial Sequence: Synthetic oligonucleotide
cugggucgcugcuguacag

SEQ ID NO: 806584 - RNA, 19 nt, Artificial Sequence
  Description of Artificial Sequence: Synthetic oligonucleotide
acugugcgugcauggccug

SEQ ID NO: 806585 - RNA, 19 nt, Artificial Sequence
  Description of Artificial Sequence: Synthetic oligonucleotide
cuuucucgcgcucgcgcuc

SEQ ID NO: 806586 - RNA, 19 nt, Artificial Sequence
  Description of Artificial Sequence: Synthetic oligonucleotide
aucuaccagaugaaauaau

SEQ ID NO: 806587 - RNA, 19 nt, Artificial Sequence
  Description of Artificial Sequence: Synthetic oligonucleotide
agcgccagccguucucgcu

SEQ ID NO: 806588 - RNA, 19 nt, Artificial Sequence
  Description of Artificial Sequence: Synthetic oligonucleotide
augauacugugcacuuucu

SEQ ID NO: 806589 - RNA, 19 nt, Artificial Sequence
  Description of Artificial Sequence: Synthetic oligonucleotide
gggcgcacauugccgaggg

SEQ ID NO: 806590 - RNA, 19 nt, Artificial Sequence
  Description of Artificial Sequence: Synthetic oligonucleotide
gcggacugugcgugcaugg

SEQ ID NO: 806591 - RNA, 19 nt, Artificial Sequence
  Description of Artificial Sequence: Synthetic oligonucleotide
cuccgcacacaaccccggg

SEQ ID NO: 806592 - RNA, 19 nt, Artificial Sequence
  Description of Artificial Sequence: Synthetic oligonucleotide
agguucuacagcggcuugu

SEQ ID NO: 806593 - RNA, 19 nt, Artificial Sequence
  Description of Artificial Sequence: Synthetic oligonucleotide
gcugggacauuguaaccca

SEQ ID NO: 806594 - RNA, 19 nt, Artificial Sequence
  Description of Artificial Sequence: Synthetic oligonucleotide
ccgguaaggggcagcaaag

SEQ ID NO: 806595 - RNA, 19 nt, Artificial Sequence
  Description of Artificial Sequence: Synthetic oligonucleotide
gggauccaggccuggcccg

SEQ ID NO: 806596 - RNA, 19 nt, Artificial Sequence
  Description of Artificial Sequence: Synthetic oligonucleotide
ugcagggguucuagcucac

SEQ ID NO: 806597 - RNA, 19 nt, Artificial Sequence
  Description of Artificial Sequence: Synthetic oligonucleotide
uuguugaaccgggcugacu

SEQ ID NO: 806598 - RNA, 19 nt, Artificial Sequence
  Description of Artificial Sequence: Synthetic oligonucleotide
guauucgcugagagugcgc

SEQ ID NO: 806599 - RNA, 19 nt, Artificial Sequence
  Description of Artificial Sequence: Synthetic oligonucleotide
caggucggcgcgcuucuug

SEQ ID NO: 806600 - RNA, 19 nt, Artificial Sequence
  Description of Artificial Sequence: Synthetic oligonucleotide
cugacuggcguggcugggc

SEQ ID NO: 806601 - RNA, 19 nt, Artificial Sequence
  Description of Artificial Sequence: Synthetic oligonucleotide
aggggcgcacauugccgag

SEQ ID NO: 806602 - RNA, 19 nt, Artificial Sequence
  Description of Artificial Sequence: Synthetic oligonucleotide
gguacuggacccagagaug

SEQ ID NO: 806603 - RNA, 19 nt, Artificial Sequence
  Description of Artificial Sequence: Synthetic oligonucleotide
uggugacgaaggacuucgu

SEQ ID NO: 806604 - RNA, 19 nt, Artificial Sequence
  Description of Artificial Sequence: Synthetic oligonucleotide
cacggaggucacguucacg

SEQ ID NO: 806605 - RNA, 19 nt, Artificial Sequence
  Description of Artificial Sequence: Synthetic oligonucleotide
cacacggggauggggcggg

SEQ ID NO: 806606 - RNA, 19 nt, Artificial Sequence
  Description of Artificial Sequence: Synthetic oligonucleotide
gcaugcugccuuucggcug

SEQ ID NO: 806607 - RNA, 19 nt, Artificial Sequence
  Description of Artificial Sequence: Synthetic oligonucleotide
gggucaaugagagggugca

SEQ ID NO: 806608 - RNA, 19 nt, Artificial Sequence
  Description of Artificial Sequence: Synthetic oligonucleotide
ggcaccggacucuccgggg

SEQ ID NO: 806609 - RNA, 19 nt, Artificial Sequence
  Description of Artificial Sequence: Synthetic oligonucleotide
ugguugcgauugccaggag

SEQ ID NO: 806610 - RNA, 19 nt, Artificial Sequence
  Description of Artificial Sequence: Synthetic oligonucleotide
ucgcgcucuuucucgcgcu

SEQ ID NO: 806611 - RNA, 19 nt, Artificial Sequence
  Description of Artificial Sequence: Synthetic oligonucleotide
guuagggagggucccggcu

SEQ ID NO: 806612 - RNA, 19 nt, Artificial Sequence
  Description of Artificial Sequence: Synthetic oligonucleotide
cagguucuacagcggcuug

SEQ ID NO: 806613 - RNA, 19 nt, Artificial Sequence
  Description of Artificial Sequence: Synthetic oligonucleotide
ggaguggcacgcugugcag

SEQ ID NO: 806614 - RNA, 19 nt, Artificial Sequence
  Description of Artificial Sequence: Synthetic oligonucleotide
cuccaaggucuggaugaag

SEQ ID NO: 806615 - RNA, 19 nt, Artificial Sequence
  Description of Artificial Sequence: Synthetic oligonucleotide
ucacguucacgggcuuccc

SEQ ID NO: 806616 - RNA, 19 nt, Artificial Sequence
  Description of Artificial Sequence: Synthetic oligonucleotide
gauugccaggagacaugac

SEQ ID NO: 806617 - RNA, 19 nt, Artificial Sequence
  Description of Artificial Sequence: Synthetic oligonucleotide
cacuccaccggcgcacggc

SEQ ID NO: 806618 - RNA, 19 nt, Artificial Sequence
  Description of Artificial Sequence: Synthetic oligonucleotide
cuucuccucgcgcgcgcgc

SEQ ID NO: 806619 - RNA, 19 nt, Artificial Sequence
  Description of Artificial Sequence: Synthetic oligonucleotide
agagcaucauauagauauu

SEQ ID NO: 806620 - RNA, 19 nt, Artificial Sequence
  Description of Artificial Sequence: Synthetic oligonucleotide
ggcguggcugggcacgucc

SEQ ID NO: 806621 - RNA, 19 nt, Artificial Sequence
  Description of Artificial Sequence: Synthetic oligonucleotide
gaggucacguucacgggcu

SEQ ID NO: 806622 - RNA, 19 nt, Artificial Sequence
  Description of Artificial Sequence: Synthetic oligonucleotide
gucuucgugucuggugcug

SEQ ID NO: 806623 - RNA, 19 nt, Artificial Sequence
  Description of Artificial Sequence: Synthetic oligonucleotide
gguuagggagggucccggc

SEQ ID NO: 806624 - RNA, 19 nt, Artificial Sequence
  Description of Artificial Sequence: Synthetic oligonucleotide
acgggcaaggggcgcacau

SEQ ID NO: 806625 - RNA, 19 nt, Artificial Sequence
  Description of Artificial Sequence: Synthetic oligonucleotide
cguauucgcugagagugcg

SEQ ID NO: 806626 - RNA, 19 nt, Artificial Sequence
  Description of Artificial Sequence: Synthetic oligonucleotide
gggcaccggacucuccggg

SEQ ID NO: 806627 - RNA, 19 nt, Artificial Sequence
  Description of Artificial Sequence: Synthetic oligonucleotide
ucgggcguauucgcugaga

SEQ ID NO: 806628 - RNA, 19 nt, Artificial Sequence
  Description of Artificial Sequence: Synthetic oligonucleotide
ugacgugaggucgggcgua

SEQ ID NO: 806629 - RNA, 19 nt, Artificial Sequence
  Description of Artificial Sequence: Synthetic oligonucleotide
guuccagcgccaagcgcug

SEQ ID NO: 806630 - RNA, 19 nt, Artificial Sequence
  Description of Artificial Sequence: Synthetic oligonucleotide
caaccccgggccuugaccu

SEQ ID NO: 806631 - RNA, 19 nt, Artificial Sequence
  Description of Artificial Sequence: Synthetic oligonucleotide
guucucgugcagaggguga

SEQ ID NO: 806632 - RNA, 19 nt, Artificial Sequence
  Description of Artificial Sequence: Synthetic oligonucleotide
gguucuacagcggcuuguc

SEQ ID NO: 806633 - RNA, 19 nt, Artificial Sequence
  Description of Artificial Sequence: Synthetic oligonucleotide
cuggagugucaggacccag

SEQ ID NO: 806634 - RNA, 19 nt, Artificial Sequence
  Description of Artificial Sequence: Synthetic oligonucleotide
cagggguucuagcucacua

SEQ ID NO: 806635 - RNA, 19 nt, Artificial Sequence
  Description of Artificial Sequence: Synthetic oligonucleotide
cgcugccaggcucaaaggg

SEQ ID NO: 806636 - RNA, 19 nt, Artificial Sequence
  Description of Artificial Sequence: Synthetic oligonucleotide
ucgcugcgcgcgcacgagu

SEQ ID NO: 806637 - RNA, 19 nt, Artificial Sequence
  Description of Artificial Sequence: Synthetic oligonucleotide
gggcugacugacuggcgug

SEQ ID NO: 806638 - RNA, 19 nt, Artificial Sequence
  Description of Artificial Sequence: Synthetic oligonucleotide
cagcgccaagcgcugcagc

SEQ ID NO: 806639 - RNA, 19 nt, Artificial Sequence
  Description of Artificial Sequence: Synthetic oligonucleotide
ucccaccuccgcacacaac

SEQ ID NO: 806640 - RNA, 19 nt, Artificial Sequence
  Description of Artificial Sequence: Synthetic oligonucleotide
gucgggcguauucgcugag

SEQ ID NO: 806641 - RNA, 19 nt, Artificial Sequence
  Description of Artificial Sequence: Synthetic oligonucleotide
guucacgggcuucccgcuc

SEQ ID NO: 806642 - RNA, 19 nt, Artificial Sequence
  Description of Artificial Sequence: Synthetic oligonucleotide
cugugcgugcauggccugc

SEQ ID NO: 806643 - RNA, 19 nt, Artificial Sequence
  Description of Artificial Sequence: Synthetic oligonucleotide
agcgggucaaugagagggu

SEQ ID NO: 806644 - RNA, 19 nt, Artificial Sequence
  Description of Artificial Sequence: Synthetic oligonucleotide
cacuguagccacggcgcug

SEQ ID NO: 806645 - RNA, 19 nt, Artificial Sequence
  Description of Artificial Sequence: Synthetic oligonucleotide
gggugcaccgaggcggagg

SEQ ID NO: 806646 - RNA, 19 nt, Artificial Sequence
  Description of Artificial Sequence: Synthetic oligonucleotide
cugggcacguccaccaccu

SEQ ID NO: 806647 - RNA, 19 nt, Artificial Sequence
  Description of Artificial Sequence: Synthetic oligonucleotide
ggcucggaugaaaagggaa

SEQ ID NO: 806648 - RNA, 19 nt, Artificial Sequence
  Description of Artificial Sequence: Synthetic oligonucleotide
aggcucggaugaaaaggga

SEQ ID NO: 806649 - RNA, 19 nt, Artificial Sequence
  Description of Artificial Sequence: Synthetic oligonucleotide
ugcgcgcgcacgaguugaa

SEQ ID NO: 806650 - RNA, 19 nt, Artificial Sequence
  Description of Artificial Sequence: Synthetic oligonucleotide
cgcgcgcacgaguugaagc

SEQ ID NO: 806651 - RNA, 19 nt, Artificial Sequence
  Description of Artificial Sequence: Synthetic oligonucleotide
gcagugggugcucucugga

SEQ ID NO: 806652 - RNA, 19 nt, Artificial Sequence
  Description of Artificial Sequence: Synthetic oligonucleotide
aggucgcugcgcgcgcacg

SEQ ID NO: 806653 - RNA, 19 nt, Artificial Sequence
  Description of Artificial Sequence: Synthetic oligonucleotide
cacaaccccgggccuugac

SEQ ID NO: 806654 - RNA, 19 nt, Artificial Sequence
  Description of Artificial Sequence: Synthetic oligonucleotide
caccaggucggcgcgcuuc

SEQ ID NO: 806655 - RNA, 19 nt, Artificial Sequence
  Description of Artificial Sequence: Synthetic oligonucleotide
acgggcuucccgcucccuu

SEQ ID NO: 806656 - RNA, 19 nt, Artificial Sequence
  Description of Artificial Sequence: Synthetic oligonucleotide
ccuccgcacacaaccccgg

SEQ ID NO: 806657 - RNA, 19 nt, Artificial Sequence
  Description of Artificial Sequence: Synthetic oligonucleotide
cagcggcacgaaguacagg

SEQ ID NO: 806658 - RNA, 19 nt, Artificial Sequence
  Description of Artificial Sequence: Synthetic oligonucleotide
cagccgcuccgcguaagac

SEQ ID NO: 806659 - RNA, 19 nt, Artificial Sequence
  Description of Artificial Sequence: Synthetic oligonucleotide
cacguccaccaccuuggga

SEQ ID NO: 806660 - RNA, 19 nt, Artificial Sequence
  Description of Artificial Sequence: Synthetic oligonucleotide
ccacccuuucugcaugcug

SEQ ID NO: 806661 - RNA, 19 nt, Artificial Sequence
  Description of Artificial Sequence: Synthetic oligonucleotide
gcugcucggccucgcgccg

SEQ ID NO: 806662 - RNA, 19 nt, Artificial Sequence
  Description of Artificial Sequence: Synthetic oligonucleotide
gcgauugccaggagacaug

SEQ ID NO: 806663 - RNA, 19 nt, Artificial Sequence
  Description of Artificial Sequence: Synthetic oligonucleotide
cgcaaacagccacaucuac

SEQ ID NO: 806664 - RNA, 19 nt, Artificial Sequence
  Description of Artificial Sequence: Synthetic oligonucleotide
cgggccuugaccucaucug

SEQ ID NO: 806665 - RNA, 19 nt, Artificial Sequence
  Description of Artificial Sequence: Synthetic oligonucleotide
ggacuucguucucgugcag

SEQ ID NO: 806666 - RNA, 19 nt, Artificial Sequence
  Description of Artificial Sequence: Synthetic oligonucleotide
cccaugcagggguucuagc

SEQ ID NO: 806667 - RNA, 19 nt, Artificial Sequence
  Description of Artificial Sequence: Synthetic oligonucleotide
ccagcgggucaaugagagg

SEQ ID NO: 806668 - RNA, 19 nt, Artificial Sequence
  Description of Artificial Sequence: Synthetic oligonucleotide
ggaggcugcguggauggca

SEQ ID NO: 806669 - RNA, 19 nt, Artificial Sequence
  Description of Artificial Sequence: Synthetic oligonucleotide
gcguauucgcugagagugc

SEQ ID NO: 806670 - RNA, 19 nt, Artificial Sequence
  Description of Artificial Sequence: Synthetic oligonucleotide
ggggcgcacauugccgagg

SEQ ID NO: 806671 - RNA, 19 nt, Artificial Sequence
  Description of Artificial Sequence: Synthetic oligonucleotide
gcacacaaugcuacgcaaa

SEQ ID NO: 806672 - RNA, 19 nt, Artificial Sequence
  Description of Artificial Sequence: Synthetic oligonucleotide
gcacguccaccaccuuggg

SEQ ID NO: 806673 - RNA, 19 nt, Artificial Sequence
  Description of Artificial Sequence: Synthetic oligonucleotide
gacucuccggggucucaua

SEQ ID NO: 806674 - RNA, 19 nt, Artificial Sequence
  Description of Artificial Sequence: Synthetic oligonucleotide
cgugaggucgggcguauuc

SEQ ID NO: 806675 - RNA, 19 nt, Artificial Sequence
  Description of Artificial Sequence: Synthetic oligonucleotide
agccggucacggaggucac

SEQ ID NO: 806676 - RNA, 19 nt, Artificial Sequence
  Description of Artificial Sequence: Synthetic oligonucleotide
ggcgcacauugccgagggg

SEQ ID NO: 806677 - RNA, 19 nt, Artificial Sequence
  Description of Artificial Sequence: Synthetic oligonucleotide
gaguggcacgcugugcagu

SEQ ID NO: 806678 - RNA, 19 nt, Artificial Sequence
  Description of Artificial Sequence: Synthetic oligonucleotide
acgcugugcagugggugau

SEQ ID NO: 806679 - RNA, 19 nt, Artificial Sequence
  Description of Artificial Sequence: Synthetic oligonucleotide
gcgggucaaugagagggug

SEQ ID NO: 806680 - RNA, 19 nt, Artificial Sequence
  Description of Artificial Sequence: Synthetic oligonucleotide
ggucggcgcgcuucuuggc

SEQ ID NO: 806681 - RNA, 19 nt, Artificial Sequence
  Description of Artificial Sequence: Synthetic oligonucleotide
caggucgcugcgcgcgcac

SEQ ID NO: 806682 - RNA, 19 nt, Artificial Sequence
  Description of Artificial Sequence: Synthetic oligonucleotide
cuccucgcgcgcgcgcugc

SEQ ID NO: 806683 - RNA, 19 nt, Artificial Sequence
  Description of Artificial Sequence: Synthetic oligonucleotide
cacuucccaccuccgcaca

SEQ ID NO: 806684 - RNA, 19 nt, Artificial Sequence
  Description of Artificial Sequence: Synthetic oligonucleotide
cccgguaaggggcagcaaa

SEQ ID NO: 806685 - RNA, 19 nt, Artificial Sequence
  Description of Artificial Sequence: Synthetic oligonucleotide
ggcacuccaccggcgcacg

SEQ ID NO: 806686 - RNA, 19 nt, Artificial Sequence
  Description of Artificial Sequence: Synthetic oligonucleotide
ggugacgaaggacuucguu

SEQ ID NO: 806687 - RNA, 19 nt, Artificial Sequence
  Description of Artificial Sequence: Synthetic oligonucleotide
cugcgcgcgcacgaguuga

SEQ ID NO: 806688 - RNA, 19 nt, Artificial Sequence
  Description of Artificial Sequence: Synthetic oligonucleotide
gaggucgggcguauucgcu

SEQ ID NO: 806689 - RNA, 19 nt, Artificial Sequence
  Description of Artificial Sequence: Synthetic oligonucleotide
cguucucgugcagagggug

SEQ ID NO: 806690 - RNA, 19 nt, Artificial Sequence
  Description of Artificial Sequence: Synthetic oligonucleotide
aagccgcgguccaggugcu

SEQ ID NO: 806691 - RNA, 19 nt, Artificial Sequence
  Description of Artificial Sequence: Synthetic oligonucleotide
gcgcacgaguugaagccgc

SEQ ID NO: 806692 - RNA, 19 nt, Artificial Sequence
  Description of Artificial Sequence: Synthetic oligonucleotide
aggucacguucacgggcuu

SEQ ID NO: 806693 - RNA, 19 nt, Artificial Sequence
  Description of Artificial Sequence: Synthetic oligonucleotide
ggucgcugcgcgcgcacga

SEQ ID NO: 806694 - RNA, 19 nt, Artificial Sequence
  Description of Artificial Sequence: Synthetic oligonucleotide
cgcacgaguugaagccgcg

SEQ ID NO: 806695 - RNA, 19 nt, Artificial Sequence
  Description of Artificial Sequence: Synthetic oligonucleotide
ucccgguaaggggcagcaa

SEQ ID NO: 806696 - RNA, 19 nt, Artificial Sequence
  Description of Artificial Sequence: Synthetic oligonucleotide
ccccaugcagggguucuag

SEQ ID NO: 806697 - RNA, 19 nt, Artificial Sequence
  Description of Artificial Sequence: Synthetic oligonucleotide
gcacuccaccggcgcacgg

SEQ ID NO: 806698 - RNA, 19 nt, Artificial Sequence
  Description of Artificial Sequence: Synthetic oligonucleotide
ccgggcuguagagccaggc

SEQ ID NO: 806699 - RNA, 19 nt, Artificial Sequence
  Description of Artificial Sequence: Synthetic oligonucleotide
cgcgcacgaguugaagccg

SEQ ID NO: 806700 - RNA, 19 nt, Artificial Sequence
  Description of Artificial Sequence: Synthetic oligonucleotide
gcagcucagcggacugugc

SEQ ID NO: 806701 - RNA, 19 nt, Artificial Sequence
  Description of Artificial Sequence: Synthetic oligonucleotide
ccuucuccucgcgcgcgcg

SEQ ID NO: 806702 - RNA, 19 nt, Artificial Sequence
  Description of Artificial Sequence: Synthetic oligonucleotide
gggauccgggugaggugag

SEQ ID NO: 806703 - RNA, 19 nt, Artificial Sequence
  Description of Artificial Sequence: Synthetic oligonucleotide
gaagagggaccugguccau

SEQ ID NO: 806704 - RNA, 19 nt, Artificial Sequence
  Description of Artificial Sequence: Synthetic oligonucleotide
ggugauggggagucacguu

SEQ ID NO: 806705 - RNA, 19 nt, Artificial Sequence
  Description of Artificial Sequence: Synthetic oligonucleotide
gggcguauucgcugagagu

SEQ ID NO: 806706 - RNA, 19 nt, Artificial Sequence
  Description of Artificial Sequence: Synthetic oligonucleotide
ccgccacccuuucugcaug

SEQ ID NO: 806707 - RNA, 19 nt, Artificial Sequence
  Description of Artificial Sequence: Synthetic oligonucleotide
gcuacgcaaacagccacau

SEQ ID NO: 806708 - RNA, 19 nt, Artificial Sequence
  Description of Artificial Sequence: Synthetic oligonucleotide
ggcuggcaggucccgguaa

SEQ ID NO: 806709 - RNA, 19 nt, Artificial Sequence
  Description of Artificial Sequence: Synthetic oligonucleotide
ggccagcgggucaaugaga

SEQ ID NO: 806710 - RNA, 19 nt, Artificial Sequence
  Description of Artificial Sequence: Synthetic oligonucleotide
cggacugugcgugcauggc

SEQ ID NO: 806711 - RNA, 19 nt, Artificial Sequence
  Description of Artificial Sequence: Synthetic oligonucleotide
caccggcgcacggcccucc

SEQ ID NO: 806712 - RNA, 19 nt, Artificial Sequence
  Description of Artificial Sequence: Synthetic oligonucleotide
gggacgggcaaggggcgca

SEQ ID NO: 806713 - RNA, 19 nt, Artificial Sequence
  Description of Artificial Sequence: Synthetic oligonucleotide
ccuccagcggcacgaagua

SEQ ID NO: 806714 - RNA, 19 nt, Artificial Sequence
  Description of Artificial Sequence: Synthetic oligonucleotide
gacgugaggucgggcguau

SEQ ID NO: 806715 - RNA, 19 nt, Artificial Sequence
  Description of Artificial Sequence: Synthetic oligonucleotide
gccgcuccgcguaagacau

SEQ ID NO: 806716 - RNA, 19 nt, Artificial Sequence
  Description of Artificial Sequence: Synthetic oligonucleotide
gggaacugugaggauguuu

SEQ ID NO: 806717 - RNA, 19 nt, Artificial Sequence
  Description of Artificial Sequence: Synthetic oligonucleotide
ccggggucucauagucuuc

SEQ ID NO: 806718 - RNA, 19 nt, Artificial Sequence
  Description of Artificial Sequence: Synthetic oligonucleotide
cgccacccuuucugcaugc

SEQ ID NO: 806719 - RNA, 19 nt, Artificial Sequence
  Description of Artificial Sequence: Synthetic oligonucleotide
gcagggaguggcacgcugu

SEQ ID NO: 806720 - RNA, 19 nt, Artificial Sequence
  Description of Artificial Sequence: Synthetic oligonucleotide
gcgcgcgcacgaguugaag

SEQ ID NO: 806721 - RNA, 19 nt, Artificial Sequence
  Description of Artificial Sequence: Synthetic oligonucleotide
ggaccccaugcagggguuc

SEQ ID NO: 806722 - RNA, 19 nt, Artificial Sequence
  Description of Artificial Sequence: Synthetic oligonucleotide
ggggagucacguugagcau

SEQ ID NO: 806723 - RNA, 19 nt, Artificial Sequence
  Description of Artificial Sequence: Synthetic oligonucleotide
uggcguggcugggcacguc

SEQ ID NO: 806724 - RNA, 19 nt, Artificial Sequence
  Description of Artificial Sequence: Synthetic oligonucleotide
ggauccgggugaggugaga

SEQ ID NO: 806725 - RNA, 19 nt, Artificial Sequence
  Description of Artificial Sequence: Synthetic oligonucleotide
cccgggcuguagagccagg

SEQ ID NO: 806726 - RNA, 19 nt, Artificial Sequence
  Description of Artificial Sequence: Synthetic oligonucleotide
acgugaggucgggcguauu

SEQ ID NO: 806727 - RNA, 19 nt, Artificial Sequence
  Description of Artificial Sequence: Synthetic oligonucleotide
acggcgcugccaggcucaa

SEQ ID NO: 806728 - RNA, 19 nt, Artificial Sequence
  Description of Artificial Sequence: Synthetic oligonucleotide
ccggucacggaggucacgu

SEQ ID NO: 806729 - RNA, 19 nt, Artificial Sequence
  Description of Artificial Sequence: Synthetic oligonucleotide
cccggcuggguaggggauc

SEQ ID NO: 806730 - RNA, 19 nt, Artificial Sequence
  Description of Artificial Sequence: Synthetic oligonucleotide
gcuccgcguaagacauguc

SEQ ID NO: 806731 - RNA, 19 nt, Artificial Sequence
  Description of Artificial Sequence: Synthetic oligonucleotide
ccgcuccgcguaagacaug

SEQ ID NO: 806732 - RNA, 19 nt, Artificial Sequence
  Description of Artificial Sequence: Synthetic oligonucleotide
cuggcguggcugggcacgu

SEQ ID NO: 806733 - RNA, 19 nt, Artificial Sequence
  Description of Artificial Sequence: Synthetic oligonucleotide
cgcuccgcguaagacaugu

SEQ ID NO: 806734 - RNA, 19 nt, Artificial Sequence
  Description of Artificial Sequence: Synthetic oligonucleotide
cuacagcggcuugucgcuu

SEQ ID NO: 806735 - RNA, 19 nt, Artificial Sequence
  Description of Artificial Sequence: Synthetic oligonucleotide
ccggacucuccggggucuc

SEQ ID NO: 806736 - RNA, 19 nt, Artificial Sequence
  Description of Artificial Sequence: Synthetic oligonucleotide
cccuugccacuucccaccu

SEQ ID NO: 806737 - RNA, 19 nt, Artificial Sequence
  Description of Artificial Sequence: Synthetic oligonucleotide
ccgggugaggugagacccu

SEQ ID NO: 806738 - RNA, 19 nt, Artificial Sequence
  Description of Artificial Sequence: Synthetic oligonucleotide
gcgcugcagcucagcggac

SEQ ID NO: 806739 - RNA, 19 nt, Artificial Sequence
  Description of Artificial Sequence: Synthetic oligonucleotide
ccucgcgcgcgcgcugcuc

SEQ ID NO: 806740 - RNA, 19 nt, Artificial Sequence
  Description of Artificial Sequence: Synthetic oligonucleotide
cgcacacaaccccgggccu

SEQ ID NO: 806741 - RNA, 19 nt, Artificial Sequence
  Description of Artificial Sequence: Synthetic oligonucleotide
ccaccggcgcacggcccuc

SEQ ID NO: 806742 - RNA, 19 nt, Artificial Sequence
  Description of Artificial Sequence: Synthetic oligonucleotide
cugaggccagcgggucaau

SEQ ID NO: 806743 - RNA, 19 nt, Artificial Sequence
  Description of Artificial Sequence: Synthetic oligonucleotide
cgcgcgcgcgcugcucggc

SEQ ID NO: 806744 - RNA, 19 nt, Artificial Sequence
  Description of Artificial Sequence: Synthetic oligonucleotide
cggucacggaggucacguu

SEQ ID NO: 806745 - RNA, 19 nt, Artificial Sequence
  Description of Artificial Sequence: Synthetic oligonucleotide
ccaggucggcgcgcuucuu

SEQ ID NO: 806746 - RNA, 19 nt, Artificial Sequence
  Description of Artificial Sequence: Synthetic oligonucleotide
cggccucgcgccgcaccuu

SEQ ID NO: 806747 - RNA, 19 nt, Artificial Sequence
  Description of Artificial Sequence: Synthetic oligonucleotide
ucugauaucccuaagagga

SEQ ID NO: 806748 - RNA, 19 nt, Artificial Sequence
  Description of Artificial Sequence: Synthetic oligonucleotide
uuauaacucaucuugaccc

SEQ ID NO: 806749 - RNA, 19 nt, Artificial Sequence
  Description of Artificial Sequence: Synthetic oligonucleotide
uagccuuuggacaauaggg

SEQ ID NO: 806750 - RNA, 19 nt, Artificial Sequence
  Description of Artificial Sequence: Synthetic oligonucleotide
gagagaauugaauaguacc

SEQ ID NO: 806751 - RNA, 19 nt, Artificial Sequence
  Description of Artificial Sequence: Synthetic oligonucleotide
cagagcauaauaaagcagg

SEQ ID NO: 806752 - RNA, 19 nt, Artificial Sequence
  Description of Artificial Sequence: Synthetic oligonucleotide
cuugagacaagccucauag

SEQ ID NO: 806753 - RNA, 19 nt, Artificial Sequence
  Description of Artificial Sequence: Synthetic oligonucleotide
agcauaauaaagcaggaca

SEQ ID NO: 806754 - RNA, 19 nt, Artificial Sequence
  Description of Artificial Sequence: Synthetic oligonucleotide
ucucugauaucccuaagag

SEQ ID NO: 806755 - RNA, 19 nt, Artificial Sequence
  Description of Artificial Sequence: Synthetic oligonucleotide
aguuauaacucaucuugac

SEQ ID NO: 806756 - RNA, 19 nt, Artificial Sequence
  Description of Artificial Sequence: Synthetic oligonucleotide
auaauaaagcaggacacac

SEQ ID NO: 806757 - RNA, 19 nt, Artificial Sequence
  Description of Artificial Sequence: Synthetic oligonucleotide
ggaguuauaacucaucuug

SEQ ID NO: 806758 - RNA, 19 nt, Artificial Sequence
  Description of Artificial Sequence: Synthetic oligonucleotide
ucagcaaggugcaacaggc

SEQ ID NO: 806759 - RNA, 19 nt, Artificial Sequence
  Description of Artificial Sequence: Synthetic oligonucleotide
caugguaauacugaggggc

SEQ ID NO: 806760 - RNA, 19 nt, Artificial Sequence
  Description of Artificial Sequence: Synthetic oligonucleotide
cugaguaccuuauaagagg

SEQ ID NO: 806761 - RNA, 19 nt, Artificial Sequence
  Description of Artificial Sequence: Synthetic oligonucleotide
aagcugguacaguagagag

SEQ ID NO: 806762 - RNA, 19 nt, Artificial Sequence
  Description of Artificial Sequence: Synthetic oligonucleotide
ugaguaccuuauaagaggc

SEQ ID NO: 806763 - RNA, 19 nt, Artificial Sequence
  Description of Artificial Sequence: Synthetic oligonucleotide
cuuauucccacucccaggg

SEQ ID NO: 806764 - RNA, 19 nt, Artificial Sequence
  Description of Artificial Sequence: Synthetic oligonucleotide
uugguaagagccuuguggc

SEQ ID NO: 806765 - RNA, 19 nt, Artificial Sequence
  Description of Artificial Sequence: Synthetic oligonucleotide
gguacagauaaacucgucg

SEQ ID NO: 806766 - RNA, 19 nt, Artificial Sequence
  Description of Artificial Sequence: Synthetic oligonucleotide
cuauucaguaauacugggg

SEQ ID NO: 806767 - RNA, 19 nt, Artificial Sequence
  Description of Artificial Sequence: Synthetic oligonucleotide
ucuagcugaacuauucagu

SEQ ID NO: 806768 - RNA, 19 nt, Artificial Sequence
  Description of Artificial Sequence: Synthetic oligonucleotide
auaaacucgucguaguugu

SEQ ID NO: 806769 - RNA, 19 nt, Artificial Sequence
  Description of Artificial Sequence: Synthetic oligonucleotide
agugcuagcagcuccuuag

SEQ ID NO: 806770 - RNA, 19 nt, Artificial Sequence
  Description of Artificial Sequence: Synthetic oligonucleotide
uccacuauagcugugggac

SEQ ID NO: 806771 - RNA, 19 nt, Artificial Sequence
  Description of Artificial Sequence: Synthetic oligonucleotide
uagguuggcaagcauaccu

SEQ ID NO: 806772 - RNA, 19 nt, Artificial Sequence
  Description of Artificial Sequence: Synthetic oligonucleotide
ugagacaagccucauaguu

SEQ ID NO: 806773 - RNA, 19 nt, Artificial Sequence
  Description of Artificial Sequence: Synthetic oligonucleotide
ugugaagccgaccaaugcu

SEQ ID NO: 806774 - RNA, 19 nt, Artificial Sequence
  Description of Artificial Sequence: Synthetic oligonucleotide
aauugaauaguaccagcuu

SEQ ID NO: 806775 - RNA, 19 nt, Artificial Sequence
  Description of Artificial Sequence: Synthetic oligonucleotide
acaaccagcuuagauuugc

SEQ ID NO: 806776 - RNA, 19 nt, Artificial Sequence
  Description of Artificial Sequence: Synthetic oligonucleotide
gagacaugguaauacugag

SEQ ID NO: 806777 - RNA, 19 nt, Artificial Sequence
  Description of Artificial Sequence: Synthetic oligonucleotide
aucuagcugaacuauucag

SEQ ID NO: 806778 - RNA, 19 nt, Artificial Sequence
  Description of Artificial Sequence: Synthetic oligonucleotide
cauaauugugauugucuag

SEQ ID NO: 806779 - RNA, 19 nt, Artificial Sequence
  Description of Artificial Sequence: Synthetic oligonucleotide
aacucgucguaguugugag

SEQ ID NO: 806780 - RNA, 19 nt, Artificial Sequence
  Description of Artificial Sequence: Synthetic oligonucleotide
uggcguuuggccuuauagg

SEQ ID NO: 806781 - RNA, 19 nt, Artificial Sequence
  Description of Artificial Sequence: Synthetic oligonucleotide
agcauuauggggcugacuu

SEQ ID NO: 806782 - RNA, 19 nt, Artificial Sequence
  Description of Artificial Sequence: Synthetic oligonucleotide
aagccgaccaaugcugacc

SEQ ID NO: 806783 - RNA, 19 nt, Artificial Sequence
  Description of Artificial Sequence: Synthetic oligonucleotide
acuagguuggcaagcauac

SEQ ID NO: 806784 - RNA, 19 nt, Artificial Sequence
  Description of Artificial Sequence: Synthetic oligonucleotide
agccucauaguuugcaauc

SEQ ID NO: 806785 - RNA, 19 nt, Artificial Sequence
  Description of Artificial Sequence: Synthetic oligonucleotide
ucgcuggucaucaaucuug

SEQ ID NO: 806786 - RNA, 19 nt, Artificial Sequence
  Description of Artificial Sequence: Synthetic oligonucleotide
uuauggggcugacuuaccc

SEQ ID NO: 806787 - RNA, 19 nt, Artificial Sequence
  Description of Artificial Sequence: Synthetic oligonucleotide
acgguuguagcguaugcag

SEQ ID NO: 806788 - RNA, 19 nt, Artificial Sequence
  Description of Artificial Sequence: Synthetic oligonucleotide
acagauaaacucgucguag

SEQ ID NO: 806789 - RNA, 19 nt, Artificial Sequence
  Description of Artificial Sequence: Synthetic oligonucleotide
acucaucuugacccugucc

SEQ ID NO: 806790 - RNA, 19 nt, Artificial Sequence
  Description of Artificial Sequence: Synthetic oligonucleotide
agccgaccaaugcugaccc

SEQ ID NO: 806791 - RNA, 19 nt, Artificial Sequence
  Description of Artificial Sequence: Synthetic oligonucleotide
aggggacuugguaagagcc

SEQ ID NO: 806792 - RNA, 19 nt, Artificial Sequence
  Description of Artificial Sequence: Synthetic oligonucleotide
gcuuguaucugauuggcag

SEQ ID NO: 806793 - RNA, 19 nt, Artificial Sequence
  Description of Artificial Sequence: Synthetic oligonucleotide
acugcuagucuugauggac

SEQ ID NO: 806794 - RNA, 19 nt, Artificial Sequence
  Description of Artificial Sequence: Synthetic oligonucleotide
guaguugugaguccuucgc

SEQ ID NO: 806795 - RNA, 19 nt, Artificial Sequence
  Description of Artificial Sequence: Synthetic oligonucleotide
guuaucuguggcuucuacc

SEQ ID NO: 806796 - RNA, 19 nt, Artificial Sequence
  Description of Artificial Sequence: Synthetic oligonucleotide
gauuugugggucugaauca

SEQ ID NO: 806797 - RNA, 19 nt, Artificial Sequence
  Description of Artificial Sequence: Synthetic oligonucleotide
guggacacgaaccagccac

SEQ ID NO: 806798 - RNA, 19 nt, Artificial Sequence
  Description of Artificial Sequence: Synthetic oligonucleotide
uauaacucaucuugacccu

SEQ ID NO: 806799 - RNA, 19 nt, Artificial Sequence
  Description of Artificial Sequence: Synthetic oligonucleotide
ucuccacuauagcuguggg

SEQ ID NO: 806800 - RNA, 19 nt, Artificial Sequence
  Description of Artificial Sequence: Synthetic oligonucleotide
aggaauugaaaggucuuuc

SEQ ID NO: 806801 - RNA, 19 nt, Artificial Sequence
  Description of Artificial Sequence: Synthetic oligonucleotide
gaaggcuaucaucuucucc

SEQ ID NO: 806802 - RNA, 19 nt, Artificial Sequence
  Description of Artificial Sequence: Synthetic oligonucleotide
agagauuaggagcccaaga

SEQ ID NO: 806803 - RNA, 19 nt, Artificial Sequence
  Description of Artificial Sequence: Synthetic oligonucleotide
gaaucagggccagaggucc

SEQ ID NO: 806804 - RNA, 19 nt, Artificial Sequence
  Description of Artificial Sequence: Synthetic oligonucleotide
ccuuauaggggcgagagcg

SEQ ID NO: 806805 - RNA, 19 nt, Artificial Sequence
  Description of Artificial Sequence: Synthetic oligonucleotide
uacccugaguaccuuauaa

SEQ ID NO: 806806 - RNA, 19 nt, Artificial Sequence
  Description of Artificial Sequence: Synthetic oligonucleotide
uauggggcugacuuacccc

SEQ ID NO: 806807 - RNA, 19 nt, Artificial Sequence
  Description of Artificial Sequence: Synthetic oligonucleotide
gauaggcccauagccaggg

SEQ ID NO: 806808 - RNA, 19 nt, Artificial Sequence
  Description of Artificial Sequence: Synthetic oligonucleotide
uuaggugaguacuucucuc

SEQ ID NO: 806809 - RNA, 19 nt, Artificial Sequence
  Description of Artificial Sequence: Synthetic oligonucleotide
ugcuagucuugauggacag

SEQ ID NO: 806810 - RNA, 19 nt, Artificial Sequence
  Description of Artificial Sequence: Synthetic oligonucleotide
ggacacacagcuuauuccc

SEQ ID NO: 806811 - RNA, 19 nt, Artificial Sequence
  Description of Artificial Sequence: Synthetic oligonucleotide
cuagcagcuccuuagguga

SEQ ID NO: 806812 - RNA, 19 nt, Artificial Sequence
  Description of Artificial Sequence: Synthetic oligonucleotide
gaauugcucaacgauccug

SEQ ID NO: 806813 - RNA, 19 nt, Artificial Sequence
  Description of Artificial Sequence: Synthetic oligonucleotide
cuuuggacaauaggguuag

SEQ ID NO: 806814 - RNA, 19 nt, Artificial Sequence
  Description of Artificial Sequence: Synthetic oligonucleotide
aacgauccuggcuucccug

SEQ ID NO: 806815 - RNA, 19 nt, Artificial Sequence
  Description of Artificial Sequence: Synthetic oligonucleotide
ucagaguacugcuggggug

SEQ ID NO: 806816 - RNA, 19 nt, Artificial Sequence
  Description of Artificial Sequence: Synthetic oligonucleotide
cauuauggggcugacuuac

SEQ ID NO: 806817 - RNA, 19 nt, Artificial Sequence
  Description of Artificial Sequence: Synthetic oligonucleotide
aagccucauaguuugcaau

SEQ ID NO: 806818 - RNA, 19 nt, Artificial Sequence
  Description of Artificial Sequence: Synthetic oligonucleotide
uccgugcucucauugcuag

SEQ ID NO: 806819 - RNA, 19 nt, Artificial Sequence
  Description of Artificial Sequence: Synthetic oligonucleotide
cuucauucaagcagcccug

SEQ ID NO: 806820 - RNA, 19 nt, Artificial Sequence
  Description of Artificial Sequence: Synthetic oligonucleotide
ugacuuaccccugccaggc

SEQ ID NO: 806821 - RNA, 19 nt, Artificial Sequence
  Description of Artificial Sequence: Synthetic oligonucleotide
uaccuuauaagaggccaag

SEQ ID NO: 806822 - RNA, 19 nt, Artificial Sequence
  Description of Artificial Sequence: Synthetic oligonucleotide
guaugcagucaacacgcag

SEQ ID NO: 806823 - RNA, 19 nt, Artificial Sequence
  Description of Artificial Sequence: Synthetic oligonucleotide
gaucuagcugaacuauuca

SEQ ID NO: 806824 - RNA, 19 nt, Artificial Sequence
  Description of Artificial Sequence: Synthetic oligonucleotide
gagggagacaugguaauac

SEQ ID NO: 806825 - RNA, 19 nt, Artificial Sequence
  Description of Artificial Sequence: Synthetic oligonucleotide
uggucggaccgcaacucgg

SEQ ID NO: 806826 - RNA, 19 nt, Artificial Sequence
  Description of Artificial Sequence: Synthetic oligonucleotide
cugacuuaccccugccagg

SEQ ID NO: 806827 - RNA, 19 nt, Artificial Sequence
  Description of Artificial Sequence: Synthetic oligonucleotide
aggggauuuggcauaauug

SEQ ID NO: 806828 - RNA, 19 nt, Artificial Sequence
  Description of Artificial Sequence: Synthetic oligonucleotide
agauuaggagcccaagaua

SEQ ID NO: 806829 - RNA, 19 nt, Artificial Sequence
  Description of Artificial Sequence: Synthetic oligonucleotide
gacucaguacaccaucauc

SEQ ID NO: 806830 - RNA, 19 nt, Artificial Sequence
  Description of Artificial Sequence: Synthetic oligonucleotide
acacaggaguuauaacuca

SEQ ID NO: 806831 - RNA, 19 nt, Artificial Sequence
  Description of Artificial Sequence: Synthetic oligonucleotide
agacaugguaauacugagg

SEQ ID NO: 806832 - RNA, 19 nt, Artificial Sequence
  Description of Artificial Sequence: Synthetic oligonucleotide
uaguugugaguccuucgcu

SEQ ID NO: 806833 - RNA, 19 nt, Artificial Sequence
  Description of Artificial Sequence: Synthetic oligonucleotide
cagaguacugcuggggugg

SEQ ID NO: 806834 - RNA, 19 nt, Artificial Sequence
  Description of Artificial Sequence: Synthetic oligonucleotide
uaauugugauugucuagaa

SEQ ID NO: 806835 - RNA, 19 nt, Artificial Sequence
  Description of Artificial Sequence: Synthetic oligonucleotide
guugccuuggcuugaucug

SEQ ID NO: 806836 - RNA, 19 nt, Artificial Sequence
  Description of Artificial Sequence: Synthetic oligonucleotide
caagcauaccuuccugagc

SEQ ID NO: 806837 - RNA, 19 nt, Artificial Sequence
  Description of Artificial Sequence: Synthetic oligonucleotide
cuucucaguuaagacauug

SEQ ID NO: 806838 - RNA, 19 nt, Artificial Sequence
  Description of Artificial Sequence: Synthetic oligonucleotide
gcuuagauuugcugggagg

SEQ ID NO: 806839 - RNA, 19 nt, Artificial Sequence
  Description of Artificial Sequence: Synthetic oligonucleotide
ccugaguaccuuauaagag

SEQ ID NO: 806840 - RNA, 19 nt, Artificial Sequence
  Description of Artificial Sequence: Synthetic oligonucleotide
gcaagggugaguugaaagc

SEQ ID NO: 806841 - RNA, 19 nt, Artificial Sequence
  Description of Artificial Sequence: Synthetic oligonucleotide
ugccaaucucagaagcugu

SEQ ID NO: 806842 - RNA, 19 nt, Artificial Sequence
  Description of Artificial Sequence: Synthetic oligonucleotide
uagcguaugcagucaacac

SEQ ID NO: 806843 - RNA, 19 nt, Artificial Sequence
  Description of Artificial Sequence: Synthetic oligonucleotide
cacuauagcugugggaccc

SEQ ID NO: 806844 - RNA, 19 nt, Artificial Sequence
  Description of Artificial Sequence: Synthetic oligonucleotide
uccuuaggugaguacuucu

SEQ ID NO: 806845 - RNA, 19 nt, Artificial Sequence
  Description of Artificial Sequence: Synthetic oligonucleotide
agaaucagggccagagguc

SEQ ID NO: 806846 - RNA, 19 nt, Artificial Sequence
  Description of Artificial Sequence: Synthetic oligonucleotide
gugugagugcacucagagg

SEQ ID NO: 806847 - RNA, 19 nt, Artificial Sequence
  Description of Artificial Sequence: Synthetic oligonucleotide
ucaacacgcagaaggcuau

SEQ ID NO: 806848 - RNA, 19 nt, Artificial Sequence
  Description of Artificial Sequence: Synthetic oligonucleotide
aguggaccugcucagccca

SEQ ID NO: 806849 - RNA, 19 nt, Artificial Sequence
  Description of Artificial Sequence: Synthetic oligonucleotide
gcauaauaaagcaggacac

SEQ ID NO: 806850 - RNA, 19 nt, Artificial Sequence
  Description of Artificial Sequence: Synthetic oligonucleotide
uguagcguaugcagucaac

SEQ ID NO: 806851 - RNA, 19 nt, Artificial Sequence
  Description of Artificial Sequence: Synthetic oligonucleotide
acaggaguuauaacucauc

SEQ ID NO: 806852 - RNA, 19 nt, Artificial Sequence
  Description of Artificial Sequence: Synthetic oligonucleotide
agauaaacucgucguaguu

SEQ ID NO: 806853 - RNA, 19 nt, Artificial Sequence
  Description of Artificial Sequence: Synthetic oligonucleotide
ugcucucauugcuaggggu

SEQ ID NO: 806854 - RNA, 19 nt, Artificial Sequence
  Description of Artificial Sequence: Synthetic oligonucleotide
cuacacacuuuaguagugc

SEQ ID NO: 806855 - RNA, 19 nt, Artificial Sequence
  Description of Artificial Sequence: Synthetic oligonucleotide
guguuggguuggcugagcg

SEQ ID NO: 806856 - RNA, 19 nt, Artificial Sequence
  Description of Artificial Sequence: Synthetic oligonucleotide
gguaauacugaggggcugg

SEQ ID NO: 806857 - RNA, 19 nt, Artificial Sequence
  Description of Artificial Sequence: Synthetic oligonucleotide
agcaccuuugagaugugag

SEQ ID NO: 806858 - RNA, 19 nt, Artificial Sequence
  Description of Artificial Sequence: Synthetic oligonucleotide
accgcaacucggcugcggg

SEQ ID NO: 806859 - RNA, 19 nt, Artificial Sequence
  Description of Artificial Sequence: Synthetic oligonucleotide
agagcguuuccgucgguca

SEQ ID NO: 806860 - RNA, 19 nt, Artificial Sequence
  Description of Artificial Sequence: Synthetic oligonucleotide
ugcuaggggugggugaagg

SEQ ID NO: 806861 - RNA, 19 nt, Artificial Sequence
  Description of Artificial Sequence: Synthetic oligonucleotide
uuuccgucggucaggcuuc

SEQ ID NO: 806862 - RNA, 19 nt, Artificial Sequence
  Description of Artificial Sequence: Synthetic oligonucleotide
gagcauaauaaagcaggac

SEQ ID NO: 806863 - RNA, 19 nt, Artificial Sequence
  Description of Artificial Sequence: Synthetic oligonucleotide
cacgcagaaggcuaucauc

SEQ ID NO: 806864 - RNA, 19 nt, Artificial Sequence
  Description of Artificial Sequence: Synthetic oligonucleotide
agcuccuuaggugaguacu

SEQ ID NO: 806865 - RNA, 19 nt, Artificial Sequence
  Description of Artificial Sequence: Synthetic oligonucleotide
gcugacuuaccccugccag

SEQ ID NO: 806866 - RNA, 19 nt, Artificial Sequence
  Description of Artificial Sequence: Synthetic oligonucleotide
cacagcuuauucccacucc

SEQ ID NO: 806867 - RNA, 19 nt, Artificial Sequence
  Description of Artificial Sequence: Synthetic oligonucleotide
ugguaagagccuuguggca

SEQ ID NO: 806868 - RNA, 19 nt, Artificial Sequence
  Description of Artificial Sequence: Synthetic oligonucleotide
auaggggcgagagcguuuc

SEQ ID NO: 806869 - RNA, 19 nt, Artificial Sequence
  Description of Artificial Sequence: Synthetic oligonucleotide
uagagacuucucugagucc

SEQ ID NO: 806870 - RNA, 19 nt, Artificial Sequence
  Description of Artificial Sequence: Synthetic oligonucleotide
acaguagagagaauugaau

SEQ ID NO: 806871 - RNA, 19 nt, Artificial Sequence
  Description of Artificial Sequence: Synthetic oligonucleotide
ugcaacaggccugugcuaa

SEQ ID NO: 806872 - RNA, 19 nt, Artificial Sequence
  Description of Artificial Sequence: Synthetic oligonucleotide
ugaguacuucucuccacuc

SEQ ID NO: 806873 - RNA, 19 nt, Artificial Sequence
  Description of Artificial Sequence: Synthetic oligonucleotide
gcuuauucccacucccagg

SEQ ID NO: 806874 - RNA, 19 nt, Artificial Sequence
  Description of Artificial Sequence: Synthetic oligonucleotide
aggaguuauaacucaucuu

SEQ ID NO: 806875 - RNA, 19 nt, Artificial Sequence
  Description of Artificial Sequence: Synthetic oligonucleotide
gucacggacagcacgguug

SEQ ID NO: 806876 - RNA, 19 nt, Artificial Sequence
  Description of Artificial Sequence: Synthetic oligonucleotide
guuaagacauugauggugu

SEQ ID NO: 806877 - RNA, 19 nt, Artificial Sequence
  Description of Artificial Sequence: Synthetic oligonucleotide
ugggacaacucaacacuuc

SEQ ID NO: 806878 - RNA, 19 nt, Artificial Sequence
  Description of Artificial Sequence: Synthetic oligonucleotide
ggcgagagcguuuccgucg

SEQ ID NO: 806879 - RNA, 19 nt, Artificial Sequence
  Description of Artificial Sequence: Synthetic oligonucleotide
auuauggggcugacuuacc

SEQ ID NO: 806880 - RNA, 19 nt, Artificial Sequence
  Description of Artificial Sequence: Synthetic oligonucleotide
gcaagcauaccuuccugag

SEQ ID NO: 806881 - RNA, 19 nt, Artificial Sequence
  Description of Artificial Sequence: Synthetic oligonucleotide
gacaauaggguuaggauuu

SEQ ID NO: 806882 - RNA, 19 nt, Artificial Sequence
  Description of Artificial Sequence: Synthetic oligonucleotide
ucaacgauccuggcuuccc

SEQ ID NO: 806883 - RNA, 19 nt, Artificial Sequence
  Description of Artificial Sequence: Synthetic oligonucleotide
uuguagcguaugcagucaa

SEQ ID NO: 806884 - RNA, 19 nt, Artificial Sequence
  Description of Artificial Sequence: Synthetic oligonucleotide
auaacucaucuugacccug

SEQ ID NO: 806885 - RNA, 19 nt, Artificial Sequence
  Description of Artificial Sequence: Synthetic oligonucleotide
guagcguaugcagucaaca

SEQ ID NO: 806886 - RNA, 19 nt, Artificial Sequence
  Description of Artificial Sequence: Synthetic oligonucleotide
ggauuuggcauaauuguga

SEQ ID NO: 806887 - RNA, 19 nt, Artificial Sequence
  Description of Artificial Sequence: Synthetic oligonucleotide
agaauugcucaacgauccu

SEQ ID NO: 806888 - RNA, 19 nt, Artificial Sequence
  Description of Artificial Sequence: Synthetic oligonucleotide
gagcguuuccgucggucag

SEQ ID NO: 806889 - RNA, 19 nt, Artificial Sequence
  Description of Artificial Sequence: Synthetic oligonucleotide
gacccugguaggcugucug

SEQ ID NO: 806890 - RNA, 19 nt, Artificial Sequence
  Description of Artificial Sequence: Synthetic oligonucleotide
ucucauugcuagggguggg

SEQ ID NO: 806891 - RNA, 19 nt, Artificial Sequence
  Description of Artificial Sequence: Synthetic oligonucleotide
uugagacaagccucauagu

SEQ ID NO: 806892 - RNA, 19 nt, Artificial Sequence
  Description of Artificial Sequence: Synthetic oligonucleotide
gcguaugcagucaacacgc

SEQ ID NO: 806893 - RNA, 19 nt, Artificial Sequence
  Description of Artificial Sequence: Synthetic oligonucleotide
caagggugaguugaaagca

SEQ ID NO: 806894 - RNA, 19 nt, Artificial Sequence
  Description of Artificial Sequence: Synthetic oligonucleotide
guaauacugaggggcuggg

SEQ ID NO: 806895 - RNA, 19 nt, Artificial Sequence
  Description of Artificial Sequence: Synthetic oligonucleotide
guagagagaauugaauagu

SEQ ID NO: 806896 - RNA, 19 nt, Artificial Sequence
  Description of Artificial Sequence: Synthetic oligonucleotide
aguccuucgcuggucauca

SEQ ID NO: 806897 - RNA, 19 nt, Artificial Sequence
  Description of Artificial Sequence: Synthetic oligonucleotide
gugcuagcagcuccuuagg

SEQ ID NO: 806898 - RNA, 19 nt, Artificial Sequence
  Description of Artificial Sequence: Synthetic oligonucleotide
cuugagauuugugggucug

SEQ ID NO: 806899 - RNA, 19 nt, Artificial Sequence
  Description of Artificial Sequence: Synthetic oligonucleotide
ccagagcauaauaaagcag

SEQ ID NO: 806900 - RNA, 19 nt, Artificial Sequence
  Description of Artificial Sequence: Synthetic oligonucleotide
cacuucucuccacuauagc

SEQ ID NO: 806901 - RNA, 19 nt, Artificial Sequence
  Description of Artificial Sequence: Synthetic oligonucleotide
auugucuagaaaggcuggu

SEQ ID NO: 806902 - RNA, 19 nt, Artificial Sequence
  Description of Artificial Sequence: Synthetic oligonucleotide
ggcuagagggccguguugg

SEQ ID NO: 806903 - RNA, 19 nt, Artificial Sequence
  Description of Artificial Sequence: Synthetic oligonucleotide
guggucggaccgcaacucg

SEQ ID NO: 806904 - RNA, 19 nt, Artificial Sequence
  Description of Artificial Sequence: Synthetic oligonucleotide
uugugaguccuucgcuggu

SEQ ID NO: 806905 - RNA, 19 nt, Artificial Sequence
  Description of Artificial Sequence: Synthetic oligonucleotide
ucggaccgcaacucggcug

SEQ ID NO: 806906 - RNA, 19 nt, Artificial Sequence
  Description of Artificial Sequence: Synthetic oligonucleotide
ugggucgaagcuuguggac

SEQ ID NO: 806907 - RNA, 19 nt, Artificial Sequence
  Description of Artificial Sequence: Synthetic oligonucleotide
gugcucucauugcuagggg

SEQ ID NO: 806908 - RNA, 19 nt, Artificial Sequence
  Description of Artificial Sequence: Synthetic oligonucleotide
ucgucguaguugugagucc

SEQ ID NO: 806909 - RNA, 19 nt, Artificial Sequence
  Description of Artificial Sequence: Synthetic oligonucleotide
uucgcuggucaucaaucuu

SEQ ID NO: 806910 - RNA, 19 nt, Artificial Sequence
  Description of Artificial Sequence: Synthetic oligonucleotide
uggacacgaaccagccacu

SEQ ID NO: 806911 - RNA, 19 nt, Artificial Sequence
  Description of Artificial Sequence: Synthetic oligonucleotide
ggggauuuggcauaauugu

SEQ ID NO: 806912 - RNA, 19 nt, Artificial Sequence
  Description of Artificial Sequence: Synthetic oligonucleotide
gaagccgaccaaugcugac

SEQ ID NO: 806913 - RNA, 19 nt, Artificial Sequence
  Description of Artificial Sequence: Synthetic oligonucleotide
cagaggaauugaaaggucu

SEQ ID NO: 806914 - RNA, 19 nt, Artificial Sequence
  Description of Artificial Sequence: Synthetic oligonucleotide
caguggaccugcucagccc

SEQ ID NO: 806915 - RNA, 19 nt, Artificial Sequence
  Description of Artificial Sequence: Synthetic oligonucleotide
gagcgcaagggugaguuga

SEQ ID NO: 806916 - RNA, 19 nt, Artificial Sequence
  Description of Artificial Sequence: Synthetic oligonucleotide
aggggcgagagcguuuccg

SEQ ID NO: 806917 - RNA, 19 nt, Artificial Sequence
  Description of Artificial Sequence: Synthetic oligonucleotide
caggaguuauaacucaucu

SEQ ID NO: 806918 - RNA, 19 nt, Artificial Sequence
  Description of Artificial Sequence: Synthetic oligonucleotide
augguaauacugaggggcu

SEQ ID NO: 806919 - RNA, 19 nt, Artificial Sequence
  Description of Artificial Sequence: Synthetic oligonucleotide
gugggucgaagcuugugga

SEQ ID NO: 806920 - RNA, 19 nt, Artificial Sequence
  Description of Artificial Sequence: Synthetic oligonucleotide
uugucuagaaaggcuggua

SEQ ID NO: 806921 - RNA, 19 nt, Artificial Sequence
  Description of Artificial Sequence: Synthetic oligonucleotide
ccuuauaagaggccaagga

SEQ ID NO: 806922 - RNA, 19 nt, Artificial Sequence
  Description of Artificial Sequence: Synthetic oligonucleotide
auugcuaggggugggugaa

SEQ ID NO: 806923 - RNA, 19 nt, Artificial Sequence
  Description of Artificial Sequence: Synthetic oligonucleotide
agcguuuccgucggucagg

SEQ ID NO: 806924 - RNA, 19 nt, Artificial Sequence
  Description of Artificial Sequence: Synthetic oligonucleotide
uucauucaagcagcccugu

SEQ ID NO: 806925 - RNA, 19 nt, Artificial Sequence
  Description of Artificial Sequence: Synthetic oligonucleotide
agguacccuucccacccuc

SEQ ID NO: 806926 - RNA, 19 nt, Artificial Sequence
  Description of Artificial Sequence: Synthetic oligonucleotide
augggaacacaggaguuau

SEQ ID NO: 806927 - RNA, 19 nt, Artificial Sequence
  Description of Artificial Sequence: Synthetic oligonucleotide
gcauaauugugauugucua

SEQ ID NO: 806928 - RNA, 19 nt, Artificial Sequence
  Description of Artificial Sequence: Synthetic oligonucleotide
acgauccuggcuucccugu

SEQ ID NO: 806929 - RNA, 19 nt, Artificial Sequence
  Description of Artificial Sequence: Synthetic oligonucleotide
cagcaaggugcaacaggcc

SEQ ID NO: 806930 - RNA, 19 nt, Artificial Sequence
  Description of Artificial Sequence: Synthetic oligonucleotide
acacgcagaaggcuaucau

SEQ ID NO: 806931 - RNA, 19 nt, Artificial Sequence
  Description of Artificial Sequence: Synthetic oligonucleotide
ggaucuagcugaacuauuc

SEQ ID NO: 806932 - RNA, 19 nt, Artificial Sequence
  Description of Artificial Sequence: Synthetic oligonucleotide
uuaagacauugaugguguu

SEQ ID NO: 806933 - RNA, 19 nt, Artificial Sequence
  Description of Artificial Sequence: Synthetic oligonucleotide
agauaggcccauagccagg

SEQ ID NO: 806934 - RNA, 19 nt, Artificial Sequence
  Description of Artificial Sequence: Synthetic oligonucleotide
uuuggacaauaggguuagg

SEQ ID NO: 806935 - RNA, 19 nt, Artificial Sequence
  Description of Artificial Sequence: Synthetic oligonucleotide
ggccuuauaggggcgagag

SEQ ID NO: 806936 - RNA, 19 nt, Artificial Sequence
  Description of Artificial Sequence: Synthetic oligonucleotide
cauugcuagggguggguga

SEQ ID NO: 806937 - RNA, 19 nt, Artificial Sequence
  Description of Artificial Sequence: Synthetic oligonucleotide
gagcggaugggcgagcgca

SEQ ID NO: 806938 - RNA, 19 nt, Artificial Sequence
  Description of Artificial Sequence: Synthetic oligonucleotide
cuuaggugaguacuucucu

SEQ ID NO: 806939 - RNA, 19 nt, Artificial Sequence
  Description of Artificial Sequence: Synthetic oligonucleotide
cacuagguuggcaagcaua

SEQ ID NO: 806940 - RNA, 19 nt, Artificial Sequence
  Description of Artificial Sequence: Synthetic oligonucleotide
ucguaguugugaguccuuc

SEQ ID NO: 806941 - RNA, 19 nt, Artificial Sequence
  Description of Artificial Sequence: Synthetic oligonucleotide
gugaguacuucucuccacu

SEQ ID NO: 806942 - RNA, 19 nt, Artificial Sequence
  Description of Artificial Sequence: Synthetic oligonucleotide
ggaauugaaaggucuuucu

SEQ ID NO: 806943 - RNA, 19 nt, Artificial Sequence
  Description of Artificial Sequence: Synthetic oligonucleotide
cucuguuaucuguggcuuc

SEQ ID NO: 806944 - RNA, 19 nt, Artificial Sequence
  Description of Artificial Sequence: Synthetic oligonucleotide
ggugcaacaggccugugcu

SEQ ID NO: 806945 - RNA, 19 nt, Artificial Sequence
  Description of Artificial Sequence: Synthetic oligonucleotide
cuuugaccugggacaacuc

SEQ ID NO: 806946 - RNA, 19 nt, Artificial Sequence
  Description of Artificial Sequence: Synthetic oligonucleotide
ugagcggaugggcgagcgc

SEQ ID NO: 806947 - RNA, 19 nt, Artificial Sequence
  Description of Artificial Sequence: Synthetic oligonucleotide
guuuggccuuauaggggcg

SEQ ID NO: 806948 - RNA, 19 nt, Artificial Sequence
  Description of Artificial Sequence: Synthetic oligonucleotide
ggucgaagcuuguggacac

SEQ ID NO: 806949 - RNA, 19 nt, Artificial Sequence
  Description of Artificial Sequence: Synthetic oligonucleotide
uagugcuagcagcuccuua

SEQ ID NO: 806950 - RNA, 19 nt, Artificial Sequence
  Description of Artificial Sequence: Synthetic oligonucleotide
gucaacacgcagaaggcua

SEQ ID NO: 806951 - RNA, 19 nt, Artificial Sequence
  Description of Artificial Sequence: Synthetic oligonucleotide
agcacgguuguagcguaug

SEQ ID NO: 806952 - RNA, 19 nt, Artificial Sequence
  Description of Artificial Sequence: Synthetic oligonucleotide
augggcgagcgcaagggug

SEQ ID NO: 806953 - RNA, 19 nt, Artificial Sequence
  Description of Artificial Sequence: Synthetic oligonucleotide
caagccucauaguuugcaa

SEQ ID NO: 806954 - RNA, 19 nt, Artificial Sequence
  Description of Artificial Sequence: Synthetic oligonucleotide
gguugccuuggcuugaucu

SEQ ID NO: 806955 - RNA, 19 nt, Artificial Sequence
  Description of Artificial Sequence: Synthetic oligonucleotide
gucggucaggcuuccgcug

SEQ ID NO: 806956 - RNA, 19 nt, Artificial Sequence
  Description of Artificial Sequence: Synthetic oligonucleotide
acucgucguaguugugagu

SEQ ID NO: 806957 - RNA, 19 nt, Artificial Sequence
  Description of Artificial Sequence: Synthetic oligonucleotide
ugcgaguguguggguacag

SEQ ID NO: 806958 - RNA, 19 nt, Artificial Sequence
  Description of Artificial Sequence: Synthetic oligonucleotide
agggccagagguccucacu

SEQ ID NO: 806959 - RNA, 19 nt, Artificial Sequence
  Description of Artificial Sequence: Synthetic oligonucleotide
agcauaccuuccugagcca

SEQ ID NO: 806960 - RNA, 19 nt, Artificial Sequence
  Description of Artificial Sequence: Synthetic oligonucleotide
ugagcauuauggggcugac

SEQ ID NO: 806961 - RNA, 19 nt, Artificial Sequence
  Description of Artificial Sequence: Synthetic oligonucleotide
gagagcguuuccgucgguc

SEQ ID NO: 806962 - RNA, 19 nt, Artificial Sequence
  Description of Artificial Sequence: Synthetic oligonucleotide
cucaacgauccuggcuucc

SEQ ID NO: 806963 - RNA, 19 nt, Artificial Sequence
  Description of Artificial Sequence: Synthetic oligonucleotide
cuccacuauagcuguggga

SEQ ID NO: 806964 - RNA, 19 nt, Artificial Sequence
  Description of Artificial Sequence: Synthetic oligonucleotide
gacuuaccccugccaggcc

SEQ ID NO: 806965 - RNA, 19 nt, Artificial Sequence
  Description of Artificial Sequence: Synthetic oligonucleotide
cguaguugugaguccuucg

SEQ ID NO: 806966 - RNA, 19 nt, Artificial Sequence
  Description of Artificial Sequence: Synthetic oligonucleotide
gccugugcuaaugacagga

SEQ ID NO: 806967 - RNA, 19 nt, Artificial Sequence
  Description of Artificial Sequence: Synthetic oligonucleotide
gcguuuggccuuauagggg

SEQ ID NO: 806968 - RNA, 19 nt, Artificial Sequence
  Description of Artificial Sequence: Synthetic oligonucleotide
aacucggcugcgggcccac

SEQ ID NO: 806969 - RNA, 19 nt, Artificial Sequence
  Description of Artificial Sequence: Synthetic oligonucleotide
ggccguguuggguuggcug

SEQ ID NO: 806970 - RNA, 19 nt, Artificial Sequence
  Description of Artificial Sequence: Synthetic oligonucleotide
gcgagagcguuuccgucgg

SEQ ID NO: 806971 - RNA, 19 nt, Artificial Sequence
  Description of Artificial Sequence: Synthetic oligonucleotide
ggaggggacuugguaagag

SEQ ID NO: 806972 - RNA, 19 nt, Artificial Sequence
  Description of Artificial Sequence: Synthetic oligonucleotide
gaguccuucgcuggucauc

SEQ ID NO: 806973 - RNA, 19 nt, Artificial Sequence
  Description of Artificial Sequence: Synthetic oligonucleotide
guaccuuauaagaggccaa

SEQ ID NO: 806974 - RNA, 19 nt, Artificial Sequence
  Description of Artificial Sequence: Synthetic oligonucleotide
gaccgcaacucggcugcgg

SEQ ID NO: 806975 - RNA, 19 nt, Artificial Sequence
  Description of Artificial Sequence: Synthetic oligonucleotide
cuauagcugugggacccug

SEQ ID NO: 806976 - RNA, 19 nt, Artificial Sequence
  Description of Artificial Sequence: Synthetic oligonucleotide
gggaaccccauugaggcuc

SEQ ID NO: 806977 - RNA, 19 nt, Artificial Sequence
  Description of Artificial Sequence: Synthetic oligonucleotide
gcaaggugcaacaggccug

SEQ ID NO: 806978 - RNA, 19 nt, Artificial Sequence
  Description of Artificial Sequence: Synthetic oligonucleotide
acacacuuuaguagugcua

SEQ ID NO: 806979 - RNA, 19 nt, Artificial Sequence
  Description of Artificial Sequence: Synthetic oligonucleotide
accugccgccaagucuucc

SEQ ID NO: 806980 - RNA, 19 nt, Artificial Sequence
  Description of Artificial Sequence: Synthetic oligonucleotide
gcuagagggccguguuggg

SEQ ID NO: 806981 - RNA, 19 nt, Artificial Sequence
  Description of Artificial Sequence: Synthetic oligonucleotide
cacgguuguagcguaugca

SEQ ID NO: 806982 - RNA, 19 nt, Artificial Sequence
  Description of Artificial Sequence: Synthetic oligonucleotide
acuauagcugugggacccu

SEQ ID NO: 806983 - RNA, 19 nt, Artificial Sequence
  Description of Artificial Sequence: Synthetic oligonucleotide
gcugcgaguguguggguac

SEQ ID NO: 806984 - RNA, 19 nt, Artificial Sequence
  Description of Artificial Sequence: Synthetic oligonucleotide
gcacgguuguagcguaugc

SEQ ID NO: 806985 - RNA, 19 nt, Artificial Sequence
  Description of Artificial Sequence: Synthetic oligonucleotide
ugcugaccccuuggcggcg

SEQ ID NO: 806986 - RNA, 19 nt, Artificial Sequence
  Description of Artificial Sequence: Synthetic oligonucleotide
cuuauaggggcgagagcgu

SEQ ID NO: 806987 - RNA, 19 nt, Artificial Sequence
  Description of Artificial Sequence: Synthetic oligonucleotide
uggccuuauaggggcgaga

SEQ ID NO: 806988 - RNA, 19 nt, Artificial Sequence
  Description of Artificial Sequence: Synthetic oligonucleotide
agguuggcaagcauaccuu

SEQ ID NO: 806989 - RNA, 19 nt, Artificial Sequence
  Description of Artificial Sequence: Synthetic oligonucleotide
agggccguguuggguuggc

SEQ ID NO: 806990 - RNA, 19 nt, Artificial Sequence
  Description of Artificial Sequence: Synthetic oligonucleotide
cucuaggcugcuggacccc

SEQ ID NO: 806991 - RNA, 19 nt, Artificial Sequence
  Description of Artificial Sequence: Synthetic oligonucleotide
aggcuuccgcugcuuguga

SEQ ID NO: 806992 - RNA, 19 nt, Artificial Sequence
  Description of Artificial Sequence: Synthetic oligonucleotide
cacugcuagucuugaugga

SEQ ID NO: 806993 - RNA, 19 nt, Artificial Sequence
  Description of Artificial Sequence: Synthetic oligonucleotide
uugcuaggggugggugaag

SEQ ID NO: 806994 - RNA, 19 nt, Artificial Sequence
  Description of Artificial Sequence: Synthetic oligonucleotide
cucggcugcgggcccacac

SEQ ID NO: 806995 - RNA, 19 nt, Artificial Sequence
  Description of Artificial Sequence: Synthetic oligonucleotide
cagcuccuuaggugaguac

SEQ ID NO: 806996 - RNA, 19 nt, Artificial Sequence
  Description of Artificial Sequence: Synthetic oligonucleotide
gaccccuuggcggcgccgc

SEQ ID NO: 806997 - RNA, 19 nt, Artificial Sequence
  Description of Artificial Sequence: Synthetic oligonucleotide
uaggggcgagagcguuucc

SEQ ID NO: 806998 - RNA, 19 nt, Artificial Sequence
  Description of Artificial Sequence: Synthetic oligonucleotide
ugaccccuuggcggcgccg

SEQ ID NO: 806999 - RNA, 19 nt, Artificial Sequence
  Description of Artificial Sequence: Synthetic oligonucleotide
gccaaucucagaagcugug

SEQ ID NO: 807000 - RNA, 19 nt, Artificial Sequence
  Description of Artificial Sequence: Synthetic oligonucleotide
gaugggcgagcgcaagggu

SEQ ID NO: 807001 - RNA, 19 nt, Artificial Sequence
  Description of Artificial Sequence: Synthetic oligonucleotide
ccucauaguuugcaaucuc

SEQ ID NO: 807002 - RNA, 19 nt, Artificial Sequence
  Description of Artificial Sequence: Synthetic oligonucleotide
gggucgaagcuuguggaca

SEQ ID NO: 807003 - RNA, 19 nt, Artificial Sequence
  Description of Artificial Sequence: Synthetic oligonucleotide
ugcuugccuccaguccgag

SEQ ID NO: 807004 - RNA, 19 nt, Artificial Sequence
  Description of Artificial Sequence: Synthetic oligonucleotide
gagggccguguuggguugg

SEQ ID NO: 807005 - RNA, 19 nt, Artificial Sequence
  Description of Artificial Sequence: Synthetic oligonucleotide
ccgcuuguaucugauuggc

SEQ ID NO: 807006 - RNA, 19 nt, Artificial Sequence
  Description of Artificial Sequence: Synthetic oligonucleotide
cacaggaguuauaacucau

SEQ ID NO: 807007 - RNA, 19 nt, Artificial Sequence
  Description of Artificial Sequence: Synthetic oligonucleotide
gccguguuggguuggcuga

SEQ ID NO: 807008 - RNA, 19 nt, Artificial Sequence
  Description of Artificial Sequence: Synthetic oligonucleotide
agcugguguucugcacauc

SEQ ID NO: 807009 - RNA, 19 nt, Artificial Sequence
  Description of Artificial Sequence: Synthetic oligonucleotide
ugguugccuuggcuugauc

SEQ ID NO: 807010 - RNA, 19 nt, Artificial Sequence
  Description of Artificial Sequence: Synthetic oligonucleotide
gcauaggggauuuggcaua

SEQ ID NO: 807011 - RNA, 19 nt, Artificial Sequence
  Description of Artificial Sequence: Synthetic oligonucleotide
cugcgggcccacaccugcc

SEQ ID NO: 807012 - RNA, 19 nt, Artificial Sequence
  Description of Artificial Sequence: Synthetic oligonucleotide
gcuugccuccaguccgagg

SEQ ID NO: 807013 - RNA, 19 nt, Artificial Sequence
  Description of Artificial Sequence: Synthetic oligonucleotide
ggucggaccgcaacucggc

SEQ ID NO: 807014 - RNA, 19 nt, Artificial Sequence
  Description of Artificial Sequence: Synthetic oligonucleotide
ccgucggucaggcuuccgc

SEQ ID NO: 807015 - RNA, 19 nt, Artificial Sequence
  Description of Artificial Sequence: Synthetic oligonucleotide
cggaccgcaacucggcugc

SEQ ID NO: 807016 - RNA, 19 nt, Artificial Sequence
  Description of Artificial Sequence: Synthetic oligonucleotide
gccgcacugagauguucug

SEQ ID NO: 807017 - RNA, 19 nt, Artificial Sequence
  Description of Artificial Sequence: Synthetic oligonucleotide
ggcugacuuaccccugcca

SEQ ID NO: 807018 - RNA, 19 nt, Artificial Sequence
  Description of Artificial Sequence: Synthetic oligonucleotide
gguggucggaccgcaacuc

SEQ ID NO: 807019 - RNA, 19 nt, Artificial Sequence
  Description of Artificial Sequence: Synthetic oligonucleotide
gggcuagagggccguguug

SEQ ID NO: 807020 - RNA, 19 nt, Artificial Sequence
  Description of Artificial Sequence: Synthetic oligonucleotide
uccgucggucaggcuuccg

SEQ ID NO: 807021 - RNA, 19 nt, Artificial Sequence
  Description of Artificial Sequence: Synthetic oligonucleotide
caacacgcagaaggcuauc

SEQ ID NO: 807022 - RNA, 19 nt, Artificial Sequence
  Description of Artificial Sequence: Synthetic oligonucleotide
cugcuugccuccaguccga

SEQ ID NO: 807023 - RNA, 19 nt, Artificial Sequence
  Description of Artificial Sequence: Synthetic oligonucleotide
caaccagcuuagauuugcu

SEQ ID NO: 807024 - RNA, 19 nt, Artificial Sequence
  Description of Artificial Sequence: Synthetic oligonucleotide
aggggacucaguacaccau

SEQ ID NO: 807025 - RNA, 19 nt, Artificial Sequence
  Description of Artificial Sequence: Synthetic oligonucleotide
gcuuugaccugggacaacu

SEQ ID NO: 807026 - RNA, 19 nt, Artificial Sequence
  Description of Artificial Sequence: Synthetic oligonucleotide
ggaggacugugggucgaag

SEQ ID NO: 807027 - RNA, 19 nt, Artificial Sequence
  Description of Artificial Sequence: Synthetic oligonucleotide
gcauuauggggcugacuua

SEQ ID NO: 807028 - RNA, 19 nt, Artificial Sequence
  Description of Artificial Sequence: Synthetic oligonucleotide
agcgcaagggugaguugaa

SEQ ID NO: 807029 - RNA, 19 nt, Artificial Sequence
  Description of Artificial Sequence: Synthetic oligonucleotide
uuccgucggucaggcuucc

SEQ ID NO: 807030 - RNA, 19 nt, Artificial Sequence
  Description of Artificial Sequence: Synthetic oligonucleotide
ucacuggcguuuggccuua

SEQ ID NO: 807031 - RNA, 19 nt, Artificial Sequence
  Description of Artificial Sequence: Synthetic oligonucleotide
ggcggcgccgcacugagau

SEQ ID NO: 807032 - RNA, 19 nt, Artificial Sequence
  Description of Artificial Sequence: Synthetic oligonucleotide
gcugaacuauucaguaaua

SEQ ID NO: 807033 - RNA, 19 nt, Artificial Sequence
  Description of Artificial Sequence: Synthetic oligonucleotide
ccgugcucucauugcuagg

SEQ ID NO: 807034 - RNA, 19 nt, Artificial Sequence
  Description of Artificial Sequence: Synthetic oligonucleotide
gccccagagccuugcuuug

SEQ ID NO: 807035 - RNA, 19 nt, Artificial Sequence
  Description of Artificial Sequence: Synthetic oligonucleotide
gggcgagagcguuuccguc

SEQ ID NO: 807036 - RNA, 19 nt, Artificial Sequence
  Description of Artificial Sequence: Synthetic oligonucleotide
gagcauuauggggcugacu

SEQ ID NO: 807037 - RNA, 19 nt, Artificial Sequence
  Description of Artificial Sequence: Synthetic oligonucleotide
cuagagggccguguugggu

SEQ ID NO: 807038 - RNA, 19 nt, Artificial Sequence
  Description of Artificial Sequence: Synthetic oligonucleotide
acagggcuagagggccgug

SEQ ID NO: 807039 - RNA, 19 nt, Artificial Sequence
  Description of Artificial Sequence: Synthetic oligonucleotide
gucggaccgcaacucggcu

SEQ ID NO: 807040 - RNA, 19 nt, Artificial Sequence
  Description of Artificial Sequence: Synthetic oligonucleotide
cugcgaguguguggguaca

SEQ ID NO: 807041 - RNA, 19 nt, Artificial Sequence
  Description of Artificial Sequence: Synthetic oligonucleotide
aggcugcgagugugugggu

SEQ ID NO: 807042 - RNA, 19 nt, Artificial Sequence
  Description of Artificial Sequence: Synthetic oligonucleotide
guccgugcucucauugcua

SEQ ID NO: 807043 - RNA, 19 nt, Artificial Sequence
  Description of Artificial Sequence: Synthetic oligonucleotide
ccgcaacucggcugcgggc

SEQ ID NO: 807044 - RNA, 19 nt, Artificial Sequence
  Description of Artificial Sequence: Synthetic oligonucleotide
ggggcgagagcguuuccgu

SEQ ID NO: 807045 - RNA, 19 nt, Artificial Sequence
  Description of Artificial Sequence: Synthetic oligonucleotide
gagguccucacuggcguuu

SEQ ID NO: 807046 - RNA, 19 nt, Artificial Sequence
  Description of Artificial Sequence: Synthetic oligonucleotide
agcggaugggcgagcgcaa

SEQ ID NO: 807047 - RNA, 19 nt, Artificial Sequence
  Description of Artificial Sequence: Synthetic oligonucleotide
ggguggucggaccgcaacu

SEQ ID NO: 807048 - RNA, 19 nt, Artificial Sequence
  Description of Artificial Sequence: Synthetic oligonucleotide
gccgaccaaugcugacccc

SEQ ID NO: 807049 - RNA, 19 nt, Artificial Sequence
  Description of Artificial Sequence: Synthetic oligonucleotide
ggggacuugguaagagccu

SEQ ID NO: 807050 - RNA, 19 nt, Artificial Sequence
  Description of Artificial Sequence: Synthetic oligonucleotide
ccuacccugaguaccuuau

SEQ ID NO: 807051 - RNA, 19 nt, Artificial Sequence
  Description of Artificial Sequence: Synthetic oligonucleotide
gggaggggacuugguaaga

SEQ ID NO: 807052 - RNA, 19 nt, Artificial Sequence
  Description of Artificial Sequence: Synthetic oligonucleotide
ggaccgcaacucggcugcg

SEQ ID NO: 807053 - RNA, 19 nt, Artificial Sequence
  Description of Artificial Sequence: Synthetic oligonucleotide
cgcuuguaucugauuggca

SEQ ID NO: 807054 - RNA, 19 nt, Artificial Sequence
  Description of Artificial Sequence: Synthetic oligonucleotide
ggcugcgagugugugggua

SEQ ID NO: 807055 - RNA, 19 nt, Artificial Sequence
  Description of Artificial Sequence: Synthetic oligonucleotide
caacucggcugcgggccca

SEQ ID NO: 807056 - RNA, 19 nt, Artificial Sequence
  Description of Artificial Sequence: Synthetic oligonucleotide
cguaugcagucaacacgca

SEQ ID NO: 807057 - RNA, 19 nt, Artificial Sequence
  Description of Artificial Sequence: Synthetic oligonucleotide
gcgagcgcaagggugaguu

SEQ ID NO: 807058 - RNA, 19 nt, Artificial Sequence
  Description of Artificial Sequence: Synthetic oligonucleotide
cuggacucccagccccacu

SEQ ID NO: 807059 - RNA, 19 nt, Artificial Sequence
  Description of Artificial Sequence: Synthetic oligonucleotide
cgcugcuugugaagccgac

SEQ ID NO: 807060 - RNA, 19 nt, Artificial Sequence
  Description of Artificial Sequence: Synthetic oligonucleotide
ccgaccaaugcugaccccu

SEQ ID NO: 807061 - RNA, 19 nt, Artificial Sequence
  Description of Artificial Sequence: Synthetic oligonucleotide
cgagcgcaagggugaguug

SEQ ID NO: 807062 - RNA, 19 nt, Artificial Sequence
  Description of Artificial Sequence: Synthetic oligonucleotide
gggaucuagcugaacuauu

SEQ ID NO: 807063 - RNA, 19 nt, Artificial Sequence
  Description of Artificial Sequence: Synthetic oligonucleotide
cagggcuagagggccgugu

SEQ ID NO: 807064 - RNA, 19 nt, Artificial Sequence
  Description of Artificial Sequence: Synthetic oligonucleotide
guagugcuagcagcuccuu

SEQ ID NO: 807065 - RNA, 19 nt, Artificial Sequence
  Description of Artificial Sequence: Synthetic oligonucleotide
ggucacggacagcacgguu

SEQ ID NO: 807066 - RNA, 19 nt, Artificial Sequence
  Description of Artificial Sequence: Synthetic oligonucleotide
gucguaguugugaguccuu

SEQ ID NO: 807067 - RNA, 19 nt, Artificial Sequence
  Description of Artificial Sequence: Synthetic oligonucleotide
gcggcgccgcacugagaug

SEQ ID NO: 807068 - RNA, 19 nt, Artificial Sequence
  Description of Artificial Sequence: Synthetic oligonucleotide
cgaagcuuguggacacgaa

SEQ ID NO: 807069 - RNA, 19 nt, Artificial Sequence
  Description of Artificial Sequence: Synthetic oligonucleotide
ccuuggcggcgccgcacug

SEQ ID NO: 807070 - RNA, 19 nt, Artificial Sequence
  Description of Artificial Sequence: Synthetic oligonucleotide
acucggcugcgggcccaca

SEQ ID NO: 807071 - RNA, 19 nt, Artificial Sequence
  Description of Artificial Sequence: Synthetic oligonucleotide
cccuacccugaguaccuua

SEQ ID NO: 807072 - RNA, 19 nt, Artificial Sequence
  Description of Artificial Sequence: Synthetic oligonucleotide
gcgcaagggugaguugaaa

SEQ ID NO: 807073 - RNA, 19 nt, Artificial Sequence
  Description of Artificial Sequence: Synthetic oligonucleotide
gggaggacugugggucgaa

SEQ ID NO: 807074 - RNA, 19 nt, Artificial Sequence
  Description of Artificial Sequence: Synthetic oligonucleotide
gcccagacuugucucuguu

SEQ ID NO: 807075 - RNA, 19 nt, Artificial Sequence
  Description of Artificial Sequence: Synthetic oligonucleotide
cgucggucaggcuuccgcu

SEQ ID NO: 807076 - RNA, 19 nt, Artificial Sequence
  Description of Artificial Sequence: Synthetic oligonucleotide
gcgccgcacugagauguuc

SEQ ID NO: 807077 - RNA, 19 nt, Artificial Sequence
  Description of Artificial Sequence: Synthetic oligonucleotide
cgccgcacugagauguucu

SEQ ID NO: 807078 - RNA, 19 nt, Artificial Sequence
  Description of Artificial Sequence: Synthetic oligonucleotide
cccugguaggcugucugcu

SEQ ID NO: 807079 - RNA, 19 nt, Artificial Sequence
  Description of Artificial Sequence: Synthetic oligonucleotide
ccgcacugagauguucugu

SEQ ID NO: 807080 - RNA, 19 nt, Artificial Sequence
  Description of Artificial Sequence: Synthetic oligonucleotide
cggcgccgcacugagaugu

SEQ ID NO: 807081 - RNA, 19 nt, Artificial Sequence
  Description of Artificial Sequence: Synthetic oligonucleotide
cccuuggcggcgccgcacu

SEQ ID NO: 807082 - RNA, 19 nt, Artificial Sequence
  Description of Artificial Sequence: Synthetic oligonucleotide
ggucaggcuuccgcugcuu

SEQ ID NO: 807083 - RNA, 19 nt, Artificial Sequence
  Description of Artificial Sequence: Synthetic oligonucleotide
ggcgagcgcaagggugagu

SEQ ID NO: 807084 - RNA, 19 nt, Artificial Sequence
  Description of Artificial Sequence: Synthetic oligonucleotide
cgaccaaugcugaccccuu

SEQ ID NO: 807085 - RNA, 19 nt, Artificial Sequence
  Description of Artificial Sequence: Synthetic oligonucleotide
gggccguguuggguuggcu

SEQ ID NO: 807086 - RNA, 19 nt, Artificial Sequence
  Description of Artificial Sequence: Synthetic oligonucleotide
ggcgccgcacugagauguu

SEQ ID NO: 807087 - RNA, 19 nt, Artificial Sequence
  Description of Artificial Sequence: Synthetic oligonucleotide
cacuggcguuuggccuuau

SEQ ID NO: 807088 - RNA, 19 nt, Artificial Sequence
  Description of Artificial Sequence: Synthetic oligonucleotide
cgagagcguuuccgucggu

SEQ ID NO: 807089 - RNA, 19 nt, Artificial Sequence
  Description of Artificial Sequence: Synthetic oligonucleotide
ccccuacccugaguaccuu

SEQ ID NO: 807090 - RNA, 19 nt, Artificial Sequence
  Description of Artificial Sequence: Synthetic oligonucleotide
aauacagcaacacugacgc

SEQ ID NO: 807091 - RNA, 19 nt, Artificial Sequence
  Description of Artificial Sequence: Synthetic oligonucleotide
aaugaaacggcccaaagcg

SEQ ID NO: 807092 - RNA, 19 nt, Artificial Sequence
  Description of Artificial Sequence: Synthetic oligonucleotide
agauguguaagucagaaug

SEQ ID NO: 807093 - RNA, 19 nt, Artificial Sequence
  Description of Artificial Sequence: Synthetic oligonucleotide
gauaucauggggcaaacag

SEQ ID NO: 807094 - RNA, 19 nt, Artificial Sequence
  Description of Artificial Sequence: Synthetic oligonucleotide
aaagacucgaauucgguug

SEQ ID NO: 807095 - RNA, 19 nt, Artificial Sequence
  Description of Artificial Sequence: Synthetic oligonucleotide
ugcauuauagccaccaaag

SEQ ID NO: 807096 - RNA, 19 nt, Artificial Sequence
  Description of Artificial Sequence: Synthetic oligonucleotide
uauaggguacaacaggagg

SEQ ID NO: 807097 - RNA, 19 nt, Artificial Sequence
  Description of Artificial Sequence: Synthetic oligonucleotide
guccauaccgcauauaggg

SEQ ID NO: 807098 - RNA, 19 nt, Artificial Sequence
  Description of Artificial Sequence: Synthetic oligonucleotide
uccaagauguguaagucag

SEQ ID NO: 807099 - RNA, 19 nt, Artificial Sequence
  Description of Artificial Sequence: Synthetic oligonucleotide
aagacucgaauucgguugc

SEQ ID NO: 807100 - RNA, 19 nt, Artificial Sequence
  Description of Artificial Sequence: Synthetic oligonucleotide
gaagaggacaaucuuauca

SEQ ID NO: 807101 - RNA, 19 nt, Artificial Sequence
  Description of Artificial Sequence: Synthetic oligonucleotide
aaagcagucugccagcugu

SEQ ID NO: 807102 - RNA, 19 nt, Artificial Sequence
  Description of Artificial Sequence: Synthetic oligonucleotide
cagacuagggcuaaagucc

SEQ ID NO: 807103 - RNA, 19 nt, Artificial Sequence
  Description of Artificial Sequence: Synthetic oligonucleotide
cuuugugcaaacaaggguc

SEQ ID NO: 807104 - RNA, 19 nt, Artificial Sequence
  Description of Artificial Sequence: Synthetic oligonucleotide
caggauuaaacuuccagag

SEQ ID NO: 807105 - RNA, 19 nt, Artificial Sequence
  Description of Artificial Sequence: Synthetic oligonucleotide
aacacggcuugucuucucc

SEQ ID NO: 807106 - RNA, 19 nt, Artificial Sequence
  Description of Artificial Sequence: Synthetic oligonucleotide
uuauacugaaucacggcca

SEQ ID NO: 807107 - RNA, 19 nt, Artificial Sequence
  Description of Artificial Sequence: Synthetic oligonucleotide
uguaucauugcgcccaccc

SEQ ID NO: 807108 - RNA, 19 nt, Artificial Sequence
  Description of Artificial Sequence: Synthetic oligonucleotide
aucgcauugagcucccacc

SEQ ID NO: 807109 - RNA, 19 nt, Artificial Sequence
  Description of Artificial Sequence: Synthetic oligonucleotide
aaccaugguugauuagccc

SEQ ID NO: 807110 - RNA, 19 nt, Artificial Sequence
  Description of Artificial Sequence: Synthetic oligonucleotide
gaaugaaacggcccaaagc

SEQ ID NO: 807111 - RNA, 19 nt, Artificial Sequence
  Description of Artificial Sequence: Synthetic oligonucleotide
uguguggacagucaagcca

SEQ ID NO: 807112 - RNA, 19 nt, Artificial Sequence
  Description of Artificial Sequence: Synthetic oligonucleotide
gugaguauugacaucaaag

SEQ ID NO: 807113 - RNA, 19 nt, Artificial Sequence
  Description of Artificial Sequence: Synthetic oligonucleotide
aaaggacccaggauuaaac

SEQ ID NO: 807114 - RNA, 19 nt, Artificial Sequence
  Description of Artificial Sequence: Synthetic oligonucleotide
aggggaggcauuccuaucc

SEQ ID NO: 807115 - RNA, 19 nt, Artificial Sequence
  Description of Artificial Sequence: Synthetic oligonucleotide
agacauacaugugauugcc

SEQ ID NO: 807116 - RNA, 19 nt, Artificial Sequence
  Description of Artificial Sequence: Synthetic oligonucleotide
ugucucguagucuucacca

SEQ ID NO: 807117 - RNA, 19 nt, Artificial Sequence
  Description of Artificial Sequence: Synthetic oligonucleotide
aggauuaaacuuccagagg

SEQ ID NO: 807118 - RNA, 19 nt, Artificial Sequence
  Description of Artificial Sequence: Synthetic oligonucleotide
agguauacugaguccaggg

SEQ ID NO: 807119 - RNA, 19 nt, Artificial Sequence
  Description of Artificial Sequence: Synthetic oligonucleotide
ugucaaagacucgaauucg

SEQ ID NO: 807120 - RNA, 19 nt, Artificial Sequence
  Description of Artificial Sequence: Synthetic oligonucleotide
uguccauaccgcauauagg

SEQ ID NO: 807121 - RNA, 19 nt, Artificial Sequence
  Description of Artificial Sequence: Synthetic oligonucleotide
guugauuagccccucacac

SEQ ID NO: 807122 - RNA, 19 nt, Artificial Sequence
  Description of Artificial Sequence: Synthetic oligonucleotide
uccacguggagguauacug

SEQ ID NO: 807123 - RNA, 19 nt, Artificial Sequence
  Description of Artificial Sequence: Synthetic oligonucleotide
uguuggaaugaaacggccc

SEQ ID NO: 807124 - RNA, 19 nt, Artificial Sequence
  Description of Artificial Sequence: Synthetic oligonucleotide
acauacaugugauugccca

SEQ ID NO: 807125 - RNA, 19 nt, Artificial Sequence
  Description of Artificial Sequence: Synthetic oligonucleotide
gaaacugccaggccgggcc

SEQ ID NO: 807126 - RNA, 19 nt, Artificial Sequence
  Description of Artificial Sequence: Synthetic oligonucleotide
uaaccaugguugauuagcc

SEQ ID NO: 807127 - RNA, 19 nt, Artificial Sequence
  Description of Artificial Sequence: Synthetic oligonucleotide
guguccauaccgcauauag

SEQ ID NO: 807128 - RNA, 19 nt, Artificial Sequence
  Description of Artificial Sequence: Synthetic oligonucleotide
ugaaucacggccagcuugc

SEQ ID NO: 807129 - RNA, 19 nt, Artificial Sequence
  Description of Artificial Sequence: Synthetic oligonucleotide
auacaugugauugcccagc

SEQ ID NO: 807130 - RNA, 19 nt, Artificial Sequence
  Description of Artificial Sequence: Synthetic oligonucleotide
guaaccaugguugauuagc

SEQ ID NO: 807131 - RNA, 19 nt, Artificial Sequence
  Description of Artificial Sequence: Synthetic oligonucleotide
uacccuuugugcaaacaag

SEQ ID NO: 807132 - RNA, 19 nt, Artificial Sequence
  Description of Artificial Sequence: Synthetic oligonucleotide
auuagccccucacacagag

SEQ ID NO: 807133 - RNA, 19 nt, Artificial Sequence
  Description of Artificial Sequence: Synthetic oligonucleotide
auucgguugcaguaaaucu

SEQ ID NO: 807134 - RNA, 19 nt, Artificial Sequence
  Description of Artificial Sequence: Synthetic oligonucleotide
ucgguugcaguaaaucuca

SEQ ID NO: 807135 - RNA, 19 nt, Artificial Sequence
  Description of Artificial Sequence: Synthetic oligonucleotide
ugaaacggcccaaagcggu

SEQ ID NO: 807136 - RNA, 19 nt, Artificial Sequence
  Description of Artificial Sequence: Synthetic oligonucleotide
cauuggaaaagcagucugc

SEQ ID NO: 807137 - RNA, 19 nt, Artificial Sequence
  Description of Artificial Sequence: Synthetic oligonucleotide
auugcgcccaccccaaagg

SEQ ID NO: 807138 - RNA, 19 nt, Artificial Sequence
  Description of Artificial Sequence: Synthetic oligonucleotide
uuacccuuugugcaaacaa

SEQ ID NO: 807139 - RNA, 19 nt, Artificial Sequence
  Description of Artificial Sequence: Synthetic oligonucleotide
uuuguccaacgcaaggaca

SEQ ID NO: 807140 - RNA, 19 nt, Artificial Sequence
  Description of Artificial Sequence: Synthetic oligonucleotide
agggguuucaugccaacag

SEQ ID NO: 807141 - RNA, 19 nt, Artificial Sequence
  Description of Artificial Sequence: Synthetic oligonucleotide
caaacaaggguccauguca

SEQ ID NO: 807142 - RNA, 19 nt, Artificial Sequence
  Description of Artificial Sequence: Synthetic oligonucleotide
aaggacccaggauuaaacu

SEQ ID NO: 807143 - RNA, 19 nt, Artificial Sequence
  Description of Artificial Sequence: Synthetic oligonucleotide
uuguuggaaugaaacggcc

SEQ ID NO: 807144 - RNA, 19 nt, Artificial Sequence
  Description of Artificial Sequence: Synthetic oligonucleotide
ugauccguugucccugggg

SEQ ID NO: 807145 - RNA, 19 nt, Artificial Sequence
  Description of Artificial Sequence: Synthetic oligonucleotide
acuguccaccguaacaucc

SEQ ID NO: 807146 - RNA, 19 nt, Artificial Sequence
  Description of Artificial Sequence: Synthetic oligonucleotide
uacagcuccccauuguagc

SEQ ID NO: 807147 - RNA, 19 nt, Artificial Sequence
  Description of Artificial Sequence: Synthetic oligonucleotide
auaucauggggcaaacagg

SEQ ID NO: 807148 - RNA, 19 nt, Artificial Sequence
  Description of Artificial Sequence: Synthetic oligonucleotide
cuugugaguauugacauca

SEQ ID NO: 807149 - RNA, 19 nt, Artificial Sequence
  Description of Artificial Sequence: Synthetic oligonucleotide
aucuuaucaccaacaauac

SEQ ID NO: 807150 - RNA, 19 nt, Artificial Sequence
  Description of Artificial Sequence: Synthetic oligonucleotide
ucuguugguccccacuccc

SEQ ID NO: 807151 - RNA, 19 nt, Artificial Sequence
  Description of Artificial Sequence: Synthetic oligonucleotide
guauacugaguccaggguc

SEQ ID NO: 807152 - RNA, 19 nt, Artificial Sequence
  Description of Artificial Sequence: Synthetic oligonucleotide
uguguaagucagaaugauc

SEQ ID NO: 807153 - RNA, 19 nt, Artificial Sequence
  Description of Artificial Sequence: Synthetic oligonucleotide
caggacuagaaacugccag

SEQ ID NO: 807154 - RNA, 19 nt, Artificial Sequence
  Description of Artificial Sequence: Synthetic oligonucleotide
guuggaaugaaacggccca

SEQ ID NO: 807155 - RNA, 19 nt, Artificial Sequence
  Description of Artificial Sequence: Synthetic oligonucleotide
uaucugacguagugucucg

SEQ ID NO: 807156 - RNA, 19 nt, Artificial Sequence
  Description of Artificial Sequence: Synthetic oligonucleotide
accguaacauccccuggac

SEQ ID NO: 807157 - RNA, 19 nt, Artificial Sequence
  Description of Artificial Sequence: Synthetic oligonucleotide
guggucaucgcauugagcu

SEQ ID NO: 807158 - RNA, 19 nt, Artificial Sequence
  Description of Artificial Sequence: Synthetic oligonucleotide
aacuccauguaaccauggu

SEQ ID NO: 807159 - RNA, 19 nt, Artificial Sequence
  Description of Artificial Sequence: Synthetic oligonucleotide
acgaggagagggaagcucc

SEQ ID NO: 807160 - RNA, 19 nt, Artificial Sequence
  Description of Artificial Sequence: Synthetic oligonucleotide
uccaccguaacauccccug

SEQ ID NO: 807161 - RNA, 19 nt, Artificial Sequence
  Description of Artificial Sequence: Synthetic oligonucleotide
gugucaucgaugaggacgg

SEQ ID NO: 807162 - RNA, 19 nt, Artificial Sequence
  Description of Artificial Sequence: Synthetic oligonucleotide
ugugaguauugacaucaaa

SEQ ID NO: 807163 - RNA, 19 nt, Artificial Sequence
  Description of Artificial Sequence: Synthetic oligonucleotide
cauaccgcauauaggguac

SEQ ID NO: 807164 - RNA, 19 nt, Artificial Sequence
  Description of Artificial Sequence: Synthetic oligonucleotide
gucaaagacucgaauucgg

SEQ ID NO: 807165 - RNA, 19 nt, Artificial Sequence
  Description of Artificial Sequence: Synthetic oligonucleotide
cucccaccugauaucaugg

SEQ ID NO: 807166 - RNA, 19 nt, Artificial Sequence
  Description of Artificial Sequence: Synthetic oligonucleotide
gguguagaccacuugugag

SEQ ID NO: 807167 - RNA, 19 nt, Artificial Sequence
  Description of Artificial Sequence: Synthetic oligonucleotide
ucuaucugacguagugucu

SEQ ID NO: 807168 - RNA, 19 nt, Artificial Sequence
  Description of Artificial Sequence: Synthetic oligonucleotide
acccuuugugcaaacaagg

SEQ ID NO: 807169 - RNA, 19 nt, Artificial Sequence
  Description of Artificial Sequence: Synthetic oligonucleotide
gauguguaagucagaauga

SEQ ID NO: 807170 - RNA, 19 nt, Artificial Sequence
  Description of Artificial Sequence: Synthetic oligonucleotide
cuaaaguccaagaugugua

SEQ ID NO: 807171 - RNA, 19 nt, Artificial Sequence
  Description of Artificial Sequence: Synthetic oligonucleotide
uguggaugucauuggaaaa

SEQ ID NO: 807172 - RNA, 19 nt, Artificial Sequence
  Description of Artificial Sequence: Synthetic oligonucleotide
uccuuugacagcuguggcu

SEQ ID NO: 807173 - RNA, 19 nt, Artificial Sequence
  Description of Artificial Sequence: Synthetic oligonucleotide
uagccccucacacagaguu

SEQ ID NO: 807174 - RNA, 19 nt, Artificial Sequence
  Description of Artificial Sequence: Synthetic oligonucleotide
ugucuguugguccccacuc

SEQ ID NO: 807175 - RNA, 19 nt, Artificial Sequence
  Description of Artificial Sequence: Synthetic oligonucleotide
ggauuaaacuuccagaggu

SEQ ID NO: 807176 - RNA, 19 nt, Artificial Sequence
  Description of Artificial Sequence: Synthetic oligonucleotide
gacgguugaguguccauac

SEQ ID NO: 807177 - RNA, 19 nt, Artificial Sequence
  Description of Artificial Sequence: Synthetic oligonucleotide
acgguugaguguccauacc

SEQ ID NO: 807178 - RNA, 19 nt, Artificial Sequence
  Description of Artificial Sequence: Synthetic oligonucleotide
aaacugccaggccgggccg

SEQ ID NO: 807179 - RNA, 19 nt, Artificial Sequence
  Description of Artificial Sequence: Synthetic oligonucleotide
ugaguguccauaccgcaua

SEQ ID NO: 807180 - RNA, 19 nt, Artificial Sequence
  Description of Artificial Sequence: Synthetic oligonucleotide
uccccauuguagccaaaag

SEQ ID NO: 807181 - RNA, 19 nt, Artificial Sequence
  Description of Artificial Sequence: Synthetic oligonucleotide
cugacguagugucucguag

SEQ ID NO: 807182 - RNA, 19 nt, Artificial Sequence
  Description of Artificial Sequence: Synthetic oligonucleotide
auuccuauccgugggagga

SEQ ID NO: 807183 - RNA, 19 nt, Artificial Sequence
  Description of Artificial Sequence: Synthetic oligonucleotide
acacggcuugucuucuccc

SEQ ID NO: 807184 - RNA, 19 nt, Artificial Sequence
  Description of Artificial Sequence: Synthetic oligonucleotide
ugcuaccuaggacagggaa

SEQ ID NO: 807185 - RNA, 19 nt, Artificial Sequence
  Description of Artificial Sequence: Synthetic oligonucleotide
ugguugauuagccccucac

SEQ ID NO: 807186 - RNA, 19 nt, Artificial Sequence
  Description of Artificial Sequence: Synthetic oligonucleotide
ucgcauugagcucccaccu

SEQ ID NO: 807187 - RNA, 19 nt, Artificial Sequence
  Description of Artificial Sequence: Synthetic oligonucleotide
uccaacacggcuugucuuc

SEQ ID NO: 807188 - RNA, 19 nt, Artificial Sequence
  Description of Artificial Sequence: Synthetic oligonucleotide
uguaagucagaaugaucua

SEQ ID NO: 807189 - RNA, 19 nt, Artificial Sequence
  Description of Artificial Sequence: Synthetic oligonucleotide
ugacguagugucucguagu

SEQ ID NO: 807190 - RNA, 19 nt, Artificial Sequence
  Description of Artificial Sequence: Synthetic oligonucleotide
agagcuggcugaucuucgg

SEQ ID NO: 807191 - RNA, 19 nt, Artificial Sequence
  Description of Artificial Sequence: Synthetic oligonucleotide
cauuccuauccgugggagg

SEQ ID NO: 807192 - RNA, 19 nt, Artificial Sequence
  Description of Artificial Sequence: Synthetic oligonucleotide
acucgaauucgguugcagu

SEQ ID NO: 807193 - RNA, 19 nt, Artificial Sequence
  Description of Artificial Sequence: Synthetic oligonucleotide
uacacucggugcccaacag

SEQ ID NO: 807194 - RNA, 19 nt, Artificial Sequence
  Description of Artificial Sequence: Synthetic oligonucleotide
gacguagugucucguaguc

SEQ ID NO: 807195 - RNA, 19 nt, Artificial Sequence
  Description of Artificial Sequence: Synthetic oligonucleotide
gagguggaugggaacagag

SEQ ID NO: 807196 - RNA, 19 nt, Artificial Sequence
  Description of Artificial Sequence: Synthetic oligonucleotide
uugaguguccauaccgcau

SEQ ID NO: 807197 - RNA, 19 nt, Artificial Sequence
  Description of Artificial Sequence: Synthetic oligonucleotide
uguugguccccacucccga

SEQ ID NO: 807198 - RNA, 19 nt, Artificial Sequence
  Description of Artificial Sequence: Synthetic oligonucleotide
ggggugagggguuucaugc

SEQ ID NO: 807199 - RNA, 19 nt, Artificial Sequence
  Description of Artificial Sequence: Synthetic oligonucleotide
gauuaaacuuccagagguc

SEQ ID NO: 807200 - RNA, 19 nt, Artificial Sequence
  Description of Artificial Sequence: Synthetic oligonucleotide
uccauaccgcauauagggu

SEQ ID NO: 807201 - RNA, 19 nt, Artificial Sequence
  Description of Artificial Sequence: Synthetic oligonucleotide
gugauugcccagcauggug

SEQ ID NO: 807202 - RNA, 19 nt, Artificial Sequence
  Description of Artificial Sequence: Synthetic oligonucleotide
ccaccugauaucauggggc

SEQ ID NO: 807203 - RNA, 19 nt, Artificial Sequence
  Description of Artificial Sequence: Synthetic oligonucleotide
uucuggugucaaagacucg

SEQ ID NO: 807204 - RNA, 19 nt, Artificial Sequence
  Description of Artificial Sequence: Synthetic oligonucleotide
guaucauugcgcccacccc

SEQ ID NO: 807205 - RNA, 19 nt, Artificial Sequence
  Description of Artificial Sequence: Synthetic oligonucleotide
aaacaaggguccaugucau

SEQ ID NO: 807206 - RNA, 19 nt, Artificial Sequence
  Description of Artificial Sequence: Synthetic oligonucleotide
uauccgugggaggagacaa

SEQ ID NO: 807207 - RNA, 19 nt, Artificial Sequence
  Description of Artificial Sequence: Synthetic oligonucleotide
acgaggaguuccuuugaca

SEQ ID NO: 807208 - RNA, 19 nt, Artificial Sequence
  Description of Artificial Sequence: Synthetic oligonucleotide
aggacccaggauuaaacuu

SEQ ID NO: 807209 - RNA, 19 nt, Artificial Sequence
  Description of Artificial Sequence: Synthetic oligonucleotide
caggaugcccucaggcacg

SEQ ID NO: 807210 - RNA, 19 nt, Artificial Sequence
  Description of Artificial Sequence: Synthetic oligonucleotide
aguacacucggugcccaac

SEQ ID NO: 807211 - RNA, 19 nt, Artificial Sequence
  Description of Artificial Sequence: Synthetic oligonucleotide
uaaaggacccaggauuaaa

SEQ ID NO: 807212 - RNA, 19 nt, Artificial Sequence
  Description of Artificial Sequence: Synthetic oligonucleotide
ucgaauucgguugcaguaa

SEQ ID NO: 807213 - RNA, 19 nt, Artificial Sequence
  Description of Artificial Sequence: Synthetic oligonucleotide
augaaacggcccaaagcgg

SEQ ID NO: 807214 - RNA, 19 nt, Artificial Sequence
  Description of Artificial Sequence: Synthetic oligonucleotide
caggguuacccuuugugca

SEQ ID NO: 807215 - RNA, 19 nt, Artificial Sequence
  Description of Artificial Sequence: Synthetic oligonucleotide
accgcauauaggguacaac

SEQ ID NO: 807216 - RNA, 19 nt, Artificial Sequence
  Description of Artificial Sequence: Synthetic oligonucleotide
ugggagaagcugucuguug

SEQ ID NO: 807217 - RNA, 19 nt, Artificial Sequence
  Description of Artificial Sequence: Synthetic oligonucleotide
cuucuguaucauugcgccc

SEQ ID NO: 807218 - RNA, 19 nt, Artificial Sequence
  Description of Artificial Sequence: Synthetic oligonucleotide
ugccgguucagccuugcau

SEQ ID NO: 807219 - RNA, 19 nt, Artificial Sequence
  Description of Artificial Sequence: Synthetic oligonucleotide
gcacagaaaacaccucuag

SEQ ID NO: 807220 - RNA, 19 nt, Artificial Sequence
  Description of Artificial Sequence: Synthetic oligonucleotide
ucguagucuucaccagagc

SEQ ID NO: 807221 - RNA, 19 nt, Artificial Sequence
  Description of Artificial Sequence: Synthetic oligonucleotide
aacggcccaaagcggucag

SEQ ID NO: 807222 - RNA, 19 nt, Artificial Sequence
  Description of Artificial Sequence: Synthetic oligonucleotide
cuguugguccccacucccg

SEQ ID NO: 807223 - RNA, 19 nt, Artificial Sequence
  Description of Artificial Sequence: Synthetic oligonucleotide
cauugcgcccaccccaaag

SEQ ID NO: 807224 - RNA, 19 nt, Artificial Sequence
  Description of Artificial Sequence: Synthetic oligonucleotide
aagggaggagaguggcccu

SEQ ID NO: 807225 - RNA, 19 nt, Artificial Sequence
  Description of Artificial Sequence: Synthetic oligonucleotide
ccccauuguagccaaaagc

SEQ ID NO: 807226 - RNA, 19 nt, Artificial Sequence
  Description of Artificial Sequence: Synthetic oligonucleotide
auacugaguccaggguccc

SEQ ID NO: 807227 - RNA, 19 nt, Artificial Sequence
  Description of Artificial Sequence: Synthetic oligonucleotide
ucuguaucauugcgcccac

SEQ ID NO: 807228 - RNA, 19 nt, Artificial Sequence
  Description of Artificial Sequence: Synthetic oligonucleotide
uccguugucccugggguca

SEQ ID NO: 807229 - RNA, 19 nt, Artificial Sequence
  Description of Artificial Sequence: Synthetic oligonucleotide
auccguugucccugggguc

SEQ ID NO: 807230 - RNA, 19 nt, Artificial Sequence
  Description of Artificial Sequence: Synthetic oligonucleotide
cucgaauucgguugcagua

SEQ ID NO: 807231 - RNA, 19 nt, Artificial Sequence
  Description of Artificial Sequence: Synthetic oligonucleotide
auguguaagucagaaugau

SEQ ID NO: 807232 - RNA, 19 nt, Artificial Sequence
  Description of Artificial Sequence: Synthetic oligonucleotide
guucagccuugcauuauag

SEQ ID NO: 807233 - RNA, 19 nt, Artificial Sequence
  Description of Artificial Sequence: Synthetic oligonucleotide
gacacucgggguguagacc

SEQ ID NO: 807234 - RNA, 19 nt, Artificial Sequence
  Description of Artificial Sequence: Synthetic oligonucleotide
ucugacguagugucucgua

SEQ ID NO: 807235 - RNA, 19 nt, Artificial Sequence
  Description of Artificial Sequence: Synthetic oligonucleotide
augcacuguccaccguaac

SEQ ID NO: 807236 - RNA, 19 nt, Artificial Sequence
  Description of Artificial Sequence: Synthetic oligonucleotide
cccuuugugcaaacaaggg

SEQ ID NO: 807237 - RNA, 19 nt, Artificial Sequence
  Description of Artificial Sequence: Synthetic oligonucleotide
aaacggcccaaagcgguca

SEQ ID NO: 807238 - RNA, 19 nt, Artificial Sequence
  Description of Artificial Sequence: Synthetic oligonucleotide
ggcacgaggaguuccuuug

SEQ ID NO: 807239 - RNA, 19 nt, Artificial Sequence
  Description of Artificial Sequence: Synthetic oligonucleotide
caucgcauugagcucccac

SEQ ID NO: 807240 - RNA, 19 nt, Artificial Sequence
  Description of Artificial Sequence: Synthetic oligonucleotide
ugauaucauggggcaaaca

SEQ ID NO: 807241 - RNA, 19 nt, Artificial Sequence
  Description of Artificial Sequence: Synthetic oligonucleotide
ugaauggcuccugcgcccc

SEQ ID NO: 807242 - RNA, 19 nt, Artificial Sequence
  Description of Artificial Sequence: Synthetic oligonucleotide
ucggcccaagggaggagag

SEQ ID NO: 807243 - RNA, 19 nt, Artificial Sequence
  Description of Artificial Sequence: Synthetic oligonucleotide
agggaacuccauguaacca

SEQ ID NO: 807244 - RNA, 19 nt, Artificial Sequence
  Description of Artificial Sequence: Synthetic oligonucleotide
ugguucacccugcguggcc

SEQ ID NO: 807245 - RNA, 19 nt, Artificial Sequence
  Description of Artificial Sequence: Synthetic oligonucleotide
uggaaugaaacggcccaaa

SEQ ID NO: 807246 - RNA, 19 nt, Artificial Sequence
  Description of Artificial Sequence: Synthetic oligonucleotide
gucuguugguccccacucc

SEQ ID NO: 807247 - RNA, 19 nt, Artificial Sequence
  Description of Artificial Sequence: Synthetic oligonucleotide
guguagaccacuugugagu

SEQ ID NO: 807248 - RNA, 19 nt, Artificial Sequence
  Description of Artificial Sequence: Synthetic oligonucleotide
gucauggaagugccgguuc

SEQ ID NO: 807249 - RNA, 19 nt, Artificial Sequence
  Description of Artificial Sequence: Synthetic oligonucleotide
aaugaucuaugaggucaaa

SEQ ID NO: 807250 - RNA, 19 nt, Artificial Sequence
  Description of Artificial Sequence: Synthetic oligonucleotide
cacgaggaguuccuuugac

SEQ ID NO: 807251 - RNA, 19 nt, Artificial Sequence
  Description of Artificial Sequence: Synthetic oligonucleotide
agacuagggcuaaagucca

SEQ ID NO: 807252 - RNA, 19 nt, Artificial Sequence
  Description of Artificial Sequence: Synthetic oligonucleotide
gacgaggagagggaagcuc

SEQ ID NO: 807253 - RNA, 19 nt, Artificial Sequence
  Description of Artificial Sequence: Synthetic oligonucleotide
ggacccaggauuaaacuuc

SEQ ID NO: 807254 - RNA, 19 nt, Artificial Sequence
  Description of Artificial Sequence: Synthetic oligonucleotide
uggucaucgcauugagcuc

SEQ ID NO: 807255 - RNA, 19 nt, Artificial Sequence
  Description of Artificial Sequence: Synthetic oligonucleotide
aguuuucagacuagggcua

SEQ ID NO: 807256 - RNA, 19 nt, Artificial Sequence
  Description of Artificial Sequence: Synthetic oligonucleotide
caccugauaucauggggca

SEQ ID NO: 807257 - RNA, 19 nt, Artificial Sequence
  Description of Artificial Sequence: Synthetic oligonucleotide
guacacucggugcccaaca

SEQ ID NO: 807258 - RNA, 19 nt, Artificial Sequence
  Description of Artificial Sequence: Synthetic oligonucleotide
uuggaaugaaacggcccaa

SEQ ID NO: 807259 - RNA, 19 nt, Artificial Sequence
  Description of Artificial Sequence: Synthetic oligonucleotide
gcaacagcucaaugauggg

SEQ ID NO: 807260 - RNA, 19 nt, Artificial Sequence
  Description of Artificial Sequence: Synthetic oligonucleotide
agcaugguucacccugcgu

SEQ ID NO: 807261 - RNA, 19 nt, Artificial Sequence
  Description of Artificial Sequence: Synthetic oligonucleotide
cguaacauccccuggacca

SEQ ID NO: 807262 - RNA, 19 nt, Artificial Sequence
  Description of Artificial Sequence: Synthetic oligonucleotide
cgguugaguguccauaccg

SEQ ID NO: 807263 - RNA, 19 nt, Artificial Sequence
  Description of Artificial Sequence: Synthetic oligonucleotide
ugcuguugguggucaucgc

SEQ ID NO: 807264 - RNA, 19 nt, Artificial Sequence
  Description of Artificial Sequence: Synthetic oligonucleotide
ggggaggcauuccuauccg

SEQ ID NO: 807265 - RNA, 19 nt, Artificial Sequence
  Description of Artificial Sequence: Synthetic oligonucleotide
gcacaucuaucugacguag

SEQ ID NO: 807266 - RNA, 19 nt, Artificial Sequence
  Description of Artificial Sequence: Synthetic oligonucleotide
ucguugccaggacuagaaa

SEQ ID NO: 807267 - RNA, 19 nt, Artificial Sequence
  Description of Artificial Sequence: Synthetic oligonucleotide
cguugccaggacuagaaac

SEQ ID NO: 807268 - RNA, 19 nt, Artificial Sequence
  Description of Artificial Sequence: Synthetic oligonucleotide
uccuauccgugggaggaga

SEQ ID NO: 807269 - RNA, 19 nt, Artificial Sequence
  Description of Artificial Sequence: Synthetic oligonucleotide
acggcuugucuucucccga

SEQ ID NO: 807270 - RNA, 19 nt, Artificial Sequence
  Description of Artificial Sequence: Synthetic oligonucleotide
uuagccccucacacagagu

SEQ ID NO: 807271 - RNA, 19 nt, Artificial Sequence
  Description of Artificial Sequence: Synthetic oligonucleotide
gcaaacaaggguccauguc

SEQ ID NO: 807272 - RNA, 19 nt, Artificial Sequence
  Description of Artificial Sequence: Synthetic oligonucleotide
caaaggaagaccgugucau

SEQ ID NO: 807273 - RNA, 19 nt, Artificial Sequence
  Description of Artificial Sequence: Synthetic oligonucleotide
augguugauuagccccuca

SEQ ID NO: 807274 - RNA, 19 nt, Artificial Sequence
  Description of Artificial Sequence: Synthetic oligonucleotide
uuccuauccgugggaggag

SEQ ID NO: 807275 - RNA, 19 nt, Artificial Sequence
  Description of Artificial Sequence: Synthetic oligonucleotide
uguccaacgcaaggacaca

SEQ ID NO: 807276 - RNA, 19 nt, Artificial Sequence
  Description of Artificial Sequence: Synthetic oligonucleotide
uauagccaccaaagaugua

SEQ ID NO: 807277 - RNA, 19 nt, Artificial Sequence
  Description of Artificial Sequence: Synthetic oligonucleotide
caccguaacauccccugga

SEQ ID NO: 807278 - RNA, 19 nt, Artificial Sequence
  Description of Artificial Sequence: Synthetic oligonucleotide
guucacccugcguggcccg

SEQ ID NO: 807279 - RNA, 19 nt, Artificial Sequence
  Description of Artificial Sequence: Synthetic oligonucleotide
guugcaggccccuucugua

SEQ ID NO: 807280 - RNA, 19 nt, Artificial Sequence
  Description of Artificial Sequence: Synthetic oligonucleotide
ggguguagaccacuuguga

SEQ ID NO: 807281 - RNA, 19 nt, Artificial Sequence
  Description of Artificial Sequence: Synthetic oligonucleotide
uuccugacacucggggugu

SEQ ID NO: 807282 - RNA, 19 nt, Artificial Sequence
  Description of Artificial Sequence: Synthetic oligonucleotide
acuccacguggagguauac

SEQ ID NO: 807283 - RNA, 19 nt, Artificial Sequence
  Description of Artificial Sequence: Synthetic oligonucleotide
auugagcucccaccugaua

SEQ ID NO: 807284 - RNA, 19 nt, Artificial Sequence
  Description of Artificial Sequence: Synthetic oligonucleotide
cccgaaggaguacacucgg

SEQ ID NO: 807285 - RNA, 19 nt, Artificial Sequence
  Description of Artificial Sequence: Synthetic oligonucleotide
cgaaggaguacacucggug

SEQ ID NO: 807286 - RNA, 19 nt, Artificial Sequence
  Description of Artificial Sequence: Synthetic oligonucleotide
ccccgaaggaguacacucg

SEQ ID NO: 807287 - RNA, 19 nt, Artificial Sequence
  Description of Artificial Sequence: Synthetic oligonucleotide
gagggguuucaugccaaca

SEQ ID NO: 807288 - RNA, 19 nt, Artificial Sequence
  Description of Artificial Sequence: Synthetic oligonucleotide
guuacccuuugugcaaaca

SEQ ID NO: 807289 - RNA, 19 nt, Artificial Sequence
  Description of Artificial Sequence: Synthetic oligonucleotide
caccgcagcaugguucacc

SEQ ID NO: 807290 - RNA, 19 nt, Artificial Sequence
  Description of Artificial Sequence: Synthetic oligonucleotide
ugcguggcccgcccuccag

SEQ ID NO: 807291 - RNA, 19 nt, Artificial Sequence
  Description of Artificial Sequence: Synthetic oligonucleotide
ggagguauacugaguccag

SEQ ID NO: 807292 - RNA, 19 nt, Artificial Sequence
  Description of Artificial Sequence: Synthetic oligonucleotide
caaagacucgaauucgguu

SEQ ID NO: 807293 - RNA, 19 nt, Artificial Sequence
  Description of Artificial Sequence: Synthetic oligonucleotide
gguauacugaguccagggu

SEQ ID NO: 807294 - RNA, 19 nt, Artificial Sequence
  Description of Artificial Sequence: Synthetic oligonucleotide
gacguugcaggccccuucu

SEQ ID NO: 807295 - RNA, 19 nt, Artificial Sequence
  Description of Artificial Sequence: Synthetic oligonucleotide
agaggacguugcaggcccc

SEQ ID NO: 807296 - RNA, 19 nt, Artificial Sequence
  Description of Artificial Sequence: Synthetic oligonucleotide
acugacgccggcggggaca

SEQ ID NO: 807297 - RNA, 19 nt, Artificial Sequence
  Description of Artificial Sequence: Synthetic oligonucleotide
acguagugucucguagucu

SEQ ID NO: 807298 - RNA, 19 nt, Artificial Sequence
  Description of Artificial Sequence: Synthetic oligonucleotide
agacaggcaggggcaauga

SEQ ID NO: 807299 - RNA, 19 nt, Artificial Sequence
  Description of Artificial Sequence: Synthetic oligonucleotide
ccagcgugcaggguuaccc

SEQ ID NO: 807300 - RNA, 19 nt, Artificial Sequence
  Description of Artificial Sequence: Synthetic oligonucleotide
uaccgcauauaggguacaa

SEQ ID NO: 807301 - RNA, 19 nt, Artificial Sequence
  Description of Artificial Sequence: Synthetic oligonucleotide
gaagugccgguucagccuu

SEQ ID NO: 807302 - RNA, 19 nt, Artificial Sequence
  Description of Artificial Sequence: Synthetic oligonucleotide
ccucugcuaccuaggacag

SEQ ID NO: 807303 - RNA, 19 nt, Artificial Sequence
  Description of Artificial Sequence: Synthetic oligonucleotide
acggcccaaagcggucagc

SEQ ID NO: 807304 - RNA, 19 nt, Artificial Sequence
  Description of Artificial Sequence: Synthetic oligonucleotide
gacaggcaggggcaaugaa

SEQ ID NO: 807305 - RNA, 19 nt, Artificial Sequence
  Description of Artificial Sequence: Synthetic oligonucleotide
caccaacaauacagcaaca

SEQ ID NO: 807306 - RNA, 19 nt, Artificial Sequence
  Description of Artificial Sequence: Synthetic oligonucleotide
ggggcccucggcccaaggg

SEQ ID NO: 807307 - RNA, 19 nt, Artificial Sequence
  Description of Artificial Sequence: Synthetic oligonucleotide
gguucacccugcguggccc

SEQ ID NO: 807308 - RNA, 19 nt, Artificial Sequence
  Description of Artificial Sequence: Synthetic oligonucleotide
aucugacguagugucucgu

SEQ ID NO: 807309 - RNA, 19 nt, Artificial Sequence
  Description of Artificial Sequence: Synthetic oligonucleotide
gcgcccaccccaaaggaag

SEQ ID NO: 807310 - RNA, 19 nt, Artificial Sequence
  Description of Artificial Sequence: Synthetic oligonucleotide
ccaacgcaaggacacagca

SEQ ID NO: 807311 - RNA, 19 nt, Artificial Sequence
  Description of Artificial Sequence: Synthetic oligonucleotide
caugguugauuagccccuc

SEQ ID NO: 807312 - RNA, 19 nt, Artificial Sequence
  Description of Artificial Sequence: Synthetic oligonucleotide
cugauccguugucccuggg

SEQ ID NO: 807313 - RNA, 19 nt, Artificial Sequence
  Description of Artificial Sequence: Synthetic oligonucleotide
ggaagugccgguucagccu

SEQ ID NO: 807314 - RNA, 19 nt, Artificial Sequence
  Description of Artificial Sequence: Synthetic oligonucleotide
aacuccacguggagguaua

SEQ ID NO: 807315 - RNA, 19 nt, Artificial Sequence
  Description of Artificial Sequence: Synthetic oligonucleotide
acguugcaggccccuucug

SEQ ID NO: 807316 - RNA, 19 nt, Artificial Sequence
  Description of Artificial Sequence: Synthetic oligonucleotide
auaccgcauauaggguaca

SEQ ID NO: 807317 - RNA, 19 nt, Artificial Sequence
  Description of Artificial Sequence: Synthetic oligonucleotide
guaaaggacccaggauuaa

SEQ ID NO: 807318 - RNA, 19 nt, Artificial Sequence
  Description of Artificial Sequence: Synthetic oligonucleotide
gguggucaucgcauugagc

SEQ ID NO: 807319 - RNA, 19 nt, Artificial Sequence
  Description of Artificial Sequence: Synthetic oligonucleotide
aucauugcgcccaccccaa

SEQ ID NO: 807320 - RNA, 19 nt, Artificial Sequence
  Description of Artificial Sequence: Synthetic oligonucleotide
ccguaacauccccuggacc

SEQ ID NO: 807321 - RNA, 19 nt, Artificial Sequence
  Description of Artificial Sequence: Synthetic oligonucleotide
uccagcgugcaggguuacc

SEQ ID NO: 807322 - RNA, 19 nt, Artificial Sequence
  Description of Artificial Sequence: Synthetic oligonucleotide
gguucagccuugcauuaua

SEQ ID NO: 807323 - RNA, 19 nt, Artificial Sequence
  Description of Artificial Sequence: Synthetic oligonucleotide
aggccuuccucgggagagg

SEQ ID NO: 807324 - RNA, 19 nt, Artificial Sequence
  Description of Artificial Sequence: Synthetic oligonucleotide
cuauccgugggaggagaca

SEQ ID NO: 807325 - RNA, 19 nt, Artificial Sequence
  Description of Artificial Sequence: Synthetic oligonucleotide
ccauaccgcauauagggua

SEQ ID NO: 807326 - RNA, 19 nt, Artificial Sequence
  Description of Artificial Sequence: Synthetic oligonucleotide
caacacggcuugucuucuc

SEQ ID NO: 807327 - RNA, 19 nt, Artificial Sequence
  Description of Artificial Sequence: Synthetic oligonucleotide
ggcauuccuauccguggga

SEQ ID NO: 807328 - RNA, 19 nt, Artificial Sequence
  Description of Artificial Sequence: Synthetic oligonucleotide
ggggcaaacaggacugguc

SEQ ID NO: 807329 - RNA, 19 nt, Artificial Sequence
  Description of Artificial Sequence: Synthetic oligonucleotide
cuguaucauugcgcccacc

SEQ ID NO: 807330 - RNA, 19 nt, Artificial Sequence
  Description of Artificial Sequence: Synthetic oligonucleotide
gacaauggggcggcugaua

SEQ ID NO: 807331 - RNA, 19 nt, Artificial Sequence
  Description of Artificial Sequence: Synthetic oligonucleotide
cagcucaaugaugggagaa

SEQ ID NO: 807332 - RNA, 19 nt, Artificial Sequence
  Description of Artificial Sequence: Synthetic oligonucleotide
acguggagguauacugagu

SEQ ID NO: 807333 - RNA, 19 nt, Artificial Sequence
  Description of Artificial Sequence: Synthetic oligonucleotide
ccaccguaacauccccugg

SEQ ID NO: 807334 - RNA, 19 nt, Artificial Sequence
  Description of Artificial Sequence: Synthetic oligonucleotide
ucacccugcguggcccgcc

SEQ ID NO: 807335 - RNA, 19 nt, Artificial Sequence
  Description of Artificial Sequence: Synthetic oligonucleotide
acacugacgccggcgggga

SEQ ID NO: 807336 - RNA, 19 nt, Artificial Sequence
  Description of Artificial Sequence: Synthetic oligonucleotide
cacucgggguguagaccac

SEQ ID NO: 807337 - RNA, 19 nt, Artificial Sequence
  Description of Artificial Sequence: Synthetic oligonucleotide
uucacccugcguggcccgc

SEQ ID NO: 807338 - RNA, 19 nt, Artificial Sequence
  Description of Artificial Sequence: Synthetic oligonucleotide
cuccccauuguagccaaaa

SEQ ID NO: 807339 - RNA, 19 nt, Artificial Sequence
  Description of Artificial Sequence: Synthetic oligonucleotide
agacucgaauucgguugca

SEQ ID NO: 807340 - RNA, 19 nt, Artificial Sequence
  Description of Artificial Sequence: Synthetic oligonucleotide
caccucuaguccaccaacu

SEQ ID NO: 807341 - RNA, 19 nt, Artificial Sequence
  Description of Artificial Sequence: Synthetic oligonucleotide
ggacguugcaggccccuuc

SEQ ID NO: 807342 - RNA, 19 nt, Artificial Sequence
  Description of Artificial Sequence: Synthetic oligonucleotide
gaaucacggccagcuugca

SEQ ID NO: 807343 - RNA, 19 nt, Artificial Sequence
  Description of Artificial Sequence: Synthetic oligonucleotide
ucccgggcaggugcucaag

SEQ ID NO: 807344 - RNA, 19 nt, Artificial Sequence
  Description of Artificial Sequence: Synthetic oligonucleotide
cccgaagaggacaaucuua

SEQ ID NO: 807345 - RNA, 19 nt, Artificial Sequence
  Description of Artificial Sequence: Synthetic oligonucleotide
ccuauccgugggaggagac

SEQ ID NO: 807346 - RNA, 19 nt, Artificial Sequence
  Description of Artificial Sequence: Synthetic oligonucleotide
uaccuaggacagggaacuc

SEQ ID NO: 807347 - RNA, 19 nt, Artificial Sequence
  Description of Artificial Sequence: Synthetic oligonucleotide
gaauucgguugcaguaaau

SEQ ID NO: 807348 - RNA, 19 nt, Artificial Sequence
  Description of Artificial Sequence: Synthetic oligonucleotide
aagugccgguucagccuug

SEQ ID NO: 807349 - RNA, 19 nt, Artificial Sequence
  Description of Artificial Sequence: Synthetic oligonucleotide
cacccugcguggcccgccc

SEQ ID NO: 807350 - RNA, 19 nt, Artificial Sequence
  Description of Artificial Sequence: Synthetic oligonucleotide
ucaucgcauugagcuccca

SEQ ID NO: 807351 - RNA, 19 nt, Artificial Sequence
  Description of Artificial Sequence: Synthetic oligonucleotide
caacgcaaggacacagcau

SEQ ID NO: 807352 - RNA, 19 nt, Artificial Sequence
  Description of Artificial Sequence: Synthetic oligonucleotide
ccgaagaggacaaucuuau

SEQ ID NO: 807353 - RNA, 19 nt, Artificial Sequence
  Description of Artificial Sequence: Synthetic oligonucleotide
ggaggggaggcauuccuau

SEQ ID NO: 807354 - RNA, 19 nt, Artificial Sequence
  Description of Artificial Sequence: Synthetic oligonucleotide
ccaagauguguaagucaga

SEQ ID NO: 807355 - RNA, 19 nt, Artificial Sequence
  Description of Artificial Sequence: Synthetic oligonucleotide
cugcuaccuaggacaggga

SEQ ID NO: 807356 - RNA, 19 nt, Artificial Sequence
  Description of Artificial Sequence: Synthetic oligonucleotide
ccaggacuagaaacugcca

SEQ ID NO: 807357 - RNA, 19 nt, Artificial Sequence
  Description of Artificial Sequence: Synthetic oligonucleotide
gccgguucagccuugcauu

SEQ ID NO: 807358 - RNA, 19 nt, Artificial Sequence
  Description of Artificial Sequence: Synthetic oligonucleotide
cacucccgagggccgggug

SEQ ID NO: 807359 - RNA, 19 nt, Artificial Sequence
  Description of Artificial Sequence: Synthetic oligonucleotide
cgaagaggacaaucuuauc

SEQ ID NO: 807360 - RNA, 19 nt, Artificial Sequence
  Description of Artificial Sequence: Synthetic oligonucleotide
cucaagcagggagagggau

SEQ ID NO: 807361 - RNA, 19 nt, Artificial Sequence
  Description of Artificial Sequence: Synthetic oligonucleotide
cccucggacagcaggccuc

SEQ ID NO: 807362 - RNA, 19 nt, Artificial Sequence
  Description of Artificial Sequence: Synthetic oligonucleotide
cauugagcucccaccugau

SEQ ID NO: 807363 - RNA, 19 nt, Artificial Sequence
  Description of Artificial Sequence: Synthetic oligonucleotide
cuccaacacggcuugucuu

SEQ ID NO: 807364 - RNA, 19 nt, Artificial Sequence
  Description of Artificial Sequence: Synthetic oligonucleotide
acccaggauuaaacuucca

SEQ ID NO: 807365 - RNA, 19 nt, Artificial Sequence
  Description of Artificial Sequence: Synthetic oligonucleotide
cccgggcaggugcucaagc

SEQ ID NO: 807366 - RNA, 19 nt, Artificial Sequence
  Description of Artificial Sequence: Synthetic oligonucleotide
ccaugguugauuagccccu

SEQ ID NO: 807367 - RNA, 19 nt, Artificial Sequence
  Description of Artificial Sequence: Synthetic oligonucleotide
caggacugguccagguuau

SEQ ID NO: 807368 - RNA, 19 nt, Artificial Sequence
  Description of Artificial Sequence: Synthetic oligonucleotide
ccugcgccccucaggcagc

SEQ ID NO: 807369 - RNA, 19 nt, Artificial Sequence
  Description of Artificial Sequence: Synthetic oligonucleotide
cacugacgccggcggggac

SEQ ID NO: 807370 - RNA, 19 nt, Artificial Sequence
  Description of Artificial Sequence: Synthetic oligonucleotide
auccgugggaggagacaau

SEQ ID NO: 807371 - RNA, 19 nt, Artificial Sequence
  Description of Artificial Sequence: Synthetic oligonucleotide
cuccagcgugcaggguuac

SEQ ID NO: 807372 - RNA, 19 nt, Artificial Sequence
  Description of Artificial Sequence: Synthetic oligonucleotide
gugccgguucagccuugca

SEQ ID NO: 807373 - RNA, 19 nt, Artificial Sequence
  Description of Artificial Sequence: Synthetic oligonucleotide
ggugggccgcggguccucg

SEQ ID NO: 807374 - RNA, 19 nt, Artificial Sequence
  Description of Artificial Sequence: Synthetic oligonucleotide
ggaccacaaguuacaggaa

SEQ ID NO: 807375 - RNA, 19 nt, Artificial Sequence
  Description of Artificial Sequence: Synthetic oligonucleotide
cccuuuccccuuugguuca

SEQ ID NO: 807376 - RNA, 19 nt, Artificial Sequence
  Description of Artificial Sequence: Synthetic oligonucleotide
acccugcguggcccgcccu

SEQ ID NO: 807377 - RNA, 19 nt, Artificial Sequence
  Description of Artificial Sequence: Synthetic oligonucleotide
cggcuugucuucucccgac

SEQ ID NO: 807378 - RNA, 19 nt, Artificial Sequence
  Description of Artificial Sequence: Synthetic oligonucleotide
gccuuccucgggagagggg

SEQ ID NO: 807379 - RNA, 19 nt, Artificial Sequence
  Description of Artificial Sequence: Synthetic oligonucleotide
cuccacguggagguauacu

SEQ ID NO: 807380 - RNA, 19 nt, Artificial Sequence
  Description of Artificial Sequence: Synthetic oligonucleotide
ggcuugucuucucccgacu

SEQ ID NO: 807381 - RNA, 19 nt, Artificial Sequence
  Description of Artificial Sequence: Synthetic oligonucleotide
gggaggcauuccuauccgu

SEQ ID NO: 807382 - RNA, 19 nt, Artificial Sequence
  Description of Artificial Sequence: Synthetic oligonucleotide
cgaauucgguugcaguaaa

SEQ ID NO: 807383 - RNA, 19 nt, Artificial Sequence
  Description of Artificial Sequence: Synthetic oligonucleotide
ccccggcacggccugcugc

SEQ ID NO: 807384 - RNA, 19 nt, Artificial Sequence
  Description of Artificial Sequence: Synthetic oligonucleotide
cucccgggcaggugcucaa

SEQ ID NO: 807385 - RNA, 19 nt, Artificial Sequence
  Description of Artificial Sequence: Synthetic oligonucleotide
gcccaccccaaaggaagac

SEQ ID NO: 807386 - RNA, 19 nt, Artificial Sequence
  Description of Artificial Sequence: Synthetic oligonucleotide
ccccaaaggaagaccgugu

SEQ ID NO: 807387 - RNA, 19 nt, Artificial Sequence
  Description of Artificial Sequence: Synthetic oligonucleotide
cucggacagcaggccucac

SEQ ID NO: 807388 - RNA, 19 nt, Artificial Sequence
  Description of Artificial Sequence: Synthetic oligonucleotide
cgggguguagaccacuugu

SEQ ID NO: 807389 - RNA, 19 nt, Artificial Sequence
  Description of Artificial Sequence: Synthetic oligonucleotide
ccgguucagccuugcauua

SEQ ID NO: 807390 - RNA, 19 nt, Artificial Sequence
  Description of Artificial Sequence: Synthetic oligonucleotide
ccgugucaucgaugaggac

SEQ ID NO: 807391 - RNA, 19 nt, Artificial Sequence
  Description of Artificial Sequence: Synthetic oligonucleotide
gcggggacauggcccuuuc

SEQ ID NO: 807392 - RNA, 19 nt, Artificial Sequence
  Description of Artificial Sequence: Synthetic oligonucleotide
ccuccagcgugcaggguua

SEQ ID NO: 807393 - RNA, 19 nt, Artificial Sequence
  Description of Artificial Sequence: Synthetic oligonucleotide
aggcuccaacacggcuugu

SEQ ID NO: 807394 - RNA, 19 nt, Artificial Sequence
  Description of Artificial Sequence: Synthetic oligonucleotide
cugcguggcccgcccucca

SEQ ID NO: 807395 - RNA, 19 nt, Artificial Sequence
  Description of Artificial Sequence: Synthetic oligonucleotide
gcguggcccgcccuccaga

SEQ ID NO: 807396 - RNA, 19 nt, Artificial Sequence
  Description of Artificial Sequence: Synthetic oligonucleotide
gcgccccucaggcagcacu

SEQ ID NO: 807397 - RNA, 19 nt, Artificial Sequence
  Description of Artificial Sequence: Synthetic oligonucleotide
gcccucggacagcaggccu

SEQ ID NO: 807398 - RNA, 19 nt, Artificial Sequence
  Description of Artificial Sequence: Synthetic oligonucleotide
ccgaaggaguacacucggu

SEQ ID NO: 807399 - RNA, 19 nt, Artificial Sequence
  Description of Artificial Sequence: Synthetic oligonucleotide
ugacgccggcggggacaug

SEQ ID NO: 807400 - RNA, 19 nt, Artificial Sequence
  Description of Artificial Sequence: Synthetic oligonucleotide
cugcgccccucaggcagca

SEQ ID NO: 807401 - RNA, 19 nt, Artificial Sequence
  Description of Artificial Sequence: Synthetic oligonucleotide
cccucggcccaagggagga

SEQ ID NO: 807402 - RNA, 19 nt, Artificial Sequence
  Description of Artificial Sequence: Synthetic oligonucleotide
cugacgccggcggggacau

SEQ ID NO: 807403 - RNA, 19 nt, Artificial Sequence
  Description of Artificial Sequence: Synthetic oligonucleotide
ccguugucccuggggucac

SEQ ID NO: 807404 - RNA, 19 nt, Artificial Sequence
  Description of Artificial Sequence: Synthetic oligonucleotide
ccauguaaccaugguugau

SEQ ID NO: 807405 - RNA, 19 nt, Artificial Sequence
  Description of Artificial Sequence: Synthetic oligonucleotide
cgggccccaggaacuguuc

SEQ ID NO: 807406 - RNA, 19 nt, Artificial Sequence
  Description of Artificial Sequence: Synthetic oligonucleotide
ccccgaagaggacaaucuu

SEQ ID NO: 807407 - RNA, 19 nt, Artificial Sequence
  Description of Artificial Sequence: Synthetic oligonucleotide
gcgugcaggguuacccuuu

SEQ ID NO: 807408 - RNA, 19 nt, Artificial Sequence
  Description of Artificial Sequence: Synthetic oligonucleotide
ccaccgcagcaugguucac

SEQ ID NO: 807409 - RNA, 19 nt, Artificial Sequence
  Description of Artificial Sequence: Synthetic oligonucleotide
ggcccgcccuccagaugca

SEQ ID NO: 807410 - RNA, 19 nt, Artificial Sequence
  Description of Artificial Sequence: Synthetic oligonucleotide
cguggcccgcccuccagau

SEQ ID NO: 807411 - RNA, 19 nt, Artificial Sequence
  Description of Artificial Sequence: Synthetic oligonucleotide
ccgcagcaugguucacccu

SEQ ID NO: 807412 - RNA, 19 nt, Artificial Sequence
  Description of Artificial Sequence: Synthetic oligonucleotide
cgguucagccuugcauuau

SEQ ID NO: 807413 - RNA, 19 nt, Artificial Sequence
  Description of Artificial Sequence: Synthetic oligonucleotide
ccacucccgagggccgggu

SEQ ID NO: 807414 - RNA, 19 nt, Artificial Sequence
  Description of Artificial Sequence: Synthetic oligonucleotide
cguugucccuggggucacu

SEQ ID NO: 807415 - RNA, 19 nt, Artificial Sequence
  Description of Artificial Sequence: Synthetic oligonucleotide
cggcggggacauggcccuu

SEQ ID NO: 807416 - RNA, 19 nt, Artificial Sequence
  Description of Artificial Sequence: Synthetic oligonucleotide
uuugucucgauuuugacgg

SEQ ID NO: 807417 - RNA, 19 nt, Artificial Sequence
  Description of Artificial Sequence: Synthetic oligonucleotide
uuuuagguuaaucugcucc

SEQ ID NO: 807418 - RNA, 19 nt, Artificial Sequence
  Description of Artificial Sequence: Synthetic oligonucleotide
gacaacacugcucaaaggg

SEQ ID NO: 807419 - RNA, 19 nt, Artificial Sequence
  Description of Artificial Sequence: Synthetic oligonucleotide
aaagaucuggccuaacauc

SEQ ID NO: 807420 - RNA, 19 nt, Artificial Sequence
  Description of Artificial Sequence: Synthetic oligonucleotide
acaauuacagaaaugcagc

SEQ ID NO: 807421 - RNA, 19 nt, Artificial Sequence
  Description of Artificial Sequence: Synthetic oligonucleotide
acugcgaucacccuuggac

SEQ ID NO: 807422 - RNA, 19 nt, Artificial Sequence
  Description of Artificial Sequence: Synthetic oligonucleotide
uggacuauaaaaucugugc

SEQ ID NO: 807423 - RNA, 19 nt, Artificial Sequence
  Description of Artificial Sequence: Synthetic oligonucleotide
uaacaguagacacauccgg

SEQ ID NO: 807424 - RNA, 19 nt, Artificial Sequence
  Description of Artificial Sequence: Synthetic oligonucleotide
aaugcagcacgagugaucg

SEQ ID NO: 807425 - RNA, 19 nt, Artificial Sequence
  Description of Artificial Sequence: Synthetic oligonucleotide
aggacuucaaguuaucuag

SEQ ID NO: 807426 - RNA, 19 nt, Artificial Sequence
  Description of Artificial Sequence: Synthetic oligonucleotide
ucaucuaaggcuuuggagu

SEQ ID NO: 807427 - RNA, 19 nt, Artificial Sequence
  Description of Artificial Sequence: Synthetic oligonucleotide
uguaaauaagccauacagu

SEQ ID NO: 807428 - RNA, 19 nt, Artificial Sequence
  Description of Artificial Sequence: Synthetic oligonucleotide
ucgauuuugacggaguagg

SEQ ID NO: 807429 - RNA, 19 nt, Artificial Sequence
  Description of Artificial Sequence: Synthetic oligonucleotide
accugcauagaguagacuc

SEQ ID NO: 807430 - RNA, 19 nt, Artificial Sequence
  Description of Artificial Sequence: Synthetic oligonucleotide
uuauggacaguacagcucu

SEQ ID NO: 807431 - RNA, 19 nt, Artificial Sequence
  Description of Artificial Sequence: Synthetic oligonucleotide
gacuauaaaaucugugccc

SEQ ID NO: 807432 - RNA, 19 nt, Artificial Sequence
  Description of Artificial Sequence: Synthetic oligonucleotide
aaaagaucuggccuaacau

SEQ ID NO: 807433 - RNA, 19 nt, Artificial Sequence
  Description of Artificial Sequence: Synthetic oligonucleotide
uguuaauccccaguuaagg

SEQ ID NO: 807434 - RNA, 19 nt, Artificial Sequence
  Description of Artificial Sequence: Synthetic oligonucleotide
aguguuggggagcucaccc

SEQ ID NO: 807435 - RNA, 19 nt, Artificial Sequence
  Description of Artificial Sequence: Synthetic oligonucleotide
aaccugucgagaucauucc

SEQ ID NO: 807436 - RNA, 19 nt, Artificial Sequence
  Description of Artificial Sequence: Synthetic oligonucleotide
uuuagguuaaucugcuccc

SEQ ID NO: 807437 - RNA, 19 nt, Artificial Sequence
  Description of Artificial Sequence: Synthetic oligonucleotide
uuuuguuuuguuuuguuuu

SEQ ID NO: 807438 - RNA, 19 nt, Artificial Sequence
  Description of Artificial Sequence: Synthetic oligonucleotide
uucaucuaaggcuuuggag

SEQ ID NO: 807439 - RNA, 19 nt, Artificial Sequence
  Description of Artificial Sequence: Synthetic oligonucleotide
ucuuccuaacaguagacac

SEQ ID NO: 807440 - RNA, 19 nt, Artificial Sequence
  Description of Artificial Sequence: Synthetic oligonucleotide
ugugguaacaauugcaauu

SEQ ID NO: 807441 - RNA, 19 nt, Artificial Sequence
  Description of Artificial Sequence: Synthetic oligonucleotide
cagaaaugcagcacgagug

SEQ ID NO: 807442 - RNA, 19 nt, Artificial Sequence
  Description of Artificial Sequence: Synthetic oligonucleotide
ugugaagucccgcucucgg

SEQ ID NO: 807443 - RNA, 19 nt, Artificial Sequence
  Description of Artificial Sequence: Synthetic oligonucleotide
uccgacaggucuuugagga

SEQ ID NO: 807444 - RNA, 19 nt, Artificial Sequence
  Description of Artificial Sequence: Synthetic oligonucleotide
aaagcucaaguguuuauua

SEQ ID NO: 807445 - RNA, 19 nt, Artificial Sequence
  Description of Artificial Sequence: Synthetic oligonucleotide
ucaagucugacuccacuug

SEQ ID NO: 807446 - RNA, 19 nt, Artificial Sequence
  Description of Artificial Sequence: Synthetic oligonucleotide
auuuugacggaguaggcaa

SEQ ID NO: 807447 - RNA, 19 nt, Artificial Sequence
  Description of Artificial Sequence: Synthetic oligonucleotide
uuuauggacaguacagcuc

SEQ ID NO: 807448 - RNA, 19 nt, Artificial Sequence
  Description of Artificial Sequence: Synthetic oligonucleotide
uaauccccaguuaaggcca

SEQ ID NO: 807449 - RNA, 19 nt, Artificial Sequence
  Description of Artificial Sequence: Synthetic oligonucleotide
gucgagaucauuccucagg

SEQ ID NO: 807450 - RNA, 19 nt, Artificial Sequence
  Description of Artificial Sequence: Synthetic oligonucleotide
guuaauccccaguuaaggc

SEQ ID NO: 807451 - RNA, 19 nt, Artificial Sequence
  Description of Artificial Sequence: Synthetic oligonucleotide
aaauccuuuauggacagua

SEQ ID NO: 807452 - RNA, 19 nt, Artificial Sequence
  Description of Artificial Sequence: Synthetic oligonucleotide
auagaguagacuccguccu

SEQ ID NO: 807453 - RNA, 19 nt, Artificial Sequence
  Description of Artificial Sequence: Synthetic oligonucleotide
gaugugugguaacaauugc

SEQ ID NO: 807454 - RNA, 19 nt, Artificial Sequence
  Description of Artificial Sequence: Synthetic oligonucleotide
aaggaugugaagucccgcu

SEQ ID NO: 807455 - RNA, 19 nt, Artificial Sequence
  Description of Artificial Sequence: Synthetic oligonucleotide
agcgauuccagacucucag

SEQ ID NO: 807456 - RNA, 19 nt, Artificial Sequence
  Description of Artificial Sequence: Synthetic oligonucleotide
guagacuccguccucuacg

SEQ ID NO: 807457 - RNA, 19 nt, Artificial Sequence
  Description of Artificial Sequence: Synthetic oligonucleotide
aauccuuuauggacaguac

SEQ ID NO: 807458 - RNA, 19 nt, Artificial Sequence
  Description of Artificial Sequence: Synthetic oligonucleotide
agccauacaguucauuuca

SEQ ID NO: 807459 - RNA, 19 nt, Artificial Sequence
  Description of Artificial Sequence: Synthetic oligonucleotide
acuauaaaaucugugcccu

SEQ ID NO: 807460 - RNA, 19 nt, Artificial Sequence
  Description of Artificial Sequence: Synthetic oligonucleotide
ggacuauaaaaucugugcc

SEQ ID NO: 807461 - RNA, 19 nt, Artificial Sequence
  Description of Artificial Sequence: Synthetic oligonucleotide
ucuacguacugcagccugg

SEQ ID NO: 807462 - RNA, 19 nt, Artificial Sequence
  Description of Artificial Sequence: Synthetic oligonucleotide
ucgagaucauuccucaggu

SEQ ID NO: 807463 - RNA, 19 nt, Artificial Sequence
  Description of Artificial Sequence: Synthetic oligonucleotide
ucgaccguguucuccaagg

SEQ ID NO: 807464 - RNA, 19 nt, Artificial Sequence
  Description of Artificial Sequence: Synthetic oligonucleotide
aacuggacuauaaaaucug

SEQ ID NO: 807465 - RNA, 19 nt, Artificial Sequence
  Description of Artificial Sequence: Synthetic oligonucleotide
ucaucuugacaucauuuau

SEQ ID NO: 807466 - RNA, 19 nt, Artificial Sequence
  Description of Artificial Sequence: Synthetic oligonucleotide
uccucuacguacugcagcc

SEQ ID NO: 807467 - RNA, 19 nt, Artificial Sequence
  Description of Artificial Sequence: Synthetic oligonucleotide
uguccaaauccuuuaugga

SEQ ID NO: 807468 - RNA, 19 nt, Artificial Sequence
  Description of Artificial Sequence: Synthetic oligonucleotide
guagacaucggacuccaug

SEQ ID NO: 807469 - RNA, 19 nt, Artificial Sequence
  Description of Artificial Sequence: Synthetic oligonucleotide
uggaguucaucuaaggcuu

SEQ ID NO: 807470 - RNA, 19 nt, Artificial Sequence
  Description of Artificial Sequence: Synthetic oligonucleotide
ggaguaggcaaccaaacug

SEQ ID NO: 807471 - RNA, 19 nt, Artificial Sequence
  Description of Artificial Sequence: Synthetic oligonucleotide
uuacagaaaugcagcacga

SEQ ID NO: 807472 - RNA, 19 nt, Artificial Sequence
  Description of Artificial Sequence: Synthetic oligonucleotide
caucacaacuuucuuuuag

SEQ ID NO: 807473 - RNA, 19 nt, Artificial Sequence
  Description of Artificial Sequence: Synthetic oligonucleotide
auacuccuggcucuuggac

SEQ ID NO: 807474 - RNA, 19 nt, Artificial Sequence
  Description of Artificial Sequence: Synthetic oligonucleotide
caaccugucgagaucauuc

SEQ ID NO: 807475 - RNA, 19 nt, Artificial Sequence
  Description of Artificial Sequence: Synthetic oligonucleotide
ucacaacuuucuuuuaggu

SEQ ID NO: 807476 - RNA, 19 nt, Artificial Sequence
  Description of Artificial Sequence: Synthetic oligonucleotide
aauugcaauuuuguuuugu

SEQ ID NO: 807477 - RNA, 19 nt, Artificial Sequence
  Description of Artificial Sequence: Synthetic oligonucleotide
gaccucuucaggaauacug

SEQ ID NO: 807478 - RNA, 19 nt, Artificial Sequence
  Description of Artificial Sequence: Synthetic oligonucleotide
uugguucauagaaacugga

SEQ ID NO: 807479 - RNA, 19 nt, Artificial Sequence
  Description of Artificial Sequence: Synthetic oligonucleotide
acaguagacacauccggcu

SEQ ID NO: 807480 - RNA, 19 nt, Artificial Sequence
  Description of Artificial Sequence: Synthetic oligonucleotide
aaaccaaagauguguggua

SEQ ID NO: 807481 - RNA, 19 nt, Artificial Sequence
  Description of Artificial Sequence: Synthetic oligonucleotide
aaaugcagcacgagugauc

SEQ ID NO: 807482 - RNA, 19 nt, Artificial Sequence
  Description of Artificial Sequence: Synthetic oligonucleotide
cagaacuucgcugauccgg

SEQ ID NO: 807483 - RNA, 19 nt, Artificial Sequence
  Description of Artificial Sequence: Synthetic oligonucleotide
uuaugcugagagcuucuca

SEQ ID NO: 807484 - RNA, 19 nt, Artificial Sequence
  Description of Artificial Sequence: Synthetic oligonucleotide
ggagucuuugaagacaacg

SEQ ID NO: 807485 - RNA, 19 nt, Artificial Sequence
  Description of Artificial Sequence: Synthetic oligonucleotide
ucgcugauccgguugaucu

SEQ ID NO: 807486 - RNA, 19 nt, Artificial Sequence
  Description of Artificial Sequence: Synthetic oligonucleotide
cauaacaaagcucaagugu

SEQ ID NO: 807487 - RNA, 19 nt, Artificial Sequence
  Description of Artificial Sequence: Synthetic oligonucleotide
ucugcucccuguuaauccc

SEQ ID NO: 807488 - RNA, 19 nt, Artificial Sequence
  Description of Artificial Sequence: Synthetic oligonucleotide
uguggcgugcagaagcuac

SEQ ID NO: 807489 - RNA, 19 nt, Artificial Sequence
  Description of Artificial Sequence: Synthetic oligonucleotide
acgagugaucgucacugac

SEQ ID NO: 807490 - RNA, 19 nt, Artificial Sequence
  Description of Artificial Sequence: Synthetic oligonucleotide
aagcuaccugcauagagua

SEQ ID NO: 807491 - RNA, 19 nt, Artificial Sequence
  Description of Artificial Sequence: Synthetic oligonucleotide
accaaagaugugugguaac

SEQ ID NO: 807492 - RNA, 19 nt, Artificial Sequence
  Description of Artificial Sequence: Synthetic oligonucleotide
cuggacuauaaaaucugug

SEQ ID NO: 807493 - RNA, 19 nt, Artificial Sequence
  Description of Artificial Sequence: Synthetic oligonucleotide
auccuuuauggacaguaca

SEQ ID NO: 807494 - RNA, 19 nt, Artificial Sequence
  Description of Artificial Sequence: Synthetic oligonucleotide
aagcucaaguguuuauuaa

SEQ ID NO: 807495 - RNA, 19 nt, Artificial Sequence
  Description of Artificial Sequence: Synthetic oligonucleotide
gucauaacaaagcucaagu

SEQ ID NO: 807496 - RNA, 19 nt, Artificial Sequence
  Description of Artificial Sequence: Synthetic oligonucleotide
aggauggacucgaaagucc

SEQ ID NO: 807497 - RNA, 19 nt, Artificial Sequence
  Description of Artificial Sequence: Synthetic oligonucleotide
gauccgguugaucucacuc

SEQ ID NO: 807498 - RNA, 19 nt, Artificial Sequence
  Description of Artificial Sequence: Synthetic oligonucleotide
auaacaaagcucaaguguu

SEQ ID NO: 807499 - RNA, 19 nt, Artificial Sequence
  Description of Artificial Sequence: Synthetic oligonucleotide
ucgggcauccuuuaccaca

SEQ ID NO: 807500 - RNA, 19 nt, Artificial Sequence
  Description of Artificial Sequence: Synthetic oligonucleotide
agacaacacugcucaaagg

SEQ ID NO: 807501 - RNA, 19 nt, Artificial Sequence
  Description of Artificial Sequence: Synthetic oligonucleotide
ccaguuaaggccauugccc

SEQ ID NO: 807502 - RNA, 19 nt, Artificial Sequence
  Description of Artificial Sequence: Synthetic oligonucleotide
ucucgggcauccuuuacca

SEQ ID NO: 807503 - RNA, 19 nt, Artificial Sequence
  Description of Artificial Sequence: Synthetic oligonucleotide
augaaucuuuucaacuuuc

SEQ ID NO: 807504 - RNA, 19 nt, Artificial Sequence
  Description of Artificial Sequence: Synthetic oligonucleotide
caggauuucagaaaccaaa

SEQ ID NO: 807505 - RNA, 19 nt, Artificial Sequence
  Description of Artificial Sequence: Synthetic oligonucleotide
cuguuaauccccaguuaag

SEQ ID NO: 807506 - RNA, 19 nt, Artificial Sequence
  Description of Artificial Sequence: Synthetic oligonucleotide
uagguuaaucugcucccug

SEQ ID NO: 807507 - RNA, 19 nt, Artificial Sequence
  Description of Artificial Sequence: Synthetic oligonucleotide
aaguccugaggaggcaugg

SEQ ID NO: 807508 - RNA, 19 nt, Artificial Sequence
  Description of Artificial Sequence: Synthetic oligonucleotide
cuguacaucggugaagaug

SEQ ID NO: 807509 - RNA, 19 nt, Artificial Sequence
  Description of Artificial Sequence: Synthetic oligonucleotide
ucgaugucccucucccugg

SEQ ID NO: 807510 - RNA, 19 nt, Artificial Sequence
  Description of Artificial Sequence: Synthetic oligonucleotide
gauuuugacggaguaggca

SEQ ID NO: 807511 - RNA, 19 nt, Artificial Sequence
  Description of Artificial Sequence: Synthetic oligonucleotide
uguuuaugcugagagcuuc

SEQ ID NO: 807512 - RNA, 19 nt, Artificial Sequence
  Description of Artificial Sequence: Synthetic oligonucleotide
aguucaucuaaggcuuugg

SEQ ID NO: 807513 - RNA, 19 nt, Artificial Sequence
  Description of Artificial Sequence: Synthetic oligonucleotide
aagaugugugguaacaauu

SEQ ID NO: 807514 - RNA, 19 nt, Artificial Sequence
  Description of Artificial Sequence: Synthetic oligonucleotide
ugcagaagcuaccugcaua

SEQ ID NO: 807515 - RNA, 19 nt, Artificial Sequence
  Description of Artificial Sequence: Synthetic oligonucleotide
uuuugacggaguaggcaac

SEQ ID NO: 807516 - RNA, 19 nt, Artificial Sequence
  Description of Artificial Sequence: Synthetic oligonucleotide
cugcauagaguagacuccg

SEQ ID NO: 807517 - RNA, 19 nt, Artificial Sequence
  Description of Artificial Sequence: Synthetic oligonucleotide
uccggcugggccuucagga

SEQ ID NO: 807518 - RNA, 19 nt, Artificial Sequence
  Description of Artificial Sequence: Synthetic oligonucleotide
gaaaccaaagauguguggu

SEQ ID NO: 807519 - RNA, 19 nt, Artificial Sequence
  Description of Artificial Sequence: Synthetic oligonucleotide
gguaacaauugcaauuuug

SEQ ID NO: 807520 - RNA, 19 nt, Artificial Sequence
  Description of Artificial Sequence: Synthetic oligonucleotide
caggcguugcucauacucc

SEQ ID NO: 807521 - RNA, 19 nt, Artificial Sequence
  Description of Artificial Sequence: Synthetic oligonucleotide
uuugacggaguaggcaacc

SEQ ID NO: 807522 - RNA, 19 nt, Artificial Sequence
  Description of Artificial Sequence: Synthetic oligonucleotide
cuggcucuuggacaggagc

SEQ ID NO: 807523 - RNA, 19 nt, Artificial Sequence
  Description of Artificial Sequence: Synthetic oligonucleotide
ucaaucugccucuggaguu

SEQ ID NO: 807524 - RNA, 19 nt, Artificial Sequence
  Description of Artificial Sequence: Synthetic oligonucleotide
acaggagcgauuccagacu

SEQ ID NO: 807525 - RNA, 19 nt, Artificial Sequence
  Description of Artificial Sequence: Synthetic oligonucleotide
agguuaaucugcucccugu

SEQ ID NO: 807526 - RNA, 19 nt, Artificial Sequence
  Description of Artificial Sequence: Synthetic oligonucleotide
acauggaucccauccgaca

SEQ ID NO: 807527 - RNA, 19 nt, Artificial Sequence
  Description of Artificial Sequence: Synthetic oligonucleotide
ggacuguaccuucugcucg

SEQ ID NO: 807528 - RNA, 19 nt, Artificial Sequence
  Description of Artificial Sequence: Synthetic oligonucleotide
auccgacaggucuuugagg

SEQ ID NO: 807529 - RNA, 19 nt, Artificial Sequence
  Description of Artificial Sequence: Synthetic oligonucleotide
guuaucuagagaggagagc

SEQ ID NO: 807530 - RNA, 19 nt, Artificial Sequence
  Description of Artificial Sequence: Synthetic oligonucleotide
uggacaguacagcucugac

SEQ ID NO: 807531 - RNA, 19 nt, Artificial Sequence
  Description of Artificial Sequence: Synthetic oligonucleotide
accuaggcccucaaucugc

SEQ ID NO: 807532 - RNA, 19 nt, Artificial Sequence
  Description of Artificial Sequence: Synthetic oligonucleotide
ugaucucacucuccccuug

SEQ ID NO: 807533 - RNA, 19 nt, Artificial Sequence
  Description of Artificial Sequence: Synthetic oligonucleotide
ugcucgacgcccugcaggc

SEQ ID NO: 807534 - RNA, 19 nt, Artificial Sequence
  Description of Artificial Sequence: Synthetic oligonucleotide
uccauggucugaagggaac

SEQ ID NO: 807535 - RNA, 19 nt, Artificial Sequence
  Description of Artificial Sequence: Synthetic oligonucleotide
accguguucuccaaggaug

SEQ ID NO: 807536 - RNA, 19 nt, Artificial Sequence
  Description of Artificial Sequence: Synthetic oligonucleotide
ucccuguuaauccccaguu

SEQ ID NO: 807537 - RNA, 19 nt, Artificial Sequence
  Description of Artificial Sequence: Synthetic oligonucleotide
caaacaaccugucgagauc

SEQ ID NO: 807538 - RNA, 19 nt, Artificial Sequence
  Description of Artificial Sequence: Synthetic oligonucleotide
gcacaagcaguucauuuag

SEQ ID NO: 807539 - RNA, 19 nt, Artificial Sequence
  Description of Artificial Sequence: Synthetic oligonucleotide
uccucgaccguguucucca

SEQ ID NO: 807540 - RNA, 19 nt, Artificial Sequence
  Description of Artificial Sequence: Synthetic oligonucleotide
ugucucgauuuugacggag

SEQ ID NO: 807541 - RNA, 19 nt, Artificial Sequence
  Description of Artificial Sequence: Synthetic oligonucleotide
uccgguugaucucacucuc

SEQ ID NO: 807542 - RNA, 19 nt, Artificial Sequence
  Description of Artificial Sequence: Synthetic oligonucleotide
auccgguugaucucacucu

SEQ ID NO: 807543 - RNA, 19 nt, Artificial Sequence
  Description of Artificial Sequence: Synthetic oligonucleotide
ugaucgucacugacagaug

SEQ ID NO: 807544 - RNA, 19 nt, Artificial Sequence
  Description of Artificial Sequence: Synthetic oligonucleotide
uccugagcauuuucaaguc

SEQ ID NO: 807545 - RNA, 19 nt, Artificial Sequence
  Description of Artificial Sequence: Synthetic oligonucleotide
ucggugaagauggcaaugu

SEQ ID NO: 807546 - RNA, 19 nt, Artificial Sequence
  Description of Artificial Sequence: Synthetic oligonucleotide
ggaggcaaccuucaucuug

SEQ ID NO: 807547 - RNA, 19 nt, Artificial Sequence
  Description of Artificial Sequence: Synthetic oligonucleotide
ucaggaauacugugauaaa

SEQ ID NO: 807548 - RNA, 19 nt, Artificial Sequence
  Description of Artificial Sequence: Synthetic oligonucleotide
gcagccauuaaagacaaca

SEQ ID NO: 807549 - RNA, 19 nt, Artificial Sequence
  Description of Artificial Sequence: Synthetic oligonucleotide
acagauggggccaggcgac

SEQ ID NO: 807550 - RNA, 19 nt, Artificial Sequence
  Description of Artificial Sequence: Synthetic oligonucleotide
uuagguuaaucugcucccu

SEQ ID NO: 807551 - RNA, 19 nt, Artificial Sequence
  Description of Artificial Sequence: Synthetic oligonucleotide
cucgauuuugacggaguag

SEQ ID NO: 807552 - RNA, 19 nt, Artificial Sequence
  Description of Artificial Sequence: Synthetic oligonucleotide
ucaaagaggccuguaccuc

SEQ ID NO: 807553 - RNA, 19 nt, Artificial Sequence
  Description of Artificial Sequence: Synthetic oligonucleotide
cacguugcuggucagcauc

SEQ ID NO: 807554 - RNA, 19 nt, Artificial Sequence
  Description of Artificial Sequence: Synthetic oligonucleotide
ugucgagaucauuccucag

SEQ ID NO: 807555 - RNA, 19 nt, Artificial Sequence
  Description of Artificial Sequence: Synthetic oligonucleotide
ggccuaacaucucccaggg

SEQ ID NO: 807556 - RNA, 19 nt, Artificial Sequence
  Description of Artificial Sequence: Synthetic oligonucleotide
guucaucuaaggcuuugga

SEQ ID NO: 807557 - RNA, 19 nt, Artificial Sequence
  Description of Artificial Sequence: Synthetic oligonucleotide
acaucggacuccauggucu

SEQ ID NO: 807558 - RNA, 19 nt, Artificial Sequence
  Description of Artificial Sequence: Synthetic oligonucleotide
cccaaauguggcuugcagg

SEQ ID NO: 807559 - RNA, 19 nt, Artificial Sequence
  Description of Artificial Sequence: Synthetic oligonucleotide
guaggcaaccaaacugucc

SEQ ID NO: 807560 - RNA, 19 nt, Artificial Sequence
  Description of Artificial Sequence: Synthetic oligonucleotide
ugcgaucacccuuggacuc

SEQ ID NO: 807561 - RNA, 19 nt, Artificial Sequence
  Description of Artificial Sequence: Synthetic oligonucleotide
acugaggacuucaaguuau

SEQ ID NO: 807562 - RNA, 19 nt, Artificial Sequence
  Description of Artificial Sequence: Synthetic oligonucleotide
ugagugcaccuguucuugc

SEQ ID NO: 807563 - RNA, 19 nt, Artificial Sequence
  Description of Artificial Sequence: Synthetic oligonucleotide
ccugcauagaguagacucc

SEQ ID NO: 807564 - RNA, 19 nt, Artificial Sequence
  Description of Artificial Sequence: Synthetic oligonucleotide
gaaugccuguugcuccugc

SEQ ID NO: 807565 - RNA, 19 nt, Artificial Sequence
  Description of Artificial Sequence: Synthetic oligonucleotide
cuguagcuccuucacguug

SEQ ID NO: 807566 - RNA, 19 nt, Artificial Sequence
  Description of Artificial Sequence: Synthetic oligonucleotide
cuuuuagguuaaucugcuc

SEQ ID NO: 807567 - RNA, 19 nt, Artificial Sequence
  Description of Artificial Sequence: Synthetic oligonucleotide
gaugugaagucccgcucuc

SEQ ID NO: 807568 - RNA, 19 nt, Artificial Sequence
  Description of Artificial Sequence: Synthetic oligonucleotide
gaagcuaccugcauagagu

SEQ ID NO: 807569 - RNA, 19 nt, Artificial Sequence
  Description of Artificial Sequence: Synthetic oligonucleotide
agaguagacuccguccucu

SEQ ID NO: 807570 - RNA, 19 nt, Artificial Sequence
  Description of Artificial Sequence: Synthetic oligonucleotide
agugagugcaccuguucuu

SEQ ID NO: 807571 - RNA, 19 nt, Artificial Sequence
  Description of Artificial Sequence: Synthetic oligonucleotide
guaccuucugcucgacgcc

SEQ ID NO: 807572 - RNA, 19 nt, Artificial Sequence
  Description of Artificial Sequence: Synthetic oligonucleotide
uccccaguuaaggccauug

SEQ ID NO: 807573 - RNA, 19 nt, Artificial Sequence
  Description of Artificial Sequence: Synthetic oligonucleotide
cauuaaagacaacacugcu

SEQ ID NO: 807574 - RNA, 19 nt, Artificial Sequence
  Description of Artificial Sequence: Synthetic oligonucleotide
uagaguagacuccguccuc

SEQ ID NO: 807575 - RNA, 19 nt, Artificial Sequence
  Description of Artificial Sequence: Synthetic oligonucleotide
cacauggaucccauccgac

SEQ ID NO: 807576 - RNA, 19 nt, Artificial Sequence
  Description of Artificial Sequence: Synthetic oligonucleotide
gaggcucacuagcucccgg

SEQ ID NO: 807577 - RNA, 19 nt, Artificial Sequence
  Description of Artificial Sequence: Synthetic oligonucleotide
gacuguaccuucugcucga

SEQ ID NO: 807578 - RNA, 19 nt, Artificial Sequence
  Description of Artificial Sequence: Synthetic oligonucleotide
aucggugaagauggcaaug

SEQ ID NO: 807579 - RNA, 19 nt, Artificial Sequence
  Description of Artificial Sequence: Synthetic oligonucleotide
uuuaugcugagagcuucuc

SEQ ID NO: 807580 - RNA, 19 nt, Artificial Sequence
  Description of Artificial Sequence: Synthetic oligonucleotide
acaguacagcucugacauc

SEQ ID NO: 807581 - RNA, 19 nt, Artificial Sequence
  Description of Artificial Sequence: Synthetic oligonucleotide
cccaguuaaggccauugcc

SEQ ID NO: 807582 - RNA, 19 nt, Artificial Sequence
  Description of Artificial Sequence: Synthetic oligonucleotide
gugaucgucacugacagau

SEQ ID NO: 807583 - RNA, 19 nt, Artificial Sequence
  Description of Artificial Sequence: Synthetic oligonucleotide
aggcguugcucauacuccu

SEQ ID NO: 807584 - RNA, 19 nt, Artificial Sequence
  Description of Artificial Sequence: Synthetic oligonucleotide
ugcauagaguagacuccgu

SEQ ID NO: 807585 - RNA, 19 nt, Artificial Sequence
  Description of Artificial Sequence: Synthetic oligonucleotide
agacucucaguguggcgug

SEQ ID NO: 807586 - RNA, 19 nt, Artificial Sequence
  Description of Artificial Sequence: Synthetic oligonucleotide
acuggacuauaaaaucugu

SEQ ID NO: 807587 - RNA, 19 nt, Artificial Sequence
  Description of Artificial Sequence: Synthetic oligonucleotide
gaguucaucuaaggcuuug

SEQ ID NO: 807588 - RNA, 19 nt, Artificial Sequence
  Description of Artificial Sequence: Synthetic oligonucleotide
ggcaccuaggcccucaauc

SEQ ID NO: 807589 - RNA, 19 nt, Artificial Sequence
  Description of Artificial Sequence: Synthetic oligonucleotide
cugucgagaucauuccuca

SEQ ID NO: 807590 - RNA, 19 nt, Artificial Sequence
  Description of Artificial Sequence: Synthetic oligonucleotide
agacaucggacuccauggu

SEQ ID NO: 807591 - RNA, 19 nt, Artificial Sequence
  Description of Artificial Sequence: Synthetic oligonucleotide
agaacuucgcugauccggu

SEQ ID NO: 807592 - RNA, 19 nt, Artificial Sequence
  Description of Artificial Sequence: Synthetic oligonucleotide
caaggaugugaagucccgc

SEQ ID NO: 807593 - RNA, 19 nt, Artificial Sequence
  Description of Artificial Sequence: Synthetic oligonucleotide
accugucgagaucauuccu

SEQ ID NO: 807594 - RNA, 19 nt, Artificial Sequence
  Description of Artificial Sequence: Synthetic oligonucleotide
cgugagguccuguuuaugc

SEQ ID NO: 807595 - RNA, 19 nt, Artificial Sequence
  Description of Artificial Sequence: Synthetic oligonucleotide
gaacuuucagguccugacu

SEQ ID NO: 807596 - RNA, 19 nt, Artificial Sequence
  Description of Artificial Sequence: Synthetic oligonucleotide
gacacauccggcugggccu

SEQ ID NO: 807597 - RNA, 19 nt, Artificial Sequence
  Description of Artificial Sequence: Synthetic oligonucleotide
gugagugcaccuguucuug

SEQ ID NO: 807598 - RNA, 19 nt, Artificial Sequence
  Description of Artificial Sequence: Synthetic oligonucleotide
auggucugaagggaacucu

SEQ ID NO: 807599 - RNA, 19 nt, Artificial Sequence
  Description of Artificial Sequence: Synthetic oligonucleotide
uaccuucugcucgacgccc

SEQ ID NO: 807600 - RNA, 19 nt, Artificial Sequence
  Description of Artificial Sequence: Synthetic oligonucleotide
gagaccucuucaggaauac

SEQ ID NO: 807601 - RNA, 19 nt, Artificial Sequence
  Description of Artificial Sequence: Synthetic oligonucleotide
gcguugcucauacuccugg

SEQ ID NO: 807602 - RNA, 19 nt, Artificial Sequence
  Description of Artificial Sequence: Synthetic oligonucleotide
gacggaguaggcaaccaaa

SEQ ID NO: 807603 - RNA, 19 nt, Artificial Sequence
  Description of Artificial Sequence: Synthetic oligonucleotide
caggagcgauuccagacuc

SEQ ID NO: 807604 - RNA, 19 nt, Artificial Sequence
  Description of Artificial Sequence: Synthetic oligonucleotide
augugaagucccgcucucg

SEQ ID NO: 807605 - RNA, 19 nt, Artificial Sequence
  Description of Artificial Sequence: Synthetic oligonucleotide
agcacgagugaucgucacu

SEQ ID NO: 807606 - RNA, 19 nt, Artificial Sequence
  Description of Artificial Sequence: Synthetic oligonucleotide
agcucugacaucacaacuu

SEQ ID NO: 807607 - RNA, 19 nt, Artificial Sequence
  Description of Artificial Sequence: Synthetic oligonucleotide
ggauggacucgaaaguccc

SEQ ID NO: 807608 - RNA, 19 nt, Artificial Sequence
  Description of Artificial Sequence: Synthetic oligonucleotide
gcacgagugaucgucacug

SEQ ID NO: 807609 - RNA, 19 nt, Artificial Sequence
  Description of Artificial Sequence: Synthetic oligonucleotide
cuacguacugcagccuggc

SEQ ID NO: 807610 - RNA, 19 nt, Artificial Sequence
  Description of Artificial Sequence: Synthetic oligonucleotide
gcuaccugcauagaguaga

SEQ ID NO: 807611 - RNA, 19 nt, Artificial Sequence
  Description of Artificial Sequence: Synthetic oligonucleotide
cugcucccuguuaaucccc

SEQ ID NO: 807612 - RNA, 19 nt, Artificial Sequence
  Description of Artificial Sequence: Synthetic oligonucleotide
ccaaggaugugaagucccg

SEQ ID NO: 807613 - RNA, 19 nt, Artificial Sequence
  Description of Artificial Sequence: Synthetic oligonucleotide
uugacggaguaggcaacca

SEQ ID NO: 807614 - RNA, 19 nt, Artificial Sequence
  Description of Artificial Sequence: Synthetic oligonucleotide
ggacaguacagcucugaca

SEQ ID NO: 807615 - RNA, 19 nt, Artificial Sequence
  Description of Artificial Sequence: Synthetic oligonucleotide
gaugucugccgggaggcga

SEQ ID NO: 807616 - RNA, 19 nt, Artificial Sequence
  Description of Artificial Sequence: Synthetic oligonucleotide
auggacaguacagcucuga

SEQ ID NO: 807617 - RNA, 19 nt, Artificial Sequence
  Description of Artificial Sequence: Synthetic oligonucleotide
auggacucgaaagucccaa

SEQ ID NO: 807618 - RNA, 19 nt, Artificial Sequence
  Description of Artificial Sequence: Synthetic oligonucleotide
ucccggaccucuguguaga

SEQ ID NO: 807619 - RNA, 19 nt, Artificial Sequence
  Description of Artificial Sequence: Synthetic oligonucleotide
gcauagaguagacuccguc

SEQ ID NO: 807620 - RNA, 19 nt, Artificial Sequence
  Description of Artificial Sequence: Synthetic oligonucleotide
uggacucgaaagucccaaa

SEQ ID NO: 807621 - RNA, 19 nt, Artificial Sequence
  Description of Artificial Sequence: Synthetic oligonucleotide
cauggucugaagggaacuc

SEQ ID NO: 807622 - RNA, 19 nt, Artificial Sequence
  Description of Artificial Sequence: Synthetic oligonucleotide
uugucucgauuuugacgga

SEQ ID NO: 807623 - RNA, 19 nt, Artificial Sequence
  Description of Artificial Sequence: Synthetic oligonucleotide
caccuaggcccucaaucug

SEQ ID NO: 807624 - RNA, 19 nt, Artificial Sequence
  Description of Artificial Sequence: Synthetic oligonucleotide
ccugucgagaucauuccuc

SEQ ID NO: 807625 - RNA, 19 nt, Artificial Sequence
  Description of Artificial Sequence: Synthetic oligonucleotide
ccuguuaauccccaguuaa

SEQ ID NO: 807626 - RNA, 19 nt, Artificial Sequence
  Description of Artificial Sequence: Synthetic oligonucleotide
caaagaugugugguaacaa

SEQ ID NO: 807627 - RNA, 19 nt, Artificial Sequence
  Description of Artificial Sequence: Synthetic oligonucleotide
ugauccgguugaucucacu

SEQ ID NO: 807628 - RNA, 19 nt, Artificial Sequence
  Description of Artificial Sequence: Synthetic oligonucleotide
cucgacgcccugcaggcuc

SEQ ID NO: 807629 - RNA, 19 nt, Artificial Sequence
  Description of Artificial Sequence: Synthetic oligonucleotide
uccgugagguccuguuuau

SEQ ID NO: 807630 - RNA, 19 nt, Artificial Sequence
  Description of Artificial Sequence: Synthetic oligonucleotide
uccguccucuacguacugc

SEQ ID NO: 807631 - RNA, 19 nt, Artificial Sequence
  Description of Artificial Sequence: Synthetic oligonucleotide
ucuguacaucggugaagau

SEQ ID NO: 807632 - RNA, 19 nt, Artificial Sequence
  Description of Artificial Sequence: Synthetic oligonucleotide
caacggccuccucugcucc

SEQ ID NO: 807633 - RNA, 19 nt, Artificial Sequence
  Description of Artificial Sequence: Synthetic oligonucleotide
ggacaaggcagccauuaaa

SEQ ID NO: 807634 - RNA, 19 nt, Artificial Sequence
  Description of Artificial Sequence: Synthetic oligonucleotide
aggcgcucugagucugccg

SEQ ID NO: 807635 - RNA, 19 nt, Artificial Sequence
  Description of Artificial Sequence: Synthetic oligonucleotide
acuguaccuucugcucgac

SEQ ID NO: 807636 - RNA, 19 nt, Artificial Sequence
  Description of Artificial Sequence: Synthetic oligonucleotide
caguuaaggccauugcccu

SEQ ID NO: 807637 - RNA, 19 nt, Artificial Sequence
  Description of Artificial Sequence: Synthetic oligonucleotide
agugaucgucacugacaga

SEQ ID NO: 807638 - RNA, 19 nt, Artificial Sequence
  Description of Artificial Sequence: Synthetic oligonucleotide
uccgucaggcgcuccucga

SEQ ID NO: 807639 - RNA, 19 nt, Artificial Sequence
  Description of Artificial Sequence: Synthetic oligonucleotide
aguguggcgugcagaagcu

SEQ ID NO: 807640 - RNA, 19 nt, Artificial Sequence
  Description of Artificial Sequence: Synthetic oligonucleotide
ugaaugccuguugcuccug

SEQ ID NO: 807641 - RNA, 19 nt, Artificial Sequence
  Description of Artificial Sequence: Synthetic oligonucleotide
uggcgugcagaagcuaccu

SEQ ID NO: 807642 - RNA, 19 nt, Artificial Sequence
  Description of Artificial Sequence: Synthetic oligonucleotide
uucucaggauggacucgaa

SEQ ID NO: 807643 - RNA, 19 nt, Artificial Sequence
  Description of Artificial Sequence: Synthetic oligonucleotide
acugacagauggggccagg

SEQ ID NO: 807644 - RNA, 19 nt, Artificial Sequence
  Description of Artificial Sequence: Synthetic oligonucleotide
uucgcugauccgguugauc

SEQ ID NO: 807645 - RNA, 19 nt, Artificial Sequence
  Description of Artificial Sequence: Synthetic oligonucleotide
uaccugcauagaguagacu

SEQ ID NO: 807646 - RNA, 19 nt, Artificial Sequence
  Description of Artificial Sequence: Synthetic oligonucleotide
gguccugacugcgaucacc

SEQ ID NO: 807647 - RNA, 19 nt, Artificial Sequence
  Description of Artificial Sequence: Synthetic oligonucleotide
ggucugaagggaacucugc

SEQ ID NO: 807648 - RNA, 19 nt, Artificial Sequence
  Description of Artificial Sequence: Synthetic oligonucleotide
gacaacggccuccucugcu

SEQ ID NO: 807649 - RNA, 19 nt, Artificial Sequence
  Description of Artificial Sequence: Synthetic oligonucleotide
aagucccgcucucgggcau

SEQ ID NO: 807650 - RNA, 19 nt, Artificial Sequence
  Description of Artificial Sequence: Synthetic oligonucleotide
cagcacgagugaucgucac

SEQ ID NO: 807651 - RNA, 19 nt, Artificial Sequence
  Description of Artificial Sequence: Synthetic oligonucleotide
auacuguaaauaagccaua

SEQ ID NO: 807652 - RNA, 19 nt, Artificial Sequence
  Description of Artificial Sequence: Synthetic oligonucleotide
ucacguugcuggucagcau

SEQ ID NO: 807653 - RNA, 19 nt, Artificial Sequence
  Description of Artificial Sequence: Synthetic oligonucleotide
uccuaacaguagacacauc

SEQ ID NO: 807654 - RNA, 19 nt, Artificial Sequence
  Description of Artificial Sequence: Synthetic oligonucleotide
agcuaccugcauagaguag

SEQ ID NO: 807655 - RNA, 19 nt, Artificial Sequence
  Description of Artificial Sequence: Synthetic oligonucleotide
guggcgugcagaagcuacc

SEQ ID NO: 807656 - RNA, 19 nt, Artificial Sequence
  Description of Artificial Sequence: Synthetic oligonucleotide
cucgggcauccuuuaccac

SEQ ID NO: 807657 - RNA, 19 nt, Artificial Sequence
  Description of Artificial Sequence: Synthetic oligonucleotide
cugauccgguugaucucac

SEQ ID NO: 807658 - RNA, 19 nt, Artificial Sequence
  Description of Artificial Sequence: Synthetic oligonucleotide
uccugacugcgaucacccu

SEQ ID NO: 807659 - RNA, 19 nt, Artificial Sequence
  Description of Artificial Sequence: Synthetic oligonucleotide
uguagacaucggacuccau

SEQ ID NO: 807660 - RNA, 19 nt, Artificial Sequence
  Description of Artificial Sequence: Synthetic oligonucleotide
cagugagugcaccuguucu

SEQ ID NO: 807661 - RNA, 19 nt, Artificial Sequence
  Description of Artificial Sequence: Synthetic oligonucleotide
cagacucucaguguggcgu

SEQ ID NO: 807662 - RNA, 19 nt, Artificial Sequence
  Description of Artificial Sequence: Synthetic oligonucleotide
cugcgaucacccuuggacu

SEQ ID NO: 807663 - RNA, 19 nt, Artificial Sequence
  Description of Artificial Sequence: Synthetic oligonucleotide
cacaaacaaccugucgaga

SEQ ID NO: 807664 - RNA, 19 nt, Artificial Sequence
  Description of Artificial Sequence: Synthetic oligonucleotide
acguugcuggucagcauca

SEQ ID NO: 807665 - RNA, 19 nt, Artificial Sequence
  Description of Artificial Sequence: Synthetic oligonucleotide
aggcagccauuaaagacaa

SEQ ID NO: 807666 - RNA, 19 nt, Artificial Sequence
  Description of Artificial Sequence: Synthetic oligonucleotide
ggaugugaagucccgcucu

SEQ ID NO: 807667 - RNA, 19 nt, Artificial Sequence
  Description of Artificial Sequence: Synthetic oligonucleotide
gugugguaacaauugcaau

SEQ ID NO: 807668 - RNA, 19 nt, Artificial Sequence
  Description of Artificial Sequence: Synthetic oligonucleotide
ggcgacaggagaccucuuc

SEQ ID NO: 807669 - RNA, 19 nt, Artificial Sequence
  Description of Artificial Sequence: Synthetic oligonucleotide
cgauuuugacggaguaggc

SEQ ID NO: 807670 - RNA, 19 nt, Artificial Sequence
  Description of Artificial Sequence: Synthetic oligonucleotide
cgguugaucucacucuccc

SEQ ID NO: 807671 - RNA, 19 nt, Artificial Sequence
  Description of Artificial Sequence: Synthetic oligonucleotide
gcugauccgguugaucuca

SEQ ID NO: 807672 - RNA, 19 nt, Artificial Sequence
  Description of Artificial Sequence: Synthetic oligonucleotide
guugcuccugcuugaggcu

SEQ ID NO: 807673 - RNA, 19 nt, Artificial Sequence
  Description of Artificial Sequence: Synthetic oligonucleotide
gcagugagugcaccuguuc

SEQ ID NO: 807674 - RNA, 19 nt, Artificial Sequence
  Description of Artificial Sequence: Synthetic oligonucleotide
gagcgauuccagacucuca

SEQ ID NO: 807675 - RNA, 19 nt, Artificial Sequence
  Description of Artificial Sequence: Synthetic oligonucleotide
gacugcgaucacccuugga

SEQ ID NO: 807676 - RNA, 19 nt, Artificial Sequence
  Description of Artificial Sequence: Synthetic oligonucleotide
acucucaguguggcgugca

SEQ ID NO: 807677 - RNA, 19 nt, Artificial Sequence
  Description of Artificial Sequence: Synthetic oligonucleotide
agaucagaggagggcccca

SEQ ID NO: 807678 - RNA, 19 nt, Artificial Sequence
  Description of Artificial Sequence: Synthetic oligonucleotide
gaguagacuccguccucua

SEQ ID NO: 807679 - RNA, 19 nt, Artificial Sequence
  Description of Artificial Sequence: Synthetic oligonucleotide
gcaccuaggcccucaaucu

SEQ ID NO: 807680 - RNA, 19 nt, Artificial Sequence
  Description of Artificial Sequence: Synthetic oligonucleotide
ggcucacuagcucccggac

SEQ ID NO: 807681 - RNA, 19 nt, Artificial Sequence
  Description of Artificial Sequence: Synthetic oligonucleotide
guuuaugcugagagcuucu

SEQ ID NO: 807682 - RNA, 19 nt, Artificial Sequence
  Description of Artificial Sequence: Synthetic oligonucleotide
cacgagugaucgucacuga

SEQ ID NO: 807683 - RNA, 19 nt, Artificial Sequence
  Description of Artificial Sequence: Synthetic oligonucleotide
acuagcucccggaccucug

SEQ ID NO: 807684 - RNA, 19 nt, Artificial Sequence
  Description of Artificial Sequence: Synthetic oligonucleotide
ggaggcgagaggaggacuc

SEQ ID NO: 807685 - RNA, 19 nt, Artificial Sequence
  Description of Artificial Sequence: Synthetic oligonucleotide
caaagcucaaguguuuauu

SEQ ID NO: 807686 - RNA, 19 nt, Artificial Sequence
  Description of Artificial Sequence: Synthetic oligonucleotide
ccgguugaucucacucucc

SEQ ID NO: 807687 - RNA, 19 nt, Artificial Sequence
  Description of Artificial Sequence: Synthetic oligonucleotide
ccccaguuaaggccauugc

SEQ ID NO: 807688 - RNA, 19 nt, Artificial Sequence
  Description of Artificial Sequence: Synthetic oligonucleotide
cgagugaucgucacugaca

SEQ ID NO: 807689 - RNA, 19 nt, Artificial Sequence
  Description of Artificial Sequence: Synthetic oligonucleotide
agucccgcucucgggcauc

SEQ ID NO: 807690 - RNA, 19 nt, Artificial Sequence
  Description of Artificial Sequence: Synthetic oligonucleotide
uggcaccuaggcccucaau

SEQ ID NO: 807691 - RNA, 19 nt, Artificial Sequence
  Description of Artificial Sequence: Synthetic oligonucleotide
aggcgagaggaggacuccu

SEQ ID NO: 807692 - RNA, 19 nt, Artificial Sequence
  Description of Artificial Sequence: Synthetic oligonucleotide
gcgagaggaggacuccuca

SEQ ID NO: 807693 - RNA, 19 nt, Artificial Sequence
  Description of Artificial Sequence: Synthetic oligonucleotide
cucccuguuaauccccagu

SEQ ID NO: 807694 - RNA, 19 nt, Artificial Sequence
  Description of Artificial Sequence: Synthetic oligonucleotide
aggagcgauuccagacucu

SEQ ID NO: 807695 - RNA, 19 nt, Artificial Sequence
  Description of Artificial Sequence: Synthetic oligonucleotide
augcagcacgagugaucgu

SEQ ID NO: 807696 - RNA, 19 nt, Artificial Sequence
  Description of Artificial Sequence: Synthetic oligonucleotide
gagagccuguccagaaagu

SEQ ID NO: 807697 - RNA, 19 nt, Artificial Sequence
  Description of Artificial Sequence: Synthetic oligonucleotide
accgcaguccugagcauuu

SEQ ID NO: 807698 - RNA, 19 nt, Artificial Sequence
  Description of Artificial Sequence: Synthetic oligonucleotide
aucggacuccauggucuga

SEQ ID NO: 807699 - RNA, 19 nt, Artificial Sequence
  Description of Artificial Sequence: Synthetic oligonucleotide
cuugcagggacuguaccuu

SEQ ID NO: 807700 - RNA, 19 nt, Artificial Sequence
  Description of Artificial Sequence: Synthetic oligonucleotide
ccucuguguagacaucgga

SEQ ID NO: 807701 - RNA, 19 nt, Artificial Sequence
  Description of Artificial Sequence: Synthetic oligonucleotide
caucggugaagauggcaau

SEQ ID NO: 807702 - RNA, 19 nt, Artificial Sequence
  Description of Artificial Sequence: Synthetic oligonucleotide
cuguuuaugcugagagcuu

SEQ ID NO: 807703 - RNA, 19 nt, Artificial Sequence
  Description of Artificial Sequence: Synthetic oligonucleotide
ggcguugcucauacuccug

SEQ ID NO: 807704 - RNA, 19 nt, Artificial Sequence
  Description of Artificial Sequence: Synthetic oligonucleotide
gcucugacaucacaacuuu

SEQ ID NO: 807705 - RNA, 19 nt, Artificial Sequence
  Description of Artificial Sequence: Synthetic oligonucleotide
ccgccugcuugaaugccug

SEQ ID NO: 807706 - RNA, 19 nt, Artificial Sequence
  Description of Artificial Sequence: Synthetic oligonucleotide
cagcaagcccuuggcugac

SEQ ID NO: 807707 - RNA, 19 nt, Artificial Sequence
  Description of Artificial Sequence: Synthetic oligonucleotide
cuagcucccggaccucugu

SEQ ID NO: 807708 - RNA, 19 nt, Artificial Sequence
  Description of Artificial Sequence: Synthetic oligonucleotide
agcaagcccuuggcugacu

SEQ ID NO: 807709 - RNA, 19 nt, Artificial Sequence
  Description of Artificial Sequence: Synthetic oligonucleotide
ggcgagaggaggacuccuc

SEQ ID NO: 807710 - RNA, 19 nt, Artificial Sequence
  Description of Artificial Sequence: Synthetic oligonucleotide
ccgucaggcgcuccucgac

SEQ ID NO: 807711 - RNA, 19 nt, Artificial Sequence
  Description of Artificial Sequence: Synthetic oligonucleotide
ccguguucuccaaggaugu

SEQ ID NO: 807712 - RNA, 19 nt, Artificial Sequence
  Description of Artificial Sequence: Synthetic oligonucleotide
gcgauuccagacucucagu

SEQ ID NO: 807713 - RNA, 19 nt, Artificial Sequence
  Description of Artificial Sequence: Synthetic oligonucleotide
cgcugauccgguugaucuc

SEQ ID NO: 807714 - RNA, 19 nt, Artificial Sequence
  Description of Artificial Sequence: Synthetic oligonucleotide
gugcccugcacaagcaguu

SEQ ID NO: 807715 - RNA, 19 nt, Artificial Sequence
  Description of Artificial Sequence: Synthetic oligonucleotide
cggaccucuguguagacau

SEQ ID NO: 807716 - RNA, 19 nt, Artificial Sequence
  Description of Artificial Sequence: Synthetic oligonucleotide
agucugccgccugcuugaa

SEQ ID NO: 807717 - RNA, 19 nt, Artificial Sequence
  Description of Artificial Sequence: Synthetic oligonucleotide
gccuaacaucucccaggga

SEQ ID NO: 807718 - RNA, 19 nt, Artificial Sequence
  Description of Artificial Sequence: Synthetic oligonucleotide
cccuguuaauccccaguua

SEQ ID NO: 807719 - RNA, 19 nt, Artificial Sequence
  Description of Artificial Sequence: Synthetic oligonucleotide
cuggcaccuaggcccucaa

SEQ ID NO: 807720 - RNA, 19 nt, Artificial Sequence
  Description of Artificial Sequence: Synthetic oligonucleotide
ccuccaaagccaggcgcuc

SEQ ID NO: 807721 - RNA, 19 nt, Artificial Sequence
  Description of Artificial Sequence: Synthetic oligonucleotide
ccgugagguccuguuuaug

SEQ ID NO: 807722 - RNA, 19 nt, Artificial Sequence
  Description of Artificial Sequence: Synthetic oligonucleotide
ccugacugcgaucacccuu

SEQ ID NO: 807723 - RNA, 19 nt, Artificial Sequence
  Description of Artificial Sequence: Synthetic oligonucleotide
auccccaguuaaggccauu

SEQ ID NO: 807724 - RNA, 19 nt, Artificial Sequence
  Description of Artificial Sequence: Synthetic oligonucleotide
cccggaccucuguguagac

SEQ ID NO: 807725 - RNA, 19 nt, Artificial Sequence
  Description of Artificial Sequence: Synthetic oligonucleotide
gggagauguccaaauccuu

SEQ ID NO: 807726 - RNA, 19 nt, Artificial Sequence
  Description of Artificial Sequence: Synthetic oligonucleotide
ggacuucaaagaggccugu

SEQ ID NO: 807727 - RNA, 19 nt, Artificial Sequence
  Description of Artificial Sequence: Synthetic oligonucleotide
gcgcuccucgaccguguuc

SEQ ID NO: 807728 - RNA, 19 nt, Artificial Sequence
  Description of Artificial Sequence: Synthetic oligonucleotide
cggaguaggcaaccaaacu

SEQ ID NO: 807729 - RNA, 19 nt, Artificial Sequence
  Description of Artificial Sequence: Synthetic oligonucleotide
cguugcuggucagcaucag

SEQ ID NO: 807730 - RNA, 19 nt, Artificial Sequence
  Description of Artificial Sequence: Synthetic oligonucleotide
cgaccguguucuccaagga

SEQ ID NO: 807731 - RNA, 19 nt, Artificial Sequence
  Description of Artificial Sequence: Synthetic oligonucleotide
ccggcugggccuucaggaa

SEQ ID NO: 807732 - RNA, 19 nt, Artificial Sequence
  Description of Artificial Sequence: Synthetic oligonucleotide
cacauccggcugggccuuc

SEQ ID NO: 807733 - RNA, 19 nt, Artificial Sequence
  Description of Artificial Sequence: Synthetic oligonucleotide
gggaggcgagaggaggacu

SEQ ID NO: 807734 - RNA, 19 nt, Artificial Sequence
  Description of Artificial Sequence: Synthetic oligonucleotide
caccgcaguccugagcauu

SEQ ID NO: 807735 - RNA, 19 nt, Artificial Sequence
  Description of Artificial Sequence: Synthetic oligonucleotide
gucugccgccugcuugaau

SEQ ID NO: 807736 - RNA, 19 nt, Artificial Sequence
  Description of Artificial Sequence: Synthetic oligonucleotide
ccggaccucuguguagaca

SEQ ID NO: 807737 - RNA, 19 nt, Artificial Sequence
  Description of Artificial Sequence: Synthetic oligonucleotide
gccaggcgacaggagaccu

SEQ ID NO: 807738 - RNA, 19 nt, Artificial Sequence
  Description of Artificial Sequence: Synthetic oligonucleotide
cuucgcugauccgguugau

SEQ ID NO: 807739 - RNA, 19 nt, Artificial Sequence
  Description of Artificial Sequence: Synthetic oligonucleotide
gggaggcaaccuucaucuu

SEQ ID NO: 807740 - RNA, 19 nt, Artificial Sequence
  Description of Artificial Sequence: Synthetic oligonucleotide
ccucgaccguguucuccaa

SEQ ID NO: 807741 - RNA, 19 nt, Artificial Sequence
  Description of Artificial Sequence: Synthetic oligonucleotide
ccgacaggucuuugaggau

SEQ ID NO: 807742 - RNA, 19 nt, Artificial Sequence
  Description of Artificial Sequence: Synthetic oligonucleotide
ccucuacguacugcagccu

SEQ ID NO: 807743 - RNA, 19 nt, Artificial Sequence
  Description of Artificial Sequence: Synthetic oligonucleotide
cggugaagauggcaauguu

SEQ ID NO: 807744 - RNA, 19 nt, Artificial Sequence
  Description of Artificial Sequence: Synthetic oligonucleotide
gcucgacgcccugcaggcu

SEQ ID NO: 807745 - RNA, 19 nt, Artificial Sequence
  Description of Artificial Sequence: Synthetic oligonucleotide
ccaccgcaguccugagcau

SEQ ID NO: 807746 - RNA, 19 nt, Artificial Sequence
  Description of Artificial Sequence: Synthetic oligonucleotide
aguaaguuaauuuaggcac

SEQ ID NO: 807747 - RNA, 19 nt, Artificial Sequence
  Description of Artificial Sequence: Synthetic oligonucleotide
aaaguauuaagagaaggcc

SEQ ID NO: 807748 - RNA, 19 nt, Artificial Sequence
  Description of Artificial Sequence: Synthetic oligonucleotide
aguaaguaaggacagacgc

SEQ ID NO: 807749 - RNA, 19 nt, Artificial Sequence
  Description of Artificial Sequence: Synthetic oligonucleotide
uuaaaguuagccaaaaucu

SEQ ID NO: 807750 - RNA, 19 nt, Artificial Sequence
  Description of Artificial Sequence: Synthetic oligonucleotide
aaauaauuaucucuaugac

SEQ ID NO: 807751 - RNA, 19 nt, Artificial Sequence
  Description of Artificial Sequence: Synthetic oligonucleotide
uucuaauuuauuaagguca

SEQ ID NO: 807752 - RNA, 19 nt, Artificial Sequence
  Description of Artificial Sequence: Synthetic oligonucleotide
uuuaaaguuagccaaaauc

SEQ ID NO: 807753 - RNA, 19 nt, Artificial Sequence
  Description of Artificial Sequence: Synthetic oligonucleotide
ugaaagauguccuucaucc

SEQ ID NO: 807754 - RNA, 19 nt, Artificial Sequence
  Description of Artificial Sequence: Synthetic oligonucleotide
ucuagagcaaucauuuugg

SEQ ID NO: 807755 - RNA, 19 nt, Artificial Sequence
  Description of Artificial Sequence: Synthetic oligonucleotide
ugaaugacgaauagggacg

SEQ ID NO: 807756 - RNA, 19 nt, Artificial Sequence
  Description of Artificial Sequence: Synthetic oligonucleotide
aauuuaguaaguaaggaca

SEQ ID NO: 807757 - RNA, 19 nt, Artificial Sequence
  Description of Artificial Sequence: Synthetic oligonucleotide
aaagcaucaauaucguuca

SEQ ID NO: 807758 - RNA, 19 nt, Artificial Sequence
  Description of Artificial Sequence: Synthetic oligonucleotide
agagauacaagccauggug

SEQ ID NO: 807759 - RNA, 19 nt, Artificial Sequence
  Description of Artificial Sequence: Synthetic oligonucleotide
uccaaguaaaagcugaucu

SEQ ID NO: 807760 - RNA, 19 nt, Artificial Sequence
  Description of Artificial Sequence: Synthetic oligonucleotide
aagcuaucagaccaacagc

SEQ ID NO: 807761 - RNA, 19 nt, Artificial Sequence
  Description of Artificial Sequence: Synthetic oligonucleotide
uugaaugacgaauagggac

SEQ ID NO: 807762 - RNA, 19 nt, Artificial Sequence
  Description of Artificial Sequence: Synthetic oligonucleotide
acaacgacaucacacuggc

SEQ ID NO: 807763 - RNA, 19 nt, Artificial Sequence
  Description of Artificial Sequence: Synthetic oligonucleotide
agagcaaucauuuuggaua

SEQ ID NO: 807764 - RNA, 19 nt, Artificial Sequence
  Description of Artificial Sequence: Synthetic oligonucleotide
uuugauguaguagaaaggu

SEQ ID NO: 807765 - RNA, 19 nt, Artificial Sequence
  Description of Artificial Sequence: Synthetic oligonucleotide
uccuuacucagucuguugg

SEQ ID NO: 807766 - RNA, 19 nt, Artificial Sequence
  Description of Artificial Sequence: Synthetic oligonucleotide
uaguaaguuaauuuaggca

SEQ ID NO: 807767 - RNA, 19 nt, Artificial Sequence
  Description of Artificial Sequence: Synthetic oligonucleotide
uggaacauuggaccgaugc

SEQ ID NO: 807768 - RNA, 19 nt, Artificial Sequence
  Description of Artificial Sequence: Synthetic oligonucleotide
cacaaucauagcaugaccc

SEQ ID NO: 807769 - RNA, 19 nt, Artificial Sequence
  Description of Artificial Sequence: Synthetic oligonucleotide
uguaccaaagaugauauaa

SEQ ID NO: 807770 - RNA, 19 nt, Artificial Sequence
  Description of Artificial Sequence: Synthetic oligonucleotide
gguuugaagagauacaagc

SEQ ID NO: 807771 - RNA, 19 nt, Artificial Sequence
  Description of Artificial Sequence: Synthetic oligonucleotide
aaucugagggcccauuuug

SEQ ID NO: 807772 - RNA, 19 nt, Artificial Sequence
  Description of Artificial Sequence: Synthetic oligonucleotide
aagagcuaggaacuacagg

SEQ ID NO: 807773 - RNA, 19 nt, Artificial Sequence
  Description of Artificial Sequence: Synthetic oligonucleotide
uuaucggaaagcuuggaac

SEQ ID NO: 807774 - RNA, 19 nt, Artificial Sequence
  Description of Artificial Sequence: Synthetic oligonucleotide
ugauguaguagaaagguuu

SEQ ID NO: 807775 - RNA, 19 nt, Artificial Sequence
  Description of Artificial Sequence: Synthetic oligonucleotide
ucaggugauagaaaauuca

SEQ ID NO: 807776 - RNA, 19 nt, Artificial Sequence
  Description of Artificial Sequence: Synthetic oligonucleotide
aguauuaagagaaggccac

SEQ ID NO: 807777 - RNA, 19 nt, Artificial Sequence
  Description of Artificial Sequence: Synthetic oligonucleotide
aauauuggguuuugcuaag

SEQ ID NO: 807778 - RNA, 19 nt, Artificial Sequence
  Description of Artificial Sequence: Synthetic oligonucleotide
gagguuaucggaaagcuug

SEQ ID NO: 807779 - RNA, 19 nt, Artificial Sequence
  Description of Artificial Sequence: Synthetic oligonucleotide
auaucguucaugguuaauc

SEQ ID NO: 807780 - RNA, 19 nt, Artificial Sequence
  Description of Artificial Sequence: Synthetic oligonucleotide
uaucguucaugguuaaucc

SEQ ID NO: 807781 - RNA, 19 nt, Artificial Sequence
  Description of Artificial Sequence: Synthetic oligonucleotide
uaaguaaggacagacgcug

SEQ ID NO: 807782 - RNA, 19 nt, Artificial Sequence
  Description of Artificial Sequence: Synthetic oligonucleotide
uuagccaaaaucuggccug

SEQ ID NO: 807783 - RNA, 19 nt, Artificial Sequence
  Description of Artificial Sequence: Synthetic oligonucleotide
ucaauaucguucaugguua

SEQ ID NO: 807784 - RNA, 19 nt, Artificial Sequence
  Description of Artificial Sequence: Synthetic oligonucleotide
gaagagauacaagccaugg

SEQ ID NO: 807785 - RNA, 19 nt, Artificial Sequence
  Description of Artificial Sequence: Synthetic oligonucleotide
acuaugagaccgcagagca

SEQ ID NO: 807786 - RNA, 19 nt, Artificial Sequence
  Description of Artificial Sequence: Synthetic oligonucleotide
acauaugugauacucugga

SEQ ID NO: 807787 - RNA, 19 nt, Artificial Sequence
  Description of Artificial Sequence: Synthetic oligonucleotide
agccauuagucuuugcaac

SEQ ID NO: 807788 - RNA, 19 nt, Artificial Sequence
  Description of Artificial Sequence: Synthetic oligonucleotide
uaucggaaagcuuggaaca

SEQ ID NO: 807789 - RNA, 19 nt, Artificial Sequence
  Description of Artificial Sequence: Synthetic oligonucleotide
uuaauccugccuuuucuag

SEQ ID NO: 807790 - RNA, 19 nt, Artificial Sequence
  Description of Artificial Sequence: Synthetic oligonucleotide
gugcaaaccagucagaauc

SEQ ID NO: 807791 - RNA, 19 nt, Artificial Sequence
  Description of Artificial Sequence: Synthetic oligonucleotide
augacgaauagggacgucc

SEQ ID NO: 807792 - RNA, 19 nt, Artificial Sequence
  Description of Artificial Sequence: Synthetic oligonucleotide
auaugugauacucuggaau

SEQ ID NO: 807793 - RNA, 19 nt, Artificial Sequence
  Description of Artificial Sequence: Synthetic oligonucleotide
caauaucugaaagaugucc

SEQ ID NO: 807794 - RNA, 19 nt, Artificial Sequence
  Description of Artificial Sequence: Synthetic oligonucleotide
cauucgagaaacagcaaag

SEQ ID NO: 807795 - RNA, 19 nt, Artificial Sequence
  Description of Artificial Sequence: Synthetic oligonucleotide
uccgacauuaacucaacac

SEQ ID NO: 807796 - RNA, 19 nt, Artificial Sequence
  Description of Artificial Sequence: Synthetic oligonucleotide
gauagaaaauucaaucuga

SEQ ID NO: 807797 - RNA, 19 nt, Artificial Sequence
  Description of Artificial Sequence: Synthetic oligonucleotide
cagaaaucagaccaccucc

SEQ ID NO: 807798 - RNA, 19 nt, Artificial Sequence
  Description of Artificial Sequence: Synthetic oligonucleotide
agagacagugauccgcccc

SEQ ID NO: 807799 - RNA, 19 nt, Artificial Sequence
  Description of Artificial Sequence: Synthetic oligonucleotide
agagauaacaagaacugug

SEQ ID NO: 807800 - RNA, 19 nt, Artificial Sequence
  Description of Artificial Sequence: Synthetic oligonucleotide
aagaacugugugcacauau

SEQ ID NO: 807801 - RNA, 19 nt, Artificial Sequence
  Description of Artificial Sequence: Synthetic oligonucleotide
ugacgaauagggacguccg

SEQ ID NO: 807802 - RNA, 19 nt, Artificial Sequence
  Description of Artificial Sequence: Synthetic oligonucleotide
ugaaggguacaauaucuga

SEQ ID NO: 807803 - RNA, 19 nt, Artificial Sequence
  Description of Artificial Sequence: Synthetic oligonucleotide
cucuagagcaaucauuuug

SEQ ID NO: 807804 - RNA, 19 nt, Artificial Sequence
  Description of Artificial Sequence: Synthetic oligonucleotide
agaauccauggcuuuaaag

SEQ ID NO: 807805 - RNA, 19 nt, Artificial Sequence
  Description of Artificial Sequence: Synthetic oligonucleotide
uaaaaguggaagucaagau

SEQ ID NO: 807806 - RNA, 19 nt, Artificial Sequence
  Description of Artificial Sequence: Synthetic oligonucleotide
ugccccucuagccaagucg

SEQ ID NO: 807807 - RNA, 19 nt, Artificial Sequence
  Description of Artificial Sequence: Synthetic oligonucleotide
auaacccauggccagagcu

SEQ ID NO: 807808 - RNA, 19 nt, Artificial Sequence
  Description of Artificial Sequence: Synthetic oligonucleotide
uaucagaccaacagcugug

SEQ ID NO: 807809 - RNA, 19 nt, Artificial Sequence
  Description of Artificial Sequence: Synthetic oligonucleotide
aacauuggaccgaugcaac

SEQ ID NO: 807810 - RNA, 19 nt, Artificial Sequence
  Description of Artificial Sequence: Synthetic oligonucleotide
uaccaaagaugauauaauc

SEQ ID NO: 807811 - RNA, 19 nt, Artificial Sequence
  Description of Artificial Sequence: Synthetic oligonucleotide
aacaagaacugugugcaca

SEQ ID NO: 807812 - RNA, 19 nt, Artificial Sequence
  Description of Artificial Sequence: Synthetic oligonucleotide
uaugccuuuggcuuauaac

SEQ ID NO: 807813 - RNA, 19 nt, Artificial Sequence
  Description of Artificial Sequence: Synthetic oligonucleotide
auuagucuuugcaacagag

SEQ ID NO: 807814 - RNA, 19 nt, Artificial Sequence
  Description of Artificial Sequence: Synthetic oligonucleotide
acaaacccgaaagugcccc

SEQ ID NO: 807815 - RNA, 19 nt, Artificial Sequence
  Description of Artificial Sequence: Synthetic oligonucleotide
aauuuagagagcagaagau

SEQ ID NO: 807816 - RNA, 19 nt, Artificial Sequence
  Description of Artificial Sequence: Synthetic oligonucleotide
cacaacgacaucacacugg

SEQ ID NO: 807817 - RNA, 19 nt, Artificial Sequence
  Description of Artificial Sequence: Synthetic oligonucleotide
uaauuuaggcacauugguu

SEQ ID NO: 807818 - RNA, 19 nt, Artificial Sequence
  Description of Artificial Sequence: Synthetic oligonucleotide
uuggcuuauaacccauggc

SEQ ID NO: 807819 - RNA, 19 nt, Artificial Sequence
  Description of Artificial Sequence: Synthetic oligonucleotide
agauaacaagaacugugug

SEQ ID NO: 807820 - RNA, 19 nt, Artificial Sequence
  Description of Artificial Sequence: Synthetic oligonucleotide
ucagagauguuuagauuac

SEQ ID NO: 807821 - RNA, 19 nt, Artificial Sequence
  Description of Artificial Sequence: Synthetic oligonucleotide
uggccagacuaugagaccg

SEQ ID NO: 807822 - RNA, 19 nt, Artificial Sequence
  Description of Artificial Sequence: Synthetic oligonucleotide
aggguacaauaucugaaag

SEQ ID NO: 807823 - RNA, 19 nt, Artificial Sequence
  Description of Artificial Sequence: Synthetic oligonucleotide
guaguuuugugcaaaccag

SEQ ID NO: 807824 - RNA, 19 nt, Artificial Sequence
  Description of Artificial Sequence: Synthetic oligonucleotide
gagaucaagcaucauuuuc

SEQ ID NO: 807825 - RNA, 19 nt, Artificial Sequence
  Description of Artificial Sequence: Synthetic oligonucleotide
acaaucauagcaugacccu

SEQ ID NO: 807826 - RNA, 19 nt, Artificial Sequence
  Description of Artificial Sequence: Synthetic oligonucleotide
uuaguuuggccauuugcuc

SEQ ID NO: 807827 - RNA, 19 nt, Artificial Sequence
  Description of Artificial Sequence: Synthetic oligonucleotide
uauuggguuuugcuaaggu

SEQ ID NO: 807828 - RNA, 19 nt, Artificial Sequence
  Description of Artificial Sequence: Synthetic oligonucleotide
caaccucucuccaagcugc

SEQ ID NO: 807829 - RNA, 19 nt, Artificial Sequence
  Description of Artificial Sequence: Synthetic oligonucleotide
ugcacauaugugauacucu

SEQ ID NO: 807830 - RNA, 19 nt, Artificial Sequence
  Description of Artificial Sequence: Synthetic oligonucleotide
gaccgaugcaacaaacccg

SEQ ID NO: 807831 - RNA, 19 nt, Artificial Sequence
  Description of Artificial Sequence: Synthetic oligonucleotide
gcaaaguauuaagagaagg

SEQ ID NO: 807832 - RNA, 19 nt, Artificial Sequence
  Description of Artificial Sequence: Synthetic oligonucleotide
aguuuugugcaaaccaguc

SEQ ID NO: 807833 - RNA, 19 nt, Artificial Sequence
  Description of Artificial Sequence: Synthetic oligonucleotide
aaaaucugagggcccauuu

SEQ ID NO: 807834 - RNA, 19 nt, Artificial Sequence
  Description of Artificial Sequence: Synthetic oligonucleotide
aagaugagguuaucggaaa

SEQ ID NO: 807835 - RNA, 19 nt, Artificial Sequence
  Description of Artificial Sequence: Synthetic oligonucleotide
cuuugaaggguacaauauc

SEQ ID NO: 807836 - RNA, 19 nt, Artificial Sequence
  Description of Artificial Sequence: Synthetic oligonucleotide
gcuccaaugaggaaggacg

SEQ ID NO: 807837 - RNA, 19 nt, Artificial Sequence
  Description of Artificial Sequence: Synthetic oligonucleotide
uggaccgaugcaacaaacc

SEQ ID NO: 807838 - RNA, 19 nt, Artificial Sequence
  Description of Artificial Sequence: Synthetic oligonucleotide
cauauguugguccaaguaa

SEQ ID NO: 807839 - RNA, 19 nt, Artificial Sequence
  Description of Artificial Sequence: Synthetic oligonucleotide
aaucauagcaugacccugu

SEQ ID NO: 807840 - RNA, 19 nt, Artificial Sequence
  Description of Artificial Sequence: Synthetic oligonucleotide
acgaauagggacguccgac

SEQ ID NO: 807841 - RNA, 19 nt, Artificial Sequence
  Description of Artificial Sequence: Synthetic oligonucleotide
gagaccgcagagcauauuc

SEQ ID NO: 807842 - RNA, 19 nt, Artificial Sequence
  Description of Artificial Sequence: Synthetic oligonucleotide
gccacuaaagcauacuggc

SEQ ID NO: 807843 - RNA, 19 nt, Artificial Sequence
  Description of Artificial Sequence: Synthetic oligonucleotide
aggucaaccaauaugguau

SEQ ID NO: 807844 - RNA, 19 nt, Artificial Sequence
  Description of Artificial Sequence: Synthetic oligonucleotide
uaugagaccgcagagcaua

SEQ ID NO: 807845 - RNA, 19 nt, Artificial Sequence
  Description of Artificial Sequence: Synthetic oligonucleotide
uuauaacccauggccagag

SEQ ID NO: 807846 - RNA, 19 nt, Artificial Sequence
  Description of Artificial Sequence: Synthetic oligonucleotide
uaauccugccuuuucuaga

SEQ ID NO: 807847 - RNA, 19 nt, Artificial Sequence
  Description of Artificial Sequence: Synthetic oligonucleotide
cugcuaucagccauuaguc

SEQ ID NO: 807848 - RNA, 19 nt, Artificial Sequence
  Description of Artificial Sequence: Synthetic oligonucleotide
uccacaaucauagcaugac

SEQ ID NO: 807849 - RNA, 19 nt, Artificial Sequence
  Description of Artificial Sequence: Synthetic oligonucleotide
cauccgucaggaaagaaga

SEQ ID NO: 807850 - RNA, 19 nt, Artificial Sequence
  Description of Artificial Sequence: Synthetic oligonucleotide
uguggucauagcuugguuu

SEQ ID NO: 807851 - RNA, 19 nt, Artificial Sequence
  Description of Artificial Sequence: Synthetic oligonucleotide
guucgagugcugcacacag

SEQ ID NO: 807852 - RNA, 19 nt, Artificial Sequence
  Description of Artificial Sequence: Synthetic oligonucleotide
agggacguccgacauuaac

SEQ ID NO: 807853 - RNA, 19 nt, Artificial Sequence
  Description of Artificial Sequence: Synthetic oligonucleotide
ucguguggcauuaagucuu

SEQ ID NO: 807854 - RNA, 19 nt, Artificial Sequence
  Description of Artificial Sequence: Synthetic oligonucleotide
ccgacauuaacucaacacc

SEQ ID NO: 807855 - RNA, 19 nt, Artificial Sequence
  Description of Artificial Sequence: Synthetic oligonucleotide
aaaucugagggcccauuuu

SEQ ID NO: 807856 - RNA, 19 nt, Artificial Sequence
  Description of Artificial Sequence: Synthetic oligonucleotide
uugguccaaguaaaagcug

SEQ ID NO: 807857 - RNA, 19 nt, Artificial Sequence
  Description of Artificial Sequence: Synthetic oligonucleotide
auugccaaguucgagugcu

SEQ ID NO: 807858 - RNA, 19 nt, Artificial Sequence
  Description of Artificial Sequence: Synthetic oligonucleotide
uguggcauuaagucuuuau

SEQ ID NO: 807859 - RNA, 19 nt, Artificial Sequence
  Description of Artificial Sequence: Synthetic oligonucleotide
aucccguuaucuuugguaa

SEQ ID NO: 807860 - RNA, 19 nt, Artificial Sequence
  Description of Artificial Sequence: Synthetic oligonucleotide
cauagcaugacccuguccu

SEQ ID NO: 807861 - RNA, 19 nt, Artificial Sequence
  Description of Artificial Sequence: Synthetic oligonucleotide
uauguugguccaaguaaaa

SEQ ID NO: 807862 - RNA, 19 nt, Artificial Sequence
  Description of Artificial Sequence: Synthetic oligonucleotide
uuuaguaaguaaggacaga

SEQ ID NO: 807863 - RNA, 19 nt, Artificial Sequence
  Description of Artificial Sequence: Synthetic oligonucleotide
uagagcaaucauuuuggau

SEQ ID NO: 807864 - RNA, 19 nt, Artificial Sequence
  Description of Artificial Sequence: Synthetic oligonucleotide
guuccauucgagaaacagc

SEQ ID NO: 807865 - RNA, 19 nt, Artificial Sequence
  Description of Artificial Sequence: Synthetic oligonucleotide
gacuaugagaccgcagagc

SEQ ID NO: 807866 - RNA, 19 nt, Artificial Sequence
  Description of Artificial Sequence: Synthetic oligonucleotide
auagcaugacccuguccuc

SEQ ID NO: 807867 - RNA, 19 nt, Artificial Sequence
  Description of Artificial Sequence: Synthetic oligonucleotide
auaggaagugccagacagc

SEQ ID NO: 807868 - RNA, 19 nt, Artificial Sequence
  Description of Artificial Sequence: Synthetic oligonucleotide
uuccuaagaagagcuagga

SEQ ID NO: 807869 - RNA, 19 nt, Artificial Sequence
  Description of Artificial Sequence: Synthetic oligonucleotide
cauguaguuuugugcaaac

SEQ ID NO: 807870 - RNA, 19 nt, Artificial Sequence
  Description of Artificial Sequence: Synthetic oligonucleotide
ucuaugacauggacaggaa

SEQ ID NO: 807871 - RNA, 19 nt, Artificial Sequence
  Description of Artificial Sequence: Synthetic oligonucleotide
gauccaaccuugguuuucc

SEQ ID NO: 807872 - RNA, 19 nt, Artificial Sequence
  Description of Artificial Sequence: Synthetic oligonucleotide
ucaaccaauaugguauuua

SEQ ID NO: 807873 - RNA, 19 nt, Artificial Sequence
  Description of Artificial Sequence: Synthetic oligonucleotide
acuguaccaaagaugauau

SEQ ID NO: 807874 - RNA, 19 nt, Artificial Sequence
  Description of Artificial Sequence: Synthetic oligonucleotide
gaacauuggaccgaugcaa

SEQ ID NO: 807875 - RNA, 19 nt, Artificial Sequence
  Description of Artificial Sequence: Synthetic oligonucleotide
auguugguccaaguaaaag

SEQ ID NO: 807876 - RNA, 19 nt, Artificial Sequence
  Description of Artificial Sequence: Synthetic oligonucleotide
aucggaaagcuuggaacac

SEQ ID NO: 807877 - RNA, 19 nt, Artificial Sequence
  Description of Artificial Sequence: Synthetic oligonucleotide
ucauagcaugacccugucc

SEQ ID NO: 807878 - RNA, 19 nt, Artificial Sequence
  Description of Artificial Sequence: Synthetic oligonucleotide
gaucccguuaucuuuggua

SEQ ID NO: 807879 - RNA, 19 nt, Artificial Sequence
  Description of Artificial Sequence: Synthetic oligonucleotide
auauucauccuguuccauu

SEQ ID NO: 807880 - RNA, 19 nt, Artificial Sequence
  Description of Artificial Sequence: Synthetic oligonucleotide
ugguagacauucugaaauc

SEQ ID NO: 807881 - RNA, 19 nt, Artificial Sequence
  Description of Artificial Sequence: Synthetic oligonucleotide
gcacauaugugauacucug

SEQ ID NO: 807882 - RNA, 19 nt, Artificial Sequence
  Description of Artificial Sequence: Synthetic oligonucleotide
gcuuauaacccauggccag

SEQ ID NO: 807883 - RNA, 19 nt, Artificial Sequence
  Description of Artificial Sequence: Synthetic oligonucleotide
uuggaccgaugcaacaaac

SEQ ID NO: 807884 - RNA, 19 nt, Artificial Sequence
  Description of Artificial Sequence: Synthetic oligonucleotide
aaacccgaaagugccccuc

SEQ ID NO: 807885 - RNA, 19 nt, Artificial Sequence
  Description of Artificial Sequence: Synthetic oligonucleotide
cuugaaugacgaauaggga

SEQ ID NO: 807886 - RNA, 19 nt, Artificial Sequence
  Description of Artificial Sequence: Synthetic oligonucleotide
aagucguguggcauuaagu

SEQ ID NO: 807887 - RNA, 19 nt, Artificial Sequence
  Description of Artificial Sequence: Synthetic oligonucleotide
ucucauuaguggagaacuc

SEQ ID NO: 807888 - RNA, 19 nt, Artificial Sequence
  Description of Artificial Sequence: Synthetic oligonucleotide
acgacaucacacuggccag

SEQ ID NO: 807889 - RNA, 19 nt, Artificial Sequence
  Description of Artificial Sequence: Synthetic oligonucleotide
auauuggguuuugcuaagg

SEQ ID NO: 807890 - RNA, 19 nt, Artificial Sequence
  Description of Artificial Sequence: Synthetic oligonucleotide
ugugcaaaccagucagaau

SEQ ID NO: 807891 - RNA, 19 nt, Artificial Sequence
  Description of Artificial Sequence: Synthetic oligonucleotide
gcaacaaacccgaaagugc

SEQ ID NO: 807892 - RNA, 19 nt, Artificial Sequence
  Description of Artificial Sequence: Synthetic oligonucleotide
ucggucugcagaguggccc

SEQ ID NO: 807893 - RNA, 19 nt, Artificial Sequence
  Description of Artificial Sequence: Synthetic oligonucleotide
aauagggacguccgacauu

SEQ ID NO: 807894 - RNA, 19 nt, Artificial Sequence
  Description of Artificial Sequence: Synthetic oligonucleotide
acagugauccgccccagau

SEQ ID NO: 807895 - RNA, 19 nt, Artificial Sequence
  Description of Artificial Sequence: Synthetic oligonucleotide
gagacagugauccgcccca

SEQ ID NO: 807896 - RNA, 19 nt, Artificial Sequence
  Description of Artificial Sequence: Synthetic oligonucleotide
auucuuaauauuggguuuu

SEQ ID NO: 807897 - RNA, 19 nt, Artificial Sequence
  Description of Artificial Sequence: Synthetic oligonucleotide
auggaaugcggacgccuuc

SEQ ID NO: 807898 - RNA, 19 nt, Artificial Sequence
  Description of Artificial Sequence: Synthetic oligonucleotide
gaaaucagaccaccuccuc

SEQ ID NO: 807899 - RNA, 19 nt, Artificial Sequence
  Description of Artificial Sequence: Synthetic oligonucleotide
agcagaaauggaaugcgga

SEQ ID NO: 807900 - RNA, 19 nt, Artificial Sequence
  Description of Artificial Sequence: Synthetic oligonucleotide
uucuuaauauuggguuuug

SEQ ID NO: 807901 - RNA, 19 nt, Artificial Sequence
  Description of Artificial Sequence: Synthetic oligonucleotide
gcuuggaacacuggcaagg

SEQ ID NO: 807902 - RNA, 19 nt, Artificial Sequence
  Description of Artificial Sequence: Synthetic oligonucleotide
auagggacguccgacauua

SEQ ID NO: 807903 - RNA, 19 nt, Artificial Sequence
  Description of Artificial Sequence: Synthetic oligonucleotide
aaauaugccuuuggcuuau

SEQ ID NO: 807904 - RNA, 19 nt, Artificial Sequence
  Description of Artificial Sequence: Synthetic oligonucleotide
gagauaacaagaacugugu

SEQ ID NO: 807905 - RNA, 19 nt, Artificial Sequence
  Description of Artificial Sequence: Synthetic oligonucleotide
gucacuugguggugcauug

SEQ ID NO: 807906 - RNA, 19 nt, Artificial Sequence
  Description of Artificial Sequence: Synthetic oligonucleotide
cuagaacuuuuggaguagc

SEQ ID NO: 807907 - RNA, 19 nt, Artificial Sequence
  Description of Artificial Sequence: Synthetic oligonucleotide
caaucauagcaugacccug

SEQ ID NO: 807908 - RNA, 19 nt, Artificial Sequence
  Description of Artificial Sequence: Synthetic oligonucleotide
accgaugcaacaaacccga

SEQ ID NO: 807909 - RNA, 19 nt, Artificial Sequence
  Description of Artificial Sequence: Synthetic oligonucleotide
guaaguuaauuuaggcaca

SEQ ID NO: 807910 - RNA, 19 nt, Artificial Sequence
  Description of Artificial Sequence: Synthetic oligonucleotide
aaugacgaauagggacguc

SEQ ID NO: 807911 - RNA, 19 nt, Artificial Sequence
  Description of Artificial Sequence: Synthetic oligonucleotide
ugagguuaucggaaagcuu

SEQ ID NO: 807912 - RNA, 19 nt, Artificial Sequence
  Description of Artificial Sequence: Synthetic oligonucleotide
aggcacauugguuuguauu

SEQ ID NO: 807913 - RNA, 19 nt, Artificial Sequence
  Description of Artificial Sequence: Synthetic oligonucleotide
cacuaaagcauacuggccu

SEQ ID NO: 807914 - RNA, 19 nt, Artificial Sequence
  Description of Artificial Sequence: Synthetic oligonucleotide
acauuggaccgaugcaaca

SEQ ID NO: 807915 - RNA, 19 nt, Artificial Sequence
  Description of Artificial Sequence: Synthetic oligonucleotide
ucgcagaagcaccauccgu

SEQ ID NO: 807916 - RNA, 19 nt, Artificial Sequence
  Description of Artificial Sequence: Synthetic oligonucleotide
aggaacuacaggugucacu

SEQ ID NO: 807917 - RNA, 19 nt, Artificial Sequence
  Description of Artificial Sequence: Synthetic oligonucleotide
auuggaccgaugcaacaaa

SEQ ID NO: 807918 - RNA, 19 nt, Artificial Sequence
  Description of Artificial Sequence: Synthetic oligonucleotide
guugguccaaguaaaagcu

SEQ ID NO: 807919 - RNA, 19 nt, Artificial Sequence
  Description of Artificial Sequence: Synthetic oligonucleotide
caaaccucagccaaccucu

SEQ ID NO: 807920 - RNA, 19 nt, Artificial Sequence
  Description of Artificial Sequence: Synthetic oligonucleotide
gauacaagccauggugaca

SEQ ID NO: 807921 - RNA, 19 nt, Artificial Sequence
  Description of Artificial Sequence: Synthetic oligonucleotide
aucagccauuagucuuugc

SEQ ID NO: 807922 - RNA, 19 nt, Artificial Sequence
  Description of Artificial Sequence: Synthetic oligonucleotide
agaaaucagaccaccuccu

SEQ ID NO: 807923 - RNA, 19 nt, Artificial Sequence
  Description of Artificial Sequence: Synthetic oligonucleotide
gaucaagcaucauuuuccu

SEQ ID NO: 807924 - RNA, 19 nt, Artificial Sequence
  Description of Artificial Sequence: Synthetic oligonucleotide
auccuuacucagucuguug

SEQ ID NO: 807925 - RNA, 19 nt, Artificial Sequence
  Description of Artificial Sequence: Synthetic oligonucleotide
gaccagucgacagccagug

SEQ ID NO: 807926 - RNA, 19 nt, Artificial Sequence
  Description of Artificial Sequence: Synthetic oligonucleotide
guuaauccugccuuuucua

SEQ ID NO: 807927 - RNA, 19 nt, Artificial Sequence
  Description of Artificial Sequence: Synthetic oligonucleotide
aauaucguucaugguuaau

SEQ ID NO: 807928 - RNA, 19 nt, Artificial Sequence
  Description of Artificial Sequence: Synthetic oligonucleotide
cauccuguuccauucgaga

SEQ ID NO: 807929 - RNA, 19 nt, Artificial Sequence
  Description of Artificial Sequence: Synthetic oligonucleotide
agagauguuuagauuacuu

SEQ ID NO: 807930 - RNA, 19 nt, Artificial Sequence
  Description of Artificial Sequence: Synthetic oligonucleotide
agguuaucggaaagcuugg

SEQ ID NO: 807931 - RNA, 19 nt, Artificial Sequence
  Description of Artificial Sequence: Synthetic oligonucleotide
gaucguagcugggaagaac

SEQ ID NO: 807932 - RNA, 19 nt, Artificial Sequence
  Description of Artificial Sequence: Synthetic oligonucleotide
cuugguggugcauugaaau

SEQ ID NO: 807933 - RNA, 19 nt, Artificial Sequence
  Description of Artificial Sequence: Synthetic oligonucleotide
ggacguccgacauuaacuc

SEQ ID NO: 807934 - RNA, 19 nt, Artificial Sequence
  Description of Artificial Sequence: Synthetic oligonucleotide
ucggaaagcuuggaacacu

SEQ ID NO: 807935 - RNA, 19 nt, Artificial Sequence
  Description of Artificial Sequence: Synthetic oligonucleotide
ugguacuuugaaggguaca

SEQ ID NO: 807936 - RNA, 19 nt, Artificial Sequence
  Description of Artificial Sequence: Synthetic oligonucleotide
cuaggaacuacagguguca

SEQ ID NO: 807937 - RNA, 19 nt, Artificial Sequence
  Description of Artificial Sequence: Synthetic oligonucleotide
aggacggaucccguuaucu

SEQ ID NO: 807938 - RNA, 19 nt, Artificial Sequence
  Description of Artificial Sequence: Synthetic oligonucleotide
ggaacauuggaccgaugca

SEQ ID NO: 807939 - RNA, 19 nt, Artificial Sequence
  Description of Artificial Sequence: Synthetic oligonucleotide
gacguccgacauuaacuca

SEQ ID NO: 807940 - RNA, 19 nt, Artificial Sequence
  Description of Artificial Sequence: Synthetic oligonucleotide
accgcagagcauauucauc

SEQ ID NO: 807941 - RNA, 19 nt, Artificial Sequence
  Description of Artificial Sequence: Synthetic oligonucleotide
cauaugugauacucuggaa

SEQ ID NO: 807942 - RNA, 19 nt, Artificial Sequence
  Description of Artificial Sequence: Synthetic oligonucleotide
gcuaaggucuucuuggacu

SEQ ID NO: 807943 - RNA, 19 nt, Artificial Sequence
  Description of Artificial Sequence: Synthetic oligonucleotide
cuuacucagucuguuggca

SEQ ID NO: 807944 - RNA, 19 nt, Artificial Sequence
  Description of Artificial Sequence: Synthetic oligonucleotide
ucccguuaucuuugguaac

SEQ ID NO: 807945 - RNA, 19 nt, Artificial Sequence
  Description of Artificial Sequence: Synthetic oligonucleotide
gacgaauagggacguccga

SEQ ID NO: 807946 - RNA, 19 nt, Artificial Sequence
  Description of Artificial Sequence: Synthetic oligonucleotide
ccacuaaagcauacuggcc

SEQ ID NO: 807947 - RNA, 19 nt, Artificial Sequence
  Description of Artificial Sequence: Synthetic oligonucleotide
ugauccaaccuugguuuuc

SEQ ID NO: 807948 - RNA, 19 nt, Artificial Sequence
  Description of Artificial Sequence: Synthetic oligonucleotide
cagaucguagcugggaaga

SEQ ID NO: 807949 - RNA, 19 nt, Artificial Sequence
  Description of Artificial Sequence: Synthetic oligonucleotide
ccacaaucauagcaugacc

SEQ ID NO: 807950 - RNA, 19 nt, Artificial Sequence
  Description of Artificial Sequence: Synthetic oligonucleotide
gcagaucguagcugggaag

SEQ ID NO: 807951 - RNA, 19 nt, Artificial Sequence
  Description of Artificial Sequence: Synthetic oligonucleotide
uuaggcacauugguuugua

SEQ ID NO: 807952 - RNA, 19 nt, Artificial Sequence
  Description of Artificial Sequence: Synthetic oligonucleotide
agucgacagccaguggcuc

SEQ ID NO: 807953 - RNA, 19 nt, Artificial Sequence
  Description of Artificial Sequence: Synthetic oligonucleotide
acggaucccguuaucuuug

SEQ ID NO: 807954 - RNA, 19 nt, Artificial Sequence
  Description of Artificial Sequence: Synthetic oligonucleotide
cuuauaacccauggccaga

SEQ ID NO: 807955 - RNA, 19 nt, Artificial Sequence
  Description of Artificial Sequence: Synthetic oligonucleotide
guaaguaaggacagacgcu

SEQ ID NO: 807956 - RNA, 19 nt, Artificial Sequence
  Description of Artificial Sequence: Synthetic oligonucleotide
uaggaacuacaggugucac

SEQ ID NO: 807957 - RNA, 19 nt, Artificial Sequence
  Description of Artificial Sequence: Synthetic oligonucleotide
acguccgacauuaacucaa

SEQ ID NO: 807958 - RNA, 19 nt, Artificial Sequence
  Description of Artificial Sequence: Synthetic oligonucleotide
gauguaguagaaagguuuu

SEQ ID NO: 807959 - RNA, 19 nt, Artificial Sequence
  Description of Artificial Sequence: Synthetic oligonucleotide
accagucgacagccagugg

SEQ ID NO: 807960 - RNA, 19 nt, Artificial Sequence
  Description of Artificial Sequence: Synthetic oligonucleotide
gucguguggcauuaagucu

SEQ ID NO: 807961 - RNA, 19 nt, Artificial Sequence
  Description of Artificial Sequence: Synthetic oligonucleotide
aagcaucaauaucguucau

SEQ ID NO: 807962 - RNA, 19 nt, Artificial Sequence
  Description of Artificial Sequence: Synthetic oligonucleotide
gguggugcauugaaauggc

SEQ ID NO: 807963 - RNA, 19 nt, Artificial Sequence
  Description of Artificial Sequence: Synthetic oligonucleotide
ggauaagcuuccacaauca

SEQ ID NO: 807964 - RNA, 19 nt, Artificial Sequence
  Description of Artificial Sequence: Synthetic oligonucleotide
gaauagggacguccgacau

SEQ ID NO: 807965 - RNA, 19 nt, Artificial Sequence
  Description of Artificial Sequence: Synthetic oligonucleotide
aguucgagugcugcacaca

SEQ ID NO: 807966 - RNA, 19 nt, Artificial Sequence
  Description of Artificial Sequence: Synthetic oligonucleotide
acuacaggugucacuuggu

SEQ ID NO: 807967 - RNA, 19 nt, Artificial Sequence
  Description of Artificial Sequence: Synthetic oligonucleotide
gguuaauccugccuuuucu

SEQ ID NO: 807968 - RNA, 19 nt, Artificial Sequence
  Description of Artificial Sequence: Synthetic oligonucleotide
auccgccccagauauuaaa

SEQ ID NO: 807969 - RNA, 19 nt, Artificial Sequence
  Description of Artificial Sequence: Synthetic oligonucleotide
ccgaaagugccccucuagc

SEQ ID NO: 807970 - RNA, 19 nt, Artificial Sequence
  Description of Artificial Sequence: Synthetic oligonucleotide
caacgacaucacacuggcc

SEQ ID NO: 807971 - RNA, 19 nt, Artificial Sequence
  Description of Artificial Sequence: Synthetic oligonucleotide
cauuggaccgaugcaacaa

SEQ ID NO: 807972 - RNA, 19 nt, Artificial Sequence
  Description of Artificial Sequence: Synthetic oligonucleotide
ucacuugguggugcauuga

SEQ ID NO: 807973 - RNA, 19 nt, Artificial Sequence
  Description of Artificial Sequence: Synthetic oligonucleotide
augugauacucuggaauuu

SEQ ID NO: 807974 - RNA, 19 nt, Artificial Sequence
  Description of Artificial Sequence: Synthetic oligonucleotide
cagaguggcccauggucuc

SEQ ID NO: 807975 - RNA, 19 nt, Artificial Sequence
  Description of Artificial Sequence: Synthetic oligonucleotide
cacauugguuuguauuuua

SEQ ID NO: 807976 - RNA, 19 nt, Artificial Sequence
  Description of Artificial Sequence: Synthetic oligonucleotide
agaccgcagagcauauuca

SEQ ID NO: 807977 - RNA, 19 nt, Artificial Sequence
  Description of Artificial Sequence: Synthetic oligonucleotide
gaaugacgaauagggacgu

SEQ ID NO: 807978 - RNA, 19 nt, Artificial Sequence
  Description of Artificial Sequence: Synthetic oligonucleotide
guaccaaagaugauauaau

SEQ ID NO: 807979 - RNA, 19 nt, Artificial Sequence
  Description of Artificial Sequence: Synthetic oligonucleotide
aucugagggcccauuuuga

SEQ ID NO: 807980 - RNA, 19 nt, Artificial Sequence
  Description of Artificial Sequence: Synthetic oligonucleotide
gcugccaugaccagucgac

SEQ ID NO: 807981 - RNA, 19 nt, Artificial Sequence
  Description of Artificial Sequence: Synthetic oligonucleotide
ggaagucaagaugguagac

SEQ ID NO: 807982 - RNA, 19 nt, Artificial Sequence
  Description of Artificial Sequence: Synthetic oligonucleotide
uagccaagucguguggcau

SEQ ID NO: 807983 - RNA, 19 nt, Artificial Sequence
  Description of Artificial Sequence: Synthetic oligonucleotide
gacuuggucuggacagcug

SEQ ID NO: 807984 - RNA, 19 nt, Artificial Sequence
  Description of Artificial Sequence: Synthetic oligonucleotide
agcaaucauuuuggauaag

SEQ ID NO: 807985 - RNA, 19 nt, Artificial Sequence
  Description of Artificial Sequence: Synthetic oligonucleotide
aggaaggacggaucccguu

SEQ ID NO: 807986 - RNA, 19 nt, Artificial Sequence
  Description of Artificial Sequence: Synthetic oligonucleotide
ucuagccacauugcuuguu

SEQ ID NO: 807987 - RNA, 19 nt, Artificial Sequence
  Description of Artificial Sequence: Synthetic oligonucleotide
gaccgcagagcauauucau

SEQ ID NO: 807988 - RNA, 19 nt, Artificial Sequence
  Description of Artificial Sequence: Synthetic oligonucleotide
ccucuagccaagucgugug

SEQ ID NO: 807989 - RNA, 19 nt, Artificial Sequence
  Description of Artificial Sequence: Synthetic oligonucleotide
ccauucgagaaacagcaaa

SEQ ID NO: 807990 - RNA, 19 nt, Artificial Sequence
  Description of Artificial Sequence: Synthetic oligonucleotide
caauaucguucaugguuaa

SEQ ID NO: 807991 - RNA, 19 nt, Artificial Sequence
  Description of Artificial Sequence: Synthetic oligonucleotide
gaaggacggaucccguuau

SEQ ID NO: 807992 - RNA, 19 nt, Artificial Sequence
  Description of Artificial Sequence: Synthetic oligonucleotide
aggcuugauugcaaaguau

SEQ ID NO: 807993 - RNA, 19 nt, Artificial Sequence
  Description of Artificial Sequence: Synthetic oligonucleotide
ggaaggacggaucccguua

SEQ ID NO: 807994 - RNA, 19 nt, Artificial Sequence
  Description of Artificial Sequence: Synthetic oligonucleotide
cagcaucgcagaagcacca

SEQ ID NO: 807995 - RNA, 19 nt, Artificial Sequence
  Description of Artificial Sequence: Synthetic oligonucleotide
caggcuuuaguuuggccau

SEQ ID NO: 807996 - RNA, 19 nt, Artificial Sequence
  Description of Artificial Sequence: Synthetic oligonucleotide
ccacaacgacaucacacug

SEQ ID NO: 807997 - RNA, 19 nt, Artificial Sequence
  Description of Artificial Sequence: Synthetic oligonucleotide
ggcagaucguagcugggaa

SEQ ID NO: 807998 - RNA, 19 nt, Artificial Sequence
  Description of Artificial Sequence: Synthetic oligonucleotide
aagcugcuaucagccauua

SEQ ID NO: 807999 - RNA, 19 nt, Artificial Sequence
  Description of Artificial Sequence: Synthetic oligonucleotide
ccagacuaugagaccgcag

SEQ ID NO: 808000 - RNA, 19 nt, Artificial Sequence
  Description of Artificial Sequence: Synthetic oligonucleotide
gccccagauauuaaacuuc

SEQ ID NO: 808001 - RNA, 19 nt, Artificial Sequence
  Description of Artificial Sequence: Synthetic oligonucleotide
agaucguagcugggaagaa

SEQ ID NO: 808002 - RNA, 19 nt, Artificial Sequence
  Description of Artificial Sequence: Synthetic oligonucleotide
agccaaaaucuggccugag

SEQ ID NO: 808003 - RNA, 19 nt, Artificial Sequence
  Description of Artificial Sequence: Synthetic oligonucleotide
gggacguccgacauuaacu

SEQ ID NO: 808004 - RNA, 19 nt, Artificial Sequence
  Description of Artificial Sequence: Synthetic oligonucleotide
agaguggcccauggucuca

SEQ ID NO: 808005 - RNA, 19 nt, Artificial Sequence
  Description of Artificial Sequence: Synthetic oligonucleotide
cccgaaagugccccucuag

SEQ ID NO: 808006 - RNA, 19 nt, Artificial Sequence
  Description of Artificial Sequence: Synthetic oligonucleotide
gcggacgccuuccaccacc

SEQ ID NO: 808007 - RNA, 19 nt, Artificial Sequence
  Description of Artificial Sequence: Synthetic oligonucleotide
cucagaggucuuacagaaa

SEQ ID NO: 808008 - RNA, 19 nt, Artificial Sequence
  Description of Artificial Sequence: Synthetic oligonucleotide
guagcauauguugguccaa

SEQ ID NO: 808009 - RNA, 19 nt, Artificial Sequence
  Description of Artificial Sequence: Synthetic oligonucleotide
ccauuuugauguaguagaa

SEQ ID NO: 808010 - RNA, 19 nt, Artificial Sequence
  Description of Artificial Sequence: Synthetic oligonucleotide
cuccucuagagcaaucauu

SEQ ID NO: 808011 - RNA, 19 nt, Artificial Sequence
  Description of Artificial Sequence: Synthetic oligonucleotide
caugaccagucgacagcca

SEQ ID NO: 808012 - RNA, 19 nt, Artificial Sequence
  Description of Artificial Sequence: Synthetic oligonucleotide
aauaugccuuuggcuuaua

SEQ ID NO: 808013 - RNA, 19 nt, Artificial Sequence
  Description of Artificial Sequence: Synthetic oligonucleotide
cagucgacagccaguggcu

SEQ ID NO: 808014 - RNA, 19 nt, Artificial Sequence
  Description of Artificial Sequence: Synthetic oligonucleotide
uugcuccaaugaggaagga

SEQ ID NO: 808015 - RNA, 19 nt, Artificial Sequence
  Description of Artificial Sequence: Synthetic oligonucleotide
guggugcauugaaauggca

SEQ ID NO: 808016 - RNA, 19 nt, Artificial Sequence
  Description of Artificial Sequence: Synthetic oligonucleotide
agucaagaugguagacauu

SEQ ID NO: 808017 - RNA, 19 nt, Artificial Sequence
  Description of Artificial Sequence: Synthetic oligonucleotide
gguuaucggaaagcuugga

SEQ ID NO: 808018 - RNA, 19 nt, Artificial Sequence
  Description of Artificial Sequence: Synthetic oligonucleotide
cagugauccgccccagaua

SEQ ID NO: 808019 - RNA, 19 nt, Artificial Sequence
  Description of Artificial Sequence: Synthetic oligonucleotide
ugagaccgcagagcauauu

SEQ ID NO: 808020 - RNA, 19 nt, Artificial Sequence
  Description of Artificial Sequence: Synthetic oligonucleotide
cuguaccaaagaugauaua

SEQ ID NO: 808021 - RNA, 19 nt, Artificial Sequence
  Description of Artificial Sequence: Synthetic oligonucleotide
auccgucaggaaagaagaa

SEQ ID NO: 808022 - RNA, 19 nt, Artificial Sequence
  Description of Artificial Sequence: Synthetic oligonucleotide
uagggacguccgacauuaa

SEQ ID NO: 808023 - RNA, 19 nt, Artificial Sequence
  Description of Artificial Sequence: Synthetic oligonucleotide
gucggucugcagaguggcc

SEQ ID NO: 808024 - RNA, 19 nt, Artificial Sequence
  Description of Artificial Sequence: Synthetic oligonucleotide
cgaauagggacguccgaca

SEQ ID NO: 808025 - RNA, 19 nt, Artificial Sequence
  Description of Artificial Sequence: Synthetic oligonucleotide
cugccaugaccagucgaca

SEQ ID NO: 808026 - RNA, 19 nt, Artificial Sequence
  Description of Artificial Sequence: Synthetic oligonucleotide
gacgcuggcucagagucuu

SEQ ID NO: 808027 - RNA, 19 nt, Artificial Sequence
  Description of Artificial Sequence: Synthetic oligonucleotide
ccguuaucuuugguaacug

SEQ ID NO: 808028 - RNA, 19 nt, Artificial Sequence
  Description of Artificial Sequence: Synthetic oligonucleotide
gauccgccccagauauuaa

SEQ ID NO: 808029 - RNA, 19 nt, Artificial Sequence
  Description of Artificial Sequence: Synthetic oligonucleotide
augagaccgcagagcauau

SEQ ID NO: 808030 - RNA, 19 nt, Artificial Sequence
  Description of Artificial Sequence: Synthetic oligonucleotide
cagagauguuuagauuacu

SEQ ID NO: 808031 - RNA, 19 nt, Artificial Sequence
  Description of Artificial Sequence: Synthetic oligonucleotide
ggccagacuaugagaccgc

SEQ ID NO: 808032 - RNA, 19 nt, Artificial Sequence
  Description of Artificial Sequence: Synthetic oligonucleotide
cuaugagaccgcagagcau

SEQ ID NO: 808033 - RNA, 19 nt, Artificial Sequence
  Description of Artificial Sequence: Synthetic oligonucleotide
cauauucauccuguuccau

SEQ ID NO: 808034 - RNA, 19 nt, Artificial Sequence
  Description of Artificial Sequence: Synthetic oligonucleotide
caaacccgaaagugccccu

SEQ ID NO: 808035 - RNA, 19 nt, Artificial Sequence
  Description of Artificial Sequence: Synthetic oligonucleotide
cguccgacauuaacucaac

SEQ ID NO: 808036 - RNA, 19 nt, Artificial Sequence
  Description of Artificial Sequence: Synthetic oligonucleotide
gggcagaucguagcuggga

SEQ ID NO: 808037 - RNA, 19 nt, Artificial Sequence
  Description of Artificial Sequence: Synthetic oligonucleotide
cgaugcaacaaacccgaaa

SEQ ID NO: 808038 - RNA, 19 nt, Artificial Sequence
  Description of Artificial Sequence: Synthetic oligonucleotide
agcuugguuugaagagaua

SEQ ID NO: 808039 - RNA, 19 nt, Artificial Sequence
  Description of Artificial Sequence: Synthetic oligonucleotide
cauccuuacucagucuguu

SEQ ID NO: 808040 - RNA, 19 nt, Artificial Sequence
  Description of Artificial Sequence: Synthetic oligonucleotide
gccagacuaugagaccgca

SEQ ID NO: 808041 - RNA, 19 nt, Artificial Sequence
  Description of Artificial Sequence: Synthetic oligonucleotide
caccauccgucaggaaaga

SEQ ID NO: 808042 - RNA, 19 nt, Artificial Sequence
  Description of Artificial Sequence: Synthetic oligonucleotide
gcagccacuaaagcauacu

SEQ ID NO: 808043 - RNA, 19 nt, Artificial Sequence
  Description of Artificial Sequence: Synthetic oligonucleotide
cccguuaucuuugguaacu

SEQ ID NO: 808044 - RNA, 19 nt, Artificial Sequence
  Description of Artificial Sequence: Synthetic oligonucleotide
gccccucuagccaagucgu

SEQ ID NO: 808045 - RNA, 19 nt, Artificial Sequence
  Description of Artificial Sequence: Synthetic oligonucleotide
ccauccuuacucagucugu

SEQ ID NO: 808046 - RNA, 19 nt, Artificial Sequence
  Description of Artificial Sequence: Synthetic oligonucleotide
ggaucccguuaucuuuggu

SEQ ID NO: 808047 - RNA, 19 nt, Artificial Sequence
  Description of Artificial Sequence: Synthetic oligonucleotide
gggcccauuuugauguagu

SEQ ID NO: 808048 - RNA, 19 nt, Artificial Sequence
  Description of Artificial Sequence: Synthetic oligonucleotide
ccccucuagccaagucgug

SEQ ID NO: 808049 - RNA, 19 nt, Artificial Sequence
  Description of Artificial Sequence: Synthetic oligonucleotide
ggacgccuuccaccaccac

SEQ ID NO: 808050 - RNA, 19 nt, Artificial Sequence
  Description of Artificial Sequence: Synthetic oligonucleotide
gcacauugguuuguauuuu

SEQ ID NO: 808051 - RNA, 19 nt, Artificial Sequence
  Description of Artificial Sequence: Synthetic oligonucleotide
acgcuggcucagagucuug

SEQ ID NO: 808052 - RNA, 19 nt, Artificial Sequence
  Description of Artificial Sequence: Synthetic oligonucleotide
cccucuagccaagucgugu

SEQ ID NO: 808053 - RNA, 19 nt, Artificial Sequence
  Description of Artificial Sequence: Synthetic oligonucleotide
ccgaugcaacaaacccgaa

SEQ ID NO: 808054 - RNA, 19 nt, Artificial Sequence
  Description of Artificial Sequence: Synthetic oligonucleotide
ccaagucguguggcauuaa

SEQ ID NO: 808055 - RNA, 19 nt, Artificial Sequence
  Description of Artificial Sequence: Synthetic oligonucleotide
aaucuaauugcaaaugugc

SEQ ID NO: 808056 - RNA, 19 nt, Artificial Sequence
  Description of Artificial Sequence: Synthetic oligonucleotide
aauaacugaggaucugacc

SEQ ID NO: 808057 - RNA, 19 nt, Artificial Sequence
  Description of Artificial Sequence: Synthetic oligonucleotide
gaccagaucauacugaggg

SEQ ID NO: 808058 - RNA, 19 nt, Artificial Sequence
  Description of Artificial Sequence: Synthetic oligonucleotide
ugucaaauaggacagauaa

SEQ ID NO: 808059 - RNA, 19 nt, Artificial Sequence
  Description of Artificial Sequence: Synthetic oligonucleotide
acuuuuagaggcccgaagc

SEQ ID NO: 808060 - RNA, 19 nt, Artificial Sequence
  Description of Artificial Sequence: Synthetic oligonucleotide
ugugacaugucaaauagga

SEQ ID NO: 808061 - RNA, 19 nt, Artificial Sequence
  Description of Artificial Sequence: Synthetic oligonucleotide
ugacaugucaaauaggaca

SEQ ID NO: 808062 - RNA, 19 nt, Artificial Sequence
  Description of Artificial Sequence: Synthetic oligonucleotide
uguaacagcauccuggacu

SEQ ID NO: 808063 - RNA, 19 nt, Artificial Sequence
  Description of Artificial Sequence: Synthetic oligonucleotide
gauaaaaggagaccacugg

SEQ ID NO: 808064 - RNA, 19 nt, Artificial Sequence
  Description of Artificial Sequence: Synthetic oligonucleotide
aauaggacagauaaaagga

SEQ ID NO: 808065 - RNA, 19 nt, Artificial Sequence
  Description of Artificial Sequence: Synthetic oligonucleotide
cauauaucuacgauguggg

SEQ ID NO: 808066 - RNA, 19 nt, Artificial Sequence
  Description of Artificial Sequence: Synthetic oligonucleotide
aauucacgauuccacuucc

SEQ ID NO: 808067 - RNA, 19 nt, Artificial Sequence
  Description of Artificial Sequence: Synthetic oligonucleotide
aauucuaguguuucuuguc

SEQ ID NO: 808068 - RNA, 19 nt, Artificial Sequence
  Description of Artificial Sequence: Synthetic oligonucleotide
uaaaaggagaccacugggg

SEQ ID NO: 808069 - RNA, 19 nt, Artificial Sequence
  Description of Artificial Sequence: Synthetic oligonucleotide
aauaaggagaguucuuuca

SEQ ID NO: 808070 - RNA, 19 nt, Artificial Sequence
  Description of Artificial Sequence: Synthetic oligonucleotide
aaagagcuaguacaaucac

SEQ ID NO: 808071 - RNA, 19 nt, Artificial Sequence
  Description of Artificial Sequence: Synthetic oligonucleotide
uauaaacagagcagguggg

SEQ ID NO: 808072 - RNA, 19 nt, Artificial Sequence
  Description of Artificial Sequence: Synthetic oligonucleotide
ccuaacaugucuuagagcc

SEQ ID NO: 808073 - RNA, 19 nt, Artificial Sequence
  Description of Artificial Sequence: Synthetic oligonucleotide
agugacagugcucaucccc

SEQ ID NO: 808074 - RNA, 19 nt, Artificial Sequence
  Description of Artificial Sequence: Synthetic oligonucleotide
uuuuaguuuaaagucaugu

SEQ ID NO: 808075 - RNA, 19 nt, Artificial Sequence
  Description of Artificial Sequence: Synthetic oligonucleotide
aguucagcuauacagacgu

SEQ ID NO: 808076 - RNA, 19 nt, Artificial Sequence
  Description of Artificial Sequence: Synthetic oligonucleotide
uaauucagacauuauauaa

SEQ ID NO: 808077 - RNA, 19 nt, Artificial Sequence
  Description of Artificial Sequence: Synthetic oligonucleotide
aaucacauauuugaaagga

SEQ ID NO: 808078 - RNA, 19 nt, Artificial Sequence
  Description of Artificial Sequence: Synthetic oligonucleotide
cauauuugaaaggagaaac

SEQ ID NO: 808079 - RNA, 19 nt, Artificial Sequence
  Description of Artificial Sequence: Synthetic oligonucleotide
caaacgaucggacauugcg

SEQ ID NO: 808080 - RNA, 19 nt, Artificial Sequence
  Description of Artificial Sequence: Synthetic oligonucleotide
gcuauaaugacccugcugc

SEQ ID NO: 808081 - RNA, 19 nt, Artificial Sequence
  Description of Artificial Sequence: Synthetic oligonucleotide
ucacgucuaaacaagcugc

SEQ ID NO: 808082 - RNA, 19 nt, Artificial Sequence
  Description of Artificial Sequence: Synthetic oligonucleotide
uuccagaugaccuaacaug

SEQ ID NO: 808083 - RNA, 19 nt, Artificial Sequence
  Description of Artificial Sequence: Synthetic oligonucleotide
auugcgaugaaaugucauc

SEQ ID NO: 808084 - RNA, 19 nt, Artificial Sequence
  Description of Artificial Sequence: Synthetic oligonucleotide
aaacaagcugcacaguaca

SEQ ID NO: 808085 - RNA, 19 nt, Artificial Sequence
  Description of Artificial Sequence: Synthetic oligonucleotide
auacuugcuuuucccaucc

SEQ ID NO: 808086 - RNA, 19 nt, Artificial Sequence
  Description of Artificial Sequence: Synthetic oligonucleotide
uuagagccaucucacaaag

SEQ ID NO: 808087 - RNA, 19 nt, Artificial Sequence
  Description of Artificial Sequence: Synthetic oligonucleotide
ugaaccggagggaaggagg

SEQ ID NO: 808088 - RNA, 19 nt, Artificial Sequence
  Description of Artificial Sequence: Synthetic oligonucleotide
uuucuaagguguaugugug

SEQ ID NO: 808089 - RNA, 19 nt, Artificial Sequence
  Description of Artificial Sequence: Synthetic oligonucleotide
uauuugccccaaacgaucg

SEQ ID NO: 808090 - RNA, 19 nt, Artificial Sequence
  Description of Artificial Sequence: Synthetic oligonucleotide
uuuagaggcccgaagcugc

SEQ ID NO: 808091 - RNA, 19 nt, Artificial Sequence
  Description of Artificial Sequence: Synthetic oligonucleotide
agcuaguacaaucacauau

SEQ ID NO: 808092 - RNA, 19 nt, Artificial Sequence
  Description of Artificial Sequence: Synthetic oligonucleotide
agaaucuaauugcaaaugu

SEQ ID NO: 808093 - RNA, 19 nt, Artificial Sequence
  Description of Artificial Sequence: Synthetic oligonucleotide
auaucuacgaugugggcug

SEQ ID NO: 808094 - RNA, 19 nt, Artificial Sequence
  Description of Artificial Sequence: Synthetic oligonucleotide
cugagagucgaauacuugc

SEQ ID NO: 808095 - RNA, 19 nt, Artificial Sequence
  Description of Artificial Sequence: Synthetic oligonucleotide
aguaauucagacauuauau

SEQ ID NO: 808096 - RNA, 19 nt, Artificial Sequence
  Description of Artificial Sequence: Synthetic oligonucleotide
gaacguauaaaaguucagc

SEQ ID NO: 808097 - RNA, 19 nt, Artificial Sequence
  Description of Artificial Sequence: Synthetic oligonucleotide
ugucuaggaauaacugagg

SEQ ID NO: 808098 - RNA, 19 nt, Artificial Sequence
  Description of Artificial Sequence: Synthetic oligonucleotide
aacacagcuuaagugacag

SEQ ID NO: 808099 - RNA, 19 nt, Artificial Sequence
  Description of Artificial Sequence: Synthetic oligonucleotide
gugucacaugccuagaagg

SEQ ID NO: 808100 - RNA, 19 nt, Artificial Sequence
  Description of Artificial Sequence: Synthetic oligonucleotide
auauaucuacgaugugggc

SEQ ID NO: 808101 - RNA, 19 nt, Artificial Sequence
  Description of Artificial Sequence: Synthetic oligonucleotide
ucgaauacuugcuuuuccc

SEQ ID NO: 808102 - RNA, 19 nt, Artificial Sequence
  Description of Artificial Sequence: Synthetic oligonucleotide
aauugcaaaugugcacccc

SEQ ID NO: 808103 - RNA, 19 nt, Artificial Sequence
  Description of Artificial Sequence: Synthetic oligonucleotide
aauucagacauuauauaaa

SEQ ID NO: 808104 - RNA, 19 nt, Artificial Sequence
  Description of Artificial Sequence: Synthetic oligonucleotide
ucuuagagccaucucacaa

SEQ ID NO: 808105 - RNA, 19 nt, Artificial Sequence
  Description of Artificial Sequence: Synthetic oligonucleotide
aucacgucuaaacaagcug

SEQ ID NO: 808106 - RNA, 19 nt, Artificial Sequence
  Description of Artificial Sequence: Synthetic oligonucleotide
gagauauugcaccuuauaa

SEQ ID NO: 808107 - RNA, 19 nt, Artificial Sequence
  Description of Artificial Sequence: Synthetic oligonucleotide
gaaucuaauugcaaaugug

SEQ ID NO: 808108 - RNA, 19 nt, Artificial Sequence
  Description of Artificial Sequence: Synthetic oligonucleotide
ugucuuagagccaucucac

SEQ ID NO: 808109 - RNA, 19 nt, Artificial Sequence
  Description of Artificial Sequence: Synthetic oligonucleotide
uaagguagcgcugugacau

SEQ ID NO: 808110 - RNA, 19 nt, Artificial Sequence
  Description of Artificial Sequence: Synthetic oligonucleotide
augucuaggaauaacugag

SEQ ID NO: 808111 - RNA, 19 nt, Artificial Sequence
  Description of Artificial Sequence: Synthetic oligonucleotide
ucggacauugcgaugaaau

SEQ ID NO: 808112 - RNA, 19 nt, Artificial Sequence
  Description of Artificial Sequence: Synthetic oligonucleotide
cuuaagguagcgcugugac

SEQ ID NO: 808113 - RNA, 19 nt, Artificial Sequence
  Description of Artificial Sequence: Synthetic oligonucleotide
aacuuucaggagcuuucgg

SEQ ID NO: 808114 - RNA, 19 nt, Artificial Sequence
  Description of Artificial Sequence: Synthetic oligonucleotide
accuaacaugucuuagagc

SEQ ID NO: 808115 - RNA, 19 nt, Artificial Sequence
  Description of Artificial Sequence: Synthetic oligonucleotide
guaacagcauccuggacug

SEQ ID NO: 808116 - RNA, 19 nt, Artificial Sequence
  Description of Artificial Sequence: Synthetic oligonucleotide
agaaucaccucuuaaggua

SEQ ID NO: 808117 - RNA, 19 nt, Artificial Sequence
  Description of Artificial Sequence: Synthetic oligonucleotide
uucugcaaauuggagacag

SEQ ID NO: 808118 - RNA, 19 nt, Artificial Sequence
  Description of Artificial Sequence: Synthetic oligonucleotide
caguacaccuuuagcaucg

SEQ ID NO: 808119 - RNA, 19 nt, Artificial Sequence
  Description of Artificial Sequence: Synthetic oligonucleotide
caaaugugcaccccagagg

SEQ ID NO: 808120 - RNA, 19 nt, Artificial Sequence
  Description of Artificial Sequence: Synthetic oligonucleotide
acuccggcggcugagaggc

SEQ ID NO: 808121 - RNA, 19 nt, Artificial Sequence
  Description of Artificial Sequence: Synthetic oligonucleotide
aggacagauaaaaggagac

SEQ ID NO: 808122 - RNA, 19 nt, Artificial Sequence
  Description of Artificial Sequence: Synthetic oligonucleotide
ucuggccgcauuucuaagg

SEQ ID NO: 808123 - RNA, 19 nt, Artificial Sequence
  Description of Artificial Sequence: Synthetic oligonucleotide
uauugcaccuuauaauguc

SEQ ID NO: 808124 - RNA, 19 nt, Artificial Sequence
  Description of Artificial Sequence: Synthetic oligonucleotide
aacgaucggacauugcgau

SEQ ID NO: 808125 - RNA, 19 nt, Artificial Sequence
  Description of Artificial Sequence: Synthetic oligonucleotide
uccacuucccauccgaggu

SEQ ID NO: 808126 - RNA, 19 nt, Artificial Sequence
  Description of Artificial Sequence: Synthetic oligonucleotide
ugucacaugccuagaaggu

SEQ ID NO: 808127 - RNA, 19 nt, Artificial Sequence
  Description of Artificial Sequence: Synthetic oligonucleotide
cacagcuuaagugacagug

SEQ ID NO: 808128 - RNA, 19 nt, Artificial Sequence
  Description of Artificial Sequence: Synthetic oligonucleotide
gaauucacgauuccacuuc

SEQ ID NO: 808129 - RNA, 19 nt, Artificial Sequence
  Description of Artificial Sequence: Synthetic oligonucleotide
uucacgauuccacuuccca

SEQ ID NO: 808130 - RNA, 19 nt, Artificial Sequence
  Description of Artificial Sequence: Synthetic oligonucleotide
ugcuuguuggcccauccug

SEQ ID NO: 808131 - RNA, 19 nt, Artificial Sequence
  Description of Artificial Sequence: Synthetic oligonucleotide
cucuagaccuacaacauca

SEQ ID NO: 808132 - RNA, 19 nt, Artificial Sequence
  Description of Artificial Sequence: Synthetic oligonucleotide
accagaucauacugagggc

SEQ ID NO: 808133 - RNA, 19 nt, Artificial Sequence
  Description of Artificial Sequence: Synthetic oligonucleotide
uuaggugaugugagucugg

SEQ ID NO: 808134 - RNA, 19 nt, Artificial Sequence
  Description of Artificial Sequence: Synthetic oligonucleotide
uguuggcccauccuguccc

SEQ ID NO: 808135 - RNA, 19 nt, Artificial Sequence
  Description of Artificial Sequence: Synthetic oligonucleotide
gaaucaccucuuaagguag

SEQ ID NO: 808136 - RNA, 19 nt, Artificial Sequence
  Description of Artificial Sequence: Synthetic oligonucleotide
gcuauacagacguagcuag

SEQ ID NO: 808137 - RNA, 19 nt, Artificial Sequence
  Description of Artificial Sequence: Synthetic oligonucleotide
gacuuuuagaggcccgaag

SEQ ID NO: 808138 - RNA, 19 nt, Artificial Sequence
  Description of Artificial Sequence: Synthetic oligonucleotide
uuggcagguuugcaggcgg

SEQ ID NO: 808139 - RNA, 19 nt, Artificial Sequence
  Description of Artificial Sequence: Synthetic oligonucleotide
gacugaaccggagggaagg

SEQ ID NO: 808140 - RNA, 19 nt, Artificial Sequence
  Description of Artificial Sequence: Synthetic oligonucleotide
accuacaacaucaauacau

SEQ ID NO: 808141 - RNA, 19 nt, Artificial Sequence
  Description of Artificial Sequence: Synthetic oligonucleotide
aacugaggaucugaccgcg

SEQ ID NO: 808142 - RNA, 19 nt, Artificial Sequence
  Description of Artificial Sequence: Synthetic oligonucleotide
aagugacagugcucauccc

SEQ ID NO: 808143 - RNA, 19 nt, Artificial Sequence
  Description of Artificial Sequence: Synthetic oligonucleotide
uuccugcacaguaauucag

SEQ ID NO: 808144 - RNA, 19 nt, Artificial Sequence
  Description of Artificial Sequence: Synthetic oligonucleotide
ucccauccgagguaagagg

SEQ ID NO: 808145 - RNA, 19 nt, Artificial Sequence
  Description of Artificial Sequence: Synthetic oligonucleotide
uacgaugugggcuggcuga

SEQ ID NO: 808146 - RNA, 19 nt, Artificial Sequence
  Description of Artificial Sequence: Synthetic oligonucleotide
ccauauaucuacgaugugg

SEQ ID NO: 808147 - RNA, 19 nt, Artificial Sequence
  Description of Artificial Sequence: Synthetic oligonucleotide
uggugagaacaucaaauuu

SEQ ID NO: 808148 - RNA, 19 nt, Artificial Sequence
  Description of Artificial Sequence: Synthetic oligonucleotide
uauaaugacccugcugcca

SEQ ID NO: 808149 - RNA, 19 nt, Artificial Sequence
  Description of Artificial Sequence: Synthetic oligonucleotide
uuucauacggaaagagcua

SEQ ID NO: 808150 - RNA, 19 nt, Artificial Sequence
  Description of Artificial Sequence: Synthetic oligonucleotide
gggaaauacagggugagag

SEQ ID NO: 808151 - RNA, 19 nt, Artificial Sequence
  Description of Artificial Sequence: Synthetic oligonucleotide
caugucuaggaauaacuga

SEQ ID NO: 808152 - RNA, 19 nt, Artificial Sequence
  Description of Artificial Sequence: Synthetic oligonucleotide
aaucaccucuuaagguagc

SEQ ID NO: 808153 - RNA, 19 nt, Artificial Sequence
  Description of Artificial Sequence: Synthetic oligonucleotide
aaucacgucuaaacaagcu

SEQ ID NO: 808154 - RNA, 19 nt, Artificial Sequence
  Description of Artificial Sequence: Synthetic oligonucleotide
uuucugcaaacccggcugc

SEQ ID NO: 808155 - RNA, 19 nt, Artificial Sequence
  Description of Artificial Sequence: Synthetic oligonucleotide
agauaaaaggagaccacug

SEQ ID NO: 808156 - RNA, 19 nt, Artificial Sequence
  Description of Artificial Sequence: Synthetic oligonucleotide
cuauaaugacccugcugcc

SEQ ID NO: 808157 - RNA, 19 nt, Artificial Sequence
  Description of Artificial Sequence: Synthetic oligonucleotide
cacuaucacaauguugggg

SEQ ID NO: 808158 - RNA, 19 nt, Artificial Sequence
  Description of Artificial Sequence: Synthetic oligonucleotide
acguauaaaaguucagcua

SEQ ID NO: 808159 - RNA, 19 nt, Artificial Sequence
  Description of Artificial Sequence: Synthetic oligonucleotide
guagcuagcauuuuguuuu

SEQ ID NO: 808160 - RNA, 19 nt, Artificial Sequence
  Description of Artificial Sequence: Synthetic oligonucleotide
ugccuagaaggucaccagc

SEQ ID NO: 808161 - RNA, 19 nt, Artificial Sequence
  Description of Artificial Sequence: Synthetic oligonucleotide
ggguuauuugccccaaacg

SEQ ID NO: 808162 - RNA, 19 nt, Artificial Sequence
  Description of Artificial Sequence: Synthetic oligonucleotide
aguuuguaacagcauccug

SEQ ID NO: 808163 - RNA, 19 nt, Artificial Sequence
  Description of Artificial Sequence: Synthetic oligonucleotide
gaucugaccgcgccuacug

SEQ ID NO: 808164 - RNA, 19 nt, Artificial Sequence
  Description of Artificial Sequence: Synthetic oligonucleotide
uccccagaaucuaauugca

SEQ ID NO: 808165 - RNA, 19 nt, Artificial Sequence
  Description of Artificial Sequence: Synthetic oligonucleotide
aaacgaucggacauugcga

SEQ ID NO: 808166 - RNA, 19 nt, Artificial Sequence
  Description of Artificial Sequence: Synthetic oligonucleotide
agacguagcuagcauuuug

SEQ ID NO: 808167 - RNA, 19 nt, Artificial Sequence
  Description of Artificial Sequence: Synthetic oligonucleotide
uuagcaucguccagguguc

SEQ ID NO: 808168 - RNA, 19 nt, Artificial Sequence
  Description of Artificial Sequence: Synthetic oligonucleotide
ugugggcuggcugacaaug

SEQ ID NO: 808169 - RNA, 19 nt, Artificial Sequence
  Description of Artificial Sequence: Synthetic oligonucleotide
ugaaaacaggcaaccuccu

SEQ ID NO: 808170 - RNA, 19 nt, Artificial Sequence
  Description of Artificial Sequence: Synthetic oligonucleotide
gucgaauacuugcuuuucc

SEQ ID NO: 808171 - RNA, 19 nt, Artificial Sequence
  Description of Artificial Sequence: Synthetic oligonucleotide
auuaggugaugugagucug

SEQ ID NO: 808172 - RNA, 19 nt, Artificial Sequence
  Description of Artificial Sequence: Synthetic oligonucleotide
agagauauugcaccuuaua

SEQ ID NO: 808173 - RNA, 19 nt, Artificial Sequence
  Description of Artificial Sequence: Synthetic oligonucleotide
cacgauuccacuucccauc

SEQ ID NO: 808174 - RNA, 19 nt, Artificial Sequence
  Description of Artificial Sequence: Synthetic oligonucleotide
uugacacauaauguccacc

SEQ ID NO: 808175 - RNA, 19 nt, Artificial Sequence
  Description of Artificial Sequence: Synthetic oligonucleotide
uaacaugucuuagagccau

SEQ ID NO: 808176 - RNA, 19 nt, Artificial Sequence
  Description of Artificial Sequence: Synthetic oligonucleotide
gcaaaugugcaccccagag

SEQ ID NO: 808177 - RNA, 19 nt, Artificial Sequence
  Description of Artificial Sequence: Synthetic oligonucleotide
uggucugcguccgcgagcg

SEQ ID NO: 808178 - RNA, 19 nt, Artificial Sequence
  Description of Artificial Sequence: Synthetic oligonucleotide
cugugacaugucaaauagg

SEQ ID NO: 808179 - RNA, 19 nt, Artificial Sequence
  Description of Artificial Sequence: Synthetic oligonucleotide
uugcccuggguuauuugcc

SEQ ID NO: 808180 - RNA, 19 nt, Artificial Sequence
  Description of Artificial Sequence: Synthetic oligonucleotide
ucucuagaccuacaacauc

SEQ ID NO: 808181 - RNA, 19 nt, Artificial Sequence
  Description of Artificial Sequence: Synthetic oligonucleotide
gagggaaauacagggugag

SEQ ID NO: 808182 - RNA, 19 nt, Artificial Sequence
  Description of Artificial Sequence: Synthetic oligonucleotide
ucccaauuugccuggucug

SEQ ID NO: 808183 - RNA, 19 nt, Artificial Sequence
  Description of Artificial Sequence: Synthetic oligonucleotide
cuauacagacguagcuagc

SEQ ID NO: 808184 - RNA, 19 nt, Artificial Sequence
  Description of Artificial Sequence: Synthetic oligonucleotide
ugagguuacagagguggug

SEQ ID NO: 808185 - RNA, 19 nt, Artificial Sequence
  Description of Artificial Sequence: Synthetic oligonucleotide
agcuuucgggagcagaaga

SEQ ID NO: 808186 - RNA, 19 nt, Artificial Sequence
  Description of Artificial Sequence: Synthetic oligonucleotide
guaugugugugugugugug

SEQ ID NO: 808187 - RNA, 19 nt, Artificial Sequence
  Description of Artificial Sequence: Synthetic oligonucleotide
agguguaugugugugugug

SEQ ID NO: 808188 - RNA, 19 nt, Artificial Sequence
  Description of Artificial Sequence: Synthetic oligonucleotide
auuugccccaaacgaucgg

SEQ ID NO: 808189 - RNA, 19 nt, Artificial Sequence
  Description of Artificial Sequence: Synthetic oligonucleotide
gggccagggacuuuuagag

SEQ ID NO: 808190 - RNA, 19 nt, Artificial Sequence
  Description of Artificial Sequence: Synthetic oligonucleotide
uugcaccuuauaaugucuc

SEQ ID NO: 808191 - RNA, 19 nt, Artificial Sequence
  Description of Artificial Sequence: Synthetic oligonucleotide
caauguuggggucguuucc

SEQ ID NO: 808192 - RNA, 19 nt, Artificial Sequence
  Description of Artificial Sequence: Synthetic oligonucleotide
uuugccccaaacgaucgga

SEQ ID NO: 808193 - RNA, 19 nt, Artificial Sequence
  Description of Artificial Sequence: Synthetic oligonucleotide
augaccuaacaugucuuag

SEQ ID NO: 808194 - RNA, 19 nt, Artificial Sequence
  Description of Artificial Sequence: Synthetic oligonucleotide
ucuuaagguagcgcuguga

SEQ ID NO: 808195 - RNA, 19 nt, Artificial Sequence
  Description of Artificial Sequence: Synthetic oligonucleotide
ucuagaccuacaacaucaa

SEQ ID NO: 808196 - RNA, 19 nt, Artificial Sequence
  Description of Artificial Sequence: Synthetic oligonucleotide
uguaugugugugugugugu

SEQ ID NO: 808197 - RNA, 19 nt, Artificial Sequence
  Description of Artificial Sequence: Synthetic oligonucleotide
ggugucacaugccuagaag

SEQ ID NO: 808198 - RNA, 19 nt, Artificial Sequence
  Description of Artificial Sequence: Synthetic oligonucleotide
agcauuaggugaugugagu

SEQ ID NO: 808199 - RNA, 19 nt, Artificial Sequence
  Description of Artificial Sequence: Synthetic oligonucleotide
uuugcaggcgguggcauac

SEQ ID NO: 808200 - RNA, 19 nt, Artificial Sequence
  Description of Artificial Sequence: Synthetic oligonucleotide
agguaagaggcucccaaau

SEQ ID NO: 808201 - RNA, 19 nt, Artificial Sequence
  Description of Artificial Sequence: Synthetic oligonucleotide
uacagacguagcuagcauu

SEQ ID NO: 808202 - RNA, 19 nt, Artificial Sequence
  Description of Artificial Sequence: Synthetic oligonucleotide
gagggugaauucacgauuc

SEQ ID NO: 808203 - RNA, 19 nt, Artificial Sequence
  Description of Artificial Sequence: Synthetic oligonucleotide
ucugcaaauuggagacaga

SEQ ID NO: 808204 - RNA, 19 nt, Artificial Sequence
  Description of Artificial Sequence: Synthetic oligonucleotide
ugaccgcgccuacugaucu

SEQ ID NO: 808205 - RNA, 19 nt, Artificial Sequence
  Description of Artificial Sequence: Synthetic oligonucleotide
ucauacggaaagagcuagu

SEQ ID NO: 808206 - RNA, 19 nt, Artificial Sequence
  Description of Artificial Sequence: Synthetic oligonucleotide
guguaugugugugugugug

SEQ ID NO: 808207 - RNA, 19 nt, Artificial Sequence
  Description of Artificial Sequence: Synthetic oligonucleotide
cuuagagccaucucacaaa

SEQ ID NO: 808208 - RNA, 19 nt, Artificial Sequence
  Description of Artificial Sequence: Synthetic oligonucleotide
aucaccucuuaagguagcg

SEQ ID NO: 808209 - RNA, 19 nt, Artificial Sequence
  Description of Artificial Sequence: Synthetic oligonucleotide
accgcgccuacugaucucc

SEQ ID NO: 808210 - RNA, 19 nt, Artificial Sequence
  Description of Artificial Sequence: Synthetic oligonucleotide
gcaaggaacguauaaaagu

SEQ ID NO: 808211 - RNA, 19 nt, Artificial Sequence
  Description of Artificial Sequence: Synthetic oligonucleotide
auaaacagagcagguggga

SEQ ID NO: 808212 - RNA, 19 nt, Artificial Sequence
  Description of Artificial Sequence: Synthetic oligonucleotide
gcuuaagugacagugcuca

SEQ ID NO: 808213 - RNA, 19 nt, Artificial Sequence
  Description of Artificial Sequence: Synthetic oligonucleotide
gcuuuucccauccuugccc

SEQ ID NO: 808214 - RNA, 19 nt, Artificial Sequence
  Description of Artificial Sequence: Synthetic oligonucleotide
agcaucguccaggugucac

SEQ ID NO: 808215 - RNA, 19 nt, Artificial Sequence
  Description of Artificial Sequence: Synthetic oligonucleotide
uaugugugugugugugugu

SEQ ID NO: 808216 - RNA, 19 nt, Artificial Sequence
  Description of Artificial Sequence: Synthetic oligonucleotide
acgucuaaacaagcugcac

SEQ ID NO: 808217 - RNA, 19 nt, Artificial Sequence
  Description of Artificial Sequence: Synthetic oligonucleotide
gaauacuugcuuuucccau

SEQ ID NO: 808218 - RNA, 19 nt, Artificial Sequence
  Description of Artificial Sequence: Synthetic oligonucleotide
auucacgauuccacuuccc

SEQ ID NO: 808219 - RNA, 19 nt, Artificial Sequence
  Description of Artificial Sequence: Synthetic oligonucleotide
ggcaacuuucccaagacuc

SEQ ID NO: 808220 - RNA, 19 nt, Artificial Sequence
  Description of Artificial Sequence: Synthetic oligonucleotide
guggagaacacagcuuaag

SEQ ID NO: 808221 - RNA, 19 nt, Artificial Sequence
  Description of Artificial Sequence: Synthetic oligonucleotide
gaugaccuaacaugucuua

SEQ ID NO: 808222 - RNA, 19 nt, Artificial Sequence
  Description of Artificial Sequence: Synthetic oligonucleotide
augugugugugugugugug

SEQ ID NO: 808223 - RNA, 19 nt, Artificial Sequence
  Description of Artificial Sequence: Synthetic oligonucleotide
auugcaccuuauaaugucu

SEQ ID NO: 808224 - RNA, 19 nt, Artificial Sequence
  Description of Artificial Sequence: Synthetic oligonucleotide
acaugucuuagagccaucu

SEQ ID NO: 808225 - RNA, 19 nt, Artificial Sequence
  Description of Artificial Sequence: Synthetic oligonucleotide
ugcgaugaaaugucaucua

SEQ ID NO: 808226 - RNA, 19 nt, Artificial Sequence
  Description of Artificial Sequence: Synthetic oligonucleotide
caaggaacguauaaaaguu

SEQ ID NO: 808227 - RNA, 19 nt, Artificial Sequence
  Description of Artificial Sequence: Synthetic oligonucleotide
ucaccucuuaagguagcgc

SEQ ID NO: 808228 - RNA, 19 nt, Artificial Sequence
  Description of Artificial Sequence: Synthetic oligonucleotide
caugccuagaaggucacca

SEQ ID NO: 808229 - RNA, 19 nt, Artificial Sequence
  Description of Artificial Sequence: Synthetic oligonucleotide
uaccuaaagggcacauuuu

SEQ ID NO: 808230 - RNA, 19 nt, Artificial Sequence
  Description of Artificial Sequence: Synthetic oligonucleotide
ugugugugugugugugucu

SEQ ID NO: 808231 - RNA, 19 nt, Artificial Sequence
  Description of Artificial Sequence: Synthetic oligonucleotide
auggcggucgggcggcggc

SEQ ID NO: 808232 - RNA, 19 nt, Artificial Sequence
  Description of Artificial Sequence: Synthetic oligonucleotide
gucucuuaagaaucaccuc

SEQ ID NO: 808233 - RNA, 19 nt, Artificial Sequence
  Description of Artificial Sequence: Synthetic oligonucleotide
ggaaauacagggugagaga

SEQ ID NO: 808234 - RNA, 19 nt, Artificial Sequence
  Description of Artificial Sequence: Synthetic oligonucleotide
ugugugugugugugugugu

SEQ ID NO: 808235 - RNA, 19 nt, Artificial Sequence
  Description of Artificial Sequence: Synthetic oligonucleotide
agcuauacagacguagcua

SEQ ID NO: 808236 - RNA, 19 nt, Artificial Sequence
  Description of Artificial Sequence: Synthetic oligonucleotide
gguaagaggcucccaaauc

SEQ ID NO: 808237 - RNA, 19 nt, Artificial Sequence
  Description of Artificial Sequence: Synthetic oligonucleotide
uugccccaaacgaucggac

SEQ ID NO: 808238 - RNA, 19 nt, Artificial Sequence
  Description of Artificial Sequence: Synthetic oligonucleotide
agaucauacugagggccag

SEQ ID NO: 808239 - RNA, 19 nt, Artificial Sequence
  Description of Artificial Sequence: Synthetic oligonucleotide
aacaugucuuagagccauc

SEQ ID NO: 808240 - RNA, 19 nt, Artificial Sequence
  Description of Artificial Sequence: Synthetic oligonucleotide
cuaacaugucuuagagcca

SEQ ID NO: 808241 - RNA, 19 nt, Artificial Sequence
  Description of Artificial Sequence: Synthetic oligonucleotide
gugugugugugugugugug

SEQ ID NO: 808242 - RNA, 19 nt, Artificial Sequence
  Description of Artificial Sequence: Synthetic oligonucleotide
ugugugugugugugucucu

SEQ ID NO: 808243 - RNA, 19 nt, Artificial Sequence
  Description of Artificial Sequence: Synthetic oligonucleotide
ggacagauaaaaggagacc

SEQ ID NO: 808244 - RNA, 19 nt, Artificial Sequence
  Description of Artificial Sequence: Synthetic oligonucleotide
guagcgcugugacauguca

SEQ ID NO: 808245 - RNA, 19 nt, Artificial Sequence
  Description of Artificial Sequence: Synthetic oligonucleotide
agcuuaagugacagugcuc

SEQ ID NO: 808246 - RNA, 19 nt, Artificial Sequence
  Description of Artificial Sequence: Synthetic oligonucleotide
cccauccgagguaagaggc

SEQ ID NO: 808247 - RNA, 19 nt, Artificial Sequence
  Description of Artificial Sequence: Synthetic oligonucleotide
ccaaaucacgucuaaacaa

SEQ ID NO: 808248 - RNA, 19 nt, Artificial Sequence
  Description of Artificial Sequence: Synthetic oligonucleotide
ggaacguauaaaaguucag

SEQ ID NO: 808249 - RNA, 19 nt, Artificial Sequence
  Description of Artificial Sequence: Synthetic oligonucleotide
ugugucgguuucugcaaau

SEQ ID NO: 808250 - RNA, 19 nt, Artificial Sequence
  Description of Artificial Sequence: Synthetic oligonucleotide
cuacgaugugggcuggcug

SEQ ID NO: 808251 - RNA, 19 nt, Artificial Sequence
  Description of Artificial Sequence: Synthetic oligonucleotide
auccgagguaagaggcucc

SEQ ID NO: 808252 - RNA, 19 nt, Artificial Sequence
  Description of Artificial Sequence: Synthetic oligonucleotide
uagcgcugugacaugucaa

SEQ ID NO: 808253 - RNA, 19 nt, Artificial Sequence
  Description of Artificial Sequence: Synthetic oligonucleotide
uaucuacgaugugggcugg

SEQ ID NO: 808254 - RNA, 19 nt, Artificial Sequence
  Description of Artificial Sequence: Synthetic oligonucleotide
acagacguagcuagcauuu

SEQ ID NO: 808255 - RNA, 19 nt, Artificial Sequence
  Description of Artificial Sequence: Synthetic oligonucleotide
aggaucugaccgcgccuac

SEQ ID NO: 808256 - RNA, 19 nt, Artificial Sequence
  Description of Artificial Sequence: Synthetic oligonucleotide
gaccuacaacaucaauaca

SEQ ID NO: 808257 - RNA, 19 nt, Artificial Sequence
  Description of Artificial Sequence: Synthetic oligonucleotide
gugacaugucaaauaggac

SEQ ID NO: 808258 - RNA, 19 nt, Artificial Sequence
  Description of Artificial Sequence: Synthetic oligonucleotide
gagguaagaggcucccaaa

SEQ ID NO: 808259 - RNA, 19 nt, Artificial Sequence
  Description of Artificial Sequence: Synthetic oligonucleotide
acaugccuagaaggucacc

SEQ ID NO: 808260 - RNA, 19 nt, Artificial Sequence
  Description of Artificial Sequence: Synthetic oligonucleotide
uccgagguaagaggcuccc

SEQ ID NO: 808261 - RNA, 19 nt, Artificial Sequence
  Description of Artificial Sequence: Synthetic oligonucleotide
cauccgagguaagaggcuc

SEQ ID NO: 808262 - RNA, 19 nt, Artificial Sequence
  Description of Artificial Sequence: Synthetic oligonucleotide
cuuuuagaggcccgaagcu

SEQ ID NO: 808263 - RNA, 19 nt, Artificial Sequence
  Description of Artificial Sequence: Synthetic oligonucleotide
cauuaggugaugugagucu

SEQ ID NO: 808264 - RNA, 19 nt, Artificial Sequence
  Description of Artificial Sequence: Synthetic oligonucleotide
gugugugugugucucuuaa

SEQ ID NO: 808265 - RNA, 19 nt, Artificial Sequence
  Description of Artificial Sequence: Synthetic oligonucleotide
aggugucacaugccuagaa

SEQ ID NO: 808266 - RNA, 19 nt, Artificial Sequence
  Description of Artificial Sequence: Synthetic oligonucleotide
gagcagugagaggacagca

SEQ ID NO: 808267 - RNA, 19 nt, Artificial Sequence
  Description of Artificial Sequence: Synthetic oligonucleotide
gacguagcuagcauuuugu

SEQ ID NO: 808268 - RNA, 19 nt, Artificial Sequence
  Description of Artificial Sequence: Synthetic oligonucleotide
acgaucggacauugcgaug

SEQ ID NO: 808269 - RNA, 19 nt, Artificial Sequence
  Description of Artificial Sequence: Synthetic oligonucleotide
ugaugugagucuggccgca

SEQ ID NO: 808270 - RNA, 19 nt, Artificial Sequence
  Description of Artificial Sequence: Synthetic oligonucleotide
caucuaguaaggaaauuuu

SEQ ID NO: 808271 - RNA, 19 nt, Artificial Sequence
  Description of Artificial Sequence: Synthetic oligonucleotide
caccucuuaagguagcgcu

SEQ ID NO: 808272 - RNA, 19 nt, Artificial Sequence
  Description of Artificial Sequence: Synthetic oligonucleotide
ugugugugugugucucuua

SEQ ID NO: 808273 - RNA, 19 nt, Artificial Sequence
  Description of Artificial Sequence: Synthetic oligonucleotide
guaagccaugucuaggaau

SEQ ID NO: 808274 - RNA, 19 nt, Artificial Sequence
  Description of Artificial Sequence: Synthetic oligonucleotide
gcauuaggugaugugaguc

SEQ ID NO: 808275 - RNA, 19 nt, Artificial Sequence
  Description of Artificial Sequence: Synthetic oligonucleotide
uggccgcauuucuaaggug

SEQ ID NO: 808276 - RNA, 19 nt, Artificial Sequence
  Description of Artificial Sequence: Synthetic oligonucleotide
accucuuaagguagcgcug

SEQ ID NO: 808277 - RNA, 19 nt, Artificial Sequence
  Description of Artificial Sequence: Synthetic oligonucleotide
acgaugugggcuggcugac

SEQ ID NO: 808278 - RNA, 19 nt, Artificial Sequence
  Description of Artificial Sequence: Synthetic oligonucleotide
cauacggaaagagcuagua

SEQ ID NO: 808279 - RNA, 19 nt, Artificial Sequence
  Description of Artificial Sequence: Synthetic oligonucleotide
guguguguguguguguguc

SEQ ID NO: 808280 - RNA, 19 nt, Artificial Sequence
  Description of Artificial Sequence: Synthetic oligonucleotide
agaugaccuaacaugucuu

SEQ ID NO: 808281 - RNA, 19 nt, Artificial Sequence
  Description of Artificial Sequence: Synthetic oligonucleotide
agggacuuuuagaggcccg

SEQ ID NO: 808282 - RNA, 19 nt, Artificial Sequence
  Description of Artificial Sequence: Synthetic oligonucleotide
cuaguacaaucacauauuu

SEQ ID NO: 808283 - RNA, 19 nt, Artificial Sequence
  Description of Artificial Sequence: Synthetic oligonucleotide
gaggacagcaaggaacgua

SEQ ID NO: 808284 - RNA, 19 nt, Artificial Sequence
  Description of Artificial Sequence: Synthetic oligonucleotide
caggcgggcagaucugcac

SEQ ID NO: 808285 - RNA, 19 nt, Artificial Sequence
  Description of Artificial Sequence: Synthetic oligonucleotide
aaacccggcugcggcugcg

SEQ ID NO: 808286 - RNA, 19 nt, Artificial Sequence
  Description of Artificial Sequence: Synthetic oligonucleotide
gucaaauaggacagauaaa

SEQ ID NO: 808287 - RNA, 19 nt, Artificial Sequence
  Description of Artificial Sequence: Synthetic oligonucleotide
cugaccgcgccuacugauc

SEQ ID NO: 808288 - RNA, 19 nt, Artificial Sequence
  Description of Artificial Sequence: Synthetic oligonucleotide
gugugugugugugugucuc

SEQ ID NO: 808289 - RNA, 19 nt, Artificial Sequence
  Description of Artificial Sequence: Synthetic oligonucleotide
acauugcgaugaaauguca

SEQ ID NO: 808290 - RNA, 19 nt, Artificial Sequence
  Description of Artificial Sequence: Synthetic oligonucleotide
cuggucugcguccgcgagc

SEQ ID NO: 808291 - RNA, 19 nt, Artificial Sequence
  Description of Artificial Sequence: Synthetic oligonucleotide
cuuucccaagacucuguaa

SEQ ID NO: 808292 - RNA, 19 nt, Artificial Sequence
  Description of Artificial Sequence: Synthetic oligonucleotide
gcauacgccgggcuguggc

SEQ ID NO: 808293 - RNA, 19 nt, Artificial Sequence
  Description of Artificial Sequence: Synthetic oligonucleotide
cccagaaucuaauugcaaa

SEQ ID NO: 808294 - RNA, 19 nt, Artificial Sequence
  Description of Artificial Sequence: Synthetic oligonucleotide
cucuuaagguagcgcugug

SEQ ID NO: 808295 - RNA, 19 nt, Artificial Sequence
  Description of Artificial Sequence: Synthetic oligonucleotide
cagcuuaagugacagugcu

SEQ ID NO: 808296 - RNA, 19 nt, Artificial Sequence
  Description of Artificial Sequence: Synthetic oligonucleotide
agguagcgcugugacaugu

SEQ ID NO: 808297 - RNA, 19 nt, Artificial Sequence
  Description of Artificial Sequence: Synthetic oligonucleotide
ggcgagggugaauucacga

SEQ ID NO: 808298 - RNA, 19 nt, Artificial Sequence
  Description of Artificial Sequence: Synthetic oligonucleotide
uggcagguuugcaggcggu

SEQ ID NO: 808299 - RNA, 19 nt, Artificial Sequence
  Description of Artificial Sequence: Synthetic oligonucleotide
augucaaauaggacagaua

SEQ ID NO: 808300 - RNA, 19 nt, Artificial Sequence
  Description of Artificial Sequence: Synthetic oligonucleotide
aggagcuuucgggagcaga

SEQ ID NO: 808301 - RNA, 19 nt, Artificial Sequence
  Description of Artificial Sequence: Synthetic oligonucleotide
ccuacaacaucaauacaua

SEQ ID NO: 808302 - RNA, 19 nt, Artificial Sequence
  Description of Artificial Sequence: Synthetic oligonucleotide
ugcgacuccggcggcugag

SEQ ID NO: 808303 - RNA, 19 nt, Artificial Sequence
  Description of Artificial Sequence: Synthetic oligonucleotide
ggcgguggcauacgccggg

SEQ ID NO: 808304 - RNA, 19 nt, Artificial Sequence
  Description of Artificial Sequence: Synthetic oligonucleotide
cuuggcuugaccagaucau

SEQ ID NO: 808305 - RNA, 19 nt, Artificial Sequence
  Description of Artificial Sequence: Synthetic oligonucleotide
guacaccuuuagcaucguc

SEQ ID NO: 808306 - RNA, 19 nt, Artificial Sequence
  Description of Artificial Sequence: Synthetic oligonucleotide
gagcuaguacaaucacaua

SEQ ID NO: 808307 - RNA, 19 nt, Artificial Sequence
  Description of Artificial Sequence: Synthetic oligonucleotide
cauugcgaugaaaugucau

SEQ ID NO: 808308 - RNA, 19 nt, Artificial Sequence
  Description of Artificial Sequence: Synthetic oligonucleotide
ggcaccgcucccaauuugc

SEQ ID NO: 808309 - RNA, 19 nt, Artificial Sequence
  Description of Artificial Sequence: Synthetic oligonucleotide
aucucccuuuauacuuguc

SEQ ID NO: 808310 - RNA, 19 nt, Artificial Sequence
  Description of Artificial Sequence: Synthetic oligonucleotide
cuaguguuucuugucuuua

SEQ ID NO: 808311 - RNA, 19 nt, Artificial Sequence
  Description of Artificial Sequence: Synthetic oligonucleotide
ucggcaccgcucccaauuu

SEQ ID NO: 808312 - RNA, 19 nt, Artificial Sequence
  Description of Artificial Sequence: Synthetic oligonucleotide
acugaaccggagggaagga

SEQ ID NO: 808313 - RNA, 19 nt, Artificial Sequence
  Description of Artificial Sequence: Synthetic oligonucleotide
gggcacuaucacaauguug

SEQ ID NO: 808314 - RNA, 19 nt, Artificial Sequence
  Description of Artificial Sequence: Synthetic oligonucleotide
caacagggacugaaccgga

SEQ ID NO: 808315 - RNA, 19 nt, Artificial Sequence
  Description of Artificial Sequence: Synthetic oligonucleotide
cauacgccgggcuguggca

SEQ ID NO: 808316 - RNA, 19 nt, Artificial Sequence
  Description of Artificial Sequence: Synthetic oligonucleotide
cucuuaagaaucaccucuu

SEQ ID NO: 808317 - RNA, 19 nt, Artificial Sequence
  Description of Artificial Sequence: Synthetic oligonucleotide
augugagucuggccgcauu

SEQ ID NO: 808318 - RNA, 19 nt, Artificial Sequence
  Description of Artificial Sequence: Synthetic oligonucleotide
ugcguccgcgagcgacggg

SEQ ID NO: 808319 - RNA, 19 nt, Artificial Sequence
  Description of Artificial Sequence: Synthetic oligonucleotide
caaacccggcugcggcugc

SEQ ID NO: 808320 - RNA, 19 nt, Artificial Sequence
  Description of Artificial Sequence: Synthetic oligonucleotide
gaucggacauugcgaugaa

SEQ ID NO: 808321 - RNA, 19 nt, Artificial Sequence
  Description of Artificial Sequence: Synthetic oligonucleotide
cuggccgcauuucuaaggu

SEQ ID NO: 808322 - RNA, 19 nt, Artificial Sequence
  Description of Artificial Sequence: Synthetic oligonucleotide
uggcccauccugucccguc

SEQ ID NO: 808323 - RNA, 19 nt, Artificial Sequence
  Description of Artificial Sequence: Synthetic oligonucleotide
ccaaacgaucggacauugc

SEQ ID NO: 808324 - RNA, 19 nt, Artificial Sequence
  Description of Artificial Sequence: Synthetic oligonucleotide
uacgccgggcuguggcaac

SEQ ID NO: 808325 - RNA, 19 nt, Artificial Sequence
  Description of Artificial Sequence: Synthetic oligonucleotide
ugagggccagggacuuuua

SEQ ID NO: 808326 - RNA, 19 nt, Artificial Sequence
  Description of Artificial Sequence: Synthetic oligonucleotide
uggcauacgccgggcugug

SEQ ID NO: 808327 - RNA, 19 nt, Artificial Sequence
  Description of Artificial Sequence: Synthetic oligonucleotide
ccagaaucuaauugcaaau

SEQ ID NO: 808328 - RNA, 19 nt, Artificial Sequence
  Description of Artificial Sequence: Synthetic oligonucleotide
ccguccuugggcacuauca

SEQ ID NO: 808329 - RNA, 19 nt, Artificial Sequence
  Description of Artificial Sequence: Synthetic oligonucleotide
uggggucguuuccuuuguu

SEQ ID NO: 808330 - RNA, 19 nt, Artificial Sequence
  Description of Artificial Sequence: Synthetic oligonucleotide
cgguuucugcaaauuggag

SEQ ID NO: 808331 - RNA, 19 nt, Artificial Sequence
  Description of Artificial Sequence: Synthetic oligonucleotide
cuagaccuacaacaucaau

SEQ ID NO: 808332 - RNA, 19 nt, Artificial Sequence
  Description of Artificial Sequence: Synthetic oligonucleotide
caauuugccuggucugcgu

SEQ ID NO: 808333 - RNA, 19 nt, Artificial Sequence
  Description of Artificial Sequence: Synthetic oligonucleotide
cugcguccgcgagcgacgg

SEQ ID NO: 808334 - RNA, 19 nt, Artificial Sequence
  Description of Artificial Sequence: Synthetic oligonucleotide
aaggagggcgagggugaau

SEQ ID NO: 808335 - RNA, 19 nt, Artificial Sequence
  Description of Artificial Sequence: Synthetic oligonucleotide
gcaucguccaggugucaca

SEQ ID NO: 808336 - RNA, 19 nt, Artificial Sequence
  Description of Artificial Sequence: Synthetic oligonucleotide
aucggacauugcgaugaaa

SEQ ID NO: 808337 - RNA, 19 nt, Artificial Sequence
  Description of Artificial Sequence: Synthetic oligonucleotide
auacgccgggcuguggcaa

SEQ ID NO: 808338 - RNA, 19 nt, Artificial Sequence
  Description of Artificial Sequence: Synthetic oligonucleotide
gggacuuuuagaggcccga

SEQ ID NO: 808339 - RNA, 19 nt, Artificial Sequence
  Description of Artificial Sequence: Synthetic oligonucleotide
gaccgcgccuacugaucuc

SEQ ID NO: 808340 - RNA, 19 nt, Artificial Sequence
  Description of Artificial Sequence: Synthetic oligonucleotide
cgaucggacauugcgauga

SEQ ID NO: 808341 - RNA, 19 nt, Artificial Sequence
  Description of Artificial Sequence: Synthetic oligonucleotide
gguguaugugugugugugu

SEQ ID NO: 808342 - RNA, 19 nt, Artificial Sequence
  Description of Artificial Sequence: Synthetic oligonucleotide
ccuggucugcguccgcgag

SEQ ID NO: 808343 - RNA, 19 nt, Artificial Sequence
  Description of Artificial Sequence: Synthetic oligonucleotide
uagcaucguccagguguca

SEQ ID NO: 808344 - RNA, 19 nt, Artificial Sequence
  Description of Artificial Sequence: Synthetic oligonucleotide
agggcgggaaggagggagu

SEQ ID NO: 808345 - RNA, 19 nt, Artificial Sequence
  Description of Artificial Sequence: Synthetic oligonucleotide
aggcuaccuaaagggcaca

SEQ ID NO: 808346 - RNA, 19 nt, Artificial Sequence
  Description of Artificial Sequence: Synthetic oligonucleotide
cauccccaacacugagcca

SEQ ID NO: 808347 - RNA, 19 nt, Artificial Sequence
  Description of Artificial Sequence: Synthetic oligonucleotide
aggcccgaagcugcccucu

SEQ ID NO: 808348 - RNA, 19 nt, Artificial Sequence
  Description of Artificial Sequence: Synthetic oligonucleotide
guggcauacgccgggcugu

SEQ ID NO: 808349 - RNA, 19 nt, Artificial Sequence
  Description of Artificial Sequence: Synthetic oligonucleotide
cuggcugacaauggaacuu

SEQ ID NO: 808350 - RNA, 19 nt, Artificial Sequence
  Description of Artificial Sequence: Synthetic oligonucleotide
cugguggagaacacagcuu

SEQ ID NO: 808351 - RNA, 19 nt, Artificial Sequence
  Description of Artificial Sequence: Synthetic oligonucleotide
ccuugcccuggguuauuug

SEQ ID NO: 808352 - RNA, 19 nt, Artificial Sequence
  Description of Artificial Sequence: Synthetic oligonucleotide
gccccaaacgaucggacau

SEQ ID NO: 808353 - RNA, 19 nt, Artificial Sequence
  Description of Artificial Sequence: Synthetic oligonucleotide
gacgggcccgggcgauggc

SEQ ID NO: 808354 - RNA, 19 nt, Artificial Sequence
  Description of Artificial Sequence: Synthetic oligonucleotide
cgagguaagaggcucccaa

SEQ ID NO: 808355 - RNA, 19 nt, Artificial Sequence
  Description of Artificial Sequence: Synthetic oligonucleotide
ccaagacucuguaagccau

SEQ ID NO: 808356 - RNA, 19 nt, Artificial Sequence
  Description of Artificial Sequence: Synthetic oligonucleotide
gguggagaacacagcuuaa

SEQ ID NO: 808357 - RNA, 19 nt, Artificial Sequence
  Description of Artificial Sequence: Synthetic oligonucleotide
ggacuuuuagaggcccgaa

SEQ ID NO: 808358 - RNA, 19 nt, Artificial Sequence
  Description of Artificial Sequence: Synthetic oligonucleotide
gcgagggugaauucacgau

SEQ ID NO: 808359 - RNA, 19 nt, Artificial Sequence
  Description of Artificial Sequence: Synthetic oligonucleotide
caucguccaggugucacau

SEQ ID NO: 808360 - RNA, 19 nt, Artificial Sequence
  Description of Artificial Sequence: Synthetic oligonucleotide
caggugucacaugccuaga

SEQ ID NO: 808361 - RNA, 19 nt, Artificial Sequence
  Description of Artificial Sequence: Synthetic oligonucleotide
cgauuccacuucccauccg

SEQ ID NO: 808362 - RNA, 19 nt, Artificial Sequence
  Description of Artificial Sequence: Synthetic oligonucleotide
ccauccugucccguccuug

SEQ ID NO: 808363 - RNA, 19 nt, Artificial Sequence
  Description of Artificial Sequence: Synthetic oligonucleotide
cccuggguuauuugcccca

SEQ ID NO: 808364 - RNA, 19 nt, Artificial Sequence
  Description of Artificial Sequence: Synthetic oligonucleotide
guucagcuauacagacgua

SEQ ID NO: 808365 - RNA, 19 nt, Artificial Sequence
  Description of Artificial Sequence: Synthetic oligonucleotide
gcgagcgacgggcccgggc

SEQ ID NO: 808366 - RNA, 19 nt, Artificial Sequence
  Description of Artificial Sequence: Synthetic oligonucleotide
cgcugugacaugucaaaua

SEQ ID NO: 808367 - RNA, 19 nt, Artificial Sequence
  Description of Artificial Sequence: Synthetic oligonucleotide
gaugugagucuggccgcau

SEQ ID NO: 808368 - RNA, 19 nt, Artificial Sequence
  Description of Artificial Sequence: Synthetic oligonucleotide
gugugugugugugucucuu

SEQ ID NO: 808369 - RNA, 19 nt, Artificial Sequence
  Description of Artificial Sequence: Synthetic oligonucleotide
ggcccgaagcugcccucug

SEQ ID NO: 808370 - RNA, 19 nt, Artificial Sequence
  Description of Artificial Sequence: Synthetic oligonucleotide
cguagcuagcauuuuguuu

SEQ ID NO: 808371 - RNA, 19 nt, Artificial Sequence
  Description of Artificial Sequence: Synthetic oligonucleotide
agcgacgggcccgggcgau

SEQ ID NO: 808372 - RNA, 19 nt, Artificial Sequence
  Description of Artificial Sequence: Synthetic oligonucleotide
cuccagcuauaaugacccu

SEQ ID NO: 808373 - RNA, 19 nt, Artificial Sequence
  Description of Artificial Sequence: Synthetic oligonucleotide
cugucacacuggaacucuu

SEQ ID NO: 808374 - RNA, 19 nt, Artificial Sequence
  Description of Artificial Sequence: Synthetic oligonucleotide
auccuugcccuggguuauu

SEQ ID NO: 808375 - RNA, 19 nt, Artificial Sequence
  Description of Artificial Sequence: Synthetic oligonucleotide
gccgcauuucuaaggugua

SEQ ID NO: 808376 - RNA, 19 nt, Artificial Sequence
  Description of Artificial Sequence: Synthetic oligonucleotide
ccgcgccuacugaucuccc

SEQ ID NO: 808377 - RNA, 19 nt, Artificial Sequence
  Description of Artificial Sequence: Synthetic oligonucleotide
ccauccgagguaagaggcu

SEQ ID NO: 808378 - RNA, 19 nt, Artificial Sequence
  Description of Artificial Sequence: Synthetic oligonucleotide
ggaucugaccgcgccuacu

SEQ ID NO: 808379 - RNA, 19 nt, Artificial Sequence
  Description of Artificial Sequence: Synthetic oligonucleotide
gcgccuacugaucucccuu

SEQ ID NO: 808380 - RNA, 19 nt, Artificial Sequence
  Description of Artificial Sequence: Synthetic oligonucleotide
ggacagcaaggaacguaua

SEQ ID NO: 808381 - RNA, 19 nt, Artificial Sequence
  Description of Artificial Sequence: Synthetic oligonucleotide
cgagggugaauucacgauu

SEQ ID NO: 808382 - RNA, 19 nt, Artificial Sequence
  Description of Artificial Sequence: Synthetic oligonucleotide
ggcggcugagaggcuguca

SEQ ID NO: 808383 - RNA, 19 nt, Artificial Sequence
  Description of Artificial Sequence: Synthetic oligonucleotide
gcaggcgggcagaucugca

SEQ ID NO: 808384 - RNA, 19 nt, Artificial Sequence
  Description of Artificial Sequence: Synthetic oligonucleotide
cgacgggcccgggcgaugg

SEQ ID NO: 808385 - RNA, 19 nt, Artificial Sequence
  Description of Artificial Sequence: Synthetic oligonucleotide
gcacugcacaggagacuca

SEQ ID NO: 808386 - RNA, 19 nt, Artificial Sequence
  Description of Artificial Sequence: Synthetic oligonucleotide
ggcuaccuaaagggcacau

SEQ ID NO: 808387 - RNA, 19 nt, Artificial Sequence
  Description of Artificial Sequence: Synthetic oligonucleotide
cggcaccgcucccaauuug

SEQ ID NO: 808388 - RNA, 19 nt, Artificial Sequence
  Description of Artificial Sequence: Synthetic oligonucleotide
ucccguccuugggcacuau

SEQ ID NO: 808389 - RNA, 19 nt, Artificial Sequence
  Description of Artificial Sequence: Synthetic oligonucleotide
gcgacuccggcggcugaga

SEQ ID NO: 808390 - RNA, 19 nt, Artificial Sequence
  Description of Artificial Sequence: Synthetic oligonucleotide
gcgcugugacaugucaaau

SEQ ID NO: 808391 - RNA, 19 nt, Artificial Sequence
  Description of Artificial Sequence: Synthetic oligonucleotide
gcccgaagcugcccucugu

SEQ ID NO: 808392 - RNA, 19 nt, Artificial Sequence
  Description of Artificial Sequence: Synthetic oligonucleotide
ccccaacacugagccacuc

SEQ ID NO: 808393 - RNA, 19 nt, Artificial Sequence
  Description of Artificial Sequence: Synthetic oligonucleotide
ccgagguaagaggcuccca

SEQ ID NO: 808394 - RNA, 19 nt, Artificial Sequence
  Description of Artificial Sequence: Synthetic oligonucleotide
gcgacgggcccgggcgaug

SEQ ID NO: 808395 - RNA, 19 nt, Artificial Sequence
  Description of Artificial Sequence: Synthetic oligonucleotide
ccgcauuucuaagguguau

SEQ ID NO: 808396 - RNA, 19 nt, Artificial Sequence
  Description of Artificial Sequence: Synthetic oligonucleotide
ccccaaacgaucggacauu

SEQ ID NO: 808397 - RNA, 19 nt, Artificial Sequence
  Description of Artificial Sequence: Synthetic oligonucleotide
cgcgccuacugaucucccu

SEQ ID NO: 808398 - RNA, 19 nt, Artificial Sequence
  Description of Artificial Sequence: Synthetic oligonucleotide
cgauggcggucgggcggcg

SEQ ID NO: 808399 - RNA, 19 nt, Artificial Sequence
  Description of Artificial Sequence: Synthetic oligonucleotide
cgcgagcgacgggcccggg

SEQ ID NO: 808400 - RNA, 19 nt, Artificial Sequence
  Description of Artificial Sequence: Synthetic oligonucleotide
aaaugauucaaacaucuuc

SEQ ID NO: 808401 - RNA, 19 nt, Artificial Sequence
  Description of Artificial Sequence: Synthetic oligonucleotide
acuaaaaugucauagguuc

SEQ ID NO: 808402 - RNA, 19 nt, Artificial Sequence
  Description of Artificial Sequence: Synthetic oligonucleotide
aaugauucaaacaucuucc

SEQ ID NO: 808403 - RNA, 19 nt, Artificial Sequence
  Description of Artificial Sequence: Synthetic oligonucleotide
ucuucuaaaaguuaaccgg

SEQ ID NO: 808404 - RNA, 19 nt, Artificial Sequence
  Description of Artificial Sequence: Synthetic oligonucleotide
aaucaucacaucuacugcc

SEQ ID NO: 808405 - RNA, 19 nt, Artificial Sequence
  Description of Artificial Sequence: Synthetic oligonucleotide
aacagaucuaaguuggagc

SEQ ID NO: 808406 - RNA, 19 nt, Artificial Sequence
  Description of Artificial Sequence: Synthetic oligonucleotide
uauaauauaaaagcugucg

SEQ ID NO: 808407 - RNA, 19 nt, Artificial Sequence
  Description of Artificial Sequence: Synthetic oligonucleotide
uguaacauaggcuacuuag

SEQ ID NO: 808408 - RNA, 19 nt, Artificial Sequence
  Description of Artificial Sequence: Synthetic oligonucleotide
auaauauaaaagcugucgg

SEQ ID NO: 808409 - RNA, 19 nt, Artificial Sequence
  Description of Artificial Sequence: Synthetic oligonucleotide
uuaacuacaagugaccacg

SEQ ID NO: 808410 - RNA, 19 nt, Artificial Sequence
  Description of Artificial Sequence: Synthetic oligonucleotide
uauuauucggucaaagugc

SEQ ID NO: 808411 - RNA, 19 nt, Artificial Sequence
  Description of Artificial Sequence: Synthetic oligonucleotide
acagaucuaaguuggagcc

SEQ ID NO: 808412 - RNA, 19 nt, Artificial Sequence
  Description of Artificial Sequence: Synthetic oligonucleotide
agucggaacuuccagaucc

SEQ ID NO: 808413 - RNA, 19 nt, Artificial Sequence
  Description of Artificial Sequence: Synthetic oligonucleotide
uccuuuguuacuaaaaugu

SEQ ID NO: 808414 - RNA, 19 nt, Artificial Sequence
  Description of Artificial Sequence: Synthetic oligonucleotide
ucuagugauuuaaagagug

SEQ ID NO: 808415 - RNA, 19 nt, Artificial Sequence
  Description of Artificial Sequence: Synthetic oligonucleotide
cauacugaccaacagaacg

SEQ ID NO: 808416 - RNA, 19 nt, Artificial Sequence
  Description of Artificial Sequence: Synthetic oligonucleotide
uucuucuaaaaguuaaccg

SEQ ID NO: 808417 - RNA, 19 nt, Artificial Sequence
  Description of Artificial Sequence: Synthetic oligonucleotide
auaagauucacagccagcc

SEQ ID NO: 808418 - RNA, 19 nt, Artificial Sequence
  Description of Artificial Sequence: Synthetic oligonucleotide
aaguuaaccgguccagucc

SEQ ID NO: 808419 - RNA, 19 nt, Artificial Sequence
  Description of Artificial Sequence: Synthetic oligonucleotide
uaacauaggcuacuuaggg

SEQ ID NO: 808420 - RNA, 19 nt, Artificial Sequence
  Description of Artificial Sequence: Synthetic oligonucleotide
aacauaaguggucuaauga

SEQ ID NO: 808421 - RNA, 19 nt, Artificial Sequence
  Description of Artificial Sequence: Synthetic oligonucleotide
guuaugaccauacaauucc

SEQ ID NO: 808422 - RNA, 19 nt, Artificial Sequence
  Description of Artificial Sequence: Synthetic oligonucleotide
ugaccuuaggaaaauuugg

SEQ ID NO: 808423 - RNA, 19 nt, Artificial Sequence
  Description of Artificial Sequence: Synthetic oligonucleotide
uucuaaaugcccuuaacca

SEQ ID NO: 808424 - RNA, 19 nt, Artificial Sequence
  Description of Artificial Sequence: Synthetic oligonucleotide
guauuauucggucaaagug

SEQ ID NO: 808425 - RNA, 19 nt, Artificial Sequence
  Description of Artificial Sequence: Synthetic oligonucleotide
acuaugauucuucuaaaag

SEQ ID NO: 808426 - RNA, 19 nt, Artificial Sequence
  Description of Artificial Sequence: Synthetic oligonucleotide
guuacuaaaaugucauagg

SEQ ID NO: 808427 - RNA, 19 nt, Artificial Sequence
  Description of Artificial Sequence: Synthetic oligonucleotide
ugcuugaacauccauaacu

SEQ ID NO: 808428 - RNA, 19 nt, Artificial Sequence
  Description of Artificial Sequence: Synthetic oligonucleotide
uuacuaaaaugucauaggu

SEQ ID NO: 808429 - RNA, 19 nt, Artificial Sequence
  Description of Artificial Sequence: Synthetic oligonucleotide
acaucuacugcccaggguc

SEQ ID NO: 808430 - RNA, 19 nt, Artificial Sequence
  Description of Artificial Sequence: Synthetic oligonucleotide
augacauaaaaguugucuc

SEQ ID NO: 808431 - RNA, 19 nt, Artificial Sequence
  Description of Artificial Sequence: Synthetic oligonucleotide
uaauauaaaagcugucggc

SEQ ID NO: 808432 - RNA, 19 nt, Artificial Sequence
  Description of Artificial Sequence: Synthetic oligonucleotide
aaugcccuuaaccacagca

SEQ ID NO: 808433 - RNA, 19 nt, Artificial Sequence
  Description of Artificial Sequence: Synthetic oligonucleotide
cuuauauaccuuuuccccg

SEQ ID NO: 808434 - RNA, 19 nt, Artificial Sequence
  Description of Artificial Sequence: Synthetic oligonucleotide
gauuauucgcucuccaucc

SEQ ID NO: 808435 - RNA, 19 nt, Artificial Sequence
  Description of Artificial Sequence: Synthetic oligonucleotide
aauaacuccagcauaagau

SEQ ID NO: 808436 - RNA, 19 nt, Artificial Sequence
  Description of Artificial Sequence: Synthetic oligonucleotide
ucuaaaaguuaaccggucc

SEQ ID NO: 808437 - RNA, 19 nt, Artificial Sequence
  Description of Artificial Sequence: Synthetic oligonucleotide
auuacuaaaauggugguga

SEQ ID NO: 808438 - RNA, 19 nt, Artificial Sequence
  Description of Artificial Sequence: Synthetic oligonucleotide
aguuaaccgguccaguccc

SEQ ID NO: 808439 - RNA, 19 nt, Artificial Sequence
  Description of Artificial Sequence: Synthetic oligonucleotide
agaaccagguauuauucgg

SEQ ID NO: 808440 - RNA, 19 nt, Artificial Sequence
  Description of Artificial Sequence: Synthetic oligonucleotide
uauaggauucugcacagac

SEQ ID NO: 808441 - RNA, 19 nt, Artificial Sequence
  Description of Artificial Sequence: Synthetic oligonucleotide
gaccauacaauucccaaag

SEQ ID NO: 808442 - RNA, 19 nt, Artificial Sequence
  Description of Artificial Sequence: Synthetic oligonucleotide
aaacauaaguggucuaaug

SEQ ID NO: 808443 - RNA, 19 nt, Artificial Sequence
  Description of Artificial Sequence: Synthetic oligonucleotide
uccauaacuaagcauuuga

SEQ ID NO: 808444 - RNA, 19 nt, Artificial Sequence
  Description of Artificial Sequence: Synthetic oligonucleotide
aaguacugucccuuauggc

SEQ ID NO: 808445 - RNA, 19 nt, Artificial Sequence
  Description of Artificial Sequence: Synthetic oligonucleotide
aaaugucauagguuccccg

SEQ ID NO: 808446 - RNA, 19 nt, Artificial Sequence
  Description of Artificial Sequence: Synthetic oligonucleotide
gauuuaaagaguggcacag

SEQ ID NO: 808447 - RNA, 19 nt, Artificial Sequence
  Description of Artificial Sequence: Synthetic oligonucleotide
aguaguuaugaccauacaa

SEQ ID NO: 808448 - RNA, 19 nt, Artificial Sequence
  Description of Artificial Sequence: Synthetic oligonucleotide
uuugggaugaaccaccuuu

SEQ ID NO: 808449 - RNA, 19 nt, Artificial Sequence
  Description of Artificial Sequence: Synthetic oligonucleotide
ucuaaguuggagccaaaca

SEQ ID NO: 808450 - RNA, 19 nt, Artificial Sequence
  Description of Artificial Sequence: Synthetic oligonucleotide
auaaguggucuaaugaugg

SEQ ID NO: 808451 - RNA, 19 nt, Artificial Sequence
  Description of Artificial Sequence: Synthetic oligonucleotide
aacuacaagugaccacggc

SEQ ID NO: 808452 - RNA, 19 nt, Artificial Sequence
  Description of Artificial Sequence: Synthetic oligonucleotide
ucuaaaugcccuuaaccac

SEQ ID NO: 808453 - RNA, 19 nt, Artificial Sequence
  Description of Artificial Sequence: Synthetic oligonucleotide
cuuaggaaaauuugggauc

SEQ ID NO: 808454 - RNA, 19 nt, Artificial Sequence
  Description of Artificial Sequence: Synthetic oligonucleotide
ucaguuuugggaugaacca

SEQ ID NO: 808455 - RNA, 19 nt, Artificial Sequence
  Description of Artificial Sequence: Synthetic oligonucleotide
uccuucuaagguuugggag

SEQ ID NO: 808456 - RNA, 19 nt, Artificial Sequence
  Description of Artificial Sequence: Synthetic oligonucleotide
ugauuauucgcucuccauc

SEQ ID NO: 808457 - RNA, 19 nt, Artificial Sequence
  Description of Artificial Sequence: Synthetic oligonucleotide
aauuacuaaaaugguggug

SEQ ID NO: 808458 - RNA, 19 nt, Artificial Sequence
  Description of Artificial Sequence: Synthetic oligonucleotide
uccggcgugugaaaggucg

SEQ ID NO: 808459 - RNA, 19 nt, Artificial Sequence
  Description of Artificial Sequence: Synthetic oligonucleotide
uuuuaaucaagaugcucac

SEQ ID NO: 808460 - RNA, 19 nt, Artificial Sequence
  Description of Artificial Sequence: Synthetic oligonucleotide
uuauauaccuuuuccccga

SEQ ID NO: 808461 - RNA, 19 nt, Artificial Sequence
  Description of Artificial Sequence: Synthetic oligonucleotide
auccuuguucguuuuaguc

SEQ ID NO: 808462 - RNA, 19 nt, Artificial Sequence
  Description of Artificial Sequence: Synthetic oligonucleotide
uucguuuuagucuugcuuu

SEQ ID NO: 808463 - RNA, 19 nt, Artificial Sequence
  Description of Artificial Sequence: Synthetic oligonucleotide
agaaagcugcuccugauca

SEQ ID NO: 808464 - RNA, 19 nt, Artificial Sequence
  Description of Artificial Sequence: Synthetic oligonucleotide
gugauauuccucuucauga

SEQ ID NO: 808465 - RNA, 19 nt, Artificial Sequence
  Description of Artificial Sequence: Synthetic oligonucleotide
uaaaaguuaaccgguccag

SEQ ID NO: 808466 - RNA, 19 nt, Artificial Sequence
  Description of Artificial Sequence: Synthetic oligonucleotide
ugauuuaaagaguggcaca

SEQ ID NO: 808467 - RNA, 19 nt, Artificial Sequence
  Description of Artificial Sequence: Synthetic oligonucleotide
acuucuacucuaaaagaac

SEQ ID NO: 808468 - RNA, 19 nt, Artificial Sequence
  Description of Artificial Sequence: Synthetic oligonucleotide
aagcauuugacuucuccaa

SEQ ID NO: 808469 - RNA, 19 nt, Artificial Sequence
  Description of Artificial Sequence: Synthetic oligonucleotide
agaacguguuugauuaucc

SEQ ID NO: 808470 - RNA, 19 nt, Artificial Sequence
  Description of Artificial Sequence: Synthetic oligonucleotide
cuagugauuuaaagagugg

SEQ ID NO: 808471 - RNA, 19 nt, Artificial Sequence
  Description of Artificial Sequence: Synthetic oligonucleotide
ucuaagguuugggagcugg

SEQ ID NO: 808472 - RNA, 19 nt, Artificial Sequence
  Description of Artificial Sequence: Synthetic oligonucleotide
uugauuauccuuuguuacu

SEQ ID NO: 808473 - RNA, 19 nt, Artificial Sequence
  Description of Artificial Sequence: Synthetic oligonucleotide
auucggucaaagugcaagg

SEQ ID NO: 808474 - RNA, 19 nt, Artificial Sequence
  Description of Artificial Sequence: Synthetic oligonucleotide
acauaaguggucuaaugau

SEQ ID NO: 808475 - RNA, 19 nt, Artificial Sequence
  Description of Artificial Sequence: Synthetic oligonucleotide
aguuaugaccauacaauuc

SEQ ID NO: 808476 - RNA, 19 nt, Artificial Sequence
  Description of Artificial Sequence: Synthetic oligonucleotide
cucuuaacuacaagugacc

SEQ ID NO: 808477 - RNA, 19 nt, Artificial Sequence
  Description of Artificial Sequence: Synthetic oligonucleotide
uacucgucuagaaaaucug

SEQ ID NO: 808478 - RNA, 19 nt, Artificial Sequence
  Description of Artificial Sequence: Synthetic oligonucleotide
ggugacaacagcaggaacg

SEQ ID NO: 808479 - RNA, 19 nt, Artificial Sequence
  Description of Artificial Sequence: Synthetic oligonucleotide
aguuagaaaggccuucaca

SEQ ID NO: 808480 - RNA, 19 nt, Artificial Sequence
  Description of Artificial Sequence: Synthetic oligonucleotide
uuaugaccauacaauuccc

SEQ ID NO: 808481 - RNA, 19 nt, Artificial Sequence
  Description of Artificial Sequence: Synthetic oligonucleotide
agaacagccauuagugugg

SEQ ID NO: 808482 - RNA, 19 nt, Artificial Sequence
  Description of Artificial Sequence: Synthetic oligonucleotide
aguuuugacuaacuuuuca

SEQ ID NO: 808483 - RNA, 19 nt, Artificial Sequence
  Description of Artificial Sequence: Synthetic oligonucleotide
uaugaccauacaauuccca

SEQ ID NO: 808484 - RNA, 19 nt, Artificial Sequence
  Description of Artificial Sequence: Synthetic oligonucleotide
caucucuagugauuuaaag

SEQ ID NO: 808485 - RNA, 19 nt, Artificial Sequence
  Description of Artificial Sequence: Synthetic oligonucleotide
auauaaaagcugucggccu

SEQ ID NO: 808486 - RNA, 19 nt, Artificial Sequence
  Description of Artificial Sequence: Synthetic oligonucleotide
guaacauaggcuacuuagg

SEQ ID NO: 808487 - RNA, 19 nt, Artificial Sequence
  Description of Artificial Sequence: Synthetic oligonucleotide
aacguguuugauuauccuu

SEQ ID NO: 808488 - RNA, 19 nt, Artificial Sequence
  Description of Artificial Sequence: Synthetic oligonucleotide
uacuaaaaugucauagguu

SEQ ID NO: 808489 - RNA, 19 nt, Artificial Sequence
  Description of Artificial Sequence: Synthetic oligonucleotide
agucuggacaucucuuaac

SEQ ID NO: 808490 - RNA, 19 nt, Artificial Sequence
  Description of Artificial Sequence: Synthetic oligonucleotide
caagaaccagguauuauuc

SEQ ID NO: 808491 - RNA, 19 nt, Artificial Sequence
  Description of Artificial Sequence: Synthetic oligonucleotide
guuuuggugucacacugag

SEQ ID NO: 808492 - RNA, 19 nt, Artificial Sequence
  Description of Artificial Sequence: Synthetic oligonucleotide
cuuagggcagucugaagag

SEQ ID NO: 808493 - RNA, 19 nt, Artificial Sequence
  Description of Artificial Sequence: Synthetic oligonucleotide
gacugaucuagucuggaca

SEQ ID NO: 808494 - RNA, 19 nt, Artificial Sequence
  Description of Artificial Sequence: Synthetic oligonucleotide
aagguuuuggugucacacu

SEQ ID NO: 808495 - RNA, 19 nt, Artificial Sequence
  Description of Artificial Sequence: Synthetic oligonucleotide
uaacuacaagugaccacgg

SEQ ID NO: 808496 - RNA, 19 nt, Artificial Sequence
  Description of Artificial Sequence: Synthetic oligonucleotide
gaauaacuccagcauaaga

SEQ ID NO: 808497 - RNA, 19 nt, Artificial Sequence
  Description of Artificial Sequence: Synthetic oligonucleotide
gugauuuaaagaguggcac

SEQ ID NO: 808498 - RNA, 19 nt, Artificial Sequence
  Description of Artificial Sequence: Synthetic oligonucleotide
gaagauuagacugggaugu

SEQ ID NO: 808499 - RNA, 19 nt, Artificial Sequence
  Description of Artificial Sequence: Synthetic oligonucleotide
aaguuggagccaaacaucu

SEQ ID NO: 808500 - RNA, 19 nt, Artificial Sequence
  Description of Artificial Sequence: Synthetic oligonucleotide
aacuaagcauuugacuucu

SEQ ID NO: 808501 - RNA, 19 nt, Artificial Sequence
  Description of Artificial Sequence: Synthetic oligonucleotide
gauuagacugggaugugug

SEQ ID NO: 808502 - RNA, 19 nt, Artificial Sequence
  Description of Artificial Sequence: Synthetic oligonucleotide
ugggaugaaccaccuuugg

SEQ ID NO: 808503 - RNA, 19 nt, Artificial Sequence
  Description of Artificial Sequence: Synthetic oligonucleotide
acucgucuagaaaaucugc

SEQ ID NO: 808504 - RNA, 19 nt, Artificial Sequence
  Description of Artificial Sequence: Synthetic oligonucleotide
aaagggcgccuucugaggu

SEQ ID NO: 808505 - RNA, 19 nt, Artificial Sequence
  Description of Artificial Sequence: Synthetic oligonucleotide
ugacucucaagauuucuaa

SEQ ID NO: 808506 - RNA, 19 nt, Artificial Sequence
  Description of Artificial Sequence: Synthetic oligonucleotide
uucguagugugugauauuc

SEQ ID NO: 808507 - RNA, 19 nt, Artificial Sequence
  Description of Artificial Sequence: Synthetic oligonucleotide
ugagugauuauucgcucuc

SEQ ID NO: 808508 - RNA, 19 nt, Artificial Sequence
  Description of Artificial Sequence: Synthetic oligonucleotide
ucgcucuccauccuuauau

SEQ ID NO: 808509 - RNA, 19 nt, Artificial Sequence
  Description of Artificial Sequence: Synthetic oligonucleotide
gaagccuacaucucugcuc

SEQ ID NO: 808510 - RNA, 19 nt, Artificial Sequence
  Description of Artificial Sequence: Synthetic oligonucleotide
guuuugacuaacuuuucaa

SEQ ID NO: 808511 - RNA, 19 nt, Artificial Sequence
  Description of Artificial Sequence: Synthetic oligonucleotide
uucguuccgacaucucuag

SEQ ID NO: 808512 - RNA, 19 nt, Artificial Sequence
  Description of Artificial Sequence: Synthetic oligonucleotide
caucgagaacuugagaaag

SEQ ID NO: 808513 - RNA, 19 nt, Artificial Sequence
  Description of Artificial Sequence: Synthetic oligonucleotide
acugaucuagucuggacau

SEQ ID NO: 808514 - RNA, 19 nt, Artificial Sequence
  Description of Artificial Sequence: Synthetic oligonucleotide
uucuaaaaguuaaccgguc

SEQ ID NO: 808515 - RNA, 19 nt, Artificial Sequence
  Description of Artificial Sequence: Synthetic oligonucleotide
cuaaaaguuaaccggucca

SEQ ID NO: 808516 - RNA, 19 nt, Artificial Sequence
  Description of Artificial Sequence: Synthetic oligonucleotide
aaaaguuaaccgguccagu

SEQ ID NO: 808517 - RNA, 19 nt, Artificial Sequence
  Description of Artificial Sequence: Synthetic oligonucleotide
caauaccauagaaaaugac

SEQ ID NO: 808518 - RNA, 19 nt, Artificial Sequence
  Description of Artificial Sequence: Synthetic oligonucleotide
ugaaguacuccaccgcgaa

SEQ ID NO: 808519 - RNA, 19 nt, Artificial Sequence
  Description of Artificial Sequence: Synthetic oligonucleotide
aucuaaguuggagccaaac

SEQ ID NO: 808520 - RNA, 19 nt, Artificial Sequence
  Description of Artificial Sequence: Synthetic oligonucleotide
augaccuuaggaaaauuug

SEQ ID NO: 808521 - RNA, 19 nt, Artificial Sequence
  Description of Artificial Sequence: Synthetic oligonucleotide
gugacaacagcaggaacgg

SEQ ID NO: 808522 - RNA, 19 nt, Artificial Sequence
  Description of Artificial Sequence: Synthetic oligonucleotide
auaccuuuuccccgaucac

SEQ ID NO: 808523 - RNA, 19 nt, Artificial Sequence
  Description of Artificial Sequence: Synthetic oligonucleotide
ucgagaacuugagaaagcu

SEQ ID NO: 808524 - RNA, 19 nt, Artificial Sequence
  Description of Artificial Sequence: Synthetic oligonucleotide
aagaguggcacagauucaa

SEQ ID NO: 808525 - RNA, 19 nt, Artificial Sequence
  Description of Artificial Sequence: Synthetic oligonucleotide
aacgguucugucgugucug

SEQ ID NO: 808526 - RNA, 19 nt, Artificial Sequence
  Description of Artificial Sequence: Synthetic oligonucleotide
ugaugugcgugcuuggcuc

SEQ ID NO: 808527 - RNA, 19 nt, Artificial Sequence
  Description of Artificial Sequence: Synthetic oligonucleotide
ugauuauccuuuguuacua

SEQ ID NO: 808528 - RNA, 19 nt, Artificial Sequence
  Description of Artificial Sequence: Synthetic oligonucleotide
agugauuuaaagaguggca

SEQ ID NO: 808529 - RNA, 19 nt, Artificial Sequence
  Description of Artificial Sequence: Synthetic oligonucleotide
aucgagaacuugagaaagc

SEQ ID NO: 808530 - RNA, 19 nt, Artificial Sequence
  Description of Artificial Sequence: Synthetic oligonucleotide
agugauuauucgcucucca

SEQ ID NO: 808531 - RNA, 19 nt, Artificial Sequence
  Description of Artificial Sequence: Synthetic oligonucleotide
ugcacagacugauacucgu

SEQ ID NO: 808532 - RNA, 19 nt, Artificial Sequence
  Description of Artificial Sequence: Synthetic oligonucleotide
cugcuuuauuucauggaac

SEQ ID NO: 808533 - RNA, 19 nt, Artificial Sequence
  Description of Artificial Sequence: Synthetic oligonucleotide
uauggcaaugggcaaucuc

SEQ ID NO: 808534 - RNA, 19 nt, Artificial Sequence
  Description of Artificial Sequence: Synthetic oligonucleotide
gagacaguuagaaaggccu

SEQ ID NO: 808535 - RNA, 19 nt, Artificial Sequence
  Description of Artificial Sequence: Synthetic oligonucleotide
ucaggauuauaggauucug

SEQ ID NO: 808536 - RNA, 19 nt, Artificial Sequence
  Description of Artificial Sequence: Synthetic oligonucleotide
cauaacuaagcauuugacu

SEQ ID NO: 808537 - RNA, 19 nt, Artificial Sequence
  Description of Artificial Sequence: Synthetic oligonucleotide
cacccugagugauuauucg

SEQ ID NO: 808538 - RNA, 19 nt, Artificial Sequence
  Description of Artificial Sequence: Synthetic oligonucleotide
agugcuagcugccugcuuu

SEQ ID NO: 808539 - RNA, 19 nt, Artificial Sequence
  Description of Artificial Sequence: Synthetic oligonucleotide
auuauucggucaaagugca

SEQ ID NO: 808540 - RNA, 19 nt, Artificial Sequence
  Description of Artificial Sequence: Synthetic oligonucleotide
ugaagccuacaucucugcu

SEQ ID NO: 808541 - RNA, 19 nt, Artificial Sequence
  Description of Artificial Sequence: Synthetic oligonucleotide
ggcaucgagaacuugagaa

SEQ ID NO: 808542 - RNA, 19 nt, Artificial Sequence
  Description of Artificial Sequence: Synthetic oligonucleotide
caaagggcgccuucugagg

SEQ ID NO: 808543 - RNA, 19 nt, Artificial Sequence
  Description of Artificial Sequence: Synthetic oligonucleotide
gugaccacggcaaaagcug

SEQ ID NO: 808544 - RNA, 19 nt, Artificial Sequence
  Description of Artificial Sequence: Synthetic oligonucleotide
caagauuucuaaaugcccu

SEQ ID NO: 808545 - RNA, 19 nt, Artificial Sequence
  Description of Artificial Sequence: Synthetic oligonucleotide
agguauuauucggucaaag

SEQ ID NO: 808546 - RNA, 19 nt, Artificial Sequence
  Description of Artificial Sequence: Synthetic oligonucleotide
uacaucagagcuaguucuc

SEQ ID NO: 808547 - RNA, 19 nt, Artificial Sequence
  Description of Artificial Sequence: Synthetic oligonucleotide
aguggucuaaugaugggcu

SEQ ID NO: 808548 - RNA, 19 nt, Artificial Sequence
  Description of Artificial Sequence: Synthetic oligonucleotide
ugcccuuaaccacagcaau

SEQ ID NO: 808549 - RNA, 19 nt, Artificial Sequence
  Description of Artificial Sequence: Synthetic oligonucleotide
guacaucagagcuaguucu

SEQ ID NO: 808550 - RNA, 19 nt, Artificial Sequence
  Description of Artificial Sequence: Synthetic oligonucleotide
augcuugaacauccauaac

SEQ ID NO: 808551 - RNA, 19 nt, Artificial Sequence
  Description of Artificial Sequence: Synthetic oligonucleotide
auacugaccaacagaacgu

SEQ ID NO: 808552 - RNA, 19 nt, Artificial Sequence
  Description of Artificial Sequence: Synthetic oligonucleotide
ucacuaugauucuucuaaa

SEQ ID NO: 808553 - RNA, 19 nt, Artificial Sequence
  Description of Artificial Sequence: Synthetic oligonucleotide
guaguuaugaccauacaau

SEQ ID NO: 808554 - RNA, 19 nt, Artificial Sequence
  Description of Artificial Sequence: Synthetic oligonucleotide
cuucuaaaaguuaaccggu

SEQ ID NO: 808555 - RNA, 19 nt, Artificial Sequence
  Description of Artificial Sequence: Synthetic oligonucleotide
uuuucacccugagugauua

SEQ ID NO: 808556 - RNA, 19 nt, Artificial Sequence
  Description of Artificial Sequence: Synthetic oligonucleotide
auauaccuuuuccccgauc

SEQ ID NO: 808557 - RNA, 19 nt, Artificial Sequence
  Description of Artificial Sequence: Synthetic oligonucleotide
guuccgacaucucuaguga

SEQ ID NO: 808558 - RNA, 19 nt, Artificial Sequence
  Description of Artificial Sequence: Synthetic oligonucleotide
aagugcaaggucugauuua

SEQ ID NO: 808559 - RNA, 19 nt, Artificial Sequence
  Description of Artificial Sequence: Synthetic oligonucleotide
aggaauaacuccagcauaa

SEQ ID NO: 808560 - RNA, 19 nt, Artificial Sequence
  Description of Artificial Sequence: Synthetic oligonucleotide
ugacugaucuagucuggac

SEQ ID NO: 808561 - RNA, 19 nt, Artificial Sequence
  Description of Artificial Sequence: Synthetic oligonucleotide
uauucgcucuccauccuua

SEQ ID NO: 808562 - RNA, 19 nt, Artificial Sequence
  Description of Artificial Sequence: Synthetic oligonucleotide
uccccggacucuauaauau

SEQ ID NO: 808563 - RNA, 19 nt, Artificial Sequence
  Description of Artificial Sequence: Synthetic oligonucleotide
gaaguacuccaccgcgaag

SEQ ID NO: 808564 - RNA, 19 nt, Artificial Sequence
  Description of Artificial Sequence: Synthetic oligonucleotide
gucgugucuguuuucugug

SEQ ID NO: 808565 - RNA, 19 nt, Artificial Sequence
  Description of Artificial Sequence: Synthetic oligonucleotide
cauaggcuacuuagggcag

SEQ ID NO: 808566 - RNA, 19 nt, Artificial Sequence
  Description of Artificial Sequence: Synthetic oligonucleotide
agguuugggagcuggaauu

SEQ ID NO: 808567 - RNA, 19 nt, Artificial Sequence
  Description of Artificial Sequence: Synthetic oligonucleotide
uagguuccccguucuauga

SEQ ID NO: 808568 - RNA, 19 nt, Artificial Sequence
  Description of Artificial Sequence: Synthetic oligonucleotide
uguccaugcacggucccag

SEQ ID NO: 808569 - RNA, 19 nt, Artificial Sequence
  Description of Artificial Sequence: Synthetic oligonucleotide
gaugugcgugcuuggcucc

SEQ ID NO: 808570 - RNA, 19 nt, Artificial Sequence
  Description of Artificial Sequence: Synthetic oligonucleotide
acaauccaugcuggcaugg

SEQ ID NO: 808571 - RNA, 19 nt, Artificial Sequence
  Description of Artificial Sequence: Synthetic oligonucleotide
cucgggguauuguacauca

SEQ ID NO: 808572 - RNA, 19 nt, Artificial Sequence
  Description of Artificial Sequence: Synthetic oligonucleotide
uguucguuuuagucuugcu

SEQ ID NO: 808573 - RNA, 19 nt, Artificial Sequence
  Description of Artificial Sequence: Synthetic oligonucleotide
auuauucgcucuccauccu

SEQ ID NO: 808574 - RNA, 19 nt, Artificial Sequence
  Description of Artificial Sequence: Synthetic oligonucleotide
auccccgucguccgagucg

SEQ ID NO: 808575 - RNA, 19 nt, Artificial Sequence
  Description of Artificial Sequence: Synthetic oligonucleotide
uccccguucuaugacauaa

SEQ ID NO: 808576 - RNA, 19 nt, Artificial Sequence
  Description of Artificial Sequence: Synthetic oligonucleotide
accagugcaagcucuccga

SEQ ID NO: 808577 - RNA, 19 nt, Artificial Sequence
  Description of Artificial Sequence: Synthetic oligonucleotide
ugaccaacagaacguguuu

SEQ ID NO: 808578 - RNA, 19 nt, Artificial Sequence
  Description of Artificial Sequence: Synthetic oligonucleotide
agaucuaaguuggagccaa

SEQ ID NO: 808579 - RNA, 19 nt, Artificial Sequence
  Description of Artificial Sequence: Synthetic oligonucleotide
aggagucggaacuuccaga

SEQ ID NO: 808580 - RNA, 19 nt, Artificial Sequence
  Description of Artificial Sequence: Synthetic oligonucleotide
ucuggacaucucuuaacua

SEQ ID NO: 808581 - RNA, 19 nt, Artificial Sequence
  Description of Artificial Sequence: Synthetic oligonucleotide
acaguuagaaaggccuuca

SEQ ID NO: 808582 - RNA, 19 nt, Artificial Sequence
  Description of Artificial Sequence: Synthetic oligonucleotide
uaagguuugggagcuggaa

SEQ ID NO: 808583 - RNA, 19 nt, Artificial Sequence
  Description of Artificial Sequence: Synthetic oligonucleotide
uuauucgcucuccauccuu

SEQ ID NO: 808584 - RNA, 19 nt, Artificial Sequence
  Description of Artificial Sequence: Synthetic oligonucleotide
acuuccagauccccgucgu

SEQ ID NO: 808585 - RNA, 19 nt, Artificial Sequence
  Description of Artificial Sequence: Synthetic oligonucleotide
aagauuagacugggaugug

SEQ ID NO: 808586 - RNA, 19 nt, Artificial Sequence
  Description of Artificial Sequence: Synthetic oligonucleotide
gagugauuauucgcucucc

SEQ ID NO: 808587 - RNA, 19 nt, Artificial Sequence
  Description of Artificial Sequence: Synthetic oligonucleotide
guugucauacugaccaaca

SEQ ID NO: 808588 - RNA, 19 nt, Artificial Sequence
  Description of Artificial Sequence: Synthetic oligonucleotide
ggcucugagaaucaucaca

SEQ ID NO: 808589 - RNA, 19 nt, Artificial Sequence
  Description of Artificial Sequence: Synthetic oligonucleotide
gacaguuagaaaggccuuc

SEQ ID NO: 808590 - RNA, 19 nt, Artificial Sequence
  Description of Artificial Sequence: Synthetic oligonucleotide
guccagugcaccucuuacc

SEQ ID NO: 808591 - RNA, 19 nt, Artificial Sequence
  Description of Artificial Sequence: Synthetic oligonucleotide
uccgacaucucuagugauu

SEQ ID NO: 808592 - RNA, 19 nt, Artificial Sequence
  Description of Artificial Sequence: Synthetic oligonucleotide
caggagucggaacuuccag

SEQ ID NO: 808593 - RNA, 19 nt, Artificial Sequence
  Description of Artificial Sequence: Synthetic oligonucleotide
cuuggucaaugacaugcuc

SEQ ID NO: 808594 - RNA, 19 nt, Artificial Sequence
  Description of Artificial Sequence: Synthetic oligonucleotide
agauuagacugggaugugu

SEQ ID NO: 808595 - RNA, 19 nt, Artificial Sequence
  Description of Artificial Sequence: Synthetic oligonucleotide
uacaagugaccacggcaaa

SEQ ID NO: 808596 - RNA, 19 nt, Artificial Sequence
  Description of Artificial Sequence: Synthetic oligonucleotide
uucggucaaagugcaaggu

SEQ ID NO: 808597 - RNA, 19 nt, Artificial Sequence
  Description of Artificial Sequence: Synthetic oligonucleotide
acguguuugauuauccuuu

SEQ ID NO: 808598 - RNA, 19 nt, Artificial Sequence
  Description of Artificial Sequence: Synthetic oligonucleotide
gcuaguucuccaaaacugc

SEQ ID NO: 808599 - RNA, 19 nt, Artificial Sequence
  Description of Artificial Sequence: Synthetic oligonucleotide
uuccccggacucuauaaua

SEQ ID NO: 808600 - RNA, 19 nt, Artificial Sequence
  Description of Artificial Sequence: Synthetic oligonucleotide
uccgagucggagucgcucu

SEQ ID NO: 808601 - RNA, 19 nt, Artificial Sequence
  Description of Artificial Sequence: Synthetic oligonucleotide
uauauaccuuuuccccgau

SEQ ID NO: 808602 - RNA, 19 nt, Artificial Sequence
  Description of Artificial Sequence: Synthetic oligonucleotide
uggcaucgagaacuugaga

SEQ ID NO: 808603 - RNA, 19 nt, Artificial Sequence
  Description of Artificial Sequence: Synthetic oligonucleotide
auaggauucugcacagacu

SEQ ID NO: 808604 - RNA, 19 nt, Artificial Sequence
  Description of Artificial Sequence: Synthetic oligonucleotide
uccccgucguccgagucgg

SEQ ID NO: 808605 - RNA, 19 nt, Artificial Sequence
  Description of Artificial Sequence: Synthetic oligonucleotide
ccguucuaugacauaaaag

SEQ ID NO: 808606 - RNA, 19 nt, Artificial Sequence
  Description of Artificial Sequence: Synthetic oligonucleotide
acuuccccggacucuauaa

SEQ ID NO: 808607 - RNA, 19 nt, Artificial Sequence
  Description of Artificial Sequence: Synthetic oligonucleotide
accgcgcuagacuccggcg

SEQ ID NO: 808608 - RNA, 19 nt, Artificial Sequence
  Description of Artificial Sequence: Synthetic oligonucleotide
uggucuaaugaugggcuuc

SEQ ID NO: 808609 - RNA, 19 nt, Artificial Sequence
  Description of Artificial Sequence: Synthetic oligonucleotide
gaguggcacagauucaaua

SEQ ID NO: 808610 - RNA, 19 nt, Artificial Sequence
  Description of Artificial Sequence: Synthetic oligonucleotide
ucgugucuguuuucugugu

SEQ ID NO: 808611 - RNA, 19 nt, Artificial Sequence
  Description of Artificial Sequence: Synthetic oligonucleotide
aaggucgucguggcgguga

SEQ ID NO: 808612 - RNA, 19 nt, Artificial Sequence
  Description of Artificial Sequence: Synthetic oligonucleotide
accgguccaguccccaaag

SEQ ID NO: 808613 - RNA, 19 nt, Artificial Sequence
  Description of Artificial Sequence: Synthetic oligonucleotide
cagaacguguuugauuauc

SEQ ID NO: 808614 - RNA, 19 nt, Artificial Sequence
  Description of Artificial Sequence: Synthetic oligonucleotide
agcuguaacauaggcuacu

SEQ ID NO: 808615 - RNA, 19 nt, Artificial Sequence
  Description of Artificial Sequence: Synthetic oligonucleotide
uucacccugagugauuauu

SEQ ID NO: 808616 - RNA, 19 nt, Artificial Sequence
  Description of Artificial Sequence: Synthetic oligonucleotide
guccuucuaagguuuggga

SEQ ID NO: 808617 - RNA, 19 nt, Artificial Sequence
  Description of Artificial Sequence: Synthetic oligonucleotide
ucgggguauuguacaucag

SEQ ID NO: 808618 - RNA, 19 nt, Artificial Sequence
  Description of Artificial Sequence: Synthetic oligonucleotide
agacugauacucgucuaga

SEQ ID NO: 808619 - RNA, 19 nt, Artificial Sequence
  Description of Artificial Sequence: Synthetic oligonucleotide
caccgcgaagucgaggagg

SEQ ID NO: 808620 - RNA, 19 nt, Artificial Sequence
  Description of Artificial Sequence: Synthetic oligonucleotide
gguauuauucggucaaagu

SEQ ID NO: 808621 - RNA, 19 nt, Artificial Sequence
  Description of Artificial Sequence: Synthetic oligonucleotide
uggggcggagccucugucc

SEQ ID NO: 808622 - RNA, 19 nt, Artificial Sequence
  Description of Artificial Sequence: Synthetic oligonucleotide
ugcgugcuuggcuccuggg

SEQ ID NO: 808623 - RNA, 19 nt, Artificial Sequence
  Description of Artificial Sequence: Synthetic oligonucleotide
uuaaccgguccagucccca

SEQ ID NO: 808624 - RNA, 19 nt, Artificial Sequence
  Description of Artificial Sequence: Synthetic oligonucleotide
cgucuagaaaaucugccag

SEQ ID NO: 808625 - RNA, 19 nt, Artificial Sequence
  Description of Artificial Sequence: Synthetic oligonucleotide
gaacguguuugauuauccu

SEQ ID NO: 808626 - RNA, 19 nt, Artificial Sequence
  Description of Artificial Sequence: Synthetic oligonucleotide
ugcaagcuuccugaagccu

SEQ ID NO: 808627 - RNA, 19 nt, Artificial Sequence
  Description of Artificial Sequence: Synthetic oligonucleotide
caguuagaaaggccuucac

SEQ ID NO: 808628 - RNA, 19 nt, Artificial Sequence
  Description of Artificial Sequence: Synthetic oligonucleotide
guacuccaccgcgaagucg

SEQ ID NO: 808629 - RNA, 19 nt, Artificial Sequence
  Description of Artificial Sequence: Synthetic oligonucleotide
uuuugggaugaaccaccuu

SEQ ID NO: 808630 - RNA, 19 nt, Artificial Sequence
  Description of Artificial Sequence: Synthetic oligonucleotide
cacggcaaaagcugagaga

SEQ ID NO: 808631 - RNA, 19 nt, Artificial Sequence
  Description of Artificial Sequence: Synthetic oligonucleotide
gaaagcugcuccugaucaa

SEQ ID NO: 808632 - RNA, 19 nt, Artificial Sequence
  Description of Artificial Sequence: Synthetic oligonucleotide
ucauucguuccgacaucuc

SEQ ID NO: 808633 - RNA, 19 nt, Artificial Sequence
  Description of Artificial Sequence: Synthetic oligonucleotide
ggagucgcucuccuugucc

SEQ ID NO: 808634 - RNA, 19 nt, Artificial Sequence
  Description of Artificial Sequence: Synthetic oligonucleotide
cccgaucacauccacaauc

SEQ ID NO: 808635 - RNA, 19 nt, Artificial Sequence
  Description of Artificial Sequence: Synthetic oligonucleotide
uggcgaccgcgcuagacuc

SEQ ID NO: 808636 - RNA, 19 nt, Artificial Sequence
  Description of Artificial Sequence: Synthetic oligonucleotide
acuccggcgugugaaaggu

SEQ ID NO: 808637 - RNA, 19 nt, Artificial Sequence
  Description of Artificial Sequence: Synthetic oligonucleotide
uuccgacaucucuagugau

SEQ ID NO: 808638 - RNA, 19 nt, Artificial Sequence
  Description of Artificial Sequence: Synthetic oligonucleotide
ggugacugaucuagucugg

SEQ ID NO: 808639 - RNA, 19 nt, Artificial Sequence
  Description of Artificial Sequence: Synthetic oligonucleotide
cauucguuccgacaucucu

SEQ ID NO: 808640 - RNA, 19 nt, Artificial Sequence
  Description of Artificial Sequence: Synthetic oligonucleotide
auucguuccgacaucucua

SEQ ID NO: 808641 - RNA, 19 nt, Artificial Sequence
  Description of Artificial Sequence: Synthetic oligonucleotide
cucuagugauuuaaagagu

SEQ ID NO: 808642 - RNA, 19 nt, Artificial Sequence
  Description of Artificial Sequence: Synthetic oligonucleotide
uccgaaguacugucccuua

SEQ ID NO: 808643 - RNA, 19 nt, Artificial Sequence
  Description of Artificial Sequence: Synthetic oligonucleotide
uacugcccaggguccaaca

SEQ ID NO: 808644 - RNA, 19 nt, Artificial Sequence
  Description of Artificial Sequence: Synthetic oligonucleotide
uucgcucuccauccuuaua

SEQ ID NO: 808645 - RNA, 19 nt, Artificial Sequence
  Description of Artificial Sequence: Synthetic oligonucleotide
ucgcgcaggcgugugaagu

SEQ ID NO: 808646 - RNA, 19 nt, Artificial Sequence
  Description of Artificial Sequence: Synthetic oligonucleotide
cacagacugauacucgucu

SEQ ID NO: 808647 - RNA, 19 nt, Artificial Sequence
  Description of Artificial Sequence: Synthetic oligonucleotide
caguaaacauaaguggucu

SEQ ID NO: 808648 - RNA, 19 nt, Artificial Sequence
  Description of Artificial Sequence: Synthetic oligonucleotide
guauuguacaucagagcua

SEQ ID NO: 808649 - RNA, 19 nt, Artificial Sequence
  Description of Artificial Sequence: Synthetic oligonucleotide
gagucggaacuuccagauc

SEQ ID NO: 808650 - RNA, 19 nt, Artificial Sequence
  Description of Artificial Sequence: Synthetic oligonucleotide
ccacaaucuucauucguuc

SEQ ID NO: 808651 - RNA, 19 nt, Artificial Sequence
  Description of Artificial Sequence: Synthetic oligonucleotide
cuaagguuugggagcugga

SEQ ID NO: 808652 - RNA, 19 nt, Artificial Sequence
  Description of Artificial Sequence: Synthetic oligonucleotide
caggcgugugaaguacucc

SEQ ID NO: 808653 - RNA, 19 nt, Artificial Sequence
  Description of Artificial Sequence: Synthetic oligonucleotide
gguccaacagaucuaaguu

SEQ ID NO: 808654 - RNA, 19 nt, Artificial Sequence
  Description of Artificial Sequence: Synthetic oligonucleotide
cuagacuccggcgugugaa

SEQ ID NO: 808655 - RNA, 19 nt, Artificial Sequence
  Description of Artificial Sequence: Synthetic oligonucleotide
acaucucuagugauuuaaa

SEQ ID NO: 808656 - RNA, 19 nt, Artificial Sequence
  Description of Artificial Sequence: Synthetic oligonucleotide
auucgcucuccauccuuau

SEQ ID NO: 808657 - RNA, 19 nt, Artificial Sequence
  Description of Artificial Sequence: Synthetic oligonucleotide
aggaacgguucugucgugu

SEQ ID NO: 808658 - RNA, 19 nt, Artificial Sequence
  Description of Artificial Sequence: Synthetic oligonucleotide
acagccagccacaauccau

SEQ ID NO: 808659 - RNA, 19 nt, Artificial Sequence
  Description of Artificial Sequence: Synthetic oligonucleotide
gugcgugcuuggcuccugg

SEQ ID NO: 808660 - RNA, 19 nt, Artificial Sequence
  Description of Artificial Sequence: Synthetic oligonucleotide
ucguuccgacaucucuagu

SEQ ID NO: 808661 - RNA, 19 nt, Artificial Sequence
  Description of Artificial Sequence: Synthetic oligonucleotide
gcaucgagaacuugagaaa

SEQ ID NO: 808662 - RNA, 19 nt, Artificial Sequence
  Description of Artificial Sequence: Synthetic oligonucleotide
cuacuuagggcagucugaa

SEQ ID NO: 808663 - RNA, 19 nt, Artificial Sequence
  Description of Artificial Sequence: Synthetic oligonucleotide
ggguccaacagaucuaagu

SEQ ID NO: 808664 - RNA, 19 nt, Artificial Sequence
  Description of Artificial Sequence: Synthetic oligonucleotide
cugagugauuauucgcucu

SEQ ID NO: 808665 - RNA, 19 nt, Artificial Sequence
  Description of Artificial Sequence: Synthetic oligonucleotide
auaggcuacuuagggcagu

SEQ ID NO: 808666 - RNA, 19 nt, Artificial Sequence
  Description of Artificial Sequence: Synthetic oligonucleotide
gaaaggucgucguggcggu

SEQ ID NO: 808667 - RNA, 19 nt, Artificial Sequence
  Description of Artificial Sequence: Synthetic oligonucleotide
gaucuagucuggacaucuc

SEQ ID NO: 808668 - RNA, 19 nt, Artificial Sequence
  Description of Artificial Sequence: Synthetic oligonucleotide
uucugucgugucuguuuuc

SEQ ID NO: 808669 - RNA, 19 nt, Artificial Sequence
  Description of Artificial Sequence: Synthetic oligonucleotide
ccacggcaaaagcugagag

SEQ ID NO: 808670 - RNA, 19 nt, Artificial Sequence
  Description of Artificial Sequence: Synthetic oligonucleotide
gcaagaaccagguauuauu

SEQ ID NO: 808671 - RNA, 19 nt, Artificial Sequence
  Description of Artificial Sequence: Synthetic oligonucleotide
gcaaggucugauuuauuua

SEQ ID NO: 808672 - RNA, 19 nt, Artificial Sequence
  Description of Artificial Sequence: Synthetic oligonucleotide
ccuuaggaaaauuugggau

SEQ ID NO: 808673 - RNA, 19 nt, Artificial Sequence
  Description of Artificial Sequence: Synthetic oligonucleotide
cugaccaacagaacguguu

SEQ ID NO: 808674 - RNA, 19 nt, Artificial Sequence
  Description of Artificial Sequence: Synthetic oligonucleotide
accgcgaagucgaggaggu

SEQ ID NO: 808675 - RNA, 19 nt, Artificial Sequence
  Description of Artificial Sequence: Synthetic oligonucleotide
gcauuugacuucuccaacu

SEQ ID NO: 808676 - RNA, 19 nt, Artificial Sequence
  Description of Artificial Sequence: Synthetic oligonucleotide
agaaggcucugagaaucau

SEQ ID NO: 808677 - RNA, 19 nt, Artificial Sequence
  Description of Artificial Sequence: Synthetic oligonucleotide
ggucuaaugaugggcuuca

SEQ ID NO: 808678 - RNA, 19 nt, Artificial Sequence
  Description of Artificial Sequence: Synthetic oligonucleotide
cacccuuagcagccugcag

SEQ ID NO: 808679 - RNA, 19 nt, Artificial Sequence
  Description of Artificial Sequence: Synthetic oligonucleotide
agacaguuagaaaggccuu

SEQ ID NO: 808680 - RNA, 19 nt, Artificial Sequence
  Description of Artificial Sequence: Synthetic oligonucleotide
gugacugaucuagucugga

SEQ ID NO: 808681 - RNA, 19 nt, Artificial Sequence
  Description of Artificial Sequence: Synthetic oligonucleotide
gauccccgucguccgaguc

SEQ ID NO: 808682 - RNA, 19 nt, Artificial Sequence
  Description of Artificial Sequence: Synthetic oligonucleotide
ccagguauuauucggucaa

SEQ ID NO: 808683 - RNA, 19 nt, Artificial Sequence
  Description of Artificial Sequence: Synthetic oligonucleotide
aaaggucgucguggcggug

SEQ ID NO: 808684 - RNA, 19 nt, Artificial Sequence
  Description of Artificial Sequence: Synthetic oligonucleotide
guuaaccgguccagucccc

SEQ ID NO: 808685 - RNA, 19 nt, Artificial Sequence
  Description of Artificial Sequence: Synthetic oligonucleotide
cuucuaagguuugggagcu

SEQ ID NO: 808686 - RNA, 19 nt, Artificial Sequence
  Description of Artificial Sequence: Synthetic oligonucleotide
gaguccagugcaccucuua

SEQ ID NO: 808687 - RNA, 19 nt, Artificial Sequence
  Description of Artificial Sequence: Synthetic oligonucleotide
gcugagagacaguuagaaa

SEQ ID NO: 808688 - RNA, 19 nt, Artificial Sequence
  Description of Artificial Sequence: Synthetic oligonucleotide
ggagucggaacuuccagau

SEQ ID NO: 808689 - RNA, 19 nt, Artificial Sequence
  Description of Artificial Sequence: Synthetic oligonucleotide
ucuacugcccaggguccaa

SEQ ID NO: 808690 - RNA, 19 nt, Artificial Sequence
  Description of Artificial Sequence: Synthetic oligonucleotide
ggaacgguucugucguguc

SEQ ID NO: 808691 - RNA, 19 nt, Artificial Sequence
  Description of Artificial Sequence: Synthetic oligonucleotide
gcuacuuagggcagucuga

SEQ ID NO: 808692 - RNA, 19 nt, Artificial Sequence
  Description of Artificial Sequence: Synthetic oligonucleotide
uucuaagguuugggagcug

SEQ ID NO: 808693 - RNA, 19 nt, Artificial Sequence
  Description of Artificial Sequence: Synthetic oligonucleotide
cagauccccgucguccgag

SEQ ID NO: 808694 - RNA, 19 nt, Artificial Sequence
  Description of Artificial Sequence: Synthetic oligonucleotide
cagaucuaaguuggagcca

SEQ ID NO: 808695 - RNA, 19 nt, Artificial Sequence
  Description of Artificial Sequence: Synthetic oligonucleotide
cgaaguacugucccuuaug

SEQ ID NO: 808696 - RNA, 19 nt, Artificial Sequence
  Description of Artificial Sequence: Synthetic oligonucleotide
caucaguuuugacuaacuu

SEQ ID NO: 808697 - RNA, 19 nt, Artificial Sequence
  Description of Artificial Sequence: Synthetic oligonucleotide
agauccccgucguccgagu

SEQ ID NO: 808698 - RNA, 19 nt, Artificial Sequence
  Description of Artificial Sequence: Synthetic oligonucleotide
guggcgaccgcgcuagacu

SEQ ID NO: 808699 - RNA, 19 nt, Artificial Sequence
  Description of Artificial Sequence: Synthetic oligonucleotide
cuccaccgcgaagucgagg

SEQ ID NO: 808700 - RNA, 19 nt, Artificial Sequence
  Description of Artificial Sequence: Synthetic oligonucleotide
gcccuuaaccacagcaaug

SEQ ID NO: 808701 - RNA, 19 nt, Artificial Sequence
  Description of Artificial Sequence: Synthetic oligonucleotide
cucgcgcaggcgugugaag

SEQ ID NO: 808702 - RNA, 19 nt, Artificial Sequence
  Description of Artificial Sequence: Synthetic oligonucleotide
aucuacugcccagggucca

SEQ ID NO: 808703 - RNA, 19 nt, Artificial Sequence
  Description of Artificial Sequence: Synthetic oligonucleotide
cuguaacauaggcuacuua

SEQ ID NO: 808704 - RNA, 19 nt, Artificial Sequence
  Description of Artificial Sequence: Synthetic oligonucleotide
cccggacucuauaauauaa

SEQ ID NO: 808705 - RNA, 19 nt, Artificial Sequence
  Description of Artificial Sequence: Synthetic oligonucleotide
cagugcaccucuuaccuuu

SEQ ID NO: 808706 - RNA, 19 nt, Artificial Sequence
  Description of Artificial Sequence: Synthetic oligonucleotide
caggaacgguucugucgug

SEQ ID NO: 808707 - RNA, 19 nt, Artificial Sequence
  Description of Artificial Sequence: Synthetic oligonucleotide
gggaugaaccaccuuuggu

SEQ ID NO: 808708 - RNA, 19 nt, Artificial Sequence
  Description of Artificial Sequence: Synthetic oligonucleotide
gucguccgagucggagucg

SEQ ID NO: 808709 - RNA, 19 nt, Artificial Sequence
  Description of Artificial Sequence: Synthetic oligonucleotide
cggacucuauaauauaaaa

SEQ ID NO: 808710 - RNA, 19 nt, Artificial Sequence
  Description of Artificial Sequence: Synthetic oligonucleotide
cucuucguagugugugaua

SEQ ID NO: 808711 - RNA, 19 nt, Artificial Sequence
  Description of Artificial Sequence: Synthetic oligonucleotide
cgugucuguuuucugugug

SEQ ID NO: 808712 - RNA, 19 nt, Artificial Sequence
  Description of Artificial Sequence: Synthetic oligonucleotide
caauccaugcuggcaugga

SEQ ID NO: 808713 - RNA, 19 nt, Artificial Sequence
  Description of Artificial Sequence: Synthetic oligonucleotide
gcgaccgcgcuagacuccg

SEQ ID NO: 808714 - RNA, 19 nt, Artificial Sequence
  Description of Artificial Sequence: Synthetic oligonucleotide
caugauguccaugcacggu

SEQ ID NO: 808715 - RNA, 19 nt, Artificial Sequence
  Description of Artificial Sequence: Synthetic oligonucleotide
gagucggagucgcucuccu

SEQ ID NO: 808716 - RNA, 19 nt, Artificial Sequence
  Description of Artificial Sequence: Synthetic oligonucleotide
gaucuaaguuggagccaaa

SEQ ID NO: 808717 - RNA, 19 nt, Artificial Sequence
  Description of Artificial Sequence: Synthetic oligonucleotide
cccugagugauuauucgcu

SEQ ID NO: 808718 - RNA, 19 nt, Artificial Sequence
  Description of Artificial Sequence: Synthetic oligonucleotide
gcaagcuuccugaagccua

SEQ ID NO: 808719 - RNA, 19 nt, Artificial Sequence
  Description of Artificial Sequence: Synthetic oligonucleotide
ccggacucuauaauauaaa

SEQ ID NO: 808720 - RNA, 19 nt, Artificial Sequence
  Description of Artificial Sequence: Synthetic oligonucleotide
aggucgucguggcggugau

SEQ ID NO: 808721 - RNA, 19 nt, Artificial Sequence
  Description of Artificial Sequence: Synthetic oligonucleotide
ccuuguucguuuuagucuu

SEQ ID NO: 808722 - RNA, 19 nt, Artificial Sequence
  Description of Artificial Sequence: Synthetic oligonucleotide
cccguucuaugacauaaaa

SEQ ID NO: 808723 - RNA, 19 nt, Artificial Sequence
  Description of Artificial Sequence: Synthetic oligonucleotide
augugcgugcuuggcuccu

SEQ ID NO: 808724 - RNA, 19 nt, Artificial Sequence
  Description of Artificial Sequence: Synthetic oligonucleotide
cuuuucacccugagugauu

SEQ ID NO: 808725 - RNA, 19 nt, Artificial Sequence
  Description of Artificial Sequence: Synthetic oligonucleotide
cagguauuauucggucaaa

SEQ ID NO: 808726 - RNA, 19 nt, Artificial Sequence
  Description of Artificial Sequence: Synthetic oligonucleotide
ccgguccaguccccaaagg

SEQ ID NO: 808727 - RNA, 19 nt, Artificial Sequence
  Description of Artificial Sequence: Synthetic oligonucleotide
gccuacaucucugcucauc

SEQ ID NO: 808728 - RNA, 19 nt, Artificial Sequence
  Description of Artificial Sequence: Synthetic oligonucleotide
guuccccguucuaugacau

SEQ ID NO: 808729 - RNA, 19 nt, Artificial Sequence
  Description of Artificial Sequence: Synthetic oligonucleotide
acuccaccgcgaagucgag

SEQ ID NO: 808730 - RNA, 19 nt, Artificial Sequence
  Description of Artificial Sequence: Synthetic oligonucleotide
cgucguccgagucggaguc

SEQ ID NO: 808731 - RNA, 19 nt, Artificial Sequence
  Description of Artificial Sequence: Synthetic oligonucleotide
gcucaucaguuuugacuaa

SEQ ID NO: 808732 - RNA, 19 nt, Artificial Sequence
  Description of Artificial Sequence: Synthetic oligonucleotide
agccuacaucucugcucau

SEQ ID NO: 808733 - RNA, 19 nt, Artificial Sequence
  Description of Artificial Sequence: Synthetic oligonucleotide
ccaaaacugccaugguugu

SEQ ID NO: 808734 - RNA, 19 nt, Artificial Sequence
  Description of Artificial Sequence: Synthetic oligonucleotide
gcuagacuccggcguguga

SEQ ID NO: 808735 - RNA, 19 nt, Artificial Sequence
  Description of Artificial Sequence: Synthetic oligonucleotide
cugucggccuuuucacccu

SEQ ID NO: 808736 - RNA, 19 nt, Artificial Sequence
  Description of Artificial Sequence: Synthetic oligonucleotide
gcggugacaacagcaggaa

SEQ ID NO: 808737 - RNA, 19 nt, Artificial Sequence
  Description of Artificial Sequence: Synthetic oligonucleotide
cuucguagugugugauauu

SEQ ID NO: 808738 - RNA, 19 nt, Artificial Sequence
  Description of Artificial Sequence: Synthetic oligonucleotide
guagcagcucucgggguau

SEQ ID NO: 808739 - RNA, 19 nt, Artificial Sequence
  Description of Artificial Sequence: Synthetic oligonucleotide
gcgcaggcgugugaaguac

SEQ ID NO: 808740 - RNA, 19 nt, Artificial Sequence
  Description of Artificial Sequence: Synthetic oligonucleotide
gcacggucccagaagccuc

SEQ ID NO: 808741 - RNA, 19 nt, Artificial Sequence
  Description of Artificial Sequence: Synthetic oligonucleotide
cccgucguccgagucggag

SEQ ID NO: 808742 - RNA, 19 nt, Artificial Sequence
  Description of Artificial Sequence: Synthetic oligonucleotide
cucgguggcgaccgcgcua

SEQ ID NO: 808743 - RNA, 19 nt, Artificial Sequence
  Description of Artificial Sequence: Synthetic oligonucleotide
ggcgaccgcgcuagacucc

SEQ ID NO: 808744 - RNA, 19 nt, Artificial Sequence
  Description of Artificial Sequence: Synthetic oligonucleotide
cgcgcuagacuccggcgug

SEQ ID NO: 808745 - RNA, 19 nt, Artificial Sequence
  Description of Artificial Sequence: Synthetic oligonucleotide
gguuugggagcuggaauuu

SEQ ID NO: 808746 - RNA, 19 nt, Artificial Sequence
  Description of Artificial Sequence: Synthetic oligonucleotide
uagcagcucucgggguauu

SEQ ID NO: 808747 - RNA, 19 nt, Artificial Sequence
  Description of Artificial Sequence: Synthetic oligonucleotide
ggcgccuucugagguggca

SEQ ID NO: 808748 - RNA, 19 nt, Artificial Sequence
  Description of Artificial Sequence: Synthetic oligonucleotide
gcaaaagcugagagacagu

SEQ ID NO: 808749 - RNA, 19 nt, Artificial Sequence
  Description of Artificial Sequence: Synthetic oligonucleotide
ccgagucggagucgcucuc

SEQ ID NO: 808750 - RNA, 19 nt, Artificial Sequence
  Description of Artificial Sequence: Synthetic oligonucleotide
ccuuauggcaaugggcaau

SEQ ID NO: 808751 - RNA, 19 nt, Artificial Sequence
  Description of Artificial Sequence: Synthetic oligonucleotide
gcgccuucugagguggcaa

SEQ ID NO: 808752 - RNA, 19 nt, Artificial Sequence
  Description of Artificial Sequence: Synthetic oligonucleotide
ccgacaucucuagugauuu

SEQ ID NO: 808753 - RNA, 19 nt, Artificial Sequence
  Description of Artificial Sequence: Synthetic oligonucleotide
ccccguucuaugacauaaa

SEQ ID NO: 808754 - RNA, 19 nt, Artificial Sequence
  Description of Artificial Sequence: Synthetic oligonucleotide
ccccggacucuauaauaua

SEQ ID NO: 808755 - RNA, 19 nt, Artificial Sequence
  Description of Artificial Sequence: Synthetic oligonucleotide
gcgggccucgcgcaggcgu

SEQ ID NO: 808756 - RNA, 19 nt, Artificial Sequence
  Description of Artificial Sequence: Synthetic oligonucleotide
ccagauccccgucguccga

SEQ ID NO: 808757 - RNA, 19 nt, Artificial Sequence
  Description of Artificial Sequence: Synthetic oligonucleotide
gccucgcgcaggcguguga

SEQ ID NO: 808758 - RNA, 19 nt, Artificial Sequence
  Description of Artificial Sequence: Synthetic oligonucleotide
ccgucguccgagucggagu

SEQ ID NO: 808759 - RNA, 19 nt, Artificial Sequence
  Description of Artificial Sequence: Synthetic oligonucleotide
cgcucuccauccuuauaua

SEQ ID NO: 808760 - RNA, 19 nt, Artificial Sequence
  Description of Artificial Sequence: Synthetic oligonucleotide
ccucgcgcaggcgugugaa

SEQ ID NO: 808761 - RNA, 19 nt, Artificial Sequence
  Description of Artificial Sequence: Synthetic oligonucleotide
ggccucgcgcaggcgugug

SEQ ID NO: 808762 - RNA, 19 nt, Artificial Sequence
  Description of Artificial Sequence: Synthetic oligonucleotide
ccgcgcuagacuccggcgu

SEQ ID NO: 808763 - RNA, 19 nt, Artificial Sequence
  Description of Artificial Sequence: Synthetic oligonucleotide
ccgaaguacugucccuuau

SEQ ID NO: 808764 - RNA, 19 nt, Artificial Sequence
  Description of Artificial Sequence: Synthetic oligonucleotide
cggcgugugaaaggucguc

SEQ ID NO: 808765 - RNA, 19 nt, Artificial Sequence
  Description of Artificial Sequence: Synthetic oligonucleotide
cgaccgcgcuagacuccgg

SEQ ID NO: 808766 - RNA, 19 nt, Artificial Sequence
  Description of Artificial Sequence: Synthetic oligonucleotide
ccggcgugugaaaggucgu

SEQ ID NO: 808767 - RNA, 19 nt, Artificial Sequence
  Description of Artificial Sequence: Synthetic oligonucleotide
gggcggagccucuguccau

SEQ ID NO: 808768 - RNA, 19 nt, Artificial Sequence
  Description of Artificial Sequence: Synthetic oligonucleotide
gcgcuagacuccggcgugu

SEQ ID NO: 808769 - RNA, 19 nt, Artificial Sequence
  Description of Artificial Sequence: Synthetic oligonucleotide
ccgcgaagucgaggagguc

SEQ ID NO: 808770 - RNA, 19 nt, Artificial Sequence
  Description of Artificial Sequence: Synthetic oligonucleotide
ccccgaucacauccacaau

SEQ ID NO: 808771 - RNA, 19 nt, Artificial Sequence
  Description of Artificial Sequence: Synthetic oligonucleotide
gggccucgcgcaggcgugu

SEQ ID NO: 808772 - RNA, 19 nt, Artificial Sequence
  Description of Artificial Sequence: Synthetic oligonucleotide
  modified_base (7)..(7): a, c, u, g, unknown or other
ucuaggngaaaacuuaucg

SEQ ID NO: 808773 - RNA, 19 nt, Artificial Sequence
  Description of Artificial Sequence: Synthetic oligonucleotide
uuaagauucacccaaauua

SEQ ID NO: 808774 - RNA, 19 nt, Artificial Sequence
  Description of Artificial Sequence: Synthetic oligonucleotide
auaauauucuaauuuuccc

SEQ ID NO: 808775 - RNA, 19 nt, Artificial Sequence
  Description of Artificial Sequence: Synthetic oligonucleotide
aauaaaggagaauguauuc

SEQ ID NO: 808776 - RNA, 19 nt, Artificial Sequence
  Description of Artificial Sequence: Synthetic oligonucleotide
agugauaugauucaauuug

SEQ ID NO: 808777 - RNA, 19 nt, Artificial Sequence
  Description of Artificial Sequence: Synthetic oligonucleotide
auaguaaaaggccaaauag

SEQ ID NO: 808778 - RNA, 19 nt, Artificial Sequence
  Description of Artificial Sequence: Synthetic oligonucleotide
guuacuaugaaccuacagg

SEQ ID NO: 808779 - RNA, 19 nt, Artificial Sequence
  Description of Artificial Sequence: Synthetic oligonucleotide
auaaacguaaauaaaauag

SEQ ID NO: 808780 - RNA, 19 nt, Artificial Sequence
  Description of Artificial Sequence: Synthetic oligonucleotide
ugguauaacacauuagagg

SEQ ID NO: 808781 - RNA, 19 nt, Artificial Sequence
  Description of Artificial Sequence: Synthetic oligonucleotide
uucaauuugaaaaccauga

SEQ ID NO: 808782 - RNA, 19 nt, Artificial Sequence
  Description of Artificial Sequence: Synthetic oligonucleotide
aguaaauagacauaaacaa

SEQ ID NO: 808783 - RNA, 19 nt, Artificial Sequence
  Description of Artificial Sequence: Synthetic oligonucleotide
auauuguugcuucagaguc

SEQ ID NO: 808784 - RNA, 19 nt, Artificial Sequence
  Description of Artificial Sequence: Synthetic oligonucleotide
uggauuuagcuuuacaagg

SEQ ID NO: 808785 - RNA, 19 nt, Artificial Sequence
  Description of Artificial Sequence: Synthetic oligonucleotide
aggauaaauauacauguuc

SEQ ID NO: 808786 - RNA, 19 nt, Artificial Sequence
  Description of Artificial Sequence: Synthetic oligonucleotide
gaaagagagauacuguuag

SEQ ID NO: 808787 - RNA, 19 nt, Artificial Sequence
  Description of Artificial Sequence: Synthetic oligonucleotide
acucuuuauagacuaaugg

SEQ ID NO: 808788 - RNA, 19 nt, Artificial Sequence
  Description of Artificial Sequence: Synthetic oligonucleotide
aaagauaacaagauuguug

SEQ ID NO: 808789 - RNA, 19 nt, Artificial Sequence
  Description of Artificial Sequence: Synthetic oligonucleotide
auuucuuagauccugaaaa

SEQ ID NO: 808790 - RNA, 19 nt, Artificial Sequence
  Description of Artificial Sequence: Synthetic oligonucleotide
cuagagaacugaaagagag

SEQ ID NO: 808791 - RNA, 19 nt, Artificial Sequence
  Description of Artificial Sequence: Synthetic oligonucleotide
  modified_base (2)..(2): a, c, u, g, unknown or other
gngaaaacuuaucggaugg

SEQ ID NO: 808792 - RNA, 19 nt, Artificial Sequence
  Description of Artificial Sequence: Synthetic oligonucleotide
aacauuaacuaaaggaggg

SEQ ID NO: 808793 - RNA, 19 nt, Artificial Sequence
  Description of Artificial Sequence: Synthetic oligonucleotide
aauagauugucuuaucuuu

SEQ ID NO: 808794 - RNA, 19 nt, Artificial Sequence
  Description of Artificial Sequence: Synthetic oligonucleotide
aaaaguuuaguguguaggu

SEQ ID NO: 808795 - RNA, 19 nt, Artificial Sequence
  Description of Artificial Sequence: Synthetic oligonucleotide
aguuauugcuaauauauca

SEQ ID NO: 808796 - RNA, 19 nt, Artificial Sequence
  Description of Artificial Sequence: Synthetic oligonucleotide
uaaacguaaauaaaauagu

SEQ ID NO: 808797 - RNA, 19 nt, Artificial Sequence
  Description of Artificial Sequence: Synthetic oligonucleotide
uuuucuagucauuucaucu

SEQ ID NO: 808798 - RNA, 19 nt, Artificial Sequence
  Description of Artificial Sequence: Synthetic oligonucleotide
aaaauccugaaguauacau

SEQ ID NO: 808799 - RNA, 19 nt, Artificial Sequence
  Description of Artificial Sequence: Synthetic oligonucleotide
aaagagagauacuguuagc

SEQ ID NO: 808800 - RNA, 19 nt, Artificial Sequence
  Description of Artificial Sequence: Synthetic oligonucleotide
uguagcacaaguuauugcu

SEQ ID NO: 808801 - RNA, 19 nt, Artificial Sequence
  Description of Artificial Sequence: Synthetic oligonucleotide
uucuagagaacugaaagag

SEQ ID NO: 808802 - RNA, 19 nt, Artificial Sequence
  Description of Artificial Sequence: Synthetic oligonucleotide
auguguaagacugacacgg

SEQ ID NO: 808803 - RNA, 19 nt, Artificial Sequence
  Description of Artificial Sequence: Synthetic oligonucleotide
uuuuaauacuuucuuagau

SEQ ID NO: 808804 - RNA, 19 nt, Artificial Sequence
  Description of Artificial Sequence: Synthetic oligonucleotide
accaugaaaccacaaaagg

SEQ ID NO: 808805 - RNA, 19 nt, Artificial Sequence
  Description of Artificial Sequence: Synthetic oligonucleotide
uagcuuuacaaggagaacg

SEQ ID NO: 808806 - RNA, 19 nt, Artificial Sequence
  Description of Artificial Sequence: Synthetic oligonucleotide
aacugaaagagagauacug

SEQ ID NO: 808807 - RNA, 19 nt, Artificial Sequence
  Description of Artificial Sequence: Synthetic oligonucleotide
ucggaugguacuaaucugg

SEQ ID NO: 808808 - RNA, 19 nt, Artificial Sequence
  Description of Artificial Sequence: Synthetic oligonucleotide
agaauuaagauucacccaa

SEQ ID NO: 808809 - RNA, 19 nt, Artificial Sequence
  Description of Artificial Sequence: Synthetic oligonucleotide
uuagaggugaaaauaaaua

SEQ ID NO: 808810 - RNA, 19 nt, Artificial Sequence
  Description of Artificial Sequence: Synthetic oligonucleotide
uaaaaggccaaauaguuua

SEQ ID NO: 808811 - RNA, 19 nt, Artificial Sequence
  Description of Artificial Sequence: Synthetic oligonucleotide
  modified_base (5)..(5): a, c, u, g, unknown or other
uaggngaaaacuuaucgga

SEQ ID NO: 808812 - RNA, 19 nt, Artificial Sequence
  Description of Artificial Sequence: Synthetic oligonucleotide
cuaagugugcuucaagugg

SEQ ID NO: 808813 - RNA, 19 nt, Artificial Sequence
  Description of Artificial Sequence: Synthetic oligonucleotide
acguaaauaaaauaguaaa

SEQ ID NO: 808814 - RNA, 19 nt, Artificial Sequence
  Description of Artificial Sequence: Synthetic oligonucleotide
aaguuuugaccuuuucuag

SEQ ID NO: 808815 - RNA, 19 nt, Artificial Sequence
  Description of Artificial Sequence: Synthetic oligonucleotide
ucuucaaauggaccgaccc

SEQ ID NO: 808816 - RNA, 19 nt, Artificial Sequence
  Description of Artificial Sequence: Synthetic oligonucleotide
uguggauuuagcuuuacaa

SEQ ID NO: 808817 - RNA, 19 nt, Artificial Sequence
  Description of Artificial Sequence: Synthetic oligonucleotide
  modified_base (6)..(6): a, c, u, g, unknown or other
cuaggngaaaacuuaucgg

SEQ ID NO: 808818 - RNA, 19 nt, Artificial Sequence
  Description of Artificial Sequence: Synthetic oligonucleotide
acaauuacugauucuccac

SEQ ID NO: 808819 - RNA, 19 nt, Artificial Sequence
  Description of Artificial Sequence: Synthetic oligonucleotide
uaucggaugguacuaaucu

SEQ ID NO: 808820 - RNA, 19 nt, Artificial Sequence
  Description of Artificial Sequence: Synthetic oligonucleotide
acuuauugaaaugugagcu

SEQ ID NO: 808821 - RNA, 19 nt, Artificial Sequence
  Description of Artificial Sequence: Synthetic oligonucleotide
acuaaucuggcuccacucc

SEQ ID NO: 808822 - RNA, 19 nt, Artificial Sequence
  Description of Artificial Sequence: Synthetic oligonucleotide
guagcuauuagcccaaagc

SEQ ID NO: 808823 - RNA, 19 nt, Artificial Sequence
  Description of Artificial Sequence: Synthetic oligonucleotide
auacuguuagcucuaguuc

SEQ ID NO: 808824 - RNA, 19 nt, Artificial Sequence
  Description of Artificial Sequence: Synthetic oligonucleotide
ucuaugaagggaaaggaua

SEQ ID NO: 808825 - RNA, 19 nt, Artificial Sequence
  Description of Artificial Sequence: Synthetic oligonucleotide
caugaaaccacaaaaggca

SEQ ID NO: 808826 - RNA, 19 nt, Artificial Sequence
  Description of Artificial Sequence: Synthetic oligonucleotide
ugucuuaucuuucuagaga

SEQ ID NO: 808827 - RNA, 19 nt, Artificial Sequence
  Description of Artificial Sequence: Synthetic oligonucleotide
uuaacuaaaggagggaaca

SEQ ID NO: 808828 - RNA, 19 nt, Artificial Sequence
  Description of Artificial Sequence: Synthetic oligonucleotide
caaaaguuuaguguguagg

SEQ ID NO: 808829 - RNA, 19 nt, Artificial Sequence
  Description of Artificial Sequence: Synthetic oligonucleotide
auucacccaaauuauagug

SEQ ID NO: 808830 - RNA, 19 nt, Artificial Sequence
  Description of Artificial Sequence: Synthetic oligonucleotide
aaaguuuaguguguagguc

SEQ ID NO: 808831 - RNA, 19 nt, Artificial Sequence
  Description of Artificial Sequence: Synthetic oligonucleotide
auauggacagacucaguac

SEQ ID NO: 808832 - RNA, 19 nt, Artificial Sequence
  Description of Artificial Sequence: Synthetic oligonucleotide
uccauuauacagcagacuu

SEQ ID NO: 808833 - RNA, 19 nt, Artificial Sequence
  Description of Artificial Sequence: Synthetic oligonucleotide
accauaucauaaaaguugc

SEQ ID NO: 808834 - RNA, 19 nt, Artificial Sequence
  Description of Artificial Sequence: Synthetic oligonucleotide
cacgggguuacuaugaacc

SEQ ID NO: 808835 - RNA, 19 nt, Artificial Sequence
  Description of Artificial Sequence: Synthetic oligonucleotide
augguacuaaucuggcucc

SEQ ID NO: 808836 - RNA, 19 nt, Artificial Sequence
  Description of Artificial Sequence: Synthetic oligonucleotide
aauguagcacaaguuauug

SEQ ID NO: 808837 - RNA, 19 nt, Artificial Sequence
  Description of Artificial Sequence: Synthetic oligonucleotide
uaacugauccaacagcaca

SEQ ID NO: 808838 - RNA, 19 nt, Artificial Sequence
  Description of Artificial Sequence: Synthetic oligonucleotide
ugugguuauuaacaggacu

SEQ ID NO: 808839 - RNA, 19 nt, Artificial Sequence
  Description of Artificial Sequence: Synthetic oligonucleotide
cauuauacagcagacuugc

SEQ ID NO: 808840 - RNA, 19 nt, Artificial Sequence
  Description of Artificial Sequence: Synthetic oligonucleotide
aagagagauacuguuagcu

SEQ ID NO: 808841 - RNA, 19 nt, Artificial Sequence
  Description of Artificial Sequence: Synthetic oligonucleotide
ggaacuaucaacuacucuc

SEQ ID NO: 808842 - RNA, 19 nt, Artificial Sequence
  Description of Artificial Sequence: Synthetic oligonucleotide
aagccuuagucgucguugc

SEQ ID NO: 808843 - RNA, 19 nt, Artificial Sequence
  Description of Artificial Sequence: Synthetic oligonucleotide
aaugacugggaguggaacu

SEQ ID NO: 808844 - RNA, 19 nt, Artificial Sequence
  Description of Artificial Sequence: Synthetic oligonucleotide
gauacagugauaugauuca

SEQ ID NO: 808845 - RNA, 19 nt, Artificial Sequence
  Description of Artificial Sequence: Synthetic oligonucleotide
  modified_base (13)..(13): a, c, u, g, unknown or other
ucuaguucuaggngaaaac

SEQ ID NO: 808846 - RNA, 19 nt, Artificial Sequence
  Description of Artificial Sequence: Synthetic oligonucleotide
aaauaaaggagaauguauu

SEQ ID NO: 808847 - RNA, 19 nt, Artificial Sequence
  Description of Artificial Sequence: Synthetic oligonucleotide
ccuauuaauauuuaaaaga

SEQ ID NO: 808848 - RNA, 19 nt, Artificial Sequence
  Description of Artificial Sequence: Synthetic oligonucleotide
uauacagcagacuugcuuu

SEQ ID NO: 808849 - RNA, 19 nt, Artificial Sequence
  Description of Artificial Sequence: Synthetic oligonucleotide
ucaucuaaaaggagagaca

SEQ ID NO: 808850 - RNA, 19 nt, Artificial Sequence
  Description of Artificial Sequence: Synthetic oligonucleotide
aggagauccauuauacagc

SEQ ID NO: 808851 - RNA, 19 nt, Artificial Sequence
  Description of Artificial Sequence: Synthetic oligonucleotide
uacgggcagacaaugagcc

SEQ ID NO: 808852 - RNA, 19 nt, Artificial Sequence
  Description of Artificial Sequence: Synthetic oligonucleotide
aaagccuuagucgucguug

SEQ ID NO: 808853 - RNA, 19 nt, Artificial Sequence
  Description of Artificial Sequence: Synthetic oligonucleotide
uacuguuagcucuaguucu

SEQ ID NO: 808854 - RNA, 19 nt, Artificial Sequence
  Description of Artificial Sequence: Synthetic oligonucleotide
auguagcacaaguuauugc

SEQ ID NO: 808855 - RNA, 19 nt, Artificial Sequence
  Description of Artificial Sequence: Synthetic oligonucleotide
auuaacuaaaggagggaac

SEQ ID NO: 808856 - RNA, 19 nt, Artificial Sequence
  Description of Artificial Sequence: Synthetic oligonucleotide
aagacugacacgggguuac

SEQ ID NO: 808857 - RNA, 19 nt, Artificial Sequence
  Description of Artificial Sequence: Synthetic oligonucleotide
aguuaguaaauagacauaa

SEQ ID NO: 808858 - RNA, 19 nt, Artificial Sequence
  Description of Artificial Sequence: Synthetic oligonucleotide
aauccaggccuauuaauau

SEQ ID NO: 808859 - RNA, 19 nt, Artificial Sequence
  Description of Artificial Sequence: Synthetic oligonucleotide
ucacaauuacugauucucc

SEQ ID NO: 808860 - RNA, 19 nt, Artificial Sequence
  Description of Artificial Sequence: Synthetic oligonucleotide
aauuaagauucacccaaau

SEQ ID NO: 808861 - RNA, 19 nt, Artificial Sequence
  Description of Artificial Sequence: Synthetic oligonucleotide
aacguaaauaaaauaguaa

SEQ ID NO: 808862 - RNA, 19 nt, Artificial Sequence
  Description of Artificial Sequence: Synthetic oligonucleotide
gauaugauucaauuugaaa

SEQ ID NO: 808863 - RNA, 19 nt, Artificial Sequence
  Description of Artificial Sequence: Synthetic oligonucleotide
acuaugaaccuacagggaa

SEQ ID NO: 808864 - RNA, 19 nt, Artificial Sequence
  Description of Artificial Sequence: Synthetic oligonucleotide
cuuacuucacagaauugug

SEQ ID NO: 808865 - RNA, 19 nt, Artificial Sequence
  Description of Artificial Sequence: Synthetic oligonucleotide
uguguaggucacagcaugg

SEQ ID NO: 808866 - RNA, 19 nt, Artificial Sequence
  Description of Artificial Sequence: Synthetic oligonucleotide
aaauuauaguguucuggaa

SEQ ID NO: 808867 - RNA, 19 nt, Artificial Sequence
  Description of Artificial Sequence: Synthetic oligonucleotide
ugaaccuacagggaaacac

SEQ ID NO: 808868 - RNA, 19 nt, Artificial Sequence
  Description of Artificial Sequence: Synthetic oligonucleotide
aaacguaaauaaaauagua

SEQ ID NO: 808869 - RNA, 19 nt, Artificial Sequence
  Description of Artificial Sequence: Synthetic oligonucleotide
agauucacccaaauuauag

SEQ ID NO: 808870 - RNA, 19 nt, Artificial Sequence
  Description of Artificial Sequence: Synthetic oligonucleotide
ucuuaacuugcucucuaug

SEQ ID NO: 808871 - RNA, 19 nt, Artificial Sequence
  Description of Artificial Sequence: Synthetic oligonucleotide
aucccauguuguuaagagc

SEQ ID NO: 808872 - RNA, 19 nt, Artificial Sequence
  Description of Artificial Sequence: Synthetic oligonucleotide
uucaaauggaccgacccug

SEQ ID NO: 808873 - RNA, 19 nt, Artificial Sequence
  Description of Artificial Sequence: Synthetic oligonucleotide
auauaucaaagaccauauc

SEQ ID NO: 808874 - RNA, 19 nt, Artificial Sequence
  Description of Artificial Sequence: Synthetic oligonucleotide
aaauuaaccucaugaucau

SEQ ID NO: 808875 - RNA, 19 nt, Artificial Sequence
  Description of Artificial Sequence: Synthetic oligonucleotide
auaaaggagaauguauuca

SEQ ID NO: 808876 - RNA, 19 nt, Artificial Sequence
  Description of Artificial Sequence: Synthetic oligonucleotide
gaacgguuccuuuucuucc

SEQ ID NO: 808877 - RNA, 19 nt, Artificial Sequence
  Description of Artificial Sequence: Synthetic oligonucleotide
uauacuccaccuaaacuau

SEQ ID NO: 808878 - RNA, 19 nt, Artificial Sequence
  Description of Artificial Sequence: Synthetic oligonucleotide
uccauauggacagacucag

SEQ ID NO: 808879 - RNA, 19 nt, Artificial Sequence
  Description of Artificial Sequence: Synthetic oligonucleotide
gguauaacacauuagaggu

SEQ ID NO: 808880 - RNA, 19 nt, Artificial Sequence
  Description of Artificial Sequence: Synthetic oligonucleotide
uacaaggagauccauuaua

SEQ ID NO: 808881 - RNA, 19 nt, Artificial Sequence
  Description of Artificial Sequence: Synthetic oligonucleotide
uuagcccaaagccuuaguc

SEQ ID NO: 808882 - RNA, 19 nt, Artificial Sequence
  Description of Artificial Sequence: Synthetic oligonucleotide
uugauauuguugcuucaga

SEQ ID NO: 808883 - RNA, 19 nt, Artificial Sequence
  Description of Artificial Sequence: Synthetic oligonucleotide
ugaaagagagauacuguua

SEQ ID NO: 808884 - RNA, 19 nt, Artificial Sequence
  Description of Artificial Sequence: Synthetic oligonucleotide
uauaguguucuggaaacac

SEQ ID NO: 808885 - RNA, 19 nt, Artificial Sequence
  Description of Artificial Sequence: Synthetic oligonucleotide
acaaagaucuaugaaggga

SEQ ID NO: 808886 - RNA, 19 nt, Artificial Sequence
  Description of Artificial Sequence: Synthetic oligonucleotide
ugguuauuaacaggacugg

SEQ ID NO: 808887 - RNA, 19 nt, Artificial Sequence
  Description of Artificial Sequence: Synthetic oligonucleotide
cuuuugaagccuuacuuca

SEQ ID NO: 808888 - RNA, 19 nt, Artificial Sequence
  Description of Artificial Sequence: Synthetic oligonucleotide
uguguaagacugacacggg

SEQ ID NO: 808889 - RNA, 19 nt, Artificial Sequence
  Description of Artificial Sequence: Synthetic oligonucleotide
auaaauauacauguucuua

SEQ ID NO: 808890 - RNA, 19 nt, Artificial Sequence
  Description of Artificial Sequence: Synthetic oligonucleotide
  modified_base (19)..(19): a, c, u, g, unknown or other
guuagcucuaguucuaggn

SEQ ID NO: 808891 - RNA, 19 nt, Artificial Sequence
  Description of Artificial Sequence: Synthetic oligonucleotide
ugauaugauucaauuugaa

SEQ ID NO: 808892 - RNA, 19 nt, Artificial Sequence
  Description of Artificial Sequence: Synthetic oligonucleotide
ucucacuccccuuauauuu

SEQ ID NO: 808893 - RNA, 19 nt, Artificial Sequence
  Description of Artificial Sequence: Synthetic oligonucleotide
acagaauuguggauuuagc

SEQ ID NO: 808894 - RNA, 19 nt, Artificial Sequence
  Description of Artificial Sequence: Synthetic oligonucleotide
cacaaagaucuaugaaggg

SEQ ID NO: 808895 - RNA, 19 nt, Artificial Sequence
  Description of Artificial Sequence: Synthetic oligonucleotide
guuauuaacaggacuggac

SEQ ID NO: 808896 - RNA, 19 nt, Artificial Sequence
  Description of Artificial Sequence: Synthetic oligonucleotide
uucuagucauuucaucuaa

SEQ ID NO: 808897 - RNA, 19 nt, Artificial Sequence
  Description of Artificial Sequence: Synthetic oligonucleotide
ugagcuuacuggaaagaaa

SEQ ID NO: 808898 - RNA, 19 nt, Artificial Sequence
  Description of Artificial Sequence: Synthetic oligonucleotide
uaucaauagauugucuuau

SEQ ID NO: 808899 - RNA, 19 nt, Artificial Sequence
  Description of Artificial Sequence: Synthetic oligonucleotide
ccaugaaaccacaaaaggc

SEQ ID NO: 808900 - RNA, 19 nt, Artificial Sequence
  Description of Artificial Sequence: Synthetic oligonucleotide
acuaaaggagggaacaaug

SEQ ID NO: 808901 - RNA, 19 nt, Artificial Sequence
  Description of Artificial Sequence: Synthetic oligonucleotide
ugggaguggaacuaucaac

SEQ ID NO: 808902 - RNA, 19 nt, Artificial Sequence
  Description of Artificial Sequence: Synthetic oligonucleotide
cuuucccuuaaaacaaaug

SEQ ID NO: 808903 - RNA, 19 nt, Artificial Sequence
  Description of Artificial Sequence: Synthetic oligonucleotide
auagauugucuuaucuuuc

SEQ ID NO: 808904 - RNA, 19 nt, Artificial Sequence
  Description of Artificial Sequence: Synthetic oligonucleotide
uauugaaaugugagcuuac

SEQ ID NO: 808905 - RNA, 19 nt, Artificial Sequence
  Description of Artificial Sequence: Synthetic oligonucleotide
gucuuaucuuucuagagaa

SEQ ID NO: 808906 - RNA, 19 nt, Artificial Sequence
  Description of Artificial Sequence: Synthetic oligonucleotide
acuaucaacuacucucaca

SEQ ID NO: 808907 - RNA, 19 nt, Artificial Sequence
  Description of Artificial Sequence: Synthetic oligonucleotide
gaguggaacuaucaacuac

SEQ ID NO: 808908 - RNA, 19 nt, Artificial Sequence
  Description of Artificial Sequence: Synthetic oligonucleotide
  modified_base (11)..(11): a, c, u, g, unknown or other
uaguucuaggngaaaacuu

SEQ ID NO: 808909 - RNA, 19 nt, Artificial Sequence
  Description of Artificial Sequence: Synthetic oligonucleotide
augaucauuucagagggca

SEQ ID NO: 808910 - RNA, 19 nt, Artificial Sequence
  Description of Artificial Sequence: Synthetic oligonucleotide
uuaucggaugguacuaauc

SEQ ID NO: 808911 - RNA, 19 nt, Artificial Sequence
  Description of Artificial Sequence: Synthetic oligonucleotide
gcugguauaacacauuaga

SEQ ID NO: 808912 - RNA, 19 nt, Artificial Sequence
  Description of Artificial Sequence: Synthetic oligonucleotide
gggccauugaagcaaaucc

SEQ ID NO: 808913 - RNA, 19 nt, Artificial Sequence
  Description of Artificial Sequence: Synthetic oligonucleotide
uagagaacugaaagagaga

SEQ ID NO: 808914 - RNA, 19 nt, Artificial Sequence
  Description of Artificial Sequence: Synthetic oligonucleotide
gauacuguuagcucuaguu

SEQ ID NO: 808915 - RNA, 19 nt, Artificial Sequence
  Description of Artificial Sequence: Synthetic oligonucleotide
agucacuacgggcagacaa

SEQ ID NO: 808916 - RNA, 19 nt, Artificial Sequence
  Description of Artificial Sequence: Synthetic oligonucleotide
  modified_base (3)..(3): a, c, u, g, unknown or other
ggngaaaacuuaucggaug

SEQ ID NO: 808917 - RNA, 19 nt, Artificial Sequence
  Description of Artificial Sequence: Synthetic oligonucleotide
cauguacuuccauauggac

SEQ ID NO: 808918 - RNA, 19 nt, Artificial Sequence
  Description of Artificial Sequence: Synthetic oligonucleotide
caauagguacuucacuuuc

SEQ ID NO: 808919 - RNA, 19 nt, Artificial Sequence
  Description of Artificial Sequence: Synthetic oligonucleotide
cuuagauuccuucucaugu

SEQ ID NO: 808920 - RNA, 19 nt, Artificial Sequence
  Description of Artificial Sequence: Synthetic oligonucleotide
agcauggcucaaaacaaac

SEQ ID NO: 808921 - RNA, 19 nt, Artificial Sequence
  Description of Artificial Sequence: Synthetic oligonucleotide
cauggcucaaaacaaacaa

SEQ ID NO: 808922 - RNA, 19 nt, Artificial Sequence
  Description of Artificial Sequence: Synthetic oligonucleotide
ggaguuaguaaauagacau

SEQ ID NO: 808923 - RNA, 19 nt, Artificial Sequence
  Description of Artificial Sequence: Synthetic oligonucleotide
uuugaaaagcugguauaac

SEQ ID NO: 808924 - RNA, 19 nt, Artificial Sequence
  Description of Artificial Sequence: Synthetic oligonucleotide
aauagguacuucacuuuca

SEQ ID NO: 808925 - RNA, 19 nt, Artificial Sequence
  Description of Artificial Sequence: Synthetic oligonucleotide
cuacgggcagacaaugagc

SEQ ID NO: 808926 - RNA, 19 nt, Artificial Sequence
  Description of Artificial Sequence: Synthetic oligonucleotide
uggaacuaucaacuacucu

SEQ ID NO: 808927 - RNA, 19 nt, Artificial Sequence
  Description of Artificial Sequence: Synthetic oligonucleotide
aacuaaaggagggaacaau

SEQ ID NO: 808928 - RNA, 19 nt, Artificial Sequence
  Description of Artificial Sequence: Synthetic oligonucleotide
  modified_base (10)..(10): a, c, u, g, unknown or other
aguucuaggngaaaacuua

SEQ ID NO: 808929 - RNA, 19 nt, Artificial Sequence
  Description of Artificial Sequence: Synthetic oligonucleotide
agagucacuacgggcagac

SEQ ID NO: 808930 - RNA, 19 nt, Artificial Sequence
  Description of Artificial Sequence: Synthetic oligonucleotide
guguguaggucacagcaug

SEQ ID NO: 808931 - RNA, 19 nt, Artificial Sequence
  Description of Artificial Sequence: Synthetic oligonucleotide
  modified_base (8)..(8): a, c, u, g, unknown or other
uucuaggngaaaacuuauc

SEQ ID NO: 808932 - RNA, 19 nt, Artificial Sequence
  Description of Artificial Sequence: Synthetic oligonucleotide
gauccauuauacagcagac

SEQ ID NO: 808933 - RNA, 19 nt, Artificial Sequence
  Description of Artificial Sequence: Synthetic oligonucleotide
agaggugaaaauaaauaaa

SEQ ID NO: 808934 - RNA, 19 nt, Artificial Sequence
  Description of Artificial Sequence: Synthetic oligonucleotide
guuauugcuaauauaucaa

SEQ ID NO: 808935 - RNA, 19 nt, Artificial Sequence
  Description of Artificial Sequence: Synthetic oligonucleotide
gaacuaucaacuacucuca

SEQ ID NO: 808936 - RNA, 19 nt, Artificial Sequence
  Description of Artificial Sequence: Synthetic oligonucleotide
uucuucaaauggaccgacc

SEQ ID NO: 808937 - RNA, 19 nt, Artificial Sequence
  Description of Artificial Sequence: Synthetic oligonucleotide
gguaacacaggauaaauau

SEQ ID NO: 808938 - RNA, 19 nt, Artificial Sequence
  Description of Artificial Sequence: Synthetic oligonucleotide
uuguggauuuagcuuuaca

SEQ ID NO: 808939 - RNA, 19 nt, Artificial Sequence
  Description of Artificial Sequence: Synthetic oligonucleotide
aaggauacagugauaugau

SEQ ID NO: 808940 - RNA, 19 nt, Artificial Sequence
  Description of Artificial Sequence: Synthetic oligonucleotide
aaauccugaaguauacauu

SEQ ID NO: 808941 - RNA, 19 nt, Artificial Sequence
  Description of Artificial Sequence: Synthetic oligonucleotide
uucugcagugcgugaagag

SEQ ID NO: 808942 - RNA, 19 nt, Artificial Sequence
  Description of Artificial Sequence: Synthetic oligonucleotide
aaucaaggagacaaagaua

SEQ ID NO: 808943 - RNA, 19 nt, Artificial Sequence
  Description of Artificial Sequence: Synthetic oligonucleotide
cauauggacagacucagua

SEQ ID NO: 808944 - RNA, 19 nt, Artificial Sequence
  Description of Artificial Sequence: Synthetic oligonucleotide
accgacccuguuuauaugu

SEQ ID NO: 808945 - RNA, 19 nt, Artificial Sequence
  Description of Artificial Sequence: Synthetic oligonucleotide
caucuaaaaggagagacaa

SEQ ID NO: 808946 - RNA, 19 nt, Artificial Sequence
  Description of Artificial Sequence: Synthetic oligonucleotide
gguuacuaugaaccuacag

SEQ ID NO: 808947 - RNA, 19 nt, Artificial Sequence
  Description of Artificial Sequence: Synthetic oligonucleotide
uugaucacuugcaacuguu

SEQ ID NO: 808948 - RNA, 19 nt, Artificial Sequence
  Description of Artificial Sequence: Synthetic oligonucleotide
auguacuuccauauggaca

SEQ ID NO: 808949 - RNA, 19 nt, Artificial Sequence
  Description of Artificial Sequence: Synthetic oligonucleotide
cuuaacuugcucucuaugu

SEQ ID NO: 808950 - RNA, 19 nt, Artificial Sequence
  Description of Artificial Sequence: Synthetic oligonucleotide
ugauucuccacaucuccua

SEQ ID NO: 808951 - RNA, 19 nt, Artificial Sequence
  Description of Artificial Sequence: Synthetic oligonucleotide
cacaauuacugauucucca

SEQ ID NO: 808952 - RNA, 19 nt, Artificial Sequence
  Description of Artificial Sequence: Synthetic oligonucleotide
ucaaauggaccgacccugu

SEQ ID NO: 808953 - RNA, 19 nt, Artificial Sequence
  Description of Artificial Sequence: Synthetic oligonucleotide
ggccuauuaauauuuaaaa

SEQ ID NO: 808954 - RNA, 19 nt, Artificial Sequence
  Description of Artificial Sequence: Synthetic oligonucleotide
uuagucgucguugcugucu

SEQ ID NO: 808955 - RNA, 19 nt, Artificial Sequence
  Description of Artificial Sequence: Synthetic oligonucleotide
uuaacaggacuggacuucu

SEQ ID NO: 808956 - RNA, 19 nt, Artificial Sequence
  Description of Artificial Sequence: Synthetic oligonucleotide
uauuagcccaaagccuuag

SEQ ID NO: 808957 - RNA, 19 nt, Artificial Sequence
  Description of Artificial Sequence: Synthetic oligonucleotide
gaaccuacagggaaacaca

SEQ ID NO: 808958 - RNA, 19 nt, Artificial Sequence
  Description of Artificial Sequence: Synthetic oligonucleotide
gauucacccaaauuauagu

SEQ ID NO: 808959 - RNA, 19 nt, Artificial Sequence
  Description of Artificial Sequence: Synthetic oligonucleotide
uuagcuuuacaaggagaac

SEQ ID NO: 808960 - RNA, 19 nt, Artificial Sequence
  Description of Artificial Sequence: Synthetic oligonucleotide
auugaaaugugagcuuacu

SEQ ID NO: 808961 - RNA, 19 nt, Artificial Sequence
  Description of Artificial Sequence: Synthetic oligonucleotide
uucagcucuuaacuugcuc

SEQ ID NO: 808962 - RNA, 19 nt, Artificial Sequence
  Description of Artificial Sequence: Synthetic oligonucleotide
auaauugaacaaaacugua

SEQ ID NO: 808963 - RNA, 19 nt, Artificial Sequence
  Description of Artificial Sequence: Synthetic oligonucleotide
uaacaagauuguuguuucu

SEQ ID NO: 808964 - RNA, 19 nt, Artificial Sequence
  Description of Artificial Sequence: Synthetic oligonucleotide
guauaacacauuagaggug

SEQ ID NO: 808965 - RNA, 19 nt, Artificial Sequence
  Description of Artificial Sequence: Synthetic oligonucleotide
aaucuggcuccacuccuaa

SEQ ID NO: 808966 - RNA, 19 nt, Artificial Sequence
  Description of Artificial Sequence: Synthetic oligonucleotide
agcuuacuggaaagaaaac

SEQ ID NO: 808967 - RNA, 19 nt, Artificial Sequence
  Description of Artificial Sequence: Synthetic oligonucleotide
acauuaacuaaaggaggga

SEQ ID NO: 808968 - RNA, 19 nt, Artificial Sequence
  Description of Artificial Sequence: Synthetic oligonucleotide
uagcauugggaaaucccau

SEQ ID NO: 808969 - RNA, 19 nt, Artificial Sequence
  Description of Artificial Sequence: Synthetic oligonucleotide
gcaauucaaugacugggag

SEQ ID NO: 808970 - RNA, 19 nt, Artificial Sequence
  Description of Artificial Sequence: Synthetic oligonucleotide
uggaacucuuuugaagccu

SEQ ID NO: 808971 - RNA, 19 nt, Artificial Sequence
  Description of Artificial Sequence: Synthetic oligonucleotide
uuugcuaagugugcuucaa

SEQ ID NO: 808972 - RNA, 19 nt, Artificial Sequence
  Description of Artificial Sequence: Synthetic oligonucleotide
aacuuaucggaugguacua

SEQ ID NO: 808973 - RNA, 19 nt, Artificial Sequence
  Description of Artificial Sequence: Synthetic oligonucleotide
acuccaccuaaacuaucug

SEQ ID NO: 808974 - RNA, 19 nt, Artificial Sequence
  Description of Artificial Sequence: Synthetic oligonucleotide
ggcaggauagcauugggaa

SEQ ID NO: 808975 - RNA, 19 nt, Artificial Sequence
  Description of Artificial Sequence: Synthetic oligonucleotide
ucaaagcaucucacucccc

SEQ ID NO: 808976 - RNA, 19 nt, Artificial Sequence
  Description of Artificial Sequence: Synthetic oligonucleotide
uugcaggguccuuacaaau

SEQ ID NO: 808977 - RNA, 19 nt, Artificial Sequence
  Description of Artificial Sequence: Synthetic oligonucleotide
aacuaucugucaaguuuug

SEQ ID NO: 808978 - RNA, 19 nt, Artificial Sequence
  Description of Artificial Sequence: Synthetic oligonucleotide
aaaggagaauguauucaua

SEQ ID NO: 808979 - RNA, 19 nt, Artificial Sequence
  Description of Artificial Sequence: Synthetic oligonucleotide
auuguggauuuagcuuuac

SEQ ID NO: 808980 - RNA, 19 nt, Artificial Sequence
  Description of Artificial Sequence: Synthetic oligonucleotide
auaguguucuggaaacaca

SEQ ID NO: 808981 - RNA, 19 nt, Artificial Sequence
  Description of Artificial Sequence: Synthetic oligonucleotide
aaaaggccaaauaguuuau

SEQ ID NO: 808982 - RNA, 19 nt, Artificial Sequence
  Description of Artificial Sequence: Synthetic oligonucleotide
ugucuugcaggguccuuac

SEQ ID NO: 808983 - RNA, 19 nt, Artificial Sequence
  Description of Artificial Sequence: Synthetic oligonucleotide
ugcagugcgugaagaggca

SEQ ID NO: 808984 - RNA, 19 nt, Artificial Sequence
  Description of Artificial Sequence: Synthetic oligonucleotide
cuaugaaccuacagggaaa

SEQ ID NO: 808985 - RNA, 19 nt, Artificial Sequence
  Description of Artificial Sequence: Synthetic oligonucleotide
  modified_base (4)..(4): a, c, u, g, unknown or other
aggngaaaacuuaucggau

SEQ ID NO: 808986 - RNA, 19 nt, Artificial Sequence
  Description of Artificial Sequence: Synthetic oligonucleotide
aauuaaccucaugaucauu

SEQ ID NO: 808987 - RNA, 19 nt, Artificial Sequence
  Description of Artificial Sequence: Synthetic oligonucleotide
uaaucuggcuccacuccua

SEQ ID NO: 808988 - RNA, 19 nt, Artificial Sequence
  Description of Artificial Sequence: Synthetic oligonucleotide
aagauucacccaaauuaua

SEQ ID NO: 808989 - RNA, 19 nt, Artificial Sequence
  Description of Artificial Sequence: Synthetic oligonucleotide
uacaaggagaacgguuccu

SEQ ID NO: 808990 - RNA, 19 nt, Artificial Sequence
  Description of Artificial Sequence: Synthetic oligonucleotide
acgggguuacuaugaaccu

SEQ ID NO: 808991 - RNA, 19 nt, Artificial Sequence
  Description of Artificial Sequence: Synthetic oligonucleotide
  modified_base (14)..(14): a, c, u, g, unknown or other
cucuaguucuaggngaaaa

SEQ ID NO: 808992 - RNA, 19 nt, Artificial Sequence
  Description of Artificial Sequence: Synthetic oligonucleotide
auccauuauacagcagacu

SEQ ID NO: 808993 - RNA, 19 nt, Artificial Sequence
  Description of Artificial Sequence: Synthetic oligonucleotide
auuagcccaaagccuuagu

SEQ ID NO: 808994 - RNA, 19 nt, Artificial Sequence
  Description of Artificial Sequence: Synthetic oligonucleotide
aucuaugaagggaaaggau

SEQ ID NO: 808995 - RNA, 19 nt, Artificial Sequence
  Description of Artificial Sequence: Synthetic oligonucleotide
cagcucuuaacuugcucuc

SEQ ID NO: 808996 - RNA, 19 nt, Artificial Sequence
  Description of Artificial Sequence: Synthetic oligonucleotide
uauagacuaauggggccau

SEQ ID NO: 808997 - RNA, 19 nt, Artificial Sequence
  Description of Artificial Sequence: Synthetic oligonucleotide
ccauuauacagcagacuug

SEQ ID NO: 808998 - RNA, 19 nt, Artificial Sequence
  Description of Artificial Sequence: Synthetic oligonucleotide
ggauuuagcuuuacaagga

SEQ ID NO: 808999 - RNA, 19 nt, Artificial Sequence
  Description of Artificial Sequence: Synthetic oligonucleotide
gggguuacuaugaaccuac

SEQ ID NO: 809000 - RNA, 19 nt, Artificial Sequence
  Description of Artificial Sequence: Synthetic oligonucleotide
acuaucugucaaguuuuga

SEQ ID NO: 809001 - RNA, 19 nt, Artificial Sequence
  Description of Artificial Sequence: Synthetic oligonucleotide
aggauagcauugggaaauc

SEQ ID NO: 809002 - RNA, 19 nt, Artificial Sequence
  Description of Artificial Sequence: Synthetic oligonucleotide
agcacaaguuauugcuaau

SEQ ID NO: 809003 - RNA, 19 nt, Artificial Sequence
  Description of Artificial Sequence: Synthetic oligonucleotide
  modified_base (16)..(16): a, c, u, g, unknown or other
agcucuaguucuaggngaa

SEQ ID NO: 809004 - RNA, 19 nt, Artificial Sequence
  Description of Artificial Sequence: Synthetic oligonucleotide
  modified_base (12)..(12): a, c, u, g, unknown or other
cuaguucuaggngaaaacu

SEQ ID NO: 809005 - RNA, 19 nt, Artificial Sequence
  Description of Artificial Sequence: Synthetic oligonucleotide
cacccaaauuauaguguuc

SEQ ID NO: 809006 - RNA, 19 nt, Artificial Sequence
  Description of Artificial Sequence: Synthetic oligonucleotide
auguuguuaagagccucca

SEQ ID NO: 809007 - RNA, 19 nt, Artificial Sequence
  Description of Artificial Sequence: Synthetic oligonucleotide
gaguuaguaaauagacaua

SEQ ID NO: 809008 - RNA, 19 nt, Artificial Sequence
  Description of Artificial Sequence: Synthetic oligonucleotide
guaacacaggauaaauaua

SEQ ID NO: 809009 - RNA, 19 nt, Artificial Sequence
  Description of Artificial Sequence: Synthetic oligonucleotide
cuugcaggguccuuacaaa

SEQ ID NO: 809010 - RNA, 19 nt, Artificial Sequence
  Description of Artificial Sequence: Synthetic oligonucleotide
caauagauugucuuaucuu

SEQ ID NO: 809011 - RNA, 19 nt, Artificial Sequence
  Description of Artificial Sequence: Synthetic oligonucleotide
caauucaaugacugggagu

SEQ ID NO: 809012 - RNA, 19 nt, Artificial Sequence
  Description of Artificial Sequence: Synthetic oligonucleotide
cacuccuaaugauggcuuc

SEQ ID NO: 809013 - RNA, 19 nt, Artificial Sequence
  Description of Artificial Sequence: Synthetic oligonucleotide
cacaaucugccuuuugcua

SEQ ID NO: 809014 - RNA, 19 nt, Artificial Sequence
  Description of Artificial Sequence: Synthetic oligonucleotide
caaagcaucucacuccccu

SEQ ID NO: 809015 - RNA, 19 nt, Artificial Sequence
  Description of Artificial Sequence: Synthetic oligonucleotide
gaccgacccuguuuauaug

SEQ ID NO: 809016 - RNA, 19 nt, Artificial Sequence
  Description of Artificial Sequence: Synthetic oligonucleotide
uagucgucguugcugucuu

SEQ ID NO: 809017 - RNA, 19 nt, Artificial Sequence
  Description of Artificial Sequence: Synthetic oligonucleotide
cacaaguuauugcuaauau

SEQ ID NO: 809018 - RNA, 19 nt, Artificial Sequence
  Description of Artificial Sequence: Synthetic oligonucleotide
uaagacugacacgggguua

SEQ ID NO: 809019 - RNA, 19 nt, Artificial Sequence
  Description of Artificial Sequence: Synthetic oligonucleotide
gagauccauuauacagcag

SEQ ID NO: 809020 - RNA, 19 nt, Artificial Sequence
  Description of Artificial Sequence: Synthetic oligonucleotide
cagcacaggauuucuuaga

SEQ ID NO: 809021 - RNA, 19 nt, Artificial Sequence
  Description of Artificial Sequence: Synthetic oligonucleotide
acuuaucggaugguacuaa

SEQ ID NO: 809022 - RNA, 19 nt, Artificial Sequence
  Description of Artificial Sequence: Synthetic oligonucleotide
agagauacuguuagcucua

SEQ ID NO: 809023 - RNA, 19 nt, Artificial Sequence
  Description of Artificial Sequence: Synthetic oligonucleotide
uccaugcuugaggucuuca

SEQ ID NO: 809024 - RNA, 19 nt, Artificial Sequence
  Description of Artificial Sequence: Synthetic oligonucleotide
gguuauuaacaggacugga

SEQ ID NO: 809025 - RNA, 19 nt, Artificial Sequence
  Description of Artificial Sequence: Synthetic oligonucleotide
gggaguggaacuaucaacu

SEQ ID NO: 809026 - RNA, 19 nt, Artificial Sequence
  Description of Artificial Sequence: Synthetic oligonucleotide
agggaacaaugguuauuau

SEQ ID NO: 809027 - RNA, 19 nt, Artificial Sequence
  Description of Artificial Sequence: Synthetic oligonucleotide
ggcuccacuccuaaugaug

SEQ ID NO: 809028 - RNA, 19 nt, Artificial Sequence
  Description of Artificial Sequence: Synthetic oligonucleotide
ugguacuaaucuggcucca

SEQ ID NO: 809029 - RNA, 19 nt, Artificial Sequence
  Description of Artificial Sequence: Synthetic oligonucleotide
cuucaaauggaccgacccu

SEQ ID NO: 809030 - RNA, 19 nt, Artificial Sequence
  Description of Artificial Sequence: Synthetic oligonucleotide
gcacuacuucuugauauug

SEQ ID NO: 809031 - RNA, 19 nt, Artificial Sequence
  Description of Artificial Sequence: Synthetic oligonucleotide
ggcuggugugguuauuaac

SEQ ID NO: 809032 - RNA, 19 nt, Artificial Sequence
  Description of Artificial Sequence: Synthetic oligonucleotide
auuauacagcagacuugcu

SEQ ID NO: 809033 - RNA, 19 nt, Artificial Sequence
  Description of Artificial Sequence: Synthetic oligonucleotide
guagcacaaguuauugcua

SEQ ID NO: 809034 - RNA, 19 nt, Artificial Sequence
  Description of Artificial Sequence: Synthetic oligonucleotide
agugcgugaagaggcacua

SEQ ID NO: 809035 - RNA, 19 nt, Artificial Sequence
  Description of Artificial Sequence: Synthetic oligonucleotide
acaguagcuauuagcccaa

SEQ ID NO: 809036 - RNA, 19 nt, Artificial Sequence
  Description of Artificial Sequence: Synthetic oligonucleotide
gcaaauccaggccuauuaa

SEQ ID NO: 809037 - RNA, 19 nt, Artificial Sequence
  Description of Artificial Sequence: Synthetic oligonucleotide
caggauagcauugggaaau

SEQ ID NO: 809038 - RNA, 19 nt, Artificial Sequence
  Description of Artificial Sequence: Synthetic oligonucleotide
acgggcagacaaugagcca

SEQ ID NO: 809039 - RNA, 19 nt, Artificial Sequence
  Description of Artificial Sequence: Synthetic oligonucleotide
uggcuccacuccuaaugau

SEQ ID NO: 809040 - RNA, 19 nt, Artificial Sequence
  Description of Artificial Sequence: Synthetic oligonucleotide
agccuuagucgucguugcu

SEQ ID NO: 809041 - RNA, 19 nt, Artificial Sequence
  Description of Artificial Sequence: Synthetic oligonucleotide
uggaccgacccuguuuaua

SEQ ID NO: 809042 - RNA, 19 nt, Artificial Sequence
  Description of Artificial Sequence: Synthetic oligonucleotide
  modified_base (9)..(9): a, c, u, g, unknown or other
guucuaggngaaaacuuau

SEQ ID NO: 809043 - RNA, 19 nt, Artificial Sequence
  Description of Artificial Sequence: Synthetic oligonucleotide
cagaagcaauucaaugacu

SEQ ID NO: 809044 - RNA, 19 nt, Artificial Sequence
  Description of Artificial Sequence: Synthetic oligonucleotide
gccuuagucgucguugcug

SEQ ID NO: 809045 - RNA, 19 nt, Artificial Sequence
  Description of Artificial Sequence: Synthetic oligonucleotide
cuauuagcccaaagccuua

SEQ ID NO: 809046 - RNA, 19 nt, Artificial Sequence
  Description of Artificial Sequence: Synthetic oligonucleotide
cuaaacuaucugucaaguu

SEQ ID NO: 809047 - RNA, 19 nt, Artificial Sequence
  Description of Artificial Sequence: Synthetic oligonucleotide
cagugauaugauucaauuu

SEQ ID NO: 809048 - RNA, 19 nt, Artificial Sequence
  Description of Artificial Sequence: Synthetic oligonucleotide
uggcuucugcagugcguga

SEQ ID NO: 809049 - RNA, 19 nt, Artificial Sequence
  Description of Artificial Sequence: Synthetic oligonucleotide
gcuugaggucuucacaaua

SEQ ID NO: 809050 - RNA, 19 nt, Artificial Sequence
  Description of Artificial Sequence: Synthetic oligonucleotide
cuuaucggaugguacuaau

SEQ ID NO: 809051 - RNA, 19 nt, Artificial Sequence
  Description of Artificial Sequence: Synthetic oligonucleotide
gacccuguuuauauguuuu

SEQ ID NO: 809052 - RNA, 19 nt, Artificial Sequence
  Description of Artificial Sequence: Synthetic oligonucleotide
agucgucguugcugucuug

SEQ ID NO: 809053 - RNA, 19 nt, Artificial Sequence
  Description of Artificial Sequence: Synthetic oligonucleotide
cggaugguacuaaucuggc

SEQ ID NO: 809054 - RNA, 19 nt, Artificial Sequence
  Description of Artificial Sequence: Synthetic oligonucleotide
ccaccuaaacuaucuguca

SEQ ID NO: 809055 - RNA, 19 nt, Artificial Sequence
  Description of Artificial Sequence: Synthetic oligonucleotide
acucaguaccaaacauuaa

SEQ ID NO: 809056 - RNA, 19 nt, Artificial Sequence
  Description of Artificial Sequence: Synthetic oligonucleotide
caggauaaauauacauguu

SEQ ID NO: 809057 - RNA, 19 nt, Artificial Sequence
  Description of Artificial Sequence: Synthetic oligonucleotide
ggaccgacccuguuuauau

SEQ ID NO: 809058 - RNA, 19 nt, Artificial Sequence
  Description of Artificial Sequence: Synthetic oligonucleotide
cucuuaacuugcucucuau

SEQ ID NO: 809059 - RNA, 19 nt, Artificial Sequence
  Description of Artificial Sequence: Synthetic oligonucleotide
gacugacacgggguuacua

SEQ ID NO: 809060 - RNA, 19 nt, Artificial Sequence
  Description of Artificial Sequence: Synthetic oligonucleotide
gaagcaaauccaggccuau

SEQ ID NO: 809061 - RNA, 19 nt, Artificial Sequence
  Description of Artificial Sequence: Synthetic oligonucleotide
auggaccgacccuguuuau

SEQ ID NO: 809062 - RNA, 19 nt, Artificial Sequence
  Description of Artificial Sequence: Synthetic oligonucleotide
gcugacacaaucugccuuu

SEQ ID NO: 809063 - RNA, 19 nt, Artificial Sequence
  Description of Artificial Sequence: Synthetic oligonucleotide
gccuuacuucacagaauug

SEQ ID NO: 809064 - RNA, 19 nt, Artificial Sequence
  Description of Artificial Sequence: Synthetic oligonucleotide
cagugcgugaagaggcacu

SEQ ID NO: 809065 - RNA, 19 nt, Artificial Sequence
  Description of Artificial Sequence: Synthetic oligonucleotide
ggguccuuacaaaugugua

SEQ ID NO: 809066 - RNA, 19 nt, Artificial Sequence
  Description of Artificial Sequence: Synthetic oligonucleotide
ccuaaacuaucugucaagu

SEQ ID NO: 809067 - RNA, 19 nt, Artificial Sequence
  Description of Artificial Sequence: Synthetic oligonucleotide
agacugacacgggguuacu

SEQ ID NO: 809068 - RNA, 19 nt, Artificial Sequence
  Description of Artificial Sequence: Synthetic oligonucleotide
auagacuaauggggccauu

SEQ ID NO: 809069 - RNA, 19 nt, Artificial Sequence
  Description of Artificial Sequence: Synthetic oligonucleotide
ccuuagucgucguugcugu

SEQ ID NO: 809070 - RNA, 19 nt, Artificial Sequence
  Description of Artificial Sequence: Synthetic oligonucleotide
gugcgugaagaggcacuac

SEQ ID NO: 809071 - RNA, 19 nt, Artificial Sequence
  Description of Artificial Sequence: Synthetic oligonucleotide
gagucacuacgggcagaca

SEQ ID NO: 809072 - RNA, 19 nt, Artificial Sequence
  Description of Artificial Sequence: Synthetic oligonucleotide
gcagugcgugaagaggcac

SEQ ID NO: 809073 - RNA, 19 nt, Artificial Sequence
  Description of Artificial Sequence: Synthetic oligonucleotide
cagagucacuacgggcaga

SEQ ID NO: 809074 - RNA, 19 nt, Artificial Sequence
  Description of Artificial Sequence: Synthetic oligonucleotide
ggguuacuaugaaccuaca

SEQ ID NO: 809075 - RNA, 19 nt, Artificial Sequence
  Description of Artificial Sequence: Synthetic oligonucleotide
caguuccgaucuuugucuu

SEQ ID NO: 809076 - RNA, 19 nt, Artificial Sequence
  Description of Artificial Sequence: Synthetic oligonucleotide
caaauggaccgacccuguu

SEQ ID NO: 809077 - RNA, 19 nt, Artificial Sequence
  Description of Artificial Sequence: Synthetic oligonucleotide
ccaggccuauuaauauuua

SEQ ID NO: 809078 - RNA, 19 nt, Artificial Sequence
  Description of Artificial Sequence: Synthetic oligonucleotide
cgggcagacaaugagccaa

SEQ ID NO: 809079 - RNA, 19 nt, Artificial Sequence
  Description of Artificial Sequence: Synthetic oligonucleotide
caguagcuauuagcccaaa

SEQ ID NO: 809080 - RNA, 19 nt, Artificial Sequence
  Description of Artificial Sequence: Synthetic oligonucleotide
cgggguuacuaugaaccua

SEQ ID NO: 809081 - RNA, 19 nt, Artificial Sequence
  Description of Artificial Sequence: Synthetic oligonucleotide
ccgacccuguuuauauguu

SEQ ID NO: 809082 - RNA, 19 nt, Artificial Sequence
  Description of Artificial Sequence: Synthetic oligonucleotide
cgacccuguuuauauguuu

SEQ ID NO: 809083 - RNA, 19 nt, Artificial Sequence
  Description of Artificial Sequence: Synthetic oligonucleotide
  modified_base (1)..(1): a, c, u, g, unknown or other
ngaaaacuuaucggauggu

SEQ ID NO: 809084 - RNA, 19 nt, Artificial Sequence
  Description of Artificial Sequence: Synthetic oligonucleotide
aaauaauacaaggaugagg

SEQ ID NO: 809085 - RNA, 19 nt, Artificial Sequence
  Description of Artificial Sequence: Synthetic oligonucleotide
gaugauucaaaccucagca

SEQ ID NO: 809086 - RNA, 19 nt, Artificial Sequence
  Description of Artificial Sequence: Synthetic oligonucleotide
agaugauucaaaccucagc

SEQ ID NO: 809087 - RNA, 19 nt, Artificial Sequence
  Description of Artificial Sequence: Synthetic oligonucleotide
cucugaguggaacacaugg

SEQ ID NO: 809088 - RNA, 19 nt, Artificial Sequence
  Description of Artificial Sequence: Synthetic oligonucleotide
uauuagaggugacagguuc

SEQ ID NO: 809089 - RNA, 19 nt, Artificial Sequence
  Description of Artificial Sequence: Synthetic oligonucleotide
aaaauaauacaaggaugag

SEQ ID NO: 809090 - RNA, 19 nt, Artificial Sequence
  Description of Artificial Sequence: Synthetic oligonucleotide
aggugcagaucucuuaggc

SEQ ID NO: 809091 - RNA, 19 nt, Artificial Sequence
  Description of Artificial Sequence: Synthetic oligonucleotide
accggaugcguccagcucc

SEQ ID NO: 809092 - RNA, 19 nt, Artificial Sequence
  Description of Artificial Sequence: Synthetic oligonucleotide
caagccacgguauuagagg

SEQ ID NO: 809093 - RNA, 19 nt, Artificial Sequence
  Description of Artificial Sequence: Synthetic oligonucleotide
aaaacgacgccguccacga

SEQ ID NO: 809094 - RNA, 19 nt, Artificial Sequence
  Description of Artificial Sequence: Synthetic oligonucleotide
ugaugugaaucucucgcgc

SEQ ID NO: 809095 - RNA, 19 nt, Artificial Sequence
  Description of Artificial Sequence: Synthetic oligonucleotide
agcccagguauuuugccgc

SEQ ID NO: 809096 - RNA, 19 nt, Artificial Sequence
  Description of Artificial Sequence: Synthetic oligonucleotide
aucucauucggcgugacag

SEQ ID NO: 809097 - RNA, 19 nt, Artificial Sequence
  Description of Artificial Sequence: Synthetic oligonucleotide
acuuggcuggggucgaucc

SEQ ID NO: 809098 - RNA, 19 nt, Artificial Sequence
  Description of Artificial Sequence: Synthetic oligonucleotide
gacaccgccacgcucagcc

SEQ ID NO: 809099 - RNA, 19 nt, Artificial Sequence
  Description of Artificial Sequence: Synthetic oligonucleotide
agacaagagcccuccagcg

SEQ ID NO: 809100 - RNA, 19 nt, Artificial Sequence
  Description of Artificial Sequence: Synthetic oligonucleotide
aggcgaagaugauucaaac

SEQ ID NO: 809101 - RNA, 19 nt, Artificial Sequence
  Description of Artificial Sequence: Synthetic oligonucleotide
gaugugaaucucucgcgcc

SEQ ID NO: 809102 - RNA, 19 nt, Artificial Sequence
  Description of Artificial Sequence: Synthetic oligonucleotide
ucacugacgagugucgccg

SEQ ID NO: 809103 - RNA, 19 nt, Artificial Sequence
  Description of Artificial Sequence: Synthetic oligonucleotide
ugcggcauggcuaccacgc

SEQ ID NO: 809104 - RNA, 19 nt, Artificial Sequence
  Description of Artificial Sequence: Synthetic oligonucleotide
ucuuaggcaagccacggua

SEQ ID NO: 809105 - RNA, 19 nt, Artificial Sequence
  Description of Artificial Sequence: Synthetic oligonucleotide
gcggcuagcaccuugaccc

SEQ ID NO: 809106 - RNA, 19 nt, Artificial Sequence
  Description of Artificial Sequence: Synthetic oligonucleotide
aagccacgguauuagaggu

SEQ ID NO: 809107 - RNA, 19 nt, Artificial Sequence
  Description of Artificial Sequence: Synthetic oligonucleotide
aacgacgccguccacgagu

SEQ ID NO: 809108 - RNA, 19 nt, Artificial Sequence
  Description of Artificial Sequence: Synthetic oligonucleotide
cacgcagaagcccaguugc

SEQ ID NO: 809109 - RNA, 19 nt, Artificial Sequence
  Description of Artificial Sequence: Synthetic oligonucleotide
acgguauuagaggugacag

SEQ ID NO: 809110 - RNA, 19 nt, Artificial Sequence
  Description of Artificial Sequence: Synthetic oligonucleotide
gagauaaagauguccaccu

SEQ ID NO: 809111 - RNA, 19 nt, Artificial Sequence
  Description of Artificial Sequence: Synthetic oligonucleotide
aguggcaaugugcagggga

SEQ ID NO: 809112 - RNA, 19 nt, Artificial Sequence
  Description of Artificial Sequence: Synthetic oligonucleotide
ucucauucggcgugacagg

SEQ ID NO: 809113 - RNA, 19 nt, Artificial Sequence
  Description of Artificial Sequence: Synthetic oligonucleotide
guagagacgcugcuugcgg

SEQ ID NO: 809114 - RNA, 19 nt, Artificial Sequence
  Description of Artificial Sequence: Synthetic oligonucleotide
ucucucgcgccucugugag

SEQ ID NO: 809115 - RNA, 19 nt, Artificial Sequence
  Description of Artificial Sequence: Synthetic oligonucleotide
cagacaagagcccuccagc

SEQ ID NO: 809116 - RNA, 19 nt, Artificial Sequence
  Description of Artificial Sequence: Synthetic oligonucleotide
uugcucgugcacauggggc

SEQ ID NO: 809117 - RNA, 19 nt, Artificial Sequence
  Description of Artificial Sequence: Synthetic oligonucleotide
guagguugcagcuggcaug

SEQ ID NO: 809118 - RNA, 19 nt, Artificial Sequence
  Description of Artificial Sequence: Synthetic oligonucleotide
accucgaugaugcgguguc

SEQ ID NO: 809119 - RNA, 19 nt, Artificial Sequence
  Description of Artificial Sequence: Synthetic oligonucleotide
ugcucgugcacauggggcc

SEQ ID NO: 809120 - RNA, 19 nt, Artificial Sequence
  Description of Artificial Sequence: Synthetic oligonucleotide
ucgucuccgggccaucacg

SEQ ID NO: 809121 - RNA, 19 nt, Artificial Sequence
  Description of Artificial Sequence: Synthetic oligonucleotide
cauucggcgugacaggccc

SEQ ID NO: 809122 - RNA, 19 nt, Artificial Sequence
  Description of Artificial Sequence: Synthetic oligonucleotide
aagaugauucaaaccucag

SEQ ID NO: 809123 - RNA, 19 nt, Artificial Sequence
  Description of Artificial Sequence: Synthetic oligonucleotide
ggagucagcggcuagcacc

SEQ ID NO: 809124 - RNA, 19 nt, Artificial Sequence
  Description of Artificial Sequence: Synthetic oligonucleotide
guaacacgguccccgaugc

SEQ ID NO: 809125 - RNA, 19 nt, Artificial Sequence
  Description of Artificial Sequence: Synthetic oligonucleotide
uggagauaaagauguccac

SEQ ID NO: 809126 - RNA, 19 nt, Artificial Sequence
  Description of Artificial Sequence: Synthetic oligonucleotide
gaguggaacacauggcaca

SEQ ID NO: 809127 - RNA, 19 nt, Artificial Sequence
  Description of Artificial Sequence: Synthetic oligonucleotide
uaggugcagaucucuuagg

SEQ ID NO: 809128 - RNA, 19 nt, Artificial Sequence
  Description of Artificial Sequence: Synthetic oligonucleotide
agugucgccgcaccucgcg

SEQ ID NO: 809129 - RNA, 19 nt, Artificial Sequence
  Description of Artificial Sequence: Synthetic oligonucleotide
accccggguccccagaugg

SEQ ID NO: 809130 - RNA, 19 nt, Artificial Sequence
  Description of Artificial Sequence: Synthetic oligonucleotide
aguggaugauacucagugu

SEQ ID NO: 809131 - RNA, 19 nt, Artificial Sequence
  Description of Artificial Sequence: Synthetic oligonucleotide
uguaggugcagaucucuua

SEQ ID NO: 809132 - RNA, 19 nt, Artificial Sequence
  Description of Artificial Sequence: Synthetic oligonucleotide
gcgaagaugauucaaaccu

SEQ ID NO: 809133 - RNA, 19 nt, Artificial Sequence
  Description of Artificial Sequence: Synthetic oligonucleotide
ugucaccaggcuacaagac

SEQ ID NO: 809134 - RNA, 19 nt, Artificial Sequence
  Description of Artificial Sequence: Synthetic oligonucleotide
gguggagauaaagaugucc

SEQ ID NO: 809135 - RNA, 19 nt, Artificial Sequence
  Description of Artificial Sequence: Synthetic oligonucleotide
agacggcagggcaugaggc

SEQ ID NO: 809136 - RNA, 19 nt, Artificial Sequence
  Description of Artificial Sequence: Synthetic oligonucleotide
ggaugaugcgcgcaugcgg

SEQ ID NO: 809137 - RNA, 19 nt, Artificial Sequence
  Description of Artificial Sequence: Synthetic oligonucleotide
gacgccguccacgaguucc

SEQ ID NO: 809138 - RNA, 19 nt, Artificial Sequence
  Description of Artificial Sequence: Synthetic oligonucleotide
ucagcggcuagcaccuuga

SEQ ID NO: 809139 - RNA, 19 nt, Artificial Sequence
  Description of Artificial Sequence: Synthetic oligonucleotide
gucuguggaggauccacag

SEQ ID NO: 809140 - RNA, 19 nt, Artificial Sequence
  Description of Artificial Sequence: Synthetic oligonucleotide
augugaaucucucgcgccu

SEQ ID NO: 809141 - RNA, 19 nt, Artificial Sequence
  Description of Artificial Sequence: Synthetic oligonucleotide
gaaccucggagacggcagg

SEQ ID NO: 809142 - RNA, 19 nt, Artificial Sequence
  Description of Artificial Sequence: Synthetic oligonucleotide
ggcgaagaugauucaaacc

SEQ ID NO: 809143 - RNA, 19 nt, Artificial Sequence
  Description of Artificial Sequence: Synthetic oligonucleotide
ucauucggcgugacaggcc

SEQ ID NO: 809144 - RNA, 19 nt, Artificial Sequence
  Description of Artificial Sequence: Synthetic oligonucleotide
gugacaguccugguggcgg

SEQ ID NO: 809145 - RNA, 19 nt, Artificial Sequence
  Description of Artificial Sequence: Synthetic oligonucleotide
gcuggcauggucuugaugu

SEQ ID NO: 809146 - RNA, 19 nt, Artificial Sequence
  Description of Artificial Sequence: Synthetic oligonucleotide
cuagaacuccugcugucug

SEQ ID NO: 809147 - RNA, 19 nt, Artificial Sequence
  Description of Artificial Sequence: Synthetic oligonucleotide
ugacuggcguccgagggcc

SEQ ID NO: 809148 - RNA, 19 nt, Artificial Sequence
  Description of Artificial Sequence: Synthetic oligonucleotide
auacucagugucacugacg

SEQ ID NO: 809149 - RNA, 19 nt, Artificial Sequence
  Description of Artificial Sequence: Synthetic oligonucleotide
gguaacacgguccccgaug

SEQ ID NO: 809150 - RNA, 19 nt, Artificial Sequence
  Description of Artificial Sequence: Synthetic oligonucleotide
gggacgaaggcacgcacgg

SEQ ID NO: 809151 - RNA, 19 nt, Artificial Sequence
  Description of Artificial Sequence: Synthetic oligonucleotide
gauggccugugcaacgagc

SEQ ID NO: 809152 - RNA, 19 nt, Artificial Sequence
  Description of Artificial Sequence: Synthetic oligonucleotide
cucauucggcgugacaggc

SEQ ID NO: 809153 - RNA, 19 nt, Artificial Sequence
  Description of Artificial Sequence: Synthetic oligonucleotide
gggaccuggaaccucggag

SEQ ID NO: 809154 - RNA, 19 nt, Artificial Sequence
  Description of Artificial Sequence: Synthetic oligonucleotide
ugggacccuguucacgcug

SEQ ID NO: 809155 - RNA, 19 nt, Artificial Sequence
  Description of Artificial Sequence: Synthetic oligonucleotide
aacgcccaggcccucucca

SEQ ID NO: 809156 - RNA, 19 nt, Artificial Sequence
  Description of Artificial Sequence: Synthetic oligonucleotide
agggcgugguccaucaggg

SEQ ID NO: 809157 - RNA, 19 nt, Artificial Sequence
  Description of Artificial Sequence: Synthetic oligonucleotide
gacggcggugggcagcagg

SEQ ID NO: 809158 - RNA, 19 nt, Artificial Sequence
  Description of Artificial Sequence: Synthetic oligonucleotide
uuaggcaagccacgguauu

SEQ ID NO: 809159 - RNA, 19 nt, Artificial Sequence
  Description of Artificial Sequence: Synthetic oligonucleotide
ugucacugacgagugucgc

SEQ ID NO: 809160 - RNA, 19 nt, Artificial Sequence
  Description of Artificial Sequence: Synthetic oligonucleotide
aacgagcugggcauccucu

SEQ ID NO: 809161 - RNA, 19 nt, Artificial Sequence
  Description of Artificial Sequence: Synthetic oligonucleotide
cuccaucucauucggcgug

SEQ ID NO: 809162 - RNA, 19 nt, Artificial Sequence
  Description of Artificial Sequence: Synthetic oligonucleotide
gugucacugacgagugucg

SEQ ID NO: 809163 - RNA, 19 nt, Artificial Sequence
  Description of Artificial Sequence: Synthetic oligonucleotide
ugggaacgggccacccagg

SEQ ID NO: 809164 - RNA, 19 nt, Artificial Sequence
  Description of Artificial Sequence: Synthetic oligonucleotide
ugcguccagcuccaucuca

SEQ ID NO: 809165 - RNA, 19 nt, Artificial Sequence
  Description of Artificial Sequence: Synthetic oligonucleotide
aggcaagccacgguauuag

SEQ ID NO: 809166 - RNA, 19 nt, Artificial Sequence
  Description of Artificial Sequence: Synthetic oligonucleotide
uugugcgggugacuggcgu

SEQ ID NO: 809167 - RNA, 19 nt, Artificial Sequence
  Description of Artificial Sequence: Synthetic oligonucleotide
ugcagggcgugguccauca

SEQ ID NO: 809168 - RNA, 19 nt, Artificial Sequence
  Description of Artificial Sequence: Synthetic oligonucleotide
cagccggacucaaccaggg

SEQ ID NO: 809169 - RNA, 19 nt, Artificial Sequence
  Description of Artificial Sequence: Synthetic oligonucleotide
ggcgguaacacgguccccg

SEQ ID NO: 809170 - RNA, 19 nt, Artificial Sequence
  Description of Artificial Sequence: Synthetic oligonucleotide
gcauuuuguagagacgcug

SEQ ID NO: 809171 - RNA, 19 nt, Artificial Sequence
  Description of Artificial Sequence: Synthetic oligonucleotide
uggcaaugacggcgguggg

SEQ ID NO: 809172 - RNA, 19 nt, Artificial Sequence
  Description of Artificial Sequence: Synthetic oligonucleotide
aaacgacgccguccacgag

SEQ ID NO: 809173 - RNA, 19 nt, Artificial Sequence
  Description of Artificial Sequence: Synthetic oligonucleotide
gaaggcacgcacggacggg

SEQ ID NO: 809174 - RNA, 19 nt, Artificial Sequence
  Description of Artificial Sequence: Synthetic oligonucleotide
caagagcccuccagcgucc

SEQ ID NO: 809175 - RNA, 19 nt, Artificial Sequence
  Description of Artificial Sequence: Synthetic oligonucleotide
gaugauacucagugucacu

SEQ ID NO: 809176 - RNA, 19 nt, Artificial Sequence
  Description of Artificial Sequence: Synthetic oligonucleotide
uguucacgcuggcauuguc

SEQ ID NO: 809177 - RNA, 19 nt, Artificial Sequence
  Description of Artificial Sequence: Synthetic oligonucleotide
gacauccccuccauccacc

SEQ ID NO: 809178 - RNA, 19 nt, Artificial Sequence
  Description of Artificial Sequence: Synthetic oligonucleotide
ugcaacgagcugggcaucc

SEQ ID NO: 809179 - RNA, 19 nt, Artificial Sequence
  Description of Artificial Sequence: Synthetic oligonucleotide
acgaaggcacgcacggacg

SEQ ID NO: 809180 - RNA, 19 nt, Artificial Sequence
  Description of Artificial Sequence: Synthetic oligonucleotide
cuuggcuggggucgauccc

SEQ ID NO: 809181 - RNA, 19 nt, Artificial Sequence
  Description of Artificial Sequence: Synthetic oligonucleotide
aguugcucgugcacauggg

SEQ ID NO: 809182 - RNA, 19 nt, Artificial Sequence
  Description of Artificial Sequence: Synthetic oligonucleotide
gugucccacgcggacaccg

SEQ ID NO: 809183 - RNA, 19 nt, Artificial Sequence
  Description of Artificial Sequence: Synthetic oligonucleotide
aucgaggggcagccccacc

SEQ ID NO: 809184 - RNA, 19 nt, Artificial Sequence
  Description of Artificial Sequence: Synthetic oligonucleotide
ggugcagaucucuuaggca

SEQ ID NO: 809185 - RNA, 19 nt, Artificial Sequence
  Description of Artificial Sequence: Synthetic oligonucleotide
acaccggaugcguccagcu

SEQ ID NO: 809186 - RNA, 19 nt, Artificial Sequence
  Description of Artificial Sequence: Synthetic oligonucleotide
gcuggcauugucaccaggc

SEQ ID NO: 809187 - RNA, 19 nt, Artificial Sequence
  Description of Artificial Sequence: Synthetic oligonucleotide
gcaagccacgguauuagag

SEQ ID NO: 809188 - RNA, 19 nt, Artificial Sequence
  Description of Artificial Sequence: Synthetic oligonucleotide
ugugaaucucucgcgccuc

SEQ ID NO: 809189 - RNA, 19 nt, Artificial Sequence
  Description of Artificial Sequence: Synthetic oligonucleotide
caggcgaagaugauucaaa

SEQ ID NO: 809190 - RNA, 19 nt, Artificial Sequence
  Description of Artificial Sequence: Synthetic oligonucleotide
gaugcgcgcaugcggcaug

SEQ ID NO: 809191 - RNA, 19 nt, Artificial Sequence
  Description of Artificial Sequence: Synthetic oligonucleotide
uggccgauggccugugcaa

SEQ ID NO: 809192 - RNA, 19 nt, Artificial Sequence
  Description of Artificial Sequence: Synthetic oligonucleotide
ggcuccgcggcugacaucc

SEQ ID NO: 809193 - RNA, 19 nt, Artificial Sequence
  Description of Artificial Sequence: Synthetic oligonucleotide
gaucagcacuggcccaaug

SEQ ID NO: 809194 - RNA, 19 nt, Artificial Sequence
  Description of Artificial Sequence: Synthetic oligonucleotide
ccacgaguuccucaugucc

SEQ ID NO: 809195 - RNA, 19 nt, Artificial Sequence
  Description of Artificial Sequence: Synthetic oligonucleotide
uugacgcgguccauggcuu

SEQ ID NO: 809196 - RNA, 19 nt, Artificial Sequence
  Description of Artificial Sequence: Synthetic oligonucleotide
ugucccacgcggacaccgc

SEQ ID NO: 809197 - RNA, 19 nt, Artificial Sequence
  Description of Artificial Sequence: Synthetic oligonucleotide
cuugacgcgguccauggcu

SEQ ID NO: 809198 - RNA, 19 nt, Artificial Sequence
  Description of Artificial Sequence: Synthetic oligonucleotide
uuccugcacaccggaugcg

SEQ ID NO: 809199 - RNA, 19 nt, Artificial Sequence
  Description of Artificial Sequence: Synthetic oligonucleotide
ugaaucucucgcgccucug

SEQ ID NO: 809200 - RNA, 19 nt, Artificial Sequence
  Description of Artificial Sequence: Synthetic oligonucleotide
ucccauugauggcgguaac

SEQ ID NO: 809201 - RNA, 19 nt, Artificial Sequence
  Description of Artificial Sequence: Synthetic oligonucleotide
cuagugggcuggucaucag

SEQ ID NO: 809202 - RNA, 19 nt, Artificial Sequence
  Description of Artificial Sequence: Synthetic oligonucleotide
cauggcuaccacgcucugc

SEQ ID NO: 809203 - RNA, 19 nt, Artificial Sequence
  Description of Artificial Sequence: Synthetic oligonucleotide
cacgcucugcccguugacc

SEQ ID NO: 809204 - RNA, 19 nt, Artificial Sequence
  Description of Artificial Sequence: Synthetic oligonucleotide
uccugcacaccggaugcgu

SEQ ID NO: 809205 - RNA, 19 nt, Artificial Sequence
  Description of Artificial Sequence: Synthetic oligonucleotide
ugccccgugagcagccggu

SEQ ID NO: 809206 - RNA, 19 nt, Artificial Sequence
  Description of Artificial Sequence: Synthetic oligonucleotide
gacaguccugguggcgggg

SEQ ID NO: 809207 - RNA, 19 nt, Artificial Sequence
  Description of Artificial Sequence: Synthetic oligonucleotide
caugcggcauggcuaccac

SEQ ID NO: 809208 - RNA, 19 nt, Artificial Sequence
  Description of Artificial Sequence: Synthetic oligonucleotide
gucaccguugugcggguga

SEQ ID NO: 809209 - RNA, 19 nt, Artificial Sequence
  Description of Artificial Sequence: Synthetic oligonucleotide
gcagccgguagguugcagc

SEQ ID NO: 809210 - RNA, 19 nt, Artificial Sequence
  Description of Artificial Sequence: Synthetic oligonucleotide
cacgguauuagaggugaca

SEQ ID NO: 809211 - RNA, 19 nt, Artificial Sequence
  Description of Artificial Sequence: Synthetic oligonucleotide
gcugggcauccucugagug

SEQ ID NO: 809212 - RNA, 19 nt, Artificial Sequence
  Description of Artificial Sequence: Synthetic oligonucleotide
augaugcgcgcaugcggca

SEQ ID NO: 809213 - RNA, 19 nt, Artificial Sequence
  Description of Artificial Sequence: Synthetic oligonucleotide
ggcugagucucacccucgg

SEQ ID NO: 809214 - RNA, 19 nt, Artificial Sequence
  Description of Artificial Sequence: Synthetic oligonucleotide
acggacggggcggucacag

SEQ ID NO: 809215 - RNA, 19 nt, Artificial Sequence
  Description of Artificial Sequence: Synthetic oligonucleotide
gcaagcggggugcagucug

SEQ ID NO: 809216 - RNA, 19 nt, Artificial Sequence
  Description of Artificial Sequence: Synthetic oligonucleotide
gacaagggcuguaggugca

SEQ ID NO: 809217 - RNA, 19 nt, Artificial Sequence
  Description of Artificial Sequence: Synthetic oligonucleotide
gaaucucucgcgccucugu

SEQ ID NO: 809218 - RNA, 19 nt, Artificial Sequence
  Description of Artificial Sequence: Synthetic oligonucleotide
gggucgauccccguucucc

SEQ ID NO: 809219 - RNA, 19 nt, Artificial Sequence
  Description of Artificial Sequence: Synthetic oligonucleotide
ccagccggacucaaccagg

SEQ ID NO: 809220 - RNA, 19 nt, Artificial Sequence
  Description of Artificial Sequence: Synthetic oligonucleotide
gcaaugacggcggugggca

SEQ ID NO: 809221 - RNA, 19 nt, Artificial Sequence
  Description of Artificial Sequence: Synthetic oligonucleotide
caacgagcugggcauccuc

SEQ ID NO: 809222 - RNA, 19 nt, Artificial Sequence
  Description of Artificial Sequence: Synthetic oligonucleotide
guugugcgggugacuggcg

SEQ ID NO: 809223 - RNA, 19 nt, Artificial Sequence
  Description of Artificial Sequence: Synthetic oligonucleotide
cgaagaugauucaaaccuc

SEQ ID NO: 809224 - RNA, 19 nt, Artificial Sequence
  Description of Artificial Sequence: Synthetic oligonucleotide
gucgauccccguucuccug

SEQ ID NO: 809225 - RNA, 19 nt, Artificial Sequence
  Description of Artificial Sequence: Synthetic oligonucleotide
ucaccguugugcgggugac

SEQ ID NO: 809226 - RNA, 19 nt, Artificial Sequence
  Description of Artificial Sequence: Synthetic oligonucleotide
ggacucaaccagggcaacg

SEQ ID NO: 809227 - RNA, 19 nt, Artificial Sequence
  Description of Artificial Sequence: Synthetic oligonucleotide
cagcaagcggggugcaguc

SEQ ID NO: 809228 - RNA, 19 nt, Artificial Sequence
  Description of Artificial Sequence: Synthetic oligonucleotide
cagguauuuugccgcaaaa

SEQ ID NO: 809229 - RNA, 19 nt, Artificial Sequence
  Description of Artificial Sequence: Synthetic oligonucleotide
ggggacgaaggcacgcacg

SEQ ID NO: 809230 - RNA, 19 nt, Artificial Sequence
  Description of Artificial Sequence: Synthetic oligonucleotide
auacaaggaugaggauucu

SEQ ID NO: 809231 - RNA, 19 nt, Artificial Sequence
  Description of Artificial Sequence: Synthetic oligonucleotide
caaugacggcggugggcag

SEQ ID NO: 809232 - RNA, 19 nt, Artificial Sequence
  Description of Artificial Sequence: Synthetic oligonucleotide
cacaccggaugcguccagc

SEQ ID NO: 809233 - RNA, 19 nt, Artificial Sequence
  Description of Artificial Sequence: Synthetic oligonucleotide
gccacgguauuagagguga

SEQ ID NO: 809234 - RNA, 19 nt, Artificial Sequence
  Description of Artificial Sequence: Synthetic oligonucleotide
augcgcgcaugcggcaugg

SEQ ID NO: 809235 - RNA, 19 nt, Artificial Sequence
  Description of Artificial Sequence: Synthetic oligonucleotide
gcugcgcucugacagcaac

SEQ ID NO: 809236 - RNA, 19 nt, Artificial Sequence
  Description of Artificial Sequence: Synthetic oligonucleotide
ugcgggugacuggcguccg

SEQ ID NO: 809237 - RNA, 19 nt, Artificial Sequence
  Description of Artificial Sequence: Synthetic oligonucleotide
uucggcgugacaggcccuc

SEQ ID NO: 809238 - RNA, 19 nt, Artificial Sequence
  Description of Artificial Sequence: Synthetic oligonucleotide
cuuaggcaagccacgguau

SEQ ID NO: 809239 - RNA, 19 nt, Artificial Sequence
  Description of Artificial Sequence: Synthetic oligonucleotide
ggaucaguuccugcacacc

SEQ ID NO: 809240 - RNA, 19 nt, Artificial Sequence
  Description of Artificial Sequence: Synthetic oligonucleotide
gccaugcgcaugcugggug

SEQ ID NO: 809241 - RNA, 19 nt, Artificial Sequence
  Description of Artificial Sequence: Synthetic oligonucleotide
ugaugcgcgcaugcggcau

SEQ ID NO: 809242 - RNA, 19 nt, Artificial Sequence
  Description of Artificial Sequence: Synthetic oligonucleotide
ggcacgcacggacggggcg

SEQ ID NO: 809243 - RNA, 19 nt, Artificial Sequence
  Description of Artificial Sequence: Synthetic oligonucleotide
ugacgcgguccauggcuuc

SEQ ID NO: 809244 - RNA, 19 nt, Artificial Sequence
  Description of Artificial Sequence: Synthetic oligonucleotide
augacggcggugggcagca

SEQ ID NO: 809245 - RNA, 19 nt, Artificial Sequence
  Description of Artificial Sequence: Synthetic oligonucleotide
ggcaaugacggcggugggc

SEQ ID NO: 809246 - RNA, 19 nt, Artificial Sequence
  Description of Artificial Sequence: Synthetic oligonucleotide
gggccgucaggccuuggcc

SEQ ID NO: 809247 - RNA, 19 nt, Artificial Sequence
  Description of Artificial Sequence: Synthetic oligonucleotide
gcaaugugcaggggacagg

SEQ ID NO: 809248 - RNA, 19 nt, Artificial Sequence
  Description of Artificial Sequence: Synthetic oligonucleotide
agggcaacgcccaggcccu

SEQ ID NO: 809249 - RNA, 19 nt, Artificial Sequence
  Description of Artificial Sequence: Synthetic oligonucleotide
gcuagugggcuggucauca

SEQ ID NO: 809250 - RNA, 19 nt, Artificial Sequence
  Description of Artificial Sequence: Synthetic oligonucleotide
gugucgccgcaccucgcgc

SEQ ID NO: 809251 - RNA, 19 nt, Artificial Sequence
  Description of Artificial Sequence: Synthetic oligonucleotide
agggccgcgugcccacuug

SEQ ID NO: 809252 - RNA, 19 nt, Artificial Sequence
  Description of Artificial Sequence: Synthetic oligonucleotide
ccgcaccucgcgcacagcg

SEQ ID NO: 809253 - RNA, 19 nt, Artificial Sequence
  Description of Artificial Sequence: Synthetic oligonucleotide
ugcuagugggcuggucauc

SEQ ID NO: 809254 - RNA, 19 nt, Artificial Sequence
  Description of Artificial Sequence: Synthetic oligonucleotide
gccugcgccaugcgcaugc

SEQ ID NO: 809255 - RNA, 19 nt, Artificial Sequence
  Description of Artificial Sequence: Synthetic oligonucleotide
cgcaauguaggagaugguc

SEQ ID NO: 809256 - RNA, 19 nt, Artificial Sequence
  Description of Artificial Sequence: Synthetic oligonucleotide
ggcgcgguccuccuggcca

SEQ ID NO: 809257 - RNA, 19 nt, Artificial Sequence
  Description of Artificial Sequence: Synthetic oligonucleotide
cucucgcgccucugugagc

SEQ ID NO: 809258 - RNA, 19 nt, Artificial Sequence
  Description of Artificial Sequence: Synthetic oligonucleotide
cgagugucgccgcaccucg

SEQ ID NO: 809259 - RNA, 19 nt, Artificial Sequence
  Description of Artificial Sequence: Synthetic oligonucleotide
gucgucuccgggccaucac

SEQ ID NO: 809260 - RNA, 19 nt, Artificial Sequence
  Description of Artificial Sequence: Synthetic oligonucleotide
gcggucacagguacaccgg

SEQ ID NO: 809261 - RNA, 19 nt, Artificial Sequence
  Description of Artificial Sequence: Synthetic oligonucleotide
cgaaggcacgcacggacgg

SEQ ID NO: 809262 - RNA, 19 nt, Artificial Sequence
  Description of Artificial Sequence: Synthetic oligonucleotide
caucucauucggcgugaca

SEQ ID NO: 809263 - RNA, 19 nt, Artificial Sequence
  Description of Artificial Sequence: Synthetic oligonucleotide
caccggaugcguccagcuc

SEQ ID NO: 809264 - RNA, 19 nt, Artificial Sequence
  Description of Artificial Sequence: Synthetic oligonucleotide
gacccuguucacgcuggca

SEQ ID NO: 809265 - RNA, 19 nt, Artificial Sequence
  Description of Artificial Sequence: Synthetic oligonucleotide
aggcaucgaggggcagccc

SEQ ID NO: 809266 - RNA, 19 nt, Artificial Sequence
  Description of Artificial Sequence: Synthetic oligonucleotide
ugagggcucccgagcgcuc

SEQ ID NO: 809267 - RNA, 19 nt, Artificial Sequence
  Description of Artificial Sequence: Synthetic oligonucleotide
cacgguccccgaugcugag

SEQ ID NO: 809268 - RNA, 19 nt, Artificial Sequence
  Description of Artificial Sequence: Synthetic oligonucleotide
ggaugcguccagcuccauc

SEQ ID NO: 809269 - RNA, 19 nt, Artificial Sequence
  Description of Artificial Sequence: Synthetic oligonucleotide
gcgcaugcggcauggcuac

SEQ ID NO: 809270 - RNA, 19 nt, Artificial Sequence
  Description of Artificial Sequence: Synthetic oligonucleotide
cccagccggacucaaccag

SEQ ID NO: 809271 - RNA, 19 nt, Artificial Sequence
  Description of Artificial Sequence: Synthetic oligonucleotide
agccgguagguugcagcug

SEQ ID NO: 809272 - RNA, 19 nt, Artificial Sequence
  Description of Artificial Sequence: Synthetic oligonucleotide
ggcauggucuugaugugaa

SEQ ID NO: 809273 - RNA, 19 nt, Artificial Sequence
  Description of Artificial Sequence: Synthetic oligonucleotide
gucgccgcaccucgcgcac

SEQ ID NO: 809274 - RNA, 19 nt, Artificial Sequence
  Description of Artificial Sequence: Synthetic oligonucleotide
gcggcugacauccccucca

SEQ ID NO: 809275 - RNA, 19 nt, Artificial Sequence
  Description of Artificial Sequence: Synthetic oligonucleotide
ggagacggcagggcaugag

SEQ ID NO: 809276 - RNA, 19 nt, Artificial Sequence
  Description of Artificial Sequence: Synthetic oligonucleotide
gcaggcaucgaggggcagc

SEQ ID NO: 809277 - RNA, 19 nt, Artificial Sequence
  Description of Artificial Sequence: Synthetic oligonucleotide
cuggaaccucggagacggc

SEQ ID NO: 809278 - RNA, 19 nt, Artificial Sequence
  Description of Artificial Sequence: Synthetic oligonucleotide
cuggcguccgagggccgcg

SEQ ID NO: 809279 - RNA, 19 nt, Artificial Sequence
  Description of Artificial Sequence: Synthetic oligonucleotide
ccgcgugcccacuuggcug

SEQ ID NO: 809280 - RNA, 19 nt, Artificial Sequence
  Description of Artificial Sequence: Synthetic oligonucleotide
ggcaagccacgguauuaga

SEQ ID NO: 809281 - RNA, 19 nt, Artificial Sequence
  Description of Artificial Sequence: Synthetic oligonucleotide
cgcgugcccacuuggcugg

SEQ ID NO: 809282 - RNA, 19 nt, Artificial Sequence
  Description of Artificial Sequence: Synthetic oligonucleotide
gggccgcgugcccacuugg

SEQ ID NO: 809283 - RNA, 19 nt, Artificial Sequence
  Description of Artificial Sequence: Synthetic oligonucleotide
acgcagaagcccaguugcu

SEQ ID NO: 809284 - RNA, 19 nt, Artificial Sequence
  Description of Artificial Sequence: Synthetic oligonucleotide
ucggcgugacaggcccucc

SEQ ID NO: 809285 - RNA, 19 nt, Artificial Sequence
  Description of Artificial Sequence: Synthetic oligonucleotide
caucgaggggcagccccac

SEQ ID NO: 809286 - RNA, 19 nt, Artificial Sequence
  Description of Artificial Sequence: Synthetic oligonucleotide
agcagccgguagguugcag

SEQ ID NO: 809287 - RNA, 19 nt, Artificial Sequence
  Description of Artificial Sequence: Synthetic oligonucleotide
gagugucgccgcaccucgc

SEQ ID NO: 809288 - RNA, 19 nt, Artificial Sequence
  Description of Artificial Sequence: Synthetic oligonucleotide
cagcguccacacucuccug

SEQ ID NO: 809289 - RNA, 19 nt, Artificial Sequence
  Description of Artificial Sequence: Synthetic oligonucleotide
augcgcaugcuggguggug

SEQ ID NO: 809290 - RNA, 19 nt, Artificial Sequence
  Description of Artificial Sequence: Synthetic oligonucleotide
gaccucgaugaugcggugu

SEQ ID NO: 809291 - RNA, 19 nt, Artificial Sequence
  Description of Artificial Sequence: Synthetic oligonucleotide
acgcggacaccgccacgcu

SEQ ID NO: 809292 - RNA, 19 nt, Artificial Sequence
  Description of Artificial Sequence: Synthetic oligonucleotide
cucuuaggcaagccacggu

SEQ ID NO: 809293 - RNA, 19 nt, Artificial Sequence
  Description of Artificial Sequence: Synthetic oligonucleotide
ggcgggcaguggaugauac

SEQ ID NO: 809294 - RNA, 19 nt, Artificial Sequence
  Description of Artificial Sequence: Synthetic oligonucleotide
guauuagaggugacagguu

SEQ ID NO: 809295 - RNA, 19 nt, Artificial Sequence
  Description of Artificial Sequence: Synthetic oligonucleotide
acgacgccguccacgaguu

SEQ ID NO: 809296 - RNA, 19 nt, Artificial Sequence
  Description of Artificial Sequence: Synthetic oligonucleotide
cucgcgccucugugagcag

SEQ ID NO: 809297 - RNA, 19 nt, Artificial Sequence
  Description of Artificial Sequence: Synthetic oligonucleotide
cugcgcucugacagcaacu

SEQ ID NO: 809298 - RNA, 19 nt, Artificial Sequence
  Description of Artificial Sequence: Synthetic oligonucleotide
ggucgauccccguucuccu

SEQ ID NO: 809299 - RNA, 19 nt, Artificial Sequence
  Description of Artificial Sequence: Synthetic oligonucleotide
acgccguccacgaguuccu

SEQ ID NO: 809300 - RNA, 19 nt, Artificial Sequence
  Description of Artificial Sequence: Synthetic oligonucleotide
cggucacagguacaccggc

SEQ ID NO: 809301 - RNA, 19 nt, Artificial Sequence
  Description of Artificial Sequence: Synthetic oligonucleotide
gcuacaagacaagggcugu

SEQ ID NO: 809302 - RNA, 19 nt, Artificial Sequence
  Description of Artificial Sequence: Synthetic oligonucleotide
cgcaccucgcgcacagcgg

SEQ ID NO: 809303 - RNA, 19 nt, Artificial Sequence
  Description of Artificial Sequence: Synthetic oligonucleotide
ccagguauuuugccgcaaa

SEQ ID NO: 809304 - RNA, 19 nt, Artificial Sequence
  Description of Artificial Sequence: Synthetic oligonucleotide
gcaugcggcauggcuacca

SEQ ID NO: 809305 - RNA, 19 nt, Artificial Sequence
  Description of Artificial Sequence: Synthetic oligonucleotide
cacugggugcuagugggcu

SEQ ID NO: 809306 - RNA, 19 nt, Artificial Sequence
  Description of Artificial Sequence: Synthetic oligonucleotide
gcguccgagggccgcgugc

SEQ ID NO: 809307 - RNA, 19 nt, Artificial Sequence
  Description of Artificial Sequence: Synthetic oligonucleotide
guccgagggccgcgugccc

SEQ ID NO: 809308 - RNA, 19 nt, Artificial Sequence
  Description of Artificial Sequence: Synthetic oligonucleotide
gccguccacgaguuccuca

SEQ ID NO: 809309 - RNA, 19 nt, Artificial Sequence
  Description of Artificial Sequence: Synthetic oligonucleotide
ugggugcuagugggcuggu

SEQ ID NO: 809310 - RNA, 19 nt, Artificial Sequence
  Description of Artificial Sequence: Synthetic oligonucleotide
auucggcgugacaggcccu

SEQ ID NO: 809311 - RNA, 19 nt, Artificial Sequence
  Description of Artificial Sequence: Synthetic oligonucleotide
gcuaccacgcucugcccgu

SEQ ID NO: 809312 - RNA, 19 nt, Artificial Sequence
  Description of Artificial Sequence: Synthetic oligonucleotide
gcccagguauuuugccgca

SEQ ID NO: 809313 - RNA, 19 nt, Artificial Sequence
  Description of Artificial Sequence: Synthetic oligonucleotide
cugagggcucccgagcgcu

SEQ ID NO: 809314 - RNA, 19 nt, Artificial Sequence
  Description of Artificial Sequence: Synthetic oligonucleotide
ccacgguauuagaggugac

SEQ ID NO: 809315 - RNA, 19 nt, Artificial Sequence
  Description of Artificial Sequence: Synthetic oligonucleotide
cagcuggaugaugcgcgca

SEQ ID NO: 809316 - RNA, 19 nt, Artificial Sequence
  Description of Artificial Sequence: Synthetic oligonucleotide
cacacucuccugggccguc

SEQ ID NO: 809317 - RNA, 19 nt, Artificial Sequence
  Description of Artificial Sequence: Synthetic oligonucleotide
cuggggcgcgguccuccug

SEQ ID NO: 809318 - RNA, 19 nt, Artificial Sequence
  Description of Artificial Sequence: Synthetic oligonucleotide
gcgguaacacgguccccga

SEQ ID NO: 809319 - RNA, 19 nt, Artificial Sequence
  Description of Artificial Sequence: Synthetic oligonucleotide
ccccgaggcccacugggug

SEQ ID NO: 809320 - RNA, 19 nt, Artificial Sequence
  Description of Artificial Sequence: Synthetic oligonucleotide
ugcgguccuggggcgcggu

SEQ ID NO: 809321 - RNA, 19 nt, Artificial Sequence
  Description of Artificial Sequence: Synthetic oligonucleotide
gugcaacgagcugggcauc

SEQ ID NO: 809322 - RNA, 19 nt, Artificial Sequence
  Description of Artificial Sequence: Synthetic oligonucleotide
gcacggacggggcggucac

SEQ ID NO: 809323 - RNA, 19 nt, Artificial Sequence
  Description of Artificial Sequence: Synthetic oligonucleotide
ccccgugagcagccgguag

SEQ ID NO: 809324 - RNA, 19 nt, Artificial Sequence
  Description of Artificial Sequence: Synthetic oligonucleotide
ggucccauugauggcggua

SEQ ID NO: 809325 - RNA, 19 nt, Artificial Sequence
  Description of Artificial Sequence: Synthetic oligonucleotide
caagcggggugcagucugu

SEQ ID NO: 809326 - RNA, 19 nt, Artificial Sequence
  Description of Artificial Sequence: Synthetic oligonucleotide
ggcggaugauggcuguggu

SEQ ID NO: 809327 - RNA, 19 nt, Artificial Sequence
  Description of Artificial Sequence: Synthetic oligonucleotide
ucgccgcaccucgcgcaca

SEQ ID NO: 809328 - RNA, 19 nt, Artificial Sequence
  Description of Artificial Sequence: Synthetic oligonucleotide
uggcguccgagggccgcgu

SEQ ID NO: 809329 - RNA, 19 nt, Artificial Sequence
  Description of Artificial Sequence: Synthetic oligonucleotide
cuguggugacaggcgggca

SEQ ID NO: 809330 - RNA, 19 nt, Artificial Sequence
  Description of Artificial Sequence: Synthetic oligonucleotide
ccgguagguugcagcuggc

SEQ ID NO: 809331 - RNA, 19 nt, Artificial Sequence
  Description of Artificial Sequence: Synthetic oligonucleotide
gcaucgaggggcagcccca

SEQ ID NO: 809332 - RNA, 19 nt, Artificial Sequence
  Description of Artificial Sequence: Synthetic oligonucleotide
ggucacagguacaccggcu

SEQ ID NO: 809333 - RNA, 19 nt, Artificial Sequence
  Description of Artificial Sequence: Synthetic oligonucleotide
ugacggcggugggcagcag

SEQ ID NO: 809334 - RNA, 19 nt, Artificial Sequence
  Description of Artificial Sequence: Synthetic oligonucleotide
gagcagccgguagguugca

SEQ ID NO: 809335 - RNA, 19 nt, Artificial Sequence
  Description of Artificial Sequence: Synthetic oligonucleotide
cgauggccugugcaacgag

SEQ ID NO: 809336 - RNA, 19 nt, Artificial Sequence
  Description of Artificial Sequence: Synthetic oligonucleotide
cguccgagggccgcgugcc

SEQ ID NO: 809337 - RNA, 19 nt, Artificial Sequence
  Description of Artificial Sequence: Synthetic oligonucleotide
ccacgcucagccgcacccc

SEQ ID NO: 809338 - RNA, 19 nt, Artificial Sequence
  Description of Artificial Sequence: Synthetic oligonucleotide
ggccgcgugcccacuuggc

SEQ ID NO: 809339 - RNA, 19 nt, Artificial Sequence
  Description of Artificial Sequence: Synthetic oligonucleotide
cgucuccgggccaucacga

SEQ ID NO: 809340 - RNA, 19 nt, Artificial Sequence
  Description of Artificial Sequence: Synthetic oligonucleotide
cggcgugacaggcccuccg

SEQ ID NO: 809341 - RNA, 19 nt, Artificial Sequence
  Description of Artificial Sequence: Synthetic oligonucleotide
ggucaccguugugcgggug

SEQ ID NO: 809342 - RNA, 19 nt, Artificial Sequence
  Description of Artificial Sequence: Synthetic oligonucleotide
ccggaugcguccagcucca

SEQ ID NO: 809343 - RNA, 19 nt, Artificial Sequence
  Description of Artificial Sequence: Synthetic oligonucleotide
gcggugcugucuccagcca

SEQ ID NO: 809344 - RNA, 19 nt, Artificial Sequence
  Description of Artificial Sequence: Synthetic oligonucleotide
cagugucacugacgagugu

SEQ ID NO: 809345 - RNA, 19 nt, Artificial Sequence
  Description of Artificial Sequence: Synthetic oligonucleotide
ggggucgauccccguucuc

SEQ ID NO: 809346 - RNA, 19 nt, Artificial Sequence
  Description of Artificial Sequence: Synthetic oligonucleotide
gcaguggaugauacucagu

SEQ ID NO: 809347 - RNA, 19 nt, Artificial Sequence
  Description of Artificial Sequence: Synthetic oligonucleotide
gccgcgugcccacuuggcu

SEQ ID NO: 809348 - RNA, 19 nt, Artificial Sequence
  Description of Artificial Sequence: Synthetic oligonucleotide
ggcguccgagggccgcgug

SEQ ID NO: 809349 - RNA, 19 nt, Artificial Sequence
  Description of Artificial Sequence: Synthetic oligonucleotide
cggggacgaaggcacgcac

SEQ ID NO: 809350 - RNA, 19 nt, Artificial Sequence
  Description of Artificial Sequence: Synthetic oligonucleotide
gccagucgucuccgggcca

SEQ ID NO: 809351 - RNA, 19 nt, Artificial Sequence
  Description of Artificial Sequence: Synthetic oligonucleotide
caugcgcaugcuggguggu

SEQ ID NO: 809352 - RNA, 19 nt, Artificial Sequence
  Description of Artificial Sequence: Synthetic oligonucleotide
ccccagccggacucaacca

SEQ ID NO: 809353 - RNA, 19 nt, Artificial Sequence
  Description of Artificial Sequence: Synthetic oligonucleotide
gcggggacgaaggcacgca

SEQ ID NO: 809354 - RNA, 19 nt, Artificial Sequence
  Description of Artificial Sequence: Synthetic oligonucleotide
gagccccagccggacucaa

SEQ ID NO: 809355 - RNA, 19 nt, Artificial Sequence
  Description of Artificial Sequence: Synthetic oligonucleotide
gcuggggucgauccccguu

SEQ ID NO: 809356 - RNA, 19 nt, Artificial Sequence
  Description of Artificial Sequence: Synthetic oligonucleotide
ccgcggcugacauccccuc

SEQ ID NO: 809357 - RNA, 19 nt, Artificial Sequence
  Description of Artificial Sequence: Synthetic oligonucleotide
ggacaccgccacgcucagc

SEQ ID NO: 809358 - RNA, 19 nt, Artificial Sequence
  Description of Artificial Sequence: Synthetic oligonucleotide
ccccguggagcagguuggc

SEQ ID NO: 809359 - RNA, 19 nt, Artificial Sequence
  Description of Artificial Sequence: Synthetic oligonucleotide
cuggcccaauguccgcaau

SEQ ID NO: 809360 - RNA, 19 nt, Artificial Sequence
  Description of Artificial Sequence: Synthetic oligonucleotide
gcgggcaguggaugauacu

SEQ ID NO: 809361 - RNA, 19 nt, Artificial Sequence
  Description of Artificial Sequence: Synthetic oligonucleotide
gggugcuagugggcugguc

SEQ ID NO: 809362 - RNA, 19 nt, Artificial Sequence
  Description of Artificial Sequence: Synthetic oligonucleotide
cgcggacaccgccacgcuc

SEQ ID NO: 809363 - RNA, 19 nt, Artificial Sequence
  Description of Artificial Sequence: Synthetic oligonucleotide
cggacucaaccagggcaac

SEQ ID NO: 809364 - RNA, 19 nt, Artificial Sequence
  Description of Artificial Sequence: Synthetic oligonucleotide
cacggacggggcggucaca

SEQ ID NO: 809365 - RNA, 19 nt, Artificial Sequence
  Description of Artificial Sequence: Synthetic oligonucleotide
cggacaccgccacgcucag

SEQ ID NO: 809366 - RNA, 19 nt, Artificial Sequence
  Description of Artificial Sequence: Synthetic oligonucleotide
caccguugugcgggugacu

SEQ ID NO: 809367 - RNA, 19 nt, Artificial Sequence
  Description of Artificial Sequence: Synthetic oligonucleotide
cccagguauuuugccgcaa

SEQ ID NO: 809368 - RNA, 19 nt, Artificial Sequence
  Description of Artificial Sequence: Synthetic oligonucleotide
gcuccgcggcugacauccc

SEQ ID NO: 809369 - RNA, 19 nt, Artificial Sequence
  Description of Artificial Sequence: Synthetic oligonucleotide
ccgcaauguaggagauggu

SEQ ID NO: 809370 - RNA, 19 nt, Artificial Sequence
  Description of Artificial Sequence: Synthetic oligonucleotide
cgcacggacggggcgguca

SEQ ID NO: 809371 - RNA, 19 nt, Artificial Sequence
  Description of Artificial Sequence: Synthetic oligonucleotide
cccggguccccagaugggu

SEQ ID NO: 809372 - RNA, 19 nt, Artificial Sequence
  Description of Artificial Sequence: Synthetic oligonucleotide
cgcaugcggcauggcuacc

SEQ ID NO: 809373 - RNA, 19 nt, Artificial Sequence
  Description of Artificial Sequence: Synthetic oligonucleotide
cuaccacgcucugcccguu

SEQ ID NO: 809374 - RNA, 19 nt, Artificial Sequence
  Description of Artificial Sequence: Synthetic oligonucleotide
gccccgaggcccacugggu

SEQ ID NO: 809375 - RNA, 19 nt, Artificial Sequence
  Description of Artificial Sequence: Synthetic oligonucleotide
gccccgugagcagccggua

SEQ ID NO: 809376 - RNA, 19 nt, Artificial Sequence
  Description of Artificial Sequence: Synthetic oligonucleotide
cggggcggucacagguaca

SEQ ID NO: 809377 - RNA, 19 nt, Artificial Sequence
  Description of Artificial Sequence: Synthetic oligonucleotide
ccuggggcgcgguccuccu

SEQ ID NO: 809378 - RNA, 19 nt, Artificial Sequence
  Description of Artificial Sequence: Synthetic oligonucleotide
cgacgccguccacgaguuc

SEQ ID NO: 809379 - RNA, 19 nt, Artificial Sequence
  Description of Artificial Sequence: Synthetic oligonucleotide
cgccguccacgaguuccuc

SEQ ID NO: 809380 - RNA, 19 nt, Artificial Sequence
  Description of Artificial Sequence: Synthetic oligonucleotide
ccugcgccaugcgcaugcu

SEQ ID NO: 809381 - RNA, 19 nt, Artificial Sequence
  Description of Artificial Sequence: Synthetic oligonucleotide
cgccaugcgcaugcugggu

SEQ ID NO: 809382 - RNA, 19 nt, Artificial Sequence
  Description of Artificial Sequence: Synthetic oligonucleotide
agcauaauaggccagaaac

SEQ ID NO: 809383 - RNA, 19 nt, Artificial Sequence
  Description of Artificial Sequence: Synthetic oligonucleotide
auagauuccuguaauaccc

SEQ ID NO: 809384 - RNA, 19 nt, Artificial Sequence
  Description of Artificial Sequence: Synthetic oligonucleotide
ugugacuggguacaaaccg

SEQ ID NO: 809385 - RNA, 19 nt, Artificial Sequence
  Description of Artificial Sequence: Synthetic oligonucleotide
guaaacaaaaccaggacgg

SEQ ID NO: 809386 - RNA, 19 nt, Artificial Sequence
  Description of Artificial Sequence: Synthetic oligonucleotide
uguaaagcuggacagacac

SEQ ID NO: 809387 - RNA, 19 nt, Artificial Sequence
  Description of Artificial Sequence: Synthetic oligonucleotide
ugacacacuagaaaggacc

SEQ ID NO: 809388 - RNA, 19 nt, Artificial Sequence
  Description of Artificial Sequence: Synthetic oligonucleotide
acaagcucagaguuguucc

SEQ ID NO: 809389 - RNA, 19 nt, Artificial Sequence
  Description of Artificial Sequence: Synthetic oligonucleotide
uugaauagccauucgcugg

SEQ ID NO: 809390 - RNA, 19 nt, Artificial Sequence
  Description of Artificial Sequence: Synthetic oligonucleotide
aagccgcucacacugacuc

SEQ ID NO: 809391 - RNA, 19 nt, Artificial Sequence
  Description of Artificial Sequence: Synthetic oligonucleotide
uuguuccuggcacagauug

SEQ ID NO: 809392 - RNA, 19 nt, Artificial Sequence
  Description of Artificial Sequence: Synthetic oligonucleotide
cauaauaggccagaaacag

SEQ ID NO: 809393 - RNA, 19 nt, Artificial Sequence
  Description of Artificial Sequence: Synthetic oligonucleotide
ucagauuugucaagugucc

SEQ ID NO: 809394 - RNA, 19 nt, Artificial Sequence
  Description of Artificial Sequence: Synthetic oligonucleotide
ugggagaugacacacuaga

SEQ ID NO: 809395 - RNA, 19 nt, Artificial Sequence
  Description of Artificial Sequence: Synthetic oligonucleotide
augcagaucauaguugugc

SEQ ID NO: 809396 - RNA, 19 nt, Artificial Sequence
  Description of Artificial Sequence: Synthetic oligonucleotide
ucuacucggguucugacga

SEQ ID NO: 809397 - RNA, 19 nt, Artificial Sequence
  Description of Artificial Sequence: Synthetic oligonucleotide
uguaauacccuuccacgug

SEQ ID NO: 809398 - RNA, 19 nt, Artificial Sequence
  Description of Artificial Sequence: Synthetic oligonucleotide
uacuugaaguucaggacag

SEQ ID NO: 809399 - RNA, 19 nt, Artificial Sequence
  Description of Artificial Sequence: Synthetic oligonucleotide
acuccgauucgucagccgc

SEQ ID NO: 809400 - RNA, 19 nt, Artificial Sequence
  Description of Artificial Sequence: Synthetic oligonucleotide
cuggguauggugcaaagag

SEQ ID NO: 809401 - RNA, 19 nt, Artificial Sequence
  Description of Artificial Sequence: Synthetic oligonucleotide
aaugaaugugcagaccuug

SEQ ID NO: 809402 - RNA, 19 nt, Artificial Sequence
  Description of Artificial Sequence: Synthetic oligonucleotide
acaaaccggauucugcagg

SEQ ID NO: 809403 - RNA, 19 nt, Artificial Sequence
  Description of Artificial Sequence: Synthetic oligonucleotide
acgcuggguaaacaaaacc

SEQ ID NO: 809404 - RNA, 19 nt, Artificial Sequence
  Description of Artificial Sequence: Synthetic oligonucleotide
uggcucaacuuccacaugc

SEQ ID NO: 809405 - RNA, 19 nt, Artificial Sequence
  Description of Artificial Sequence: Synthetic oligonucleotide
uaaagcuggacagacacgu

SEQ ID NO: 809406 - RNA, 19 nt, Artificial Sequence
  Description of Artificial Sequence: Synthetic oligonucleotide
aagcuggacagacacguug

SEQ ID NO: 809407 - RNA, 19 nt, Artificial Sequence
  Description of Artificial Sequence: Synthetic oligonucleotide
guaauacccuuccacgugg

SEQ ID NO: 809408 - RNA, 19 nt, Artificial Sequence
  Description of Artificial Sequence: Synthetic oligonucleotide
augcaagacaagcucagag

SEQ ID NO: 809409 - RNA, 19 nt, Artificial Sequence
  Description of Artificial Sequence: Synthetic oligonucleotide
ugguuguuauuucaucacc

SEQ ID NO: 809410 - RNA, 19 nt, Artificial Sequence
  Description of Artificial Sequence: Synthetic oligonucleotide
aaacacagauggcucaacu

SEQ ID NO: 809411 - RNA, 19 nt, Artificial Sequence
  Description of Artificial Sequence: Synthetic oligonucleotide
gaaaggacuggacagggga

SEQ ID NO: 809412 - RNA, 19 nt, Artificial Sequence
  Description of Artificial Sequence: Synthetic oligonucleotide
aaagacuguggugugauaa

SEQ ID NO: 809413 - RNA, 19 nt, Artificial Sequence
  Description of Artificial Sequence: Synthetic oligonucleotide
cuugaauagccauucgcug

SEQ ID NO: 809414 - RNA, 19 nt, Artificial Sequence
  Description of Artificial Sequence: Synthetic oligonucleotide
acggcauuggguuguacac

SEQ ID NO: 809415 - RNA, 19 nt, Artificial Sequence
  Description of Artificial Sequence: Synthetic oligonucleotide
aacggcauuggguuguaca

SEQ ID NO: 809416 - RNA, 19 nt, Artificial Sequence
  Description of Artificial Sequence: Synthetic oligonucleotide
uucuacucggguucugacg

SEQ ID NO: 809417 - RNA, 19 nt, Artificial Sequence
  Description of Artificial Sequence: Synthetic oligonucleotide
gaacccacaaaggagauga

SEQ ID NO: 809418 - RNA, 19 nt, Artificial Sequence
  Description of Artificial Sequence: Synthetic oligonucleotide
gguacuaggugugaggucg

SEQ ID NO: 809419 - RNA, 19 nt, Artificial Sequence
  Description of Artificial Sequence: Synthetic oligonucleotide
aaccggauucugcaggaag

SEQ ID NO: 809420 - RNA, 19 nt, Artificial Sequence
  Description of Artificial Sequence: Synthetic oligonucleotide
ugugauaaccauucacagu

SEQ ID NO: 809421 - RNA, 19 nt, Artificial Sequence
  Description of Artificial Sequence: Synthetic oligonucleotide
gugugauaaccauucacag

SEQ ID NO: 809422 - RNA, 19 nt, Artificial Sequence
  Description of Artificial Sequence: Synthetic oligonucleotide
uccacacggagcucaaacg

SEQ ID NO: 809423 - RNA, 19 nt, Artificial Sequence
  Description of Artificial Sequence: Synthetic oligonucleotide
ugaaaguugccaccuuccc

SEQ ID NO: 809424 - RNA, 19 nt, Artificial Sequence
  Description of Artificial Sequence: Synthetic oligonucleotide
ugaaugugcagaccuuggc

SEQ ID NO: 809425 - RNA, 19 nt, Artificial Sequence
  Description of Artificial Sequence: Synthetic oligonucleotide
ucagccgcaccucuaagug

SEQ ID NO: 809426 - RNA, 19 nt, Artificial Sequence
  Description of Artificial Sequence: Synthetic oligonucleotide
ugcagucuuggcaaagcag

SEQ ID NO: 809427 - RNA, 19 nt, Artificial Sequence
  Description of Artificial Sequence: Synthetic oligonucleotide
gaagucaccuguguagagg

SEQ ID NO: 809428 - RNA, 19 nt, Artificial Sequence
  Description of Artificial Sequence: Synthetic oligonucleotide
aauaaccagcugcugaguu

SEQ ID NO: 809429 - RNA, 19 nt, Artificial Sequence
  Description of Artificial Sequence: Synthetic oligonucleotide
aagguaauaaccagcugcu

SEQ ID NO: 809430 - RNA, 19 nt, Artificial Sequence
  Description of Artificial Sequence: Synthetic oligonucleotide
ucuuggcaaagcaggaaug

SEQ ID NO: 809431 - RNA, 19 nt, Artificial Sequence
  Description of Artificial Sequence: Synthetic oligonucleotide
gaaaggacccuucacagua

SEQ ID NO: 809432 - RNA, 19 nt, Artificial Sequence
  Description of Artificial Sequence: Synthetic oligonucleotide
agacuguggugugauaacc

SEQ ID NO: 809433 - RNA, 19 nt, Artificial Sequence
  Description of Artificial Sequence: Synthetic oligonucleotide
ugcgcuuuagagaugggau

SEQ ID NO: 809434 - RNA, 19 nt, Artificial Sequence
  Description of Artificial Sequence: Synthetic oligonucleotide
cuuguccacuugaauagcc

SEQ ID NO: 809435 - RNA, 19 nt, Artificial Sequence
  Description of Artificial Sequence: Synthetic oligonucleotide
gaaugugcagaccuuggca

SEQ ID NO: 809436 - RNA, 19 nt, Artificial Sequence
  Description of Artificial Sequence: Synthetic oligonucleotide
aggcccauguuuuccacac

SEQ ID NO: 809437 - RNA, 19 nt, Artificial Sequence
  Description of Artificial Sequence: Synthetic oligonucleotide
aggaaugacuuccaccgug

SEQ ID NO: 809438 - RNA, 19 nt, Artificial Sequence
  Description of Artificial Sequence: Synthetic oligonucleotide
gaugugcuaaucugcaguc

SEQ ID NO: 809439 - RNA, 19 nt, Artificial Sequence
  Description of Artificial Sequence: Synthetic oligonucleotide
ucgcugaagaccccaaaga

SEQ ID NO: 809440 - RNA, 19 nt, Artificial Sequence
  Description of Artificial Sequence: Synthetic oligonucleotide
uuccacacggagcucaaac

SEQ ID NO: 809441 - RNA, 19 nt, Artificial Sequence
  Description of Artificial Sequence: Synthetic oligonucleotide
aacacagauggcucaacuu

SEQ ID NO: 809442 - RNA, 19 nt, Artificial Sequence
  Description of Artificial Sequence: Synthetic oligonucleotide
cagugaugugcuaaucugc

SEQ ID NO: 809443 - RNA, 19 nt, Artificial Sequence
  Description of Artificial Sequence: Synthetic oligonucleotide
agauuugucaagugucccu

SEQ ID NO: 809444 - RNA, 19 nt, Artificial Sequence
  Description of Artificial Sequence: Synthetic oligonucleotide
caaacagggugacuucugg

SEQ ID NO: 809445 - RNA, 19 nt, Artificial Sequence
  Description of Artificial Sequence: Synthetic oligonucleotide
acuugaauagccauucgcu

SEQ ID NO: 809446 - RNA, 19 nt, Artificial Sequence
  Description of Artificial Sequence: Synthetic oligonucleotide
uugacggugaaaguugcca

SEQ ID NO: 809447 - RNA, 19 nt, Artificial Sequence
  Description of Artificial Sequence: Synthetic oligonucleotide
gacacacuagaaaggaccc

SEQ ID NO: 809448 - RNA, 19 nt, Artificial Sequence
  Description of Artificial Sequence: Synthetic oligonucleotide
cuaaucugcagucuuggca

SEQ ID NO: 809449 - RNA, 19 nt, Artificial Sequence
  Description of Artificial Sequence: Synthetic oligonucleotide
ccuguaauacccuuccacg

SEQ ID NO: 809450 - RNA, 19 nt, Artificial Sequence
  Description of Artificial Sequence: Synthetic oligonucleotide
uggugagaagcuuggaggu

SEQ ID NO: 809451 - RNA, 19 nt, Artificial Sequence
  Description of Artificial Sequence: Synthetic oligonucleotide
uacaaaccggauucugcag

SEQ ID NO: 809452 - RNA, 19 nt, Artificial Sequence
  Description of Artificial Sequence: Synthetic oligonucleotide
agauugucagcucgugcuc

SEQ ID NO: 809453 - RNA, 19 nt, Artificial Sequence
  Description of Artificial Sequence: Synthetic oligonucleotide
uuggguuguacaccaucag

SEQ ID NO: 809454 - RNA, 19 nt, Artificial Sequence
  Description of Artificial Sequence: Synthetic oligonucleotide
ugacuggguacaaaccgga

SEQ ID NO: 809455 - RNA, 19 nt, Artificial Sequence
  Description of Artificial Sequence: Synthetic oligonucleotide
uggaaggggaccacaguga

SEQ ID NO: 809456 - RNA, 19 nt, Artificial Sequence
  Description of Artificial Sequence: Synthetic oligonucleotide
gggaaagccgcucacacug

SEQ ID NO: 809457 - RNA, 19 nt, Artificial Sequence
  Description of Artificial Sequence: Synthetic oligonucleotide
ugggucggcuuucuacucg

SEQ ID NO: 809458 - RNA, 19 nt, Artificial Sequence
  Description of Artificial Sequence: Synthetic oligonucleotide
gaaaguugccaccuuccca

SEQ ID NO: 809459 - RNA, 19 nt, Artificial Sequence
  Description of Artificial Sequence: Synthetic oligonucleotide
ggcacagauugucagcucg

SEQ ID NO: 809460 - RNA, 19 nt, Artificial Sequence
  Description of Artificial Sequence: Synthetic oligonucleotide
uccacuugaauagccauuc

SEQ ID NO: 809461 - RNA, 19 nt, Artificial Sequence
  Description of Artificial Sequence: Synthetic oligonucleotide
uugaacuuguccacuugaa

SEQ ID NO: 809462 - RNA, 19 nt, Artificial Sequence
  Description of Artificial Sequence: Synthetic oligonucleotide
gucgcugaagaccccaaag

SEQ ID NO: 809463 - RNA, 19 nt, Artificial Sequence
  Description of Artificial Sequence: Synthetic oligonucleotide
uugggagaugacacacuag

SEQ ID NO: 809464 - RNA, 19 nt, Artificial Sequence
  Description of Artificial Sequence: Synthetic oligonucleotide
ugugggaccccgaccagug

SEQ ID NO: 809465 - RNA, 19 nt, Artificial Sequence
  Description of Artificial Sequence: Synthetic oligonucleotide
acacguugguuguuauuuc

SEQ ID NO: 809466 - RNA, 19 nt, Artificial Sequence
  Description of Artificial Sequence: Synthetic oligonucleotide
agagcccgcacgugcacgc

SEQ ID NO: 809467 - RNA, 19 nt, Artificial Sequence
  Description of Artificial Sequence: Synthetic oligonucleotide
ugauaaccauucacaguga

SEQ ID NO: 809468 - RNA, 19 nt, Artificial Sequence
  Description of Artificial Sequence: Synthetic oligonucleotide
ucaccgcugcgcuuuagag

SEQ ID NO: 809469 - RNA, 19 nt, Artificial Sequence
  Description of Artificial Sequence: Synthetic oligonucleotide
agggacuccgauucgucag

SEQ ID NO: 809470 - RNA, 19 nt, Artificial Sequence
  Description of Artificial Sequence: Synthetic oligonucleotide
agacucaaacuccacucca

SEQ ID NO: 809471 - RNA, 19 nt, Artificial Sequence
  Description of Artificial Sequence: Synthetic oligonucleotide
uagauuccuguaauacccu

SEQ ID NO: 809472 - RNA, 19 nt, Artificial Sequence
  Description of Artificial Sequence: Synthetic oligonucleotide
ugacggugaaaguugccac

SEQ ID NO: 809473 - RNA, 19 nt, Artificial Sequence
  Description of Artificial Sequence: Synthetic oligonucleotide
ucuaagugcacagggucac

SEQ ID NO: 809474 - RNA, 19 nt, Artificial Sequence
  Description of Artificial Sequence: Synthetic oligonucleotide
guucuccaagguaauaacc

SEQ ID NO: 809475 - RNA, 19 nt, Artificial Sequence
  Description of Artificial Sequence: Synthetic oligonucleotide
cuugcucuugcaguccucg

SEQ ID NO: 809476 - RNA, 19 nt, Artificial Sequence
  Description of Artificial Sequence: Synthetic oligonucleotide
accagaagaaggcugcaau

SEQ ID NO: 809477 - RNA, 19 nt, Artificial Sequence
  Description of Artificial Sequence: Synthetic oligonucleotide
aaggacccuucacaguacu

SEQ ID NO: 809478 - RNA, 19 nt, Artificial Sequence
  Description of Artificial Sequence: Synthetic oligonucleotide
gacccuucacaguacuggc

SEQ ID NO: 809479 - RNA, 19 nt, Artificial Sequence
  Description of Artificial Sequence: Synthetic oligonucleotide
uuguaaagcuggacagaca

SEQ ID NO: 809480 - RNA, 19 nt, Artificial Sequence
  Description of Artificial Sequence: Synthetic oligonucleotide
ucaaacggcauuggguugu

SEQ ID NO: 809481 - RNA, 19 nt, Artificial Sequence
  Description of Artificial Sequence: Synthetic oligonucleotide
aggucgcucagcauaauag

SEQ ID NO: 809482 - RNA, 19 nt, Artificial Sequence
  Description of Artificial Sequence: Synthetic oligonucleotide
aagaccccaaagacugugg

SEQ ID NO: 809483 - RNA, 19 nt, Artificial Sequence
  Description of Artificial Sequence: Synthetic oligonucleotide
ucuagcaggcagucgcuga

SEQ ID NO: 809484 - RNA, 19 nt, Artificial Sequence
  Description of Artificial Sequence: Synthetic oligonucleotide
auagccauucgcuggcacu

SEQ ID NO: 809485 - RNA, 19 nt, Artificial Sequence
  Description of Artificial Sequence: Synthetic oligonucleotide
cacacggagcucaaacggc

SEQ ID NO: 809486 - RNA, 19 nt, Artificial Sequence
  Description of Artificial Sequence: Synthetic oligonucleotide
gugacuggguacaaaccgg

SEQ ID NO: 809487 - RNA, 19 nt, Artificial Sequence
  Description of Artificial Sequence: Synthetic oligonucleotide
ucagaagcguuuguggguc

SEQ ID NO: 809488 - RNA, 19 nt, Artificial Sequence
  Description of Artificial Sequence: Synthetic oligonucleotide
acaggggaaagccgcucac

SEQ ID NO: 809489 - RNA, 19 nt, Artificial Sequence
  Description of Artificial Sequence: Synthetic oligonucleotide
agugaugugcuaaucugca

SEQ ID NO: 809490 - RNA, 19 nt, Artificial Sequence
  Description of Artificial Sequence: Synthetic oligonucleotide
aucaugcagaucauaguug

SEQ ID NO: 809491 - RNA, 19 nt, Artificial Sequence
  Description of Artificial Sequence: Synthetic oligonucleotide
accggauucugcaggaagg

SEQ ID NO: 809492 - RNA, 19 nt, Artificial Sequence
  Description of Artificial Sequence: Synthetic oligonucleotide
ugcaaugaaugugcagacc

SEQ ID NO: 809493 - RNA, 19 nt, Artificial Sequence
  Description of Artificial Sequence: Synthetic oligonucleotide
ugggaccccgaccagugug

SEQ ID NO: 809494 - RNA, 19 nt, Artificial Sequence
  Description of Artificial Sequence: Synthetic oligonucleotide
augaaugugcagaccuugg

SEQ ID NO: 809495 - RNA, 19 nt, Artificial Sequence
  Description of Artificial Sequence: Synthetic oligonucleotide
uccacuggugaggaggccc

SEQ ID NO: 809496 - RNA, 19 nt, Artificial Sequence
  Description of Artificial Sequence: Synthetic oligonucleotide
ucugggaggaaggaagaaa

SEQ ID NO: 809497 - RNA, 19 nt, Artificial Sequence
  Description of Artificial Sequence: Synthetic oligonucleotide
guucugacgaccuggcgga

SEQ ID NO: 809498 - RNA, 19 nt, Artificial Sequence
  Description of Artificial Sequence: Synthetic oligonucleotide
ucaucacucagguccugga

SEQ ID NO: 809499 - RNA, 19 nt, Artificial Sequence
  Description of Artificial Sequence: Synthetic oligonucleotide
ugcacgcuggguaaacaaa

SEQ ID NO: 809500 - RNA, 19 nt, Artificial Sequence
  Description of Artificial Sequence: Synthetic oligonucleotide
ugacuuccaccguggagcc

SEQ ID NO: 809501 - RNA, 19 nt, Artificial Sequence
  Description of Artificial Sequence: Synthetic oligonucleotide
ggagaugacacacuagaaa

SEQ ID NO: 809502 - RNA, 19 nt, Artificial Sequence
  Description of Artificial Sequence: Synthetic oligonucleotide
ggacccuucacaguacugg

SEQ ID NO: 809503 - RNA, 19 nt, Artificial Sequence
  Description of Artificial Sequence: Synthetic oligonucleotide
aggggcucuaguccaaugu

SEQ ID NO: 809504 - RNA, 19 nt, Artificial Sequence
  Description of Artificial Sequence: Synthetic oligonucleotide
cauuggguuguacaccauc

SEQ ID NO: 809505 - RNA, 19 nt, Artificial Sequence
  Description of Artificial Sequence: Synthetic oligonucleotide
aagcucagaguuguuccug

SEQ ID NO: 809506 - RNA, 19 nt, Artificial Sequence
  Description of Artificial Sequence: Synthetic oligonucleotide
gcuguagggacuccgauuc

SEQ ID NO: 809507 - RNA, 19 nt, Artificial Sequence
  Description of Artificial Sequence: Synthetic oligonucleotide
uagggacuccgauucguca

SEQ ID NO: 809508 - RNA, 19 nt, Artificial Sequence
  Description of Artificial Sequence: Synthetic oligonucleotide
aacccacuggaagucuauc

SEQ ID NO: 809509 - RNA, 19 nt, Artificial Sequence
  Description of Artificial Sequence: Synthetic oligonucleotide
cagauuugucaaguguccc

SEQ ID NO: 809510 - RNA, 19 nt, Artificial Sequence
  Description of Artificial Sequence: Synthetic oligonucleotide
cugacgaccuggcggaaag

SEQ ID NO: 809511 - RNA, 19 nt, Artificial Sequence
  Description of Artificial Sequence: Synthetic oligonucleotide
gcugguacuaggugugagg

SEQ ID NO: 809512 - RNA, 19 nt, Artificial Sequence
  Description of Artificial Sequence: Synthetic oligonucleotide
ucggcuuucuacucggguu

SEQ ID NO: 809513 - RNA, 19 nt, Artificial Sequence
  Description of Artificial Sequence: Synthetic oligonucleotide
gguuguacaccaucagcug

SEQ ID NO: 809514 - RNA, 19 nt, Artificial Sequence
  Description of Artificial Sequence: Synthetic oligonucleotide
gcuggguaaacaaaaccag

SEQ ID NO: 809515 - RNA, 19 nt, Artificial Sequence
  Description of Artificial Sequence: Synthetic oligonucleotide
uuccacguggccugggccu

SEQ ID NO: 809516 - RNA, 19 nt, Artificial Sequence
  Description of Artificial Sequence: Synthetic oligonucleotide
gacuccgauucgucagccg

SEQ ID NO: 809517 - RNA, 19 nt, Artificial Sequence
  Description of Artificial Sequence: Synthetic oligonucleotide
gaaagccgcucacacugac

SEQ ID NO: 809518 - RNA, 19 nt, Artificial Sequence
  Description of Artificial Sequence: Synthetic oligonucleotide
cagaguacuugaaguucag

SEQ ID NO: 809519 - RNA, 19 nt, Artificial Sequence
  Description of Artificial Sequence: Synthetic oligonucleotide
guagaaggugcuggaaccc

SEQ ID NO: 809520 - RNA, 19 nt, Artificial Sequence
  Description of Artificial Sequence: Synthetic oligonucleotide
auaauaggccagaaacaga

SEQ ID NO: 809521 - RNA, 19 nt, Artificial Sequence
  Description of Artificial Sequence: Synthetic oligonucleotide
auugucagcucgugcucug

SEQ ID NO: 809522 - RNA, 19 nt, Artificial Sequence
  Description of Artificial Sequence: Synthetic oligonucleotide
caggcugguacuaggugug

SEQ ID NO: 809523 - RNA, 19 nt, Artificial Sequence
  Description of Artificial Sequence: Synthetic oligonucleotide
cucuaagugcacaggguca

SEQ ID NO: 809524 - RNA, 19 nt, Artificial Sequence
  Description of Artificial Sequence: Synthetic oligonucleotide
cacgcuggguaaacaaaac

SEQ ID NO: 809525 - RNA, 19 nt, Artificial Sequence
  Description of Artificial Sequence: Synthetic oligonucleotide
agccgcucacacugacucc

SEQ ID NO: 809526 - RNA, 19 nt, Artificial Sequence
  Description of Artificial Sequence: Synthetic oligonucleotide
cauucgcuggcacucgcug

SEQ ID NO: 809527 - RNA, 19 nt, Artificial Sequence
  Description of Artificial Sequence: Synthetic oligonucleotide
uaauaaccagcugcugagu

SEQ ID NO: 809528 - RNA, 19 nt, Artificial Sequence
  Description of Artificial Sequence: Synthetic oligonucleotide
acuccacuccacuggugag

SEQ ID NO: 809529 - RNA, 19 nt, Artificial Sequence
  Description of Artificial Sequence: Synthetic oligonucleotide
ccauguuuuccacacggag

SEQ ID NO: 809530 - RNA, 19 nt, Artificial Sequence
  Description of Artificial Sequence: Synthetic oligonucleotide
gguuguuauuucaucacca

SEQ ID NO: 809531 - RNA, 19 nt, Artificial Sequence
  Description of Artificial Sequence: Synthetic oligonucleotide
cuuccacguggccugggcc

SEQ ID NO: 809532 - RNA, 19 nt, Artificial Sequence
  Description of Artificial Sequence: Synthetic oligonucleotide
uuccuguaauacccuucca

SEQ ID NO: 809533 - RNA, 19 nt, Artificial Sequence
  Description of Artificial Sequence: Synthetic oligonucleotide
cuccacgcucgccucaccg

SEQ ID NO: 809534 - RNA, 19 nt, Artificial Sequence
  Description of Artificial Sequence: Synthetic oligonucleotide
caaggcaggucgacuggcc

SEQ ID NO: 809535 - RNA, 19 nt, Artificial Sequence
  Description of Artificial Sequence: Synthetic oligonucleotide
acuaggugugaggucgcuc

SEQ ID NO: 809536 - RNA, 19 nt, Artificial Sequence
  Description of Artificial Sequence: Synthetic oligonucleotide
ucacauggcugcccaucca

SEQ ID NO: 809537 - RNA, 19 nt, Artificial Sequence
  Description of Artificial Sequence: Synthetic oligonucleotide
acacuagaaaggacccuuc

SEQ ID NO: 809538 - RNA, 19 nt, Artificial Sequence
  Description of Artificial Sequence: Synthetic oligonucleotide
caccgugucaagguagaag

SEQ ID NO: 809539 - RNA, 19 nt, Artificial Sequence
  Description of Artificial Sequence: Synthetic oligonucleotide
cagcucaagaaguccccag

SEQ ID NO: 809540 - RNA, 19 nt, Artificial Sequence
  Description of Artificial Sequence: Synthetic oligonucleotide
gauaaccauucacagugau

SEQ ID NO: 809541 - RNA, 19 nt, Artificial Sequence
  Description of Artificial Sequence: Synthetic oligonucleotide
uacucggguucugacgacc

SEQ ID NO: 809542 - RNA, 19 nt, Artificial Sequence
  Description of Artificial Sequence: Synthetic oligonucleotide
aaacggcauuggguuguac

SEQ ID NO: 809543 - RNA, 19 nt, Artificial Sequence
  Description of Artificial Sequence: Synthetic oligonucleotide
aagcguuugugggucggcu

SEQ ID NO: 809544 - RNA, 19 nt, Artificial Sequence
  Description of Artificial Sequence: Synthetic oligonucleotide
aacccacaaaggagaugac

SEQ ID NO: 809545 - RNA, 19 nt, Artificial Sequence
  Description of Artificial Sequence: Synthetic oligonucleotide
caaaccggauucugcagga

SEQ ID NO: 809546 - RNA, 19 nt, Artificial Sequence
  Description of Artificial Sequence: Synthetic oligonucleotide
ucgucagccgcaccucuaa

SEQ ID NO: 809547 - RNA, 19 nt, Artificial Sequence
  Description of Artificial Sequence: Synthetic oligonucleotide
acggugaaaguugccaccu

SEQ ID NO: 809548 - RNA, 19 nt, Artificial Sequence
  Description of Artificial Sequence: Synthetic oligonucleotide
gucaagugucccuucucuc

SEQ ID NO: 809549 - RNA, 19 nt, Artificial Sequence
  Description of Artificial Sequence: Synthetic oligonucleotide
aagcggauguggaggaaga

SEQ ID NO: 809550 - RNA, 19 nt, Artificial Sequence
  Description of Artificial Sequence: Synthetic oligonucleotide
aaccaggacgguggcagcu

SEQ ID NO: 809551 - RNA, 19 nt, Artificial Sequence
  Description of Artificial Sequence: Synthetic oligonucleotide
uagccauucgcuggcacuc

SEQ ID NO: 809552 - RNA, 19 nt, Artificial Sequence
  Description of Artificial Sequence: Synthetic oligonucleotide
ucgugcucuguggaguuga

SEQ ID NO: 809553 - RNA, 19 nt, Artificial Sequence
  Description of Artificial Sequence: Synthetic oligonucleotide
guugaagagggaacuggga

SEQ ID NO: 809554 - RNA, 19 nt, Artificial Sequence
  Description of Artificial Sequence: Synthetic oligonucleotide
aggcaggucgacuggccug

SEQ ID NO: 809555 - RNA, 19 nt, Artificial Sequence
  Description of Artificial Sequence: Synthetic oligonucleotide
aaagcuggguauggugcaa

SEQ ID NO: 809556 - RNA, 19 nt, Artificial Sequence
  Description of Artificial Sequence: Synthetic oligonucleotide
acgaccuggcggaaaggac

SEQ ID NO: 809557 - RNA, 19 nt, Artificial Sequence
  Description of Artificial Sequence: Synthetic oligonucleotide
gacgaccuggcggaaagga

SEQ ID NO: 809558 - RNA, 19 nt, Artificial Sequence
  Description of Artificial Sequence: Synthetic oligonucleotide
ccucuaagugcacaggguc

SEQ ID NO: 809559 - RNA, 19 nt, Artificial Sequence
  Description of Artificial Sequence: Synthetic oligonucleotide
uguacaccaucagcugaac

SEQ ID NO: 809560 - RNA, 19 nt, Artificial Sequence
  Description of Artificial Sequence: Synthetic oligonucleotide
cuguagggacuccgauucg

SEQ ID NO: 809561 - RNA, 19 nt, Artificial Sequence
  Description of Artificial Sequence: Synthetic oligonucleotide
ugguacuaggugugagguc

SEQ ID NO: 809562 - RNA, 19 nt, Artificial Sequence
  Description of Artificial Sequence: Synthetic oligonucleotide
uugaacccacuggaagucu

SEQ ID NO: 809563 - RNA, 19 nt, Artificial Sequence
  Description of Artificial Sequence: Synthetic oligonucleotide
gagucuugagguggccaag

SEQ ID NO: 809564 - RNA, 19 nt, Artificial Sequence
  Description of Artificial Sequence: Synthetic oligonucleotide
cagccgcaccucuaagugc

SEQ ID NO: 809565 - RNA, 19 nt, Artificial Sequence
  Description of Artificial Sequence: Synthetic oligonucleotide
aaagggccccacgcuguag

SEQ ID NO: 809566 - RNA, 19 nt, Artificial Sequence
  Description of Artificial Sequence: Synthetic oligonucleotide
cuguaauacccuuccacgu

SEQ ID NO: 809567 - RNA, 19 nt, Artificial Sequence
  Description of Artificial Sequence: Synthetic oligonucleotide
gcauaauaggccagaaaca

SEQ ID NO: 809568 - RNA, 19 nt, Artificial Sequence
  Description of Artificial Sequence: Synthetic oligonucleotide
ggaagagacucaaacucca

SEQ ID NO: 809569 - RNA, 19 nt, Artificial Sequence
  Description of Artificial Sequence: Synthetic oligonucleotide
ugcaggaagugugcugacu

SEQ ID NO: 809570 - RNA, 19 nt, Artificial Sequence
  Description of Artificial Sequence: Synthetic oligonucleotide
gggucggcuuucuacucgg

SEQ ID NO: 809571 - RNA, 19 nt, Artificial Sequence
  Description of Artificial Sequence: Synthetic oligonucleotide
uccuggcaagagaagucua

SEQ ID NO: 809572 - RNA, 19 nt, Artificial Sequence
  Description of Artificial Sequence: Synthetic oligonucleotide
gaagcguuugugggucggc

SEQ ID NO: 809573 - RNA, 19 nt, Artificial Sequence
  Description of Artificial Sequence: Synthetic oligonucleotide
ugacgaccuggcggaaagg

SEQ ID NO: 809574 - RNA, 19 nt, Artificial Sequence
  Description of Artificial Sequence: Synthetic oligonucleotide
gugcuaaucugcagucuug

SEQ ID NO: 809575 - RNA, 19 nt, Artificial Sequence
  Description of Artificial Sequence: Synthetic oligonucleotide
auggcucaacuuccacaug

SEQ ID NO: 809576 - RNA, 19 nt, Artificial Sequence
  Description of Artificial Sequence: Synthetic oligonucleotide
gucuuggcaaagcaggaau

SEQ ID NO: 809577 - RNA, 19 nt, Artificial Sequence
  Description of Artificial Sequence: Synthetic oligonucleotide
gcuaaucugcagucuuggc

SEQ ID NO: 809578 - RNA, 19 nt, Artificial Sequence
  Description of Artificial Sequence: Synthetic oligonucleotide
uccgauucgucagccgcac

SEQ ID NO: 809579 - RNA, 19 nt, Artificial Sequence
  Description of Artificial Sequence: Synthetic oligonucleotide
gaggucgcucagcauaaua

SEQ ID NO: 809580 - RNA, 19 nt, Artificial Sequence
  Description of Artificial Sequence: Synthetic oligonucleotide
accucuaagugcacagggu

SEQ ID NO: 809581 - RNA, 19 nt, Artificial Sequence
  Description of Artificial Sequence: Synthetic oligonucleotide
cauucuugugguccuggaa

SEQ ID NO: 809582 - RNA, 19 nt, Artificial Sequence
  Description of Artificial Sequence: Synthetic oligonucleotide
acagacacguugguuguua

SEQ ID NO: 809583 - RNA, 19 nt, Artificial Sequence
  Description of Artificial Sequence: Synthetic oligonucleotide
gcagaucauaguugugcac

SEQ ID NO: 809584 - RNA, 19 nt, Artificial Sequence
  Description of Artificial Sequence: Synthetic oligonucleotide
acgugcacgcuggguaaac

SEQ ID NO: 809585 - RNA, 19 nt, Artificial Sequence
  Description of Artificial Sequence: Synthetic oligonucleotide
gcggauguggaggaagaag

SEQ ID NO: 809586 - RNA, 19 nt, Artificial Sequence
  Description of Artificial Sequence: Synthetic oligonucleotide
agacacguugguuguuauu

SEQ ID NO: 809587 - RNA, 19 nt, Artificial Sequence
  Description of Artificial Sequence: Synthetic oligonucleotide
uucgucagccgcaccucua

SEQ ID NO: 809588 - RNA, 19 nt, Artificial Sequence
  Description of Artificial Sequence: Synthetic oligonucleotide
agucgcugaagaccccaaa

SEQ ID NO: 809589 - RNA, 19 nt, Artificial Sequence
  Description of Artificial Sequence: Synthetic oligonucleotide
ccucacagucacauggcug

SEQ ID NO: 809590 - RNA, 19 nt, Artificial Sequence
  Description of Artificial Sequence: Synthetic oligonucleotide
cgcuggguaaacaaaacca

SEQ ID NO: 809591 - RNA, 19 nt, Artificial Sequence
  Description of Artificial Sequence: Synthetic oligonucleotide
gauugucagcucgugcucu

SEQ ID NO: 809592 - RNA, 19 nt, Artificial Sequence
  Description of Artificial Sequence: Synthetic oligonucleotide
aaaccggauucugcaggaa

SEQ ID NO: 809593 - RNA, 19 nt, Artificial Sequence
  Description of Artificial Sequence: Synthetic oligonucleotide
caguccucguggaagcgga

SEQ ID NO: 809594 - RNA, 19 nt, Artificial Sequence
  Description of Artificial Sequence: Synthetic oligonucleotide
aggggauucugggacacuu

SEQ ID NO: 809595 - RNA, 19 nt, Artificial Sequence
  Description of Artificial Sequence: Synthetic oligonucleotide
ucugacgaccuggcggaaa

SEQ ID NO: 809596 - RNA, 19 nt, Artificial Sequence
  Description of Artificial Sequence: Synthetic oligonucleotide
agcguuugugggucggcuu

SEQ ID NO: 809597 - RNA, 19 nt, Artificial Sequence
  Description of Artificial Sequence: Synthetic oligonucleotide
cuacucggguucugacgac

SEQ ID NO: 809598 - RNA, 19 nt, Artificial Sequence
  Description of Artificial Sequence: Synthetic oligonucleotide
agguugucuagcaggcagu

SEQ ID NO: 809599 - RNA, 19 nt, Artificial Sequence
  Description of Artificial Sequence: Synthetic oligonucleotide
gggacuccgauucgucagc

SEQ ID NO: 809600 - RNA, 19 nt, Artificial Sequence
  Description of Artificial Sequence: Synthetic oligonucleotide
cugcgcuuuagagauggga

SEQ ID NO: 809601 - RNA, 19 nt, Artificial Sequence
  Description of Artificial Sequence: Synthetic oligonucleotide
cuccgauucgucagccgca

SEQ ID NO: 809602 - RNA, 19 nt, Artificial Sequence
  Description of Artificial Sequence: Synthetic oligonucleotide
aggaggcccuccacgcucg

SEQ ID NO: 809603 - RNA, 19 nt, Artificial Sequence
  Description of Artificial Sequence: Synthetic oligonucleotide
cagcauaauaggccagaaa

SEQ ID NO: 809604 - RNA, 19 nt, Artificial Sequence
  Description of Artificial Sequence: Synthetic oligonucleotide
uacuaggugugaggucgcu

SEQ ID NO: 809605 - RNA, 19 nt, Artificial Sequence
  Description of Artificial Sequence: Synthetic oligonucleotide
guagggacuccgauucguc

SEQ ID NO: 809606 - RNA, 19 nt, Artificial Sequence
  Description of Artificial Sequence: Synthetic oligonucleotide
acggagcucaaacggcauu

SEQ ID NO: 809607 - RNA, 19 nt, Artificial Sequence
  Description of Artificial Sequence: Synthetic oligonucleotide
cugguacuaggugugaggu

SEQ ID NO: 809608 - RNA, 19 nt, Artificial Sequence
  Description of Artificial Sequence: Synthetic oligonucleotide
guacuaggugugaggucgc

SEQ ID NO: 809609 - RNA, 19 nt, Artificial Sequence
  Description of Artificial Sequence: Synthetic oligonucleotide
cacaugcagucccagagau

SEQ ID NO: 809610 - RNA, 19 nt, Artificial Sequence
  Description of Artificial Sequence: Synthetic oligonucleotide
ggguucugacgaccuggcg

SEQ ID NO: 809611 - RNA, 19 nt, Artificial Sequence
  Description of Artificial Sequence: Synthetic oligonucleotide
gaauagccauucgcuggca

SEQ ID NO: 809612 - RNA, 19 nt, Artificial Sequence
  Description of Artificial Sequence: Synthetic oligonucleotide
cacugccgggugcugguug

SEQ ID NO: 809613 - RNA, 19 nt, Artificial Sequence
  Description of Artificial Sequence: Synthetic oligonucleotide
cacgcuguagggacuccga

SEQ ID NO: 809614 - RNA, 19 nt, Artificial Sequence
  Description of Artificial Sequence: Synthetic oligonucleotide
acucggguucugacgaccu

SEQ ID NO: 809615 - RNA, 19 nt, Artificial Sequence
  Description of Artificial Sequence: Synthetic oligonucleotide
ccggauucugcaggaaggg

SEQ ID NO: 809616 - RNA, 19 nt, Artificial Sequence
  Description of Artificial Sequence: Synthetic oligonucleotide
uggcagugaugugcuaauc

SEQ ID NO: 809617 - RNA, 19 nt, Artificial Sequence
  Description of Artificial Sequence: Synthetic oligonucleotide
gcaaacagggugacuucug

SEQ ID NO: 809618 - RNA, 19 nt, Artificial Sequence
  Description of Artificial Sequence: Synthetic oligonucleotide
guacaccaucagcugaacu

SEQ ID NO: 809619 - RNA, 19 nt, Artificial Sequence
  Description of Artificial Sequence: Synthetic oligonucleotide
ugccgggugcugguugcag

SEQ ID NO: 809620 - RNA, 19 nt, Artificial Sequence
  Description of Artificial Sequence: Synthetic oligonucleotide
ggcccauguuuuccacacg

SEQ ID NO: 809621 - RNA, 19 nt, Artificial Sequence
  Description of Artificial Sequence: Synthetic oligonucleotide
gccgggugcugguugcagg

SEQ ID NO: 809622 - RNA, 19 nt, Artificial Sequence
  Description of Artificial Sequence: Synthetic oligonucleotide
cuccagaguacuugaaguu

SEQ ID NO: 809623 - RNA, 19 nt, Artificial Sequence
  Description of Artificial Sequence: Synthetic oligonucleotide
ggcaaagcaggaaugacuu

SEQ ID NO: 809624 - RNA, 19 nt, Artificial Sequence
  Description of Artificial Sequence: Synthetic oligonucleotide
cgcaccucuaagugcacag

SEQ ID NO: 809625 - RNA, 19 nt, Artificial Sequence
  Description of Artificial Sequence: Synthetic oligonucleotide
gugaggucgcucagcauaa

SEQ ID NO: 809626 - RNA, 19 nt, Artificial Sequence
  Description of Artificial Sequence: Synthetic oligonucleotide
ggacuggacaggggaaagc

SEQ ID NO: 809627 - RNA, 19 nt, Artificial Sequence
  Description of Artificial Sequence: Synthetic oligonucleotide
gucggcuuucuacucgggu

SEQ ID NO: 809628 - RNA, 19 nt, Artificial Sequence
  Description of Artificial Sequence: Synthetic oligonucleotide
cgcugcgcuuuagagaugg

SEQ ID NO: 809629 - RNA, 19 nt, Artificial Sequence
  Description of Artificial Sequence: Synthetic oligonucleotide
ccuugaacccacuggaagu

SEQ ID NO: 809630 - RNA, 19 nt, Artificial Sequence
  Description of Artificial Sequence: Synthetic oligonucleotide
cccuguagucugugggacc

SEQ ID NO: 809631 - RNA, 19 nt, Artificial Sequence
  Description of Artificial Sequence: Synthetic oligonucleotide
agaaguccccagacaacuu

SEQ ID NO: 809632 - RNA, 19 nt, Artificial Sequence
  Description of Artificial Sequence: Synthetic oligonucleotide
cacgcucgccucaccgcug

SEQ ID NO: 809633 - RNA, 19 nt, Artificial Sequence
  Description of Artificial Sequence: Synthetic oligonucleotide
gcucuaguccaauguucuc

SEQ ID NO: 809634 - RNA, 19 nt, Artificial Sequence
  Description of Artificial Sequence: Synthetic oligonucleotide
gcucagcauaauaggccag

SEQ ID NO: 809635 - RNA, 19 nt, Artificial Sequence
  Description of Artificial Sequence: Synthetic oligonucleotide
caggucgacuggccugaug

SEQ ID NO: 809636 - RNA, 19 nt, Artificial Sequence
  Description of Artificial Sequence: Synthetic oligonucleotide
caaugaaugugcagaccuu

SEQ ID NO: 809637 - RNA, 19 nt, Artificial Sequence
  Description of Artificial Sequence: Synthetic oligonucleotide
ggacuccgauucgucagcc

SEQ ID NO: 809638 - RNA, 19 nt, Artificial Sequence
  Description of Artificial Sequence: Synthetic oligonucleotide
ggacagacacguugguugu

SEQ ID NO: 809639 - RNA, 19 nt, Artificial Sequence
  Description of Artificial Sequence: Synthetic oligonucleotide
gcacgcuggguaaacaaaa

SEQ ID NO: 809640 - RNA, 19 nt, Artificial Sequence
  Description of Artificial Sequence: Synthetic oligonucleotide
gucgacuggccugauggcu

SEQ ID NO: 809641 - RNA, 19 nt, Artificial Sequence
  Description of Artificial Sequence: Synthetic oligonucleotide
ccuuccacguggccugggc

SEQ ID NO: 809642 - RNA, 19 nt, Artificial Sequence
  Description of Artificial Sequence: Synthetic oligonucleotide
gggagaugacacacuagaa

SEQ ID NO: 809643 - RNA, 19 nt, Artificial Sequence
  Description of Artificial Sequence: Synthetic oligonucleotide
aggcugcaaugaaugugca

SEQ ID NO: 809644 - RNA, 19 nt, Artificial Sequence
  Description of Artificial Sequence: Synthetic oligonucleotide
gccauucgcuggcacucgc

SEQ ID NO: 809645 - RNA, 19 nt, Artificial Sequence
  Description of Artificial Sequence: Synthetic oligonucleotide
ccaaggcaggucgacuggc

SEQ ID NO: 809646 - RNA, 19 nt, Artificial Sequence
  Description of Artificial Sequence: Synthetic oligonucleotide
cucgugcucuguggaguug

SEQ ID NO: 809647 - RNA, 19 nt, Artificial Sequence
  Description of Artificial Sequence: Synthetic oligonucleotide
gaggcccuccacgcucgcc

SEQ ID NO: 809648 - RNA, 19 nt, Artificial Sequence
  Description of Artificial Sequence: Synthetic oligonucleotide
gccgcucacacugacucca

SEQ ID NO: 809649 - RNA, 19 nt, Artificial Sequence
  Description of Artificial Sequence: Synthetic oligonucleotide
ggacgguggcagcuccuug

SEQ ID NO: 809650 - RNA, 19 nt, Artificial Sequence
  Description of Artificial Sequence: Synthetic oligonucleotide
ugaggucgcucagcauaau

SEQ ID NO: 809651 - RNA, 19 nt, Artificial Sequence
  Description of Artificial Sequence: Synthetic oligonucleotide
gaucaucccuguagucugu

SEQ ID NO: 809652 - RNA, 19 nt, Artificial Sequence
  Description of Artificial Sequence: Synthetic oligonucleotide
cggcuuucuacucggguuc

SEQ ID NO: 809653 - RNA, 19 nt, Artificial Sequence
  Description of Artificial Sequence: Synthetic oligonucleotide
ggucggcuuucuacucggg

SEQ ID NO: 809654 - RNA, 19 nt, Artificial Sequence
  Description of Artificial Sequence: Synthetic oligonucleotide
acaugcagucccagagaua

SEQ ID NO: 809655 - RNA, 19 nt, Artificial Sequence
  Description of Artificial Sequence: Synthetic oligonucleotide
caccagaagaaggcugcaa

SEQ ID NO: 809656 - RNA, 19 nt, Artificial Sequence
  Description of Artificial Sequence: Synthetic oligonucleotide
uucugacgaccuggcggaa

SEQ ID NO: 809657 - RNA, 19 nt, Artificial Sequence
  Description of Artificial Sequence: Synthetic oligonucleotide
gccacugguuuucacuccu

SEQ ID NO: 809658 - RNA, 19 nt, Artificial Sequence
  Description of Artificial Sequence: Synthetic oligonucleotide
uggcacucgcuggcaugca

SEQ ID NO: 809659 - RNA, 19 nt, Artificial Sequence
  Description of Artificial Sequence: Synthetic oligonucleotide
gcugcaccgugucaaggua

SEQ ID NO: 809660 - RNA, 19 nt, Artificial Sequence
  Description of Artificial Sequence: Synthetic oligonucleotide
gugcagaccuuggcaguga

SEQ ID NO: 809661 - RNA, 19 nt, Artificial Sequence
  Description of Artificial Sequence: Synthetic oligonucleotide
ccaggggauucugggacac

SEQ ID NO: 809662 - RNA, 19 nt, Artificial Sequence
  Description of Artificial Sequence: Synthetic oligonucleotide
caaagggccccacgcugua

SEQ ID NO: 809663 - RNA, 19 nt, Artificial Sequence
  Description of Artificial Sequence: Synthetic oligonucleotide
gacuggguacaaaccggau

SEQ ID NO: 809664 - RNA, 19 nt, Artificial Sequence
  Description of Artificial Sequence: Synthetic oligonucleotide
caggaaugacuuccaccgu

SEQ ID NO: 809665 - RNA, 19 nt, Artificial Sequence
  Description of Artificial Sequence: Synthetic oligonucleotide
guccacuugaauagccauu

SEQ ID NO: 809666 - RNA, 19 nt, Artificial Sequence
  Description of Artificial Sequence: Synthetic oligonucleotide
acguggccugggccuccag

SEQ ID NO: 809667 - RNA, 19 nt, Artificial Sequence
  Description of Artificial Sequence: Synthetic oligonucleotide
gggaccccgaccaguguga

SEQ ID NO: 809668 - RNA, 19 nt, Artificial Sequence
  Description of Artificial Sequence: Synthetic oligonucleotide
cagacacguugguuguuau

SEQ ID NO: 809669 - RNA, 19 nt, Artificial Sequence
  Description of Artificial Sequence: Synthetic oligonucleotide
ggggcucuaguccaauguu

SEQ ID NO: 809670 - RNA, 19 nt, Artificial Sequence
  Description of Artificial Sequence: Synthetic oligonucleotide
cccgaccagugugacuggg

SEQ ID NO: 809671 - RNA, 19 nt, Artificial Sequence
  Description of Artificial Sequence: Synthetic oligonucleotide
cgauucgucagccgcaccu

SEQ ID NO: 809672 - RNA, 19 nt, Artificial Sequence
  Description of Artificial Sequence: Synthetic oligonucleotide
ccuggcggaaaggacugga

SEQ ID NO: 809673 - RNA, 19 nt, Artificial Sequence
  Description of Artificial Sequence: Synthetic oligonucleotide
ccgauucgucagccgcacc

SEQ ID NO: 809674 - RNA, 19 nt, Artificial Sequence
  Description of Artificial Sequence: Synthetic oligonucleotide
ccagcucaagaagucccca

SEQ ID NO: 809675 - RNA, 19 nt, Artificial Sequence
  Description of Artificial Sequence: Synthetic oligonucleotide
gggguucaggccugugccu

SEQ ID NO: 809676 - RNA, 19 nt, Artificial Sequence
  Description of Artificial Sequence: Synthetic oligonucleotide
gcguuugugggucggcuuu

SEQ ID NO: 809677 - RNA, 19 nt, Artificial Sequence
  Description of Artificial Sequence: Synthetic oligonucleotide
ggaccccgaccagugugac

SEQ ID NO: 809678 - RNA, 19 nt, Artificial Sequence
  Description of Artificial Sequence: Synthetic oligonucleotide
ggccccaaggcaggucgac

SEQ ID NO: 809679 - RNA, 19 nt, Artificial Sequence
  Description of Artificial Sequence: Synthetic oligonucleotide
cgucagccgcaccucuaag

SEQ ID NO: 809680 - RNA, 19 nt, Artificial Sequence
  Description of Artificial Sequence: Synthetic oligonucleotide
gcacagauugucagcucgu

SEQ ID NO: 809681 - RNA, 19 nt, Artificial Sequence
  Description of Artificial Sequence: Synthetic oligonucleotide
cccacuggaagucuaucuu

SEQ ID NO: 809682 - RNA, 19 nt, Artificial Sequence
  Description of Artificial Sequence: Synthetic oligonucleotide
ggaggcccuccacgcucgc

SEQ ID NO: 809683 - RNA, 19 nt, Artificial Sequence
  Description of Artificial Sequence: Synthetic oligonucleotide
cgaccagugugacugggua

SEQ ID NO: 809684 - RNA, 19 nt, Artificial Sequence
  Description of Artificial Sequence: Synthetic oligonucleotide
caccguggagccacugguu

SEQ ID NO: 809685 - RNA, 19 nt, Artificial Sequence
  Description of Artificial Sequence: Synthetic oligonucleotide
ggcuuucuacucggguucu

SEQ ID NO: 809686 - RNA, 19 nt, Artificial Sequence
  Description of Artificial Sequence: Synthetic oligonucleotide
ccaggccucgugccuccug

SEQ ID NO: 809687 - RNA, 19 nt, Artificial Sequence
  Description of Artificial Sequence: Synthetic oligonucleotide
ccuccacgcucgccucacc

SEQ ID NO: 809688 - RNA, 19 nt, Artificial Sequence
  Description of Artificial Sequence: Synthetic oligonucleotide
cuuccaccguggagccacu

SEQ ID NO: 809689 - RNA, 19 nt, Artificial Sequence
  Description of Artificial Sequence: Synthetic oligonucleotide
gagcccgcacgugcacgcu

SEQ ID NO: 809690 - RNA, 19 nt, Artificial Sequence
  Description of Artificial Sequence: Synthetic oligonucleotide
gccacccaggcugguacua

SEQ ID NO: 809691 - RNA, 19 nt, Artificial Sequence
  Description of Artificial Sequence: Synthetic oligonucleotide
ccucaccgcugcgcuuuag

SEQ ID NO: 809692 - RNA, 19 nt, Artificial Sequence
  Description of Artificial Sequence: Synthetic oligonucleotide
ccgcugcgcuuuagagaug

SEQ ID NO: 809693 - RNA, 19 nt, Artificial Sequence
  Description of Artificial Sequence: Synthetic oligonucleotide
gccgcaccucuaagugcac

SEQ ID NO: 809694 - RNA, 19 nt, Artificial Sequence
  Description of Artificial Sequence: Synthetic oligonucleotide
ggggauucugggacacuuu

SEQ ID NO: 809695 - RNA, 19 nt, Artificial Sequence
  Description of Artificial Sequence: Synthetic oligonucleotide
ccgcaccucuaagugcaca

SEQ ID NO: 809696 - RNA, 19 nt, Artificial Sequence
  Description of Artificial Sequence: Synthetic oligonucleotide
gccccaaggcaggucgacu

SEQ ID NO: 809697 - RNA, 19 nt, Artificial Sequence
  Description of Artificial Sequence: Synthetic oligonucleotide
cggugaaaguugccaccuu

SEQ ID NO: 809698 - RNA, 19 nt, Artificial Sequence
  Description of Artificial Sequence: Synthetic oligonucleotide
aauuuuaucuauaucaucc

SEQ ID NO: 809699 - RNA, 19 nt, Artificial Sequence
  Description of Artificial Sequence: Synthetic oligonucleotide
aguuuaucgaagucgaucc

SEQ ID NO: 809700 - RNA, 19 nt, Artificial Sequence
  Description of Artificial Sequence: Synthetic oligonucleotide
auaaucagcacucagaacu

SEQ ID NO: 809701 - RNA, 19 nt, Artificial Sequence
  Description of Artificial Sequence: Synthetic oligonucleotide
aaauaguuuaucgaagucg

SEQ ID NO: 809702 - RNA, 19 nt, Artificial Sequence
  Description of Artificial Sequence: Synthetic oligonucleotide
ucacauuagacucacuagg

SEQ ID NO: 809703 - RNA, 19 nt, Artificial Sequence
  Description of Artificial Sequence: Synthetic oligonucleotide
uuuaucuauaucauccucc

SEQ ID NO: 809704 - RNA, 19 nt, Artificial Sequence
  Description of Artificial Sequence: Synthetic oligonucleotide
aaaauaguuuaucgaaguc

SEQ ID NO: 809705 - RNA, 19 nt, Artificial Sequence
  Description of Artificial Sequence: Synthetic oligonucleotide
aauccuucgauccuccgac

SEQ ID NO: 809706 - RNA, 19 nt, Artificial Sequence
  Description of Artificial Sequence: Synthetic oligonucleotide
uuuaugaugagucaguguu

SEQ ID NO: 809707 - RNA, 19 nt, Artificial Sequence
  Description of Artificial Sequence: Synthetic oligonucleotide
aaagccguaaagucugagc

SEQ ID NO: 809708 - RNA, 19 nt, Artificial Sequence
  Description of Artificial Sequence: Synthetic oligonucleotide
uuuacuuacugacaggaga

SEQ ID NO: 809709 - RNA, 19 nt, Artificial Sequence
  Description of Artificial Sequence: Synthetic oligonucleotide
uucuaaaucccaaacauaa

SEQ ID NO: 809710 - RNA, 19 nt, Artificial Sequence
  Description of Artificial Sequence: Synthetic oligonucleotide
aacauaaaguuugccaacc

SEQ ID NO: 809711 - RNA, 19 nt, Artificial Sequence
  Description of Artificial Sequence: Synthetic oligonucleotide
uguaccaaaugucacacug

SEQ ID NO: 809712 - RNA, 19 nt, Artificial Sequence
  Description of Artificial Sequence: Synthetic oligonucleotide
ucuaaaugcucuaugugcc

SEQ ID NO: 809713 - RNA, 19 nt, Artificial Sequence
  Description of Artificial Sequence: Synthetic oligonucleotide
aagaauagucacauuagac

SEQ ID NO: 809714 - RNA, 19 nt, Artificial Sequence
  Description of Artificial Sequence: Synthetic oligonucleotide
agaauagucacauuagacu

SEQ ID NO: 809715 - RNA, 19 nt, Artificial Sequence
  Description of Artificial Sequence: Synthetic oligonucleotide
uuaugaucuuccuugaggc

SEQ ID NO: 809716 - RNA, 19 nt, Artificial Sequence
  Description of Artificial Sequence: Synthetic oligonucleotide
uccuuaauugcauucauca

SEQ ID NO: 809717 - RNA, 19 nt, Artificial Sequence
  Description of Artificial Sequence: Synthetic oligonucleotide
cauaggacugcaauaaccg

SEQ ID NO: 809718 - RNA, 19 nt, Artificial Sequence
  Description of Artificial Sequence: Synthetic oligonucleotide
uagucguaaagcaugaucu

SEQ ID NO: 809719 - RNA, 19 nt, Artificial Sequence
  Description of Artificial Sequence: Synthetic oligonucleotide
auagaaaaccucauguacc

SEQ ID NO: 809720 - RNA, 19 nt, Artificial Sequence
  Description of Artificial Sequence: Synthetic oligonucleotide
uuuaugaggaucuucuacu

SEQ ID NO: 809721 - RNA, 19 nt, Artificial Sequence
  Description of Artificial Sequence: Synthetic oligonucleotide
ucuggauauuccauagucg

SEQ ID NO: 809722 - RNA, 19 nt, Artificial Sequence
  Description of Artificial Sequence: Synthetic oligonucleotide
ucauaagauuccuuaauug

SEQ ID NO: 809723 - RNA, 19 nt, Artificial Sequence
  Description of Artificial Sequence: Synthetic oligonucleotide
agaggcggaacucaaaggg

SEQ ID NO: 809724 - RNA, 19 nt, Artificial Sequence
  Description of Artificial Sequence: Synthetic oligonucleotide
uuggaaaguaucaaaucgc

SEQ ID NO: 809725 - RNA, 19 nt, Artificial Sequence
  Description of Artificial Sequence: Synthetic oligonucleotide
ugauccauaccacaggaca

SEQ ID NO: 809726 - RNA, 19 nt, Artificial Sequence
  Description of Artificial Sequence: Synthetic oligonucleotide
uauuccauagucguaaagc

SEQ ID NO: 809727 - RNA, 19 nt, Artificial Sequence
  Description of Artificial Sequence: Synthetic oligonucleotide
auagucguaaagcaugauc

SEQ ID NO: 809728 - RNA, 19 nt, Artificial Sequence
  Description of Artificial Sequence: Synthetic oligonucleotide
aagguaacucuguugcuuc

SEQ ID NO: 809729 - RNA, 19 nt, Artificial Sequence
  Description of Artificial Sequence: Synthetic oligonucleotide
ucauaaucagcacucagaa

SEQ ID NO: 809730 - RNA, 19 nt, Artificial Sequence
  Description of Artificial Sequence: Synthetic oligonucleotide
uuugaguugauucuccaaa

SEQ ID NO: 809731 - RNA, 19 nt, Artificial Sequence
  Description of Artificial Sequence: Synthetic oligonucleotide
aacauaauuccuauguaug

SEQ ID NO: 809732 - RNA, 19 nt, Artificial Sequence
  Description of Artificial Sequence: Synthetic oligonucleotide
aauaguuuaucgaagucga

SEQ ID NO: 809733 - RNA, 19 nt, Artificial Sequence
  Description of Artificial Sequence: Synthetic oligonucleotide
uggaaaguaucaaaucgcc

SEQ ID NO: 809734 - RNA, 19 nt, Artificial Sequence
  Description of Artificial Sequence: Synthetic oligonucleotide
ugguagaaaagucaggaaa

SEQ ID NO: 809735 - RNA, 19 nt, Artificial Sequence
  Description of Artificial Sequence: Synthetic oligonucleotide
uuacuagcaagauacauua

SEQ ID NO: 809736 - RNA, 19 nt, Artificial Sequence
  Description of Artificial Sequence: Synthetic oligonucleotide
uuguaggcguaucagggcg

SEQ ID NO: 809737 - RNA, 19 nt, Artificial Sequence
  Description of Artificial Sequence: Synthetic oligonucleotide
ugguuugucgaauagcagc

SEQ ID NO: 809738 - RNA, 19 nt, Artificial Sequence
  Description of Artificial Sequence: Synthetic oligonucleotide
uaauuauccuuauuaugcc

SEQ ID NO: 809739 - RNA, 19 nt, Artificial Sequence
  Description of Artificial Sequence: Synthetic oligonucleotide
aguugcaaacaccagagga

SEQ ID NO: 809740 - RNA, 19 nt, Artificial Sequence
  Description of Artificial Sequence: Synthetic oligonucleotide
uaucauagguccaugcaca

SEQ ID NO: 809741 - RNA, 19 nt, Artificial Sequence
  Description of Artificial Sequence: Synthetic oligonucleotide
gaauggcacucauauaagg

SEQ ID NO: 809742 - RNA, 19 nt, Artificial Sequence
  Description of Artificial Sequence: Synthetic oligonucleotide
auucgguguauuuguaggc

SEQ ID NO: 809743 - RNA, 19 nt, Artificial Sequence
  Description of Artificial Sequence: Synthetic oligonucleotide
uguauuuguaggcguauca

SEQ ID NO: 809744 - RNA, 19 nt, Artificial Sequence
  Description of Artificial Sequence: Synthetic oligonucleotide
ucaaaucgccuaaccaucg

SEQ ID NO: 809745 - RNA, 19 nt, Artificial Sequence
  Description of Artificial Sequence: Synthetic oligonucleotide
ugaaagaauauuugcauuu

SEQ ID NO: 809746 - RNA, 19 nt, Artificial Sequence
  Description of Artificial Sequence: Synthetic oligonucleotide
gaagaggcggaacucaaag

SEQ ID NO: 809747 - RNA, 19 nt, Artificial Sequence
  Description of Artificial Sequence: Synthetic oligonucleotide
aucguuaugggauuaauua

SEQ ID NO: 809748 - RNA, 19 nt, Artificial Sequence
  Description of Artificial Sequence: Synthetic oligonucleotide
gaaaguaucaaaucgccua

SEQ ID NO: 809749 - RNA, 19 nt, Artificial Sequence
  Description of Artificial Sequence: Synthetic oligonucleotide
uguguuugugccacucucg

SEQ ID NO: 809750 - RNA, 19 nt, Artificial Sequence
  Description of Artificial Sequence: Synthetic oligonucleotide
cauucgguguauuuguagg

SEQ ID NO: 809751 - RNA, 19 nt, Artificial Sequence
  Description of Artificial Sequence: Synthetic oligonucleotide
cacaccuccaaauauugcc

SEQ ID NO: 809752 - RNA, 19 nt, Artificial Sequence
  Description of Artificial Sequence: Synthetic oligonucleotide
aaaucgcccaagaauaguc

SEQ ID NO: 809753 - RNA, 19 nt, Artificial Sequence
  Description of Artificial Sequence: Synthetic oligonucleotide
aaaguaucaaaucgccuaa

SEQ ID NO: 809754 - RNA, 19 nt, Artificial Sequence
  Description of Artificial Sequence: Synthetic oligonucleotide
ugcuaaagcugguuugucg

SEQ ID NO: 809755 - RNA, 19 nt, Artificial Sequence
  Description of Artificial Sequence: Synthetic oligonucleotide
uagaaaaccucauguacca

SEQ ID NO: 809756 - RNA, 19 nt, Artificial Sequence
  Description of Artificial Sequence: Synthetic oligonucleotide
uccgcaauuggcucaaucc

SEQ ID NO: 809757 - RNA, 19 nt, Artificial Sequence
  Description of Artificial Sequence: Synthetic oligonucleotide
uuacuuacugacaggagaa

SEQ ID NO: 809758 - RNA, 19 nt, Artificial Sequence
  Description of Artificial Sequence: Synthetic oligonucleotide
aagaggcggaacucaaagg

SEQ ID NO: 809759 - RNA, 19 nt, Artificial Sequence
  Description of Artificial Sequence: Synthetic oligonucleotide
aauauugccacaagcgugu

SEQ ID NO: 809760 - RNA, 19 nt, Artificial Sequence
  Description of Artificial Sequence: Synthetic oligonucleotide
ucuuuugccagaaauccau

SEQ ID NO: 809761 - RNA, 19 nt, Artificial Sequence
  Description of Artificial Sequence: Synthetic oligonucleotide
uuugucgaauagcagcacc

SEQ ID NO: 809762 - RNA, 19 nt, Artificial Sequence
  Description of Artificial Sequence: Synthetic oligonucleotide
ucgaagucgaucccaacgc

SEQ ID NO: 809763 - RNA, 19 nt, Artificial Sequence
  Description of Artificial Sequence: Synthetic oligonucleotide
ugaucuuuacuuacugaca

SEQ ID NO: 809764 - RNA, 19 nt, Artificial Sequence
  Description of Artificial Sequence: Synthetic oligonucleotide
ugcaauaaccggauuuccc

SEQ ID NO: 809765 - RNA, 19 nt, Artificial Sequence
  Description of Artificial Sequence: Synthetic oligonucleotide
acuagcaagauacauuaau

SEQ ID NO: 809766 - RNA, 19 nt, Artificial Sequence
  Description of Artificial Sequence: Synthetic oligonucleotide
cucauauaagguaacucug

SEQ ID NO: 809767 - RNA, 19 nt, Artificial Sequence
  Description of Artificial Sequence: Synthetic oligonucleotide
aucuauaucauccuccauu

SEQ ID NO: 809768 - RNA, 19 nt, Artificial Sequence
  Description of Artificial Sequence: Synthetic oligonucleotide
uaggacugcaauaaccgga

SEQ ID NO: 809769 - RNA, 19 nt, Artificial Sequence
  Description of Artificial Sequence: Synthetic oligonucleotide
aacuuguuucaucacaaua

SEQ ID NO: 809770 - RNA, 19 nt, Artificial Sequence
  Description of Artificial Sequence: Synthetic oligonucleotide
uaagauuccuuaauugcau

SEQ ID NO: 809771 - RNA, 19 nt, Artificial Sequence
  Description of Artificial Sequence: Synthetic oligonucleotide
ucaaaucgcccaagaauag

SEQ ID NO: 809772 - RNA, 19 nt, Artificial Sequence
  Description of Artificial Sequence: Synthetic oligonucleotide
aguuugccaaccugauugc

SEQ ID NO: 809773 - RNA, 19 nt, Artificial Sequence
  Description of Artificial Sequence: Synthetic oligonucleotide
agucuaaaugcucuaugug

SEQ ID NO: 809774 - RNA, 19 nt, Artificial Sequence
  Description of Artificial Sequence: Synthetic oligonucleotide
ucuauaucauccuccauuu

SEQ ID NO: 809775 - RNA, 19 nt, Artificial Sequence
  Description of Artificial Sequence: Synthetic oligonucleotide
uuaugaugagucaguguug

SEQ ID NO: 809776 - RNA, 19 nt, Artificial Sequence
  Description of Artificial Sequence: Synthetic oligonucleotide
gucacauuagacucacuag

SEQ ID NO: 809777 - RNA, 19 nt, Artificial Sequence
  Description of Artificial Sequence: Synthetic oligonucleotide
aacgccaaaugcuggcauc

SEQ ID NO: 809778 - RNA, 19 nt, Artificial Sequence
  Description of Artificial Sequence: Synthetic oligonucleotide
ugguguugcuaucauaggu

SEQ ID NO: 809779 - RNA, 19 nt, Artificial Sequence
  Description of Artificial Sequence: Synthetic oligonucleotide
aaucgccuaaccaucgcac

SEQ ID NO: 809780 - RNA, 19 nt, Artificial Sequence
  Description of Artificial Sequence: Synthetic oligonucleotide
aaaucgccuaaccaucgca

SEQ ID NO: 809781 - RNA, 19 nt, Artificial Sequence
  Description of Artificial Sequence: Synthetic oligonucleotide
guuaugggauuaauuaucc

SEQ ID NO: 809782 - RNA, 19 nt, Artificial Sequence
  Description of Artificial Sequence: Synthetic oligonucleotide
agucugagcaggaagacag

SEQ ID NO: 809783 - RNA, 19 nt, Artificial Sequence
  Description of Artificial Sequence: Synthetic oligonucleotide
ucuacuucuaaaucccaaa

SEQ ID NO: 809784 - RNA, 19 nt, Artificial Sequence
  Description of Artificial Sequence: Synthetic oligonucleotide
uaaccaucgcacacaauca

SEQ ID NO: 809785 - RNA, 19 nt, Artificial Sequence
  Description of Artificial Sequence: Synthetic oligonucleotide
ucuacauaggacugcaaua

SEQ ID NO: 809786 - RNA, 19 nt, Artificial Sequence
  Description of Artificial Sequence: Synthetic oligonucleotide
uccacaccuccaaauauug

SEQ ID NO: 809787 - RNA, 19 nt, Artificial Sequence
  Description of Artificial Sequence: Synthetic oligonucleotide
gaugagucaguguuguaca

SEQ ID NO: 809788 - RNA, 19 nt, Artificial Sequence
  Description of Artificial Sequence: Synthetic oligonucleotide
uucgguguauuuguaggcg

SEQ ID NO: 809789 - RNA, 19 nt, Artificial Sequence
  Description of Artificial Sequence: Synthetic oligonucleotide
acccaaaagaucauaauca

SEQ ID NO: 809790 - RNA, 19 nt, Artificial Sequence
  Description of Artificial Sequence: Synthetic oligonucleotide
uaaucaaaucgcccaagaa

SEQ ID NO: 809791 - RNA, 19 nt, Artificial Sequence
  Description of Artificial Sequence: Synthetic oligonucleotide
uuuggguuguaaucauaag

SEQ ID NO: 809792 - RNA, 19 nt, Artificial Sequence
  Description of Artificial Sequence: Synthetic oligonucleotide
aucgcccaagaauagucac

SEQ ID NO: 809793 - RNA, 19 nt, Artificial Sequence
  Description of Artificial Sequence: Synthetic oligonucleotide
uaugaggaugcugcuaucc

SEQ ID NO: 809794 - RNA, 19 nt, Artificial Sequence
  Description of Artificial Sequence: Synthetic oligonucleotide
aguuaaacugaacuccaaa

SEQ ID NO: 809795 - RNA, 19 nt, Artificial Sequence
  Description of Artificial Sequence: Synthetic oligonucleotide
cuacuucuaaaucccaaac

SEQ ID NO: 809796 - RNA, 19 nt, Artificial Sequence
  Description of Artificial Sequence: Synthetic oligonucleotide
uccuuauuaugccucuaga

SEQ ID NO: 809797 - RNA, 19 nt, Artificial Sequence
  Description of Artificial Sequence: Synthetic oligonucleotide
guaucaaaucgccuaacca

SEQ ID NO: 809798 - RNA, 19 nt, Artificial Sequence
  Description of Artificial Sequence: Synthetic oligonucleotide
auauuccauagucguaaag

SEQ ID NO: 809799 - RNA, 19 nt, Artificial Sequence
  Description of Artificial Sequence: Synthetic oligonucleotide
cacuacauucagcucagcc

SEQ ID NO: 809800 - RNA, 19 nt, Artificial Sequence
  Description of Artificial Sequence: Synthetic oligonucleotide
gaaaaccucauguaccaaa

SEQ ID NO: 809801 - RNA, 19 nt, Artificial Sequence
  Description of Artificial Sequence: Synthetic oligonucleotide
uccuauguaugucucuggu

SEQ ID NO: 809802 - RNA, 19 nt, Artificial Sequence
  Description of Artificial Sequence: Synthetic oligonucleotide
uguaaucaaaucgcccaag

SEQ ID NO: 809803 - RNA, 19 nt, Artificial Sequence
  Description of Artificial Sequence: Synthetic oligonucleotide
uuugcacugaggcgucggg

SEQ ID NO: 809804 - RNA, 19 nt, Artificial Sequence
  Description of Artificial Sequence: Synthetic oligonucleotide
uuguacauuuggcuuuaug

SEQ ID NO: 809805 - RNA, 19 nt, Artificial Sequence
  Description of Artificial Sequence: Synthetic oligonucleotide
uggcacucauauaagguaa

SEQ ID NO: 809806 - RNA, 19 nt, Artificial Sequence
  Description of Artificial Sequence: Synthetic oligonucleotide
ucguuaugggauuaauuau

SEQ ID NO: 809807 - RNA, 19 nt, Artificial Sequence
  Description of Artificial Sequence: Synthetic oligonucleotide
gauuuccccuugugaaugg

SEQ ID NO: 809808 - RNA, 19 nt, Artificial Sequence
  Description of Artificial Sequence: Synthetic oligonucleotide
aagcugguuugucgaauag

SEQ ID NO: 809809 - RNA, 19 nt, Artificial Sequence
  Description of Artificial Sequence: Synthetic oligonucleotide
cugauugcccaaugcaagc

SEQ ID NO: 809810 - RNA, 19 nt, Artificial Sequence
  Description of Artificial Sequence: Synthetic oligonucleotide
aagacuuggaaaguaucaa

SEQ ID NO: 809811 - RNA, 19 nt, Artificial Sequence
  Description of Artificial Sequence: Synthetic oligonucleotide
uaauuccuauguaugucuc

SEQ ID NO: 809812 - RNA, 19 nt, Artificial Sequence
  Description of Artificial Sequence: Synthetic oligonucleotide
agagugauccauaccacag

SEQ ID NO: 809813 - RNA, 19 nt, Artificial Sequence
  Description of Artificial Sequence: Synthetic oligonucleotide
auuggcucaauccuucgau

SEQ ID NO: 809814 - RNA, 19 nt, Artificial Sequence
  Description of Artificial Sequence: Synthetic oligonucleotide
aucaaaucgcccaagaaua

SEQ ID NO: 809815 - RNA, 19 nt, Artificial Sequence
  Description of Artificial Sequence: Synthetic oligonucleotide
uguaaucauaagauuccuu

SEQ ID NO: 809816 - RNA, 19 nt, Artificial Sequence
  Description of Artificial Sequence: Synthetic oligonucleotide
ugccaguuaaacugaacuc

SEQ ID NO: 809817 - RNA, 19 nt, Artificial Sequence
  Description of Artificial Sequence: Synthetic oligonucleotide
ucucgauacugacagcauc

SEQ ID NO: 809818 - RNA, 19 nt, Artificial Sequence
  Description of Artificial Sequence: Synthetic oligonucleotide
ccaacauagugcuuuauac

SEQ ID NO: 809819 - RNA, 19 nt, Artificial Sequence
  Description of Artificial Sequence: Synthetic oligonucleotide
ggcaggauuccuuacgucc

SEQ ID NO: 809820 - RNA, 19 nt, Artificial Sequence
  Description of Artificial Sequence: Synthetic oligonucleotide
aaaagccguaaagucugag

SEQ ID NO: 809821 - RNA, 19 nt, Artificial Sequence
  Description of Artificial Sequence: Synthetic oligonucleotide
ucccucucggacauauucc

SEQ ID NO: 809822 - RNA, 19 nt, Artificial Sequence
  Description of Artificial Sequence: Synthetic oligonucleotide
cucgucucccgacaggucc

SEQ ID NO: 809823 - RNA, 19 nt, Artificial Sequence
  Description of Artificial Sequence: Synthetic oligonucleotide
uggcugguuaugaucuucc

SEQ ID NO: 809824 - RNA, 19 nt, Artificial Sequence
  Description of Artificial Sequence: Synthetic oligonucleotide
agacucacuagguuuaauu

SEQ ID NO: 809825 - RNA, 19 nt, Artificial Sequence
  Description of Artificial Sequence: Synthetic oligonucleotide
aaccaucgcacacaaucaa

SEQ ID NO: 809826 - RNA, 19 nt, Artificial Sequence
  Description of Artificial Sequence: Synthetic oligonucleotide
acucucgauacugacagca

SEQ ID NO: 809827 - RNA, 19 nt, Artificial Sequence
  Description of Artificial Sequence: Synthetic oligonucleotide
aauaaccggauuuccccuu

SEQ ID NO: 809828 - RNA, 19 nt, Artificial Sequence
  Description of Artificial Sequence: Synthetic oligonucleotide
uuaugggauuaauuauccu

SEQ ID NO: 809829 - RNA, 19 nt, Artificial Sequence
  Description of Artificial Sequence: Synthetic oligonucleotide
aagauaugguauaauuuua

SEQ ID NO: 809830 - RNA, 19 nt, Artificial Sequence
  Description of Artificial Sequence: Synthetic oligonucleotide
uuccauagucguaaagcau

SEQ ID NO: 809831 - RNA, 19 nt, Artificial Sequence
  Description of Artificial Sequence: Synthetic oligonucleotide
ugcaagcaucuuuugccag

SEQ ID NO: 809832 - RNA, 19 nt, Artificial Sequence
  Description of Artificial Sequence: Synthetic oligonucleotide
cucgauacugacagcauca

SEQ ID NO: 809833 - RNA, 19 nt, Artificial Sequence
  Description of Artificial Sequence: Synthetic oligonucleotide
cauuuaugaugagucagug

SEQ ID NO: 809834 - RNA, 19 nt, Artificial Sequence
  Description of Artificial Sequence: Synthetic oligonucleotide
uaugaucuuccuugaggcu

SEQ ID NO: 809835 - RNA, 19 nt, Artificial Sequence
  Description of Artificial Sequence: Synthetic oligonucleotide
ugcucuaugugcccuuacu

SEQ ID NO: 809836 - RNA, 19 nt, Artificial Sequence
  Description of Artificial Sequence: Synthetic oligonucleotide
uaccacaggacauuauuuu

SEQ ID NO: 809837 - RNA, 19 nt, Artificial Sequence
  Description of Artificial Sequence: Synthetic oligonucleotide
gagagugauccauaccaca

SEQ ID NO: 809838 - RNA, 19 nt, Artificial Sequence
  Description of Artificial Sequence: Synthetic oligonucleotide
ucguggguggaauuucagc

SEQ ID NO: 809839 - RNA, 19 nt, Artificial Sequence
  Description of Artificial Sequence: Synthetic oligonucleotide
uccuugcaaagacguuucg

SEQ ID NO: 809840 - RNA, 19 nt, Artificial Sequence
  Description of Artificial Sequence: Synthetic oligonucleotide
cauaaucagcacucagaac

SEQ ID NO: 809841 - RNA, 19 nt, Artificial Sequence
  Description of Artificial Sequence: Synthetic oligonucleotide
uccuuacugugccaguuaa

SEQ ID NO: 809842 - RNA, 19 nt, Artificial Sequence
  Description of Artificial Sequence: Synthetic oligonucleotide
aagcgugucugucuggaua

SEQ ID NO: 809843 - RNA, 19 nt, Artificial Sequence
  Description of Artificial Sequence: Synthetic oligonucleotide
uuaugaggaucuucuacuu

SEQ ID NO: 809844 - RNA, 19 nt, Artificial Sequence
  Description of Artificial Sequence: Synthetic oligonucleotide
agagagugauccauaccac

SEQ ID NO: 809845 - RNA, 19 nt, Artificial Sequence
  Description of Artificial Sequence: Synthetic oligonucleotide
acaaucaacauaauuccua

SEQ ID NO: 809846 - RNA, 19 nt, Artificial Sequence
  Description of Artificial Sequence: Synthetic oligonucleotide
gacaggagaagauuugggu

SEQ ID NO: 809847 - RNA, 19 nt, Artificial Sequence
  Description of Artificial Sequence: Synthetic oligonucleotide
ucaauccuucgauccuccg

SEQ ID NO: 809848 - RNA, 19 nt, Artificial Sequence
  Description of Artificial Sequence: Synthetic oligonucleotide
auaagguaacucuguugcu

SEQ ID NO: 809849 - RNA, 19 nt, Artificial Sequence
  Description of Artificial Sequence: Synthetic oligonucleotide
acuuacugacaggagaaga

SEQ ID NO: 809850 - RNA, 19 nt, Artificial Sequence
  Description of Artificial Sequence: Synthetic oligonucleotide
uugcaaacaccagaggauc

SEQ ID NO: 809851 - RNA, 19 nt, Artificial Sequence
  Description of Artificial Sequence: Synthetic oligonucleotide
ccuuauuaugccucuagac

SEQ ID NO: 809852 - RNA, 19 nt, Artificial Sequence
  Description of Artificial Sequence: Synthetic oligonucleotide
aaagacguuucguccgcaa

SEQ ID NO: 809853 - RNA, 19 nt, Artificial Sequence
  Description of Artificial Sequence: Synthetic oligonucleotide
gcccuuacuagcaagauac

SEQ ID NO: 809854 - RNA, 19 nt, Artificial Sequence
  Description of Artificial Sequence: Synthetic oligonucleotide
ucgaucccaacgccaaaug

SEQ ID NO: 809855 - RNA, 19 nt, Artificial Sequence
  Description of Artificial Sequence: Synthetic oligonucleotide
gacguuucguccgcaauug

SEQ ID NO: 809856 - RNA, 19 nt, Artificial Sequence
  Description of Artificial Sequence: Synthetic oligonucleotide
guuuaucgaagucgauccc

SEQ ID NO: 809857 - RNA, 19 nt, Artificial Sequence
  Description of Artificial Sequence: Synthetic oligonucleotide
uucacaagacuuggaaagu

SEQ ID NO: 809858 - RNA, 19 nt, Artificial Sequence
  Description of Artificial Sequence: Synthetic oligonucleotide
aagacguuucguccgcaau

SEQ ID NO: 809859 - RNA, 19 nt, Artificial Sequence
  Description of Artificial Sequence: Synthetic oligonucleotide
agcaaguagaggguggcug

SEQ ID NO: 809860 - RNA, 19 nt, Artificial Sequence
  Description of Artificial Sequence: Synthetic oligonucleotide
aaaagggcgcgcgcgcgcg

SEQ ID NO: 809861 - RNA, 19 nt, Artificial Sequence
  Description of Artificial Sequence: Synthetic oligonucleotide
uaaucagcacucagaacuu

SEQ ID NO: 809862 - RNA, 19 nt, Artificial Sequence
  Description of Artificial Sequence: Synthetic oligonucleotide
acauuuaugaugagucagu

SEQ ID NO: 809863 - RNA, 19 nt, Artificial Sequence
  Description of Artificial Sequence: Synthetic oligonucleotide
uauuuggguuguaaucaua

SEQ ID NO: 809864 - RNA, 19 nt, Artificial Sequence
  Description of Artificial Sequence: Synthetic oligonucleotide
uaucagggcguucuguguu

SEQ ID NO: 809865 - RNA, 19 nt, Artificial Sequence
  Description of Artificial Sequence: Synthetic oligonucleotide
ucgguguauuuguaggcgu

SEQ ID NO: 809866 - RNA, 19 nt, Artificial Sequence
  Description of Artificial Sequence: Synthetic oligonucleotide
ugauugcccaaugcaagca

SEQ ID NO: 809867 - RNA, 19 nt, Artificial Sequence
  Description of Artificial Sequence: Synthetic oligonucleotide
aaucgcccaagaauaguca

SEQ ID NO: 809868 - RNA, 19 nt, Artificial Sequence
  Description of Artificial Sequence: Synthetic oligonucleotide
auaaccggauuuccccuug

SEQ ID NO: 809869 - RNA, 19 nt, Artificial Sequence
  Description of Artificial Sequence: Synthetic oligonucleotide
cuaugugcccuuacuagca

SEQ ID NO: 809870 - RNA, 19 nt, Artificial Sequence
  Description of Artificial Sequence: Synthetic oligonucleotide
ucgcccaagaauagucaca

SEQ ID NO: 809871 - RNA, 19 nt, Artificial Sequence
  Description of Artificial Sequence: Synthetic oligonucleotide
aaccggauuuccccuugug

SEQ ID NO: 809872 - RNA, 19 nt, Artificial Sequence
  Description of Artificial Sequence: Synthetic oligonucleotide
ucgccuaaccaucgcacac

SEQ ID NO: 809873 - RNA, 19 nt, Artificial Sequence
  Description of Artificial Sequence: Synthetic oligonucleotide
auuuccccuugugaauggc

SEQ ID NO: 809874 - RNA, 19 nt, Artificial Sequence
  Description of Artificial Sequence: Synthetic oligonucleotide
uaaaagccguaaagucuga

SEQ ID NO: 809875 - RNA, 19 nt, Artificial Sequence
  Description of Artificial Sequence: Synthetic oligonucleotide
ccacucucgauacugacag

SEQ ID NO: 809876 - RNA, 19 nt, Artificial Sequence
  Description of Artificial Sequence: Synthetic oligonucleotide
ugucgacacuucccucucg

SEQ ID NO: 809877 - RNA, 19 nt, Artificial Sequence
  Description of Artificial Sequence: Synthetic oligonucleotide
acauuagacucacuagguu

SEQ ID NO: 809878 - RNA, 19 nt, Artificial Sequence
  Description of Artificial Sequence: Synthetic oligonucleotide
cuggauauuccauagucgu

SEQ ID NO: 809879 - RNA, 19 nt, Artificial Sequence
  Description of Artificial Sequence: Synthetic oligonucleotide
accaucgcacacaaucaac

SEQ ID NO: 809880 - RNA, 19 nt, Artificial Sequence
  Description of Artificial Sequence: Synthetic oligonucleotide
uacuuacugacaggagaag

SEQ ID NO: 809881 - RNA, 19 nt, Artificial Sequence
  Description of Artificial Sequence: Synthetic oligonucleotide
uggauauuccauagucgua

SEQ ID NO: 809882 - RNA, 19 nt, Artificial Sequence
  Description of Artificial Sequence: Synthetic oligonucleotide
auccuucgauccuccgacc

SEQ ID NO: 809883 - RNA, 19 nt, Artificial Sequence
  Description of Artificial Sequence: Synthetic oligonucleotide
agagaagaggcggaacuca

SEQ ID NO: 809884 - RNA, 19 nt, Artificial Sequence
  Description of Artificial Sequence: Synthetic oligonucleotide
auugcccaaugcaagcauc

SEQ ID NO: 809885 - RNA, 19 nt, Artificial Sequence
  Description of Artificial Sequence: Synthetic oligonucleotide
augggauuaauuauccuua

SEQ ID NO: 809886 - RNA, 19 nt, Artificial Sequence
  Description of Artificial Sequence: Synthetic oligonucleotide
uucguccgcaauuggcuca

SEQ ID NO: 809887 - RNA, 19 nt, Artificial Sequence
  Description of Artificial Sequence: Synthetic oligonucleotide
agggcaggauuccuuacgu

SEQ ID NO: 809888 - RNA, 19 nt, Artificial Sequence
  Description of Artificial Sequence: Synthetic oligonucleotide
uguaggcguaucagggcgu

SEQ ID NO: 809889 - RNA, 19 nt, Artificial Sequence
  Description of Artificial Sequence: Synthetic oligonucleotide
uucucgucucccgacaggu

SEQ ID NO: 809890 - RNA, 19 nt, Artificial Sequence
  Description of Artificial Sequence: Synthetic oligonucleotide
aaaugcucuaugugcccuu

SEQ ID NO: 809891 - RNA, 19 nt, Artificial Sequence
  Description of Artificial Sequence: Synthetic oligonucleotide
gcuaaagcugguuugucga

SEQ ID NO: 809892 - RNA, 19 nt, Artificial Sequence
  Description of Artificial Sequence: Synthetic oligonucleotide
ccugauugcccaaugcaag

SEQ ID NO: 809893 - RNA, 19 nt, Artificial Sequence
  Description of Artificial Sequence: Synthetic oligonucleotide
agacguuucguccgcaauu

SEQ ID NO: 809894 - RNA, 19 nt, Artificial Sequence
  Description of Artificial Sequence: Synthetic oligonucleotide
aaagggcgcgcgcgcgcgc

SEQ ID NO: 809895 - RNA, 19 nt, Artificial Sequence
  Description of Artificial Sequence: Synthetic oligonucleotide
ugcugaaaagggcgcgcgc

SEQ ID NO: 809896 - RNA, 19 nt, Artificial Sequence
  Description of Artificial Sequence: Synthetic oligonucleotide
gaccccgccacacugcuga

SEQ ID NO: 809897 - RNA, 19 nt, Artificial Sequence
  Description of Artificial Sequence: Synthetic oligonucleotide
uccgcacuuugcacugagg

SEQ ID NO: 809898 - RNA, 19 nt, Artificial Sequence
  Description of Artificial Sequence: Synthetic oligonucleotide
caaaucgccuaaccaucgc

SEQ ID NO: 809899 - RNA, 19 nt, Artificial Sequence
  Description of Artificial Sequence: Synthetic oligonucleotide
ggugcauucgguguauuug

SEQ ID NO: 809900 - RNA, 19 nt, Artificial Sequence
  Description of Artificial Sequence: Synthetic oligonucleotide
uuggcucaauccuucgauc

SEQ ID NO: 809901 - RNA, 19 nt, Artificial Sequence
  Description of Artificial Sequence: Synthetic oligonucleotide
gauauuccauagucguaaa

SEQ ID NO: 809902 - RNA, 19 nt, Artificial Sequence
  Description of Artificial Sequence: Synthetic oligonucleotide
aguggauuuucugggaaau

SEQ ID NO: 809903 - RNA, 19 nt, Artificial Sequence
  Description of Artificial Sequence: Synthetic oligonucleotide
uacauucagcucagccuga

SEQ ID NO: 809904 - RNA, 19 nt, Artificial Sequence
  Description of Artificial Sequence: Synthetic oligonucleotide
cugaaaagggcgcgcgcgc

SEQ ID NO: 809905 - RNA, 19 nt, Artificial Sequence
  Description of Artificial Sequence: Synthetic oligonucleotide
gaaaagggcgcgcgcgcgc

SEQ ID NO: 809906 - RNA, 19 nt, Artificial Sequence
  Description of Artificial Sequence: Synthetic oligonucleotide
ucagcucauugauagcauu

SEQ ID NO: 809907 - RNA, 19 nt, Artificial Sequence
  Description of Artificial Sequence: Synthetic oligonucleotide
cagcaucuacauaggacug

SEQ ID NO: 809908 - RNA, 19 nt, Artificial Sequence
  Description of Artificial Sequence: Synthetic oligonucleotide
aucgccuaaccaucgcaca

SEQ ID NO: 809909 - RNA, 19 nt, Artificial Sequence
  Description of Artificial Sequence: Synthetic oligonucleotide
uagguccaugcacaaguau

SEQ ID NO: 809910 - RNA, 19 nt, Artificial Sequence
  Description of Artificial Sequence: Synthetic oligonucleotide
gacgggagcuuuucccgcc

SEQ ID NO: 809911 - RNA, 19 nt, Artificial Sequence
  Description of Artificial Sequence: Synthetic oligonucleotide
guucucgucucccgacagg

SEQ ID NO: 809912 - RNA, 19 nt, Artificial Sequence
  Description of Artificial Sequence: Synthetic oligonucleotide
gcauucgguguauuuguag

SEQ ID NO: 809913 - RNA, 19 nt, Artificial Sequence
  Description of Artificial Sequence: Synthetic oligonucleotide
ggauauuccauagucguaa

SEQ ID NO: 809914 - RNA, 19 nt, Artificial Sequence
  Description of Artificial Sequence: Synthetic oligonucleotide
gaucccaacgccaaaugcu

SEQ ID NO: 809915 - RNA, 19 nt, Artificial Sequence
  Description of Artificial Sequence: Synthetic oligonucleotide
acugcaucguuaugggauu

SEQ ID NO: 809916 - RNA, 19 nt, Artificial Sequence
  Description of Artificial Sequence: Synthetic oligonucleotide
agacaguacaaagaaugua

SEQ ID NO: 809917 - RNA, 19 nt, Artificial Sequence
  Description of Artificial Sequence: Synthetic oligonucleotide
cuucgauccuccgacccgc

SEQ ID NO: 809918 - RNA, 19 nt, Artificial Sequence
  Description of Artificial Sequence: Synthetic oligonucleotide
cauuagacucacuagguuu

SEQ ID NO: 809919 - RNA, 19 nt, Artificial Sequence
  Description of Artificial Sequence: Synthetic oligonucleotide
acguuucguccgcaauugg

SEQ ID NO: 809920 - RNA, 19 nt, Artificial Sequence
  Description of Artificial Sequence: Synthetic oligonucleotide
augcucuaugugcccuuac

SEQ ID NO: 809921 - RNA, 19 nt, Artificial Sequence
  Description of Artificial Sequence: Synthetic oligonucleotide
agcaugaucuuuacuuacu

SEQ ID NO: 809922 - RNA, 19 nt, Artificial Sequence
  Description of Artificial Sequence: Synthetic oligonucleotide
cuuugcacugaggcgucgg

SEQ ID NO: 809923 - RNA, 19 nt, Artificial Sequence
  Description of Artificial Sequence: Synthetic oligonucleotide
aagucgaucccaacgccaa

SEQ ID NO: 809924 - RNA, 19 nt, Artificial Sequence
  Description of Artificial Sequence: Synthetic oligonucleotide
uuaugccucuagacccagc

SEQ ID NO: 809925 - RNA, 19 nt, Artificial Sequence
  Description of Artificial Sequence: Synthetic oligonucleotide
agcgccuagagaagaggcg

SEQ ID NO: 809926 - RNA, 19 nt, Artificial Sequence
  Description of Artificial Sequence: Synthetic oligonucleotide
cuuacugacaggagaagau

SEQ ID NO: 809927 - RNA, 19 nt, Artificial Sequence
  Description of Artificial Sequence: Synthetic oligonucleotide
agaucauaaucagcacuca

SEQ ID NO: 809928 - RNA, 19 nt, Artificial Sequence
  Description of Artificial Sequence: Synthetic oligonucleotide
gcugaaaagggcgcgcgcg

SEQ ID NO: 809929 - RNA, 19 nt, Artificial Sequence
  Description of Artificial Sequence: Synthetic oligonucleotide
uccucuccgcacuuugcac

SEQ ID NO: 809930 - RNA, 19 nt, Artificial Sequence
  Description of Artificial Sequence: Synthetic oligonucleotide
gcuaucauagguccaugca

SEQ ID NO: 809931 - RNA, 19 nt, Artificial Sequence
  Description of Artificial Sequence: Synthetic oligonucleotide
guguuugugccacucucga

SEQ ID NO: 809932 - RNA, 19 nt, Artificial Sequence
  Description of Artificial Sequence: Synthetic oligonucleotide
uguuguacauuuggcuuua

SEQ ID NO: 809933 - RNA, 19 nt, Artificial Sequence
  Description of Artificial Sequence: Synthetic oligonucleotide
gguuugucgaauagcagca

SEQ ID NO: 809934 - RNA, 19 nt, Artificial Sequence
  Description of Artificial Sequence: Synthetic oligonucleotide
uguaugucucugguagaaa

SEQ ID NO: 809935 - RNA, 19 nt, Artificial Sequence
  Description of Artificial Sequence: Synthetic oligonucleotide
caaucaacauaauuccuau

SEQ ID NO: 809936 - RNA, 19 nt, Artificial Sequence
  Description of Artificial Sequence: Synthetic oligonucleotide
ucggguccgcggcucagag

SEQ ID NO: 809937 - RNA, 19 nt, Artificial Sequence
  Description of Artificial Sequence: Synthetic oligonucleotide
uguuugugccacucucgau

SEQ ID NO: 809938 - RNA, 19 nt, Artificial Sequence
  Description of Artificial Sequence: Synthetic oligonucleotide
cucuccgcacuuugcacug

SEQ ID NO: 809939 - RNA, 19 nt, Artificial Sequence
  Description of Artificial Sequence: Synthetic oligonucleotide
cacauuagacucacuaggu

SEQ ID NO: 809940 - RNA, 19 nt, Artificial Sequence
  Description of Artificial Sequence: Synthetic oligonucleotide
ucucccgacagguccgggu

SEQ ID NO: 809941 - RNA, 19 nt, Artificial Sequence
  Description of Artificial Sequence: Synthetic oligonucleotide
cugcugaaaagggcgcgcg

SEQ ID NO: 809942 - RNA, 19 nt, Artificial Sequence
  Description of Artificial Sequence: Synthetic oligonucleotide
cacugcaucguuaugggau

SEQ ID NO: 809943 - RNA, 19 nt, Artificial Sequence
  Description of Artificial Sequence: Synthetic oligonucleotide
aggcggaacucaaagggcu

SEQ ID NO: 809944 - RNA, 19 nt, Artificial Sequence
  Description of Artificial Sequence: Synthetic oligonucleotide
cacaagcgugucugucugg

SEQ ID NO: 809945 - RNA, 19 nt, Artificial Sequence
  Description of Artificial Sequence: Synthetic oligonucleotide
uccggguugcuguucucgu

SEQ ID NO: 809946 - RNA, 19 nt, Artificial Sequence
  Description of Artificial Sequence: Synthetic oligonucleotide
agguccaugcacaaguaua

SEQ ID NO: 809947 - RNA, 19 nt, Artificial Sequence
  Description of Artificial Sequence: Synthetic oligonucleotide
uccauaccacaggacauua

SEQ ID NO: 809948 - RNA, 19 nt, Artificial Sequence
  Description of Artificial Sequence: Synthetic oligonucleotide
acacuucccucucggacau

SEQ ID NO: 809949 - RNA, 19 nt, Artificial Sequence
  Description of Artificial Sequence: Synthetic oligonucleotide
ucgacacuucccucucgga

SEQ ID NO: 809950 - RNA, 19 nt, Artificial Sequence
  Description of Artificial Sequence: Synthetic oligonucleotide
aaugcucuaugugcccuua

SEQ ID NO: 809951 - RNA, 19 nt, Artificial Sequence
  Description of Artificial Sequence: Synthetic oligonucleotide
cucggacauauuccuccgc

SEQ ID NO: 809952 - RNA, 19 nt, Artificial Sequence
  Description of Artificial Sequence: Synthetic oligonucleotide
gcgccuagagaagaggcgg

SEQ ID NO: 809953 - RNA, 19 nt, Artificial Sequence
  Description of Artificial Sequence: Synthetic oligonucleotide
ucccuccacgguucucgcg

SEQ ID NO: 809954 - RNA, 19 nt, Artificial Sequence
  Description of Artificial Sequence: Synthetic oligonucleotide
acgccaaaugcuggcauca

SEQ ID NO: 809955 - RNA, 19 nt, Artificial Sequence
  Description of Artificial Sequence: Synthetic oligonucleotide
gcaaagacguuucguccgc

SEQ ID NO: 809956 - RNA, 19 nt, Artificial Sequence
  Description of Artificial Sequence: Synthetic oligonucleotide
gugcauucgguguauuugu

SEQ ID NO: 809957 - RNA, 19 nt, Artificial Sequence
  Description of Artificial Sequence: Synthetic oligonucleotide
accagaggaucuccuuccu

SEQ ID NO: 809958 - RNA, 19 nt, Artificial Sequence
  Description of Artificial Sequence: Synthetic oligonucleotide
guuucguccgcaauuggcu

SEQ ID NO: 809959 - RNA, 19 nt, Artificial Sequence
  Description of Artificial Sequence: Synthetic oligonucleotide
auauugccacaagcguguc

SEQ ID NO: 809960 - RNA, 19 nt, Artificial Sequence
  Description of Artificial Sequence: Synthetic oligonucleotide
cuaaagcugguuugucgaa

SEQ ID NO: 809961 - RNA, 19 nt, Artificial Sequence
  Description of Artificial Sequence: Synthetic oligonucleotide
cuaugaggaugcugcuauc

SEQ ID NO: 809962 - RNA, 19 nt, Artificial Sequence
  Description of Artificial Sequence: Synthetic oligonucleotide
agggcguucuguguuugug

SEQ ID NO: 809963 - RNA, 19 nt, Artificial Sequence
  Description of Artificial Sequence: Synthetic oligonucleotide
ucccgacagguccggguug

SEQ ID NO: 809964 - RNA, 19 nt, Artificial Sequence
  Description of Artificial Sequence: Synthetic oligonucleotide
ucgauacugacagcaucau

SEQ ID NO: 809965 - RNA, 19 nt, Artificial Sequence
  Description of Artificial Sequence: Synthetic oligonucleotide
agccugauugaaugcugaa

SEQ ID NO: 809966 - RNA, 19 nt, Artificial Sequence
  Description of Artificial Sequence: Synthetic oligonucleotide
gcaggauuccuuacguccc

SEQ ID NO: 809967 - RNA, 19 nt, Artificial Sequence
  Description of Artificial Sequence: Synthetic oligonucleotide
cguuucguccgcaauuggc

SEQ ID NO: 809968 - RNA, 19 nt, Artificial Sequence
  Description of Artificial Sequence: Synthetic oligonucleotide
ccgacgggagcuuuucccg

SEQ ID NO: 809969 - RNA, 19 nt, Artificial Sequence
  Description of Artificial Sequence: Synthetic oligonucleotide
guuugucgaauagcagcac

SEQ ID NO: 809970 - RNA, 19 nt, Artificial Sequence
  Description of Artificial Sequence: Synthetic oligonucleotide
cuugugaauggcacucaua

SEQ ID NO: 809971 - RNA, 19 nt, Artificial Sequence
  Description of Artificial Sequence: Synthetic oligonucleotide
cagccugauugaaugcuga

SEQ ID NO: 809972 - RNA, 19 nt, Artificial Sequence
  Description of Artificial Sequence: Synthetic oligonucleotide
ccaucgcacacaaucaaca

SEQ ID NO: 809973 - RNA, 19 nt, Artificial Sequence
  Description of Artificial Sequence: Synthetic oligonucleotide
ucccgacgggagcuuuucc

SEQ ID NO: 809974 - RNA, 19 nt, Artificial Sequence
  Description of Artificial Sequence: Synthetic oligonucleotide
gugcgugcgaccccgccac

SEQ ID NO: 809975 - RNA, 19 nt, Artificial Sequence
  Description of Artificial Sequence: Synthetic oligonucleotide
gauccauaccacaggacau

SEQ ID NO: 809976 - RNA, 19 nt, Artificial Sequence
  Description of Artificial Sequence: Synthetic oligonucleotide
aagggcgcgcgcgcgcgcg

SEQ ID NO: 809977 - RNA, 19 nt, Artificial Sequence
  Description of Artificial Sequence: Synthetic oligonucleotide
acuuugcacugaggcgucg

SEQ ID NO: 809978 - RNA, 19 nt, Artificial Sequence
  Description of Artificial Sequence: Synthetic oligonucleotide
cacucucgauacugacagc

SEQ ID NO: 809979 - RNA, 19 nt, Artificial Sequence
  Description of Artificial Sequence: Synthetic oligonucleotide
auccauaccacaggacauu

SEQ ID NO: 809980 - RNA, 19 nt, Artificial Sequence
  Description of Artificial Sequence: Synthetic oligonucleotide
guccgcaauuggcucaauc

SEQ ID NO: 809981 - RNA, 19 nt, Artificial Sequence
  Description of Artificial Sequence: Synthetic oligonucleotide
gcuaugaggaugcugcuau

SEQ ID NO: 809982 - RNA, 19 nt, Artificial Sequence
  Description of Artificial Sequence: Synthetic oligonucleotide
cuuccguccccugcucccg

SEQ ID NO: 809983 - RNA, 19 nt, Artificial Sequence
  Description of Artificial Sequence: Synthetic oligonucleotide
guguuguacauuuggcuuu

SEQ ID NO: 809984 - RNA, 19 nt, Artificial Sequence
  Description of Artificial Sequence: Synthetic oligonucleotide
gguccaugcacaaguauaa

SEQ ID NO: 809985 - RNA, 19 nt, Artificial Sequence
  Description of Artificial Sequence: Synthetic oligonucleotide
caguuaaacugaacuccaa

SEQ ID NO: 809986 - RNA, 19 nt, Artificial Sequence
  Description of Artificial Sequence: Synthetic oligonucleotide
ccuucgauccuccgacccg

SEQ ID NO: 809987 - RNA, 19 nt, Artificial Sequence
  Description of Artificial Sequence: Synthetic oligonucleotide
cguaucagggcguucugug

SEQ ID NO: 809988 - RNA, 19 nt, Artificial Sequence
  Description of Artificial Sequence: Synthetic oligonucleotide
uucccgccggcgcugucga

SEQ ID NO: 809989 - RNA, 19 nt, Artificial Sequence
  Description of Artificial Sequence: Synthetic oligonucleotide
cugucgacacuucccucuc

SEQ ID NO: 809990 - RNA, 19 nt, Artificial Sequence
  Description of Artificial Sequence: Synthetic oligonucleotide
cccgacgggagcuuuuccc

SEQ ID NO: 809991 - RNA, 19 nt, Artificial Sequence
  Description of Artificial Sequence: Synthetic oligonucleotide
gugcgaccccgccacacug

SEQ ID NO: 809992 - RNA, 19 nt, Artificial Sequence
  Description of Artificial Sequence: Synthetic oligonucleotide
auaguuuaucgaagucgau

SEQ ID NO: 809993 - RNA, 19 nt, Artificial Sequence
  Description of Artificial Sequence: Synthetic oligonucleotide
ugcugcuaucccugcuaaa

SEQ ID NO: 809994 - RNA, 19 nt, Artificial Sequence
  Description of Artificial Sequence: Synthetic oligonucleotide
ccacaccuccaaauauugc

SEQ ID NO: 809995 - RNA, 19 nt, Artificial Sequence
  Description of Artificial Sequence: Synthetic oligonucleotide
ccauagaaaaccucaugua

SEQ ID NO: 809996 - RNA, 19 nt, Artificial Sequence
  Description of Artificial Sequence: Synthetic oligonucleotide
caucguuaugggauuaauu

SEQ ID NO: 809997 - RNA, 19 nt, Artificial Sequence
  Description of Artificial Sequence: Synthetic oligonucleotide
gccaacauagugcuuuaua

SEQ ID NO: 809998 - RNA, 19 nt, Artificial Sequence
  Description of Artificial Sequence: Synthetic oligonucleotide
agcuaugaggaugcugcua

SEQ ID NO: 809999 - RNA, 19 nt, Artificial Sequence
  Description of Artificial Sequence: Synthetic oligonucleotide
cucccuccacgguucucgc

SEQ ID NO: 810000 - RNA, 19 nt, Artificial Sequence
  Description of Artificial Sequence: Synthetic oligonucleotide
cgaucccaacgccaaaugc

SEQ ID NO: 810001 - RNA, 19 nt, Artificial Sequence
  Description of Artificial Sequence: Synthetic oligonucleotide
gcacuuugcacugaggcgu

SEQ ID NO: 810002 - RNA, 19 nt, Artificial Sequence
  Description of Artificial Sequence: Synthetic oligonucleotide
ccacaagcgugucugucug

SEQ ID NO: 810003 - RNA, 19 nt, Artificial Sequence
  Description of Artificial Sequence: Synthetic oligonucleotide
ggcacucauauaagguaac

SEQ ID NO: 810004 - RNA, 19 nt, Artificial Sequence
  Description of Artificial Sequence: Synthetic oligonucleotide
auagguccaugcacaagua

SEQ ID NO: 810005 - RNA, 19 nt, Artificial Sequence
  Description of Artificial Sequence: Synthetic oligonucleotide
guccccugcucccgacggg

SEQ ID NO: 810006 - RNA, 19 nt, Artificial Sequence
  Description of Artificial Sequence: Synthetic oligonucleotide
ccaaccugauugcccaaug

SEQ ID NO: 810007 - RNA, 19 nt, Artificial Sequence
  Description of Artificial Sequence: Synthetic oligonucleotide
uucucgcgcccagccgccg

SEQ ID NO: 810008 - RNA, 19 nt, Artificial Sequence
  Description of Artificial Sequence: Synthetic oligonucleotide
cuuuucccgccguccucuc

SEQ ID NO: 810009 - RNA, 19 nt, Artificial Sequence
  Description of Artificial Sequence: Synthetic oligonucleotide
cuccacgguucucgcgccc

SEQ ID NO: 810010 - RNA, 19 nt, Artificial Sequence
  Description of Artificial Sequence: Synthetic oligonucleotide
caaaucgcccaagaauagu

SEQ ID NO: 810011 - RNA, 19 nt, Artificial Sequence
  Description of Artificial Sequence: Synthetic oligonucleotide
ugccaaccugauugcccaa

SEQ ID NO: 810012 - RNA, 19 nt, Artificial Sequence
  Description of Artificial Sequence: Synthetic oligonucleotide
cgacacuucccucucggac

SEQ ID NO: 810013 - RNA, 19 nt, Artificial Sequence
  Description of Artificial Sequence: Synthetic oligonucleotide
ccuagagaagaggcggaac

SEQ ID NO: 810014 - RNA, 19 nt, Artificial Sequence
  Description of Artificial Sequence: Synthetic oligonucleotide
guucucgcgcccagccgcc

SEQ ID NO: 810015 - RNA, 19 nt, Artificial Sequence
  Description of Artificial Sequence: Synthetic oligonucleotide
cucgcgcccagccgccgag

SEQ ID NO: 810016 - RNA, 19 nt, Artificial Sequence
  Description of Artificial Sequence: Synthetic oligonucleotide
agggcgcgcgcgcgcgcgc

SEQ ID NO: 810017 - RNA, 19 nt, Artificial Sequence
  Description of Artificial Sequence: Synthetic oligonucleotide
ggcggaacucaaagggcug

SEQ ID NO: 810018 - RNA, 19 nt, Artificial Sequence
  Description of Artificial Sequence: Synthetic oligonucleotide
gccucuagacccagcaaca

SEQ ID NO: 810019 - RNA, 19 nt, Artificial Sequence
  Description of Artificial Sequence: Synthetic oligonucleotide
ggaacucaaagggcugcuc

SEQ ID NO: 810020 - RNA, 19 nt, Artificial Sequence
  Description of Artificial Sequence: Synthetic oligonucleotide
cacgguucucgcgcccagc

SEQ ID NO: 810021 - RNA, 19 nt, Artificial Sequence
  Description of Artificial Sequence: Synthetic oligonucleotide
caaagacguuucguccgca

SEQ ID NO: 810022 - RNA, 19 nt, Artificial Sequence
  Description of Artificial Sequence: Synthetic oligonucleotide
cucccgacgggagcuuuuc

SEQ ID NO: 810023 - RNA, 19 nt, Artificial Sequence
  Description of Artificial Sequence: Synthetic oligonucleotide
ugcgugcgaccccgccaca

SEQ ID NO: 810024 - RNA, 19 nt, Artificial Sequence
  Description of Artificial Sequence: Synthetic oligonucleotide
gggcaggauuccuuacguc

SEQ ID NO: 810025 - RNA, 19 nt, Artificial Sequence
  Description of Artificial Sequence: Synthetic oligonucleotide
gugccacucucgauacuga

SEQ ID NO: 810026 - RNA, 19 nt, Artificial Sequence
  Description of Artificial Sequence: Synthetic oligonucleotide
cugcuuccguccccugcuc

SEQ ID NO: 810027 - RNA, 19 nt, Artificial Sequence
  Description of Artificial Sequence: Synthetic oligonucleotide
cucucgauacugacagcau

SEQ ID NO: 810028 - RNA, 19 nt, Artificial Sequence
  Description of Artificial Sequence: Synthetic oligonucleotide
gaggcgggcgugcgugcga

SEQ ID NO: 810029 - RNA, 19 nt, Artificial Sequence
  Description of Artificial Sequence: Synthetic oligonucleotide
gggcgugcgugcgaccccg

SEQ ID NO: 810030 - RNA, 19 nt, Artificial Sequence
  Description of Artificial Sequence: Synthetic oligonucleotide
uaggcguaucagggcguuc

SEQ ID NO: 810031 - RNA, 19 nt, Artificial Sequence
  Description of Artificial Sequence: Synthetic oligonucleotide
agacagcuaugaggaugcu

SEQ ID NO: 810032 - RNA, 19 nt, Artificial Sequence
  Description of Artificial Sequence: Synthetic oligonucleotide
ucgcgcccagccgccgagg

SEQ ID NO: 810033 - RNA, 19 nt, Artificial Sequence
  Description of Artificial Sequence: Synthetic oligonucleotide
ccuccacgguucucgcgcc

SEQ ID NO: 810034 - RNA, 19 nt, Artificial Sequence
  Description of Artificial Sequence: Synthetic oligonucleotide
guagaggguggcugguguu

SEQ ID NO: 810035 - RNA, 19 nt, Artificial Sequence
  Description of Artificial Sequence: Synthetic oligonucleotide
cccgccacacugcugaaaa

SEQ ID NO: 810036 - RNA, 19 nt, Artificial Sequence
  Description of Artificial Sequence: Synthetic oligonucleotide
cgacgggagcuuuucccgc

SEQ ID NO: 810037 - RNA, 19 nt, Artificial Sequence
  Description of Artificial Sequence: Synthetic oligonucleotide
cguccccugcucccgacgg

SEQ ID NO: 810038 - RNA, 19 nt, Artificial Sequence
  Description of Artificial Sequence: Synthetic oligonucleotide
caacgccaaaugcuggcau

SEQ ID NO: 810039 - RNA, 19 nt, Artificial Sequence
  Description of Artificial Sequence: Synthetic oligonucleotide
aggcgucggguccgcggcu

SEQ ID NO: 810040 - RNA, 19 nt, Artificial Sequence
  Description of Artificial Sequence: Synthetic oligonucleotide
cguccucuccgcacuuugc

SEQ ID NO: 810041 - RNA, 19 nt, Artificial Sequence
  Description of Artificial Sequence: Synthetic oligonucleotide
gcacucauauaagguaacu

SEQ ID NO: 810042 - RNA, 19 nt, Artificial Sequence
  Description of Artificial Sequence: Synthetic oligonucleotide
ccguccucuccgcacuuug

SEQ ID NO: 810043 - RNA, 19 nt, Artificial Sequence
  Description of Artificial Sequence: Synthetic oligonucleotide
gccgaggcgggcgugcgug

SEQ ID NO: 810044 - RNA, 19 nt, Artificial Sequence
  Description of Artificial Sequence: Synthetic oligonucleotide
ccgccacacugcugaaaag

SEQ ID NO: 810045 - RNA, 19 nt, Artificial Sequence
  Description of Artificial Sequence: Synthetic oligonucleotide
ccggguugcuguucucguc

SEQ ID NO: 810046 - RNA, 19 nt, Artificial Sequence
  Description of Artificial Sequence: Synthetic oligonucleotide
gcgcccagccgccgaggcg

SEQ ID NO: 810047 - RNA, 19 nt, Artificial Sequence
  Description of Artificial Sequence: Synthetic oligonucleotide
cauagucguaaagcaugau

SEQ ID NO: 810048 - RNA, 19 nt, Artificial Sequence
  Description of Artificial Sequence: Synthetic oligonucleotide
ccucuccgcacuuugcacu

SEQ ID NO: 810049 - RNA, 19 nt, Artificial Sequence
  Description of Artificial Sequence: Synthetic oligonucleotide
ccugcuaaagcugguuugu

SEQ ID NO: 810050 - RNA, 19 nt, Artificial Sequence
  Description of Artificial Sequence: Synthetic oligonucleotide
cugcaucguuaugggauua

SEQ ID NO: 810051 - RNA, 19 nt, Artificial Sequence
  Description of Artificial Sequence: Synthetic oligonucleotide
ccaacgccaaaugcuggca

SEQ ID NO: 810052 - RNA, 19 nt, Artificial Sequence
  Description of Artificial Sequence: Synthetic oligonucleotide
gccuagagaagaggcggaa

SEQ ID NO: 810053 - RNA, 19 nt, Artificial Sequence
  Description of Artificial Sequence: Synthetic oligonucleotide
gcgugcgugcgaccccgcc

SEQ ID NO: 810054 - RNA, 19 nt, Artificial Sequence
  Description of Artificial Sequence: Synthetic oligonucleotide
guaggcguaucagggcguu

SEQ ID NO: 810055 - RNA, 19 nt, Artificial Sequence
  Description of Artificial Sequence: Synthetic oligonucleotide
ccgccucccuccacgguuc

SEQ ID NO: 810056 - RNA, 19 nt, Artificial Sequence
  Description of Artificial Sequence: Synthetic oligonucleotide
cguaaagucugagcaggaa

SEQ ID NO: 810057 - RNA, 19 nt, Artificial Sequence
  Description of Artificial Sequence: Synthetic oligonucleotide
gcaucguuaugggauuaau

SEQ ID NO: 810058 - RNA, 19 nt, Artificial Sequence
  Description of Artificial Sequence: Synthetic oligonucleotide
ggucucguggguggaauuu

SEQ ID NO: 810059 - RNA, 19 nt, Artificial Sequence
  Description of Artificial Sequence: Synthetic oligonucleotide
cagggcguucuguguuugu

SEQ ID NO: 810060 - RNA, 19 nt, Artificial Sequence
  Description of Artificial Sequence: Synthetic oligonucleotide
gcgugcgaccccgccacac

SEQ ID NO: 810061 - RNA, 19 nt, Artificial Sequence
  Description of Artificial Sequence: Synthetic oligonucleotide
guuguacauuuggcuuuau

SEQ ID NO: 810062 - RNA, 19 nt, Artificial Sequence
  Description of Artificial Sequence: Synthetic oligonucleotide
cggcgcugucgacacuucc

SEQ ID NO: 810063 - RNA, 19 nt, Artificial Sequence
  Description of Artificial Sequence: Synthetic oligonucleotide
ccgaggcgggcgugcgugc

SEQ ID NO: 810064 - RNA, 19 nt, Artificial Sequence
  Description of Artificial Sequence: Synthetic oligonucleotide
cgccuagagaagaggcgga

SEQ ID NO: 810065 - RNA, 19 nt, Artificial Sequence
  Description of Artificial Sequence: Synthetic oligonucleotide
gcguaucagggcguucugu

SEQ ID NO: 810066 - RNA, 19 nt, Artificial Sequence
  Description of Artificial Sequence: Synthetic oligonucleotide
cgugcgugcgaccccgcca

SEQ ID NO: 810067 - RNA, 19 nt, Artificial Sequence
  Description of Artificial Sequence: Synthetic oligonucleotide
gguccgcggcucagagggc

SEQ ID NO: 810068 - RNA, 19 nt, Artificial Sequence
  Description of Artificial Sequence: Synthetic oligonucleotide
gcgcgcgcgcgcccucccg

SEQ ID NO: 810069 - RNA, 19 nt, Artificial Sequence
  Description of Artificial Sequence: Synthetic oligonucleotide
gcgaccccgccacacugcu

SEQ ID NO: 810070 - RNA, 19 nt, Artificial Sequence
  Description of Artificial Sequence: Synthetic oligonucleotide
cgaggcgggcgugcgugcg

SEQ ID NO: 810071 - RNA, 19 nt, Artificial Sequence
  Description of Artificial Sequence: Synthetic oligonucleotide
cggacauauuccuccgccu

SEQ ID NO: 810072 - RNA, 19 nt, Artificial Sequence
  Description of Artificial Sequence: Synthetic oligonucleotide
ggacugcaauaaccggauu

SEQ ID NO: 810073 - RNA, 19 nt, Artificial Sequence
  Description of Artificial Sequence: Synthetic oligonucleotide
ccggcgcugucgacacuuc

SEQ ID NO: 810074 - RNA, 19 nt, Artificial Sequence
  Description of Artificial Sequence: Synthetic oligonucleotide
ggcgcgcgcgcgcgcgccc

SEQ ID NO: 810075 - RNA, 19 nt, Artificial Sequence
  Description of Artificial Sequence: Synthetic oligonucleotide
gcgucggguccgcggcuca

SEQ ID NO: 810076 - RNA, 19 nt, Artificial Sequence
  Description of Artificial Sequence: Synthetic oligonucleotide
ggccaacauagugcuuuau

SEQ ID NO: 810077 - RNA, 19 nt, Artificial Sequence
  Description of Artificial Sequence: Synthetic oligonucleotide
cgggcgugcgugcgacccc

SEQ ID NO: 810078 - RNA, 19 nt, Artificial Sequence
  Description of Artificial Sequence: Synthetic oligonucleotide
ggcgugcgugcgaccccgc

SEQ ID NO: 810079 - RNA, 19 nt, Artificial Sequence
  Description of Artificial Sequence: Synthetic oligonucleotide
gggcgcgcgcgcgcgcgcc

SEQ ID NO: 810080 - RNA, 19 nt, Artificial Sequence
  Description of Artificial Sequence: Synthetic oligonucleotide
cgaccccgccacacugcug

SEQ ID NO: 810081 - RNA, 19 nt, Artificial Sequence
  Description of Artificial Sequence: Synthetic oligonucleotide
cacggcuuccuggcugcuu

SEQ ID NO: 810082 - RNA, 19 nt, Artificial Sequence
  Description of Artificial Sequence: Synthetic oligonucleotide
cacuucccucucggacaua

SEQ ID NO: 810083 - RNA, 19 nt, Artificial Sequence
  Description of Artificial Sequence: Synthetic oligonucleotide
gcgcgcgcgcgcgcccucc

SEQ ID NO: 810084 - RNA, 19 nt, Artificial Sequence
  Description of Artificial Sequence: Synthetic oligonucleotide
cgcgcgcgcgcgcccuccc

SEQ ID NO: 810085 - RNA, 19 nt, Artificial Sequence
  Description of Artificial Sequence: Synthetic oligonucleotide
ccccgccacacugcugaaa

SEQ ID NO: 810086 - RNA, 19 nt, Artificial Sequence
  Description of Artificial Sequence: Synthetic oligonucleotide
gcucccgacgggagcuuuu

SEQ ID NO: 810087 - RNA, 19 nt, Artificial Sequence
  Description of Artificial Sequence: Synthetic oligonucleotide
cugcucccgacgggagcuu

SEQ ID NO: 810088 - RNA, 19 nt, Artificial Sequence
  Description of Artificial Sequence: Synthetic oligonucleotide
gcgcgcccucccgcacggc

SEQ ID NO: 810089 - RNA, 19 nt, Artificial Sequence
  Description of Artificial Sequence: Synthetic oligonucleotide
cgcgcgcgcgcgcgcccuc

SEQ ID NO: 810090 - RNA, 19 nt, Artificial Sequence
  Description of Artificial Sequence: Synthetic oligonucleotide
gcgcgcgcgcgcgcgcccu

SEQ ID NO: 810091 - RNA, 19 nt, Artificial Sequence
  Description of Artificial Sequence: Synthetic oligonucleotide
ccggugcauucgguguauu

SEQ ID NO: 810092 - RNA, 19 nt, Artificial Sequence
  Description of Artificial Sequence: Synthetic oligonucleotide
cguccgcaauuggcucaau

SEQ ID NO: 810093 - RNA, 19 nt, Artificial Sequence
  Description of Artificial Sequence: Synthetic oligonucleotide
cgccggcgcugucgacacu

SEQ ID NO: 810094 - RNA, 19 nt, Artificial Sequence
  Description of Artificial Sequence: Synthetic oligonucleotide
agauauuagugauagaauc

SEQ ID NO: 810095 - RNA, 19 nt, Artificial Sequence
  Description of Artificial Sequence: Synthetic oligonucleotide
aaguuuaacccuccggucc

SEQ ID NO: 810096 - RNA, 19 nt, Artificial Sequence
  Description of Artificial Sequence: Synthetic oligonucleotide
agcacuaucaaauucaaug

SEQ ID NO: 810097 - RNA, 19 nt, Artificial Sequence
  Description of Artificial Sequence: Synthetic oligonucleotide
aaagauauuagugauagaa

SEQ ID NO: 810098 - RNA, 19 nt, Artificial Sequence
  Description of Artificial Sequence: Synthetic oligonucleotide
ucuucuagaucucagagac

SEQ ID NO: 810099 - RNA, 19 nt, Artificial Sequence
  Description of Artificial Sequence: Synthetic oligonucleotide
ugcagagucaauaugauuc

SEQ ID NO: 810100 - RNA, 19 nt, Artificial Sequence
  Description of Artificial Sequence: Synthetic oligonucleotide
uuucuugucaaaaugucca

SEQ ID NO: 810101 - RNA, 19 nt, Artificial Sequence
  Description of Artificial Sequence: Synthetic oligonucleotide
aaucaaguucuguugggac

SEQ ID NO: 810102 - RNA, 19 nt, Artificial Sequence
  Description of Artificial Sequence: Synthetic oligonucleotide
ucgguaaucauccacaguc

SEQ ID NO: 810103 - RNA, 19 nt, Artificial Sequence
  Description of Artificial Sequence: Synthetic oligonucleotide
aaaguuuaacccuccgguc

SEQ ID NO: 810104 - RNA, 19 nt, Artificial Sequence
  Description of Artificial Sequence: Synthetic oligonucleotide
agcacuuucccacuguggc

SEQ ID NO: 810105 - RNA, 19 nt, Artificial Sequence
  Description of Artificial Sequence: Synthetic oligonucleotide
ugugcaucaggccaaaaca

SEQ ID NO: 810106 - RNA, 19 nt, Artificial Sequence
  Description of Artificial Sequence: Synthetic oligonucleotide
aaauaaaagaugugcccug

SEQ ID NO: 810107 - RNA, 19 nt, Artificial Sequence
  Description of Artificial Sequence: Synthetic oligonucleotide
gauauuagugauagaaucc

SEQ ID NO: 810108 - RNA, 19 nt, Artificial Sequence
  Description of Artificial Sequence: Synthetic oligonucleotide
ucucccaaagauauuagug

SEQ ID NO: 810109 - RNA, 19 nt, Artificial Sequence
  Description of Artificial Sequence: Synthetic oligonucleotide
aguucacacacacacaaag

SEQ ID NO: 810110 - RNA, 19 nt, Artificial Sequence
  Description of Artificial Sequence: Synthetic oligonucleotide
auaaagagaacccucggcu

SEQ ID NO: 810111 - RNA, 19 nt, Artificial Sequence
  Description of Artificial Sequence: Synthetic oligonucleotide
uucacacacacacaaagcu

SEQ ID NO: 810112 - RNA, 19 nt, Artificial Sequence
  Description of Artificial Sequence: Synthetic oligonucleotide
uuuaccggaagcaggauga

SEQ ID NO: 810113 - RNA, 19 nt, Artificial Sequence
  Description of Artificial Sequence: Synthetic oligonucleotide
aaaccagcuccacccaucc

SEQ ID NO: 810114 - RNA, 19 nt, Artificial Sequence
  Description of Artificial Sequence: Synthetic oligonucleotide
gaauccaaaccucugcuag

SEQ ID NO: 810115 - RNA, 19 nt, Artificial Sequence
  Description of Artificial Sequence: Synthetic oligonucleotide
auuacugccagccagggaa

SEQ ID NO: 810116 - RNA, 19 nt, Artificial Sequence
  Description of Artificial Sequence: Synthetic oligonucleotide
uuugucgacacugacaaca

SEQ ID NO: 810117 - RNA, 19 nt, Artificial Sequence
  Description of Artificial Sequence: Synthetic oligonucleotide
aaagaugugcccuggccag

SEQ ID NO: 810118 - RNA, 19 nt, Artificial Sequence
  Description of Artificial Sequence: Synthetic oligonucleotide
gaccguauaucccagaaac

SEQ ID NO: 810119 - RNA, 19 nt, Artificial Sequence
  Description of Artificial Sequence: Synthetic oligonucleotide
uaaucgguaaucauccaca

SEQ ID NO: 810120 - RNA, 19 nt, Artificial Sequence
  Description of Artificial Sequence: Synthetic oligonucleotide
gguaaaugaccccagaaag

SEQ ID NO: 810121 - RNA, 19 nt, Artificial Sequence
  Description of Artificial Sequence: Synthetic oligonucleotide
ugaguucacacacacacaa

SEQ ID NO: 810122 - RNA, 19 nt, Artificial Sequence
  Description of Artificial Sequence: Synthetic oligonucleotide
uuagugauagaauccagaa

SEQ ID NO: 810123 - RNA, 19 nt, Artificial Sequence
  Description of Artificial Sequence: Synthetic oligonucleotide
uuaaucgguaaucauccac

SEQ ID NO: 810124 - RNA, 19 nt, Artificial Sequence
  Description of Artificial Sequence: Synthetic oligonucleotide
ucuguugggacacauaauu

SEQ ID NO: 810125 - RNA, 19 nt, Artificial Sequence
  Description of Artificial Sequence: Synthetic oligonucleotide
aagagguaagcuccagcac

SEQ ID NO: 810126 - RNA, 19 nt, Artificial Sequence
  Description of Artificial Sequence: Synthetic oligonucleotide
ucagcaacgagaccagucc

SEQ ID NO: 810127 - RNA, 19 nt, Artificial Sequence
  Description of Artificial Sequence: Synthetic oligonucleotide
auuacacauugcucggugc

SEQ ID NO: 810128 - RNA, 19 nt, Artificial Sequence
  Description of Artificial Sequence: Synthetic oligonucleotide
gugaucugaagucucaucc

SEQ ID NO: 810129 - RNA, 19 nt, Artificial Sequence
  Description of Artificial Sequence: Synthetic oligonucleotide
agaugcagguuucagcaac

SEQ ID NO: 810130 - RNA, 19 nt, Artificial Sequence
  Description of Artificial Sequence: Synthetic oligonucleotide
cuuuaugcagacuuugcug

SEQ ID NO: 810131 - RNA, 19 nt, Artificial Sequence
  Description of Artificial Sequence: Synthetic oligonucleotide
aguuaguaguguuucccac

SEQ ID NO: 810132 - RNA, 19 nt, Artificial Sequence
  Description of Artificial Sequence: Synthetic oligonucleotide
cucggguccagucagagcc

SEQ ID NO: 810133 - RNA, 19 nt, Artificial Sequence
  Description of Artificial Sequence: Synthetic oligonucleotide
aaagcuauggggaaaugcu

SEQ ID NO: 810134 - RNA, 19 nt, Artificial Sequence
  Description of Artificial Sequence: Synthetic oligonucleotide
agagucgcuuaguagcugc

SEQ ID NO: 810135 - RNA, 19 nt, Artificial Sequence
  Description of Artificial Sequence: Synthetic oligonucleotide
aucgaagacacacaaggca

SEQ ID NO: 810136 - RNA, 19 nt, Artificial Sequence
  Description of Artificial Sequence: Synthetic oligonucleotide
gaugcaucaagguuguguc

SEQ ID NO: 810137 - RNA, 19 nt, Artificial Sequence
  Description of Artificial Sequence: Synthetic oligonucleotide
augugcaucgaagacacac

SEQ ID NO: 810138 - RNA, 19 nt, Artificial Sequence
  Description of Artificial Sequence: Synthetic oligonucleotide
uagugauagaauccagaag

SEQ ID NO: 810139 - RNA, 19 nt, Artificial Sequence
  Description of Artificial Sequence: Synthetic oligonucleotide
aaagagaacccucggcuga

SEQ ID NO: 810140 - RNA, 19 nt, Artificial Sequence
  Description of Artificial Sequence: Synthetic oligonucleotide
accgcauuuauggaggagc

SEQ ID NO: 810141 - RNA, 19 nt, Artificial Sequence
  Description of Artificial Sequence: Synthetic oligonucleotide
ggugaguucacacacacac

SEQ ID NO: 810142 - RNA, 19 nt, Artificial Sequence
  Description of Artificial Sequence: Synthetic oligonucleotide
cauaaagagaacccucggc

SEQ ID NO: 810143 - RNA, 19 nt, Artificial Sequence
  Description of Artificial Sequence: Synthetic oligonucleotide
aguguuucccacucaaaug

SEQ ID NO: 810144 - RNA, 19 nt, Artificial Sequence
  Description of Artificial Sequence: Synthetic oligonucleotide
acucucacaucuuuaccgg

SEQ ID NO: 810145 - RNA, 19 nt, Artificial Sequence
  Description of Artificial Sequence: Synthetic oligonucleotide
acauaaagagaacccucgg

SEQ ID NO: 810146 - RNA, 19 nt, Artificial Sequence
  Description of Artificial Sequence: Synthetic oligonucleotide
ucaacacaagcucucuggc

SEQ ID NO: 810147 - RNA, 19 nt, Artificial Sequence
  Description of Artificial Sequence: Synthetic oligonucleotide
aucauuugaagcugcuaag

SEQ ID NO: 810148 - RNA, 19 nt, Artificial Sequence
  Description of Artificial Sequence: Synthetic oligonucleotide
uuacacauugcucggugca

SEQ ID NO: 810149 - RNA, 19 nt, Artificial Sequence
  Description of Artificial Sequence: Synthetic oligonucleotide
caucuuuaccggaagcagg

SEQ ID NO: 810150 - RNA, 19 nt, Artificial Sequence
  Description of Artificial Sequence: Synthetic oligonucleotide
agaccuuaagucaaaguuc

SEQ ID NO: 810151 - RNA, 19 nt, Artificial Sequence
  Description of Artificial Sequence: Synthetic oligonucleotide
agaaacgaauuuucuuguc

SEQ ID NO: 810152 - RNA, 19 nt, Artificial Sequence
  Description of Artificial Sequence: Synthetic oligonucleotide
ccuuaaucgguaaucaucc

SEQ ID NO: 810153 - RNA, 19 nt, Artificial Sequence
  Description of Artificial Sequence: Synthetic oligonucleotide
gguauggaaggucaguuag

SEQ ID NO: 810154 - RNA, 19 nt, Artificial Sequence
  Description of Artificial Sequence: Synthetic oligonucleotide
ucucucgggguuuaagucc

SEQ ID NO: 810155 - RNA, 19 nt, Artificial Sequence
  Description of Artificial Sequence: Synthetic oligonucleotide
auuuauggaggagcugugc

SEQ ID NO: 810156 - RNA, 19 nt, Artificial Sequence
  Description of Artificial Sequence: Synthetic oligonucleotide
cucauuacacauugcucgg

SEQ ID NO: 810157 - RNA, 19 nt, Artificial Sequence
  Description of Artificial Sequence: Synthetic oligonucleotide
uuugcugcguagaucccag

SEQ ID NO: 810158 - RNA, 19 nt, Artificial Sequence
  Description of Artificial Sequence: Synthetic oligonucleotide
uaaucauccacaguccaga

SEQ ID NO: 810159 - RNA, 19 nt, Artificial Sequence
  Description of Artificial Sequence: Synthetic oligonucleotide
uggccagcgaauuucaacu

SEQ ID NO: 810160 - RNA, 19 nt, Artificial Sequence
  Description of Artificial Sequence: Synthetic oligonucleotide
ggaccacacacucugaccg

SEQ ID NO: 810161 - RNA, 19 nt, Artificial Sequence
  Description of Artificial Sequence: Synthetic oligonucleotide
cagguuucagcaacgagac

SEQ ID NO: 810162 - RNA, 19 nt, Artificial Sequence
  Description of Artificial Sequence: Synthetic oligonucleotide
gacuuccugagacuauccg

SEQ ID NO: 810163 - RNA, 19 nt, Artificial Sequence
  Description of Artificial Sequence: Synthetic oligonucleotide
auuucaacucccaucaaca

SEQ ID NO: 810164 - RNA, 19 nt, Artificial Sequence
  Description of Artificial Sequence: Synthetic oligonucleotide
ucauuugaagcugcuaaga

SEQ ID NO: 810165 - RNA, 19 nt, Artificial Sequence
  Description of Artificial Sequence: Synthetic oligonucleotide
ugcugcguagaucccagag

SEQ ID NO: 810166 - RNA, 19 nt, Artificial Sequence
  Description of Artificial Sequence: Synthetic oligonucleotide
ugugcaucgaagacacaca

SEQ ID NO: 810167 - RNA, 19 nt, Artificial Sequence
  Description of Artificial Sequence: Synthetic oligonucleotide
cugcauuugguuuccacug

SEQ ID NO: 810168 - RNA, 19 nt, Artificial Sequence
  Description of Artificial Sequence: Synthetic oligonucleotide
ccagaaacgaauuuucuug

SEQ ID NO: 810169 - RNA, 19 nt, Artificial Sequence
  Description of Artificial Sequence: Synthetic oligonucleotide
caacaugcaugcccgaggg

SEQ ID NO: 810170 - RNA, 19 nt, Artificial Sequence
  Description of Artificial Sequence: Synthetic oligonucleotide
ucucguuuucggcauugag

SEQ ID NO: 810171 - RNA, 19 nt, Artificial Sequence
  Description of Artificial Sequence: Synthetic oligonucleotide
caauaugauucaguguugc

SEQ ID NO: 810172 - RNA, 19 nt, Artificial Sequence
  Description of Artificial Sequence: Synthetic oligonucleotide
ugaucugaagucucaucca

SEQ ID NO: 810173 - RNA, 19 nt, Artificial Sequence
  Description of Artificial Sequence: Synthetic oligonucleotide
acucugaccguauauccca

SEQ ID NO: 810174 - RNA, 19 nt, Artificial Sequence
  Description of Artificial Sequence: Synthetic oligonucleotide
ugcguugacuuccccauca

SEQ ID NO: 810175 - RNA, 19 nt, Artificial Sequence
  Description of Artificial Sequence: Synthetic oligonucleotide
cucggugcaaacaauguca

SEQ ID NO: 810176 - RNA, 19 nt, Artificial Sequence
  Description of Artificial Sequence: Synthetic oligonucleotide
cuuaguagcugcucugcug

SEQ ID NO: 810177 - RNA, 19 nt, Artificial Sequence
  Description of Artificial Sequence: Synthetic oligonucleotide
ucccaaagauauuagugau

SEQ ID NO: 810178 - RNA, 19 nt, Artificial Sequence
  Description of Artificial Sequence: Synthetic oligonucleotide
uguccggaggucaaugacu

SEQ ID NO: 810179 - RNA, 19 nt, Artificial Sequence
  Description of Artificial Sequence: Synthetic oligonucleotide
gagaccuuaagucaaaguu

SEQ ID NO: 810180 - RNA, 19 nt, Artificial Sequence
  Description of Artificial Sequence: Synthetic oligonucleotide
cuaagagguaagcuccagc

SEQ ID NO: 810181 - RNA, 19 nt, Artificial Sequence
  Description of Artificial Sequence: Synthetic oligonucleotide
ucaucacgagagcagcuca

SEQ ID NO: 810182 - RNA, 19 nt, Artificial Sequence
  Description of Artificial Sequence: Synthetic oligonucleotide
ugcgagagucgcuuaguag

SEQ ID NO: 810183 - RNA, 19 nt, Artificial Sequence
  Description of Artificial Sequence: Synthetic oligonucleotide
auuuaucuccgaauacuuc

SEQ ID NO: 810184 - RNA, 19 nt, Artificial Sequence
  Description of Artificial Sequence: Synthetic oligonucleotide
ugugagcacacuccagaca

SEQ ID NO: 810185 - RNA, 19 nt, Artificial Sequence
  Description of Artificial Sequence: Synthetic oligonucleotide
uggguaaaugaccccagaa

SEQ ID NO: 810186 - RNA, 19 nt, Artificial Sequence
  Description of Artificial Sequence: Synthetic oligonucleotide
ugcaucgaagacacacaag

SEQ ID NO: 810187 - RNA, 19 nt, Artificial Sequence
  Description of Artificial Sequence: Synthetic oligonucleotide
guucuguugggacacauaa

SEQ ID NO: 810188 - RNA, 19 nt, Artificial Sequence
  Description of Artificial Sequence: Synthetic oligonucleotide
aaaugcagacaagaaucca

SEQ ID NO: 810189 - RNA, 19 nt, Artificial Sequence
  Description of Artificial Sequence: Synthetic oligonucleotide
aggugcacugaaugucugc

SEQ ID NO: 810190 - RNA, 19 nt, Artificial Sequence
  Description of Artificial Sequence: Synthetic oligonucleotide
uuaacccuccgguccaugc

SEQ ID NO: 810191 - RNA, 19 nt, Artificial Sequence
  Description of Artificial Sequence: Synthetic oligonucleotide
aacaugcaugcccgagggg

SEQ ID NO: 810192 - RNA, 19 nt, Artificial Sequence
  Description of Artificial Sequence: Synthetic oligonucleotide
gaugcagguuucagcaacg

SEQ ID NO: 810193 - RNA, 19 nt, Artificial Sequence
  Description of Artificial Sequence: Synthetic oligonucleotide
aucaggccaaaacagacuu

SEQ ID NO: 810194 - RNA, 19 nt, Artificial Sequence
  Description of Artificial Sequence: Synthetic oligonucleotide
ucacacacacacaaagcua

SEQ ID NO: 810195 - RNA, 19 nt, Artificial Sequence
  Description of Artificial Sequence: Synthetic oligonucleotide
aucaugugcaucgaagaca

SEQ ID NO: 810196 - RNA, 19 nt, Artificial Sequence
  Description of Artificial Sequence: Synthetic oligonucleotide
aguuuaacccuccggucca

SEQ ID NO: 810197 - RNA, 19 nt, Artificial Sequence
  Description of Artificial Sequence: Synthetic oligonucleotide
cuuuaccggaagcaggaug

SEQ ID NO: 810198 - RNA, 19 nt, Artificial Sequence
  Description of Artificial Sequence: Synthetic oligonucleotide
cacauuuaucuccgaauac

SEQ ID NO: 810199 - RNA, 19 nt, Artificial Sequence
  Description of Artificial Sequence: Synthetic oligonucleotide
cauuacacauugcucggug

SEQ ID NO: 810200 - RNA, 19 nt, Artificial Sequence
  Description of Artificial Sequence: Synthetic oligonucleotide
gaagcugcuaagagguaag

SEQ ID NO: 810201 - RNA, 19 nt, Artificial Sequence
  Description of Artificial Sequence: Synthetic oligonucleotide
gcgagagucgcuuaguagc

SEQ ID NO: 810202 - RNA, 19 nt, Artificial Sequence
  Description of Artificial Sequence: Synthetic oligonucleotide
cugcauuacugccagccag

SEQ ID NO: 810203 - RNA, 19 nt, Artificial Sequence
  Description of Artificial Sequence: Synthetic oligonucleotide
uaaccgggagccuggacug

SEQ ID NO: 810204 - RNA, 19 nt, Artificial Sequence
  Description of Artificial Sequence: Synthetic oligonucleotide
cugcuaggcacuugcagag

SEQ ID NO: 810205 - RNA, 19 nt, Artificial Sequence
  Description of Artificial Sequence: Synthetic oligonucleotide
agacaacucggguccaguc

SEQ ID NO: 810206 - RNA, 19 nt, Artificial Sequence
  Description of Artificial Sequence: Synthetic oligonucleotide
ugacuuccugagacuaucc

SEQ ID NO: 810207 - RNA, 19 nt, Artificial Sequence
  Description of Artificial Sequence: Synthetic oligonucleotide
ugaagcugcuaagagguaa

SEQ ID NO: 810208 - RNA, 19 nt, Artificial Sequence
  Description of Artificial Sequence: Synthetic oligonucleotide
agagaccuuaagucaaagu

SEQ ID NO: 810209 - RNA, 19 nt, Artificial Sequence
  Description of Artificial Sequence: Synthetic oligonucleotide
uucucucgggguuuaaguc

SEQ ID NO: 810210 - RNA, 19 nt, Artificial Sequence
  Description of Artificial Sequence: Synthetic oligonucleotide
ucacaugaggacaggcccu

SEQ ID NO: 810211 - RNA, 19 nt, Artificial Sequence
  Description of Artificial Sequence: Synthetic oligonucleotide
uggccaguaaccgggagcc

SEQ ID NO: 810212 - RNA, 19 nt, Artificial Sequence
  Description of Artificial Sequence: Synthetic oligonucleotide
caaaguuuaacccuccggu

SEQ ID NO: 810213 - RNA, 19 nt, Artificial Sequence
  Description of Artificial Sequence: Synthetic oligonucleotide
cuuggguaaaugaccccag

SEQ ID NO: 810214 - RNA, 19 nt, Artificial Sequence
  Description of Artificial Sequence: Synthetic oligonucleotide
ucuccgaauacuucccaaa

SEQ ID NO: 810215 - RNA, 19 nt, Artificial Sequence
  Description of Artificial Sequence: Synthetic oligonucleotide
ugccacguaacugccauca

SEQ ID NO: 810216 - RNA, 19 nt, Artificial Sequence
  Description of Artificial Sequence: Synthetic oligonucleotide
agggcugaagacaacucgg

SEQ ID NO: 810217 - RNA, 19 nt, Artificial Sequence
  Description of Artificial Sequence: Synthetic oligonucleotide
uaucuccgaauacuuccca

SEQ ID NO: 810218 - RNA, 19 nt, Artificial Sequence
  Description of Artificial Sequence: Synthetic oligonucleotide
guaaucauccacaguccag

SEQ ID NO: 810219 - RNA, 19 nt, Artificial Sequence
  Description of Artificial Sequence: Synthetic oligonucleotide
aagcuauggggaaaugcug

SEQ ID NO: 810220 - RNA, 19 nt, Artificial Sequence
  Description of Artificial Sequence: Synthetic oligonucleotide
aacccuccgguccaugccu

SEQ ID NO: 810221 - RNA, 19 nt, Artificial Sequence
  Description of Artificial Sequence: Synthetic oligonucleotide
uaucccagaaacgaauuuu

SEQ ID NO: 810222 - RNA, 19 nt, Artificial Sequence
  Description of Artificial Sequence: Synthetic oligonucleotide
acgaauuuucuugucaaaa

SEQ ID NO: 810223 - RNA, 19 nt, Artificial Sequence
  Description of Artificial Sequence: Synthetic oligonucleotide
uuguccggaggucaaugac

SEQ ID NO: 810224 - RNA, 19 nt, Artificial Sequence
  Description of Artificial Sequence: Synthetic oligonucleotide
guucacacacacacaaagc

SEQ ID NO: 810225 - RNA, 19 nt, Artificial Sequence
  Description of Artificial Sequence: Synthetic oligonucleotide
gacaacaugcaugcccgag

SEQ ID NO: 810226 - RNA, 19 nt, Artificial Sequence
  Description of Artificial Sequence: Synthetic oligonucleotide
uuggguaaaugaccccaga

SEQ ID NO: 810227 - RNA, 19 nt, Artificial Sequence
  Description of Artificial Sequence: Synthetic oligonucleotide
gggacacauaauuaaauaa

SEQ ID NO: 810228 - RNA, 19 nt, Artificial Sequence
  Description of Artificial Sequence: Synthetic oligonucleotide
guuuaaguccagagcagug

SEQ ID NO: 810229 - RNA, 19 nt, Artificial Sequence
  Description of Artificial Sequence: Synthetic oligonucleotide
uauccgagcguuguccagc

SEQ ID NO: 810230 - RNA, 19 nt, Artificial Sequence
  Description of Artificial Sequence: Synthetic oligonucleotide
ugagacuauccgagcguug

SEQ ID NO: 810231 - RNA, 19 nt, Artificial Sequence
  Description of Artificial Sequence: Synthetic oligonucleotide
ugaccguauaucccagaaa

SEQ ID NO: 810232 - RNA, 19 nt, Artificial Sequence
  Description of Artificial Sequence: Synthetic oligonucleotide
acaagaauccaaaccucug

SEQ ID NO: 810233 - RNA, 19 nt, Artificial Sequence
  Description of Artificial Sequence: Synthetic oligonucleotide
ucggugcaaacaaugucau

SEQ ID NO: 810234 - RNA, 19 nt, Artificial Sequence
  Description of Artificial Sequence: Synthetic oligonucleotide
agguuucagcaacgagacc

SEQ ID NO: 810235 - RNA, 19 nt, Artificial Sequence
  Description of Artificial Sequence: Synthetic oligonucleotide
ggucgugacuuccugagac

SEQ ID NO: 810236 - RNA, 19 nt, Artificial Sequence
  Description of Artificial Sequence: Synthetic oligonucleotide
aucuuuaccggaagcagga

SEQ ID NO: 810237 - RNA, 19 nt, Artificial Sequence
  Description of Artificial Sequence: Synthetic oligonucleotide
uuccuuugucgacacugac

SEQ ID NO: 810238 - RNA, 19 nt, Artificial Sequence
  Description of Artificial Sequence: Synthetic oligonucleotide
aguaaccgggagccuggac

SEQ ID NO: 810239 - RNA, 19 nt, Artificial Sequence
  Description of Artificial Sequence: Synthetic oligonucleotide
ugggaggacacaucacccu

SEQ ID NO: 810240 - RNA, 19 nt, Artificial Sequence
  Description of Artificial Sequence: Synthetic oligonucleotide
accguauaucccagaaacg

SEQ ID NO: 810241 - RNA, 19 nt, Artificial Sequence
  Description of Artificial Sequence: Synthetic oligonucleotide
ugcacugcguugacuuccc

SEQ ID NO: 810242 - RNA, 19 nt, Artificial Sequence
  Description of Artificial Sequence: Synthetic oligonucleotide
cagaaagggagugugcauc

SEQ ID NO: 810243 - RNA, 19 nt, Artificial Sequence
  Description of Artificial Sequence: Synthetic oligonucleotide
auuuguccggaggucaaug

SEQ ID NO: 810244 - RNA, 19 nt, Artificial Sequence
  Description of Artificial Sequence: Synthetic oligonucleotide
caucacgagagcagcucag

SEQ ID NO: 810245 - RNA, 19 nt, Artificial Sequence
  Description of Artificial Sequence: Synthetic oligonucleotide
ucgcuuaguagcugcucug

SEQ ID NO: 810246 - RNA, 19 nt, Artificial Sequence
  Description of Artificial Sequence: Synthetic oligonucleotide
ugugcuccccaugagguau

SEQ ID NO: 810247 - RNA, 19 nt, Artificial Sequence
  Description of Artificial Sequence: Synthetic oligonucleotide
cugugagcacacuccagac

SEQ ID NO: 810248 - RNA, 19 nt, Artificial Sequence
  Description of Artificial Sequence: Synthetic oligonucleotide
uucuguugggacacauaau

SEQ ID NO: 810249 - RNA, 19 nt, Artificial Sequence
  Description of Artificial Sequence: Synthetic oligonucleotide
aucacgagagcagcucagg

SEQ ID NO: 810250 - RNA, 19 nt, Artificial Sequence
  Description of Artificial Sequence: Synthetic oligonucleotide
uggaagagacagagcgucu

SEQ ID NO: 810251 - RNA, 19 nt, Artificial Sequence
  Description of Artificial Sequence: Synthetic oligonucleotide
cacuugcagagucaauaug

SEQ ID NO: 810252 - RNA, 19 nt, Artificial Sequence
  Description of Artificial Sequence: Synthetic oligonucleotide
gcgaauuucaacucccauc

SEQ ID NO: 810253 - RNA, 19 nt, Artificial Sequence
  Description of Artificial Sequence: Synthetic oligonucleotide
guaaccgggagccuggacu

SEQ ID NO: 810254 - RNA, 19 nt, Artificial Sequence
  Description of Artificial Sequence: Synthetic oligonucleotide
cacuccagacauaaagaga

SEQ ID NO: 810255 - RNA, 19 nt, Artificial Sequence
  Description of Artificial Sequence: Synthetic oligonucleotide
uguccacucauuacacauu

SEQ ID NO: 810256 - RNA, 19 nt, Artificial Sequence
  Description of Artificial Sequence: Synthetic oligonucleotide
uggggaaaugcuggcagga

SEQ ID NO: 810257 - RNA, 19 nt, Artificial Sequence
  Description of Artificial Sequence: Synthetic oligonucleotide
agcgaauuucaacucccau

SEQ ID NO: 810258 - RNA, 19 nt, Artificial Sequence
  Description of Artificial Sequence: Synthetic oligonucleotide
aucgguaaucauccacagu

SEQ ID NO: 810259 - RNA, 19 nt, Artificial Sequence
  Description of Artificial Sequence: Synthetic oligonucleotide
guuaguaguguuucccacu

SEQ ID NO: 810260 - RNA, 19 nt, Artificial Sequence
  Description of Artificial Sequence: Synthetic oligonucleotide
aguucucucgggguuuaag

SEQ ID NO: 810261 - RNA, 19 nt, Artificial Sequence
  Description of Artificial Sequence: Synthetic oligonucleotide
ucauuacacauugcucggu

SEQ ID NO: 810262 - RNA, 19 nt, Artificial Sequence
  Description of Artificial Sequence: Synthetic oligonucleotide
caguuaguaguguuuccca

SEQ ID NO: 810263 - RNA, 19 nt, Artificial Sequence
  Description of Artificial Sequence: Synthetic oligonucleotide
cauugcucggugcaaacaa

SEQ ID NO: 810264 - RNA, 19 nt, Artificial Sequence
  Description of Artificial Sequence: Synthetic oligonucleotide
cacacucugaccguauauc

SEQ ID NO: 810265 - RNA, 19 nt, Artificial Sequence
  Description of Artificial Sequence: Synthetic oligonucleotide
cgaauuucaacucccauca

SEQ ID NO: 810266 - RNA, 19 nt, Artificial Sequence
  Description of Artificial Sequence: Synthetic oligonucleotide
uugggacucucacaucuuu

SEQ ID NO: 810267 - RNA, 19 nt, Artificial Sequence
  Description of Artificial Sequence: Synthetic oligonucleotide
ucugaccguauaucccaga

SEQ ID NO: 810268 - RNA, 19 nt, Artificial Sequence
  Description of Artificial Sequence: Synthetic oligonucleotide
ugccuuaaucgguaaucau

SEQ ID NO: 810269 - RNA, 19 nt, Artificial Sequence
  Description of Artificial Sequence: Synthetic oligonucleotide
uucucugggaggacacauc

SEQ ID NO: 810270 - RNA, 19 nt, Artificial Sequence
  Description of Artificial Sequence: Synthetic oligonucleotide
gaacuuggcagagagcacu

SEQ ID NO: 810271 - RNA, 19 nt, Artificial Sequence
  Description of Artificial Sequence: Synthetic oligonucleotide
ggaaggucaguuaguagug

SEQ ID NO: 810272 - RNA, 19 nt, Artificial Sequence
  Description of Artificial Sequence: Synthetic oligonucleotide
ugggacucucacaucuuua

SEQ ID NO: 810273 - RNA, 19 nt, Artificial Sequence
  Description of Artificial Sequence: Synthetic oligonucleotide
agugugugccuuaaucggu

SEQ ID NO: 810274 - RNA, 19 nt, Artificial Sequence
  Description of Artificial Sequence: Synthetic oligonucleotide
agucgcuuaguagcugcuc

SEQ ID NO: 810275 - RNA, 19 nt, Artificial Sequence
  Description of Artificial Sequence: Synthetic oligonucleotide
guugggacacauaauuaaa

SEQ ID NO: 810276 - RNA, 19 nt, Artificial Sequence
  Description of Artificial Sequence: Synthetic oligonucleotide
aucuccgaauacuucccaa

SEQ ID NO: 810277 - RNA, 19 nt, Artificial Sequence
  Description of Artificial Sequence: Synthetic oligonucleotide
cagugguugggacucucac

SEQ ID NO: 810278 - RNA, 19 nt, Artificial Sequence
  Description of Artificial Sequence: Synthetic oligonucleotide
ggagacccaauacccagug

SEQ ID NO: 810279 - RNA, 19 nt, Artificial Sequence
  Description of Artificial Sequence: Synthetic oligonucleotide
cacacacacacaaagcuau

SEQ ID NO: 810280 - RNA, 19 nt, Artificial Sequence
  Description of Artificial Sequence: Synthetic oligonucleotide
cccaauacccagugugugg

SEQ ID NO: 810281 - RNA, 19 nt, Artificial Sequence
  Description of Artificial Sequence: Synthetic oligonucleotide
aaguucuguugggacacau

SEQ ID NO: 810282 - RNA, 19 nt, Artificial Sequence
  Description of Artificial Sequence: Synthetic oligonucleotide
cuuaaucgguaaucaucca

SEQ ID NO: 810283 - RNA, 19 nt, Artificial Sequence
  Description of Artificial Sequence: Synthetic oligonucleotide
ccuuugucgacacugacaa

SEQ ID NO: 810284 - RNA, 19 nt, Artificial Sequence
  Description of Artificial Sequence: Synthetic oligonucleotide
gcugcguagaucccagagc

SEQ ID NO: 810285 - RNA, 19 nt, Artificial Sequence
  Description of Artificial Sequence: Synthetic oligonucleotide
cuccaagacagggcugugg

SEQ ID NO: 810286 - RNA, 19 nt, Artificial Sequence
  Description of Artificial Sequence: Synthetic oligonucleotide
cugcguagaucccagagcu

SEQ ID NO: 810287 - RNA, 19 nt, Artificial Sequence
  Description of Artificial Sequence: Synthetic oligonucleotide
acccaauacccagugugug

SEQ ID NO: 810288 - RNA, 19 nt, Artificial Sequence
  Description of Artificial Sequence: Synthetic oligonucleotide
gaggacacaucacccucca

SEQ ID NO: 810289 - RNA, 19 nt, Artificial Sequence
  Description of Artificial Sequence: Synthetic oligonucleotide
ggacucucacaucuuuacc

SEQ ID NO: 810290 - RNA, 19 nt, Artificial Sequence
  Description of Artificial Sequence: Synthetic oligonucleotide
uccggucgugacuuccuga

SEQ ID NO: 810291 - RNA, 19 nt, Artificial Sequence
  Description of Artificial Sequence: Synthetic oligonucleotide
cucucgggguuuaagucca

SEQ ID NO: 810292 - RNA, 19 nt, Artificial Sequence
  Description of Artificial Sequence: Synthetic oligonucleotide
ucgugacuuccugagacua

SEQ ID NO: 810293 - RNA, 19 nt, Artificial Sequence
  Description of Artificial Sequence: Synthetic oligonucleotide
uuaccggaagcaggaugag

SEQ ID NO: 810294 - RNA, 19 nt, Artificial Sequence
  Description of Artificial Sequence: Synthetic oligonucleotide
guucucucgggguuuaagu

SEQ ID NO: 810295 - RNA, 19 nt, Artificial Sequence
  Description of Artificial Sequence: Synthetic oligonucleotide
uacacauugcucggugcaa

SEQ ID NO: 810296 - RNA, 19 nt, Artificial Sequence
  Description of Artificial Sequence: Synthetic oligonucleotide
cagaaacgaauuuucuugu

SEQ ID NO: 810297 - RNA, 19 nt, Artificial Sequence
  Description of Artificial Sequence: Synthetic oligonucleotide
ugggguuguccuuggcacu

SEQ ID NO: 810298 - RNA, 19 nt, Artificial Sequence
  Description of Artificial Sequence: Synthetic oligonucleotide
gccuuaaucgguaaucauc

SEQ ID NO: 810299 - RNA, 19 nt, Artificial Sequence
  Description of Artificial Sequence: Synthetic oligonucleotide
gagacuauccgagcguugu

SEQ ID NO: 810300 - RNA, 19 nt, Artificial Sequence
  Description of Artificial Sequence: Synthetic oligonucleotide
ccgagcguuguccagcagg

SEQ ID NO: 810301 - RNA, 19 nt, Artificial Sequence
  Description of Artificial Sequence: Synthetic oligonucleotide
aaccaacaggugaguucac

SEQ ID NO: 810302 - RNA, 19 nt, Artificial Sequence
  Description of Artificial Sequence: Synthetic oligonucleotide
gcguagaucccagagcuug

SEQ ID NO: 810303 - RNA, 19 nt, Artificial Sequence
  Description of Artificial Sequence: Synthetic oligonucleotide
ugacaacaugcaugcccga

SEQ ID NO: 810304 - RNA, 19 nt, Artificial Sequence
  Description of Artificial Sequence: Synthetic oligonucleotide
gacugaacugcacugcguu

SEQ ID NO: 810305 - RNA, 19 nt, Artificial Sequence
  Description of Artificial Sequence: Synthetic oligonucleotide
cugaccguauaucccagaa

SEQ ID NO: 810306 - RNA, 19 nt, Artificial Sequence
  Description of Artificial Sequence: Synthetic oligonucleotide
ccuggacugaacugcacug

SEQ ID NO: 810307 - RNA, 19 nt, Artificial Sequence
  Description of Artificial Sequence: Synthetic oligonucleotide
ccuuaagucaaaguucuca

SEQ ID NO: 810308 - RNA, 19 nt, Artificial Sequence
  Description of Artificial Sequence: Synthetic oligonucleotide
guauaucccagaaacgaau

SEQ ID NO: 810309 - RNA, 19 nt, Artificial Sequence
  Description of Artificial Sequence: Synthetic oligonucleotide
cuuugucgacacugacaac

SEQ ID NO: 810310 - RNA, 19 nt, Artificial Sequence
  Description of Artificial Sequence: Synthetic oligonucleotide
ugccuggcgccuccuggag

SEQ ID NO: 810311 - RNA, 19 nt, Artificial Sequence
  Description of Artificial Sequence: Synthetic oligonucleotide
gagagucgcuuaguagcug

SEQ ID NO: 810312 - RNA, 19 nt, Artificial Sequence
  Description of Artificial Sequence: Synthetic oligonucleotide
ccaguaaccgggagccugg

SEQ ID NO: 810313 - RNA, 19 nt, Artificial Sequence
  Description of Artificial Sequence: Synthetic oligonucleotide
cacugcguugacuucccca

SEQ ID NO: 810314 - RNA, 19 nt, Artificial Sequence
  Description of Artificial Sequence: Synthetic oligonucleotide
agcaaaccaacaggugagu

SEQ ID NO: 810315 - RNA, 19 nt, Artificial Sequence
  Description of Artificial Sequence: Synthetic oligonucleotide
gucgcuuaguagcugcucu

SEQ ID NO: 810316 - RNA, 19 nt, Artificial Sequence
  Description of Artificial Sequence: Synthetic oligonucleotide
cacaugaggacaggcccug

SEQ ID NO: 810317 - RNA, 19 nt, Artificial Sequence
  Description of Artificial Sequence: Synthetic oligonucleotide
ucucgggguuuaaguccag

SEQ ID NO: 810318 - RNA, 19 nt, Artificial Sequence
  Description of Artificial Sequence: Synthetic oligonucleotide
ccuccgguggccaguaacc

SEQ ID NO: 810319 - RNA, 19 nt, Artificial Sequence
  Description of Artificial Sequence: Synthetic oligonucleotide
cugcagaugcagguuucag

SEQ ID NO: 810320 - RNA, 19 nt, Artificial Sequence
  Description of Artificial Sequence: Synthetic oligonucleotide
uucucguuuucggcauuga

SEQ ID NO: 810321 - RNA, 19 nt, Artificial Sequence
  Description of Artificial Sequence: Synthetic oligonucleotide
uccgguccaugccuccggu

SEQ ID NO: 810322 - RNA, 19 nt, Artificial Sequence
  Description of Artificial Sequence: Synthetic oligonucleotide
gucucccaaagauauuagu

SEQ ID NO: 810323 - RNA, 19 nt, Artificial Sequence
  Description of Artificial Sequence: Synthetic oligonucleotide
cagggaacucuugaauuca

SEQ ID NO: 810324 - RNA, 19 nt, Artificial Sequence
  Description of Artificial Sequence: Synthetic oligonucleotide
gagguaagcuccagcacua

SEQ ID NO: 810325 - RNA, 19 nt, Artificial Sequence
  Description of Artificial Sequence: Synthetic oligonucleotide
gagcgucucccaaagauau

SEQ ID NO: 810326 - RNA, 19 nt, Artificial Sequence
  Description of Artificial Sequence: Synthetic oligonucleotide
acagagcgucucccaaaga

SEQ ID NO: 810327 - RNA, 19 nt, Artificial Sequence
  Description of Artificial Sequence: Synthetic oligonucleotide
acacauugcucggugcaaa

SEQ ID NO: 810328 - RNA, 19 nt, Artificial Sequence
  Description of Artificial Sequence: Synthetic oligonucleotide
gcucggugcaaacaauguc

SEQ ID NO: 810329 - RNA, 19 nt, Artificial Sequence
  Description of Artificial Sequence: Synthetic oligonucleotide
agagcgucucccaaagaua

SEQ ID NO: 810330 - RNA, 19 nt, Artificial Sequence
  Description of Artificial Sequence: Synthetic oligonucleotide
caacucccaucaacacaag

SEQ ID NO: 810331 - RNA, 19 nt, Artificial Sequence
  Description of Artificial Sequence: Synthetic oligonucleotide
ucuuuaccggaagcaggau

SEQ ID NO: 810332 - RNA, 19 nt, Artificial Sequence
  Description of Artificial Sequence: Synthetic oligonucleotide
gugaguucacacacacaca

SEQ ID NO: 810333 - RNA, 19 nt, Artificial Sequence
  Description of Artificial Sequence: Synthetic oligonucleotide
ccaaugccuacagugacuc

SEQ ID NO: 810334 - RNA, 19 nt, Artificial Sequence
  Description of Artificial Sequence: Synthetic oligonucleotide
aggucaguuaguaguguuu

SEQ ID NO: 810335 - RNA, 19 nt, Artificial Sequence
  Description of Artificial Sequence: Synthetic oligonucleotide
ccggucgugacuuccugag

SEQ ID NO: 810336 - RNA, 19 nt, Artificial Sequence
  Description of Artificial Sequence: Synthetic oligonucleotide
auugcucggugcaaacaau

SEQ ID NO: 810337 - RNA, 19 nt, Artificial Sequence
  Description of Artificial Sequence: Synthetic oligonucleotide
agugacucccuuggguaaa

SEQ ID NO: 810338 - RNA, 19 nt, Artificial Sequence
  Description of Artificial Sequence: Synthetic oligonucleotide
ggaugcaucaagguugugu

SEQ ID NO: 810339 - RNA, 19 nt, Artificial Sequence
  Description of Artificial Sequence: Synthetic oligonucleotide
ggcugcgagagucgcuuag

SEQ ID NO: 810340 - RNA, 19 nt, Artificial Sequence
  Description of Artificial Sequence: Synthetic oligonucleotide
ucgcacaggagaggucucu

SEQ ID NO: 810341 - RNA, 19 nt, Artificial Sequence
  Description of Artificial Sequence: Synthetic oligonucleotide
uccgagcguuguccagcag

SEQ ID NO: 810342 - RNA, 19 nt, Artificial Sequence
  Description of Artificial Sequence: Synthetic oligonucleotide
cucuugaauucacauuuau

SEQ ID NO: 810343 - RNA, 19 nt, Artificial Sequence
  Description of Artificial Sequence: Synthetic oligonucleotide
ugacucccuuggguaaaug

SEQ ID NO: 810344 - RNA, 19 nt, Artificial Sequence
  Description of Artificial Sequence: Synthetic oligonucleotide
cgggguuuaaguccagagc

SEQ ID NO: 810345 - RNA, 19 nt, Artificial Sequence
  Description of Artificial Sequence: Synthetic oligonucleotide
cagcgaauuucaacuccca

SEQ ID NO: 810346 - RNA, 19 nt, Artificial Sequence
  Description of Artificial Sequence: Synthetic oligonucleotide
aacccucggcugagccugc

SEQ ID NO: 810347 - RNA, 19 nt, Artificial Sequence
  Description of Artificial Sequence: Synthetic oligonucleotide
gaaggucaguuaguagugu

SEQ ID NO: 810348 - RNA, 19 nt, Artificial Sequence
  Description of Artificial Sequence: Synthetic oligonucleotide
ugcuaggcacuugcagagu

SEQ ID NO: 810349 - RNA, 19 nt, Artificial Sequence
  Description of Artificial Sequence: Synthetic oligonucleotide
gaguucacacacacacaaa

SEQ ID NO: 810350 - RNA, 19 nt, Artificial Sequence
  Description of Artificial Sequence: Synthetic oligonucleotide
ccucggcugagccugcugc

SEQ ID NO: 810351 - RNA, 19 nt, Artificial Sequence
  Description of Artificial Sequence: Synthetic oligonucleotide
acgccaccgcauuuaugga

SEQ ID NO: 810352 - RNA, 19 nt, Artificial Sequence
  Description of Artificial Sequence: Synthetic oligonucleotide
gacccaauacccagugugu

SEQ ID NO: 810353 - RNA, 19 nt, Artificial Sequence
  Description of Artificial Sequence: Synthetic oligonucleotide
gccaguaaccgggagccug

SEQ ID NO: 810354 - RNA, 19 nt, Artificial Sequence
  Description of Artificial Sequence: Synthetic oligonucleotide
guccggucgugacuuccug

SEQ ID NO: 810355 - RNA, 19 nt, Artificial Sequence
  Description of Artificial Sequence: Synthetic oligonucleotide
uugcugcguagaucccaga

SEQ ID NO: 810356 - RNA, 19 nt, Artificial Sequence
  Description of Artificial Sequence: Synthetic oligonucleotide
gagccuggacugaacugca

SEQ ID NO: 810357 - RNA, 19 nt, Artificial Sequence
  Description of Artificial Sequence: Synthetic oligonucleotide
caccgcauuuauggaggag

SEQ ID NO: 810358 - RNA, 19 nt, Artificial Sequence
  Description of Artificial Sequence: Synthetic oligonucleotide
cagugacucccuuggguaa

SEQ ID NO: 810359 - RNA, 19 nt, Artificial Sequence
  Description of Artificial Sequence: Synthetic oligonucleotide
cacccuccaagacagggcu

SEQ ID NO: 810360 - RNA, 19 nt, Artificial Sequence
  Description of Artificial Sequence: Synthetic oligonucleotide
gguuuaaguccagagcagu

SEQ ID NO: 810361 - RNA, 19 nt, Artificial Sequence
  Description of Artificial Sequence: Synthetic oligonucleotide
cucgcacaggagaggucuc

SEQ ID NO: 810362 - RNA, 19 nt, Artificial Sequence
  Description of Artificial Sequence: Synthetic oligonucleotide
ccuuggguaaaugacccca

SEQ ID NO: 810363 - RNA, 19 nt, Artificial Sequence
  Description of Artificial Sequence: Synthetic oligonucleotide
guauggaaggucaguuagu

SEQ ID NO: 810364 - RNA, 19 nt, Artificial Sequence
  Description of Artificial Sequence: Synthetic oligonucleotide
cucuggcagcaaaccaaca

SEQ ID NO: 810365 - RNA, 19 nt, Artificial Sequence
  Description of Artificial Sequence: Synthetic oligonucleotide
gucgugacuuccugagacu

SEQ ID NO: 810366 - RNA, 19 nt, Artificial Sequence
  Description of Artificial Sequence: Synthetic oligonucleotide
ggccagcgaauuucaacuc

SEQ ID NO: 810367 - RNA, 19 nt, Artificial Sequence
  Description of Artificial Sequence: Synthetic oligonucleotide
gugugugccuuaaucggua

SEQ ID NO: 810368 - RNA, 19 nt, Artificial Sequence
  Description of Artificial Sequence: Synthetic oligonucleotide
agcucgcacaggagagguc

SEQ ID NO: 810369 - RNA, 19 nt, Artificial Sequence
  Description of Artificial Sequence: Synthetic oligonucleotide
gagacccaauacccagugu

SEQ ID NO: 810370 - RNA, 19 nt, Artificial Sequence
  Description of Artificial Sequence: Synthetic oligonucleotide
gaugugcccuggccagcga

SEQ ID NO: 810371 - RNA, 19 nt, Artificial Sequence
  Description of Artificial Sequence: Synthetic oligonucleotide
cugcguugacuuccccauc

SEQ ID NO: 810372 - RNA, 19 nt, Artificial Sequence
  Description of Artificial Sequence: Synthetic oligonucleotide
gggaacucuugaauucaca

SEQ ID NO: 810373 - RNA, 19 nt, Artificial Sequence
  Description of Artificial Sequence: Synthetic oligonucleotide
gcgucucccaaagauauua

SEQ ID NO: 810374 - RNA, 19 nt, Artificial Sequence
  Description of Artificial Sequence: Synthetic oligonucleotide
gccuccgguggccaguaac

SEQ ID NO: 810375 - RNA, 19 nt, Artificial Sequence
  Description of Artificial Sequence: Synthetic oligonucleotide
cugcgagagucgcuuagua

SEQ ID NO: 810376 - RNA, 19 nt, Artificial Sequence
  Description of Artificial Sequence: Synthetic oligonucleotide
cccuuggguaaaugacccc

SEQ ID NO: 810377 - RNA, 19 nt, Artificial Sequence
  Description of Artificial Sequence: Synthetic oligonucleotide
cugccacguaacugccauc

SEQ ID NO: 810378 - RNA, 19 nt, Artificial Sequence
  Description of Artificial Sequence: Synthetic oligonucleotide
ccgaauacuucccaaaguu

SEQ ID NO: 810379 - RNA, 19 nt, Artificial Sequence
  Description of Artificial Sequence: Synthetic oligonucleotide
ggcugaagacaacucgggu

SEQ ID NO: 810380 - RNA, 19 nt, Artificial Sequence
  Description of Artificial Sequence: Synthetic oligonucleotide
agguaagcuccagcacuau

SEQ ID NO: 810381 - RNA, 19 nt, Artificial Sequence
  Description of Artificial Sequence: Synthetic oligonucleotide
caacucggguccagucaga

SEQ ID NO: 810382 - RNA, 19 nt, Artificial Sequence
  Description of Artificial Sequence: Synthetic oligonucleotide
gcucgcacaggagaggucu

SEQ ID NO: 810383 - RNA, 19 nt, Artificial Sequence
  Description of Artificial Sequence: Synthetic oligonucleotide
gagugugcaucaggccaaa

SEQ ID NO: 810384 - RNA, 19 nt, Artificial Sequence
  Description of Artificial Sequence: Synthetic oligonucleotide
guccggaggucaaugacuu

SEQ ID NO: 810385 - RNA, 19 nt, Artificial Sequence
  Description of Artificial Sequence: Synthetic oligonucleotide
gccuggacugaacugcacu

SEQ ID NO: 810386 - RNA, 19 nt, Artificial Sequence
  Description of Artificial Sequence: Synthetic oligonucleotide
gaacugcacugcguugacu

SEQ ID NO: 810387 - RNA, 19 nt, Artificial Sequence
  Description of Artificial Sequence: Synthetic oligonucleotide
cugagggacugggauggaa

SEQ ID NO: 810388 - RNA, 19 nt, Artificial Sequence
  Description of Artificial Sequence: Synthetic oligonucleotide
accgggagccuggacugaa

SEQ ID NO: 810389 - RNA, 19 nt, Artificial Sequence
  Description of Artificial Sequence: Synthetic oligonucleotide
cgagcguuguccagcagga

SEQ ID NO: 810390 - RNA, 19 nt, Artificial Sequence
  Description of Artificial Sequence: Synthetic oligonucleotide
gagucgcuuaguagcugcu

SEQ ID NO: 810391 - RNA, 19 nt, Artificial Sequence
  Description of Artificial Sequence: Synthetic oligonucleotide
ggguccggucgugacuucc

SEQ ID NO: 810392 - RNA, 19 nt, Artificial Sequence
  Description of Artificial Sequence: Synthetic oligonucleotide
ccacccauccuuugucaca

SEQ ID NO: 810393 - RNA, 19 nt, Artificial Sequence
  Description of Artificial Sequence: Synthetic oligonucleotide
caaguucuguugggacaca

SEQ ID NO: 810394 - RNA, 19 nt, Artificial Sequence
  Description of Artificial Sequence: Synthetic oligonucleotide
cuggcgccuccuggagucc

SEQ ID NO: 810395 - RNA, 19 nt, Artificial Sequence
  Description of Artificial Sequence: Synthetic oligonucleotide
cugagacuauccgagcguu

SEQ ID NO: 810396 - RNA, 19 nt, Artificial Sequence
  Description of Artificial Sequence: Synthetic oligonucleotide
aggcugcgagagucgcuua

SEQ ID NO: 810397 - RNA, 19 nt, Artificial Sequence
  Description of Artificial Sequence: Synthetic oligonucleotide
gagcguuguccagcaggaa

SEQ ID NO: 810398 - RNA, 19 nt, Artificial Sequence
  Description of Artificial Sequence: Synthetic oligonucleotide
agcgucucccaaagauauu

SEQ ID NO: 810399 - RNA, 19 nt, Artificial Sequence
  Description of Artificial Sequence: Synthetic oligonucleotide
ccugagacuauccgagcgu

SEQ ID NO: 810400 - RNA, 19 nt, Artificial Sequence
  Description of Artificial Sequence: Synthetic oligonucleotide
cagcucgcacaggagaggu

SEQ ID NO: 810401 - RNA, 19 nt, Artificial Sequence
  Description of Artificial Sequence: Synthetic oligonucleotide
ggggaugcaucaagguugu

SEQ ID NO: 810402 - RNA, 19 nt, Artificial Sequence
  Description of Artificial Sequence: Synthetic oligonucleotide
gcacugcguugacuucccc

SEQ ID NO: 810403 - RNA, 19 nt, Artificial Sequence
  Description of Artificial Sequence: Synthetic oligonucleotide
caggcugcgagagucgcuu

SEQ ID NO: 810404 - RNA, 19 nt, Artificial Sequence
  Description of Artificial Sequence: Synthetic oligonucleotide
cgcauuuauggaggagcug

SEQ ID NO: 810405 - RNA, 19 nt, Artificial Sequence
  Description of Artificial Sequence: Synthetic oligonucleotide
guugggacucucacaucuu

SEQ ID NO: 810406 - RNA, 19 nt, Artificial Sequence
  Description of Artificial Sequence: Synthetic oligonucleotide
caguaaccgggagccugga

SEQ ID NO: 810407 - RNA, 19 nt, Artificial Sequence
  Description of Artificial Sequence: Synthetic oligonucleotide
ggacugaacugcacugcgu

SEQ ID NO: 810408 - RNA, 19 nt, Artificial Sequence
  Description of Artificial Sequence: Synthetic oligonucleotide
cauuuguccggaggucaau

SEQ ID NO: 810409 - RNA, 19 nt, Artificial Sequence
  Description of Artificial Sequence: Synthetic oligonucleotide
cgagagucgcuuaguagcu

SEQ ID NO: 810410 - RNA, 19 nt, Artificial Sequence
  Description of Artificial Sequence: Synthetic oligonucleotide
gcaaaccaacaggugaguu

SEQ ID NO: 810411 - RNA, 19 nt, Artificial Sequence
  Description of Artificial Sequence: Synthetic oligonucleotide
ccugugagugugugccuua

SEQ ID NO: 810412 - RNA, 19 nt, Artificial Sequence
  Description of Artificial Sequence: Synthetic oligonucleotide
gugacucccuuggguaaau

SEQ ID NO: 810413 - RNA, 19 nt, Artificial Sequence
  Description of Artificial Sequence: Synthetic oligonucleotide
gcugcgagagucgcuuagu

SEQ ID NO: 810414 - RNA, 19 nt, Artificial Sequence
  Description of Artificial Sequence: Synthetic oligonucleotide
ccggaagcaggaugagugu

SEQ ID NO: 810415 - RNA, 19 nt, Artificial Sequence
  Description of Artificial Sequence: Synthetic oligonucleotide
cccucggcugagccugcug

SEQ ID NO: 810416 - RNA, 19 nt, Artificial Sequence
  Description of Artificial Sequence: Synthetic oligonucleotide
gguccggucgugacuuccu

SEQ ID NO: 810417 - RNA, 19 nt, Artificial Sequence
  Description of Artificial Sequence: Synthetic oligonucleotide
cagccgugccuggcgccuc

SEQ ID NO: 810418 - RNA, 19 nt, Artificial Sequence
  Description of Artificial Sequence: Synthetic oligonucleotide
caguucucucgggguuuaa

SEQ ID NO: 810419 - RNA, 19 nt, Artificial Sequence
  Description of Artificial Sequence: Synthetic oligonucleotide
gcguugacuuccccaucau

SEQ ID NO: 810420 - RNA, 19 nt, Artificial Sequence
  Description of Artificial Sequence: Synthetic oligonucleotide
cggucgugacuuccugaga

SEQ ID NO: 810421 - RNA, 19 nt, Artificial Sequence
  Description of Artificial Sequence: Synthetic oligonucleotide
ggccaguaaccgggagccu

SEQ ID NO: 810422 - RNA, 19 nt, Artificial Sequence
  Description of Artificial Sequence: Synthetic oligonucleotide
ccuucucguuuucggcauu

SEQ ID NO: 810423 - RNA, 19 nt, Artificial Sequence
  Description of Artificial Sequence: Synthetic oligonucleotide
gccgugccuggcgccuccu

SEQ ID NO: 810424 - RNA, 19 nt, Artificial Sequence
  Description of Artificial Sequence: Synthetic oligonucleotide
aaaucgacgaaguaagucc

SEQ ID NO: 810425 - RNA, 19 nt, Artificial Sequence
  Description of Artificial Sequence: Synthetic oligonucleotide
aaucacuccagucugacgg

SEQ ID NO: 810426 - RNA, 19 nt, Artificial Sequence
  Description of Artificial Sequence: Synthetic oligonucleotide
ugcuauuuauucaauaacg

SEQ ID NO: 810427 - RNA, 19 nt, Artificial Sequence
  Description of Artificial Sequence: Synthetic oligonucleotide
uuacacgaaaauaauaucc

SEQ ID NO: 810428 - RNA, 19 nt, Artificial Sequence
  Description of Artificial Sequence: Synthetic oligonucleotide
uguauguugauuuaccucc

SEQ ID NO: 810429 - RNA, 19 nt, Artificial Sequence
  Description of Artificial Sequence: Synthetic oligonucleotide
acgaaaauaauauccaaac

SEQ ID NO: 810430 - RNA, 19 nt, Artificial Sequence
  Description of Artificial Sequence: Synthetic oligonucleotide
aacuauuauucuuugcgac

SEQ ID NO: 810431 - RNA, 19 nt, Artificial Sequence
  Description of Artificial Sequence: Synthetic oligonucleotide
aaauggguugcaaacaugc

SEQ ID NO: 810432 - RNA, 19 nt, Artificial Sequence
  Description of Artificial Sequence: Synthetic oligonucleotide
acuguugguaaacuuaacc

SEQ ID NO: 810433 - RNA, 19 nt, Artificial Sequence
  Description of Artificial Sequence: Synthetic oligonucleotide
uuaacaauggcauccuggg

SEQ ID NO: 810434 - RNA, 19 nt, Artificial Sequence
  Description of Artificial Sequence: Synthetic oligonucleotide
aauuagcaagcucagccac

SEQ ID NO: 810435 - RNA, 19 nt, Artificial Sequence
  Description of Artificial Sequence: Synthetic oligonucleotide
aauaagaggagucacgaaa

SEQ ID NO: 810436 - RNA, 19 nt, Artificial Sequence
  Description of Artificial Sequence: Synthetic oligonucleotide
acuauuauucuuugcgacc

SEQ ID NO: 810437 - RNA, 19 nt, Artificial Sequence
  Description of Artificial Sequence: Synthetic oligonucleotide
caucauucggaauaaaugc

SEQ ID NO: 810438 - RNA, 19 nt, Artificial Sequence
  Description of Artificial Sequence: Synthetic oligonucleotide
auuauugacaguugguauc

SEQ ID NO: 810439 - RNA, 19 nt, Artificial Sequence
  Description of Artificial Sequence: Synthetic oligonucleotide
uaaagcauaguuaagguuu

SEQ ID NO: 810440 - RNA, 19 nt, Artificial Sequence
  Description of Artificial Sequence: Synthetic oligonucleotide
uggaaaucgacgaaguaag

SEQ ID NO: 810441 - RNA, 19 nt, Artificial Sequence
  Description of Artificial Sequence: Synthetic oligonucleotide
cacuuauuaauguagacug

SEQ ID NO: 810442 - RNA, 19 nt, Artificial Sequence
  Description of Artificial Sequence: Synthetic oligonucleotide
ugauccauauccaaaguug

SEQ ID NO: 810443 - RNA, 19 nt, Artificial Sequence
  Description of Artificial Sequence: Synthetic oligonucleotide
auucggaauaaaugcaacc

SEQ ID NO: 810444 - RNA, 19 nt, Artificial Sequence
  Description of Artificial Sequence: Synthetic oligonucleotide
aacgaagaucaauaagagg

SEQ ID NO: 810445 - RNA, 19 nt, Artificial Sequence
  Description of Artificial Sequence: Synthetic oligonucleotide
auaguuaagguuucuucac

SEQ ID NO: 810446 - RNA, 19 nt, Artificial Sequence
  Description of Artificial Sequence: Synthetic oligonucleotide
ugaauccucaacaaaaguc

SEQ ID NO: 810447 - RNA, 19 nt, Artificial Sequence
  Description of Artificial Sequence: Synthetic oligonucleotide
uauacuccgauauagccca

SEQ ID NO: 810448 - RNA, 19 nt, Artificial Sequence
  Description of Artificial Sequence: Synthetic oligonucleotide
ugguaaagcauaguuaagg

SEQ ID NO: 810449 - RNA, 19 nt, Artificial Sequence
  Description of Artificial Sequence: Synthetic oligonucleotide
acgaagaucaauaagagga

SEQ ID NO: 810450 - RNA, 19 nt, Artificial Sequence
  Description of Artificial Sequence: Synthetic oligonucleotide
auauagcccaugcuaaccc

SEQ ID NO: 810451 - RNA, 19 nt, Artificial Sequence
  Description of Artificial Sequence: Synthetic oligonucleotide
aaacuauuauucuuugcga

SEQ ID NO: 810452 - RNA, 19 nt, Artificial Sequence
  Description of Artificial Sequence: Synthetic oligonucleotide
aucaacaaugccuggugcc

SEQ ID NO: 810453 - RNA, 19 nt, Artificial Sequence
  Description of Artificial Sequence: Synthetic oligonucleotide
uugcaaacaugcaaaaggc

SEQ ID NO: 810454 - RNA, 19 nt, Artificial Sequence
  Description of Artificial Sequence: Synthetic oligonucleotide
ugagacgugagcaaagcug

SEQ ID NO: 810455 - RNA, 19 nt, Artificial Sequence
  Description of Artificial Sequence: Synthetic oligonucleotide
ugagcuaacacaucauuga

SEQ ID NO: 810456 - RNA, 19 nt, Artificial Sequence
  Description of Artificial Sequence: Synthetic oligonucleotide
agaaauauugacaauuucu

SEQ ID NO: 810457 - RNA, 19 nt, Artificial Sequence
  Description of Artificial Sequence: Synthetic oligonucleotide
aaagguugagggcucuaac

SEQ ID NO: 810458 - RNA, 19 nt, Artificial Sequence
  Description of Artificial Sequence: Synthetic oligonucleotide
ucuaacugcugccaugucc

SEQ ID NO: 810459 - RNA, 19 nt, Artificial Sequence
  Description of Artificial Sequence: Synthetic oligonucleotide
agaacgaagaucaauaaga

SEQ ID NO: 810460 - RNA, 19 nt, Artificial Sequence
  Description of Artificial Sequence: Synthetic oligonucleotide
cuggaauccaauuuuaauc

SEQ ID NO: 810461 - RNA, 19 nt, Artificial Sequence
  Description of Artificial Sequence: Synthetic oligonucleotide
uguuuauccuuuucaaagc

SEQ ID NO: 810462 - RNA, 19 nt, Artificial Sequence
  Description of Artificial Sequence: Synthetic oligonucleotide
uaacugagcuaacacauca

SEQ ID NO: 810463 - RNA, 19 nt, Artificial Sequence
  Description of Artificial Sequence: Synthetic oligonucleotide
guacguaaggaacaggugc

SEQ ID NO: 810464 - RNA, 19 nt, Artificial Sequence
  Description of Artificial Sequence: Synthetic oligonucleotide
cuucguugcaauauacucc

SEQ ID NO: 810465 - RNA, 19 nt, Artificial Sequence
  Description of Artificial Sequence: Synthetic oligonucleotide
ugggccaugaguacaauca

SEQ ID NO: 810466 - RNA, 19 nt, Artificial Sequence
  Description of Artificial Sequence: Synthetic oligonucleotide
auguauguugauuuaccuc

SEQ ID NO: 810467 - RNA, 19 nt, Artificial Sequence
  Description of Artificial Sequence: Synthetic oligonucleotide
uuuaaucuguuugccaggg

SEQ ID NO: 810468 - RNA, 19 nt, Artificial Sequence
  Description of Artificial Sequence: Synthetic oligonucleotide
uuuaccucccauauuggga

SEQ ID NO: 810469 - RNA, 19 nt, Artificial Sequence
  Description of Artificial Sequence: Synthetic oligonucleotide
uuuauucgugaaaugauuu

SEQ ID NO: 810470 - RNA, 19 nt, Artificial Sequence
  Description of Artificial Sequence: Synthetic oligonucleotide
ugauuauuaaggaaucuuu

SEQ ID NO: 810471 - RNA, 19 nt, Artificial Sequence
  Description of Artificial Sequence: Synthetic oligonucleotide
uuuauucaauaacgcagcc

SEQ ID NO: 810472 - RNA, 19 nt, Artificial Sequence
  Description of Artificial Sequence: Synthetic oligonucleotide
uucacuugguaaagcauag

SEQ ID NO: 810473 - RNA, 19 nt, Artificial Sequence
  Description of Artificial Sequence: Synthetic oligonucleotide
uugcuauuuauucaauaac

SEQ ID NO: 810474 - RNA, 19 nt, Artificial Sequence
  Description of Artificial Sequence: Synthetic oligonucleotide
cauauugggaccaguaaug

SEQ ID NO: 810475 - RNA, 19 nt, Artificial Sequence
  Description of Artificial Sequence: Synthetic oligonucleotide
ugugauauucuccuccgac

SEQ ID NO: 810476 - RNA, 19 nt, Artificial Sequence
  Description of Artificial Sequence: Synthetic oligonucleotide
acuaaauuuaaucuuucuu

SEQ ID NO: 810477 - RNA, 19 nt, Artificial Sequence
  Description of Artificial Sequence: Synthetic oligonucleotide
aguaaguccuccuguaaag

SEQ ID NO: 810478 - RNA, 19 nt, Artificial Sequence
  Description of Artificial Sequence: Synthetic oligonucleotide
ucuucguugcaauauacuc

SEQ ID NO: 810479 - RNA, 19 nt, Artificial Sequence
  Description of Artificial Sequence: Synthetic oligonucleotide
uccaaucucauguacuggc

SEQ ID NO: 810480 - RNA, 19 nt, Artificial Sequence
  Description of Artificial Sequence: Synthetic oligonucleotide
uucuuugcgaccaccucgg

SEQ ID NO: 810481 - RNA, 19 nt, Artificial Sequence
  Description of Artificial Sequence: Synthetic oligonucleotide
aaggcaccaaucuucguug

SEQ ID NO: 810482 - RNA, 19 nt, Artificial Sequence
  Description of Artificial Sequence: Synthetic oligonucleotide
caauaacgcagccagagac

SEQ ID NO: 810483 - RNA, 19 nt, Artificial Sequence
  Description of Artificial Sequence: Synthetic oligonucleotide
uugacaguugguaucuggc

SEQ ID NO: 810484 - RNA, 19 nt, Artificial Sequence
  Description of Artificial Sequence: Synthetic oligonucleotide
aaaggcaccaaucuucguu

SEQ ID NO: 810485 - RNA, 19 nt, Artificial Sequence
  Description of Artificial Sequence: Synthetic oligonucleotide
uccgacaugucaguaaagg

SEQ ID NO: 810486 - RNA, 19 nt, Artificial Sequence
  Description of Artificial Sequence: Synthetic oligonucleotide
uucacucagguuaggauca

SEQ ID NO: 810487 - RNA, 19 nt, Artificial Sequence
  Description of Artificial Sequence: Synthetic oligonucleotide
aaucuucguugcaauauac

SEQ ID NO: 810488 - RNA, 19 nt, Artificial Sequence
  Description of Artificial Sequence: Synthetic oligonucleotide
ugguuaaccaaucuuuguc

SEQ ID NO: 810489 - RNA, 19 nt, Artificial Sequence
  Description of Artificial Sequence: Synthetic oligonucleotide
uauucgugaaaugauuuca

SEQ ID NO: 810490 - RNA, 19 nt, Artificial Sequence
  Description of Artificial Sequence: Synthetic oligonucleotide
uuaagguuucuucacuagu

SEQ ID NO: 810491 - RNA, 19 nt, Artificial Sequence
  Description of Artificial Sequence: Synthetic oligonucleotide
accaguaaugauguggaac

SEQ ID NO: 810492 - RNA, 19 nt, Artificial Sequence
  Description of Artificial Sequence: Synthetic oligonucleotide
aaacuucuuggcaagucgg

SEQ ID NO: 810493 - RNA, 19 nt, Artificial Sequence
  Description of Artificial Sequence: Synthetic oligonucleotide
agggguccaauccaagacc

SEQ ID NO: 810494 - RNA, 19 nt, Artificial Sequence
  Description of Artificial Sequence: Synthetic oligonucleotide
uuccuugcagguuacacga

SEQ ID NO: 810495 - RNA, 19 nt, Artificial Sequence
  Description of Artificial Sequence: Synthetic oligonucleotide
uugucucugaaacuucuug

SEQ ID NO: 810496 - RNA, 19 nt, Artificial Sequence
  Description of Artificial Sequence: Synthetic oligonucleotide
uguuuaauccacugguuaa

SEQ ID NO: 810497 - RNA, 19 nt, Artificial Sequence
  Description of Artificial Sequence: Synthetic oligonucleotide
acuaguuagugcugugacg

SEQ ID NO: 810498 - RNA, 19 nt, Artificial Sequence
  Description of Artificial Sequence: Synthetic oligonucleotide
ucucuuaguucacucaggu

SEQ ID NO: 810499 - RNA, 19 nt, Artificial Sequence
  Description of Artificial Sequence: Synthetic oligonucleotide
gaacgaagaucaauaagag

SEQ ID NO: 810500 - RNA, 19 nt, Artificial Sequence
  Description of Artificial Sequence: Synthetic oligonucleotide
uucggaauaaaugcaaccu

SEQ ID NO: 810501 - RNA, 19 nt, Artificial Sequence
  Description of Artificial Sequence: Synthetic oligonucleotide
auuguugcgaaggacuuuc

SEQ ID NO: 810502 - RNA, 19 nt, Artificial Sequence
  Description of Artificial Sequence: Synthetic oligonucleotide
ucauucggaauaaaugcaa

SEQ ID NO: 810503 - RNA, 19 nt, Artificial Sequence
  Description of Artificial Sequence: Synthetic oligonucleotide
aaagcauaguuaagguuuc

SEQ ID NO: 810504 - RNA, 19 nt, Artificial Sequence
  Description of Artificial Sequence: Synthetic oligonucleotide
uuaccucccauauugggac

SEQ ID NO: 810505 - RNA, 19 nt, Artificial Sequence
  Description of Artificial Sequence: Synthetic oligonucleotide
uuauucuuugcgaccaccu

SEQ ID NO: 810506 - RNA, 19 nt, Artificial Sequence
  Description of Artificial Sequence: Synthetic oligonucleotide
aguuagugcugugacgugc

SEQ ID NO: 810507 - RNA, 19 nt, Artificial Sequence
  Description of Artificial Sequence: Synthetic oligonucleotide
ucgguagcagucuuguaag

SEQ ID NO: 810508 - RNA, 19 nt, Artificial Sequence
  Description of Artificial Sequence: Synthetic oligonucleotide
ugauauucuccuccgacau

SEQ ID NO: 810509 - RNA, 19 nt, Artificial Sequence
  Description of Artificial Sequence: Synthetic oligonucleotide
auugggaccaguaaugaug

SEQ ID NO: 810510 - RNA, 19 nt, Artificial Sequence
  Description of Artificial Sequence: Synthetic oligonucleotide
uggguugcaaacaugcaaa

SEQ ID NO: 810511 - RNA, 19 nt, Artificial Sequence
  Description of Artificial Sequence: Synthetic oligonucleotide
uguuucuaucauuucuuga

SEQ ID NO: 810512 - RNA, 19 nt, Artificial Sequence
  Description of Artificial Sequence: Synthetic oligonucleotide
guuaagguuucuucacuag

SEQ ID NO: 810513 - RNA, 19 nt, Artificial Sequence
  Description of Artificial Sequence: Synthetic oligonucleotide
acaguugguaucuggcuag

SEQ ID NO: 810514 - RNA, 19 nt, Artificial Sequence
  Description of Artificial Sequence: Synthetic oligonucleotide
ucugacggauguauguuga

SEQ ID NO: 810515 - RNA, 19 nt, Artificial Sequence
  Description of Artificial Sequence: Synthetic oligonucleotide
auauccacugugcugaaau

SEQ ID NO: 810516 - RNA, 19 nt, Artificial Sequence
  Description of Artificial Sequence: Synthetic oligonucleotide
gguagcacuucuuugcggg

SEQ ID NO: 810517 - RNA, 19 nt, Artificial Sequence
  Description of Artificial Sequence: Synthetic oligonucleotide
ugaacguggaaacaccuuu

SEQ ID NO: 810518 - RNA, 19 nt, Artificial Sequence
  Description of Artificial Sequence: Synthetic oligonucleotide
uuauucgugaaaugauuuc

SEQ ID NO: 810519 - RNA, 19 nt, Artificial Sequence
  Description of Artificial Sequence: Synthetic oligonucleotide
uaagguuucuucacuaguu

SEQ ID NO: 810520 - RNA, 19 nt, Artificial Sequence
  Description of Artificial Sequence: Synthetic oligonucleotide
gauauagucgguagcaguc

SEQ ID NO: 810521 - RNA, 19 nt, Artificial Sequence
  Description of Artificial Sequence: Synthetic oligonucleotide
aagaugacuggccguacgu

SEQ ID NO: 810522 - RNA, 19 nt, Artificial Sequence
  Description of Artificial Sequence: Synthetic oligonucleotide
ugcuaacccaaauccauca

SEQ ID NO: 810523 - RNA, 19 nt, Artificial Sequence
  Description of Artificial Sequence: Synthetic oligonucleotide
aacguggaaacaccuuuca

SEQ ID NO: 810524 - RNA, 19 nt, Artificial Sequence
  Description of Artificial Sequence: Synthetic oligonucleotide
auagcugcggucuccagca

SEQ ID NO: 810525 - RNA, 19 nt, Artificial Sequence
  Description of Artificial Sequence: Synthetic oligonucleotide
uugguaaagcauaguuaag

SEQ ID NO: 810526 - RNA, 19 nt, Artificial Sequence
  Description of Artificial Sequence: Synthetic oligonucleotide
uuugcgaccaccucggcuu

SEQ ID NO: 810527 - RNA, 19 nt, Artificial Sequence
  Description of Artificial Sequence: Synthetic oligonucleotide
aguaaugauguggaacauc

SEQ ID NO: 810528 - RNA, 19 nt, Artificial Sequence
  Description of Artificial Sequence: Synthetic oligonucleotide
ugacgugcagauuauugac

SEQ ID NO: 810529 - RNA, 19 nt, Artificial Sequence
  Description of Artificial Sequence: Synthetic oligonucleotide
uuaaucuguuugccagggg

SEQ ID NO: 810530 - RNA, 19 nt, Artificial Sequence
  Description of Artificial Sequence: Synthetic oligonucleotide
guuacacgaaaauaauauc

SEQ ID NO: 810531 - RNA, 19 nt, Artificial Sequence
  Description of Artificial Sequence: Synthetic oligonucleotide
aucaauaagaggagucacg

SEQ ID NO: 810532 - RNA, 19 nt, Artificial Sequence
  Description of Artificial Sequence: Synthetic oligonucleotide
ucggaauaaaugcaaccuc

SEQ ID NO: 810533 - RNA, 19 nt, Artificial Sequence
  Description of Artificial Sequence: Synthetic oligonucleotide
cauccauuacuucucuuag

SEQ ID NO: 810534 - RNA, 19 nt, Artificial Sequence
  Description of Artificial Sequence: Synthetic oligonucleotide
gcaauauacuccgauauag

SEQ ID NO: 810535 - RNA, 19 nt, Artificial Sequence
  Description of Artificial Sequence: Synthetic oligonucleotide
caaucucauguacuggcgg

SEQ ID NO: 810536 - RNA, 19 nt, Artificial Sequence
  Description of Artificial Sequence: Synthetic oligonucleotide
cagaacgaagaucaauaag

SEQ ID NO: 810537 - RNA, 19 nt, Artificial Sequence
  Description of Artificial Sequence: Synthetic oligonucleotide
aaaugcaaccucaucuuga

SEQ ID NO: 810538 - RNA, 19 nt, Artificial Sequence
  Description of Artificial Sequence: Synthetic oligonucleotide
gacgaaguaaguccuccug

SEQ ID NO: 810539 - RNA, 19 nt, Artificial Sequence
  Description of Artificial Sequence: Synthetic oligonucleotide
ucuacauagccugaagaaa

SEQ ID NO: 810540 - RNA, 19 nt, Artificial Sequence
  Description of Artificial Sequence: Synthetic oligonucleotide
uugucuggcgcacucuacc

SEQ ID NO: 810541 - RNA, 19 nt, Artificial Sequence
  Description of Artificial Sequence: Synthetic oligonucleotide
aggaugcaaucuaaaaugg

SEQ ID NO: 810542 - RNA, 19 nt, Artificial Sequence
  Description of Artificial Sequence: Synthetic oligonucleotide
aauuugggccaugaguaca

SEQ ID NO: 810543 - RNA, 19 nt, Artificial Sequence
  Description of Artificial Sequence: Synthetic oligonucleotide
caugccgagggaaauuagc

SEQ ID NO: 810544 - RNA, 19 nt, Artificial Sequence
  Description of Artificial Sequence: Synthetic oligonucleotide
acgaaaacugccaucaaca

SEQ ID NO: 810545 - RNA, 19 nt, Artificial Sequence
  Description of Artificial Sequence: Synthetic oligonucleotide
guaaacuuaaccccguucu

SEQ ID NO: 810546 - RNA, 19 nt, Artificial Sequence
  Description of Artificial Sequence: Synthetic oligonucleotide
ucaauaacgcagccagaga

SEQ ID NO: 810547 - RNA, 19 nt, Artificial Sequence
  Description of Artificial Sequence: Synthetic oligonucleotide
cuuauuaauguagacugca

SEQ ID NO: 810548 - RNA, 19 nt, Artificial Sequence
  Description of Artificial Sequence: Synthetic oligonucleotide
aagguuucuucacuaguua

SEQ ID NO: 810549 - RNA, 19 nt, Artificial Sequence
  Description of Artificial Sequence: Synthetic oligonucleotide
auauccaaacugugcacug

SEQ ID NO: 810550 - RNA, 19 nt, Artificial Sequence
  Description of Artificial Sequence: Synthetic oligonucleotide
acaugaaucccaaaacucu

SEQ ID NO: 810551 - RNA, 19 nt, Artificial Sequence
  Description of Artificial Sequence: Synthetic oligonucleotide
agucacgaaaacugccauc

SEQ ID NO: 810552 - RNA, 19 nt, Artificial Sequence
  Description of Artificial Sequence: Synthetic oligonucleotide
caugagaggcuguuuaauc

SEQ ID NO: 810553 - RNA, 19 nt, Artificial Sequence
  Description of Artificial Sequence: Synthetic oligonucleotide
gaauccucaacaaaagucu

SEQ ID NO: 810554 - RNA, 19 nt, Artificial Sequence
  Description of Artificial Sequence: Synthetic oligonucleotide
aauaacgcagccagagacu

SEQ ID NO: 810555 - RNA, 19 nt, Artificial Sequence
  Description of Artificial Sequence: Synthetic oligonucleotide
aaucgacgaaguaaguccu

SEQ ID NO: 810556 - RNA, 19 nt, Artificial Sequence
  Description of Artificial Sequence: Synthetic oligonucleotide
acaccuuucagcugacugu

SEQ ID NO: 810557 - RNA, 19 nt, Artificial Sequence
  Description of Artificial Sequence: Synthetic oligonucleotide
auggguugcaaacaugcaa

SEQ ID NO: 810558 - RNA, 19 nt, Artificial Sequence
  Description of Artificial Sequence: Synthetic oligonucleotide
uaaguccuccuguaaaguc

SEQ ID NO: 810559 - RNA, 19 nt, Artificial Sequence
  Description of Artificial Sequence: Synthetic oligonucleotide
uggcaagucgguuaagauc

SEQ ID NO: 810560 - RNA, 19 nt, Artificial Sequence
  Description of Artificial Sequence: Synthetic oligonucleotide
acaaucacuccagucugac

SEQ ID NO: 810561 - RNA, 19 nt, Artificial Sequence
  Description of Artificial Sequence: Synthetic oligonucleotide
ugaaucccaaaacucugau

SEQ ID NO: 810562 - RNA, 19 nt, Artificial Sequence
  Description of Artificial Sequence: Synthetic oligonucleotide
agauuauugacaguuggua

SEQ ID NO: 810563 - RNA, 19 nt, Artificial Sequence
  Description of Artificial Sequence: Synthetic oligonucleotide
auuacuucucuuaguucac

SEQ ID NO: 810564 - RNA, 19 nt, Artificial Sequence
  Description of Artificial Sequence: Synthetic oligonucleotide
gguuaagaucuggaaaucg

SEQ ID NO: 810565 - RNA, 19 nt, Artificial Sequence
  Description of Artificial Sequence: Synthetic oligonucleotide
agcacuucuuugcgggugg

SEQ ID NO: 810566 - RNA, 19 nt, Artificial Sequence
  Description of Artificial Sequence: Synthetic oligonucleotide
gauguauguugauuuaccu

SEQ ID NO: 810567 - RNA, 19 nt, Artificial Sequence
  Description of Artificial Sequence: Synthetic oligonucleotide
acgaaguaaguccuccugu

SEQ ID NO: 810568 - RNA, 19 nt, Artificial Sequence
  Description of Artificial Sequence: Synthetic oligonucleotide
uuccaaugcucugaaauuc

SEQ ID NO: 810569 - RNA, 19 nt, Artificial Sequence
  Description of Artificial Sequence: Synthetic oligonucleotide
aucccaaaacucugaucac

SEQ ID NO: 810570 - RNA, 19 nt, Artificial Sequence
  Description of Artificial Sequence: Synthetic oligonucleotide
caucaacaaugccuggugc

SEQ ID NO: 810571 - RNA, 19 nt, Artificial Sequence
  Description of Artificial Sequence: Synthetic oligonucleotide
aaccccguucuucugaaua

SEQ ID NO: 810572 - RNA, 19 nt, Artificial Sequence
  Description of Artificial Sequence: Synthetic oligonucleotide
gucacgaaaacugccauca

SEQ ID NO: 810573 - RNA, 19 nt, Artificial Sequence
  Description of Artificial Sequence: Synthetic oligonucleotide
uauagcccaugcuaaccca

SEQ ID NO: 810574 - RNA, 19 nt, Artificial Sequence
  Description of Artificial Sequence: Synthetic oligonucleotide
acacgaaaauaauauccaa

SEQ ID NO: 810575 - RNA, 19 nt, Artificial Sequence
  Description of Artificial Sequence: Synthetic oligonucleotide
guaaagggcacuugcuuca

SEQ ID NO: 810576 - RNA, 19 nt, Artificial Sequence
  Description of Artificial Sequence: Synthetic oligonucleotide
cuggccguacguaaggaac

SEQ ID NO: 810577 - RNA, 19 nt, Artificial Sequence
  Description of Artificial Sequence: Synthetic oligonucleotide
auaacgcagccagagacug

SEQ ID NO: 810578 - RNA, 19 nt, Artificial Sequence
  Description of Artificial Sequence: Synthetic oligonucleotide
gauuauugacaguugguau

SEQ ID NO: 810579 - RNA, 19 nt, Artificial Sequence
  Description of Artificial Sequence: Synthetic oligonucleotide
uugagacgugagcaaagcu

SEQ ID NO: 810580 - RNA, 19 nt, Artificial Sequence
  Description of Artificial Sequence: Synthetic oligonucleotide
ucauacucgccuuuauuuu

SEQ ID NO: 810581 - RNA, 19 nt, Artificial Sequence
  Description of Artificial Sequence: Synthetic oligonucleotide
cacgaaaauaauauccaaa

SEQ ID NO: 810582 - RNA, 19 nt, Artificial Sequence
  Description of Artificial Sequence: Synthetic oligonucleotide
cuucuuugcgggugguucc

SEQ ID NO: 810583 - RNA, 19 nt, Artificial Sequence
  Description of Artificial Sequence: Synthetic oligonucleotide
cccaugcuaacccaaaucc

SEQ ID NO: 810584 - RNA, 19 nt, Artificial Sequence
  Description of Artificial Sequence: Synthetic oligonucleotide
gauauucuccuccgacaug

SEQ ID NO: 810585 - RNA, 19 nt, Artificial Sequence
  Description of Artificial Sequence: Synthetic oligonucleotide
cuauuauucuuugcgacca

SEQ ID NO: 810586 - RNA, 19 nt, Artificial Sequence
  Description of Artificial Sequence: Synthetic oligonucleotide
cacuaguuagugcugugac

SEQ ID NO: 810587 - RNA, 19 nt, Artificial Sequence
  Description of Artificial Sequence: Synthetic oligonucleotide
uucuuggcaagucgguuaa

SEQ ID NO: 810588 - RNA, 19 nt, Artificial Sequence
  Description of Artificial Sequence: Synthetic oligonucleotide
gggaccaguaaugaugugg

SEQ ID NO: 810589 - RNA, 19 nt, Artificial Sequence
  Description of Artificial Sequence: Synthetic oligonucleotide
guugguaucuggcuagcca

SEQ ID NO: 810590 - RNA, 19 nt, Artificial Sequence
  Description of Artificial Sequence: Synthetic oligonucleotide
guugcugaccugaggauag

SEQ ID NO: 810591 - RNA, 19 nt, Artificial Sequence
  Description of Artificial Sequence: Synthetic oligonucleotide
ugcauugguucuacauagc

SEQ ID NO: 810592 - RNA, 19 nt, Artificial Sequence
  Description of Artificial Sequence: Synthetic oligonucleotide
augcaaucuaaaauggaca

SEQ ID NO: 810593 - RNA, 19 nt, Artificial Sequence
  Description of Artificial Sequence: Synthetic oligonucleotide
caagaugacuggccguacg

SEQ ID NO: 810594 - RNA, 19 nt, Artificial Sequence
  Description of Artificial Sequence: Synthetic oligonucleotide
cagguuaggaucaaaugaa

SEQ ID NO: 810595 - RNA, 19 nt, Artificial Sequence
  Description of Artificial Sequence: Synthetic oligonucleotide
acccugauauagucgguag

SEQ ID NO: 810596 - RNA, 19 nt, Artificial Sequence
  Description of Artificial Sequence: Synthetic oligonucleotide
ucuggcgcacucuaccaca

SEQ ID NO: 810597 - RNA, 19 nt, Artificial Sequence
  Description of Artificial Sequence: Synthetic oligonucleotide
aaguucgcugcuugucucu

SEQ ID NO: 810598 - RNA, 19 nt, Artificial Sequence
  Description of Artificial Sequence: Synthetic oligonucleotide
uggccguacguaaggaaca

SEQ ID NO: 810599 - RNA, 19 nt, Artificial Sequence
  Description of Artificial Sequence: Synthetic oligonucleotide
uggcggaaguacaaaagua

SEQ ID NO: 810600 - RNA, 19 nt, Artificial Sequence
  Description of Artificial Sequence: Synthetic oligonucleotide
gugacgugcagauuauuga

SEQ ID NO: 810601 - RNA, 19 nt, Artificial Sequence
  Description of Artificial Sequence: Synthetic oligonucleotide
ucccaaaacucugaucaca

SEQ ID NO: 810602 - RNA, 19 nt, Artificial Sequence
  Description of Artificial Sequence: Synthetic oligonucleotide
aucauucggaauaaaugca

SEQ ID NO: 810603 - RNA, 19 nt, Artificial Sequence
  Description of Artificial Sequence: Synthetic oligonucleotide
guuuaauccacugguuaac

SEQ ID NO: 810604 - RNA, 19 nt, Artificial Sequence
  Description of Artificial Sequence: Synthetic oligonucleotide
agguagcacuucuuugcgg

SEQ ID NO: 810605 - RNA, 19 nt, Artificial Sequence
  Description of Artificial Sequence: Synthetic oligonucleotide
gucgguagcagucuuguaa

SEQ ID NO: 810606 - RNA, 19 nt, Artificial Sequence
  Description of Artificial Sequence: Synthetic oligonucleotide
gugauauucuccuccgaca

SEQ ID NO: 810607 - RNA, 19 nt, Artificial Sequence
  Description of Artificial Sequence: Synthetic oligonucleotide
gcauugguucuacauagcc

SEQ ID NO: 810608 - RNA, 19 nt, Artificial Sequence
  Description of Artificial Sequence: Synthetic oligonucleotide
gaugacuggccguacguaa

SEQ ID NO: 810609 - RNA, 19 nt, Artificial Sequence
  Description of Artificial Sequence: Synthetic oligonucleotide
cguggaaacaccuuucagc

SEQ ID NO: 810610 - RNA, 19 nt, Artificial Sequence
  Description of Artificial Sequence: Synthetic oligonucleotide
uguaugacgcuggggagcu

SEQ ID NO: 810611 - RNA, 19 nt, Artificial Sequence
  Description of Artificial Sequence: Synthetic oligonucleotide
ucggcuuuuaguuguuuua

SEQ ID NO: 810612 - RNA, 19 nt, Artificial Sequence
  Description of Artificial Sequence: Synthetic oligonucleotide
auaagaggagucacgaaaa

SEQ ID NO: 810613 - RNA, 19 nt, Artificial Sequence
  Description of Artificial Sequence: Synthetic oligonucleotide
ggcggaaguacaaaaguag

SEQ ID NO: 810614 - RNA, 19 nt, Artificial Sequence
  Description of Artificial Sequence: Synthetic oligonucleotide
uugcgaaggacuuucucuu

SEQ ID NO: 810615 - RNA, 19 nt, Artificial Sequence
  Description of Artificial Sequence: Synthetic oligonucleotide
aggcaccaaucuucguugc

SEQ ID NO: 810616 - RNA, 19 nt, Artificial Sequence
  Description of Artificial Sequence: Synthetic oligonucleotide
aguugguaucuggcuagcc

SEQ ID NO: 810617 - RNA, 19 nt, Artificial Sequence
  Description of Artificial Sequence: Synthetic oligonucleotide
uaaguucgcugcuugucuc

SEQ ID NO: 810618 - RNA, 19 nt, Artificial Sequence
  Description of Artificial Sequence: Synthetic oligonucleotide
acguggaaacaccuuucag

SEQ ID NO: 810619 - RNA, 19 nt, Artificial Sequence
  Description of Artificial Sequence: Synthetic oligonucleotide
uuaauguagacugcaucuu

SEQ ID NO: 810620 - RNA, 19 nt, Artificial Sequence
  Description of Artificial Sequence: Synthetic oligonucleotide
guugcgaaggacuuucucu

SEQ ID NO: 810621 - RNA, 19 nt, Artificial Sequence
  Description of Artificial Sequence: Synthetic oligonucleotide
caaucacuccagucugacg

SEQ ID NO: 810622 - RNA, 19 nt, Artificial Sequence
  Description of Artificial Sequence: Synthetic oligonucleotide
uuugucuggcgcacucuac

SEQ ID NO: 810623 - RNA, 19 nt, Artificial Sequence
  Description of Artificial Sequence: Synthetic oligonucleotide
caauuugggccaugaguac

SEQ ID NO: 810624 - RNA, 19 nt, Artificial Sequence
  Description of Artificial Sequence: Synthetic oligonucleotide
uacguagagguuccucuuc

SEQ ID NO: 810625 - RNA, 19 nt, Artificial Sequence
  Description of Artificial Sequence: Synthetic oligonucleotide
guugcaauauacuccgaua

SEQ ID NO: 810626 - RNA, 19 nt, Artificial Sequence
  Description of Artificial Sequence: Synthetic oligonucleotide
ucucauguacuggcggaag

SEQ ID NO: 810627 - RNA, 19 nt, Artificial Sequence
  Description of Artificial Sequence: Synthetic oligonucleotide
acuggcggaaguacaaaag

SEQ ID NO: 810628 - RNA, 19 nt, Artificial Sequence
  Description of Artificial Sequence: Synthetic oligonucleotide
uucccaguucaucaaugau

SEQ ID NO: 810629 - RNA, 19 nt, Artificial Sequence
  Description of Artificial Sequence: Synthetic oligonucleotide
uucgugaaaugauuucauu

SEQ ID NO: 810630 - RNA, 19 nt, Artificial Sequence
  Description of Artificial Sequence: Synthetic oligonucleotide
ugucuggcgcacucuacca

SEQ ID NO: 810631 - RNA, 19 nt, Artificial Sequence
  Description of Artificial Sequence: Synthetic oligonucleotide
uuaaccccguucuucugaa

SEQ ID NO: 810632 - RNA, 19 nt, Artificial Sequence
  Description of Artificial Sequence: Synthetic oligonucleotide
agaucuggaaaucgacgaa

SEQ ID NO: 810633 - RNA, 19 nt, Artificial Sequence
  Description of Artificial Sequence: Synthetic oligonucleotide
ugccuggaggcuuucaaua

SEQ ID NO: 810634 - RNA, 19 nt, Artificial Sequence
  Description of Artificial Sequence: Synthetic oligonucleotide
gagggcucuaacugcugcc

SEQ ID NO: 810635 - RNA, 19 nt, Artificial Sequence
  Description of Artificial Sequence: Synthetic oligonucleotide
ggauguauguugauuuacc

SEQ ID NO: 810636 - RNA, 19 nt, Artificial Sequence
  Description of Artificial Sequence: Synthetic oligonucleotide
uuaguucacucagguuagg

SEQ ID NO: 810637 - RNA, 19 nt, Artificial Sequence
  Description of Artificial Sequence: Synthetic oligonucleotide
gacggauguauguugauuu

SEQ ID NO: 810638 - RNA, 19 nt, Artificial Sequence
  Description of Artificial Sequence: Synthetic oligonucleotide
uuugcgggugguuccauuu

SEQ ID NO: 810639 - RNA, 19 nt, Artificial Sequence
  Description of Artificial Sequence: Synthetic oligonucleotide
aggaacucaugguuuucca

SEQ ID NO: 810640 - RNA, 19 nt, Artificial Sequence
  Description of Artificial Sequence: Synthetic oligonucleotide
auguugauuuaccucccau

SEQ ID NO: 810641 - RNA, 19 nt, Artificial Sequence
  Description of Artificial Sequence: Synthetic oligonucleotide
uugguucuacauagccuga

SEQ ID NO: 810642 - RNA, 19 nt, Artificial Sequence
  Description of Artificial Sequence: Synthetic oligonucleotide
uaguucacucagguuagga

SEQ ID NO: 810643 - RNA, 19 nt, Artificial Sequence
  Description of Artificial Sequence: Synthetic oligonucleotide
cuguaugacgcuggggagc

SEQ ID NO: 810644 - RNA, 19 nt, Artificial Sequence
  Description of Artificial Sequence: Synthetic oligonucleotide
cuacauagccugaagaaau

SEQ ID NO: 810645 - RNA, 19 nt, Artificial Sequence
  Description of Artificial Sequence: Synthetic oligonucleotide
cuaguuagugcugugacgu

SEQ ID NO: 810646 - RNA, 19 nt, Artificial Sequence
  Description of Artificial Sequence: Synthetic oligonucleotide
cuuugguugcugaccugag

SEQ ID NO: 810647 - RNA, 19 nt, Artificial Sequence
  Description of Artificial Sequence: Synthetic oligonucleotide
gguucuacauagccugaag

SEQ ID NO: 810648 - RNA, 19 nt, Artificial Sequence
  Description of Artificial Sequence: Synthetic oligonucleotide
gcagguuacacgaaaauaa

SEQ ID NO: 810649 - RNA, 19 nt, Artificial Sequence
  Description of Artificial Sequence: Synthetic oligonucleotide
ugccgagggaaauuagcaa

SEQ ID NO: 810650 - RNA, 19 nt, Artificial Sequence
  Description of Artificial Sequence: Synthetic oligonucleotide
guuaaccaaucuuuguccu

SEQ ID NO: 810651 - RNA, 19 nt, Artificial Sequence
  Description of Artificial Sequence: Synthetic oligonucleotide
auauagucgguagcagucu

SEQ ID NO: 810652 - RNA, 19 nt, Artificial Sequence
  Description of Artificial Sequence: Synthetic oligonucleotide
gguaaacuuaaccccguuc

SEQ ID NO: 810653 - RNA, 19 nt, Artificial Sequence
  Description of Artificial Sequence: Synthetic oligonucleotide
cauacguagagguuccucu

SEQ ID NO: 810654 - RNA, 19 nt, Artificial Sequence
  Description of Artificial Sequence: Synthetic oligonucleotide
uagucgguagcagucuugu

SEQ ID NO: 810655 - RNA, 19 nt, Artificial Sequence
  Description of Artificial Sequence: Synthetic oligonucleotide
gguuacacgaaaauaauau

SEQ ID NO: 810656 - RNA, 19 nt, Artificial Sequence
  Description of Artificial Sequence: Synthetic oligonucleotide
guauguugauuuaccuccc

SEQ ID NO: 810657 - RNA, 19 nt, Artificial Sequence
  Description of Artificial Sequence: Synthetic oligonucleotide
gccuguaugacgcugggga

SEQ ID NO: 810658 - RNA, 19 nt, Artificial Sequence
  Description of Artificial Sequence: Synthetic oligonucleotide
gagccuguaugacgcuggg

SEQ ID NO: 810659 - RNA, 19 nt, Artificial Sequence
  Description of Artificial Sequence: Synthetic oligonucleotide
ccgacaugucaguaaaggg

SEQ ID NO: 810660 - RNA, 19 nt, Artificial Sequence
  Description of Artificial Sequence: Synthetic oligonucleotide
ugucaguaaagggcacuug

SEQ ID NO: 810661 - RNA, 19 nt, Artificial Sequence
  Description of Artificial Sequence: Synthetic oligonucleotide
aguucacuguugguaaacu

SEQ ID NO: 810662 - RNA, 19 nt, Artificial Sequence
  Description of Artificial Sequence: Synthetic oligonucleotide
gguaaagcauaguuaaggu

SEQ ID NO: 810663 - RNA, 19 nt, Artificial Sequence
  Description of Artificial Sequence: Synthetic oligonucleotide
ccaacucgagccaggaugc

SEQ ID NO: 810664 - RNA, 19 nt, Artificial Sequence
  Description of Artificial Sequence: Synthetic oligonucleotide
gcugacaacagcaucuaac

SEQ ID NO: 810665 - RNA, 19 nt, Artificial Sequence
  Description of Artificial Sequence: Synthetic oligonucleotide
uccuccgacaugucaguaa

SEQ ID NO: 810666 - RNA, 19 nt, Artificial Sequence
  Description of Artificial Sequence: Synthetic oligonucleotide
gacgugcagauuauugaca

SEQ ID NO: 810667 - RNA, 19 nt, Artificial Sequence
  Description of Artificial Sequence: Synthetic oligonucleotide
ucauacguagagguuccuc

SEQ ID NO: 810668 - RNA, 19 nt, Artificial Sequence
  Description of Artificial Sequence: Synthetic oligonucleotide
uucagcugacugucaccag

SEQ ID NO: 810669 - RNA, 19 nt, Artificial Sequence
  Description of Artificial Sequence: Synthetic oligonucleotide
uugggccaugaguacaauc

SEQ ID NO: 810670 - RNA, 19 nt, Artificial Sequence
  Description of Artificial Sequence: Synthetic oligonucleotide
uagcacuucuuugcgggug

SEQ ID NO: 810671 - RNA, 19 nt, Artificial Sequence
  Description of Artificial Sequence: Synthetic oligonucleotide
gguuccaaugcucugaaau

SEQ ID NO: 810672 - RNA, 19 nt, Artificial Sequence
  Description of Artificial Sequence: Synthetic oligonucleotide
guaaguucgcugcuugucu

SEQ ID NO: 810673 - RNA, 19 nt, Artificial Sequence
  Description of Artificial Sequence: Synthetic oligonucleotide
aucuucguugcaauauacu

SEQ ID NO: 810674 - RNA, 19 nt, Artificial Sequence
  Description of Artificial Sequence: Synthetic oligonucleotide
auacguagagguuccucuu

SEQ ID NO: 810675 - RNA, 19 nt, Artificial Sequence
  Description of Artificial Sequence: Synthetic oligonucleotide
caugcuaacccaaauccau

SEQ ID NO: 810676 - RNA, 19 nt, Artificial Sequence
  Description of Artificial Sequence: Synthetic oligonucleotide
cuuuauucgugaaaugauu

SEQ ID NO: 810677 - RNA, 19 nt, Artificial Sequence
  Description of Artificial Sequence: Synthetic oligonucleotide
aucuggaaaucgacgaagu

SEQ ID NO: 810678 - RNA, 19 nt, Artificial Sequence
  Description of Artificial Sequence: Synthetic oligonucleotide
guaaagcauaguuaagguu

SEQ ID NO: 810679 - RNA, 19 nt, Artificial Sequence
  Description of Artificial Sequence: Synthetic oligonucleotide
cuaacccaaauccaucaua

SEQ ID NO: 810680 - RNA, 19 nt, Artificial Sequence
  Description of Artificial Sequence: Synthetic oligonucleotide
aggccauccauuacuucuc

SEQ ID NO: 810681 - RNA, 19 nt, Artificial Sequence
  Description of Artificial Sequence: Synthetic oligonucleotide
caccucugcugacucacag

SEQ ID NO: 810682 - RNA, 19 nt, Artificial Sequence
  Description of Artificial Sequence: Synthetic oligonucleotide
ccaugaacguggaaacacc

SEQ ID NO: 810683 - RNA, 19 nt, Artificial Sequence
  Description of Artificial Sequence: Synthetic oligonucleotide
agccuuuugucuggcgcac

SEQ ID NO: 810684 - RNA, 19 nt, Artificial Sequence
  Description of Artificial Sequence: Synthetic oligonucleotide
ugcgaaggacuuucucuuc

SEQ ID NO: 810685 - RNA, 19 nt, Artificial Sequence
  Description of Artificial Sequence: Synthetic oligonucleotide
cauugguucuacauagccu

SEQ ID NO: 810686 - RNA, 19 nt, Artificial Sequence
  Description of Artificial Sequence: Synthetic oligonucleotide
cuugagcuaguuuugcuau

SEQ ID NO: 810687 - RNA, 19 nt, Artificial Sequence
  Description of Artificial Sequence: Synthetic oligonucleotide
gacgugagcaaagcugaca

SEQ ID NO: 810688 - RNA, 19 nt, Artificial Sequence
  Description of Artificial Sequence: Synthetic oligonucleotide
gugagguuccaaugcucug

SEQ ID NO: 810689 - RNA, 19 nt, Artificial Sequence
  Description of Artificial Sequence: Synthetic oligonucleotide
ucacgaaaacugccaucaa

SEQ ID NO: 810690 - RNA, 19 nt, Artificial Sequence
  Description of Artificial Sequence: Synthetic oligonucleotide
accccguucuucugaauau

SEQ ID NO: 810691 - RNA, 19 nt, Artificial Sequence
  Description of Artificial Sequence: Synthetic oligonucleotide
aacucgagccaggaugcaa

SEQ ID NO: 810692 - RNA, 19 nt, Artificial Sequence
  Description of Artificial Sequence: Synthetic oligonucleotide
uccucauacucgccuuuau

SEQ ID NO: 810693 - RNA, 19 nt, Artificial Sequence
  Description of Artificial Sequence: Synthetic oligonucleotide
ugguaaacuuaaccccguu

SEQ ID NO: 810694 - RNA, 19 nt, Artificial Sequence
  Description of Artificial Sequence: Synthetic oligonucleotide
gcaaucuaaaauggacacc

SEQ ID NO: 810695 - RNA, 19 nt, Artificial Sequence
  Description of Artificial Sequence: Synthetic oligonucleotide
cccguucuucugaauaucc

SEQ ID NO: 810696 - RNA, 19 nt, Artificial Sequence
  Description of Artificial Sequence: Synthetic oligonucleotide
aagaccccgggcugcacuu

SEQ ID NO: 810697 - RNA, 19 nt, Artificial Sequence
  Description of Artificial Sequence: Synthetic oligonucleotide
gcgaaggacuuucucuucc

SEQ ID NO: 810698 - RNA, 19 nt, Artificial Sequence
  Description of Artificial Sequence: Synthetic oligonucleotide
uaccucccauauugggacc

SEQ ID NO: 810699 - RNA, 19 nt, Artificial Sequence
  Description of Artificial Sequence: Synthetic oligonucleotide
acggauguauguugauuua

SEQ ID NO: 810700 - RNA, 19 nt, Artificial Sequence
  Description of Artificial Sequence: Synthetic oligonucleotide
uuguugcgaaggacuuucu

SEQ ID NO: 810701 - RNA, 19 nt, Artificial Sequence
  Description of Artificial Sequence: Synthetic oligonucleotide
ugguugcugaccugaggau

SEQ ID NO: 810702 - RNA, 19 nt, Artificial Sequence
  Description of Artificial Sequence: Synthetic oligonucleotide
agguuacacgaaaauaaua

SEQ ID NO: 810703 - RNA, 19 nt, Artificial Sequence
  Description of Artificial Sequence: Synthetic oligonucleotide
caugaacguggaaacaccu

SEQ ID NO: 810704 - RNA, 19 nt, Artificial Sequence
  Description of Artificial Sequence: Synthetic oligonucleotide
aucuuugguugcugaccug

SEQ ID NO: 810705 - RNA, 19 nt, Artificial Sequence
  Description of Artificial Sequence: Synthetic oligonucleotide
cagauuauugacaguuggu

SEQ ID NO: 810706 - RNA, 19 nt, Artificial Sequence
  Description of Artificial Sequence: Synthetic oligonucleotide
ucuuugcgaccaccucggc

SEQ ID NO: 810707 - RNA, 19 nt, Artificial Sequence
  Description of Artificial Sequence: Synthetic oligonucleotide
uucuuugcgggugguucca

SEQ ID NO: 810708 - RNA, 19 nt, Artificial Sequence
  Description of Artificial Sequence: Synthetic oligonucleotide
uugcgggugguuccauuuc

SEQ ID NO: 810709 - RNA, 19 nt, Artificial Sequence
  Description of Artificial Sequence: Synthetic oligonucleotide
cuccgacaugucaguaaag

SEQ ID NO: 810710 - RNA, 19 nt, Artificial Sequence
  Description of Artificial Sequence: Synthetic oligonucleotide
auuugggccaugaguacaa

SEQ ID NO: 810711 - RNA, 19 nt, Artificial Sequence
  Description of Artificial Sequence: Synthetic oligonucleotide
agaacccuggaaagguuga

SEQ ID NO: 810712 - RNA, 19 nt, Artificial Sequence
  Description of Artificial Sequence: Synthetic oligonucleotide
ugguucuacauagccugaa

SEQ ID NO: 810713 - RNA, 19 nt, Artificial Sequence
  Description of Artificial Sequence: Synthetic oligonucleotide
cauuugagacgugagcaaa

SEQ ID NO: 810714 - RNA, 19 nt, Artificial Sequence
  Description of Artificial Sequence: Synthetic oligonucleotide
aucgacgaaguaaguccuc

SEQ ID NO: 810715 - RNA, 19 nt, Artificial Sequence
  Description of Artificial Sequence: Synthetic oligonucleotide
caauaagaggagucacgaa

SEQ ID NO: 810716 - RNA, 19 nt, Artificial Sequence
  Description of Artificial Sequence: Synthetic oligonucleotide
cccugugagguuccaaugc

SEQ ID NO: 810717 - RNA, 19 nt, Artificial Sequence
  Description of Artificial Sequence: Synthetic oligonucleotide
caaucuucguugcaauaua

SEQ ID NO: 810718 - RNA, 19 nt, Artificial Sequence
  Description of Artificial Sequence: Synthetic oligonucleotide
ucgagccaggaugcaaucu

SEQ ID NO: 810719 - RNA, 19 nt, Artificial Sequence
  Description of Artificial Sequence: Synthetic oligonucleotide
acguaaggaacaggugcug

SEQ ID NO: 810720 - RNA, 19 nt, Artificial Sequence
  Description of Artificial Sequence: Synthetic oligonucleotide
agacgugagcaaagcugac

SEQ ID NO: 810721 - RNA, 19 nt, Artificial Sequence
  Description of Artificial Sequence: Synthetic oligonucleotide
ccugauauagucgguagca

SEQ ID NO: 810722 - RNA, 19 nt, Artificial Sequence
  Description of Artificial Sequence: Synthetic oligonucleotide
ucguugcaauauacuccga

SEQ ID NO: 810723 - RNA, 19 nt, Artificial Sequence
  Description of Artificial Sequence: Synthetic oligonucleotide
agucucuacuaaauuuaau

SEQ ID NO: 810724 - RNA, 19 nt, Artificial Sequence
  Description of Artificial Sequence: Synthetic oligonucleotide
caccugauccauauccaaa

SEQ ID NO: 810725 - RNA, 19 nt, Artificial Sequence
  Description of Artificial Sequence: Synthetic oligonucleotide
cuggcggaaguacaaaagu

SEQ ID NO: 810726 - RNA, 19 nt, Artificial Sequence
  Description of Artificial Sequence: Synthetic oligonucleotide
acgcuggggagcugguuca

SEQ ID NO: 810727 - RNA, 19 nt, Artificial Sequence
  Description of Artificial Sequence: Synthetic oligonucleotide
agcccaugcuaacccaaau

SEQ ID NO: 810728 - RNA, 19 nt, Artificial Sequence
  Description of Artificial Sequence: Synthetic oligonucleotide
cugguuaaccaaucuuugu

SEQ ID NO: 810729 - RNA, 19 nt, Artificial Sequence
  Description of Artificial Sequence: Synthetic oligonucleotide
cucgagccaggaugcaauc

SEQ ID NO: 810730 - RNA, 19 nt, Artificial Sequence
  Description of Artificial Sequence: Synthetic oligonucleotide
acucgagccaggaugcaau

SEQ ID NO: 810731 - RNA, 19 nt, Artificial Sequence
  Description of Artificial Sequence: Synthetic oligonucleotide
ccuguaugacgcuggggag

SEQ ID NO: 810732 - RNA, 19 nt, Artificial Sequence
  Description of Artificial Sequence: Synthetic oligonucleotide
gucuggcgcacucuaccac

SEQ ID NO: 810733 - RNA, 19 nt, Artificial Sequence
  Description of Artificial Sequence: Synthetic oligonucleotide
uccuugcagguuacacgaa

SEQ ID NO: 810734 - RNA, 19 nt, Artificial Sequence
  Description of Artificial Sequence: Synthetic oligonucleotide
agccuguaugacgcugggg

SEQ ID NO: 810735 - RNA, 19 nt, Artificial Sequence
  Description of Artificial Sequence: Synthetic oligonucleotide
acaugccgagggaaauuag

SEQ ID NO: 810736 - RNA, 19 nt, Artificial Sequence
  Description of Artificial Sequence: Synthetic oligonucleotide
cagucugacggauguaugu

SEQ ID NO: 810737 - RNA, 19 nt, Artificial Sequence
  Description of Artificial Sequence: Synthetic oligonucleotide
caucacgucccugugaggu

SEQ ID NO: 810738 - RNA, 19 nt, Artificial Sequence
  Description of Artificial Sequence: Synthetic oligonucleotide
aucucauguacuggcggaa

SEQ ID NO: 810739 - RNA, 19 nt, Artificial Sequence
  Description of Artificial Sequence: Synthetic oligonucleotide
gaauauccacugugcugaa

SEQ ID NO: 810740 - RNA, 19 nt, Artificial Sequence
  Description of Artificial Sequence: Synthetic oligonucleotide
gagucacgaaaacugccau

SEQ ID NO: 810741 - RNA, 19 nt, Artificial Sequence
  Description of Artificial Sequence: Synthetic oligonucleotide
cagguuacacgaaaauaau

SEQ ID NO: 810742 - RNA, 19 nt, Artificial Sequence
  Description of Artificial Sequence: Synthetic oligonucleotide
cagugguaucuucaacaga

SEQ ID NO: 810743 - RNA, 19 nt, Artificial Sequence
  Description of Artificial Sequence: Synthetic oligonucleotide
caaccucaucuugaauuuc

SEQ ID NO: 810744 - RNA, 19 nt, Artificial Sequence
  Description of Artificial Sequence: Synthetic oligonucleotide
cccaaauccaucauacgua

SEQ ID NO: 810745 - RNA, 19 nt, Artificial Sequence
  Description of Artificial Sequence: Synthetic oligonucleotide
cugauccauauccaaaguu

SEQ ID NO: 810746 - RNA, 19 nt, Artificial Sequence
  Description of Artificial Sequence: Synthetic oligonucleotide
guaaguccuccuguaaagu

SEQ ID NO: 810747 - RNA, 19 nt, Artificial Sequence
  Description of Artificial Sequence: Synthetic oligonucleotide
caguugguaucuggcuagc

SEQ ID NO: 810748 - RNA, 19 nt, Artificial Sequence
  Description of Artificial Sequence: Synthetic oligonucleotide
gcccaugcuaacccaaauc

SEQ ID NO: 810749 - RNA, 19 nt, Artificial Sequence
  Description of Artificial Sequence: Synthetic oligonucleotide
agaugacuggccguacgua

SEQ ID NO: 810750 - RNA, 19 nt, Artificial Sequence
  Description of Artificial Sequence: Synthetic oligonucleotide
aacacccaauuugggccau

SEQ ID NO: 810751 - RNA, 19 nt, Artificial Sequence
  Description of Artificial Sequence: Synthetic oligonucleotide
cguacguaaggaacaggug

SEQ ID NO: 810752 - RNA, 19 nt, Artificial Sequence
  Description of Artificial Sequence: Synthetic oligonucleotide
cucucucuccagguagcac

SEQ ID NO: 810753 - RNA, 19 nt, Artificial Sequence
  Description of Artificial Sequence: Synthetic oligonucleotide
ccgauauagcccaugcuaa

SEQ ID NO: 810754 - RNA, 19 nt, Artificial Sequence
  Description of Artificial Sequence: Synthetic oligonucleotide
gacuggccguacguaagga

SEQ ID NO: 810755 - RNA, 19 nt, Artificial Sequence
  Description of Artificial Sequence: Synthetic oligonucleotide
ccaugcuaacccaaaucca

SEQ ID NO: 810756 - RNA, 19 nt, Artificial Sequence
  Description of Artificial Sequence: Synthetic oligonucleotide
cuuugcgaccaccucggcu

SEQ ID NO: 810757 - RNA, 19 nt, Artificial Sequence
  Description of Artificial Sequence: Synthetic oligonucleotide
cgauauagcccaugcuaac

SEQ ID NO: 810758 - RNA, 19 nt, Artificial Sequence
  Description of Artificial Sequence: Synthetic oligonucleotide
cccaauuugggccaugagu

SEQ ID NO: 810759 - RNA, 19 nt, Artificial Sequence
  Description of Artificial Sequence: Synthetic oligonucleotide
cacaugccgagggaaauua

SEQ ID NO: 810760 - RNA, 19 nt, Artificial Sequence
  Description of Artificial Sequence: Synthetic oligonucleotide
aucauacguagagguuccu

SEQ ID NO: 810761 - RNA, 19 nt, Artificial Sequence
  Description of Artificial Sequence: Synthetic oligonucleotide
ccuuuugucuggcgcacuc

SEQ ID NO: 810762 - RNA, 19 nt, Artificial Sequence
  Description of Artificial Sequence: Synthetic oligonucleotide
cucuaacugcugccauguc

SEQ ID NO: 810763 - RNA, 19 nt, Artificial Sequence
  Description of Artificial Sequence: Synthetic oligonucleotide
ggccguacguaaggaacag

SEQ ID NO: 810764 - RNA, 19 nt, Artificial Sequence
  Description of Artificial Sequence: Synthetic oligonucleotide
agguuccaaugcucugaaa

SEQ ID NO: 810765 - RNA, 19 nt, Artificial Sequence
  Description of Artificial Sequence: Synthetic oligonucleotide
ccguacguaaggaacaggu

SEQ ID NO: 810766 - RNA, 19 nt, Artificial Sequence
  Description of Artificial Sequence: Synthetic oligonucleotide
ccuuuauucgugaaaugau

SEQ ID NO: 810767 - RNA, 19 nt, Artificial Sequence
  Description of Artificial Sequence: Synthetic oligonucleotide
ucacucagguuaggaucaa

SEQ ID NO: 810768 - RNA, 19 nt, Artificial Sequence
  Description of Artificial Sequence: Synthetic oligonucleotide
caugucaguaaagggcacu

SEQ ID NO: 810769 - RNA, 19 nt, Artificial Sequence
  Description of Artificial Sequence: Synthetic oligonucleotide
agucgguagcagucuugua

SEQ ID NO: 810770 - RNA, 19 nt, Artificial Sequence
  Description of Artificial Sequence: Synthetic oligonucleotide
gcaaccucaucuugaauuu

SEQ ID NO: 810771 - RNA, 19 nt, Artificial Sequence
  Description of Artificial Sequence: Synthetic oligonucleotide
cacccaauuugggccauga

SEQ ID NO: 810772 - RNA, 19 nt, Artificial Sequence
  Description of Artificial Sequence: Synthetic oligonucleotide
ccauauugggaccaguaau

SEQ ID NO: 810773 - RNA, 19 nt, Artificial Sequence
  Description of Artificial Sequence: Synthetic oligonucleotide
agcaugccuggaggcuuuc

SEQ ID NO: 810774 - RNA, 19 nt, Artificial Sequence
  Description of Artificial Sequence: Synthetic oligonucleotide
uugcgaccaccucggcuuu

SEQ ID NO: 810775 - RNA, 19 nt, Artificial Sequence
  Description of Artificial Sequence: Synthetic oligonucleotide
cggauguauguugauuuac

SEQ ID NO: 810776 - RNA, 19 nt, Artificial Sequence
  Description of Artificial Sequence: Synthetic oligonucleotide
ucuuugcgggugguuccau

SEQ ID NO: 810777 - RNA, 19 nt, Artificial Sequence
  Description of Artificial Sequence: Synthetic oligonucleotide
gccguacguaaggaacagg

SEQ ID NO: 810778 - RNA, 19 nt, Artificial Sequence
  Description of Artificial Sequence: Synthetic oligonucleotide
cacccugauauagucggua

SEQ ID NO: 810779 - RNA, 19 nt, Artificial Sequence
  Description of Artificial Sequence: Synthetic oligonucleotide
ccuccgacaugucaguaaa

SEQ ID NO: 810780 - RNA, 19 nt, Artificial Sequence
  Description of Artificial Sequence: Synthetic oligonucleotide
gcggaaguacaaaaguagu

SEQ ID NO: 810781 - RNA, 19 nt, Artificial Sequence
  Description of Artificial Sequence: Synthetic oligonucleotide
ccaucacgucccugugagg

SEQ ID NO: 810782 - RNA, 19 nt, Artificial Sequence
  Description of Artificial Sequence: Synthetic oligonucleotide
ccuugcagguuacacgaaa

SEQ ID NO: 810783 - RNA, 19 nt, Artificial Sequence
  Description of Artificial Sequence: Synthetic oligonucleotide
gcgcacucuaccacaugcc

SEQ ID NO: 810784 - RNA, 19 nt, Artificial Sequence
  Description of Artificial Sequence: Synthetic oligonucleotide
acacccaauuugggccaug

SEQ ID NO: 810785 - RNA, 19 nt, Artificial Sequence
  Description of Artificial Sequence: Synthetic oligonucleotide
gguagcagucuuguaaguu

SEQ ID NO: 810786 - RNA, 19 nt, Artificial Sequence
  Description of Artificial Sequence: Synthetic oligonucleotide
cgugagcaaagcugacaac

SEQ ID NO: 810787 - RNA, 19 nt, Artificial Sequence
  Description of Artificial Sequence: Synthetic oligonucleotide
ccaccugauccauauccaa

SEQ ID NO: 810788 - RNA, 19 nt, Artificial Sequence
  Description of Artificial Sequence: Synthetic oligonucleotide
ccaaucuucguugcaauau

SEQ ID NO: 810789 - RNA, 19 nt, Artificial Sequence
  Description of Artificial Sequence: Synthetic oligonucleotide
gcuaacccaaauccaucau

SEQ ID NO: 810790 - RNA, 19 nt, Artificial Sequence
  Description of Artificial Sequence: Synthetic oligonucleotide
ggaaaucgacgaaguaagu

SEQ ID NO: 810791 - RNA, 19 nt, Artificial Sequence
  Description of Artificial Sequence: Synthetic oligonucleotide
cugacggauguauguugau

SEQ ID NO: 810792 - RNA, 19 nt, Artificial Sequence
  Description of Artificial Sequence: Synthetic oligonucleotide
gcuagccaaagcaguaagu

SEQ ID NO: 810793 - RNA, 19 nt, Artificial Sequence
  Description of Artificial Sequence: Synthetic oligonucleotide
gcagucuuguaaguucgcu

SEQ ID NO: 810794 - RNA, 19 nt, Artificial Sequence
  Description of Artificial Sequence: Synthetic oligonucleotide
gcaagucgguuaagaucug

SEQ ID NO: 810795 - RNA, 19 nt, Artificial Sequence
  Description of Artificial Sequence: Synthetic oligonucleotide
cacucagguuaggaucaaa

SEQ ID NO: 810796 - RNA, 19 nt, Artificial Sequence
  Description of Artificial Sequence: Synthetic oligonucleotide
guaugacgcuggggagcug

SEQ ID NO: 810797 - RNA, 19 nt, Artificial Sequence
  Description of Artificial Sequence: Synthetic oligonucleotide
cgguuaagaucuggaaauc

SEQ ID NO: 810798 - RNA, 19 nt, Artificial Sequence
  Description of Artificial Sequence: Synthetic oligonucleotide
cuggcgcacucuaccacau

SEQ ID NO: 810799 - RNA, 19 nt, Artificial Sequence
  Description of Artificial Sequence: Synthetic oligonucleotide
ccgggcugcacuuauuaau

SEQ ID NO: 810800 - RNA, 19 nt, Artificial Sequence
  Description of Artificial Sequence: Synthetic oligonucleotide
cuuugcgggugguuccauu

SEQ ID NO: 810801 - RNA, 19 nt, Artificial Sequence
  Description of Artificial Sequence: Synthetic oligonucleotide
gcgggugguuccauuucuc

SEQ ID NO: 810802 - RNA, 19 nt, Artificial Sequence
  Description of Artificial Sequence: Synthetic oligonucleotide
ugcgaccaccucggcuuuu

SEQ ID NO: 810803 - RNA, 19 nt, Artificial Sequence
  Description of Artificial Sequence: Synthetic oligonucleotide
accucggcuuuuaguuguu

SEQ ID NO: 810804 - RNA, 19 nt, Artificial Sequence
  Description of Artificial Sequence: Synthetic oligonucleotide
cucccauauugggaccagu

SEQ ID NO: 810805 - RNA, 19 nt, Artificial Sequence
  Description of Artificial Sequence: Synthetic oligonucleotide
ccccgggcugcacuuauua

SEQ ID NO: 810806 - RNA, 19 nt, Artificial Sequence
  Description of Artificial Sequence: Synthetic oligonucleotide
ccaugagaggcuguuuaau

SEQ ID NO: 810807 - RNA, 19 nt, Artificial Sequence
  Description of Artificial Sequence: Synthetic oligonucleotide
cgagggaaauuagcaagcu

SEQ ID NO: 810808 - RNA, 19 nt, Artificial Sequence
  Description of Artificial Sequence: Synthetic oligonucleotide
cugugacgugcagauuauu

SEQ ID NO: 810809 - RNA, 19 nt, Artificial Sequence
  Description of Artificial Sequence: Synthetic oligonucleotide
cgacgaaguaaguccuccu

SEQ ID NO: 810810 - RNA, 19 nt, Artificial Sequence
  Description of Artificial Sequence: Synthetic oligonucleotide
accccgggcugcacuuauu

SEQ ID NO: 810811 - RNA, 19 nt, Artificial Sequence
  Description of Artificial Sequence: Synthetic oligonucleotide
gccuuuugucuggcgcacu

SEQ ID NO: 810812 - RNA, 19 nt, Artificial Sequence
  Description of Artificial Sequence: Synthetic oligonucleotide
gugcugugacgugcagauu

SEQ ID NO: 810813 - RNA, 19 nt, Artificial Sequence
  Description of Artificial Sequence: Synthetic oligonucleotide
ccacaugccgagggaaauu

SEQ ID NO: 810814 - RNA, 19 nt, Artificial Sequence
  Description of Artificial Sequence: Synthetic oligonucleotide
aaaauuauugaaccuaagc

SEQ ID NO: 810815 - RNA, 19 nt, Artificial Sequence
  Description of Artificial Sequence: Synthetic oligonucleotide
aauuauugaaccuaagcag

SEQ ID NO: 810816 - RNA, 19 nt, Artificial Sequence
  Description of Artificial Sequence: Synthetic oligonucleotide
aaauuauugaaccuaagca

SEQ ID NO: 810817 - RNA, 19 nt, Artificial Sequence
  Description of Artificial Sequence: Synthetic oligonucleotide
aaucugauaggugaaaugc

SEQ ID NO: 810818 - RNA, 19 nt, Artificial Sequence
  Description of Artificial Sequence: Synthetic oligonucleotide
auuagaauagaaguuaagc

SEQ ID NO: 810819 - RNA, 19 nt, Artificial Sequence
  Description of Artificial Sequence: Synthetic oligonucleotide
ugaaccuacguccacaucg

SEQ ID NO: 810820 - RNA, 19 nt, Artificial Sequence
  Description of Artificial Sequence: Synthetic oligonucleotide
aguuaagcaauacugggcc

SEQ ID NO: 810821 - RNA, 19 nt, Artificial Sequence
  Description of Artificial Sequence: Synthetic oligonucleotide
aaugaguuuguuuucaggu

SEQ ID NO: 810822 - RNA, 19 nt, Artificial Sequence
  Description of Artificial Sequence: Synthetic oligonucleotide
auccauugaaccuacgucc

SEQ ID NO: 810823 - RNA, 19 nt, Artificial Sequence
  Description of Artificial Sequence: Synthetic oligonucleotide
uuagaauagaaguuaagca

SEQ ID NO: 810824 - RNA, 19 nt, Artificial Sequence
  Description of Artificial Sequence: Synthetic oligonucleotide
aacguaaggaaguuucucg

SEQ ID NO: 810825 - RNA, 19 nt, Artificial Sequence
  Description of Artificial Sequence: Synthetic oligonucleotide
ucuuucaaaaguuacguca

SEQ ID NO: 810826 - RNA, 19 nt, Artificial Sequence
  Description of Artificial Sequence: Synthetic oligonucleotide
ucagagacaaacuguaacg

SEQ ID NO: 810827 - RNA, 19 nt, Artificial Sequence
  Description of Artificial Sequence: Synthetic oligonucleotide
agaacugagucacuggacc

SEQ ID NO: 810828 - RNA, 19 nt, Artificial Sequence
  Description of Artificial Sequence: Synthetic oligonucleotide
agaauaauuaugcagucca

SEQ ID NO: 810829 - RNA, 19 nt, Artificial Sequence
  Description of Artificial Sequence: Synthetic oligonucleotide
auugaaccuaagcagaauc

SEQ ID NO: 810830 - RNA, 19 nt, Artificial Sequence
  Description of Artificial Sequence: Synthetic oligonucleotide
guaucguuggucuucaagg

SEQ ID NO: 810831 - RNA, 19 nt, Artificial Sequence
  Description of Artificial Sequence: Synthetic oligonucleotide
uguaacguaaggaaguuuc

SEQ ID NO: 810832 - RNA, 19 nt, Artificial Sequence
  Description of Artificial Sequence: Synthetic oligonucleotide
ucuguggugaaucuugaag

SEQ ID NO: 810833 - RNA, 19 nt, Artificial Sequence
  Description of Artificial Sequence: Synthetic oligonucleotide
acauaaucauaguugcagc

SEQ ID NO: 810834 - RNA, 19 nt, Artificial Sequence
  Description of Artificial Sequence: Synthetic oligonucleotide
aauaauuaugcaguccaag

SEQ ID NO: 810835 - RNA, 19 nt, Artificial Sequence
  Description of Artificial Sequence: Synthetic oligonucleotide
aauagaaguuaagcaauac

SEQ ID NO: 810836 - RNA, 19 nt, Artificial Sequence
  Description of Artificial Sequence: Synthetic oligonucleotide
agagaaaacuuagugaagg

SEQ ID NO: 810837 - RNA, 19 nt, Artificial Sequence
  Description of Artificial Sequence: Synthetic oligonucleotide
aaguuaagcaauacugggc

SEQ ID NO: 810838 - RNA, 19 nt, Artificial Sequence
  Description of Artificial Sequence: Synthetic oligonucleotide
aauacugggccauccacag

SEQ ID NO: 810839 - RNA, 19 nt, Artificial Sequence
  Description of Artificial Sequence: Synthetic oligonucleotide
aaugcuaggaccaucaaaa

SEQ ID NO: 810840 - RNA, 19 nt, Artificial Sequence
  Description of Artificial Sequence: Synthetic oligonucleotide
acauuguugggguaguugg

SEQ ID NO: 810841 - RNA, 19 nt, Artificial Sequence
  Description of Artificial Sequence: Synthetic oligonucleotide
ucgaagagauaaaaggugc

SEQ ID NO: 810842 - RNA, 19 nt, Artificial Sequence
  Description of Artificial Sequence: Synthetic oligonucleotide
ucagaaccacauauggucg

SEQ ID NO: 810843 - RNA, 19 nt, Artificial Sequence
  Description of Artificial Sequence: Synthetic oligonucleotide
agaacguuccaagagaccg

SEQ ID NO: 810844 - RNA, 19 nt, Artificial Sequence
  Description of Artificial Sequence: Synthetic oligonucleotide
aagagauaaaaggugcagg

SEQ ID NO: 810845 - RNA, 19 nt, Artificial Sequence
  Description of Artificial Sequence: Synthetic oligonucleotide
gaugaaacguuuugugggg

SEQ ID NO: 810846 - RNA, 19 nt, Artificial Sequence
  Description of Artificial Sequence: Synthetic oligonucleotide
gagguaucggucuuaaacc

SEQ ID NO: 810847 - RNA, 19 nt, Artificial Sequence
  Description of Artificial Sequence: Synthetic oligonucleotide
aauucuggaaccacagaac

SEQ ID NO: 810848 - RNA, 19 nt, Artificial Sequence
  Description of Artificial Sequence: Synthetic oligonucleotide
uguugagucuuccagcuca

SEQ ID NO: 810849 - RNA, 19 nt, Artificial Sequence
  Description of Artificial Sequence: Synthetic oligonucleotide
ugacaaaagaaggagggag

SEQ ID NO: 810850 - RNA, 19 nt, Artificial Sequence
  Description of Artificial Sequence: Synthetic oligonucleotide
uuaaaccucagauacaguu

SEQ ID NO: 810851 - RNA, 19 nt, Artificial Sequence
  Description of Artificial Sequence: Synthetic oligonucleotide
aaugaggagauuugauugu

SEQ ID NO: 810852 - RNA, 19 nt, Artificial Sequence
  Description of Artificial Sequence: Synthetic oligonucleotide
uuucucgaagagauaaaag

SEQ ID NO: 810853 - RNA, 19 nt, Artificial Sequence
  Description of Artificial Sequence: Synthetic oligonucleotide
gcaaucugcaaucugauag

SEQ ID NO: 810854 - RNA, 19 nt, Artificial Sequence
  Description of Artificial Sequence: Synthetic oligonucleotide
cuagagaaaacuuagugaa

SEQ ID NO: 810855 - RNA, 19 nt, Artificial Sequence
  Description of Artificial Sequence: Synthetic oligonucleotide
gaaaacuuagugaagguga

SEQ ID NO: 810856 - RNA, 19 nt, Artificial Sequence
  Description of Artificial Sequence: Synthetic oligonucleotide
ucugauaggugaaaugcac

SEQ ID NO: 810857 - RNA, 19 nt, Artificial Sequence
  Description of Artificial Sequence: Synthetic oligonucleotide
agauaaaaggugcagguau

SEQ ID NO: 810858 - RNA, 19 nt, Artificial Sequence
  Description of Artificial Sequence: Synthetic oligonucleotide
agagauaaaaggugcaggu

SEQ ID NO: 810859 - RNA, 19 nt, Artificial Sequence
  Description of Artificial Sequence: Synthetic oligonucleotide
ucggaaauugcugucaaag

SEQ ID NO: 810860 - RNA, 19 nt, Artificial Sequence
  Description of Artificial Sequence: Synthetic oligonucleotide
ugagcgaucuuccaaacau

SEQ ID NO: 810861 - RNA, 19 nt, Artificial Sequence
  Description of Artificial Sequence: Synthetic oligonucleotide
auagaaguuaagcaauacu

SEQ ID NO: 810862 - RNA, 19 nt, Artificial Sequence
  Description of Artificial Sequence: Synthetic oligonucleotide
aagagaccgauuuccaaug

SEQ ID NO: 810863 - RNA, 19 nt, Artificial Sequence
  Description of Artificial Sequence: Synthetic oligonucleotide
uuauuaucauauucuugag

SEQ ID NO: 810864 - RNA, 19 nt, Artificial Sequence
  Description of Artificial Sequence: Synthetic oligonucleotide
aacaggguaucguuggucu

SEQ ID NO: 810865 - RNA, 19 nt, Artificial Sequence
  Description of Artificial Sequence: Synthetic oligonucleotide
gucugaaggacuccuaagg

SEQ ID NO: 810866 - RNA, 19 nt, Artificial Sequence
  Description of Artificial Sequence: Synthetic oligonucleotide
cacauaaucauaguugcag

SEQ ID NO: 810867 - RNA, 19 nt, Artificial Sequence
  Description of Artificial Sequence: Synthetic oligonucleotide
caagccgucaugaucacag

SEQ ID NO: 810868 - RNA, 19 nt, Artificial Sequence
  Description of Artificial Sequence: Synthetic oligonucleotide
uuucguaccuccaaguaau

SEQ ID NO: 810869 - RNA, 19 nt, Artificial Sequence
  Description of Artificial Sequence: Synthetic oligonucleotide
aaacauguuguugucauau

SEQ ID NO: 810870 - RNA, 19 nt, Artificial Sequence
  Description of Artificial Sequence: Synthetic oligonucleotide
acagcagugaacguguuuc

SEQ ID NO: 810871 - RNA, 19 nt, Artificial Sequence
  Description of Artificial Sequence: Synthetic oligonucleotide
aaaugaggcgaugaaacgu

SEQ ID NO: 810872 - RNA, 19 nt, Artificial Sequence
  Description of Artificial Sequence: Synthetic oligonucleotide
ugcuuuuaguuugagaaga

SEQ ID NO: 810873 - RNA, 19 nt, Artificial Sequence
  Description of Artificial Sequence: Synthetic oligonucleotide
ucugaaggacuccuaagga

SEQ ID NO: 810874 - RNA, 19 nt, Artificial Sequence
  Description of Artificial Sequence: Synthetic oligonucleotide
uuccaccuaaaucugacgu

SEQ ID NO: 810875 - RNA, 19 nt, Artificial Sequence
  Description of Artificial Sequence: Synthetic oligonucleotide
uugaaccuaagcagaauca

SEQ ID NO: 810876 - RNA, 19 nt, Artificial Sequence
  Description of Artificial Sequence: Synthetic oligonucleotide
cauuaaauccuucucuuuc

SEQ ID NO: 810877 - RNA, 19 nt, Artificial Sequence
  Description of Artificial Sequence: Synthetic oligonucleotide
uguugcauuaaauccuucu

SEQ ID NO: 810878 - RNA, 19 nt, Artificial Sequence
  Description of Artificial Sequence: Synthetic oligonucleotide
aguaaucaugcugacauug

SEQ ID NO: 810879 - RNA, 19 nt, Artificial Sequence
  Description of Artificial Sequence: Synthetic oligonucleotide
cuaaguaguucucugagca

SEQ ID NO: 810880 - RNA, 19 nt, Artificial Sequence
  Description of Artificial Sequence: Synthetic oligonucleotide
gaaggaugcagacgaagcc

SEQ ID NO: 810881 - RNA, 19 nt, Artificial Sequence
  Description of Artificial Sequence: Synthetic oligonucleotide
aaaacuuagugaaggugag

SEQ ID NO: 810882 - RNA, 19 nt, Artificial Sequence
  Description of Artificial Sequence: Synthetic oligonucleotide
aaucauaguugcagcuucc

SEQ ID NO: 810883 - RNA, 19 nt, Artificial Sequence
  Description of Artificial Sequence: Synthetic oligonucleotide
guaaggaaguuucucgaag

SEQ ID NO: 810884 - RNA, 19 nt, Artificial Sequence
  Description of Artificial Sequence: Synthetic oligonucleotide
aaguuggcacugcagaacu

SEQ ID NO: 810885 - RNA, 19 nt, Artificial Sequence
  Description of Artificial Sequence: Synthetic oligonucleotide
uagagaaaacuuagugaag

SEQ ID NO: 810886 - RNA, 19 nt, Artificial Sequence
  Description of Artificial Sequence: Synthetic oligonucleotide
uaauuaugcaguccaaguu

SEQ ID NO: 810887 - RNA, 19 nt, Artificial Sequence
  Description of Artificial Sequence: Synthetic oligonucleotide
uuuacucucaugcgugaug

SEQ ID NO: 810888 - RNA, 19 nt, Artificial Sequence
  Description of Artificial Sequence: Synthetic oligonucleotide
gauccauugaaccuacguc

SEQ ID NO: 810889 - RNA, 19 nt, Artificial Sequence
  Description of Artificial Sequence: Synthetic oligonucleotide
uuaucauauucuugaggcc

SEQ ID NO: 810890 - RNA, 19 nt, Artificial Sequence
  Description of Artificial Sequence: Synthetic oligonucleotide
caguacuuguuaaggagcg

SEQ ID NO: 810891 - RNA, 19 nt, Artificial Sequence
  Description of Artificial Sequence: Synthetic oligonucleotide
aaaugcacucucgaguuug

SEQ ID NO: 810892 - RNA, 19 nt, Artificial Sequence
  Description of Artificial Sequence: Synthetic oligonucleotide
aacuguaacguaaggaagu

SEQ ID NO: 810893 - RNA, 19 nt, Artificial Sequence
  Description of Artificial Sequence: Synthetic oligonucleotide
uauuugggaaccacaaaau

SEQ ID NO: 810894 - RNA, 19 nt, Artificial Sequence
  Description of Artificial Sequence: Synthetic oligonucleotide
aguagugauccacaguacu

SEQ ID NO: 810895 - RNA, 19 nt, Artificial Sequence
  Description of Artificial Sequence: Synthetic oligonucleotide
ugggguaguugguagauga

SEQ ID NO: 810896 - RNA, 19 nt, Artificial Sequence
  Description of Artificial Sequence: Synthetic oligonucleotide
gagcccaauggauuuauug

SEQ ID NO: 810897 - RNA, 19 nt, Artificial Sequence
  Description of Artificial Sequence: Synthetic oligonucleotide
uuauugaaccuaagcagaa

SEQ ID NO: 810898 - RNA, 19 nt, Artificial Sequence
  Description of Artificial Sequence: Synthetic oligonucleotide
acaaugauccaaguacagg

SEQ ID NO: 810899 - RNA, 19 nt, Artificial Sequence
  Description of Artificial Sequence: Synthetic oligonucleotide
aguuugagaagaaucuguc

SEQ ID NO: 810900 - RNA, 19 nt, Artificial Sequence
  Description of Artificial Sequence: Synthetic oligonucleotide
uauggucgcaagaggagug

SEQ ID NO: 810901 - RNA, 19 nt, Artificial Sequence
  Description of Artificial Sequence: Synthetic oligonucleotide
ggaggagccacaaugaucc

SEQ ID NO: 810902 - RNA, 19 nt, Artificial Sequence
  Description of Artificial Sequence: Synthetic oligonucleotide
aaccacauauggucgcaag

SEQ ID NO: 810903 - RNA, 19 nt, Artificial Sequence
  Description of Artificial Sequence: Synthetic oligonucleotide
ugugcaagccgucaugauc

SEQ ID NO: 810904 - RNA, 19 nt, Artificial Sequence
  Description of Artificial Sequence: Synthetic oligonucleotide
agagaccgauuuccaaugc

SEQ ID NO: 810905 - RNA, 19 nt, Artificial Sequence
  Description of Artificial Sequence: Synthetic oligonucleotide
uguuaaggagcggugaacu

SEQ ID NO: 810906 - RNA, 19 nt, Artificial Sequence
  Description of Artificial Sequence: Synthetic oligonucleotide
uugguuguauucucuguug

SEQ ID NO: 810907 - RNA, 19 nt, Artificial Sequence
  Description of Artificial Sequence: Synthetic oligonucleotide
aaugauccaaguacaggug

SEQ ID NO: 810908 - RNA, 19 nt, Artificial Sequence
  Description of Artificial Sequence: Synthetic oligonucleotide
gaauauggacgucugaugu

SEQ ID NO: 810909 - RNA, 19 nt, Artificial Sequence
  Description of Artificial Sequence: Synthetic oligonucleotide
uaaggugacugagguaucg

SEQ ID NO: 810910 - RNA, 19 nt, Artificial Sequence
  Description of Artificial Sequence: Synthetic oligonucleotide
ucguuggucuucaagguuc

SEQ ID NO: 810911 - RNA, 19 nt, Artificial Sequence
  Description of Artificial Sequence: Synthetic oligonucleotide
gagaauaauuaugcagucc

SEQ ID NO: 810912 - RNA, 19 nt, Artificial Sequence
  Description of Artificial Sequence: Synthetic oligonucleotide
cauauggucgcaagaggag

SEQ ID NO: 810913 - RNA, 19 nt, Artificial Sequence
  Description of Artificial Sequence: Synthetic oligonucleotide
uggauuuauuguagauucc

SEQ ID NO: 810914 - RNA, 19 nt, Artificial Sequence
  Description of Artificial Sequence: Synthetic oligonucleotide
uccauugaaccuacgucca

SEQ ID NO: 810915 - RNA, 19 nt, Artificial Sequence
  Description of Artificial Sequence: Synthetic oligonucleotide
guagauuccaccacaggug

SEQ ID NO: 810916 - RNA, 19 nt, Artificial Sequence
  Description of Artificial Sequence: Synthetic oligonucleotide
auuucguaccuccaaguaa

SEQ ID NO: 810917 - RNA, 19 nt, Artificial Sequence
  Description of Artificial Sequence: Synthetic oligonucleotide
uggaaccacagaacguucc

SEQ ID NO: 810918 - RNA, 19 nt, Artificial Sequence
  Description of Artificial Sequence: Synthetic oligonucleotide
caaucugauaggugaaaug

SEQ ID NO: 810919 - RNA, 19 nt, Artificial Sequence
  Description of Artificial Sequence: Synthetic oligonucleotide
cacacaguuaucuuaaucu

SEQ ID NO: 810920 - RNA, 19 nt, Artificial Sequence
  Description of Artificial Sequence: Synthetic oligonucleotide
aguuauuaucauauucuug

SEQ ID NO: 810921 - RNA, 19 nt, Artificial Sequence
  Description of Artificial Sequence: Synthetic oligonucleotide
gaggcgaugaaacguuuug

SEQ ID NO: 810922 - RNA, 19 nt, Artificial Sequence
  Description of Artificial Sequence: Synthetic oligonucleotide
gugcucuuaauauuuugug

SEQ ID NO: 810923 - RNA, 19 nt, Artificial Sequence
  Description of Artificial Sequence: Synthetic oligonucleotide
uaucguuggucuucaaggu

SEQ ID NO: 810924 - RNA, 19 nt, Artificial Sequence
  Description of Artificial Sequence: Synthetic oligonucleotide
cugcaaucagcacauaauc

SEQ ID NO: 810925 - RNA, 19 nt, Artificial Sequence
  Description of Artificial Sequence: Synthetic oligonucleotide
uguugcaaucugcaaucug

SEQ ID NO: 810926 - RNA, 19 nt, Artificial Sequence
  Description of Artificial Sequence: Synthetic oligonucleotide
aaccuacguccacaucggc

SEQ ID NO: 810927 - RNA, 19 nt, Artificial Sequence
  Description of Artificial Sequence: Synthetic oligonucleotide
accgauuuccaaugcuagg

SEQ ID NO: 810928 - RNA, 19 nt, Artificial Sequence
  Description of Artificial Sequence: Synthetic oligonucleotide
gauuuauuguagauuccac

SEQ ID NO: 810929 - RNA, 19 nt, Artificial Sequence
  Description of Artificial Sequence: Synthetic oligonucleotide
auuuccaaugcuaggacca

SEQ ID NO: 810930 - RNA, 19 nt, Artificial Sequence
  Description of Artificial Sequence: Synthetic oligonucleotide
ugcaguccaaguuauuauc

SEQ ID NO: 810931 - RNA, 19 nt, Artificial Sequence
  Description of Artificial Sequence: Synthetic oligonucleotide
cuuagugaaggugagauua

SEQ ID NO: 810932 - RNA, 19 nt, Artificial Sequence
  Description of Artificial Sequence: Synthetic oligonucleotide
guugcaaucugcaaucuga

SEQ ID NO: 810933 - RNA, 19 nt, Artificial Sequence
  Description of Artificial Sequence: Synthetic oligonucleotide
acaguuaucuuaaucugcu

SEQ ID NO: 810934 - RNA, 19 nt, Artificial Sequence
  Description of Artificial Sequence: Synthetic oligonucleotide
uuaaggagcggugaacuuc

SEQ ID NO: 810935 - RNA, 19 nt, Artificial Sequence
  Description of Artificial Sequence: Synthetic oligonucleotide
gaaaacgaaccuuugcagu

SEQ ID NO: 810936 - RNA, 19 nt, Artificial Sequence
  Description of Artificial Sequence: Synthetic oligonucleotide
agguaucggucuuaaaccu

SEQ ID NO: 810937 - RNA, 19 nt, Artificial Sequence
  Description of Artificial Sequence: Synthetic oligonucleotide
caguguuuacucucaugcg

SEQ ID NO: 810938 - RNA, 19 nt, Artificial Sequence
  Description of Artificial Sequence: Synthetic oligonucleotide
uuaucuuaaucugcuugug

SEQ ID NO: 810939 - RNA, 19 nt, Artificial Sequence
  Description of Artificial Sequence: Synthetic oligonucleotide
gagacaaacuguaacguaa

SEQ ID NO: 810940 - RNA, 19 nt, Artificial Sequence
  Description of Artificial Sequence: Synthetic oligonucleotide
ugacaaaugaggcgaugaa

SEQ ID NO: 810941 - RNA, 19 nt, Artificial Sequence
  Description of Artificial Sequence: Synthetic oligonucleotide
caaugauccaaguacaggu

SEQ ID NO: 810942 - RNA, 19 nt, Artificial Sequence
  Description of Artificial Sequence: Synthetic oligonucleotide
uguuuucaggugcaauuau

SEQ ID NO: 810943 - RNA, 19 nt, Artificial Sequence
  Description of Artificial Sequence: Synthetic oligonucleotide
ucccacacaguuaucuuaa

SEQ ID NO: 810944 - RNA, 19 nt, Artificial Sequence
  Description of Artificial Sequence: Synthetic oligonucleotide
gaaccuacguccacaucgg

SEQ ID NO: 810945 - RNA, 19 nt, Artificial Sequence
  Description of Artificial Sequence: Synthetic oligonucleotide
gaaggugagauuaaugagu

SEQ ID NO: 810946 - RNA, 19 nt, Artificial Sequence
  Description of Artificial Sequence: Synthetic oligonucleotide
aaggugacugagguaucgg

SEQ ID NO: 810947 - RNA, 19 nt, Artificial Sequence
  Description of Artificial Sequence: Synthetic oligonucleotide
cgaugaaacguuuuguggg

SEQ ID NO: 810948 - RNA, 19 nt, Artificial Sequence
  Description of Artificial Sequence: Synthetic oligonucleotide
ggugaaaugcacucucgag

SEQ ID NO: 810949 - RNA, 19 nt, Artificial Sequence
  Description of Artificial Sequence: Synthetic oligonucleotide
aggugcaauuauguacucc

SEQ ID NO: 810950 - RNA, 19 nt, Artificial Sequence
  Description of Artificial Sequence: Synthetic oligonucleotide
acauauggucgcaagagga

SEQ ID NO: 810951 - RNA, 19 nt, Artificial Sequence
  Description of Artificial Sequence: Synthetic oligonucleotide
cuuacauagaugguguaga

SEQ ID NO: 810952 - RNA, 19 nt, Artificial Sequence
  Description of Artificial Sequence: Synthetic oligonucleotide
aaggugagauuaaugaguu

SEQ ID NO: 810953 - RNA, 19 nt, Artificial Sequence
  Description of Artificial Sequence: Synthetic oligonucleotide
gacgucugauguuugacaa

SEQ ID NO: 810954 - RNA, 19 nt, Artificial Sequence
  Description of Artificial Sequence: Synthetic oligonucleotide
ugucaaagcuaaucuccca

SEQ ID NO: 810955 - RNA, 19 nt, Artificial Sequence
  Description of Artificial Sequence: Synthetic oligonucleotide
ggcauaugcauuagaauag

SEQ ID NO: 810956 - RNA, 19 nt, Artificial Sequence
  Description of Artificial Sequence: Synthetic oligonucleotide
uggugcucuuaauauuuug

SEQ ID NO: 810957 - RNA, 19 nt, Artificial Sequence
  Description of Artificial Sequence: Synthetic oligonucleotide
uguuuacucucaugcguga

SEQ ID NO: 810958 - RNA, 19 nt, Artificial Sequence
  Description of Artificial Sequence: Synthetic oligonucleotide
guagaugagucugaaggac

SEQ ID NO: 810959 - RNA, 19 nt, Artificial Sequence
  Description of Artificial Sequence: Synthetic oligonucleotide
gauggcaguagugauccac

SEQ ID NO: 810960 - RNA, 19 nt, Artificial Sequence
  Description of Artificial Sequence: Synthetic oligonucleotide
uccagguaaggugacugag

SEQ ID NO: 810961 - RNA, 19 nt, Artificial Sequence
  Description of Artificial Sequence: Synthetic oligonucleotide
uuaagcaauacugggccau

SEQ ID NO: 810962 - RNA, 19 nt, Artificial Sequence
  Description of Artificial Sequence: Synthetic oligonucleotide
uaaucucccaguguuuacu

SEQ ID NO: 810963 - RNA, 19 nt, Artificial Sequence
  Description of Artificial Sequence: Synthetic oligonucleotide
uguggugaaucuugaaguu

SEQ ID NO: 810964 - RNA, 19 nt, Artificial Sequence
  Description of Artificial Sequence: Synthetic oligonucleotide
aucauauucuugaggccac

SEQ ID NO: 810965 - RNA, 19 nt, Artificial Sequence
  Description of Artificial Sequence: Synthetic oligonucleotide
ugccucuagagaaaacuua

SEQ ID NO: 810966 - RNA, 19 nt, Artificial Sequence
  Description of Artificial Sequence: Synthetic oligonucleotide
aacgaaccuuugcaguccu

SEQ ID NO: 810967 - RNA, 19 nt, Artificial Sequence
  Description of Artificial Sequence: Synthetic oligonucleotide
gguaucguuggucuucaag

SEQ ID NO: 810968 - RNA, 19 nt, Artificial Sequence
  Description of Artificial Sequence: Synthetic oligonucleotide
aaugaggcgaugaaacguu

SEQ ID NO: 810969 - RNA, 19 nt, Artificial Sequence
  Description of Artificial Sequence: Synthetic oligonucleotide
gaaggacuccuaaggagcc

SEQ ID NO: 810970 - RNA, 19 nt, Artificial Sequence
  Description of Artificial Sequence: Synthetic oligonucleotide
guugcaacauguguucccc

SEQ ID NO: 810971 - RNA, 19 nt, Artificial Sequence
  Description of Artificial Sequence: Synthetic oligonucleotide
agugaaggugagauuaaug

SEQ ID NO: 810972 - RNA, 19 nt, Artificial Sequence
  Description of Artificial Sequence: Synthetic oligonucleotide
ggaaaguuuggagagauaa

SEQ ID NO: 810973 - RNA, 19 nt, Artificial Sequence
  Description of Artificial Sequence: Synthetic oligonucleotide
gauucggaaauugcuguca

SEQ ID NO: 810974 - RNA, 19 nt, Artificial Sequence
  Description of Artificial Sequence: Synthetic oligonucleotide
cagaaccacauauggucgc

SEQ ID NO: 810975 - RNA, 19 nt, Artificial Sequence
  Description of Artificial Sequence: Synthetic oligonucleotide
uaacguaaggaaguuucuc

SEQ ID NO: 810976 - RNA, 19 nt, Artificial Sequence
  Description of Artificial Sequence: Synthetic oligonucleotide
gagggaaauggugugguuc

SEQ ID NO: 810977 - RNA, 19 nt, Artificial Sequence
  Description of Artificial Sequence: Synthetic oligonucleotide
uuugacaaaugaggcgaug

SEQ ID NO: 810978 - RNA, 19 nt, Artificial Sequence
  Description of Artificial Sequence: Synthetic oligonucleotide
gucgcaagaggaguggaag

SEQ ID NO: 810979 - RNA, 19 nt, Artificial Sequence
  Description of Artificial Sequence: Synthetic oligonucleotide
ggcgaugaaacguuuugug

SEQ ID NO: 810980 - RNA, 19 nt, Artificial Sequence
  Description of Artificial Sequence: Synthetic oligonucleotide
uguggaauucuggaaccac

SEQ ID NO: 810981 - RNA, 19 nt, Artificial Sequence
  Description of Artificial Sequence: Synthetic oligonucleotide
ugagucacuggaccauuuc

SEQ ID NO: 810982 - RNA, 19 nt, Artificial Sequence
  Description of Artificial Sequence: Synthetic oligonucleotide
aguccaaguuauuaucaua

SEQ ID NO: 810983 - RNA, 19 nt, Artificial Sequence
  Description of Artificial Sequence: Synthetic oligonucleotide
gugaacguguuuccuguug

SEQ ID NO: 810984 - RNA, 19 nt, Artificial Sequence
  Description of Artificial Sequence: Synthetic oligonucleotide
uguaaggcuucagaaccac

SEQ ID NO: 810985 - RNA, 19 nt, Artificial Sequence
  Description of Artificial Sequence: Synthetic oligonucleotide
guugucauauggcuuugga

SEQ ID NO: 810986 - RNA, 19 nt, Artificial Sequence
  Description of Artificial Sequence: Synthetic oligonucleotide
ucgcaagaggaguggaaga

SEQ ID NO: 810987 - RNA, 19 nt, Artificial Sequence
  Description of Artificial Sequence: Synthetic oligonucleotide
aguacuuguuaaggagcgg

SEQ ID NO: 810988 - RNA, 19 nt, Artificial Sequence
  Description of Artificial Sequence: Synthetic oligonucleotide
ucaugcgugauggcugucc

SEQ ID NO: 810989 - RNA, 19 nt, Artificial Sequence
  Description of Artificial Sequence: Synthetic oligonucleotide
cuaaucucccaguguuuac

SEQ ID NO: 810990 - RNA, 19 nt, Artificial Sequence
  Description of Artificial Sequence: Synthetic oligonucleotide
ucucaugcgugauggcugu

SEQ ID NO: 810991 - RNA, 19 nt, Artificial Sequence
  Description of Artificial Sequence: Synthetic oligonucleotide
augucauauccagguaagg

SEQ ID NO: 810992 - RNA, 19 nt, Artificial Sequence
  Description of Artificial Sequence: Synthetic oligonucleotide
guaccuccaaguaaucaug

SEQ ID NO: 810993 - RNA, 19 nt, Artificial Sequence
  Description of Artificial Sequence: Synthetic oligonucleotide
auauggucgcaagaggagu

SEQ ID NO: 810994 - RNA, 19 nt, Artificial Sequence
  Description of Artificial Sequence: Synthetic oligonucleotide
uaucggucuuaaaccucag

SEQ ID NO: 810995 - RNA, 19 nt, Artificial Sequence
  Description of Artificial Sequence: Synthetic oligonucleotide
aaguaaucaugcugacauu

SEQ ID NO: 810996 - RNA, 19 nt, Artificial Sequence
  Description of Artificial Sequence: Synthetic oligonucleotide
auuaugcaguccaaguuau

SEQ ID NO: 810997 - RNA, 19 nt, Artificial Sequence
  Description of Artificial Sequence: Synthetic oligonucleotide
cagaacguuccaagagacc

SEQ ID NO: 810998 - RNA, 19 nt, Artificial Sequence
  Description of Artificial Sequence: Synthetic oligonucleotide
cauaaucauaguugcagcu

SEQ ID NO: 810999 - RNA, 19 nt, Artificial Sequence
  Description of Artificial Sequence: Synthetic oligonucleotide
cuguggugaaucuugaagu

SEQ ID NO: 811000 - RNA, 19 nt, Artificial Sequence
  Description of Artificial Sequence: Synthetic oligonucleotide
gaaguucuaaguaguucuc

SEQ ID NO: 811001 - RNA, 19 nt, Artificial Sequence
  Description of Artificial Sequence: Synthetic oligonucleotide
uaugaaggaugcagacgaa

SEQ ID NO: 811002 - RNA, 19 nt, Artificial Sequence
  Description of Artificial Sequence: Synthetic oligonucleotide
uuguuaaggagcggugaac

SEQ ID NO: 811003 - RNA, 19 nt, Artificial Sequence
  Description of Artificial Sequence: Synthetic oligonucleotide
agcgaucuuccaaacaugu

SEQ ID NO: 811004 - RNA, 19 nt, Artificial Sequence
  Description of Artificial Sequence: Synthetic oligonucleotide
aacguuccaagagaccgau

SEQ ID NO: 811005 - RNA, 19 nt, Artificial Sequence
  Description of Artificial Sequence: Synthetic oligonucleotide
uggccuggcaucuccucag

SEQ ID NO: 811006 - RNA, 19 nt, Artificial Sequence
  Description of Artificial Sequence: Synthetic oligonucleotide
guaucggucuuaaaccuca

SEQ ID NO: 811007 - RNA, 19 nt, Artificial Sequence
  Description of Artificial Sequence: Synthetic oligonucleotide
ugacauuguguugagucuu

SEQ ID NO: 811008 - RNA, 19 nt, Artificial Sequence
  Description of Artificial Sequence: Synthetic oligonucleotide
ucacucuguugcuucuuac

SEQ ID NO: 811009 - RNA, 19 nt, Artificial Sequence
  Description of Artificial Sequence: Synthetic oligonucleotide
ucguaccuccaaguaauca

SEQ ID NO: 811010 - RNA, 19 nt, Artificial Sequence
  Description of Artificial Sequence: Synthetic oligonucleotide
auauggacgucugauguuu

SEQ ID NO: 811011 - RNA, 19 nt, Artificial Sequence
  Description of Artificial Sequence: Synthetic oligonucleotide
ugagauuaaugaguuuguu

SEQ ID NO: 811012 - RNA, 19 nt, Artificial Sequence
  Description of Artificial Sequence: Synthetic oligonucleotide
cccaauggauuuauuguag

SEQ ID NO: 811013 - RNA, 19 nt, Artificial Sequence
  Description of Artificial Sequence: Synthetic oligonucleotide
uauugaaccuaagcagaau

SEQ ID NO: 811014 - RNA, 19 nt, Artificial Sequence
  Description of Artificial Sequence: Synthetic oligonucleotide
guuaagcaauacugggcca

SEQ ID NO: 811015 - RNA, 19 nt, Artificial Sequence
  Description of Artificial Sequence: Synthetic oligonucleotide
gccucuagagaaaacuuag

SEQ ID NO: 811016 - RNA, 19 nt, Artificial Sequence
  Description of Artificial Sequence: Synthetic oligonucleotide
uugccaacaggguaucguu

SEQ ID NO: 811017 - RNA, 19 nt, Artificial Sequence
  Description of Artificial Sequence: Synthetic oligonucleotide
ugaggggauguaaggcuuc

SEQ ID NO: 811018 - RNA, 19 nt, Artificial Sequence
  Description of Artificial Sequence: Synthetic oligonucleotide
acguuuuguggggucaaag

SEQ ID NO: 811019 - RNA, 19 nt, Artificial Sequence
  Description of Artificial Sequence: Synthetic oligonucleotide
uggauccauugaaccuacg

SEQ ID NO: 811020 - RNA, 19 nt, Artificial Sequence
  Description of Artificial Sequence: Synthetic oligonucleotide
aucugauaggugaaaugca

SEQ ID NO: 811021 - RNA, 19 nt, Artificial Sequence
  Description of Artificial Sequence: Synthetic oligonucleotide
cuggauccauugaaccuac

SEQ ID NO: 811022 - RNA, 19 nt, Artificial Sequence
  Description of Artificial Sequence: Synthetic oligonucleotide
auaaaaggugcagguauuu

SEQ ID NO: 811023 - RNA, 19 nt, Artificial Sequence
  Description of Artificial Sequence: Synthetic oligonucleotide
cauaugcauuagaauagaa

SEQ ID NO: 811024 - RNA, 19 nt, Artificial Sequence
  Description of Artificial Sequence: Synthetic oligonucleotide
caguagugauccacaguac

SEQ ID NO: 811025 - RNA, 19 nt, Artificial Sequence
  Description of Artificial Sequence: Synthetic oligonucleotide
agguauuugggaaccacaa

SEQ ID NO: 811026 - RNA, 19 nt, Artificial Sequence
  Description of Artificial Sequence: Synthetic oligonucleotide
auggucgcaagaggagugg

SEQ ID NO: 811027 - RNA, 19 nt, Artificial Sequence
  Description of Artificial Sequence: Synthetic oligonucleotide
ugaggcgaugaaacguuuu

SEQ ID NO: 811028 - RNA, 19 nt, Artificial Sequence
  Description of Artificial Sequence: Synthetic oligonucleotide
gaauaauuaugcaguccaa

SEQ ID NO: 811029 - RNA, 19 nt, Artificial Sequence
  Description of Artificial Sequence: Synthetic oligonucleotide
uggacgucugauguuugac

SEQ ID NO: 811030 - RNA, 19 nt, Artificial Sequence
  Description of Artificial Sequence: Synthetic oligonucleotide
cacaaagguauauguugca

SEQ ID NO: 811031 - RNA, 19 nt, Artificial Sequence
  Description of Artificial Sequence: Synthetic oligonucleotide
gacagguugugaccuuuga

SEQ ID NO: 811032 - RNA, 19 nt, Artificial Sequence
  Description of Artificial Sequence: Synthetic oligonucleotide
caaucagcacauaaucaua

SEQ ID NO: 811033 - RNA, 19 nt, Artificial Sequence
  Description of Artificial Sequence: Synthetic oligonucleotide
aucguuggucuucaagguu

SEQ ID NO: 811034 - RNA, 19 nt, Artificial Sequence
  Description of Artificial Sequence: Synthetic oligonucleotide
auccagguaaggugacuga

SEQ ID NO: 811035 - RNA, 19 nt, Artificial Sequence
  Description of Artificial Sequence: Synthetic oligonucleotide
uguucgugggauggcugag

SEQ ID NO: 811036 - RNA, 19 nt, Artificial Sequence
  Description of Artificial Sequence: Synthetic oligonucleotide
auggacgucugauguuuga

SEQ ID NO: 811037 - RNA, 19 nt, Artificial Sequence
  Description of Artificial Sequence: Synthetic oligonucleotide
uucggaaauugcugucaaa

SEQ ID NO: 811038 - RNA, 19 nt, Artificial Sequence
  Description of Artificial Sequence: Synthetic oligonucleotide
acuuagugaaggugagauu

SEQ ID NO: 811039 - RNA, 19 nt, Artificial Sequence
  Description of Artificial Sequence: Synthetic oligonucleotide
gagcgaucuuccaaacaug

SEQ ID NO: 811040 - RNA, 19 nt, Artificial Sequence
  Description of Artificial Sequence: Synthetic oligonucleotide
caaugcuaggaccaucaaa

SEQ ID NO: 811041 - RNA, 19 nt, Artificial Sequence
  Description of Artificial Sequence: Synthetic oligonucleotide
cauuguguugagucuucca

SEQ ID NO: 811042 - RNA, 19 nt, Artificial Sequence
  Description of Artificial Sequence: Synthetic oligonucleotide
aagacagguugugaccuuu

SEQ ID NO: 811043 - RNA, 19 nt, Artificial Sequence
  Description of Artificial Sequence: Synthetic oligonucleotide
aaacguuuuguggggucaa

SEQ ID NO: 811044 - RNA, 19 nt, Artificial Sequence
  Description of Artificial Sequence: Synthetic oligonucleotide
ccagcucaaaccaauagaa

SEQ ID NO: 811045 - RNA, 19 nt, Artificial Sequence
  Description of Artificial Sequence: Synthetic oligonucleotide
agauuugauuguaccauua

SEQ ID NO: 811046 - RNA, 19 nt, Artificial Sequence
  Description of Artificial Sequence: Synthetic oligonucleotide
cuggaaccacagaacguuc

SEQ ID NO: 811047 - RNA, 19 nt, Artificial Sequence
  Description of Artificial Sequence: Synthetic oligonucleotide
uucguaccuccaaguaauc

SEQ ID NO: 811048 - RNA, 19 nt, Artificial Sequence
  Description of Artificial Sequence: Synthetic oligonucleotide
ggggauucggaaauugcug

SEQ ID NO: 811049 - RNA, 19 nt, Artificial Sequence
  Description of Artificial Sequence: Synthetic oligonucleotide
aggaugcagacgaagcccu

SEQ ID NO: 811050 - RNA, 19 nt, Artificial Sequence
  Description of Artificial Sequence: Synthetic oligonucleotide
uugaaccuacguccacauc

SEQ ID NO: 811051 - RNA, 19 nt, Artificial Sequence
  Description of Artificial Sequence: Synthetic oligonucleotide
uggaaaguuuggagagaua

SEQ ID NO: 811052 - RNA, 19 nt, Artificial Sequence
  Description of Artificial Sequence: Synthetic oligonucleotide
cauuucguaccuccaagua

SEQ ID NO: 811053 - RNA, 19 nt, Artificial Sequence
  Description of Artificial Sequence: Synthetic oligonucleotide
uaagcaauacugggccauc

SEQ ID NO: 811054 - RNA, 19 nt, Artificial Sequence
  Description of Artificial Sequence: Synthetic oligonucleotide
uuaugcaguccaaguuauu

SEQ ID NO: 811055 - RNA, 19 nt, Artificial Sequence
  Description of Artificial Sequence: Synthetic oligonucleotide
aggcgaugaaacguuuugu

SEQ ID NO: 811056 - RNA, 19 nt, Artificial Sequence
  Description of Artificial Sequence: Synthetic oligonucleotide
agccgucaugaucacaguu

SEQ ID NO: 811057 - RNA, 19 nt, Artificial Sequence
  Description of Artificial Sequence: Synthetic oligonucleotide
ggggauguaaggcuucaga

SEQ ID NO: 811058 - RNA, 19 nt, Artificial Sequence
  Description of Artificial Sequence: Synthetic oligonucleotide
agaccgauuuccaaugcua

SEQ ID NO: 811059 - RNA, 19 nt, Artificial Sequence
  Description of Artificial Sequence: Synthetic oligonucleotide
aguugguagaugagucuga

SEQ ID NO: 811060 - RNA, 19 nt, Artificial Sequence
  Description of Artificial Sequence: Synthetic oligonucleotide
ucgugggauggcugaggcc

SEQ ID NO: 811061 - RNA, 19 nt, Artificial Sequence
  Description of Artificial Sequence: Synthetic oligonucleotide
uuuccaaugcuaggaccau

SEQ ID NO: 811062 - RNA, 19 nt, Artificial Sequence
  Description of Artificial Sequence: Synthetic oligonucleotide
acgucucacuccugccauc

SEQ ID NO: 811063 - RNA, 19 nt, Artificial Sequence
  Description of Artificial Sequence: Synthetic oligonucleotide
gagaccgauuuccaaugcu

SEQ ID NO: 811064 - RNA, 19 nt, Artificial Sequence
  Description of Artificial Sequence: Synthetic oligonucleotide
caaugggacuaggagccac

SEQ ID NO: 811065 - RNA, 19 nt, Artificial Sequence
  Description of Artificial Sequence: Synthetic oligonucleotide
aucugcaaucugauaggug

SEQ ID NO: 811066 - RNA, 19 nt, Artificial Sequence
  Description of Artificial Sequence: Synthetic oligonucleotide
gaacguuccaagagaccga

SEQ ID NO: 811067 - RNA, 19 nt, Artificial Sequence
  Description of Artificial Sequence: Synthetic oligonucleotide
caggguaucguuggucuuc

SEQ ID NO: 811068 - RNA, 19 nt, Artificial Sequence
  Description of Artificial Sequence: Synthetic oligonucleotide
accuacguccacaucggcu

SEQ ID NO: 811069 - RNA, 19 nt, Artificial Sequence
  Description of Artificial Sequence: Synthetic oligonucleotide
ggacgucugauguuugaca

SEQ ID NO: 811070 - RNA, 19 nt, Artificial Sequence
  Description of Artificial Sequence: Synthetic oligonucleotide
caacaggguaucguugguc

SEQ ID NO: 811071 - RNA, 19 nt, Artificial Sequence
  Description of Artificial Sequence: Synthetic oligonucleotide
cuguucgugggauggcuga

SEQ ID NO: 811072 - RNA, 19 nt, Artificial Sequence
  Description of Artificial Sequence: Synthetic oligonucleotide
caauggauuuauuguagau

SEQ ID NO: 811073 - RNA, 19 nt, Artificial Sequence
  Description of Artificial Sequence: Synthetic oligonucleotide
ugcugccucuagagaaaac

SEQ ID NO: 811074 - RNA, 19 nt, Artificial Sequence
  Description of Artificial Sequence: Synthetic oligonucleotide
gauugccaaauccuugguu

SEQ ID NO: 811075 - RNA, 19 nt, Artificial Sequence
  Description of Artificial Sequence: Synthetic oligonucleotide
gguggaauauggacgucug

SEQ ID NO: 811076 - RNA, 19 nt, Artificial Sequence
  Description of Artificial Sequence: Synthetic oligonucleotide
acgucugauguuugacaaa

SEQ ID NO: 811077 - RNA, 19 nt, Artificial Sequence
  Description of Artificial Sequence: Synthetic oligonucleotide
augaggagauuugauugua

SEQ ID NO: 811078 - RNA, 19 nt, Artificial Sequence
  Description of Artificial Sequence: Synthetic oligonucleotide
ucggcuuaugaaggaugca

SEQ ID NO: 811079 - RNA, 19 nt, Artificial Sequence
  Description of Artificial Sequence: Synthetic oligonucleotide
ccuaaaucugacgucucac

SEQ ID NO: 811080 - RNA, 19 nt, Artificial Sequence
  Description of Artificial Sequence: Synthetic oligonucleotide
aacguuuuguggggucaaa

SEQ ID NO: 811081 - RNA, 19 nt, Artificial Sequence
  Description of Artificial Sequence: Synthetic oligonucleotide
cagcucaaaccaauagaaa

SEQ ID NO: 811082 - RNA, 19 nt, Artificial Sequence
  Description of Artificial Sequence: Synthetic oligonucleotide
ggauccauugaaccuacgu

SEQ ID NO: 811083 - RNA, 19 nt, Artificial Sequence
  Description of Artificial Sequence: Synthetic oligonucleotide
ggagcggugaacuuccagu

SEQ ID NO: 811084 - RNA, 19 nt, Artificial Sequence
  Description of Artificial Sequence: Synthetic oligonucleotide
uguggggaggagccacaau

SEQ ID NO: 811085 - RNA, 19 nt, Artificial Sequence
  Description of Artificial Sequence: Synthetic oligonucleotide
agugaacguguuuccuguu

SEQ ID NO: 811086 - RNA, 19 nt, Artificial Sequence
  Description of Artificial Sequence: Synthetic oligonucleotide
ccacacaguuaucuuaauc

SEQ ID NO: 811087 - RNA, 19 nt, Artificial Sequence
  Description of Artificial Sequence: Synthetic oligonucleotide
caugcgugauggcugucca

SEQ ID NO: 811088 - RNA, 19 nt, Artificial Sequence
  Description of Artificial Sequence: Synthetic oligonucleotide
cugagcgaucuuccaaaca

SEQ ID NO: 811089 - RNA, 19 nt, Artificial Sequence
  Description of Artificial Sequence: Synthetic oligonucleotide
uggucgcaagaggagugga

SEQ ID NO: 811090 - RNA, 19 nt, Artificial Sequence
  Description of Artificial Sequence: Synthetic oligonucleotide
aggguaucguuggucuuca

SEQ ID NO: 811091 - RNA, 19 nt, Artificial Sequence
  Description of Artificial Sequence: Synthetic oligonucleotide
cagugaacguguuuccugu

SEQ ID NO: 811092 - RNA, 19 nt, Artificial Sequence
  Description of Artificial Sequence: Synthetic oligonucleotide
aggagccacaaugauccaa

SEQ ID NO: 811093 - RNA, 19 nt, Artificial Sequence
  Description of Artificial Sequence: Synthetic oligonucleotide
ggcuuaugaaggaugcaga

SEQ ID NO: 811094 - RNA, 19 nt, Artificial Sequence
  Description of Artificial Sequence: Synthetic oligonucleotide
gugagauuaaugaguuugu

SEQ ID NO: 811095 - RNA, 19 nt, Artificial Sequence
  Description of Artificial Sequence: Synthetic oligonucleotide
ccaauggauuuauuguaga

SEQ ID NO: 811096 - RNA, 19 nt, Artificial Sequence
  Description of Artificial Sequence: Synthetic oligonucleotide
acucucgaguuuguguuua

SEQ ID NO: 811097 - RNA, 19 nt, Artificial Sequence
  Description of Artificial Sequence: Synthetic oligonucleotide
ggcugagcgaucuuccaaa

SEQ ID NO: 811098 - RNA, 19 nt, Artificial Sequence
  Description of Artificial Sequence: Synthetic oligonucleotide
caggugcaauuauguacuc

SEQ ID NO: 811099 - RNA, 19 nt, Artificial Sequence
  Description of Artificial Sequence: Synthetic oligonucleotide
guaacguaaggaaguuucu

SEQ ID NO: 811100 - RNA, 19 nt, Artificial Sequence
  Description of Artificial Sequence: Synthetic oligonucleotide
gaaguuucucgaagagaua

SEQ ID NO: 811101 - RNA, 19 nt, Artificial Sequence
  Description of Artificial Sequence: Synthetic oligonucleotide
acaggguaucguuggucuu

SEQ ID NO: 811102 - RNA, 19 nt, Artificial Sequence
  Description of Artificial Sequence: Synthetic oligonucleotide
cgaaccuuugcaguccucc

SEQ ID NO: 811103 - RNA, 19 nt, Artificial Sequence
  Description of Artificial Sequence: Synthetic oligonucleotide
gugcaauuauguacuccca

SEQ ID NO: 811104 - RNA, 19 nt, Artificial Sequence
  Description of Artificial Sequence: Synthetic oligonucleotide
ccgauuuccaaugcuagga

SEQ ID NO: 811105 - RNA, 19 nt, Artificial Sequence
  Description of Artificial Sequence: Synthetic oligonucleotide
gcugagcgaucuuccaaac

SEQ ID NO: 811106 - RNA, 19 nt, Artificial Sequence
  Description of Artificial Sequence: Synthetic oligonucleotide
cggcuuaugaaggaugcag

SEQ ID NO: 811107 - RNA, 19 nt, Artificial Sequence
  Description of Artificial Sequence: Synthetic oligonucleotide
gaaccacauauggucgcaa

SEQ ID NO: 811108 - RNA, 19 nt, Artificial Sequence
  Description of Artificial Sequence: Synthetic oligonucleotide
gcugccucuagagaaaacu

SEQ ID NO: 811109 - RNA, 19 nt, Artificial Sequence
  Description of Artificial Sequence: Synthetic oligonucleotide
guagugauccacaguacuu

SEQ ID NO: 811110 - RNA, 19 nt, Artificial Sequence
  Description of Artificial Sequence: Synthetic oligonucleotide
augcacucucgaguuugug

SEQ ID NO: 811111 - RNA, 19 nt, Artificial Sequence
  Description of Artificial Sequence: Synthetic oligonucleotide
cuguaacucccacacaguu

SEQ ID NO: 811112 - RNA, 19 nt, Artificial Sequence
  Description of Artificial Sequence: Synthetic oligonucleotide
gggguaguugguagaugag

SEQ ID NO: 811113 - RNA, 19 nt, Artificial Sequence
  Description of Artificial Sequence: Synthetic oligonucleotide
aggaaaucuugaacccaaa

SEQ ID NO: 811114 - RNA, 19 nt, Artificial Sequence
  Description of Artificial Sequence: Synthetic oligonucleotide
cccaguguuuacucucaug

SEQ ID NO: 811115 - RNA, 19 nt, Artificial Sequence
  Description of Artificial Sequence: Synthetic oligonucleotide
cucuguggugaaucuugaa

SEQ ID NO: 811116 - RNA, 19 nt, Artificial Sequence
  Description of Artificial Sequence: Synthetic oligonucleotide
gagguccagauaaugucau

SEQ ID NO: 811117 - RNA, 19 nt, Artificial Sequence
  Description of Artificial Sequence: Synthetic oligonucleotide
gaaaugcacucucgaguuu

SEQ ID NO: 811118 - RNA, 19 nt, Artificial Sequence
  Description of Artificial Sequence: Synthetic oligonucleotide
uacguccacaucggcuuau

SEQ ID NO: 811119 - RNA, 19 nt, Artificial Sequence
  Description of Artificial Sequence: Synthetic oligonucleotide
guuaaggagcggugaacuu

SEQ ID NO: 811120 - RNA, 19 nt, Artificial Sequence
  Description of Artificial Sequence: Synthetic oligonucleotide
caguccaaguuauuaucau

SEQ ID NO: 811121 - RNA, 19 nt, Artificial Sequence
  Description of Artificial Sequence: Synthetic oligonucleotide
acgaaccuuugcaguccuc

SEQ ID NO: 811122 - RNA, 19 nt, Artificial Sequence
  Description of Artificial Sequence: Synthetic oligonucleotide
cugccucuagagaaaacuu

SEQ ID NO: 811123 - RNA, 19 nt, Artificial Sequence
  Description of Artificial Sequence: Synthetic oligonucleotide
ccaaugaggagauuugauu

SEQ ID NO: 811124 - RNA, 19 nt, Artificial Sequence
  Description of Artificial Sequence: Synthetic oligonucleotide
gcuguuauuggugcucuua

SEQ ID NO: 811125 - RNA, 19 nt, Artificial Sequence
  Description of Artificial Sequence: Synthetic oligonucleotide
ccauugaaccuacguccac

SEQ ID NO: 811126 - RNA, 19 nt, Artificial Sequence
  Description of Artificial Sequence: Synthetic oligonucleotide
aaggagcggugaacuucca

SEQ ID NO: 811127 - RNA, 19 nt, Artificial Sequence
  Description of Artificial Sequence: Synthetic oligonucleotide
augaggcgaugaaacguuu

SEQ ID NO: 811128 - RNA, 19 nt, Artificial Sequence
  Description of Artificial Sequence: Synthetic oligonucleotide
cucucgaguuuguguuuaa

SEQ ID NO: 811129 - RNA, 19 nt, Artificial Sequence
  Description of Artificial Sequence: Synthetic oligonucleotide
guuuacucucaugcgugau

SEQ ID NO: 811130 - RNA, 19 nt, Artificial Sequence
  Description of Artificial Sequence: Synthetic oligonucleotide
ccuacguccacaucggcuu

SEQ ID NO: 811131 - RNA, 19 nt, Artificial Sequence
  Description of Artificial Sequence: Synthetic oligonucleotide
cagguggaauauggacguc

SEQ ID NO: 811132 - RNA, 19 nt, Artificial Sequence
  Description of Artificial Sequence: Synthetic oligonucleotide
ccauuucguaccuccaagu

SEQ ID NO: 811133 - RNA, 19 nt, Artificial Sequence
  Description of Artificial Sequence: Synthetic oligonucleotide
cguaccuccaaguaaucau

SEQ ID NO: 811134 - RNA, 19 nt, Artificial Sequence
  Description of Artificial Sequence: Synthetic oligonucleotide
gcgugauggcuguccagga

SEQ ID NO: 811135 - RNA, 19 nt, Artificial Sequence
  Description of Artificial Sequence: Synthetic oligonucleotide
cuacguccacaucggcuua

SEQ ID NO: 811136 - RNA, 19 nt, Artificial Sequence
  Description of Artificial Sequence: Synthetic oligonucleotide
cguuccaagagaccgauuu

SEQ ID NO: 811137 - RNA, 19 nt, Artificial Sequence
  Description of Artificial Sequence: Synthetic oligonucleotide
cuggcaaggcugugaaguu

SEQ ID NO: 811138 - RNA, 19 nt, Artificial Sequence
  Description of Artificial Sequence: Synthetic oligonucleotide
ggucgcaagaggaguggaa

SEQ ID NO: 811139 - RNA, 19 nt, Artificial Sequence
  Description of Artificial Sequence: Synthetic oligonucleotide
cugagucacuggaccauuu

SEQ ID NO: 811140 - RNA, 19 nt, Artificial Sequence
  Description of Artificial Sequence: Synthetic oligonucleotide
cucaugcgugauggcuguc

SEQ ID NO: 811141 - RNA, 19 nt, Artificial Sequence
  Description of Artificial Sequence: Synthetic oligonucleotide
cggugaacuuccagugcug

SEQ ID NO: 811142 - RNA, 19 nt, Artificial Sequence
  Description of Artificial Sequence: Synthetic oligonucleotide
gccgucaugaucacaguuu

SEQ ID NO: 811143 - RNA, 19 nt, Artificial Sequence
  Description of Artificial Sequence: Synthetic oligonucleotide
gccaaugaggagauuugau

SEQ ID NO: 811144 - RNA, 19 nt, Artificial Sequence
  Description of Artificial Sequence: Synthetic oligonucleotide
cagaaucacucuguugcuu

SEQ ID NO: 811145 - RNA, 19 nt, Artificial Sequence
  Description of Artificial Sequence: Synthetic oligonucleotide
gcuguaacucccacacagu

SEQ ID NO: 811146 - RNA, 19 nt, Artificial Sequence
  Description of Artificial Sequence: Synthetic oligonucleotide
ccaaugcuaggaccaucaa

SEQ ID NO: 811147 - RNA, 19 nt, Artificial Sequence
  Description of Artificial Sequence: Synthetic oligonucleotide
caccacagguggugacucu

SEQ ID NO: 811148 - RNA, 19 nt, Artificial Sequence
  Description of Artificial Sequence: Synthetic oligonucleotide
acguuccaagagaccgauu

SEQ ID NO: 811149 - RNA, 19 nt, Artificial Sequence
  Description of Artificial Sequence: Synthetic oligonucleotide
ggacuccuaaggagcccaa

SEQ ID NO: 811150 - RNA, 19 nt, Artificial Sequence
  Description of Artificial Sequence: Synthetic oligonucleotide
caucugcaaucagcacaua

SEQ ID NO: 811151 - RNA, 19 nt, Artificial Sequence
  Description of Artificial Sequence: Synthetic oligonucleotide
ggguaucguuggucuucaa

SEQ ID NO: 811152 - RNA, 19 nt, Artificial Sequence
  Description of Artificial Sequence: Synthetic oligonucleotide
gcgaucuuccaaacauguu

SEQ ID NO: 811153 - RNA, 19 nt, Artificial Sequence
  Description of Artificial Sequence: Synthetic oligonucleotide
ggcuguuauuggugcucuu

SEQ ID NO: 811154 - RNA, 19 nt, Artificial Sequence
  Description of Artificial Sequence: Synthetic oligonucleotide
uacacaugcaccaagaggg

SEQ ID NO: 811155 - RNA, 19 nt, Artificial Sequence
  Description of Artificial Sequence: Synthetic oligonucleotide
aacauagugguccuuaaac

SEQ ID NO: 811156 - RNA, 19 nt, Artificial Sequence
  Description of Artificial Sequence: Synthetic oligonucleotide
uguauaauucaucaucucg

SEQ ID NO: 811157 - RNA, 19 nt, Artificial Sequence
  Description of Artificial Sequence: Synthetic oligonucleotide
aucacauuaacauagagga

SEQ ID NO: 811158 - RNA, 19 nt, Artificial Sequence
  Description of Artificial Sequence: Synthetic oligonucleotide
uagguauuucuuaagaucc

SEQ ID NO: 811159 - RNA, 19 nt, Artificial Sequence
  Description of Artificial Sequence: Synthetic oligonucleotide
ucagcuugaauucuguagg

SEQ ID NO: 811160 - RNA, 19 nt, Artificial Sequence
  Description of Artificial Sequence: Synthetic oligonucleotide
aagucuacaaccuugguau

SEQ ID NO: 811161 - RNA, 19 nt, Artificial Sequence
  Description of Artificial Sequence: Synthetic oligonucleotide
auuuaagucuacuccacgc

SEQ ID NO: 811162 - RNA, 19 nt, Artificial Sequence
  Description of Artificial Sequence: Synthetic oligonucleotide
cauugugaagaauaaaucc

SEQ ID NO: 811163 - RNA, 19 nt, Artificial Sequence
  Description of Artificial Sequence: Synthetic oligonucleotide
uugauaguaacuuuguugu

SEQ ID NO: 811164 - RNA, 19 nt, Artificial Sequence
  Description of Artificial Sequence: Synthetic oligonucleotide
uccauuaugaauccacagg

SEQ ID NO: 811165 - RNA, 19 nt, Artificial Sequence
  Description of Artificial Sequence: Synthetic oligonucleotide
auugugaagaauaaauccc

SEQ ID NO: 811166 - RNA, 19 nt, Artificial Sequence
  Description of Artificial Sequence: Synthetic oligonucleotide
uucgacauaguaaaguacc

SEQ ID NO: 811167 - RNA, 19 nt, Artificial Sequence
  Description of Artificial Sequence: Synthetic oligonucleotide
uuacaauuccuuuuagggg

SEQ ID NO: 811168 - RNA, 19 nt, Artificial Sequence
  Description of Artificial Sequence: Synthetic oligonucleotide
uuugacagggacaguagcg

SEQ ID NO: 811169 - RNA, 19 nt, Artificial Sequence
  Description of Artificial Sequence: Synthetic oligonucleotide
ugagggauaaugcugaggu

SEQ ID NO: 811170 - RNA, 19 nt, Artificial Sequence
  Description of Artificial Sequence: Synthetic oligonucleotide
cacauuaacauagaggagg

SEQ ID NO: 811171 - RNA, 19 nt, Artificial Sequence
  Description of Artificial Sequence: Synthetic oligonucleotide
agcaugacgacucuccacc

SEQ ID NO: 811172 - RNA, 19 nt, Artificial Sequence
  Description of Artificial Sequence: Synthetic oligonucleotide
uuaaguacuaacucggccu

SEQ ID NO: 811173 - RNA, 19 nt, Artificial Sequence
  Description of Artificial Sequence: Synthetic oligonucleotide
aacucugcuaaaucuacag

SEQ ID NO: 811174 - RNA, 19 nt, Artificial Sequence
  Description of Artificial Sequence: Synthetic oligonucleotide
uuuugcuaaaccaacugga

SEQ ID NO: 811175 - RNA, 19 nt, Artificial Sequence
  Description of Artificial Sequence: Synthetic oligonucleotide
uguaaucggaucuucaugu

SEQ ID NO: 811176 - RNA, 19 nt, Artificial Sequence
  Description of Artificial Sequence: Synthetic oligonucleotide
agauccauccaucaucuac

SEQ ID NO: 811177 - RNA, 19 nt, Artificial Sequence
  Description of Artificial Sequence: Synthetic oligonucleotide
uacaauuccuuuuaggggu

SEQ ID NO: 811178 - RNA, 19 nt, Artificial Sequence
  Description of Artificial Sequence: Synthetic oligonucleotide
cuucuauucguaaaacacg

SEQ ID NO: 811179 - RNA, 19 nt, Artificial Sequence
  Description of Artificial Sequence: Synthetic oligonucleotide
uaugcuaagauccauccau

SEQ ID NO: 811180 - RNA, 19 nt, Artificial Sequence
  Description of Artificial Sequence: Synthetic oligonucleotide
gaccgaaccaaguucagcg

SEQ ID NO: 811181 - RNA, 19 nt, Artificial Sequence
  Description of Artificial Sequence: Synthetic oligonucleotide
uucuauucguaaaacacga

SEQ ID NO: 811182 - RNA, 19 nt, Artificial Sequence
  Description of Artificial Sequence: Synthetic oligonucleotide
ugugaauugagggauaaug

SEQ ID NO: 811183 - RNA, 19 nt, Artificial Sequence
  Description of Artificial Sequence: Synthetic oligonucleotide
uuuauguaauaacuuaaaa

SEQ ID NO: 811184 - RNA, 19 nt, Artificial Sequence
  Description of Artificial Sequence: Synthetic oligonucleotide
ucuacuccacgccagagag

SEQ ID NO: 811185 - RNA, 19 nt, Artificial Sequence
  Description of Artificial Sequence: Synthetic oligonucleotide
acacaagagagcuggaugg

SEQ ID NO: 811186 - RNA, 19 nt, Artificial Sequence
  Description of Artificial Sequence: Synthetic oligonucleotide
cuuagaauaagauuaagua

SEQ ID NO: 811187 - RNA, 19 nt, Artificial Sequence
  Description of Artificial Sequence: Synthetic oligonucleotide
ugugauuuugaauuuugga

SEQ ID NO: 811188 - RNA, 19 nt, Artificial Sequence
  Description of Artificial Sequence: Synthetic oligonucleotide
uguuaugugaauugaggga

SEQ ID NO: 811189 - RNA, 19 nt, Artificial Sequence
  Description of Artificial Sequence: Synthetic oligonucleotide
uccaacauuagugaggaug

SEQ ID NO: 811190 - RNA, 19 nt, Artificial Sequence
  Description of Artificial Sequence: Synthetic oligonucleotide
aggaacagaacauaguggu

SEQ ID NO: 811191 - RNA, 19 nt, Artificial Sequence
  Description of Artificial Sequence: Synthetic oligonucleotide
aagccucuaagucagcaag

SEQ ID NO: 811192 - RNA, 19 nt, Artificial Sequence
  Description of Artificial Sequence: Synthetic oligonucleotide
gugagguugacacacaagc

SEQ ID NO: 811193 - RNA, 19 nt, Artificial Sequence
  Description of Artificial Sequence: Synthetic oligonucleotide
auucguaaaacacgacugg

SEQ ID NO: 811194 - RNA, 19 nt, Artificial Sequence
  Description of Artificial Sequence: Synthetic oligonucleotide
uguguuaggaacuuuuaaa

SEQ ID NO: 811195 - RNA, 19 nt, Artificial Sequence
  Description of Artificial Sequence: Synthetic oligonucleotide
gaacagaacauaguggucc

SEQ ID NO: 811196 - RNA, 19 nt, Artificial Sequence
  Description of Artificial Sequence: Synthetic oligonucleotide
caggauuuaagucuacucc

SEQ ID NO: 811197 - RNA, 19 nt, Artificial Sequence
  Description of Artificial Sequence: Synthetic oligonucleotide
ugaauugagggauaaugcu

SEQ ID NO: 811198 - RNA, 19 nt, Artificial Sequence
  Description of Artificial Sequence: Synthetic oligonucleotide
ucugcaaauuuauaugugu

SEQ ID NO: 811199 - RNA, 19 nt, Artificial Sequence
  Description of Artificial Sequence: Synthetic oligonucleotide
ugaagcgucuuaaugcaag

SEQ ID NO: 811200 - RNA, 19 nt, Artificial Sequence
  Description of Artificial Sequence: Synthetic oligonucleotide
uaugaagcgucuuaaugca

SEQ ID NO: 811201 - RNA, 19 nt, Artificial Sequence
  Description of Artificial Sequence: Synthetic oligonucleotide
ugguuuugccuuuugagug

SEQ ID NO: 811202 - RNA, 19 nt, Artificial Sequence
  Description of Artificial Sequence: Synthetic oligonucleotide
acuaacucggccuccaaag

SEQ ID NO: 811203 - RNA, 19 nt, Artificial Sequence
  Description of Artificial Sequence: Synthetic oligonucleotide
uuaguaugcuccgcgaugg

SEQ ID NO: 811204 - RNA, 19 nt, Artificial Sequence
  Description of Artificial Sequence: Synthetic oligonucleotide
acaguagcguuuuauguag

SEQ ID NO: 811205 - RNA, 19 nt, Artificial Sequence
  Description of Artificial Sequence: Synthetic oligonucleotide
cuggaugucuaaaauaaug

SEQ ID NO: 811206 - RNA, 19 nt, Artificial Sequence
  Description of Artificial Sequence: Synthetic oligonucleotide
gaauuuguauccauuauga

SEQ ID NO: 811207 - RNA, 19 nt, Artificial Sequence
  Description of Artificial Sequence: Synthetic oligonucleotide
aagacuaauuauuuuccau

SEQ ID NO: 811208 - RNA, 19 nt, Artificial Sequence
  Description of Artificial Sequence: Synthetic oligonucleotide
uaaaguaccccauguauuc

SEQ ID NO: 811209 - RNA, 19 nt, Artificial Sequence
  Description of Artificial Sequence: Synthetic oligonucleotide
auaagauuaaguacuaacu

SEQ ID NO: 811210 - RNA, 19 nt, Artificial Sequence
  Description of Artificial Sequence: Synthetic oligonucleotide
aguaaaguaccccauguau

SEQ ID NO: 811211 - RNA, 19 nt, Artificial Sequence
  Description of Artificial Sequence: Synthetic oligonucleotide
uuuuggaggucuuauggga

SEQ ID NO: 811212 - RNA, 19 nt, Artificial Sequence
  Description of Artificial Sequence: Synthetic oligonucleotide
uuugugagaauccucuauc

SEQ ID NO: 811213 - RNA, 19 nt, Artificial Sequence
  Description of Artificial Sequence: Synthetic oligonucleotide
caucccauaagcuccauac

SEQ ID NO: 811214 - RNA, 19 nt, Artificial Sequence
  Description of Artificial Sequence: Synthetic oligonucleotide
uuuggaggucuuaugggag

SEQ ID NO: 811215 - RNA, 19 nt, Artificial Sequence
  Description of Artificial Sequence: Synthetic oligonucleotide
gacauaguaaaguacccca

SEQ ID NO: 811216 - RNA, 19 nt, Artificial Sequence
  Description of Artificial Sequence: Synthetic oligonucleotide
ucuaccaagacucgccucu

SEQ ID NO: 811217 - RNA, 19 nt, Artificial Sequence
  Description of Artificial Sequence: Synthetic oligonucleotide
uuaagucuacuccacgcca

SEQ ID NO: 811218 - RNA, 19 nt, Artificial Sequence
  Description of Artificial Sequence: Synthetic oligonucleotide
uuuucaucagacgaggggu

SEQ ID NO: 811219 - RNA, 19 nt, Artificial Sequence
  Description of Artificial Sequence: Synthetic oligonucleotide
aggauuuaagucuacucca

SEQ ID NO: 811220 - RNA, 19 nt, Artificial Sequence
  Description of Artificial Sequence: Synthetic oligonucleotide
cuugagagagcgaauggag

SEQ ID NO: 811221 - RNA, 19 nt, Artificial Sequence
  Description of Artificial Sequence: Synthetic oligonucleotide
uagcguuuuauguaguucu

SEQ ID NO: 811222 - RNA, 19 nt, Artificial Sequence
  Description of Artificial Sequence: Synthetic oligonucleotide
uuguaaucggaucuucaug

SEQ ID NO: 811223 - RNA, 19 nt, Artificial Sequence
  Description of Artificial Sequence: Synthetic oligonucleotide
aaguaccccauguauucuc

SEQ ID NO: 811224 - RNA, 19 nt, Artificial Sequence
  Description of Artificial Sequence: Synthetic oligonucleotide
auagccuucucccgcgucc

SEQ ID NO: 811225 - RNA, 19 nt, Artificial Sequence
  Description of Artificial Sequence: Synthetic oligonucleotide
uauacccuguguuaggaac

SEQ ID NO: 811226 - RNA, 19 nt, Artificial Sequence
  Description of Artificial Sequence: Synthetic oligonucleotide
acacaagccauuucucugg

SEQ ID NO: 811227 - RNA, 19 nt, Artificial Sequence
  Description of Artificial Sequence: Synthetic oligonucleotide
ugcuuugucuccaaucgug

SEQ ID NO: 811228 - RNA, 19 nt, Artificial Sequence
  Description of Artificial Sequence: Synthetic oligonucleotide
ugucuaaaauaauguuggg

SEQ ID NO: 811229 - RNA, 19 nt, Artificial Sequence
  Description of Artificial Sequence: Synthetic oligonucleotide
cuuggaacacagcaugacg

SEQ ID NO: 811230 - RNA, 19 nt, Artificial Sequence
  Description of Artificial Sequence: Synthetic oligonucleotide
ucauaagcuguuaugugaa

SEQ ID NO: 811231 - RNA, 19 nt, Artificial Sequence
  Description of Artificial Sequence: Synthetic oligonucleotide
aaucgugcaugcuauucca

SEQ ID NO: 811232 - RNA, 19 nt, Artificial Sequence
  Description of Artificial Sequence: Synthetic oligonucleotide
cagagucacagcucgaagg

SEQ ID NO: 811233 - RNA, 19 nt, Artificial Sequence
  Description of Artificial Sequence: Synthetic oligonucleotide
ucgauguucgacauaguaa

SEQ ID NO: 811234 - RNA, 19 nt, Artificial Sequence
  Description of Artificial Sequence: Synthetic oligonucleotide
aauuuguauccauuaugaa

SEQ ID NO: 811235 - RNA, 19 nt, Artificial Sequence
  Description of Artificial Sequence: Synthetic oligonucleotide
aaagaccgaaccaaguuca

SEQ ID NO: 811236 - RNA, 19 nt, Artificial Sequence
  Description of Artificial Sequence: Synthetic oligonucleotide
aagcgucuuaaugcaagcc

SEQ ID NO: 811237 - RNA, 19 nt, Artificial Sequence
  Description of Artificial Sequence: Synthetic oligonucleotide
aagacucgccucucaggcc

SEQ ID NO: 811238 - RNA, 19 nt, Artificial Sequence
  Description of Artificial Sequence: Synthetic oligonucleotide
uuuauguaguucuuguguu

SEQ ID NO: 811239 - RNA, 19 nt, Artificial Sequence
  Description of Artificial Sequence: Synthetic oligonucleotide
uuugcuaaaccaacuggaa

SEQ ID NO: 811240 - RNA, 19 nt, Artificial Sequence
  Description of Artificial Sequence: Synthetic oligonucleotide
uuugaguguugauaguaac

SEQ ID NO: 811241 - RNA, 19 nt, Artificial Sequence
  Description of Artificial Sequence: Synthetic oligonucleotide
auaaugcugagguuugaug

SEQ ID NO: 811242 - RNA, 19 nt, Artificial Sequence
  Description of Artificial Sequence: Synthetic oligonucleotide
caauucauaauagcugggg

SEQ ID NO: 811243 - RNA, 19 nt, Artificial Sequence
  Description of Artificial Sequence: Synthetic oligonucleotide
ggauguauaauucaucauc

SEQ ID NO: 811244 - RNA, 19 nt, Artificial Sequence
  Description of Artificial Sequence: Synthetic oligonucleotide
aauuccuuuuagggguacc

SEQ ID NO: 811245 - RNA, 19 nt, Artificial Sequence
  Description of Artificial Sequence: Synthetic oligonucleotide
uuuugugagaauccucuau

SEQ ID NO: 811246 - RNA, 19 nt, Artificial Sequence
  Description of Artificial Sequence: Synthetic oligonucleotide
uagugguccuuaaacaugu

SEQ ID NO: 811247 - RNA, 19 nt, Artificial Sequence
  Description of Artificial Sequence: Synthetic oligonucleotide
uguucgacauaguaaagua

SEQ ID NO: 811248 - RNA, 19 nt, Artificial Sequence
  Description of Artificial Sequence: Synthetic oligonucleotide
aucuacaggaaaucaucuc

SEQ ID NO: 811249 - RNA, 19 nt, Artificial Sequence
  Description of Artificial Sequence: Synthetic oligonucleotide
ucgacauaguaaaguaccc

SEQ ID NO: 811250 - RNA, 19 nt, Artificial Sequence
  Description of Artificial Sequence: Synthetic oligonucleotide
acaggaaaucaucucaggu

SEQ ID NO: 811251 - RNA, 19 nt, Artificial Sequence
  Description of Artificial Sequence: Synthetic oligonucleotide
aguguugauaguaacuuug

SEQ ID NO: 811252 - RNA, 19 nt, Artificial Sequence
  Description of Artificial Sequence: Synthetic oligonucleotide
ucauuggcacuaauuuucc

SEQ ID NO: 811253 - RNA, 19 nt, Artificial Sequence
  Description of Artificial Sequence: Synthetic oligonucleotide
ucaggauuuaagucuacuc

SEQ ID NO: 811254 - RNA, 19 nt, Artificial Sequence
  Description of Artificial Sequence: Synthetic oligonucleotide
auccauuaugaauccacag

SEQ ID NO: 811255 - RNA, 19 nt, Artificial Sequence
  Description of Artificial Sequence: Synthetic oligonucleotide
agacucgccucucaggccg

SEQ ID NO: 811256 - RNA, 19 nt, Artificial Sequence
  Description of Artificial Sequence: Synthetic oligonucleotide
ugugagaauccucuaucac

SEQ ID NO: 811257 - RNA, 19 nt, Artificial Sequence
  Description of Artificial Sequence: Synthetic oligonucleotide
acuuagaauaagauuaagu

SEQ ID NO: 811258 - RNA, 19 nt, Artificial Sequence
  Description of Artificial Sequence: Synthetic oligonucleotide
auuggcacuaauuuuccau

SEQ ID NO: 811259 - RNA, 19 nt, Artificial Sequence
  Description of Artificial Sequence: Synthetic oligonucleotide
caagacucgccucucaggc

SEQ ID NO: 811260 - RNA, 19 nt, Artificial Sequence
  Description of Artificial Sequence: Synthetic oligonucleotide
caguauaguuuacaauucc

SEQ ID NO: 811261 - RNA, 19 nt, Artificial Sequence
  Description of Artificial Sequence: Synthetic oligonucleotide
aggggcaauucuuuggguc

SEQ ID NO: 811262 - RNA, 19 nt, Artificial Sequence
  Description of Artificial Sequence: Synthetic oligonucleotide
aaucuacaggaaaucaucu

SEQ ID NO: 811263 - RNA, 19 nt, Artificial Sequence
  Description of Artificial Sequence: Synthetic oligonucleotide
gaauggagucgucagccag

SEQ ID NO: 811264 - RNA, 19 nt, Artificial Sequence
  Description of Artificial Sequence: Synthetic oligonucleotide
guaacuuuguuguguacac

SEQ ID NO: 811265 - RNA, 19 nt, Artificial Sequence
  Description of Artificial Sequence: Synthetic oligonucleotide
aguaacuuuguuguguaca

SEQ ID NO: 811266 - RNA, 19 nt, Artificial Sequence
  Description of Artificial Sequence: Synthetic oligonucleotide
agccagaccaaucacauua

SEQ ID NO: 811267 - RNA, 19 nt, Artificial Sequence
  Description of Artificial Sequence: Synthetic oligonucleotide
cuuccuacgaaacuuagaa

SEQ ID NO: 811268 - RNA, 19 nt, Artificial Sequence
  Description of Artificial Sequence: Synthetic oligonucleotide
ucgucagccagaccaauca

SEQ ID NO: 811269 - RNA, 19 nt, Artificial Sequence
  Description of Artificial Sequence: Synthetic oligonucleotide
uugugagaauccucuauca

SEQ ID NO: 811270 - RNA, 19 nt, Artificial Sequence
  Description of Artificial Sequence: Synthetic oligonucleotide
gugaauugagggauaaugc

SEQ ID NO: 811271 - RNA, 19 nt, Artificial Sequence
  Description of Artificial Sequence: Synthetic oligonucleotide
ucagcguugaggcuguauc

SEQ ID NO: 811272 - RNA, 19 nt, Artificial Sequence
  Description of Artificial Sequence: Synthetic oligonucleotide
cccaauucauaauagcugg

SEQ ID NO: 811273 - RNA, 19 nt, Artificial Sequence
  Description of Artificial Sequence: Synthetic oligonucleotide
uucgcaucagcuugaauuc

SEQ ID NO: 811274 - RNA, 19 nt, Artificial Sequence
  Description of Artificial Sequence: Synthetic oligonucleotide
auaauucaucaucucgaug

SEQ ID NO: 811275 - RNA, 19 nt, Artificial Sequence
  Description of Artificial Sequence: Synthetic oligonucleotide
ucuagugucaggggaagug

SEQ ID NO: 811276 - RNA, 19 nt, Artificial Sequence
  Description of Artificial Sequence: Synthetic oligonucleotide
aacauuagugaggauguau

SEQ ID NO: 811277 - RNA, 19 nt, Artificial Sequence
  Description of Artificial Sequence: Synthetic oligonucleotide
ucuucuagugucaggggaa

SEQ ID NO: 811278 - RNA, 19 nt, Artificial Sequence
  Description of Artificial Sequence: Synthetic oligonucleotide
ucuccaaucgugcaugcua

SEQ ID NO: 811279 - RNA, 19 nt, Artificial Sequence
  Description of Artificial Sequence: Synthetic oligonucleotide
acaagcaccccuccagcac

SEQ ID NO: 811280 - RNA, 19 nt, Artificial Sequence
  Description of Artificial Sequence: Synthetic oligonucleotide
uugagagagcgaauggagu

SEQ ID NO: 811281 - RNA, 19 nt, Artificial Sequence
  Description of Artificial Sequence: Synthetic oligonucleotide
uuguauccauuaugaaucc

SEQ ID NO: 811282 - RNA, 19 nt, Artificial Sequence
  Description of Artificial Sequence: Synthetic oligonucleotide
agcgucuuaaugcaagccu

SEQ ID NO: 811283 - RNA, 19 nt, Artificial Sequence
  Description of Artificial Sequence: Synthetic oligonucleotide
uugcuaaaccaacuggaaa

SEQ ID NO: 811284 - RNA, 19 nt, Artificial Sequence
  Description of Artificial Sequence: Synthetic oligonucleotide
uaaguacuaacucggccuc

SEQ ID NO: 811285 - RNA, 19 nt, Artificial Sequence
  Description of Artificial Sequence: Synthetic oligonucleotide
ucguaaaacacgacugguc

SEQ ID NO: 811286 - RNA, 19 nt, Artificial Sequence
  Description of Artificial Sequence: Synthetic oligonucleotide
caaucgugcaugcuauucc

SEQ ID NO: 811287 - RNA, 19 nt, Artificial Sequence
  Description of Artificial Sequence: Synthetic oligonucleotide
ugaguguugauaguaacuu

SEQ ID NO: 811288 - RNA, 19 nt, Artificial Sequence
  Description of Artificial Sequence: Synthetic oligonucleotide
aguugcacagggcucccac

SEQ ID NO: 811289 - RNA, 19 nt, Artificial Sequence
  Description of Artificial Sequence: Synthetic oligonucleotide
aaugcugagguuugauguu

SEQ ID NO: 811290 - RNA, 19 nt, Artificial Sequence
  Description of Artificial Sequence: Synthetic oligonucleotide
cuuaguaugcuccgcgaug

SEQ ID NO: 811291 - RNA, 19 nt, Artificial Sequence
  Description of Artificial Sequence: Synthetic oligonucleotide
caauaugcuaagauccauc

SEQ ID NO: 811292 - RNA, 19 nt, Artificial Sequence
  Description of Artificial Sequence: Synthetic oligonucleotide
uggcacuaauuuuccaucc

SEQ ID NO: 811293 - RNA, 19 nt, Artificial Sequence
  Description of Artificial Sequence: Synthetic oligonucleotide
uugggucagaauuuguauc

SEQ ID NO: 811294 - RNA, 19 nt, Artificial Sequence
  Description of Artificial Sequence: Synthetic oligonucleotide
gaagcgucuuaaugcaagc

SEQ ID NO: 811295 - RNA, 19 nt, Artificial Sequence
  Description of Artificial Sequence: Synthetic oligonucleotide
ugcaugcuauuccagcaca

SEQ ID NO: 811296 - RNA, 19 nt, Artificial Sequence
  Description of Artificial Sequence: Synthetic oligonucleotide
agcuugagagagcgaaugg

SEQ ID NO: 811297 - RNA, 19 nt, Artificial Sequence
  Description of Artificial Sequence: Synthetic oligonucleotide
ugcuaagauccauccauca

SEQ ID NO: 811298 - RNA, 19 nt, Artificial Sequence
  Description of Artificial Sequence: Synthetic oligonucleotide
gucauuggcacuaauuuuc

SEQ ID NO: 811299 - RNA, 19 nt, Artificial Sequence
  Description of Artificial Sequence: Synthetic oligonucleotide
gagagagcgaauggagucg

SEQ ID NO: 811300 - RNA, 19 nt, Artificial Sequence
  Description of Artificial Sequence: Synthetic oligonucleotide
aaguacuaacucggccucc

SEQ ID NO: 811301 - RNA, 19 nt, Artificial Sequence
  Description of Artificial Sequence: Synthetic oligonucleotide
uucauaauagcuggggcau

SEQ ID NO: 811302 - RNA, 19 nt, Artificial Sequence
  Description of Artificial Sequence: Synthetic oligonucleotide
agguucuccaacauuagug

SEQ ID NO: 811303 - RNA, 19 nt, Artificial Sequence
  Description of Artificial Sequence: Synthetic oligonucleotide
ucuuccuacgaaacuuaga

SEQ ID NO: 811304 - RNA, 19 nt, Artificial Sequence
  Description of Artificial Sequence: Synthetic oligonucleotide
gauuaaguacuaacucggc

SEQ ID NO: 811305 - RNA, 19 nt, Artificial Sequence
  Description of Artificial Sequence: Synthetic oligonucleotide
aacacgacuggucuuugua

SEQ ID NO: 811306 - RNA, 19 nt, Artificial Sequence
  Description of Artificial Sequence: Synthetic oligonucleotide
aguauaguuuacaauuccu

SEQ ID NO: 811307 - RNA, 19 nt, Artificial Sequence
  Description of Artificial Sequence: Synthetic oligonucleotide
ucuauucguaaaacacgac

SEQ ID NO: 811308 - RNA, 19 nt, Artificial Sequence
  Description of Artificial Sequence: Synthetic oligonucleotide
uuggcacuaauuuuccauc

SEQ ID NO: 811309 - RNA, 19 nt, Artificial Sequence
  Description of Artificial Sequence: Synthetic oligonucleotide
ugauaguaacuuuguugug

SEQ ID NO: 811310 - RNA, 19 nt, Artificial Sequence
  Description of Artificial Sequence: Synthetic oligonucleotide
guccuuaguaugcuccgcg

SEQ ID NO: 811311 - RNA, 19 nt, Artificial Sequence
  Description of Artificial Sequence: Synthetic oligonucleotide
gcuaugaagcgucuuaaug

SEQ ID NO: 811312 - RNA, 19 nt, Artificial Sequence
  Description of Artificial Sequence: Synthetic oligonucleotide
gcuguuaugugaauugagg

SEQ ID NO: 811313 - RNA, 19 nt, Artificial Sequence
  Description of Artificial Sequence: Synthetic oligonucleotide
uguauacccuguguuagga

SEQ ID NO: 811314 - RNA, 19 nt, Artificial Sequence
  Description of Artificial Sequence: Synthetic oligonucleotide
ugaggcuguaucaggauuu

SEQ ID NO: 811315 - RNA, 19 nt, Artificial Sequence
  Description of Artificial Sequence: Synthetic oligonucleotide
auaguaacuuuguugugua

SEQ ID NO: 811316 - RNA, 19 nt, Artificial Sequence
  Description of Artificial Sequence: Synthetic oligonucleotide
cuaacucggccuccaaagg

SEQ ID NO: 811317 - RNA, 19 nt, Artificial Sequence
  Description of Artificial Sequence: Synthetic oligonucleotide
gacaguagcguuuuaugua

SEQ ID NO: 811318 - RNA, 19 nt, Artificial Sequence
  Description of Artificial Sequence: Synthetic oligonucleotide
uaucaaccacaccucagaa

SEQ ID NO: 811319 - RNA, 19 nt, Artificial Sequence
  Description of Artificial Sequence: Synthetic oligonucleotide
gauaguaacuuuguugugu

SEQ ID NO: 811320 - RNA, 19 nt, Artificial Sequence
  Description of Artificial Sequence: Synthetic oligonucleotide
ucgugcaugcuauuccagc

SEQ ID NO: 811321 - RNA, 19 nt, Artificial Sequence
  Description of Artificial Sequence: Synthetic oligonucleotide
ucuaucacaugguucccuc

SEQ ID NO: 811322 - RNA, 19 nt, Artificial Sequence
  Description of Artificial Sequence: Synthetic oligonucleotide
uugagggauaaugcugagg

SEQ ID NO: 811323 - RNA, 19 nt, Artificial Sequence
  Description of Artificial Sequence: Synthetic oligonucleotide
agugugguuaggcucggcu

SEQ ID NO: 811324 - RNA, 19 nt, Artificial Sequence
  Description of Artificial Sequence: Synthetic oligonucleotide
uggucuuuguaaucggauc

SEQ ID NO: 811325 - RNA, 19 nt, Artificial Sequence
  Description of Artificial Sequence: Synthetic oligonucleotide
agauccucgaaagcauugg

SEQ ID NO: 811326 - RNA, 19 nt, Artificial Sequence
  Description of Artificial Sequence: Synthetic oligonucleotide
acgacuggucuuuguaauc

SEQ ID NO: 811327 - RNA, 19 nt, Artificial Sequence
  Description of Artificial Sequence: Synthetic oligonucleotide
uucguaaaacacgacuggu

SEQ ID NO: 811328 - RNA, 19 nt, Artificial Sequence
  Description of Artificial Sequence: Synthetic oligonucleotide
auguucgacauaguaaagu

SEQ ID NO: 811329 - RNA, 19 nt, Artificial Sequence
  Description of Artificial Sequence: Synthetic oligonucleotide
agaauaaaucccaauucau

SEQ ID NO: 811330 - RNA, 19 nt, Artificial Sequence
  Description of Artificial Sequence: Synthetic oligonucleotide
uaaaacacgacuggucuuu

SEQ ID NO: 811331 - RNA, 19 nt, Artificial Sequence
  Description of Artificial Sequence: Synthetic oligonucleotide
aucacaugguucccuccgg

SEQ ID NO: 811332 - RNA, 19 nt, Artificial Sequence
  Description of Artificial Sequence: Synthetic oligonucleotide
uggaacacagcaugacgac

SEQ ID NO: 811333 - RNA, 19 nt, Artificial Sequence
  Description of Artificial Sequence: Synthetic oligonucleotide
agggauaaugcugagguuu

SEQ ID NO: 811334 - RNA, 19 nt, Artificial Sequence
  Description of Artificial Sequence: Synthetic oligonucleotide
agaccgaaccaaguucagc

SEQ ID NO: 811335 - RNA, 19 nt, Artificial Sequence
  Description of Artificial Sequence: Synthetic oligonucleotide
ugcugucaaguccaaguuc

SEQ ID NO: 811336 - RNA, 19 nt, Artificial Sequence
  Description of Artificial Sequence: Synthetic oligonucleotide
auaugcuaagauccaucca

SEQ ID NO: 811337 - RNA, 19 nt, Artificial Sequence
  Description of Artificial Sequence: Synthetic oligonucleotide
uuauguaguucuuguguuu

SEQ ID NO: 811338 - RNA, 19 nt, Artificial Sequence
  Description of Artificial Sequence: Synthetic oligonucleotide
cuacgaaacuuagaauaag

SEQ ID NO: 811339 - RNA, 19 nt, Artificial Sequence
  Description of Artificial Sequence: Synthetic oligonucleotide
auagugguccuuaaacaug

SEQ ID NO: 811340 - RNA, 19 nt, Artificial Sequence
  Description of Artificial Sequence: Synthetic oligonucleotide
aagcgcucagugugguuag

SEQ ID NO: 811341 - RNA, 19 nt, Artificial Sequence
  Description of Artificial Sequence: Synthetic oligonucleotide
gauguucgacauaguaaag

SEQ ID NO: 811342 - RNA, 19 nt, Artificial Sequence
  Description of Artificial Sequence: Synthetic oligonucleotide
cuaucaaccacaccucaga

SEQ ID NO: 811343 - RNA, 19 nt, Artificial Sequence
  Description of Artificial Sequence: Synthetic oligonucleotide
aaaguaccccauguauucu

SEQ ID NO: 811344 - RNA, 19 nt, Artificial Sequence
  Description of Artificial Sequence: Synthetic oligonucleotide
aagcuguuaugugaauuga

SEQ ID NO: 811345 - RNA, 19 nt, Artificial Sequence
  Description of Artificial Sequence: Synthetic oligonucleotide
cuauucguaaaacacgacu

SEQ ID NO: 811346 - RNA, 19 nt, Artificial Sequence
  Description of Artificial Sequence: Synthetic oligonucleotide
gcugucaaguccaaguucc

SEQ ID NO: 811347 - RNA, 19 nt, Artificial Sequence
  Description of Artificial Sequence: Synthetic oligonucleotide
aucuaccaagacucgccuc

SEQ ID NO: 811348 - RNA, 19 nt, Artificial Sequence
  Description of Artificial Sequence: Synthetic oligonucleotide
cugaauacugguggguccc

SEQ ID NO: 811349 - RNA, 19 nt, Artificial Sequence
  Description of Artificial Sequence: Synthetic oligonucleotide
acaugguucccuccgggcu

SEQ ID NO: 811350 - RNA, 19 nt, Artificial Sequence
  Description of Artificial Sequence: Synthetic oligonucleotide
aagucuacuccacgccaga

SEQ ID NO: 811351 - RNA, 19 nt, Artificial Sequence
  Description of Artificial Sequence: Synthetic oligonucleotide
uccgcgauggcuuccuuaa

SEQ ID NO: 811352 - RNA, 19 nt, Artificial Sequence
  Description of Artificial Sequence: Synthetic oligonucleotide
ggacauccaagaaaggugc

SEQ ID NO: 811353 - RNA, 19 nt, Artificial Sequence
  Description of Artificial Sequence: Synthetic oligonucleotide
uuaugugaauugagggaua

SEQ ID NO: 811354 - RNA, 19 nt, Artificial Sequence
  Description of Artificial Sequence: Synthetic oligonucleotide
aaacacgacuggucuuugu

SEQ ID NO: 811355 - RNA, 19 nt, Artificial Sequence
  Description of Artificial Sequence: Synthetic oligonucleotide
ucucaggccggaaauucau

SEQ ID NO: 811356 - RNA, 19 nt, Artificial Sequence
  Description of Artificial Sequence: Synthetic oligonucleotide
accccauguauucucuucu

SEQ ID NO: 811357 - RNA, 19 nt, Artificial Sequence
  Description of Artificial Sequence: Synthetic oligonucleotide
cuaacauggcaauaugcua

SEQ ID NO: 811358 - RNA, 19 nt, Artificial Sequence
  Description of Artificial Sequence: Synthetic oligonucleotide
uccuuaguaugcuccgcga

SEQ ID NO: 811359 - RNA, 19 nt, Artificial Sequence
  Description of Artificial Sequence: Synthetic oligonucleotide
acgaaacuuagaauaagau

SEQ ID NO: 811360 - RNA, 19 nt, Artificial Sequence
  Description of Artificial Sequence: Synthetic oligonucleotide
uuaggcucggcugggagaa

SEQ ID NO: 811361 - RNA, 19 nt, Artificial Sequence
  Description of Artificial Sequence: Synthetic oligonucleotide
ugccuuuugaguguugaua

SEQ ID NO: 811362 - RNA, 19 nt, Artificial Sequence
  Description of Artificial Sequence: Synthetic oligonucleotide
guuaugugaauugagggau

SEQ ID NO: 811363 - RNA, 19 nt, Artificial Sequence
  Description of Artificial Sequence: Synthetic oligonucleotide
aaaacacgacuggucuuug

SEQ ID NO: 811364 - RNA, 19 nt, Artificial Sequence
  Description of Artificial Sequence: Synthetic oligonucleotide
cauaagcuccauacacaug

SEQ ID NO: 811365 - RNA, 19 nt, Artificial Sequence
  Description of Artificial Sequence: Synthetic oligonucleotide
ucccgcguccuuaguaugc

SEQ ID NO: 811366 - RNA, 19 nt, Artificial Sequence
  Description of Artificial Sequence: Synthetic oligonucleotide
guucgacauaguaaaguac

SEQ ID NO: 811367 - RNA, 19 nt, Artificial Sequence
  Description of Artificial Sequence: Synthetic oligonucleotide
gugugguuaggcucggcug

SEQ ID NO: 811368 - RNA, 19 nt, Artificial Sequence
  Description of Artificial Sequence: Synthetic oligonucleotide
uguauccauuaugaaucca

SEQ ID NO: 811369 - RNA, 19 nt, Artificial Sequence
  Description of Artificial Sequence: Synthetic oligonucleotide
uuccuacgaaacuuagaau

SEQ ID NO: 811370 - RNA, 19 nt, Artificial Sequence
  Description of Artificial Sequence: Synthetic oligonucleotide
uggaggucuuaugggagag

SEQ ID NO: 811371 - RNA, 19 nt, Artificial Sequence
  Description of Artificial Sequence: Synthetic oligonucleotide
agcguugaggcuguaucag

SEQ ID NO: 811372 - RNA, 19 nt, Artificial Sequence
  Description of Artificial Sequence: Synthetic oligonucleotide
aaucaucaacucugcuaaa

SEQ ID NO: 811373 - RNA, 19 nt, Artificial Sequence
  Description of Artificial Sequence: Synthetic oligonucleotide
agcuguuaugugaauugag

SEQ ID NO: 811374 - RNA, 19 nt, Artificial Sequence
  Description of Artificial Sequence: Synthetic oligonucleotide
cucgccaccaccccuaaca

SEQ ID NO: 811375 - RNA, 19 nt, Artificial Sequence
  Description of Artificial Sequence: Synthetic oligonucleotide
ucggcugggagaagccuug

SEQ ID NO: 811376 - RNA, 19 nt, Artificial Sequence
  Description of Artificial Sequence: Synthetic oligonucleotide
agagcgaauggagucguca

SEQ ID NO: 811377 - RNA, 19 nt, Artificial Sequence
  Description of Artificial Sequence: Synthetic oligonucleotide
aucaucucaggucuuccua

SEQ ID NO: 811378 - RNA, 19 nt, Artificial Sequence
  Description of Artificial Sequence: Synthetic oligonucleotide
acagcaugacgacucucca

SEQ ID NO: 811379 - RNA, 19 nt, Artificial Sequence
  Description of Artificial Sequence: Synthetic oligonucleotide
cacaugguucccuccgggc

SEQ ID NO: 811380 - RNA, 19 nt, Artificial Sequence
  Description of Artificial Sequence: Synthetic oligonucleotide
cucuucuagugucagggga

SEQ ID NO: 811381 - RNA, 19 nt, Artificial Sequence
  Description of Artificial Sequence: Synthetic oligonucleotide
augcuaagauccauccauc

SEQ ID NO: 811382 - RNA, 19 nt, Artificial Sequence
  Description of Artificial Sequence: Synthetic oligonucleotide
ucgaaagcauuggugcugu

SEQ ID NO: 811383 - RNA, 19 nt, Artificial Sequence
  Description of Artificial Sequence: Synthetic oligonucleotide
acacgacuggucuuuguaa

SEQ ID NO: 811384 - RNA, 19 nt, Artificial Sequence
  Description of Artificial Sequence: Synthetic oligonucleotide
uaguaacuuuguuguguac

SEQ ID NO: 811385 - RNA, 19 nt, Artificial Sequence
  Description of Artificial Sequence: Synthetic oligonucleotide
cucgaaagcauuggugcug

SEQ ID NO: 811386 - RNA, 19 nt, Artificial Sequence
  Description of Artificial Sequence: Synthetic oligonucleotide
ucucccgcguccuuaguau

SEQ ID NO: 811387 - RNA, 19 nt, Artificial Sequence
  Description of Artificial Sequence: Synthetic oligonucleotide
uucccuccgggcuggaugu

SEQ ID NO: 811388 - RNA, 19 nt, Artificial Sequence
  Description of Artificial Sequence: Synthetic oligonucleotide
uaacauagaggagguugcu

SEQ ID NO: 811389 - RNA, 19 nt, Artificial Sequence
  Description of Artificial Sequence: Synthetic oligonucleotide
gggcugauagccuucuccc

SEQ ID NO: 811390 - RNA, 19 nt, Artificial Sequence
  Description of Artificial Sequence: Synthetic oligonucleotide
ccaauucauaauagcuggg

SEQ ID NO: 811391 - RNA, 19 nt, Artificial Sequence
  Description of Artificial Sequence: Synthetic oligonucleotide
guaaucggaucuucauguc

SEQ ID NO: 811392 - RNA, 19 nt, Artificial Sequence
  Description of Artificial Sequence: Synthetic oligonucleotide
guagcguuuuauguaguuc

SEQ ID NO: 811393 - RNA, 19 nt, Artificial Sequence
  Description of Artificial Sequence: Synthetic oligonucleotide
aagaccgaaccaaguucag

SEQ ID NO: 811394 - RNA, 19 nt, Artificial Sequence
  Description of Artificial Sequence: Synthetic oligonucleotide
aguacuaacucggccucca

SEQ ID NO: 811395 - RNA, 19 nt, Artificial Sequence
  Description of Artificial Sequence: Synthetic oligonucleotide
auccucgaaagcauuggug

SEQ ID NO: 811396 - RNA, 19 nt, Artificial Sequence
  Description of Artificial Sequence: Synthetic oligonucleotide
caagaaaggugccuccaga

SEQ ID NO: 811397 - RNA, 19 nt, Artificial Sequence
  Description of Artificial Sequence: Synthetic oligonucleotide
uucucccgcguccuuagua

SEQ ID NO: 811398 - RNA, 19 nt, Artificial Sequence
  Description of Artificial Sequence: Synthetic oligonucleotide
aguaugcuccgcgauggcu

SEQ ID NO: 811399 - RNA, 19 nt, Artificial Sequence
  Description of Artificial Sequence: Synthetic oligonucleotide
uaccaagacucgccucuca

SEQ ID NO: 811400 - RNA, 19 nt, Artificial Sequence
  Description of Artificial Sequence: Synthetic oligonucleotide
aggucuuccuacgaaacuu

SEQ ID NO: 811401 - RNA, 19 nt, Artificial Sequence
  Description of Artificial Sequence: Synthetic oligonucleotide
uaguaugcuccgcgauggc

SEQ ID NO: 811402 - RNA, 19 nt, Artificial Sequence
  Description of Artificial Sequence: Synthetic oligonucleotide
cuguguuaggaacuuuuaa

SEQ ID NO: 811403 - RNA, 19 nt, Artificial Sequence
  Description of Artificial Sequence: Synthetic oligonucleotide
ggcuucuauucguaaaaca

SEQ ID NO: 811404 - RNA, 19 nt, Artificial Sequence
  Description of Artificial Sequence: Synthetic oligonucleotide
auacccuguguuaggaacu

SEQ ID NO: 811405 - RNA, 19 nt, Artificial Sequence
  Description of Artificial Sequence: Synthetic oligonucleotide
uggcuaugaagcgucuuaa

SEQ ID NO: 811406 - RNA, 19 nt, Artificial Sequence
  Description of Artificial Sequence: Synthetic oligonucleotide
acuagguccaaaagaccga

SEQ ID NO: 811407 - RNA, 19 nt, Artificial Sequence
  Description of Artificial Sequence: Synthetic oligonucleotide
aaauugucauuggcacuaa

SEQ ID NO: 811408 - RNA, 19 nt, Artificial Sequence
  Description of Artificial Sequence: Synthetic oligonucleotide
ggcugauagccuucucccg

SEQ ID NO: 811409 - RNA, 19 nt, Artificial Sequence
  Description of Artificial Sequence: Synthetic oligonucleotide
ugggagagcaaagcugaaa

SEQ ID NO: 811410 - RNA, 19 nt, Artificial Sequence
  Description of Artificial Sequence: Synthetic oligonucleotide
agucuacuccacgccagag

SEQ ID NO: 811411 - RNA, 19 nt, Artificial Sequence
  Description of Artificial Sequence: Synthetic oligonucleotide
cuauuccagcacacuggac

SEQ ID NO: 811412 - RNA, 19 nt, Artificial Sequence
  Description of Artificial Sequence: Synthetic oligonucleotide
ggucuuaugggagagcaaa

SEQ ID NO: 811413 - RNA, 19 nt, Artificial Sequence
  Description of Artificial Sequence: Synthetic oligonucleotide
gauagccuucucccgcguc

SEQ ID NO: 811414 - RNA, 19 nt, Artificial Sequence
  Description of Artificial Sequence: Synthetic oligonucleotide
caccucagaagucgucuug

SEQ ID NO: 811415 - RNA, 19 nt, Artificial Sequence
  Description of Artificial Sequence: Synthetic oligonucleotide
gauccucgaaagcauuggu

SEQ ID NO: 811416 - RNA, 19 nt, Artificial Sequence
  Description of Artificial Sequence: Synthetic oligonucleotide
gguuaggcucggcugggag

SEQ ID NO: 811417 - RNA, 19 nt, Artificial Sequence
  Description of Artificial Sequence: Synthetic oligonucleotide
caaaagaccgaaccaaguu

SEQ ID NO: 811418 - RNA, 19 nt, Artificial Sequence
  Description of Artificial Sequence: Synthetic oligonucleotide
caauaggggcugguuuugc

SEQ ID NO: 811419 - RNA, 19 nt, Artificial Sequence
  Description of Artificial Sequence: Synthetic oligonucleotide
cgauguucgacauaguaaa

SEQ ID NO: 811420 - RNA, 19 nt, Artificial Sequence
  Description of Artificial Sequence: Synthetic oligonucleotide
caucagacgagggguuccc

SEQ ID NO: 811421 - RNA, 19 nt, Artificial Sequence
  Description of Artificial Sequence: Synthetic oligonucleotide
gcguugaggcuguaucagg

SEQ ID NO: 811422 - RNA, 19 nt, Artificial Sequence
  Description of Artificial Sequence: Synthetic oligonucleotide
aggcccaacucgccaccac

SEQ ID NO: 811423 - RNA, 19 nt, Artificial Sequence
  Description of Artificial Sequence: Synthetic oligonucleotide
gggauaaugcugagguuug

SEQ ID NO: 811424 - RNA, 19 nt, Artificial Sequence
  Description of Artificial Sequence: Synthetic oligonucleotide
gcguccuuaguaugcuccg

SEQ ID NO: 811425 - RNA, 19 nt, Artificial Sequence
  Description of Artificial Sequence: Synthetic oligonucleotide
cagcguugaggcuguauca

SEQ ID NO: 811426 - RNA, 19 nt, Artificial Sequence
  Description of Artificial Sequence: Synthetic oligonucleotide
gauaaugcugagguuugau

SEQ ID NO: 811427 - RNA, 19 nt, Artificial Sequence
  Description of Artificial Sequence: Synthetic oligonucleotide
ggacaguagcguuuuaugu

SEQ ID NO: 811428 - RNA, 19 nt, Artificial Sequence
  Description of Artificial Sequence: Synthetic oligonucleotide
cauuggcacuaauuuucca

SEQ ID NO: 811429 - RNA, 19 nt, Artificial Sequence
  Description of Artificial Sequence: Synthetic oligonucleotide
gaauccucuaucacauggu

SEQ ID NO: 811430 - RNA, 19 nt, Artificial Sequence
  Description of Artificial Sequence: Synthetic oligonucleotide
ucgcaucagcuugaauucu

SEQ ID NO: 811431 - RNA, 19 nt, Artificial Sequence
  Description of Artificial Sequence: Synthetic oligonucleotide
uguucgcaucagcuugaau

SEQ ID NO: 811432 - RNA, 19 nt, Artificial Sequence
  Description of Artificial Sequence: Synthetic oligonucleotide
aagauccauccaucaucua

SEQ ID NO: 811433 - RNA, 19 nt, Artificial Sequence
  Description of Artificial Sequence: Synthetic oligonucleotide
aucgugcaugcuauuccag

SEQ ID NO: 811434 - RNA, 19 nt, Artificial Sequence
  Description of Artificial Sequence: Synthetic oligonucleotide
guaaaguaccccauguauu

SEQ ID NO: 811435 - RNA, 19 nt, Artificial Sequence
  Description of Artificial Sequence: Synthetic oligonucleotide
cacaagcaccccuccagca

SEQ ID NO: 811436 - RNA, 19 nt, Artificial Sequence
  Description of Artificial Sequence: Synthetic oligonucleotide
agggguacccgcucaucau

SEQ ID NO: 811437 - RNA, 19 nt, Artificial Sequence
  Description of Artificial Sequence: Synthetic oligonucleotide
cacuuuugcuaaaccaacu

SEQ ID NO: 811438 - RNA, 19 nt, Artificial Sequence
  Description of Artificial Sequence: Synthetic oligonucleotide
guauacccuguguuaggaa

SEQ ID NO: 811439 - RNA, 19 nt, Artificial Sequence
  Description of Artificial Sequence: Synthetic oligonucleotide
acaccucagaagucgucuu

SEQ ID NO: 811440 - RNA, 19 nt, Artificial Sequence
  Description of Artificial Sequence: Synthetic oligonucleotide
ccaacauuagugaggaugu

SEQ ID NO: 811441 - RNA, 19 nt, Artificial Sequence
  Description of Artificial Sequence: Synthetic oligonucleotide
cuagguccaaaagaccgaa

SEQ ID NO: 811442 - RNA, 19 nt, Artificial Sequence
  Description of Artificial Sequence: Synthetic oligonucleotide
gaguguugauaguaacuuu

SEQ ID NO: 811443 - RNA, 19 nt, Artificial Sequence
  Description of Artificial Sequence: Synthetic oligonucleotide
uggggcaucggcugcuguu

SEQ ID NO: 811444 - RNA, 19 nt, Artificial Sequence
  Description of Artificial Sequence: Synthetic oligonucleotide
ggcaauaugcuaagaucca

SEQ ID NO: 811445 - RNA, 19 nt, Artificial Sequence
  Description of Artificial Sequence: Synthetic oligonucleotide
acucgccaccaccccuaac

SEQ ID NO: 811446 - RNA, 19 nt, Artificial Sequence
  Description of Artificial Sequence: Synthetic oligonucleotide
augaauccacaggcccagg

SEQ ID NO: 811447 - RNA, 19 nt, Artificial Sequence
  Description of Artificial Sequence: Synthetic oligonucleotide
accaccccuaacauggcaa

SEQ ID NO: 811448 - RNA, 19 nt, Artificial Sequence
  Description of Artificial Sequence: Synthetic oligonucleotide
aacucgccaccaccccuaa

SEQ ID NO: 811449 - RNA, 19 nt, Artificial Sequence
  Description of Artificial Sequence: Synthetic oligonucleotide
cgcguccuuaguaugcucc

SEQ ID NO: 811450 - RNA, 19 nt, Artificial Sequence
  Description of Artificial Sequence: Synthetic oligonucleotide
cgacauaguaaaguacccc

SEQ ID NO: 811451 - RNA, 19 nt, Artificial Sequence
  Description of Artificial Sequence: Synthetic oligonucleotide
guguugauaguaacuuugu

SEQ ID NO: 811452 - RNA, 19 nt, Artificial Sequence
  Description of Artificial Sequence: Synthetic oligonucleotide
guaaaacacgacuggucuu

SEQ ID NO: 811453 - RNA, 19 nt, Artificial Sequence
  Description of Artificial Sequence: Synthetic oligonucleotide
aagcaccccuccagcacug

SEQ ID NO: 811454 - RNA, 19 nt, Artificial Sequence
  Description of Artificial Sequence: Synthetic oligonucleotide
guguaauauuuuggagguc

SEQ ID NO: 811455 - RNA, 19 nt, Artificial Sequence
  Description of Artificial Sequence: Synthetic oligonucleotide
gcgucuuaaugcaagccuc

SEQ ID NO: 811456 - RNA, 19 nt, Artificial Sequence
  Description of Artificial Sequence: Synthetic oligonucleotide
caucuaccaagacucgccu

SEQ ID NO: 811457 - RNA, 19 nt, Artificial Sequence
  Description of Artificial Sequence: Synthetic oligonucleotide
acaauuccuuuuaggggua

SEQ ID NO: 811458 - RNA, 19 nt, Artificial Sequence
  Description of Artificial Sequence: Synthetic oligonucleotide
gggcaucggcugcuguucg

SEQ ID NO: 811459 - RNA, 19 nt, Artificial Sequence
  Description of Artificial Sequence: Synthetic oligonucleotide
augcuccgcgauggcuucc

SEQ ID NO: 811460 - RNA, 19 nt, Artificial Sequence
  Description of Artificial Sequence: Synthetic oligonucleotide
cacgacuggucuuuguaau

SEQ ID NO: 811461 - RNA, 19 nt, Artificial Sequence
  Description of Artificial Sequence: Synthetic oligonucleotide
gucgucagccagaccaauc

SEQ ID NO: 811462 - RNA, 19 nt, Artificial Sequence
  Description of Artificial Sequence: Synthetic oligonucleotide
augaagcgucuuaaugcaa

SEQ ID NO: 811463 - RNA, 19 nt, Artificial Sequence
  Description of Artificial Sequence: Synthetic oligonucleotide
cuaccaagacucgccucuc

SEQ ID NO: 811464 - RNA, 19 nt, Artificial Sequence
  Description of Artificial Sequence: Synthetic oligonucleotide
gacucgccucucaggccgg

SEQ ID NO: 811465 - RNA, 19 nt, Artificial Sequence
  Description of Artificial Sequence: Synthetic oligonucleotide
gccaucuaucaaccacacc

SEQ ID NO: 811466 - RNA, 19 nt, Artificial Sequence
  Description of Artificial Sequence: Synthetic oligonucleotide
gcuaaaccaacuggaaaua

SEQ ID NO: 811467 - RNA, 19 nt, Artificial Sequence
  Description of Artificial Sequence: Synthetic oligonucleotide
ugcuccgcgauggcuuccu

SEQ ID NO: 811468 - RNA, 19 nt, Artificial Sequence
  Description of Artificial Sequence: Synthetic oligonucleotide
cagcuugaauucuguaggu

SEQ ID NO: 811469 - RNA, 19 nt, Artificial Sequence
  Description of Artificial Sequence: Synthetic oligonucleotide
cacaccucagaagucgucu

SEQ ID NO: 811470 - RNA, 19 nt, Artificial Sequence
  Description of Artificial Sequence: Synthetic oligonucleotide
caagcaccccuccagcacu

SEQ ID NO: 811471 - RNA, 19 nt, Artificial Sequence
  Description of Artificial Sequence: Synthetic oligonucleotide
cuucugaauacuggugggu

SEQ ID NO: 811472 - RNA, 19 nt, Artificial Sequence
  Description of Artificial Sequence: Synthetic oligonucleotide
gcaagccucuaagucagca

SEQ ID NO: 811473 - RNA, 19 nt, Artificial Sequence
  Description of Artificial Sequence: Synthetic oligonucleotide
caacucgccaccaccccua

SEQ ID NO: 811474 - RNA, 19 nt, Artificial Sequence
  Description of Artificial Sequence: Synthetic oligonucleotide
ggcacuaauuuuccauccu

SEQ ID NO: 811475 - RNA, 19 nt, Artificial Sequence
  Description of Artificial Sequence: Synthetic oligonucleotide
caugcuauuccagcacacu

SEQ ID NO: 811476 - RNA, 19 nt, Artificial Sequence
  Description of Artificial Sequence: Synthetic oligonucleotide
gcuaagauccauccaucau

SEQ ID NO: 811477 - RNA, 19 nt, Artificial Sequence
  Description of Artificial Sequence: Synthetic oligonucleotide
cgugcaugcuauuccagca

SEQ ID NO: 811478 - RNA, 19 nt, Artificial Sequence
  Description of Artificial Sequence: Synthetic oligonucleotide
ccccauguauucucuucug

SEQ ID NO: 811479 - RNA, 19 nt, Artificial Sequence
  Description of Artificial Sequence: Synthetic oligonucleotide
cauaagcuguuaugugaau

SEQ ID NO: 811480 - RNA, 19 nt, Artificial Sequence
  Description of Artificial Sequence: Synthetic oligonucleotide
cgaaacuuagaauaagauu

SEQ ID NO: 811481 - RNA, 19 nt, Artificial Sequence
  Description of Artificial Sequence: Synthetic oligonucleotide
caaccuugguauuucucuu

SEQ ID NO: 811482 - RNA, 19 nt, Artificial Sequence
  Description of Artificial Sequence: Synthetic oligonucleotide
gcaugcuauuccagcacac

SEQ ID NO: 811483 - RNA, 19 nt, Artificial Sequence
  Description of Artificial Sequence: Synthetic oligonucleotide
ggccggaaauucauuuuca

SEQ ID NO: 811484 - RNA, 19 nt, Artificial Sequence
  Description of Artificial Sequence: Synthetic oligonucleotide
ggccaucuaucaaccacac

SEQ ID NO: 811485 - RNA, 19 nt, Artificial Sequence
  Description of Artificial Sequence: Synthetic oligonucleotide
guacuaacucggccuccaa

SEQ ID NO: 811486 - RNA, 19 nt, Artificial Sequence
  Description of Artificial Sequence: Synthetic oligonucleotide
gagggauaaugcugagguu

SEQ ID NO: 811487 - RNA, 19 nt, Artificial Sequence
  Description of Artificial Sequence: Synthetic oligonucleotide
ccucucaggccggaaauuc

SEQ ID NO: 811488 - RNA, 19 nt, Artificial Sequence
  Description of Artificial Sequence: Synthetic oligonucleotide
gggucagaauuuguaucca

SEQ ID NO: 811489 - RNA, 19 nt, Artificial Sequence
  Description of Artificial Sequence: Synthetic oligonucleotide
ggucagaauuuguauccau

SEQ ID NO: 811490 - RNA, 19 nt, Artificial Sequence
  Description of Artificial Sequence: Synthetic oligonucleotide
gucuacaaccuugguauuu

SEQ ID NO: 811491 - RNA, 19 nt, Artificial Sequence
  Description of Artificial Sequence: Synthetic oligonucleotide
ggauaaugcugagguuuga

SEQ ID NO: 811492 - RNA, 19 nt, Artificial Sequence
  Description of Artificial Sequence: Synthetic oligonucleotide
aggcuguaucaggauuuaa

SEQ ID NO: 811493 - RNA, 19 nt, Artificial Sequence
  Description of Artificial Sequence: Synthetic oligonucleotide
ggucuuccuacgaaacuua

SEQ ID NO: 811494 - RNA, 19 nt, Artificial Sequence
  Description of Artificial Sequence: Synthetic oligonucleotide
cuccgcgauggcuuccuua

SEQ ID NO: 811495 - RNA, 19 nt, Artificial Sequence
  Description of Artificial Sequence: Synthetic oligonucleotide
gcuguucgcaucagcuuga

SEQ ID NO: 811496 - RNA, 19 nt, Artificial Sequence
  Description of Artificial Sequence: Synthetic oligonucleotide
guuaggcagccaucagcau

SEQ ID NO: 811497 - RNA, 19 nt, Artificial Sequence
  Description of Artificial Sequence: Synthetic oligonucleotide
guuccucauacaggaauuu

SEQ ID NO: 811498 - RNA, 19 nt, Artificial Sequence
  Description of Artificial Sequence: Synthetic oligonucleotide
caguagcguuuuauguagu

SEQ ID NO: 811499 - RNA, 19 nt, Artificial Sequence
  Description of Artificial Sequence: Synthetic oligonucleotide
ggaguugcacagggcuccc

SEQ ID NO: 811500 - RNA, 19 nt, Artificial Sequence
  Description of Artificial Sequence: Synthetic oligonucleotide
caucucgauguucgacaua

SEQ ID NO: 811501 - RNA, 19 nt, Artificial Sequence
  Description of Artificial Sequence: Synthetic oligonucleotide
gcaauaugcuaagauccau

SEQ ID NO: 811502 - RNA, 19 nt, Artificial Sequence
  Description of Artificial Sequence: Synthetic oligonucleotide
caggccggaaauucauuuu

SEQ ID NO: 811503 - RNA, 19 nt, Artificial Sequence
  Description of Artificial Sequence: Synthetic oligonucleotide
ccacaccucagaagucguc

SEQ ID NO: 811504 - RNA, 19 nt, Artificial Sequence
  Description of Artificial Sequence: Synthetic oligonucleotide
gcgauggcuuccuuaaguu

SEQ ID NO: 811505 - RNA, 19 nt, Artificial Sequence
  Description of Artificial Sequence: Synthetic oligonucleotide
ggcuaugaagcgucuuaau

SEQ ID NO: 811506 - RNA, 19 nt, Artificial Sequence
  Description of Artificial Sequence: Synthetic oligonucleotide
cucggcugggagaagccuu

SEQ ID NO: 811507 - RNA, 19 nt, Artificial Sequence
  Description of Artificial Sequence: Synthetic oligonucleotide
ggugggucccaagggcuca

SEQ ID NO: 811508 - RNA, 19 nt, Artificial Sequence
  Description of Artificial Sequence: Synthetic oligonucleotide
caagggcucaggccaucua

SEQ ID NO: 811509 - RNA, 19 nt, Artificial Sequence
  Description of Artificial Sequence: Synthetic oligonucleotide
cuucucaauaggggcuggu

SEQ ID NO: 811510 - RNA, 19 nt, Artificial Sequence
  Description of Artificial Sequence: Synthetic oligonucleotide
ccucgaaagcauuggugcu

SEQ ID NO: 811511 - RNA, 19 nt, Artificial Sequence
  Description of Artificial Sequence: Synthetic oligonucleotide
ccgggcuggaugucuaaaa

SEQ ID NO: 811512 - RNA, 19 nt, Artificial Sequence
  Description of Artificial Sequence: Synthetic oligonucleotide
cuguucgcaucagcuugaa

SEQ ID NO: 811513 - RNA, 19 nt, Artificial Sequence
  Description of Artificial Sequence: Synthetic oligonucleotide
cauuaacauagaggagguu

SEQ ID NO: 811514 - RNA, 19 nt, Artificial Sequence
  Description of Artificial Sequence: Synthetic oligonucleotide
cuuggcuaugaagcgucuu

SEQ ID NO: 811515 - RNA, 19 nt, Artificial Sequence
  Description of Artificial Sequence: Synthetic oligonucleotide
caccccuaacauggcaaua

SEQ ID NO: 811516 - RNA, 19 nt, Artificial Sequence
  Description of Artificial Sequence: Synthetic oligonucleotide
ccuuaguaugcuccgcgau

SEQ ID NO: 811517 - RNA, 19 nt, Artificial Sequence
  Description of Artificial Sequence: Synthetic oligonucleotide
ccgcgauggcuuccuuaag

SEQ ID NO: 811518 - RNA, 19 nt, Artificial Sequence
  Description of Artificial Sequence: Synthetic oligonucleotide
gggguacccgcucaucauu

SEQ ID NO: 811519 - RNA, 19 nt, Artificial Sequence
  Description of Artificial Sequence: Synthetic oligonucleotide
ccgcguccuuaguaugcuc

SEQ ID NO: 811520 - RNA, 19 nt, Artificial Sequence
  Description of Artificial Sequence: Synthetic oligonucleotide
ccaacucgccaccaccccu

SEQ ID NO: 811521 - RNA, 19 nt, Artificial Sequence
  Description of Artificial Sequence: Synthetic oligonucleotide
gguugacacacaagccauu

SEQ ID NO: 811522 - RNA, 19 nt, Artificial Sequence
  Description of Artificial Sequence: Synthetic oligonucleotide
cagccagaccaaucacauu

SEQ ID NO: 811523 - RNA, 19 nt, Artificial Sequence
  Description of Artificial Sequence: Synthetic oligonucleotide
ggguacccgcucaucauuu

SEQ ID NO: 811524 - RNA, 19 nt, Artificial Sequence
  Description of Artificial Sequence: Synthetic oligonucleotide
cucgccucucaggccggaa

SEQ ID NO: 811525 - RNA, 19 nt, Artificial Sequence
  Description of Artificial Sequence: Synthetic oligonucleotide
ccaccccuaacauggcaau

SEQ ID NO: 811526 - RNA, 19 nt, Artificial Sequence
  Description of Artificial Sequence: Synthetic oligonucleotide
cuaagucagcaaggccauu

SEQ ID NO: 811527 - RNA, 19 nt, Artificial Sequence
  Description of Artificial Sequence: Synthetic oligonucleotide
ccuuggcuaugaagcgucu

SEQ ID NO: 811528 - RNA, 19 nt, Artificial Sequence
  Description of Artificial Sequence: Synthetic oligonucleotide
cgggcuggaugucuaaaau

SEQ ID NO: 811529 - RNA, 19 nt, Artificial Sequence
  Description of Artificial Sequence: Synthetic oligonucleotide
guucagcguugaggcugua

SEQ ID NO: 811530 - RNA, 19 nt, Artificial Sequence
  Description of Artificial Sequence: Synthetic oligonucleotide
cccgcguccuuaguaugcu

SEQ ID NO: 811531 - RNA, 19 nt, Artificial Sequence
  Description of Artificial Sequence: Synthetic oligonucleotide
gguucccuccgggcuggau

SEQ ID NO: 811532 - RNA, 19 nt, Artificial Sequence
  Description of Artificial Sequence: Synthetic oligonucleotide
gcuccgcgauggcuuccuu

SEQ ID NO: 811533 - RNA, 19 nt, Artificial Sequence
  Description of Artificial Sequence: Synthetic oligonucleotide
uauauuaacaaauagucug

SEQ ID NO: 811534 - RNA, 19 nt, Artificial Sequence
  Description of Artificial Sequence: Synthetic oligonucleotide
uguagauuaguuaagaucu

SEQ ID NO: 811535 - RNA, 19 nt, Artificial Sequence
  Description of Artificial Sequence: Synthetic oligonucleotide
aauugauacaauucaguac

SEQ ID NO: 811536 - RNA, 19 nt, Artificial Sequence
  Description of Artificial Sequence: Synthetic oligonucleotide
aauauuaacguuaaucagg

SEQ ID NO: 811537 - RNA, 19 nt, Artificial Sequence
  Description of Artificial Sequence: Synthetic oligonucleotide
ucaaauauaccccagaaau

SEQ ID NO: 811538 - RNA, 19 nt, Artificial Sequence
  Description of Artificial Sequence: Synthetic oligonucleotide
aaaguauggagcuuguguc

SEQ ID NO: 811539 - RNA, 19 nt, Artificial Sequence
  Description of Artificial Sequence: Synthetic oligonucleotide
aacaguaucagguuugaag

SEQ ID NO: 811540 - RNA, 19 nt, Artificial Sequence
  Description of Artificial Sequence: Synthetic oligonucleotide
uauucaaacagauuggaca

SEQ ID NO: 811541 - RNA, 19 nt, Artificial Sequence
  Description of Artificial Sequence: Synthetic oligonucleotide
aaucuagugacucacuaag

SEQ ID NO: 811542 - RNA, 19 nt, Artificial Sequence
  Description of Artificial Sequence: Synthetic oligonucleotide
uuaguacagaaacaaauag

SEQ ID NO: 811543 - RNA, 19 nt, Artificial Sequence
  Description of Artificial Sequence: Synthetic oligonucleotide
auuaccugcaaacaaauug

SEQ ID NO: 811544 - RNA, 19 nt, Artificial Sequence
  Description of Artificial Sequence: Synthetic oligonucleotide
auugaccuaacacaugacc

SEQ ID NO: 811545 - RNA, 19 nt, Artificial Sequence
  Description of Artificial Sequence: Synthetic oligonucleotide
uugauauuaaauauuuuac

SEQ ID NO: 811546 - RNA, 19 nt, Artificial Sequence
  Description of Artificial Sequence: Synthetic oligonucleotide
aaagccaggacuuuugaug

SEQ ID NO: 811547 - RNA, 19 nt, Artificial Sequence
  Description of Artificial Sequence: Synthetic oligonucleotide
aauacuauuuaugcucccc

SEQ ID NO: 811548 - RNA, 19 nt, Artificial Sequence
  Description of Artificial Sequence: Synthetic oligonucleotide
uuaauagaagcuuuauacc

SEQ ID NO: 811549 - RNA, 19 nt, Artificial Sequence
  Description of Artificial Sequence: Synthetic oligonucleotide
uuaagguacacaacuauca

SEQ ID NO: 811550 - RNA, 19 nt, Artificial Sequence
  Description of Artificial Sequence: Synthetic oligonucleotide
uccauaaaggcaaacaaac

SEQ ID NO: 811551 - RNA, 19 nt, Artificial Sequence
  Description of Artificial Sequence: Synthetic oligonucleotide
uuggauucugauuuaaucc

SEQ ID NO: 811552 - RNA, 19 nt, Artificial Sequence
  Description of Artificial Sequence: Synthetic oligonucleotide
uuagcuuccaugaggaugc

SEQ ID NO: 811553 - RNA, 19 nt, Artificial Sequence
  Description of Artificial Sequence: Synthetic oligonucleotide
aaguauggagcuugugucc

SEQ ID NO: 811554 - RNA, 19 nt, Artificial Sequence
  Description of Artificial Sequence: Synthetic oligonucleotide
uuaguuaagaucugacuag

SEQ ID NO: 811555 - RNA, 19 nt, Artificial Sequence
  Description of Artificial Sequence: Synthetic oligonucleotide
aaagggucaagauuucauc

SEQ ID NO: 811556 - RNA, 19 nt, Artificial Sequence
  Description of Artificial Sequence: Synthetic oligonucleotide
acugacaauaacuuguaag

SEQ ID NO: 811557 - RNA, 19 nt, Artificial Sequence
  Description of Artificial Sequence: Synthetic oligonucleotide
ugaccuuggaaccaguccg

SEQ ID NO: 811558 - RNA, 19 nt, Artificial Sequence
  Description of Artificial Sequence: Synthetic oligonucleotide
auauuaacguuaaucaggc

SEQ ID NO: 811559 - RNA, 19 nt, Artificial Sequence
  Description of Artificial Sequence: Synthetic oligonucleotide
uuuagggugaacacaauac

SEQ ID NO: 811560 - RNA, 19 nt, Artificial Sequence
  Description of Artificial Sequence: Synthetic oligonucleotide
aaauugauacaauucagua

SEQ ID NO: 811561 - RNA, 19 nt, Artificial Sequence
  Description of Artificial Sequence: Synthetic oligonucleotide
aaacaaacgacagggaaag

SEQ ID NO: 811562 - RNA, 19 nt, Artificial Sequence
  Description of Artificial Sequence: Synthetic oligonucleotide
cugauugauauucaaacag

SEQ ID NO: 811563 - RNA, 19 nt, Artificial Sequence
  Description of Artificial Sequence: Synthetic oligonucleotide
auuaacguuaaucaggcau

SEQ ID NO: 811564 - RNA, 19 nt, Artificial Sequence
  Description of Artificial Sequence: Synthetic oligonucleotide
uuaacguuaaucaggcaug

SEQ ID NO: 811565 - RNA, 19 nt, Artificial Sequence
  Description of Artificial Sequence: Synthetic oligonucleotide
aauucaguacccugauaac

SEQ ID NO: 811566 - RNA, 19 nt, Artificial Sequence
  Description of Artificial Sequence: Synthetic oligonucleotide
auuaguuaagaucugacua

SEQ ID NO: 811567 - RNA, 19 nt, Artificial Sequence
  Description of Artificial Sequence: Synthetic oligonucleotide
uugaccuaacacaugaccc

SEQ ID NO: 811568 - RNA, 19 nt, Artificial Sequence
  Description of Artificial Sequence: Synthetic oligonucleotide
aaauacuauuuaugcuccc

SEQ ID NO: 811569 - RNA, 19 nt, Artificial Sequence
  Description of Artificial Sequence: Synthetic oligonucleotide
aauaaccuaaaauggaguu

SEQ ID NO: 811570 - RNA, 19 nt, Artificial Sequence
  Description of Artificial Sequence: Synthetic oligonucleotide
auagagaccaaccucucuc

SEQ ID NO: 811571 - RNA, 19 nt, Artificial Sequence
  Description of Artificial Sequence: Synthetic oligonucleotide
uuaccugcaaacaaauuga

SEQ ID NO: 811572 - RNA, 19 nt, Artificial Sequence
  Description of Artificial Sequence: Synthetic oligonucleotide
aaagagugagacucugggg

SEQ ID NO: 811573 - RNA, 19 nt, Artificial Sequence
  Description of Artificial Sequence: Synthetic oligonucleotide
aggaccuuagacuuuuagc

SEQ ID NO: 811574 - RNA, 19 nt, Artificial Sequence
  Description of Artificial Sequence: Synthetic oligonucleotide
acaguaucagguuugaaga

SEQ ID NO: 811575 - RNA, 19 nt, Artificial Sequence
  Description of Artificial Sequence: Synthetic oligonucleotide
ugacccaacauaaauauua

SEQ ID NO: 811576 - RNA, 19 nt, Artificial Sequence
  Description of Artificial Sequence: Synthetic oligonucleotide
ucuagugacucacuaagac

SEQ ID NO: 811577 - RNA, 19 nt, Artificial Sequence
  Description of Artificial Sequence: Synthetic oligonucleotide
agagcuuagauauauguau

SEQ ID NO: 811578 - RNA, 19 nt, Artificial Sequence
  Description of Artificial Sequence: Synthetic oligonucleotide
uuguagauuaguuaagauc

SEQ ID NO: 811579 - RNA, 19 nt, Artificial Sequence
  Description of Artificial Sequence: Synthetic oligonucleotide
uuaagaucugacuagcauc

SEQ ID NO: 811580 - RNA, 19 nt, Artificial Sequence
  Description of Artificial Sequence: Synthetic oligonucleotide
uuuggauucugauuuaauc

SEQ ID NO: 811581 - RNA, 19 nt, Artificial Sequence
  Description of Artificial Sequence: Synthetic oligonucleotide
gacaauaacuuguaaguca

SEQ ID NO: 811582 - RNA, 19 nt, Artificial Sequence
  Description of Artificial Sequence: Synthetic oligonucleotide
ugcuuauuuuaucugcucc

SEQ ID NO: 811583 - RNA, 19 nt, Artificial Sequence
  Description of Artificial Sequence: Synthetic oligonucleotide
cauaaauugagguugaugu

SEQ ID NO: 811584 - RNA, 19 nt, Artificial Sequence
  Description of Artificial Sequence: Synthetic oligonucleotide
auauguauucuucaguuaa

SEQ ID NO: 811585 - RNA, 19 nt, Artificial Sequence
  Description of Artificial Sequence: Synthetic oligonucleotide
aguaucagguuugaagagc

SEQ ID NO: 811586 - RNA, 19 nt, Artificial Sequence
  Description of Artificial Sequence: Synthetic oligonucleotide
ugauauuaccugcaaacaa

SEQ ID NO: 811587 - RNA, 19 nt, Artificial Sequence
  Description of Artificial Sequence: Synthetic oligonucleotide
uuagggugaacacaauaca

SEQ ID NO: 811588 - RNA, 19 nt, Artificial Sequence
  Description of Artificial Sequence: Synthetic oligonucleotide
acauugcucacucaaagca

SEQ ID NO: 811589 - RNA, 19 nt, Artificial Sequence
  Description of Artificial Sequence: Synthetic oligonucleotide
agagagcuuagauauaugu

SEQ ID NO: 811590 - RNA, 19 nt, Artificial Sequence
  Description of Artificial Sequence: Synthetic oligonucleotide
agcuuagauauauguauuc

SEQ ID NO: 811591 - RNA, 19 nt, Artificial Sequence
  Description of Artificial Sequence: Synthetic oligonucleotide
aauuaugauuaauuugauu

SEQ ID NO: 811592 - RNA, 19 nt, Artificial Sequence
  Description of Artificial Sequence: Synthetic oligonucleotide
augacaaagaaauacgcuu

SEQ ID NO: 811593 - RNA, 19 nt, Artificial Sequence
  Description of Artificial Sequence: Synthetic oligonucleotide
acagauuccaccuaagguu

SEQ ID NO: 811594 - RNA, 19 nt, Artificial Sequence
  Description of Artificial Sequence: Synthetic oligonucleotide
aaugacaaagaaauacgcu

SEQ ID NO: 811595 - RNA, 19 nt, Artificial Sequence
  Description of Artificial Sequence: Synthetic oligonucleotide
gauuuaauccuauaauucu

SEQ ID NO: 811596 - RNA, 19 nt, Artificial Sequence
  Description of Artificial Sequence: Synthetic oligonucleotide
aggaacgauagacucuccc

SEQ ID NO: 811597 - RNA, 19 nt, Artificial Sequence
  Description of Artificial Sequence: Synthetic oligonucleotide
accuacaaagugcaauuac

SEQ ID NO: 811598 - RNA, 19 nt, Artificial Sequence
  Description of Artificial Sequence: Synthetic oligonucleotide
agguacacaacuaucaaag

SEQ ID NO: 811599 - RNA, 19 nt, Artificial Sequence
  Description of Artificial Sequence: Synthetic oligonucleotide
cagagugccucuuuaaacc

SEQ ID NO: 811600 - RNA, 19 nt, Artificial Sequence
  Description of Artificial Sequence: Synthetic oligonucleotide
gaguauguugguuaguaca

SEQ ID NO: 811601 - RNA, 19 nt, Artificial Sequence
  Description of Artificial Sequence: Synthetic oligonucleotide
aaaccuacaaagugcaauu

SEQ ID NO: 811602 - RNA, 19 nt, Artificial Sequence
  Description of Artificial Sequence: Synthetic oligonucleotide
agaauuaccaugaccuugg

SEQ ID NO: 811603 - RNA, 19 nt, Artificial Sequence
  Description of Artificial Sequence: Synthetic oligonucleotide
caucuuagcuuccaugagg

SEQ ID NO: 811604 - RNA, 19 nt, Artificial Sequence
  Description of Artificial Sequence: Synthetic oligonucleotide
auaguuaagucuaaaauuu

SEQ ID NO: 811605 - RNA, 19 nt, Artificial Sequence
  Description of Artificial Sequence: Synthetic oligonucleotide
ugacaggcugagaauagag

SEQ ID NO: 811606 - RNA, 19 nt, Artificial Sequence
  Description of Artificial Sequence: Synthetic oligonucleotide
cuucacuaucuuaagguac

SEQ ID NO: 811607 - RNA, 19 nt, Artificial Sequence
  Description of Artificial Sequence: Synthetic oligonucleotide
agaauagagaccaaccucu

SEQ ID NO: 811608 - RNA, 19 nt, Artificial Sequence
  Description of Artificial Sequence: Synthetic oligonucleotide
ucaggcaugcuaugcaucc

SEQ ID NO: 811609 - RNA, 19 nt, Artificial Sequence
  Description of Artificial Sequence: Synthetic oligonucleotide
agaccaaccucucucuuuc

SEQ ID NO: 811610 - RNA, 19 nt, Artificial Sequence
  Description of Artificial Sequence: Synthetic oligonucleotide
uugguuaguacagaaacaa

SEQ ID NO: 811611 - RNA, 19 nt, Artificial Sequence
  Description of Artificial Sequence: Synthetic oligonucleotide
gaacgauagacucucccug

SEQ ID NO: 811612 - RNA, 19 nt, Artificial Sequence
  Description of Artificial Sequence: Synthetic oligonucleotide
aauagagaccaaccucucu

SEQ ID NO: 811613 - RNA, 19 nt, Artificial Sequence
  Description of Artificial Sequence: Synthetic oligonucleotide
aguauggagcuuguguccc

SEQ ID NO: 811614 - RNA, 19 nt, Artificial Sequence
  Description of Artificial Sequence: Synthetic oligonucleotide
cuuuauaccagagugccuc

SEQ ID NO: 811615 - RNA, 19 nt, Artificial Sequence
  Description of Artificial Sequence: Synthetic oligonucleotide
uuuuagggugaacacaaua

SEQ ID NO: 811616 - RNA, 19 nt, Artificial Sequence
  Description of Artificial Sequence: Synthetic oligonucleotide
ucuuacucucccuauauuu

SEQ ID NO: 811617 - RNA, 19 nt, Artificial Sequence
  Description of Artificial Sequence: Synthetic oligonucleotide
ucucauauuccuucuuuga

SEQ ID NO: 811618 - RNA, 19 nt, Artificial Sequence
  Description of Artificial Sequence: Synthetic oligonucleotide
aacacaugacccaacauaa

SEQ ID NO: 811619 - RNA, 19 nt, Artificial Sequence
  Description of Artificial Sequence: Synthetic oligonucleotide
uuggacauugcucacucaa

SEQ ID NO: 811620 - RNA, 19 nt, Artificial Sequence
  Description of Artificial Sequence: Synthetic oligonucleotide
uuuguagauuaguuaagau

SEQ ID NO: 811621 - RNA, 19 nt, Artificial Sequence
  Description of Artificial Sequence: Synthetic oligonucleotide
aguauguugguuaguacag

SEQ ID NO: 811622 - RNA, 19 nt, Artificial Sequence
  Description of Artificial Sequence: Synthetic oligonucleotide
uagggugaacacaauacaa

SEQ ID NO: 811623 - RNA, 19 nt, Artificial Sequence
  Description of Artificial Sequence: Synthetic oligonucleotide
uaaaccuacaaagugcaau

SEQ ID NO: 811624 - RNA, 19 nt, Artificial Sequence
  Description of Artificial Sequence: Synthetic oligonucleotide
aacgauagacucucccuga

SEQ ID NO: 811625 - RNA, 19 nt, Artificial Sequence
  Description of Artificial Sequence: Synthetic oligonucleotide
uaagguacacaacuaucaa

SEQ ID NO: 811626 - RNA, 19 nt, Artificial Sequence
  Description of Artificial Sequence: Synthetic oligonucleotide
gagaauuaccaugaccuug

SEQ ID NO: 811627 - RNA, 19 nt, Artificial Sequence
  Description of Artificial Sequence: Synthetic oligonucleotide
cuaaagagugagacucugg

SEQ ID NO: 811628 - RNA, 19 nt, Artificial Sequence
  Description of Artificial Sequence: Synthetic oligonucleotide
uuucuuacucucccuauau

SEQ ID NO: 811629 - RNA, 19 nt, Artificial Sequence
  Description of Artificial Sequence: Synthetic oligonucleotide
ucccuugcacucuagaggu

SEQ ID NO: 811630 - RNA, 19 nt, Artificial Sequence
  Description of Artificial Sequence: Synthetic oligonucleotide
aaauuugguaaaauguguu

SEQ ID NO: 811631 - RNA, 19 nt, Artificial Sequence
  Description of Artificial Sequence: Synthetic oligonucleotide
cacguauccaagaaugcac

SEQ ID NO: 811632 - RNA, 19 nt, Artificial Sequence
  Description of Artificial Sequence: Synthetic oligonucleotide
gagcacguauccaagaaug

SEQ ID NO: 811633 - RNA, 19 nt, Artificial Sequence
  Description of Artificial Sequence: Synthetic oligonucleotide
aaagcacugcaccagcuua

SEQ ID NO: 811634 - RNA, 19 nt, Artificial Sequence
  Description of Artificial Sequence: Synthetic oligonucleotide
aauacgcuuuuaaauguca

SEQ ID NO: 811635 - RNA, 19 nt, Artificial Sequence
  Description of Artificial Sequence: Synthetic oligonucleotide
cacucuagaggucagagga

SEQ ID NO: 811636 - RNA, 19 nt, Artificial Sequence
  Description of Artificial Sequence: Synthetic oligonucleotide
agggugaacacaauacaac

SEQ ID NO: 811637 - RNA, 19 nt, Artificial Sequence
  Description of Artificial Sequence: Synthetic oligonucleotide
cagucauugaccuaacaca

SEQ ID NO: 811638 - RNA, 19 nt, Artificial Sequence
  Description of Artificial Sequence: Synthetic oligonucleotide
auacuauuuaugcuccccu

SEQ ID NO: 811639 - RNA, 19 nt, Artificial Sequence
  Description of Artificial Sequence: Synthetic oligonucleotide
caguacccugauaacaucc

SEQ ID NO: 811640 - RNA, 19 nt, Artificial Sequence
  Description of Artificial Sequence: Synthetic oligonucleotide
auaacuuguaagucacagu

SEQ ID NO: 811641 - RNA, 19 nt, Artificial Sequence
  Description of Artificial Sequence: Synthetic oligonucleotide
auauuaacaaauagucugu

SEQ ID NO: 811642 - RNA, 19 nt, Artificial Sequence
  Description of Artificial Sequence: Synthetic oligonucleotide
agaagcuuuauaccagagu

SEQ ID NO: 811643 - RNA, 19 nt, Artificial Sequence
  Description of Artificial Sequence: Synthetic oligonucleotide
uuacucucccuauauuugu

SEQ ID NO: 811644 - RNA, 19 nt, Artificial Sequence
  Description of Artificial Sequence: Synthetic oligonucleotide
ugauuucuuacucucccua

SEQ ID NO: 811645 - RNA, 19 nt, Artificial Sequence
  Description of Artificial Sequence: Synthetic oligonucleotide
aauuaccaugaccuuggaa

SEQ ID NO: 811646 - RNA, 19 nt, Artificial Sequence
  Description of Artificial Sequence: Synthetic oligonucleotide
acccugauaacauccauaa

SEQ ID NO: 811647 - RNA, 19 nt, Artificial Sequence
  Description of Artificial Sequence: Synthetic oligonucleotide
uccuauaauucuucaguaa

SEQ ID NO: 811648 - RNA, 19 nt, Artificial Sequence
  Description of Artificial Sequence: Synthetic oligonucleotide
acgcuuuuaaaugucacca

SEQ ID NO: 811649 - RNA, 19 nt, Artificial Sequence
  Description of Artificial Sequence: Synthetic oligonucleotide
uauauguauucuucaguua

SEQ ID NO: 811650 - RNA, 19 nt, Artificial Sequence
  Description of Artificial Sequence: Synthetic oligonucleotide
uagauuaguuaagaucuga

SEQ ID NO: 811651 - RNA, 19 nt, Artificial Sequence
  Description of Artificial Sequence: Synthetic oligonucleotide
uaaaagugaguauguuggu

SEQ ID NO: 811652 - RNA, 19 nt, Artificial Sequence
  Description of Artificial Sequence: Synthetic oligonucleotide
gauagacucucccugaccu

SEQ ID NO: 811653 - RNA, 19 nt, Artificial Sequence
  Description of Artificial Sequence: Synthetic oligonucleotide
aaauauugggcagcaaaua

SEQ ID NO: 811654 - RNA, 19 nt, Artificial Sequence
  Description of Artificial Sequence: Synthetic oligonucleotide
auucaguacccugauaaca

SEQ ID NO: 811655 - RNA, 19 nt, Artificial Sequence
  Description of Artificial Sequence: Synthetic oligonucleotide
aguuuuagggugaacacaa

SEQ ID NO: 811656 - RNA, 19 nt, Artificial Sequence
  Description of Artificial Sequence: Synthetic oligonucleotide
acguuaaucaggcaugcua

SEQ ID NO: 811657 - RNA, 19 nt, Artificial Sequence
  Description of Artificial Sequence: Synthetic oligonucleotide
uacaauucaguacccugau

SEQ ID NO: 811658 - RNA, 19 nt, Artificial Sequence
  Description of Artificial Sequence: Synthetic oligonucleotide
ugcacucuagaggucagag

SEQ ID NO: 811659 - RNA, 19 nt, Artificial Sequence
  Description of Artificial Sequence: Synthetic oligonucleotide
ggacuaaagagugagacuc

SEQ ID NO: 811660 - RNA, 19 nt, Artificial Sequence
  Description of Artificial Sequence: Synthetic oligonucleotide
uauaccccagaaauacuau

SEQ ID NO: 811661 - RNA, 19 nt, Artificial Sequence
  Description of Artificial Sequence: Synthetic oligonucleotide
auugagguugauguuccag

SEQ ID NO: 811662 - RNA, 19 nt, Artificial Sequence
  Description of Artificial Sequence: Synthetic oligonucleotide
caaauaaguuuuaggguga

SEQ ID NO: 811663 - RNA, 19 nt, Artificial Sequence
  Description of Artificial Sequence: Synthetic oligonucleotide
ugaguauguugguuaguac

SEQ ID NO: 811664 - RNA, 19 nt, Artificial Sequence
  Description of Artificial Sequence: Synthetic oligonucleotide
aaugcacgugugcauugcu

SEQ ID NO: 811665 - RNA, 19 nt, Artificial Sequence
  Description of Artificial Sequence: Synthetic oligonucleotide
gacagauuccaccuaaggu

SEQ ID NO: 811666 - RNA, 19 nt, Artificial Sequence
  Description of Artificial Sequence: Synthetic oligonucleotide
auaaauugagguugauguu

SEQ ID NO: 811667 - RNA, 19 nt, Artificial Sequence
  Description of Artificial Sequence: Synthetic oligonucleotide
guuaagucuaaaauuuuaa

SEQ ID NO: 811668 - RNA, 19 nt, Artificial Sequence
  Description of Artificial Sequence: Synthetic oligonucleotide
auacgcuuuuaaaugucac

SEQ ID NO: 811669 - RNA, 19 nt, Artificial Sequence
  Description of Artificial Sequence: Synthetic oligonucleotide
aauauaccccagaaauacu

SEQ ID NO: 811670 - RNA, 19 nt, Artificial Sequence
  Description of Artificial Sequence: Synthetic oligonucleotide
uaacguuaaucaggcaugc

SEQ ID NO: 811671 - RNA, 19 nt, Artificial Sequence
  Description of Artificial Sequence: Synthetic oligonucleotide
cacuaagacugacaggcug

SEQ ID NO: 811672 - RNA, 19 nt, Artificial Sequence
  Description of Artificial Sequence: Synthetic oligonucleotide
acguauccaagaaugcacg

SEQ ID NO: 811673 - RNA, 19 nt, Artificial Sequence
  Description of Artificial Sequence: Synthetic oligonucleotide
acaaucuagugacucacua

SEQ ID NO: 811674 - RNA, 19 nt, Artificial Sequence
  Description of Artificial Sequence: Synthetic oligonucleotide
caguccggacuaaagagug

SEQ ID NO: 811675 - RNA, 19 nt, Artificial Sequence
  Description of Artificial Sequence: Synthetic oligonucleotide
agcacguauccaagaaugc

SEQ ID NO: 811676 - RNA, 19 nt, Artificial Sequence
  Description of Artificial Sequence: Synthetic oligonucleotide
guuaaucaggcaugcuaug

SEQ ID NO: 811677 - RNA, 19 nt, Artificial Sequence
  Description of Artificial Sequence: Synthetic oligonucleotide
aagcacugcaccagcuuac

SEQ ID NO: 811678 - RNA, 19 nt, Artificial Sequence
  Description of Artificial Sequence: Synthetic oligonucleotide
ccauaaaggcaaacaaacg

SEQ ID NO: 811679 - RNA, 19 nt, Artificial Sequence
  Description of Artificial Sequence: Synthetic oligonucleotide
uaucagguuugaagagcag

SEQ ID NO: 811680 - RNA, 19 nt, Artificial Sequence
  Description of Artificial Sequence: Synthetic oligonucleotide
aaaagguggaggaacgaua

SEQ ID NO: 811681 - RNA, 19 nt, Artificial Sequence
  Description of Artificial Sequence: Synthetic oligonucleotide
caaauugauacaauucagu

SEQ ID NO: 811682 - RNA, 19 nt, Artificial Sequence
  Description of Artificial Sequence: Synthetic oligonucleotide
ugguuaguacagaaacaaa

SEQ ID NO: 811683 - RNA, 19 nt, Artificial Sequence
  Description of Artificial Sequence: Synthetic oligonucleotide
gcuuuuaaaugucaccaac

SEQ ID NO: 811684 - RNA, 19 nt, Artificial Sequence
  Description of Artificial Sequence: Synthetic oligonucleotide
agguugagcagucgcuuag

SEQ ID NO: 811685 - RNA, 19 nt, Artificial Sequence
  Description of Artificial Sequence: Synthetic oligonucleotide
aggacaaucuagugacuca

SEQ ID NO: 811686 - RNA, 19 nt, Artificial Sequence
  Description of Artificial Sequence: Synthetic oligonucleotide
uuuauaccagagugccucu

SEQ ID NO: 811687 - RNA, 19 nt, Artificial Sequence
  Description of Artificial Sequence: Synthetic oligonucleotide
gaugguucuguugcccuag

SEQ ID NO: 811688 - RNA, 19 nt, Artificial Sequence
  Description of Artificial Sequence: Synthetic oligonucleotide
aacuaucaaagcugauauu

SEQ ID NO: 811689 - RNA, 19 nt, Artificial Sequence
  Description of Artificial Sequence: Synthetic oligonucleotide
auuuaauccuauaauucuu

SEQ ID NO: 811690 - RNA, 19 nt, Artificial Sequence
  Description of Artificial Sequence: Synthetic oligonucleotide
uuaaaccuacaaagugcaa

SEQ ID NO: 811691 - RNA, 19 nt, Artificial Sequence
  Description of Artificial Sequence: Synthetic oligonucleotide
aaauaaguuuuagggugaa

SEQ ID NO: 811692 - RNA, 19 nt, Artificial Sequence
  Description of Artificial Sequence: Synthetic oligonucleotide
uacccugauaacauccaua

SEQ ID NO: 811693 - RNA, 19 nt, Artificial Sequence
  Description of Artificial Sequence: Synthetic oligonucleotide
uugcuuauuuuaucugcuc

SEQ ID NO: 811694 - RNA, 19 nt, Artificial Sequence
  Description of Artificial Sequence: Synthetic oligonucleotide
aucagguuugaagagcaga

SEQ ID NO: 811695 - RNA, 19 nt, Artificial Sequence
  Description of Artificial Sequence: Synthetic oligonucleotide
caaaguauggagcuugugu

SEQ ID NO: 811696 - RNA, 19 nt, Artificial Sequence
  Description of Artificial Sequence: Synthetic oligonucleotide
guauccaagaaugcacgug

SEQ ID NO: 811697 - RNA, 19 nt, Artificial Sequence
  Description of Artificial Sequence: Synthetic oligonucleotide
uauuaacguuaaucaggca

SEQ ID NO: 811698 - RNA, 19 nt, Artificial Sequence
  Description of Artificial Sequence: Synthetic oligonucleotide
uauuaccugcaaacaaauu

SEQ ID NO: 811699 - RNA, 19 nt, Artificial Sequence
  Description of Artificial Sequence: Synthetic oligonucleotide
aagaaugcacgugugcauu

SEQ ID NO: 811700 - RNA, 19 nt, Artificial Sequence
  Description of Artificial Sequence: Synthetic oligonucleotide
agucgcuuagguagccucc

SEQ ID NO: 811701 - RNA, 19 nt, Artificial Sequence
  Description of Artificial Sequence: Synthetic oligonucleotide
cauccauaaucaaauaagu

SEQ ID NO: 811702 - RNA, 19 nt, Artificial Sequence
  Description of Artificial Sequence: Synthetic oligonucleotide
auugcucacucaaagcacu

SEQ ID NO: 811703 - RNA, 19 nt, Artificial Sequence
  Description of Artificial Sequence: Synthetic oligonucleotide
uggacauugcucacucaaa

SEQ ID NO: 811704 - RNA, 19 nt, Artificial Sequence
  Description of Artificial Sequence: Synthetic oligonucleotide
guaucagguuugaagagca

SEQ ID NO: 811705 - RNA, 19 nt, Artificial Sequence
  Description of Artificial Sequence: Synthetic oligonucleotide
auuucuuacucucccuaua

SEQ ID NO: 811706 - RNA, 19 nt, Artificial Sequence
  Description of Artificial Sequence: Synthetic oligonucleotide
auauuaccugcaaacaaau

SEQ ID NO: 811707 - RNA, 19 nt, Artificial Sequence
  Description of Artificial Sequence: Synthetic oligonucleotide
acuaagacugacaggcuga

SEQ ID NO: 811708 - RNA, 19 nt, Artificial Sequence
  Description of Artificial Sequence: Synthetic oligonucleotide
gaaccaguccggacuaaag

SEQ ID NO: 811709 - RNA, 19 nt, Artificial Sequence
  Description of Artificial Sequence: Synthetic oligonucleotide
aaacugacaauaacuugua

SEQ ID NO: 811710 - RNA, 19 nt, Artificial Sequence
  Description of Artificial Sequence: Synthetic oligonucleotide
gguacacaacuaucaaagc

SEQ ID NO: 811711 - RNA, 19 nt, Artificial Sequence
  Description of Artificial Sequence: Synthetic oligonucleotide
acuuucaaauauaccccag

SEQ ID NO: 811712 - RNA, 19 nt, Artificial Sequence
  Description of Artificial Sequence: Synthetic oligonucleotide
guuaagaucugacuagcau

SEQ ID NO: 811713 - RNA, 19 nt, Artificial Sequence
  Description of Artificial Sequence: Synthetic oligonucleotide
ccugguauguguuccagac

SEQ ID NO: 811714 - RNA, 19 nt, Artificial Sequence
  Description of Artificial Sequence: Synthetic oligonucleotide
caacuaucaaagcugauau

SEQ ID NO: 811715 - RNA, 19 nt, Artificial Sequence
  Description of Artificial Sequence: Synthetic oligonucleotide
uacuauuuaugcuccccuu

SEQ ID NO: 811716 - RNA, 19 nt, Artificial Sequence
  Description of Artificial Sequence: Synthetic oligonucleotide
gcuuagguagccucccagg

SEQ ID NO: 811717 - RNA, 19 nt, Artificial Sequence
  Description of Artificial Sequence: Synthetic oligonucleotide
gaccuuggaaccaguccgg

SEQ ID NO: 811718 - RNA, 19 nt, Artificial Sequence
  Description of Artificial Sequence: Synthetic oligonucleotide
auauugggcagcaaauaaa

SEQ ID NO: 811719 - RNA, 19 nt, Artificial Sequence
  Description of Artificial Sequence: Synthetic oligonucleotide
ggcaaauuugguaaaaugu

SEQ ID NO: 811720 - RNA, 19 nt, Artificial Sequence
  Description of Artificial Sequence: Synthetic oligonucleotide
guagauuaguuaagaucug

SEQ ID NO: 811721 - RNA, 19 nt, Artificial Sequence
  Description of Artificial Sequence: Synthetic oligonucleotide
uucuuacucucccuauauu

SEQ ID NO: 811722 - RNA, 19 nt, Artificial Sequence
  Description of Artificial Sequence: Synthetic oligonucleotide
cuaagacugacaggcugag

SEQ ID NO: 811723 - RNA, 19 nt, Artificial Sequence
  Description of Artificial Sequence: Synthetic oligonucleotide
cagacagauuccaccuaag

SEQ ID NO: 811724 - RNA, 19 nt, Artificial Sequence
  Description of Artificial Sequence: Synthetic oligonucleotide
augcuaugcauccccaguu

SEQ ID NO: 811725 - RNA, 19 nt, Artificial Sequence
  Description of Artificial Sequence: Synthetic oligonucleotide
uugagcagucgcuuaggua

SEQ ID NO: 811726 - RNA, 19 nt, Artificial Sequence
  Description of Artificial Sequence: Synthetic oligonucleotide
caggacuuuugaugugagc

SEQ ID NO: 811727 - RNA, 19 nt, Artificial Sequence
  Description of Artificial Sequence: Synthetic oligonucleotide
agcuuggaugcuuuucaau

SEQ ID NO: 811728 - RNA, 19 nt, Artificial Sequence
  Description of Artificial Sequence: Synthetic oligonucleotide
gagagcuuagauauaugua

SEQ ID NO: 811729 - RNA, 19 nt, Artificial Sequence
  Description of Artificial Sequence: Synthetic oligonucleotide
caaucuagugacucacuaa

SEQ ID NO: 811730 - RNA, 19 nt, Artificial Sequence
  Description of Artificial Sequence: Synthetic oligonucleotide
uacucucccuauauuugua

SEQ ID NO: 811731 - RNA, 19 nt, Artificial Sequence
  Description of Artificial Sequence: Synthetic oligonucleotide
ucuuuccauaaaggcaaac

SEQ ID NO: 811732 - RNA, 19 nt, Artificial Sequence
  Description of Artificial Sequence: Synthetic oligonucleotide
uccggacuaaagagugaga

SEQ ID NO: 811733 - RNA, 19 nt, Artificial Sequence
  Description of Artificial Sequence: Synthetic oligonucleotide
gcauaguuaagucuaaaau

SEQ ID NO: 811734 - RNA, 19 nt, Artificial Sequence
  Description of Artificial Sequence: Synthetic oligonucleotide
ucccggagcacguauccaa

SEQ ID NO: 811735 - RNA, 19 nt, Artificial Sequence
  Description of Artificial Sequence: Synthetic oligonucleotide
ccuauaauucuucaguaaa

SEQ ID NO: 811736 - RNA, 19 nt, Artificial Sequence
  Description of Artificial Sequence: Synthetic oligonucleotide
cuagugacucacuaagacu

SEQ ID NO: 811737 - RNA, 19 nt, Artificial Sequence
  Description of Artificial Sequence: Synthetic oligonucleotide
aacguuaaucaggcaugcu

SEQ ID NO: 811738 - RNA, 19 nt, Artificial Sequence
  Description of Artificial Sequence: Synthetic oligonucleotide
agauuggacauugcucacu

SEQ ID NO: 811739 - RNA, 19 nt, Artificial Sequence
  Description of Artificial Sequence: Synthetic oligonucleotide
aguuaagaucugacuagca

SEQ ID NO: 811740 - RNA, 19 nt, Artificial Sequence
  Description of Artificial Sequence: Synthetic oligonucleotide
aaccuacaaagugcaauua

SEQ ID NO: 811741 - RNA, 19 nt, Artificial Sequence
  Description of Artificial Sequence: Synthetic oligonucleotide
uaccagagugccucuuuaa

SEQ ID NO: 811742 - RNA, 19 nt, Artificial Sequence
  Description of Artificial Sequence: Synthetic oligonucleotide
uaccaugaccuuggaacca

SEQ ID NO: 811743 - RNA, 19 nt, Artificial Sequence
  Description of Artificial Sequence: Synthetic oligonucleotide
agagugagacucugggguu

SEQ ID NO: 811744 - RNA, 19 nt, Artificial Sequence
  Description of Artificial Sequence: Synthetic oligonucleotide
acgugugcauugcuuauuu

SEQ ID NO: 811745 - RNA, 19 nt, Artificial Sequence
  Description of Artificial Sequence: Synthetic oligonucleotide
agacugacaggcugagaau

SEQ ID NO: 811746 - RNA, 19 nt, Artificial Sequence
  Description of Artificial Sequence: Synthetic oligonucleotide
gaauagagaccaaccucuc

SEQ ID NO: 811747 - RNA, 19 nt, Artificial Sequence
  Description of Artificial Sequence: Synthetic oligonucleotide
ugcauccccaguucauaaa

SEQ ID NO: 811748 - RNA, 19 nt, Artificial Sequence
  Description of Artificial Sequence: Synthetic oligonucleotide
gcuguaauucugcaaagua

SEQ ID NO: 811749 - RNA, 19 nt, Artificial Sequence
  Description of Artificial Sequence: Synthetic oligonucleotide
gguuaguacagaaacaaau

SEQ ID NO: 811750 - RNA, 19 nt, Artificial Sequence
  Description of Artificial Sequence: Synthetic oligonucleotide
gugaguauguugguuagua

SEQ ID NO: 811751 - RNA, 19 nt, Artificial Sequence
  Description of Artificial Sequence: Synthetic oligonucleotide
aguacccugauaacaucca

SEQ ID NO: 811752 - RNA, 19 nt, Artificial Sequence
  Description of Artificial Sequence: Synthetic oligonucleotide
auaccagagugccucuuua

SEQ ID NO: 811753 - RNA, 19 nt, Artificial Sequence
  Description of Artificial Sequence: Synthetic oligonucleotide
ggaggaacgauagacucuc

SEQ ID NO: 811754 - RNA, 19 nt, Artificial Sequence
  Description of Artificial Sequence: Synthetic oligonucleotide
auuggacauugcucacuca

SEQ ID NO: 811755 - RNA, 19 nt, Artificial Sequence
  Description of Artificial Sequence: Synthetic oligonucleotide
ggaugcauaguuaagucua

SEQ ID NO: 811756 - RNA, 19 nt, Artificial Sequence
  Description of Artificial Sequence: Synthetic oligonucleotide
cagucgcuuagguagccuc

SEQ ID NO: 811757 - RNA, 19 nt, Artificial Sequence
  Description of Artificial Sequence: Synthetic oligonucleotide
gacuuuugaugugagcugu

SEQ ID NO: 811758 - RNA, 19 nt, Artificial Sequence
  Description of Artificial Sequence: Synthetic oligonucleotide
acccaacauaaauauuauu

SEQ ID NO: 811759 - RNA, 19 nt, Artificial Sequence
  Description of Artificial Sequence: Synthetic oligonucleotide
gaugcauaguuaagucuaa

SEQ ID NO: 811760 - RNA, 19 nt, Artificial Sequence
  Description of Artificial Sequence: Synthetic oligonucleotide
aagaucugacuagcauccu

SEQ ID NO: 811761 - RNA, 19 nt, Artificial Sequence
  Description of Artificial Sequence: Synthetic oligonucleotide
ugaugguucuguugcccua

SEQ ID NO: 811762 - RNA, 19 nt, Artificial Sequence
  Description of Artificial Sequence: Synthetic oligonucleotide
guugauguuccagacuugu

SEQ ID NO: 811763 - RNA, 19 nt, Artificial Sequence
  Description of Artificial Sequence: Synthetic oligonucleotide
ccggacuaaagagugagac

SEQ ID NO: 811764 - RNA, 19 nt, Artificial Sequence
  Description of Artificial Sequence: Synthetic oligonucleotide
acaauucaguacccugaua

SEQ ID NO: 811765 - RNA, 19 nt, Artificial Sequence
  Description of Artificial Sequence: Synthetic oligonucleotide
aucuagugacucacuaaga

SEQ ID NO: 811766 - RNA, 19 nt, Artificial Sequence
  Description of Artificial Sequence: Synthetic oligonucleotide
gaauuaccaugaccuugga

SEQ ID NO: 811767 - RNA, 19 nt, Artificial Sequence
  Description of Artificial Sequence: Synthetic oligonucleotide
agugaguauguugguuagu

SEQ ID NO: 811768 - RNA, 19 nt, Artificial Sequence
  Description of Artificial Sequence: Synthetic oligonucleotide
accuaagguugagcagucg

SEQ ID NO: 811769 - RNA, 19 nt, Artificial Sequence
  Description of Artificial Sequence: Synthetic oligonucleotide
ggaacgauagacucucccu

SEQ ID NO: 811770 - RNA, 19 nt, Artificial Sequence
  Description of Artificial Sequence: Synthetic oligonucleotide
ucgcuuagguagccuccca

SEQ ID NO: 811771 - RNA, 19 nt, Artificial Sequence
  Description of Artificial Sequence: Synthetic oligonucleotide
guauguguuccagacagau

SEQ ID NO: 811772 - RNA, 19 nt, Artificial Sequence
  Description of Artificial Sequence: Synthetic oligonucleotide
caccuaagguugagcaguc

SEQ ID NO: 811773 - RNA, 19 nt, Artificial Sequence
  Description of Artificial Sequence: Synthetic oligonucleotide
auguugguuaguacagaaa

SEQ ID NO: 811774 - RNA, 19 nt, Artificial Sequence
  Description of Artificial Sequence: Synthetic oligonucleotide
ggucacucucucauauucc

SEQ ID NO: 811775 - RNA, 19 nt, Artificial Sequence
  Description of Artificial Sequence: Synthetic oligonucleotide
gguugagcagucgcuuagg

SEQ ID NO: 811776 - RNA, 19 nt, Artificial Sequence
  Description of Artificial Sequence: Synthetic oligonucleotide
agagaccaaccucucucuu

SEQ ID NO: 811777 - RNA, 19 nt, Artificial Sequence
  Description of Artificial Sequence: Synthetic oligonucleotide
aucugacuagcauccuguu

SEQ ID NO: 811778 - RNA, 19 nt, Artificial Sequence
  Description of Artificial Sequence: Synthetic oligonucleotide
caugcuaugcauccccagu

SEQ ID NO: 811779 - RNA, 19 nt, Artificial Sequence
  Description of Artificial Sequence: Synthetic oligonucleotide
cuagaggucagaggaaacu

SEQ ID NO: 811780 - RNA, 19 nt, Artificial Sequence
  Description of Artificial Sequence: Synthetic oligonucleotide
ugugagcugugugaaccuu

SEQ ID NO: 811781 - RNA, 19 nt, Artificial Sequence
  Description of Artificial Sequence: Synthetic oligonucleotide
ccaagaaugcacgugugca

SEQ ID NO: 811782 - RNA, 19 nt, Artificial Sequence
  Description of Artificial Sequence: Synthetic oligonucleotide
accucucucuuuccauaaa

SEQ ID NO: 811783 - RNA, 19 nt, Artificial Sequence
  Description of Artificial Sequence: Synthetic oligonucleotide
gacccaacauaaauauuau

SEQ ID NO: 811784 - RNA, 19 nt, Artificial Sequence
  Description of Artificial Sequence: Synthetic oligonucleotide
uccagacuuguggcacugc

SEQ ID NO: 811785 - RNA, 19 nt, Artificial Sequence
  Description of Artificial Sequence: Synthetic oligonucleotide
gagcuuagauauauguauu

SEQ ID NO: 811786 - RNA, 19 nt, Artificial Sequence
  Description of Artificial Sequence: Synthetic oligonucleotide
gaggaacgauagacucucc

SEQ ID NO: 811787 - RNA, 19 nt, Artificial Sequence
  Description of Artificial Sequence: Synthetic oligonucleotide
ggaaagggucaagauuuca

SEQ ID NO: 811788 - RNA, 19 nt, Artificial Sequence
  Description of Artificial Sequence: Synthetic oligonucleotide
acgacagggaaagggucaa

SEQ ID NO: 811789 - RNA, 19 nt, Artificial Sequence
  Description of Artificial Sequence: Synthetic oligonucleotide
cugacaggcugagaauaga

SEQ ID NO: 811790 - RNA, 19 nt, Artificial Sequence
  Description of Artificial Sequence: Synthetic oligonucleotide
gacaaucuagugacucacu

SEQ ID NO: 811791 - RNA, 19 nt, Artificial Sequence
  Description of Artificial Sequence: Synthetic oligonucleotide
cccucauaguaaagccagg

SEQ ID NO: 811792 - RNA, 19 nt, Artificial Sequence
  Description of Artificial Sequence: Synthetic oligonucleotide
augacuccauagggcagca

SEQ ID NO: 811793 - RNA, 19 nt, Artificial Sequence
  Description of Artificial Sequence: Synthetic oligonucleotide
cuaacacaugacccaacau

SEQ ID NO: 811794 - RNA, 19 nt, Artificial Sequence
  Description of Artificial Sequence: Synthetic oligonucleotide
gcaaaguauggagcuugug

SEQ ID NO: 811795 - RNA, 19 nt, Artificial Sequence
  Description of Artificial Sequence: Synthetic oligonucleotide
aggugugccugcagggacu

SEQ ID NO: 811796 - RNA, 19 nt, Artificial Sequence
  Description of Artificial Sequence: Synthetic oligonucleotide
gagugccucuuuaaaccua

SEQ ID NO: 811797 - RNA, 19 nt, Artificial Sequence
  Description of Artificial Sequence: Synthetic oligonucleotide
ccugaccugguauguguuc

SEQ ID NO: 811798 - RNA, 19 nt, Artificial Sequence
  Description of Artificial Sequence: Synthetic oligonucleotide
ccagacagauuccaccuaa

SEQ ID NO: 811799 - RNA, 19 nt, Artificial Sequence
  Description of Artificial Sequence: Synthetic oligonucleotide
guacccugauaacauccau

SEQ ID NO: 811800 - RNA, 19 nt, Artificial Sequence
  Description of Artificial Sequence: Synthetic oligonucleotide
cccggagcacguauccaag

SEQ ID NO: 811801 - RNA, 19 nt, Artificial Sequence
  Description of Artificial Sequence: Synthetic oligonucleotide
augcacgugugcauugcuu

SEQ ID NO: 811802 - RNA, 19 nt, Artificial Sequence
  Description of Artificial Sequence: Synthetic oligonucleotide
ggugaacacaauacaacuu

SEQ ID NO: 811803 - RNA, 19 nt, Artificial Sequence
  Description of Artificial Sequence: Synthetic oligonucleotide
gcauccccaguucauaaau

SEQ ID NO: 811804 - RNA, 19 nt, Artificial Sequence
  Description of Artificial Sequence: Synthetic oligonucleotide
cguuaaucaggcaugcuau

SEQ ID NO: 811805 - RNA, 19 nt, Artificial Sequence
  Description of Artificial Sequence: Synthetic oligonucleotide
cagcuuacugagcuuggau

SEQ ID NO: 811806 - RNA, 19 nt, Artificial Sequence
  Description of Artificial Sequence: Synthetic oligonucleotide
gggaaagggucaagauuuc

SEQ ID NO: 811807 - RNA, 19 nt, Artificial Sequence
  Description of Artificial Sequence: Synthetic oligonucleotide
cauccccaguucauaaauu

SEQ ID NO: 811808 - RNA, 19 nt, Artificial Sequence
  Description of Artificial Sequence: Synthetic oligonucleotide
caacaguaucagguuugaa

SEQ ID NO: 811809 - RNA, 19 nt, Artificial Sequence
  Description of Artificial Sequence: Synthetic oligonucleotide
ggcaugcuaugcaucccca

SEQ ID NO: 811810 - RNA, 19 nt, Artificial Sequence
  Description of Artificial Sequence: Synthetic oligonucleotide
gacuagcauccuguuguau

SEQ ID NO: 811811 - RNA, 19 nt, Artificial Sequence
  Description of Artificial Sequence: Synthetic oligonucleotide
cacaacuaucaaagcugau

SEQ ID NO: 811812 - RNA, 19 nt, Artificial Sequence
  Description of Artificial Sequence: Synthetic oligonucleotide
ccaguccggacuaaagagu

SEQ ID NO: 811813 - RNA, 19 nt, Artificial Sequence
  Description of Artificial Sequence: Synthetic oligonucleotide
ccggagcacguauccaaga

SEQ ID NO: 811814 - RNA, 19 nt, Artificial Sequence
  Description of Artificial Sequence: Synthetic oligonucleotide
ccagacuuguggcacugcu

SEQ ID NO: 811815 - RNA, 19 nt, Artificial Sequence
  Description of Artificial Sequence: Synthetic oligonucleotide
gcacgugugcauugcuuau

SEQ ID NO: 811816 - RNA, 19 nt, Artificial Sequence
  Description of Artificial Sequence: Synthetic oligonucleotide
gcccuagcacaugccagga

SEQ ID NO: 811817 - RNA, 19 nt, Artificial Sequence
  Description of Artificial Sequence: Synthetic oligonucleotide
cggacuaaagagugagacu

SEQ ID NO: 811818 - RNA, 19 nt, Artificial Sequence
  Description of Artificial Sequence: Synthetic oligonucleotide
cacgugugcauugcuuauu

SEQ ID NO: 811819 - RNA, 19 nt, Artificial Sequence
  Description of Artificial Sequence: Synthetic oligonucleotide
gcagucgcuuagguagccu

SEQ ID NO: 811820 - RNA, 19 nt, Artificial Sequence
  Description of Artificial Sequence: Synthetic oligonucleotide
cccuagcacaugccaggaa

SEQ ID NO: 811821 - RNA, 19 nt, Artificial Sequence
  Description of Artificial Sequence: Synthetic oligonucleotide
cccugaccugguauguguu

SEQ ID NO: 811822 - RNA, 19 nt, Artificial Sequence
  Description of Artificial Sequence: Synthetic oligonucleotide
ucuggcaugacuuucaggg

SEQ ID NO: 811823 - RNA, 19 nt, Artificial Sequence
  Description of Artificial Sequence: Synthetic oligonucleotide
aauggugaugaacugucgg

SEQ ID NO: 811824 - RNA, 19 nt, Artificial Sequence
  Description of Artificial Sequence: Synthetic oligonucleotide
uacaaagagaacacgaaca

SEQ ID NO: 811825 - RNA, 19 nt, Artificial Sequence
  Description of Artificial Sequence: Synthetic oligonucleotide
gaaggaggcauccagaaug

SEQ ID NO: 811826 - RNA, 19 nt, Artificial Sequence
  Description of Artificial Sequence: Synthetic oligonucleotide
gauaauauguaucccagga

SEQ ID NO: 811827 - RNA, 19 nt, Artificial Sequence
  Description of Artificial Sequence: Synthetic oligonucleotide
aaacucaaguaaccuuucc

SEQ ID NO: 811828 - RNA, 19 nt, Artificial Sequence
  Description of Artificial Sequence: Synthetic oligonucleotide
ugaacugucgguacugggg

SEQ ID NO: 811829 - RNA, 19 nt, Artificial Sequence
  Description of Artificial Sequence: Synthetic oligonucleotide
auagugagaaaacggcacc

SEQ ID NO: 811830 - RNA, 19 nt, Artificial Sequence
  Description of Artificial Sequence: Synthetic oligonucleotide
guuauaguuggccagcugc

SEQ ID NO: 811831 - RNA, 19 nt, Artificial Sequence
  Description of Artificial Sequence: Synthetic oligonucleotide
aaucucguuaccaucacag

SEQ ID NO: 811832 - RNA, 19 nt, Artificial Sequence
  Description of Artificial Sequence: Synthetic oligonucleotide
uuuuauuaauuauuaggaa

SEQ ID NO: 811833 - RNA, 19 nt, Artificial Sequence
  Description of Artificial Sequence: Synthetic oligonucleotide
ucucguuaccaucacaggc

SEQ ID NO: 811834 - RNA, 19 nt, Artificial Sequence
  Description of Artificial Sequence: Synthetic oligonucleotide
uucauuuaaugcaggaugu

SEQ ID NO: 811835 - RNA, 19 nt, Artificial Sequence
  Description of Artificial Sequence: Synthetic oligonucleotide
agcauagugagaaaacggc

SEQ ID NO: 811836 - RNA, 19 nt, Artificial Sequence
  Description of Artificial Sequence: Synthetic oligonucleotide
aagggagaggaguaguaag

SEQ ID NO: 811837 - RNA, 19 nt, Artificial Sequence
  Description of Artificial Sequence: Synthetic oligonucleotide
uuuggacaaacucaaguaa

SEQ ID NO: 811838 - RNA, 19 nt, Artificial Sequence
  Description of Artificial Sequence: Synthetic oligonucleotide
auaauauguaucccaggag

SEQ ID NO: 811839 - RNA, 19 nt, Artificial Sequence
  Description of Artificial Sequence: Synthetic oligonucleotide
uuuaaugcaggauguauau

SEQ ID NO: 811840 - RNA, 19 nt, Artificial Sequence
  Description of Artificial Sequence: Synthetic oligonucleotide
cucguuaccaucacaggcg

SEQ ID NO: 811841 - RNA, 19 nt, Artificial Sequence
  Description of Artificial Sequence: Synthetic oligonucleotide
uuucccucacagcagauca

SEQ ID NO: 811842 - RNA, 19 nt, Artificial Sequence
  Description of Artificial Sequence: Synthetic oligonucleotide
ugauaauauguaucccagg

SEQ ID NO: 811843 - RNA, 19 nt, Artificial Sequence
  Description of Artificial Sequence: Synthetic oligonucleotide
gaaacgugcaagaggaccg

SEQ ID NO: 811844 - RNA, 19 nt, Artificial Sequence
  Description of Artificial Sequence: Synthetic oligonucleotide
acucaaguaaccuuuccug

SEQ ID NO: 811845 - RNA, 19 nt, Artificial Sequence
  Description of Artificial Sequence: Synthetic oligonucleotide
uggacaaacucaaguaacc

SEQ ID NO: 811846 - RNA, 19 nt, Artificial Sequence
  Description of Artificial Sequence: Synthetic oligonucleotide
uaaccuuuccuguacaggu

SEQ ID NO: 811847 - RNA, 19 nt, Artificial Sequence
  Description of Artificial Sequence: Synthetic oligonucleotide
acuuuggacaaacucaagu

SEQ ID NO: 811848 - RNA, 19 nt, Artificial Sequence
  Description of Artificial Sequence: Synthetic oligonucleotide
aggagcgaagcacagacag

SEQ ID NO: 811849 - RNA, 19 nt, Artificial Sequence
  Description of Artificial Sequence: Synthetic oligonucleotide
ugccucacggcucugagcc

SEQ ID NO: 811850 - RNA, 19 nt, Artificial Sequence
  Description of Artificial Sequence: Synthetic oligonucleotide
cauagugagaaaacggcac

SEQ ID NO: 811851 - RNA, 19 nt, Artificial Sequence
  Description of Artificial Sequence: Synthetic oligonucleotide
uguggcuuccaaaauggug

SEQ ID NO: 811852 - RNA, 19 nt, Artificial Sequence
  Description of Artificial Sequence: Synthetic oligonucleotide
uauguaucccaggagcugg

SEQ ID NO: 811853 - RNA, 19 nt, Artificial Sequence
  Description of Artificial Sequence: Synthetic oligonucleotide
uuauaguuggccagcugcc

SEQ ID NO: 811854 - RNA, 19 nt, Artificial Sequence
  Description of Artificial Sequence: Synthetic oligonucleotide
gaaaacggcaccacuuugg

SEQ ID NO: 811855 - RNA, 19 nt, Artificial Sequence
  Description of Artificial Sequence: Synthetic oligonucleotide
ugaagucgaaguuauaguu

SEQ ID NO: 811856 - RNA, 19 nt, Artificial Sequence
  Description of Artificial Sequence: Synthetic oligonucleotide
gaugauuccagcccaggac

SEQ ID NO: 811857 - RNA, 19 nt, Artificial Sequence
  Description of Artificial Sequence: Synthetic oligonucleotide
cagcauagugagaaaacgg

SEQ ID NO: 811858 - RNA, 19 nt, Artificial Sequence
  Description of Artificial Sequence: Synthetic oligonucleotide
ugcaagaggaccgugguca

SEQ ID NO: 811859 - RNA, 19 nt, Artificial Sequence
  Description of Artificial Sequence: Synthetic oligonucleotide
ggaauagccagcuuccagg

SEQ ID NO: 811860 - RNA, 19 nt, Artificial Sequence
  Description of Artificial Sequence: Synthetic oligonucleotide
gagaacacgaacagagagg

SEQ ID NO: 811861 - RNA, 19 nt, Artificial Sequence
  Description of Artificial Sequence: Synthetic oligonucleotide
aauauguaucccaggagcu

SEQ ID NO: 811862 - RNA, 19 nt, Artificial Sequence
  Description of Artificial Sequence: Synthetic oligonucleotide
uccauccgcacucaugucc

SEQ ID NO: 811863 - RNA, 19 nt, Artificial Sequence
  Description of Artificial Sequence: Synthetic oligonucleotide
auaccggaacugcaggagc

SEQ ID NO: 811864 - RNA, 19 nt, Artificial Sequence
  Description of Artificial Sequence: Synthetic oligonucleotide
uguguggcgucaaaguugu

SEQ ID NO: 811865 - RNA, 19 nt, Artificial Sequence
  Description of Artificial Sequence: Synthetic oligonucleotide
gacagcacuaaugucuggg

SEQ ID NO: 811866 - RNA, 19 nt, Artificial Sequence
  Description of Artificial Sequence: Synthetic oligonucleotide
cuacaaagagaacacgaac

SEQ ID NO: 811867 - RNA, 19 nt, Artificial Sequence
  Description of Artificial Sequence: Synthetic oligonucleotide
aagugcggucccuagaggu

SEQ ID NO: 811868 - RNA, 19 nt, Artificial Sequence
  Description of Artificial Sequence: Synthetic oligonucleotide
aggcgaguaguuuugcccg

SEQ ID NO: 811869 - RNA, 19 nt, Artificial Sequence
  Description of Artificial Sequence: Synthetic oligonucleotide
ucgacuguaaacugaggcu

SEQ ID NO: 811870 - RNA, 19 nt, Artificial Sequence
  Description of Artificial Sequence: Synthetic oligonucleotide
uguggcgucaaaguugugc

SEQ ID NO: 811871 - RNA, 19 nt, Artificial Sequence
  Description of Artificial Sequence: Synthetic oligonucleotide
ugagaaaacggcaccacuu

SEQ ID NO: 811872 - RNA, 19 nt, Artificial Sequence
  Description of Artificial Sequence: Synthetic oligonucleotide
gaagucgaaguuauaguug

SEQ ID NO: 811873 - RNA, 19 nt, Artificial Sequence
  Description of Artificial Sequence: Synthetic oligonucleotide
guaggagcgaagcacagac

SEQ ID NO: 811874 - RNA, 19 nt, Artificial Sequence
  Description of Artificial Sequence: Synthetic oligonucleotide
acagacaccaguccuccuc

SEQ ID NO: 811875 - RNA, 19 nt, Artificial Sequence
  Description of Artificial Sequence: Synthetic oligonucleotide
aaacggcaccacuuuggac

SEQ ID NO: 811876 - RNA, 19 nt, Artificial Sequence
  Description of Artificial Sequence: Synthetic oligonucleotide
uguuccccggugcagaggc

SEQ ID NO: 811877 - RNA, 19 nt, Artificial Sequence
  Description of Artificial Sequence: Synthetic oligonucleotide
uauuaauuauuaggaauaa

SEQ ID NO: 811878 - RNA, 19 nt, Artificial Sequence
  Description of Artificial Sequence: Synthetic oligonucleotide
agugaagccuccgauggac

SEQ ID NO: 811879 - RNA, 19 nt, Artificial Sequence
  Description of Artificial Sequence: Synthetic oligonucleotide
aaaugcucggcugggagug

SEQ ID NO: 811880 - RNA, 19 nt, Artificial Sequence
  Description of Artificial Sequence: Synthetic oligonucleotide
uguauauggggagagcuaa

SEQ ID NO: 811881 - RNA, 19 nt, Artificial Sequence
  Description of Artificial Sequence: Synthetic oligonucleotide
gaggaccguggucagaggg

SEQ ID NO: 811882 - RNA, 19 nt, Artificial Sequence
  Description of Artificial Sequence: Synthetic oligonucleotide
gaaguuauaguuggccagc

SEQ ID NO: 811883 - RNA, 19 nt, Artificial Sequence
  Description of Artificial Sequence: Synthetic oligonucleotide
aaaucgggcccauguuccg

SEQ ID NO: 811884 - RNA, 19 nt, Artificial Sequence
  Description of Artificial Sequence: Synthetic oligonucleotide
ugucccagcauagugagaa

SEQ ID NO: 811885 - RNA, 19 nt, Artificial Sequence
  Description of Artificial Sequence: Synthetic oligonucleotide
gaaaucgggcccauguucc

SEQ ID NO: 811886 - RNA, 19 nt, Artificial Sequence
  Description of Artificial Sequence: Synthetic oligonucleotide
cuggaaccgacacagcugc

SEQ ID NO: 811887 - RNA, 19 nt, Artificial Sequence
  Description of Artificial Sequence: Synthetic oligonucleotide
agccuggaugauuccagcc

SEQ ID NO: 811888 - RNA, 19 nt, Artificial Sequence
  Description of Artificial Sequence: Synthetic oligonucleotide
gacuacaaagagaacacga

SEQ ID NO: 811889 - RNA, 19 nt, Artificial Sequence
  Description of Artificial Sequence: Synthetic oligonucleotide
guacagguagaagauggcg

SEQ ID NO: 811890 - RNA, 19 nt, Artificial Sequence
  Description of Artificial Sequence: Synthetic oligonucleotide
auaguuggccagcugccuc

SEQ ID NO: 811891 - RNA, 19 nt, Artificial Sequence
  Description of Artificial Sequence: Synthetic oligonucleotide
aggauaccggaacugcagg

SEQ ID NO: 811892 - RNA, 19 nt, Artificial Sequence
  Description of Artificial Sequence: Synthetic oligonucleotide
caggcgaguaguuuugccc

SEQ ID NO: 811893 - RNA, 19 nt, Artificial Sequence
  Description of Artificial Sequence: Synthetic oligonucleotide
auauggggagagcuaagug

SEQ ID NO: 811894 - RNA, 19 nt, Artificial Sequence
  Description of Artificial Sequence: Synthetic oligonucleotide
gauaccggaacugcaggag

SEQ ID NO: 811895 - RNA, 19 nt, Artificial Sequence
  Description of Artificial Sequence: Synthetic oligonucleotide
guaaccuuuccuguacagg

SEQ ID NO: 811896 - RNA, 19 nt, Artificial Sequence
  Description of Artificial Sequence: Synthetic oligonucleotide
aucucguuaccaucacagg

SEQ ID NO: 811897 - RNA, 19 nt, Artificial Sequence
  Description of Artificial Sequence: Synthetic oligonucleotide
uaaacugaggcuuccucua

SEQ ID NO: 811898 - RNA, 19 nt, Artificial Sequence
  Description of Artificial Sequence: Synthetic oligonucleotide
uccuugguucuucggauca

SEQ ID NO: 811899 - RNA, 19 nt, Artificial Sequence
  Description of Artificial Sequence: Synthetic oligonucleotide
uccuguacagguagaagau

SEQ ID NO: 811900 - RNA, 19 nt, Artificial Sequence
  Description of Artificial Sequence: Synthetic oligonucleotide
ucaaguaaccuuuccugua

SEQ ID NO: 811901 - RNA, 19 nt, Artificial Sequence
  Description of Artificial Sequence: Synthetic oligonucleotide
agaaaacggcaccacuuug

SEQ ID NO: 811902 - RNA, 19 nt, Artificial Sequence
  Description of Artificial Sequence: Synthetic oligonucleotide
aaucgggcccauguuccgc

SEQ ID NO: 811903 - RNA, 19 nt, Artificial Sequence
  Description of Artificial Sequence: Synthetic oligonucleotide
uauauggggagagcuaagu

SEQ ID NO: 811904 - RNA, 19 nt, Artificial Sequence
  Description of Artificial Sequence: Synthetic oligonucleotide
gauggcaaacugaaccacc

SEQ ID NO: 811905 - RNA, 19 nt, Artificial Sequence
  Description of Artificial Sequence: Synthetic oligonucleotide
cuuuggacaaacucaagua

SEQ ID NO: 811906 - RNA, 19 nt, Artificial Sequence
  Description of Artificial Sequence: Synthetic oligonucleotide
gacggaauagccagcuucc

SEQ ID NO: 811907 - RNA, 19 nt, Artificial Sequence
  Description of Artificial Sequence: Synthetic oligonucleotide
caucacgcgaggauaccgg

SEQ ID NO: 811908 - RNA, 19 nt, Artificial Sequence
  Description of Artificial Sequence: Synthetic oligonucleotide
gucuccgggacgcuggacg

SEQ ID NO: 811909 - RNA, 19 nt, Artificial Sequence
  Description of Artificial Sequence: Synthetic oligonucleotide
gaacugucgguacugggga

SEQ ID NO: 811910 - RNA, 19 nt, Artificial Sequence
  Description of Artificial Sequence: Synthetic oligonucleotide
ucacaggcgaguaguuuug

SEQ ID NO: 811911 - RNA, 19 nt, Artificial Sequence
  Description of Artificial Sequence: Synthetic oligonucleotide
ugcccagacuacaaagaga

SEQ ID NO: 811912 - RNA, 19 nt, Artificial Sequence
  Description of Artificial Sequence: Synthetic oligonucleotide
ucguuaccaucacaggcga

SEQ ID NO: 811913 - RNA, 19 nt, Artificial Sequence
  Description of Artificial Sequence: Synthetic oligonucleotide
uuaaugcaggauguauaug

SEQ ID NO: 811914 - RNA, 19 nt, Artificial Sequence
  Description of Artificial Sequence: Synthetic oligonucleotide
aucgggcccauguuccgcc

SEQ ID NO: 811915 - RNA, 19 nt, Artificial Sequence
  Description of Artificial Sequence: Synthetic oligonucleotide
guugugcagaugcuuccgg

SEQ ID NO: 811916 - RNA, 19 nt, Artificial Sequence
  Description of Artificial Sequence: Synthetic oligonucleotide
auugguccagcguccaaug

SEQ ID NO: 811917 - RNA, 19 nt, Artificial Sequence
  Description of Artificial Sequence: Synthetic oligonucleotide
gauguauauggggagagcu

SEQ ID NO: 811918 - RNA, 19 nt, Artificial Sequence
  Description of Artificial Sequence: Synthetic oligonucleotide
aggcguagaugacaauguc

SEQ ID NO: 811919 - RNA, 19 nt, Artificial Sequence
  Description of Artificial Sequence: Synthetic oligonucleotide
aacauggugucaaucucgu

SEQ ID NO: 811920 - RNA, 19 nt, Artificial Sequence
  Description of Artificial Sequence: Synthetic oligonucleotide
ugaagccuccgauggacca

SEQ ID NO: 811921 - RNA, 19 nt, Artificial Sequence
  Description of Artificial Sequence: Synthetic oligonucleotide
cugcccagacuacaaagag

SEQ ID NO: 811922 - RNA, 19 nt, Artificial Sequence
  Description of Artificial Sequence: Synthetic oligonucleotide
aguggcagucuccgggacg

SEQ ID NO: 811923 - RNA, 19 nt, Artificial Sequence
  Description of Artificial Sequence: Synthetic oligonucleotide
uugacccuguugaggaaug

SEQ ID NO: 811924 - RNA, 19 nt, Artificial Sequence
  Description of Artificial Sequence: Synthetic oligonucleotide
augaggggaaacgugcaag

SEQ ID NO: 811925 - RNA, 19 nt, Artificial Sequence
  Description of Artificial Sequence: Synthetic oligonucleotide
caccacuuuggacaaacuc

SEQ ID NO: 811926 - RNA, 19 nt, Artificial Sequence
  Description of Artificial Sequence: Synthetic oligonucleotide
acuacaaagagaacacgaa

SEQ ID NO: 811927 - RNA, 19 nt, Artificial Sequence
  Description of Artificial Sequence: Synthetic oligonucleotide
ggaguaguaagagauggac

SEQ ID NO: 811928 - RNA, 19 nt, Artificial Sequence
  Description of Artificial Sequence: Synthetic oligonucleotide
cuacagacugguuccgaug

SEQ ID NO: 811929 - RNA, 19 nt, Artificial Sequence
  Description of Artificial Sequence: Synthetic oligonucleotide
cacaagaguccaagugcgg

SEQ ID NO: 811930 - RNA, 19 nt, Artificial Sequence
  Description of Artificial Sequence: Synthetic oligonucleotide
acagcacuaaugucugggu

SEQ ID NO: 811931 - RNA, 19 nt, Artificial Sequence
  Description of Artificial Sequence: Synthetic oligonucleotide
acaagaguccaagugcggu

SEQ ID NO: 811932 - RNA, 19 nt, Artificial Sequence
  Description of Artificial Sequence: Synthetic oligonucleotide
aagccuccgauggaccagg

SEQ ID NO: 811933 - RNA, 19 nt, Artificial Sequence
  Description of Artificial Sequence: Synthetic oligonucleotide
gcaaugucccagcauagug

SEQ ID NO: 811934 - RNA, 19 nt, Artificial Sequence
  Description of Artificial Sequence: Synthetic oligonucleotide
uggaugauuccagcccagg

SEQ ID NO: 811935 - RNA, 19 nt, Artificial Sequence
  Description of Artificial Sequence: Synthetic oligonucleotide
agagauggaccagaagacu

SEQ ID NO: 811936 - RNA, 19 nt, Artificial Sequence
  Description of Artificial Sequence: Synthetic oligonucleotide
caagaguccaagugcgguc

SEQ ID NO: 811937 - RNA, 19 nt, Artificial Sequence
  Description of Artificial Sequence: Synthetic oligonucleotide
ucccaucgacuguaaacug

SEQ ID NO: 811938 - RNA, 19 nt, Artificial Sequence
  Description of Artificial Sequence: Synthetic oligonucleotide
cugacaaggcagcuucuug

SEQ ID NO: 811939 - RNA, 19 nt, Artificial Sequence
  Description of Artificial Sequence: Synthetic oligonucleotide
auggcgaagggagaggagu

SEQ ID NO: 811940 - RNA, 19 nt, Artificial Sequence
  Description of Artificial Sequence: Synthetic oligonucleotide
ugacagcacuaaugucugg

SEQ ID NO: 811941 - RNA, 19 nt, Artificial Sequence
  Description of Artificial Sequence: Synthetic oligonucleotide
ggaccagaagacugaagcc

SEQ ID NO: 811942 - RNA, 19 nt, Artificial Sequence
  Description of Artificial Sequence: Synthetic oligonucleotide
agcuaagugcuuccacgug

SEQ ID NO: 811943 - RNA, 19 nt, Artificial Sequence
  Description of Artificial Sequence: Synthetic oligonucleotide
uguuggacaugaugucuuc

SEQ ID NO: 811944 - RNA, 19 nt, Artificial Sequence
  Description of Artificial Sequence: Synthetic oligonucleotide
agucgaaguuauaguuggc

SEQ ID NO: 811945 - RNA, 19 nt, Artificial Sequence
  Description of Artificial Sequence: Synthetic oligonucleotide
cucugggcggagcagggcc

SEQ ID NO: 811946 - RNA, 19 nt, Artificial Sequence
  Description of Artificial Sequence: Synthetic oligonucleotide
cacgcgaggauaccggaac

SEQ ID NO: 811947 - RNA, 19 nt, Artificial Sequence
  Description of Artificial Sequence: Synthetic oligonucleotide
uauaguuggccagcugccu

SEQ ID NO: 811948 - RNA, 19 nt, Artificial Sequence
  Description of Artificial Sequence: Synthetic oligonucleotide
uggaagucgacuggccagc

SEQ ID NO: 811949 - RNA, 19 nt, Artificial Sequence
  Description of Artificial Sequence: Synthetic oligonucleotide
uugcccggcgcccauuaca

SEQ ID NO: 811950 - RNA, 19 nt, Artificial Sequence
  Description of Artificial Sequence: Synthetic oligonucleotide
gaggggaaacgugcaagag

SEQ ID NO: 811951 - RNA, 19 nt, Artificial Sequence
  Description of Artificial Sequence: Synthetic oligonucleotide
ggaaaucgggcccauguuc

SEQ ID NO: 811952 - RNA, 19 nt, Artificial Sequence
  Description of Artificial Sequence: Synthetic oligonucleotide
gucauugccucuguuggac

SEQ ID NO: 811953 - RNA, 19 nt, Artificial Sequence
  Description of Artificial Sequence: Synthetic oligonucleotide
aaccgacacagcugcucug

SEQ ID NO: 811954 - RNA, 19 nt, Artificial Sequence
  Description of Artificial Sequence: Synthetic oligonucleotide
ggggaaacgugcaagagga

SEQ ID NO: 811955 - RNA, 19 nt, Artificial Sequence
  Description of Artificial Sequence: Synthetic oligonucleotide
cagcaaugucccagcauag

SEQ ID NO: 811956 - RNA, 19 nt, Artificial Sequence
  Description of Artificial Sequence: Synthetic oligonucleotide
ucccagcauagugagaaaa

SEQ ID NO: 811957 - RNA, 19 nt, Artificial Sequence
  Description of Artificial Sequence: Synthetic oligonucleotide
uaggagcgaagcacagaca

SEQ ID NO: 811958 - RNA, 19 nt, Artificial Sequence
  Description of Artificial Sequence: Synthetic oligonucleotide
ccauguuccgccugguagg

SEQ ID NO: 811959 - RNA, 19 nt, Artificial Sequence
  Description of Artificial Sequence: Synthetic oligonucleotide
caccccugcgggaagggcc

SEQ ID NO: 811960 - RNA, 19 nt, Artificial Sequence
  Description of Artificial Sequence: Synthetic oligonucleotide
ugcccggcgcccauuacac

SEQ ID NO: 811961 - RNA, 19 nt, Artificial Sequence
  Description of Artificial Sequence: Synthetic oligonucleotide
ggcguagaugacaaugucc

SEQ ID NO: 811962 - RNA, 19 nt, Artificial Sequence
  Description of Artificial Sequence: Synthetic oligonucleotide
caccaucacgcgaggauac

SEQ ID NO: 811963 - RNA, 19 nt, Artificial Sequence
  Description of Artificial Sequence: Synthetic oligonucleotide
guaguuuugcccggcgccc

SEQ ID NO: 811964 - RNA, 19 nt, Artificial Sequence
  Description of Artificial Sequence: Synthetic oligonucleotide
aaacgugcaagaggaccgu

SEQ ID NO: 811965 - RNA, 19 nt, Artificial Sequence
  Description of Artificial Sequence: Synthetic oligonucleotide
caagugcggucccuagagg

SEQ ID NO: 811966 - RNA, 19 nt, Artificial Sequence
  Description of Artificial Sequence: Synthetic oligonucleotide
ggugaucugacaaggcagc

SEQ ID NO: 811967 - RNA, 19 nt, Artificial Sequence
  Description of Artificial Sequence: Synthetic oligonucleotide
ucggcugggaguggggugc

SEQ ID NO: 811968 - RNA, 19 nt, Artificial Sequence
  Description of Artificial Sequence: Synthetic oligonucleotide
accaucacgcgaggauacc

SEQ ID NO: 811969 - RNA, 19 nt, Artificial Sequence
  Description of Artificial Sequence: Synthetic oligonucleotide
cacaaacauggugucaauc

SEQ ID NO: 811970 - RNA, 19 nt, Artificial Sequence
  Description of Artificial Sequence: Synthetic oligonucleotide
gaagccuccgauggaccag

SEQ ID NO: 811971 - RNA, 19 nt, Artificial Sequence
  Description of Artificial Sequence: Synthetic oligonucleotide
gaugcuuccgggccagaaa

SEQ ID NO: 811972 - RNA, 19 nt, Artificial Sequence
  Description of Artificial Sequence: Synthetic oligonucleotide
acgugcaagaggaccgugg

SEQ ID NO: 811973 - RNA, 19 nt, Artificial Sequence
  Description of Artificial Sequence: Synthetic oligonucleotide
aucacgcgaggauaccgga

SEQ ID NO: 811974 - RNA, 19 nt, Artificial Sequence
  Description of Artificial Sequence: Synthetic oligonucleotide
cgaaguuauaguuggccag

SEQ ID NO: 811975 - RNA, 19 nt, Artificial Sequence
  Description of Artificial Sequence: Synthetic oligonucleotide
gacccuguugaggaaugug

SEQ ID NO: 811976 - RNA, 19 nt, Artificial Sequence
  Description of Artificial Sequence: Synthetic oligonucleotide
uguuuucuacagacugguu

SEQ ID NO: 811977 - RNA, 19 nt, Artificial Sequence
  Description of Artificial Sequence: Synthetic oligonucleotide
aacugucgguacuggggau

SEQ ID NO: 811978 - RNA, 19 nt, Artificial Sequence
  Description of Artificial Sequence: Synthetic oligonucleotide
uggugucaaucucguuacc

SEQ ID NO: 811979 - RNA, 19 nt, Artificial Sequence
  Description of Artificial Sequence: Synthetic oligonucleotide
aguaagagauggaccagaa

SEQ ID NO: 811980 - RNA, 19 nt, Artificial Sequence
  Description of Artificial Sequence: Synthetic oligonucleotide
cucaaguaaccuuuccugu

SEQ ID NO: 811981 - RNA, 19 nt, Artificial Sequence
  Description of Artificial Sequence: Synthetic oligonucleotide
ccaaaauggugaugaacug

SEQ ID NO: 811982 - RNA, 19 nt, Artificial Sequence
  Description of Artificial Sequence: Synthetic oligonucleotide
ccaagugcggucccuagag

SEQ ID NO: 811983 - RNA, 19 nt, Artificial Sequence
  Description of Artificial Sequence: Synthetic oligonucleotide
guauauggggagagcuaag

SEQ ID NO: 811984 - RNA, 19 nt, Artificial Sequence
  Description of Artificial Sequence: Synthetic oligonucleotide
ccucccaucgacuguaaac

SEQ ID NO: 811985 - RNA, 19 nt, Artificial Sequence
  Description of Artificial Sequence: Synthetic oligonucleotide
gaggaccacaagugucccc

SEQ ID NO: 811986 - RNA, 19 nt, Artificial Sequence
  Description of Artificial Sequence: Synthetic oligonucleotide
uccgggacgcuggacgcgg

SEQ ID NO: 811987 - RNA, 19 nt, Artificial Sequence
  Description of Artificial Sequence: Synthetic oligonucleotide
gagcuaagugcuuccacgu

SEQ ID NO: 811988 - RNA, 19 nt, Artificial Sequence
  Description of Artificial Sequence: Synthetic oligonucleotide
cccauguuccgccugguag

SEQ ID NO: 811989 - RNA, 19 nt, Artificial Sequence
  Description of Artificial Sequence: Synthetic oligonucleotide
acgaacagagaggaccaca

SEQ ID NO: 811990 - RNA, 19 nt, Artificial Sequence
  Description of Artificial Sequence: Synthetic oligonucleotide
uuuugcccggcgcccauua

SEQ ID NO: 811991 - RNA, 19 nt, Artificial Sequence
  Description of Artificial Sequence: Synthetic oligonucleotide
agaggaccguggucagagg

SEQ ID NO: 811992 - RNA, 19 nt, Artificial Sequence
  Description of Artificial Sequence: Synthetic oligonucleotide
cugaagucgaaguuauagu

SEQ ID NO: 811993 - RNA, 19 nt, Artificial Sequence
  Description of Artificial Sequence: Synthetic oligonucleotide
ucccuagaggugccagggc

SEQ ID NO: 811994 - RNA, 19 nt, Artificial Sequence
  Description of Artificial Sequence: Synthetic oligonucleotide
ucacgcgaggauaccggaa

SEQ ID NO: 811995 - RNA, 19 nt, Artificial Sequence
  Description of Artificial Sequence: Synthetic oligonucleotide
ggaggcaggccacaccugc

SEQ ID NO: 811996 - RNA, 19 nt, Artificial Sequence
  Description of Artificial Sequence: Synthetic oligonucleotide
gagccuggguacagcaucc

SEQ ID NO: 811997 - RNA, 19 nt, Artificial Sequence
  Description of Artificial Sequence: Synthetic oligonucleotide
aacgugcaagaggaccgug

SEQ ID NO: 811998 - RNA, 19 nt, Artificial Sequence
  Description of Artificial Sequence: Synthetic oligonucleotide
aggugcugccucacugucc

SEQ ID NO: 811999 - RNA, 19 nt, Artificial Sequence
  Description of Artificial Sequence: Synthetic oligonucleotide
gaaccgacacagcugcucu

SEQ ID NO: 812000 - RNA, 19 nt, Artificial Sequence
  Description of Artificial Sequence: Synthetic oligonucleotide
agcguccaaugccucggag

SEQ ID NO: 812001 - RNA, 19 nt, Artificial Sequence
  Description of Artificial Sequence: Synthetic oligonucleotide
ugcuguuccccggugcaga

SEQ ID NO: 812002 - RNA, 19 nt, Artificial Sequence
  Description of Artificial Sequence: Synthetic oligonucleotide
ggggcuggaagcccaggcg

SEQ ID NO: 812003 - RNA, 19 nt, Artificial Sequence
  Description of Artificial Sequence: Synthetic oligonucleotide
gagaaaacggcaccacuuu

SEQ ID NO: 812004 - RNA, 19 nt, Artificial Sequence
  Description of Artificial Sequence: Synthetic oligonucleotide
agcauccggcgccccaggg

SEQ ID NO: 812005 - RNA, 19 nt, Artificial Sequence
  Description of Artificial Sequence: Synthetic oligonucleotide
cuuccacguggaugagggg

SEQ ID NO: 812006 - RNA, 19 nt, Artificial Sequence
  Description of Artificial Sequence: Synthetic oligonucleotide
ggggcugauaauauguauc

SEQ ID NO: 812007 - RNA, 19 nt, Artificial Sequence
  Description of Artificial Sequence: Synthetic oligonucleotide
agguagcuggugaucugac

SEQ ID NO: 812008 - RNA, 19 nt, Artificial Sequence
  Description of Artificial Sequence: Synthetic oligonucleotide
aggucgucgaaggaggcau

SEQ ID NO: 812009 - RNA, 19 nt, Artificial Sequence
  Description of Artificial Sequence: Synthetic oligonucleotide
guuccgauguguggcuucc

SEQ ID NO: 812010 - RNA, 19 nt, Artificial Sequence
  Description of Artificial Sequence: Synthetic oligonucleotide
uccgauggaccaggcguag

SEQ ID NO: 812011 - RNA, 19 nt, Artificial Sequence
  Description of Artificial Sequence: Synthetic oligonucleotide
gcccagacuacaaagagaa

SEQ ID NO: 812012 - RNA, 19 nt, Artificial Sequence
  Description of Artificial Sequence: Synthetic oligonucleotide
ccaggcguagaugacaaug

SEQ ID NO: 812013 - RNA, 19 nt, Artificial Sequence
  Description of Artificial Sequence: Synthetic oligonucleotide
cacggggcugauaauaugu

SEQ ID NO: 812014 - RNA, 19 nt, Artificial Sequence
  Description of Artificial Sequence: Synthetic oligonucleotide
gcccgcauuucccucacag

SEQ ID NO: 812015 - RNA, 19 nt, Artificial Sequence
  Description of Artificial Sequence: Synthetic oligonucleotide
cuuccucuagcugggagga

SEQ ID NO: 812016 - RNA, 19 nt, Artificial Sequence
  Description of Artificial Sequence: Synthetic oligonucleotide
cugaggcuuccucuagcug

SEQ ID NO: 812017 - RNA, 19 nt, Artificial Sequence
  Description of Artificial Sequence: Synthetic oligonucleotide
ggucccuagaggugccagg

SEQ ID NO: 812018 - RNA, 19 nt, Artificial Sequence
  Description of Artificial Sequence: Synthetic oligonucleotide
ccuuccacaagaguccaag

SEQ ID NO: 812019 - RNA, 19 nt, Artificial Sequence
  Description of Artificial Sequence: Synthetic oligonucleotide
cucuuccaccagucgggcc

SEQ ID NO: 812020 - RNA, 19 nt, Artificial Sequence
  Description of Artificial Sequence: Synthetic oligonucleotide
aggcucugggcggagcagg

SEQ ID NO: 812021 - RNA, 19 nt, Artificial Sequence
  Description of Artificial Sequence: Synthetic oligonucleotide
ccuggaaccgacacagcug

SEQ ID NO: 812022 - RNA, 19 nt, Artificial Sequence
  Description of Artificial Sequence: Synthetic oligonucleotide
gggagagcuaagugcuucc

SEQ ID NO: 812023 - RNA, 19 nt, Artificial Sequence
  Description of Artificial Sequence: Synthetic oligonucleotide
caggaggucauugccucug

SEQ ID NO: 812024 - RNA, 19 nt, Artificial Sequence
  Description of Artificial Sequence: Synthetic oligonucleotide
agacugguuccgaugugug

SEQ ID NO: 812025 - RNA, 19 nt, Artificial Sequence
  Description of Artificial Sequence: Synthetic oligonucleotide
agugcggucccuagaggug

SEQ ID NO: 812026 - RNA, 19 nt, Artificial Sequence
  Description of Artificial Sequence: Synthetic oligonucleotide
aggaguaguaagagaugga

SEQ ID NO: 812027 - RNA, 19 nt, Artificial Sequence
  Description of Artificial Sequence: Synthetic oligonucleotide
cauuuaaugcaggauguau

SEQ ID NO: 812028 - RNA, 19 nt, Artificial Sequence
  Description of Artificial Sequence: Synthetic oligonucleotide
uaagugcuuccacguggau

SEQ ID NO: 812029 - RNA, 19 nt, Artificial Sequence
  Description of Artificial Sequence: Synthetic oligonucleotide
ggcgaguaguuuugcccgg

SEQ ID NO: 812030 - RNA, 19 nt, Artificial Sequence
  Description of Artificial Sequence: Synthetic oligonucleotide
acgcgaggauaccggaacu

SEQ ID NO: 812031 - RNA, 19 nt, Artificial Sequence
  Description of Artificial Sequence: Synthetic oligonucleotide
accgacacagcugcucuga

SEQ ID NO: 812032 - RNA, 19 nt, Artificial Sequence
  Description of Artificial Sequence: Synthetic oligonucleotide
cucggaggcaggccacacc

SEQ ID NO: 812033 - RNA, 19 nt, Artificial Sequence
  Description of Artificial Sequence: Synthetic oligonucleotide
aaccuuuccuguacaggua

SEQ ID NO: 812034 - RNA, 19 nt, Artificial Sequence
  Description of Artificial Sequence: Synthetic oligonucleotide
gugagaaaacggcaccacu

SEQ ID NO: 812035 - RNA, 19 nt, Artificial Sequence
  Description of Artificial Sequence: Synthetic oligonucleotide
caaucucguuaccaucaca

SEQ ID NO: 812036 - RNA, 19 nt, Artificial Sequence
  Description of Artificial Sequence: Synthetic oligonucleotide
ggcugauaauauguauccc

SEQ ID NO: 812037 - RNA, 19 nt, Artificial Sequence
  Description of Artificial Sequence: Synthetic oligonucleotide
acaccccugcgggaagggc

SEQ ID NO: 812038 - RNA, 19 nt, Artificial Sequence
  Description of Artificial Sequence: Synthetic oligonucleotide
acggcaccacuuuggacaa

SEQ ID NO: 812039 - RNA, 19 nt, Artificial Sequence
  Description of Artificial Sequence: Synthetic oligonucleotide
uaguuuugcccggcgccca

SEQ ID NO: 812040 - RNA, 19 nt, Artificial Sequence
  Description of Artificial Sequence: Synthetic oligonucleotide
ggauaccggaacugcagga

SEQ ID NO: 812041 - RNA, 19 nt, Artificial Sequence
  Description of Artificial Sequence: Synthetic oligonucleotide
cugucgguacuggggauug

SEQ ID NO: 812042 - RNA, 19 nt, Artificial Sequence
  Description of Artificial Sequence: Synthetic oligonucleotide
uuugcccggcgcccauuac

SEQ ID NO: 812043 - RNA, 19 nt, Artificial Sequence
  Description of Artificial Sequence: Synthetic oligonucleotide
ccgcauuucccucacagca

SEQ ID NO: 812044 - RNA, 19 nt, Artificial Sequence
  Description of Artificial Sequence: Synthetic oligonucleotide
auguauauggggagagcua

SEQ ID NO: 812045 - RNA, 19 nt, Artificial Sequence
  Description of Artificial Sequence: Synthetic oligonucleotide
cacagcccaccucauagaa

SEQ ID NO: 812046 - RNA, 19 nt, Artificial Sequence
  Description of Artificial Sequence: Synthetic oligonucleotide
gauugguccagcguccaau

SEQ ID NO: 812047 - RNA, 19 nt, Artificial Sequence
  Description of Artificial Sequence: Synthetic oligonucleotide
ggauguauauggggagagc

SEQ ID NO: 812048 - RNA, 19 nt, Artificial Sequence
  Description of Artificial Sequence: Synthetic oligonucleotide
gucgaaggaggcauccaga

SEQ ID NO: 812049 - RNA, 19 nt, Artificial Sequence
  Description of Artificial Sequence: Synthetic oligonucleotide
augcucggcugggaguggg

SEQ ID NO: 812050 - RNA, 19 nt, Artificial Sequence
  Description of Artificial Sequence: Synthetic oligonucleotide
cacaggcgaguaguuuugc

SEQ ID NO: 812051 - RNA, 19 nt, Artificial Sequence
  Description of Artificial Sequence: Synthetic oligonucleotide
guacuggggauugguccag

SEQ ID NO: 812052 - RNA, 19 nt, Artificial Sequence
  Description of Artificial Sequence: Synthetic oligonucleotide
gaagggccaccucgggauc

SEQ ID NO: 812053 - RNA, 19 nt, Artificial Sequence
  Description of Artificial Sequence: Synthetic oligonucleotide
ggagcauccccgcugccca

SEQ ID NO: 812054 - RNA, 19 nt, Artificial Sequence
  Description of Artificial Sequence: Synthetic oligonucleotide
caggauguauauggggaga

SEQ ID NO: 812055 - RNA, 19 nt, Artificial Sequence
  Description of Artificial Sequence: Synthetic oligonucleotide
ggcgucaaaguugugcaga

SEQ ID NO: 812056 - RNA, 19 nt, Artificial Sequence
  Description of Artificial Sequence: Synthetic oligonucleotide
gaccgugguggugaugauc

SEQ ID NO: 812057 - RNA, 19 nt, Artificial Sequence
  Description of Artificial Sequence: Synthetic oligonucleotide
cuagaggugccagggcauc

SEQ ID NO: 812058 - RNA, 19 nt, Artificial Sequence
  Description of Artificial Sequence: Synthetic oligonucleotide
cuguccuggucaccaggac

SEQ ID NO: 812059 - RNA, 19 nt, Artificial Sequence
  Description of Artificial Sequence: Synthetic oligonucleotide
ggauggcaaacugaaccac

SEQ ID NO: 812060 - RNA, 19 nt, Artificial Sequence
  Description of Artificial Sequence: Synthetic oligonucleotide
ccacuuuggacaaacucaa

SEQ ID NO: 812061 - RNA, 19 nt, Artificial Sequence
  Description of Artificial Sequence: Synthetic oligonucleotide
ugacccuguugaggaaugu

SEQ ID NO: 812062 - RNA, 19 nt, Artificial Sequence
  Description of Artificial Sequence: Synthetic oligonucleotide
uggaaccgacacagcugcu

SEQ ID NO: 812063 - RNA, 19 nt, Artificial Sequence
  Description of Artificial Sequence: Synthetic oligonucleotide
ccaucacgcgaggauaccg

SEQ ID NO: 812064 - RNA, 19 nt, Artificial Sequence
  Description of Artificial Sequence: Synthetic oligonucleotide
cucccguccugccuuccac

SEQ ID NO: 812065 - RNA, 19 nt, Artificial Sequence
  Description of Artificial Sequence: Synthetic oligonucleotide
gugcaagaggaccgugguc

SEQ ID NO: 812066 - RNA, 19 nt, Artificial Sequence
  Description of Artificial Sequence: Synthetic oligonucleotide
gcgaggauaccggaacugc

SEQ ID NO: 812067 - RNA, 19 nt, Artificial Sequence
  Description of Artificial Sequence: Synthetic oligonucleotide
cacguggaugaggggaaac

SEQ ID NO: 812068 - RNA, 19 nt, Artificial Sequence
  Description of Artificial Sequence: Synthetic oligonucleotide
acugucgguacuggggauu

SEQ ID NO: 812069 - RNA, 19 nt, Artificial Sequence
  Description of Artificial Sequence: Synthetic oligonucleotide
uacuggggauugguccagc

SEQ ID NO: 812070 - RNA, 19 nt, Artificial Sequence
  Description of Artificial Sequence: Synthetic oligonucleotide
gacggggcggggacggcag

SEQ ID NO: 812071 - RNA, 19 nt, Artificial Sequence
  Description of Artificial Sequence: Synthetic oligonucleotide
agaugcuuccgggccagaa

SEQ ID NO: 812072 - RNA, 19 nt, Artificial Sequence
  Description of Artificial Sequence: Synthetic oligonucleotide
uccgccugguaggagcgaa

SEQ ID NO: 812073 - RNA, 19 nt, Artificial Sequence
  Description of Artificial Sequence: Synthetic oligonucleotide
cagcacuaaugucugggua

SEQ ID NO: 812074 - RNA, 19 nt, Artificial Sequence
  Description of Artificial Sequence: Synthetic oligonucleotide
gaaacagcgccagcugccu

SEQ ID NO: 812075 - RNA, 19 nt, Artificial Sequence
  Description of Artificial Sequence: Synthetic oligonucleotide
acggaauagccagcuucca

SEQ ID NO: 812076 - RNA, 19 nt, Artificial Sequence
  Description of Artificial Sequence: Synthetic oligonucleotide
gguuccgauguguggcuuc

SEQ ID NO: 812077 - RNA, 19 nt, Artificial Sequence
  Description of Artificial Sequence: Synthetic oligonucleotide
ggcgaagggagaggaguag

SEQ ID NO: 812078 - RNA, 19 nt, Artificial Sequence
  Description of Artificial Sequence: Synthetic oligonucleotide
gcuguuccccggugcagag

SEQ ID NO: 812079 - RNA, 19 nt, Artificial Sequence
  Description of Artificial Sequence: Synthetic oligonucleotide
acauggugucaaucucguu

SEQ ID NO: 812080 - RNA, 19 nt, Artificial Sequence
  Description of Artificial Sequence: Synthetic oligonucleotide
ccagcguccaaugccucgg

SEQ ID NO: 812081 - RNA, 19 nt, Artificial Sequence
  Description of Artificial Sequence: Synthetic oligonucleotide
cccgcauuucccucacagc

SEQ ID NO: 812082 - RNA, 19 nt, Artificial Sequence
  Description of Artificial Sequence: Synthetic oligonucleotide
cuguuccccggugcagagg

SEQ ID NO: 812083 - RNA, 19 nt, Artificial Sequence
  Description of Artificial Sequence: Synthetic oligonucleotide
cccaucgacuguaaacuga

SEQ ID NO: 812084 - RNA, 19 nt, Artificial Sequence
  Description of Artificial Sequence: Synthetic oligonucleotide
cauguuccgccugguagga

SEQ ID NO: 812085 - RNA, 19 nt, Artificial Sequence
  Description of Artificial Sequence: Synthetic oligonucleotide
gaccguggucagaggggag

SEQ ID NO: 812086 - RNA, 19 nt, Artificial Sequence
  Description of Artificial Sequence: Synthetic oligonucleotide
cccggcgcccauuacacuc

SEQ ID NO: 812087 - RNA, 19 nt, Artificial Sequence
  Description of Artificial Sequence: Synthetic oligonucleotide
gcacggggcugauaauaug

SEQ ID NO: 812088 - RNA, 19 nt, Artificial Sequence
  Description of Artificial Sequence: Synthetic oligonucleotide
uccguccauccgcacucau

SEQ ID NO: 812089 - RNA, 19 nt, Artificial Sequence
  Description of Artificial Sequence: Synthetic oligonucleotide
accucccaucgacuguaaa

SEQ ID NO: 812090 - RNA, 19 nt, Artificial Sequence
  Description of Artificial Sequence: Synthetic oligonucleotide
cuccgauggaccaggcgua

SEQ ID NO: 812091 - RNA, 19 nt, Artificial Sequence
  Description of Artificial Sequence: Synthetic oligonucleotide
acgcggcccgcuccgucuc

SEQ ID NO: 812092 - RNA, 19 nt, Artificial Sequence
  Description of Artificial Sequence: Synthetic oligonucleotide
gggagcauccccgcugccc

SEQ ID NO: 812093 - RNA, 19 nt, Artificial Sequence
  Description of Artificial Sequence: Synthetic oligonucleotide
ggggagagcuaagugcuuc

SEQ ID NO: 812094 - RNA, 19 nt, Artificial Sequence
  Description of Artificial Sequence: Synthetic oligonucleotide
cacgaacagagaggaccac

SEQ ID NO: 812095 - RNA, 19 nt, Artificial Sequence
  Description of Artificial Sequence: Synthetic oligonucleotide
aggacggaauagccagcuu

SEQ ID NO: 812096 - RNA, 19 nt, Artificial Sequence
  Description of Artificial Sequence: Synthetic oligonucleotide
aggcgguggauggcaaacu

SEQ ID NO: 812097 - RNA, 19 nt, Artificial Sequence
  Description of Artificial Sequence: Synthetic oligonucleotide
ccucacggcucugagcccc

SEQ ID NO: 812098 - RNA, 19 nt, Artificial Sequence
  Description of Artificial Sequence: Synthetic oligonucleotide
acguggcagugaagccucc

SEQ ID NO: 812099 - RNA, 19 nt, Artificial Sequence
  Description of Artificial Sequence: Synthetic oligonucleotide
cuccgggacgcuggacgcg

SEQ ID NO: 812100 - RNA, 19 nt, Artificial Sequence
  Description of Artificial Sequence: Synthetic oligonucleotide
auguuccgccugguaggag

SEQ ID NO: 812101 - RNA, 19 nt, Artificial Sequence
  Description of Artificial Sequence: Synthetic oligonucleotide
gcagaugcuuccgggccag

SEQ ID NO: 812102 - RNA, 19 nt, Artificial Sequence
  Description of Artificial Sequence: Synthetic oligonucleotide
cgaguaguuuugcccggcg

SEQ ID NO: 812103 - RNA, 19 nt, Artificial Sequence
  Description of Artificial Sequence: Synthetic oligonucleotide
gguaggagcgaagcacaga

SEQ ID NO: 812104 - RNA, 19 nt, Artificial Sequence
  Description of Artificial Sequence: Synthetic oligonucleotide
agccuccgauggaccaggc

SEQ ID NO: 812105 - RNA, 19 nt, Artificial Sequence
  Description of Artificial Sequence: Synthetic oligonucleotide
guccauccgcacucauguc

SEQ ID NO: 812106 - RNA, 19 nt, Artificial Sequence
  Description of Artificial Sequence: Synthetic oligonucleotide
gcgggaagggccaccucgg

SEQ ID NO: 812107 - RNA, 19 nt, Artificial Sequence
  Description of Artificial Sequence: Synthetic oligonucleotide
agucgacuggccagcuccu

SEQ ID NO: 812108 - RNA, 19 nt, Artificial Sequence
  Description of Artificial Sequence: Synthetic oligonucleotide
acggggcugauaauaugua

SEQ ID NO: 812109 - RNA, 19 nt, Artificial Sequence
  Description of Artificial Sequence: Synthetic oligonucleotide
cgaacagagaggaccacaa

SEQ ID NO: 812110 - RNA, 19 nt, Artificial Sequence
  Description of Artificial Sequence: Synthetic oligonucleotide
cguccugccuuccacaaga

SEQ ID NO: 812111 - RNA, 19 nt, Artificial Sequence
  Description of Artificial Sequence: Synthetic oligonucleotide
ggaccguggucagagggga

SEQ ID NO: 812112 - RNA, 19 nt, Artificial Sequence
  Description of Artificial Sequence: Synthetic oligonucleotide
gacgcuggacgcggcccgc

SEQ ID NO: 812113 - RNA, 19 nt, Artificial Sequence
  Description of Artificial Sequence: Synthetic oligonucleotide
uccggcgccccagggugug

SEQ ID NO: 812114 - RNA, 19 nt, Artificial Sequence
  Description of Artificial Sequence: Synthetic oligonucleotide
gccaccucgggaucccuuc

SEQ ID NO: 812115 - RNA, 19 nt, Artificial Sequence
  Description of Artificial Sequence: Synthetic oligonucleotide
cucgggccgcggucccucg

SEQ ID NO: 812116 - RNA, 19 nt, Artificial Sequence
  Description of Artificial Sequence: Synthetic oligonucleotide
gugucugcuguuccccggu

SEQ ID NO: 812117 - RNA, 19 nt, Artificial Sequence
  Description of Artificial Sequence: Synthetic oligonucleotide
ccguccauccgcacucaug

SEQ ID NO: 812118 - RNA, 19 nt, Artificial Sequence
  Description of Artificial Sequence: Synthetic oligonucleotide
ggcuuccaaaauggugaug

SEQ ID NO: 812119 - RNA, 19 nt, Artificial Sequence
  Description of Artificial Sequence: Synthetic oligonucleotide
ugguuccgauguguggcuu

SEQ ID NO: 812120 - RNA, 19 nt, Artificial Sequence
  Description of Artificial Sequence: Synthetic oligonucleotide
agcauccccgcugcccaga

SEQ ID NO: 812121 - RNA, 19 nt, Artificial Sequence
  Description of Artificial Sequence: Synthetic oligonucleotide
aggggaaaucgggcccaug

SEQ ID NO: 812122 - RNA, 19 nt, Artificial Sequence
  Description of Artificial Sequence: Synthetic oligonucleotide
agggcacggggcugauaau

SEQ ID NO: 812123 - RNA, 19 nt, Artificial Sequence
  Description of Artificial Sequence: Synthetic oligonucleotide
cugguuccgauguguggcu

SEQ ID NO: 812124 - RNA, 19 nt, Artificial Sequence
  Description of Artificial Sequence: Synthetic oligonucleotide
ggagcgaagcacagacaga

SEQ ID NO: 812125 - RNA, 19 nt, Artificial Sequence
  Description of Artificial Sequence: Synthetic oligonucleotide
caggacggaauagccagcu

SEQ ID NO: 812126 - RNA, 19 nt, Artificial Sequence
  Description of Artificial Sequence: Synthetic oligonucleotide
gcgaguaguuuugcccggc

SEQ ID NO: 812127 - RNA, 19 nt, Artificial Sequence
  Description of Artificial Sequence: Synthetic oligonucleotide
uuccgccugguaggagcga

SEQ ID NO: 812128 - RNA, 19 nt, Artificial Sequence
  Description of Artificial Sequence: Synthetic oligonucleotide
ggcggagcagggccacacc

SEQ ID NO: 812129 - RNA, 19 nt, Artificial Sequence
  Description of Artificial Sequence: Synthetic oligonucleotide
ccggugcagaggcucuggg

SEQ ID NO: 812130 - RNA, 19 nt, Artificial Sequence
  Description of Artificial Sequence: Synthetic oligonucleotide
cugggcggagcagggccac

SEQ ID NO: 812131 - RNA, 19 nt, Artificial Sequence
  Description of Artificial Sequence: Synthetic oligonucleotide
cgaggauaccggaacugca

SEQ ID NO: 812132 - RNA, 19 nt, Artificial Sequence
  Description of Artificial Sequence: Synthetic oligonucleotide
cguccauccgcacucaugu

SEQ ID NO: 812133 - RNA, 19 nt, Artificial Sequence
  Description of Artificial Sequence: Synthetic oligonucleotide
agcccgcauuucccucaca

SEQ ID NO: 812134 - RNA, 19 nt, Artificial Sequence
  Description of Artificial Sequence: Synthetic oligonucleotide
gucucccgcucccgguaga

SEQ ID NO: 812135 - RNA, 19 nt, Artificial Sequence
  Description of Artificial Sequence: Synthetic oligonucleotide
ccgacacagcugcucugag

SEQ ID NO: 812136 - RNA, 19 nt, Artificial Sequence
  Description of Artificial Sequence: Synthetic oligonucleotide
cuucagggaccgugguggu

SEQ ID NO: 812137 - RNA, 19 nt, Artificial Sequence
  Description of Artificial Sequence: Synthetic oligonucleotide
gggauugguccagcgucca

SEQ ID NO: 812138 - RNA, 19 nt, Artificial Sequence
  Description of Artificial Sequence: Synthetic oligonucleotide
gcgucaaaguugugcagau

SEQ ID NO: 812139 - RNA, 19 nt, Artificial Sequence
  Description of Artificial Sequence: Synthetic oligonucleotide
ggauugguccagcguccaa

SEQ ID NO: 812140 - RNA, 19 nt, Artificial Sequence
  Description of Artificial Sequence: Synthetic oligonucleotide
gcccaggacggaauagcca

SEQ ID NO: 812141 - RNA, 19 nt, Artificial Sequence
  Description of Artificial Sequence: Synthetic oligonucleotide
cagcguccaaugccucgga

SEQ ID NO: 812142 - RNA, 19 nt, Artificial Sequence
  Description of Artificial Sequence: Synthetic oligonucleotide
ggcgccccagggugugugc

SEQ ID NO: 812143 - RNA, 19 nt, Artificial Sequence
  Description of Artificial Sequence: Synthetic oligonucleotide
agggaccgugguggugaug

SEQ ID NO: 812144 - RNA, 19 nt, Artificial Sequence
  Description of Artificial Sequence: Synthetic oligonucleotide
cugcgggaagggccaccuc

SEQ ID NO: 812145 - RNA, 19 nt, Artificial Sequence
  Description of Artificial Sequence: Synthetic oligonucleotide
gcauccccgcugcccagac

SEQ ID NO: 812146 - RNA, 19 nt, Artificial Sequence
  Description of Artificial Sequence: Synthetic oligonucleotide
cguggcagugaagccuccg

SEQ ID NO: 812147 - RNA, 19 nt, Artificial Sequence
  Description of Artificial Sequence: Synthetic oligonucleotide
cucccgcucccgguagauc

SEQ ID NO: 812148 - RNA, 19 nt, Artificial Sequence
  Description of Artificial Sequence: Synthetic oligonucleotide
ccguccugccuuccacaag

SEQ ID NO: 812149 - RNA, 19 nt, Artificial Sequence
  Description of Artificial Sequence: Synthetic oligonucleotide
cccggugcagaggcucugg

SEQ ID NO: 812150 - RNA, 19 nt, Artificial Sequence
  Description of Artificial Sequence: Synthetic oligonucleotide
ccgccugguaggagcgaag

SEQ ID NO: 812151 - RNA, 19 nt, Artificial Sequence
  Description of Artificial Sequence: Synthetic oligonucleotide
cgcgaggauaccggaacug

SEQ ID NO: 812152 - RNA, 19 nt, Artificial Sequence
  Description of Artificial Sequence: Synthetic oligonucleotide
cagagccuggguacagcau

SEQ ID NO: 812153 - RNA, 19 nt, Artificial Sequence
  Description of Artificial Sequence: Synthetic oligonucleotide
gggcggagcagggccacac

SEQ ID NO: 812154 - RNA, 19 nt, Artificial Sequence
  Description of Artificial Sequence: Synthetic oligonucleotide
ggcggacggggcggggacg

SEQ ID NO: 812155 - RNA, 19 nt, Artificial Sequence
  Description of Artificial Sequence: Synthetic oligonucleotide
cuggcggacggggcgggga

SEQ ID NO: 812156 - RNA, 19 nt, Artificial Sequence
  Description of Artificial Sequence: Synthetic oligonucleotide
uggacgcggcccgcuccgu

SEQ ID NO: 812157 - RNA, 19 nt, Artificial Sequence
  Description of Artificial Sequence: Synthetic oligonucleotide
ggccacaccccugcgggaa

SEQ ID NO: 812158 - RNA, 19 nt, Artificial Sequence
  Description of Artificial Sequence: Synthetic oligonucleotide
uccagggcacggggcugau

SEQ ID NO: 812159 - RNA, 19 nt, Artificial Sequence
  Description of Artificial Sequence: Synthetic oligonucleotide
acgcuggacgcggcccgcu

SEQ ID NO: 812160 - RNA, 19 nt, Artificial Sequence
  Description of Artificial Sequence: Synthetic oligonucleotide
auccggcgccccagggugu

SEQ ID NO: 812161 - RNA, 19 nt, Artificial Sequence
  Description of Artificial Sequence: Synthetic oligonucleotide
guguggcgucaaaguugug

SEQ ID NO: 812162 - RNA, 19 nt, Artificial Sequence
  Description of Artificial Sequence: Synthetic oligonucleotide
gcgccccagggugugugcc

SEQ ID NO: 812163 - RNA, 19 nt, Artificial Sequence
  Description of Artificial Sequence: Synthetic oligonucleotide
cccgcugcccagacuacaa

SEQ ID NO: 812164 - RNA, 19 nt, Artificial Sequence
  Description of Artificial Sequence: Synthetic oligonucleotide
ccuagaggugccagggcau

SEQ ID NO: 812165 - RNA, 19 nt, Artificial Sequence
  Description of Artificial Sequence: Synthetic oligonucleotide
gccccagggugugugccac

SEQ ID NO: 812166 - RNA, 19 nt, Artificial Sequence
  Description of Artificial Sequence: Synthetic oligonucleotide
cgucucccgcucccgguag

SEQ ID NO: 812167 - RNA, 19 nt, Artificial Sequence
  Description of Artificial Sequence: Synthetic oligonucleotide
cucacggcucugagccccu

SEQ ID NO: 812168 - RNA, 19 nt, Artificial Sequence
  Description of Artificial Sequence: Synthetic oligonucleotide
ccucggaggcaggccacac

SEQ ID NO: 812169 - RNA, 19 nt, Artificial Sequence
  Description of Artificial Sequence: Synthetic oligonucleotide
cugcugggcuccucccagu

SEQ ID NO: 812170 - RNA, 19 nt, Artificial Sequence
  Description of Artificial Sequence: Synthetic oligonucleotide
ggaagucgacuggccagcu

SEQ ID NO: 812171 - RNA, 19 nt, Artificial Sequence
  Description of Artificial Sequence: Synthetic oligonucleotide
gggccacaccccugcggga

SEQ ID NO: 812172 - RNA, 19 nt, Artificial Sequence
  Description of Artificial Sequence: Synthetic oligonucleotide
ccaagggcaccaggucguc

SEQ ID NO: 812173 - RNA, 19 nt, Artificial Sequence
  Description of Artificial Sequence: Synthetic oligonucleotide
gcccauguuccgccuggua

SEQ ID NO: 812174 - RNA, 19 nt, Artificial Sequence
  Description of Artificial Sequence: Synthetic oligonucleotide
ccgcucccgguagaucuug

SEQ ID NO: 812175 - RNA, 19 nt, Artificial Sequence
  Description of Artificial Sequence: Synthetic oligonucleotide
ggcgcccauuacacucuuc

SEQ ID NO: 812176 - RNA, 19 nt, Artificial Sequence
  Description of Artificial Sequence: Synthetic oligonucleotide
cagaugcuuccgggccaga

SEQ ID NO: 812177 - RNA, 19 nt, Artificial Sequence
  Description of Artificial Sequence: Synthetic oligonucleotide
cauccccgcugcccagacu

SEQ ID NO: 812178 - RNA, 19 nt, Artificial Sequence
  Description of Artificial Sequence: Synthetic oligonucleotide
cggggcugauaauauguau

SEQ ID NO: 812179 - RNA, 19 nt, Artificial Sequence
  Description of Artificial Sequence: Synthetic oligonucleotide
gccuuccacaagaguccaa

SEQ ID NO: 812180 - RNA, 19 nt, Artificial Sequence
  Description of Artificial Sequence: Synthetic oligonucleotide
ccggcgcccauuacacucu

SEQ ID NO: 812181 - RNA, 19 nt, Artificial Sequence
  Description of Artificial Sequence: Synthetic oligonucleotide
cccgccgguccacaaacau

SEQ ID NO: 812182 - RNA, 19 nt, Artificial Sequence
  Description of Artificial Sequence: Synthetic oligonucleotide
cagggaccgugguggugau

SEQ ID NO: 812183 - RNA, 19 nt, Artificial Sequence
  Description of Artificial Sequence: Synthetic oligonucleotide
ccgauggaccaggcguaga

SEQ ID NO: 812184 - RNA, 19 nt, Artificial Sequence
  Description of Artificial Sequence: Synthetic oligonucleotide
gcggucccuagaggugcca

SEQ ID NO: 812185 - RNA, 19 nt, Artificial Sequence
  Description of Artificial Sequence: Synthetic oligonucleotide
ccccgccgguccacaaaca

SEQ ID NO: 812186 - RNA, 19 nt, Artificial Sequence
  Description of Artificial Sequence: Synthetic oligonucleotide
ccacguggaugaggggaaa

SEQ ID NO: 812187 - RNA, 19 nt, Artificial Sequence
  Description of Artificial Sequence: Synthetic oligonucleotide
caggggaaaucgggcccau

SEQ ID NO: 812188 - RNA, 19 nt, Artificial Sequence
  Description of Artificial Sequence: Synthetic oligonucleotide
cgcuggacgcggcccgcuc

SEQ ID NO: 812189 - RNA, 19 nt, Artificial Sequence
  Description of Artificial Sequence: Synthetic oligonucleotide
gcccggcgcccauuacacu

SEQ ID NO: 812190 - RNA, 19 nt, Artificial Sequence
  Description of Artificial Sequence: Synthetic oligonucleotide
cggcgccccagggugugug

SEQ ID NO: 812191 - RNA, 19 nt, Artificial Sequence
  Description of Artificial Sequence: Synthetic oligonucleotide
cgcggucccucggccucag

SEQ ID NO: 812192 - RNA, 19 nt, Artificial Sequence
  Description of Artificial Sequence: Synthetic oligonucleotide
ggcucgggccgcggucccu

SEQ ID NO: 812193 - RNA, 19 nt, Artificial Sequence
  Description of Artificial Sequence: Synthetic oligonucleotide
cggcgcccauuacacucuu

SEQ ID NO: 812194 - RNA, 19 nt, Artificial Sequence
  Description of Artificial Sequence: Synthetic oligonucleotide
ccggcgccccagggugugu

SEQ ID NO: 812195 - RNA, 19 nt, Artificial Sequence
  Description of Artificial Sequence: Synthetic oligonucleotide
aacaauuagguauaauggc

SEQ ID NO: 812196 - RNA, 19 nt, Artificial Sequence
  Description of Artificial Sequence: Synthetic oligonucleotide
uuaguuugcacuuaggacg

SEQ ID NO: 812197 - RNA, 19 nt, Artificial Sequence
  Description of Artificial Sequence: Synthetic oligonucleotide
uuuguauugaauaaaaggu

SEQ ID NO: 812198 - RNA, 19 nt, Artificial Sequence
  Description of Artificial Sequence: Synthetic oligonucleotide
aaguguuugaacaggaugc

SEQ ID NO: 812199 - RNA, 19 nt, Artificial Sequence
  Description of Artificial Sequence: Synthetic oligonucleotide
aguaauaugagauuuugca

SEQ ID NO: 812200 - RNA, 19 nt, Artificial Sequence
  Description of Artificial Sequence: Synthetic oligonucleotide
auaugaaugagcaucauac

SEQ ID NO: 812201 - RNA, 19 nt, Artificial Sequence
  Description of Artificial Sequence: Synthetic oligonucleotide
uaaaagugcagcaauacac

SEQ ID NO: 812202 - RNA, 19 nt, Artificial Sequence
  Description of Artificial Sequence: Synthetic oligonucleotide
uuaaggagaauucuaaaac

SEQ ID NO: 812203 - RNA, 19 nt, Artificial Sequence
  Description of Artificial Sequence: Synthetic oligonucleotide
agcaucaaaacgaagaggc

SEQ ID NO: 812204 - RNA, 19 nt, Artificial Sequence
  Description of Artificial Sequence: Synthetic oligonucleotide
uccaauucaaaacuguaag

SEQ ID NO: 812205 - RNA, 19 nt, Artificial Sequence
  Description of Artificial Sequence: Synthetic oligonucleotide
auaguugcugguuuguugc

SEQ ID NO: 812206 - RNA, 19 nt, Artificial Sequence
  Description of Artificial Sequence: Synthetic oligonucleotide
aauaugagauuuugcagag

SEQ ID NO: 812207 - RNA, 19 nt, Artificial Sequence
  Description of Artificial Sequence: Synthetic oligonucleotide
aaagcucuugcuccaaccc

SEQ ID NO: 812208 - RNA, 19 nt, Artificial Sequence
  Description of Artificial Sequence: Synthetic oligonucleotide
aaugacuuuacacaguaau

SEQ ID NO: 812209 - RNA, 19 nt, Artificial Sequence
  Description of Artificial Sequence: Synthetic oligonucleotide
auaauggaggcucagauca

SEQ ID NO: 812210 - RNA, 19 nt, Artificial Sequence
  Description of Artificial Sequence: Synthetic oligonucleotide
aauaggguaguugagacug

SEQ ID NO: 812211 - RNA, 19 nt, Artificial Sequence
  Description of Artificial Sequence: Synthetic oligonucleotide
uuuaucuacgaaauggugu

SEQ ID NO: 812212 - RNA, 19 nt, Artificial Sequence
  Description of Artificial Sequence: Synthetic oligonucleotide
auugaauaaaaggugcugc

SEQ ID NO: 812213 - RNA, 19 nt, Artificial Sequence
  Description of Artificial Sequence: Synthetic oligonucleotide
accauuuauaucuaaagcu

SEQ ID NO: 812214 - RNA, 19 nt, Artificial Sequence
  Description of Artificial Sequence: Synthetic oligonucleotide
auuaccuuaacagaaguuc

SEQ ID NO: 812215 - RNA, 19 nt, Artificial Sequence
  Description of Artificial Sequence: Synthetic oligonucleotide
aaugaaaaucauuugguuu

SEQ ID NO: 812216 - RNA, 19 nt, Artificial Sequence
  Description of Artificial Sequence: Synthetic oligonucleotide
uuguauugaauaaaaggug

SEQ ID NO: 812217 - RNA, 19 nt, Artificial Sequence
  Description of Artificial Sequence: Synthetic oligonucleotide
ugauuauucaaaacagcag

SEQ ID NO: 812218 - RNA, 19 nt, Artificial Sequence
  Description of Artificial Sequence: Synthetic oligonucleotide
aagaaacuacacuggaagg

SEQ ID NO: 812219 - RNA, 19 nt, Artificial Sequence
  Description of Artificial Sequence: Synthetic oligonucleotide
aaacguacugguuacuaag

SEQ ID NO: 812220 - RNA, 19 nt, Artificial Sequence
  Description of Artificial Sequence: Synthetic oligonucleotide
gaagugaguggucaaauag

SEQ ID NO: 812221 - RNA, 19 nt, Artificial Sequence
  Description of Artificial Sequence: Synthetic oligonucleotide
ugcuaauuuauauaugucu

SEQ ID NO: 812222 - RNA, 19 nt, Artificial Sequence
  Description of Artificial Sequence: Synthetic oligonucleotide
accagagaaauauugaucu

SEQ ID NO: 812223 - RNA, 19 nt, Artificial Sequence
  Description of Artificial Sequence: Synthetic oligonucleotide
uaaauuaccuuaacagaag

SEQ ID NO: 812224 - RNA, 19 nt, Artificial Sequence
  Description of Artificial Sequence: Synthetic oligonucleotide
cauggcuugcuuuagaagc

SEQ ID NO: 812225 - RNA, 19 nt, Artificial Sequence
  Description of Artificial Sequence: Synthetic oligonucleotide
uuaucuacgaaauggugug

SEQ ID NO: 812226 - RNA, 19 nt, Artificial Sequence
  Description of Artificial Sequence: Synthetic oligonucleotide
cuuuaacucaaaauuuggg

SEQ ID NO: 812227 - RNA, 19 nt, Artificial Sequence
  Description of Artificial Sequence: Synthetic oligonucleotide
cacuuaauagaccuuagcc

SEQ ID NO: 812228 - RNA, 19 nt, Artificial Sequence
  Description of Artificial Sequence: Synthetic oligonucleotide
uuaauucuuccacauaaga

SEQ ID NO: 812229 - RNA, 19 nt, Artificial Sequence
  Description of Artificial Sequence: Synthetic oligonucleotide
ugcaaaucaggcuaguuca

SEQ ID NO: 812230 - RNA, 19 nt, Artificial Sequence
  Description of Artificial Sequence: Synthetic oligonucleotide
aacacaucaauucauggua

SEQ ID NO: 812231 - RNA, 19 nt, Artificial Sequence
  Description of Artificial Sequence: Synthetic oligonucleotide
uuaucaaacguacugguua

SEQ ID NO: 812232 - RNA, 19 nt, Artificial Sequence
  Description of Artificial Sequence: Synthetic oligonucleotide
ugcacuuaggacgagagag

SEQ ID NO: 812233 - RNA, 19 nt, Artificial Sequence
  Description of Artificial Sequence: Synthetic oligonucleotide
guugcuugcugucuuaucg

SEQ ID NO: 812234 - RNA, 19 nt, Artificial Sequence
  Description of Artificial Sequence: Synthetic oligonucleotide
cuuuuagugaacacuacac

SEQ ID NO: 812235 - RNA, 19 nt, Artificial Sequence
  Description of Artificial Sequence: Synthetic oligonucleotide
aaauuaccuuaacagaagu

SEQ ID NO: 812236 - RNA, 19 nt, Artificial Sequence
  Description of Artificial Sequence: Synthetic oligonucleotide
caauuagguauaauggcgg

SEQ ID NO: 812237 - RNA, 19 nt, Artificial Sequence
  Description of Artificial Sequence: Synthetic oligonucleotide
uguuuguauugaauaaaag

SEQ ID NO: 812238 - RNA, 19 nt, Artificial Sequence
  Description of Artificial Sequence: Synthetic oligonucleotide
uaauaacugggccagacaa

SEQ ID NO: 812239 - RNA, 19 nt, Artificial Sequence
  Description of Artificial Sequence: Synthetic oligonucleotide
gaacauucuaacuggagac

SEQ ID NO: 812240 - RNA, 19 nt, Artificial Sequence
  Description of Artificial Sequence: Synthetic oligonucleotide
uuuaugugcacaagaguug

SEQ ID NO: 812241 - RNA, 19 nt, Artificial Sequence
  Description of Artificial Sequence: Synthetic oligonucleotide
aauguuauuuaaagguuag

SEQ ID NO: 812242 - RNA, 19 nt, Artificial Sequence
  Description of Artificial Sequence: Synthetic oligonucleotide
acaauuagguauaauggcg

SEQ ID NO: 812243 - RNA, 19 nt, Artificial Sequence
  Description of Artificial Sequence: Synthetic oligonucleotide
auucuaauuaaccuaaguu

SEQ ID NO: 812244 - RNA, 19 nt, Artificial Sequence
  Description of Artificial Sequence: Synthetic oligonucleotide
ugcaaaucugaaaagguaa

SEQ ID NO: 812245 - RNA, 19 nt, Artificial Sequence
  Description of Artificial Sequence: Synthetic oligonucleotide
cuauguguuguuaucagug

SEQ ID NO: 812246 - RNA, 19 nt, Artificial Sequence
  Description of Artificial Sequence: Synthetic oligonucleotide
aaggguuucaccaaaauuu

SEQ ID NO: 812247 - RNA, 19 nt, Artificial Sequence
  Description of Artificial Sequence: Synthetic oligonucleotide
uuuggcaacugcaaaguga

SEQ ID NO: 812248 - RNA, 19 nt, Artificial Sequence
  Description of Artificial Sequence: Synthetic oligonucleotide
ugucuuaucgcuugguggc

SEQ ID NO: 812249 - RNA, 19 nt, Artificial Sequence
  Description of Artificial Sequence: Synthetic oligonucleotide
cagacaauuugccaaaagc

SEQ ID NO: 812250 - RNA, 19 nt, Artificial Sequence
  Description of Artificial Sequence: Synthetic oligonucleotide
ugugcaaaucugaaaaggu

SEQ ID NO: 812251 - RNA, 19 nt, Artificial Sequence
  Description of Artificial Sequence: Synthetic oligonucleotide
agaaacuacacuggaaggg

SEQ ID NO: 812252 - RNA, 19 nt, Artificial Sequence
  Description of Artificial Sequence: Synthetic oligonucleotide
augaaugagcaucauacca

SEQ ID NO: 812253 - RNA, 19 nt, Artificial Sequence
  Description of Artificial Sequence: Synthetic oligonucleotide
uuuugcagagcuaaagauc

SEQ ID NO: 812254 - RNA, 19 nt, Artificial Sequence
  Description of Artificial Sequence: Synthetic oligonucleotide
gaaucaagcagaugcacac

SEQ ID NO: 812255 - RNA, 19 nt, Artificial Sequence
  Description of Artificial Sequence: Synthetic oligonucleotide
agugcagcaauacacucag

SEQ ID NO: 812256 - RNA, 19 nt, Artificial Sequence
  Description of Artificial Sequence: Synthetic oligonucleotide
ugaaugagcaucauaccaa

SEQ ID NO: 812257 - RNA, 19 nt, Artificial Sequence
  Description of Artificial Sequence: Synthetic oligonucleotide
aaggugcugcacuuaauag

SEQ ID NO: 812258 - RNA, 19 nt, Artificial Sequence
  Description of Artificial Sequence: Synthetic oligonucleotide
ugucaguugagugggaagg

SEQ ID NO: 812259 - RNA, 19 nt, Artificial Sequence
  Description of Artificial Sequence: Synthetic oligonucleotide
aauaaaaggugcugcacuu

SEQ ID NO: 812260 - RNA, 19 nt, Artificial Sequence
  Description of Artificial Sequence: Synthetic oligonucleotide
aaagugucuugauccacag

SEQ ID NO: 812261 - RNA, 19 nt, Artificial Sequence
  Description of Artificial Sequence: Synthetic oligonucleotide
agaagauuuggacuuuaag

SEQ ID NO: 812262 - RNA, 19 nt, Artificial Sequence
  Description of Artificial Sequence: Synthetic oligonucleotide
aacauggaaaauaggguag

SEQ ID NO: 812263 - RNA, 19 nt, Artificial Sequence
  Description of Artificial Sequence: Synthetic oligonucleotide
uucauguugcugcaaaacu

SEQ ID NO: 812264 - RNA, 19 nt, Artificial Sequence
  Description of Artificial Sequence: Synthetic oligonucleotide
ucuuguaacacuucugaau

SEQ ID NO: 812265 - RNA, 19 nt, Artificial Sequence
  Description of Artificial Sequence: Synthetic oligonucleotide
aagguuaguuugcacuuag

SEQ ID NO: 812266 - RNA, 19 nt, Artificial Sequence
  Description of Artificial Sequence: Synthetic oligonucleotide
ugaguggucaaauaggguu

SEQ ID NO: 812267 - RNA, 19 nt, Artificial Sequence
  Description of Artificial Sequence: Synthetic oligonucleotide
guuaguuugcacuuaggac

SEQ ID NO: 812268 - RNA, 19 nt, Artificial Sequence
  Description of Artificial Sequence: Synthetic oligonucleotide
ucaaugugugcaaaucuga

SEQ ID NO: 812269 - RNA, 19 nt, Artificial Sequence
  Description of Artificial Sequence: Synthetic oligonucleotide
ugaaucaagcagaugcaca

SEQ ID NO: 812270 - RNA, 19 nt, Artificial Sequence
  Description of Artificial Sequence: Synthetic oligonucleotide
cuuccaauaugaaugagca

SEQ ID NO: 812271 - RNA, 19 nt, Artificial Sequence
  Description of Artificial Sequence: Synthetic oligonucleotide
aacuuuguuauuccuacuu

SEQ ID NO: 812272 - RNA, 19 nt, Artificial Sequence
  Description of Artificial Sequence: Synthetic oligonucleotide
uguuauuccuacuuuuagu

SEQ ID NO: 812273 - RNA, 19 nt, Artificial Sequence
  Description of Artificial Sequence: Synthetic oligonucleotide
agucuuguaacacuucuga

SEQ ID NO: 812274 - RNA, 19 nt, Artificial Sequence
  Description of Artificial Sequence: Synthetic oligonucleotide
aauuagguauaauggcgga

SEQ ID NO: 812275 - RNA, 19 nt, Artificial Sequence
  Description of Artificial Sequence: Synthetic oligonucleotide
uuguuaucagugaaacacc

SEQ ID NO: 812276 - RNA, 19 nt, Artificial Sequence
  Description of Artificial Sequence: Synthetic oligonucleotide
ucucaaugugugcaaaucu

SEQ ID NO: 812277 - RNA, 19 nt, Artificial Sequence
  Description of Artificial Sequence: Synthetic oligonucleotide
accacauuaucaaacguac

SEQ ID NO: 812278 - RNA, 19 nt, Artificial Sequence
  Description of Artificial Sequence: Synthetic oligonucleotide
uaagacuaaauuaccuuaa

SEQ ID NO: 812279 - RNA, 19 nt, Artificial Sequence
  Description of Artificial Sequence: Synthetic oligonucleotide
aaagcaguaucaguggaca

SEQ ID NO: 812280 - RNA, 19 nt, Artificial Sequence
  Description of Artificial Sequence: Synthetic oligonucleotide
aaaggugcugcacuuaaua

SEQ ID NO: 812281 - RNA, 19 nt, Artificial Sequence
  Description of Artificial Sequence: Synthetic oligonucleotide
uguaaggucacagcaaacu

SEQ ID NO: 812282 - RNA, 19 nt, Artificial Sequence
  Description of Artificial Sequence: Synthetic oligonucleotide
gugaacacuacacaguuuc

SEQ ID NO: 812283 - RNA, 19 nt, Artificial Sequence
  Description of Artificial Sequence: Synthetic oligonucleotide
cugucuuaucgcuuggugg

SEQ ID NO: 812284 - RNA, 19 nt, Artificial Sequence
  Description of Artificial Sequence: Synthetic oligonucleotide
agacuaaauuaccuuaaca

SEQ ID NO: 812285 - RNA, 19 nt, Artificial Sequence
  Description of Artificial Sequence: Synthetic oligonucleotide
acuuuuagugaacacuaca

SEQ ID NO: 812286 - RNA, 19 nt, Artificial Sequence
  Description of Artificial Sequence: Synthetic oligonucleotide
aaaauuuagacaaguguuu

SEQ ID NO: 812287 - RNA, 19 nt, Artificial Sequence
  Description of Artificial Sequence: Synthetic oligonucleotide
aagcacaccugcuaugugu

SEQ ID NO: 812288 - RNA, 19 nt, Artificial Sequence
  Description of Artificial Sequence: Synthetic oligonucleotide
uuaauagaccuuagccuug

SEQ ID NO: 812289 - RNA, 19 nt, Artificial Sequence
  Description of Artificial Sequence: Synthetic oligonucleotide
agugaguggucaaauaggg

SEQ ID NO: 812290 - RNA, 19 nt, Artificial Sequence
  Description of Artificial Sequence: Synthetic oligonucleotide
uauaauggcggaagcauua

SEQ ID NO: 812291 - RNA, 19 nt, Artificial Sequence
  Description of Artificial Sequence: Synthetic oligonucleotide
uuaauaacugggccagaca

SEQ ID NO: 812292 - RNA, 19 nt, Artificial Sequence
  Description of Artificial Sequence: Synthetic oligonucleotide
agcaucauaccaaaguguc

SEQ ID NO: 812293 - RNA, 19 nt, Artificial Sequence
  Description of Artificial Sequence: Synthetic oligonucleotide
ugggaaucaucacaguaga

SEQ ID NO: 812294 - RNA, 19 nt, Artificial Sequence
  Description of Artificial Sequence: Synthetic oligonucleotide
augguagugaaguacaguu

SEQ ID NO: 812295 - RNA, 19 nt, Artificial Sequence
  Description of Artificial Sequence: Synthetic oligonucleotide
aucaugcauaugcauuuac

SEQ ID NO: 812296 - RNA, 19 nt, Artificial Sequence
  Description of Artificial Sequence: Synthetic oligonucleotide
cuuuaucuacgaaauggug

SEQ ID NO: 812297 - RNA, 19 nt, Artificial Sequence
  Description of Artificial Sequence: Synthetic oligonucleotide
agacaauuugccaaaagca

SEQ ID NO: 812298 - RNA, 19 nt, Artificial Sequence
  Description of Artificial Sequence: Synthetic oligonucleotide
uacgaaauggugugauucc

SEQ ID NO: 812299 - RNA, 19 nt, Artificial Sequence
  Description of Artificial Sequence: Synthetic oligonucleotide
uguguuguuaucagugaaa

SEQ ID NO: 812300 - RNA, 19 nt, Artificial Sequence
  Description of Artificial Sequence: Synthetic oligonucleotide
uuauuccuacuuuuaguga

SEQ ID NO: 812301 - RNA, 19 nt, Artificial Sequence
  Description of Artificial Sequence: Synthetic oligonucleotide
aacgaagaggcaagagagc

SEQ ID NO: 812302 - RNA, 19 nt, Artificial Sequence
  Description of Artificial Sequence: Synthetic oligonucleotide
cugaaaagguaacugucag

SEQ ID NO: 812303 - RNA, 19 nt, Artificial Sequence
  Description of Artificial Sequence: Synthetic oligonucleotide
aguaucaguggacagccga

SEQ ID NO: 812304 - RNA, 19 nt, Artificial Sequence
  Description of Artificial Sequence: Synthetic oligonucleotide
acuucaacucaauuuuaug

SEQ ID NO: 812305 - RNA, 19 nt, Artificial Sequence
  Description of Artificial Sequence: Synthetic oligonucleotide
gaaaauaggguaguugaga

SEQ ID NO: 812306 - RNA, 19 nt, Artificial Sequence
  Description of Artificial Sequence: Synthetic oligonucleotide
uaucaaacguacugguuac

SEQ ID NO: 812307 - RNA, 19 nt, Artificial Sequence
  Description of Artificial Sequence: Synthetic oligonucleotide
agugggaucggaaugagcu

SEQ ID NO: 812308 - RNA, 19 nt, Artificial Sequence
  Description of Artificial Sequence: Synthetic oligonucleotide
agcugauucacaaagcucu

SEQ ID NO: 812309 - RNA, 19 nt, Artificial Sequence
  Description of Artificial Sequence: Synthetic oligonucleotide
aguugagugggaagggucc

SEQ ID NO: 812310 - RNA, 19 nt, Artificial Sequence
  Description of Artificial Sequence: Synthetic oligonucleotide
caccuuaaagcacaccugc

SEQ ID NO: 812311 - RNA, 19 nt, Artificial Sequence
  Description of Artificial Sequence: Synthetic oligonucleotide
gugaccuuaauucauucca

SEQ ID NO: 812312 - RNA, 19 nt, Artificial Sequence
  Description of Artificial Sequence: Synthetic oligonucleotide
acuauggaacauucuaacu

SEQ ID NO: 812313 - RNA, 19 nt, Artificial Sequence
  Description of Artificial Sequence: Synthetic oligonucleotide
uaaccuaaguuucuuguuu

SEQ ID NO: 812314 - RNA, 19 nt, Artificial Sequence
  Description of Artificial Sequence: Synthetic oligonucleotide
cacuauggaacauucuaac

SEQ ID NO: 812315 - RNA, 19 nt, Artificial Sequence
  Description of Artificial Sequence: Synthetic oligonucleotide
accuuaauucauuccaacu

SEQ ID NO: 812316 - RNA, 19 nt, Artificial Sequence
  Description of Artificial Sequence: Synthetic oligonucleotide
uuaugugcacaagaguuga

SEQ ID NO: 812317 - RNA, 19 nt, Artificial Sequence
  Description of Artificial Sequence: Synthetic oligonucleotide
uguuaaggagaauucuaaa

SEQ ID NO: 812318 - RNA, 19 nt, Artificial Sequence
  Description of Artificial Sequence: Synthetic oligonucleotide
aacuacacuggaaggggac

SEQ ID NO: 812319 - RNA, 19 nt, Artificial Sequence
  Description of Artificial Sequence: Synthetic oligonucleotide
uguugccaccacauuauca

SEQ ID NO: 812320 - RNA, 19 nt, Artificial Sequence
  Description of Artificial Sequence: Synthetic oligonucleotide
uguaacacuucugaauagu

SEQ ID NO: 812321 - RNA, 19 nt, Artificial Sequence
  Description of Artificial Sequence: Synthetic oligonucleotide
ugaugcuaauguuauuuaa

SEQ ID NO: 812322 - RNA, 19 nt, Artificial Sequence
  Description of Artificial Sequence: Synthetic oligonucleotide
guaaggucacagcaaacug

SEQ ID NO: 812323 - RNA, 19 nt, Artificial Sequence
  Description of Artificial Sequence: Synthetic oligonucleotide
auagaccuuagccuugugu

SEQ ID NO: 812324 - RNA, 19 nt, Artificial Sequence
  Description of Artificial Sequence: Synthetic oligonucleotide
uagguauaauggcggaagc

SEQ ID NO: 812325 - RNA, 19 nt, Artificial Sequence
  Description of Artificial Sequence: Synthetic oligonucleotide
acaagucugcacuacuuga

SEQ ID NO: 812326 - RNA, 19 nt, Artificial Sequence
  Description of Artificial Sequence: Synthetic oligonucleotide
aaauggugugauuccaauu

SEQ ID NO: 812327 - RNA, 19 nt, Artificial Sequence
  Description of Artificial Sequence: Synthetic oligonucleotide
gaauaaaaggugcugcacu

SEQ ID NO: 812328 - RNA, 19 nt, Artificial Sequence
  Description of Artificial Sequence: Synthetic oligonucleotide
aaccuaaguuucuuguuuu

SEQ ID NO: 812329 - RNA, 19 nt, Artificial Sequence
  Description of Artificial Sequence: Synthetic oligonucleotide
cuacgaaauggugugauuc

SEQ ID NO: 812330 - RNA, 19 nt, Artificial Sequence
  Description of Artificial Sequence: Synthetic oligonucleotide
aagcaguaucaguggacag

SEQ ID NO: 812331 - RNA, 19 nt, Artificial Sequence
  Description of Artificial Sequence: Synthetic oligonucleotide
agacaaguguuugaacagg

SEQ ID NO: 812332 - RNA, 19 nt, Artificial Sequence
  Description of Artificial Sequence: Synthetic oligonucleotide
gaaguucaagucuguaaca

SEQ ID NO: 812333 - RNA, 19 nt, Artificial Sequence
  Description of Artificial Sequence: Synthetic oligonucleotide
ucuuccacauaagaauaug

SEQ ID NO: 812334 - RNA, 19 nt, Artificial Sequence
  Description of Artificial Sequence: Synthetic oligonucleotide
cugcaaaucaggcuaguuc

SEQ ID NO: 812335 - RNA, 19 nt, Artificial Sequence
  Description of Artificial Sequence: Synthetic oligonucleotide
ccaauucaaaacuguaagg

SEQ ID NO: 812336 - RNA, 19 nt, Artificial Sequence
  Description of Artificial Sequence: Synthetic oligonucleotide
ccauuuauaucuaaagcuc

SEQ ID NO: 812337 - RNA, 19 nt, Artificial Sequence
  Description of Artificial Sequence: Synthetic oligonucleotide
cagagcuaaagaucacugc

SEQ ID NO: 812338 - RNA, 19 nt, Artificial Sequence
  Description of Artificial Sequence: Synthetic oligonucleotide
ucaaauaggguuugcuguu

SEQ ID NO: 812339 - RNA, 19 nt, Artificial Sequence
  Description of Artificial Sequence: Synthetic oligonucleotide
uuagccuuguguugcuuca

SEQ ID NO: 812340 - RNA, 19 nt, Artificial Sequence
  Description of Artificial Sequence: Synthetic oligonucleotide
aggugcugcacuuaauaga

SEQ ID NO: 812341 - RNA, 19 nt, Artificial Sequence
  Description of Artificial Sequence: Synthetic oligonucleotide
caaagcaguaucaguggac

SEQ ID NO: 812342 - RNA, 19 nt, Artificial Sequence
  Description of Artificial Sequence: Synthetic oligonucleotide
ugaccuuaauucauuccaa

SEQ ID NO: 812343 - RNA, 19 nt, Artificial Sequence
  Description of Artificial Sequence: Synthetic oligonucleotide
ugggaucggaaugagcucc

SEQ ID NO: 812344 - RNA, 19 nt, Artificial Sequence
  Description of Artificial Sequence: Synthetic oligonucleotide
ccgauugccaccacuaugg

SEQ ID NO: 812345 - RNA, 19 nt, Artificial Sequence
  Description of Artificial Sequence: Synthetic oligonucleotide
acauucuaacuggagacug

SEQ ID NO: 812346 - RNA, 19 nt, Artificial Sequence
  Description of Artificial Sequence: Synthetic oligonucleotide
uggacuuuaaggguuucac

SEQ ID NO: 812347 - RNA, 19 nt, Artificial Sequence
  Description of Artificial Sequence: Synthetic oligonucleotide
uacuuuuagugaacacuac

SEQ ID NO: 812348 - RNA, 19 nt, Artificial Sequence
  Description of Artificial Sequence: Synthetic oligonucleotide
acaggaugcaguuaccaua

SEQ ID NO: 812349 - RNA, 19 nt, Artificial Sequence
  Description of Artificial Sequence: Synthetic oligonucleotide
ggucaaauaggguuugcug

SEQ ID NO: 812350 - RNA, 19 nt, Artificial Sequence
  Description of Artificial Sequence: Synthetic oligonucleotide
ugaggcuaggaucuucauc

SEQ ID NO: 812351 - RNA, 19 nt, Artificial Sequence
  Description of Artificial Sequence: Synthetic oligonucleotide
gguuaguuugcacuuagga

SEQ ID NO: 812352 - RNA, 19 nt, Artificial Sequence
  Description of Artificial Sequence: Synthetic oligonucleotide
gucaaauaggguuugcugu

SEQ ID NO: 812353 - RNA, 19 nt, Artificial Sequence
  Description of Artificial Sequence: Synthetic oligonucleotide
aucaguggacagccgauug

SEQ ID NO: 812354 - RNA, 19 nt, Artificial Sequence
  Description of Artificial Sequence: Synthetic oligonucleotide
aacuucaacucaauuuuau

SEQ ID NO: 812355 - RNA, 19 nt, Artificial Sequence
  Description of Artificial Sequence: Synthetic oligonucleotide
acaguagaggcccaauuua

SEQ ID NO: 812356 - RNA, 19 nt, Artificial Sequence
  Description of Artificial Sequence: Synthetic oligonucleotide
auggcggaagcauuaauua

SEQ ID NO: 812357 - RNA, 19 nt, Artificial Sequence
  Description of Artificial Sequence: Synthetic oligonucleotide
uguguugcuucagggaaug

SEQ ID NO: 812358 - RNA, 19 nt, Artificial Sequence
  Description of Artificial Sequence: Synthetic oligonucleotide
cuaugauuucaaaugcuaa

SEQ ID NO: 812359 - RNA, 19 nt, Artificial Sequence
  Description of Artificial Sequence: Synthetic oligonucleotide
agaccuuagccuuguguug

SEQ ID NO: 812360 - RNA, 19 nt, Artificial Sequence
  Description of Artificial Sequence: Synthetic oligonucleotide
acaucaauucaugguagug

SEQ ID NO: 812361 - RNA, 19 nt, Artificial Sequence
  Description of Artificial Sequence: Synthetic oligonucleotide
caauuuaaucucaaugugu

SEQ ID NO: 812362 - RNA, 19 nt, Artificial Sequence
  Description of Artificial Sequence: Synthetic oligonucleotide
gaccuuagccuuguguugc

SEQ ID NO: 812363 - RNA, 19 nt, Artificial Sequence
  Description of Artificial Sequence: Synthetic oligonucleotide
cuuguguugcuucagggaa

SEQ ID NO: 812364 - RNA, 19 nt, Artificial Sequence
  Description of Artificial Sequence: Synthetic oligonucleotide
accuuaacagaaguucaag

SEQ ID NO: 812365 - RNA, 19 nt, Artificial Sequence
  Description of Artificial Sequence: Synthetic oligonucleotide
aauuaccuuaacagaaguu

SEQ ID NO: 812366 - RNA, 19 nt, Artificial Sequence
  Description of Artificial Sequence: Synthetic oligonucleotide
ugaauaguugcugguuugu

SEQ ID NO: 812367 - RNA, 19 nt, Artificial Sequence
  Description of Artificial Sequence: Synthetic oligonucleotide
gacaauaauggaggcucag

SEQ ID NO: 812368 - RNA, 19 nt, Artificial Sequence
  Description of Artificial Sequence: Synthetic oligonucleotide
ucauaccaaagugucuuga

SEQ ID NO: 812369 - RNA, 19 nt, Artificial Sequence
  Description of Artificial Sequence: Synthetic oligonucleotide
ccaauuuaaucucaaugug

SEQ ID NO: 812370 - RNA, 19 nt, Artificial Sequence
  Description of Artificial Sequence: Synthetic oligonucleotide
ugcagagcuaaagaucacu

SEQ ID NO: 812371 - RNA, 19 nt, Artificial Sequence
  Description of Artificial Sequence: Synthetic oligonucleotide
uaauuaccauuuauaucua

SEQ ID NO: 812372 - RNA, 19 nt, Artificial Sequence
  Description of Artificial Sequence: Synthetic oligonucleotide
auguguuguuaucagugaa

SEQ ID NO: 812373 - RNA, 19 nt, Artificial Sequence
  Description of Artificial Sequence: Synthetic oligonucleotide
acacaucaauucaugguag

SEQ ID NO: 812374 - RNA, 19 nt, Artificial Sequence
  Description of Artificial Sequence: Synthetic oligonucleotide
aaggggacaaucacacugu

SEQ ID NO: 812375 - RNA, 19 nt, Artificial Sequence
  Description of Artificial Sequence: Synthetic oligonucleotide
auucuaacuggagacugca

SEQ ID NO: 812376 - RNA, 19 nt, Artificial Sequence
  Description of Artificial Sequence: Synthetic oligonucleotide
gacauggcuugcuuuagaa

SEQ ID NO: 812377 - RNA, 19 nt, Artificial Sequence
  Description of Artificial Sequence: Synthetic oligonucleotide
auaggguuugcuguucuca

SEQ ID NO: 812378 - RNA, 19 nt, Artificial Sequence
  Description of Artificial Sequence: Synthetic oligonucleotide
uuaggaaaucaugcauaug

SEQ ID NO: 812379 - RNA, 19 nt, Artificial Sequence
  Description of Artificial Sequence: Synthetic oligonucleotide
uugugaccuuaauucauuc

SEQ ID NO: 812380 - RNA, 19 nt, Artificial Sequence
  Description of Artificial Sequence: Synthetic oligonucleotide
caguuuaggaaaucaugca

SEQ ID NO: 812381 - RNA, 19 nt, Artificial Sequence
  Description of Artificial Sequence: Synthetic oligonucleotide
ucaaacguacugguuacua

SEQ ID NO: 812382 - RNA, 19 nt, Artificial Sequence
  Description of Artificial Sequence: Synthetic oligonucleotide
ggugcugcacuuaauagac

SEQ ID NO: 812383 - RNA, 19 nt, Artificial Sequence
  Description of Artificial Sequence: Synthetic oligonucleotide
ugcagaucauuccucuaua

SEQ ID NO: 812384 - RNA, 19 nt, Artificial Sequence
  Description of Artificial Sequence: Synthetic oligonucleotide
aggguuucaccaaaauuug

SEQ ID NO: 812385 - RNA, 19 nt, Artificial Sequence
  Description of Artificial Sequence: Synthetic oligonucleotide
guacugguuacuaaguaaa

SEQ ID NO: 812386 - RNA, 19 nt, Artificial Sequence
  Description of Artificial Sequence: Synthetic oligonucleotide
gcuaguucaauaacugcag

SEQ ID NO: 812387 - RNA, 19 nt, Artificial Sequence
  Description of Artificial Sequence: Synthetic oligonucleotide
uccuacuuuuagugaacac

SEQ ID NO: 812388 - RNA, 19 nt, Artificial Sequence
  Description of Artificial Sequence: Synthetic oligonucleotide
aggugcuuugagugggauc

SEQ ID NO: 812389 - RNA, 19 nt, Artificial Sequence
  Description of Artificial Sequence: Synthetic oligonucleotide
uuccuacuuuuagugaaca

SEQ ID NO: 812390 - RNA, 19 nt, Artificial Sequence
  Description of Artificial Sequence: Synthetic oligonucleotide
uaacagguugcagcucagg

SEQ ID NO: 812391 - RNA, 19 nt, Artificial Sequence
  Description of Artificial Sequence: Synthetic oligonucleotide
aauaacugggccagacaau

SEQ ID NO: 812392 - RNA, 19 nt, Artificial Sequence
  Description of Artificial Sequence: Synthetic oligonucleotide
ugguagugaaguacaguuu

SEQ ID NO: 812393 - RNA, 19 nt, Artificial Sequence
  Description of Artificial Sequence: Synthetic oligonucleotide
uaggacgagagaggaaaug

SEQ ID NO: 812394 - RNA, 19 nt, Artificial Sequence
  Description of Artificial Sequence: Synthetic oligonucleotide
ggacuuuaaggguuucacc

SEQ ID NO: 812395 - RNA, 19 nt, Artificial Sequence
  Description of Artificial Sequence: Synthetic oligonucleotide
uugcacuuaggacgagaga

SEQ ID NO: 812396 - RNA, 19 nt, Artificial Sequence
  Description of Artificial Sequence: Synthetic oligonucleotide
ccucuauacagauccuugg

SEQ ID NO: 812397 - RNA, 19 nt, Artificial Sequence
  Description of Artificial Sequence: Synthetic oligonucleotide
acaauaauggaggcucaga

SEQ ID NO: 812398 - RNA, 19 nt, Artificial Sequence
  Description of Artificial Sequence: Synthetic oligonucleotide
auuugugaccuuaauucau

SEQ ID NO: 812399 - RNA, 19 nt, Artificial Sequence
  Description of Artificial Sequence: Synthetic oligonucleotide
ggaugcaguuaccauauga

SEQ ID NO: 812400 - RNA, 19 nt, Artificial Sequence
  Description of Artificial Sequence: Synthetic oligonucleotide
caguugagugggaaggguc

SEQ ID NO: 812401 - RNA, 19 nt, Artificial Sequence
  Description of Artificial Sequence: Synthetic oligonucleotide
uuaggacgagagaggaaau

SEQ ID NO: 812402 - RNA, 19 nt, Artificial Sequence
  Description of Artificial Sequence: Synthetic oligonucleotide
acauggaaaauaggguagu

SEQ ID NO: 812403 - RNA, 19 nt, Artificial Sequence
  Description of Artificial Sequence: Synthetic oligonucleotide
gucaguugagugggaaggg

SEQ ID NO: 812404 - RNA, 19 nt, Artificial Sequence
  Description of Artificial Sequence: Synthetic oligonucleotide
uuguguugcuucagggaau

SEQ ID NO: 812405 - RNA, 19 nt, Artificial Sequence
  Description of Artificial Sequence: Synthetic oligonucleotide
guguuuguauugaauaaaa

SEQ ID NO: 812406 - RNA, 19 nt, Artificial Sequence
  Description of Artificial Sequence: Synthetic oligonucleotide
agguauaauggcggaagca

SEQ ID NO: 812407 - RNA, 19 nt, Artificial Sequence
  Description of Artificial Sequence: Synthetic oligonucleotide
ucaguugagugggaagggu

SEQ ID NO: 812408 - RNA, 19 nt, Artificial Sequence
  Description of Artificial Sequence: Synthetic oligonucleotide
ggcuaguucaauaacugca

SEQ ID NO: 812409 - RNA, 19 nt, Artificial Sequence
  Description of Artificial Sequence: Synthetic oligonucleotide
uaauggcggaagcauuaau

SEQ ID NO: 812410 - RNA, 19 nt, Artificial Sequence
  Description of Artificial Sequence: Synthetic oligonucleotide
aaagguuaguuugcacuua

SEQ ID NO: 812411 - RNA, 19 nt, Artificial Sequence
  Description of Artificial Sequence: Synthetic oligonucleotide
cuaaagcucuugcuccaac

SEQ ID NO: 812412 - RNA, 19 nt, Artificial Sequence
  Description of Artificial Sequence: Synthetic oligonucleotide
uaucgcuugguggccaucu

SEQ ID NO: 812413 - RNA, 19 nt, Artificial Sequence
  Description of Artificial Sequence: Synthetic oligonucleotide
caccacauuaucaaacgua

SEQ ID NO: 812414 - RNA, 19 nt, Artificial Sequence
  Description of Artificial Sequence: Synthetic oligonucleotide
gauccuugguuucucuuua

SEQ ID NO: 812415 - RNA, 19 nt, Artificial Sequence
  Description of Artificial Sequence: Synthetic oligonucleotide
ucagggaaugaggcuagga

SEQ ID NO: 812416 - RNA, 19 nt, Artificial Sequence
  Description of Artificial Sequence: Synthetic oligonucleotide
gcaguuaccauaugaagcu

SEQ ID NO: 812417 - RNA, 19 nt, Artificial Sequence
  Description of Artificial Sequence: Synthetic oligonucleotide
uaugugcacaagaguugaa

SEQ ID NO: 812418 - RNA, 19 nt, Artificial Sequence
  Description of Artificial Sequence: Synthetic oligonucleotide
ucuacgaaauggugugauu

SEQ ID NO: 812419 - RNA, 19 nt, Artificial Sequence
  Description of Artificial Sequence: Synthetic oligonucleotide
cugagccaccuuaaagcac

SEQ ID NO: 812420 - RNA, 19 nt, Artificial Sequence
  Description of Artificial Sequence: Synthetic oligonucleotide
auuagguauaauggcggaa

SEQ ID NO: 812421 - RNA, 19 nt, Artificial Sequence
  Description of Artificial Sequence: Synthetic oligonucleotide
auguuauuuaaagguuagu

SEQ ID NO: 812422 - RNA, 19 nt, Artificial Sequence
  Description of Artificial Sequence: Synthetic oligonucleotide
cuuuaaggguuucaccaaa

SEQ ID NO: 812423 - RNA, 19 nt, Artificial Sequence
  Description of Artificial Sequence: Synthetic oligonucleotide
ucuuaucgcuugguggcca

SEQ ID NO: 812424 - RNA, 19 nt, Artificial Sequence
  Description of Artificial Sequence: Synthetic oligonucleotide
aaucaugcauaugcauuua

SEQ ID NO: 812425 - RNA, 19 nt, Artificial Sequence
  Description of Artificial Sequence: Synthetic oligonucleotide
gaucggaaugagcucccca

SEQ ID NO: 812426 - RNA, 19 nt, Artificial Sequence
  Description of Artificial Sequence: Synthetic oligonucleotide
acagauccuugguuucucu

SEQ ID NO: 812427 - RNA, 19 nt, Artificial Sequence
  Description of Artificial Sequence: Synthetic oligonucleotide
uaucuacgaaaugguguga

SEQ ID NO: 812428 - RNA, 19 nt, Artificial Sequence
  Description of Artificial Sequence: Synthetic oligonucleotide
gcacuuaauagaccuuagc

SEQ ID NO: 812429 - RNA, 19 nt, Artificial Sequence
  Description of Artificial Sequence: Synthetic oligonucleotide
ugcacuacuugaugcuaau

SEQ ID NO: 812430 - RNA, 19 nt, Artificial Sequence
  Description of Artificial Sequence: Synthetic oligonucleotide
acuuaaaagugcagcaaua

SEQ ID NO: 812431 - RNA, 19 nt, Artificial Sequence
  Description of Artificial Sequence: Synthetic oligonucleotide
ggacgagagaggaaauggg

SEQ ID NO: 812432 - RNA, 19 nt, Artificial Sequence
  Description of Artificial Sequence: Synthetic oligonucleotide
cuuaaagcacaccugcuau

SEQ ID NO: 812433 - RNA, 19 nt, Artificial Sequence
  Description of Artificial Sequence: Synthetic oligonucleotide
acgaaauggugugauucca

SEQ ID NO: 812434 - RNA, 19 nt, Artificial Sequence
  Description of Artificial Sequence: Synthetic oligonucleotide
auuaucaaacguacugguu

SEQ ID NO: 812435 - RNA, 19 nt, Artificial Sequence
  Description of Artificial Sequence: Synthetic oligonucleotide
acguacugguuacuaagua

SEQ ID NO: 812436 - RNA, 19 nt, Artificial Sequence
  Description of Artificial Sequence: Synthetic oligonucleotide
aguuuccuuuaucuacgaa

SEQ ID NO: 812437 - RNA, 19 nt, Artificial Sequence
  Description of Artificial Sequence: Synthetic oligonucleotide
aucuacgaaauggugugau

SEQ ID NO: 812438 - RNA, 19 nt, Artificial Sequence
  Description of Artificial Sequence: Synthetic oligonucleotide
caaacguacugguuacuaa

SEQ ID NO: 812439 - RNA, 19 nt, Artificial Sequence
  Description of Artificial Sequence: Synthetic oligonucleotide
caauaauggaggcucagau

SEQ ID NO: 812440 - RNA, 19 nt, Artificial Sequence
  Description of Artificial Sequence: Synthetic oligonucleotide
uuaccauaugaagcuuuaa

SEQ ID NO: 812441 - RNA, 19 nt, Artificial Sequence
  Description of Artificial Sequence: Synthetic oligonucleotide
uuguugccaccacauuauc

SEQ ID NO: 812442 - RNA, 19 nt, Artificial Sequence
  Description of Artificial Sequence: Synthetic oligonucleotide
acuacacuggaaggggaca

SEQ ID NO: 812443 - RNA, 19 nt, Artificial Sequence
  Description of Artificial Sequence: Synthetic oligonucleotide
acgagagaggaaaugggaa

SEQ ID NO: 812444 - RNA, 19 nt, Artificial Sequence
  Description of Artificial Sequence: Synthetic oligonucleotide
gcugucuuaucgcuuggug

SEQ ID NO: 812445 - RNA, 19 nt, Artificial Sequence
  Description of Artificial Sequence: Synthetic oligonucleotide
agcucagguagagaccaug

SEQ ID NO: 812446 - RNA, 19 nt, Artificial Sequence
  Description of Artificial Sequence: Synthetic oligonucleotide
aguuaccauaugaagcuuu

SEQ ID NO: 812447 - RNA, 19 nt, Artificial Sequence
  Description of Artificial Sequence: Synthetic oligonucleotide
aaaaggugcugcacuuaau

SEQ ID NO: 812448 - RNA, 19 nt, Artificial Sequence
  Description of Artificial Sequence: Synthetic oligonucleotide
agguuaguuugcacuuagg

SEQ ID NO: 812449 - RNA, 19 nt, Artificial Sequence
  Description of Artificial Sequence: Synthetic oligonucleotide
ugcuuugagugggaucgga

SEQ ID NO: 812450 - RNA, 19 nt, Artificial Sequence
  Description of Artificial Sequence: Synthetic oligonucleotide
gguagugaaguacaguuuu

SEQ ID NO: 812451 - RNA, 19 nt, Artificial Sequence
  Description of Artificial Sequence: Synthetic oligonucleotide
caguaucaguggacagccg

SEQ ID NO: 812452 - RNA, 19 nt, Artificial Sequence
  Description of Artificial Sequence: Synthetic oligonucleotide
gcagaucauuccucuauac

SEQ ID NO: 812453 - RNA, 19 nt, Artificial Sequence
  Description of Artificial Sequence: Synthetic oligonucleotide
gccaccuuaaagcacaccu

SEQ ID NO: 812454 - RNA, 19 nt, Artificial Sequence
  Description of Artificial Sequence: Synthetic oligonucleotide
cugcuauguguuguuauca

SEQ ID NO: 812455 - RNA, 19 nt, Artificial Sequence
  Description of Artificial Sequence: Synthetic oligonucleotide
cacuuaggacgagagagga

SEQ ID NO: 812456 - RNA, 19 nt, Artificial Sequence
  Description of Artificial Sequence: Synthetic oligonucleotide
gagcaucauaccaaagugu

SEQ ID NO: 812457 - RNA, 19 nt, Artificial Sequence
  Description of Artificial Sequence: Synthetic oligonucleotide
gugcaaaucugaaaaggua

SEQ ID NO: 812458 - RNA, 19 nt, Artificial Sequence
  Description of Artificial Sequence: Synthetic oligonucleotide
auaauggcggaagcauuaa

SEQ ID NO: 812459 - RNA, 19 nt, Artificial Sequence
  Description of Artificial Sequence: Synthetic oligonucleotide
ugacugagacauggcuugc

SEQ ID NO: 812460 - RNA, 19 nt, Artificial Sequence
  Description of Artificial Sequence: Synthetic oligonucleotide
ggaacauggaaaauagggu

SEQ ID NO: 812461 - RNA, 19 nt, Artificial Sequence
  Description of Artificial Sequence: Synthetic oligonucleotide
gcacuuaggacgagagagg

SEQ ID NO: 812462 - RNA, 19 nt, Artificial Sequence
  Description of Artificial Sequence: Synthetic oligonucleotide
gugucuugauccacagcgc

SEQ ID NO: 812463 - RNA, 19 nt, Artificial Sequence
  Description of Artificial Sequence: Synthetic oligonucleotide
guuaccauaugaagcuuua

SEQ ID NO: 812464 - RNA, 19 nt, Artificial Sequence
  Description of Artificial Sequence: Synthetic oligonucleotide
guuuguggaggacaauaau

SEQ ID NO: 812465 - RNA, 19 nt, Artificial Sequence
  Description of Artificial Sequence: Synthetic oligonucleotide
ccugcuauguguuguuauc

SEQ ID NO: 812466 - RNA, 19 nt, Artificial Sequence
  Description of Artificial Sequence: Synthetic oligonucleotide
gccgauugccaccacuaug

SEQ ID NO: 812467 - RNA, 19 nt, Artificial Sequence
  Description of Artificial Sequence: Synthetic oligonucleotide
gugggaucggaaugagcuc

SEQ ID NO: 812468 - RNA, 19 nt, Artificial Sequence
  Description of Artificial Sequence: Synthetic oligonucleotide
gucuuaucgcuugguggcc

SEQ ID NO: 812469 - RNA, 19 nt, Artificial Sequence
  Description of Artificial Sequence: Synthetic oligonucleotide
uaccaugugcaggugcuuu

SEQ ID NO: 812470 - RNA, 19 nt, Artificial Sequence
  Description of Artificial Sequence: Synthetic oligonucleotide
aucaaacguacugguuacu

SEQ ID NO: 812471 - RNA, 19 nt, Artificial Sequence
  Description of Artificial Sequence: Synthetic oligonucleotide
caggaugcaguuaccauau

SEQ ID NO: 812472 - RNA, 19 nt, Artificial Sequence
  Description of Artificial Sequence: Synthetic oligonucleotide
gguauaauggcggaagcau

SEQ ID NO: 812473 - RNA, 19 nt, Artificial Sequence
  Description of Artificial Sequence: Synthetic oligonucleotide
caaaauuugugaccuuaau

SEQ ID NO: 812474 - RNA, 19 nt, Artificial Sequence
  Description of Artificial Sequence: Synthetic oligonucleotide
gguugcagcucagguagag

SEQ ID NO: 812475 - RNA, 19 nt, Artificial Sequence
  Description of Artificial Sequence: Synthetic oligonucleotide
gcucagguagagaccaugc

SEQ ID NO: 812476 - RNA, 19 nt, Artificial Sequence
  Description of Artificial Sequence: Synthetic oligonucleotide
acugcaaaucaggcuaguu

SEQ ID NO: 812477 - RNA, 19 nt, Artificial Sequence
  Description of Artificial Sequence: Synthetic oligonucleotide
aggaugcaguuaccauaug

SEQ ID NO: 812478 - RNA, 19 nt, Artificial Sequence
  Description of Artificial Sequence: Synthetic oligonucleotide
cccagcugauucacaaagc

SEQ ID NO: 812479 - RNA, 19 nt, Artificial Sequence
  Description of Artificial Sequence: Synthetic oligonucleotide
caaugacuuuacacaguaa

SEQ ID NO: 812480 - RNA, 19 nt, Artificial Sequence
  Description of Artificial Sequence: Synthetic oligonucleotide
agccgauugccaccacuau

SEQ ID NO: 812481 - RNA, 19 nt, Artificial Sequence
  Description of Artificial Sequence: Synthetic oligonucleotide
cacaucaauucaugguagu

SEQ ID NO: 812482 - RNA, 19 nt, Artificial Sequence
  Description of Artificial Sequence: Synthetic oligonucleotide
guagugaaguacaguuuua

SEQ ID NO: 812483 - RNA, 19 nt, Artificial Sequence
  Description of Artificial Sequence: Synthetic oligonucleotide
ccacuauggaacauucuaa

SEQ ID NO: 812484 - RNA, 19 nt, Artificial Sequence
  Description of Artificial Sequence: Synthetic oligonucleotide
gcggaagcauuaauuacca

SEQ ID NO: 812485 - RNA, 19 nt, Artificial Sequence
  Description of Artificial Sequence: Synthetic oligonucleotide
cagccgauugccaccacua

SEQ ID NO: 812486 - RNA, 19 nt, Artificial Sequence
  Description of Artificial Sequence: Synthetic oligonucleotide
ccuuaauucauuccaacuu

SEQ ID NO: 812487 - RNA, 19 nt, Artificial Sequence
  Description of Artificial Sequence: Synthetic oligonucleotide
gaguggucaaauaggguuu

SEQ ID NO: 812488 - RNA, 19 nt, Artificial Sequence
  Description of Artificial Sequence: Synthetic oligonucleotide
cuacacuggaaggggacaa

SEQ ID NO: 812489 - RNA, 19 nt, Artificial Sequence
  Description of Artificial Sequence: Synthetic oligonucleotide
aguggacagccgauugcca

SEQ ID NO: 812490 - RNA, 19 nt, Artificial Sequence
  Description of Artificial Sequence: Synthetic oligonucleotide
aacugucaguugaguggga

SEQ ID NO: 812491 - RNA, 19 nt, Artificial Sequence
  Description of Artificial Sequence: Synthetic oligonucleotide
auaggguaguugagacugu

SEQ ID NO: 812492 - RNA, 19 nt, Artificial Sequence
  Description of Artificial Sequence: Synthetic oligonucleotide
gcuauguguuguuaucagu

SEQ ID NO: 812493 - RNA, 19 nt, Artificial Sequence
  Description of Artificial Sequence: Synthetic oligonucleotide
uuaccaugugcaggugcuu

SEQ ID NO: 812494 - RNA, 19 nt, Artificial Sequence
  Description of Artificial Sequence: Synthetic oligonucleotide
cguacugguuacuaaguaa

SEQ ID NO: 812495 - RNA, 19 nt, Artificial Sequence
  Description of Artificial Sequence: Synthetic oligonucleotide
uuaucgcuugguggccauc

SEQ ID NO: 812496 - RNA, 19 nt, Artificial Sequence
  Description of Artificial Sequence: Synthetic oligonucleotide
cauuaauaacugggccaga

SEQ ID NO: 812497 - RNA, 19 nt, Artificial Sequence
  Description of Artificial Sequence: Synthetic oligonucleotide
gcacuacuugaugcuaaug

SEQ ID NO: 812498 - RNA, 19 nt, Artificial Sequence
  Description of Artificial Sequence: Synthetic oligonucleotide
caauacacucaguuuccuu

SEQ ID NO: 812499 - RNA, 19 nt, Artificial Sequence
  Description of Artificial Sequence: Synthetic oligonucleotide
aggguaguugagacuguua

SEQ ID NO: 812500 - RNA, 19 nt, Artificial Sequence
  Description of Artificial Sequence: Synthetic oligonucleotide
gacugagacauggcuugcu

SEQ ID NO: 812501 - RNA, 19 nt, Artificial Sequence
  Description of Artificial Sequence: Synthetic oligonucleotide
ggacaauaauggaggcuca

SEQ ID NO: 812502 - RNA, 19 nt, Artificial Sequence
  Description of Artificial Sequence: Synthetic oligonucleotide
gugaguggucaaauagggu

SEQ ID NO: 812503 - RNA, 19 nt, Artificial Sequence
  Description of Artificial Sequence: Synthetic oligonucleotide
cacugcaccucuguagucu

SEQ ID NO: 812504 - RNA, 19 nt, Artificial Sequence
  Description of Artificial Sequence: Synthetic oligonucleotide
cugaagugaguggucaaau

SEQ ID NO: 812505 - RNA, 19 nt, Artificial Sequence
  Description of Artificial Sequence: Synthetic oligonucleotide
gggaucggaaugagcuccc

SEQ ID NO: 812506 - RNA, 19 nt, Artificial Sequence
  Description of Artificial Sequence: Synthetic oligonucleotide
gcacacaagucugcacuac

SEQ ID NO: 812507 - RNA, 19 nt, Artificial Sequence
  Description of Artificial Sequence: Synthetic oligonucleotide
ggaucggaaugagcucccc

SEQ ID NO: 812508 - RNA, 19 nt, Artificial Sequence
  Description of Artificial Sequence: Synthetic oligonucleotide
cccaauacucaagaaugaa

SEQ ID NO: 812509 - RNA, 19 nt, Artificial Sequence
  Description of Artificial Sequence: Synthetic oligonucleotide
gcuuugagugggaucggaa

SEQ ID NO: 812510 - RNA, 19 nt, Artificial Sequence
  Description of Artificial Sequence: Synthetic oligonucleotide
ugggagccuucuguugcuu

SEQ ID NO: 812511 - RNA, 19 nt, Artificial Sequence
  Description of Artificial Sequence: Synthetic oligonucleotide
ccagagaaauauugaucua

SEQ ID NO: 812512 - RNA, 19 nt, Artificial Sequence
  Description of Artificial Sequence: Synthetic oligonucleotide
cuuaucgcuugguggccau

SEQ ID NO: 812513 - RNA, 19 nt, Artificial Sequence
  Description of Artificial Sequence: Synthetic oligonucleotide
cagauccuugguuucucuu

SEQ ID NO: 812514 - RNA, 19 nt, Artificial Sequence
  Description of Artificial Sequence: Synthetic oligonucleotide
gcaucauaccaaagugucu

SEQ ID NO: 812515 - RNA, 19 nt, Artificial Sequence
  Description of Artificial Sequence: Synthetic oligonucleotide
cugggagccuucuguugcu

SEQ ID NO: 812516 - RNA, 19 nt, Artificial Sequence
  Description of Artificial Sequence: Synthetic oligonucleotide
caguuccaccaaugaaaau

SEQ ID NO: 812517 - RNA, 19 nt, Artificial Sequence
  Description of Artificial Sequence: Synthetic oligonucleotide
caguuaccauaugaagcuu

SEQ ID NO: 812518 - RNA, 19 nt, Artificial Sequence
  Description of Artificial Sequence: Synthetic oligonucleotide
gugaaacacccagcugauu

SEQ ID NO: 812519 - RNA, 19 nt, Artificial Sequence
  Description of Artificial Sequence: Synthetic oligonucleotide
gcugcacuuaauagaccuu

SEQ ID NO: 812520 - RNA, 19 nt, Artificial Sequence
  Description of Artificial Sequence: Synthetic oligonucleotide
aguauggcuauuuucaacc

SEQ ID NO: 812521 - RNA, 19 nt, Artificial Sequence
  Description of Artificial Sequence: Synthetic oligonucleotide
auuucauaaaugcuugucc

SEQ ID NO: 812522 - RNA, 19 nt, Artificial Sequence
  Description of Artificial Sequence: Synthetic oligonucleotide
aacaguccauaauauaagc

SEQ ID NO: 812523 - RNA, 19 nt, Artificial Sequence
  Description of Artificial Sequence: Synthetic oligonucleotide
aguaucuuugcauacuacc

SEQ ID NO: 812524 - RNA, 19 nt, Artificial Sequence
  Description of Artificial Sequence: Synthetic oligonucleotide
acugcuuuccuauagguac

SEQ ID NO: 812525 - RNA, 19 nt, Artificial Sequence
  Description of Artificial Sequence: Synthetic oligonucleotide
auugguaacugucuagucc

SEQ ID NO: 812526 - RNA, 19 nt, Artificial Sequence
  Description of Artificial Sequence: Synthetic oligonucleotide
auuggauggauaucuagcc

SEQ ID NO: 812527 - RNA, 19 nt, Artificial Sequence
  Description of Artificial Sequence: Synthetic oligonucleotide
aacacaacgagguggagag

SEQ ID NO: 812528 - RNA, 19 nt, Artificial Sequence
  Description of Artificial Sequence: Synthetic oligonucleotide
ucauuugauaagaaggugc

SEQ ID NO: 812529 - RNA, 19 nt, Artificial Sequence
  Description of Artificial Sequence: Synthetic oligonucleotide
uauaguagcauuuuccaca

SEQ ID NO: 812530 - RNA, 19 nt, Artificial Sequence
  Description of Artificial Sequence: Synthetic oligonucleotide
aauaguuccaaguguucgg

SEQ ID NO: 812531 - RNA, 19 nt, Artificial Sequence
  Description of Artificial Sequence: Synthetic oligonucleotide
ugaccauuugguaagacug

SEQ ID NO: 812532 - RNA, 19 nt, Artificial Sequence
  Description of Artificial Sequence: Synthetic oligonucleotide
auuugaaugucacuuguuc

SEQ ID NO: 812533 - RNA, 19 nt, Artificial Sequence
  Description of Artificial Sequence: Synthetic oligonucleotide
ugaguagauaccauuuggg

SEQ ID NO: 812534 - RNA, 19 nt, Artificial Sequence
  Description of Artificial Sequence: Synthetic oligonucleotide
cauaugggaaacuacauug

SEQ ID NO: 812535 - RNA, 19 nt, Artificial Sequence
  Description of Artificial Sequence: Synthetic oligonucleotide
aaaaucgcaagguuucaag

SEQ ID NO: 812536 - RNA, 19 nt, Artificial Sequence
  Description of Artificial Sequence: Synthetic oligonucleotide
auuugguaagacuguagcc

SEQ ID NO: 812537 - RNA, 19 nt, Artificial Sequence
  Description of Artificial Sequence: Synthetic oligonucleotide
aaucaaucucaccuaacag

SEQ ID NO: 812538 - RNA, 19 nt, Artificial Sequence
  Description of Artificial Sequence: Synthetic oligonucleotide
uccuggauggguuagaagc

SEQ ID NO: 812539 - RNA, 19 nt, Artificial Sequence
  Description of Artificial Sequence: Synthetic oligonucleotide
acugauaucugauuucauc

SEQ ID NO: 812540 - RNA, 19 nt, Artificial Sequence
  Description of Artificial Sequence: Synthetic oligonucleotide
aaguguucgguauccaggg

SEQ ID NO: 812541 - RNA, 19 nt, Artificial Sequence
  Description of Artificial Sequence: Synthetic oligonucleotide
uucacgguaaucaaucuca

SEQ ID NO: 812542 - RNA, 19 nt, Artificial Sequence
  Description of Artificial Sequence: Synthetic oligonucleotide
uaaucaaucucaccuaaca

SEQ ID NO: 812543 - RNA, 19 nt, Artificial Sequence
  Description of Artificial Sequence: Synthetic oligonucleotide
uggauguagucccaguucg

SEQ ID NO: 812544 - RNA, 19 nt, Artificial Sequence
  Description of Artificial Sequence: Synthetic oligonucleotide
acugauaccuuucauucuc

SEQ ID NO: 812545 - RNA, 19 nt, Artificial Sequence
  Description of Artificial Sequence: Synthetic oligonucleotide
uuucauaaaugcuugucca

SEQ ID NO: 812546 - RNA, 19 nt, Artificial Sequence
  Description of Artificial Sequence: Synthetic oligonucleotide
acgguaaucaaucucaccu

SEQ ID NO: 812547 - RNA, 19 nt, Artificial Sequence
  Description of Artificial Sequence: Synthetic oligonucleotide
auaccuuucauucuccuug

SEQ ID NO: 812548 - RNA, 19 nt, Artificial Sequence
  Description of Artificial Sequence: Synthetic oligonucleotide
uuugauaagaaggugcaca

SEQ ID NO: 812549 - RNA, 19 nt, Artificial Sequence
  Description of Artificial Sequence: Synthetic oligonucleotide
aguauaguagcauuuucca

SEQ ID NO: 812550 - RNA, 19 nt, Artificial Sequence
  Description of Artificial Sequence: Synthetic oligonucleotide
aauccugugaggugaguag

SEQ ID NO: 812551 - RNA, 19 nt, Artificial Sequence
  Description of Artificial Sequence: Synthetic oligonucleotide
aaucgcaagguuucaagcu

SEQ ID NO: 812552 - RNA, 19 nt, Artificial Sequence
  Description of Artificial Sequence: Synthetic oligonucleotide
uacuuuaacaauaguucca

SEQ ID NO: 812553 - RNA, 19 nt, Artificial Sequence
  Description of Artificial Sequence: Synthetic oligonucleotide
uuucauuggauggauaucu

SEQ ID NO: 812554 - RNA, 19 nt, Artificial Sequence
  Description of Artificial Sequence: Synthetic oligonucleotide
uauaaggagguuugcaugu

SEQ ID NO: 812555 - RNA, 19 nt, Artificial Sequence
  Description of Artificial Sequence: Synthetic oligonucleotide
aguugauaccccucauugc

SEQ ID NO: 812556 - RNA, 19 nt, Artificial Sequence
  Description of Artificial Sequence: Synthetic oligonucleotide
aaaguacugguccuguaga

SEQ ID NO: 812557 - RNA, 19 nt, Artificial Sequence
  Description of Artificial Sequence: Synthetic oligonucleotide
auauaaggagguuugcaug

SEQ ID NO: 812558 - RNA, 19 nt, Artificial Sequence
  Description of Artificial Sequence: Synthetic oligonucleotide
cauuggauggauaucuagc

SEQ ID NO: 812559 - RNA, 19 nt, Artificial Sequence
  Description of Artificial Sequence: Synthetic oligonucleotide
aaaaguuucccaugcucca

SEQ ID NO: 812560 - RNA, 19 nt, Artificial Sequence
  Description of Artificial Sequence: Synthetic oligonucleotide
uucacauaauggaauguca

SEQ ID NO: 812561 - RNA, 19 nt, Artificial Sequence
  Description of Artificial Sequence: Synthetic oligonucleotide
cuaaaggacccaaagggug

SEQ ID NO: 812562 - RNA, 19 nt, Artificial Sequence
  Description of Artificial Sequence: Synthetic oligonucleotide
aaucccaugaggauugaag

SEQ ID NO: 812563 - RNA, 19 nt, Artificial Sequence
  Description of Artificial Sequence: Synthetic oligonucleotide
ucuuguuaguauaguagca

SEQ ID NO: 812564 - RNA, 19 nt, Artificial Sequence
  Description of Artificial Sequence: Synthetic oligonucleotide
uggauaucuagccaugggu

SEQ ID NO: 812565 - RNA, 19 nt, Artificial Sequence
  Description of Artificial Sequence: Synthetic oligonucleotide
ucaaacgcaguuccaacug

SEQ ID NO: 812566 - RNA, 19 nt, Artificial Sequence
  Description of Artificial Sequence: Synthetic oligonucleotide
uucauaaaugcuuguccag

SEQ ID NO: 812567 - RNA, 19 nt, Artificial Sequence
  Description of Artificial Sequence: Synthetic oligonucleotide
uggaaaaucgcaagguuuc

SEQ ID NO: 812568 - RNA, 19 nt, Artificial Sequence
  Description of Artificial Sequence: Synthetic oligonucleotide
uguugcaguaauaaucgaa

SEQ ID NO: 812569 - RNA, 19 nt, Artificial Sequence
  Description of Artificial Sequence: Synthetic oligonucleotide
acaguccauaauauaagcc

SEQ ID NO: 812570 - RNA, 19 nt, Artificial Sequence
  Description of Artificial Sequence: Synthetic oligonucleotide
caaaaccucggucacauug

SEQ ID NO: 812571 - RNA, 19 nt, Artificial Sequence
  Description of Artificial Sequence: Synthetic oligonucleotide
caaguguucgguauccagg

SEQ ID NO: 812572 - RNA, 19 nt, Artificial Sequence
  Description of Artificial Sequence: Synthetic oligonucleotide
uggguaaacugucacaauc

SEQ ID NO: 812573 - RNA, 19 nt, Artificial Sequence
  Description of Artificial Sequence: Synthetic oligonucleotide
ucaccuaacaguugauacc

SEQ ID NO: 812574 - RNA, 19 nt, Artificial Sequence
  Description of Artificial Sequence: Synthetic oligonucleotide
auguagucccaguucgucc

SEQ ID NO: 812575 - RNA, 19 nt, Artificial Sequence
  Description of Artificial Sequence: Synthetic oligonucleotide
uuacauucguaccguaccc

SEQ ID NO: 812576 - RNA, 19 nt, Artificial Sequence
  Description of Artificial Sequence: Synthetic oligonucleotide
uguccaaaauaauauuccu

SEQ ID NO: 812577 - RNA, 19 nt, Artificial Sequence
  Description of Artificial Sequence: Synthetic oligonucleotide
auucacgguaaucaaucuc

SEQ ID NO: 812578 - RNA, 19 nt, Artificial Sequence
  Description of Artificial Sequence: Synthetic oligonucleotide
uaugaguauggcuauuuuc

SEQ ID NO: 812579 - RNA, 19 nt, Artificial Sequence
  Description of Artificial Sequence: Synthetic oligonucleotide
uguucgguauccagggcgg

SEQ ID NO: 812580 - RNA, 19 nt, Artificial Sequence
  Description of Artificial Sequence: Synthetic oligonucleotide
uugguaagacuguagccag

SEQ ID NO: 812581 - RNA, 19 nt, Artificial Sequence
  Description of Artificial Sequence: Synthetic oligonucleotide
uguacacaaaaccucgguc

SEQ ID NO: 812582 - RNA, 19 nt, Artificial Sequence
  Description of Artificial Sequence: Synthetic oligonucleotide
acauucacgguaaucaauc

SEQ ID NO: 812583 - RNA, 19 nt, Artificial Sequence
  Description of Artificial Sequence: Synthetic oligonucleotide
aacugucuaguccaugaga

SEQ ID NO: 812584 - RNA, 19 nt, Artificial Sequence
  Description of Artificial Sequence: Synthetic oligonucleotide
uguagucccaguucguccc

SEQ ID NO: 812585 - RNA, 19 nt, Artificial Sequence
  Description of Artificial Sequence: Synthetic oligonucleotide
ucgaacugcuuuccuauag

SEQ ID NO: 812586 - RNA, 19 nt, Artificial Sequence
  Description of Artificial Sequence: Synthetic oligonucleotide
guuucaagcuacaucuugg

SEQ ID NO: 812587 - RNA, 19 nt, Artificial Sequence
  Description of Artificial Sequence: Synthetic oligonucleotide
caauaguuccaaguguucg

SEQ ID NO: 812588 - RNA, 19 nt, Artificial Sequence
  Description of Artificial Sequence: Synthetic oligonucleotide
ucacauaauggaaugucau

SEQ ID NO: 812589 - RNA, 19 nt, Artificial Sequence
  Description of Artificial Sequence: Synthetic oligonucleotide
uucaagcuacaucuuggag

SEQ ID NO: 812590 - RNA, 19 nt, Artificial Sequence
  Description of Artificial Sequence: Synthetic oligonucleotide
ugucuaguccaugagacac

SEQ ID NO: 812591 - RNA, 19 nt, Artificial Sequence
  Description of Artificial Sequence: Synthetic oligonucleotide
cuuggauacagcuugucca

SEQ ID NO: 812592 - RNA, 19 nt, Artificial Sequence
  Description of Artificial Sequence: Synthetic oligonucleotide
aguccaugagacacaaucc

SEQ ID NO: 812593 - RNA, 19 nt, Artificial Sequence
  Description of Artificial Sequence: Synthetic oligonucleotide
cuuguaaacugguuucuug

SEQ ID NO: 812594 - RNA, 19 nt, Artificial Sequence
  Description of Artificial Sequence: Synthetic oligonucleotide
ugcugaauaaucucauggu

SEQ ID NO: 812595 - RNA, 19 nt, Artificial Sequence
  Description of Artificial Sequence: Synthetic oligonucleotide
aauaaucucaugguuugaa

SEQ ID NO: 812596 - RNA, 19 nt, Artificial Sequence
  Description of Artificial Sequence: Synthetic oligonucleotide
uguuaguauaguagcauuu

SEQ ID NO: 812597 - RNA, 19 nt, Artificial Sequence
  Description of Artificial Sequence: Synthetic oligonucleotide
acucaaacgcaguuccaac

SEQ ID NO: 812598 - RNA, 19 nt, Artificial Sequence
  Description of Artificial Sequence: Synthetic oligonucleotide
ugauaccccucauugcagg

SEQ ID NO: 812599 - RNA, 19 nt, Artificial Sequence
  Description of Artificial Sequence: Synthetic oligonucleotide
aggcuaaaggacccaaagg

SEQ ID NO: 812600 - RNA, 19 nt, Artificial Sequence
  Description of Artificial Sequence: Synthetic oligonucleotide
guguucgguauccagggcg

SEQ ID NO: 812601 - RNA, 19 nt, Artificial Sequence
  Description of Artificial Sequence: Synthetic oligonucleotide
gauaucugauuucaucauc

SEQ ID NO: 812602 - RNA, 19 nt, Artificial Sequence
  Description of Artificial Sequence: Synthetic oligonucleotide
uccuauagguacugggaag

SEQ ID NO: 812603 - RNA, 19 nt, Artificial Sequence
  Description of Artificial Sequence: Synthetic oligonucleotide
auucguaccguacccuuuc

SEQ ID NO: 812604 - RNA, 19 nt, Artificial Sequence
  Description of Artificial Sequence: Synthetic oligonucleotide
caguccauaauauaagcca

SEQ ID NO: 812605 - RNA, 19 nt, Artificial Sequence
  Description of Artificial Sequence: Synthetic oligonucleotide
uguaaacugguuucuugga

SEQ ID NO: 812606 - RNA, 19 nt, Artificial Sequence
  Description of Artificial Sequence: Synthetic oligonucleotide
aaauaguucaaaagguuua

SEQ ID NO: 812607 - RNA, 19 nt, Artificial Sequence
  Description of Artificial Sequence: Synthetic oligonucleotide
uguccugaccauuugguaa

SEQ ID NO: 812608 - RNA, 19 nt, Artificial Sequence
  Description of Artificial Sequence: Synthetic oligonucleotide
guaccguacccuuucauug

SEQ ID NO: 812609 - RNA, 19 nt, Artificial Sequence
  Description of Artificial Sequence: Synthetic oligonucleotide
acugguuucuuggauacag

SEQ ID NO: 812610 - RNA, 19 nt, Artificial Sequence
  Description of Artificial Sequence: Synthetic oligonucleotide
auggauaucuagccauggg

SEQ ID NO: 812611 - RNA, 19 nt, Artificial Sequence
  Description of Artificial Sequence: Synthetic oligonucleotide
gaguagauaccauuuggga

SEQ ID NO: 812612 - RNA, 19 nt, Artificial Sequence
  Description of Artificial Sequence: Synthetic oligonucleotide
uaaacugguuucuuggaua

SEQ ID NO: 812613 - RNA, 19 nt, Artificial Sequence
  Description of Artificial Sequence: Synthetic oligonucleotide
uccaugagacacaauccca

SEQ ID NO: 812614 - RNA, 19 nt, Artificial Sequence
  Description of Artificial Sequence: Synthetic oligonucleotide
aguucgucccugaaggagc

SEQ ID NO: 812615 - RNA, 19 nt, Artificial Sequence
  Description of Artificial Sequence: Synthetic oligonucleotide
caccuaacaguugauaccc

SEQ ID NO: 812616 - RNA, 19 nt, Artificial Sequence
  Description of Artificial Sequence: Synthetic oligonucleotide
cauuuuggugguucugucc

SEQ ID NO: 812617 - RNA, 19 nt, Artificial Sequence
  Description of Artificial Sequence: Synthetic oligonucleotide
uugauaagaaggugcacau

SEQ ID NO: 812618 - RNA, 19 nt, Artificial Sequence
  Description of Artificial Sequence: Synthetic oligonucleotide
uggauggauaucuagccau

SEQ ID NO: 812619 - RNA, 19 nt, Artificial Sequence
  Description of Artificial Sequence: Synthetic oligonucleotide
cauuugauaagaaggugca

SEQ ID NO: 812620 - RNA, 19 nt, Artificial Sequence
  Description of Artificial Sequence: Synthetic oligonucleotide
uuccuauagguacugggaa

SEQ ID NO: 812621 - RNA, 19 nt, Artificial Sequence
  Description of Artificial Sequence: Synthetic oligonucleotide
auagguacugggaaguaag

SEQ ID NO: 812622 - RNA, 19 nt, Artificial Sequence
  Description of Artificial Sequence: Synthetic oligonucleotide
uaccguacccuuucauugg

SEQ ID NO: 812623 - RNA, 19 nt, Artificial Sequence
  Description of Artificial Sequence: Synthetic oligonucleotide
acacuugacuuuuaaagua

SEQ ID NO: 812624 - RNA, 19 nt, Artificial Sequence
  Description of Artificial Sequence: Synthetic oligonucleotide
ugcgauugacacaugucac

SEQ ID NO: 812625 - RNA, 19 nt, Artificial Sequence
  Description of Artificial Sequence: Synthetic oligonucleotide
uggguuagaagccacccau

SEQ ID NO: 812626 - RNA, 19 nt, Artificial Sequence
  Description of Artificial Sequence: Synthetic oligonucleotide
cacuugacuuuuaaaguac

SEQ ID NO: 812627 - RNA, 19 nt, Artificial Sequence
  Description of Artificial Sequence: Synthetic oligonucleotide
uaacugucuaguccaugag

SEQ ID NO: 812628 - RNA, 19 nt, Artificial Sequence
  Description of Artificial Sequence: Synthetic oligonucleotide
agcuguaugucaccucuuc

SEQ ID NO: 812629 - RNA, 19 nt, Artificial Sequence
  Description of Artificial Sequence: Synthetic oligonucleotide
aguaaggucugcgugucuc

SEQ ID NO: 812630 - RNA, 19 nt, Artificial Sequence
  Description of Artificial Sequence: Synthetic oligonucleotide
gguuuauuacauucguacc

SEQ ID NO: 812631 - RNA, 19 nt, Artificial Sequence
  Description of Artificial Sequence: Synthetic oligonucleotide
ugguccuguagauagcugu

SEQ ID NO: 812632 - RNA, 19 nt, Artificial Sequence
  Description of Artificial Sequence: Synthetic oligonucleotide
ucguucucuguacacaaaa

SEQ ID NO: 812633 - RNA, 19 nt, Artificial Sequence
  Description of Artificial Sequence: Synthetic oligonucleotide
uguuggacccauucauuug

SEQ ID NO: 812634 - RNA, 19 nt, Artificial Sequence
  Description of Artificial Sequence: Synthetic oligonucleotide
auauugguaacugucuagu

SEQ ID NO: 812635 - RNA, 19 nt, Artificial Sequence
  Description of Artificial Sequence: Synthetic oligonucleotide
gauggguuagaagccaccc

SEQ ID NO: 812636 - RNA, 19 nt, Artificial Sequence
  Description of Artificial Sequence: Synthetic oligonucleotide
guuuaauccugugagguga

SEQ ID NO: 812637 - RNA, 19 nt, Artificial Sequence
  Description of Artificial Sequence: Synthetic oligonucleotide
uaaggagguuugcauguca

SEQ ID NO: 812638 - RNA, 19 nt, Artificial Sequence
  Description of Artificial Sequence: Synthetic oligonucleotide
auuugauaagaaggugcac

SEQ ID NO: 812639 - RNA, 19 nt, Artificial Sequence
  Description of Artificial Sequence: Synthetic oligonucleotide
caggcuaaaggacccaaag

SEQ ID NO: 812640 - RNA, 19 nt, Artificial Sequence
  Description of Artificial Sequence: Synthetic oligonucleotide
auaguagcauuuuccacau

SEQ ID NO: 812641 - RNA, 19 nt, Artificial Sequence
  Description of Artificial Sequence: Synthetic oligonucleotide
uggcuauuuucaacccugg

SEQ ID NO: 812642 - RNA, 19 nt, Artificial Sequence
  Description of Artificial Sequence: Synthetic oligonucleotide
uccaaaggccguuuucuga

SEQ ID NO: 812643 - RNA, 19 nt, Artificial Sequence
  Description of Artificial Sequence: Synthetic oligonucleotide
uucuggaaaaucgcaaggu

SEQ ID NO: 812644 - RNA, 19 nt, Artificial Sequence
  Description of Artificial Sequence: Synthetic oligonucleotide
gaaguccaacacaacgagg

SEQ ID NO: 812645 - RNA, 19 nt, Artificial Sequence
  Description of Artificial Sequence: Synthetic oligonucleotide
aaaaccucggucacauuga

SEQ ID NO: 812646 - RNA, 19 nt, Artificial Sequence
  Description of Artificial Sequence: Synthetic oligonucleotide
ugugcgauugacacauguc

SEQ ID NO: 812647 - RNA, 19 nt, Artificial Sequence
  Description of Artificial Sequence: Synthetic oligonucleotide
ugaccuauaugaaucucuu

SEQ ID NO: 812648 - RNA, 19 nt, Artificial Sequence
  Description of Artificial Sequence: Synthetic oligonucleotide
uguucaccugaccuauaug

SEQ ID NO: 812649 - RNA, 19 nt, Artificial Sequence
  Description of Artificial Sequence: Synthetic oligonucleotide
guccugaccauuugguaag

SEQ ID NO: 812650 - RNA, 19 nt, Artificial Sequence
  Description of Artificial Sequence: Synthetic oligonucleotide
accauauagaccuccguuu

SEQ ID NO: 812651 - RNA, 19 nt, Artificial Sequence
  Description of Artificial Sequence: Synthetic oligonucleotide
ucuggguaugguuggucag

SEQ ID NO: 812652 - RNA, 19 nt, Artificial Sequence
  Description of Artificial Sequence: Synthetic oligonucleotide
gauacugauaccuuucauu

SEQ ID NO: 812653 - RNA, 19 nt, Artificial Sequence
  Description of Artificial Sequence: Synthetic oligonucleotide
acccuugcauacuuuaaca

SEQ ID NO: 812654 - RNA, 19 nt, Artificial Sequence
  Description of Artificial Sequence: Synthetic oligonucleotide
uuguuaguauaguagcauu

SEQ ID NO: 812655 - RNA, 19 nt, Artificial Sequence
  Description of Artificial Sequence: Synthetic oligonucleotide
auaaucucaugguuugaau

SEQ ID NO: 812656 - RNA, 19 nt, Artificial Sequence
  Description of Artificial Sequence: Synthetic oligonucleotide
uuguucaccugaccuauau

SEQ ID NO: 812657 - RNA, 19 nt, Artificial Sequence
  Description of Artificial Sequence: Synthetic oligonucleotide
gguacugggaaguaagguc

SEQ ID NO: 812658 - RNA, 19 nt, Artificial Sequence
  Description of Artificial Sequence: Synthetic oligonucleotide
guauggcuauuuucaaccc

SEQ ID NO: 812659 - RNA, 19 nt, Artificial Sequence
  Description of Artificial Sequence: Synthetic oligonucleotide
uccuccuacacauuucaua

SEQ ID NO: 812660 - RNA, 19 nt, Artificial Sequence
  Description of Artificial Sequence: Synthetic oligonucleotide
uugcagguauaaacaaccu

SEQ ID NO: 812661 - RNA, 19 nt, Artificial Sequence
  Description of Artificial Sequence: Synthetic oligonucleotide
uauugguaacugucuaguc

SEQ ID NO: 812662 - RNA, 19 nt, Artificial Sequence
  Description of Artificial Sequence: Synthetic oligonucleotide
uaccucuccaauccaugug

SEQ ID NO: 812663 - RNA, 19 nt, Artificial Sequence
  Description of Artificial Sequence: Synthetic oligonucleotide
gcggcauggaauuucaggc

SEQ ID NO: 812664 - RNA, 19 nt, Artificial Sequence
  Description of Artificial Sequence: Synthetic oligonucleotide
aaggguguaucuccaggau

SEQ ID NO: 812665 - RNA, 19 nt, Artificial Sequence
  Description of Artificial Sequence: Synthetic oligonucleotide
gauaucuagccaugggucu

SEQ ID NO: 812666 - RNA, 19 nt, Artificial Sequence
  Description of Artificial Sequence: Synthetic oligonucleotide
cauucuaaaaguuucccau

SEQ ID NO: 812667 - RNA, 19 nt, Artificial Sequence
  Description of Artificial Sequence: Synthetic oligonucleotide
acaauaguuccaaguguuc

SEQ ID NO: 812668 - RNA, 19 nt, Artificial Sequence
  Description of Artificial Sequence: Synthetic oligonucleotide
cugauaccuuucauucucc

SEQ ID NO: 812669 - RNA, 19 nt, Artificial Sequence
  Description of Artificial Sequence: Synthetic oligonucleotide
ucggucacauugauacuga

SEQ ID NO: 812670 - RNA, 19 nt, Artificial Sequence
  Description of Artificial Sequence: Synthetic oligonucleotide
gguuaauuguguccugacc

SEQ ID NO: 812671 - RNA, 19 nt, Artificial Sequence
  Description of Artificial Sequence: Synthetic oligonucleotide
ucacauucacgguaaucaa

SEQ ID NO: 812672 - RNA, 19 nt, Artificial Sequence
  Description of Artificial Sequence: Synthetic oligonucleotide
augugcgauugacacaugu

SEQ ID NO: 812673 - RNA, 19 nt, Artificial Sequence
  Description of Artificial Sequence: Synthetic oligonucleotide
ccuguccaaaauaauauuc

SEQ ID NO: 812674 - RNA, 19 nt, Artificial Sequence
  Description of Artificial Sequence: Synthetic oligonucleotide
ugucacuuguucaccugac

SEQ ID NO: 812675 - RNA, 19 nt, Artificial Sequence
  Description of Artificial Sequence: Synthetic oligonucleotide
ugauaccuuucauucuccu

SEQ ID NO: 812676 - RNA, 19 nt, Artificial Sequence
  Description of Artificial Sequence: Synthetic oligonucleotide
auccggaaacugugcagac

SEQ ID NO: 812677 - RNA, 19 nt, Artificial Sequence
  Description of Artificial Sequence: Synthetic oligonucleotide
uauagguacugggaaguaa

SEQ ID NO: 812678 - RNA, 19 nt, Artificial Sequence
  Description of Artificial Sequence: Synthetic oligonucleotide
aaucccauuuugacacauc

SEQ ID NO: 812679 - RNA, 19 nt, Artificial Sequence
  Description of Artificial Sequence: Synthetic oligonucleotide
ucacgguaaucaaucucac

SEQ ID NO: 812680 - RNA, 19 nt, Artificial Sequence
  Description of Artificial Sequence: Synthetic oligonucleotide
uuucuuggauacagcuugu

SEQ ID NO: 812681 - RNA, 19 nt, Artificial Sequence
  Description of Artificial Sequence: Synthetic oligonucleotide
aacaguugauaccccucau

SEQ ID NO: 812682 - RNA, 19 nt, Artificial Sequence
  Description of Artificial Sequence: Synthetic oligonucleotide
ugacagaauuucuguauuu

SEQ ID NO: 812683 - RNA, 19 nt, Artificial Sequence
  Description of Artificial Sequence: Synthetic oligonucleotide
ucuaguccaugagacacaa

SEQ ID NO: 812684 - RNA, 19 nt, Artificial Sequence
  Description of Artificial Sequence: Synthetic oligonucleotide
ggugaguagauaccauuug

SEQ ID NO: 812685 - RNA, 19 nt, Artificial Sequence
  Description of Artificial Sequence: Synthetic oligonucleotide
cacgguaaucaaucucacc

SEQ ID NO: 812686 - RNA, 19 nt, Artificial Sequence
  Description of Artificial Sequence: Synthetic oligonucleotide
uacugggaaguaaggucug

SEQ ID NO: 812687 - RNA, 19 nt, Artificial Sequence
  Description of Artificial Sequence: Synthetic oligonucleotide
aucgcaagguuucaagcua

SEQ ID NO: 812688 - RNA, 19 nt, Artificial Sequence
  Description of Artificial Sequence: Synthetic oligonucleotide
gauguagucccaguucguc

SEQ ID NO: 812689 - RNA, 19 nt, Artificial Sequence
  Description of Artificial Sequence: Synthetic oligonucleotide
ggguguaucuccaggaugc

SEQ ID NO: 812690 - RNA, 19 nt, Artificial Sequence
  Description of Artificial Sequence: Synthetic oligonucleotide
gguaagacuguagccagag

SEQ ID NO: 812691 - RNA, 19 nt, Artificial Sequence
  Description of Artificial Sequence: Synthetic oligonucleotide
uccaugugcgauugacaca

SEQ ID NO: 812692 - RNA, 19 nt, Artificial Sequence
  Description of Artificial Sequence: Synthetic oligonucleotide
ugcauacuaccucuccaau

SEQ ID NO: 812693 - RNA, 19 nt, Artificial Sequence
  Description of Artificial Sequence: Synthetic oligonucleotide
cauaaaugcuuguccagaa

SEQ ID NO: 812694 - RNA, 19 nt, Artificial Sequence
  Description of Artificial Sequence: Synthetic oligonucleotide
uugacacaucacuucuacu

SEQ ID NO: 812695 - RNA, 19 nt, Artificial Sequence
  Description of Artificial Sequence: Synthetic oligonucleotide
gccacaaauccccuguugc

SEQ ID NO: 812696 - RNA, 19 nt, Artificial Sequence
  Description of Artificial Sequence: Synthetic oligonucleotide
auaaggagguuugcauguc

SEQ ID NO: 812697 - RNA, 19 nt, Artificial Sequence
  Description of Artificial Sequence: Synthetic oligonucleotide
auaguuccaaguguucggu

SEQ ID NO: 812698 - RNA, 19 nt, Artificial Sequence
  Description of Artificial Sequence: Synthetic oligonucleotide
uccccuguugcaguaauaa

SEQ ID NO: 812699 - RNA, 19 nt, Artificial Sequence
  Description of Artificial Sequence: Synthetic oligonucleotide
caaagcgcaccaccugucc

SEQ ID NO: 812700 - RNA, 19 nt, Artificial Sequence
  Description of Artificial Sequence: Synthetic oligonucleotide
uaauccugugaggugagua

SEQ ID NO: 812701 - RNA, 19 nt, Artificial Sequence
  Description of Artificial Sequence: Synthetic oligonucleotide
uacuaccucuccaauccau

SEQ ID NO: 812702 - RNA, 19 nt, Artificial Sequence
  Description of Artificial Sequence: Synthetic oligonucleotide
cuagccaugggucuuguua

SEQ ID NO: 812703 - RNA, 19 nt, Artificial Sequence
  Description of Artificial Sequence: Synthetic oligonucleotide
ugaggugaguagauaccau

SEQ ID NO: 812704 - RNA, 19 nt, Artificial Sequence
  Description of Artificial Sequence: Synthetic oligonucleotide
aguccauaauauaagccaa

SEQ ID NO: 812705 - RNA, 19 nt, Artificial Sequence
  Description of Artificial Sequence: Synthetic oligonucleotide
uucauuggauggauaucua

SEQ ID NO: 812706 - RNA, 19 nt, Artificial Sequence
  Description of Artificial Sequence: Synthetic oligonucleotide
accugaccuauaugaaucu

SEQ ID NO: 812707 - RNA, 19 nt, Artificial Sequence
  Description of Artificial Sequence: Synthetic oligonucleotide
uuauuacauucguaccgua

SEQ ID NO: 812708 - RNA, 19 nt, Artificial Sequence
  Description of Artificial Sequence: Synthetic oligonucleotide
gaaguaaggucugcguguc

SEQ ID NO: 812709 - RNA, 19 nt, Artificial Sequence
  Description of Artificial Sequence: Synthetic oligonucleotide
aggauagaagccaugugaa

SEQ ID NO: 812710 - RNA, 19 nt, Artificial Sequence
  Description of Artificial Sequence: Synthetic oligonucleotide
auggguuagaagccaccca

SEQ ID NO: 812711 - RNA, 19 nt, Artificial Sequence
  Description of Artificial Sequence: Synthetic oligonucleotide
cuugaaugccuucugggua

SEQ ID NO: 812712 - RNA, 19 nt, Artificial Sequence
  Description of Artificial Sequence: Synthetic oligonucleotide
acugguccuguagauagcu

SEQ ID NO: 812713 - RNA, 19 nt, Artificial Sequence
  Description of Artificial Sequence: Synthetic oligonucleotide
uacauucguaccguacccu

SEQ ID NO: 812714 - RNA, 19 nt, Artificial Sequence
  Description of Artificial Sequence: Synthetic oligonucleotide
accuguccaaaauaauauu

SEQ ID NO: 812715 - RNA, 19 nt, Artificial Sequence
  Description of Artificial Sequence: Synthetic oligonucleotide
auccuggauggguuagaag

SEQ ID NO: 812716 - RNA, 19 nt, Artificial Sequence
  Description of Artificial Sequence: Synthetic oligonucleotide
ugguaagacuguagccaga

SEQ ID NO: 812717 - RNA, 19 nt, Artificial Sequence
  Description of Artificial Sequence: Synthetic oligonucleotide
acuugacuuuuaaaguacu

SEQ ID NO: 812718 - RNA, 19 nt, Artificial Sequence
  Description of Artificial Sequence: Synthetic oligonucleotide
uugccugcggcauggaauu

SEQ ID NO: 812719 - RNA, 19 nt, Artificial Sequence
  Description of Artificial Sequence: Synthetic oligonucleotide
ugcuccaaaggccguuuuc

SEQ ID NO: 812720 - RNA, 19 nt, Artificial Sequence
  Description of Artificial Sequence: Synthetic oligonucleotide
ggauaucuagccauggguc

SEQ ID NO: 812721 - RNA, 19 nt, Artificial Sequence
  Description of Artificial Sequence: Synthetic oligonucleotide
ucggcuuuucacugcucca

SEQ ID NO: 812722 - RNA, 19 nt, Artificial Sequence
  Description of Artificial Sequence: Synthetic oligonucleotide
caguucgucccugaaggag

SEQ ID NO: 812723 - RNA, 19 nt, Artificial Sequence
  Description of Artificial Sequence: Synthetic oligonucleotide
agacugcauccccucguuc

SEQ ID NO: 812724 - RNA, 19 nt, Artificial Sequence
  Description of Artificial Sequence: Synthetic oligonucleotide
ggcuauuuucaacccuggg

SEQ ID NO: 812725 - RNA, 19 nt, Artificial Sequence
  Description of Artificial Sequence: Synthetic oligonucleotide
cuccaaaggccguuuucug

SEQ ID NO: 812726 - RNA, 19 nt, Artificial Sequence
  Description of Artificial Sequence: Synthetic oligonucleotide
guaaucaaucucaccuaac

SEQ ID NO: 812727 - RNA, 19 nt, Artificial Sequence
  Description of Artificial Sequence: Synthetic oligonucleotide
uccgcaucacauucacggu

SEQ ID NO: 812728 - RNA, 19 nt, Artificial Sequence
  Description of Artificial Sequence: Synthetic oligonucleotide
auugccugcggcauggaau

SEQ ID NO: 812729 - RNA, 19 nt, Artificial Sequence
  Description of Artificial Sequence: Synthetic oligonucleotide
ugcuuuccuauagguacug

SEQ ID NO: 812730 - RNA, 19 nt, Artificial Sequence
  Description of Artificial Sequence: Synthetic oligonucleotide
acauucguaccguacccuu

SEQ ID NO: 812731 - RNA, 19 nt, Artificial Sequence
  Description of Artificial Sequence: Synthetic oligonucleotide
caacgagguggagagcucc

SEQ ID NO: 812732 - RNA, 19 nt, Artificial Sequence
  Description of Artificial Sequence: Synthetic oligonucleotide
ccuguagauagcuguuucc

SEQ ID NO: 812733 - RNA, 19 nt, Artificial Sequence
  Description of Artificial Sequence: Synthetic oligonucleotide
gaaaaucgcaagguuucaa

SEQ ID NO: 812734 - RNA, 19 nt, Artificial Sequence
  Description of Artificial Sequence: Synthetic oligonucleotide
ggcauuuguagguggcuug

SEQ ID NO: 812735 - RNA, 19 nt, Artificial Sequence
  Description of Artificial Sequence: Synthetic oligonucleotide
gacugcauccccucguucu

SEQ ID NO: 812736 - RNA, 19 nt, Artificial Sequence
  Description of Artificial Sequence: Synthetic oligonucleotide
auacuaccucuccaaucca

SEQ ID NO: 812737 - RNA, 19 nt, Artificial Sequence
  Description of Artificial Sequence: Synthetic oligonucleotide
uucguaccguacccuuuca

SEQ ID NO: 812738 - RNA, 19 nt, Artificial Sequence
  Description of Artificial Sequence: Synthetic oligonucleotide
ucucaccuaacaguugaua

SEQ ID NO: 812739 - RNA, 19 nt, Artificial Sequence
  Description of Artificial Sequence: Synthetic oligonucleotide
aggcuuccauccuugugca

SEQ ID NO: 812740 - RNA, 19 nt, Artificial Sequence
  Description of Artificial Sequence: Synthetic oligonucleotide
agagugacacuugacuuuu

SEQ ID NO: 812741 - RNA, 19 nt, Artificial Sequence
  Description of Artificial Sequence: Synthetic oligonucleotide
accuaacaguugauacccc

SEQ ID NO: 812742 - RNA, 19 nt, Artificial Sequence
  Description of Artificial Sequence: Synthetic oligonucleotide
ggauagaagccaugugaac

SEQ ID NO: 812743 - RNA, 19 nt, Artificial Sequence
  Description of Artificial Sequence: Synthetic oligonucleotide
ugucacaauguuggaccca

SEQ ID NO: 812744 - RNA, 19 nt, Artificial Sequence
  Description of Artificial Sequence: Synthetic oligonucleotide
gaaugccuucuggguaugg

SEQ ID NO: 812745 - RNA, 19 nt, Artificial Sequence
  Description of Artificial Sequence: Synthetic oligonucleotide
accguacccuuucauugga

SEQ ID NO: 812746 - RNA, 19 nt, Artificial Sequence
  Description of Artificial Sequence: Synthetic oligonucleotide
ugguuccccacaugaagua

SEQ ID NO: 812747 - RNA, 19 nt, Artificial Sequence
  Description of Artificial Sequence: Synthetic oligonucleotide
ugggucuuguuaguauagu

SEQ ID NO: 812748 - RNA, 19 nt, Artificial Sequence
  Description of Artificial Sequence: Synthetic oligonucleotide
ggauauaaggagguuugca

SEQ ID NO: 812749 - RNA, 19 nt, Artificial Sequence
  Description of Artificial Sequence: Synthetic oligonucleotide
cauugcagucaaagcgcac

SEQ ID NO: 812750 - RNA, 19 nt, Artificial Sequence
  Description of Artificial Sequence: Synthetic oligonucleotide
gacccaaaggguguaucuc

SEQ ID NO: 812751 - RNA, 19 nt, Artificial Sequence
  Description of Artificial Sequence: Synthetic oligonucleotide
cacccauuuuccacccuug

SEQ ID NO: 812752 - RNA, 19 nt, Artificial Sequence
  Description of Artificial Sequence: Synthetic oligonucleotide
uggugguuccccacaugaa

SEQ ID NO: 812753 - RNA, 19 nt, Artificial Sequence
  Description of Artificial Sequence: Synthetic oligonucleotide
cauccggaaacugugcaga

SEQ ID NO: 812754 - RNA, 19 nt, Artificial Sequence
  Description of Artificial Sequence: Synthetic oligonucleotide
caccuguccaaaauaauau

SEQ ID NO: 812755 - RNA, 19 nt, Artificial Sequence
  Description of Artificial Sequence: Synthetic oligonucleotide
uucgguauccagggcggca

SEQ ID NO: 812756 - RNA, 19 nt, Artificial Sequence
  Description of Artificial Sequence: Synthetic oligonucleotide
ggaaguaaggucugcgugu

SEQ ID NO: 812757 - RNA, 19 nt, Artificial Sequence
  Description of Artificial Sequence: Synthetic oligonucleotide
caacacaacgagguggaga

SEQ ID NO: 812758 - RNA, 19 nt, Artificial Sequence
  Description of Artificial Sequence: Synthetic oligonucleotide
cucaaacgcaguuccaacu

SEQ ID NO: 812759 - RNA, 19 nt, Artificial Sequence
  Description of Artificial Sequence: Synthetic oligonucleotide
gccaugugaacacugauau

SEQ ID NO: 812760 - RNA, 19 nt, Artificial Sequence
  Description of Artificial Sequence: Synthetic oligonucleotide
gcauacuaccucuccaauc

SEQ ID NO: 812761 - RNA, 19 nt, Artificial Sequence
  Description of Artificial Sequence: Synthetic oligonucleotide
ucgucccugaaggagccac

SEQ ID NO: 812762 - RNA, 19 nt, Artificial Sequence
  Description of Artificial Sequence: Synthetic oligonucleotide
ucguaccguacccuuucau

SEQ ID NO: 812763 - RNA, 19 nt, Artificial Sequence
  Description of Artificial Sequence: Synthetic oligonucleotide
caccaccuguccaaaauaa

SEQ ID NO: 812764 - RNA, 19 nt, Artificial Sequence
  Description of Artificial Sequence: Synthetic oligonucleotide
uugcaacuacugguggugu

SEQ ID NO: 812765 - RNA, 19 nt, Artificial Sequence
  Description of Artificial Sequence: Synthetic oligonucleotide
uccggaaacugugcagacu

SEQ ID NO: 812766 - RNA, 19 nt, Artificial Sequence
  Description of Artificial Sequence: Synthetic oligonucleotide
aguacugguccuguagaua

SEQ ID NO: 812767 - RNA, 19 nt, Artificial Sequence
  Description of Artificial Sequence: Synthetic oligonucleotide
uucuuggauacagcuuguc

SEQ ID NO: 812768 - RNA, 19 nt, Artificial Sequence
  Description of Artificial Sequence: Synthetic oligonucleotide
ggcugaggacuccauccgg

SEQ ID NO: 812769 - RNA, 19 nt, Artificial Sequence
  Description of Artificial Sequence: Synthetic oligonucleotide
acacaacgagguggagagc

SEQ ID NO: 812770 - RNA, 19 nt, Artificial Sequence
  Description of Artificial Sequence: Synthetic oligonucleotide
cuuguuaguauaguagcau

SEQ ID NO: 812771 - RNA, 19 nt, Artificial Sequence
  Description of Artificial Sequence: Synthetic oligonucleotide
uuccuccuacacauuucau

SEQ ID NO: 812772 - RNA, 19 nt, Artificial Sequence
  Description of Artificial Sequence: Synthetic oligonucleotide
uuaauccugugaggugagu

SEQ ID NO: 812773 - RNA, 19 nt, Artificial Sequence
  Description of Artificial Sequence: Synthetic oligonucleotide
uggacccauucauuugaua

SEQ ID NO: 812774 - RNA, 19 nt, Artificial Sequence
  Description of Artificial Sequence: Synthetic oligonucleotide
auaucuagccaugggucuu

SEQ ID NO: 812775 - RNA, 19 nt, Artificial Sequence
  Description of Artificial Sequence: Synthetic oligonucleotide
gcgauugacacaugucaca

SEQ ID NO: 812776 - RNA, 19 nt, Artificial Sequence
  Description of Artificial Sequence: Synthetic oligonucleotide
cugucuaguccaugagaca

SEQ ID NO: 812777 - RNA, 19 nt, Artificial Sequence
  Description of Artificial Sequence: Synthetic oligonucleotide
auugguccacccauccgca

SEQ ID NO: 812778 - RNA, 19 nt, Artificial Sequence
  Description of Artificial Sequence: Synthetic oligonucleotide
acaacgagguggagagcuc

SEQ ID NO: 812779 - RNA, 19 nt, Artificial Sequence
  Description of Artificial Sequence: Synthetic oligonucleotide
accauuugguaagacugua

SEQ ID NO: 812780 - RNA, 19 nt, Artificial Sequence
  Description of Artificial Sequence: Synthetic oligonucleotide
cacauggccuuuuccgaca

SEQ ID NO: 812781 - RNA, 19 nt, Artificial Sequence
  Description of Artificial Sequence: Synthetic oligonucleotide
gauaccccucauugcaggu

SEQ ID NO: 812782 - RNA, 19 nt, Artificial Sequence
  Description of Artificial Sequence: Synthetic oligonucleotide
ggaaacugugcagacugca

SEQ ID NO: 812783 - RNA, 19 nt, Artificial Sequence
  Description of Artificial Sequence: Synthetic oligonucleotide
ucgguauccagggcggcau

SEQ ID NO: 812784 - RNA, 19 nt, Artificial Sequence
  Description of Artificial Sequence: Synthetic oligonucleotide
ugcgugucucugcaccaua

SEQ ID NO: 812785 - RNA, 19 nt, Artificial Sequence
  Description of Artificial Sequence: Synthetic oligonucleotide
agccaugugaacacugaua

SEQ ID NO: 812786 - RNA, 19 nt, Artificial Sequence
  Description of Artificial Sequence: Synthetic oligonucleotide
cacaacgagguggagagcu

SEQ ID NO: 812787 - RNA, 19 nt, Artificial Sequence
  Description of Artificial Sequence: Synthetic oligonucleotide
aucgaacugcuuuccuaua

SEQ ID NO: 812788 - RNA, 19 nt, Artificial Sequence
  Description of Artificial Sequence: Synthetic oligonucleotide
gggauauaaggagguuugc

SEQ ID NO: 812789 - RNA, 19 nt, Artificial Sequence
  Description of Artificial Sequence: Synthetic oligonucleotide
cuggauggguuagaagcca

SEQ ID NO: 812790 - RNA, 19 nt, Artificial Sequence
  Description of Artificial Sequence: Synthetic oligonucleotide
cauucacgguaaucaaucu

SEQ ID NO: 812791 - RNA, 19 nt, Artificial Sequence
  Description of Artificial Sequence: Synthetic oligonucleotide
cuaccucuccaauccaugu

SEQ ID NO: 812792 - RNA, 19 nt, Artificial Sequence
  Description of Artificial Sequence: Synthetic oligonucleotide
cacauaauggaaugucauu

SEQ ID NO: 812793 - RNA, 19 nt, Artificial Sequence
  Description of Artificial Sequence: Synthetic oligonucleotide
cguacccuuucauuggaug

SEQ ID NO: 812794 - RNA, 19 nt, Artificial Sequence
  Description of Artificial Sequence: Synthetic oligonucleotide
ggcagguuaauuguguccu

SEQ ID NO: 812795 - RNA, 19 nt, Artificial Sequence
  Description of Artificial Sequence: Synthetic oligonucleotide
guguccugaccauuuggua

SEQ ID NO: 812796 - RNA, 19 nt, Artificial Sequence
  Description of Artificial Sequence: Synthetic oligonucleotide
cacauguggugguucccca

SEQ ID NO: 812797 - RNA, 19 nt, Artificial Sequence
  Description of Artificial Sequence: Synthetic oligonucleotide
gaaacugugcagacugcau

SEQ ID NO: 812798 - RNA, 19 nt, Artificial Sequence
  Description of Artificial Sequence: Synthetic oligonucleotide
ggauggguuagaagccacc

SEQ ID NO: 812799 - RNA, 19 nt, Artificial Sequence
  Description of Artificial Sequence: Synthetic oligonucleotide
gugcagacugcauccccuc

SEQ ID NO: 812800 - RNA, 19 nt, Artificial Sequence
  Description of Artificial Sequence: Synthetic oligonucleotide
ccacauggccuuuuccgac

SEQ ID NO: 812801 - RNA, 19 nt, Artificial Sequence
  Description of Artificial Sequence: Synthetic oligonucleotide
gcuuuccuauagguacugg

SEQ ID NO: 812802 - RNA, 19 nt, Artificial Sequence
  Description of Artificial Sequence: Synthetic oligonucleotide
acccuuucauuggauggau

SEQ ID NO: 812803 - RNA, 19 nt, Artificial Sequence
  Description of Artificial Sequence: Synthetic oligonucleotide
cugcggcauggaauuucag

SEQ ID NO: 812804 - RNA, 19 nt, Artificial Sequence
  Description of Artificial Sequence: Synthetic oligonucleotide
guaaggucugcgugucucu

SEQ ID NO: 812805 - RNA, 19 nt, Artificial Sequence
  Description of Artificial Sequence: Synthetic oligonucleotide
ggaaaaucgcaagguuuca

SEQ ID NO: 812806 - RNA, 19 nt, Artificial Sequence
  Description of Artificial Sequence: Synthetic oligonucleotide
gcagguuaauuguguccug

SEQ ID NO: 812807 - RNA, 19 nt, Artificial Sequence
  Description of Artificial Sequence: Synthetic oligonucleotide
gggcggcauuuguaggugg

SEQ ID NO: 812808 - RNA, 19 nt, Artificial Sequence
  Description of Artificial Sequence: Synthetic oligonucleotide
gugguuccccacaugaagu

SEQ ID NO: 812809 - RNA, 19 nt, Artificial Sequence
  Description of Artificial Sequence: Synthetic oligonucleotide
ucacaauguuggacccauu

SEQ ID NO: 812810 - RNA, 19 nt, Artificial Sequence
  Description of Artificial Sequence: Synthetic oligonucleotide
ggacccauccaguacuugu

SEQ ID NO: 812811 - RNA, 19 nt, Artificial Sequence
  Description of Artificial Sequence: Synthetic oligonucleotide
caacuacugguggugugca

SEQ ID NO: 812812 - RNA, 19 nt, Artificial Sequence
  Description of Artificial Sequence: Synthetic oligonucleotide
ccuggguaaacugucacaa

SEQ ID NO: 812813 - RNA, 19 nt, Artificial Sequence
  Description of Artificial Sequence: Synthetic oligonucleotide
gguuagaagccacccauuu

SEQ ID NO: 812814 - RNA, 19 nt, Artificial Sequence
  Description of Artificial Sequence: Synthetic oligonucleotide
uugguccacccauccgcau

SEQ ID NO: 812815 - RNA, 19 nt, Artificial Sequence
  Description of Artificial Sequence: Synthetic oligonucleotide
ucuagccaugggucuuguu

SEQ ID NO: 812816 - RNA, 19 nt, Artificial Sequence
  Description of Artificial Sequence: Synthetic oligonucleotide
auaccccucauugcaggua

SEQ ID NO: 812817 - RNA, 19 nt, Artificial Sequence
  Description of Artificial Sequence: Synthetic oligonucleotide
gguguaucuccaggaugcc

SEQ ID NO: 812818 - RNA, 19 nt, Artificial Sequence
  Description of Artificial Sequence: Synthetic oligonucleotide
ccacaaauccccuguugca

SEQ ID NO: 812819 - RNA, 19 nt, Artificial Sequence
  Description of Artificial Sequence: Synthetic oligonucleotide
ggguaugguuggucaggcc

SEQ ID NO: 812820 - RNA, 19 nt, Artificial Sequence
  Description of Artificial Sequence: Synthetic oligonucleotide
cugcuuuccuauagguacu

SEQ ID NO: 812821 - RNA, 19 nt, Artificial Sequence
  Description of Artificial Sequence: Synthetic oligonucleotide
cucguucucuguacacaaa

SEQ ID NO: 812822 - RNA, 19 nt, Artificial Sequence
  Description of Artificial Sequence: Synthetic oligonucleotide
uggcugggaccaaguuccu

SEQ ID NO: 812823 - RNA, 19 nt, Artificial Sequence
  Description of Artificial Sequence: Synthetic oligonucleotide
ccauuuuccacccuugcau

SEQ ID NO: 812824 - RNA, 19 nt, Artificial Sequence
  Description of Artificial Sequence: Synthetic oligonucleotide
ggcggcauuuguagguggc

SEQ ID NO: 812825 - RNA, 19 nt, Artificial Sequence
  Description of Artificial Sequence: Synthetic oligonucleotide
guaagacuguagccagagu

SEQ ID NO: 812826 - RNA, 19 nt, Artificial Sequence
  Description of Artificial Sequence: Synthetic oligonucleotide
ccaugugaacacugauauc

SEQ ID NO: 812827 - RNA, 19 nt, Artificial Sequence
  Description of Artificial Sequence: Synthetic oligonucleotide
ggccaagacccugacagaa

SEQ ID NO: 812828 - RNA, 19 nt, Artificial Sequence
  Description of Artificial Sequence: Synthetic oligonucleotide
cuauagguacugggaagua

SEQ ID NO: 812829 - RNA, 19 nt, Artificial Sequence
  Description of Artificial Sequence: Synthetic oligonucleotide
aucucaccuaacaguugau

SEQ ID NO: 812830 - RNA, 19 nt, Artificial Sequence
  Description of Artificial Sequence: Synthetic oligonucleotide
ggcuuuucacugcuccaaa

SEQ ID NO: 812831 - RNA, 19 nt, Artificial Sequence
  Description of Artificial Sequence: Synthetic oligonucleotide
ccuaacaguugauaccccu

SEQ ID NO: 812832 - RNA, 19 nt, Artificial Sequence
  Description of Artificial Sequence: Synthetic oligonucleotide
gcuguaugucaccucuucu

SEQ ID NO: 812833 - RNA, 19 nt, Artificial Sequence
  Description of Artificial Sequence: Synthetic oligonucleotide
gcugaggacuccauccgga

SEQ ID NO: 812834 - RNA, 19 nt, Artificial Sequence
  Description of Artificial Sequence: Synthetic oligonucleotide
ccucguucucuguacacaa

SEQ ID NO: 812835 - RNA, 19 nt, Artificial Sequence
  Description of Artificial Sequence: Synthetic oligonucleotide
uucgucccugaaggagcca

SEQ ID NO: 812836 - RNA, 19 nt, Artificial Sequence
  Description of Artificial Sequence: Synthetic oligonucleotide
ccacuuacaauucuuccau

SEQ ID NO: 812837 - RNA, 19 nt, Artificial Sequence
  Description of Artificial Sequence: Synthetic oligonucleotide
aucuagccaugggucuugu

SEQ ID NO: 812838 - RNA, 19 nt, Artificial Sequence
  Description of Artificial Sequence: Synthetic oligonucleotide
cccaaaggguguaucucca

SEQ ID NO: 812839 - RNA, 19 nt, Artificial Sequence
  Description of Artificial Sequence: Synthetic oligonucleotide
agguuucaagcuacaucuu

SEQ ID NO: 812840 - RNA, 19 nt, Artificial Sequence
  Description of Artificial Sequence: Synthetic oligonucleotide
ggcuuccauccuugugcag

SEQ ID NO: 812841 - RNA, 19 nt, Artificial Sequence
  Description of Artificial Sequence: Synthetic oligonucleotide
ccugcggcauggaauuuca

SEQ ID NO: 812842 - RNA, 19 nt, Artificial Sequence
  Description of Artificial Sequence: Synthetic oligonucleotide
ccugaccuauaugaaucuc

SEQ ID NO: 812843 - RNA, 19 nt, Artificial Sequence
  Description of Artificial Sequence: Synthetic oligonucleotide
ccuauagguacugggaagu

SEQ ID NO: 812844 - RNA, 19 nt, Artificial Sequence
  Description of Artificial Sequence: Synthetic oligonucleotide
cauucguaccguacccuuu

SEQ ID NO: 812845 - RNA, 19 nt, Artificial Sequence
  Description of Artificial Sequence: Synthetic oligonucleotide
ccaugagacacaaucccau

SEQ ID NO: 812846 - RNA, 19 nt, Artificial Sequence
  Description of Artificial Sequence: Synthetic oligonucleotide
gcaguggauugcuuucugu

SEQ ID NO: 812847 - RNA, 19 nt, Artificial Sequence
  Description of Artificial Sequence: Synthetic oligonucleotide
caagacccugacagaauuu

SEQ ID NO: 812848 - RNA, 19 nt, Artificial Sequence
  Description of Artificial Sequence: Synthetic oligonucleotide
cuggguaaacugucacaau

SEQ ID NO: 812849 - RNA, 19 nt, Artificial Sequence
  Description of Artificial Sequence: Synthetic oligonucleotide
cacugauaucugauuucau

SEQ ID NO: 812850 - RNA, 19 nt, Artificial Sequence
  Description of Artificial Sequence: Synthetic oligonucleotide
cacuuacaauucuuccauu

SEQ ID NO: 812851 - RNA, 19 nt, Artificial Sequence
  Description of Artificial Sequence: Synthetic oligonucleotide
aucuuggagcugggaccca

SEQ ID NO: 812852 - RNA, 19 nt, Artificial Sequence
  Description of Artificial Sequence: Synthetic oligonucleotide
gucaccucuucuccauauu

SEQ ID NO: 812853 - RNA, 19 nt, Artificial Sequence
  Description of Artificial Sequence: Synthetic oligonucleotide
gggacccauccaguacuug

SEQ ID NO: 812854 - RNA, 19 nt, Artificial Sequence
  Description of Artificial Sequence: Synthetic oligonucleotide
gccugcggcauggaauuuc

SEQ ID NO: 812855 - RNA, 19 nt, Artificial Sequence
  Description of Artificial Sequence: Synthetic oligonucleotide
ccaguucgucccugaagga

SEQ ID NO: 812856 - RNA, 19 nt, Artificial Sequence
  Description of Artificial Sequence: Synthetic oligonucleotide
auccccuguugcaguaaua

SEQ ID NO: 812857 - RNA, 19 nt, Artificial Sequence
  Description of Artificial Sequence: Synthetic oligonucleotide
ccaacacaacgagguggag

SEQ ID NO: 812858 - RNA, 19 nt, Artificial Sequence
  Description of Artificial Sequence: Synthetic oligonucleotide
ccaagacccugacagaauu

SEQ ID NO: 812859 - RNA, 19 nt, Artificial Sequence
  Description of Artificial Sequence: Synthetic oligonucleotide
ccaggcuaaaggacccaaa

SEQ ID NO: 812860 - RNA, 19 nt, Artificial Sequence
  Description of Artificial Sequence: Synthetic oligonucleotide
ggauguagucccaguucgu

SEQ ID NO: 812861 - RNA, 19 nt, Artificial Sequence
  Description of Artificial Sequence: Synthetic oligonucleotide
ugccugcggcauggaauuu

SEQ ID NO: 812862 - RNA, 19 nt, Artificial Sequence
  Description of Artificial Sequence: Synthetic oligonucleotide
ggcugggaccaaguuccuc

SEQ ID NO: 812863 - RNA, 19 nt, Artificial Sequence
  Description of Artificial Sequence: Synthetic oligonucleotide
gguccuguagauagcuguu

SEQ ID NO: 812864 - RNA, 19 nt, Artificial Sequence
  Description of Artificial Sequence: Synthetic oligonucleotide
agauaccauuugggauaua

SEQ ID NO: 812865 - RNA, 19 nt, Artificial Sequence
  Description of Artificial Sequence: Synthetic oligonucleotide
gcucuguguuuaauccugu

SEQ ID NO: 812866 - RNA, 19 nt, Artificial Sequence
  Description of Artificial Sequence: Synthetic oligonucleotide
cguaccguacccuuucauu

SEQ ID NO: 812867 - RNA, 19 nt, Artificial Sequence
  Description of Artificial Sequence: Synthetic oligonucleotide
ccuuugcaccaaacucaaa

SEQ ID NO: 812868 - RNA, 19 nt, Artificial Sequence
  Description of Artificial Sequence: Synthetic oligonucleotide
accccucauugcagguaua

SEQ ID NO: 812869 - RNA, 19 nt, Artificial Sequence
  Description of Artificial Sequence: Synthetic oligonucleotide
gcggcauuuguagguggcu

SEQ ID NO: 812870 - RNA, 19 nt, Artificial Sequence
  Description of Artificial Sequence: Synthetic oligonucleotide
ggguuagaagccacccauu

SEQ ID NO: 812871 - RNA, 19 nt, Artificial Sequence
  Description of Artificial Sequence: Synthetic oligonucleotide
gcgcaccaccuguccaaaa

SEQ ID NO: 812872 - RNA, 19 nt, Artificial Sequence
  Description of Artificial Sequence: Synthetic oligonucleotide
ccuuguaaacugguuucuu

SEQ ID NO: 812873 - RNA, 19 nt, Artificial Sequence
  Description of Artificial Sequence: Synthetic oligonucleotide
cgcaccaccuguccaaaau

SEQ ID NO: 812874 - RNA, 19 nt, Artificial Sequence
  Description of Artificial Sequence: Synthetic oligonucleotide
ccguacccuuucauuggau

SEQ ID NO: 812875 - RNA, 19 nt, Artificial Sequence
  Description of Artificial Sequence: Synthetic oligonucleotide
cgguauccagggcggcauu

SEQ ID NO: 812876 - RNA, 19 nt, Artificial Sequence
  Description of Artificial Sequence: Synthetic oligonucleotide
uugaauacaacuguaagag

SEQ ID NO: 812877 - RNA, 19 nt, Artificial Sequence
  Description of Artificial Sequence: Synthetic oligonucleotide
aaaguugagucguuuguac

SEQ ID NO: 812878 - RNA, 19 nt, Artificial Sequence
  Description of Artificial Sequence: Synthetic oligonucleotide
aaugcgucugcucagccgg

SEQ ID NO: 812879 - RNA, 19 nt, Artificial Sequence
  Description of Artificial Sequence: Synthetic oligonucleotide
augaauauuucaauggccc

SEQ ID NO: 812880 - RNA, 19 nt, Artificial Sequence
  Description of Artificial Sequence: Synthetic oligonucleotide
uuaaccuaggucuuuaacu

SEQ ID NO: 812881 - RNA, 19 nt, Artificial Sequence
  Description of Artificial Sequence: Synthetic oligonucleotide
aggaaaaugcuguuagcgc

SEQ ID NO: 812882 - RNA, 19 nt, Artificial Sequence
  Description of Artificial Sequence: Synthetic oligonucleotide
uuaucuaacagcaggcgca

SEQ ID NO: 812883 - RNA, 19 nt, Artificial Sequence
  Description of Artificial Sequence: Synthetic oligonucleotide
auacauagcagcugcaguc

SEQ ID NO: 812884 - RNA, 19 nt, Artificial Sequence
  Description of Artificial Sequence: Synthetic oligonucleotide
ucgucuuccagcaggaggg

SEQ ID NO: 812885 - RNA, 19 nt, Artificial Sequence
  Description of Artificial Sequence: Synthetic oligonucleotide
aaaaugcgucugcucagcc

SEQ ID NO: 812886 - RNA, 19 nt, Artificial Sequence
  Description of Artificial Sequence: Synthetic oligonucleotide
uuugcucccaguuggacag

SEQ ID NO: 812887 - RNA, 19 nt, Artificial Sequence
  Description of Artificial Sequence: Synthetic oligonucleotide
agcccuaauaccaaguacc

SEQ ID NO: 812888 - RNA, 19 nt, Artificial Sequence
  Description of Artificial Sequence: Synthetic oligonucleotide
agaggugaaaguugagucg

SEQ ID NO: 812889 - RNA, 19 nt, Artificial Sequence
  Description of Artificial Sequence: Synthetic oligonucleotide
uucuuaucuaacagcaggc

SEQ ID NO: 812890 - RNA, 19 nt, Artificial Sequence
  Description of Artificial Sequence: Synthetic oligonucleotide
aguugagucguuuguacuc

SEQ ID NO: 812891 - RNA, 19 nt, Artificial Sequence
  Description of Artificial Sequence: Synthetic oligonucleotide
aggucuuuaacuaaccaac

SEQ ID NO: 812892 - RNA, 19 nt, Artificial Sequence
  Description of Artificial Sequence: Synthetic oligonucleotide
uguuuuauccacaccccag

SEQ ID NO: 812893 - RNA, 19 nt, Artificial Sequence
  Description of Artificial Sequence: Synthetic oligonucleotide
gaggguuugaguaaggaug

SEQ ID NO: 812894 - RNA, 19 nt, Artificial Sequence
  Description of Artificial Sequence: Synthetic oligonucleotide
uuuaacuaaccaacugggc

SEQ ID NO: 812895 - RNA, 19 nt, Artificial Sequence
  Description of Artificial Sequence: Synthetic oligonucleotide
gaaaauggaagaccagggc

SEQ ID NO: 812896 - RNA, 19 nt, Artificial Sequence
  Description of Artificial Sequence: Synthetic oligonucleotide
ugaauacaacuguaagagg

SEQ ID NO: 812897 - RNA, 19 nt, Artificial Sequence
  Description of Artificial Sequence: Synthetic oligonucleotide
guaaggauggaugaggcag

SEQ ID NO: 812898 - RNA, 19 nt, Artificial Sequence
  Description of Artificial Sequence: Synthetic oligonucleotide
aaaugcgucugcucagccg

SEQ ID NO: 812899 - RNA, 19 nt, Artificial Sequence
  Description of Artificial Sequence: Synthetic oligonucleotide
ugguccguggccaagucgg

SEQ ID NO: 812900 - RNA, 19 nt, Artificial Sequence
  Description of Artificial Sequence: Synthetic oligonucleotide
agggaugaucuuaaaagcc

SEQ ID NO: 812901 - RNA, 19 nt, Artificial Sequence
  Description of Artificial Sequence: Synthetic oligonucleotide
guccaguugaggcauaggg

SEQ ID NO: 812902 - RNA, 19 nt, Artificial Sequence
  Description of Artificial Sequence: Synthetic oligonucleotide
cuuaucuaacagcaggcgc

SEQ ID NO: 812903 - RNA, 19 nt, Artificial Sequence
  Description of Artificial Sequence: Synthetic oligonucleotide
acuccggucauuuuggcug

SEQ ID NO: 812904 - RNA, 19 nt, Artificial Sequence
  Description of Artificial Sequence: Synthetic oligonucleotide
agggacugaaccaaaacac

SEQ ID NO: 812905 - RNA, 19 nt, Artificial Sequence
  Description of Artificial Sequence: Synthetic oligonucleotide
ucuuaucuaacagcaggcg

SEQ ID NO: 812906 - RNA, 19 nt, Artificial Sequence
  Description of Artificial Sequence: Synthetic oligonucleotide
gagagagcagcccuaauac

SEQ ID NO: 812907 - RNA, 19 nt, Artificial Sequence
  Description of Artificial Sequence: Synthetic oligonucleotide
gauaacaccucccggacuc

SEQ ID NO: 812908 - RNA, 19 nt, Artificial Sequence
  Description of Artificial Sequence: Synthetic oligonucleotide
cauaggaggguucuuauuc

SEQ ID NO: 812909 - RNA, 19 nt, Artificial Sequence
  Description of Artificial Sequence: Synthetic oligonucleotide
aaacuugccgaugcuacuc

SEQ ID NO: 812910 - RNA, 19 nt, Artificial Sequence
  Description of Artificial Sequence: Synthetic oligonucleotide
agagagcagcccuaauacc

SEQ ID NO: 812911 - RNA, 19 nt, Artificial Sequence
  Description of Artificial Sequence: Synthetic oligonucleotide
uguaccucgucuuccagca

SEQ ID NO: 812912 - RNA, 19 nt, Artificial Sequence
  Description of Artificial Sequence: Synthetic oligonucleotide
uccacuccggucauuuugg

SEQ ID NO: 812913 - RNA, 19 nt, Artificial Sequence
  Description of Artificial Sequence: Synthetic oligonucleotide
uaaccuaggucuuuaacua

SEQ ID NO: 812914 - RNA, 19 nt, Artificial Sequence
  Description of Artificial Sequence: Synthetic oligonucleotide
ucguacucggggaagcagg

SEQ ID NO: 812915 - RNA, 19 nt, Artificial Sequence
  Description of Artificial Sequence: Synthetic oligonucleotide
uguccuacagccugggaug

SEQ ID NO: 812916 - RNA, 19 nt, Artificial Sequence
  Description of Artificial Sequence: Synthetic oligonucleotide
cauguagaggugaaaguug

SEQ ID NO: 812917 - RNA, 19 nt, Artificial Sequence
  Description of Artificial Sequence: Synthetic oligonucleotide
acuguauuccaucucggca

SEQ ID NO: 812918 - RNA, 19 nt, Artificial Sequence
  Description of Artificial Sequence: Synthetic oligonucleotide
uucuugagugccauguaga

SEQ ID NO: 812919 - RNA, 19 nt, Artificial Sequence
  Description of Artificial Sequence: Synthetic oligonucleotide
aaguugagucguuuguacu

SEQ ID NO: 812920 - RNA, 19 nt, Artificial Sequence
  Description of Artificial Sequence: Synthetic oligonucleotide
gagucguuuguacucugcg

SEQ ID NO: 812921 - RNA, 19 nt, Artificial Sequence
  Description of Artificial Sequence: Synthetic oligonucleotide
ucucggaggguacaugugc

SEQ ID NO: 812922 - RNA, 19 nt, Artificial Sequence
  Description of Artificial Sequence: Synthetic oligonucleotide
aaaacuugccgaugcuacu

SEQ ID NO: 812923 - RNA, 19 nt, Artificial Sequence
  Description of Artificial Sequence: Synthetic oligonucleotide
guuugaguaaggauggaug

SEQ ID NO: 812924 - RNA, 19 nt, Artificial Sequence
  Description of Artificial Sequence: Synthetic oligonucleotide
ucuagcacccgguauggca

SEQ ID NO: 812925 - RNA, 19 nt, Artificial Sequence
  Description of Artificial Sequence: Synthetic oligonucleotide
ugauacauagcagcugcag

SEQ ID NO: 812926 - RNA, 19 nt, Artificial Sequence
  Description of Artificial Sequence: Synthetic oligonucleotide
agugcugacaucagguaac

SEQ ID NO: 812927 - RNA, 19 nt, Artificial Sequence
  Description of Artificial Sequence: Synthetic oligonucleotide
uucgguacuuggauaacac

SEQ ID NO: 812928 - RNA, 19 nt, Artificial Sequence
  Description of Artificial Sequence: Synthetic oligonucleotide
cuuggauaacaccucccgg

SEQ ID NO: 812929 - RNA, 19 nt, Artificial Sequence
  Description of Artificial Sequence: Synthetic oligonucleotide
uuucccuccccucugcuac

SEQ ID NO: 812930 - RNA, 19 nt, Artificial Sequence
  Description of Artificial Sequence: Synthetic oligonucleotide
uccaguuagcuuccagaag

SEQ ID NO: 812931 - RNA, 19 nt, Artificial Sequence
  Description of Artificial Sequence: Synthetic oligonucleotide
uagcguugugccaauguca

SEQ ID NO: 812932 - RNA, 19 nt, Artificial Sequence
  Description of Artificial Sequence: Synthetic oligonucleotide
ugacaugaccgucuccacc

SEQ ID NO: 812933 - RNA, 19 nt, Artificial Sequence
  Description of Artificial Sequence: Synthetic oligonucleotide
guuagcgccacuguauucc

SEQ ID NO: 812934 - RNA, 19 nt, Artificial Sequence
  Description of Artificial Sequence: Synthetic oligonucleotide
uuccggagacaacuguggg

SEQ ID NO: 812935 - RNA, 19 nt, Artificial Sequence
  Description of Artificial Sequence: Synthetic oligonucleotide
uuugaaccaggcuccaggu

SEQ ID NO: 812936 - RNA, 19 nt, Artificial Sequence
  Description of Artificial Sequence: Synthetic oligonucleotide
uugccgaugcuacucacac

SEQ ID NO: 812937 - RNA, 19 nt, Artificial Sequence
  Description of Artificial Sequence: Synthetic oligonucleotide
acgucugauuuccggagac

SEQ ID NO: 812938 - RNA, 19 nt, Artificial Sequence
  Description of Artificial Sequence: Synthetic oligonucleotide
aggguuugaguaaggaugg

SEQ ID NO: 812939 - RNA, 19 nt, Artificial Sequence
  Description of Artificial Sequence: Synthetic oligonucleotide
gugugcgccucauaggagg

SEQ ID NO: 812940 - RNA, 19 nt, Artificial Sequence
  Description of Artificial Sequence: Synthetic oligonucleotide
aacgcauacuucuuaucua

SEQ ID NO: 812941 - RNA, 19 nt, Artificial Sequence
  Description of Artificial Sequence: Synthetic oligonucleotide
uaauaccaaguaccggcug

SEQ ID NO: 812942 - RNA, 19 nt, Artificial Sequence
  Description of Artificial Sequence: Synthetic oligonucleotide
ggugccuuaaccuaggucu

SEQ ID NO: 812943 - RNA, 19 nt, Artificial Sequence
  Description of Artificial Sequence: Synthetic oligonucleotide
uggauaacaccucccggac

SEQ ID NO: 812944 - RNA, 19 nt, Artificial Sequence
  Description of Artificial Sequence: Synthetic oligonucleotide
ugauuuccggagacaacug

SEQ ID NO: 812945 - RNA, 19 nt, Artificial Sequence
  Description of Artificial Sequence: Synthetic oligonucleotide
gugaaaguugagucguuug

SEQ ID NO: 812946 - RNA, 19 nt, Artificial Sequence
  Description of Artificial Sequence: Synthetic oligonucleotide
agcgccacuguauuccauc

SEQ ID NO: 812947 - RNA, 19 nt, Artificial Sequence
  Description of Artificial Sequence: Synthetic oligonucleotide
gaucaggauuccuuugaac

SEQ ID NO: 812948 - RNA, 19 nt, Artificial Sequence
  Description of Artificial Sequence: Synthetic oligonucleotide
gaugaucuuaaaagccuug

SEQ ID NO: 812949 - RNA, 19 nt, Artificial Sequence
  Description of Artificial Sequence: Synthetic oligonucleotide
aauauuucaauggcccauu

SEQ ID NO: 812950 - RNA, 19 nt, Artificial Sequence
  Description of Artificial Sequence: Synthetic oligonucleotide
agcaggcgcaggaaaaugc

SEQ ID NO: 812951 - RNA, 19 nt, Artificial Sequence
  Description of Artificial Sequence: Synthetic oligonucleotide
uucggugccuuaaccuagg

SEQ ID NO: 812952 - RNA, 19 nt, Artificial Sequence
  Description of Artificial Sequence: Synthetic oligonucleotide
aagcccgacaccucugaca

SEQ ID NO: 812953 - RNA, 19 nt, Artificial Sequence
  Description of Artificial Sequence: Synthetic oligonucleotide
agccuucggugccuuaacc

SEQ ID NO: 812954 - RNA, 19 nt, Artificial Sequence
  Description of Artificial Sequence: Synthetic oligonucleotide
cuccuauccucccuggacc

SEQ ID NO: 812955 - RNA, 19 nt, Artificial Sequence
  Description of Artificial Sequence: Synthetic oligonucleotide
ucgguacuuggauaacacc

SEQ ID NO: 812956 - RNA, 19 nt, Artificial Sequence
  Description of Artificial Sequence: Synthetic oligonucleotide
guacagugaggccuguacc

SEQ ID NO: 812957 - RNA, 19 nt, Artificial Sequence
  Description of Artificial Sequence: Synthetic oligonucleotide
accuaggucuuuaacuaac

SEQ ID NO: 812958 - RNA, 19 nt, Artificial Sequence
  Description of Artificial Sequence: Synthetic oligonucleotide
aacuugccgaugcuacuca

SEQ ID NO: 812959 - RNA, 19 nt, Artificial Sequence
  Description of Artificial Sequence: Synthetic oligonucleotide
uuauugccuuugaauacaa

SEQ ID NO: 812960 - RNA, 19 nt, Artificial Sequence
  Description of Artificial Sequence: Synthetic oligonucleotide
ugcugcaaaaugcgucugc

SEQ ID NO: 812961 - RNA, 19 nt, Artificial Sequence
  Description of Artificial Sequence: Synthetic oligonucleotide
uaucuaacagcaggcgcag

SEQ ID NO: 812962 - RNA, 19 nt, Artificial Sequence
  Description of Artificial Sequence: Synthetic oligonucleotide
auaaccaacucuguuuuau

SEQ ID NO: 812963 - RNA, 19 nt, Artificial Sequence
  Description of Artificial Sequence: Synthetic oligonucleotide
aaccuaggucuuuaacuaa

SEQ ID NO: 812964 - RNA, 19 nt, Artificial Sequence
  Description of Artificial Sequence: Synthetic oligonucleotide
ucugauuuccggagacaac

SEQ ID NO: 812965 - RNA, 19 nt, Artificial Sequence
  Description of Artificial Sequence: Synthetic oligonucleotide
cauccguucucucagauua

SEQ ID NO: 812966 - RNA, 19 nt, Artificial Sequence
  Description of Artificial Sequence: Synthetic oligonucleotide
cuucggugccuuaaccuag

SEQ ID NO: 812967 - RNA, 19 nt, Artificial Sequence
  Description of Artificial Sequence: Synthetic oligonucleotide
agaccagggcgucuagcac

SEQ ID NO: 812968 - RNA, 19 nt, Artificial Sequence
  Description of Artificial Sequence: Synthetic oligonucleotide
aauaaccaacucuguuuua

SEQ ID NO: 812969 - RNA, 19 nt, Artificial Sequence
  Description of Artificial Sequence: Synthetic oligonucleotide
agucguuuguacucugcga

SEQ ID NO: 812970 - RNA, 19 nt, Artificial Sequence
  Description of Artificial Sequence: Synthetic oligonucleotide
ucguuuguacucugcgaug

SEQ ID NO: 812971 - RNA, 19 nt, Artificial Sequence
  Description of Artificial Sequence: Synthetic oligonucleotide
agcgcugagccauccguuc

SEQ ID NO: 812972 - RNA, 19 nt, Artificial Sequence
  Description of Artificial Sequence: Synthetic oligonucleotide
gauacauagcagcugcagu

SEQ ID NO: 812973 - RNA, 19 nt, Artificial Sequence
  Description of Artificial Sequence: Synthetic oligonucleotide
acuugccgaugcuacucac

SEQ ID NO: 812974 - RNA, 19 nt, Artificial Sequence
  Description of Artificial Sequence: Synthetic oligonucleotide
gucgaagcaguuccaggag

SEQ ID NO: 812975 - RNA, 19 nt, Artificial Sequence
  Description of Artificial Sequence: Synthetic oligonucleotide
ucaucucguacucggggaa

SEQ ID NO: 812976 - RNA, 19 nt, Artificial Sequence
  Description of Artificial Sequence: Synthetic oligonucleotide
uguauuccaucucggcaau

SEQ ID NO: 812977 - RNA, 19 nt, Artificial Sequence
  Description of Artificial Sequence: Synthetic oligonucleotide
uauugccuuugaauacaac

SEQ ID NO: 812978 - RNA, 19 nt, Artificial Sequence
  Description of Artificial Sequence: Synthetic oligonucleotide
aggugagcgcugucauucc

SEQ ID NO: 812979 - RNA, 19 nt, Artificial Sequence
  Description of Artificial Sequence: Synthetic oligonucleotide
guccacuccggucauuuug

SEQ ID NO: 812980 - RNA, 19 nt, Artificial Sequence
  Description of Artificial Sequence: Synthetic oligonucleotide
guagcguugugccaauguc

SEQ ID NO: 812981 - RNA, 19 nt, Artificial Sequence
  Description of Artificial Sequence: Synthetic oligonucleotide
ugucucggguccccgcgcg

SEQ ID NO: 812982 - RNA, 19 nt, Artificial Sequence
  Description of Artificial Sequence: Synthetic oligonucleotide
caagguuguagaagcgcug

SEQ ID NO: 812983 - RNA, 19 nt, Artificial Sequence
  Description of Artificial Sequence: Synthetic oligonucleotide
uucucggaggguacaugug

SEQ ID NO: 812984 - RNA, 19 nt, Artificial Sequence
  Description of Artificial Sequence: Synthetic oligonucleotide
ucugcgaugucaucucgua

SEQ ID NO: 812985 - RNA, 19 nt, Artificial Sequence
  Description of Artificial Sequence: Synthetic oligonucleotide
gaccaagacaggugagcgc

SEQ ID NO: 812986 - RNA, 19 nt, Artificial Sequence
  Description of Artificial Sequence: Synthetic oligonucleotide
uguaccccacaagcggugg

SEQ ID NO: 812987 - RNA, 19 nt, Artificial Sequence
  Description of Artificial Sequence: Synthetic oligonucleotide
agcccgacaccucugacau

SEQ ID NO: 812988 - RNA, 19 nt, Artificial Sequence
  Description of Artificial Sequence: Synthetic oligonucleotide
cucacacgugggaagccgg

SEQ ID NO: 812989 - RNA, 19 nt, Artificial Sequence
  Description of Artificial Sequence: Synthetic oligonucleotide
cauagggaagcccgacacc

SEQ ID NO: 812990 - RNA, 19 nt, Artificial Sequence
  Description of Artificial Sequence: Synthetic oligonucleotide
gccagugugcgccucauag

SEQ ID NO: 812991 - RNA, 19 nt, Artificial Sequence
  Description of Artificial Sequence: Synthetic oligonucleotide
aaauccugguggcuugaua

SEQ ID NO: 812992 - RNA, 19 nt, Artificial Sequence
  Description of Artificial Sequence: Synthetic oligonucleotide
uccuauccucccuggacca

SEQ ID NO: 812993 - RNA, 19 nt, Artificial Sequence
  Description of Artificial Sequence: Synthetic oligonucleotide
gguacagugaggccuguac

SEQ ID NO: 812994 - RNA, 19 nt, Artificial Sequence
  Description of Artificial Sequence: Synthetic oligonucleotide
ccaaccagaucaauccucc

SEQ ID NO: 812995 - RNA, 19 nt, Artificial Sequence
  Description of Artificial Sequence: Synthetic oligonucleotide
cuacucacacgugggaagc

SEQ ID NO: 812996 - RNA, 19 nt, Artificial Sequence
  Description of Artificial Sequence: Synthetic oligonucleotide
ggaccaagacaggugagcg

SEQ ID NO: 812997 - RNA, 19 nt, Artificial Sequence
  Description of Artificial Sequence: Synthetic oligonucleotide
cuaggucuuuaacuaacca

SEQ ID NO: 812998 - RNA, 19 nt, Artificial Sequence
  Description of Artificial Sequence: Synthetic oligonucleotide
caguugaggcauagggaag

SEQ ID NO: 812999 - RNA, 19 nt, Artificial Sequence
  Description of Artificial Sequence: Synthetic oligonucleotide
aagcggugguaaccccugg

SEQ ID NO: 813000 - RNA, 19 nt, Artificial Sequence
  Description of Artificial Sequence: Synthetic oligonucleotide
uacucugcgaugucaucuc

SEQ ID NO: 813001 - RNA, 19 nt, Artificial Sequence
  Description of Artificial Sequence: Synthetic oligonucleotide
uuagcgccacuguauucca

SEQ ID NO: 813002 - RNA, 19 nt, Artificial Sequence
  Description of Artificial Sequence: Synthetic oligonucleotide
ccaaguaccggcuggguug

SEQ ID NO: 813003 - RNA, 19 nt, Artificial Sequence
  Description of Artificial Sequence: Synthetic oligonucleotide
ucgucgguuccauccuggg

SEQ ID NO: 813004 - RNA, 19 nt, Artificial Sequence
  Description of Artificial Sequence: Synthetic oligonucleotide
ugccgaugcuacucacacg

SEQ ID NO: 813005 - RNA, 19 nt, Artificial Sequence
  Description of Artificial Sequence: Synthetic oligonucleotide
ucccggacuccucuguaga

SEQ ID NO: 813006 - RNA, 19 nt, Artificial Sequence
  Description of Artificial Sequence: Synthetic oligonucleotide
agguuguagaagcgcugag

SEQ ID NO: 813007 - RNA, 19 nt, Artificial Sequence
  Description of Artificial Sequence: Synthetic oligonucleotide
auaacaccucccggacucc

SEQ ID NO: 813008 - RNA, 19 nt, Artificial Sequence
  Description of Artificial Sequence: Synthetic oligonucleotide
cauccuggggcacucccag

SEQ ID NO: 813009 - RNA, 19 nt, Artificial Sequence
  Description of Artificial Sequence: Synthetic oligonucleotide
cagcccuaauaccaaguac

SEQ ID NO: 813010 - RNA, 19 nt, Artificial Sequence
  Description of Artificial Sequence: Synthetic oligonucleotide
accagggcgucuagcaccc

SEQ ID NO: 813011 - RNA, 19 nt, Artificial Sequence
  Description of Artificial Sequence: Synthetic oligonucleotide
cagugugcgccucauagga

SEQ ID NO: 813012 - RNA, 19 nt, Artificial Sequence
  Description of Artificial Sequence: Synthetic oligonucleotide
cucacgucugauuuccgga

SEQ ID NO: 813013 - RNA, 19 nt, Artificial Sequence
  Description of Artificial Sequence: Synthetic oligonucleotide
caacgcauacuucuuaucu

SEQ ID NO: 813014 - RNA, 19 nt, Artificial Sequence
  Description of Artificial Sequence: Synthetic oligonucleotide
uguuagcgccacuguauuc

SEQ ID NO: 813015 - RNA, 19 nt, Artificial Sequence
  Description of Artificial Sequence: Synthetic oligonucleotide
cacuucgguacuuggauaa

SEQ ID NO: 813016 - RNA, 19 nt, Artificial Sequence
  Description of Artificial Sequence: Synthetic oligonucleotide
gucaucucguacucgggga

SEQ ID NO: 813017 - RNA, 19 nt, Artificial Sequence
  Description of Artificial Sequence: Synthetic oligonucleotide
uucccguggcuuugcaggc

SEQ ID NO: 813018 - RNA, 19 nt, Artificial Sequence
  Description of Artificial Sequence: Synthetic oligonucleotide
acuucgguacuuggauaac

SEQ ID NO: 813019 - RNA, 19 nt, Artificial Sequence
  Description of Artificial Sequence: Synthetic oligonucleotide
ugcugucguaagccuucgg

SEQ ID NO: 813020 - RNA, 19 nt, Artificial Sequence
  Description of Artificial Sequence: Synthetic oligonucleotide
ucauaggaggguucuuauu

SEQ ID NO: 813021 - RNA, 19 nt, Artificial Sequence
  Description of Artificial Sequence: Synthetic oligonucleotide
caagcggugguaaccccug

SEQ ID NO: 813022 - RNA, 19 nt, Artificial Sequence
  Description of Artificial Sequence: Synthetic oligonucleotide
cuguaagaggguacaguga

SEQ ID NO: 813023 - RNA, 19 nt, Artificial Sequence
  Description of Artificial Sequence: Synthetic oligonucleotide
ucggaggguacaugugcca

SEQ ID NO: 813024 - RNA, 19 nt, Artificial Sequence
  Description of Artificial Sequence: Synthetic oligonucleotide
uccguucucucagauuaga

SEQ ID NO: 813025 - RNA, 19 nt, Artificial Sequence
  Description of Artificial Sequence: Synthetic oligonucleotide
gaauauuucaauggcccau

SEQ ID NO: 813026 - RNA, 19 nt, Artificial Sequence
  Description of Artificial Sequence: Synthetic oligonucleotide
gacucgcacaaugggauca

SEQ ID NO: 813027 - RNA, 19 nt, Artificial Sequence
  Description of Artificial Sequence: Synthetic oligonucleotide
ugcuacucacacgugggaa

SEQ ID NO: 813028 - RNA, 19 nt, Artificial Sequence
  Description of Artificial Sequence: Synthetic oligonucleotide
gauuuccggagacaacugu

SEQ ID NO: 813029 - RNA, 19 nt, Artificial Sequence
  Description of Artificial Sequence: Synthetic oligonucleotide
gcucacgucugauuuccgg

SEQ ID NO: 813030 - RNA, 19 nt, Artificial Sequence
  Description of Artificial Sequence: Synthetic oligonucleotide
gaggugaaaguugagucgu

SEQ ID NO: 813031 - RNA, 19 nt, Artificial Sequence
  Description of Artificial Sequence: Synthetic oligonucleotide
cugauuuccggagacaacu

SEQ ID NO: 813032 - RNA, 19 nt, Artificial Sequence
  Description of Artificial Sequence: Synthetic oligonucleotide
cuagcacccgguauggcaa

SEQ ID NO: 813033 - RNA, 19 nt, Artificial Sequence
  Description of Artificial Sequence: Synthetic oligonucleotide
uaccgcuuugugguccagg

SEQ ID NO: 813034 - RNA, 19 nt, Artificial Sequence
  Description of Artificial Sequence: Synthetic oligonucleotide
augcuacucacacguggga

SEQ ID NO: 813035 - RNA, 19 nt, Artificial Sequence
  Description of Artificial Sequence: Synthetic oligonucleotide
acaugaccgucuccaccuc

SEQ ID NO: 813036 - RNA, 19 nt, Artificial Sequence
  Description of Artificial Sequence: Synthetic oligonucleotide
gucguuuguacucugcgau

SEQ ID NO: 813037 - RNA, 19 nt, Artificial Sequence
  Description of Artificial Sequence: Synthetic oligonucleotide
cucuucaaccccgcguccc

SEQ ID NO: 813038 - RNA, 19 nt, Artificial Sequence
  Description of Artificial Sequence: Synthetic oligonucleotide
cugauuccgggccccgcgg

SEQ ID NO: 813039 - RNA, 19 nt, Artificial Sequence
  Description of Artificial Sequence: Synthetic oligonucleotide
aacaccucccggacuccuc

SEQ ID NO: 813040 - RNA, 19 nt, Artificial Sequence
  Description of Artificial Sequence: Synthetic oligonucleotide
aucgucgguuccauccugg

SEQ ID NO: 813041 - RNA, 19 nt, Artificial Sequence
  Description of Artificial Sequence: Synthetic oligonucleotide
aggcauagggaagcccgac

SEQ ID NO: 813042 - RNA, 19 nt, Artificial Sequence
  Description of Artificial Sequence: Synthetic oligonucleotide
aggauuccuuugaaccagg

SEQ ID NO: 813043 - RNA, 19 nt, Artificial Sequence
  Description of Artificial Sequence: Synthetic oligonucleotide
gucauuccauggugacagg

SEQ ID NO: 813044 - RNA, 19 nt, Artificial Sequence
  Description of Artificial Sequence: Synthetic oligonucleotide
gcccuaauaccaaguaccg

SEQ ID NO: 813045 - RNA, 19 nt, Artificial Sequence
  Description of Artificial Sequence: Synthetic oligonucleotide
cagggcgucuagcacccgg

SEQ ID NO: 813046 - RNA, 19 nt, Artificial Sequence
  Description of Artificial Sequence: Synthetic oligonucleotide
gucugauuuccggagacaa

SEQ ID NO: 813047 - RNA, 19 nt, Artificial Sequence
  Description of Artificial Sequence: Synthetic oligonucleotide
cacaccccagugaacugac

SEQ ID NO: 813048 - RNA, 19 nt, Artificial Sequence
  Description of Artificial Sequence: Synthetic oligonucleotide
agucccguguucagucucg

SEQ ID NO: 813049 - RNA, 19 nt, Artificial Sequence
  Description of Artificial Sequence: Synthetic oligonucleotide
uugaaccaggcuccagguu

SEQ ID NO: 813050 - RNA, 19 nt, Artificial Sequence
  Description of Artificial Sequence: Synthetic oligonucleotide
caaagccuagaauggcaga

SEQ ID NO: 813051 - RNA, 19 nt, Artificial Sequence
  Description of Artificial Sequence: Synthetic oligonucleotide
caacuguaagaggguacag

SEQ ID NO: 813052 - RNA, 19 nt, Artificial Sequence
  Description of Artificial Sequence: Synthetic oligonucleotide
augucaucucguacucggg

SEQ ID NO: 813053 - RNA, 19 nt, Artificial Sequence
  Description of Artificial Sequence: Synthetic oligonucleotide
cacaagcggugguaacccc

SEQ ID NO: 813054 - RNA, 19 nt, Artificial Sequence
  Description of Artificial Sequence: Synthetic oligonucleotide
cuugccgaugcuacucaca

SEQ ID NO: 813055 - RNA, 19 nt, Artificial Sequence
  Description of Artificial Sequence: Synthetic oligonucleotide
gcgucuagcacccgguaug

SEQ ID NO: 813056 - RNA, 19 nt, Artificial Sequence
  Description of Artificial Sequence: Synthetic oligonucleotide
uagaagcgcugagccaucc

SEQ ID NO: 813057 - RNA, 19 nt, Artificial Sequence
  Description of Artificial Sequence: Synthetic oligonucleotide
cugcgaugucaucucguac

SEQ ID NO: 813058 - RNA, 19 nt, Artificial Sequence
  Description of Artificial Sequence: Synthetic oligonucleotide
ggagagagcagcccuaaua

SEQ ID NO: 813059 - RNA, 19 nt, Artificial Sequence
  Description of Artificial Sequence: Synthetic oligonucleotide
gaagcccgacaccucugac

SEQ ID NO: 813060 - RNA, 19 nt, Artificial Sequence
  Description of Artificial Sequence: Synthetic oligonucleotide
uguagaccuccaggacccg

SEQ ID NO: 813061 - RNA, 19 nt, Artificial Sequence
  Description of Artificial Sequence: Synthetic oligonucleotide
gguauggcaacgcauacuu

SEQ ID NO: 813062 - RNA, 19 nt, Artificial Sequence
  Description of Artificial Sequence: Synthetic oligonucleotide
ucugguccguggccaaguc

SEQ ID NO: 813063 - RNA, 19 nt, Artificial Sequence
  Description of Artificial Sequence: Synthetic oligonucleotide
gacugcacucuggagcuca

SEQ ID NO: 813064 - RNA, 19 nt, Artificial Sequence
  Description of Artificial Sequence: Synthetic oligonucleotide
acaagcggugguaaccccu

SEQ ID NO: 813065 - RNA, 19 nt, Artificial Sequence
  Description of Artificial Sequence: Synthetic oligonucleotide
cuucgguacuuggauaaca

SEQ ID NO: 813066 - RNA, 19 nt, Artificial Sequence
  Description of Artificial Sequence: Synthetic oligonucleotide
acacgugggaagccgguuu

SEQ ID NO: 813067 - RNA, 19 nt, Artificial Sequence
  Description of Artificial Sequence: Synthetic oligonucleotide
ucccguguucagucucgag

SEQ ID NO: 813068 - RNA, 19 nt, Artificial Sequence
  Description of Artificial Sequence: Synthetic oligonucleotide
gccgaugcuacucacacgu

SEQ ID NO: 813069 - RNA, 19 nt, Artificial Sequence
  Description of Artificial Sequence: Synthetic oligonucleotide
ugcgucugcucagccgggg

SEQ ID NO: 813070 - RNA, 19 nt, Artificial Sequence
  Description of Artificial Sequence: Synthetic oligonucleotide
agccgcguggcgcguuccc

SEQ ID NO: 813071 - RNA, 19 nt, Artificial Sequence
  Description of Artificial Sequence: Synthetic oligonucleotide
gcuugauacauagcagcug

SEQ ID NO: 813072 - RNA, 19 nt, Artificial Sequence
  Description of Artificial Sequence: Synthetic oligonucleotide
caucucguacucggggaag

SEQ ID NO: 813073 - RNA, 19 nt, Artificial Sequence
  Description of Artificial Sequence: Synthetic oligonucleotide
ugccaaugucaggaggcac

SEQ ID NO: 813074 - RNA, 19 nt, Artificial Sequence
  Description of Artificial Sequence: Synthetic oligonucleotide
guacucugcgaugucaucu

SEQ ID NO: 813075 - RNA, 19 nt, Artificial Sequence
  Description of Artificial Sequence: Synthetic oligonucleotide
ccaguuagcuuccagaagu

SEQ ID NO: 813076 - RNA, 19 nt, Artificial Sequence
  Description of Artificial Sequence: Synthetic oligonucleotide
acucgcacaaugggaucag

SEQ ID NO: 813077 - RNA, 19 nt, Artificial Sequence
  Description of Artificial Sequence: Synthetic oligonucleotide
agguaacuccaguuagcuu

SEQ ID NO: 813078 - RNA, 19 nt, Artificial Sequence
  Description of Artificial Sequence: Synthetic oligonucleotide
uaaccccuggugguugcug

SEQ ID NO: 813079 - RNA, 19 nt, Artificial Sequence
  Description of Artificial Sequence: Synthetic oligonucleotide
agugugcgccucauaggag

SEQ ID NO: 813080 - RNA, 19 nt, Artificial Sequence
  Description of Artificial Sequence: Synthetic oligonucleotide
caugugccagacucgcaca

SEQ ID NO: 813081 - RNA, 19 nt, Artificial Sequence
  Description of Artificial Sequence: Synthetic oligonucleotide
ccagugugcgccucauagg

SEQ ID NO: 813082 - RNA, 19 nt, Artificial Sequence
  Description of Artificial Sequence: Synthetic oligonucleotide
caucgucgguuccauccug

SEQ ID NO: 813083 - RNA, 19 nt, Artificial Sequence
  Description of Artificial Sequence: Synthetic oligonucleotide
ccccagugaacugacacag

SEQ ID NO: 813084 - RNA, 19 nt, Artificial Sequence
  Description of Artificial Sequence: Synthetic oligonucleotide
agcagcccuaauaccaagu

SEQ ID NO: 813085 - RNA, 19 nt, Artificial Sequence
  Description of Artificial Sequence: Synthetic oligonucleotide
ucggugccuuaaccuaggu

SEQ ID NO: 813086 - RNA, 19 nt, Artificial Sequence
  Description of Artificial Sequence: Synthetic oligonucleotide
cucgcacaaugggaucagg

SEQ ID NO: 813087 - RNA, 19 nt, Artificial Sequence
  Description of Artificial Sequence: Synthetic oligonucleotide
ccuacagccugggaugggg

SEQ ID NO: 813088 - RNA, 19 nt, Artificial Sequence
  Description of Artificial Sequence: Synthetic oligonucleotide
auggggccgugccuuccuc

SEQ ID NO: 813089 - RNA, 19 nt, Artificial Sequence
  Description of Artificial Sequence: Synthetic oligonucleotide
gcggugguaaccccuggug

SEQ ID NO: 813090 - RNA, 19 nt, Artificial Sequence
  Description of Artificial Sequence: Synthetic oligonucleotide
ccguucucucagauuagag

SEQ ID NO: 813091 - RNA, 19 nt, Artificial Sequence
  Description of Artificial Sequence: Synthetic oligonucleotide
ugcgccucauaggaggguu

SEQ ID NO: 813092 - RNA, 19 nt, Artificial Sequence
  Description of Artificial Sequence: Synthetic oligonucleotide
ccuccuauccucccuggac

SEQ ID NO: 813093 - RNA, 19 nt, Artificial Sequence
  Description of Artificial Sequence: Synthetic oligonucleotide
aucugcucggccagaggug

SEQ ID NO: 813094 - RNA, 19 nt, Artificial Sequence
  Description of Artificial Sequence: Synthetic oligonucleotide
cagucccguguucagucuc

SEQ ID NO: 813095 - RNA, 19 nt, Artificial Sequence
  Description of Artificial Sequence: Synthetic oligonucleotide
gacaggugagcgcugucau

SEQ ID NO: 813096 - RNA, 19 nt, Artificial Sequence
  Description of Artificial Sequence: Synthetic oligonucleotide
acucggggaagcaggacaa

SEQ ID NO: 813097 - RNA, 19 nt, Artificial Sequence
  Description of Artificial Sequence: Synthetic oligonucleotide
cccacaagcggugguaacc

SEQ ID NO: 813098 - RNA, 19 nt, Artificial Sequence
  Description of Artificial Sequence: Synthetic oligonucleotide
uggcgcuucuccguccgga

SEQ ID NO: 813099 - RNA, 19 nt, Artificial Sequence
  Description of Artificial Sequence: Synthetic oligonucleotide
auccguucucucagauuag

SEQ ID NO: 813100 - RNA, 19 nt, Artificial Sequence
  Description of Artificial Sequence: Synthetic oligonucleotide
cacgucugauuuccggaga

SEQ ID NO: 813101 - RNA, 19 nt, Artificial Sequence
  Description of Artificial Sequence: Synthetic oligonucleotide
acaggugagcgcugucauu

SEQ ID NO: 813102 - RNA, 19 nt, Artificial Sequence
  Description of Artificial Sequence: Synthetic oligonucleotide
gcaacgcauacuucuuauc

SEQ ID NO: 813103 - RNA, 19 nt, Artificial Sequence
  Description of Artificial Sequence: Synthetic oligonucleotide
ccacaagcggugguaaccc

SEQ ID NO: 813104 - RNA, 19 nt, Artificial Sequence
  Description of Artificial Sequence: Synthetic oligonucleotide
ucggccagaggugcaugcu

SEQ ID NO: 813105 - RNA, 19 nt, Artificial Sequence
  Description of Artificial Sequence: Synthetic oligonucleotide
cccuaauaccaaguaccgg

SEQ ID NO: 813106 - RNA, 19 nt, Artificial Sequence
  Description of Artificial Sequence: Synthetic oligonucleotide
ucgagcuccuccugcuguu

SEQ ID NO: 813107 - RNA, 19 nt, Artificial Sequence
  Description of Artificial Sequence: Synthetic oligonucleotide
gccgggguccaacauacuc

SEQ ID NO: 813108 - RNA, 19 nt, Artificial Sequence
  Description of Artificial Sequence: Synthetic oligonucleotide
gcugucguaagccuucggu

SEQ ID NO: 813109 - RNA, 19 nt, Artificial Sequence
  Description of Artificial Sequence: Synthetic oligonucleotide
gaggcauagggaagcccga

SEQ ID NO: 813110 - RNA, 19 nt, Artificial Sequence
  Description of Artificial Sequence: Synthetic oligonucleotide
uccucaucgucgguuccau

SEQ ID NO: 813111 - RNA, 19 nt, Artificial Sequence
  Description of Artificial Sequence: Synthetic oligonucleotide
uaccccacaagcgguggua

SEQ ID NO: 813112 - RNA, 19 nt, Artificial Sequence
  Description of Artificial Sequence: Synthetic oligonucleotide
acucuggagcucacgucug

SEQ ID NO: 813113 - RNA, 19 nt, Artificial Sequence
  Description of Artificial Sequence: Synthetic oligonucleotide
cggugguaaccccuggugg

SEQ ID NO: 813114 - RNA, 19 nt, Artificial Sequence
  Description of Artificial Sequence: Synthetic oligonucleotide
ggauuccuuugaaccaggc

SEQ ID NO: 813115 - RNA, 19 nt, Artificial Sequence
  Description of Artificial Sequence: Synthetic oligonucleotide
aggguacaugugccagacu

SEQ ID NO: 813116 - RNA, 19 nt, Artificial Sequence
  Description of Artificial Sequence: Synthetic oligonucleotide
gcgaugucaucucguacuc

SEQ ID NO: 813117 - RNA, 19 nt, Artificial Sequence
  Description of Artificial Sequence: Synthetic oligonucleotide
cauagaggauuugcuccca

SEQ ID NO: 813118 - RNA, 19 nt, Artificial Sequence
  Description of Artificial Sequence: Synthetic oligonucleotide
cuacaucucuggggacugc

SEQ ID NO: 813119 - RNA, 19 nt, Artificial Sequence
  Description of Artificial Sequence: Synthetic oligonucleotide
uccugaggcccuguaccuc

SEQ ID NO: 813120 - RNA, 19 nt, Artificial Sequence
  Description of Artificial Sequence: Synthetic oligonucleotide
gcgcgcacugcauucccag

SEQ ID NO: 813121 - RNA, 19 nt, Artificial Sequence
  Description of Artificial Sequence: Synthetic oligonucleotide
ggaagcccgacaccucuga

SEQ ID NO: 813122 - RNA, 19 nt, Artificial Sequence
  Description of Artificial Sequence: Synthetic oligonucleotide
aaccaggcuccagguuuga

SEQ ID NO: 813123 - RNA, 19 nt, Artificial Sequence
  Description of Artificial Sequence: Synthetic oligonucleotide
cccgacaccucugacauga

SEQ ID NO: 813124 - RNA, 19 nt, Artificial Sequence
  Description of Artificial Sequence: Synthetic oligonucleotide
ugccuuaaccuaggucuuu

SEQ ID NO: 813125 - RNA, 19 nt, Artificial Sequence
  Description of Artificial Sequence: Synthetic oligonucleotide
gugccaaugucaggaggca

SEQ ID NO: 813126 - RNA, 19 nt, Artificial Sequence
  Description of Artificial Sequence: Synthetic oligonucleotide
caaguaccggcuggguuga

SEQ ID NO: 813127 - RNA, 19 nt, Artificial Sequence
  Description of Artificial Sequence: Synthetic oligonucleotide
caguuggacagugcaggga

SEQ ID NO: 813128 - RNA, 19 nt, Artificial Sequence
  Description of Artificial Sequence: Synthetic oligonucleotide
gcagcccuaauaccaagua

SEQ ID NO: 813129 - RNA, 19 nt, Artificial Sequence
  Description of Artificial Sequence: Synthetic oligonucleotide
cucggggaagcaggacaag

SEQ ID NO: 813130 - RNA, 19 nt, Artificial Sequence
  Description of Artificial Sequence: Synthetic oligonucleotide
cuuguccuacagccuggga

SEQ ID NO: 813131 - RNA, 19 nt, Artificial Sequence
  Description of Artificial Sequence: Synthetic oligonucleotide
cuucuccguccggaagccc

SEQ ID NO: 813132 - RNA, 19 nt, Artificial Sequence
  Description of Artificial Sequence: Synthetic oligonucleotide
uccccgccgcuugucucgg

SEQ ID NO: 813133 - RNA, 19 nt, Artificial Sequence
  Description of Artificial Sequence: Synthetic oligonucleotide
agggcgucuagcacccggu

SEQ ID NO: 813134 - RNA, 19 nt, Artificial Sequence
  Description of Artificial Sequence: Synthetic oligonucleotide
guagaagcgcugagccauc

SEQ ID NO: 813135 - RNA, 19 nt, Artificial Sequence
  Description of Artificial Sequence: Synthetic oligonucleotide
cuccugauuccgggccccg

SEQ ID NO: 813136 - RNA, 19 nt, Artificial Sequence
  Description of Artificial Sequence: Synthetic oligonucleotide
ggcaacgcauacuucuuau

SEQ ID NO: 813137 - RNA, 19 nt, Artificial Sequence
  Description of Artificial Sequence: Synthetic oligonucleotide
gguuugaguaaggauggau

SEQ ID NO: 813138 - RNA, 19 nt, Artificial Sequence
  Description of Artificial Sequence: Synthetic oligonucleotide
cuggcgcuucuccguccgg

SEQ ID NO: 813139 - RNA, 19 nt, Artificial Sequence
  Description of Artificial Sequence: Synthetic oligonucleotide
gucuagcacccgguauggc

SEQ ID NO: 813140 - RNA, 19 nt, Artificial Sequence
  Description of Artificial Sequence: Synthetic oligonucleotide
ucccguggcuuugcaggcu

SEQ ID NO: 813141 - RNA, 19 nt, Artificial Sequence
  Description of Artificial Sequence: Synthetic oligonucleotide
uccccgcgcgcacugcauu

SEQ ID NO: 813142 - RNA, 19 nt, Artificial Sequence
  Description of Artificial Sequence: Synthetic oligonucleotide
cacccgguauggcaacgca

SEQ ID NO: 813143 - RNA, 19 nt, Artificial Sequence
  Description of Artificial Sequence: Synthetic oligonucleotide
guauuccaucucggcaauc

SEQ ID NO: 813144 - RNA, 19 nt, Artificial Sequence
  Description of Artificial Sequence: Synthetic oligonucleotide
aaguaccggcuggguugag

SEQ ID NO: 813145 - RNA, 19 nt, Artificial Sequence
  Description of Artificial Sequence: Synthetic oligonucleotide
augcgucugcucagccggg

SEQ ID NO: 813146 - RNA, 19 nt, Artificial Sequence
  Description of Artificial Sequence: Synthetic oligonucleotide
cacgugggaagccgguuua

SEQ ID NO: 813147 - RNA, 19 nt, Artificial Sequence
  Description of Artificial Sequence: Synthetic oligonucleotide
cucgagcuccuccugcugu

SEQ ID NO: 813148 - RNA, 19 nt, Artificial Sequence
  Description of Artificial Sequence: Synthetic oligonucleotide
ccuucggugccuuaaccua

SEQ ID NO: 813149 - RNA, 19 nt, Artificial Sequence
  Description of Artificial Sequence: Synthetic oligonucleotide
gccuucggugccuuaaccu

SEQ ID NO: 813150 - RNA, 19 nt, Artificial Sequence
  Description of Artificial Sequence: Synthetic oligonucleotide
cgucgguuccauccugggg

SEQ ID NO: 813151 - RNA, 19 nt, Artificial Sequence
  Description of Artificial Sequence: Synthetic oligonucleotide
ggauaacaccucccggacu

SEQ ID NO: 813152 - RNA, 19 nt, Artificial Sequence
  Description of Artificial Sequence: Synthetic oligonucleotide
acuaaccaacugggcuccu

SEQ ID NO: 813153 - RNA, 19 nt, Artificial Sequence
  Description of Artificial Sequence: Synthetic oligonucleotide
gcuaccgcuuuguggucca

SEQ ID NO: 813154 - RNA, 19 nt, Artificial Sequence
  Description of Artificial Sequence: Synthetic oligonucleotide
cgucuagcacccgguaugg

SEQ ID NO: 813155 - RNA, 19 nt, Artificial Sequence
  Description of Artificial Sequence: Synthetic oligonucleotide
ccucuucaaccccgcgucc

SEQ ID NO: 813156 - RNA, 19 nt, Artificial Sequence
  Description of Artificial Sequence: Synthetic oligonucleotide
uggccaagucggccuugua

SEQ ID NO: 813157 - RNA, 19 nt, Artificial Sequence
  Description of Artificial Sequence: Synthetic oligonucleotide
gcgggccaccuucaauuug

SEQ ID NO: 813158 - RNA, 19 nt, Artificial Sequence
  Description of Artificial Sequence: Synthetic oligonucleotide
cuguuagcgccacuguauu

SEQ ID NO: 813159 - RNA, 19 nt, Artificial Sequence
  Description of Artificial Sequence: Synthetic oligonucleotide
gcuguuagcgccacuguau

SEQ ID NO: 813160 - RNA, 19 nt, Artificial Sequence
  Description of Artificial Sequence: Synthetic oligonucleotide
cccggacuccucuguagac

SEQ ID NO: 813161 - RNA, 19 nt, Artificial Sequence
  Description of Artificial Sequence: Synthetic oligonucleotide
caaccagaucaauccuccu

SEQ ID NO: 813162 - RNA, 19 nt, Artificial Sequence
  Description of Artificial Sequence: Synthetic oligonucleotide
gccuuguagcguugugcca

SEQ ID NO: 813163 - RNA, 19 nt, Artificial Sequence
  Description of Artificial Sequence: Synthetic oligonucleotide
gugcugacaucagguaacu

SEQ ID NO: 813164 - RNA, 19 nt, Artificial Sequence
  Description of Artificial Sequence: Synthetic oligonucleotide
cggagacaacugugggugg

SEQ ID NO: 813165 - RNA, 19 nt, Artificial Sequence
  Description of Artificial Sequence: Synthetic oligonucleotide
cuaccgcuuugugguccag

SEQ ID NO: 813166 - RNA, 19 nt, Artificial Sequence
  Description of Artificial Sequence: Synthetic oligonucleotide
cuuguagcguugugccaau

SEQ ID NO: 813167 - RNA, 19 nt, Artificial Sequence
  Description of Artificial Sequence: Synthetic oligonucleotide
gggccgugccuuccucucc

SEQ ID NO: 813168 - RNA, 19 nt, Artificial Sequence
  Description of Artificial Sequence: Synthetic oligonucleotide
guaccccacaagcgguggu

SEQ ID NO: 813169 - RNA, 19 nt, Artificial Sequence
  Description of Artificial Sequence: Synthetic oligonucleotide
cggaggguacaugugccag

SEQ ID NO: 813170 - RNA, 19 nt, Artificial Sequence
  Description of Artificial Sequence: Synthetic oligonucleotide
gcacccgguauggcaacgc

SEQ ID NO: 813171 - RNA, 19 nt, Artificial Sequence
  Description of Artificial Sequence: Synthetic oligonucleotide
ccgaugcuacucacacgug

SEQ ID NO: 813172 - RNA, 19 nt, Artificial Sequence
  Description of Artificial Sequence: Synthetic oligonucleotide
ccgcacuggagugcaacac

SEQ ID NO: 813173 - RNA, 19 nt, Artificial Sequence
  Description of Artificial Sequence: Synthetic oligonucleotide
ccgggguccaacauacucu

SEQ ID NO: 813174 - RNA, 19 nt, Artificial Sequence
  Description of Artificial Sequence: Synthetic oligonucleotide
ccguggcuuugcaggcugg

SEQ ID NO: 813175 - RNA, 19 nt, Artificial Sequence
  Description of Artificial Sequence: Synthetic oligonucleotide
gucccguguucagucucga

SEQ ID NO: 813176 - RNA, 19 nt, Artificial Sequence
  Description of Artificial Sequence: Synthetic oligonucleotide
gguccguggccaagucggc

SEQ ID NO: 813177 - RNA, 19 nt, Artificial Sequence
  Description of Artificial Sequence: Synthetic oligonucleotide
ccagacccagccgcguggc

SEQ ID NO: 813178 - RNA, 19 nt, Artificial Sequence
  Description of Artificial Sequence: Synthetic oligonucleotide
ccccacaagcggugguaac

SEQ ID NO: 813179 - RNA, 19 nt, Artificial Sequence
  Description of Artificial Sequence: Synthetic oligonucleotide
cccacuucgguacuuggau

SEQ ID NO: 813180 - RNA, 19 nt, Artificial Sequence
  Description of Artificial Sequence: Synthetic oligonucleotide
gccgcguggcgcguucccg

SEQ ID NO: 813181 - RNA, 19 nt, Artificial Sequence
  Description of Artificial Sequence: Synthetic oligonucleotide
gccuuaaccuaggucuuua

SEQ ID NO: 813182 - RNA, 19 nt, Artificial Sequence
  Description of Artificial Sequence: Synthetic oligonucleotide
guccggaagcccagaaaau

SEQ ID NO: 813183 - RNA, 19 nt, Artificial Sequence
  Description of Artificial Sequence: Synthetic oligonucleotide
ggcgucuagcacccgguau

SEQ ID NO: 813184 - RNA, 19 nt, Artificial Sequence
  Description of Artificial Sequence: Synthetic oligonucleotide
cagccgcguggcgcguucc

SEQ ID NO: 813185 - RNA, 19 nt, Artificial Sequence
  Description of Artificial Sequence: Synthetic oligonucleotide
cguuuguacucugcgaugu

SEQ ID NO: 813186 - RNA, 19 nt, Artificial Sequence
  Description of Artificial Sequence: Synthetic oligonucleotide
cguguucagucucgagcuc

SEQ ID NO: 813187 - RNA, 19 nt, Artificial Sequence
  Description of Artificial Sequence: Synthetic oligonucleotide
gugccuuaaccuaggucuu

SEQ ID NO: 813188 - RNA, 19 nt, Artificial Sequence
  Description of Artificial Sequence: Synthetic oligonucleotide
ccucaucgucgguuccauc

SEQ ID NO: 813189 - RNA, 19 nt, Artificial Sequence
  Description of Artificial Sequence: Synthetic oligonucleotide
cucagccgggguccaacau

SEQ ID NO: 813190 - RNA, 19 nt, Artificial Sequence
  Description of Artificial Sequence: Synthetic oligonucleotide
gcagucccguguucagucu

SEQ ID NO: 813191 - RNA, 19 nt, Artificial Sequence
  Description of Artificial Sequence: Synthetic oligonucleotide
ccccgcgcgcacugcauuc

SEQ ID NO: 813192 - RNA, 19 nt, Artificial Sequence
  Description of Artificial Sequence: Synthetic oligonucleotide
agccgggguccaacauacu

SEQ ID NO: 813193 - RNA, 19 nt, Artificial Sequence
  Description of Artificial Sequence: Synthetic oligonucleotide
gggguccaacauacucuuc

SEQ ID NO: 813194 - RNA, 19 nt, Artificial Sequence
  Description of Artificial Sequence: Synthetic oligonucleotide
gcgcugagccauccguucu

SEQ ID NO: 813195 - RNA, 19 nt, Artificial Sequence
  Description of Artificial Sequence: Synthetic oligonucleotide
ccgacaccucugacaugac

SEQ ID NO: 813196 - RNA, 19 nt, Artificial Sequence
  Description of Artificial Sequence: Synthetic oligonucleotide
ccgccgcuugucucggguc

SEQ ID NO: 813197 - RNA, 19 nt, Artificial Sequence
  Description of Artificial Sequence: Synthetic oligonucleotide
gcccgacaccucugacaug

SEQ ID NO: 813198 - RNA, 19 nt, Artificial Sequence
  Description of Artificial Sequence: Synthetic oligonucleotide
gcgccucauaggaggguuc

SEQ ID NO: 813199 - RNA, 19 nt, Artificial Sequence
  Description of Artificial Sequence: Synthetic oligonucleotide
gcgcguucccguggcuuug

SEQ ID NO: 813200 - RNA, 19 nt, Artificial Sequence
  Description of Artificial Sequence: Synthetic oligonucleotide
gcguucccguggcuuugca

SEQ ID NO: 813201 - RNA, 19 nt, Artificial Sequence
  Description of Artificial Sequence: Synthetic oligonucleotide
ccagccgcguggcgcguuc

SEQ ID NO: 813202 - RNA, 19 nt, Artificial Sequence
  Description of Artificial Sequence: Synthetic oligonucleotide
gugcgccucauaggagggu

SEQ ID NO: 813203 - RNA, 19 nt, Artificial Sequence
  Description of Artificial Sequence: Synthetic oligonucleotide
ccuccccucugcuaccgcu

SEQ ID NO: 813204 - RNA, 19 nt, Artificial Sequence
  Description of Artificial Sequence: Synthetic oligonucleotide
gcgucugcucagccggggu

SEQ ID NO: 813205 - RNA, 19 nt, Artificial Sequence
  Description of Artificial Sequence: Synthetic oligonucleotide
cgugggaagccgguuuaaa

SEQ ID NO: 813206 - RNA, 19 nt, Artificial Sequence
  Description of Artificial Sequence: Synthetic oligonucleotide
ccuauccucccuggaccaa

SEQ ID NO: 813207 - RNA, 19 nt, Artificial Sequence
  Description of Artificial Sequence: Synthetic oligonucleotide
caccuucaauuugggcauu

SEQ ID NO: 813208 - RNA, 19 nt, Artificial Sequence
  Description of Artificial Sequence: Synthetic oligonucleotide
cgguauggcaacgcauacu

SEQ ID NO: 813209 - RNA, 19 nt, Artificial Sequence
  Description of Artificial Sequence: Synthetic oligonucleotide
ccggcuggguugagggagu

SEQ ID NO: 813210 - RNA, 19 nt, Artificial Sequence
  Description of Artificial Sequence: Synthetic oligonucleotide
ccggucauuuuggcugccu

SEQ ID NO: 813211 - RNA, 19 nt, Artificial Sequence
  Description of Artificial Sequence: Synthetic oligonucleotide
cgcgggccaccuucaauuu

SEQ ID NO: 813212 - RNA, 19 nt, Artificial Sequence
  Description of Artificial Sequence: Synthetic oligonucleotide
ccguggccaagucggccuu

SEQ ID NO: 813213 - RNA, 19 nt, Artificial Sequence
  Description of Artificial Sequence: Synthetic oligonucleotide
ccccgcgggccaccuucaa

SEQ ID NO: 813214 - RNA, 19 nt, Artificial Sequence
  Description of Artificial Sequence: Synthetic oligonucleotide
aaguguuugaaguagaccc

SEQ ID NO: 813215 - RNA, 19 nt, Artificial Sequence
  Description of Artificial Sequence: Synthetic oligonucleotide
aauacaguaaacgauggcc

SEQ ID NO: 813216 - RNA, 19 nt, Artificial Sequence
  Description of Artificial Sequence: Synthetic oligonucleotide
accauuaggaguuugacgc

SEQ ID NO: 813217 - RNA, 19 nt, Artificial Sequence
  Description of Artificial Sequence: Synthetic oligonucleotide
acauguauaagacaugugc

SEQ ID NO: 813218 - RNA, 19 nt, Artificial Sequence
  Description of Artificial Sequence: Synthetic oligonucleotide
aaucuaaauaccaacuucc

SEQ ID NO: 813219 - RNA, 19 nt, Artificial Sequence
  Description of Artificial Sequence: Synthetic oligonucleotide
acaaaggagaaacagacac

SEQ ID NO: 813220 - RNA, 19 nt, Artificial Sequence
  Description of Artificial Sequence: Synthetic oligonucleotide
aaggcuaccuuccuaagcc

SEQ ID NO: 813221 - RNA, 19 nt, Artificial Sequence
  Description of Artificial Sequence: Synthetic oligonucleotide
aauauaucuugccaaagug

SEQ ID NO: 813222 - RNA, 19 nt, Artificial Sequence
  Description of Artificial Sequence: Synthetic oligonucleotide
ugagauaccccuaauaaca

SEQ ID NO: 813223 - RNA, 19 nt, Artificial Sequence
  Description of Artificial Sequence: Synthetic oligonucleotide
agaguuuggagcuugagag

SEQ ID NO: 813224 - RNA, 19 nt, Artificial Sequence
  Description of Artificial Sequence: Synthetic oligonucleotide
uuuauuuguugauugcugg

SEQ ID NO: 813225 - RNA, 19 nt, Artificial Sequence
  Description of Artificial Sequence: Synthetic oligonucleotide
caauguucagcuaacaucc

SEQ ID NO: 813226 - RNA, 19 nt, Artificial Sequence
  Description of Artificial Sequence: Synthetic oligonucleotide
aaauacaguaaacgauggc

SEQ ID NO: 813227 - RNA, 19 nt, Artificial Sequence
  Description of Artificial Sequence: Synthetic oligonucleotide
aauaaguucagagaagugu

SEQ ID NO: 813228 - RNA, 19 nt, Artificial Sequence
  Description of Artificial Sequence: Synthetic oligonucleotide
aauaacagucuuuagcccu

SEQ ID NO: 813229 - RNA, 19 nt, Artificial Sequence
  Description of Artificial Sequence: Synthetic oligonucleotide
aguagacccuuuuacaacc

SEQ ID NO: 813230 - RNA, 19 nt, Artificial Sequence
  Description of Artificial Sequence: Synthetic oligonucleotide
ucagcuaacaucccuaccc

SEQ ID NO: 813231 - RNA, 19 nt, Artificial Sequence
  Description of Artificial Sequence: Synthetic oligonucleotide
gaaaauaccagauaggccu

SEQ ID NO: 813232 - RNA, 19 nt, Artificial Sequence
  Description of Artificial Sequence: Synthetic oligonucleotide
uuuacaaccucaaaagggu

SEQ ID NO: 813233 - RNA, 19 nt, Artificial Sequence
  Description of Artificial Sequence: Synthetic oligonucleotide
aaauccacaucuccugggc

SEQ ID NO: 813234 - RNA, 19 nt, Artificial Sequence
  Description of Artificial Sequence: Synthetic oligonucleotide
aaaggcuaccuuccuaagc

SEQ ID NO: 813235 - RNA, 19 nt, Artificial Sequence
  Description of Artificial Sequence: Synthetic oligonucleotide
gucacuauuaugaaaaucc

SEQ ID NO: 813236 - RNA, 19 nt, Artificial Sequence
  Description of Artificial Sequence: Synthetic oligonucleotide
aacaggucuguuuggagac

SEQ ID NO: 813237 - RNA, 19 nt, Artificial Sequence
  Description of Artificial Sequence: Synthetic oligonucleotide
aauucuccaauguucagcu

SEQ ID NO: 813238 - RNA, 19 nt, Artificial Sequence
  Description of Artificial Sequence: Synthetic oligonucleotide
uauacuagggagugaauag

SEQ ID NO: 813239 - RNA, 19 nt, Artificial Sequence
  Description of Artificial Sequence: Synthetic oligonucleotide
uuuaccaagugucugauua

SEQ ID NO: 813240 - RNA, 19 nt, Artificial Sequence
  Description of Artificial Sequence: Synthetic oligonucleotide
ugaaagauuccugagguag

SEQ ID NO: 813241 - RNA, 19 nt, Artificial Sequence
  Description of Artificial Sequence: Synthetic oligonucleotide
aaguagacccuuuuacaac

SEQ ID NO: 813242 - RNA, 19 nt, Artificial Sequence
  Description of Artificial Sequence: Synthetic oligonucleotide
cauccugcaaucuaaauac

SEQ ID NO: 813243 - RNA, 19 nt, Artificial Sequence
  Description of Artificial Sequence: Synthetic oligonucleotide
agaaguguagaacacuguc

SEQ ID NO: 813244 - RNA, 19 nt, Artificial Sequence
  Description of Artificial Sequence: Synthetic oligonucleotide
ugaauggguaguuugaggu

SEQ ID NO: 813245 - RNA, 19 nt, Artificial Sequence
  Description of Artificial Sequence: Synthetic oligonucleotide
cucuuuauagggaaagggg

SEQ ID NO: 813246 - RNA, 19 nt, Artificial Sequence
  Description of Artificial Sequence: Synthetic oligonucleotide
cucacaacagacauucugg

SEQ ID NO: 813247 - RNA, 19 nt, Artificial Sequence
  Description of Artificial Sequence: Synthetic oligonucleotide
ucuaaauaccaacuucccc

SEQ ID NO: 813248 - RNA, 19 nt, Artificial Sequence
  Description of Artificial Sequence: Synthetic oligonucleotide
ugugcuccuuauuuuaugg

SEQ ID NO: 813249 - RNA, 19 nt, Artificial Sequence
  Description of Artificial Sequence: Synthetic oligonucleotide
uuauuuuauggcuucccag

SEQ ID NO: 813250 - RNA, 19 nt, Artificial Sequence
  Description of Artificial Sequence: Synthetic oligonucleotide
caagaugccaaucugguac

SEQ ID NO: 813251 - RNA, 19 nt, Artificial Sequence
  Description of Artificial Sequence: Synthetic oligonucleotide
uacaaggccagaaaugagc

SEQ ID NO: 813252 - RNA, 19 nt, Artificial Sequence
  Description of Artificial Sequence: Synthetic oligonucleotide
uaagcuuugacaugcaaaa

SEQ ID NO: 813253 - RNA, 19 nt, Artificial Sequence
  Description of Artificial Sequence: Synthetic oligonucleotide
aacguuucgagauugugau

SEQ ID NO: 813254 - RNA, 19 nt, Artificial Sequence
  Description of Artificial Sequence: Synthetic oligonucleotide
auuuuaaggagcuugugau

SEQ ID NO: 813255 - RNA, 19 nt, Artificial Sequence
  Description of Artificial Sequence: Synthetic oligonucleotide
ucucuuuauagggaaaggg

SEQ ID NO: 813256 - RNA, 19 nt, Artificial Sequence
  Description of Artificial Sequence: Synthetic oligonucleotide
aguaucuccuuccuugugg

SEQ ID NO: 813257 - RNA, 19 nt, Artificial Sequence
  Description of Artificial Sequence: Synthetic oligonucleotide
uagugauuguaccauuagg

SEQ ID NO: 813258 - RNA, 19 nt, Artificial Sequence
  Description of Artificial Sequence: Synthetic oligonucleotide
ggaaacaauaaguucagag

SEQ ID NO: 813259 - RNA, 19 nt, Artificial Sequence
  Description of Artificial Sequence: Synthetic oligonucleotide
ugcaaucuaaauaccaacu

SEQ ID NO: 813260 - RNA, 19 nt, Artificial Sequence
  Description of Artificial Sequence: Synthetic oligonucleotide
ucuuugugaagcuuauaag

SEQ ID NO: 813261 - RNA, 19 nt, Artificial Sequence
  Description of Artificial Sequence: Synthetic oligonucleotide
auacaguaaacgauggccc

SEQ ID NO: 813262 - RNA, 19 nt, Artificial Sequence
  Description of Artificial Sequence: Synthetic oligonucleotide
cuuauaagucaugacaggc

SEQ ID NO: 813263 - RNA, 19 nt, Artificial Sequence
  Description of Artificial Sequence: Synthetic oligonucleotide
uuauaagucaugacaggcu

SEQ ID NO: 813264 - RNA, 19 nt, Artificial Sequence
  Description of Artificial Sequence: Synthetic oligonucleotide
auucaugcagucuggcccc

SEQ ID NO: 813265 - RNA, 19 nt, Artificial Sequence
  Description of Artificial Sequence: Synthetic oligonucleotide
uuuggcagcagagacaagc

SEQ ID NO: 813266 - RNA, 19 nt, Artificial Sequence
  Description of Artificial Sequence: Synthetic oligonucleotide
aacaucccuaccccuuucc

SEQ ID NO: 813267 - RNA, 19 nt, Artificial Sequence
  Description of Artificial Sequence: Synthetic oligonucleotide
ucagcaaacguuucgagau

SEQ ID NO: 813268 - RNA, 19 nt, Artificial Sequence
  Description of Artificial Sequence: Synthetic oligonucleotide
acaacagacauucugggaa

SEQ ID NO: 813269 - RNA, 19 nt, Artificial Sequence
  Description of Artificial Sequence: Synthetic oligonucleotide
uaccauuaggaguuugacg

SEQ ID NO: 813270 - RNA, 19 nt, Artificial Sequence
  Description of Artificial Sequence: Synthetic oligonucleotide
uauugggugaaguaggcaa

SEQ ID NO: 813271 - RNA, 19 nt, Artificial Sequence
  Description of Artificial Sequence: Synthetic oligonucleotide
ugcauugccagccacagua

SEQ ID NO: 813272 - RNA, 19 nt, Artificial Sequence
  Description of Artificial Sequence: Synthetic oligonucleotide
uauuaugaaaauccacauc

SEQ ID NO: 813273 - RNA, 19 nt, Artificial Sequence
  Description of Artificial Sequence: Synthetic oligonucleotide
agaagugugagaaucuagg

SEQ ID NO: 813274 - RNA, 19 nt, Artificial Sequence
  Description of Artificial Sequence: Synthetic oligonucleotide
cauucagaguccaaugacc

SEQ ID NO: 813275 - RNA, 19 nt, Artificial Sequence
  Description of Artificial Sequence: Synthetic oligonucleotide
cuagucaguguccauauac

SEQ ID NO: 813276 - RNA, 19 nt, Artificial Sequence
  Description of Artificial Sequence: Synthetic oligonucleotide
uacaaccucaaaagggucc

SEQ ID NO: 813277 - RNA, 19 nt, Artificial Sequence
  Description of Artificial Sequence: Synthetic oligonucleotide
uguucaaucaggauuucua

SEQ ID NO: 813278 - RNA, 19 nt, Artificial Sequence
  Description of Artificial Sequence: Synthetic oligonucleotide
uaccagauaggccuaagcu

SEQ ID NO: 813279 - RNA, 19 nt, Artificial Sequence
  Description of Artificial Sequence: Synthetic oligonucleotide
auaccagauaggccuaagc

SEQ ID NO: 813280 - RNA, 19 nt, Artificial Sequence
  Description of Artificial Sequence: Synthetic oligonucleotide
uuauauacuagggagugaa

SEQ ID NO: 813281 - RNA, 19 nt, Artificial Sequence
  Description of Artificial Sequence: Synthetic oligonucleotide
cagacgguaauccagguug

SEQ ID NO: 813282 - RNA, 19 nt, Artificial Sequence
  Description of Artificial Sequence: Synthetic oligonucleotide
gaagaaguguagaacacug

SEQ ID NO: 813283 - RNA, 19 nt, Artificial Sequence
  Description of Artificial Sequence: Synthetic oligonucleotide
ucugguagcuuauauacua

SEQ ID NO: 813284 - RNA, 19 nt, Artificial Sequence
  Description of Artificial Sequence: Synthetic oligonucleotide
uaauaacagucuuuagccc

SEQ ID NO: 813285 - RNA, 19 nt, Artificial Sequence
  Description of Artificial Sequence: Synthetic oligonucleotide
ucucucagcaaacguuucg

SEQ ID NO: 813286 - RNA, 19 nt, Artificial Sequence
  Description of Artificial Sequence: Synthetic oligonucleotide
uucuccaauguucagcuaa

SEQ ID NO: 813287 - RNA, 19 nt, Artificial Sequence
  Description of Artificial Sequence: Synthetic oligonucleotide
aauagcucacaaguguuug

SEQ ID NO: 813288 - RNA, 19 nt, Artificial Sequence
  Description of Artificial Sequence: Synthetic oligonucleotide
ugguagcuuauauacuagg

SEQ ID NO: 813289 - RNA, 19 nt, Artificial Sequence
  Description of Artificial Sequence: Synthetic oligonucleotide
aagguacaaggccagaaau

SEQ ID NO: 813290 - RNA, 19 nt, Artificial Sequence
  Description of Artificial Sequence: Synthetic oligonucleotide
aacaauaaguucagagaag

SEQ ID NO: 813291 - RNA, 19 nt, Artificial Sequence
  Description of Artificial Sequence: Synthetic oligonucleotide
agugauuguaccauuagga

SEQ ID NO: 813292 - RNA, 19 nt, Artificial Sequence
  Description of Artificial Sequence: Synthetic oligonucleotide
ugaagcuuauaagucauga

SEQ ID NO: 813293 - RNA, 19 nt, Artificial Sequence
  Description of Artificial Sequence: Synthetic oligonucleotide
ccuaauaacagucuuuagc

SEQ ID NO: 813294 - RNA, 19 nt, Artificial Sequence
  Description of Artificial Sequence: Synthetic oligonucleotide
uguaccauuaggaguuuga

SEQ ID NO: 813295 - RNA, 19 nt, Artificial Sequence
  Description of Artificial Sequence: Synthetic oligonucleotide
uagaguuuggagcuugaga

SEQ ID NO: 813296 - RNA, 19 nt, Artificial Sequence
  Description of Artificial Sequence: Synthetic oligonucleotide
cuagggagugaauagcccc

SEQ ID NO: 813297 - RNA, 19 nt, Artificial Sequence
  Description of Artificial Sequence: Synthetic oligonucleotide
auacuagggagugaauagc

SEQ ID NO: 813298 - RNA, 19 nt, Artificial Sequence
  Description of Artificial Sequence: Synthetic oligonucleotide
agguugucagauuuggcag

SEQ ID NO: 813299 - RNA, 19 nt, Artificial Sequence
  Description of Artificial Sequence: Synthetic oligonucleotide
accuaaauauaucuugcca

SEQ ID NO: 813300 - RNA, 19 nt, Artificial Sequence
  Description of Artificial Sequence: Synthetic oligonucleotide
gaugaugggauuuccccug

SEQ ID NO: 813301 - RNA, 19 nt, Artificial Sequence
  Description of Artificial Sequence: Synthetic oligonucleotide
ugucuuaaugucccaguca

SEQ ID NO: 813302 - RNA, 19 nt, Artificial Sequence
  Description of Artificial Sequence: Synthetic oligonucleotide
uaccacaauauucuggaau

SEQ ID NO: 813303 - RNA, 19 nt, Artificial Sequence
  Description of Artificial Sequence: Synthetic oligonucleotide
auaaguucagagaagugug

SEQ ID NO: 813304 - RNA, 19 nt, Artificial Sequence
  Description of Artificial Sequence: Synthetic oligonucleotide
uuguugauugcuggaaagg

SEQ ID NO: 813305 - RNA, 19 nt, Artificial Sequence
  Description of Artificial Sequence: Synthetic oligonucleotide
gaaguagacccuuuuacaa

SEQ ID NO: 813306 - RNA, 19 nt, Artificial Sequence
  Description of Artificial Sequence: Synthetic oligonucleotide
uugguuugugccuucuugc

SEQ ID NO: 813307 - RNA, 19 nt, Artificial Sequence
  Description of Artificial Sequence: Synthetic oligonucleotide
ugccaaaguguucaaucag

SEQ ID NO: 813308 - RNA, 19 nt, Artificial Sequence
  Description of Artificial Sequence: Synthetic oligonucleotide
ugucucuuuauagggaaag

SEQ ID NO: 813309 - RNA, 19 nt, Artificial Sequence
  Description of Artificial Sequence: Synthetic oligonucleotide
ucauaagauucucuuugcu

SEQ ID NO: 813310 - RNA, 19 nt, Artificial Sequence
  Description of Artificial Sequence: Synthetic oligonucleotide
aacgauggccccaacugac

SEQ ID NO: 813311 - RNA, 19 nt, Artificial Sequence
  Description of Artificial Sequence: Synthetic oligonucleotide
gauaccccuaauaacaguc

SEQ ID NO: 813312 - RNA, 19 nt, Artificial Sequence
  Description of Artificial Sequence: Synthetic oligonucleotide
cacuauuaugaaaauccac

SEQ ID NO: 813313 - RNA, 19 nt, Artificial Sequence
  Description of Artificial Sequence: Synthetic oligonucleotide
ugagaaucuagguuccccu

SEQ ID NO: 813314 - RNA, 19 nt, Artificial Sequence
  Description of Artificial Sequence: Synthetic oligonucleotide
gaagcuuauaagucaugac

SEQ ID NO: 813315 - RNA, 19 nt, Artificial Sequence
  Description of Artificial Sequence: Synthetic oligonucleotide
aaacguuucgagauuguga

SEQ ID NO: 813316 - RNA, 19 nt, Artificial Sequence
  Description of Artificial Sequence: Synthetic oligonucleotide
aucagggugagauaccccu

SEQ ID NO: 813317 - RNA, 19 nt, Artificial Sequence
  Description of Artificial Sequence: Synthetic oligonucleotide
acacacauuuaccaagugu

SEQ ID NO: 813318 - RNA, 19 nt, Artificial Sequence
  Description of Artificial Sequence: Synthetic oligonucleotide
ucaaagaaucugguccugg

SEQ ID NO: 813319 - RNA, 19 nt, Artificial Sequence
  Description of Artificial Sequence: Synthetic oligonucleotide
uuucucucagcaaacguuu

SEQ ID NO: 813320 - RNA, 19 nt, Artificial Sequence
  Description of Artificial Sequence: Synthetic oligonucleotide
uggagacuuucuuccaagg

SEQ ID NO: 813321 - RNA, 19 nt, Artificial Sequence
  Description of Artificial Sequence: Synthetic oligonucleotide
agauuccugagguagaauu

SEQ ID NO: 813322 - RNA, 19 nt, Artificial Sequence
  Description of Artificial Sequence: Synthetic oligonucleotide
uuaugaaaauccacaucuc

SEQ ID NO: 813323 - RNA, 19 nt, Artificial Sequence
  Description of Artificial Sequence: Synthetic oligonucleotide
uuaccaagugucugauuag

SEQ ID NO: 813324 - RNA, 19 nt, Artificial Sequence
  Description of Artificial Sequence: Synthetic oligonucleotide
cuuugugaagcuuauaagu

SEQ ID NO: 813325 - RNA, 19 nt, Artificial Sequence
  Description of Artificial Sequence: Synthetic oligonucleotide
ugggaaucauucaugcagu

SEQ ID NO: 813326 - RNA, 19 nt, Artificial Sequence
  Description of Artificial Sequence: Synthetic oligonucleotide
agucuuuagcccugaauca

SEQ ID NO: 813327 - RNA, 19 nt, Artificial Sequence
  Description of Artificial Sequence: Synthetic oligonucleotide
aaagcagaaaggcuaccuu

SEQ ID NO: 813328 - RNA, 19 nt, Artificial Sequence
  Description of Artificial Sequence: Synthetic oligonucleotide
ucugaauggguaguuugag

SEQ ID NO: 813329 - RNA, 19 nt, Artificial Sequence
  Description of Artificial Sequence: Synthetic oligonucleotide
cccugaaucauucagaguc

SEQ ID NO: 813330 - RNA, 19 nt, Artificial Sequence
  Description of Artificial Sequence: Synthetic oligonucleotide
gauugucuuaaugucccag

SEQ ID NO: 813331 - RNA, 19 nt, Artificial Sequence
  Description of Artificial Sequence: Synthetic oligonucleotide
cuagugauuguaccauuag

SEQ ID NO: 813332 - RNA, 19 nt, Artificial Sequence
  Description of Artificial Sequence: Synthetic oligonucleotide
acacauguauaagacaugu

SEQ ID NO: 813333 - RNA, 19 nt, Artificial Sequence
  Description of Artificial Sequence: Synthetic oligonucleotide
uccaauguucagcuaacau

SEQ ID NO: 813334 - RNA, 19 nt, Artificial Sequence
  Description of Artificial Sequence: Synthetic oligonucleotide
gaguccaaugaccucugag

SEQ ID NO: 813335 - RNA, 19 nt, Artificial Sequence
  Description of Artificial Sequence: Synthetic oligonucleotide
uguucagcuaacaucccua

SEQ ID NO: 813336 - RNA, 19 nt, Artificial Sequence
  Description of Artificial Sequence: Synthetic oligonucleotide
auauaucuugccaaagugu

SEQ ID NO: 813337 - RNA, 19 nt, Artificial Sequence
  Description of Artificial Sequence: Synthetic oligonucleotide
agacauucugggaagauga

SEQ ID NO: 813338 - RNA, 19 nt, Artificial Sequence
  Description of Artificial Sequence: Synthetic oligonucleotide
uugucuuaaugucccaguc

SEQ ID NO: 813339 - RNA, 19 nt, Artificial Sequence
  Description of Artificial Sequence: Synthetic oligonucleotide
agcuauugggugaaguagg

SEQ ID NO: 813340 - RNA, 19 nt, Artificial Sequence
  Description of Artificial Sequence: Synthetic oligonucleotide
gggugaaguaggcaaaagg

SEQ ID NO: 813341 - RNA, 19 nt, Artificial Sequence
  Description of Artificial Sequence: Synthetic oligonucleotide
agacaugugcuccuuauuu

SEQ ID NO: 813342 - RNA, 19 nt, Artificial Sequence
  Description of Artificial Sequence: Synthetic oligonucleotide
gacgccaccaccgaugaug

SEQ ID NO: 813343 - RNA, 19 nt, Artificial Sequence
  Description of Artificial Sequence: Synthetic oligonucleotide
uauuuguugauugcuggaa

SEQ ID NO: 813344 - RNA, 19 nt, Artificial Sequence
  Description of Artificial Sequence: Synthetic oligonucleotide
uuaacaucucaugguacca

SEQ ID NO: 813345 - RNA, 19 nt, Artificial Sequence
  Description of Artificial Sequence: Synthetic oligonucleotide
gugagauaccccuaauaac

SEQ ID NO: 813346 - RNA, 19 nt, Artificial Sequence
  Description of Artificial Sequence: Synthetic oligonucleotide
aggcaaaaggaaaauacca

SEQ ID NO: 813347 - RNA, 19 nt, Artificial Sequence
  Description of Artificial Sequence: Synthetic oligonucleotide
agaaucuagguuccccucu

SEQ ID NO: 813348 - RNA, 19 nt, Artificial Sequence
  Description of Artificial Sequence: Synthetic oligonucleotide
gagauaccccuaauaacag

SEQ ID NO: 813349 - RNA, 19 nt, Artificial Sequence
  Description of Artificial Sequence: Synthetic oligonucleotide
uggguauuuucacuucagu

SEQ ID NO: 813350 - RNA, 19 nt, Artificial Sequence
  Description of Artificial Sequence: Synthetic oligonucleotide
cugcucacaacagacauuc

SEQ ID NO: 813351 - RNA, 19 nt, Artificial Sequence
  Description of Artificial Sequence: Synthetic oligonucleotide
uauucuggaauuugauguu

SEQ ID NO: 813352 - RNA, 19 nt, Artificial Sequence
  Description of Artificial Sequence: Synthetic oligonucleotide
uucagcuaacaucccuacc

SEQ ID NO: 813353 - RNA, 19 nt, Artificial Sequence
  Description of Artificial Sequence: Synthetic oligonucleotide
caauaaguucagagaagug

SEQ ID NO: 813354 - RNA, 19 nt, Artificial Sequence
  Description of Artificial Sequence: Synthetic oligonucleotide
uucgagauugugauugguu

SEQ ID NO: 813355 - RNA, 19 nt, Artificial Sequence
  Description of Artificial Sequence: Synthetic oligonucleotide
gaagcuauugggugaagua

SEQ ID NO: 813356 - RNA, 19 nt, Artificial Sequence
  Description of Artificial Sequence: Synthetic oligonucleotide
ggcaaaaggaaaauaccag

SEQ ID NO: 813357 - RNA, 19 nt, Artificial Sequence
  Description of Artificial Sequence: Synthetic oligonucleotide
aaguacuggcccggcaugg

SEQ ID NO: 813358 - RNA, 19 nt, Artificial Sequence
  Description of Artificial Sequence: Synthetic oligonucleotide
gugucugauuagcaguucc

SEQ ID NO: 813359 - RNA, 19 nt, Artificial Sequence
  Description of Artificial Sequence: Synthetic oligonucleotide
gaaaggcuaccuuccuaag

SEQ ID NO: 813360 - RNA, 19 nt, Artificial Sequence
  Description of Artificial Sequence: Synthetic oligonucleotide
aauaccagauaggccuaag

SEQ ID NO: 813361 - RNA, 19 nt, Artificial Sequence
  Description of Artificial Sequence: Synthetic oligonucleotide
uccauugguggccuuugga

SEQ ID NO: 813362 - RNA, 19 nt, Artificial Sequence
  Description of Artificial Sequence: Synthetic oligonucleotide
guuucgagauugugauugg

SEQ ID NO: 813363 - RNA, 19 nt, Artificial Sequence
  Description of Artificial Sequence: Synthetic oligonucleotide
gcauacaaaggagaaacag

SEQ ID NO: 813364 - RNA, 19 nt, Artificial Sequence
  Description of Artificial Sequence: Synthetic oligonucleotide
aggcuaccuuccuaagccc

SEQ ID NO: 813365 - RNA, 19 nt, Artificial Sequence
  Description of Artificial Sequence: Synthetic oligonucleotide
cugguagcuuauauacuag

SEQ ID NO: 813366 - RNA, 19 nt, Artificial Sequence
  Description of Artificial Sequence: Synthetic oligonucleotide
accagauaggccuaagcuu

SEQ ID NO: 813367 - RNA, 19 nt, Artificial Sequence
  Description of Artificial Sequence: Synthetic oligonucleotide
gauuguaccauuaggaguu

SEQ ID NO: 813368 - RNA, 19 nt, Artificial Sequence
  Description of Artificial Sequence: Synthetic oligonucleotide
augacacaauucuccaaug

SEQ ID NO: 813369 - RNA, 19 nt, Artificial Sequence
  Description of Artificial Sequence: Synthetic oligonucleotide
gauuagcaguuccagcauc

SEQ ID NO: 813370 - RNA, 19 nt, Artificial Sequence
  Description of Artificial Sequence: Synthetic oligonucleotide
uaccaagugucugauuagc

SEQ ID NO: 813371 - RNA, 19 nt, Artificial Sequence
  Description of Artificial Sequence: Synthetic oligonucleotide
ugauuagcaguuccagcau

SEQ ID NO: 813372 - RNA, 19 nt, Artificial Sequence
  Description of Artificial Sequence: Synthetic oligonucleotide
ucagguggaccuaaauaua

SEQ ID NO: 813373 - RNA, 19 nt, Artificial Sequence
  Description of Artificial Sequence: Synthetic oligonucleotide
cacugggugggaaucauuc

SEQ ID NO: 813374 - RNA, 19 nt, Artificial Sequence
  Description of Artificial Sequence: Synthetic oligonucleotide
cauguauaagacaugugcu

SEQ ID NO: 813375 - RNA, 19 nt, Artificial Sequence
  Description of Artificial Sequence: Synthetic oligonucleotide
aguuuggagcuugagagaa

SEQ ID NO: 813376 - RNA, 19 nt, Artificial Sequence
  Description of Artificial Sequence: Synthetic oligonucleotide
guaccaagaugccaaucug

SEQ ID NO: 813377 - RNA, 19 nt, Artificial Sequence
  Description of Artificial Sequence: Synthetic oligonucleotide
uacuagucaguguccauau

SEQ ID NO: 813378 - RNA, 19 nt, Artificial Sequence
  Description of Artificial Sequence: Synthetic oligonucleotide
acaugcuuagcagauuugu

SEQ ID NO: 813379 - RNA, 19 nt, Artificial Sequence
  Description of Artificial Sequence: Synthetic oligonucleotide
uuggagcuugagagaaucc

SEQ ID NO: 813380 - RNA, 19 nt, Artificial Sequence
  Description of Artificial Sequence: Synthetic oligonucleotide
gaaguacuggcccggcaug

SEQ ID NO: 813381 - RNA, 19 nt, Artificial Sequence
  Description of Artificial Sequence: Synthetic oligonucleotide
cuugucucuuuauagggaa

SEQ ID NO: 813382 - RNA, 19 nt, Artificial Sequence
  Description of Artificial Sequence: Synthetic oligonucleotide
agcaaacguuucgagauug

SEQ ID NO: 813383 - RNA, 19 nt, Artificial Sequence
  Description of Artificial Sequence: Synthetic oligonucleotide
uggcacagguccauuggug

SEQ ID NO: 813384 - RNA, 19 nt, Artificial Sequence
  Description of Artificial Sequence: Synthetic oligonucleotide
guccaaugaccucugagga

SEQ ID NO: 813385 - RNA, 19 nt, Artificial Sequence
  Description of Artificial Sequence: Synthetic oligonucleotide
aacuuugcugaaacaguca

SEQ ID NO: 813386 - RNA, 19 nt, Artificial Sequence
  Description of Artificial Sequence: Synthetic oligonucleotide
ugaccucugaggaaacaau

SEQ ID NO: 813387 - RNA, 19 nt, Artificial Sequence
  Description of Artificial Sequence: Synthetic oligonucleotide
ucuuaaugucccagucacu

SEQ ID NO: 813388 - RNA, 19 nt, Artificial Sequence
  Description of Artificial Sequence: Synthetic oligonucleotide
uuuagcccugaaucauuca

SEQ ID NO: 813389 - RNA, 19 nt, Artificial Sequence
  Description of Artificial Sequence: Synthetic oligonucleotide
auaucuugccaaaguguuc

SEQ ID NO: 813390 - RNA, 19 nt, Artificial Sequence
  Description of Artificial Sequence: Synthetic oligonucleotide
auuaggaguuugacgcugg

SEQ ID NO: 813391 - RNA, 19 nt, Artificial Sequence
  Description of Artificial Sequence: Synthetic oligonucleotide
auagcucacaaguguuuga

SEQ ID NO: 813392 - RNA, 19 nt, Artificial Sequence
  Description of Artificial Sequence: Synthetic oligonucleotide
aagaaguguagaacacugu

SEQ ID NO: 813393 - RNA, 19 nt, Artificial Sequence
  Description of Artificial Sequence: Synthetic oligonucleotide
gauaggccuaagcuuugac

SEQ ID NO: 813394 - RNA, 19 nt, Artificial Sequence
  Description of Artificial Sequence: Synthetic oligonucleotide
agcucacaaguguuugaag

SEQ ID NO: 813395 - RNA, 19 nt, Artificial Sequence
  Description of Artificial Sequence: Synthetic oligonucleotide
ugucacccgagguggaggc

SEQ ID NO: 813396 - RNA, 19 nt, Artificial Sequence
  Description of Artificial Sequence: Synthetic oligonucleotide
gcuuauauacuagggagug

SEQ ID NO: 813397 - RNA, 19 nt, Artificial Sequence
  Description of Artificial Sequence: Synthetic oligonucleotide
gcucacaacagacauucug

SEQ ID NO: 813398 - RNA, 19 nt, Artificial Sequence
  Description of Artificial Sequence: Synthetic oligonucleotide
cucaugguaccaagaugcc

SEQ ID NO: 813399 - RNA, 19 nt, Artificial Sequence
  Description of Artificial Sequence: Synthetic oligonucleotide
aagacaugugcuccuuauu

SEQ ID NO: 813400 - RNA, 19 nt, Artificial Sequence
  Description of Artificial Sequence: Synthetic oligonucleotide
ugaaucauucagaguccaa

SEQ ID NO: 813401 - RNA, 19 nt, Artificial Sequence
  Description of Artificial Sequence: Synthetic oligonucleotide
agauaccccuaauaacagu

SEQ ID NO: 813402 - RNA, 19 nt, Artificial Sequence
  Description of Artificial Sequence: Synthetic oligonucleotide
accgaugaugggauuuccc

SEQ ID NO: 813403 - RNA, 19 nt, Artificial Sequence
  Description of Artificial Sequence: Synthetic oligonucleotide
cagcuaacaucccuacccc

SEQ ID NO: 813404 - RNA, 19 nt, Artificial Sequence
  Description of Artificial Sequence: Synthetic oligonucleotide
caaucaggauuucuaccac

SEQ ID NO: 813405 - RNA, 19 nt, Artificial Sequence
  Description of Artificial Sequence: Synthetic oligonucleotide
ugcagucuggccccaccag

SEQ ID NO: 813406 - RNA, 19 nt, Artificial Sequence
  Description of Artificial Sequence: Synthetic oligonucleotide
gaagugugagaaucuaggu

SEQ ID NO: 813407 - RNA, 19 nt, Artificial Sequence
  Description of Artificial Sequence: Synthetic oligonucleotide
cucagguggaccuaaauau

SEQ ID NO: 813408 - RNA, 19 nt, Artificial Sequence
  Description of Artificial Sequence: Synthetic oligonucleotide
cacauguauaagacaugug

SEQ ID NO: 813409 - RNA, 19 nt, Artificial Sequence
  Description of Artificial Sequence: Synthetic oligonucleotide
ggaccuaaauauaucuugc

SEQ ID NO: 813410 - RNA, 19 nt, Artificial Sequence
  Description of Artificial Sequence: Synthetic oligonucleotide
aaauagcucacaaguguuu

SEQ ID NO: 813411 - RNA, 19 nt, Artificial Sequence
  Description of Artificial Sequence: Synthetic oligonucleotide
gagaaucuagguuccccuc

SEQ ID NO: 813412 - RNA, 19 nt, Artificial Sequence
  Description of Artificial Sequence: Synthetic oligonucleotide
cauuaggaguuugacgcug

SEQ ID NO: 813413 - RNA, 19 nt, Artificial Sequence
  Description of Artificial Sequence: Synthetic oligonucleotide
aacaugcuuagcagauuug

SEQ ID NO: 813414 - RNA, 19 nt, Artificial Sequence
  Description of Artificial Sequence: Synthetic oligonucleotide
uuucaaaccuguggccuca

SEQ ID NO: 813415 - RNA, 19 nt, Artificial Sequence
  Description of Artificial Sequence: Synthetic oligonucleotide
aucccuaccccuuuccaaa

SEQ ID NO: 813416 - RNA, 19 nt, Artificial Sequence
  Description of Artificial Sequence: Synthetic oligonucleotide
uggccuuuggaguagccuu

SEQ ID NO: 813417 - RNA, 19 nt, Artificial Sequence
  Description of Artificial Sequence: Synthetic oligonucleotide
caaacguuucgagauugug

SEQ ID NO: 813418 - RNA, 19 nt, Artificial Sequence
  Description of Artificial Sequence: Synthetic oligonucleotide
cagaaagagacaugacaca

SEQ ID NO: 813419 - RNA, 19 nt, Artificial Sequence
  Description of Artificial Sequence: Synthetic oligonucleotide
cuauuaugaaaauccacau

SEQ ID NO: 813420 - RNA, 19 nt, Artificial Sequence
  Description of Artificial Sequence: Synthetic oligonucleotide
caauggguauuuucacuuc

SEQ ID NO: 813421 - RNA, 19 nt, Artificial Sequence
  Description of Artificial Sequence: Synthetic oligonucleotide
gugcuccuuauuuuauggc

SEQ ID NO: 813422 - RNA, 19 nt, Artificial Sequence
  Description of Artificial Sequence: Synthetic oligonucleotide
ugauugucuuaauguccca

SEQ ID NO: 813423 - RNA, 19 nt, Artificial Sequence
  Description of Artificial Sequence: Synthetic oligonucleotide
auccugcaaucuaaauacc

SEQ ID NO: 813424 - RNA, 19 nt, Artificial Sequence
  Description of Artificial Sequence: Synthetic oligonucleotide
ugguacuagucagugucca

SEQ ID NO: 813425 - RNA, 19 nt, Artificial Sequence
  Description of Artificial Sequence: Synthetic oligonucleotide
guauccagauugcuaguga

SEQ ID NO: 813426 - RNA, 19 nt, Artificial Sequence
  Description of Artificial Sequence: Synthetic oligonucleotide
gaaagauuccugagguaga

SEQ ID NO: 813427 - RNA, 19 nt, Artificial Sequence
  Description of Artificial Sequence: Synthetic oligonucleotide
ccuuccuaagcccaucccg

SEQ ID NO: 813428 - RNA, 19 nt, Artificial Sequence
  Description of Artificial Sequence: Synthetic oligonucleotide
aguaaacgauggccccaac

SEQ ID NO: 813429 - RNA, 19 nt, Artificial Sequence
  Description of Artificial Sequence: Synthetic oligonucleotide
uagguuccccucuucagua

SEQ ID NO: 813430 - RNA, 19 nt, Artificial Sequence
  Description of Artificial Sequence: Synthetic oligonucleotide
gguugucagauuuggcagc

SEQ ID NO: 813431 - RNA, 19 nt, Artificial Sequence
  Description of Artificial Sequence: Synthetic oligonucleotide
acggaugauuguuugcuuu

SEQ ID NO: 813432 - RNA, 19 nt, Artificial Sequence
  Description of Artificial Sequence: Synthetic oligonucleotide
agguuccccucuucaguac

SEQ ID NO: 813433 - RNA, 19 nt, Artificial Sequence
  Description of Artificial Sequence: Synthetic oligonucleotide
uugucucuuuauagggaaa

SEQ ID NO: 813434 - RNA, 19 nt, Artificial Sequence
  Description of Artificial Sequence: Synthetic oligonucleotide
gggugggaaucauucaugc

SEQ ID NO: 813435 - RNA, 19 nt, Artificial Sequence
  Description of Artificial Sequence: Synthetic oligonucleotide
uccuaggagcugcucacaa

SEQ ID NO: 813436 - RNA, 19 nt, Artificial Sequence
  Description of Artificial Sequence: Synthetic oligonucleotide
uaccccuaauaacagucuu

SEQ ID NO: 813437 - RNA, 19 nt, Artificial Sequence
  Description of Artificial Sequence: Synthetic oligonucleotide
guaccauuaggaguuugac

SEQ ID NO: 813438 - RNA, 19 nt, Artificial Sequence
  Description of Artificial Sequence: Synthetic oligonucleotide
auauacucagaaagagaca

SEQ ID NO: 813439 - RNA, 19 nt, Artificial Sequence
  Description of Artificial Sequence: Synthetic oligonucleotide
gagcuugugauugucuuaa

SEQ ID NO: 813440 - RNA, 19 nt, Artificial Sequence
  Description of Artificial Sequence: Synthetic oligonucleotide
ccgaugaugggauuucccc

SEQ ID NO: 813441 - RNA, 19 nt, Artificial Sequence
  Description of Artificial Sequence: Synthetic oligonucleotide
aaaauaccagauaggccua

SEQ ID NO: 813442 - RNA, 19 nt, Artificial Sequence
  Description of Artificial Sequence: Synthetic oligonucleotide
cagagacaagcucuuugug

SEQ ID NO: 813443 - RNA, 19 nt, Artificial Sequence
  Description of Artificial Sequence: Synthetic oligonucleotide
uucucucagcaaacguuuc

SEQ ID NO: 813444 - RNA, 19 nt, Artificial Sequence
  Description of Artificial Sequence: Synthetic oligonucleotide
uuucgagauugugauuggu

SEQ ID NO: 813445 - RNA, 19 nt, Artificial Sequence
  Description of Artificial Sequence: Synthetic oligonucleotide
agugucugauuagcaguuc

SEQ ID NO: 813446 - RNA, 19 nt, Artificial Sequence
  Description of Artificial Sequence: Synthetic oligonucleotide
gacacaauucuccaauguu

SEQ ID NO: 813447 - RNA, 19 nt, Artificial Sequence
  Description of Artificial Sequence: Synthetic oligonucleotide
uccccucuucaguacaggu

SEQ ID NO: 813448 - RNA, 19 nt, Artificial Sequence
  Description of Artificial Sequence: Synthetic oligonucleotide
cagacacauguauaagaca

SEQ ID NO: 813449 - RNA, 19 nt, Artificial Sequence
  Description of Artificial Sequence: Synthetic oligonucleotide
cuuccaguuuuccgggaug

SEQ ID NO: 813450 - RNA, 19 nt, Artificial Sequence
  Description of Artificial Sequence: Synthetic oligonucleotide
uagacccuuuuacaaccuc

SEQ ID NO: 813451 - RNA, 19 nt, Artificial Sequence
  Description of Artificial Sequence: Synthetic oligonucleotide
caucagggugagauacccc

SEQ ID NO: 813452 - RNA, 19 nt, Artificial Sequence
  Description of Artificial Sequence: Synthetic oligonucleotide
auggguauuuucacuucag

SEQ ID NO: 813453 - RNA, 19 nt, Artificial Sequence
  Description of Artificial Sequence: Synthetic oligonucleotide
ccgaacuuugcugaaacag

SEQ ID NO: 813454 - RNA, 19 nt, Artificial Sequence
  Description of Artificial Sequence: Synthetic oligonucleotide
gguaccaagaugccaaucu

SEQ ID NO: 813455 - RNA, 19 nt, Artificial Sequence
  Description of Artificial Sequence: Synthetic oligonucleotide
gguggaccuaaauauaucu

SEQ ID NO: 813456 - RNA, 19 nt, Artificial Sequence
  Description of Artificial Sequence: Synthetic oligonucleotide
agguggaccuaaauauauc

SEQ ID NO: 813457 - RNA, 19 nt, Artificial Sequence
  Description of Artificial Sequence: Synthetic oligonucleotide
agcuaacaucccuaccccu

SEQ ID NO: 813458 - RNA, 19 nt, Artificial Sequence
  Description of Artificial Sequence: Synthetic oligonucleotide
acgguaauccagguuguca

SEQ ID NO: 813459 - RNA, 19 nt, Artificial Sequence
  Description of Artificial Sequence: Synthetic oligonucleotide
ggccuaagcuuugacaugc

SEQ ID NO: 813460 - RNA, 19 nt, Artificial Sequence
  Description of Artificial Sequence: Synthetic oligonucleotide
caugacacaauucuccaau

SEQ ID NO: 813461 - RNA, 19 nt, Artificial Sequence
  Description of Artificial Sequence: Synthetic oligonucleotide
cguuucgagauugugauug

SEQ ID NO: 813462 - RNA, 19 nt, Artificial Sequence
  Description of Artificial Sequence: Synthetic oligonucleotide
uccgggaugcuguuucaaa

SEQ ID NO: 813463 - RNA, 19 nt, Artificial Sequence
  Description of Artificial Sequence: Synthetic oligonucleotide
aaauaccagauaggccuaa

SEQ ID NO: 813464 - RNA, 19 nt, Artificial Sequence
  Description of Artificial Sequence: Synthetic oligonucleotide
ugaugggauuuccccugca

SEQ ID NO: 813465 - RNA, 19 nt, Artificial Sequence
  Description of Artificial Sequence: Synthetic oligonucleotide
acgauggccccaacugacc

SEQ ID NO: 813466 - RNA, 19 nt, Artificial Sequence
  Description of Artificial Sequence: Synthetic oligonucleotide
ugugaaguacuggcccggc

SEQ ID NO: 813467 - RNA, 19 nt, Artificial Sequence
  Description of Artificial Sequence: Synthetic oligonucleotide
uagccuuggucccuccauc

SEQ ID NO: 813468 - RNA, 19 nt, Artificial Sequence
  Description of Artificial Sequence: Synthetic oligonucleotide
uuuccgggaugcuguuuca

SEQ ID NO: 813469 - RNA, 19 nt, Artificial Sequence
  Description of Artificial Sequence: Synthetic oligonucleotide
gguauccagauugcuagug

SEQ ID NO: 813470 - RNA, 19 nt, Artificial Sequence
  Description of Artificial Sequence: Synthetic oligonucleotide
gacuuucuuccaaggucag

SEQ ID NO: 813471 - RNA, 19 nt, Artificial Sequence
  Description of Artificial Sequence: Synthetic oligonucleotide
guacuggcccggcauggag

SEQ ID NO: 813472 - RNA, 19 nt, Artificial Sequence
  Description of Artificial Sequence: Synthetic oligonucleotide
uuguaccauuaggaguuug

SEQ ID NO: 813473 - RNA, 19 nt, Artificial Sequence
  Description of Artificial Sequence: Synthetic oligonucleotide
uugggugaaguaggcaaaa

SEQ ID NO: 813474 - RNA, 19 nt, Artificial Sequence
  Description of Artificial Sequence: Synthetic oligonucleotide
aagauuccugagguagaau

SEQ ID NO: 813475 - RNA, 19 nt, Artificial Sequence
  Description of Artificial Sequence: Synthetic oligonucleotide
uuccuuguggggagccacu

SEQ ID NO: 813476 - RNA, 19 nt, Artificial Sequence
  Description of Artificial Sequence: Synthetic oligonucleotide
cagauaggccuaagcuuug

SEQ ID NO: 813477 - RNA, 19 nt, Artificial Sequence
  Description of Artificial Sequence: Synthetic oligonucleotide
auaccccuaauaacagucu

SEQ ID NO: 813478 - RNA, 19 nt, Artificial Sequence
  Description of Artificial Sequence: Synthetic oligonucleotide
ucagggugagauaccccua

SEQ ID NO: 813479 - RNA, 19 nt, Artificial Sequence
  Description of Artificial Sequence: Synthetic oligonucleotide
ccaacugaccuuuccauca

SEQ ID NO: 813480 - RNA, 19 nt, Artificial Sequence
  Description of Artificial Sequence: Synthetic oligonucleotide
auacucagaaagagacaug

SEQ ID NO: 813481 - RNA, 19 nt, Artificial Sequence
  Description of Artificial Sequence: Synthetic oligonucleotide
ugauugguuugugccuucu

SEQ ID NO: 813482 - RNA, 19 nt, Artificial Sequence
  Description of Artificial Sequence: Synthetic oligonucleotide
gccaaucugguacuaguca

SEQ ID NO: 813483 - RNA, 19 nt, Artificial Sequence
  Description of Artificial Sequence: Synthetic oligonucleotide
auugggugaaguaggcaaa

SEQ ID NO: 813484 - RNA, 19 nt, Artificial Sequence
  Description of Artificial Sequence: Synthetic oligonucleotide
cagaguccaaugaccucug

SEQ ID NO: 813485 - RNA, 19 nt, Artificial Sequence
  Description of Artificial Sequence: Synthetic oligonucleotide
gaaucugguccuggacgcc

SEQ ID NO: 813486 - RNA, 19 nt, Artificial Sequence
  Description of Artificial Sequence: Synthetic oligonucleotide
gauuuccccugcauugcca

SEQ ID NO: 813487 - RNA, 19 nt, Artificial Sequence
  Description of Artificial Sequence: Synthetic oligonucleotide
ccuuauuuuauggcuuccc

SEQ ID NO: 813488 - RNA, 19 nt, Artificial Sequence
  Description of Artificial Sequence: Synthetic oligonucleotide
cucucagcaaacguuucga

SEQ ID NO: 813489 - RNA, 19 nt, Artificial Sequence
  Description of Artificial Sequence: Synthetic oligonucleotide
uccuggacgccaccaccga

SEQ ID NO: 813490 - RNA, 19 nt, Artificial Sequence
  Description of Artificial Sequence: Synthetic oligonucleotide
ccaaaguguucaaucagga

SEQ ID NO: 813491 - RNA, 19 nt, Artificial Sequence
  Description of Artificial Sequence: Synthetic oligonucleotide
guacuagucaguguccaua

SEQ ID NO: 813492 - RNA, 19 nt, Artificial Sequence
  Description of Artificial Sequence: Synthetic oligonucleotide
ccgggaugcuguuucaaag

SEQ ID NO: 813493 - RNA, 19 nt, Artificial Sequence
  Description of Artificial Sequence: Synthetic oligonucleotide
cccgguucuuuucugguag

SEQ ID NO: 813494 - RNA, 19 nt, Artificial Sequence
  Description of Artificial Sequence: Synthetic oligonucleotide
gcuauugggugaaguaggc

SEQ ID NO: 813495 - RNA, 19 nt, Artificial Sequence
  Description of Artificial Sequence: Synthetic oligonucleotide
cugaaucauucagagucca

SEQ ID NO: 813496 - RNA, 19 nt, Artificial Sequence
  Description of Artificial Sequence: Synthetic oligonucleotide
accucugggcaggacuccg

SEQ ID NO: 813497 - RNA, 19 nt, Artificial Sequence
  Description of Artificial Sequence: Synthetic oligonucleotide
ugcucacaacagacauucu

SEQ ID NO: 813498 - RNA, 19 nt, Artificial Sequence
  Description of Artificial Sequence: Synthetic oligonucleotide
uucaaaccuguggccucag

SEQ ID NO: 813499 - RNA, 19 nt, Artificial Sequence
  Description of Artificial Sequence: Synthetic oligonucleotide
gaugggauuuccccugcau

SEQ ID NO: 813500 - RNA, 19 nt, Artificial Sequence
  Description of Artificial Sequence: Synthetic oligonucleotide
ccccagacgguaauccagg

SEQ ID NO: 813501 - RNA, 19 nt, Artificial Sequence
  Description of Artificial Sequence: Synthetic oligonucleotide
cgagauugugauugguuug

SEQ ID NO: 813502 - RNA, 19 nt, Artificial Sequence
  Description of Artificial Sequence: Synthetic oligonucleotide
uaagcccaucccggggaag

SEQ ID NO: 813503 - RNA, 19 nt, Artificial Sequence
  Description of Artificial Sequence: Synthetic oligonucleotide
cuuguggggagccacuggu

SEQ ID NO: 813504 - RNA, 19 nt, Artificial Sequence
  Description of Artificial Sequence: Synthetic oligonucleotide
augucccagucacuauuau

SEQ ID NO: 813505 - RNA, 19 nt, Artificial Sequence
  Description of Artificial Sequence: Synthetic oligonucleotide
ucccgguucuuuucuggua

SEQ ID NO: 813506 - RNA, 19 nt, Artificial Sequence
  Description of Artificial Sequence: Synthetic oligonucleotide
acuagucaguguccauaua

SEQ ID NO: 813507 - RNA, 19 nt, Artificial Sequence
  Description of Artificial Sequence: Synthetic oligonucleotide
cagguggaccuaaauauau

SEQ ID NO: 813508 - RNA, 19 nt, Artificial Sequence
  Description of Artificial Sequence: Synthetic oligonucleotide
ugguaccaagaugccaauc

SEQ ID NO: 813509 - RNA, 19 nt, Artificial Sequence
  Description of Artificial Sequence: Synthetic oligonucleotide
aguagaguuuggagcuuga

SEQ ID NO: 813510 - RNA, 19 nt, Artificial Sequence
  Description of Artificial Sequence: Synthetic oligonucleotide
cuauugggugaaguaggca

SEQ ID NO: 813511 - RNA, 19 nt, Artificial Sequence
  Description of Artificial Sequence: Synthetic oligonucleotide
accaccgaugaugggauuu

SEQ ID NO: 813512 - RNA, 19 nt, Artificial Sequence
  Description of Artificial Sequence: Synthetic oligonucleotide
caaucugguacuagucagu

SEQ ID NO: 813513 - RNA, 19 nt, Artificial Sequence
  Description of Artificial Sequence: Synthetic oligonucleotide
ucccuaccccuuuccaaau

SEQ ID NO: 813514 - RNA, 19 nt, Artificial Sequence
  Description of Artificial Sequence: Synthetic oligonucleotide
caccgaugaugggauuucc

SEQ ID NO: 813515 - RNA, 19 nt, Artificial Sequence
  Description of Artificial Sequence: Synthetic oligonucleotide
uccaguuuuccgggaugcu

SEQ ID NO: 813516 - RNA, 19 nt, Artificial Sequence
  Description of Artificial Sequence: Synthetic oligonucleotide
gcggacggaugauuguuug

SEQ ID NO: 813517 - RNA, 19 nt, Artificial Sequence
  Description of Artificial Sequence: Synthetic oligonucleotide
uggguaguuugaggugcug

SEQ ID NO: 813518 - RNA, 19 nt, Artificial Sequence
  Description of Artificial Sequence: Synthetic oligonucleotide
ggugggcccaaagaucacc

SEQ ID NO: 813519 - RNA, 19 nt, Artificial Sequence
  Description of Artificial Sequence: Synthetic oligonucleotide
agacgguaauccagguugu

SEQ ID NO: 813520 - RNA, 19 nt, Artificial Sequence
  Description of Artificial Sequence: Synthetic oligonucleotide
ugacgcugggcuucaucuu

SEQ ID NO: 813521 - RNA, 19 nt, Artificial Sequence
  Description of Artificial Sequence: Synthetic oligonucleotide
caaaguguucaaucaggau

SEQ ID NO: 813522 - RNA, 19 nt, Artificial Sequence
  Description of Artificial Sequence: Synthetic oligonucleotide
caaggccaagucuuuucaa

SEQ ID NO: 813523 - RNA, 19 nt, Artificial Sequence
  Description of Artificial Sequence: Synthetic oligonucleotide
gggaaucauucaugcaguc

SEQ ID NO: 813524 - RNA, 19 nt, Artificial Sequence
  Description of Artificial Sequence: Synthetic oligonucleotide
agggugagauaccccuaau

SEQ ID NO: 813525 - RNA, 19 nt, Artificial Sequence
  Description of Artificial Sequence: Synthetic oligonucleotide
acgggcggacggaugauug

SEQ ID NO: 813526 - RNA, 19 nt, Artificial Sequence
  Description of Artificial Sequence: Synthetic oligonucleotide
gcaaucuaaauaccaacuu

SEQ ID NO: 813527 - RNA, 19 nt, Artificial Sequence
  Description of Artificial Sequence: Synthetic oligonucleotide
gugauugguuugugccuuc

SEQ ID NO: 813528 - RNA, 19 nt, Artificial Sequence
  Description of Artificial Sequence: Synthetic oligonucleotide
ccaccagauuucauuaaca

SEQ ID NO: 813529 - RNA, 19 nt, Artificial Sequence
  Description of Artificial Sequence: Synthetic oligonucleotide
cuucccagacacugaaggu

SEQ ID NO: 813530 - RNA, 19 nt, Artificial Sequence
  Description of Artificial Sequence: Synthetic oligonucleotide
cagggugagauaccccuaa

SEQ ID NO: 813531 - RNA, 19 nt, Artificial Sequence
  Description of Artificial Sequence: Synthetic oligonucleotide
ggaugauuguuugcuuuuc

SEQ ID NO: 813532 - RNA, 19 nt, Artificial Sequence
  Description of Artificial Sequence: Synthetic oligonucleotide
gccaccaccgaugauggga

SEQ ID NO: 813533 - RNA, 19 nt, Artificial Sequence
  Description of Artificial Sequence: Synthetic oligonucleotide
gguuccccucuucaguaca

SEQ ID NO: 813534 - RNA, 19 nt, Artificial Sequence
  Description of Artificial Sequence: Synthetic oligonucleotide
accccuaauaacagucuuu

SEQ ID NO: 813535 - RNA, 19 nt, Artificial Sequence
  Description of Artificial Sequence: Synthetic oligonucleotide
cuaccuuccuaagcccauc

SEQ ID NO: 813536 - RNA, 19 nt, Artificial Sequence
  Description of Artificial Sequence: Synthetic oligonucleotide
uuccgggaugcuguuucaa

SEQ ID NO: 813537 - RNA, 19 nt, Artificial Sequence
  Description of Artificial Sequence: Synthetic oligonucleotide
acguuucgagauugugauu

SEQ ID NO: 813538 - RNA, 19 nt, Artificial Sequence
  Description of Artificial Sequence: Synthetic oligonucleotide
cagaaaggcuaccuuccua

SEQ ID NO: 813539 - RNA, 19 nt, Artificial Sequence
  Description of Artificial Sequence: Synthetic oligonucleotide
ccuaggagcugcucacaac

SEQ ID NO: 813540 - RNA, 19 nt, Artificial Sequence
  Description of Artificial Sequence: Synthetic oligonucleotide
acuggucggggagcuuguc

SEQ ID NO: 813541 - RNA, 19 nt, Artificial Sequence
  Description of Artificial Sequence: Synthetic oligonucleotide
ccccauauuggaagguguc

SEQ ID NO: 813542 - RNA, 19 nt, Artificial Sequence
  Description of Artificial Sequence: Synthetic oligonucleotide
auggguaguuugaggugcu

SEQ ID NO: 813543 - RNA, 19 nt, Artificial Sequence
  Description of Artificial Sequence: Synthetic oligonucleotide
ggacggaugauuguuugcu

SEQ ID NO: 813544 - RNA, 19 nt, Artificial Sequence
  Description of Artificial Sequence: Synthetic oligonucleotide
cuccauccugcaaucuaaa

SEQ ID NO: 813545 - RNA, 19 nt, Artificial Sequence
  Description of Artificial Sequence: Synthetic oligonucleotide
gggagcuugucucuuuaua

SEQ ID NO: 813546 - RNA, 19 nt, Artificial Sequence
  Description of Artificial Sequence: Synthetic oligonucleotide
aggaagcuauugggugaag

SEQ ID NO: 813547 - RNA, 19 nt, Artificial Sequence
  Description of Artificial Sequence: Synthetic oligonucleotide
gacggaugauuguuugcuu

SEQ ID NO: 813548 - RNA, 19 nt, Artificial Sequence
  Description of Artificial Sequence: Synthetic oligonucleotide
auuguaccauuaggaguuu

SEQ ID NO: 813549 - RNA, 19 nt, Artificial Sequence
  Description of Artificial Sequence: Synthetic oligonucleotide
ucggggagcuugucucuuu

SEQ ID NO: 813550 - RNA, 19 nt, Artificial Sequence
  Description of Artificial Sequence: Synthetic oligonucleotide
caguaaacgauggccccaa

SEQ ID NO: 813551 - RNA, 19 nt, Artificial Sequence
  Description of Artificial Sequence: Synthetic oligonucleotide
aggccagaaaugagcugcu

SEQ ID NO: 813552 - RNA, 19 nt, Artificial Sequence
  Description of Artificial Sequence: Synthetic oligonucleotide
cuaagcccaucccggggaa

SEQ ID NO: 813553 - RNA, 19 nt, Artificial Sequence
  Description of Artificial Sequence: Synthetic oligonucleotide
cuaacaucccuaccccuuu

SEQ ID NO: 813554 - RNA, 19 nt, Artificial Sequence
  Description of Artificial Sequence: Synthetic oligonucleotide
cauuuaccaagugucugau

SEQ ID NO: 813555 - RNA, 19 nt, Artificial Sequence
  Description of Artificial Sequence: Synthetic oligonucleotide
ggaagcuauugggugaagu

SEQ ID NO: 813556 - RNA, 19 nt, Artificial Sequence
  Description of Artificial Sequence: Synthetic oligonucleotide
ggcuaccuuccuaagccca

SEQ ID NO: 813557 - RNA, 19 nt, Artificial Sequence
  Description of Artificial Sequence: Synthetic oligonucleotide
ccgguucuuuucugguagc

SEQ ID NO: 813558 - RNA, 19 nt, Artificial Sequence
  Description of Artificial Sequence: Synthetic oligonucleotide
ucaugcagucuggccccac

SEQ ID NO: 813559 - RNA, 19 nt, Artificial Sequence
  Description of Artificial Sequence: Synthetic oligonucleotide
caucucccgguucuuuucu

SEQ ID NO: 813560 - RNA, 19 nt, Artificial Sequence
  Description of Artificial Sequence: Synthetic oligonucleotide
cugggcauuuuggaucaaa

SEQ ID NO: 813561 - RNA, 19 nt, Artificial Sequence
  Description of Artificial Sequence: Synthetic oligonucleotide
guagacccuuuuacaaccu

SEQ ID NO: 813562 - RNA, 19 nt, Artificial Sequence
  Description of Artificial Sequence: Synthetic oligonucleotide
guacaggucaauggguauu

SEQ ID NO: 813563 - RNA, 19 nt, Artificial Sequence
  Description of Artificial Sequence: Synthetic oligonucleotide
cggacggaugauuguuugc

SEQ ID NO: 813564 - RNA, 19 nt, Artificial Sequence
  Description of Artificial Sequence: Synthetic oligonucleotide
ccaucccggggaaggacac

SEQ ID NO: 813565 - RNA, 19 nt, Artificial Sequence
  Description of Artificial Sequence: Synthetic oligonucleotide
ggcuucccagacacugaag

SEQ ID NO: 813566 - RNA, 19 nt, Artificial Sequence
  Description of Artificial Sequence: Synthetic oligonucleotide
cgaacuuugcugaaacagu

SEQ ID NO: 813567 - RNA, 19 nt, Artificial Sequence
  Description of Artificial Sequence: Synthetic oligonucleotide
cccauauuggaagguguca

SEQ ID NO: 813568 - RNA, 19 nt, Artificial Sequence
  Description of Artificial Sequence: Synthetic oligonucleotide
guccuaggagcugcucaca

SEQ ID NO: 813569 - RNA, 19 nt, Artificial Sequence
  Description of Artificial Sequence: Synthetic oligonucleotide
ccuaagcuuugacaugcaa

SEQ ID NO: 813570 - RNA, 19 nt, Artificial Sequence
  Description of Artificial Sequence: Synthetic oligonucleotide
gguggccuuuggaguagcc

SEQ ID NO: 813571 - RNA, 19 nt, Artificial Sequence
  Description of Artificial Sequence: Synthetic oligonucleotide
cuggucggggagcuugucu

SEQ ID NO: 813572 - RNA, 19 nt, Artificial Sequence
  Description of Artificial Sequence: Synthetic oligonucleotide
agcccaucccggggaagga

SEQ ID NO: 813573 - RNA, 19 nt, Artificial Sequence
  Description of Artificial Sequence: Synthetic oligonucleotide
ucacgggcggacggaugau

SEQ ID NO: 813574 - RNA, 19 nt, Artificial Sequence
  Description of Artificial Sequence: Synthetic oligonucleotide
ggguaguuugaggugcugu

SEQ ID NO: 813575 - RNA, 19 nt, Artificial Sequence
  Description of Artificial Sequence: Synthetic oligonucleotide
gguacuagucaguguccau

SEQ ID NO: 813576 - RNA, 19 nt, Artificial Sequence
  Description of Artificial Sequence: Synthetic oligonucleotide
uggccccaacugaccuuuc

SEQ ID NO: 813577 - RNA, 19 nt, Artificial Sequence
  Description of Artificial Sequence: Synthetic oligonucleotide
ggccccaccagauuucauu

SEQ ID NO: 813578 - RNA, 19 nt, Artificial Sequence
  Description of Artificial Sequence: Synthetic oligonucleotide
gcuaacaucccuaccccuu

SEQ ID NO: 813579 - RNA, 19 nt, Artificial Sequence
  Description of Artificial Sequence: Synthetic oligonucleotide
guuuggagcuugagagaau

SEQ ID NO: 813580 - RNA, 19 nt, Artificial Sequence
  Description of Artificial Sequence: Synthetic oligonucleotide
ccauuaggaguuugacgcu

SEQ ID NO: 813581 - RNA, 19 nt, Artificial Sequence
  Description of Artificial Sequence: Synthetic oligonucleotide
cagcaaacguuucgagauu

SEQ ID NO: 813582 - RNA, 19 nt, Artificial Sequence
  Description of Artificial Sequence: Synthetic oligonucleotide
ccucacgggcggacggaug

SEQ ID NO: 813583 - RNA, 19 nt, Artificial Sequence
  Description of Artificial Sequence: Synthetic oligonucleotide
gcaaacguuucgagauugu

SEQ ID NO: 813584 - RNA, 19 nt, Artificial Sequence
  Description of Artificial Sequence: Synthetic oligonucleotide
gcccugaaucauucagagu

SEQ ID NO: 813585 - RNA, 19 nt, Artificial Sequence
  Description of Artificial Sequence: Synthetic oligonucleotide
guuuuccgggaugcuguuu

SEQ ID NO: 813586 - RNA, 19 nt, Artificial Sequence
  Description of Artificial Sequence: Synthetic oligonucleotide
gccuaagcuuugacaugca

SEQ ID NO: 813587 - RNA, 19 nt, Artificial Sequence
  Description of Artificial Sequence: Synthetic oligonucleotide
ccaccaccgaugaugggau

SEQ ID NO: 813588 - RNA, 19 nt, Artificial Sequence
  Description of Artificial Sequence: Synthetic oligonucleotide
ggggagcuugucucuuuau

SEQ ID NO: 813589 - RNA, 19 nt, Artificial Sequence
  Description of Artificial Sequence: Synthetic oligonucleotide
gcuaccuuccuaagcccau

SEQ ID NO: 813590 - RNA, 19 nt, Artificial Sequence
  Description of Artificial Sequence: Synthetic oligonucleotide
gggugggcccaaagaucac

SEQ ID NO: 813591 - RNA, 19 nt, Artificial Sequence
  Description of Artificial Sequence: Synthetic oligonucleotide
ccggggaaggacacugggu

SEQ ID NO: 813592 - RNA, 19 nt, Artificial Sequence
  Description of Artificial Sequence: Synthetic oligonucleotide
gucggggagcuugucucuu

SEQ ID NO: 813593 - RNA, 19 nt, Artificial Sequence
  Description of Artificial Sequence: Synthetic oligonucleotide
ggccucacgggcggacgga

SEQ ID NO: 813594 - RNA, 19 nt, Artificial Sequence
  Description of Artificial Sequence: Synthetic oligonucleotide
cggaugauuguuugcuuuu

SEQ ID NO: 813595 - RNA, 19 nt, Artificial Sequence
  Description of Artificial Sequence: Synthetic oligonucleotide
gggcggacggaugauuguu

SEQ ID NO: 813596 - RNA, 19 nt, Artificial Sequence
  Description of Artificial Sequence: Synthetic oligonucleotide
ccagacgguaauccagguu

SEQ ID NO: 813597 - RNA, 19 nt, Artificial Sequence
  Description of Artificial Sequence: Synthetic oligonucleotide
caucccggggaaggacacu

SEQ ID NO: 813598 - RNA, 19 nt, Artificial Sequence
  Description of Artificial Sequence: Synthetic oligonucleotide
cgccaccaccgaugauggg

SEQ ID NO: 813599 - RNA, 19 nt, Artificial Sequence
  Description of Artificial Sequence: Synthetic oligonucleotide
ggcggacggaugauuguuu

SEQ ID NO: 813600 - RNA, 19 nt, Artificial Sequence
  Description of Artificial Sequence: Synthetic oligonucleotide
cacgggcggacggaugauu

SEQ ID NO: 813601 - RNA, 19 nt, Artificial Sequence
  Description of Artificial Sequence: Synthetic oligonucleotide
caccaccgaugaugggauu

SEQ ID NO: 813602 - RNA, 19 nt, Artificial Sequence
  Description of Artificial Sequence: Synthetic oligonucleotide
ggcccggcauggagggucu

SEQ ID NO: 813603 - RNA, 19 nt, Artificial Sequence
  Description of Artificial Sequence: Synthetic oligonucleotide
gccucacgggcggacggau

SEQ ID NO: 813604 - RNA, 19 nt, Artificial Sequence
  Description of Artificial Sequence: Synthetic oligonucleotide
ggacgccaccaccgaugau

SEQ ID NO: 813605 - RNA, 19 nt, Artificial Sequence
  Description of Artificial Sequence: Synthetic oligonucleotide
cgggcggacggaugauugu

SEQ ID NO: 813606 - RNA, 19 nt, Artificial Sequence
  Description of Artificial Sequence: Synthetic oligonucleotide
cuggcccggcauggagggu

SEQ ID NO: 813607 - RNA, 19 nt, Artificial Sequence
  Description of Artificial Sequence: Synthetic oligonucleotide
gccacuggucggggagcuu

SEQ ID NO: 813608 - RNA, 19 nt, Artificial Sequence
  Description of Artificial Sequence: Synthetic oligonucleotide
uauuacauaaacaauaaac

SEQ ID NO: 813609 - RNA, 19 nt, Artificial Sequence
  Description of Artificial Sequence: Synthetic oligonucleotide
aaaucucaaauccaugagc

SEQ ID NO: 813610 - RNA, 19 nt, Artificial Sequence
  Description of Artificial Sequence: Synthetic oligonucleotide
agcacaaaaucucaaaucc

SEQ ID NO: 813611 - RNA, 19 nt, Artificial Sequence
  Description of Artificial Sequence: Synthetic oligonucleotide
gauucugccagauauaagg

SEQ ID NO: 813612 - RNA, 19 nt, Artificial Sequence
  Description of Artificial Sequence: Synthetic oligonucleotide
ugugccuaaaaucuuaucg

SEQ ID NO: 813613 - RNA, 19 nt, Artificial Sequence
  Description of Artificial Sequence: Synthetic oligonucleotide
aauuaagaaaagaaucugc

SEQ ID NO: 813614 - RNA, 19 nt, Artificial Sequence
  Description of Artificial Sequence: Synthetic oligonucleotide
gauccaaccacuuagggag

SEQ ID NO: 813615 - RNA, 19 nt, Artificial Sequence
  Description of Artificial Sequence: Synthetic oligonucleotide
aaucucaaauccaugagcc

SEQ ID NO: 813616 - RNA, 19 nt, Artificial Sequence
  Description of Artificial Sequence: Synthetic oligonucleotide
ucuauuaacaagaacucgc

SEQ ID NO: 813617 - RNA, 19 nt, Artificial Sequence
  Description of Artificial Sequence: Synthetic oligonucleotide
aaggaaccaguauaggugc

SEQ ID NO: 813618 - RNA, 19 nt, Artificial Sequence
  Description of Artificial Sequence: Synthetic oligonucleotide
uuaagauuuccucaccugg

SEQ ID NO: 813619 - RNA, 19 nt, Artificial Sequence
  Description of Artificial Sequence: Synthetic oligonucleotide
auuaucaggauccaaccac

SEQ ID NO: 813620 - RNA, 19 nt, Artificial Sequence
  Description of Artificial Sequence: Synthetic oligonucleotide
auuccaguacauuugagac

SEQ ID NO: 813621 - RNA, 19 nt, Artificial Sequence
  Description of Artificial Sequence: Synthetic oligonucleotide
uacaucauaauucuucugc

SEQ ID NO: 813622 - RNA, 19 nt, Artificial Sequence
  Description of Artificial Sequence: Synthetic oligonucleotide
ugucuaaacauucaaaguc

SEQ ID NO: 813623 - RNA, 19 nt, Artificial Sequence
  Description of Artificial Sequence: Synthetic oligonucleotide
ugguaaaagugacagaugc

SEQ ID NO: 813624 - RNA, 19 nt, Artificial Sequence
  Description of Artificial Sequence: Synthetic oligonucleotide
ugauuggagcuucagaagg

SEQ ID NO: 813625 - RNA, 19 nt, Artificial Sequence
  Description of Artificial Sequence: Synthetic oligonucleotide
uucgacaacacaaucaccu

SEQ ID NO: 813626 - RNA, 19 nt, Artificial Sequence
  Description of Artificial Sequence: Synthetic oligonucleotide
ucaggauccaaccacuuag

SEQ ID NO: 813627 - RNA, 19 nt, Artificial Sequence
  Description of Artificial Sequence: Synthetic oligonucleotide
gauauccaaagccuguugg

SEQ ID NO: 813628 - RNA, 19 nt, Artificial Sequence
  Description of Artificial Sequence: Synthetic oligonucleotide
uuugucaugccauacauau

SEQ ID NO: 813629 - RNA, 19 nt, Artificial Sequence
  Description of Artificial Sequence: Synthetic oligonucleotide
ucuuaucgaaauaauuaag

SEQ ID NO: 813630 - RNA, 19 nt, Artificial Sequence
  Description of Artificial Sequence: Synthetic oligonucleotide
cauuauucguguuucaggc

SEQ ID NO: 813631 - RNA, 19 nt, Artificial Sequence
  Description of Artificial Sequence: Synthetic oligonucleotide
aauaauacacagcucccca

SEQ ID NO: 813632 - RNA, 19 nt, Artificial Sequence
  Description of Artificial Sequence: Synthetic oligonucleotide
cagguuuaggucuacaucc

SEQ ID NO: 813633 - RNA, 19 nt, Artificial Sequence
  Description of Artificial Sequence: Synthetic oligonucleotide
ugaauugucauuugcaguc

SEQ ID NO: 813634 - RNA, 19 nt, Artificial Sequence
  Description of Artificial Sequence: Synthetic oligonucleotide
aagccuguuggauuguugg

SEQ ID NO: 813635 - RNA, 19 nt, Artificial Sequence
  Description of Artificial Sequence: Synthetic oligonucleotide
ugcaacacgguuaagauuu

SEQ ID NO: 813636 - RNA, 19 nt, Artificial Sequence
  Description of Artificial Sequence: Synthetic oligonucleotide
uuugguaaaagugacagau

SEQ ID NO: 813637 - RNA, 19 nt, Artificial Sequence
  Description of Artificial Sequence: Synthetic oligonucleotide
uuuaucugguaucaggaac

SEQ ID NO: 813638 - RNA, 19 nt, Artificial Sequence
  Description of Artificial Sequence: Synthetic oligonucleotide
ugacagaugccauuauucg

SEQ ID NO: 813639 - RNA, 19 nt, Artificial Sequence
  Description of Artificial Sequence: Synthetic oligonucleotide
uguuucgacaacacaauca

SEQ ID NO: 813640 - RNA, 19 nt, Artificial Sequence
  Description of Artificial Sequence: Synthetic oligonucleotide
uuaucugguaucaggaaca

SEQ ID NO: 813641 - RNA, 19 nt, Artificial Sequence
  Description of Artificial Sequence: Synthetic oligonucleotide
uaucgaaauaauuaagaaa

SEQ ID NO: 813642 - RNA, 19 nt, Artificial Sequence
  Description of Artificial Sequence: Synthetic oligonucleotide
aauggggucccguaaguag

SEQ ID NO: 813643 - RNA, 19 nt, Artificial Sequence
  Description of Artificial Sequence: Synthetic oligonucleotide
gauauaaggaaccaguaua

SEQ ID NO: 813644 - RNA, 19 nt, Artificial Sequence
  Description of Artificial Sequence: Synthetic oligonucleotide
aaucuuaucgaaauaauua

SEQ ID NO: 813645 - RNA, 19 nt, Artificial Sequence
  Description of Artificial Sequence: Synthetic oligonucleotide
gagauugaaaggcugauuc

SEQ ID NO: 813646 - RNA, 19 nt, Artificial Sequence
  Description of Artificial Sequence: Synthetic oligonucleotide
uuuaggucuacauccacug

SEQ ID NO: 813647 - RNA, 19 nt, Artificial Sequence
  Description of Artificial Sequence: Synthetic oligonucleotide
ugcuuuaucugguaucagg

SEQ ID NO: 813648 - RNA, 19 nt, Artificial Sequence
  Description of Artificial Sequence: Synthetic oligonucleotide
agcaacugaacuuuccggg

SEQ ID NO: 813649 - RNA, 19 nt, Artificial Sequence
  Description of Artificial Sequence: Synthetic oligonucleotide
uuaaaguaaucauuccucu

SEQ ID NO: 813650 - RNA, 19 nt, Artificial Sequence
  Description of Artificial Sequence: Synthetic oligonucleotide
aaaguuaaaugcugaugug

SEQ ID NO: 813651 - RNA, 19 nt, Artificial Sequence
  Description of Artificial Sequence: Synthetic oligonucleotide
ugcgcguacagacauuugg

SEQ ID NO: 813652 - RNA, 19 nt, Artificial Sequence
  Description of Artificial Sequence: Synthetic oligonucleotide
auaaggaaccaguauaggu

SEQ ID NO: 813653 - RNA, 19 nt, Artificial Sequence
  Description of Artificial Sequence: Synthetic oligonucleotide
cuauuaacaagaacucgcc

SEQ ID NO: 813654 - RNA, 19 nt, Artificial Sequence
  Description of Artificial Sequence: Synthetic oligonucleotide
uuugagauugaaaggcuga

SEQ ID NO: 813655 - RNA, 19 nt, Artificial Sequence
  Description of Artificial Sequence: Synthetic oligonucleotide
ucaauguuaucuccaaacu

SEQ ID NO: 813656 - RNA, 19 nt, Artificial Sequence
  Description of Artificial Sequence: Synthetic oligonucleotide
uggguugagacuuuggaga

SEQ ID NO: 813657 - RNA, 19 nt, Artificial Sequence
  Description of Artificial Sequence: Synthetic oligonucleotide
uucuauuaacaagaacucg

SEQ ID NO: 813658 - RNA, 19 nt, Artificial Sequence
  Description of Artificial Sequence: Synthetic oligonucleotide
ucgaaauaauuaagaaaag

SEQ ID NO: 813659 - RNA, 19 nt, Artificial Sequence
  Description of Artificial Sequence: Synthetic oligonucleotide
agaaucugcaucaaaagug

SEQ ID NO: 813660 - RNA, 19 nt, Artificial Sequence
  Description of Artificial Sequence: Synthetic oligonucleotide
agaggggugaagcagucac

SEQ ID NO: 813661 - RNA, 19 nt, Artificial Sequence
  Description of Artificial Sequence: Synthetic oligonucleotide
acgguuaagauuuccucac

SEQ ID NO: 813662 - RNA, 19 nt, Artificial Sequence
  Description of Artificial Sequence: Synthetic oligonucleotide
aagcuuuuacccaugcugg

SEQ ID NO: 813663 - RNA, 19 nt, Artificial Sequence
  Description of Artificial Sequence: Synthetic oligonucleotide
uccuuucagagauucagag

SEQ ID NO: 813664 - RNA, 19 nt, Artificial Sequence
  Description of Artificial Sequence: Synthetic oligonucleotide
cauuucuagucuuuccugg

SEQ ID NO: 813665 - RNA, 19 nt, Artificial Sequence
  Description of Artificial Sequence: Synthetic oligonucleotide
uuauucguguuucaggcaa

SEQ ID NO: 813666 - RNA, 19 nt, Artificial Sequence
  Description of Artificial Sequence: Synthetic oligonucleotide
uuuugcagguuuauauuug

SEQ ID NO: 813667 - RNA, 19 nt, Artificial Sequence
  Description of Artificial Sequence: Synthetic oligonucleotide
aaccaguauaggugcaaac

SEQ ID NO: 813668 - RNA, 19 nt, Artificial Sequence
  Description of Artificial Sequence: Synthetic oligonucleotide
caugccauacauaugagca

SEQ ID NO: 813669 - RNA, 19 nt, Artificial Sequence
  Description of Artificial Sequence: Synthetic oligonucleotide
uauuaucaggauccaacca

SEQ ID NO: 813670 - RNA, 19 nt, Artificial Sequence
  Description of Artificial Sequence: Synthetic oligonucleotide
caugcuguguaacagguug

SEQ ID NO: 813671 - RNA, 19 nt, Artificial Sequence
  Description of Artificial Sequence: Synthetic oligonucleotide
ucuggaaaugccuuuguaa

SEQ ID NO: 813672 - RNA, 19 nt, Artificial Sequence
  Description of Artificial Sequence: Synthetic oligonucleotide
uuaacaagaacucgccauc

SEQ ID NO: 813673 - RNA, 19 nt, Artificial Sequence
  Description of Artificial Sequence: Synthetic oligonucleotide
aucuuaucgaaauaauuaa

SEQ ID NO: 813674 - RNA, 19 nt, Artificial Sequence
  Description of Artificial Sequence: Synthetic oligonucleotide
guuucgacaacacaaucac

SEQ ID NO: 813675 - RNA, 19 nt, Artificial Sequence
  Description of Artificial Sequence: Synthetic oligonucleotide
cauacauaugagcaggaac

SEQ ID NO: 813676 - RNA, 19 nt, Artificial Sequence
  Description of Artificial Sequence: Synthetic oligonucleotide
uucuuugccauuucuaguc

SEQ ID NO: 813677 - RNA, 19 nt, Artificial Sequence
  Description of Artificial Sequence: Synthetic oligonucleotide
ugcagguuuauauuugaga

SEQ ID NO: 813678 - RNA, 19 nt, Artificial Sequence
  Description of Artificial Sequence: Synthetic oligonucleotide
ucuccaaacuuugucaugc

SEQ ID NO: 813679 - RNA, 19 nt, Artificial Sequence
  Description of Artificial Sequence: Synthetic oligonucleotide
aacugaacuuuccgggcgg

SEQ ID NO: 813680 - RNA, 19 nt, Artificial Sequence
  Description of Artificial Sequence: Synthetic oligonucleotide
auauaaggaaccaguauag

SEQ ID NO: 813681 - RNA, 19 nt, Artificial Sequence
  Description of Artificial Sequence: Synthetic oligonucleotide
aggguauucuuucagauuu

SEQ ID NO: 813682 - RNA, 19 nt, Artificial Sequence
  Description of Artificial Sequence: Synthetic oligonucleotide
augugauccgcauugucag

SEQ ID NO: 813683 - RNA, 19 nt, Artificial Sequence
  Description of Artificial Sequence: Synthetic oligonucleotide
ugagaccagguuuaggucu

SEQ ID NO: 813684 - RNA, 19 nt, Artificial Sequence
  Description of Artificial Sequence: Synthetic oligonucleotide
uauuggcacuauuaucagg

SEQ ID NO: 813685 - RNA, 19 nt, Artificial Sequence
  Description of Artificial Sequence: Synthetic oligonucleotide
cuucaugccaauucauggc

SEQ ID NO: 813686 - RNA, 19 nt, Artificial Sequence
  Description of Artificial Sequence: Synthetic oligonucleotide
uucaugccaauucauggcu

SEQ ID NO: 813687 - RNA, 19 nt, Artificial Sequence
  Description of Artificial Sequence: Synthetic oligonucleotide
gauuuugugccuaaaaucu

SEQ ID NO: 813688 - RNA, 19 nt, Artificial Sequence
  Description of Artificial Sequence: Synthetic oligonucleotide
acacgguuaagauuuccuc

SEQ ID NO: 813689 - RNA, 19 nt, Artificial Sequence
  Description of Artificial Sequence: Synthetic oligonucleotide
gaagcagugugcucgauga

SEQ ID NO: 813690 - RNA, 19 nt, Artificial Sequence
  Description of Artificial Sequence: Synthetic oligonucleotide
cuugaaaacucgacaggcc

SEQ ID NO: 813691 - RNA, 19 nt, Artificial Sequence
  Description of Artificial Sequence: Synthetic oligonucleotide
ggcacuauuaucaggaucc

SEQ ID NO: 813692 - RNA, 19 nt, Artificial Sequence
  Description of Artificial Sequence: Synthetic oligonucleotide
ugagauuuugugccuaaaa

SEQ ID NO: 813693 - RNA, 19 nt, Artificial Sequence
  Description of Artificial Sequence: Synthetic oligonucleotide
ucauuugcagucugggaug

SEQ ID NO: 813694 - RNA, 19 nt, Artificial Sequence
  Description of Artificial Sequence: Synthetic oligonucleotide
uuugcagguuuauauuuga

SEQ ID NO: 813695 - RNA, 19 nt, Artificial Sequence
  Description of Artificial Sequence: Synthetic oligonucleotide
ugagaggucuaaccacugg

SEQ ID NO: 813696 - RNA, 19 nt, Artificial Sequence
  Description of Artificial Sequence: Synthetic oligonucleotide
uuagggagaaagucagcag

SEQ ID NO: 813697 - RNA, 19 nt, Artificial Sequence
  Description of Artificial Sequence: Synthetic oligonucleotide
uaucagucccuuaaaguaa

SEQ ID NO: 813698 - RNA, 19 nt, Artificial Sequence
  Description of Artificial Sequence: Synthetic oligonucleotide
auuggcacuauuaucagga

SEQ ID NO: 813699 - RNA, 19 nt, Artificial Sequence
  Description of Artificial Sequence: Synthetic oligonucleotide
agcuccucgacaucaaaag

SEQ ID NO: 813700 - RNA, 19 nt, Artificial Sequence
  Description of Artificial Sequence: Synthetic oligonucleotide
agauucagaguccugaguu

SEQ ID NO: 813701 - RNA, 19 nt, Artificial Sequence
  Description of Artificial Sequence: Synthetic oligonucleotide
ucgacaggcccucagguca

SEQ ID NO: 813702 - RNA, 19 nt, Artificial Sequence
  Description of Artificial Sequence: Synthetic oligonucleotide
aaaagugacagaugccauu

SEQ ID NO: 813703 - RNA, 19 nt, Artificial Sequence
  Description of Artificial Sequence: Synthetic oligonucleotide
aauccaugagccaacuuca

SEQ ID NO: 813704 - RNA, 19 nt, Artificial Sequence
  Description of Artificial Sequence: Synthetic oligonucleotide
agauauaaggaaccaguau

SEQ ID NO: 813705 - RNA, 19 nt, Artificial Sequence
  Description of Artificial Sequence: Synthetic oligonucleotide
ugaguacugccacaaugcc

SEQ ID NO: 813706 - RNA, 19 nt, Artificial Sequence
  Description of Artificial Sequence: Synthetic oligonucleotide
guuaagauuuccucaccug

SEQ ID NO: 813707 - RNA, 19 nt, Artificial Sequence
  Description of Artificial Sequence: Synthetic oligonucleotide
caugccaauucauggcucg

SEQ ID NO: 813708 - RNA, 19 nt, Artificial Sequence
  Description of Artificial Sequence: Synthetic oligonucleotide
uccugaguuucaaagucca

SEQ ID NO: 813709 - RNA, 19 nt, Artificial Sequence
  Description of Artificial Sequence: Synthetic oligonucleotide
cugaugugcaggcuaaccc

SEQ ID NO: 813710 - RNA, 19 nt, Artificial Sequence
  Description of Artificial Sequence: Synthetic oligonucleotide
guuguuugaguacugccac

SEQ ID NO: 813711 - RNA, 19 nt, Artificial Sequence
  Description of Artificial Sequence: Synthetic oligonucleotide
ucgaugaagagaagcuuca

SEQ ID NO: 813712 - RNA, 19 nt, Artificial Sequence
  Description of Artificial Sequence: Synthetic oligonucleotide
cauagcaacugaacuuucc

SEQ ID NO: 813713 - RNA, 19 nt, Artificial Sequence
  Description of Artificial Sequence: Synthetic oligonucleotide
gaagcuaacacagcuucug

SEQ ID NO: 813714 - RNA, 19 nt, Artificial Sequence
  Description of Artificial Sequence: Synthetic oligonucleotide
ugauauccaaagccuguug

SEQ ID NO: 813715 - RNA, 19 nt, Artificial Sequence
  Description of Artificial Sequence: Synthetic oligonucleotide
agcagaaccuucuaucagu

SEQ ID NO: 813716 - RNA, 19 nt, Artificial Sequence
  Description of Artificial Sequence: Synthetic oligonucleotide
uggaaguaguucuuugcca

SEQ ID NO: 813717 - RNA, 19 nt, Artificial Sequence
  Description of Artificial Sequence: Synthetic oligonucleotide
ccuguauagguucugaagc

SEQ ID NO: 813718 - RNA, 19 nt, Artificial Sequence
  Description of Artificial Sequence: Synthetic oligonucleotide
cugaagcuaacacagcuuc

SEQ ID NO: 813719 - RNA, 19 nt, Artificial Sequence
  Description of Artificial Sequence: Synthetic oligonucleotide
ugugggcuacauuuggagc

SEQ ID NO: 813720 - RNA, 19 nt, Artificial Sequence
  Description of Artificial Sequence: Synthetic oligonucleotide
guuaaaugcugaugugcag

SEQ ID NO: 813721 - RNA, 19 nt, Artificial Sequence
  Description of Artificial Sequence: Synthetic oligonucleotide
augugggcuacauuuggag

SEQ ID NO: 813722 - RNA, 19 nt, Artificial Sequence
  Description of Artificial Sequence: Synthetic oligonucleotide
gaagaaucucuuuggguuc

SEQ ID NO: 813723 - RNA, 19 nt, Artificial Sequence
  Description of Artificial Sequence: Synthetic oligonucleotide
aacuucaugccaauucaug

SEQ ID NO: 813724 - RNA, 19 nt, Artificial Sequence
  Description of Artificial Sequence: Synthetic oligonucleotide
aaagugauuggagcuucag

SEQ ID NO: 813725 - RNA, 19 nt, Artificial Sequence
  Description of Artificial Sequence: Synthetic oligonucleotide
aguuaaaugcugaugugca

SEQ ID NO: 813726 - RNA, 19 nt, Artificial Sequence
  Description of Artificial Sequence: Synthetic oligonucleotide
aaagugacagaugccauua

SEQ ID NO: 813727 - RNA, 19 nt, Artificial Sequence
  Description of Artificial Sequence: Synthetic oligonucleotide
uuucgacaacacaaucacc

SEQ ID NO: 813728 - RNA, 19 nt, Artificial Sequence
  Description of Artificial Sequence: Synthetic oligonucleotide
ccuauuggcacuauuauca

SEQ ID NO: 813729 - RNA, 19 nt, Artificial Sequence
  Description of Artificial Sequence: Synthetic oligonucleotide
ugccuaaaaucuuaucgaa

SEQ ID NO: 813730 - RNA, 19 nt, Artificial Sequence
  Description of Artificial Sequence: Synthetic oligonucleotide
uaaaagugacagaugccau

SEQ ID NO: 813731 - RNA, 19 nt, Artificial Sequence
  Description of Artificial Sequence: Synthetic oligonucleotide
uacuaacucuggaaaugcc

SEQ ID NO: 813732 - RNA, 19 nt, Artificial Sequence
  Description of Artificial Sequence: Synthetic oligonucleotide
uacccuauuggcacuauua

SEQ ID NO: 813733 - RNA, 19 nt, Artificial Sequence
  Description of Artificial Sequence: Synthetic oligonucleotide
guaaucauuccucuucaga

SEQ ID NO: 813734 - RNA, 19 nt, Artificial Sequence
  Description of Artificial Sequence: Synthetic oligonucleotide
cauguaggacuugagacug

SEQ ID NO: 813735 - RNA, 19 nt, Artificial Sequence
  Description of Artificial Sequence: Synthetic oligonucleotide
agucccuuaaaguaaucau

SEQ ID NO: 813736 - RNA, 19 nt, Artificial Sequence
  Description of Artificial Sequence: Synthetic oligonucleotide
caacugaacuuuccgggcg

SEQ ID NO: 813737 - RNA, 19 nt, Artificial Sequence
  Description of Artificial Sequence: Synthetic oligonucleotide
cacuguuucgacaacacaa

SEQ ID NO: 813738 - RNA, 19 nt, Artificial Sequence
  Description of Artificial Sequence: Synthetic oligonucleotide
ucccguaaguagaaggccu

SEQ ID NO: 813739 - RNA, 19 nt, Artificial Sequence
  Description of Artificial Sequence: Synthetic oligonucleotide
acauaaacaauaaaccauu

SEQ ID NO: 813740 - RNA, 19 nt, Artificial Sequence
  Description of Artificial Sequence: Synthetic oligonucleotide
ugagacugccaagagcucc

SEQ ID NO: 813741 - RNA, 19 nt, Artificial Sequence
  Description of Artificial Sequence: Synthetic oligonucleotide
cauaugagcaggaacaccu

SEQ ID NO: 813742 - RNA, 19 nt, Artificial Sequence
  Description of Artificial Sequence: Synthetic oligonucleotide
guaaguagaaggccuggac

SEQ ID NO: 813743 - RNA, 19 nt, Artificial Sequence
  Description of Artificial Sequence: Synthetic oligonucleotide
uaaaccauucauccucaau

SEQ ID NO: 813744 - RNA, 19 nt, Artificial Sequence
  Description of Artificial Sequence: Synthetic oligonucleotide
cuauuggcacuauuaucag

SEQ ID NO: 813745 - RNA, 19 nt, Artificial Sequence
  Description of Artificial Sequence: Synthetic oligonucleotide
gugccuaaaaucuuaucga

SEQ ID NO: 813746 - RNA, 19 nt, Artificial Sequence
  Description of Artificial Sequence: Synthetic oligonucleotide
uguuaucuccaaacuuugu

SEQ ID NO: 813747 - RNA, 19 nt, Artificial Sequence
  Description of Artificial Sequence: Synthetic oligonucleotide
uuugugccuaaaaucuuau

SEQ ID NO: 813748 - RNA, 19 nt, Artificial Sequence
  Description of Artificial Sequence: Synthetic oligonucleotide
aauucauggcucggaacug

SEQ ID NO: 813749 - RNA, 19 nt, Artificial Sequence
  Description of Artificial Sequence: Synthetic oligonucleotide
cuaacacagcuucugggug

SEQ ID NO: 813750 - RNA, 19 nt, Artificial Sequence
  Description of Artificial Sequence: Synthetic oligonucleotide
uagucugggucguuguuug

SEQ ID NO: 813751 - RNA, 19 nt, Artificial Sequence
  Description of Artificial Sequence: Synthetic oligonucleotide
aacacgguuaagauuuccu

SEQ ID NO: 813752 - RNA, 19 nt, Artificial Sequence
  Description of Artificial Sequence: Synthetic oligonucleotide
ugcuuccggguacugaagc

SEQ ID NO: 813753 - RNA, 19 nt, Artificial Sequence
  Description of Artificial Sequence: Synthetic oligonucleotide
uccacuguuucgacaacac

SEQ ID NO: 813754 - RNA, 19 nt, Artificial Sequence
  Description of Artificial Sequence: Synthetic oligonucleotide
uggacucauagcaacugaa

SEQ ID NO: 813755 - RNA, 19 nt, Artificial Sequence
  Description of Artificial Sequence: Synthetic oligonucleotide
auuauucguguuucaggca

SEQ ID NO: 813756 - RNA, 19 nt, Artificial Sequence
  Description of Artificial Sequence: Synthetic oligonucleotide
gagcagaaccuucuaucag

SEQ ID NO: 813757 - RNA, 19 nt, Artificial Sequence
  Description of Artificial Sequence: Synthetic oligonucleotide
ucuuugccauuucuagucu

SEQ ID NO: 813758 - RNA, 19 nt, Artificial Sequence
  Description of Artificial Sequence: Synthetic oligonucleotide
uugucagggagucgcacac

SEQ ID NO: 813759 - RNA, 19 nt, Artificial Sequence
  Description of Artificial Sequence: Synthetic oligonucleotide
accaguauaggugcaaacu

SEQ ID NO: 813760 - RNA, 19 nt, Artificial Sequence
  Description of Artificial Sequence: Synthetic oligonucleotide
cuugcuacuaacucuggaa

SEQ ID NO: 813761 - RNA, 19 nt, Artificial Sequence
  Description of Artificial Sequence: Synthetic oligonucleotide
agcccauauccacuccgcc

SEQ ID NO: 813762 - RNA, 19 nt, Artificial Sequence
  Description of Artificial Sequence: Synthetic oligonucleotide
ugugauccgcauugucagg

SEQ ID NO: 813763 - RNA, 19 nt, Artificial Sequence
  Description of Artificial Sequence: Synthetic oligonucleotide
guugagacuuuggagauga

SEQ ID NO: 813764 - RNA, 19 nt, Artificial Sequence
  Description of Artificial Sequence: Synthetic oligonucleotide
gaggucuaaccacugguca

SEQ ID NO: 813765 - RNA, 19 nt, Artificial Sequence
  Description of Artificial Sequence: Synthetic oligonucleotide
augccauuauucguguuuc

SEQ ID NO: 813766 - RNA, 19 nt, Artificial Sequence
  Description of Artificial Sequence: Synthetic oligonucleotide
uuguggguugagacuuugg

SEQ ID NO: 813767 - RNA, 19 nt, Artificial Sequence
  Description of Artificial Sequence: Synthetic oligonucleotide
uaacccuucacuggcuucc

SEQ ID NO: 813768 - RNA, 19 nt, Artificial Sequence
  Description of Artificial Sequence: Synthetic oligonucleotide
ugaagcuuuuacccaugcu

SEQ ID NO: 813769 - RNA, 19 nt, Artificial Sequence
  Description of Artificial Sequence: Synthetic oligonucleotide
ucgacaacacaaucaccug

SEQ ID NO: 813770 - RNA, 19 nt, Artificial Sequence
  Description of Artificial Sequence: Synthetic oligonucleotide
cuuagggagaaagucagca

SEQ ID NO: 813771 - RNA, 19 nt, Artificial Sequence
  Description of Artificial Sequence: Synthetic oligonucleotide
gugggcuacauuuggagca

SEQ ID NO: 813772 - RNA, 19 nt, Artificial Sequence
  Description of Artificial Sequence: Synthetic oligonucleotide
gccauguaggacuugagac

SEQ ID NO: 813773 - RNA, 19 nt, Artificial Sequence
  Description of Artificial Sequence: Synthetic oligonucleotide
ugaagcuaacacagcuucu

SEQ ID NO: 813774 - RNA, 19 nt, Artificial Sequence
  Description of Artificial Sequence: Synthetic oligonucleotide
uggugagaggucuaaccac

SEQ ID NO: 813775 - RNA, 19 nt, Artificial Sequence
  Description of Artificial Sequence: Synthetic oligonucleotide
gucaauggggucccguaag

SEQ ID NO: 813776 - RNA, 19 nt, Artificial Sequence
  Description of Artificial Sequence: Synthetic oligonucleotide
aguacauuugagaccaggu

SEQ ID NO: 813777 - RNA, 19 nt, Artificial Sequence
  Description of Artificial Sequence: Synthetic oligonucleotide
ucgauccuugcuacuaacu

SEQ ID NO: 813778 - RNA, 19 nt, Artificial Sequence
  Description of Artificial Sequence: Synthetic oligonucleotide
gagucgcacacccaugcug

SEQ ID NO: 813779 - RNA, 19 nt, Artificial Sequence
  Description of Artificial Sequence: Synthetic oligonucleotide
ccauuauucguguuucagg

SEQ ID NO: 813780 - RNA, 19 nt, Artificial Sequence
  Description of Artificial Sequence: Synthetic oligonucleotide
caggauccaaccacuuagg

SEQ ID NO: 813781 - RNA, 19 nt, Artificial Sequence
  Description of Artificial Sequence: Synthetic oligonucleotide
gugacagaugccauuauuc

SEQ ID NO: 813782 - RNA, 19 nt, Artificial Sequence
  Description of Artificial Sequence: Synthetic oligonucleotide
ggugaagcagucacaaggg

SEQ ID NO: 813783 - RNA, 19 nt, Artificial Sequence
  Description of Artificial Sequence: Synthetic oligonucleotide
ucaauggggucccguaagu

SEQ ID NO: 813784 - RNA, 19 nt, Artificial Sequence
  Description of Artificial Sequence: Synthetic oligonucleotide
aacaagaacucgccaucau

SEQ ID NO: 813785 - RNA, 19 nt, Artificial Sequence
  Description of Artificial Sequence: Synthetic oligonucleotide
agcagugugcucgaugaag

SEQ ID NO: 813786 - RNA, 19 nt, Artificial Sequence
  Description of Artificial Sequence: Synthetic oligonucleotide
uggcacuauuaucaggauc

SEQ ID NO: 813787 - RNA, 19 nt, Artificial Sequence
  Description of Artificial Sequence: Synthetic oligonucleotide
uuucuagucuuuccuggua

SEQ ID NO: 813788 - RNA, 19 nt, Artificial Sequence
  Description of Artificial Sequence: Synthetic oligonucleotide
ucaaaagugauuggagcuu

SEQ ID NO: 813789 - RNA, 19 nt, Artificial Sequence
  Description of Artificial Sequence: Synthetic oligonucleotide
auaauacacagcuccccau

SEQ ID NO: 813790 - RNA, 19 nt, Artificial Sequence
  Description of Artificial Sequence: Synthetic oligonucleotide
agaggucuaaccacugguc

SEQ ID NO: 813791 - RNA, 19 nt, Artificial Sequence
  Description of Artificial Sequence: Synthetic oligonucleotide
cacgguuaagauuuccuca

SEQ ID NO: 813792 - RNA, 19 nt, Artificial Sequence
  Description of Artificial Sequence: Synthetic oligonucleotide
agauuuccucaccuggacu

SEQ ID NO: 813793 - RNA, 19 nt, Artificial Sequence
  Description of Artificial Sequence: Synthetic oligonucleotide
uuaggucuacauccacugu

SEQ ID NO: 813794 - RNA, 19 nt, Artificial Sequence
  Description of Artificial Sequence: Synthetic oligonucleotide
acaaaaucucaaauccaug

SEQ ID NO: 813795 - RNA, 19 nt, Artificial Sequence
  Description of Artificial Sequence: Synthetic oligonucleotide
cuacaucauaauucuucug

SEQ ID NO: 813796 - RNA, 19 nt, Artificial Sequence
  Description of Artificial Sequence: Synthetic oligonucleotide
ugaacuuuccgggcggugu

SEQ ID NO: 813797 - RNA, 19 nt, Artificial Sequence
  Description of Artificial Sequence: Synthetic oligonucleotide
cagaagggucucuuggcag

SEQ ID NO: 813798 - RNA, 19 nt, Artificial Sequence
  Description of Artificial Sequence: Synthetic oligonucleotide
cuggguacccucugaugcg

SEQ ID NO: 813799 - RNA, 19 nt, Artificial Sequence
  Description of Artificial Sequence: Synthetic oligonucleotide
gagaugauauccaaagccu

SEQ ID NO: 813800 - RNA, 19 nt, Artificial Sequence
  Description of Artificial Sequence: Synthetic oligonucleotide
caguacauuugagaccagg

SEQ ID NO: 813801 - RNA, 19 nt, Artificial Sequence
  Description of Artificial Sequence: Synthetic oligonucleotide
ucugaugcgccuguccaca

SEQ ID NO: 813802 - RNA, 19 nt, Artificial Sequence
  Description of Artificial Sequence: Synthetic oligonucleotide
agugacagaugccauuauu

SEQ ID NO: 813803 - RNA, 19 nt, Artificial Sequence
  Description of Artificial Sequence: Synthetic oligonucleotide
acaagaacucgccaucauu

SEQ ID NO: 813804 - RNA, 19 nt, Artificial Sequence
  Description of Artificial Sequence: Synthetic oligonucleotide
ucugggucguuguuugagu

SEQ ID NO: 813805 - RNA, 19 nt, Artificial Sequence
  Description of Artificial Sequence: Synthetic oligonucleotide
cuuuccgggcgguguaugg

SEQ ID NO: 813806 - RNA, 19 nt, Artificial Sequence
  Description of Artificial Sequence: Synthetic oligonucleotide
caauucauggcucggaacu

SEQ ID NO: 813807 - RNA, 19 nt, Artificial Sequence
  Description of Artificial Sequence: Synthetic oligonucleotide
uucgauccuugcuacuaac

SEQ ID NO: 813808 - RNA, 19 nt, Artificial Sequence
  Description of Artificial Sequence: Synthetic oligonucleotide
cauuugcagucugggaugg

SEQ ID NO: 813809 - RNA, 19 nt, Artificial Sequence
  Description of Artificial Sequence: Synthetic oligonucleotide
cugaagcuuuuacccaugc

SEQ ID NO: 813810 - RNA, 19 nt, Artificial Sequence
  Description of Artificial Sequence: Synthetic oligonucleotide
uguauagguucugaagcua

SEQ ID NO: 813811 - RNA, 19 nt, Artificial Sequence
  Description of Artificial Sequence: Synthetic oligonucleotide
gggucccguaaguagaagg

SEQ ID NO: 813812 - RNA, 19 nt, Artificial Sequence
  Description of Artificial Sequence: Synthetic oligonucleotide
acccuauuggcacuauuau

SEQ ID NO: 813813 - RNA, 19 nt, Artificial Sequence
  Description of Artificial Sequence: Synthetic oligonucleotide
uuccgggcgguguauggag

SEQ ID NO: 813814 - RNA, 19 nt, Artificial Sequence
  Description of Artificial Sequence: Synthetic oligonucleotide
agccaggguauucuuucag

SEQ ID NO: 813815 - RNA, 19 nt, Artificial Sequence
  Description of Artificial Sequence: Synthetic oligonucleotide
auguuaucuccaaacuuug

SEQ ID NO: 813816 - RNA, 19 nt, Artificial Sequence
  Description of Artificial Sequence: Synthetic oligonucleotide
acaucaaaaggcagugucu

SEQ ID NO: 813817 - RNA, 19 nt, Artificial Sequence
  Description of Artificial Sequence: Synthetic oligonucleotide
ucuucgauccuugcuacua

SEQ ID NO: 813818 - RNA, 19 nt, Artificial Sequence
  Description of Artificial Sequence: Synthetic oligonucleotide
gccuguauagguucugaag

SEQ ID NO: 813819 - RNA, 19 nt, Artificial Sequence
  Description of Artificial Sequence: Synthetic oligonucleotide
cugguaucaggaacaggug

SEQ ID NO: 813820 - RNA, 19 nt, Artificial Sequence
  Description of Artificial Sequence: Synthetic oligonucleotide
cuggugagaggucuaacca

SEQ ID NO: 813821 - RNA, 19 nt, Artificial Sequence
  Description of Artificial Sequence: Synthetic oligonucleotide
acacccaugcuguguaaca

SEQ ID NO: 813822 - RNA, 19 nt, Artificial Sequence
  Description of Artificial Sequence: Synthetic oligonucleotide
ugugcucgaugaagagaag

SEQ ID NO: 813823 - RNA, 19 nt, Artificial Sequence
  Description of Artificial Sequence: Synthetic oligonucleotide
ggaauaauacacagcuccc

SEQ ID NO: 813824 - RNA, 19 nt, Artificial Sequence
  Description of Artificial Sequence: Synthetic oligonucleotide
augggcugugacucuuuuc

SEQ ID NO: 813825 - RNA, 19 nt, Artificial Sequence
  Description of Artificial Sequence: Synthetic oligonucleotide
uauucguguuucaggcaaa

SEQ ID NO: 813826 - RNA, 19 nt, Artificial Sequence
  Description of Artificial Sequence: Synthetic oligonucleotide
ugggucguuguuugaguac

SEQ ID NO: 813827 - RNA, 19 nt, Artificial Sequence
  Description of Artificial Sequence: Synthetic oligonucleotide
gacagaugccauuauucgu

SEQ ID NO: 813828 - RNA, 19 nt, Artificial Sequence
  Description of Artificial Sequence: Synthetic oligonucleotide
gcuacuaacucuggaaaug

SEQ ID NO: 813829 - RNA, 19 nt, Artificial Sequence
  Description of Artificial Sequence: Synthetic oligonucleotide
uuggguucaucugugucuc

SEQ ID NO: 813830 - RNA, 19 nt, Artificial Sequence
  Description of Artificial Sequence: Synthetic oligonucleotide
aaccacuggucaucauccu

SEQ ID NO: 813831 - RNA, 19 nt, Artificial Sequence
  Description of Artificial Sequence: Synthetic oligonucleotide
gugugcucgaugaagagaa

SEQ ID NO: 813832 - RNA, 19 nt, Artificial Sequence
  Description of Artificial Sequence: Synthetic oligonucleotide
aggucuaaccacuggucau

SEQ ID NO: 813833 - RNA, 19 nt, Artificial Sequence
  Description of Artificial Sequence: Synthetic oligonucleotide
gagaggucuaaccacuggu

SEQ ID NO: 813834 - RNA, 19 nt, Artificial Sequence
  Description of Artificial Sequence: Synthetic oligonucleotide
cauggcucggaacugggga

SEQ ID NO: 813835 - RNA, 19 nt, Artificial Sequence
  Description of Artificial Sequence: Synthetic oligonucleotide
gcaggcuaacccuucacug

SEQ ID NO: 813836 - RNA, 19 nt, Artificial Sequence
  Description of Artificial Sequence: Synthetic oligonucleotide
aaccacuuagggagaaagu

SEQ ID NO: 813837 - RNA, 19 nt, Artificial Sequence
  Description of Artificial Sequence: Synthetic oligonucleotide
cuuuaucugguaucaggaa

SEQ ID NO: 813838 - RNA, 19 nt, Artificial Sequence
  Description of Artificial Sequence: Synthetic oligonucleotide
ugccagauauaaggaacca

SEQ ID NO: 813839 - RNA, 19 nt, Artificial Sequence
  Description of Artificial Sequence: Synthetic oligonucleotide
uguaggauuccaguacauu

SEQ ID NO: 813840 - RNA, 19 nt, Artificial Sequence
  Description of Artificial Sequence: Synthetic oligonucleotide
agaccugugcuacaucaua

SEQ ID NO: 813841 - RNA, 19 nt, Artificial Sequence
  Description of Artificial Sequence: Synthetic oligonucleotide
cagagauucagaguccuga

SEQ ID NO: 813842 - RNA, 19 nt, Artificial Sequence
  Description of Artificial Sequence: Synthetic oligonucleotide
gcaacugaacuuuccgggc

SEQ ID NO: 813843 - RNA, 19 nt, Artificial Sequence
  Description of Artificial Sequence: Synthetic oligonucleotide
acuguuucgacaacacaau

SEQ ID NO: 813844 - RNA, 19 nt, Artificial Sequence
  Description of Artificial Sequence: Synthetic oligonucleotide
ggauccaaccacuuaggga

SEQ ID NO: 813845 - RNA, 19 nt, Artificial Sequence
  Description of Artificial Sequence: Synthetic oligonucleotide
aagugacagaugccauuau

SEQ ID NO: 813846 - RNA, 19 nt, Artificial Sequence
  Description of Artificial Sequence: Synthetic oligonucleotide
uccgcauugucagggaguc

SEQ ID NO: 813847 - RNA, 19 nt, Artificial Sequence
  Description of Artificial Sequence: Synthetic oligonucleotide
uaucaggauccaaccacuu

SEQ ID NO: 813848 - RNA, 19 nt, Artificial Sequence
  Description of Artificial Sequence: Synthetic oligonucleotide
uugugccuaaaaucuuauc

SEQ ID NO: 813849 - RNA, 19 nt, Artificial Sequence
  Description of Artificial Sequence: Synthetic oligonucleotide
cugucuaaacauucaaagu

SEQ ID NO: 813850 - RNA, 19 nt, Artificial Sequence
  Description of Artificial Sequence: Synthetic oligonucleotide
gccaucauugucuucgauc

SEQ ID NO: 813851 - RNA, 19 nt, Artificial Sequence
  Description of Artificial Sequence: Synthetic oligonucleotide
ugauccgcauugucaggga

SEQ ID NO: 813852 - RNA, 19 nt, Artificial Sequence
  Description of Artificial Sequence: Synthetic oligonucleotide
cagugugcucgaugaagag

SEQ ID NO: 813853 - RNA, 19 nt, Artificial Sequence
  Description of Artificial Sequence: Synthetic oligonucleotide
acauuugguaaaagugaca

SEQ ID NO: 813854 - RNA, 19 nt, Artificial Sequence
  Description of Artificial Sequence: Synthetic oligonucleotide
ugccauuauucguguuuca

SEQ ID NO: 813855 - RNA, 19 nt, Artificial Sequence
  Description of Artificial Sequence: Synthetic oligonucleotide
cuacauccacuguuucgac

SEQ ID NO: 813856 - RNA, 19 nt, Artificial Sequence
  Description of Artificial Sequence: Synthetic oligonucleotide
gugucugcaacacgguuaa

SEQ ID NO: 813857 - RNA, 19 nt, Artificial Sequence
  Description of Artificial Sequence: Synthetic oligonucleotide
cucgacaucaaaaggcagu

SEQ ID NO: 813858 - RNA, 19 nt, Artificial Sequence
  Description of Artificial Sequence: Synthetic oligonucleotide
cugaauugucauuugcagu

SEQ ID NO: 813859 - RNA, 19 nt, Artificial Sequence
  Description of Artificial Sequence: Synthetic oligonucleotide
gcuuuaucugguaucagga

SEQ ID NO: 813860 - RNA, 19 nt, Artificial Sequence
  Description of Artificial Sequence: Synthetic oligonucleotide
cagcccauauccacuccgc

SEQ ID NO: 813861 - RNA, 19 nt, Artificial Sequence
  Description of Artificial Sequence: Synthetic oligonucleotide
accugugcuacaucauaau

SEQ ID NO: 813862 - RNA, 19 nt, Artificial Sequence
  Description of Artificial Sequence: Synthetic oligonucleotide
ggucccguaaguagaaggc

SEQ ID NO: 813863 - RNA, 19 nt, Artificial Sequence
  Description of Artificial Sequence: Synthetic oligonucleotide
uugcuuuaucugguaucag

SEQ ID NO: 813864 - RNA, 19 nt, Artificial Sequence
  Description of Artificial Sequence: Synthetic oligonucleotide
caacacgguuaagauuucc

SEQ ID NO: 813865 - RNA, 19 nt, Artificial Sequence
  Description of Artificial Sequence: Synthetic oligonucleotide
guauagguucugaagcuaa

SEQ ID NO: 813866 - RNA, 19 nt, Artificial Sequence
  Description of Artificial Sequence: Synthetic oligonucleotide
uuuacccaugcuggugugu

SEQ ID NO: 813867 - RNA, 19 nt, Artificial Sequence
  Description of Artificial Sequence: Synthetic oligonucleotide
auguaggacuugagacugc

SEQ ID NO: 813868 - RNA, 19 nt, Artificial Sequence
  Description of Artificial Sequence: Synthetic oligonucleotide
gggagucgcacacccaugc

SEQ ID NO: 813869 - RNA, 19 nt, Artificial Sequence
  Description of Artificial Sequence: Synthetic oligonucleotide
caucgucacugucuaaaca

SEQ ID NO: 813870 - RNA, 19 nt, Artificial Sequence
  Description of Artificial Sequence: Synthetic oligonucleotide
uggguacccucugaugcgc

SEQ ID NO: 813871 - RNA, 19 nt, Artificial Sequence
  Description of Artificial Sequence: Synthetic oligonucleotide
cacccaugcuguguaacag

SEQ ID NO: 813872 - RNA, 19 nt, Artificial Sequence
  Description of Artificial Sequence: Synthetic oligonucleotide
guaaucugcuuuauuacau

SEQ ID NO: 813873 - RNA, 19 nt, Artificial Sequence
  Description of Artificial Sequence: Synthetic oligonucleotide
aggggugaagcagucacaa

SEQ ID NO: 813874 - RNA, 19 nt, Artificial Sequence
  Description of Artificial Sequence: Synthetic oligonucleotide
auaaaccauucauccucaa

SEQ ID NO: 813875 - RNA, 19 nt, Artificial Sequence
  Description of Artificial Sequence: Synthetic oligonucleotide
uugagacugccaagagcuc

SEQ ID NO: 813876 - RNA, 19 nt, Artificial Sequence
  Description of Artificial Sequence: Synthetic oligonucleotide
auggcucggaacuggggau

SEQ ID NO: 813877 - RNA, 19 nt, Artificial Sequence
  Description of Artificial Sequence: Synthetic oligonucleotide
uuuccgggcgguguaugga

SEQ ID NO: 813878 - RNA, 19 nt, Artificial Sequence
  Description of Artificial Sequence: Synthetic oligonucleotide
uuggcacuauuaucaggau

SEQ ID NO: 813879 - RNA, 19 nt, Artificial Sequence
  Description of Artificial Sequence: Synthetic oligonucleotide
acacuagucugggucguug

SEQ ID NO: 813880 - RNA, 19 nt, Artificial Sequence
  Description of Artificial Sequence: Synthetic oligonucleotide
gguuaagauuuccucaccu

SEQ ID NO: 813881 - RNA, 19 nt, Artificial Sequence
  Description of Artificial Sequence: Synthetic oligonucleotide
gucaugccauacauaugag

SEQ ID NO: 813882 - RNA, 19 nt, Artificial Sequence
  Description of Artificial Sequence: Synthetic oligonucleotide
aagcagucacaagggauuu

SEQ ID NO: 813883 - RNA, 19 nt, Artificial Sequence
  Description of Artificial Sequence: Synthetic oligonucleotide
agccuguauagguucugaa

SEQ ID NO: 813884 - RNA, 19 nt, Artificial Sequence
  Description of Artificial Sequence: Synthetic oligonucleotide
augccaauucauggcucgg

SEQ ID NO: 813885 - RNA, 19 nt, Artificial Sequence
  Description of Artificial Sequence: Synthetic oligonucleotide
gaccugugcuacaucauaa

SEQ ID NO: 813886 - RNA, 19 nt, Artificial Sequence
  Description of Artificial Sequence: Synthetic oligonucleotide
ugggcuacauuuggagcac

SEQ ID NO: 813887 - RNA, 19 nt, Artificial Sequence
  Description of Artificial Sequence: Synthetic oligonucleotide
cccauauccacuccgccug

SEQ ID NO: 813888 - RNA, 19 nt, Artificial Sequence
  Description of Artificial Sequence: Synthetic oligonucleotide
aucagucccuuaaaguaau

SEQ ID NO: 813889 - RNA, 19 nt, Artificial Sequence
  Description of Artificial Sequence: Synthetic oligonucleotide
ccagguuuaggucuacauc

SEQ ID NO: 813890 - RNA, 19 nt, Artificial Sequence
  Description of Artificial Sequence: Synthetic oligonucleotide
cuuguggguugagacuuug

SEQ ID NO: 813891 - RNA, 19 nt, Artificial Sequence
  Description of Artificial Sequence: Synthetic oligonucleotide
uccacuccgccugucuggc

SEQ ID NO: 813892 - RNA, 19 nt, Artificial Sequence
  Description of Artificial Sequence: Synthetic oligonucleotide
gaaccaguauaggugcaaa

SEQ ID NO: 813893 - RNA, 19 nt, Artificial Sequence
  Description of Artificial Sequence: Synthetic oligonucleotide
uccgggcgguguauggaga

SEQ ID NO: 813894 - RNA, 19 nt, Artificial Sequence
  Description of Artificial Sequence: Synthetic oligonucleotide
caaaaggcagugucugcaa

SEQ ID NO: 813895 - RNA, 19 nt, Artificial Sequence
  Description of Artificial Sequence: Synthetic oligonucleotide
ccuucuaucagucccuuaa

SEQ ID NO: 813896 - RNA, 19 nt, Artificial Sequence
  Description of Artificial Sequence: Synthetic oligonucleotide
agguuuaggucuacaucca

SEQ ID NO: 813897 - RNA, 19 nt, Artificial Sequence
  Description of Artificial Sequence: Synthetic oligonucleotide
guuuaggucuacauccacu

SEQ ID NO: 813898 - RNA, 19 nt, Artificial Sequence
  Description of Artificial Sequence: Synthetic oligonucleotide
gcguacagacauuugguaa

SEQ ID NO: 813899 - RNA, 19 nt, Artificial Sequence
  Description of Artificial Sequence: Synthetic oligonucleotide
ggagcacaaaaucucaaau

SEQ ID NO: 813900 - RNA, 19 nt, Artificial Sequence
  Description of Artificial Sequence: Synthetic oligonucleotide
ugucagggagucgcacacc

SEQ ID NO: 813901 - RNA, 19 nt, Artificial Sequence
  Description of Artificial Sequence: Synthetic oligonucleotide
gcgguguauggagagcugg

SEQ ID NO: 813902 - RNA, 19 nt, Artificial Sequence
  Description of Artificial Sequence: Synthetic oligonucleotide
ggagcuguaggauuccagu

SEQ ID NO: 813903 - RNA, 19 nt, Artificial Sequence
  Description of Artificial Sequence: Synthetic oligonucleotide
gaacuuuccgggcggugua

SEQ ID NO: 813904 - RNA, 19 nt, Artificial Sequence
  Description of Artificial Sequence: Synthetic oligonucleotide
cgcauugucagggagucgc

SEQ ID NO: 813905 - RNA, 19 nt, Artificial Sequence
  Description of Artificial Sequence: Synthetic oligonucleotide
cccuauuggcacuauuauc

SEQ ID NO: 813906 - RNA, 19 nt, Artificial Sequence
  Description of Artificial Sequence: Synthetic oligonucleotide
ucgccaucauugucuucga

SEQ ID NO: 813907 - RNA, 19 nt, Artificial Sequence
  Description of Artificial Sequence: Synthetic oligonucleotide
cucauagcaacugaacuuu

SEQ ID NO: 813908 - RNA, 19 nt, Artificial Sequence
  Description of Artificial Sequence: Synthetic oligonucleotide
auccgcauugucagggagu

SEQ ID NO: 813909 - RNA, 19 nt, Artificial Sequence
  Description of Artificial Sequence: Synthetic oligonucleotide
agaccagguuuaggucuac

SEQ ID NO: 813910 - RNA, 19 nt, Artificial Sequence
  Description of Artificial Sequence: Synthetic oligonucleotide
aacuuuccgggcgguguau

SEQ ID NO: 813911 - RNA, 19 nt, Artificial Sequence
  Description of Artificial Sequence: Synthetic oligonucleotide
cuucgauccuugcuacuaa

SEQ ID NO: 813912 - RNA, 19 nt, Artificial Sequence
  Description of Artificial Sequence: Synthetic oligonucleotide
guauggagagcuggaagua

SEQ ID NO: 813913 - RNA, 19 nt, Artificial Sequence
  Description of Artificial Sequence: Synthetic oligonucleotide
uugagacuuuggagaugaa

SEQ ID NO: 813914 - RNA, 19 nt, Artificial Sequence
  Description of Artificial Sequence: Synthetic oligonucleotide
gucuaaccacuggucauca

SEQ ID NO: 813915 - RNA, 19 nt, Artificial Sequence
  Description of Artificial Sequence: Synthetic oligonucleotide
ucgcacacccaugcugugu

SEQ ID NO: 813916 - RNA, 19 nt, Artificial Sequence
  Description of Artificial Sequence: Synthetic oligonucleotide
acuuuccgggcgguguaug

SEQ ID NO: 813917 - RNA, 19 nt, Artificial Sequence
  Description of Artificial Sequence: Synthetic oligonucleotide
ggucuaaccacuggucauc

SEQ ID NO: 813918 - RNA, 19 nt, Artificial Sequence
  Description of Artificial Sequence: Synthetic oligonucleotide
guuguagcagcugcgcgua

SEQ ID NO: 813919 - RNA, 19 nt, Artificial Sequence
  Description of Artificial Sequence: Synthetic oligonucleotide
ccucgacaucaaaaggcag

SEQ ID NO: 813920 - RNA, 19 nt, Artificial Sequence
  Description of Artificial Sequence: Synthetic oligonucleotide
ugggagcuguaggauucca

SEQ ID NO: 813921 - RNA, 19 nt, Artificial Sequence
  Description of Artificial Sequence: Synthetic oligonucleotide
gaaguaguucuuugccauu

SEQ ID NO: 813922 - RNA, 19 nt, Artificial Sequence
  Description of Artificial Sequence: Synthetic oligonucleotide
acugaacuuuccgggcggu

SEQ ID NO: 813923 - RNA, 19 nt, Artificial Sequence
  Description of Artificial Sequence: Synthetic oligonucleotide
ggucuacauccacuguuuc

SEQ ID NO: 813924 - RNA, 19 nt, Artificial Sequence
  Description of Artificial Sequence: Synthetic oligonucleotide
cccguaaguagaaggccug

SEQ ID NO: 813925 - RNA, 19 nt, Artificial Sequence
  Description of Artificial Sequence: Synthetic oligonucleotide
gccaggguauucuuucaga

SEQ ID NO: 813926 - RNA, 19 nt, Artificial Sequence
  Description of Artificial Sequence: Synthetic oligonucleotide
cucuggaaaugccuuugua

SEQ ID NO: 813927 - RNA, 19 nt, Artificial Sequence
  Description of Artificial Sequence: Synthetic oligonucleotide
cguacagacauuugguaaa

SEQ ID NO: 813928 - RNA, 19 nt, Artificial Sequence
  Description of Artificial Sequence: Synthetic oligonucleotide
gagaccagguuuaggucua

SEQ ID NO: 813929 - RNA, 19 nt, Artificial Sequence
  Description of Artificial Sequence: Synthetic oligonucleotide
guaucaggaacagguggua

SEQ ID NO: 813930 - RNA, 19 nt, Artificial Sequence
  Description of Artificial Sequence: Synthetic oligonucleotide
uggguucaucugugucucu

SEQ ID NO: 813931 - RNA, 19 nt, Artificial Sequence
  Description of Artificial Sequence: Synthetic oligonucleotide
guacugagcagaaccuucu

SEQ ID NO: 813932 - RNA, 19 nt, Artificial Sequence
  Description of Artificial Sequence: Synthetic oligonucleotide
gucgcacacccaugcugug

SEQ ID NO: 813933 - RNA, 19 nt, Artificial Sequence
  Description of Artificial Sequence: Synthetic oligonucleotide
cugcgcguacagacauuug

SEQ ID NO: 813934 - RNA, 19 nt, Artificial Sequence
  Description of Artificial Sequence: Synthetic oligonucleotide
gucuggcacaaacuucugu

SEQ ID NO: 813935 - RNA, 19 nt, Artificial Sequence
  Description of Artificial Sequence: Synthetic oligonucleotide
ccuggacucauagcaacug

SEQ ID NO: 813936 - RNA, 19 nt, Artificial Sequence
  Description of Artificial Sequence: Synthetic oligonucleotide
uccuuggcacaggaauaau

SEQ ID NO: 813937 - RNA, 19 nt, Artificial Sequence
  Description of Artificial Sequence: Synthetic oligonucleotide
cugaacuuuccgggcggug

SEQ ID NO: 813938 - RNA, 19 nt, Artificial Sequence
  Description of Artificial Sequence: Synthetic oligonucleotide
gguugagacuuuggagaug

SEQ ID NO: 813939 - RNA, 19 nt, Artificial Sequence
  Description of Artificial Sequence: Synthetic oligonucleotide
ggugagaggucuaaccacu

SEQ ID NO: 813940 - RNA, 19 nt, Artificial Sequence
  Description of Artificial Sequence: Synthetic oligonucleotide
ugucugcaacacgguuaag

SEQ ID NO: 813941 - RNA, 19 nt, Artificial Sequence
  Description of Artificial Sequence: Synthetic oligonucleotide
gccaauucauggcucggaa

SEQ ID NO: 813942 - RNA, 19 nt, Artificial Sequence
  Description of Artificial Sequence: Synthetic oligonucleotide
gccuaaaaucuuaucgaaa

SEQ ID NO: 813943 - RNA, 19 nt, Artificial Sequence
  Description of Artificial Sequence: Synthetic oligonucleotide
gaccagguuuaggucuaca

SEQ ID NO: 813944 - RNA, 19 nt, Artificial Sequence
  Description of Artificial Sequence: Synthetic oligonucleotide
ccauguaggacuugagacu

SEQ ID NO: 813945 - RNA, 19 nt, Artificial Sequence
  Description of Artificial Sequence: Synthetic oligonucleotide
gaugugcaggcuaacccuu

SEQ ID NO: 813946 - RNA, 19 nt, Artificial Sequence
  Description of Artificial Sequence: Synthetic oligonucleotide
accuucuaucagucccuua

SEQ ID NO: 813947 - RNA, 19 nt, Artificial Sequence
  Description of Artificial Sequence: Synthetic oligonucleotide
gguuuauauuugagauuga

SEQ ID NO: 813948 - RNA, 19 nt, Artificial Sequence
  Description of Artificial Sequence: Synthetic oligonucleotide
agggagucgcacacccaug

SEQ ID NO: 813949 - RNA, 19 nt, Artificial Sequence
  Description of Artificial Sequence: Synthetic oligonucleotide
ggaaccaguauaggugcaa

SEQ ID NO: 813950 - RNA, 19 nt, Artificial Sequence
  Description of Artificial Sequence: Synthetic oligonucleotide
ggucguuguuugaguacug

SEQ ID NO: 813951 - RNA, 19 nt, Artificial Sequence
  Description of Artificial Sequence: Synthetic oligonucleotide
cuuugccauuucuagucuu

SEQ ID NO: 813952 - RNA, 19 nt, Artificial Sequence
  Description of Artificial Sequence: Synthetic oligonucleotide
ggguugagacuuuggagau

SEQ ID NO: 813953 - RNA, 19 nt, Artificial Sequence
  Description of Artificial Sequence: Synthetic oligonucleotide
cacuagucugggucguugu

SEQ ID NO: 813954 - RNA, 19 nt, Artificial Sequence
  Description of Artificial Sequence: Synthetic oligonucleotide
ccgggcgguguauggagag

SEQ ID NO: 813955 - RNA, 19 nt, Artificial Sequence
  Description of Artificial Sequence: Synthetic oligonucleotide
ccuugcuacuaacucugga

SEQ ID NO: 813956 - RNA, 19 nt, Artificial Sequence
  Description of Artificial Sequence: Synthetic oligonucleotide
gcuacauuuggagcacaaa

SEQ ID NO: 813957 - RNA, 19 nt, Artificial Sequence
  Description of Artificial Sequence: Synthetic oligonucleotide
cugcaacacgguuaagauu

SEQ ID NO: 813958 - RNA, 19 nt, Artificial Sequence
  Description of Artificial Sequence: Synthetic oligonucleotide
cacaaucaccugcgccuga

SEQ ID NO: 813959 - RNA, 19 nt, Artificial Sequence
  Description of Artificial Sequence: Synthetic oligonucleotide
cuguaggauuccaguacau

SEQ ID NO: 813960 - RNA, 19 nt, Artificial Sequence
  Description of Artificial Sequence: Synthetic oligonucleotide
gcggcuccuucuuucuuga

SEQ ID NO: 813961 - RNA, 19 nt, Artificial Sequence
  Description of Artificial Sequence: Synthetic oligonucleotide
gcccauauccacuccgccu

SEQ ID NO: 813962 - RNA, 19 nt, Artificial Sequence
  Description of Artificial Sequence: Synthetic oligonucleotide
gccauacauaugagcagga

SEQ ID NO: 813963 - RNA, 19 nt, Artificial Sequence
  Description of Artificial Sequence: Synthetic oligonucleotide
ccacuguuucgacaacaca

SEQ ID NO: 813964 - RNA, 19 nt, Artificial Sequence
  Description of Artificial Sequence: Synthetic oligonucleotide
cagucacaagggauuuccu

SEQ ID NO: 813965 - RNA, 19 nt, Artificial Sequence
  Description of Artificial Sequence: Synthetic oligonucleotide
ccaggguauucuuucagau

SEQ ID NO: 813966 - RNA, 19 nt, Artificial Sequence
  Description of Artificial Sequence: Synthetic oligonucleotide
gcugauucugccagauaua

SEQ ID NO: 813967 - RNA, 19 nt, Artificial Sequence
  Description of Artificial Sequence: Synthetic oligonucleotide
ggcuacauuuggagcacaa

SEQ ID NO: 813968 - RNA, 19 nt, Artificial Sequence
  Description of Artificial Sequence: Synthetic oligonucleotide
gcuuccggguacugaagcu

SEQ ID NO: 813969 - RNA, 19 nt, Artificial Sequence
  Description of Artificial Sequence: Synthetic oligonucleotide
cagaggggugaagcaguca

SEQ ID NO: 813970 - RNA, 19 nt, Artificial Sequence
  Description of Artificial Sequence: Synthetic oligonucleotide
gcagcugcgcguacagaca

SEQ ID NO: 813971 - RNA, 19 nt, Artificial Sequence
  Description of Artificial Sequence: Synthetic oligonucleotide
ggcgguguauggagagcug

SEQ ID NO: 813972 - RNA, 19 nt, Artificial Sequence
  Description of Artificial Sequence: Synthetic oligonucleotide
cuuccggguacugaagcuu

SEQ ID NO: 813973 - RNA, 19 nt, Artificial Sequence
  Description of Artificial Sequence: Synthetic oligonucleotide
cagcugcgcguacagacau

SEQ ID NO: 813974 - RNA, 19 nt, Artificial Sequence
  Description of Artificial Sequence: Synthetic oligonucleotide
ggguacccucugaugcgcc

SEQ ID NO: 813975 - RNA, 19 nt, Artificial Sequence
  Description of Artificial Sequence: Synthetic oligonucleotide
gacugccaagagcuccuuu

SEQ ID NO: 813976 - RNA, 19 nt, Artificial Sequence
  Description of Artificial Sequence: Synthetic oligonucleotide
caaauccaugagccaacuu

SEQ ID NO: 813977 - RNA, 19 nt, Artificial Sequence
  Description of Artificial Sequence: Synthetic oligonucleotide
gggcgguguauggagagcu

SEQ ID NO: 813978 - RNA, 19 nt, Artificial Sequence
  Description of Artificial Sequence: Synthetic oligonucleotide
ccauacauaugagcaggaa

SEQ ID NO: 813979 - RNA, 19 nt, Artificial Sequence
  Description of Artificial Sequence: Synthetic oligonucleotide
gggucucuuggcagcucug

SEQ ID NO: 813980 - RNA, 19 nt, Artificial Sequence
  Description of Artificial Sequence: Synthetic oligonucleotide
gcgcguacagacauuuggu

SEQ ID NO: 813981 - RNA, 19 nt, Artificial Sequence
  Description of Artificial Sequence: Synthetic oligonucleotide
gcaacacgguuaagauuuc

SEQ ID NO: 813982 - RNA, 19 nt, Artificial Sequence
  Description of Artificial Sequence: Synthetic oligonucleotide
ggagucgcacacccaugcu

SEQ ID NO: 813983 - RNA, 19 nt, Artificial Sequence
  Description of Artificial Sequence: Synthetic oligonucleotide
gcuaacccuucacuggcuu

SEQ ID NO: 813984 - RNA, 19 nt, Artificial Sequence
  Description of Artificial Sequence: Synthetic oligonucleotide
cguaaguagaaggccugga

SEQ ID NO: 813985 - RNA, 19 nt, Artificial Sequence
  Description of Artificial Sequence: Synthetic oligonucleotide
uccgccugucuggcacaaa

SEQ ID NO: 813986 - RNA, 19 nt, Artificial Sequence
  Description of Artificial Sequence: Synthetic oligonucleotide
gacacuagucugggucguu

SEQ ID NO: 813987 - RNA, 19 nt, Artificial Sequence
  Description of Artificial Sequence: Synthetic oligonucleotide
gggaugugauccgcauugu

SEQ ID NO: 813988 - RNA, 19 nt, Artificial Sequence
  Description of Artificial Sequence: Synthetic oligonucleotide
ccccuuguggguugagacu

SEQ ID NO: 813989 - RNA, 19 nt, Artificial Sequence
  Description of Artificial Sequence: Synthetic oligonucleotide
cgcacacccaugcugugua

SEQ ID NO: 813990 - RNA, 19 nt, Artificial Sequence
  Description of Artificial Sequence: Synthetic oligonucleotide
ggcucggaacuggggaugu

SEQ ID NO: 813991 - RNA, 19 nt, Artificial Sequence
  Description of Artificial Sequence: Synthetic oligonucleotide
cgggcgguguauggagagc

SEQ ID NO: 813992 - RNA, 19 nt, Artificial Sequence
  Description of Artificial Sequence: Synthetic oligonucleotide
cagcccggccugggagcug

SEQ ID NO: 813993 - RNA, 19 nt, Artificial Sequence
  Description of Artificial Sequence: Synthetic oligonucleotide
ccggguacugaagcuuuua

SEQ ID NO: 813994 - RNA, 19 nt, Artificial Sequence
  Description of Artificial Sequence: Synthetic oligonucleotide
ccauauccacuccgccugu

SEQ ID NO: 813995 - RNA, 19 nt, Artificial Sequence
  Description of Artificial Sequence: Synthetic oligonucleotide
ccacuccgccugucuggca

SEQ ID NO: 813996 - RNA, 19 nt, Artificial Sequence
  Description of Artificial Sequence: Synthetic oligonucleotide
ccuuguggguugagacuuu

SEQ ID NO: 813997 - RNA, 19 nt, Artificial Sequence
  Description of Artificial Sequence: Synthetic oligonucleotide
gaagcaauagccuagguag

SEQ ID NO: 813998 - RNA, 19 nt, Artificial Sequence
  Description of Artificial Sequence: Synthetic oligonucleotide
ucuaauacccuuuuaaaag

SEQ ID NO: 813999 - RNA, 19 nt, Artificial Sequence
  Description of Artificial Sequence: Synthetic oligonucleotide
uguagcauaagcuugcagg

SEQ ID NO: 814000 - RNA, 19 nt, Artificial Sequence
  Description of Artificial Sequence: Synthetic oligonucleotide
aaagaaguacuugagacgg

SEQ ID NO: 814001 - RNA, 19 nt, Artificial Sequence
  Description of Artificial Sequence: Synthetic oligonucleotide
aaugcaacaaacucguucu

SEQ ID NO: 814002 - RNA, 19 nt, Artificial Sequence
  Description of Artificial Sequence: Synthetic oligonucleotide
aaacgcaugacacugggca

SEQ ID NO: 814003 - RNA, 19 nt, Artificial Sequence
  Description of Artificial Sequence: Synthetic oligonucleotide
aaguacuugagacggcggc

SEQ ID NO: 814004 - RNA, 19 nt, Artificial Sequence
  Description of Artificial Sequence: Synthetic oligonucleotide
uuauugucaaacgugauca

SEQ ID NO: 814005 - RNA, 19 nt, Artificial Sequence
  Description of Artificial Sequence: Synthetic oligonucleotide
aaagguaucauuggcuggg

SEQ ID NO: 814006 - RNA, 19 nt, Artificial Sequence
  Description of Artificial Sequence: Synthetic oligonucleotide
aaauagacacucggaaacc

SEQ ID NO: 814007 - RNA, 19 nt, Artificial Sequence
  Description of Artificial Sequence: Synthetic oligonucleotide
uucgauguaggucuggagc

SEQ ID NO: 814008 - RNA, 19 nt, Artificial Sequence
  Description of Artificial Sequence: Synthetic oligonucleotide
gaugagcgaaaauagacac

SEQ ID NO: 814009 - RNA, 19 nt, Artificial Sequence
  Description of Artificial Sequence: Synthetic oligonucleotide
aaugucacaaacaugucgu

SEQ ID NO: 814010 - RNA, 19 nt, Artificial Sequence
  Description of Artificial Sequence: Synthetic oligonucleotide
agcgaaaauagacacucgg

SEQ ID NO: 814011 - RNA, 19 nt, Artificial Sequence
  Description of Artificial Sequence: Synthetic oligonucleotide
cauugaugagcgaaaauag

SEQ ID NO: 814012 - RNA, 19 nt, Artificial Sequence
  Description of Artificial Sequence: Synthetic oligonucleotide
ucaguuuaccagcagcgag

SEQ ID NO: 814013 - RNA, 19 nt, Artificial Sequence
  Description of Artificial Sequence: Synthetic oligonucleotide
ugaugagcgaaaauagaca

SEQ ID NO: 814014 - RNA, 19 nt, Artificial Sequence
  Description of Artificial Sequence: Synthetic oligonucleotide
aucaaauagaagccggaag

SEQ ID NO: 814015 - RNA, 19 nt, Artificial Sequence
  Description of Artificial Sequence: Synthetic oligonucleotide
gaaugcaacaaacucguuc

SEQ ID NO: 814016 - RNA, 19 nt, Artificial Sequence
  Description of Artificial Sequence: Synthetic oligonucleotide
uuuaccagcagcgaguggu

SEQ ID NO: 814017 - RNA, 19 nt, Artificial Sequence
  Description of Artificial Sequence: Synthetic oligonucleotide
ugcgcuuuauugucaaacg

SEQ ID NO: 814018 - RNA, 19 nt, Artificial Sequence
  Description of Artificial Sequence: Synthetic oligonucleotide
aacaggauguaccagccau

SEQ ID NO: 814019 - RNA, 19 nt, Artificial Sequence
  Description of Artificial Sequence: Synthetic oligonucleotide
agggcuuacgaccuuuggc

SEQ ID NO: 814020 - RNA, 19 nt, Artificial Sequence
  Description of Artificial Sequence: Synthetic oligonucleotide
cacaucaaauagaagccgg

SEQ ID NO: 814021 - RNA, 19 nt, Artificial Sequence
  Description of Artificial Sequence: Synthetic oligonucleotide
agagccauuggcccaaggg

SEQ ID NO: 814022 - RNA, 19 nt, Artificial Sequence
  Description of Artificial Sequence: Synthetic oligonucleotide
uagccuagguagaugacag

SEQ ID NO: 814023 - RNA, 19 nt, Artificial Sequence
  Description of Artificial Sequence: Synthetic oligonucleotide
agcggauagggauucgccc

SEQ ID NO: 814024 - RNA, 19 nt, Artificial Sequence
  Description of Artificial Sequence: Synthetic oligonucleotide
ugagcgaaaauagacacuc

SEQ ID NO: 814025 - RNA, 19 nt, Artificial Sequence
  Description of Artificial Sequence: Synthetic oligonucleotide
agaaacgcaugacacuggg

SEQ ID NO: 814026 - RNA, 19 nt, Artificial Sequence
  Description of Artificial Sequence: Synthetic oligonucleotide
guaaccaacaggauguacc

SEQ ID NO: 814027 - RNA, 19 nt, Artificial Sequence
  Description of Artificial Sequence: Synthetic oligonucleotide
ugagcgggcacacaacaag

SEQ ID NO: 814028 - RNA, 19 nt, Artificial Sequence
  Description of Artificial Sequence: Synthetic oligonucleotide
uugauggugucguaggcgc

SEQ ID NO: 814029 - RNA, 19 nt, Artificial Sequence
  Description of Artificial Sequence: Synthetic oligonucleotide
uagggauucgcccacugug

SEQ ID NO: 814030 - RNA, 19 nt, Artificial Sequence
  Description of Artificial Sequence: Synthetic oligonucleotide
gucacaaacaugucguccc

SEQ ID NO: 814031 - RNA, 19 nt, Artificial Sequence
  Description of Artificial Sequence: Synthetic oligonucleotide
gaagccacguagcagugag

SEQ ID NO: 814032 - RNA, 19 nt, Artificial Sequence
  Description of Artificial Sequence: Synthetic oligonucleotide
uucaacgugagguucuugu

SEQ ID NO: 814033 - RNA, 19 nt, Artificial Sequence
  Description of Artificial Sequence: Synthetic oligonucleotide
agaaguacuugagacggcg

SEQ ID NO: 814034 - RNA, 19 nt, Artificial Sequence
  Description of Artificial Sequence: Synthetic oligonucleotide
ugggucuccaagcggauag

SEQ ID NO: 814035 - RNA, 19 nt, Artificial Sequence
  Description of Artificial Sequence: Synthetic oligonucleotide
agguguaacagucugggau

SEQ ID NO: 814036 - RNA, 19 nt, Artificial Sequence
  Description of Artificial Sequence: Synthetic oligonucleotide
aaauagaagccggaagcug

SEQ ID NO: 814037 - RNA, 19 nt, Artificial Sequence
  Description of Artificial Sequence: Synthetic oligonucleotide
ugucggaaggcaauagugu

SEQ ID NO: 814038 - RNA, 19 nt, Artificial Sequence
  Description of Artificial Sequence: Synthetic oligonucleotide
ucguucugcagcaggaagc

SEQ ID NO: 814039 - RNA, 19 nt, Artificial Sequence
  Description of Artificial Sequence: Synthetic oligonucleotide
ucuccaagcggauagggau

SEQ ID NO: 814040 - RNA, 19 nt, Artificial Sequence
  Description of Artificial Sequence: Synthetic oligonucleotide
ugggucaauaucaaaggua

SEQ ID NO: 814041 - RNA, 19 nt, Artificial Sequence
  Description of Artificial Sequence: Synthetic oligonucleotide
aacgcaugacacugggcag

SEQ ID NO: 814042 - RNA, 19 nt, Artificial Sequence
  Description of Artificial Sequence: Synthetic oligonucleotide
acagacugauuucccgacc

SEQ ID NO: 814043 - RNA, 19 nt, Artificial Sequence
  Description of Artificial Sequence: Synthetic oligonucleotide
guguuuacacuccuggaug

SEQ ID NO: 814044 - RNA, 19 nt, Artificial Sequence
  Description of Artificial Sequence: Synthetic oligonucleotide
cuugguagagcuguucccg

SEQ ID NO: 814045 - RNA, 19 nt, Artificial Sequence
  Description of Artificial Sequence: Synthetic oligonucleotide
guaguggcgaucaucuugg

SEQ ID NO: 814046 - RNA, 19 nt, Artificial Sequence
  Description of Artificial Sequence: Synthetic oligonucleotide
ugcagguuaauugucuuca

SEQ ID NO: 814047 - RNA, 19 nt, Artificial Sequence
  Description of Artificial Sequence: Synthetic oligonucleotide
ucgauguaggucuggagcu

SEQ ID NO: 814048 - RNA, 19 nt, Artificial Sequence
  Description of Artificial Sequence: Synthetic oligonucleotide
agcauaagcuugcagggcu

SEQ ID NO: 814049 - RNA, 19 nt, Artificial Sequence
  Description of Artificial Sequence: Synthetic oligonucleotide
aggggauaaaguguagugg

SEQ ID NO: 814050 - RNA, 19 nt, Artificial Sequence
  Description of Artificial Sequence: Synthetic oligonucleotide
gguucuuugccucaaugcc

SEQ ID NO: 814051 - RNA, 19 nt, Artificial Sequence
  Description of Artificial Sequence: Synthetic oligonucleotide
aagcggauagggauucgcc

SEQ ID NO: 814052 - RNA, 19 nt, Artificial Sequence
  Description of Artificial Sequence: Synthetic oligonucleotide
uguucccguguauaggcag

SEQ ID NO: 814053 - RNA, 19 nt, Artificial Sequence
  Description of Artificial Sequence: Synthetic oligonucleotide
acucggaaaccauggacag

SEQ ID NO: 814054 - RNA, 19 nt, Artificial Sequence
  Description of Artificial Sequence: Synthetic oligonucleotide
ggggauaaaguguaguggc

SEQ ID NO: 814055 - RNA, 19 nt, Artificial Sequence
  Description of Artificial Sequence: Synthetic oligonucleotide
agccacguagcagugagcg

SEQ ID NO: 814056 - RNA, 19 nt, Artificial Sequence
  Description of Artificial Sequence: Synthetic oligonucleotide
uuaucacaggggcucauaa

SEQ ID NO: 814057 - RNA, 19 nt, Artificial Sequence
  Description of Artificial Sequence: Synthetic oligonucleotide
agugacuacccuuggguca

SEQ ID NO: 814058 - RNA, 19 nt, Artificial Sequence
  Description of Artificial Sequence: Synthetic oligonucleotide
uagguucuuugccucaaug

SEQ ID NO: 814059 - RNA, 19 nt, Artificial Sequence
  Description of Artificial Sequence: Synthetic oligonucleotide
ugcauggcugcgaauguca

SEQ ID NO: 814060 - RNA, 19 nt, Artificial Sequence
  Description of Artificial Sequence: Synthetic oligonucleotide
uauugucaaacgugaucag

SEQ ID NO: 814061 - RNA, 19 nt, Artificial Sequence
  Description of Artificial Sequence: Synthetic oligonucleotide
ucguccccauugaugagcg

SEQ ID NO: 814062 - RNA, 19 nt, Artificial Sequence
  Description of Artificial Sequence: Synthetic oligonucleotide
aauagccuagguagaugac

SEQ ID NO: 814063 - RNA, 19 nt, Artificial Sequence
  Description of Artificial Sequence: Synthetic oligonucleotide
gauguaggucuggagcucg

SEQ ID NO: 814064 - RNA, 19 nt, Artificial Sequence
  Description of Artificial Sequence: Synthetic oligonucleotide
uccgccgccacaugaaugc

SEQ ID NO: 814065 - RNA, 19 nt, Artificial Sequence
  Description of Artificial Sequence: Synthetic oligonucleotide
ugcgaaugucacaaacaug

SEQ ID NO: 814066 - RNA, 19 nt, Artificial Sequence
  Description of Artificial Sequence: Synthetic oligonucleotide
acgaccuuuggcccggaac

SEQ ID NO: 814067 - RNA, 19 nt, Artificial Sequence
  Description of Artificial Sequence: Synthetic oligonucleotide
guaagcacaucacugguaa

SEQ ID NO: 814068 - RNA, 19 nt, Artificial Sequence
  Description of Artificial Sequence: Synthetic oligonucleotide
ggauaugucaggcaguauc

SEQ ID NO: 814069 - RNA, 19 nt, Artificial Sequence
  Description of Artificial Sequence: Synthetic oligonucleotide
aacaugucguccccauuga

SEQ ID NO: 814070 - RNA, 19 nt, Artificial Sequence
  Description of Artificial Sequence: Synthetic oligonucleotide
gucgcucagucucugagcc

SEQ ID NO: 814071 - RNA, 19 nt, Artificial Sequence
  Description of Artificial Sequence: Synthetic oligonucleotide
accuguagcauaagcuugc

SEQ ID NO: 814072 - RNA, 19 nt, Artificial Sequence
  Description of Artificial Sequence: Synthetic oligonucleotide
acgagcagaguggagguac

SEQ ID NO: 814073 - RNA, 19 nt, Artificial Sequence
  Description of Artificial Sequence: Synthetic oligonucleotide
ccauugacgaacuccagcc

SEQ ID NO: 814074 - RNA, 19 nt, Artificial Sequence
  Description of Artificial Sequence: Synthetic oligonucleotide
gggcuuacgaccuuuggcc

SEQ ID NO: 814075 - RNA, 19 nt, Artificial Sequence
  Description of Artificial Sequence: Synthetic oligonucleotide
aaguucccaccugggaccc

SEQ ID NO: 814076 - RNA, 19 nt, Artificial Sequence
  Description of Artificial Sequence: Synthetic oligonucleotide
ugucauccggcccaucaga

SEQ ID NO: 814077 - RNA, 19 nt, Artificial Sequence
  Description of Artificial Sequence: Synthetic oligonucleotide
cagguuaauugucuucagc

SEQ ID NO: 814078 - RNA, 19 nt, Artificial Sequence
  Description of Artificial Sequence: Synthetic oligonucleotide
auaguguucucuucccgga

SEQ ID NO: 814079 - RNA, 19 nt, Artificial Sequence
  Description of Artificial Sequence: Synthetic oligonucleotide
gugacugcggccucgcucc

SEQ ID NO: 814080 - RNA, 19 nt, Artificial Sequence
  Description of Artificial Sequence: Synthetic oligonucleotide
accacggacauaggcauac

SEQ ID NO: 814081 - RNA, 19 nt, Artificial Sequence
  Description of Artificial Sequence: Synthetic oligonucleotide
cagcauagaagauggcuug

SEQ ID NO: 814082 - RNA, 19 nt, Artificial Sequence
  Description of Artificial Sequence: Synthetic oligonucleotide
agugagcgggcacacaaca

SEQ ID NO: 814083 - RNA, 19 nt, Artificial Sequence
  Description of Artificial Sequence: Synthetic oligonucleotide
auaaaguguaguggcgauc

SEQ ID NO: 814084 - RNA, 19 nt, Artificial Sequence
  Description of Artificial Sequence: Synthetic oligonucleotide
agacacucggaaaccaugg

SEQ ID NO: 814085 - RNA, 19 nt, Artificial Sequence
  Description of Artificial Sequence: Synthetic oligonucleotide
gacggaacuugccagaugu

SEQ ID NO: 814086 - RNA, 19 nt, Artificial Sequence
  Description of Artificial Sequence: Synthetic oligonucleotide
cacggacauaggcauaccg

SEQ ID NO: 814087 - RNA, 19 nt, Artificial Sequence
  Description of Artificial Sequence: Synthetic oligonucleotide
cauugacgaacuccagccg

SEQ ID NO: 814088 - RNA, 19 nt, Artificial Sequence
  Description of Artificial Sequence: Synthetic oligonucleotide
auagggucccaggacaauc

SEQ ID NO: 814089 - RNA, 19 nt, Artificial Sequence
  Description of Artificial Sequence: Synthetic oligonucleotide
acggacauaggcauaccgg

SEQ ID NO: 814090 - RNA, 19 nt, Artificial Sequence
  Description of Artificial Sequence: Synthetic oligonucleotide
gaaguacuugagacggcgg

SEQ ID NO: 814091 - RNA, 19 nt, Artificial Sequence
  Description of Artificial Sequence: Synthetic oligonucleotide
agucccugagaugguaagc

SEQ ID NO: 814092 - RNA, 19 nt, Artificial Sequence
  Description of Artificial Sequence: Synthetic oligonucleotide
ucggaaggcaauaguguuc

SEQ ID NO: 814093 - RNA, 19 nt, Artificial Sequence
  Description of Artificial Sequence: Synthetic oligonucleotide
auagccuagguagaugaca

SEQ ID NO: 814094 - RNA, 19 nt, Artificial Sequence
  Description of Artificial Sequence: Synthetic oligonucleotide
cugguaaccaacaggaugu

SEQ ID NO: 814095 - RNA, 19 nt, Artificial Sequence
  Description of Artificial Sequence: Synthetic oligonucleotide
auugaugagcgaaaauaga

SEQ ID NO: 814096 - RNA, 19 nt, Artificial Sequence
  Description of Artificial Sequence: Synthetic oligonucleotide
uggcccggaacuuaucaca

SEQ ID NO: 814097 - RNA, 19 nt, Artificial Sequence
  Description of Artificial Sequence: Synthetic oligonucleotide
guugucuccgugucuggag

SEQ ID NO: 814098 - RNA, 19 nt, Artificial Sequence
  Description of Artificial Sequence: Synthetic oligonucleotide
augucggaaggcaauagug

SEQ ID NO: 814099 - RNA, 19 nt, Artificial Sequence
  Description of Artificial Sequence: Synthetic oligonucleotide
acuuccucgacggaacuug

SEQ ID NO: 814100 - RNA, 19 nt, Artificial Sequence
  Description of Artificial Sequence: Synthetic oligonucleotide
agggauucgcccacugugc

SEQ ID NO: 814101 - RNA, 19 nt, Artificial Sequence
  Description of Artificial Sequence: Synthetic oligonucleotide
agaguggagguacccaaga

SEQ ID NO: 814102 - RNA, 19 nt, Artificial Sequence
  Description of Artificial Sequence: Synthetic oligonucleotide
cuacccuugggucaauauc

SEQ ID NO: 814103 - RNA, 19 nt, Artificial Sequence
  Description of Artificial Sequence: Synthetic oligonucleotide
agccuagguagaugacagc

SEQ ID NO: 814104 - RNA, 19 nt, Artificial Sequence
  Description of Artificial Sequence: Synthetic oligonucleotide
acugggguguuuacacucc

SEQ ID NO: 814105 - RNA, 19 nt, Artificial Sequence
  Description of Artificial Sequence: Synthetic oligonucleotide
guggagguacccaagagga

SEQ ID NO: 814106 - RNA, 19 nt, Artificial Sequence
  Description of Artificial Sequence: Synthetic oligonucleotide
agcgagcggaacuucacgu

SEQ ID NO: 814107 - RNA, 19 nt, Artificial Sequence
  Description of Artificial Sequence: Synthetic oligonucleotide
cagaaacgcaugacacugg

SEQ ID NO: 814108 - RNA, 19 nt, Artificial Sequence
  Description of Artificial Sequence: Synthetic oligonucleotide
guacuugagacggcggcgg

SEQ ID NO: 814109 - RNA, 19 nt, Artificial Sequence
  Description of Artificial Sequence: Synthetic oligonucleotide
guaucagguacugauccac

SEQ ID NO: 814110 - RNA, 19 nt, Artificial Sequence
  Description of Artificial Sequence: Synthetic oligonucleotide
ucguaggcgccagugauga

SEQ ID NO: 814111 - RNA, 19 nt, Artificial Sequence
  Description of Artificial Sequence: Synthetic oligonucleotide
auggccacggugguaguac

SEQ ID NO: 814112 - RNA, 19 nt, Artificial Sequence
  Description of Artificial Sequence: Synthetic oligonucleotide
cuauccaagagauccaagu

SEQ ID NO: 814113 - RNA, 19 nt, Artificial Sequence
  Description of Artificial Sequence: Synthetic oligonucleotide
cauggccgcacggugagcg

SEQ ID NO: 814114 - RNA, 19 nt, Artificial Sequence
  Description of Artificial Sequence: Synthetic oligonucleotide
aguuuaccagcagcgagug

SEQ ID NO: 814115 - RNA, 19 nt, Artificial Sequence
  Description of Artificial Sequence: Synthetic oligonucleotide
gagaugguaagcacaucac

SEQ ID NO: 814116 - RNA, 19 nt, Artificial Sequence
  Description of Artificial Sequence: Synthetic oligonucleotide
uccgugucuggagacacug

SEQ ID NO: 814117 - RNA, 19 nt, Artificial Sequence
  Description of Artificial Sequence: Synthetic oligonucleotide
uggagcucgcucuucucug

SEQ ID NO: 814118 - RNA, 19 nt, Artificial Sequence
  Description of Artificial Sequence: Synthetic oligonucleotide
agcgagugguccucugggg

SEQ ID NO: 814119 - RNA, 19 nt, Artificial Sequence
  Description of Artificial Sequence: Synthetic oligonucleotide
ucccggaaugucaccacca

SEQ ID NO: 814120 - RNA, 19 nt, Artificial Sequence
  Description of Artificial Sequence: Synthetic oligonucleotide
gaugugggacuauccuggc

SEQ ID NO: 814121 - RNA, 19 nt, Artificial Sequence
  Description of Artificial Sequence: Synthetic oligonucleotide
caaaggugucauccggccc

SEQ ID NO: 814122 - RNA, 19 nt, Artificial Sequence
  Description of Artificial Sequence: Synthetic oligonucleotide
agacgagcagaguggaggu

SEQ ID NO: 814123 - RNA, 19 nt, Artificial Sequence
  Description of Artificial Sequence: Synthetic oligonucleotide
guucgauguaggucuggag

SEQ ID NO: 814124 - RNA, 19 nt, Artificial Sequence
  Description of Artificial Sequence: Synthetic oligonucleotide
uaucacaggggcucauaaa

SEQ ID NO: 814125 - RNA, 19 nt, Artificial Sequence
  Description of Artificial Sequence: Synthetic oligonucleotide
aacucguucugcagcagga

SEQ ID NO: 814126 - RNA, 19 nt, Artificial Sequence
  Description of Artificial Sequence: Synthetic oligonucleotide
cacugugcgcuuuauuguc

SEQ ID NO: 814127 - RNA, 19 nt, Artificial Sequence
  Description of Artificial Sequence: Synthetic oligonucleotide
auaugucaggcaguaucag

SEQ ID NO: 814128 - RNA, 19 nt, Artificial Sequence
  Description of Artificial Sequence: Synthetic oligonucleotide
agccacaccaggcuacugu

SEQ ID NO: 814129 - RNA, 19 nt, Artificial Sequence
  Description of Artificial Sequence: Synthetic oligonucleotide
cuuacgaccuuuggcccgg

SEQ ID NO: 814130 - RNA, 19 nt, Artificial Sequence
  Description of Artificial Sequence: Synthetic oligonucleotide
uacugauccacagcauaga

SEQ ID NO: 814131 - RNA, 19 nt, Artificial Sequence
  Description of Artificial Sequence: Synthetic oligonucleotide
acgugaucagcacacugaa

SEQ ID NO: 814132 - RNA, 19 nt, Artificial Sequence
  Description of Artificial Sequence: Synthetic oligonucleotide
cccggaacuuaucacaggg

SEQ ID NO: 814133 - RNA, 19 nt, Artificial Sequence
  Description of Artificial Sequence: Synthetic oligonucleotide
guagcggaugacaccaacc

SEQ ID NO: 814134 - RNA, 19 nt, Artificial Sequence
  Description of Artificial Sequence: Synthetic oligonucleotide
ggagguacccaagaggaug

SEQ ID NO: 814135 - RNA, 19 nt, Artificial Sequence
  Description of Artificial Sequence: Synthetic oligonucleotide
accugggacccauacccag

SEQ ID NO: 814136 - RNA, 19 nt, Artificial Sequence
  Description of Artificial Sequence: Synthetic oligonucleotide
gagcgaaaauagacacucg

SEQ ID NO: 814137 - RNA, 19 nt, Artificial Sequence
  Description of Artificial Sequence: Synthetic oligonucleotide
uagcauaagcuugcagggc

SEQ ID NO: 814138 - RNA, 19 nt, Artificial Sequence
  Description of Artificial Sequence: Synthetic oligonucleotide
cagcgagugguccucuggg

SEQ ID NO: 814139 - RNA, 19 nt, Artificial Sequence
  Description of Artificial Sequence: Synthetic oligonucleotide
caggcuacugugacccugc

SEQ ID NO: 814140 - RNA, 19 nt, Artificial Sequence
  Description of Artificial Sequence: Synthetic oligonucleotide
uaggcauaccggccccggg

SEQ ID NO: 814141 - RNA, 19 nt, Artificial Sequence
  Description of Artificial Sequence: Synthetic oligonucleotide
agaugucggaaggcaauag

SEQ ID NO: 814142 - RNA, 19 nt, Artificial Sequence
  Description of Artificial Sequence: Synthetic oligonucleotide
gugcgcuuuauugucaaac

SEQ ID NO: 814143 - RNA, 19 nt, Artificial Sequence
  Description of Artificial Sequence: Synthetic oligonucleotide
gcuuuauugucaaacguga

SEQ ID NO: 814144 - RNA, 19 nt, Artificial Sequence
  Description of Artificial Sequence: Synthetic oligonucleotide
gaagccggaagcuguuguc

SEQ ID NO: 814145 - RNA, 19 nt, Artificial Sequence
  Description of Artificial Sequence: Synthetic oligonucleotide
uuccucgacggaacuugcc

SEQ ID NO: 814146 - RNA, 19 nt, Artificial Sequence
  Description of Artificial Sequence: Synthetic oligonucleotide
agcacaucacugguaacca

SEQ ID NO: 814147 - RNA, 19 nt, Artificial Sequence
  Description of Artificial Sequence: Synthetic oligonucleotide
ugguagagcuguucccgug

SEQ ID NO: 814148 - RNA, 19 nt, Artificial Sequence
  Description of Artificial Sequence: Synthetic oligonucleotide
aggacaauccagccacaga

SEQ ID NO: 814149 - RNA, 19 nt, Artificial Sequence
  Description of Artificial Sequence: Synthetic oligonucleotide
cagugacuacccuuggguc

SEQ ID NO: 814150 - RNA, 19 nt, Artificial Sequence
  Description of Artificial Sequence: Synthetic oligonucleotide
uccccauugaugagcgaaa

SEQ ID NO: 814151 - RNA, 19 nt, Artificial Sequence
  Description of Artificial Sequence: Synthetic oligonucleotide
uucccgaccccuccgccgc

SEQ ID NO: 814152 - RNA, 19 nt, Artificial Sequence
  Description of Artificial Sequence: Synthetic oligonucleotide
acgccggcggguccgagcg

SEQ ID NO: 814153 - RNA, 19 nt, Artificial Sequence
  Description of Artificial Sequence: Synthetic oligonucleotide
gccuagguagaugacagcc

SEQ ID NO: 814154 - RNA, 19 nt, Artificial Sequence
  Description of Artificial Sequence: Synthetic oligonucleotide
aagcaauagccuagguaga

SEQ ID NO: 814155 - RNA, 19 nt, Artificial Sequence
  Description of Artificial Sequence: Synthetic oligonucleotide
gggauaaaguguaguggcg

SEQ ID NO: 814156 - RNA, 19 nt, Artificial Sequence
  Description of Artificial Sequence: Synthetic oligonucleotide
aacuuaucacaggggcuca

SEQ ID NO: 814157 - RNA, 19 nt, Artificial Sequence
  Description of Artificial Sequence: Synthetic oligonucleotide
guaucauuggcugggucca

SEQ ID NO: 814158 - RNA, 19 nt, Artificial Sequence
  Description of Artificial Sequence: Synthetic oligonucleotide
caagcggauagggauucgc

SEQ ID NO: 814159 - RNA, 19 nt, Artificial Sequence
  Description of Artificial Sequence: Synthetic oligonucleotide
cuguagcauaagcuugcag

SEQ ID NO: 814160 - RNA, 19 nt, Artificial Sequence
  Description of Artificial Sequence: Synthetic oligonucleotide
acccagacgagcagagugg

SEQ ID NO: 814161 - RNA, 19 nt, Artificial Sequence
  Description of Artificial Sequence: Synthetic oligonucleotide
aagccacguagcagugagc

SEQ ID NO: 814162 - RNA, 19 nt, Artificial Sequence
  Description of Artificial Sequence: Synthetic oligonucleotide
cugcagguuaauugucuuc

SEQ ID NO: 814163 - RNA, 19 nt, Artificial Sequence
  Description of Artificial Sequence: Synthetic oligonucleotide
ccguguauaggcagcaaag

SEQ ID NO: 814164 - RNA, 19 nt, Artificial Sequence
  Description of Artificial Sequence: Synthetic oligonucleotide
gcggaugacaccaacccag

SEQ ID NO: 814165 - RNA, 19 nt, Artificial Sequence
  Description of Artificial Sequence: Synthetic oligonucleotide
gcuuacgaccuuuggcccg

SEQ ID NO: 814166 - RNA, 19 nt, Artificial Sequence
  Description of Artificial Sequence: Synthetic oligonucleotide
augcaacaaacucguucug

SEQ ID NO: 814167 - RNA, 19 nt, Artificial Sequence
  Description of Artificial Sequence: Synthetic oligonucleotide
ggacccauacccaggauug

SEQ ID NO: 814168 - RNA, 19 nt, Artificial Sequence
  Description of Artificial Sequence: Synthetic oligonucleotide
gggucugggucuccaagcg

SEQ ID NO: 814169 - RNA, 19 nt, Artificial Sequence
  Description of Artificial Sequence: Synthetic oligonucleotide
uugacgaacuccagccguu

SEQ ID NO: 814170 - RNA, 19 nt, Artificial Sequence
  Description of Artificial Sequence: Synthetic oligonucleotide
cacgaagcguggcaaucag

SEQ ID NO: 814171 - RNA, 19 nt, Artificial Sequence
  Description of Artificial Sequence: Synthetic oligonucleotide
cgcuuuauugucaaacgug

SEQ ID NO: 814172 - RNA, 19 nt, Artificial Sequence
  Description of Artificial Sequence: Synthetic oligonucleotide
auaggcauaccggccccgg

SEQ ID NO: 814173 - RNA, 19 nt, Artificial Sequence
  Description of Artificial Sequence: Synthetic oligonucleotide
gggauucgcccacugugcg

SEQ ID NO: 814174 - RNA, 19 nt, Artificial Sequence
  Description of Artificial Sequence: Synthetic oligonucleotide
gucguccccauugaugagc

SEQ ID NO: 814175 - RNA, 19 nt, Artificial Sequence
  Description of Artificial Sequence: Synthetic oligonucleotide
agcguggcaaucaggauau

SEQ ID NO: 814176 - RNA, 19 nt, Artificial Sequence
  Description of Artificial Sequence: Synthetic oligonucleotide
ugucguccccauugaugag

SEQ ID NO: 814177 - RNA, 19 nt, Artificial Sequence
  Description of Artificial Sequence: Synthetic oligonucleotide
agcaauagccuagguagau

SEQ ID NO: 814178 - RNA, 19 nt, Artificial Sequence
  Description of Artificial Sequence: Synthetic oligonucleotide
uccaagcggauagggauuc

SEQ ID NO: 814179 - RNA, 19 nt, Artificial Sequence
  Description of Artificial Sequence: Synthetic oligonucleotide
ucauccggcccaucagagu

SEQ ID NO: 814180 - RNA, 19 nt, Artificial Sequence
  Description of Artificial Sequence: Synthetic oligonucleotide
aggcauaccggccccggga

SEQ ID NO: 814181 - RNA, 19 nt, Artificial Sequence
  Description of Artificial Sequence: Synthetic oligonucleotide
ccagccauugacgaacucc

SEQ ID NO: 814182 - RNA, 19 nt, Artificial Sequence
  Description of Artificial Sequence: Synthetic oligonucleotide
gucauccggcccaucagag

SEQ ID NO: 814183 - RNA, 19 nt, Artificial Sequence
  Description of Artificial Sequence: Synthetic oligonucleotide
guagcagugagcgggcaca

SEQ ID NO: 814184 - RNA, 19 nt, Artificial Sequence
  Description of Artificial Sequence: Synthetic oligonucleotide
gacccauacccaggauugg

SEQ ID NO: 814185 - RNA, 19 nt, Artificial Sequence
  Description of Artificial Sequence: Synthetic oligonucleotide
auggccgcacggugagcgc

SEQ ID NO: 814186 - RNA, 19 nt, Artificial Sequence
  Description of Artificial Sequence: Synthetic oligonucleotide
uacuugagacggcggcgga

SEQ ID NO: 814187 - RNA, 19 nt, Artificial Sequence
  Description of Artificial Sequence: Synthetic oligonucleotide
uuucaacgugagguucuug

SEQ ID NO: 814188 - RNA, 19 nt, Artificial Sequence
  Description of Artificial Sequence: Synthetic oligonucleotide
cccgggauaugucaggcag

SEQ ID NO: 814189 - RNA, 19 nt, Artificial Sequence
  Description of Artificial Sequence: Synthetic oligonucleotide
ggcuuacgaccuuuggccc

SEQ ID NO: 814190 - RNA, 19 nt, Artificial Sequence
  Description of Artificial Sequence: Synthetic oligonucleotide
acacgaagcguggcaauca

SEQ ID NO: 814191 - RNA, 19 nt, Artificial Sequence
  Description of Artificial Sequence: Synthetic oligonucleotide
uggagguacccaagaggau

SEQ ID NO: 814192 - RNA, 19 nt, Artificial Sequence
  Description of Artificial Sequence: Synthetic oligonucleotide
ggugucauccggcccauca

SEQ ID NO: 814193 - RNA, 19 nt, Artificial Sequence
  Description of Artificial Sequence: Synthetic oligonucleotide
ggaacaggugaggaugacc

SEQ ID NO: 814194 - RNA, 19 nt, Artificial Sequence
  Description of Artificial Sequence: Synthetic oligonucleotide
gagcgcgggacgccggcgg

SEQ ID NO: 814195 - RNA, 19 nt, Artificial Sequence
  Description of Artificial Sequence: Synthetic oligonucleotide
cuugcagggcuuacgaccu

SEQ ID NO: 814196 - RNA, 19 nt, Artificial Sequence
  Description of Artificial Sequence: Synthetic oligonucleotide
ugggacuauccuggcacug

SEQ ID NO: 814197 - RNA, 19 nt, Artificial Sequence
  Description of Artificial Sequence: Synthetic oligonucleotide
agcagaguggagguaccca

SEQ ID NO: 814198 - RNA, 19 nt, Artificial Sequence
  Description of Artificial Sequence: Synthetic oligonucleotide
ggucuccaagcggauaggg

SEQ ID NO: 814199 - RNA, 19 nt, Artificial Sequence
  Description of Artificial Sequence: Synthetic oligonucleotide
accaacccagacgagcaga

SEQ ID NO: 814200 - RNA, 19 nt, Artificial Sequence
  Description of Artificial Sequence: Synthetic oligonucleotide
uggacagcgagcggaacuu

SEQ ID NO: 814201 - RNA, 19 nt, Artificial Sequence
  Description of Artificial Sequence: Synthetic oligonucleotide
acgaagcguggcaaucagg

SEQ ID NO: 814202 - RNA, 19 nt, Artificial Sequence
  Description of Artificial Sequence: Synthetic oligonucleotide
gagcgggcacacaacaaga

SEQ ID NO: 814203 - RNA, 19 nt, Artificial Sequence
  Description of Artificial Sequence: Synthetic oligonucleotide
caguuuaccagcagcgagu

SEQ ID NO: 814204 - RNA, 19 nt, Artificial Sequence
  Description of Artificial Sequence: Synthetic oligonucleotide
cucggaaaccauggacagc

SEQ ID NO: 814205 - RNA, 19 nt, Artificial Sequence
  Description of Artificial Sequence: Synthetic oligonucleotide
cuccgccgccacaugaaug

SEQ ID NO: 814206 - RNA, 19 nt, Artificial Sequence
  Description of Artificial Sequence: Synthetic oligonucleotide
cgaaaauagacacucggaa

SEQ ID NO: 814207 - RNA, 19 nt, Artificial Sequence
  Description of Artificial Sequence: Synthetic oligonucleotide
cugcgaaugucacaaacau

SEQ ID NO: 814208 - RNA, 19 nt, Artificial Sequence
  Description of Artificial Sequence: Synthetic oligonucleotide
caaauagaagccggaagcu

SEQ ID NO: 814209 - RNA, 19 nt, Artificial Sequence
  Description of Artificial Sequence: Synthetic oligonucleotide
acgcaugacacugggcagu

SEQ ID NO: 814210 - RNA, 19 nt, Artificial Sequence
  Description of Artificial Sequence: Synthetic oligonucleotide
ccggaacuuaucacagggg

SEQ ID NO: 814211 - RNA, 19 nt, Artificial Sequence
  Description of Artificial Sequence: Synthetic oligonucleotide
gguagcggaugacaccaac

SEQ ID NO: 814212 - RNA, 19 nt, Artificial Sequence
  Description of Artificial Sequence: Synthetic oligonucleotide
gcggaacuucacgugauag

SEQ ID NO: 814213 - RNA, 19 nt, Artificial Sequence
  Description of Artificial Sequence: Synthetic oligonucleotide
cucgacggaacuugccaga

SEQ ID NO: 814214 - RNA, 19 nt, Artificial Sequence
  Description of Artificial Sequence: Synthetic oligonucleotide
gcgaucaucuuggaaucag

SEQ ID NO: 814215 - RNA, 19 nt, Artificial Sequence
  Description of Artificial Sequence: Synthetic oligonucleotide
acugugcgcuuuauuguca

SEQ ID NO: 814216 - RNA, 19 nt, Artificial Sequence
  Description of Artificial Sequence: Synthetic oligonucleotide
gggucaauaucaaagguau

SEQ ID NO: 814217 - RNA, 19 nt, Artificial Sequence
  Description of Artificial Sequence: Synthetic oligonucleotide
cuggcgaaguucccaccug

SEQ ID NO: 814218 - RNA, 19 nt, Artificial Sequence
  Description of Artificial Sequence: Synthetic oligonucleotide
cacacgaagcguggcaauc

SEQ ID NO: 814219 - RNA, 19 nt, Artificial Sequence
  Description of Artificial Sequence: Synthetic oligonucleotide
ccagugaugagugcaauga

SEQ ID NO: 814220 - RNA, 19 nt, Artificial Sequence
  Description of Artificial Sequence: Synthetic oligonucleotide
ugugggucugggucuccaa

SEQ ID NO: 814221 - RNA, 19 nt, Artificial Sequence
  Description of Artificial Sequence: Synthetic oligonucleotide
cuguucgauguaggucugg

SEQ ID NO: 814222 - RNA, 19 nt, Artificial Sequence
  Description of Artificial Sequence: Synthetic oligonucleotide
gcgaaaauagacacucgga

SEQ ID NO: 814223 - RNA, 19 nt, Artificial Sequence
  Description of Artificial Sequence: Synthetic oligonucleotide
ucgacggaacuugccagau

SEQ ID NO: 814224 - RNA, 19 nt, Artificial Sequence
  Description of Artificial Sequence: Synthetic oligonucleotide
gcggauagggauucgccca

SEQ ID NO: 814225 - RNA, 19 nt, Artificial Sequence
  Description of Artificial Sequence: Synthetic oligonucleotide
cacggugagcgcgggacgc

SEQ ID NO: 814226 - RNA, 19 nt, Artificial Sequence
  Description of Artificial Sequence: Synthetic oligonucleotide
cuuuauugucaaacgugau

SEQ ID NO: 814227 - RNA, 19 nt, Artificial Sequence
  Description of Artificial Sequence: Synthetic oligonucleotide
ggcucugcagguuaauugu

SEQ ID NO: 814228 - RNA, 19 nt, Artificial Sequence
  Description of Artificial Sequence: Synthetic oligonucleotide
gcugcgaaugucacaaaca

SEQ ID NO: 814229 - RNA, 19 nt, Artificial Sequence
  Description of Artificial Sequence: Synthetic oligonucleotide
ccucgacggaacuugccag

SEQ ID NO: 814230 - RNA, 19 nt, Artificial Sequence
  Description of Artificial Sequence: Synthetic oligonucleotide
acggugagcgcgggacgcc

SEQ ID NO: 814231 - RNA, 19 nt, Artificial Sequence
  Description of Artificial Sequence: Synthetic oligonucleotide
guaggcgccagugaugagu

SEQ ID NO: 814232 - RNA, 19 nt, Artificial Sequence
  Description of Artificial Sequence: Synthetic oligonucleotide
gucggaaggcaauaguguu

SEQ ID NO: 814233 - RNA, 19 nt, Artificial Sequence
  Description of Artificial Sequence: Synthetic oligonucleotide
uggccacggugguaguacu

SEQ ID NO: 814234 - RNA, 19 nt, Artificial Sequence
  Description of Artificial Sequence: Synthetic oligonucleotide
gguaaccaacaggauguac

SEQ ID NO: 814235 - RNA, 19 nt, Artificial Sequence
  Description of Artificial Sequence: Synthetic oligonucleotide
auuucaacgugagguucuu

SEQ ID NO: 814236 - RNA, 19 nt, Artificial Sequence
  Description of Artificial Sequence: Synthetic oligonucleotide
ggcccggaacuuaucacag

SEQ ID NO: 814237 - RNA, 19 nt, Artificial Sequence
  Description of Artificial Sequence: Synthetic oligonucleotide
gugacuacccuugggucaa

SEQ ID NO: 814238 - RNA, 19 nt, Artificial Sequence
  Description of Artificial Sequence: Synthetic oligonucleotide
gcagaguggagguacccaa

SEQ ID NO: 814239 - RNA, 19 nt, Artificial Sequence
  Description of Artificial Sequence: Synthetic oligonucleotide
gcgagcggaacuucacgug

SEQ ID NO: 814240 - RNA, 19 nt, Artificial Sequence
  Description of Artificial Sequence: Synthetic oligonucleotide
cuguucccguguauaggca

SEQ ID NO: 814241 - RNA, 19 nt, Artificial Sequence
  Description of Artificial Sequence: Synthetic oligonucleotide
uggcuugguagagcuguuc

SEQ ID NO: 814242 - RNA, 19 nt, Artificial Sequence
  Description of Artificial Sequence: Synthetic oligonucleotide
gaacuucacgugauagggu

SEQ ID NO: 814243 - RNA, 19 nt, Artificial Sequence
  Description of Artificial Sequence: Synthetic oligonucleotide
gccacggugguaguacugc

SEQ ID NO: 814244 - RNA, 19 nt, Artificial Sequence
  Description of Artificial Sequence: Synthetic oligonucleotide
cugcauggcugcgaauguc

SEQ ID NO: 814245 - RNA, 19 nt, Artificial Sequence
  Description of Artificial Sequence: Synthetic oligonucleotide
gcaguaucagguacugauc

SEQ ID NO: 814246 - RNA, 19 nt, Artificial Sequence
  Description of Artificial Sequence: Synthetic oligonucleotide
gcccggaacuuaucacagg

SEQ ID NO: 814247 - RNA, 19 nt, Artificial Sequence
  Description of Artificial Sequence: Synthetic oligonucleotide
gcacuguucgauguagguc

SEQ ID NO: 814248 - RNA, 19 nt, Artificial Sequence
  Description of Artificial Sequence: Synthetic oligonucleotide
aaggugucauccggcccau

SEQ ID NO: 814249 - RNA, 19 nt, Artificial Sequence
  Description of Artificial Sequence: Synthetic oligonucleotide
ugguaaccaacaggaugua

SEQ ID NO: 814250 - RNA, 19 nt, Artificial Sequence
  Description of Artificial Sequence: Synthetic oligonucleotide
ccggaaugucaccaccagc

SEQ ID NO: 814251 - RNA, 19 nt, Artificial Sequence
  Description of Artificial Sequence: Synthetic oligonucleotide
ugacugcggccucgcuccc

SEQ ID NO: 814252 - RNA, 19 nt, Artificial Sequence
  Description of Artificial Sequence: Synthetic oligonucleotide
gugagcgcgggacgccggc

SEQ ID NO: 814253 - RNA, 19 nt, Artificial Sequence
  Description of Artificial Sequence: Synthetic oligonucleotide
gguagagcuguucccgugu

SEQ ID NO: 814254 - RNA, 19 nt, Artificial Sequence
  Description of Artificial Sequence: Synthetic oligonucleotide
uacgaccuuuggcccggaa

SEQ ID NO: 814255 - RNA, 19 nt, Artificial Sequence
  Description of Artificial Sequence: Synthetic oligonucleotide
acuuaucacaggggcucau

SEQ ID NO: 814256 - RNA, 19 nt, Artificial Sequence
  Description of Artificial Sequence: Synthetic oligonucleotide
acggaacuugccagaugug

SEQ ID NO: 814257 - RNA, 19 nt, Artificial Sequence
  Description of Artificial Sequence: Synthetic oligonucleotide
ccccaccacggacauaggc

SEQ ID NO: 814258 - RNA, 19 nt, Artificial Sequence
  Description of Artificial Sequence: Synthetic oligonucleotide
ggucaauaucaaagguauc

SEQ ID NO: 814259 - RNA, 19 nt, Artificial Sequence
  Description of Artificial Sequence: Synthetic oligonucleotide
gcacggugagcgcgggacg

SEQ ID NO: 814260 - RNA, 19 nt, Artificial Sequence
  Description of Artificial Sequence: Synthetic oligonucleotide
cccggaaugucaccaccag

SEQ ID NO: 814261 - RNA, 19 nt, Artificial Sequence
  Description of Artificial Sequence: Synthetic oligonucleotide
gccgccacaugaaugcaac

SEQ ID NO: 814262 - RNA, 19 nt, Artificial Sequence
  Description of Artificial Sequence: Synthetic oligonucleotide
aggcuacugugacccugcu

SEQ ID NO: 814263 - RNA, 19 nt, Artificial Sequence
  Description of Artificial Sequence: Synthetic oligonucleotide
gcgcuuuauugucaaacgu

SEQ ID NO: 814264 - RNA, 19 nt, Artificial Sequence
  Description of Artificial Sequence: Synthetic oligonucleotide
gggcuggcgaaguucccac

SEQ ID NO: 814265 - RNA, 19 nt, Artificial Sequence
  Description of Artificial Sequence: Synthetic oligonucleotide
ggcuagguucuuugccuca

SEQ ID NO: 814266 - RNA, 19 nt, Artificial Sequence
  Description of Artificial Sequence: Synthetic oligonucleotide
accaggcuacugugacccu

SEQ ID NO: 814267 - RNA, 19 nt, Artificial Sequence
  Description of Artificial Sequence: Synthetic oligonucleotide
cgugaucagcacacugaag

SEQ ID NO: 814268 - RNA, 19 nt, Artificial Sequence
  Description of Artificial Sequence: Synthetic oligonucleotide
cauaagcuugcagggcuua

SEQ ID NO: 814269 - RNA, 19 nt, Artificial Sequence
  Description of Artificial Sequence: Synthetic oligonucleotide
ccgugucuggagacacugg

SEQ ID NO: 814270 - RNA, 19 nt, Artificial Sequence
  Description of Artificial Sequence: Synthetic oligonucleotide
cugucaggaggguccaccu

SEQ ID NO: 814271 - RNA, 19 nt, Artificial Sequence
  Description of Artificial Sequence: Synthetic oligonucleotide
gucuccgugucuggagaca

SEQ ID NO: 814272 - RNA, 19 nt, Artificial Sequence
  Description of Artificial Sequence: Synthetic oligonucleotide
caucauagcuggcuagguu

SEQ ID NO: 814273 - RNA, 19 nt, Artificial Sequence
  Description of Artificial Sequence: Synthetic oligonucleotide
cucuggggagucccuucca

SEQ ID NO: 814274 - RNA, 19 nt, Artificial Sequence
  Description of Artificial Sequence: Synthetic oligonucleotide
gugagcgggcacacaacaa

SEQ ID NO: 814275 - RNA, 19 nt, Artificial Sequence
  Description of Artificial Sequence: Synthetic oligonucleotide
gcuggcgaaguucccaccu

SEQ ID NO: 814276 - RNA, 19 nt, Artificial Sequence
  Description of Artificial Sequence: Synthetic oligonucleotide
gauagggucccaggacaau

SEQ ID NO: 814277 - RNA, 19 nt, Artificial Sequence
  Description of Artificial Sequence: Synthetic oligonucleotide
accggccccgggauauguc

SEQ ID NO: 814278 - RNA, 19 nt, Artificial Sequence
  Description of Artificial Sequence: Synthetic oligonucleotide
gggacccauacccaggauu

SEQ ID NO: 814279 - RNA, 19 nt, Artificial Sequence
  Description of Artificial Sequence: Synthetic oligonucleotide
cauaccggccccgggauau

SEQ ID NO: 814280 - RNA, 19 nt, Artificial Sequence
  Description of Artificial Sequence: Synthetic oligonucleotide
uugccagaugugggacuau

SEQ ID NO: 814281 - RNA, 19 nt, Artificial Sequence
  Description of Artificial Sequence: Synthetic oligonucleotide
gacgagcagaguggaggua

SEQ ID NO: 814282 - RNA, 19 nt, Artificial Sequence
  Description of Artificial Sequence: Synthetic oligonucleotide
gagugguccucuggggagu

SEQ ID NO: 814283 - RNA, 19 nt, Artificial Sequence
  Description of Artificial Sequence: Synthetic oligonucleotide
cuccaagcggauagggauu

SEQ ID NO: 814284 - RNA, 19 nt, Artificial Sequence
  Description of Artificial Sequence: Synthetic oligonucleotide
cgagcggaacuucacguga

SEQ ID NO: 814285 - RNA, 19 nt, Artificial Sequence
  Description of Artificial Sequence: Synthetic oligonucleotide
cccguguauaggcagcaaa

SEQ ID NO: 814286 - RNA, 19 nt, Artificial Sequence
  Description of Artificial Sequence: Synthetic oligonucleotide
uucgcccacugugcgcuuu

SEQ ID NO: 814287 - RNA, 19 nt, Artificial Sequence
  Description of Artificial Sequence: Synthetic oligonucleotide
uuacgaccuuuggcccgga

SEQ ID NO: 814288 - RNA, 19 nt, Artificial Sequence
  Description of Artificial Sequence: Synthetic oligonucleotide
gagcggaacuucacgugau

SEQ ID NO: 814289 - RNA, 19 nt, Artificial Sequence
  Description of Artificial Sequence: Synthetic oligonucleotide
ggaagccacguagcaguga

SEQ ID NO: 814290 - RNA, 19 nt, Artificial Sequence
  Description of Artificial Sequence: Synthetic oligonucleotide
ggccacggugguaguacug

SEQ ID NO: 814291 - RNA, 19 nt, Artificial Sequence
  Description of Artificial Sequence: Synthetic oligonucleotide
ccaagcggauagggauucg

SEQ ID NO: 814292 - RNA, 19 nt, Artificial Sequence
  Description of Artificial Sequence: Synthetic oligonucleotide
ggcggguccgagcgcgcgc

SEQ ID NO: 814293 - RNA, 19 nt, Artificial Sequence
  Description of Artificial Sequence: Synthetic oligonucleotide
ggccgcacggugagcgcgg

SEQ ID NO: 814294 - RNA, 19 nt, Artificial Sequence
  Description of Artificial Sequence: Synthetic oligonucleotide
cugggaucucauuguugau

SEQ ID NO: 814295 - RNA, 19 nt, Artificial Sequence
  Description of Artificial Sequence: Synthetic oligonucleotide
auucgcccacugugcgcuu

SEQ ID NO: 814296 - RNA, 19 nt, Artificial Sequence
  Description of Artificial Sequence: Synthetic oligonucleotide
gggacuauccuggcacugu

SEQ ID NO: 814297 - RNA, 19 nt, Artificial Sequence
  Description of Artificial Sequence: Synthetic oligonucleotide
ugacuacccuugggucaau

SEQ ID NO: 814298 - RNA, 19 nt, Artificial Sequence
  Description of Artificial Sequence: Synthetic oligonucleotide
agguagcggaugacaccaa

SEQ ID NO: 814299 - RNA, 19 nt, Artificial Sequence
  Description of Artificial Sequence: Synthetic oligonucleotide
gggguacaggggauaaagu

SEQ ID NO: 814300 - RNA, 19 nt, Artificial Sequence
  Description of Artificial Sequence: Synthetic oligonucleotide
ggcauaccggccccgggau

SEQ ID NO: 814301 - RNA, 19 nt, Artificial Sequence
  Description of Artificial Sequence: Synthetic oligonucleotide
ccuguagcauaagcuugca

SEQ ID NO: 814302 - RNA, 19 nt, Artificial Sequence
  Description of Artificial Sequence: Synthetic oligonucleotide
ccacggacauaggcauacc

SEQ ID NO: 814303 - RNA, 19 nt, Artificial Sequence
  Description of Artificial Sequence: Synthetic oligonucleotide
cccagacgagcagagugga

SEQ ID NO: 814304 - RNA, 19 nt, Artificial Sequence
  Description of Artificial Sequence: Synthetic oligonucleotide
cagggguacaggggauaaa

SEQ ID NO: 814305 - RNA, 19 nt, Artificial Sequence
  Description of Artificial Sequence: Synthetic oligonucleotide
ccaccuggauacauucagu

SEQ ID NO: 814306 - RNA, 19 nt, Artificial Sequence
  Description of Artificial Sequence: Synthetic oligonucleotide
ccggcccaucagaguagcc

SEQ ID NO: 814307 - RNA, 19 nt, Artificial Sequence
  Description of Artificial Sequence: Synthetic oligonucleotide
cgacggaacuugccagaug

SEQ ID NO: 814308 - RNA, 19 nt, Artificial Sequence
  Description of Artificial Sequence: Synthetic oligonucleotide
cgcgccgcggugacugcgg

SEQ ID NO: 814309 - RNA, 19 nt, Artificial Sequence
  Description of Artificial Sequence: Synthetic oligonucleotide
ccgccacaugaaugcaaca

SEQ ID NO: 814310 - RNA, 19 nt, Artificial Sequence
  Description of Artificial Sequence: Synthetic oligonucleotide
gccguucccacagacugau

SEQ ID NO: 814311 - RNA, 19 nt, Artificial Sequence
  Description of Artificial Sequence: Synthetic oligonucleotide
caacccagacgagcagagu

SEQ ID NO: 814312 - RNA, 19 nt, Artificial Sequence
  Description of Artificial Sequence: Synthetic oligonucleotide
ccccauugaugagcgaaaa

SEQ ID NO: 814313 - RNA, 19 nt, Artificial Sequence
  Description of Artificial Sequence: Synthetic oligonucleotide
gccgcacggugagcgcggg

SEQ ID NO: 814314 - RNA, 19 nt, Artificial Sequence
  Description of Artificial Sequence: Synthetic oligonucleotide
cggugagcgcgggacgccg

SEQ ID NO: 814315 - RNA, 19 nt, Artificial Sequence
  Description of Artificial Sequence: Synthetic oligonucleotide
ccccgggauaugucaggca

SEQ ID NO: 814316 - RNA, 19 nt, Artificial Sequence
  Description of Artificial Sequence: Synthetic oligonucleotide
cguaggcgccagugaugag

SEQ ID NO: 814317 - RNA, 19 nt, Artificial Sequence
  Description of Artificial Sequence: Synthetic oligonucleotide
ccgggauaugucaggcagu

SEQ ID NO: 814318 - RNA, 19 nt, Artificial Sequence
  Description of Artificial Sequence: Synthetic oligonucleotide
cugcagcaggaagccacgu

SEQ ID NO: 814319 - RNA, 19 nt, Artificial Sequence
  Description of Artificial Sequence: Synthetic oligonucleotide
agcgcgcgccgcggugacu

SEQ ID NO: 814320 - RNA, 19 nt, Artificial Sequence
  Description of Artificial Sequence: Synthetic oligonucleotide
ccauggccgcacggugagc

SEQ ID NO: 814321 - RNA, 19 nt, Artificial Sequence
  Description of Artificial Sequence: Synthetic oligonucleotide
ggacgccggcggguccgag

SEQ ID NO: 814322 - RNA, 19 nt, Artificial Sequence
  Description of Artificial Sequence: Synthetic oligonucleotide
cggcccgacgcggaggcca

SEQ ID NO: 814323 - RNA, 19 nt, Artificial Sequence
  Description of Artificial Sequence: Synthetic oligonucleotide
ccgccgccacaugaaugca

SEQ ID NO: 814324 - RNA, 19 nt, Artificial Sequence
  Description of Artificial Sequence: Synthetic oligonucleotide
ccggcccgacgcggaggcc

SEQ ID NO: 814325 - RNA, 19 nt, Artificial Sequence
  Description of Artificial Sequence: Synthetic oligonucleotide
gcguggcaaucaggauauu

SEQ ID NO: 814326 - RNA, 19 nt, Artificial Sequence
  Description of Artificial Sequence: Synthetic oligonucleotide
aaucaugcgauacugaggc

SEQ ID NO: 814327 - RNA, 19 nt, Artificial Sequence
  Description of Artificial Sequence: Synthetic oligonucleotide
aauacuccaguuccgaucc

SEQ ID NO: 814328 - RNA, 19 nt, Artificial Sequence
  Description of Artificial Sequence: Synthetic oligonucleotide
auuagaaauauuuuggauc

SEQ ID NO: 814329 - RNA, 19 nt, Artificial Sequence
  Description of Artificial Sequence: Synthetic oligonucleotide
aauucgaugaaugugaaag

SEQ ID NO: 814330 - RNA, 19 nt, Artificial Sequence
  Description of Artificial Sequence: Synthetic oligonucleotide
ucuuaugcuagccaguagg

SEQ ID NO: 814331 - RNA, 19 nt, Artificial Sequence
  Description of Artificial Sequence: Synthetic oligonucleotide
uauuggauugccaucaaag

SEQ ID NO: 814332 - RNA, 19 nt, Artificial Sequence
  Description of Artificial Sequence: Synthetic oligonucleotide
ucaaauucgaugaauguga

SEQ ID NO: 814333 - RNA, 19 nt, Artificial Sequence
  Description of Artificial Sequence: Synthetic oligonucleotide
ucauauaaguccaagaaua

SEQ ID NO: 814334 - RNA, 19 nt, Artificial Sequence
  Description of Artificial Sequence: Synthetic oligonucleotide
aaguccaagaauauuaauc

SEQ ID NO: 814335 - RNA, 19 nt, Artificial Sequence
  Description of Artificial Sequence: Synthetic oligonucleotide
guuaccaugacucuugagc

SEQ ID NO: 814336 - RNA, 19 nt, Artificial Sequence
  Description of Artificial Sequence: Synthetic oligonucleotide
aagaauauuaaucucugua

SEQ ID NO: 814337 - RNA, 19 nt, Artificial Sequence
  Description of Artificial Sequence: Synthetic oligonucleotide
aguuagugaauccagacca

SEQ ID NO: 814338 - RNA, 19 nt, Artificial Sequence
  Description of Artificial Sequence: Synthetic oligonucleotide
aaauuauccacaucucuca

SEQ ID NO: 814339 - RNA, 19 nt, Artificial Sequence
  Description of Artificial Sequence: Synthetic oligonucleotide
caaaucacacaaaugauug

SEQ ID NO: 814340 - RNA, 19 nt, Artificial Sequence
  Description of Artificial Sequence: Synthetic oligonucleotide
aaacucucaaaucacacaa

SEQ ID NO: 814341 - RNA, 19 nt, Artificial Sequence
  Description of Artificial Sequence: Synthetic oligonucleotide
aguccaagaauauuaaucu

SEQ ID NO: 814342 - RNA, 19 nt, Artificial Sequence
  Description of Artificial Sequence: Synthetic oligonucleotide
uaauuagaaggacacggag

SEQ ID NO: 814343 - RNA, 19 nt, Artificial Sequence
  Description of Artificial Sequence: Synthetic oligonucleotide
aauuagaaggacacggagg

SEQ ID NO: 814344 - RNA, 19 nt, Artificial Sequence
  Description of Artificial Sequence: Synthetic oligonucleotide
aaguucaauaaacggcgac

SEQ ID NO: 814345 - RNA, 19 nt, Artificial Sequence
  Description of Artificial Sequence: Synthetic oligonucleotide
auuggauugccaucaaagg

SEQ ID NO: 814346 - RNA, 19 nt, Artificial Sequence
  Description of Artificial Sequence: Synthetic oligonucleotide
guuaaguucaguuagugaa

SEQ ID NO: 814347 - RNA, 19 nt, Artificial Sequence
  Description of Artificial Sequence: Synthetic oligonucleotide
uuugugucaccucuguucc

SEQ ID NO: 814348 - RNA, 19 nt, Artificial Sequence
  Description of Artificial Sequence: Synthetic oligonucleotide
aaagggagaaacgucuugg

SEQ ID NO: 814349 - RNA, 19 nt, Artificial Sequence
  Description of Artificial Sequence: Synthetic oligonucleotide
aaucguuagucguuucuuc

SEQ ID NO: 814350 - RNA, 19 nt, Artificial Sequence
  Description of Artificial Sequence: Synthetic oligonucleotide
uacuuucuaguagauaucg

SEQ ID NO: 814351 - RNA, 19 nt, Artificial Sequence
  Description of Artificial Sequence: Synthetic oligonucleotide
auuggcuacucguugcugc

SEQ ID NO: 814352 - RNA, 19 nt, Artificial Sequence
  Description of Artificial Sequence: Synthetic oligonucleotide
acauuguuaaucguuaguc

SEQ ID NO: 814353 - RNA, 19 nt, Artificial Sequence
  Description of Artificial Sequence: Synthetic oligonucleotide
auuguuaaucguuagucgu

SEQ ID NO: 814354 - RNA, 19 nt, Artificial Sequence
  Description of Artificial Sequence: Synthetic oligonucleotide
agguuuaaaacucucaaau

SEQ ID NO: 814355 - RNA, 19 nt, Artificial Sequence
  Description of Artificial Sequence: Synthetic oligonucleotide
uuugaauacuccaguuccg

SEQ ID NO: 814356 - RNA, 19 nt, Artificial Sequence
  Description of Artificial Sequence: Synthetic oligonucleotide
uauuaaucucuguagauua

SEQ ID NO: 814357 - RNA, 19 nt, Artificial Sequence
  Description of Artificial Sequence: Synthetic oligonucleotide
cauuguuaaucguuagucg

SEQ ID NO: 814358 - RNA, 19 nt, Artificial Sequence
  Description of Artificial Sequence: Synthetic oligonucleotide
cugaauuuaaggugcagag

SEQ ID NO: 814359 - RNA, 19 nt, Artificial Sequence
  Description of Artificial Sequence: Synthetic oligonucleotide
acuuauuacucuuccaucu

SEQ ID NO: 814360 - RNA, 19 nt, Artificial Sequence
  Description of Artificial Sequence: Synthetic oligonucleotide
aaagcuagauauauuguug

SEQ ID NO: 814361 - RNA, 19 nt, Artificial Sequence
  Description of Artificial Sequence: Synthetic oligonucleotide
uuauuacucuuccaucucc

SEQ ID NO: 814362 - RNA, 19 nt, Artificial Sequence
  Description of Artificial Sequence: Synthetic oligonucleotide
aagcuagauauauuguuga

SEQ ID NO: 814363 - RNA, 19 nt, Artificial Sequence
  Description of Artificial Sequence: Synthetic oligonucleotide
gaauauuaaucucuguaga

SEQ ID NO: 814364 - RNA, 19 nt, Artificial Sequence
  Description of Artificial Sequence: Synthetic oligonucleotide
uuuugugucaccucuguuc

SEQ ID NO: 814365 - RNA, 19 nt, Artificial Sequence
  Description of Artificial Sequence: Synthetic oligonucleotide
ucagccauuaucaugucau

SEQ ID NO: 814366 - RNA, 19 nt, Artificial Sequence
  Description of Artificial Sequence: Synthetic oligonucleotide
uuugggaagcacuuggaca

SEQ ID NO: 814367 - RNA, 19 nt, Artificial Sequence
  Description of Artificial Sequence: Synthetic oligonucleotide
ucaaaucacacaaaugauu

SEQ ID NO: 814368 - RNA, 19 nt, Artificial Sequence
  Description of Artificial Sequence: Synthetic oligonucleotide
uucaguguggcacgauucg

SEQ ID NO: 814369 - RNA, 19 nt, Artificial Sequence
  Description of Artificial Sequence: Synthetic oligonucleotide
uuuccagaguguaaaguug

SEQ ID NO: 814370 - RNA, 19 nt, Artificial Sequence
  Description of Artificial Sequence: Synthetic oligonucleotide
uuaccaugacucuugagcu

SEQ ID NO: 814371 - RNA, 19 nt, Artificial Sequence
  Description of Artificial Sequence: Synthetic oligonucleotide
ugccaucaaucuuacaggg

SEQ ID NO: 814372 - RNA, 19 nt, Artificial Sequence
  Description of Artificial Sequence: Synthetic oligonucleotide
aguucaauaaacggcgacg

SEQ ID NO: 814373 - RNA, 19 nt, Artificial Sequence
  Description of Artificial Sequence: Synthetic oligonucleotide
uacaagauuggucucccug

SEQ ID NO: 814374 - RNA, 19 nt, Artificial Sequence
  Description of Artificial Sequence: Synthetic oligonucleotide
aggaccguguguuuguuac

SEQ ID NO: 814375 - RNA, 19 nt, Artificial Sequence
  Description of Artificial Sequence: Synthetic oligonucleotide
gaucugauugugucggagg

SEQ ID NO: 814376 - RNA, 19 nt, Artificial Sequence
  Description of Artificial Sequence: Synthetic oligonucleotide
acggacuuauuacucuucc

SEQ ID NO: 814377 - RNA, 19 nt, Artificial Sequence
  Description of Artificial Sequence: Synthetic oligonucleotide
gauauauuguugaagcuga

SEQ ID NO: 814378 - RNA, 19 nt, Artificial Sequence
  Description of Artificial Sequence: Synthetic oligonucleotide
aaagaacauaugcuuggcu

SEQ ID NO: 814379 - RNA, 19 nt, Artificial Sequence
  Description of Artificial Sequence: Synthetic oligonucleotide
uuggauccgaguuauaaaa

SEQ ID NO: 814380 - RNA, 19 nt, Artificial Sequence
  Description of Artificial Sequence: Synthetic oligonucleotide
uuucgagcgacauuguuaa

SEQ ID NO: 814381 - RNA, 19 nt, Artificial Sequence
  Description of Artificial Sequence: Synthetic oligonucleotide
ucaaagcuagauauauugu

SEQ ID NO: 814382 - RNA, 19 nt, Artificial Sequence
  Description of Artificial Sequence: Synthetic oligonucleotide
aucugguuaucauauaagu

SEQ ID NO: 814383 - RNA, 19 nt, Artificial Sequence
  Description of Artificial Sequence: Synthetic oligonucleotide
ugagcuauuggauugccau

SEQ ID NO: 814384 - RNA, 19 nt, Artificial Sequence
  Description of Artificial Sequence: Synthetic oligonucleotide
ucaauaaacggcgacggac

SEQ ID NO: 814385 - RNA, 19 nt, Artificial Sequence
  Description of Artificial Sequence: Synthetic oligonucleotide
aaucugguuaucauauaag

SEQ ID NO: 814386 - RNA, 19 nt, Artificial Sequence
  Description of Artificial Sequence: Synthetic oligonucleotide
ucccuaauuagaaggacac

SEQ ID NO: 814387 - RNA, 19 nt, Artificial Sequence
  Description of Artificial Sequence: Synthetic oligonucleotide
ucucucacaaaggugaucu

SEQ ID NO: 814388 - RNA, 19 nt, Artificial Sequence
  Description of Artificial Sequence: Synthetic oligonucleotide
ugugaaagagacaguggug

SEQ ID NO: 814389 - RNA, 19 nt, Artificial Sequence
  Description of Artificial Sequence: Synthetic oligonucleotide
ugagauuggcuacucguug

SEQ ID NO: 814390 - RNA, 19 nt, Artificial Sequence
  Description of Artificial Sequence: Synthetic oligonucleotide
ugggcuaggauuccaaaga

SEQ ID NO: 814391 - RNA, 19 nt, Artificial Sequence
  Description of Artificial Sequence: Synthetic oligonucleotide
aagguuuaaaacucucaaa

SEQ ID NO: 814392 - RNA, 19 nt, Artificial Sequence
  Description of Artificial Sequence: Synthetic oligonucleotide
ugaggaucgauugucaacu

SEQ ID NO: 814393 - RNA, 19 nt, Artificial Sequence
  Description of Artificial Sequence: Synthetic oligonucleotide
ggagguuaaguucaguuag

SEQ ID NO: 814394 - RNA, 19 nt, Artificial Sequence
  Description of Artificial Sequence: Synthetic oligonucleotide
gaaacgucuuggcuggagg

SEQ ID NO: 814395 - RNA, 19 nt, Artificial Sequence
  Description of Artificial Sequence: Synthetic oligonucleotide
ucauguaggaauccuugcu

SEQ ID NO: 814396 - RNA, 19 nt, Artificial Sequence
  Description of Artificial Sequence: Synthetic oligonucleotide
uuaaggugcagagaauuug

SEQ ID NO: 814397 - RNA, 19 nt, Artificial Sequence
  Description of Artificial Sequence: Synthetic oligonucleotide
cugcggauuucaaugacgg

SEQ ID NO: 814398 - RNA, 19 nt, Artificial Sequence
  Description of Artificial Sequence: Synthetic oligonucleotide
aucauauaaguccaagaau

SEQ ID NO: 814399 - RNA, 19 nt, Artificial Sequence
  Description of Artificial Sequence: Synthetic oligonucleotide
ucuaguagauaucggaauu

SEQ ID NO: 814400 - RNA, 19 nt, Artificial Sequence
  Description of Artificial Sequence: Synthetic oligonucleotide
uguaggaauccuugcugcg

SEQ ID NO: 814401 - RNA, 19 nt, Artificial Sequence
  Description of Artificial Sequence: Synthetic oligonucleotide
uggucuacaacagaugcca

SEQ ID NO: 814402 - RNA, 19 nt, Artificial Sequence
  Description of Artificial Sequence: Synthetic oligonucleotide
gagccguacagugaaaggg

SEQ ID NO: 814403 - RNA, 19 nt, Artificial Sequence
  Description of Artificial Sequence: Synthetic oligonucleotide
uuccagaguguaaaguuga

SEQ ID NO: 814404 - RNA, 19 nt, Artificial Sequence
  Description of Artificial Sequence: Synthetic oligonucleotide
uugaaucaugacauaaaau

SEQ ID NO: 814405 - RNA, 19 nt, Artificial Sequence
  Description of Artificial Sequence: Synthetic oligonucleotide
acugacaagccuuguaaug

SEQ ID NO: 814406 - RNA, 19 nt, Artificial Sequence
  Description of Artificial Sequence: Synthetic oligonucleotide
uaaugcauugcugagcccu

SEQ ID NO: 814407 - RNA, 19 nt, Artificial Sequence
  Description of Artificial Sequence: Synthetic oligonucleotide
ucgaugaaugugaaagaga

SEQ ID NO: 814408 - RNA, 19 nt, Artificial Sequence
  Description of Artificial Sequence: Synthetic oligonucleotide
acaagcucaaugaacaucu

SEQ ID NO: 814409 - RNA, 19 nt, Artificial Sequence
  Description of Artificial Sequence: Synthetic oligonucleotide
acggcgacggacuuauuac

SEQ ID NO: 814410 - RNA, 19 nt, Artificial Sequence
  Description of Artificial Sequence: Synthetic oligonucleotide
uacugaggcaacucggaag

SEQ ID NO: 814411 - RNA, 19 nt, Artificial Sequence
  Description of Artificial Sequence: Synthetic oligonucleotide
acgaagcugugcuagggcg

SEQ ID NO: 814412 - RNA, 19 nt, Artificial Sequence
  Description of Artificial Sequence: Synthetic oligonucleotide
uaggauuccaaagagccgu

SEQ ID NO: 814413 - RNA, 19 nt, Artificial Sequence
  Description of Artificial Sequence: Synthetic oligonucleotide
gaaauauuuuggauccgag

SEQ ID NO: 814414 - RNA, 19 nt, Artificial Sequence
  Description of Artificial Sequence: Synthetic oligonucleotide
gagccuaaauagcacguag

SEQ ID NO: 814415 - RNA, 19 nt, Artificial Sequence
  Description of Artificial Sequence: Synthetic oligonucleotide
uucaguuagugaauccaga

SEQ ID NO: 814416 - RNA, 19 nt, Artificial Sequence
  Description of Artificial Sequence: Synthetic oligonucleotide
agaauugaaaucaugcgau

SEQ ID NO: 814417 - RNA, 19 nt, Artificial Sequence
  Description of Artificial Sequence: Synthetic oligonucleotide
uuuuggauccgaguuauaa

SEQ ID NO: 814418 - RNA, 19 nt, Artificial Sequence
  Description of Artificial Sequence: Synthetic oligonucleotide
aaauagcacguaguauuuc

SEQ ID NO: 814419 - RNA, 19 nt, Artificial Sequence
  Description of Artificial Sequence: Synthetic oligonucleotide
uacucguugcugcaagucc

SEQ ID NO: 814420 - RNA, 19 nt, Artificial Sequence
  Description of Artificial Sequence: Synthetic oligonucleotide
aacccgacgaagcugugcu

SEQ ID NO: 814421 - RNA, 19 nt, Artificial Sequence
  Description of Artificial Sequence: Synthetic oligonucleotide
ucgauugucaacuggucaa

SEQ ID NO: 814422 - RNA, 19 nt, Artificial Sequence
  Description of Artificial Sequence: Synthetic oligonucleotide
ugcaagucccacuuucgag

SEQ ID NO: 814423 - RNA, 19 nt, Artificial Sequence
  Description of Artificial Sequence: Synthetic oligonucleotide
agugaauccagaccauuga

SEQ ID NO: 814424 - RNA, 19 nt, Artificial Sequence
  Description of Artificial Sequence: Synthetic oligonucleotide
augucugagagggaagucg

SEQ ID NO: 814425 - RNA, 19 nt, Artificial Sequence
  Description of Artificial Sequence: Synthetic oligonucleotide
aaacgucuuggcuggaggu

SEQ ID NO: 814426 - RNA, 19 nt, Artificial Sequence
  Description of Artificial Sequence: Synthetic oligonucleotide
gaagcugagaaagagacgu

SEQ ID NO: 814427 - RNA, 19 nt, Artificial Sequence
  Description of Artificial Sequence: Synthetic oligonucleotide
aauucaguguggcacgauu

SEQ ID NO: 814428 - RNA, 19 nt, Artificial Sequence
  Description of Artificial Sequence: Synthetic oligonucleotide
ugagccguacagugaaagg

SEQ ID NO: 814429 - RNA, 19 nt, Artificial Sequence
  Description of Artificial Sequence: Synthetic oligonucleotide
gagauuggcuacucguugc

SEQ ID NO: 814430 - RNA, 19 nt, Artificial Sequence
  Description of Artificial Sequence: Synthetic oligonucleotide
acaagauuggucucccuga

SEQ ID NO: 814431 - RNA, 19 nt, Artificial Sequence
  Description of Artificial Sequence: Synthetic oligonucleotide
aggaucgauugucaacugg

SEQ ID NO: 814432 - RNA, 19 nt, Artificial Sequence
  Description of Artificial Sequence: Synthetic oligonucleotide
ugugucggagguuaaguuc

SEQ ID NO: 814433 - RNA, 19 nt, Artificial Sequence
  Description of Artificial Sequence: Synthetic oligonucleotide
caguuagugaauccagacc

SEQ ID NO: 814434 - RNA, 19 nt, Artificial Sequence
  Description of Artificial Sequence: Synthetic oligonucleotide
cucuugagcuauuggauug

SEQ ID NO: 814435 - RNA, 19 nt, Artificial Sequence
  Description of Artificial Sequence: Synthetic oligonucleotide
uuuggauccgaguuauaaa

SEQ ID NO: 814436 - RNA, 19 nt, Artificial Sequence
  Description of Artificial Sequence: Synthetic oligonucleotide
aucgauugucaacugguca

SEQ ID NO: 814437 - RNA, 19 nt, Artificial Sequence
  Description of Artificial Sequence: Synthetic oligonucleotide
gacuuauuacucuuccauc

SEQ ID NO: 814438 - RNA, 19 nt, Artificial Sequence
  Description of Artificial Sequence: Synthetic oligonucleotide
uaguagauaucggaauugc

SEQ ID NO: 814439 - RNA, 19 nt, Artificial Sequence
  Description of Artificial Sequence: Synthetic oligonucleotide
uagggcguugaacugcugc

SEQ ID NO: 814440 - RNA, 19 nt, Artificial Sequence
  Description of Artificial Sequence: Synthetic oligonucleotide
augggcuaggauuccaaag

SEQ ID NO: 814441 - RNA, 19 nt, Artificial Sequence
  Description of Artificial Sequence: Synthetic oligonucleotide
ugucaacuggucaacccga

SEQ ID NO: 814442 - RNA, 19 nt, Artificial Sequence
  Description of Artificial Sequence: Synthetic oligonucleotide
ucucuguagauuagaaaua

SEQ ID NO: 814443 - RNA, 19 nt, Artificial Sequence
  Description of Artificial Sequence: Synthetic oligonucleotide
aaugacggcgucccugaca

SEQ ID NO: 814444 - RNA, 19 nt, Artificial Sequence
  Description of Artificial Sequence: Synthetic oligonucleotide
cacgauucguguuuucccc

SEQ ID NO: 814445 - RNA, 19 nt, Artificial Sequence
  Description of Artificial Sequence: Synthetic oligonucleotide
uggaagcaucuuaugcuag

SEQ ID NO: 814446 - RNA, 19 nt, Artificial Sequence
  Description of Artificial Sequence: Synthetic oligonucleotide
uugagauugucaacaugac

SEQ ID NO: 814447 - RNA, 19 nt, Artificial Sequence
  Description of Artificial Sequence: Synthetic oligonucleotide
cacggagggaccucgagag

SEQ ID NO: 814448 - RNA, 19 nt, Artificial Sequence
  Description of Artificial Sequence: Synthetic oligonucleotide
cuuacaggguuccugagga

SEQ ID NO: 814449 - RNA, 19 nt, Artificial Sequence
  Description of Artificial Sequence: Synthetic oligonucleotide
acucguugcugcaaguccc

SEQ ID NO: 814450 - RNA, 19 nt, Artificial Sequence
  Description of Artificial Sequence: Synthetic oligonucleotide
caagucccacuuucgagcg

SEQ ID NO: 814451 - RNA, 19 nt, Artificial Sequence
  Description of Artificial Sequence: Synthetic oligonucleotide
uuacuuucuaguagauauc

SEQ ID NO: 814452 - RNA, 19 nt, Artificial Sequence
  Description of Artificial Sequence: Synthetic oligonucleotide
gcggauuucaaugacggcg

SEQ ID NO: 814453 - RNA, 19 nt, Artificial Sequence
  Description of Artificial Sequence: Synthetic oligonucleotide
gucgcugguauccucacug

SEQ ID NO: 814454 - RNA, 19 nt, Artificial Sequence
  Description of Artificial Sequence: Synthetic oligonucleotide
aaauucgaugaaugugaaa

SEQ ID NO: 814455 - RNA, 19 nt, Artificial Sequence
  Description of Artificial Sequence: Synthetic oligonucleotide
aacggcgacggacuuauua

SEQ ID NO: 814456 - RNA, 19 nt, Artificial Sequence
  Description of Artificial Sequence: Synthetic oligonucleotide
gugaaagagacagugguga

SEQ ID NO: 814457 - RNA, 19 nt, Artificial Sequence
  Description of Artificial Sequence: Synthetic oligonucleotide
uugcagaacuucuucuugu

SEQ ID NO: 814458 - RNA, 19 nt, Artificial Sequence
  Description of Artificial Sequence: Synthetic oligonucleotide
uugugcugaaaguucaaua

SEQ ID NO: 814459 - RNA, 19 nt, Artificial Sequence
  Description of Artificial Sequence: Synthetic oligonucleotide
cuaauuagaaggacacgga

SEQ ID NO: 814460 - RNA, 19 nt, Artificial Sequence
  Description of Artificial Sequence: Synthetic oligonucleotide
auauuaaucucuguagauu

SEQ ID NO: 814461 - RNA, 19 nt, Artificial Sequence
  Description of Artificial Sequence: Synthetic oligonucleotide
cuaguagauaucggaauug

SEQ ID NO: 814462 - RNA, 19 nt, Artificial Sequence
  Description of Artificial Sequence: Synthetic oligonucleotide
ucaugcgauacugaggcaa

SEQ ID NO: 814463 - RNA, 19 nt, Artificial Sequence
  Description of Artificial Sequence: Synthetic oligonucleotide
cuggucaacccgacgaagc

SEQ ID NO: 814464 - RNA, 19 nt, Artificial Sequence
  Description of Artificial Sequence: Synthetic oligonucleotide
aaagggugucuccaucuau

SEQ ID NO: 814465 - RNA, 19 nt, Artificial Sequence
  Description of Artificial Sequence: Synthetic oligonucleotide
uucaauaaacggcgacgga

SEQ ID NO: 814466 - RNA, 19 nt, Artificial Sequence
  Description of Artificial Sequence: Synthetic oligonucleotide
gacugcuuaugacuuuccc

SEQ ID NO: 814467 - RNA, 19 nt, Artificial Sequence
  Description of Artificial Sequence: Synthetic oligonucleotide
uuguuaaucguuagucguu

SEQ ID NO: 814468 - RNA, 19 nt, Artificial Sequence
  Description of Artificial Sequence: Synthetic oligonucleotide
agucgacucagcaaggcag

SEQ ID NO: 814469 - RNA, 19 nt, Artificial Sequence
  Description of Artificial Sequence: Synthetic oligonucleotide
ugaucugauugugucggag

SEQ ID NO: 814470 - RNA, 19 nt, Artificial Sequence
  Description of Artificial Sequence: Synthetic oligonucleotide
guauccucacugauaaugc

SEQ ID NO: 814471 - RNA, 19 nt, Artificial Sequence
  Description of Artificial Sequence: Synthetic oligonucleotide
cauuccaaugccccugagc

SEQ ID NO: 814472 - RNA, 19 nt, Artificial Sequence
  Description of Artificial Sequence: Synthetic oligonucleotide
cuuauuacucuuccaucuc

SEQ ID NO: 814473 - RNA, 19 nt, Artificial Sequence
  Description of Artificial Sequence: Synthetic oligonucleotide
ccgaguuauaaaauugugc

SEQ ID NO: 814474 - RNA, 19 nt, Artificial Sequence
  Description of Artificial Sequence: Synthetic oligonucleotide
uguuucugugacugacaag

SEQ ID NO: 814475 - RNA, 19 nt, Artificial Sequence
  Description of Artificial Sequence: Synthetic oligonucleotide
aauaaacggcgacggacuu

SEQ ID NO: 814476 - RNA, 19 nt, Artificial Sequence
  Description of Artificial Sequence: Synthetic oligonucleotide
accucuguuccauuuauuu

SEQ ID NO: 814477 - RNA, 19 nt, Artificial Sequence
  Description of Artificial Sequence: Synthetic oligonucleotide
ucgagcgacauuguuaauc

SEQ ID NO: 814478 - RNA, 19 nt, Artificial Sequence
  Description of Artificial Sequence: Synthetic oligonucleotide
agagaauuugggaacuuca

SEQ ID NO: 814479 - RNA, 19 nt, Artificial Sequence
  Description of Artificial Sequence: Synthetic oligonucleotide
guaggaauccuugcugcgg

SEQ ID NO: 814480 - RNA, 19 nt, Artificial Sequence
  Description of Artificial Sequence: Synthetic oligonucleotide
uguggcacgauucguguuu

SEQ ID NO: 814481 - RNA, 19 nt, Artificial Sequence
  Description of Artificial Sequence: Synthetic oligonucleotide
ugggaacgcagagauggcg

SEQ ID NO: 814482 - RNA, 19 nt, Artificial Sequence
  Description of Artificial Sequence: Synthetic oligonucleotide
cugaggaucgauugucaac

SEQ ID NO: 814483 - RNA, 19 nt, Artificial Sequence
  Description of Artificial Sequence: Synthetic oligonucleotide
cugagagggaagucgacuc

SEQ ID NO: 814484 - RNA, 19 nt, Artificial Sequence
  Description of Artificial Sequence: Synthetic oligonucleotide
ugccacacgucuuucuucu

SEQ ID NO: 814485 - RNA, 19 nt, Artificial Sequence
  Description of Artificial Sequence: Synthetic oligonucleotide
gcuagauauauuguugaag

SEQ ID NO: 814486 - RNA, 19 nt, Artificial Sequence
  Description of Artificial Sequence: Synthetic oligonucleotide
uuccaaugccccugagccg

SEQ ID NO: 814487 - RNA, 19 nt, Artificial Sequence
  Description of Artificial Sequence: Synthetic oligonucleotide
uuuccucugggaacgcaga

SEQ ID NO: 814488 - RNA, 19 nt, Artificial Sequence
  Description of Artificial Sequence: Synthetic oligonucleotide
ucugagagggaagucgacu

SEQ ID NO: 814489 - RNA, 19 nt, Artificial Sequence
  Description of Artificial Sequence: Synthetic oligonucleotide
gagccguucagccauuauc

SEQ ID NO: 814490 - RNA, 19 nt, Artificial Sequence
  Description of Artificial Sequence: Synthetic oligonucleotide
gacgaagcugugcuagggc

SEQ ID NO: 814491 - RNA, 19 nt, Artificial Sequence
  Description of Artificial Sequence: Synthetic oligonucleotide
aagcauuccaaugccccug

SEQ ID NO: 814492 - RNA, 19 nt, Artificial Sequence
  Description of Artificial Sequence: Synthetic oligonucleotide
augacggcgucccugacaa

SEQ ID NO: 814493 - RNA, 19 nt, Artificial Sequence
  Description of Artificial Sequence: Synthetic oligonucleotide
uguuaccaugacucuugag

SEQ ID NO: 814494 - RNA, 19 nt, Artificial Sequence
  Description of Artificial Sequence: Synthetic oligonucleotide
gcaagucccacuuucgagc

SEQ ID NO: 814495 - RNA, 19 nt, Artificial Sequence
  Description of Artificial Sequence: Synthetic oligonucleotide
auuuucaauuuuggugauc

SEQ ID NO: 814496 - RNA, 19 nt, Artificial Sequence
  Description of Artificial Sequence: Synthetic oligonucleotide
uugaccacuggguuucccu

SEQ ID NO: 814497 - RNA, 19 nt, Artificial Sequence
  Description of Artificial Sequence: Synthetic oligonucleotide
uuucaauuuuggugaucug

SEQ ID NO: 814498 - RNA, 19 nt, Artificial Sequence
  Description of Artificial Sequence: Synthetic oligonucleotide
uccaaugccccugagccgu

SEQ ID NO: 814499 - RNA, 19 nt, Artificial Sequence
  Description of Artificial Sequence: Synthetic oligonucleotide
uuucccuaauuagaaggac

SEQ ID NO: 814500 - RNA, 19 nt, Artificial Sequence
  Description of Artificial Sequence: Synthetic oligonucleotide
uugagcuauuggauugcca

SEQ ID NO: 814501 - RNA, 19 nt, Artificial Sequence
  Description of Artificial Sequence: Synthetic oligonucleotide
gauugucaacuggucaacc

SEQ ID NO: 814502 - RNA, 19 nt, Artificial Sequence
  Description of Artificial Sequence: Synthetic oligonucleotide
gacggcgucccugacaagc

SEQ ID NO: 814503 - RNA, 19 nt, Artificial Sequence
  Description of Artificial Sequence: Synthetic oligonucleotide
aaaguucaauaaacggcga

SEQ ID NO: 814504 - RNA, 19 nt, Artificial Sequence
  Description of Artificial Sequence: Synthetic oligonucleotide
uggucaacccgacgaagcu

SEQ ID NO: 814505 - RNA, 19 nt, Artificial Sequence
  Description of Artificial Sequence: Synthetic oligonucleotide
auugugucggagguuaagu

SEQ ID NO: 814506 - RNA, 19 nt, Artificial Sequence
  Description of Artificial Sequence: Synthetic oligonucleotide
agguuaaguucaguuagug

SEQ ID NO: 814507 - RNA, 19 nt, Artificial Sequence
  Description of Artificial Sequence: Synthetic oligonucleotide
cuuaugcuagccaguagga

SEQ ID NO: 814508 - RNA, 19 nt, Artificial Sequence
  Description of Artificial Sequence: Synthetic oligonucleotide
uucugaaggaccguguguu

SEQ ID NO: 814509 - RNA, 19 nt, Artificial Sequence
  Description of Artificial Sequence: Synthetic oligonucleotide
ugaccacuggguuucccug

SEQ ID NO: 814510 - RNA, 19 nt, Artificial Sequence
  Description of Artificial Sequence: Synthetic oligonucleotide
caaucuuacaggguuccug

SEQ ID NO: 814511 - RNA, 19 nt, Artificial Sequence
  Description of Artificial Sequence: Synthetic oligonucleotide
agagauggcgcugccauca

SEQ ID NO: 814512 - RNA, 19 nt, Artificial Sequence
  Description of Artificial Sequence: Synthetic oligonucleotide
acuuucuaguagauaucgg

SEQ ID NO: 814513 - RNA, 19 nt, Artificial Sequence
  Description of Artificial Sequence: Synthetic oligonucleotide
aucuuaugcuagccaguag

SEQ ID NO: 814514 - RNA, 19 nt, Artificial Sequence
  Description of Artificial Sequence: Synthetic oligonucleotide
uggucucccugaauuuaag

SEQ ID NO: 814515 - RNA, 19 nt, Artificial Sequence
  Description of Artificial Sequence: Synthetic oligonucleotide
ugucauuuugugucaccuc

SEQ ID NO: 814516 - RNA, 19 nt, Artificial Sequence
  Description of Artificial Sequence: Synthetic oligonucleotide
ugucaaagcuagauauauu

SEQ ID NO: 814517 - RNA, 19 nt, Artificial Sequence
  Description of Artificial Sequence: Synthetic oligonucleotide
agagacguuggaggcaggg

SEQ ID NO: 814518 - RNA, 19 nt, Artificial Sequence
  Description of Artificial Sequence: Synthetic oligonucleotide
uguuaaucguuagucguuu

SEQ ID NO: 814519 - RNA, 19 nt, Artificial Sequence
  Description of Artificial Sequence: Synthetic oligonucleotide
uccuugccuauuugaguag

SEQ ID NO: 814520 - RNA, 19 nt, Artificial Sequence
  Description of Artificial Sequence: Synthetic oligonucleotide
guccaagacaucuaaauuu

SEQ ID NO: 814521 - RNA, 19 nt, Artificial Sequence
  Description of Artificial Sequence: Synthetic oligonucleotide
caugcgauacugaggcaac

SEQ ID NO: 814522 - RNA, 19 nt, Artificial Sequence
  Description of Artificial Sequence: Synthetic oligonucleotide
cuuucgagcgacauuguua

SEQ ID NO: 814523 - RNA, 19 nt, Artificial Sequence
  Description of Artificial Sequence: Synthetic oligonucleotide
uugcugcggauuucaauga

SEQ ID NO: 814524 - RNA, 19 nt, Artificial Sequence
  Description of Artificial Sequence: Synthetic oligonucleotide
uggcaagguuuaaaacucu

SEQ ID NO: 814525 - RNA, 19 nt, Artificial Sequence
  Description of Artificial Sequence: Synthetic oligonucleotide
ucgagaguggaaaguccac

SEQ ID NO: 814526 - RNA, 19 nt, Artificial Sequence
  Description of Artificial Sequence: Synthetic oligonucleotide
agacccuguuuccucuggg

SEQ ID NO: 814527 - RNA, 19 nt, Artificial Sequence
  Description of Artificial Sequence: Synthetic oligonucleotide
gacauuguuaaucguuagu

SEQ ID NO: 814528 - RNA, 19 nt, Artificial Sequence
  Description of Artificial Sequence: Synthetic oligonucleotide
ugcuagggcguugaacugc

SEQ ID NO: 814529 - RNA, 19 nt, Artificial Sequence
  Description of Artificial Sequence: Synthetic oligonucleotide
cucgagaguggaaagucca

SEQ ID NO: 814530 - RNA, 19 nt, Artificial Sequence
  Description of Artificial Sequence: Synthetic oligonucleotide
agcuagauauauuguugaa

SEQ ID NO: 814531 - RNA, 19 nt, Artificial Sequence
  Description of Artificial Sequence: Synthetic oligonucleotide
guuuccucugggaacgcag

SEQ ID NO: 814532 - RNA, 19 nt, Artificial Sequence
  Description of Artificial Sequence: Synthetic oligonucleotide
uccguugauucucuuucau

SEQ ID NO: 814533 - RNA, 19 nt, Artificial Sequence
  Description of Artificial Sequence: Synthetic oligonucleotide
uaaucguuagucguuucuu

SEQ ID NO: 814534 - RNA, 19 nt, Artificial Sequence
  Description of Artificial Sequence: Synthetic oligonucleotide
aucuuacaggguuccugag

SEQ ID NO: 814535 - RNA, 19 nt, Artificial Sequence
  Description of Artificial Sequence: Synthetic oligonucleotide
cgagcgacauuguuaaucg

SEQ ID NO: 814536 - RNA, 19 nt, Artificial Sequence
  Description of Artificial Sequence: Synthetic oligonucleotide
agugaaagggugucuccau

SEQ ID NO: 814537 - RNA, 19 nt, Artificial Sequence
  Description of Artificial Sequence: Synthetic oligonucleotide
uugauugccgugguuuccu

SEQ ID NO: 814538 - RNA, 19 nt, Artificial Sequence
  Description of Artificial Sequence: Synthetic oligonucleotide
uuccguugauucucuuuca

SEQ ID NO: 814539 - RNA, 19 nt, Artificial Sequence
  Description of Artificial Sequence: Synthetic oligonucleotide
ugcugcggauuucaaugac

SEQ ID NO: 814540 - RNA, 19 nt, Artificial Sequence
  Description of Artificial Sequence: Synthetic oligonucleotide
ugucggagguuaaguucag

SEQ ID NO: 814541 - RNA, 19 nt, Artificial Sequence
  Description of Artificial Sequence: Synthetic oligonucleotide
uucuccagauuuugaguau

SEQ ID NO: 814542 - RNA, 19 nt, Artificial Sequence
  Description of Artificial Sequence: Synthetic oligonucleotide
aguagauaucggaauugcu

SEQ ID NO: 814543 - RNA, 19 nt, Artificial Sequence
  Description of Artificial Sequence: Synthetic oligonucleotide
uugugucggagguuaaguu

SEQ ID NO: 814544 - RNA, 19 nt, Artificial Sequence
  Description of Artificial Sequence: Synthetic oligonucleotide
gucucccugaauuuaaggu

SEQ ID NO: 814545 - RNA, 19 nt, Artificial Sequence
  Description of Artificial Sequence: Synthetic oligonucleotide
ugcggauuucaaugacggc

SEQ ID NO: 814546 - RNA, 19 nt, Artificial Sequence
  Description of Artificial Sequence: Synthetic oligonucleotide
ccuuguaaugcauugcuga

SEQ ID NO: 814547 - RNA, 19 nt, Artificial Sequence
  Description of Artificial Sequence: Synthetic oligonucleotide
ucccuauuucuggucagug

SEQ ID NO: 814548 - RNA, 19 nt, Artificial Sequence
  Description of Artificial Sequence: Synthetic oligonucleotide
auacugaggcaacucggaa

SEQ ID NO: 814549 - RNA, 19 nt, Artificial Sequence
  Description of Artificial Sequence: Synthetic oligonucleotide
gaccguguguuuguuacca

SEQ ID NO: 814550 - RNA, 19 nt, Artificial Sequence
  Description of Artificial Sequence: Synthetic oligonucleotide
agacugcuuaugacuuucc

SEQ ID NO: 814551 - RNA, 19 nt, Artificial Sequence
  Description of Artificial Sequence: Synthetic oligonucleotide
gaggaucgauugucaacug

SEQ ID NO: 814552 - RNA, 19 nt, Artificial Sequence
  Description of Artificial Sequence: Synthetic oligonucleotide
gugucggagguuaaguuca

SEQ ID NO: 814553 - RNA, 19 nt, Artificial Sequence
  Description of Artificial Sequence: Synthetic oligonucleotide
uuagugaauccagaccauu

SEQ ID NO: 814554 - RNA, 19 nt, Artificial Sequence
  Description of Artificial Sequence: Synthetic oligonucleotide
caucccuauuucuggucag

SEQ ID NO: 814555 - RNA, 19 nt, Artificial Sequence
  Description of Artificial Sequence: Synthetic oligonucleotide
ugagccuuuugcugucgcu

SEQ ID NO: 814556 - RNA, 19 nt, Artificial Sequence
  Description of Artificial Sequence: Synthetic oligonucleotide
cuugagcuauuggauugcc

SEQ ID NO: 814557 - RNA, 19 nt, Artificial Sequence
  Description of Artificial Sequence: Synthetic oligonucleotide
ccacuuucgagcgacauug

SEQ ID NO: 814558 - RNA, 19 nt, Artificial Sequence
  Description of Artificial Sequence: Synthetic oligonucleotide
acacggagggaccucgaga

SEQ ID NO: 814559 - RNA, 19 nt, Artificial Sequence
  Description of Artificial Sequence: Synthetic oligonucleotide
agaaacgucuuggcuggag

SEQ ID NO: 814560 - RNA, 19 nt, Artificial Sequence
  Description of Artificial Sequence: Synthetic oligonucleotide
caaagcuagauauauuguu

SEQ ID NO: 814561 - RNA, 19 nt, Artificial Sequence
  Description of Artificial Sequence: Synthetic oligonucleotide
gaucgauugucaacugguc

SEQ ID NO: 814562 - RNA, 19 nt, Artificial Sequence
  Description of Artificial Sequence: Synthetic oligonucleotide
acuggucaacccgacgaag

SEQ ID NO: 814563 - RNA, 19 nt, Artificial Sequence
  Description of Artificial Sequence: Synthetic oligonucleotide
gugguguaauucagugugg

SEQ ID NO: 814564 - RNA, 19 nt, Artificial Sequence
  Description of Artificial Sequence: Synthetic oligonucleotide
gggcuaggauuccaaagag

SEQ ID NO: 814565 - RNA, 19 nt, Artificial Sequence
  Description of Artificial Sequence: Synthetic oligonucleotide
guuaaucguuagucguuuc

SEQ ID NO: 814566 - RNA, 19 nt, Artificial Sequence
  Description of Artificial Sequence: Synthetic oligonucleotide
auuuacuuucuaguagaua

SEQ ID NO: 814567 - RNA, 19 nt, Artificial Sequence
  Description of Artificial Sequence: Synthetic oligonucleotide
caauaaacggcgacggacu

SEQ ID NO: 814568 - RNA, 19 nt, Artificial Sequence
  Description of Artificial Sequence: Synthetic oligonucleotide
gacucagaguccuuucugu

SEQ ID NO: 814569 - RNA, 19 nt, Artificial Sequence
  Description of Artificial Sequence: Synthetic oligonucleotide
guagauaucggaauugcuu

SEQ ID NO: 814570 - RNA, 19 nt, Artificial Sequence
  Description of Artificial Sequence: Synthetic oligonucleotide
caaauucgaugaaugugaa

SEQ ID NO: 814571 - RNA, 19 nt, Artificial Sequence
  Description of Artificial Sequence: Synthetic oligonucleotide
ugcgauacugaggcaacuc

SEQ ID NO: 814572 - RNA, 19 nt, Artificial Sequence
  Description of Artificial Sequence: Synthetic oligonucleotide
agcgacauuguuaaucguu

SEQ ID NO: 814573 - RNA, 19 nt, Artificial Sequence
  Description of Artificial Sequence: Synthetic oligonucleotide
gcacgauucguguuuuccc

SEQ ID NO: 814574 - RNA, 19 nt, Artificial Sequence
  Description of Artificial Sequence: Synthetic oligonucleotide
cauauaaguccaagaauau

SEQ ID NO: 814575 - RNA, 19 nt, Artificial Sequence
  Description of Artificial Sequence: Synthetic oligonucleotide
acuuucgagcgacauuguu

SEQ ID NO: 814576 - RNA, 19 nt, Artificial Sequence
  Description of Artificial Sequence: Synthetic oligonucleotide
uuagaaggacacggaggga

SEQ ID NO: 814577 - RNA, 19 nt, Artificial Sequence
  Description of Artificial Sequence: Synthetic oligonucleotide
ucaguguggcacgauucgu

SEQ ID NO: 814578 - RNA, 19 nt, Artificial Sequence
  Description of Artificial Sequence: Synthetic oligonucleotide
guuccgauccaagcauucc

SEQ ID NO: 814579 - RNA, 19 nt, Artificial Sequence
  Description of Artificial Sequence: Synthetic oligonucleotide
guaaugcauugcugagccc

SEQ ID NO: 814580 - RNA, 19 nt, Artificial Sequence
  Description of Artificial Sequence: Synthetic oligonucleotide
gcugcggauuucaaugacg

SEQ ID NO: 814581 - RNA, 19 nt, Artificial Sequence
  Description of Artificial Sequence: Synthetic oligonucleotide
auggugagauuggcuacuc

SEQ ID NO: 814582 - RNA, 19 nt, Artificial Sequence
  Description of Artificial Sequence: Synthetic oligonucleotide
ugagccuaaauagcacgua

SEQ ID NO: 814583 - RNA, 19 nt, Artificial Sequence
  Description of Artificial Sequence: Synthetic oligonucleotide
auuggucucccugaauuua

SEQ ID NO: 814584 - RNA, 19 nt, Artificial Sequence
  Description of Artificial Sequence: Synthetic oligonucleotide
agccguacagugaaagggu

SEQ ID NO: 814585 - RNA, 19 nt, Artificial Sequence
  Description of Artificial Sequence: Synthetic oligonucleotide
aaggaccguguguuuguua

SEQ ID NO: 814586 - RNA, 19 nt, Artificial Sequence
  Description of Artificial Sequence: Synthetic oligonucleotide
gaugucugagagggaaguc

SEQ ID NO: 814587 - RNA, 19 nt, Artificial Sequence
  Description of Artificial Sequence: Synthetic oligonucleotide
cuacucguugcugcaaguc

SEQ ID NO: 814588 - RNA, 19 nt, Artificial Sequence
  Description of Artificial Sequence: Synthetic oligonucleotide
ugauugugucggagguuaa

SEQ ID NO: 814589 - RNA, 19 nt, Artificial Sequence
  Description of Artificial Sequence: Synthetic oligonucleotide
agccauuaucaugucauuu

SEQ ID NO: 814590 - RNA, 19 nt, Artificial Sequence
  Description of Artificial Sequence: Synthetic oligonucleotide
ugccgugguuuccuucaca

SEQ ID NO: 814591 - RNA, 19 nt, Artificial Sequence
  Description of Artificial Sequence: Synthetic oligonucleotide
cuagccaguaggagccauc

SEQ ID NO: 814592 - RNA, 19 nt, Artificial Sequence
  Description of Artificial Sequence: Synthetic oligonucleotide
guugcugcaagucccacuu

SEQ ID NO: 814593 - RNA, 19 nt, Artificial Sequence
  Description of Artificial Sequence: Synthetic oligonucleotide
ugucgcugguauccucacu

SEQ ID NO: 814594 - RNA, 19 nt, Artificial Sequence
  Description of Artificial Sequence: Synthetic oligonucleotide
gacggacuuauuacucuuc

SEQ ID NO: 814595 - RNA, 19 nt, Artificial Sequence
  Description of Artificial Sequence: Synthetic oligonucleotide
cugauugugucggagguua

SEQ ID NO: 814596 - RNA, 19 nt, Artificial Sequence
  Description of Artificial Sequence: Synthetic oligonucleotide
ggcacgauucguguuuucc

SEQ ID NO: 814597 - RNA, 19 nt, Artificial Sequence
  Description of Artificial Sequence: Synthetic oligonucleotide
gacucuugagcuauuggau

SEQ ID NO: 814598 - RNA, 19 nt, Artificial Sequence
  Description of Artificial Sequence: Synthetic oligonucleotide
ccuggcaagguuuaaaacu

SEQ ID NO: 814599 - RNA, 19 nt, Artificial Sequence
  Description of Artificial Sequence: Synthetic oligonucleotide
ggcuacucguugcugcaag

SEQ ID NO: 814600 - RNA, 19 nt, Artificial Sequence
  Description of Artificial Sequence: Synthetic oligonucleotide
uugugucaccucuguucca

SEQ ID NO: 814601 - RNA, 19 nt, Artificial Sequence
  Description of Artificial Sequence: Synthetic oligonucleotide
acgcagagauggcgcugcc

SEQ ID NO: 814602 - RNA, 19 nt, Artificial Sequence
  Description of Artificial Sequence: Synthetic oligonucleotide
aagguccaagacaucuaaa

SEQ ID NO: 814603 - RNA, 19 nt, Artificial Sequence
  Description of Artificial Sequence: Synthetic oligonucleotide
aggcaacucggaagaugcc

SEQ ID NO: 814604 - RNA, 19 nt, Artificial Sequence
  Description of Artificial Sequence: Synthetic oligonucleotide
gaacgcagagauggcgcug

SEQ ID NO: 814605 - RNA, 19 nt, Artificial Sequence
  Description of Artificial Sequence: Synthetic oligonucleotide
gguagaauucucugguggu

SEQ ID NO: 814606 - RNA, 19 nt, Artificial Sequence
  Description of Artificial Sequence: Synthetic oligonucleotide
cuauuggauugccaucaaa

SEQ ID NO: 814607 - RNA, 19 nt, Artificial Sequence
  Description of Artificial Sequence: Synthetic oligonucleotide
ucaacccgacgaagcugug

SEQ ID NO: 814608 - RNA, 19 nt, Artificial Sequence
  Description of Artificial Sequence: Synthetic oligonucleotide
ggaagucgacucagcaagg

SEQ ID NO: 814609 - RNA, 19 nt, Artificial Sequence
  Description of Artificial Sequence: Synthetic oligonucleotide
gauggugagauuggcuacu

SEQ ID NO: 814610 - RNA, 19 nt, Artificial Sequence
  Description of Artificial Sequence: Synthetic oligonucleotide
gggaacgcagagauggcgc

SEQ ID NO: 814611 - RNA, 19 nt, Artificial Sequence
  Description of Artificial Sequence: Synthetic oligonucleotide
aucaugcgauacugaggca

SEQ ID NO: 814612 - RNA, 19 nt, Artificial Sequence
  Description of Artificial Sequence: Synthetic oligonucleotide
gccuaaauagcacguagua

SEQ ID NO: 814613 - RNA, 19 nt, Artificial Sequence
  Description of Artificial Sequence: Synthetic oligonucleotide
caacccgacgaagcugugc

SEQ ID NO: 814614 - RNA, 19 nt, Artificial Sequence
  Description of Artificial Sequence: Synthetic oligonucleotide
guaauucaguguggcacga

SEQ ID NO: 814615 - RNA, 19 nt, Artificial Sequence
  Description of Artificial Sequence: Synthetic oligonucleotide
caucuuaugcuagccagua

SEQ ID NO: 814616 - RNA, 19 nt, Artificial Sequence
  Description of Artificial Sequence: Synthetic oligonucleotide
cugcaagucccacuuucga

SEQ ID NO: 814617 - RNA, 19 nt, Artificial Sequence
  Description of Artificial Sequence: Synthetic oligonucleotide
auucucuggugguguaauu

SEQ ID NO: 814618 - RNA, 19 nt, Artificial Sequence
  Description of Artificial Sequence: Synthetic oligonucleotide
ucgacucagcaaggcagga

SEQ ID NO: 814619 - RNA, 19 nt, Artificial Sequence
  Description of Artificial Sequence: Synthetic oligonucleotide
cagugaaagggugucucca

SEQ ID NO: 814620 - RNA, 19 nt, Artificial Sequence
  Description of Artificial Sequence: Synthetic oligonucleotide
gccccugagccguacagug

SEQ ID NO: 814621 - RNA, 19 nt, Artificial Sequence
  Description of Artificial Sequence: Synthetic oligonucleotide
uugccgugguuuccuucac

SEQ ID NO: 814622 - RNA, 19 nt, Artificial Sequence
  Description of Artificial Sequence: Synthetic oligonucleotide
ugaaguggcugagccuaaa

SEQ ID NO: 814623 - RNA, 19 nt, Artificial Sequence
  Description of Artificial Sequence: Synthetic oligonucleotide
ccguugauucucuuucaug

SEQ ID NO: 814624 - RNA, 19 nt, Artificial Sequence
  Description of Artificial Sequence: Synthetic oligonucleotide
cugagccuaaauagcacgu

SEQ ID NO: 814625 - RNA, 19 nt, Artificial Sequence
  Description of Artificial Sequence: Synthetic oligonucleotide
cugucgcugguauccucac

SEQ ID NO: 814626 - RNA, 19 nt, Artificial Sequence
  Description of Artificial Sequence: Synthetic oligonucleotide
uaauucaguguggcacgau

SEQ ID NO: 814627 - RNA, 19 nt, Artificial Sequence
  Description of Artificial Sequence: Synthetic oligonucleotide
ggcaacucggaagaugcca

SEQ ID NO: 814628 - RNA, 19 nt, Artificial Sequence
  Description of Artificial Sequence: Synthetic oligonucleotide
caugggcuaggauuccaaa

SEQ ID NO: 814629 - RNA, 19 nt, Artificial Sequence
  Description of Artificial Sequence: Synthetic oligonucleotide
gucaacccgacgaagcugu

SEQ ID NO: 814630 - RNA, 19 nt, Artificial Sequence
  Description of Artificial Sequence: Synthetic oligonucleotide
ggaucgauugucaacuggu

SEQ ID NO: 814631 - RNA, 19 nt, Artificial Sequence
  Description of Artificial Sequence: Synthetic oligonucleotide
ggcaagguuuaaaacucuc

SEQ ID NO: 814632 - RNA, 19 nt, Artificial Sequence
  Description of Artificial Sequence: Synthetic oligonucleotide
caacucggaagaugccaca

SEQ ID NO: 814633 - RNA, 19 nt, Artificial Sequence
  Description of Artificial Sequence: Synthetic oligonucleotide
auaaacggcgacggacuua

SEQ ID NO: 814634 - RNA, 19 nt, Artificial Sequence
  Description of Artificial Sequence: Synthetic oligonucleotide
gaaguggcugagccuaaau

SEQ ID NO: 814635 - RNA, 19 nt, Artificial Sequence
  Description of Artificial Sequence: Synthetic oligonucleotide
ggauccgaguuauaaaauu

SEQ ID NO: 814636 - RNA, 19 nt, Artificial Sequence
  Description of Artificial Sequence: Synthetic oligonucleotide
gacguuggaggcagggcaa

SEQ ID NO: 814637 - RNA, 19 nt, Artificial Sequence
  Description of Artificial Sequence: Synthetic oligonucleotide
gugaucugauuuccaugaa

SEQ ID NO: 814638 - RNA, 19 nt, Artificial Sequence
  Description of Artificial Sequence: Synthetic oligonucleotide
cgacauuguuaaucguuag

SEQ ID NO: 814639 - RNA, 19 nt, Artificial Sequence
  Description of Artificial Sequence: Synthetic oligonucleotide
gugguuuccuucacaaggu

SEQ ID NO: 814640 - RNA, 19 nt, Artificial Sequence
  Description of Artificial Sequence: Synthetic oligonucleotide
ggucaacccgacgaagcug

SEQ ID NO: 814641 - RNA, 19 nt, Artificial Sequence
  Description of Artificial Sequence: Synthetic oligonucleotide
ggaccguguguuuguuacc

SEQ ID NO: 814642 - RNA, 19 nt, Artificial Sequence
  Description of Artificial Sequence: Synthetic oligonucleotide
augcgauacugaggcaacu

SEQ ID NO: 814643 - RNA, 19 nt, Artificial Sequence
  Description of Artificial Sequence: Synthetic oligonucleotide
accguguguuuguuaccau

SEQ ID NO: 814644 - RNA, 19 nt, Artificial Sequence
  Description of Artificial Sequence: Synthetic oligonucleotide
ugccccugagccguacagu

SEQ ID NO: 814645 - RNA, 19 nt, Artificial Sequence
  Description of Artificial Sequence: Synthetic oligonucleotide
cccgacgaagcugugcuag

SEQ ID NO: 814646 - RNA, 19 nt, Artificial Sequence
  Description of Artificial Sequence: Synthetic oligonucleotide
ccuauuucuggucagugau

SEQ ID NO: 814647 - RNA, 19 nt, Artificial Sequence
  Description of Artificial Sequence: Synthetic oligonucleotide
gccgugguuuccuucacaa

SEQ ID NO: 814648 - RNA, 19 nt, Artificial Sequence
  Description of Artificial Sequence: Synthetic oligonucleotide
gggaccucgagaguggaaa

SEQ ID NO: 814649 - RNA, 19 nt, Artificial Sequence
  Description of Artificial Sequence: Synthetic oligonucleotide
acggagggaccucgagagu

SEQ ID NO: 814650 - RNA, 19 nt, Artificial Sequence
  Description of Artificial Sequence: Synthetic oligonucleotide
gccaucaaaggugaugucu

SEQ ID NO: 814651 - RNA, 19 nt, Artificial Sequence
  Description of Artificial Sequence: Synthetic oligonucleotide
uucgagcgacauuguuaau

SEQ ID NO: 814652 - RNA, 19 nt, Artificial Sequence
  Description of Artificial Sequence: Synthetic oligonucleotide
ggcgacggacuuauuacuc

SEQ ID NO: 814653 - RNA, 19 nt, Artificial Sequence
  Description of Artificial Sequence: Synthetic oligonucleotide
ccaucccuauuucugguca

SEQ ID NO: 814654 - RNA, 19 nt, Artificial Sequence
  Description of Artificial Sequence: Synthetic oligonucleotide
ggcugagccuaaauagcac

SEQ ID NO: 814655 - RNA, 19 nt, Artificial Sequence
  Description of Artificial Sequence: Synthetic oligonucleotide
ucguugcugcaagucccac

SEQ ID NO: 814656 - RNA, 19 nt, Artificial Sequence
  Description of Artificial Sequence: Synthetic oligonucleotide
ccaucaaucuuacaggguu

SEQ ID NO: 814657 - RNA, 19 nt, Artificial Sequence
  Description of Artificial Sequence: Synthetic oligonucleotide
gcgacauuguuaaucguua

SEQ ID NO: 814658 - RNA, 19 nt, Artificial Sequence
  Description of Artificial Sequence: Synthetic oligonucleotide
aagagccguucagccauua

SEQ ID NO: 814659 - RNA, 19 nt, Artificial Sequence
  Description of Artificial Sequence: Synthetic oligonucleotide
gccguacagugaaagggug

SEQ ID NO: 814660 - RNA, 19 nt, Artificial Sequence
  Description of Artificial Sequence: Synthetic oligonucleotide
caaugacggcgucccugac

SEQ ID NO: 814661 - RNA, 19 nt, Artificial Sequence
  Description of Artificial Sequence: Synthetic oligonucleotide
uggcacgauucguguuuuc

SEQ ID NO: 814662 - RNA, 19 nt, Artificial Sequence
  Description of Artificial Sequence: Synthetic oligonucleotide
ugacggcgucccugacaag

SEQ ID NO: 814663 - RNA, 19 nt, Artificial Sequence
  Description of Artificial Sequence: Synthetic oligonucleotide
ccgacgaagcugugcuagg

SEQ ID NO: 814664 - RNA, 19 nt, Artificial Sequence
  Description of Artificial Sequence: Synthetic oligonucleotide
aaagagccguucagccauu

SEQ ID NO: 814665 - RNA, 19 nt, Artificial Sequence
  Description of Artificial Sequence: Synthetic oligonucleotide
cccuauuucuggucaguga

SEQ ID NO: 814666 - RNA, 19 nt, Artificial Sequence
  Description of Artificial Sequence: Synthetic oligonucleotide
acggcgucccugacaagcu

SEQ ID NO: 814667 - RNA, 19 nt, Artificial Sequence
  Description of Artificial Sequence: Synthetic oligonucleotide
gacaagccuuguaaugcau

SEQ ID NO: 814668 - RNA, 19 nt, Artificial Sequence
  Description of Artificial Sequence: Synthetic oligonucleotide
gguuaucauauaaguccaa

SEQ ID NO: 814669 - RNA, 19 nt, Artificial Sequence
  Description of Artificial Sequence: Synthetic oligonucleotide
ggaacgcagagauggcgcu

SEQ ID NO: 814670 - RNA, 19 nt, Artificial Sequence
  Description of Artificial Sequence: Synthetic oligonucleotide
gugagauuggcuacucguu

SEQ ID NO: 814671 - RNA, 19 nt, Artificial Sequence
  Description of Artificial Sequence: Synthetic oligonucleotide
gcauuccaaugccccugag

SEQ ID NO: 814672 - RNA, 19 nt, Artificial Sequence
  Description of Artificial Sequence: Synthetic oligonucleotide
guacagugaaagggugucu

SEQ ID NO: 814673 - RNA, 19 nt, Artificial Sequence
  Description of Artificial Sequence: Synthetic oligonucleotide
gcgacggacuuauuacucu

SEQ ID NO: 814674 - RNA, 19 nt, Artificial Sequence
  Description of Artificial Sequence: Synthetic oligonucleotide
cguaguauuuccagagugu

SEQ ID NO: 814675 - RNA, 19 nt, Artificial Sequence
  Description of Artificial Sequence: Synthetic oligonucleotide
caaugccccugagccguac

SEQ ID NO: 814676 - RNA, 19 nt, Artificial Sequence
  Description of Artificial Sequence: Synthetic oligonucleotide
gagaaacgucuuggcugga

SEQ ID NO: 814677 - RNA, 19 nt, Artificial Sequence
  Description of Artificial Sequence: Synthetic oligonucleotide
acccgacgaagcugugcua

SEQ ID NO: 814678 - RNA, 19 nt, Artificial Sequence
  Description of Artificial Sequence: Synthetic oligonucleotide
cggagguuaaguucaguua

SEQ ID NO: 814679 - RNA, 19 nt, Artificial Sequence
  Description of Artificial Sequence: Synthetic oligonucleotide
ccuaaauagcacguaguau

SEQ ID NO: 814680 - RNA, 19 nt, Artificial Sequence
  Description of Artificial Sequence: Synthetic oligonucleotide
cccugaggaucgauuguca

SEQ ID NO: 814681 - RNA, 19 nt, Artificial Sequence
  Description of Artificial Sequence: Synthetic oligonucleotide
ccacuggguuucccugagg

SEQ ID NO: 814682 - RNA, 19 nt, Artificial Sequence
  Description of Artificial Sequence: Synthetic oligonucleotide
cacuuucgagcgacauugu

SEQ ID NO: 814683 - RNA, 19 nt, Artificial Sequence
  Description of Artificial Sequence: Synthetic oligonucleotide
gcuacucguugcugcaagu

SEQ ID NO: 814684 - RNA, 19 nt, Artificial Sequence
  Description of Artificial Sequence: Synthetic oligonucleotide
cggauuucaaugacggcgu

SEQ ID NO: 814685 - RNA, 19 nt, Artificial Sequence
  Description of Artificial Sequence: Synthetic oligonucleotide
gcaucuuaugcuagccagu

SEQ ID NO: 814686 - RNA, 19 nt, Artificial Sequence
  Description of Artificial Sequence: Synthetic oligonucleotide
gaaggaccguguguuuguu

SEQ ID NO: 814687 - RNA, 19 nt, Artificial Sequence
  Description of Artificial Sequence: Synthetic oligonucleotide
caguuccgauccaagcauu

SEQ ID NO: 814688 - RNA, 19 nt, Artificial Sequence
  Description of Artificial Sequence: Synthetic oligonucleotide
agggaccucgagaguggaa

SEQ ID NO: 814689 - RNA, 19 nt, Artificial Sequence
  Description of Artificial Sequence: Synthetic oligonucleotide
cagccauuaucaugucauu

SEQ ID NO: 814690 - RNA, 19 nt, Artificial Sequence
  Description of Artificial Sequence: Synthetic oligonucleotide
gucggagguuaaguucagu

SEQ ID NO: 814691 - RNA, 19 nt, Artificial Sequence
  Description of Artificial Sequence: Synthetic oligonucleotide
aaacggcgacggacuuauu

SEQ ID NO: 814692 - RNA, 19 nt, Artificial Sequence
  Description of Artificial Sequence: Synthetic oligonucleotide
guggcacgauucguguuuu

SEQ ID NO: 814693 - RNA, 19 nt, Artificial Sequence
  Description of Artificial Sequence: Synthetic oligonucleotide
cgagaguggaaaguccacu

SEQ ID NO: 814694 - RNA, 19 nt, Artificial Sequence
  Description of Artificial Sequence: Synthetic oligonucleotide
gcgucccugacaagcucaa

SEQ ID NO: 814695 - RNA, 19 nt, Artificial Sequence
  Description of Artificial Sequence: Synthetic oligonucleotide
cguugcugcaagucccacu

SEQ ID NO: 814696 - RNA, 19 nt, Artificial Sequence
  Description of Artificial Sequence: Synthetic oligonucleotide
cggcgacggacuuauuacu

SEQ ID NO: 814697 - RNA, 19 nt, Artificial Sequence
  Description of Artificial Sequence: Synthetic oligonucleotide
cccacuuucgagcgacauu

SEQ ID NO: 814698 - RNA, 19 nt, Artificial Sequence
  Description of Artificial Sequence: Synthetic oligonucleotide
cgacggacuuauuacucuu

SEQ ID NO: 814699 - RNA, 19 nt, Artificial Sequence
  Description of Artificial Sequence: Synthetic oligonucleotide
cgcugccaucaaucuuaca

SEQ ID NO: 814700 - RNA, 19 nt, Artificial Sequence
  Description of Artificial Sequence: Synthetic oligonucleotide
ucugguaacaaauucuucg

SEQ ID NO: 814701 - RNA, 19 nt, Artificial Sequence
  Description of Artificial Sequence: Synthetic oligonucleotide
cauacagugauacugagcc

SEQ ID NO: 814702 - RNA, 19 nt, Artificial Sequence
  Description of Artificial Sequence: Synthetic oligonucleotide
aguuacuggaaccaaagac

SEQ ID NO: 814703 - RNA, 19 nt, Artificial Sequence
  Description of Artificial Sequence: Synthetic oligonucleotide
aaagaagcuuaacagacug

SEQ ID NO: 814704 - RNA, 19 nt, Artificial Sequence
  Description of Artificial Sequence: Synthetic oligonucleotide
aagcuaaacaguuugcuug

SEQ ID NO: 814705 - RNA, 19 nt, Artificial Sequence
  Description of Artificial Sequence: Synthetic oligonucleotide
augucagagaugcaaaacc

SEQ ID NO: 814706 - RNA, 19 nt, Artificial Sequence
  Description of Artificial Sequence: Synthetic oligonucleotide
cuuaacaaugaacuguugg

SEQ ID NO: 814707 - RNA, 19 nt, Artificial Sequence
  Description of Artificial Sequence: Synthetic oligonucleotide
auagacuuggaucuucagc

SEQ ID NO: 814708 - RNA, 19 nt, Artificial Sequence
  Description of Artificial Sequence: Synthetic oligonucleotide
uaaguauuguagcagagac

SEQ ID NO: 814709 - RNA, 19 nt, Artificial Sequence
  Description of Artificial Sequence: Synthetic oligonucleotide
agacuuucgagucauacag

SEQ ID NO: 814710 - RNA, 19 nt, Artificial Sequence
  Description of Artificial Sequence: Synthetic oligonucleotide
uuuugcgacuugaacaugg

SEQ ID NO: 814711 - RNA, 19 nt, Artificial Sequence
  Description of Artificial Sequence: Synthetic oligonucleotide
ugaaaguucaaaguugucc

SEQ ID NO: 814712 - RNA, 19 nt, Artificial Sequence
  Description of Artificial Sequence: Synthetic oligonucleotide
acuggaaccaaagacauuc

SEQ ID NO: 814713 - RNA, 19 nt, Artificial Sequence
  Description of Artificial Sequence: Synthetic oligonucleotide
uaaacaguuugcuugacgu

SEQ ID NO: 814714 - RNA, 19 nt, Artificial Sequence
  Description of Artificial Sequence: Synthetic oligonucleotide
uuaacaaugaacuguuggu

SEQ ID NO: 814715 - RNA, 19 nt, Artificial Sequence
  Description of Artificial Sequence: Synthetic oligonucleotide
acaaagaagcuuaacagac

SEQ ID NO: 814716 - RNA, 19 nt, Artificial Sequence
  Description of Artificial Sequence: Synthetic oligonucleotide
ugcugauugacuauuugag

SEQ ID NO: 814717 - RNA, 19 nt, Artificial Sequence
  Description of Artificial Sequence: Synthetic oligonucleotide
acuauuugagggcugauug

SEQ ID NO: 814718 - RNA, 19 nt, Artificial Sequence
  Description of Artificial Sequence: Synthetic oligonucleotide
agagaugcaaaaccagagc

SEQ ID NO: 814719 - RNA, 19 nt, Artificial Sequence
  Description of Artificial Sequence: Synthetic oligonucleotide
gaggagugaagcuaaacag

SEQ ID NO: 814720 - RNA, 19 nt, Artificial Sequence
  Description of Artificial Sequence: Synthetic oligonucleotide
agugaagcuaaacaguuug

SEQ ID NO: 814721 - RNA, 19 nt, Artificial Sequence
  Description of Artificial Sequence: Synthetic oligonucleotide
augaucucaguuuugcacg

SEQ ID NO: 814722 - RNA, 19 nt, Artificial Sequence
  Description of Artificial Sequence: Synthetic oligonucleotide
aaaacccugauuccucgac

SEQ ID NO: 814723 - RNA, 19 nt, Artificial Sequence
  Description of Artificial Sequence: Synthetic oligonucleotide
uucgauauugcugaggagc

SEQ ID NO: 814724 - RNA, 19 nt, Artificial Sequence
  Description of Artificial Sequence: Synthetic oligonucleotide
aauuguucucguauggaac

SEQ ID NO: 814725 - RNA, 19 nt, Artificial Sequence
  Description of Artificial Sequence: Synthetic oligonucleotide
uauagcugcagcaucuugc

SEQ ID NO: 814726 - RNA, 19 nt, Artificial Sequence
  Description of Artificial Sequence: Synthetic oligonucleotide
uagacuagaaugucuauca

SEQ ID NO: 814727 - RNA, 19 nt, Artificial Sequence
  Description of Artificial Sequence: Synthetic oligonucleotide
agucauacaguguuguauc

SEQ ID NO: 814728 - RNA, 19 nt, Artificial Sequence
  Description of Artificial Sequence: Synthetic oligonucleotide
aaacccugauuccucgacc

SEQ ID NO: 814729 - RNA, 19 nt, Artificial Sequence
  Description of Artificial Sequence: Synthetic oligonucleotide
auagggaguuacuggaacc

SEQ ID NO: 814730 - RNA, 19 nt, Artificial Sequence
  Description of Artificial Sequence: Synthetic oligonucleotide
uggaaaauccucuuagaca

SEQ ID NO: 814731 - RNA, 19 nt, Artificial Sequence
  Description of Artificial Sequence: Synthetic oligonucleotide
uuuauccaaauuguucucg

SEQ ID NO: 814732 - RNA, 19 nt, Artificial Sequence
  Description of Artificial Sequence: Synthetic oligonucleotide
guaguuuccacuaaagagc

SEQ ID NO: 814733 - RNA, 19 nt, Artificial Sequence
  Description of Artificial Sequence: Synthetic oligonucleotide
uuugcuucaauauggcaca

SEQ ID NO: 814734 - RNA, 19 nt, Artificial Sequence
  Description of Artificial Sequence: Synthetic oligonucleotide
uauuguagcagagacuugc

SEQ ID NO: 814735 - RNA, 19 nt, Artificial Sequence
  Description of Artificial Sequence: Synthetic oligonucleotide
uuacuacugagcaauaauc

SEQ ID NO: 814736 - RNA, 19 nt, Artificial Sequence
  Description of Artificial Sequence: Synthetic oligonucleotide
cacugugaaaacuuacucg

SEQ ID NO: 814737 - RNA, 19 nt, Artificial Sequence
  Description of Artificial Sequence: Synthetic oligonucleotide
uuaacagaaugcaguuugg

SEQ ID NO: 814738 - RNA, 19 nt, Artificial Sequence
  Description of Artificial Sequence: Synthetic oligonucleotide
uucacuugaaaggagggag

SEQ ID NO: 814739 - RNA, 19 nt, Artificial Sequence
  Description of Artificial Sequence: Synthetic oligonucleotide
uuuugcacggauucgauau

SEQ ID NO: 814740 - RNA, 19 nt, Artificial Sequence
  Description of Artificial Sequence: Synthetic oligonucleotide
acuacugagcaauaaucag

SEQ ID NO: 814741 - RNA, 19 nt, Artificial Sequence
  Description of Artificial Sequence: Synthetic oligonucleotide
cuugaaaggagggagaaug

SEQ ID NO: 814742 - RNA, 19 nt, Artificial Sequence
  Description of Artificial Sequence: Synthetic oligonucleotide
ugauugacugccaaaucug

SEQ ID NO: 814743 - RNA, 19 nt, Artificial Sequence
  Description of Artificial Sequence: Synthetic oligonucleotide
uaaaguuccuucaaauguc

SEQ ID NO: 814744 - RNA, 19 nt, Artificial Sequence
  Description of Artificial Sequence: Synthetic oligonucleotide
gugaaaacuuacucgacag

SEQ ID NO: 814745 - RNA, 19 nt, Artificial Sequence
  Description of Artificial Sequence: Synthetic oligonucleotide
ugucagagaugcaaaacca

SEQ ID NO: 814746 - RNA, 19 nt, Artificial Sequence
  Description of Artificial Sequence: Synthetic oligonucleotide
ugugaaagcgaacaauguc

SEQ ID NO: 814747 - RNA, 19 nt, Artificial Sequence
  Description of Artificial Sequence: Synthetic oligonucleotide
uauggaggcggauuuugcg

SEQ ID NO: 814748 - RNA, 19 nt, Artificial Sequence
  Description of Artificial Sequence: Synthetic oligonucleotide
aaaugauuggaagggcuuc

SEQ ID NO: 814749 - RNA, 19 nt, Artificial Sequence
  Description of Artificial Sequence: Synthetic oligonucleotide
acuuucgagucauacagug

SEQ ID NO: 814750 - RNA, 19 nt, Artificial Sequence
  Description of Artificial Sequence: Synthetic oligonucleotide
ugcgacuugaacaugguua

SEQ ID NO: 814751 - RNA, 19 nt, Artificial Sequence
  Description of Artificial Sequence: Synthetic oligonucleotide
aaugauuggaagggcuucg

SEQ ID NO: 814752 - RNA, 19 nt, Artificial Sequence
  Description of Artificial Sequence: Synthetic oligonucleotide
uauguauagggaguuacug

SEQ ID NO: 814753 - RNA, 19 nt, Artificial Sequence
  Description of Artificial Sequence: Synthetic oligonucleotide
aaagcgaacaaugucucca

SEQ ID NO: 814754 - RNA, 19 nt, Artificial Sequence
  Description of Artificial Sequence: Synthetic oligonucleotide
cauaccuuuagaagaaaug

SEQ ID NO: 814755 - RNA, 19 nt, Artificial Sequence
  Description of Artificial Sequence: Synthetic oligonucleotide
aucugcaccuucuaaaucu

SEQ ID NO: 814756 - RNA, 19 nt, Artificial Sequence
  Description of Artificial Sequence: Synthetic oligonucleotide
ugauuccucgaccauagcu

SEQ ID NO: 814757 - RNA, 19 nt, Artificial Sequence
  Description of Artificial Sequence: Synthetic oligonucleotide
gauacugagccugauccgg

SEQ ID NO: 814758 - RNA, 19 nt, Artificial Sequence
  Description of Artificial Sequence: Synthetic oligonucleotide
uuucgagucauacaguguu

SEQ ID NO: 814759 - RNA, 19 nt, Artificial Sequence
  Description of Artificial Sequence: Synthetic oligonucleotide
aguauuguagcagagacuu

SEQ ID NO: 814760 - RNA, 19 nt, Artificial Sequence
  Description of Artificial Sequence: Synthetic oligonucleotide
ugaauggcagcacuagaug

SEQ ID NO: 814761 - RNA, 19 nt, Artificial Sequence
  Description of Artificial Sequence: Synthetic oligonucleotide
aagucuucugggcauauau

SEQ ID NO: 814762 - RNA, 19 nt, Artificial Sequence
  Description of Artificial Sequence: Synthetic oligonucleotide
uggaucuucagccugugaa

SEQ ID NO: 814763 - RNA, 19 nt, Artificial Sequence
  Description of Artificial Sequence: Synthetic oligonucleotide
ucauagacuagaaugucua

SEQ ID NO: 814764 - RNA, 19 nt, Artificial Sequence
  Description of Artificial Sequence: Synthetic oligonucleotide
accuucuuuaaguagauuu

SEQ ID NO: 814765 - RNA, 19 nt, Artificial Sequence
  Description of Artificial Sequence: Synthetic oligonucleotide
acaucgcucuaccucauac

SEQ ID NO: 814766 - RNA, 19 nt, Artificial Sequence
  Description of Artificial Sequence: Synthetic oligonucleotide
uuuccacuaaagagcaugc

SEQ ID NO: 814767 - RNA, 19 nt, Artificial Sequence
  Description of Artificial Sequence: Synthetic oligonucleotide
uauagggaguuacuggaac

SEQ ID NO: 814768 - RNA, 19 nt, Artificial Sequence
  Description of Artificial Sequence: Synthetic oligonucleotide
auagacuagaaugucuauc

SEQ ID NO: 814769 - RNA, 19 nt, Artificial Sequence
  Description of Artificial Sequence: Synthetic oligonucleotide
cauacaguguuguaucuug

SEQ ID NO: 814770 - RNA, 19 nt, Artificial Sequence
  Description of Artificial Sequence: Synthetic oligonucleotide
cauucacuugaaaggaggg

SEQ ID NO: 814771 - RNA, 19 nt, Artificial Sequence
  Description of Artificial Sequence: Synthetic oligonucleotide
uuacuggaaccaaagacau

SEQ ID NO: 814772 - RNA, 19 nt, Artificial Sequence
  Description of Artificial Sequence: Synthetic oligonucleotide
gaaaguucaaaguuguccu

SEQ ID NO: 814773 - RNA, 19 nt, Artificial Sequence
  Description of Artificial Sequence: Synthetic oligonucleotide
cugguaacaaauucuucgc

SEQ ID NO: 814774 - RNA, 19 nt, Artificial Sequence
  Description of Artificial Sequence: Synthetic oligonucleotide
cugauccggaguuugaaag

SEQ ID NO: 814775 - RNA, 19 nt, Artificial Sequence
  Description of Artificial Sequence: Synthetic oligonucleotide
uugcugauugacuauuuga

SEQ ID NO: 814776 - RNA, 19 nt, Artificial Sequence
  Description of Artificial Sequence: Synthetic oligonucleotide
gauuccucgaccauagcug

SEQ ID NO: 814777 - RNA, 19 nt, Artificial Sequence
  Description of Artificial Sequence: Synthetic oligonucleotide
aacagaaugcaguuuggua

SEQ ID NO: 814778 - RNA, 19 nt, Artificial Sequence
  Description of Artificial Sequence: Synthetic oligonucleotide
acucuggaggcguagaaug

SEQ ID NO: 814779 - RNA, 19 nt, Artificial Sequence
  Description of Artificial Sequence: Synthetic oligonucleotide
aaaugucagagaugcaaaa

SEQ ID NO: 814780 - RNA, 19 nt, Artificial Sequence
  Description of Artificial Sequence: Synthetic oligonucleotide
auuccucgaccauagcugg

SEQ ID NO: 814781 - RNA, 19 nt, Artificial Sequence
  Description of Artificial Sequence: Synthetic oligonucleotide
gacaauugcaccuucuuua

SEQ ID NO: 814782 - RNA, 19 nt, Artificial Sequence
  Description of Artificial Sequence: Synthetic oligonucleotide
uuauagacuuggaucuuca

SEQ ID NO: 814783 - RNA, 19 nt, Artificial Sequence
  Description of Artificial Sequence: Synthetic oligonucleotide
ucauacagugauacugagc

SEQ ID NO: 814784 - RNA, 19 nt, Artificial Sequence
  Description of Artificial Sequence: Synthetic oligonucleotide
caguguuguaucuugcagc

SEQ ID NO: 814785 - RNA, 19 nt, Artificial Sequence
  Description of Artificial Sequence: Synthetic oligonucleotide
aauucuucgcucuguucca

SEQ ID NO: 814786 - RNA, 19 nt, Artificial Sequence
  Description of Artificial Sequence: Synthetic oligonucleotide
agugauacugagccugauc

SEQ ID NO: 814787 - RNA, 19 nt, Artificial Sequence
  Description of Artificial Sequence: Synthetic oligonucleotide
augguuaucauagacuaga

SEQ ID NO: 814788 - RNA, 19 nt, Artificial Sequence
  Description of Artificial Sequence: Synthetic oligonucleotide
ucguaguuuccacuaaaga

SEQ ID NO: 814789 - RNA, 19 nt, Artificial Sequence
  Description of Artificial Sequence: Synthetic oligonucleotide
uguaaaugauuggaagggc

SEQ ID NO: 814790 - RNA, 19 nt, Artificial Sequence
  Description of Artificial Sequence: Synthetic oligonucleotide
ugaaagcgaacaaugucuc

SEQ ID NO: 814791 - RNA, 19 nt, Artificial Sequence
  Description of Artificial Sequence: Synthetic oligonucleotide
uugacugccaaaucugcac

SEQ ID NO: 814792 - RNA, 19 nt, Artificial Sequence
  Description of Artificial Sequence: Synthetic oligonucleotide
acauucacuugaaaggagg

SEQ ID NO: 814793 - RNA, 19 nt, Artificial Sequence
  Description of Artificial Sequence: Synthetic oligonucleotide
auagacauugacaauugca

SEQ ID NO: 814794 - RNA, 19 nt, Artificial Sequence
  Description of Artificial Sequence: Synthetic oligonucleotide
ucuucgcucuguuccaagg

SEQ ID NO: 814795 - RNA, 19 nt, Artificial Sequence
  Description of Artificial Sequence: Synthetic oligonucleotide
ucgauauugcugaggagcu

SEQ ID NO: 814796 - RNA, 19 nt, Artificial Sequence
  Description of Artificial Sequence: Synthetic oligonucleotide
aacccugauuccucgacca

SEQ ID NO: 814797 - RNA, 19 nt, Artificial Sequence
  Description of Artificial Sequence: Synthetic oligonucleotide
ugcuguuuggagcuauagc

SEQ ID NO: 814798 - RNA, 19 nt, Artificial Sequence
  Description of Artificial Sequence: Synthetic oligonucleotide
ucuugcagcuugcuguuug

SEQ ID NO: 814799 - RNA, 19 nt, Artificial Sequence
  Description of Artificial Sequence: Synthetic oligonucleotide
ugaagcuaaacaguuugcu

SEQ ID NO: 814800 - RNA, 19 nt, Artificial Sequence
  Description of Artificial Sequence: Synthetic oligonucleotide
ugacugccaaaucugcacc

SEQ ID NO: 814801 - RNA, 19 nt, Artificial Sequence
  Description of Artificial Sequence: Synthetic oligonucleotide
ugaaaacuuacucgacagu

SEQ ID NO: 814802 - RNA, 19 nt, Artificial Sequence
  Description of Artificial Sequence: Synthetic oligonucleotide
caggagucccuaaaguucc

SEQ ID NO: 814803 - RNA, 19 nt, Artificial Sequence
  Description of Artificial Sequence: Synthetic oligonucleotide
gacuugaacaugguuauca

SEQ ID NO: 814804 - RNA, 19 nt, Artificial Sequence
  Description of Artificial Sequence: Synthetic oligonucleotide
uguggaaaauccucuuaga

SEQ ID NO: 814805 - RNA, 19 nt, Artificial Sequence
  Description of Artificial Sequence: Synthetic oligonucleotide
uuauccaaauuguucucgu

SEQ ID NO: 814806 - RNA, 19 nt, Artificial Sequence
  Description of Artificial Sequence: Synthetic oligonucleotide
cguaguuuccacuaaagag

SEQ ID NO: 814807 - RNA, 19 nt, Artificial Sequence
  Description of Artificial Sequence: Synthetic oligonucleotide
gauuucagggguguguaug

SEQ ID NO: 814808 - RNA, 19 nt, Artificial Sequence
  Description of Artificial Sequence: Synthetic oligonucleotide
cacggauucgauauugcug

SEQ ID NO: 814809 - RNA, 19 nt, Artificial Sequence
  Description of Artificial Sequence: Synthetic oligonucleotide
ugguaacaaauucuucgcu

SEQ ID NO: 814810 - RNA, 19 nt, Artificial Sequence
  Description of Artificial Sequence: Synthetic oligonucleotide
uaacaaauucuucgcucug

SEQ ID NO: 814811 - RNA, 19 nt, Artificial Sequence
  Description of Artificial Sequence: Synthetic oligonucleotide
ugacaggagucccuaaagu

SEQ ID NO: 814812 - RNA, 19 nt, Artificial Sequence
  Description of Artificial Sequence: Synthetic oligonucleotide
accaaagacauuccuucug

SEQ ID NO: 814813 - RNA, 19 nt, Artificial Sequence
  Description of Artificial Sequence: Synthetic oligonucleotide
gagaugcaaaaccagagcu

SEQ ID NO: 814814 - RNA, 19 nt, Artificial Sequence
  Description of Artificial Sequence: Synthetic oligonucleotide
cuucugggcauauaugauc

SEQ ID NO: 814815 - RNA, 19 nt, Artificial Sequence
  Description of Artificial Sequence: Synthetic oligonucleotide
gcugauugacuauuugagg

SEQ ID NO: 814816 - RNA, 19 nt, Artificial Sequence
  Description of Artificial Sequence: Synthetic oligonucleotide
agccuuaacaaugaacugu

SEQ ID NO: 814817 - RNA, 19 nt, Artificial Sequence
  Description of Artificial Sequence: Synthetic oligonucleotide
agcauagacauugacaauu

SEQ ID NO: 814818 - RNA, 19 nt, Artificial Sequence
  Description of Artificial Sequence: Synthetic oligonucleotide
guuugcuugacguccgcgc

SEQ ID NO: 814819 - RNA, 19 nt, Artificial Sequence
  Description of Artificial Sequence: Synthetic oligonucleotide
gauugacugccaaaucugc

SEQ ID NO: 814820 - RNA, 19 nt, Artificial Sequence
  Description of Artificial Sequence: Synthetic oligonucleotide
gaaagcgaacaaugucucc

SEQ ID NO: 814821 - RNA, 19 nt, Artificial Sequence
  Description of Artificial Sequence: Synthetic oligonucleotide
uugacguccgcgcugugac

SEQ ID NO: 814822 - RNA, 19 nt, Artificial Sequence
  Description of Artificial Sequence: Synthetic oligonucleotide
ugugacaggagucccuaaa

SEQ ID NO: 814823 - RNA, 19 nt, Artificial Sequence
  Description of Artificial Sequence: Synthetic oligonucleotide
cagaaugcaguuugguaug

SEQ ID NO: 814824 - RNA, 19 nt, Artificial Sequence
  Description of Artificial Sequence: Synthetic oligonucleotide
ugaacaugguuaucauaga

SEQ ID NO: 814825 - RNA, 19 nt, Artificial Sequence
  Description of Artificial Sequence: Synthetic oligonucleotide
agagcuguugauucccuga

SEQ ID NO: 814826 - RNA, 19 nt, Artificial Sequence
  Description of Artificial Sequence: Synthetic oligonucleotide
agggcuucguaguuuccac

SEQ ID NO: 814827 - RNA, 19 nt, Artificial Sequence
  Description of Artificial Sequence: Synthetic oligonucleotide
uugcaccuucuuuaaguag

SEQ ID NO: 814828 - RNA, 19 nt, Artificial Sequence
  Description of Artificial Sequence: Synthetic oligonucleotide
agucccuaaaguuccuuca

SEQ ID NO: 814829 - RNA, 19 nt, Artificial Sequence
  Description of Artificial Sequence: Synthetic oligonucleotide
cauagacauugacaauugc

SEQ ID NO: 814830 - RNA, 19 nt, Artificial Sequence
  Description of Artificial Sequence: Synthetic oligonucleotide
gguaacaaauucuucgcuc

SEQ ID NO: 814831 - RNA, 19 nt, Artificial Sequence
  Description of Artificial Sequence: Synthetic oligonucleotide
uucgagucauacaguguug

SEQ ID NO: 814832 - RNA, 19 nt, Artificial Sequence
  Description of Artificial Sequence: Synthetic oligonucleotide
uucgcucuguuccaagggu

SEQ ID NO: 814833 - RNA, 19 nt, Artificial Sequence
  Description of Artificial Sequence: Synthetic oligonucleotide
gugacaggagucccuaaag

SEQ ID NO: 814834 - RNA, 19 nt, Artificial Sequence
  Description of Artificial Sequence: Synthetic oligonucleotide
ugauccggaguuugaaagu

SEQ ID NO: 814835 - RNA, 19 nt, Artificial Sequence
  Description of Artificial Sequence: Synthetic oligonucleotide
ucuucugggcauauaugau

SEQ ID NO: 814836 - RNA, 19 nt, Artificial Sequence
  Description of Artificial Sequence: Synthetic oligonucleotide
cuucgcucuguuccaaggg

SEQ ID NO: 814837 - RNA, 19 nt, Artificial Sequence
  Description of Artificial Sequence: Synthetic oligonucleotide
gacuuggaucuucagccug

SEQ ID NO: 814838 - RNA, 19 nt, Artificial Sequence
  Description of Artificial Sequence: Synthetic oligonucleotide
caugguuaucauagacuag

SEQ ID NO: 814839 - RNA, 19 nt, Artificial Sequence
  Description of Artificial Sequence: Synthetic oligonucleotide
aaguagauuucaggggugu

SEQ ID NO: 814840 - RNA, 19 nt, Artificial Sequence
  Description of Artificial Sequence: Synthetic oligonucleotide
uugacaauugcaccuucuu

SEQ ID NO: 814841 - RNA, 19 nt, Artificial Sequence
  Description of Artificial Sequence: Synthetic oligonucleotide
ugcaccuucuaaaucuuuu

SEQ ID NO: 814842 - RNA, 19 nt, Artificial Sequence
  Description of Artificial Sequence: Synthetic oligonucleotide
aagggugacaguguaggau

SEQ ID NO: 814843 - RNA, 19 nt, Artificial Sequence
  Description of Artificial Sequence: Synthetic oligonucleotide
ugagggcugauugacugcc

SEQ ID NO: 814844 - RNA, 19 nt, Artificial Sequence
  Description of Artificial Sequence: Synthetic oligonucleotide
uugguauggaggcggauuu

SEQ ID NO: 814845 - RNA, 19 nt, Artificial Sequence
  Description of Artificial Sequence: Synthetic oligonucleotide
cucauuugcugauugacua

SEQ ID NO: 814846 - RNA, 19 nt, Artificial Sequence
  Description of Artificial Sequence: Synthetic oligonucleotide
aaguauuguagcagagacu

SEQ ID NO: 814847 - RNA, 19 nt, Artificial Sequence
  Description of Artificial Sequence: Synthetic oligonucleotide
ugcacggauucgauauugc

SEQ ID NO: 814848 - RNA, 19 nt, Artificial Sequence
  Description of Artificial Sequence: Synthetic oligonucleotide
uugacuauuugagggcuga

SEQ ID NO: 814849 - RNA, 19 nt, Artificial Sequence
  Description of Artificial Sequence: Synthetic oligonucleotide
cuugcagcuugcuguuugg

SEQ ID NO: 814850 - RNA, 19 nt, Artificial Sequence
  Description of Artificial Sequence: Synthetic oligonucleotide
ucguccugaggagugaagc

SEQ ID NO: 814851 - RNA, 19 nt, Artificial Sequence
  Description of Artificial Sequence: Synthetic oligonucleotide
gaugcaaaaccagagcugu

SEQ ID NO: 814852 - RNA, 19 nt, Artificial Sequence
  Description of Artificial Sequence: Synthetic oligonucleotide
uagggaguuacuggaacca

SEQ ID NO: 814853 - RNA, 19 nt, Artificial Sequence
  Description of Artificial Sequence: Synthetic oligonucleotide
uccugaggagugaagcuaa

SEQ ID NO: 814854 - RNA, 19 nt, Artificial Sequence
  Description of Artificial Sequence: Synthetic oligonucleotide
uuugcgacuugaacauggu

SEQ ID NO: 814855 - RNA, 19 nt, Artificial Sequence
  Description of Artificial Sequence: Synthetic oligonucleotide
uguugucuucugcaacugu

SEQ ID NO: 814856 - RNA, 19 nt, Artificial Sequence
  Description of Artificial Sequence: Synthetic oligonucleotide
ccaaauuguucucguaugg

SEQ ID NO: 814857 - RNA, 19 nt, Artificial Sequence
  Description of Artificial Sequence: Synthetic oligonucleotide
ccacacaagagcuaguuuc

SEQ ID NO: 814858 - RNA, 19 nt, Artificial Sequence
  Description of Artificial Sequence: Synthetic oligonucleotide
ucgcucuguuccaagggug

SEQ ID NO: 814859 - RNA, 19 nt, Artificial Sequence
  Description of Artificial Sequence: Synthetic oligonucleotide
aagcgaacaaugucuccaa

SEQ ID NO: 814860 - RNA, 19 nt, Artificial Sequence
  Description of Artificial Sequence: Synthetic oligonucleotide
ugguuaucauagacuagaa

SEQ ID NO: 814861 - RNA, 19 nt, Artificial Sequence
  Description of Artificial Sequence: Synthetic oligonucleotide
uaacagaaugcaguuuggu

SEQ ID NO: 814862 - RNA, 19 nt, Artificial Sequence
  Description of Artificial Sequence: Synthetic oligonucleotide
uugaaaguucaaaguuguc

SEQ ID NO: 814863 - RNA, 19 nt, Artificial Sequence
  Description of Artificial Sequence: Synthetic oligonucleotide
uucagccugugaaagcgaa

SEQ ID NO: 814864 - RNA, 19 nt, Artificial Sequence
  Description of Artificial Sequence: Synthetic oligonucleotide
ucauuugcugauugacuau

SEQ ID NO: 814865 - RNA, 19 nt, Artificial Sequence
  Description of Artificial Sequence: Synthetic oligonucleotide
cugacaucgcucuaccuca

SEQ ID NO: 814866 - RNA, 19 nt, Artificial Sequence
  Description of Artificial Sequence: Synthetic oligonucleotide
ccuaaaguuccuucaaaug

SEQ ID NO: 814867 - RNA, 19 nt, Artificial Sequence
  Description of Artificial Sequence: Synthetic oligonucleotide
uguuacuacugagcaauaa

SEQ ID NO: 814868 - RNA, 19 nt, Artificial Sequence
  Description of Artificial Sequence: Synthetic oligonucleotide
agaugcaaaaccagagcug

SEQ ID NO: 814869 - RNA, 19 nt, Artificial Sequence
  Description of Artificial Sequence: Synthetic oligonucleotide
agaaugcaguuugguaugg

SEQ ID NO: 814870 - RNA, 19 nt, Artificial Sequence
  Description of Artificial Sequence: Synthetic oligonucleotide
caaagacauuccuucugug

SEQ ID NO: 814871 - RNA, 19 nt, Artificial Sequence
  Description of Artificial Sequence: Synthetic oligonucleotide
aagggcuucguaguuucca

SEQ ID NO: 814872 - RNA, 19 nt, Artificial Sequence
  Description of Artificial Sequence: Synthetic oligonucleotide
uggaggcggauuuugcgac

SEQ ID NO: 814873 - RNA, 19 nt, Artificial Sequence
  Description of Artificial Sequence: Synthetic oligonucleotide
uugcuguuuggagcuauag

SEQ ID NO: 814874 - RNA, 19 nt, Artificial Sequence
  Description of Artificial Sequence: Synthetic oligonucleotide
ucgagucauacaguguugu

SEQ ID NO: 814875 - RNA, 19 nt, Artificial Sequence
  Description of Artificial Sequence: Synthetic oligonucleotide
gugaaagcgaacaaugucu

SEQ ID NO: 814876 - RNA, 19 nt, Artificial Sequence
  Description of Artificial Sequence: Synthetic oligonucleotide
ggaguuacuggaaccaaag

SEQ ID NO: 814877 - RNA, 19 nt, Artificial Sequence
  Description of Artificial Sequence: Synthetic oligonucleotide
gcaaaacccugauuccucg

SEQ ID NO: 814878 - RNA, 19 nt, Artificial Sequence
  Description of Artificial Sequence: Synthetic oligonucleotide
uuugguauggaggcggauu

SEQ ID NO: 814879 - RNA, 19 nt, Artificial Sequence
  Description of Artificial Sequence: Synthetic oligonucleotide
ucuaccucauacagugaua

SEQ ID NO: 814880 - RNA, 19 nt, Artificial Sequence
  Description of Artificial Sequence: Synthetic oligonucleotide
aggagugaagcuaaacagu

SEQ ID NO: 814881 - RNA, 19 nt, Artificial Sequence
  Description of Artificial Sequence: Synthetic oligonucleotide
agacuugcugacaucgcuc

SEQ ID NO: 814882 - RNA, 19 nt, Artificial Sequence
  Description of Artificial Sequence: Synthetic oligonucleotide
aaguuccuucaaaugucag

SEQ ID NO: 814883 - RNA, 19 nt, Artificial Sequence
  Description of Artificial Sequence: Synthetic oligonucleotide
uugagggcugauugacugc

SEQ ID NO: 814884 - RNA, 19 nt, Artificial Sequence
  Description of Artificial Sequence: Synthetic oligonucleotide
cuggaaccaaagacauucc

SEQ ID NO: 814885 - RNA, 19 nt, Artificial Sequence
  Description of Artificial Sequence: Synthetic oligonucleotide
uucaaaugucagagaugca

SEQ ID NO: 814886 - RNA, 19 nt, Artificial Sequence
  Description of Artificial Sequence: Synthetic oligonucleotide
cugauugacugccaaaucu

SEQ ID NO: 814887 - RNA, 19 nt, Artificial Sequence
  Description of Artificial Sequence: Synthetic oligonucleotide
gaguuacuggaaccaaaga

SEQ ID NO: 814888 - RNA, 19 nt, Artificial Sequence
  Description of Artificial Sequence: Synthetic oligonucleotide
gaaaggagggagaauguua

SEQ ID NO: 814889 - RNA, 19 nt, Artificial Sequence
  Description of Artificial Sequence: Synthetic oligonucleotide
aucugguaacaaauucuuc

SEQ ID NO: 814890 - RNA, 19 nt, Artificial Sequence
  Description of Artificial Sequence: Synthetic oligonucleotide
auucacuugaaaggaggga

SEQ ID NO: 814891 - RNA, 19 nt, Artificial Sequence
  Description of Artificial Sequence: Synthetic oligonucleotide
agagcuaguuucuggcaaa

SEQ ID NO: 814892 - RNA, 19 nt, Artificial Sequence
  Description of Artificial Sequence: Synthetic oligonucleotide
uauccaaauuguucucgua

SEQ ID NO: 814893 - RNA, 19 nt, Artificial Sequence
  Description of Artificial Sequence: Synthetic oligonucleotide
gacguccgcgcugugacag

SEQ ID NO: 814894 - RNA, 19 nt, Artificial Sequence
  Description of Artificial Sequence: Synthetic oligonucleotide
cuacugagcaauaaucagu

SEQ ID NO: 814895 - RNA, 19 nt, Artificial Sequence
  Description of Artificial Sequence: Synthetic oligonucleotide
cccuccauggagaugaaac

SEQ ID NO: 814896 - RNA, 19 nt, Artificial Sequence
  Description of Artificial Sequence: Synthetic oligonucleotide
cacugcacugaauggcagc

SEQ ID NO: 814897 - RNA, 19 nt, Artificial Sequence
  Description of Artificial Sequence: Synthetic oligonucleotide
agacuuggaucuucagccu

SEQ ID NO: 814898 - RNA, 19 nt, Artificial Sequence
  Description of Artificial Sequence: Synthetic oligonucleotide
uagauuucaggggugugua

SEQ ID NO: 814899 - RNA, 19 nt, Artificial Sequence
  Description of Artificial Sequence: Synthetic oligonucleotide
acaguuugcuugacguccg

SEQ ID NO: 814900 - RNA, 19 nt, Artificial Sequence
  Description of Artificial Sequence: Synthetic oligonucleotide
acugcacugaauggcagca

SEQ ID NO: 814901 - RNA, 19 nt, Artificial Sequence
  Description of Artificial Sequence: Synthetic oligonucleotide
cuauagcugcagcaucuug

SEQ ID NO: 814902 - RNA, 19 nt, Artificial Sequence
  Description of Artificial Sequence: Synthetic oligonucleotide
ugaaaggagggagaauguu

SEQ ID NO: 814903 - RNA, 19 nt, Artificial Sequence
  Description of Artificial Sequence: Synthetic oligonucleotide
agcuaguuucuggcaaaac

SEQ ID NO: 814904 - RNA, 19 nt, Artificial Sequence
  Description of Artificial Sequence: Synthetic oligonucleotide
cacugaauggcagcacuag

SEQ ID NO: 814905 - RNA, 19 nt, Artificial Sequence
  Description of Artificial Sequence: Synthetic oligonucleotide
uucaguggaccagacuuuc

SEQ ID NO: 814906 - RNA, 19 nt, Artificial Sequence
  Description of Artificial Sequence: Synthetic oligonucleotide
ugauuggaagggcuucgua

SEQ ID NO: 814907 - RNA, 19 nt, Artificial Sequence
  Description of Artificial Sequence: Synthetic oligonucleotide
agacauuccuucuguggaa

SEQ ID NO: 814908 - RNA, 19 nt, Artificial Sequence
  Description of Artificial Sequence: Synthetic oligonucleotide
gagcuauagcugcagcauc

SEQ ID NO: 814909 - RNA, 19 nt, Artificial Sequence
  Description of Artificial Sequence: Synthetic oligonucleotide
cauauaugaucucaguuuu

SEQ ID NO: 814910 - RNA, 19 nt, Artificial Sequence
  Description of Artificial Sequence: Synthetic oligonucleotide
gugaagcuaaacaguuugc

SEQ ID NO: 814911 - RNA, 19 nt, Artificial Sequence
  Description of Artificial Sequence: Synthetic oligonucleotide
ucagccugugaaagcgaac

SEQ ID NO: 814912 - RNA, 19 nt, Artificial Sequence
  Description of Artificial Sequence: Synthetic oligonucleotide
guaaaugauuggaagggcu

SEQ ID NO: 814913 - RNA, 19 nt, Artificial Sequence
  Description of Artificial Sequence: Synthetic oligonucleotide
gauugacuauuugagggcu

SEQ ID NO: 814914 - RNA, 19 nt, Artificial Sequence
  Description of Artificial Sequence: Synthetic oligonucleotide
uccgcgcugugacaggagu

SEQ ID NO: 814915 - RNA, 19 nt, Artificial Sequence
  Description of Artificial Sequence: Synthetic oligonucleotide
auugacugccaaaucugca

SEQ ID NO: 814916 - RNA, 19 nt, Artificial Sequence
  Description of Artificial Sequence: Synthetic oligonucleotide
aaaagucuucugggcauau

SEQ ID NO: 814917 - RNA, 19 nt, Artificial Sequence
  Description of Artificial Sequence: Synthetic oligonucleotide
cgcucuaccucauacagug

SEQ ID NO: 814918 - RNA, 19 nt, Artificial Sequence
  Description of Artificial Sequence: Synthetic oligonucleotide
uguucucguauggaacuuc

SEQ ID NO: 814919 - RNA, 19 nt, Artificial Sequence
  Description of Artificial Sequence: Synthetic oligonucleotide
ucgcucuaccucauacagu

SEQ ID NO: 814920 - RNA, 19 nt, Artificial Sequence
  Description of Artificial Sequence: Synthetic oligonucleotide
gacaggagucccuaaaguu

SEQ ID NO: 814921 - RNA, 19 nt, Artificial Sequence
  Description of Artificial Sequence: Synthetic oligonucleotide
caaauuguucucguaugga

SEQ ID NO: 814922 - RNA, 19 nt, Artificial Sequence
  Description of Artificial Sequence: Synthetic oligonucleotide
ucauacaguguuguaucuu

SEQ ID NO: 814923 - RNA, 19 nt, Artificial Sequence
  Description of Artificial Sequence: Synthetic oligonucleotide
uuugcacggauucgauauu

SEQ ID NO: 814924 - RNA, 19 nt, Artificial Sequence
  Description of Artificial Sequence: Synthetic oligonucleotide
guuguaucuugcagcuugc

SEQ ID NO: 814925 - RNA, 19 nt, Artificial Sequence
  Description of Artificial Sequence: Synthetic oligonucleotide
aguagauuucaggggugug

SEQ ID NO: 814926 - RNA, 19 nt, Artificial Sequence
  Description of Artificial Sequence: Synthetic oligonucleotide
agucuucugggcauauaug

SEQ ID NO: 814927 - RNA, 19 nt, Artificial Sequence
  Description of Artificial Sequence: Synthetic oligonucleotide
caagagcuaguuucuggca

SEQ ID NO: 814928 - RNA, 19 nt, Artificial Sequence
  Description of Artificial Sequence: Synthetic oligonucleotide
cuugaacaugguuaucaua

SEQ ID NO: 814929 - RNA, 19 nt, Artificial Sequence
  Description of Artificial Sequence: Synthetic oligonucleotide
cacacugugaaaacuuacu

SEQ ID NO: 814930 - RNA, 19 nt, Artificial Sequence
  Description of Artificial Sequence: Synthetic oligonucleotide
cauugacaauugcaccuuc

SEQ ID NO: 814931 - RNA, 19 nt, Artificial Sequence
  Description of Artificial Sequence: Synthetic oligonucleotide
gcauauaugaucucaguuu

SEQ ID NO: 814932 - RNA, 19 nt, Artificial Sequence
  Description of Artificial Sequence: Synthetic oligonucleotide
gagucauacaguguuguau

SEQ ID NO: 814933 - RNA, 19 nt, Artificial Sequence
  Description of Artificial Sequence: Synthetic oligonucleotide
cuucuguggaaaauccucu

SEQ ID NO: 814934 - RNA, 19 nt, Artificial Sequence
  Description of Artificial Sequence: Synthetic oligonucleotide
auugacuauuugagggcug

SEQ ID NO: 814935 - RNA, 19 nt, Artificial Sequence
  Description of Artificial Sequence: Synthetic oligonucleotide
cugggcauauaugaucuca

SEQ ID NO: 814936 - RNA, 19 nt, Artificial Sequence
  Description of Artificial Sequence: Synthetic oligonucleotide
uggaugcccaaacccgcaa

SEQ ID NO: 814937 - RNA, 19 nt, Artificial Sequence
  Description of Artificial Sequence: Synthetic oligonucleotide
cagccugugaaagcgaaca

SEQ ID NO: 814938 - RNA, 19 nt, Artificial Sequence
  Description of Artificial Sequence: Synthetic oligonucleotide
uugcgacuugaacaugguu

SEQ ID NO: 814939 - RNA, 19 nt, Artificial Sequence
  Description of Artificial Sequence: Synthetic oligonucleotide
caguggaccagacuuucga

SEQ ID NO: 814940 - RNA, 19 nt, Artificial Sequence
  Description of Artificial Sequence: Synthetic oligonucleotide
auuugagggcugauugacu

SEQ ID NO: 814941 - RNA, 19 nt, Artificial Sequence
  Description of Artificial Sequence: Synthetic oligonucleotide
caucgcucuaccucauaca

SEQ ID NO: 814942 - RNA, 19 nt, Artificial Sequence
  Description of Artificial Sequence: Synthetic oligonucleotide
acuuggaucuucagccugu

SEQ ID NO: 814943 - RNA, 19 nt, Artificial Sequence
  Description of Artificial Sequence: Synthetic oligonucleotide
ugcuugacguccgcgcugu

SEQ ID NO: 814944 - RNA, 19 nt, Artificial Sequence
  Description of Artificial Sequence: Synthetic oligonucleotide
gacauuccuucuguggaaa

SEQ ID NO: 814945 - RNA, 19 nt, Artificial Sequence
  Description of Artificial Sequence: Synthetic oligonucleotide
guagauuucaggggugugu

SEQ ID NO: 814946 - RNA, 19 nt, Artificial Sequence
  Description of Artificial Sequence: Synthetic oligonucleotide
uuccucgaccauagcuggu

SEQ ID NO: 814947 - RNA, 19 nt, Artificial Sequence
  Description of Artificial Sequence: Synthetic oligonucleotide
cuguugauucccugaagcu

SEQ ID NO: 814948 - RNA, 19 nt, Artificial Sequence
  Description of Artificial Sequence: Synthetic oligonucleotide
guauuguagcagagacuug

SEQ ID NO: 814949 - RNA, 19 nt, Artificial Sequence
  Description of Artificial Sequence: Synthetic oligonucleotide
ccucauacagugauacuga

SEQ ID NO: 814950 - RNA, 19 nt, Artificial Sequence
  Description of Artificial Sequence: Synthetic oligonucleotide
augauuggaagggcuucgu

SEQ ID NO: 814951 - RNA, 19 nt, Artificial Sequence
  Description of Artificial Sequence: Synthetic oligonucleotide
agccugugaaagcgaacaa

SEQ ID NO: 814952 - RNA, 19 nt, Artificial Sequence
  Description of Artificial Sequence: Synthetic oligonucleotide
guggaccagacuuucgagu

SEQ ID NO: 814953 - RNA, 19 nt, Artificial Sequence
  Description of Artificial Sequence: Synthetic oligonucleotide
aucacacugugaaaacuua

SEQ ID NO: 814954 - RNA, 19 nt, Artificial Sequence
  Description of Artificial Sequence: Synthetic oligonucleotide
caaaacccugauuccucga

SEQ ID NO: 814955 - RNA, 19 nt, Artificial Sequence
  Description of Artificial Sequence: Synthetic oligonucleotide
ugacaucgcucuaccucau

SEQ ID NO: 814956 - RNA, 19 nt, Artificial Sequence
  Description of Artificial Sequence: Synthetic oligonucleotide
ggcauauaugaucucaguu

SEQ ID NO: 814957 - RNA, 19 nt, Artificial Sequence
  Description of Artificial Sequence: Synthetic oligonucleotide
cugauuccucgaccauagc

SEQ ID NO: 814958 - RNA, 19 nt, Artificial Sequence
  Description of Artificial Sequence: Synthetic oligonucleotide
ccagacuuucgagucauac

SEQ ID NO: 814959 - RNA, 19 nt, Artificial Sequence
  Description of Artificial Sequence: Synthetic oligonucleotide
gcugauugacugccaaauc

SEQ ID NO: 814960 - RNA, 19 nt, Artificial Sequence
  Description of Artificial Sequence: Synthetic oligonucleotide
auuugcugauugacuauuu

SEQ ID NO: 814961 - RNA, 19 nt, Artificial Sequence
  Description of Artificial Sequence: Synthetic oligonucleotide
uuguucucguauggaacuu

SEQ ID NO: 814962 - RNA, 19 nt, Artificial Sequence
  Description of Artificial Sequence: Synthetic oligonucleotide
caguuugcuugacguccgc

SEQ ID NO: 814963 - RNA, 19 nt, Artificial Sequence
  Description of Artificial Sequence: Synthetic oligonucleotide
cuuucgagucauacagugu

SEQ ID NO: 814964 - RNA, 19 nt, Artificial Sequence
  Description of Artificial Sequence: Synthetic oligonucleotide
guauagggaguuacuggaa

SEQ ID NO: 814965 - RNA, 19 nt, Artificial Sequence
  Description of Artificial Sequence: Synthetic oligonucleotide
guauguauagggaguuacu

SEQ ID NO: 814966 - RNA, 19 nt, Artificial Sequence
  Description of Artificial Sequence: Synthetic oligonucleotide
cuucagccugugaaagcga

SEQ ID NO: 814967 - RNA, 19 nt, Artificial Sequence
  Description of Artificial Sequence: Synthetic oligonucleotide
cacuugaaaggagggagaa

SEQ ID NO: 814968 - RNA, 19 nt, Artificial Sequence
  Description of Artificial Sequence: Synthetic oligonucleotide
ugacguccgcgcugugaca

SEQ ID NO: 814969 - RNA, 19 nt, Artificial Sequence
  Description of Artificial Sequence: Synthetic oligonucleotide
gcgaacaaugucuccaacu

SEQ ID NO: 814970 - RNA, 19 nt, Artificial Sequence
  Description of Artificial Sequence: Synthetic oligonucleotide
acguccgcgcugugacagg

SEQ ID NO: 814971 - RNA, 19 nt, Artificial Sequence
  Description of Artificial Sequence: Synthetic oligonucleotide
ggcaaaacccugauuccuc

SEQ ID NO: 814972 - RNA, 19 nt, Artificial Sequence
  Description of Artificial Sequence: Synthetic oligonucleotide
gauccggaguuugaaaguu

SEQ ID NO: 814973 - RNA, 19 nt, Artificial Sequence
  Description of Artificial Sequence: Synthetic oligonucleotide
accugccguccuccuuggc

SEQ ID NO: 814974 - RNA, 19 nt, Artificial Sequence
  Description of Artificial Sequence: Synthetic oligonucleotide
ugacuauuugagggcugau

SEQ ID NO: 814975 - RNA, 19 nt, Artificial Sequence
  Description of Artificial Sequence: Synthetic oligonucleotide
gguuaucauagacuagaau

SEQ ID NO: 814976 - RNA, 19 nt, Artificial Sequence
  Description of Artificial Sequence: Synthetic oligonucleotide
agggaguuacuggaaccaa

SEQ ID NO: 814977 - RNA, 19 nt, Artificial Sequence
  Description of Artificial Sequence: Synthetic oligonucleotide
ccaucccauaccuuuagaa

SEQ ID NO: 814978 - RNA, 19 nt, Artificial Sequence
  Description of Artificial Sequence: Synthetic oligonucleotide
cuugacguccgcgcuguga

SEQ ID NO: 814979 - RNA, 19 nt, Artificial Sequence
  Description of Artificial Sequence: Synthetic oligonucleotide
aggcggauuuugcgacuug

SEQ ID NO: 814980 - RNA, 19 nt, Artificial Sequence
  Description of Artificial Sequence: Synthetic oligonucleotide
caccugccguccuccuugg

SEQ ID NO: 814981 - RNA, 19 nt, Artificial Sequence
  Description of Artificial Sequence: Synthetic oligonucleotide
cauagacuagaaugucuau

SEQ ID NO: 814982 - RNA, 19 nt, Artificial Sequence
  Description of Artificial Sequence: Synthetic oligonucleotide
gagcuaguuucuggcaaaa

SEQ ID NO: 814983 - RNA, 19 nt, Artificial Sequence
  Description of Artificial Sequence: Synthetic oligonucleotide
cuguuggugucuguauuaa

SEQ ID NO: 814984 - RNA, 19 nt, Artificial Sequence
  Description of Artificial Sequence: Synthetic oligonucleotide
guucucguauggaacuucu

SEQ ID NO: 814985 - RNA, 19 nt, Artificial Sequence
  Description of Artificial Sequence: Synthetic oligonucleotide
gacuuucgagucauacagu

SEQ ID NO: 814986 - RNA, 19 nt, Artificial Sequence
  Description of Artificial Sequence: Synthetic oligonucleotide
acccugauuccucgaccau

SEQ ID NO: 814987 - RNA, 19 nt, Artificial Sequence
  Description of Artificial Sequence: Synthetic oligonucleotide
ugagccugauccggaguuu

SEQ ID NO: 814988 - RNA, 19 nt, Artificial Sequence
  Description of Artificial Sequence: Synthetic oligonucleotide
caaugaacuguuggugucu

SEQ ID NO: 814989 - RNA, 19 nt, Artificial Sequence
  Description of Artificial Sequence: Synthetic oligonucleotide
ugguauggaggcggauuuu

SEQ ID NO: 814990 - RNA, 19 nt, Artificial Sequence
  Description of Artificial Sequence: Synthetic oligonucleotide
cuugcuguuuggagcuaua

SEQ ID NO: 814991 - RNA, 19 nt, Artificial Sequence
  Description of Artificial Sequence: Synthetic oligonucleotide
gacaucgcucuaccucaua

SEQ ID NO: 814992 - RNA, 19 nt, Artificial Sequence
  Description of Artificial Sequence: Synthetic oligonucleotide
auauugcugaggagcuuuu

SEQ ID NO: 814993 - RNA, 19 nt, Artificial Sequence
  Description of Artificial Sequence: Synthetic oligonucleotide
gaccagacuuucgagucau

SEQ ID NO: 814994 - RNA, 19 nt, Artificial Sequence
  Description of Artificial Sequence: Synthetic oligonucleotide
gacucuggaggcguagaau

SEQ ID NO: 814995 - RNA, 19 nt, Artificial Sequence
  Description of Artificial Sequence: Synthetic oligonucleotide
ggagcuauagcugcagcau

SEQ ID NO: 814996 - RNA, 19 nt, Artificial Sequence
  Description of Artificial Sequence: Synthetic oligonucleotide
cauuugcugauugacuauu

SEQ ID NO: 814997 - RNA, 19 nt, Artificial Sequence
  Description of Artificial Sequence: Synthetic oligonucleotide
ucccuccauggagaugaaa

SEQ ID NO: 814998 - RNA, 19 nt, Artificial Sequence
  Description of Artificial Sequence: Synthetic oligonucleotide
ggcugauugacugccaaau

SEQ ID NO: 814999 - RNA, 19 nt, Artificial Sequence
  Description of Artificial Sequence: Synthetic oligonucleotide
cccaaacccgcaaggcuuc

SEQ ID NO: 815000 - RNA, 19 nt, Artificial Sequence
  Description of Artificial Sequence: Synthetic oligonucleotide
gggcauauaugaucucagu

SEQ ID NO: 815001 - RNA, 19 nt, Artificial Sequence
  Description of Artificial Sequence: Synthetic oligonucleotide
gcacggauucgauauugcu

SEQ ID NO: 815002 - RNA, 19 nt, Artificial Sequence
  Description of Artificial Sequence: Synthetic oligonucleotide
gagugaagcuaaacaguuu

SEQ ID NO: 815003 - RNA, 19 nt, Artificial Sequence
  Description of Artificial Sequence: Synthetic oligonucleotide
gggaguuacuggaaccaaa

SEQ ID NO: 815004 - RNA, 19 nt, Artificial Sequence
  Description of Artificial Sequence: Synthetic oligonucleotide
guguauguauagggaguua

SEQ ID NO: 815005 - RNA, 19 nt, Artificial Sequence
  Description of Artificial Sequence: Synthetic oligonucleotide
agccugauccggaguuuga

SEQ ID NO: 815006 - RNA, 19 nt, Artificial Sequence
  Description of Artificial Sequence: Synthetic oligonucleotide
aggagucccuaaaguuccu

SEQ ID NO: 815007 - RNA, 19 nt, Artificial Sequence
  Description of Artificial Sequence: Synthetic oligonucleotide
cccuaaaguuccuucaaau

SEQ ID NO: 815008 - RNA, 19 nt, Artificial Sequence
  Description of Artificial Sequence: Synthetic oligonucleotide
ccuccauggagaugaaacu

SEQ ID NO: 815009 - RNA, 19 nt, Artificial Sequence
  Description of Artificial Sequence: Synthetic oligonucleotide
gccuuaacaaugaacuguu

SEQ ID NO: 815010 - RNA, 19 nt, Artificial Sequence
  Description of Artificial Sequence: Synthetic oligonucleotide
augcaaaaccagagcuguu

SEQ ID NO: 815011 - RNA, 19 nt, Artificial Sequence
  Description of Artificial Sequence: Synthetic oligonucleotide
cugugacaggagucccuaa

SEQ ID NO: 815012 - RNA, 19 nt, Artificial Sequence
  Description of Artificial Sequence: Synthetic oligonucleotide
gggcugauugacugccaaa

SEQ ID NO: 815013 - RNA, 19 nt, Artificial Sequence
  Description of Artificial Sequence: Synthetic oligonucleotide
guccgcgcugugacaggag

SEQ ID NO: 815014 - RNA, 19 nt, Artificial Sequence
  Description of Artificial Sequence: Synthetic oligonucleotide
cuccagccuuaacaaugaa

SEQ ID NO: 815015 - RNA, 19 nt, Artificial Sequence
  Description of Artificial Sequence: Synthetic oligonucleotide
cggaguuugaaaguucaaa

SEQ ID NO: 815016 - RNA, 19 nt, Artificial Sequence
  Description of Artificial Sequence: Synthetic oligonucleotide
ugccguccuccuuggccuu

SEQ ID NO: 815017 - RNA, 19 nt, Artificial Sequence
  Description of Artificial Sequence: Synthetic oligonucleotide
gaggcggauuuugcgacuu

SEQ ID NO: 815018 - RNA, 19 nt, Artificial Sequence
  Description of Artificial Sequence: Synthetic oligonucleotide
cugagguauggaggcuuaa

SEQ ID NO: 815019 - RNA, 19 nt, Artificial Sequence
  Description of Artificial Sequence: Synthetic oligonucleotide
gcggauuuugcgacuugaa

SEQ ID NO: 815020 - RNA, 19 nt, Artificial Sequence
  Description of Artificial Sequence: Synthetic oligonucleotide
gggcuucguaguuuccacu

SEQ ID NO: 815021 - RNA, 19 nt, Artificial Sequence
  Description of Artificial Sequence: Synthetic oligonucleotide
ccgcgcugugacaggaguc

SEQ ID NO: 815022 - RNA, 19 nt, Artificial Sequence
  Description of Artificial Sequence: Synthetic oligonucleotide
cgcucuguuccaaggguga

SEQ ID NO: 815023 - RNA, 19 nt, Artificial Sequence
  Description of Artificial Sequence: Synthetic oligonucleotide
gccugugaaagcgaacaau

SEQ ID NO: 815024 - RNA, 19 nt, Artificial Sequence
  Description of Artificial Sequence: Synthetic oligonucleotide
ggaggcggauuuugcgacu

SEQ ID NO: 815025 - RNA, 19 nt, Artificial Sequence
  Description of Artificial Sequence: Synthetic oligonucleotide
guuugguauggaggcggau

SEQ ID NO: 815026 - RNA, 19 nt, Artificial Sequence
  Description of Artificial Sequence: Synthetic oligonucleotide
cugcaacuguggugucaaa

SEQ ID NO: 815027 - RNA, 19 nt, Artificial Sequence
  Description of Artificial Sequence: Synthetic oligonucleotide
gcugagguauggaggcuua

SEQ ID NO: 815028 - RNA, 19 nt, Artificial Sequence
  Description of Artificial Sequence: Synthetic oligonucleotide
ccggaguuugaaaguucaa

SEQ ID NO: 815029 - RNA, 19 nt, Artificial Sequence
  Description of Artificial Sequence: Synthetic oligonucleotide
caaacccgcaaggcuucua

SEQ ID NO: 815030 - RNA, 19 nt, Artificial Sequence
  Description of Artificial Sequence: Synthetic oligonucleotide
cccaucccauaccuuuaga

SEQ ID NO: 815031 - RNA, 19 nt, Artificial Sequence
  Description of Artificial Sequence: Synthetic oligonucleotide
ccugaggagugaagcuaaa

SEQ ID NO: 815032 - RNA, 19 nt, Artificial Sequence
  Description of Artificial Sequence: Synthetic oligonucleotide
gcaccuucuuuaaguagau

SEQ ID NO: 815033 - RNA, 19 nt, Artificial Sequence
  Description of Artificial Sequence: Synthetic oligonucleotide
cuguuccaagggugacagu

SEQ ID NO: 815034 - RNA, 19 nt, Artificial Sequence
  Description of Artificial Sequence: Synthetic oligonucleotide
cgagucauacaguguugua

SEQ ID NO: 815035 - RNA, 19 nt, Artificial Sequence
  Description of Artificial Sequence: Synthetic oligonucleotide
gcuugacguccgcgcugug

SEQ ID NO: 815036 - RNA, 19 nt, Artificial Sequence
  Description of Artificial Sequence: Synthetic oligonucleotide
cguccugaggagugaagcu

SEQ ID NO: 815037 - RNA, 19 nt, Artificial Sequence
  Description of Artificial Sequence: Synthetic oligonucleotide
gcuauagcugcagcaucuu

SEQ ID NO: 815038 - RNA, 19 nt, Artificial Sequence
  Description of Artificial Sequence: Synthetic oligonucleotide
cagugauacugagccugau

SEQ ID NO: 815039 - RNA, 19 nt, Artificial Sequence
  Description of Artificial Sequence: Synthetic oligonucleotide
ggagucccuaaaguuccuu

SEQ ID NO: 815040 - RNA, 19 nt, Artificial Sequence
  Description of Artificial Sequence: Synthetic oligonucleotide
gggugacaguguaggauuu

SEQ ID NO: 815041 - RNA, 19 nt, Artificial Sequence
  Description of Artificial Sequence: Synthetic oligonucleotide
cguccgcgcugugacagga

SEQ ID NO: 815042 - RNA, 19 nt, Artificial Sequence
  Description of Artificial Sequence: Synthetic oligonucleotide
ccaaacccgcaaggcuucu

SEQ ID NO: 815043 - RNA, 19 nt, Artificial Sequence
  Description of Artificial Sequence: Synthetic oligonucleotide
aauagaauuaaacugugcg

SEQ ID NO: 815044 - RNA, 19 nt, Artificial Sequence
  Description of Artificial Sequence: Synthetic oligonucleotide
uuugauaucaauuugcuug

SEQ ID NO: 815045 - RNA, 19 nt, Artificial Sequence
  Description of Artificial Sequence: Synthetic oligonucleotide
aaacuuaguauuucaaugg

SEQ ID NO: 815046 - RNA, 19 nt, Artificial Sequence
  Description of Artificial Sequence: Synthetic oligonucleotide
aaauagugcgauuacaguc

SEQ ID NO: 815047 - RNA, 19 nt, Artificial Sequence
  Description of Artificial Sequence: Synthetic oligonucleotide
aaaacuuaguauuucaaug

SEQ ID NO: 815048 - RNA, 19 nt, Artificial Sequence
  Description of Artificial Sequence: Synthetic oligonucleotide
aaguauacaaaccauuauc

SEQ ID NO: 815049 - RNA, 19 nt, Artificial Sequence
  Description of Artificial Sequence: Synthetic oligonucleotide
cuacacuugauuuagagcc

SEQ ID NO: 815050 - RNA, 19 nt, Artificial Sequence
  Description of Artificial Sequence: Synthetic oligonucleotide
aguguuacagcguagcugc

SEQ ID NO: 815051 - RNA, 19 nt, Artificial Sequence
  Description of Artificial Sequence: Synthetic oligonucleotide
ucaagacucacaaagauga

SEQ ID NO: 815052 - RNA, 19 nt, Artificial Sequence
  Description of Artificial Sequence: Synthetic oligonucleotide
uaugacuaccuuaagacag

SEQ ID NO: 815053 - RNA, 19 nt, Artificial Sequence
  Description of Artificial Sequence: Synthetic oligonucleotide
aaaccauuaucacacacag

SEQ ID NO: 815054 - RNA, 19 nt, Artificial Sequence
  Description of Artificial Sequence: Synthetic oligonucleotide
acuaccuuaagacagcagg

SEQ ID NO: 815055 - RNA, 19 nt, Artificial Sequence
  Description of Artificial Sequence: Synthetic oligonucleotide
uuaaauugauuacuauacg

SEQ ID NO: 815056 - RNA, 19 nt, Artificial Sequence
  Description of Artificial Sequence: Synthetic oligonucleotide
aguucuaaacaagauaugc

SEQ ID NO: 815057 - RNA, 19 nt, Artificial Sequence
  Description of Artificial Sequence: Synthetic oligonucleotide
uguaugacuaccuuaagac

SEQ ID NO: 815058 - RNA, 19 nt, Artificial Sequence
  Description of Artificial Sequence: Synthetic oligonucleotide
ugcuguaucaaaauagugc

SEQ ID NO: 815059 - RNA, 19 nt, Artificial Sequence
  Description of Artificial Sequence: Synthetic oligonucleotide
uguaacauaguguuaaacu

SEQ ID NO: 815060 - RNA, 19 nt, Artificial Sequence
  Description of Artificial Sequence: Synthetic oligonucleotide
guagauauguaacauagug

SEQ ID NO: 815061 - RNA, 19 nt, Artificial Sequence
  Description of Artificial Sequence: Synthetic oligonucleotide
auacgaaaggcucuugugc

SEQ ID NO: 815062 - RNA, 19 nt, Artificial Sequence
  Description of Artificial Sequence: Synthetic oligonucleotide
uaaauugauuacuauacga

SEQ ID NO: 815063 - RNA, 19 nt, Artificial Sequence
  Description of Artificial Sequence: Synthetic oligonucleotide
aaggcgcuaaugcagaacg

SEQ ID NO: 815064 - RNA, 19 nt, Artificial Sequence
  Description of Artificial Sequence: Synthetic oligonucleotide
cauauuaauucuauguuac

SEQ ID NO: 815065 - RNA, 19 nt, Artificial Sequence
  Description of Artificial Sequence: Synthetic oligonucleotide
auuuuaugugagcaguggc

SEQ ID NO: 815066 - RNA, 19 nt, Artificial Sequence
  Description of Artificial Sequence: Synthetic oligonucleotide
aaaaccaguuuacacacca

SEQ ID NO: 815067 - RNA, 19 nt, Artificial Sequence
  Description of Artificial Sequence: Synthetic oligonucleotide
uucaauuacacuacuuggc

SEQ ID NO: 815068 - RNA, 19 nt, Artificial Sequence
  Description of Artificial Sequence: Synthetic oligonucleotide
acuacacuugauuuagagc

SEQ ID NO: 815069 - RNA, 19 nt, Artificial Sequence
  Description of Artificial Sequence: Synthetic oligonucleotide
guaucuaucugccagacac

SEQ ID NO: 815070 - RNA, 19 nt, Artificial Sequence
  Description of Artificial Sequence: Synthetic oligonucleotide
uuuauuguccaaaugguua

SEQ ID NO: 815071 - RNA, 19 nt, Artificial Sequence
  Description of Artificial Sequence: Synthetic oligonucleotide
caaaauagugcgauuacag

SEQ ID NO: 815072 - RNA, 19 nt, Artificial Sequence
  Description of Artificial Sequence: Synthetic oligonucleotide
guaacauaguguuaaacug

SEQ ID NO: 815073 - RNA, 19 nt, Artificial Sequence
  Description of Artificial Sequence: Synthetic oligonucleotide
uuccucaacgccuucaacg

SEQ ID NO: 815074 - RNA, 19 nt, Artificial Sequence
  Description of Artificial Sequence: Synthetic oligonucleotide
ucacuuaacugaaacguag

SEQ ID NO: 815075 - RNA, 19 nt, Artificial Sequence
  Description of Artificial Sequence: Synthetic oligonucleotide
aauugauuacuauacgaaa

SEQ ID NO: 815076 - RNA, 19 nt, Artificial Sequence
  Description of Artificial Sequence: Synthetic oligonucleotide
ugauuuagagcccacgcug

SEQ ID NO: 815077 - RNA, 19 nt, Artificial Sequence
  Description of Artificial Sequence: Synthetic oligonucleotide
agauauguaacauaguguu

SEQ ID NO: 815078 - RNA, 19 nt, Artificial Sequence
  Description of Artificial Sequence: Synthetic oligonucleotide
ucaauuacacuacuuggca

SEQ ID NO: 815079 - RNA, 19 nt, Artificial Sequence
  Description of Artificial Sequence: Synthetic oligonucleotide
agaauuaaacugugcgacc

SEQ ID NO: 815080 - RNA, 19 nt, Artificial Sequence
  Description of Artificial Sequence: Synthetic oligonucleotide
aaauagaauuaaacugugc

SEQ ID NO: 815081 - RNA, 19 nt, Artificial Sequence
  Description of Artificial Sequence: Synthetic oligonucleotide
aaaauagugcgauuacagu

SEQ ID NO: 815082 - RNA, 19 nt, Artificial Sequence
  Description of Artificial Sequence: Synthetic oligonucleotide
ugcacuaguaucacaaggc

SEQ ID NO: 815083 - RNA, 19 nt, Artificial Sequence
  Description of Artificial Sequence: Synthetic oligonucleotide
aauuccgugauugugaaaa

SEQ ID NO: 815084 - RNA, 19 nt, Artificial Sequence
  Description of Artificial Sequence: Synthetic oligonucleotide
uaucacuuaacugaaacgu

SEQ ID NO: 815085 - RNA, 19 nt, Artificial Sequence
  Description of Artificial Sequence: Synthetic oligonucleotide
uuaacugaaacguaguauu

SEQ ID NO: 815086 - RNA, 19 nt, Artificial Sequence
  Description of Artificial Sequence: Synthetic oligonucleotide
uauggauauaugcagugcu

SEQ ID NO: 815087 - RNA, 19 nt, Artificial Sequence
  Description of Artificial Sequence: Synthetic oligonucleotide
cucacaaagaugauucggg

SEQ ID NO: 815088 - RNA, 19 nt, Artificial Sequence
  Description of Artificial Sequence: Synthetic oligonucleotide
agacguguagcucaugaac

SEQ ID NO: 815089 - RNA, 19 nt, Artificial Sequence
  Description of Artificial Sequence: Synthetic oligonucleotide
agaaguaaaagagcagggc

SEQ ID NO: 815090 - RNA, 19 nt, Artificial Sequence
  Description of Artificial Sequence: Synthetic oligonucleotide
cuauuguagaaucacacuc

SEQ ID NO: 815091 - RNA, 19 nt, Artificial Sequence
  Description of Artificial Sequence: Synthetic oligonucleotide
cagaaugcugacaagacac

SEQ ID NO: 815092 - RNA, 19 nt, Artificial Sequence
  Description of Artificial Sequence: Synthetic oligonucleotide
acaagauaugcuaacugcc

SEQ ID NO: 815093 - RNA, 19 nt, Artificial Sequence
  Description of Artificial Sequence: Synthetic oligonucleotide
acaguaaaacguuuaagga

SEQ ID NO: 815094 - RNA, 19 nt, Artificial Sequence
  Description of Artificial Sequence: Synthetic oligonucleotide
guuggaucuaaguagagca

SEQ ID NO: 815095 - RNA, 19 nt, Artificial Sequence
  Description of Artificial Sequence: Synthetic oligonucleotide
uagaauuaaacugugcgac

SEQ ID NO: 815096 - RNA, 19 nt, Artificial Sequence
  Description of Artificial Sequence: Synthetic oligonucleotide
ugcaggcaaguucacaugg

SEQ ID NO: 815097 - RNA, 19 nt, Artificial Sequence
  Description of Artificial Sequence: Synthetic oligonucleotide
auagaauuaaacugugcga

SEQ ID NO: 815098 - RNA, 19 nt, Artificial Sequence
  Description of Artificial Sequence: Synthetic oligonucleotide
ugcacuaugcacuaguauc

SEQ ID NO: 815099 - RNA, 19 nt, Artificial Sequence
  Description of Artificial Sequence: Synthetic oligonucleotide
acuaccacgaucacggagc

SEQ ID NO: 815100 - RNA, 19 nt, Artificial Sequence
  Description of Artificial Sequence: Synthetic oligonucleotide
ugugcgaccagacaaggac

SEQ ID NO: 815101 - RNA, 19 nt, Artificial Sequence
  Description of Artificial Sequence: Synthetic oligonucleotide
ucuaaacaagauaugcuaa

SEQ ID NO: 815102 - RNA, 19 nt, Artificial Sequence
  Description of Artificial Sequence: Synthetic oligonucleotide
caagauaugcuaacugccg

SEQ ID NO: 815103 - RNA, 19 nt, Artificial Sequence
  Description of Artificial Sequence: Synthetic oligonucleotide
auugauuacuauacgaaag

SEQ ID NO: 815104 - RNA, 19 nt, Artificial Sequence
  Description of Artificial Sequence: Synthetic oligonucleotide
auguagauauguaacauag

SEQ ID NO: 815105 - RNA, 19 nt, Artificial Sequence
  Description of Artificial Sequence: Synthetic oligonucleotide
uaucacgacagcagggagg

SEQ ID NO: 815106 - RNA, 19 nt, Artificial Sequence
  Description of Artificial Sequence: Synthetic oligonucleotide
uuucaagacucacaaagau

SEQ ID NO: 815107 - RNA, 19 nt, Artificial Sequence
  Description of Artificial Sequence: Synthetic oligonucleotide
ucuaaguagagcacccagc

SEQ ID NO: 815108 - RNA, 19 nt, Artificial Sequence
  Description of Artificial Sequence: Synthetic oligonucleotide
cauuucccagaccagaccg

SEQ ID NO: 815109 - RNA, 19 nt, Artificial Sequence
  Description of Artificial Sequence: Synthetic oligonucleotide
cuugauuuagagcccacgc

SEQ ID NO: 815110 - RNA, 19 nt, Artificial Sequence
  Description of Artificial Sequence: Synthetic oligonucleotide
auaagauucccguugacuu

SEQ ID NO: 815111 - RNA, 19 nt, Artificial Sequence
  Description of Artificial Sequence: Synthetic oligonucleotide
agucccauuucccagacca

SEQ ID NO: 815112 - RNA, 19 nt, Artificial Sequence
  Description of Artificial Sequence: Synthetic oligonucleotide
ucuauuguagaaucacacu

SEQ ID NO: 815113 - RNA, 19 nt, Artificial Sequence
  Description of Artificial Sequence: Synthetic oligonucleotide
uauacgaaaggcucuugug

SEQ ID NO: 815114 - RNA, 19 nt, Artificial Sequence
  Description of Artificial Sequence: Synthetic oligonucleotide
cacgcuggcaaauucaggc

SEQ ID NO: 815115 - RNA, 19 nt, Artificial Sequence
  Description of Artificial Sequence: Synthetic oligonucleotide
uguucuagcuuguauuucu

SEQ ID NO: 815116 - RNA, 19 nt, Artificial Sequence
  Description of Artificial Sequence: Synthetic oligonucleotide
uacgaaaggcucuugugcc

SEQ ID NO: 815117 - RNA, 19 nt, Artificial Sequence
  Description of Artificial Sequence: Synthetic oligonucleotide
agauaugcuaacugccggg

SEQ ID NO: 815118 - RNA, 19 nt, Artificial Sequence
  Description of Artificial Sequence: Synthetic oligonucleotide
aguuggaucuaaguagagc

SEQ ID NO: 815119 - RNA, 19 nt, Artificial Sequence
  Description of Artificial Sequence: Synthetic oligonucleotide
agacacugaaccuuaauau

SEQ ID NO: 815120 - RNA, 19 nt, Artificial Sequence
  Description of Artificial Sequence: Synthetic oligonucleotide
gaucacggagcccaaggcg

SEQ ID NO: 815121 - RNA, 19 nt, Artificial Sequence
  Description of Artificial Sequence: Synthetic oligonucleotide
auauguaacauaguguuaa

SEQ ID NO: 815122 - RNA, 19 nt, Artificial Sequence
  Description of Artificial Sequence: Synthetic oligonucleotide
ugacuuguacauccacugg

SEQ ID NO: 815123 - RNA, 19 nt, Artificial Sequence
  Description of Artificial Sequence: Synthetic oligonucleotide
ucuacaauguagauaugua

SEQ ID NO: 815124 - RNA, 19 nt, Artificial Sequence
  Description of Artificial Sequence: Synthetic oligonucleotide
agaacgcucucuuaugcag

SEQ ID NO: 815125 - RNA, 19 nt, Artificial Sequence
  Description of Artificial Sequence: Synthetic oligonucleotide
auagugcgauuacaguccc

SEQ ID NO: 815126 - RNA, 19 nt, Artificial Sequence
  Description of Artificial Sequence: Synthetic oligonucleotide
uugauaagauucccguuga

SEQ ID NO: 815127 - RNA, 19 nt, Artificial Sequence
  Description of Artificial Sequence: Synthetic oligonucleotide
uccuugauaagauucccgu

SEQ ID NO: 815128 - RNA, 19 nt, Artificial Sequence
  Description of Artificial Sequence: Synthetic oligonucleotide
uugauuuagagcccacgcu

SEQ ID NO: 815129 - RNA, 19 nt, Artificial Sequence
  Description of Artificial Sequence: Synthetic oligonucleotide
cucuuuuaccaaauguuug

SEQ ID NO: 815130 - RNA, 19 nt, Artificial Sequence
  Description of Artificial Sequence: Synthetic oligonucleotide
agaaucacacuccuuauuu

SEQ ID NO: 815131 - RNA, 19 nt, Artificial Sequence
  Description of Artificial Sequence: Synthetic oligonucleotide
uugucaggcuccuugauaa

SEQ ID NO: 815132 - RNA, 19 nt, Artificial Sequence
  Description of Artificial Sequence: Synthetic oligonucleotide
uuuaugugagcaguggcga

SEQ ID NO: 815133 - RNA, 19 nt, Artificial Sequence
  Description of Artificial Sequence: Synthetic oligonucleotide
uuauuguccaaaugguuau

SEQ ID NO: 815134 - RNA, 19 nt, Artificial Sequence
  Description of Artificial Sequence: Synthetic oligonucleotide
aacgguuuguagaaggaug

SEQ ID NO: 815135 - RNA, 19 nt, Artificial Sequence
  Description of Artificial Sequence: Synthetic oligonucleotide
aucuaaguagagcacccag

SEQ ID NO: 815136 - RNA, 19 nt, Artificial Sequence
  Description of Artificial Sequence: Synthetic oligonucleotide
uuucaauggagucuauuuu

SEQ ID NO: 815137 - RNA, 19 nt, Artificial Sequence
  Description of Artificial Sequence: Synthetic oligonucleotide
auuuagagcccacgcuggc

SEQ ID NO: 815138 - RNA, 19 nt, Artificial Sequence
  Description of Artificial Sequence: Synthetic oligonucleotide
uaucauggcgaucuguguc

SEQ ID NO: 815139 - RNA, 19 nt, Artificial Sequence
  Description of Artificial Sequence: Synthetic oligonucleotide
uccuuauuuguguaugacu

SEQ ID NO: 815140 - RNA, 19 nt, Artificial Sequence
  Description of Artificial Sequence: Synthetic oligonucleotide
agagcuuguuaguacaaca

SEQ ID NO: 815141 - RNA, 19 nt, Artificial Sequence
  Description of Artificial Sequence: Synthetic oligonucleotide
gauuuagagcccacgcugg

SEQ ID NO: 815142 - RNA, 19 nt, Artificial Sequence
  Description of Artificial Sequence: Synthetic oligonucleotide
ugcgauuacagucccauuu

SEQ ID NO: 815143 - RNA, 19 nt, Artificial Sequence
  Description of Artificial Sequence: Synthetic oligonucleotide
cuauguuacauucuccuca

SEQ ID NO: 815144 - RNA, 19 nt, Artificial Sequence
  Description of Artificial Sequence: Synthetic oligonucleotide
auguaacauaguguuaaac

SEQ ID NO: 815145 - RNA, 19 nt, Artificial Sequence
  Description of Artificial Sequence: Synthetic oligonucleotide
gauaugcuaacugccgggg

SEQ ID NO: 815146 - RNA, 19 nt, Artificial Sequence
  Description of Artificial Sequence: Synthetic oligonucleotide
aaugguuaucugcuuguaa

SEQ ID NO: 815147 - RNA, 19 nt, Artificial Sequence
  Description of Artificial Sequence: Synthetic oligonucleotide
aauggauagguuguguaaa

SEQ ID NO: 815148 - RNA, 19 nt, Artificial Sequence
  Description of Artificial Sequence: Synthetic oligonucleotide
acagaguuggaucuaagua

SEQ ID NO: 815149 - RNA, 19 nt, Artificial Sequence
  Description of Artificial Sequence: Synthetic oligonucleotide
ucauguucuagcuuguauu

SEQ ID NO: 815150 - RNA, 19 nt, Artificial Sequence
  Description of Artificial Sequence: Synthetic oligonucleotide
uccgaggacgugcagaaac

SEQ ID NO: 815151 - RNA, 19 nt, Artificial Sequence
  Description of Artificial Sequence: Synthetic oligonucleotide
aguaaaacguuuaaggauu

SEQ ID NO: 815152 - RNA, 19 nt, Artificial Sequence
  Description of Artificial Sequence: Synthetic oligonucleotide
cauuuuaugugagcagugg

SEQ ID NO: 815153 - RNA, 19 nt, Artificial Sequence
  Description of Artificial Sequence: Synthetic oligonucleotide
agcaugaauuccgugauug

SEQ ID NO: 815154 - RNA, 19 nt, Artificial Sequence
  Description of Artificial Sequence: Synthetic oligonucleotide
uguagauauguaacauagu

SEQ ID NO: 815155 - RNA, 19 nt, Artificial Sequence
  Description of Artificial Sequence: Synthetic oligonucleotide
gacgaaaccaacacgagaa

SEQ ID NO: 815156 - RNA, 19 nt, Artificial Sequence
  Description of Artificial Sequence: Synthetic oligonucleotide
uacacuugauuuagagccc

SEQ ID NO: 815157 - RNA, 19 nt, Artificial Sequence
  Description of Artificial Sequence: Synthetic oligonucleotide
uggaucuaaguagagcacc

SEQ ID NO: 815158 - RNA, 19 nt, Artificial Sequence
  Description of Artificial Sequence: Synthetic oligonucleotide
cacuaguaucacaaggcgc

SEQ ID NO: 815159 - RNA, 19 nt, Artificial Sequence
  Description of Artificial Sequence: Synthetic oligonucleotide
cagaaaggacuugaggucg

SEQ ID NO: 815160 - RNA, 19 nt, Artificial Sequence
  Description of Artificial Sequence: Synthetic oligonucleotide
uaugcuaacugccgggguc

SEQ ID NO: 815161 - RNA, 19 nt, Artificial Sequence
  Description of Artificial Sequence: Synthetic oligonucleotide
uaugcacuaguaucacaag

SEQ ID NO: 815162 - RNA, 19 nt, Artificial Sequence
  Description of Artificial Sequence: Synthetic oligonucleotide
gauaucaauuugcuuggga

SEQ ID NO: 815163 - RNA, 19 nt, Artificial Sequence
  Description of Artificial Sequence: Synthetic oligonucleotide
cagaccgugaagcacuagg

SEQ ID NO: 815164 - RNA, 19 nt, Artificial Sequence
  Description of Artificial Sequence: Synthetic oligonucleotide
auacaguaaaacguuuaag

SEQ ID NO: 815165 - RNA, 19 nt, Artificial Sequence
  Description of Artificial Sequence: Synthetic oligonucleotide
caaaguguuacagcguagc

SEQ ID NO: 815166 - RNA, 19 nt, Artificial Sequence
  Description of Artificial Sequence: Synthetic oligonucleotide
ucccaagaccucuuaauac

SEQ ID NO: 815167 - RNA, 19 nt, Artificial Sequence
  Description of Artificial Sequence: Synthetic oligonucleotide
gugccagugaaaaugacug

SEQ ID NO: 815168 - RNA, 19 nt, Artificial Sequence
  Description of Artificial Sequence: Synthetic oligonucleotide
ucuaucacgacagcaggga

SEQ ID NO: 815169 - RNA, 19 nt, Artificial Sequence
  Description of Artificial Sequence: Synthetic oligonucleotide
acugaaacguaguauuaaa

SEQ ID NO: 815170 - RNA, 19 nt, Artificial Sequence
  Description of Artificial Sequence: Synthetic oligonucleotide
cuaugcacuaguaucacaa

SEQ ID NO: 815171 - RNA, 19 nt, Artificial Sequence
  Description of Artificial Sequence: Synthetic oligonucleotide
acagaaugcugacaagaca

SEQ ID NO: 815172 - RNA, 19 nt, Artificial Sequence
  Description of Artificial Sequence: Synthetic oligonucleotide
acgaucacggagcccaagg

SEQ ID NO: 815173 - RNA, 19 nt, Artificial Sequence
  Description of Artificial Sequence: Synthetic oligonucleotide
ucaguaucuaucugccaga

SEQ ID NO: 815174 - RNA, 19 nt, Artificial Sequence
  Description of Artificial Sequence: Synthetic oligonucleotide
agggaucacggaaacaugg

SEQ ID NO: 815175 - RNA, 19 nt, Artificial Sequence
  Description of Artificial Sequence: Synthetic oligonucleotide
uuguguaaagaaguauaca

SEQ ID NO: 815176 - RNA, 19 nt, Artificial Sequence
  Description of Artificial Sequence: Synthetic oligonucleotide
uggguuuaugcagaaguug

SEQ ID NO: 815177 - RNA, 19 nt, Artificial Sequence
  Description of Artificial Sequence: Synthetic oligonucleotide
cuccuugauaagauucccg

SEQ ID NO: 815178 - RNA, 19 nt, Artificial Sequence
  Description of Artificial Sequence: Synthetic oligonucleotide
guuguguaaagaaguauac

SEQ ID NO: 815179 - RNA, 19 nt, Artificial Sequence
  Description of Artificial Sequence: Synthetic oligonucleotide
ggugguagcaugaauuccg

SEQ ID NO: 815180 - RNA, 19 nt, Artificial Sequence
  Description of Artificial Sequence: Synthetic oligonucleotide
cuaaguagagcacccagca

SEQ ID NO: 815181 - RNA, 19 nt, Artificial Sequence
  Description of Artificial Sequence: Synthetic oligonucleotide
aagaaguauacaaaccauu

SEQ ID NO: 815182 - RNA, 19 nt, Artificial Sequence
  Description of Artificial Sequence: Synthetic oligonucleotide
ucuugcaguucaaaagcaa

SEQ ID NO: 815183 - RNA, 19 nt, Artificial Sequence
  Description of Artificial Sequence: Synthetic oligonucleotide
uugggaacgguuuguagaa

SEQ ID NO: 815184 - RNA, 19 nt, Artificial Sequence
  Description of Artificial Sequence: Synthetic oligonucleotide
ugaugaucucuacggaggu

SEQ ID NO: 815185 - RNA, 19 nt, Artificial Sequence
  Description of Artificial Sequence: Synthetic oligonucleotide
cucuaucacgacagcaggg

SEQ ID NO: 815186 - RNA, 19 nt, Artificial Sequence
  Description of Artificial Sequence: Synthetic oligonucleotide
cuugggaacgguuuguaga

SEQ ID NO: 815187 - RNA, 19 nt, Artificial Sequence
  Description of Artificial Sequence: Synthetic oligonucleotide
ucuauguuacauucuccuc

SEQ ID NO: 815188 - RNA, 19 nt, Artificial Sequence
  Description of Artificial Sequence: Synthetic oligonucleotide
uuggaucuaaguagagcac

SEQ ID NO: 815189 - RNA, 19 nt, Artificial Sequence
  Description of Artificial Sequence: Synthetic oligonucleotide
ugaauuccgugauugugaa

SEQ ID NO: 815190 - RNA, 19 nt, Artificial Sequence
  Description of Artificial Sequence: Synthetic oligonucleotide
guugucuucagaacagccc

SEQ ID NO: 815191 - RNA, 19 nt, Artificial Sequence
  Description of Artificial Sequence: Synthetic oligonucleotide
augacuaccuuaagacagc

SEQ ID NO: 815192 - RNA, 19 nt, Artificial Sequence
  Description of Artificial Sequence: Synthetic oligonucleotide
agcggacgaaaccaacacg

SEQ ID NO: 815193 - RNA, 19 nt, Artificial Sequence
  Description of Artificial Sequence: Synthetic oligonucleotide
caggcaaguucacaugggg

SEQ ID NO: 815194 - RNA, 19 nt, Artificial Sequence
  Description of Artificial Sequence: Synthetic oligonucleotide
caaggcgucuccgaggacg

SEQ ID NO: 815195 - RNA, 19 nt, Artificial Sequence
  Description of Artificial Sequence: Synthetic oligonucleotide
cacgagaaaagucucaaaa

SEQ ID NO: 815196 - RNA, 19 nt, Artificial Sequence
  Description of Artificial Sequence: Synthetic oligonucleotide
uaaccacauauuaauucua

SEQ ID NO: 815197 - RNA, 19 nt, Artificial Sequence
  Description of Artificial Sequence: Synthetic oligonucleotide
cuuguaaaacaaacauuca

SEQ ID NO: 815198 - RNA, 19 nt, Artificial Sequence
  Description of Artificial Sequence: Synthetic oligonucleotide
gacgugcagaaacacuccc

SEQ ID NO: 815199 - RNA, 19 nt, Artificial Sequence
  Description of Artificial Sequence: Synthetic oligonucleotide
acacugacacuccauugug

SEQ ID NO: 815200 - RNA, 19 nt, Artificial Sequence
  Description of Artificial Sequence: Synthetic oligonucleotide
agugcuguaucaaaauagu

SEQ ID NO: 815201 - RNA, 19 nt, Artificial Sequence
  Description of Artificial Sequence: Synthetic oligonucleotide
acuuaacugaaacguagua

SEQ ID NO: 815202 - RNA, 19 nt, Artificial Sequence
  Description of Artificial Sequence: Synthetic oligonucleotide
ugggugcuguugaugaucu

SEQ ID NO: 815203 - RNA, 19 nt, Artificial Sequence
  Description of Artificial Sequence: Synthetic oligonucleotide
augaauuccgugauuguga

SEQ ID NO: 815204 - RNA, 19 nt, Artificial Sequence
  Description of Artificial Sequence: Synthetic oligonucleotide
gcacuaguaucacaaggcg

SEQ ID NO: 815205 - RNA, 19 nt, Artificial Sequence
  Description of Artificial Sequence: Synthetic oligonucleotide
ucaggcuccuugauaagau

SEQ ID NO: 815206 - RNA, 19 nt, Artificial Sequence
  Description of Artificial Sequence: Synthetic oligonucleotide
aacugugcgaccagacaag

SEQ ID NO: 815207 - RNA, 19 nt, Artificial Sequence
  Description of Artificial Sequence: Synthetic oligonucleotide
aucacggaaacauggguuu

SEQ ID NO: 815208 - RNA, 19 nt, Artificial Sequence
  Description of Artificial Sequence: Synthetic oligonucleotide
uuaagacagcagguuaaug

SEQ ID NO: 815209 - RNA, 19 nt, Artificial Sequence
  Description of Artificial Sequence: Synthetic oligonucleotide
cuacggagguucugcaggg

SEQ ID NO: 815210 - RNA, 19 nt, Artificial Sequence
  Description of Artificial Sequence: Synthetic oligonucleotide
ugauaucaauuugcuuggg

SEQ ID NO: 815211 - RNA, 19 nt, Artificial Sequence
  Description of Artificial Sequence: Synthetic oligonucleotide
aucuaucugccagacacug

SEQ ID NO: 815212 - RNA, 19 nt, Artificial Sequence
  Description of Artificial Sequence: Synthetic oligonucleotide
ucucuuaugcaguuccauu

SEQ ID NO: 815213 - RNA, 19 nt, Artificial Sequence
  Description of Artificial Sequence: Synthetic oligonucleotide
cuugcaguucaaaagcaaa

SEQ ID NO: 815214 - RNA, 19 nt, Artificial Sequence
  Description of Artificial Sequence: Synthetic oligonucleotide
ucgaaccaccgucugggug

SEQ ID NO: 815215 - RNA, 19 nt, Artificial Sequence
  Description of Artificial Sequence: Synthetic oligonucleotide
agcgcacugaguucugcag

SEQ ID NO: 815216 - RNA, 19 nt, Artificial Sequence
  Description of Artificial Sequence: Synthetic oligonucleotide
ugauaagauucccguugac

SEQ ID NO: 815217 - RNA, 19 nt, Artificial Sequence
  Description of Artificial Sequence: Synthetic oligonucleotide
uagaaucacacuccuuauu

SEQ ID NO: 815218 - RNA, 19 nt, Artificial Sequence
  Description of Artificial Sequence: Synthetic oligonucleotide
cauuaucacacacagaguu

SEQ ID NO: 815219 - RNA, 19 nt, Artificial Sequence
  Description of Artificial Sequence: Synthetic oligonucleotide
uggggacuacacuugauuu

SEQ ID NO: 815220 - RNA, 19 nt, Artificial Sequence
  Description of Artificial Sequence: Synthetic oligonucleotide
gaacagcccugccagaaga

SEQ ID NO: 815221 - RNA, 19 nt, Artificial Sequence
  Description of Artificial Sequence: Synthetic oligonucleotide
ugaggucgggucuucacau

SEQ ID NO: 815222 - RNA, 19 nt, Artificial Sequence
  Description of Artificial Sequence: Synthetic oligonucleotide
gucuuccgacuccagauug

SEQ ID NO: 815223 - RNA, 19 nt, Artificial Sequence
  Description of Artificial Sequence: Synthetic oligonucleotide
acuccuuauuuguguauga

SEQ ID NO: 815224 - RNA, 19 nt, Artificial Sequence
  Description of Artificial Sequence: Synthetic oligonucleotide
gauaagauucccguugacu

SEQ ID NO: 815225 - RNA, 19 nt, Artificial Sequence
  Description of Artificial Sequence: Synthetic oligonucleotide
aaaggcucuugugccagug

SEQ ID NO: 815226 - RNA, 19 nt, Artificial Sequence
  Description of Artificial Sequence: Synthetic oligonucleotide
caaaaccaguuuacacacc

SEQ ID NO: 815227 - RNA, 19 nt, Artificial Sequence
  Description of Artificial Sequence: Synthetic oligonucleotide
cagcguagcugcacuaugc

SEQ ID NO: 815228 - RNA, 19 nt, Artificial Sequence
  Description of Artificial Sequence: Synthetic oligonucleotide
gaguucuaaacaagauaug

SEQ ID NO: 815229 - RNA, 19 nt, Artificial Sequence
  Description of Artificial Sequence: Synthetic oligonucleotide
guaaaacguuuaaggauug

SEQ ID NO: 815230 - RNA, 19 nt, Artificial Sequence
  Description of Artificial Sequence: Synthetic oligonucleotide
auguucuagcuuguauuuc

SEQ ID NO: 815231 - RNA, 19 nt, Artificial Sequence
  Description of Artificial Sequence: Synthetic oligonucleotide
aacgcucucuuaugcaguu

SEQ ID NO: 815232 - RNA, 19 nt, Artificial Sequence
  Description of Artificial Sequence: Synthetic oligonucleotide
cugaaacguaguauuaaaa

SEQ ID NO: 815233 - RNA, 19 nt, Artificial Sequence
  Description of Artificial Sequence: Synthetic oligonucleotide
accuuaagacagcagguua

SEQ ID NO: 815234 - RNA, 19 nt, Artificial Sequence
  Description of Artificial Sequence: Synthetic oligonucleotide
cuaucacgacagcagggag

SEQ ID NO: 815235 - RNA, 19 nt, Artificial Sequence
  Description of Artificial Sequence: Synthetic oligonucleotide
acgugcagaaacacucccc

SEQ ID NO: 815236 - RNA, 19 nt, Artificial Sequence
  Description of Artificial Sequence: Synthetic oligonucleotide
ucuuccgacuccagauugu

SEQ ID NO: 815237 - RNA, 19 nt, Artificial Sequence
  Description of Artificial Sequence: Synthetic oligonucleotide
acauuuuaugugagcagug

SEQ ID NO: 815238 - RNA, 19 nt, Artificial Sequence
  Description of Artificial Sequence: Synthetic oligonucleotide
cacuaccacgaucacggag

SEQ ID NO: 815239 - RNA, 19 nt, Artificial Sequence
  Description of Artificial Sequence: Synthetic oligonucleotide
acagcguagcugcacuaug

SEQ ID NO: 815240 - RNA, 19 nt, Artificial Sequence
  Description of Artificial Sequence: Synthetic oligonucleotide
uaguguuaaacuggcuuuc

SEQ ID NO: 815241 - RNA, 19 nt, Artificial Sequence
  Description of Artificial Sequence: Synthetic oligonucleotide
gcauguaugaggucggguc

SEQ ID NO: 815242 - RNA, 19 nt, Artificial Sequence
  Description of Artificial Sequence: Synthetic oligonucleotide
gcauucacuaccacgauca

SEQ ID NO: 815243 - RNA, 19 nt, Artificial Sequence
  Description of Artificial Sequence: Synthetic oligonucleotide
auggauauaugcagugcug

SEQ ID NO: 815244 - RNA, 19 nt, Artificial Sequence
  Description of Artificial Sequence: Synthetic oligonucleotide
uguuacagcguagcugcac

SEQ ID NO: 815245 - RNA, 19 nt, Artificial Sequence
  Description of Artificial Sequence: Synthetic oligonucleotide
agcguagcugcacuaugca

SEQ ID NO: 815246 - RNA, 19 nt, Artificial Sequence
  Description of Artificial Sequence: Synthetic oligonucleotide
cauaguguuaaacuggcuu

SEQ ID NO: 815247 - RNA, 19 nt, Artificial Sequence
  Description of Artificial Sequence: Synthetic oligonucleotide
ggagucuauuuucucuugc

SEQ ID NO: 815248 - RNA, 19 nt, Artificial Sequence
  Description of Artificial Sequence: Synthetic oligonucleotide
caauggauagguuguguaa

SEQ ID NO: 815249 - RNA, 19 nt, Artificial Sequence
  Description of Artificial Sequence: Synthetic oligonucleotide
aguaucuaucugccagaca

SEQ ID NO: 815250 - RNA, 19 nt, Artificial Sequence
  Description of Artificial Sequence: Synthetic oligonucleotide
acuccccgcauguucagcu

SEQ ID NO: 815251 - RNA, 19 nt, Artificial Sequence
  Description of Artificial Sequence: Synthetic oligonucleotide
ugacuaccuuaagacagca

SEQ ID NO: 815252 - RNA, 19 nt, Artificial Sequence
  Description of Artificial Sequence: Synthetic oligonucleotide
auaugcuaacugccggggu

SEQ ID NO: 815253 - RNA, 19 nt, Artificial Sequence
  Description of Artificial Sequence: Synthetic oligonucleotide
agcaguggcgaugauucug

SEQ ID NO: 815254 - RNA, 19 nt, Artificial Sequence
  Description of Artificial Sequence: Synthetic oligonucleotide
cacuccuuauuuguguaug

SEQ ID NO: 815255 - RNA, 19 nt, Artificial Sequence
  Description of Artificial Sequence: Synthetic oligonucleotide
cacaaaguguuacagcgua

SEQ ID NO: 815256 - RNA, 19 nt, Artificial Sequence
  Description of Artificial Sequence: Synthetic oligonucleotide
uuccgacuccagauuguca

SEQ ID NO: 815257 - RNA, 19 nt, Artificial Sequence
  Description of Artificial Sequence: Synthetic oligonucleotide
gugcuguaucaaaauagug

SEQ ID NO: 815258 - RNA, 19 nt, Artificial Sequence
  Description of Artificial Sequence: Synthetic oligonucleotide
cugcuuguaaaacaaacau

SEQ ID NO: 815259 - RNA, 19 nt, Artificial Sequence
  Description of Artificial Sequence: Synthetic oligonucleotide
caauuacacuacuuggcaa

SEQ ID NO: 815260 - RNA, 19 nt, Artificial Sequence
  Description of Artificial Sequence: Synthetic oligonucleotide
auauaaccacauauuaauu

SEQ ID NO: 815261 - RNA, 19 nt, Artificial Sequence
  Description of Artificial Sequence: Synthetic oligonucleotide
cagcggacgaaaccaacac

SEQ ID NO: 815262 - RNA, 19 nt, Artificial Sequence
  Description of Artificial Sequence: Synthetic oligonucleotide
aguguuaaacuggcuuuca

SEQ ID NO: 815263 - RNA, 19 nt, Artificial Sequence
  Description of Artificial Sequence: Synthetic oligonucleotide
ccaaaugguuaucugcuug

SEQ ID NO: 815264 - RNA, 19 nt, Artificial Sequence
  Description of Artificial Sequence: Synthetic oligonucleotide
aaaugguuaucugcuugua

SEQ ID NO: 815265 - RNA, 19 nt, Artificial Sequence
  Description of Artificial Sequence: Synthetic oligonucleotide
gauauguaacauaguguua

SEQ ID NO: 815266 - RNA, 19 nt, Artificial Sequence
  Description of Artificial Sequence: Synthetic oligonucleotide
cuaccacgaucacggagcc

SEQ ID NO: 815267 - RNA, 19 nt, Artificial Sequence
  Description of Artificial Sequence: Synthetic oligonucleotide
ucggagcucuuuuaccaaa

SEQ ID NO: 815268 - RNA, 19 nt, Artificial Sequence
  Description of Artificial Sequence: Synthetic oligonucleotide
gacguguagcucaugaacu

SEQ ID NO: 815269 - RNA, 19 nt, Artificial Sequence
  Description of Artificial Sequence: Synthetic oligonucleotide
uacuauacgaaaggcucuu

SEQ ID NO: 815270 - RNA, 19 nt, Artificial Sequence
  Description of Artificial Sequence: Synthetic oligonucleotide
acacuugauuuagagccca

SEQ ID NO: 815271 - RNA, 19 nt, Artificial Sequence
  Description of Artificial Sequence: Synthetic oligonucleotide
ggaucuaaguagagcaccc

SEQ ID NO: 815272 - RNA, 19 nt, Artificial Sequence
  Description of Artificial Sequence: Synthetic oligonucleotide
gauucccguugacuuguac

SEQ ID NO: 815273 - RNA, 19 nt, Artificial Sequence
  Description of Artificial Sequence: Synthetic oligonucleotide
cuguaucaaaauagugcga

SEQ ID NO: 815274 - RNA, 19 nt, Artificial Sequence
  Description of Artificial Sequence: Synthetic oligonucleotide
uaccuuaagacagcagguu

SEQ ID NO: 815275 - RNA, 19 nt, Artificial Sequence
  Description of Artificial Sequence: Synthetic oligonucleotide
gacuaccuuaagacagcag

SEQ ID NO: 815276 - RNA, 19 nt, Artificial Sequence
  Description of Artificial Sequence: Synthetic oligonucleotide
ccacauauuaauucuaugu

SEQ ID NO: 815277 - RNA, 19 nt, Artificial Sequence
  Description of Artificial Sequence: Synthetic oligonucleotide
gacuugaggucgcgccccg

SEQ ID NO: 815278 - RNA, 19 nt, Artificial Sequence
  Description of Artificial Sequence: Synthetic oligonucleotide
gaucuaaguagagcaccca

SEQ ID NO: 815279 - RNA, 19 nt, Artificial Sequence
  Description of Artificial Sequence: Synthetic oligonucleotide
ugcauguaugaggucgggu

SEQ ID NO: 815280 - RNA, 19 nt, Artificial Sequence
  Description of Artificial Sequence: Synthetic oligonucleotide
agggaccggccucucgaac

SEQ ID NO: 815281 - RNA, 19 nt, Artificial Sequence
  Description of Artificial Sequence: Synthetic oligonucleotide
acguguagcucaugaacuu

SEQ ID NO: 815282 - RNA, 19 nt, Artificial Sequence
  Description of Artificial Sequence: Synthetic oligonucleotide
caaaugguuaucugcuugu

SEQ ID NO: 815283 - RNA, 19 nt, Artificial Sequence
  Description of Artificial Sequence: Synthetic oligonucleotide
guggcagcggacgaaacca

SEQ ID NO: 815284 - RNA, 19 nt, Artificial Sequence
  Description of Artificial Sequence: Synthetic oligonucleotide
cuuaacugaaacguaguau

SEQ ID NO: 815285 - RNA, 19 nt, Artificial Sequence
  Description of Artificial Sequence: Synthetic oligonucleotide
gguggcagcggacgaaacc

SEQ ID NO: 815286 - RNA, 19 nt, Artificial Sequence
  Description of Artificial Sequence: Synthetic oligonucleotide
ucaacgccuucaacggcuc

SEQ ID NO: 815287 - RNA, 19 nt, Artificial Sequence
  Description of Artificial Sequence: Synthetic oligonucleotide
acgaaaccaacacgagaaa

SEQ ID NO: 815288 - RNA, 19 nt, Artificial Sequence
  Description of Artificial Sequence: Synthetic oligonucleotide
guuacagcguagcugcacu

SEQ ID NO: 815289 - RNA, 19 nt, Artificial Sequence
  Description of Artificial Sequence: Synthetic oligonucleotide
ucgggucuucacauuuuau

SEQ ID NO: 815290 - RNA, 19 nt, Artificial Sequence
  Description of Artificial Sequence: Synthetic oligonucleotide
acacgagaaaagucucaaa

SEQ ID NO: 815291 - RNA, 19 nt, Artificial Sequence
  Description of Artificial Sequence: Synthetic oligonucleotide
cgaaccaccgucugggugc

SEQ ID NO: 815292 - RNA, 19 nt, Artificial Sequence
  Description of Artificial Sequence: Synthetic oligonucleotide
cagaccccuaucauggcga

SEQ ID NO: 815293 - RNA, 19 nt, Artificial Sequence
  Description of Artificial Sequence: Synthetic oligonucleotide
cuaccuuaagacagcaggu

SEQ ID NO: 815294 - RNA, 19 nt, Artificial Sequence
  Description of Artificial Sequence: Synthetic oligonucleotide
acuauacgaaaggcucuug

SEQ ID NO: 815295 - RNA, 19 nt, Artificial Sequence
  Description of Artificial Sequence: Synthetic oligonucleotide
uggcgaugauucugcuucc

SEQ ID NO: 815296 - RNA, 19 nt, Artificial Sequence
  Description of Artificial Sequence: Synthetic oligonucleotide
ggacgaaaccaacacgaga

SEQ ID NO: 815297 - RNA, 19 nt, Artificial Sequence
  Description of Artificial Sequence: Synthetic oligonucleotide
aucacuuaacugaaacgua

SEQ ID NO: 815298 - RNA, 19 nt, Artificial Sequence
  Description of Artificial Sequence: Synthetic oligonucleotide
gggaucacggaaacauggg

SEQ ID NO: 815299 - RNA, 19 nt, Artificial Sequence
  Description of Artificial Sequence: Synthetic oligonucleotide
ugggaacgguuuguagaag

SEQ ID NO: 815300 - RNA, 19 nt, Artificial Sequence
  Description of Artificial Sequence: Synthetic oligonucleotide
ggagcucuuuuaccaaaug

SEQ ID NO: 815301 - RNA, 19 nt, Artificial Sequence
  Description of Artificial Sequence: Synthetic oligonucleotide
cacuaugcacuaguaucac

SEQ ID NO: 815302 - RNA, 19 nt, Artificial Sequence
  Description of Artificial Sequence: Synthetic oligonucleotide
aaaccaguuuacacaccaa

SEQ ID NO: 815303 - RNA, 19 nt, Artificial Sequence
  Description of Artificial Sequence: Synthetic oligonucleotide
aggcgcuaaugcagaacgc

SEQ ID NO: 815304 - RNA, 19 nt, Artificial Sequence
  Description of Artificial Sequence: Synthetic oligonucleotide
uuacagcguagcugcacua

SEQ ID NO: 815305 - RNA, 19 nt, Artificial Sequence
  Description of Artificial Sequence: Synthetic oligonucleotide
uacagcguagcugcacuau

SEQ ID NO: 815306 - RNA, 19 nt, Artificial Sequence
  Description of Artificial Sequence: Synthetic oligonucleotide
acauggguuuaugcagaag

SEQ ID NO: 815307 - RNA, 19 nt, Artificial Sequence
  Description of Artificial Sequence: Synthetic oligonucleotide
cuauacgaaaggcucuugu

SEQ ID NO: 815308 - RNA, 19 nt, Artificial Sequence
  Description of Artificial Sequence: Synthetic oligonucleotide
aggcaaguucacaugggga

SEQ ID NO: 815309 - RNA, 19 nt, Artificial Sequence
  Description of Artificial Sequence: Synthetic oligonucleotide
acggaaacauggguuuaug

SEQ ID NO: 815310 - RNA, 19 nt, Artificial Sequence
  Description of Artificial Sequence: Synthetic oligonucleotide
augcuaacugccggggucu

SEQ ID NO: 815311 - RNA, 19 nt, Artificial Sequence
  Description of Artificial Sequence: Synthetic oligonucleotide
ggcuuucacaaaguguuac

SEQ ID NO: 815312 - RNA, 19 nt, Artificial Sequence
  Description of Artificial Sequence: Synthetic oligonucleotide
cauucacuaccacgaucac

SEQ ID NO: 815313 - RNA, 19 nt, Artificial Sequence
  Description of Artificial Sequence: Synthetic oligonucleotide
gcgcacugaguucugcagg

SEQ ID NO: 815314 - RNA, 19 nt, Artificial Sequence
  Description of Artificial Sequence: Synthetic oligonucleotide
aguggcgaugauucugcuu

SEQ ID NO: 815315 - RNA, 19 nt, Artificial Sequence
  Description of Artificial Sequence: Synthetic oligonucleotide
ccaacacgagaaaagucuc

SEQ ID NO: 815316 - RNA, 19 nt, Artificial Sequence
  Description of Artificial Sequence: Synthetic oligonucleotide
gaucacggaaacauggguu

SEQ ID NO: 815317 - RNA, 19 nt, Artificial Sequence
  Description of Artificial Sequence: Synthetic oligonucleotide
gcggacgaaaccaacacga

SEQ ID NO: 815318 - RNA, 19 nt, Artificial Sequence
  Description of Artificial Sequence: Synthetic oligonucleotide
cacacugacacuccauugu

SEQ ID NO: 815319 - RNA, 19 nt, Artificial Sequence
  Description of Artificial Sequence: Synthetic oligonucleotide
gcgauuacagucccauuuc

SEQ ID NO: 815320 - RNA, 19 nt, Artificial Sequence
  Description of Artificial Sequence: Synthetic oligonucleotide
gcacuaugcacuaguauca

SEQ ID NO: 815321 - RNA, 19 nt, Artificial Sequence
  Description of Artificial Sequence: Synthetic oligonucleotide
cauguucuagcuuguauuu

SEQ ID NO: 815322 - RNA, 19 nt, Artificial Sequence
  Description of Artificial Sequence: Synthetic oligonucleotide
caaggcgcuaaugcagaac

SEQ ID NO: 815323 - RNA, 19 nt, Artificial Sequence
  Description of Artificial Sequence: Synthetic oligonucleotide
aaggcgucuccgaggacgu

SEQ ID NO: 815324 - RNA, 19 nt, Artificial Sequence
  Description of Artificial Sequence: Synthetic oligonucleotide
cacagaguuggaucuaagu

SEQ ID NO: 815325 - RNA, 19 nt, Artificial Sequence
  Description of Artificial Sequence: Synthetic oligonucleotide
guagaaucacacuccuuau

SEQ ID NO: 815326 - RNA, 19 nt, Artificial Sequence
  Description of Artificial Sequence: Synthetic oligonucleotide
cacuuaacugaaacguagu

SEQ ID NO: 815327 - RNA, 19 nt, Artificial Sequence
  Description of Artificial Sequence: Synthetic oligonucleotide
gcaguggcgaugauucugc

SEQ ID NO: 815328 - RNA, 19 nt, Artificial Sequence
  Description of Artificial Sequence: Synthetic oligonucleotide
ucacuaccacgaucacgga

SEQ ID NO: 815329 - RNA, 19 nt, Artificial Sequence
  Description of Artificial Sequence: Synthetic oligonucleotide
gcaauggauagguugugua

SEQ ID NO: 815330 - RNA, 19 nt, Artificial Sequence
  Description of Artificial Sequence: Synthetic oligonucleotide
augcagugcuguaucaaaa

SEQ ID NO: 815331 - RNA, 19 nt, Artificial Sequence
  Description of Artificial Sequence: Synthetic oligonucleotide
gaauuccgugauugugaaa

SEQ ID NO: 815332 - RNA, 19 nt, Artificial Sequence
  Description of Artificial Sequence: Synthetic oligonucleotide
agcagguuaaugacauuua

SEQ ID NO: 815333 - RNA, 19 nt, Artificial Sequence
  Description of Artificial Sequence: Synthetic oligonucleotide
gaggucgcgccccgcagca

SEQ ID NO: 815334 - RNA, 19 nt, Artificial Sequence
  Description of Artificial Sequence: Synthetic oligonucleotide
auuucccagaccagaccgu

SEQ ID NO: 815335 - RNA, 19 nt, Artificial Sequence
  Description of Artificial Sequence: Synthetic oligonucleotide
ucacggaaacauggguuua

SEQ ID NO: 815336 - RNA, 19 nt, Artificial Sequence
  Description of Artificial Sequence: Synthetic oligonucleotide
cgauuacagucccauuucc

SEQ ID NO: 815337 - RNA, 19 nt, Artificial Sequence
  Description of Artificial Sequence: Synthetic oligonucleotide
ggguuuaugcagaaguugu

SEQ ID NO: 815338 - RNA, 19 nt, Artificial Sequence
  Description of Artificial Sequence: Synthetic oligonucleotide
ugccagacguguagcucau

SEQ ID NO: 815339 - RNA, 19 nt, Artificial Sequence
  Description of Artificial Sequence: Synthetic oligonucleotide
caagaccucuuaauacugu

SEQ ID NO: 815340 - RNA, 19 nt, Artificial Sequence
  Description of Artificial Sequence: Synthetic oligonucleotide
ugcuugggaacgguuugua

SEQ ID NO: 815341 - RNA, 19 nt, Artificial Sequence
  Description of Artificial Sequence: Synthetic oligonucleotide
cagacguguagcucaugaa

SEQ ID NO: 815342 - RNA, 19 nt, Artificial Sequence
  Description of Artificial Sequence: Synthetic oligonucleotide
gaacgguuuguagaaggau

SEQ ID NO: 815343 - RNA, 19 nt, Artificial Sequence
  Description of Artificial Sequence: Synthetic oligonucleotide
gucuccgaggacgugcaga

SEQ ID NO: 815344 - RNA, 19 nt, Artificial Sequence
  Description of Artificial Sequence: Synthetic oligonucleotide
gucgggucuucacauuuua

SEQ ID NO: 815345 - RNA, 19 nt, Artificial Sequence
  Description of Artificial Sequence: Synthetic oligonucleotide
ggaucacggaaacaugggu

SEQ ID NO: 815346 - RNA, 19 nt, Artificial Sequence
  Description of Artificial Sequence: Synthetic oligonucleotide
ggggacuacacuugauuua

SEQ ID NO: 815347 - RNA, 19 nt, Artificial Sequence
  Description of Artificial Sequence: Synthetic oligonucleotide
guaucaaaauagugcgauu

SEQ ID NO: 815348 - RNA, 19 nt, Artificial Sequence
  Description of Artificial Sequence: Synthetic oligonucleotide
cugccggggucuugucugc

SEQ ID NO: 815349 - RNA, 19 nt, Artificial Sequence
  Description of Artificial Sequence: Synthetic oligonucleotide
ucccguugacuuguacauc

SEQ ID NO: 815350 - RNA, 19 nt, Artificial Sequence
  Description of Artificial Sequence: Synthetic oligonucleotide
gaacgcucucuuaugcagu

SEQ ID NO: 815351 - RNA, 19 nt, Artificial Sequence
  Description of Artificial Sequence: Synthetic oligonucleotide
cugugcgaccagacaagga

SEQ ID NO: 815352 - RNA, 19 nt, Artificial Sequence
  Description of Artificial Sequence: Synthetic oligonucleotide
gcguagcugcacuaugcac

SEQ ID NO: 815353 - RNA, 19 nt, Artificial Sequence
  Description of Artificial Sequence: Synthetic oligonucleotide
acggcucggagcucuuuua

SEQ ID NO: 815354 - RNA, 19 nt, Artificial Sequence
  Description of Artificial Sequence: Synthetic oligonucleotide
gaggacgugcagaaacacu

SEQ ID NO: 815355 - RNA, 19 nt, Artificial Sequence
  Description of Artificial Sequence: Synthetic oligonucleotide
gacuucaauuacacuacuu

SEQ ID NO: 815356 - RNA, 19 nt, Artificial Sequence
  Description of Artificial Sequence: Synthetic oligonucleotide
ccuucaacggcucggagcu

SEQ ID NO: 815357 - RNA, 19 nt, Artificial Sequence
  Description of Artificial Sequence: Synthetic oligonucleotide
ccacgcuggcaaauucagg

SEQ ID NO: 815358 - RNA, 19 nt, Artificial Sequence
  Description of Artificial Sequence: Synthetic oligonucleotide
uggcaaauucaggcuggau

SEQ ID NO: 815359 - RNA, 19 nt, Artificial Sequence
  Description of Artificial Sequence: Synthetic oligonucleotide
ccagcaagcugccagacgu

SEQ ID NO: 815360 - RNA, 19 nt, Artificial Sequence
  Description of Artificial Sequence: Synthetic oligonucleotide
agagcccacgcuggcaaau

SEQ ID NO: 815361 - RNA, 19 nt, Artificial Sequence
  Description of Artificial Sequence: Synthetic oligonucleotide
gcagguuaaugacauuuau

SEQ ID NO: 815362 - RNA, 19 nt, Artificial Sequence
  Description of Artificial Sequence: Synthetic oligonucleotide
cacgaucacggagcccaag

SEQ ID NO: 815363 - RNA, 19 nt, Artificial Sequence
  Description of Artificial Sequence: Synthetic oligonucleotide
uaacugccggggucuuguc

SEQ ID NO: 815364 - RNA, 19 nt, Artificial Sequence
  Description of Artificial Sequence: Synthetic oligonucleotide
cuuaagacagcagguuaau

SEQ ID NO: 815365 - RNA, 19 nt, Artificial Sequence
  Description of Artificial Sequence: Synthetic oligonucleotide
acgccuucaacggcucgga

SEQ ID NO: 815366 - RNA, 19 nt, Artificial Sequence
  Description of Artificial Sequence: Synthetic oligonucleotide
cuccauugugcuguuucaa

SEQ ID NO: 815367 - RNA, 19 nt, Artificial Sequence
  Description of Artificial Sequence: Synthetic oligonucleotide
cgaucacggagcccaaggc

SEQ ID NO: 815368 - RNA, 19 nt, Artificial Sequence
  Description of Artificial Sequence: Synthetic oligonucleotide
gcagcggacgaaaccaaca

SEQ ID NO: 815369 - RNA, 19 nt, Artificial Sequence
  Description of Artificial Sequence: Synthetic oligonucleotide
ggcgcuaaugcagaacgcu

SEQ ID NO: 815370 - RNA, 19 nt, Artificial Sequence
  Description of Artificial Sequence: Synthetic oligonucleotide
cggacgaaaccaacacgag

SEQ ID NO: 815371 - RNA, 19 nt, Artificial Sequence
  Description of Artificial Sequence: Synthetic oligonucleotide
ggacuucaauuacacuacu

SEQ ID NO: 815372 - RNA, 19 nt, Artificial Sequence
  Description of Artificial Sequence: Synthetic oligonucleotide
gcgcuaaugcagaacgcuc

SEQ ID NO: 815373 - RNA, 19 nt, Artificial Sequence
  Description of Artificial Sequence: Synthetic oligonucleotide
cccaaggcgucuccgagga

SEQ ID NO: 815374 - RNA, 19 nt, Artificial Sequence
  Description of Artificial Sequence: Synthetic oligonucleotide
cuggcaaauucaggcugga

SEQ ID NO: 815375 - RNA, 19 nt, Artificial Sequence
  Description of Artificial Sequence: Synthetic oligonucleotide
ggcagcggacgaaaccaac

SEQ ID NO: 815376 - RNA, 19 nt, Artificial Sequence
  Description of Artificial Sequence: Synthetic oligonucleotide
ccgaggacgugcagaaaca

SEQ ID NO: 815377 - RNA, 19 nt, Artificial Sequence
  Description of Artificial Sequence: Synthetic oligonucleotide
acacaucuguauggauaua

SEQ ID NO: 815378 - RNA, 19 nt, Artificial Sequence
  Description of Artificial Sequence: Synthetic oligonucleotide
gaccccuaucauggcgauc

SEQ ID NO: 815379 - RNA, 19 nt, Artificial Sequence
  Description of Artificial Sequence: Synthetic oligonucleotide
gcaaguucacauggggacu

SEQ ID NO: 815380 - RNA, 19 nt, Artificial Sequence
  Description of Artificial Sequence: Synthetic oligonucleotide
aggucgcgccccgcagcac

SEQ ID NO: 815381 - RNA, 19 nt, Artificial Sequence
  Description of Artificial Sequence: Synthetic oligonucleotide
ugcuaacugccggggucuu

SEQ ID NO: 815382 - RNA, 19 nt, Artificial Sequence
  Description of Artificial Sequence: Synthetic oligonucleotide
gucgcgccccgcagcacug

SEQ ID NO: 815383 - RNA, 19 nt, Artificial Sequence
  Description of Artificial Sequence: Synthetic oligonucleotide
cgaggacgugcagaaacac

SEQ ID NO: 815384 - RNA, 19 nt, Artificial Sequence
  Description of Artificial Sequence: Synthetic oligonucleotide
gcugcacuaugcacuagua

SEQ ID NO: 815385 - RNA, 19 nt, Artificial Sequence
  Description of Artificial Sequence: Synthetic oligonucleotide
gaggucgggucuucacauu

SEQ ID NO: 815386 - RNA, 19 nt, Artificial Sequence
  Description of Artificial Sequence: Synthetic oligonucleotide
gcccacgcuggcaaauuca

SEQ ID NO: 815387 - RNA, 19 nt, Artificial Sequence
  Description of Artificial Sequence: Synthetic oligonucleotide
gcuaacugccggggucuug

SEQ ID NO: 815388 - RNA, 19 nt, Artificial Sequence
  Description of Artificial Sequence: Synthetic oligonucleotide
cagggaccggccucucgaa

SEQ ID NO: 815389 - RNA, 19 nt, Artificial Sequence
  Description of Artificial Sequence: Synthetic oligonucleotide
gcucucuuaugcaguucca

SEQ ID NO: 815390 - RNA, 19 nt, Artificial Sequence
  Description of Artificial Sequence: Synthetic oligonucleotide
gaccggccucucgaaccac

SEQ ID NO: 815391 - RNA, 19 nt, Artificial Sequence
  Description of Artificial Sequence: Synthetic oligonucleotide
gaaccaccgucugggugcu

SEQ ID NO: 815392 - RNA, 19 nt, Artificial Sequence
  Description of Artificial Sequence: Synthetic oligonucleotide
cacggaaacauggguuuau

SEQ ID NO: 815393 - RNA, 19 nt, Artificial Sequence
  Description of Artificial Sequence: Synthetic oligonucleotide
ggcucuugugccagugaaa

SEQ ID NO: 815394 - RNA, 19 nt, Artificial Sequence
  Description of Artificial Sequence: Synthetic oligonucleotide
ccccgcauguucagcugug

SEQ ID NO: 815395 - RNA, 19 nt, Artificial Sequence
  Description of Artificial Sequence: Synthetic oligonucleotide
ucgcgccccgcagcacugc

SEQ ID NO: 815396 - RNA, 19 nt, Artificial Sequence
  Description of Artificial Sequence: Synthetic oligonucleotide
ccgcauguucagcugugca

SEQ ID NO: 815397 - RNA, 19 nt, Artificial Sequence
  Description of Artificial Sequence: Synthetic oligonucleotide
cccgcauguucagcugugc

SEQ ID NO: 815398 - RNA, 19 nt, Artificial Sequence
  Description of Artificial Sequence: Synthetic oligonucleotide
aaccaccgucugggugcug

SEQ ID NO: 815399 - RNA, 19 nt, Artificial Sequence
  Description of Artificial Sequence: Synthetic oligonucleotide
ggucgcgccccgcagcacu

SEQ ID NO: 815400 - RNA, 19 nt, Artificial Sequence
  Description of Artificial Sequence: Synthetic oligonucleotide
ccuugauaagauucccguu

SEQ ID NO: 815401 - RNA, 19 nt, Artificial Sequence
  Description of Artificial Sequence: Synthetic oligonucleotide
agauucccguugacuugua

SEQ ID NO: 815402 - RNA, 19 nt, Artificial Sequence
  Description of Artificial Sequence: Synthetic oligonucleotide
gugcgauuacagucccauu

SEQ ID NO: 815403 - RNA, 19 nt, Artificial Sequence
  Description of Artificial Sequence: Synthetic oligonucleotide
caguggcgaugauucugcu

SEQ ID NO: 815404 - RNA, 19 nt, Artificial Sequence
  Description of Artificial Sequence: Synthetic oligonucleotide
ccagaccgugaagcacuag

SEQ ID NO: 815405 - RNA, 19 nt, Artificial Sequence
  Description of Artificial Sequence: Synthetic oligonucleotide
gagcccacgcuggcaaauu

SEQ ID NO: 815406 - RNA, 19 nt, Artificial Sequence
  Description of Artificial Sequence: Synthetic oligonucleotide
ccaaggcgucuccgaggac

SEQ ID NO: 815407 - RNA, 19 nt, Artificial Sequence
  Description of Artificial Sequence: Synthetic oligonucleotide
cuccgaggacgugcagaaa

SEQ ID NO: 815408 - RNA, 19 nt, Artificial Sequence
  Description of Artificial Sequence: Synthetic oligonucleotide
cgccuucaacggcucggag

SEQ ID NO: 815409 - RNA, 19 nt, Artificial Sequence
  Description of Artificial Sequence: Synthetic oligonucleotide
ggucgggucuucacauuuu

SEQ ID NO: 815410 - RNA, 19 nt, Artificial Sequence
  Description of Artificial Sequence: Synthetic oligonucleotide
cgucuccgaggacgugcag

SEQ ID NO: 815411 - RNA, 19 nt, Artificial Sequence
  Description of Artificial Sequence: Synthetic oligonucleotide
cccuaucauggcgaucugu

SEQ ID NO: 815412 - RNA, 19 nt, Artificial Sequence
  Description of Artificial Sequence: Synthetic oligonucleotide
gccccgcagcacugcuuca

SEQ ID NO: 815413 - RNA, 19 nt, Artificial Sequence
  Description of Artificial Sequence: Synthetic oligonucleotide
caacggcucggagcucuuu

SEQ ID NO: 815414 - RNA, 19 nt, Artificial Sequence
  Description of Artificial Sequence: Synthetic oligonucleotide
ccgucugggugcuguugau

SEQ ID NO: 815415 - RNA, 19 nt, Artificial Sequence
  Description of Artificial Sequence: Synthetic oligonucleotide
cgugaagcacuaggacagu

SEQ ID NO: 815416 - RNA, 19 nt, Artificial Sequence
  Description of Artificial Sequence: Synthetic oligonucleotide
cgcgccccgcagcacugcu

SEQ ID NO: 815417 - RNA, 19 nt, Artificial Sequence
  Description of Artificial Sequence: Synthetic oligonucleotide
gcgccccgcagcacugcuu

SEQ ID NO: 815418 - RNA, 19 nt, Artificial Sequence
  Description of Artificial Sequence: Synthetic oligonucleotide
aauguugacuuccacaacc

SEQ ID NO: 815419 - RNA, 19 nt, Artificial Sequence
  Description of Artificial Sequence: Synthetic oligonucleotide
aacacugauacuuaagccg

SEQ ID NO: 815420 - RNA, 19 nt, Artificial Sequence
  Description of Artificial Sequence: Synthetic oligonucleotide
aaauuuagcagcauuguag

SEQ ID NO: 815421 - RNA, 19 nt, Artificial Sequence
  Description of Artificial Sequence: Synthetic oligonucleotide
uuaucguacaccuguaagg

SEQ ID NO: 815422 - RNA, 19 nt, Artificial Sequence
  Description of Artificial Sequence: Synthetic oligonucleotide
aauaugcucaaaccguccg

SEQ ID NO: 815423 - RNA, 19 nt, Artificial Sequence
  Description of Artificial Sequence: Synthetic oligonucleotide
uuaacagaaaggaaaggga

SEQ ID NO: 815424 - RNA, 19 nt, Artificial Sequence
  Description of Artificial Sequence: Synthetic oligonucleotide
aagaaauguggccacguag

SEQ ID NO: 815425 - RNA, 19 nt, Artificial Sequence
  Description of Artificial Sequence: Synthetic oligonucleotide
agacaaacgacacaccccg

SEQ ID NO: 815426 - RNA, 19 nt, Artificial Sequence
  Description of Artificial Sequence: Synthetic oligonucleotide
uucaauaugcucaaaccgu

SEQ ID NO: 815427 - RNA, 19 nt, Artificial Sequence
  Description of Artificial Sequence: Synthetic oligonucleotide
ugguagacuccauugaggg

SEQ ID NO: 815428 - RNA, 19 nt, Artificial Sequence
  Description of Artificial Sequence: Synthetic oligonucleotide
acaaugagaacugucgagc

SEQ ID NO: 815429 - RNA, 19 nt, Artificial Sequence
  Description of Artificial Sequence: Synthetic oligonucleotide
aucacaaaaccaucugagc

SEQ ID NO: 815430 - RNA, 19 nt, Artificial Sequence
  Description of Artificial Sequence: Synthetic oligonucleotide
aagcggagaaauguaaucg

SEQ ID NO: 815431 - RNA, 19 nt, Artificial Sequence
  Description of Artificial Sequence: Synthetic oligonucleotide
uucguaugcuaucugagug

SEQ ID NO: 815432 - RNA, 19 nt, Artificial Sequence
  Description of Artificial Sequence: Synthetic oligonucleotide
uccgaggacaaaauuaaug

SEQ ID NO: 815433 - RNA, 19 nt, Artificial Sequence
  Description of Artificial Sequence: Synthetic oligonucleotide
uuuaauguccagaggcaag

SEQ ID NO: 815434 - RNA, 19 nt, Artificial Sequence
  Description of Artificial Sequence: Synthetic oligonucleotide
cuuaagcugacauaguguc

SEQ ID NO: 815435 - RNA, 19 nt, Artificial Sequence
  Description of Artificial Sequence: Synthetic oligonucleotide
acaaacgacacaccccgcc

SEQ ID NO: 815436 - RNA, 19 nt, Artificial Sequence
  Description of Artificial Sequence: Synthetic oligonucleotide
guagacucgguacacaugc

SEQ ID NO: 815437 - RNA, 19 nt, Artificial Sequence
  Description of Artificial Sequence: Synthetic oligonucleotide
aacaccucaaacauccagg

SEQ ID NO: 815438 - RNA, 19 nt, Artificial Sequence
  Description of Artificial Sequence: Synthetic oligonucleotide
uaauagaauucggagaagc

SEQ ID NO: 815439 - RNA, 19 nt, Artificial Sequence
  Description of Artificial Sequence: Synthetic oligonucleotide
ggugcaauaauagaauucg

SEQ ID NO: 815440 - RNA, 19 nt, Artificial Sequence
  Description of Artificial Sequence: Synthetic oligonucleotide
augguaugggcuuacagug

SEQ ID NO: 815441 - RNA, 19 nt, Artificial Sequence
  Description of Artificial Sequence: Synthetic oligonucleotide
agcggagaaauguaaucgc

SEQ ID NO: 815442 - RNA, 19 nt, Artificial Sequence
  Description of Artificial Sequence: Synthetic oligonucleotide
uguggaacaccucaaacau

SEQ ID NO: 815443 - RNA, 19 nt, Artificial Sequence
  Description of Artificial Sequence: Synthetic oligonucleotide
agggaugucggucaagagg

SEQ ID NO: 815444 - RNA, 19 nt, Artificial Sequence
  Description of Artificial Sequence: Synthetic oligonucleotide
ugccggauaucucucaagg

SEQ ID NO: 815445 - RNA, 19 nt, Artificial Sequence
  Description of Artificial Sequence: Synthetic oligonucleotide
auucaaauggcaaugccuc

SEQ ID NO: 815446 - RNA, 19 nt, Artificial Sequence
  Description of Artificial Sequence: Synthetic oligonucleotide
uccuuaagcugacauagug

SEQ ID NO: 815447 - RNA, 19 nt, Artificial Sequence
  Description of Artificial Sequence: Synthetic oligonucleotide
aaugagaacugucgagcag

SEQ ID NO: 815448 - RNA, 19 nt, Artificial Sequence
  Description of Artificial Sequence: Synthetic oligonucleotide
uguagaggccuccuuaagc

SEQ ID NO: 815449 - RNA, 19 nt, Artificial Sequence
  Description of Artificial Sequence: Synthetic oligonucleotide
uuaauuucaucaccacggc

SEQ ID NO: 815450 - RNA, 19 nt, Artificial Sequence
  Description of Artificial Sequence: Synthetic oligonucleotide
uaugcuaucugaguggaca

SEQ ID NO: 815451 - RNA, 19 nt, Artificial Sequence
  Description of Artificial Sequence: Synthetic oligonucleotide
aaaagcggguccuguaaag

SEQ ID NO: 815452 - RNA, 19 nt, Artificial Sequence
  Description of Artificial Sequence: Synthetic oligonucleotide
uggcaaugccucuagacag

SEQ ID NO: 815453 - RNA, 19 nt, Artificial Sequence
  Description of Artificial Sequence: Synthetic oligonucleotide
aaagggaucacaaaaccau

SEQ ID NO: 815454 - RNA, 19 nt, Artificial Sequence
  Description of Artificial Sequence: Synthetic oligonucleotide
ugucaagaauaccagcugu

SEQ ID NO: 815455 - RNA, 19 nt, Artificial Sequence
  Description of Artificial Sequence: Synthetic oligonucleotide
ucguaugcuaucugagugg

SEQ ID NO: 815456 - RNA, 19 nt, Artificial Sequence
  Description of Artificial Sequence: Synthetic oligonucleotide
cuuaucguacaccuguaag

SEQ ID NO: 815457 - RNA, 19 nt, Artificial Sequence
  Description of Artificial Sequence: Synthetic oligonucleotide
aaagugcacagggaugucg

SEQ ID NO: 815458 - RNA, 19 nt, Artificial Sequence
  Description of Artificial Sequence: Synthetic oligonucleotide
uagacaaacgacacacccc

SEQ ID NO: 815459 - RNA, 19 nt, Artificial Sequence
  Description of Artificial Sequence: Synthetic oligonucleotide
uaucguacaccuguaaggc

SEQ ID NO: 815460 - RNA, 19 nt, Artificial Sequence
  Description of Artificial Sequence: Synthetic oligonucleotide
cucacuaccgggaauguug

SEQ ID NO: 815461 - RNA, 19 nt, Artificial Sequence
  Description of Artificial Sequence: Synthetic oligonucleotide
auucgcaagacauccucgg

SEQ ID NO: 815462 - RNA, 19 nt, Artificial Sequence
  Description of Artificial Sequence: Synthetic oligonucleotide
cugauacuuaagccgaugg

SEQ ID NO: 815463 - RNA, 19 nt, Artificial Sequence
  Description of Artificial Sequence: Synthetic oligonucleotide
ucaauaugcucaaaccguc

SEQ ID NO: 815464 - RNA, 19 nt, Artificial Sequence
  Description of Artificial Sequence: Synthetic oligonucleotide
aaacgugaauucccuuuuc

SEQ ID NO: 815465 - RNA, 19 nt, Artificial Sequence
  Description of Artificial Sequence: Synthetic oligonucleotide
uaaucugucuucauaucuc

SEQ ID NO: 815466 - RNA, 19 nt, Artificial Sequence
  Description of Artificial Sequence: Synthetic oligonucleotide
gagacaaugcaaccacagg

SEQ ID NO: 815467 - RNA, 19 nt, Artificial Sequence
  Description of Artificial Sequence: Synthetic oligonucleotide
uuaauguccagaggcaagc

SEQ ID NO: 815468 - RNA, 19 nt, Artificial Sequence
  Description of Artificial Sequence: Synthetic oligonucleotide
auucggagaagccauagaa

SEQ ID NO: 815469 - RNA, 19 nt, Artificial Sequence
  Description of Artificial Sequence: Synthetic oligonucleotide
ugauacuuaagccgaugga

SEQ ID NO: 815470 - RNA, 19 nt, Artificial Sequence
  Description of Artificial Sequence: Synthetic oligonucleotide
gaggacaaaauuaaugcca

SEQ ID NO: 815471 - RNA, 19 nt, Artificial Sequence
  Description of Artificial Sequence: Synthetic oligonucleotide
aacccaagaaauguggcca

SEQ ID NO: 815472 - RNA, 19 nt, Artificial Sequence
  Description of Artificial Sequence: Synthetic oligonucleotide
gaacaccucaaacauccag

SEQ ID NO: 815473 - RNA, 19 nt, Artificial Sequence
  Description of Artificial Sequence: Synthetic oligonucleotide
uaaauuuagcagcauugua

SEQ ID NO: 815474 - RNA, 19 nt, Artificial Sequence
  Description of Artificial Sequence: Synthetic oligonucleotide
uguauucaaauggcaaugc

SEQ ID NO: 815475 - RNA, 19 nt, Artificial Sequence
  Description of Artificial Sequence: Synthetic oligonucleotide
agcauuaccaccaaaccca

SEQ ID NO: 815476 - RNA, 19 nt, Artificial Sequence
  Description of Artificial Sequence: Synthetic oligonucleotide
aaagcggguccuguaaagg

SEQ ID NO: 815477 - RNA, 19 nt, Artificial Sequence
  Description of Artificial Sequence: Synthetic oligonucleotide
uucauaucucugccgagca

SEQ ID NO: 815478 - RNA, 19 nt, Artificial Sequence
  Description of Artificial Sequence: Synthetic oligonucleotide
uguccuuuuccguacgaug

SEQ ID NO: 815479 - RNA, 19 nt, Artificial Sequence
  Description of Artificial Sequence: Synthetic oligonucleotide
uuuguguuuugcccguggc

SEQ ID NO: 815480 - RNA, 19 nt, Artificial Sequence
  Description of Artificial Sequence: Synthetic oligonucleotide
agaaauguaaucgcugacu

SEQ ID NO: 815481 - RNA, 19 nt, Artificial Sequence
  Description of Artificial Sequence: Synthetic oligonucleotide
aaacgacacaccccgccag

SEQ ID NO: 815482 - RNA, 19 nt, Artificial Sequence
  Description of Artificial Sequence: Synthetic oligonucleotide
uguguuuugcccguggcac

SEQ ID NO: 815483 - RNA, 19 nt, Artificial Sequence
  Description of Artificial Sequence: Synthetic oligonucleotide
gaagcggagaaauguaauc

SEQ ID NO: 815484 - RNA, 19 nt, Artificial Sequence
  Description of Artificial Sequence: Synthetic oligonucleotide
cugguagacuccauugagg

SEQ ID NO: 815485 - RNA, 19 nt, Artificial Sequence
  Description of Artificial Sequence: Synthetic oligonucleotide
ccgaggacaaaauuaaugc

SEQ ID NO: 815486 - RNA, 19 nt, Artificial Sequence
  Description of Artificial Sequence: Synthetic oligonucleotide
auuuagcagcauuguaguc

SEQ ID NO: 815487 - RNA, 19 nt, Artificial Sequence
  Description of Artificial Sequence: Synthetic oligonucleotide
uaugcucaaaccguccgag

SEQ ID NO: 815488 - RNA, 19 nt, Artificial Sequence
  Description of Artificial Sequence: Synthetic oligonucleotide
guauucaaauggcaaugcc

SEQ ID NO: 815489 - RNA, 19 nt, Artificial Sequence
  Description of Artificial Sequence: Synthetic oligonucleotide
ugguaugggcuuacagugg

SEQ ID NO: 815490 - RNA, 19 nt, Artificial Sequence
  Description of Artificial Sequence: Synthetic oligonucleotide
aguuuuggggacuucguau

SEQ ID NO: 815491 - RNA, 19 nt, Artificial Sequence
  Description of Artificial Sequence: Synthetic oligonucleotide
uuaagcugacauaguguca

SEQ ID NO: 815492 - RNA, 19 nt, Artificial Sequence
  Description of Artificial Sequence: Synthetic oligonucleotide
aauucggagaagccauaga

SEQ ID NO: 815493 - RNA, 19 nt, Artificial Sequence
  Description of Artificial Sequence: Synthetic oligonucleotide
ucgacacaggucaaagucu

SEQ ID NO: 815494 - RNA, 19 nt, Artificial Sequence
  Description of Artificial Sequence: Synthetic oligonucleotide
caagauagaccacuuugug

SEQ ID NO: 815495 - RNA, 19 nt, Artificial Sequence
  Description of Artificial Sequence: Synthetic oligonucleotide
aacaccuccugccggauau

SEQ ID NO: 815496 - RNA, 19 nt, Artificial Sequence
  Description of Artificial Sequence: Synthetic oligonucleotide
guuuuggggacuucguaug

SEQ ID NO: 815497 - RNA, 19 nt, Artificial Sequence
  Description of Artificial Sequence: Synthetic oligonucleotide
cauucgcaagacauccucg

SEQ ID NO: 815498 - RNA, 19 nt, Artificial Sequence
  Description of Artificial Sequence: Synthetic oligonucleotide
uacuuaagccgauggaggu

SEQ ID NO: 815499 - RNA, 19 nt, Artificial Sequence
  Description of Artificial Sequence: Synthetic oligonucleotide
agagaggugucucuuugug

SEQ ID NO: 815500 - RNA, 19 nt, Artificial Sequence
  Description of Artificial Sequence: Synthetic oligonucleotide
uccuguaaaggauggcccc

SEQ ID NO: 815501 - RNA, 19 nt, Artificial Sequence
  Description of Artificial Sequence: Synthetic oligonucleotide
uguaugugacaggaaagga

SEQ ID NO: 815502 - RNA, 19 nt, Artificial Sequence
  Description of Artificial Sequence: Synthetic oligonucleotide
caauaugcucaaaccgucc

SEQ ID NO: 815503 - RNA, 19 nt, Artificial Sequence
  Description of Artificial Sequence: Synthetic oligonucleotide
cauagaauucacuguucug

SEQ ID NO: 815504 - RNA, 19 nt, Artificial Sequence
  Description of Artificial Sequence: Synthetic oligonucleotide
acaaacgugaauucccuuu

SEQ ID NO: 815505 - RNA, 19 nt, Artificial Sequence
  Description of Artificial Sequence: Synthetic oligonucleotide
cuauggaugcgucgcagcc

SEQ ID NO: 815506 - RNA, 19 nt, Artificial Sequence
  Description of Artificial Sequence: Synthetic oligonucleotide
aagcggguccuguaaagga

SEQ ID NO: 815507 - RNA, 19 nt, Artificial Sequence
  Description of Artificial Sequence: Synthetic oligonucleotide
uguugacuuccacaaccgc

SEQ ID NO: 815508 - RNA, 19 nt, Artificial Sequence
  Description of Artificial Sequence: Synthetic oligonucleotide
aaauguaaucgcugacuuu

SEQ ID NO: 815509 - RNA, 19 nt, Artificial Sequence
  Description of Artificial Sequence: Synthetic oligonucleotide
agagacaaugcaaccacag

SEQ ID NO: 815510 - RNA, 19 nt, Artificial Sequence
  Description of Artificial Sequence: Synthetic oligonucleotide
gaacugucgagcagugugg

SEQ ID NO: 815511 - RNA, 19 nt, Artificial Sequence
  Description of Artificial Sequence: Synthetic oligonucleotide
uuguguuuugcccguggca

SEQ ID NO: 815512 - RNA, 19 nt, Artificial Sequence
  Description of Artificial Sequence: Synthetic oligonucleotide
gaaauguggccacguagac

SEQ ID NO: 815513 - RNA, 19 nt, Artificial Sequence
  Description of Artificial Sequence: Synthetic oligonucleotide
cuucauaucucugccgagc

SEQ ID NO: 815514 - RNA, 19 nt, Artificial Sequence
  Description of Artificial Sequence: Synthetic oligonucleotide
ucagaagcggagaaaugua

SEQ ID NO: 815515 - RNA, 19 nt, Artificial Sequence
  Description of Artificial Sequence: Synthetic oligonucleotide
ggaauguugacuuccacaa

SEQ ID NO: 815516 - RNA, 19 nt, Artificial Sequence
  Description of Artificial Sequence: Synthetic oligonucleotide
gacuucguaugcuaucuga

SEQ ID NO: 815517 - RNA, 19 nt, Artificial Sequence
  Description of Artificial Sequence: Synthetic oligonucleotide
gaauucggagaagccauag

SEQ ID NO: 815518 - RNA, 19 nt, Artificial Sequence
  Description of Artificial Sequence: Synthetic oligonucleotide
uauggaugcgucgcagccg

SEQ ID NO: 815519 - RNA, 19 nt, Artificial Sequence
  Description of Artificial Sequence: Synthetic oligonucleotide
ccucuauccacagagagcc

SEQ ID NO: 815520 - RNA, 19 nt, Artificial Sequence
  Description of Artificial Sequence: Synthetic oligonucleotide
ugucgagcaguguggagug

SEQ ID NO: 815521 - RNA, 19 nt, Artificial Sequence
  Description of Artificial Sequence: Synthetic oligonucleotide
ucauaucucugccgagcag

SEQ ID NO: 815522 - RNA, 19 nt, Artificial Sequence
  Description of Artificial Sequence: Synthetic oligonucleotide
aucaccacggcuuucgguu

SEQ ID NO: 815523 - RNA, 19 nt, Artificial Sequence
  Description of Artificial Sequence: Synthetic oligonucleotide
gaugucggucaagaggucc

SEQ ID NO: 815524 - RNA, 19 nt, Artificial Sequence
  Description of Artificial Sequence: Synthetic oligonucleotide
auagaccacuuuguggcac

SEQ ID NO: 815525 - RNA, 19 nt, Artificial Sequence
  Description of Artificial Sequence: Synthetic oligonucleotide
ucacuaccgggaauguuga

SEQ ID NO: 815526 - RNA, 19 nt, Artificial Sequence
  Description of Artificial Sequence: Synthetic oligonucleotide
ugcccauuuugcuggaucu

SEQ ID NO: 815527 - RNA, 19 nt, Artificial Sequence
  Description of Artificial Sequence: Synthetic oligonucleotide
cagcuuuaguaaauuuagc

SEQ ID NO: 815528 - RNA, 19 nt, Artificial Sequence
  Description of Artificial Sequence: Synthetic oligonucleotide
accacuuuguggcacagua

SEQ ID NO: 815529 - RNA, 19 nt, Artificial Sequence
  Description of Artificial Sequence: Synthetic oligonucleotide
acuccauugagggaagucu

SEQ ID NO: 815530 - RNA, 19 nt, Artificial Sequence
  Description of Artificial Sequence: Synthetic oligonucleotide
ucacaaggggccagggccc

SEQ ID NO: 815531 - RNA, 19 nt, Artificial Sequence
  Description of Artificial Sequence: Synthetic oligonucleotide
agcuuacaguuuuggggac

SEQ ID NO: 815532 - RNA, 19 nt, Artificial Sequence
  Description of Artificial Sequence: Synthetic oligonucleotide
cagcgugagaggcauacag

SEQ ID NO: 815533 - RNA, 19 nt, Artificial Sequence
  Description of Artificial Sequence: Synthetic oligonucleotide
augagaacugucgagcagu

SEQ ID NO: 815534 - RNA, 19 nt, Artificial Sequence
  Description of Artificial Sequence: Synthetic oligonucleotide
uuucugaaccguguuggca

SEQ ID NO: 815535 - RNA, 19 nt, Artificial Sequence
  Description of Artificial Sequence: Synthetic oligonucleotide
aguccgguggacaucacag

SEQ ID NO: 815536 - RNA, 19 nt, Artificial Sequence
  Description of Artificial Sequence: Synthetic oligonucleotide
acaguaauccuuggcagcu

SEQ ID NO: 815537 - RNA, 19 nt, Artificial Sequence
  Description of Artificial Sequence: Synthetic oligonucleotide
ggagaaauguaaucgcuga

SEQ ID NO: 815538 - RNA, 19 nt, Artificial Sequence
  Description of Artificial Sequence: Synthetic oligonucleotide
cuccauugagggaagucug

SEQ ID NO: 815539 - RNA, 19 nt, Artificial Sequence
  Description of Artificial Sequence: Synthetic oligonucleotide
aaaccguccgaggacaaaa

SEQ ID NO: 815540 - RNA, 19 nt, Artificial Sequence
  Description of Artificial Sequence: Synthetic oligonucleotide
acuucguaugcuaucugag

SEQ ID NO: 815541 - RNA, 19 nt, Artificial Sequence
  Description of Artificial Sequence: Synthetic oligonucleotide
acucgguacacaugcucag

SEQ ID NO: 815542 - RNA, 19 nt, Artificial Sequence
  Description of Artificial Sequence: Synthetic oligonucleotide
acuaccgggaauguugacu

SEQ ID NO: 815543 - RNA, 19 nt, Artificial Sequence
  Description of Artificial Sequence: Synthetic oligonucleotide
gaaauguaaucgcugacuu

SEQ ID NO: 815544 - RNA, 19 nt, Artificial Sequence
  Description of Artificial Sequence: Synthetic oligonucleotide
accaggggagcuuuaacaa

SEQ ID NO: 815545 - RNA, 19 nt, Artificial Sequence
  Description of Artificial Sequence: Synthetic oligonucleotide
acacugauacuuaagccga

SEQ ID NO: 815546 - RNA, 19 nt, Artificial Sequence
  Description of Artificial Sequence: Synthetic oligonucleotide
ugcuaucugaguggacacg

SEQ ID NO: 815547 - RNA, 19 nt, Artificial Sequence
  Description of Artificial Sequence: Synthetic oligonucleotide
cacgccagucuguuuaccc

SEQ ID NO: 815548 - RNA, 19 nt, Artificial Sequence
  Description of Artificial Sequence: Synthetic oligonucleotide
ggcacaguaauccuuggca

SEQ ID NO: 815549 - RNA, 19 nt, Artificial Sequence
  Description of Artificial Sequence: Synthetic oligonucleotide
ccggauaucucucaagggc

SEQ ID NO: 815550 - RNA, 19 nt, Artificial Sequence
  Description of Artificial Sequence: Synthetic oligonucleotide
gguaugggcuuacaguggc

SEQ ID NO: 815551 - RNA, 19 nt, Artificial Sequence
  Description of Artificial Sequence: Synthetic oligonucleotide
aacaaacgugaauucccuu

SEQ ID NO: 815552 - RNA, 19 nt, Artificial Sequence
  Description of Artificial Sequence: Synthetic oligonucleotide
caaacauccaggcugauuu

SEQ ID NO: 815553 - RNA, 19 nt, Artificial Sequence
  Description of Artificial Sequence: Synthetic oligonucleotide
auggaugcgucgcagccga

SEQ ID NO: 815554 - RNA, 19 nt, Artificial Sequence
  Description of Artificial Sequence: Synthetic oligonucleotide
ccuccuuaagcugacauag

SEQ ID NO: 815555 - RNA, 19 nt, Artificial Sequence
  Description of Artificial Sequence: Synthetic oligonucleotide
ucaguggguuucauuuuaa

SEQ ID NO: 815556 - RNA, 19 nt, Artificial Sequence
  Description of Artificial Sequence: Synthetic oligonucleotide
uuuuccguacgauggccuc

SEQ ID NO: 815557 - RNA, 19 nt, Artificial Sequence
  Description of Artificial Sequence: Synthetic oligonucleotide
cugccgagcagcauuacca

SEQ ID NO: 815558 - RNA, 19 nt, Artificial Sequence
  Description of Artificial Sequence: Synthetic oligonucleotide
ucggugcaauaauagaauu

SEQ ID NO: 815559 - RNA, 19 nt, Artificial Sequence
  Description of Artificial Sequence: Synthetic oligonucleotide
aagacauccucggugcaau

SEQ ID NO: 815560 - RNA, 19 nt, Artificial Sequence
  Description of Artificial Sequence: Synthetic oligonucleotide
uggagcgucgggagucacg

SEQ ID NO: 815561 - RNA, 19 nt, Artificial Sequence
  Description of Artificial Sequence: Synthetic oligonucleotide
uuuuccuguagaggccucc

SEQ ID NO: 815562 - RNA, 19 nt, Artificial Sequence
  Description of Artificial Sequence: Synthetic oligonucleotide
agcgucgggagucacgcca

SEQ ID NO: 815563 - RNA, 19 nt, Artificial Sequence
  Description of Artificial Sequence: Synthetic oligonucleotide
cuuaagccgauggagguca

SEQ ID NO: 815564 - RNA, 19 nt, Artificial Sequence
  Description of Artificial Sequence: Synthetic oligonucleotide
uuucccaccccuccaguua

SEQ ID NO: 815565 - RNA, 19 nt, Artificial Sequence
  Description of Artificial Sequence: Synthetic oligonucleotide
guagaggccuccuuaagcu

SEQ ID NO: 815566 - RNA, 19 nt, Artificial Sequence
  Description of Artificial Sequence: Synthetic oligonucleotide
aguuaaagcuguauucaaa

SEQ ID NO: 815567 - RNA, 19 nt, Artificial Sequence
  Description of Artificial Sequence: Synthetic oligonucleotide
ucggucaagagguccucca

SEQ ID NO: 815568 - RNA, 19 nt, Artificial Sequence
  Description of Artificial Sequence: Synthetic oligonucleotide
gaauggagcgucgggaguc

SEQ ID NO: 815569 - RNA, 19 nt, Artificial Sequence
  Description of Artificial Sequence: Synthetic oligonucleotide
uccauugcacuuccuuauc

SEQ ID NO: 815570 - RNA, 19 nt, Artificial Sequence
  Description of Artificial Sequence: Synthetic oligonucleotide
guccuguaaaggauggccc

SEQ ID NO: 815571 - RNA, 19 nt, Artificial Sequence
  Description of Artificial Sequence: Synthetic oligonucleotide
acguagacucgguacacau

SEQ ID NO: 815572 - RNA, 19 nt, Artificial Sequence
  Description of Artificial Sequence: Synthetic oligonucleotide
gauagaccacuuuguggca

SEQ ID NO: 815573 - RNA, 19 nt, Artificial Sequence
  Description of Artificial Sequence: Synthetic oligonucleotide
acugauacuuaagccgaug

SEQ ID NO: 815574 - RNA, 19 nt, Artificial Sequence
  Description of Artificial Sequence: Synthetic oligonucleotide
agugucacaaggggccagg

SEQ ID NO: 815575 - RNA, 19 nt, Artificial Sequence
  Description of Artificial Sequence: Synthetic oligonucleotide
uuaguaaauuuagcagcau

SEQ ID NO: 815576 - RNA, 19 nt, Artificial Sequence
  Description of Artificial Sequence: Synthetic oligonucleotide
aucucugccgagcagcauu

SEQ ID NO: 815577 - RNA, 19 nt, Artificial Sequence
  Description of Artificial Sequence: Synthetic oligonucleotide
acauccucggugcaauaau

SEQ ID NO: 815578 - RNA, 19 nt, Artificial Sequence
  Description of Artificial Sequence: Synthetic oligonucleotide
cugauuugaaacacugaua

SEQ ID NO: 815579 - RNA, 19 nt, Artificial Sequence
  Description of Artificial Sequence: Synthetic oligonucleotide
agcuguauucaaauggcaa

SEQ ID NO: 815580 - RNA, 19 nt, Artificial Sequence
  Description of Artificial Sequence: Synthetic oligonucleotide
acuucagcgugggagucag

SEQ ID NO: 815581 - RNA, 19 nt, Artificial Sequence
  Description of Artificial Sequence: Synthetic oligonucleotide
acaaucaguggguuucauu

SEQ ID NO: 815582 - RNA, 19 nt, Artificial Sequence
  Description of Artificial Sequence: Synthetic oligonucleotide
aacugucgagcagugugga

SEQ ID NO: 815583 - RNA, 19 nt, Artificial Sequence
  Description of Artificial Sequence: Synthetic oligonucleotide
aaccguguuggcaaauaau

SEQ ID NO: 815584 - RNA, 19 nt, Artificial Sequence
  Description of Artificial Sequence: Synthetic oligonucleotide
uuacaaucaguggguuuca

SEQ ID NO: 815585 - RNA, 19 nt, Artificial Sequence
  Description of Artificial Sequence: Synthetic oligonucleotide
uacacaugcucaguccggu

SEQ ID NO: 815586 - RNA, 19 nt, Artificial Sequence
  Description of Artificial Sequence: Synthetic oligonucleotide
ugccgagcagcauuaccac

SEQ ID NO: 815587 - RNA, 19 nt, Artificial Sequence
  Description of Artificial Sequence: Synthetic oligonucleotide
cagcgugggagucagaaaa

SEQ ID NO: 815588 - RNA, 19 nt, Artificial Sequence
  Description of Artificial Sequence: Synthetic oligonucleotide
cagucuguuuacccaggag

SEQ ID NO: 815589 - RNA, 19 nt, Artificial Sequence
  Description of Artificial Sequence: Synthetic oligonucleotide
cguguuggcaaauaaucug

SEQ ID NO: 815590 - RNA, 19 nt, Artificial Sequence
  Description of Artificial Sequence: Synthetic oligonucleotide
ccauugcacuuccuuaucg

SEQ ID NO: 815591 - RNA, 19 nt, Artificial Sequence
  Description of Artificial Sequence: Synthetic oligonucleotide
uuaagccgauggaggucag

SEQ ID NO: 815592 - RNA, 19 nt, Artificial Sequence
  Description of Artificial Sequence: Synthetic oligonucleotide
gcuaucugaguggacacgc

SEQ ID NO: 815593 - RNA, 19 nt, Artificial Sequence
  Description of Artificial Sequence: Synthetic oligonucleotide
acgccagucuguuuaccca

SEQ ID NO: 815594 - RNA, 19 nt, Artificial Sequence
  Description of Artificial Sequence: Synthetic oligonucleotide
gccgguuuaauuucaucac

SEQ ID NO: 815595 - RNA, 19 nt, Artificial Sequence
  Description of Artificial Sequence: Synthetic oligonucleotide
cuuuaauguccagaggcaa

SEQ ID NO: 815596 - RNA, 19 nt, Artificial Sequence
  Description of Artificial Sequence: Synthetic oligonucleotide
ccgguuuaauuucaucacc

SEQ ID NO: 815597 - RNA, 19 nt, Artificial Sequence
  Description of Artificial Sequence: Synthetic oligonucleotide
ucugaaccguguuggcaaa

SEQ ID NO: 815598 - RNA, 19 nt, Artificial Sequence
  Description of Artificial Sequence: Synthetic oligonucleotide
ggugcccugcuauggaugc

SEQ ID NO: 815599 - RNA, 19 nt, Artificial Sequence
  Description of Artificial Sequence: Synthetic oligonucleotide
aauggagcgucgggaguca

SEQ ID NO: 815600 - RNA, 19 nt, Artificial Sequence
  Description of Artificial Sequence: Synthetic oligonucleotide
ucaaaccguccgaggacaa

SEQ ID NO: 815601 - RNA, 19 nt, Artificial Sequence
  Description of Artificial Sequence: Synthetic oligonucleotide
uagacucgguacacaugcu

SEQ ID NO: 815602 - RNA, 19 nt, Artificial Sequence
  Description of Artificial Sequence: Synthetic oligonucleotide
uccuuaucguacaccugua

SEQ ID NO: 815603 - RNA, 19 nt, Artificial Sequence
  Description of Artificial Sequence: Synthetic oligonucleotide
gcgugagaggcauacaguc

SEQ ID NO: 815604 - RNA, 19 nt, Artificial Sequence
  Description of Artificial Sequence: Synthetic oligonucleotide
aacaacucucugguuuaaa

SEQ ID NO: 815605 - RNA, 19 nt, Artificial Sequence
  Description of Artificial Sequence: Synthetic oligonucleotide
ucaaacauccaggcugauu

SEQ ID NO: 815606 - RNA, 19 nt, Artificial Sequence
  Description of Artificial Sequence: Synthetic oligonucleotide
cugccggauaucucucaag

SEQ ID NO: 815607 - RNA, 19 nt, Artificial Sequence
  Description of Artificial Sequence: Synthetic oligonucleotide
agcauggguccaggaaugg

SEQ ID NO: 815608 - RNA, 19 nt, Artificial Sequence
  Description of Artificial Sequence: Synthetic oligonucleotide
ccugcuauggaugcgucgc

SEQ ID NO: 815609 - RNA, 19 nt, Artificial Sequence
  Description of Artificial Sequence: Synthetic oligonucleotide
cugcccauuuugcuggauc

SEQ ID NO: 815610 - RNA, 19 nt, Artificial Sequence
  Description of Artificial Sequence: Synthetic oligonucleotide
caaacgacacaccccgcca

SEQ ID NO: 815611 - RNA, 19 nt, Artificial Sequence
  Description of Artificial Sequence: Synthetic oligonucleotide
ugaaccguguuggcaaaua

SEQ ID NO: 815612 - RNA, 19 nt, Artificial Sequence
  Description of Artificial Sequence: Synthetic oligonucleotide
ggcaaauaaucugucuuca

SEQ ID NO: 815613 - RNA, 19 nt, Artificial Sequence
  Description of Artificial Sequence: Synthetic oligonucleotide
auagugucacaaggggcca

SEQ ID NO: 815614 - RNA, 19 nt, Artificial Sequence
  Description of Artificial Sequence: Synthetic oligonucleotide
guccgguggacaucacagc

SEQ ID NO: 815615 - RNA, 19 nt, Artificial Sequence
  Description of Artificial Sequence: Synthetic oligonucleotide
cgcaagacauccucggugc

SEQ ID NO: 815616 - RNA, 19 nt, Artificial Sequence
  Description of Artificial Sequence: Synthetic oligonucleotide
cucaaaccguccgaggaca

SEQ ID NO: 815617 - RNA, 19 nt, Artificial Sequence
  Description of Artificial Sequence: Synthetic oligonucleotide
cuucguaugcuaucugagu

SEQ ID NO: 815618 - RNA, 19 nt, Artificial Sequence
  Description of Artificial Sequence: Synthetic oligonucleotide
aaacucugagaugccgguu

SEQ ID NO: 815619 - RNA, 19 nt, Artificial Sequence
  Description of Artificial Sequence: Synthetic oligonucleotide
uuccguacgauggccucac

SEQ ID NO: 815620 - RNA, 19 nt, Artificial Sequence
  Description of Artificial Sequence: Synthetic oligonucleotide
gacauccucggugcaauaa

SEQ ID NO: 815621 - RNA, 19 nt, Artificial Sequence
  Description of Artificial Sequence: Synthetic oligonucleotide
cucggugcaauaauagaau

SEQ ID NO: 815622 - RNA, 19 nt, Artificial Sequence
  Description of Artificial Sequence: Synthetic oligonucleotide
ccaguuaaagcuguauuca

SEQ ID NO: 815623 - RNA, 19 nt, Artificial Sequence
  Description of Artificial Sequence: Synthetic oligonucleotide
cucaguccgguggacauca

SEQ ID NO: 815624 - RNA, 19 nt, Artificial Sequence
  Description of Artificial Sequence: Synthetic oligonucleotide
agcgugagaggcauacagu

SEQ ID NO: 815625 - RNA, 19 nt, Artificial Sequence
  Description of Artificial Sequence: Synthetic oligonucleotide
gaagccccuguggaacacc

SEQ ID NO: 815626 - RNA, 19 nt, Artificial Sequence
  Description of Artificial Sequence: Synthetic oligonucleotide
augucggucaagagguccu

SEQ ID NO: 815627 - RNA, 19 nt, Artificial Sequence
  Description of Artificial Sequence: Synthetic oligonucleotide
ccccauucgcaagacaucc

SEQ ID NO: 815628 - RNA, 19 nt, Artificial Sequence
  Description of Artificial Sequence: Synthetic oligonucleotide
accguccgaggacaaaauu

SEQ ID NO: 815629 - RNA, 19 nt, Artificial Sequence
  Description of Artificial Sequence: Synthetic oligonucleotide
ccauucgcaagacauccuc

SEQ ID NO: 815630 - RNA, 19 nt, Artificial Sequence
  Description of Artificial Sequence: Synthetic oligonucleotide
gacaaacgacacaccccgc

SEQ ID NO: 815631 - RNA, 19 nt, Artificial Sequence
  Description of Artificial Sequence: Synthetic oligonucleotide
agaugccgguuuaauuuca

SEQ ID NO: 815632 - RNA, 19 nt, Artificial Sequence
  Description of Artificial Sequence: Synthetic oligonucleotide
cauccucggugcaauaaua

SEQ ID NO: 815633 - RNA, 19 nt, Artificial Sequence
  Description of Artificial Sequence: Synthetic oligonucleotide
cggagaaauguaaucgcug

SEQ ID NO: 815634 - RNA, 19 nt, Artificial Sequence
  Description of Artificial Sequence: Synthetic oligonucleotide
guguuuugcccguggcaca

SEQ ID NO: 815635 - RNA, 19 nt, Artificial Sequence
  Description of Artificial Sequence: Synthetic oligonucleotide
cuuuuccguacgauggccu

SEQ ID NO: 815636 - RNA, 19 nt, Artificial Sequence
  Description of Artificial Sequence: Synthetic oligonucleotide
cgugagaggcauacagucc

SEQ ID NO: 815637 - RNA, 19 nt, Artificial Sequence
  Description of Artificial Sequence: Synthetic oligonucleotide
gccacguagacucgguaca

SEQ ID NO: 815638 - RNA, 19 nt, Artificial Sequence
  Description of Artificial Sequence: Synthetic oligonucleotide
cuaccgggaauguugacuu

SEQ ID NO: 815639 - RNA, 19 nt, Artificial Sequence
  Description of Artificial Sequence: Synthetic oligonucleotide
aaccguccgaggacaaaau

SEQ ID NO: 815640 - RNA, 19 nt, Artificial Sequence
  Description of Artificial Sequence: Synthetic oligonucleotide
guacgauggccucacugcu

SEQ ID NO: 815641 - RNA, 19 nt, Artificial Sequence
  Description of Artificial Sequence: Synthetic oligonucleotide
uacaaucaguggguuucau

SEQ ID NO: 815642 - RNA, 19 nt, Artificial Sequence
  Description of Artificial Sequence: Synthetic oligonucleotide
guuuacaaucaguggguuu

SEQ ID NO: 815643 - RNA, 19 nt, Artificial Sequence
  Description of Artificial Sequence: Synthetic oligonucleotide
ccaggggagcuuuaacaac

SEQ ID NO: 815644 - RNA, 19 nt, Artificial Sequence
  Description of Artificial Sequence: Synthetic oligonucleotide
ucaccacggcuuucgguuu

SEQ ID NO: 815645 - RNA, 19 nt, Artificial Sequence
  Description of Artificial Sequence: Synthetic oligonucleotide
cggugcaauaauagaauuc

SEQ ID NO: 815646 - RNA, 19 nt, Artificial Sequence
  Description of Artificial Sequence: Synthetic oligonucleotide
agccaguucggggugcccu

SEQ ID NO: 815647 - RNA, 19 nt, Artificial Sequence
  Description of Artificial Sequence: Synthetic oligonucleotide
gucggucaagagguccucc

SEQ ID NO: 815648 - RNA, 19 nt, Artificial Sequence
  Description of Artificial Sequence: Synthetic oligonucleotide
ggacuucguaugcuaucug

SEQ ID NO: 815649 - RNA, 19 nt, Artificial Sequence
  Description of Artificial Sequence: Synthetic oligonucleotide
ccuuuuccguacgauggcc

SEQ ID NO: 815650 - RNA, 19 nt, Artificial Sequence
  Description of Artificial Sequence: Synthetic oligonucleotide
agcggguccuguaaaggau

SEQ ID NO: 815651 - RNA, 19 nt, Artificial Sequence
  Description of Artificial Sequence: Synthetic oligonucleotide
cugucgagcaguguggagu

SEQ ID NO: 815652 - RNA, 19 nt, Artificial Sequence
  Description of Artificial Sequence: Synthetic oligonucleotide
uaccgggaauguugacuuc

SEQ ID NO: 815653 - RNA, 19 nt, Artificial Sequence
  Description of Artificial Sequence: Synthetic oligonucleotide
ugucggucaagagguccuc

SEQ ID NO: 815654 - RNA, 19 nt, Artificial Sequence
  Description of Artificial Sequence: Synthetic oligonucleotide
ggaugcgucgcagccgaag

SEQ ID NO: 815655 - RNA, 19 nt, Artificial Sequence
  Description of Artificial Sequence: Synthetic oligonucleotide
caaacgugaauucccuuuu

SEQ ID NO: 815656 - RNA, 19 nt, Artificial Sequence
  Description of Artificial Sequence: Synthetic oligonucleotide
cacuaccgggaauguugac

SEQ ID NO: 815657 - RNA, 19 nt, Artificial Sequence
  Description of Artificial Sequence: Synthetic oligonucleotide
guccaggaauggagcgucg

SEQ ID NO: 815658 - RNA, 19 nt, Artificial Sequence
  Description of Artificial Sequence: Synthetic oligonucleotide
uuugcccguggcacauguu

SEQ ID NO: 815659 - RNA, 19 nt, Artificial Sequence
  Description of Artificial Sequence: Synthetic oligonucleotide
auggagcgucgggagucac

SEQ ID NO: 815660 - RNA, 19 nt, Artificial Sequence
  Description of Artificial Sequence: Synthetic oligonucleotide
augcucaguccgguggaca

SEQ ID NO: 815661 - RNA, 19 nt, Artificial Sequence
  Description of Artificial Sequence: Synthetic oligonucleotide
gcacauguucugcagcaaa

SEQ ID NO: 815662 - RNA, 19 nt, Artificial Sequence
  Description of Artificial Sequence: Synthetic oligonucleotide
cggauaucucucaagggca

SEQ ID NO: 815663 - RNA, 19 nt, Artificial Sequence
  Description of Artificial Sequence: Synthetic oligonucleotide
ccguacgauggccucacug

SEQ ID NO: 815664 - RNA, 19 nt, Artificial Sequence
  Description of Artificial Sequence: Synthetic oligonucleotide
cccugcuauggaugcgucg

SEQ ID NO: 815665 - RNA, 19 nt, Artificial Sequence
  Description of Artificial Sequence: Synthetic oligonucleotide
caaccgccucgucaucuuc

SEQ ID NO: 815666 - RNA, 19 nt, Artificial Sequence
  Description of Artificial Sequence: Synthetic oligonucleotide
guaugcuaucugaguggac

SEQ ID NO: 815667 - RNA, 19 nt, Artificial Sequence
  Description of Artificial Sequence: Synthetic oligonucleotide
ccuuaagcugacauagugu

SEQ ID NO: 815668 - RNA, 19 nt, Artificial Sequence
  Description of Artificial Sequence: Synthetic oligonucleotide
cauacaguccucggucaaa

SEQ ID NO: 815669 - RNA, 19 nt, Artificial Sequence
  Description of Artificial Sequence: Synthetic oligonucleotide
caguccgguggacaucaca

SEQ ID NO: 815670 - RNA, 19 nt, Artificial Sequence
  Description of Artificial Sequence: Synthetic oligonucleotide
cuauccacagagagccagu

SEQ ID NO: 815671 - RNA, 19 nt, Artificial Sequence
  Description of Artificial Sequence: Synthetic oligonucleotide
aguucggggugcccugcua

SEQ ID NO: 815672 - RNA, 19 nt, Artificial Sequence
  Description of Artificial Sequence: Synthetic oligonucleotide
cguccgaggacaaaauuaa

SEQ ID NO: 815673 - RNA, 19 nt, Artificial Sequence
  Description of Artificial Sequence: Synthetic oligonucleotide
agacauccucggugcaaua

SEQ ID NO: 815674 - RNA, 19 nt, Artificial Sequence
  Description of Artificial Sequence: Synthetic oligonucleotide
ccguccgaggacaaaauua

SEQ ID NO: 815675 - RNA, 19 nt, Artificial Sequence
  Description of Artificial Sequence: Synthetic oligonucleotide
cucccgcaagauagaccac

SEQ ID NO: 815676 - RNA, 19 nt, Artificial Sequence
  Description of Artificial Sequence: Synthetic oligonucleotide
ggauaucucucaagggcaa

SEQ ID NO: 815677 - RNA, 19 nt, Artificial Sequence
  Description of Artificial Sequence: Synthetic oligonucleotide
uccguacgauggccucacu

SEQ ID NO: 815678 - RNA, 19 nt, Artificial Sequence
  Description of Artificial Sequence: Synthetic oligonucleotide
gugcccugcuauggaugcg

SEQ ID NO: 815679 - RNA, 19 nt, Artificial Sequence
  Description of Artificial Sequence: Synthetic oligonucleotide
cacguagacucgguacaca

SEQ ID NO: 815680 - RNA, 19 nt, Artificial Sequence
  Description of Artificial Sequence: Synthetic oligonucleotide
gaugccgguuuaauuucau

SEQ ID NO: 815681 - RNA, 19 nt, Artificial Sequence
  Description of Artificial Sequence: Synthetic oligonucleotide
guaauccuuggcagcuuua

SEQ ID NO: 815682 - RNA, 19 nt, Artificial Sequence
  Description of Artificial Sequence: Synthetic oligonucleotide
gccaguucggggugcccug

SEQ ID NO: 815683 - RNA, 19 nt, Artificial Sequence
  Description of Artificial Sequence: Synthetic oligonucleotide
gucgggagucacgccaguc

SEQ ID NO: 815684 - RNA, 19 nt, Artificial Sequence
  Description of Artificial Sequence: Synthetic oligonucleotide
gcgugggagucagaaaaca

SEQ ID NO: 815685 - RNA, 19 nt, Artificial Sequence
  Description of Artificial Sequence: Synthetic oligonucleotide
cuccuuaagcugacauagu

SEQ ID NO: 815686 - RNA, 19 nt, Artificial Sequence
  Description of Artificial Sequence: Synthetic oligonucleotide
gcauacaguccucggucaa

SEQ ID NO: 815687 - RNA, 19 nt, Artificial Sequence
  Description of Artificial Sequence: Synthetic oligonucleotide
ccaagcauacacaccuucu

SEQ ID NO: 815688 - RNA, 19 nt, Artificial Sequence
  Description of Artificial Sequence: Synthetic oligonucleotide
cugcucucacuaccgggaa

SEQ ID NO: 815689 - RNA, 19 nt, Artificial Sequence
  Description of Artificial Sequence: Synthetic oligonucleotide
ggaauggagcgucgggagu

SEQ ID NO: 815690 - RNA, 19 nt, Artificial Sequence
  Description of Artificial Sequence: Synthetic oligonucleotide
ccguguuggcaaauaaucu

SEQ ID NO: 815691 - RNA, 19 nt, Artificial Sequence
  Description of Artificial Sequence: Synthetic oligonucleotide
agcgcucccgcaagauaga

SEQ ID NO: 815692 - RNA, 19 nt, Artificial Sequence
  Description of Artificial Sequence: Synthetic oligonucleotide
caccccgccagugcccaug

SEQ ID NO: 815693 - RNA, 19 nt, Artificial Sequence
  Description of Artificial Sequence: Synthetic oligonucleotide
ggguccuguaaaggauggc

SEQ ID NO: 815694 - RNA, 19 nt, Artificial Sequence
  Description of Artificial Sequence: Synthetic oligonucleotide
uggaugcgucgcagccgaa

SEQ ID NO: 815695 - RNA, 19 nt, Artificial Sequence
  Description of Artificial Sequence: Synthetic oligonucleotide
ccuuaucguacaccuguaa

SEQ ID NO: 815696 - RNA, 19 nt, Artificial Sequence
  Description of Artificial Sequence: Synthetic oligonucleotide
gcggagaaauguaaucgcu

SEQ ID NO: 815697 - RNA, 19 nt, Artificial Sequence
  Description of Artificial Sequence: Synthetic oligonucleotide
cgggagucacgccagucug

SEQ ID NO: 815698 - RNA, 19 nt, Artificial Sequence
  Description of Artificial Sequence: Synthetic oligonucleotide
gcgucgcagccgaagcagg

SEQ ID NO: 815699 - RNA, 19 nt, Artificial Sequence
  Description of Artificial Sequence: Synthetic oligonucleotide
caaaccguccgaggacaaa

SEQ ID NO: 815700 - RNA, 19 nt, Artificial Sequence
  Description of Artificial Sequence: Synthetic oligonucleotide
cgcucccgcaagauagacc

SEQ ID NO: 815701 - RNA, 19 nt, Artificial Sequence
  Description of Artificial Sequence: Synthetic oligonucleotide
cguaugcuaucugagugga

SEQ ID NO: 815702 - RNA, 19 nt, Artificial Sequence
  Description of Artificial Sequence: Synthetic oligonucleotide
cacaaccgccucgucaucu

SEQ ID NO: 815703 - RNA, 19 nt, Artificial Sequence
  Description of Artificial Sequence: Synthetic oligonucleotide
gcauuaccaccaaacccaa

SEQ ID NO: 815704 - RNA, 19 nt, Artificial Sequence
  Description of Artificial Sequence: Synthetic oligonucleotide
cagccgaagcagguagaga

SEQ ID NO: 815705 - RNA, 19 nt, Artificial Sequence
  Description of Artificial Sequence: Synthetic oligonucleotide
gcauggguccaggaaugga

SEQ ID NO: 815706 - RNA, 19 nt, Artificial Sequence
  Description of Artificial Sequence: Synthetic oligonucleotide
ggguccauugcacuuccuu

SEQ ID NO: 815707 - RNA, 19 nt, Artificial Sequence
  Description of Artificial Sequence: Synthetic oligonucleotide
ggccuccuuaagcugacau

SEQ ID NO: 815708 - RNA, 19 nt, Artificial Sequence
  Description of Artificial Sequence: Synthetic oligonucleotide
gccucuagacagcaggguu

SEQ ID NO: 815709 - RNA, 19 nt, Artificial Sequence
  Description of Artificial Sequence: Synthetic oligonucleotide
gucgcagccgaagcaggua

SEQ ID NO: 815710 - RNA, 19 nt, Artificial Sequence
  Description of Artificial Sequence: Synthetic oligonucleotide
gcgucgggagucacgccag

SEQ ID NO: 815711 - RNA, 19 nt, Artificial Sequence
  Description of Artificial Sequence: Synthetic oligonucleotide
cucgguacacaugcucagu

SEQ ID NO: 815712 - RNA, 19 nt, Artificial Sequence
  Description of Artificial Sequence: Synthetic oligonucleotide
gguugacaaugagaacugu

SEQ ID NO: 815713 - RNA, 19 nt, Artificial Sequence
  Description of Artificial Sequence: Synthetic oligonucleotide
cccgaagguacagggucug

SEQ ID NO: 815714 - RNA, 19 nt, Artificial Sequence
  Description of Artificial Sequence: Synthetic oligonucleotide
gguuuacaaucaguggguu

SEQ ID NO: 815715 - RNA, 19 nt, Artificial Sequence
  Description of Artificial Sequence: Synthetic oligonucleotide
gcccauuuugcuggaucuc

SEQ ID NO: 815716 - RNA, 19 nt, Artificial Sequence
  Description of Artificial Sequence: Synthetic oligonucleotide
gcuuacaguuuuggggacu

SEQ ID NO: 815717 - RNA, 19 nt, Artificial Sequence
  Description of Artificial Sequence: Synthetic oligonucleotide
cuguccuuuuccguacgau

SEQ ID NO: 815718 - RNA, 19 nt, Artificial Sequence
  Description of Artificial Sequence: Synthetic oligonucleotide
guccgaggacaaaauuaau

SEQ ID NO: 815719 - RNA, 19 nt, Artificial Sequence
  Description of Artificial Sequence: Synthetic oligonucleotide
cuucagcgugggagucaga

SEQ ID NO: 815720 - RNA, 19 nt, Artificial Sequence
  Description of Artificial Sequence: Synthetic oligonucleotide
ccgaagguacagggucugc

SEQ ID NO: 815721 - RNA, 19 nt, Artificial Sequence
  Description of Artificial Sequence: Synthetic oligonucleotide
gccuuccucuauccacaga

SEQ ID NO: 815722 - RNA, 19 nt, Artificial Sequence
  Description of Artificial Sequence: Synthetic oligonucleotide
gagucacgccagucuguuu

SEQ ID NO: 815723 - RNA, 19 nt, Artificial Sequence
  Description of Artificial Sequence: Synthetic oligonucleotide
cccuguggaacaccucaaa

SEQ ID NO: 815724 - RNA, 19 nt, Artificial Sequence
  Description of Artificial Sequence: Synthetic oligonucleotide
gcgcucccgcaagauagac

SEQ ID NO: 815725 - RNA, 19 nt, Artificial Sequence
  Description of Artificial Sequence: Synthetic oligonucleotide
ggagucacgccagucuguu

SEQ ID NO: 815726 - RNA, 19 nt, Artificial Sequence
  Description of Artificial Sequence: Synthetic oligonucleotide
guccucggucaaagcgcuc

SEQ ID NO: 815727 - RNA, 19 nt, Artificial Sequence
  Description of Artificial Sequence: Synthetic oligonucleotide
ggggugcccugcuauggau

SEQ ID NO: 815728 - RNA, 19 nt, Artificial Sequence
  Description of Artificial Sequence: Synthetic oligonucleotide
gggagucacgccagucugu

SEQ ID NO: 815729 - RNA, 19 nt, Artificial Sequence
  Description of Artificial Sequence: Synthetic oligonucleotide
cccauucgcaagacauccu

SEQ ID NO: 815730 - RNA, 19 nt, Artificial Sequence
  Description of Artificial Sequence: Synthetic oligonucleotide
gcccugcuauggaugcguc

SEQ ID NO: 815731 - RNA, 19 nt, Artificial Sequence
  Description of Artificial Sequence: Synthetic oligonucleotide
caccacggcuuucgguuuu

SEQ ID NO: 815732 - RNA, 19 nt, Artificial Sequence
  Description of Artificial Sequence: Synthetic oligonucleotide
caguaauccuuggcagcuu

SEQ ID NO: 815733 - RNA, 19 nt, Artificial Sequence
  Description of Artificial Sequence: Synthetic oligonucleotide
ccccuccaguuaaagcugu

SEQ ID NO: 815734 - RNA, 19 nt, Artificial Sequence
  Description of Artificial Sequence: Synthetic oligonucleotide
cgucgcagccgaagcaggu

SEQ ID NO: 815735 - RNA, 19 nt, Artificial Sequence
  Description of Artificial Sequence: Synthetic oligonucleotide
ccgcaagauagaccacuuu

SEQ ID NO: 815736 - RNA, 19 nt, Artificial Sequence
  Description of Artificial Sequence: Synthetic oligonucleotide
cgucgggagucacgccagu

SEQ ID NO: 815737 - RNA, 19 nt, Artificial Sequence
  Description of Artificial Sequence: Synthetic oligonucleotide
aauaauggauucuuccugg

SEQ ID NO: 815738 - RNA, 19 nt, Artificial Sequence
  Description of Artificial Sequence: Synthetic oligonucleotide
uuaacuucaacaaggagca

SEQ ID NO: 815739 - RNA, 19 nt, Artificial Sequence
  Description of Artificial Sequence: Synthetic oligonucleotide
ugucaaagcacauuugugg

SEQ ID NO: 815740 - RNA, 19 nt, Artificial Sequence
  Description of Artificial Sequence: Synthetic oligonucleotide
auauauuagcuucauauug

SEQ ID NO: 815741 - RNA, 19 nt, Artificial Sequence
  Description of Artificial Sequence: Synthetic oligonucleotide
uuuuccacaucccaggucc

SEQ ID NO: 815742 - RNA, 19 nt, Artificial Sequence
  Description of Artificial Sequence: Synthetic oligonucleotide
agaaacaucagcaauauca

SEQ ID NO: 815743 - RNA, 19 nt, Artificial Sequence
  Description of Artificial Sequence: Synthetic oligonucleotide
caucauaucagccugcucc

SEQ ID NO: 815744 - RNA, 19 nt, Artificial Sequence
  Description of Artificial Sequence: Synthetic oligonucleotide
auggagugcacucugagac

SEQ ID NO: 815745 - RNA, 19 nt, Artificial Sequence
  Description of Artificial Sequence: Synthetic oligonucleotide
ugaaacucacccuuggagg

SEQ ID NO: 815746 - RNA, 19 nt, Artificial Sequence
  Description of Artificial Sequence: Synthetic oligonucleotide
aguacuuacaaguccuggc

SEQ ID NO: 815747 - RNA, 19 nt, Artificial Sequence
  Description of Artificial Sequence: Synthetic oligonucleotide
gaugguuuguuacaucugg

SEQ ID NO: 815748 - RNA, 19 nt, Artificial Sequence
  Description of Artificial Sequence: Synthetic oligonucleotide
acuaaagcccaucucagac

SEQ ID NO: 815749 - RNA, 19 nt, Artificial Sequence
  Description of Artificial Sequence: Synthetic oligonucleotide
ucuaagaugauuucaacau

SEQ ID NO: 815750 - RNA, 19 nt, Artificial Sequence
  Description of Artificial Sequence: Synthetic oligonucleotide
uuuugagucauuuaacuuc

SEQ ID NO: 815751 - RNA, 19 nt, Artificial Sequence
  Description of Artificial Sequence: Synthetic oligonucleotide
uuucugaagcaucaaggcg

SEQ ID NO: 815752 - RNA, 19 nt, Artificial Sequence
  Description of Artificial Sequence: Synthetic oligonucleotide
agcacaaaauaauggauuc

SEQ ID NO: 815753 - RNA, 19 nt, Artificial Sequence
  Description of Artificial Sequence: Synthetic oligonucleotide
aaauacaccaagaauucag

SEQ ID NO: 815754 - RNA, 19 nt, Artificial Sequence
  Description of Artificial Sequence: Synthetic oligonucleotide
uccacaagcauuucuaagc

SEQ ID NO: 815755 - RNA, 19 nt, Artificial Sequence
  Description of Artificial Sequence: Synthetic oligonucleotide
uucugaagcaucaaggcgu

SEQ ID NO: 815756 - RNA, 19 nt, Artificial Sequence
  Description of Artificial Sequence: Synthetic oligonucleotide
agcaaugggaaauacacca

SEQ ID NO: 815757 - RNA, 19 nt, Artificial Sequence
  Description of Artificial Sequence: Synthetic oligonucleotide
ucagcaguuauaaauucug

SEQ ID NO: 815758 - RNA, 19 nt, Artificial Sequence
  Description of Artificial Sequence: Synthetic oligonucleotide
ucugacuuacuuaagguuc

SEQ ID NO: 815759 - RNA, 19 nt, Artificial Sequence
  Description of Artificial Sequence: Synthetic oligonucleotide
aaucuuacuugacuguucu

SEQ ID NO: 815760 - RNA, 19 nt, Artificial Sequence
  Description of Artificial Sequence: Synthetic oligonucleotide
auagcuuccuuucuuuugg

SEQ ID NO: 815761 - RNA, 19 nt, Artificial Sequence
  Description of Artificial Sequence: Synthetic oligonucleotide
acuaacagcugucaaaugu

SEQ ID NO: 815762 - RNA, 19 nt, Artificial Sequence
  Description of Artificial Sequence: Synthetic oligonucleotide
uaagcaucauaucagccug

SEQ ID NO: 815763 - RNA, 19 nt, Artificial Sequence
  Description of Artificial Sequence: Synthetic oligonucleotide
uucuaagaugauuucaaca

SEQ ID NO: 815764 - RNA, 19 nt, Artificial Sequence
  Description of Artificial Sequence: Synthetic oligonucleotide
uguuacaucuggaaagaug

SEQ ID NO: 815765 - RNA, 19 nt, Artificial Sequence
  Description of Artificial Sequence: Synthetic oligonucleotide
uuuagaacuuauuauuaaa

SEQ ID NO: 815766 - RNA, 19 nt, Artificial Sequence
  Description of Artificial Sequence: Synthetic oligonucleotide
cauucugacuuacuuaagg

SEQ ID NO: 815767 - RNA, 19 nt, Artificial Sequence
  Description of Artificial Sequence: Synthetic oligonucleotide
accaaaaguuccuuugaac

SEQ ID NO: 815768 - RNA, 19 nt, Artificial Sequence
  Description of Artificial Sequence: Synthetic oligonucleotide
ugucuaauaguaaguauaa

SEQ ID NO: 815769 - RNA, 19 nt, Artificial Sequence
  Description of Artificial Sequence: Synthetic oligonucleotide
uccacuugaguaaaucacc

SEQ ID NO: 815770 - RNA, 19 nt, Artificial Sequence
  Description of Artificial Sequence: Synthetic oligonucleotide
uuuagaguucucauuugca

SEQ ID NO: 815771 - RNA, 19 nt, Artificial Sequence
  Description of Artificial Sequence: Synthetic oligonucleotide
aaagauggagugcacucug

SEQ ID NO: 815772 - RNA, 19 nt, Artificial Sequence
  Description of Artificial Sequence: Synthetic oligonucleotide
aaauccaugccuuucucau

SEQ ID NO: 815773 - RNA, 19 nt, Artificial Sequence
  Description of Artificial Sequence: Synthetic oligonucleotide
ucacuguugcuucucaaag

SEQ ID NO: 815774 - RNA, 19 nt, Artificial Sequence
  Description of Artificial Sequence: Synthetic oligonucleotide
caguguauauuucauuucc

SEQ ID NO: 815775 - RNA, 19 nt, Artificial Sequence
  Description of Artificial Sequence: Synthetic oligonucleotide
auguagguuccaaauaugc

SEQ ID NO: 815776 - RNA, 19 nt, Artificial Sequence
  Description of Artificial Sequence: Synthetic oligonucleotide
ucuaagcaucauaucagcc

SEQ ID NO: 815777 - RNA, 19 nt, Artificial Sequence
  Description of Artificial Sequence: Synthetic oligonucleotide
aauuccccaauaagaauac

SEQ ID NO: 815778 - RNA, 19 nt, Artificial Sequence
  Description of Artificial Sequence: Synthetic oligonucleotide
uagaacuuauuauuaaaau

SEQ ID NO: 815779 - RNA, 19 nt, Artificial Sequence
  Description of Artificial Sequence: Synthetic oligonucleotide
agguaaucuuacuugacug

SEQ ID NO: 815780 - RNA, 19 nt, Artificial Sequence
  Description of Artificial Sequence: Synthetic oligonucleotide
uucauaacgcuguugacau

SEQ ID NO: 815781 - RNA, 19 nt, Artificial Sequence
  Description of Artificial Sequence: Synthetic oligonucleotide
ucauuuugagucauuuaac

SEQ ID NO: 815782 - RNA, 19 nt, Artificial Sequence
  Description of Artificial Sequence: Synthetic oligonucleotide
aguaaaucaccaccuuuuc

SEQ ID NO: 815783 - RNA, 19 nt, Artificial Sequence
  Description of Artificial Sequence: Synthetic oligonucleotide
aggguauggcuccagggcc

SEQ ID NO: 815784 - RNA, 19 nt, Artificial Sequence
  Description of Artificial Sequence: Synthetic oligonucleotide
uaugagaugguuuguuaca

SEQ ID NO: 815785 - RNA, 19 nt, Artificial Sequence
  Description of Artificial Sequence: Synthetic oligonucleotide
uccaaggucucaaaggagu

SEQ ID NO: 815786 - RNA, 19 nt, Artificial Sequence
  Description of Artificial Sequence: Synthetic oligonucleotide
auaucagccugcuccaagg

SEQ ID NO: 815787 - RNA, 19 nt, Artificial Sequence
  Description of Artificial Sequence: Synthetic oligonucleotide
ugugugacaggccuggagu

SEQ ID NO: 815788 - RNA, 19 nt, Artificial Sequence
  Description of Artificial Sequence: Synthetic oligonucleotide
aaaaugcgacucugacugc

SEQ ID NO: 815789 - RNA, 19 nt, Artificial Sequence
  Description of Artificial Sequence: Synthetic oligonucleotide
acugcgcuucuccaaaccc

SEQ ID NO: 815790 - RNA, 19 nt, Artificial Sequence
  Description of Artificial Sequence: Synthetic oligonucleotide
aaaugcgacucugacugcg

SEQ ID NO: 815791 - RNA, 19 nt, Artificial Sequence
  Description of Artificial Sequence: Synthetic oligonucleotide
agcaguuauaaauucugca

SEQ ID NO: 815792 - RNA, 19 nt, Artificial Sequence
  Description of Artificial Sequence: Synthetic oligonucleotide
agcuauugggagugguucc

SEQ ID NO: 815793 - RNA, 19 nt, Artificial Sequence
  Description of Artificial Sequence: Synthetic oligonucleotide
ugaucuucauuuugaaacu

SEQ ID NO: 815794 - RNA, 19 nt, Artificial Sequence
  Description of Artificial Sequence: Synthetic oligonucleotide
guuuagaguucucauuugc

SEQ ID NO: 815795 - RNA, 19 nt, Artificial Sequence
  Description of Artificial Sequence: Synthetic oligonucleotide
ugagcagguaagaacacaa

SEQ ID NO: 815796 - RNA, 19 nt, Artificial Sequence
  Description of Artificial Sequence: Synthetic oligonucleotide
ugucacagacaguaaaugu

SEQ ID NO: 815797 - RNA, 19 nt, Artificial Sequence
  Description of Artificial Sequence: Synthetic oligonucleotide
aacuucaacaaggagcagu

SEQ ID NO: 815798 - RNA, 19 nt, Artificial Sequence
  Description of Artificial Sequence: Synthetic oligonucleotide
caaguugaagucauacuug

SEQ ID NO: 815799 - RNA, 19 nt, Artificial Sequence
  Description of Artificial Sequence: Synthetic oligonucleotide
aaauaaaggauagcuuccu

SEQ ID NO: 815800 - RNA, 19 nt, Artificial Sequence
  Description of Artificial Sequence: Synthetic oligonucleotide
uuuguuacaucuggaaaga

SEQ ID NO: 815801 - RNA, 19 nt, Artificial Sequence
  Description of Artificial Sequence: Synthetic oligonucleotide
uaaccugucacagacagua

SEQ ID NO: 815802 - RNA, 19 nt, Artificial Sequence
  Description of Artificial Sequence: Synthetic oligonucleotide
ugggaaauacaccaagaau

SEQ ID NO: 815803 - RNA, 19 nt, Artificial Sequence
  Description of Artificial Sequence: Synthetic oligonucleotide
uuaagguucccagagguaa

SEQ ID NO: 815804 - RNA, 19 nt, Artificial Sequence
  Description of Artificial Sequence: Synthetic oligonucleotide
auagauacuuguagcuucc

SEQ ID NO: 815805 - RNA, 19 nt, Artificial Sequence
  Description of Artificial Sequence: Synthetic oligonucleotide
uuugucguaccuuuucuaa

SEQ ID NO: 815806 - RNA, 19 nt, Artificial Sequence
  Description of Artificial Sequence: Synthetic oligonucleotide
cauccuacacauuuagaac

SEQ ID NO: 815807 - RNA, 19 nt, Artificial Sequence
  Description of Artificial Sequence: Synthetic oligonucleotide
agccaaauaaaggauagcu

SEQ ID NO: 815808 - RNA, 19 nt, Artificial Sequence
  Description of Artificial Sequence: Synthetic oligonucleotide
guauucauuaucacgacga

SEQ ID NO: 815809 - RNA, 19 nt, Artificial Sequence
  Description of Artificial Sequence: Synthetic oligonucleotide
aaaacaguggaaaggacua

SEQ ID NO: 815810 - RNA, 19 nt, Artificial Sequence
  Description of Artificial Sequence: Synthetic oligonucleotide
aacgucaccccuuuccagu

SEQ ID NO: 815811 - RNA, 19 nt, Artificial Sequence
  Description of Artificial Sequence: Synthetic oligonucleotide
cauuauagugggcagcaac

SEQ ID NO: 815812 - RNA, 19 nt, Artificial Sequence
  Description of Artificial Sequence: Synthetic oligonucleotide
uauuagcuucauauuguac

SEQ ID NO: 815813 - RNA, 19 nt, Artificial Sequence
  Description of Artificial Sequence: Synthetic oligonucleotide
aagucucauuuauugauua

SEQ ID NO: 815814 - RNA, 19 nt, Artificial Sequence
  Description of Artificial Sequence: Synthetic oligonucleotide
uaaugacaagcaaacugac

SEQ ID NO: 815815 - RNA, 19 nt, Artificial Sequence
  Description of Artificial Sequence: Synthetic oligonucleotide
uaugucuaauaguaaguau

SEQ ID NO: 815816 - RNA, 19 nt, Artificial Sequence
  Description of Artificial Sequence: Synthetic oligonucleotide
ugcacucugagacaacuaa

SEQ ID NO: 815817 - RNA, 19 nt, Artificial Sequence
  Description of Artificial Sequence: Synthetic oligonucleotide
cugacuuacuuaagguucc

SEQ ID NO: 815818 - RNA, 19 nt, Artificial Sequence
  Description of Artificial Sequence: Synthetic oligonucleotide
guaugagaugguuuguuac

SEQ ID NO: 815819 - RNA, 19 nt, Artificial Sequence
  Description of Artificial Sequence: Synthetic oligonucleotide
ugguuccaauaaaauagcc

SEQ ID NO: 815820 - RNA, 19 nt, Artificial Sequence
  Description of Artificial Sequence: Synthetic oligonucleotide
aagaauacuuuuaauccaa

SEQ ID NO: 815821 - RNA, 19 nt, Artificial Sequence
  Description of Artificial Sequence: Synthetic oligonucleotide
uuugaaacucacccuugga

SEQ ID NO: 815822 - RNA, 19 nt, Artificial Sequence
  Description of Artificial Sequence: Synthetic oligonucleotide
guaaaucaccaccuuuucc

SEQ ID NO: 815823 - RNA, 19 nt, Artificial Sequence
  Description of Artificial Sequence: Synthetic oligonucleotide
ccaaauagauacuuguagc

SEQ ID NO: 815824 - RNA, 19 nt, Artificial Sequence
  Description of Artificial Sequence: Synthetic oligonucleotide
auaaaggauagcuuccuuu

SEQ ID NO: 815825 - RNA, 19 nt, Artificial Sequence
  Description of Artificial Sequence: Synthetic oligonucleotide
ucuuugucguaccuuuucu

SEQ ID NO: 815826 - RNA, 19 nt, Artificial Sequence
  Description of Artificial Sequence: Synthetic oligonucleotide
ugagacaacuaagugcuca

SEQ ID NO: 815827 - RNA, 19 nt, Artificial Sequence
  Description of Artificial Sequence: Synthetic oligonucleotide
caaugggaaauacaccaag

SEQ ID NO: 815828 - RNA, 19 nt, Artificial Sequence
  Description of Artificial Sequence: Synthetic oligonucleotide
aucacgacgacaucucaug

SEQ ID NO: 815829 - RNA, 19 nt, Artificial Sequence
  Description of Artificial Sequence: Synthetic oligonucleotide
uauucauuaucacgacgac

SEQ ID NO: 815830 - RNA, 19 nt, Artificial Sequence
  Description of Artificial Sequence: Synthetic oligonucleotide
uuggaggguacccugugug

SEQ ID NO: 815831 - RNA, 19 nt, Artificial Sequence
  Description of Artificial Sequence: Synthetic oligonucleotide
aaacaguggaaaggacuac

SEQ ID NO: 815832 - RNA, 19 nt, Artificial Sequence
  Description of Artificial Sequence: Synthetic oligonucleotide
acgacgacaucucaugucu

SEQ ID NO: 815833 - RNA, 19 nt, Artificial Sequence
  Description of Artificial Sequence: Synthetic oligonucleotide
aaauagauacuuguagcuu

SEQ ID NO: 815834 - RNA, 19 nt, Artificial Sequence
  Description of Artificial Sequence: Synthetic oligonucleotide
ugucguaccuuuucuaaaa

SEQ ID NO: 815835 - RNA, 19 nt, Artificial Sequence
  Description of Artificial Sequence: Synthetic oligonucleotide
auuaucacgacgacaucuc

SEQ ID NO: 815836 - RNA, 19 nt, Artificial Sequence
  Description of Artificial Sequence: Synthetic oligonucleotide
uucgaagcuauugggagug

SEQ ID NO: 815837 - RNA, 19 nt, Artificial Sequence
  Description of Artificial Sequence: Synthetic oligonucleotide
ucuaugcuaaccugucaca

SEQ ID NO: 815838 - RNA, 19 nt, Artificial Sequence
  Description of Artificial Sequence: Synthetic oligonucleotide
uugggagugguuccaauaa

SEQ ID NO: 815839 - RNA, 19 nt, Artificial Sequence
  Description of Artificial Sequence: Synthetic oligonucleotide
aaggaguaaugacaagcaa

SEQ ID NO: 815840 - RNA, 19 nt, Artificial Sequence
  Description of Artificial Sequence: Synthetic oligonucleotide
ugcaugcguuucaagagca

SEQ ID NO: 815841 - RNA, 19 nt, Artificial Sequence
  Description of Artificial Sequence: Synthetic oligonucleotide
caaagcagugauaucacga

SEQ ID NO: 815842 - RNA, 19 nt, Artificial Sequence
  Description of Artificial Sequence: Synthetic oligonucleotide
uccaaguugaagucauacu

SEQ ID NO: 815843 - RNA, 19 nt, Artificial Sequence
  Description of Artificial Sequence: Synthetic oligonucleotide
aguuuagaguucucauuug

SEQ ID NO: 815844 - RNA, 19 nt, Artificial Sequence
  Description of Artificial Sequence: Synthetic oligonucleotide
augggaaauacaccaagaa

SEQ ID NO: 815845 - RNA, 19 nt, Artificial Sequence
  Description of Artificial Sequence: Synthetic oligonucleotide
aaugcgacucugacugcgc

SEQ ID NO: 815846 - RNA, 19 nt, Artificial Sequence
  Description of Artificial Sequence: Synthetic oligonucleotide
aucaaggcgucuuaucagu

SEQ ID NO: 815847 - RNA, 19 nt, Artificial Sequence
  Description of Artificial Sequence: Synthetic oligonucleotide
uguaugagaugguuuguua

SEQ ID NO: 815848 - RNA, 19 nt, Artificial Sequence
  Description of Artificial Sequence: Synthetic oligonucleotide
uuccaaguugaagucauac

SEQ ID NO: 815849 - RNA, 19 nt, Artificial Sequence
  Description of Artificial Sequence: Synthetic oligonucleotide
agcaucaaggcgucuuauc

SEQ ID NO: 815850 - RNA, 19 nt, Artificial Sequence
  Description of Artificial Sequence: Synthetic oligonucleotide
ugcagccaaauaaaggaua

SEQ ID NO: 815851 - RNA, 19 nt, Artificial Sequence
  Description of Artificial Sequence: Synthetic oligonucleotide
cauuuaacuucaacaagga

SEQ ID NO: 815852 - RNA, 19 nt, Artificial Sequence
  Description of Artificial Sequence: Synthetic oligonucleotide
gucaaagcacauuugugga

SEQ ID NO: 815853 - RNA, 19 nt, Artificial Sequence
  Description of Artificial Sequence: Synthetic oligonucleotide
aauguaugagaugguuugu

SEQ ID NO: 815854 - RNA, 19 nt, Artificial Sequence
  Description of Artificial Sequence: Synthetic oligonucleotide
guacuuacaaguccuggca

SEQ ID NO: 815855 - RNA, 19 nt, Artificial Sequence
  Description of Artificial Sequence: Synthetic oligonucleotide
caucccagguccaaagcag

SEQ ID NO: 815856 - RNA, 19 nt, Artificial Sequence
  Description of Artificial Sequence: Synthetic oligonucleotide
uuaucacgacgacaucuca

SEQ ID NO: 815857 - RNA, 19 nt, Artificial Sequence
  Description of Artificial Sequence: Synthetic oligonucleotide
guugacauuguuucauaga

SEQ ID NO: 815858 - RNA, 19 nt, Artificial Sequence
  Description of Artificial Sequence: Synthetic oligonucleotide
cauguagguuccaaauaug

SEQ ID NO: 815859 - RNA, 19 nt, Artificial Sequence
  Description of Artificial Sequence: Synthetic oligonucleotide
cacacuagccugcuaauuc

SEQ ID NO: 815860 - RNA, 19 nt, Artificial Sequence
  Description of Artificial Sequence: Synthetic oligonucleotide
ggaguaaugacaagcaaac

SEQ ID NO: 815861 - RNA, 19 nt, Artificial Sequence
  Description of Artificial Sequence: Synthetic oligonucleotide
acaucccagguccaaagca

SEQ ID NO: 815862 - RNA, 19 nt, Artificial Sequence
  Description of Artificial Sequence: Synthetic oligonucleotide
cuuacuuaagguucccaga

SEQ ID NO: 815863 - RNA, 19 nt, Artificial Sequence
  Description of Artificial Sequence: Synthetic oligonucleotide
gaacuguuuccaguagggg

SEQ ID NO: 815864 - RNA, 19 nt, Artificial Sequence
  Description of Artificial Sequence: Synthetic oligonucleotide
uacuuacaaguccuggcaa

SEQ ID NO: 815865 - RNA, 19 nt, Artificial Sequence
  Description of Artificial Sequence: Synthetic oligonucleotide
aacuaagugcucacuguug

SEQ ID NO: 815866 - RNA, 19 nt, Artificial Sequence
  Description of Artificial Sequence: Synthetic oligonucleotide
gaaacgucaccccuuucca

SEQ ID NO: 815867 - RNA, 19 nt, Artificial Sequence
  Description of Artificial Sequence: Synthetic oligonucleotide
aagcaucauaucagccugc

SEQ ID NO: 815868 - RNA, 19 nt, Artificial Sequence
  Description of Artificial Sequence: Synthetic oligonucleotide
gguuccaauaaaauagccc

SEQ ID NO: 815869 - RNA, 19 nt, Artificial Sequence
  Description of Artificial Sequence: Synthetic oligonucleotide
gagacaacuaagugcucac

SEQ ID NO: 815870 - RNA, 19 nt, Artificial Sequence
  Description of Artificial Sequence: Synthetic oligonucleotide
acuucaacaaggagcagug

SEQ ID NO: 815871 - RNA, 19 nt, Artificial Sequence
  Description of Artificial Sequence: Synthetic oligonucleotide
uccuccuaugucuaauagu

SEQ ID NO: 815872 - RNA, 19 nt, Artificial Sequence
  Description of Artificial Sequence: Synthetic oligonucleotide
aucauaucagccugcucca

SEQ ID NO: 815873 - RNA, 19 nt, Artificial Sequence
  Description of Artificial Sequence: Synthetic oligonucleotide
caaauagauacuuguagcu

SEQ ID NO: 815874 - RNA, 19 nt, Artificial Sequence
  Description of Artificial Sequence: Synthetic oligonucleotide
acacuagccugcuaauucu

SEQ ID NO: 815875 - RNA, 19 nt, Artificial Sequence
  Description of Artificial Sequence: Synthetic oligonucleotide
uaucacgacgacaucucau

SEQ ID NO: 815876 - RNA, 19 nt, Artificial Sequence
  Description of Artificial Sequence: Synthetic oligonucleotide
agcugucaaauguaugaga

SEQ ID NO: 815877 - RNA, 19 nt, Artificial Sequence
  Description of Artificial Sequence: Synthetic oligonucleotide
uacuaaagcccaucucaga

SEQ ID NO: 815878 - RNA, 19 nt, Artificial Sequence
  Description of Artificial Sequence: Synthetic oligonucleotide
aggguuaagccuuccacaa

SEQ ID NO: 815879 - RNA, 19 nt, Artificial Sequence
  Description of Artificial Sequence: Synthetic oligonucleotide
agagguaaucuuacuugac

SEQ ID NO: 815880 - RNA, 19 nt, Artificial Sequence
  Description of Artificial Sequence: Synthetic oligonucleotide
guacuaaagcccaucucag

SEQ ID NO: 815881 - RNA, 19 nt, Artificial Sequence
  Description of Artificial Sequence: Synthetic oligonucleotide
agguccaaagcagugauau

SEQ ID NO: 815882 - RNA, 19 nt, Artificial Sequence
  Description of Artificial Sequence: Synthetic oligonucleotide
augggaacuccuccuaugu

SEQ ID NO: 815883 - RNA, 19 nt, Artificial Sequence
  Description of Artificial Sequence: Synthetic oligonucleotide
aggaacauccacaacgccu

SEQ ID NO: 815884 - RNA, 19 nt, Artificial Sequence
  Description of Artificial Sequence: Synthetic oligonucleotide
ucugaagcaucaaggcguc

SEQ ID NO: 815885 - RNA, 19 nt, Artificial Sequence
  Description of Artificial Sequence: Synthetic oligonucleotide
caccaaccuuuucagaggc

SEQ ID NO: 815886 - RNA, 19 nt, Artificial Sequence
  Description of Artificial Sequence: Synthetic oligonucleotide
ucauacuugcagccaaaua

SEQ ID NO: 815887 - RNA, 19 nt, Artificial Sequence
  Description of Artificial Sequence: Synthetic oligonucleotide
uagccugcuaauucucccc

SEQ ID NO: 815888 - RNA, 19 nt, Artificial Sequence
  Description of Artificial Sequence: Synthetic oligonucleotide
cuaagcaucauaucagccu

SEQ ID NO: 815889 - RNA, 19 nt, Artificial Sequence
  Description of Artificial Sequence: Synthetic oligonucleotide
agacaguaaaugucaaauu

SEQ ID NO: 815890 - RNA, 19 nt, Artificial Sequence
  Description of Artificial Sequence: Synthetic oligonucleotide
aggaguaaugacaagcaaa

SEQ ID NO: 815891 - RNA, 19 nt, Artificial Sequence
  Description of Artificial Sequence: Synthetic oligonucleotide
acaugacuugaauuuuccu

SEQ ID NO: 815892 - RNA, 19 nt, Artificial Sequence
  Description of Artificial Sequence: Synthetic oligonucleotide
acuuacaaguccuggcaaa

SEQ ID NO: 815893 - RNA, 19 nt, Artificial Sequence
  Description of Artificial Sequence: Synthetic oligonucleotide
gagguaaucuuacuugacu

SEQ ID NO: 815894 - RNA, 19 nt, Artificial Sequence
  Description of Artificial Sequence: Synthetic oligonucleotide
gacgacaucucaugucuuc

SEQ ID NO: 815895 - RNA, 19 nt, Artificial Sequence
  Description of Artificial Sequence: Synthetic oligonucleotide
gauggagugcacucugaga

SEQ ID NO: 815896 - RNA, 19 nt, Artificial Sequence
  Description of Artificial Sequence: Synthetic oligonucleotide
gaacagucagcaguuauaa

SEQ ID NO: 815897 - RNA, 19 nt, Artificial Sequence
  Description of Artificial Sequence: Synthetic oligonucleotide
uccaaacccacuucuugaa

SEQ ID NO: 815898 - RNA, 19 nt, Artificial Sequence
  Description of Artificial Sequence: Synthetic oligonucleotide
ccagagguaaucuuacuug

SEQ ID NO: 815899 - RNA, 19 nt, Artificial Sequence
  Description of Artificial Sequence: Synthetic oligonucleotide
gcauccuacacauuuagaa

SEQ ID NO: 815900 - RNA, 19 nt, Artificial Sequence
  Description of Artificial Sequence: Synthetic oligonucleotide
auuuguggaucacggaauu

SEQ ID NO: 815901 - RNA, 19 nt, Artificial Sequence
  Description of Artificial Sequence: Synthetic oligonucleotide
uugucguaccuuuucuaaa

SEQ ID NO: 815902 - RNA, 19 nt, Artificial Sequence
  Description of Artificial Sequence: Synthetic oligonucleotide
uuguggaucacggaauuuu

SEQ ID NO: 815903 - RNA, 19 nt, Artificial Sequence
  Description of Artificial Sequence: Synthetic oligonucleotide
caugugcauagucaccaac

SEQ ID NO: 815904 - RNA, 19 nt, Artificial Sequence
  Description of Artificial Sequence: Synthetic oligonucleotide
ucacgacgacaucucaugu

SEQ ID NO: 815905 - RNA, 19 nt, Artificial Sequence
  Description of Artificial Sequence: Synthetic oligonucleotide
uucucauuugcaggguaug

SEQ ID NO: 815906 - RNA, 19 nt, Artificial Sequence
  Description of Artificial Sequence: Synthetic oligonucleotide
cagagguaaucuuacuuga

SEQ ID NO: 815907 - RNA, 19 nt, Artificial Sequence
  Description of Artificial Sequence: Synthetic oligonucleotide
uaguaaguauaaguacuaa

SEQ ID NO: 815908 - RNA, 19 nt, Artificial Sequence
  Description of Artificial Sequence: Synthetic oligonucleotide
gucuaauaguaaguauaag

SEQ ID NO: 815909 - RNA, 19 nt, Artificial Sequence
  Description of Artificial Sequence: Synthetic oligonucleotide
auacuuguagcuucccauu

SEQ ID NO: 815910 - RNA, 19 nt, Artificial Sequence
  Description of Artificial Sequence: Synthetic oligonucleotide
aagcacauuuguggaucac

SEQ ID NO: 815911 - RNA, 19 nt, Artificial Sequence
  Description of Artificial Sequence: Synthetic oligonucleotide
auuuugaaacucacccuug

SEQ ID NO: 815912 - RNA, 19 nt, Artificial Sequence
  Description of Artificial Sequence: Synthetic oligonucleotide
auugggagugguuccaaua

SEQ ID NO: 815913 - RNA, 19 nt, Artificial Sequence
  Description of Artificial Sequence: Synthetic oligonucleotide
caugggaacuccuccuaug

SEQ ID NO: 815914 - RNA, 19 nt, Artificial Sequence
  Description of Artificial Sequence: Synthetic oligonucleotide
caaguacuuacaaguccug

SEQ ID NO: 815915 - RNA, 19 nt, Artificial Sequence
  Description of Artificial Sequence: Synthetic oligonucleotide
aguguauauuucauuucca

SEQ ID NO: 815916 - RNA, 19 nt, Artificial Sequence
  Description of Artificial Sequence: Synthetic oligonucleotide
uccuccacaugacuugaau

SEQ ID NO: 815917 - RNA, 19 nt, Artificial Sequence
  Description of Artificial Sequence: Synthetic oligonucleotide
gcacauuuguggaucacgg

SEQ ID NO: 815918 - RNA, 19 nt, Artificial Sequence
  Description of Artificial Sequence: Synthetic oligonucleotide
ugaagcaucaaggcgucuu

SEQ ID NO: 815919 - RNA, 19 nt, Artificial Sequence
  Description of Artificial Sequence: Synthetic oligonucleotide
agucucauuuauugauuaa

SEQ ID NO: 815920 - RNA, 19 nt, Artificial Sequence
  Description of Artificial Sequence: Synthetic oligonucleotide
aucucagacccagugucag

SEQ ID NO: 815921 - RNA, 19 nt, Artificial Sequence
  Description of Artificial Sequence: Synthetic oligonucleotide
ucaugggaacuccuccuau

SEQ ID NO: 815922 - RNA, 19 nt, Artificial Sequence
  Description of Artificial Sequence: Synthetic oligonucleotide
ccugcaugcguuucaagag

SEQ ID NO: 815923 - RNA, 19 nt, Artificial Sequence
  Description of Artificial Sequence: Synthetic oligonucleotide
aagaugauuucaacaucaa

SEQ ID NO: 815924 - RNA, 19 nt, Artificial Sequence
  Description of Artificial Sequence: Synthetic oligonucleotide
uggagugcacucugagaca

SEQ ID NO: 815925 - RNA, 19 nt, Artificial Sequence
  Description of Artificial Sequence: Synthetic oligonucleotide
ugggagugguuccaauaaa

SEQ ID NO: 815926 - RNA, 19 nt, Artificial Sequence
  Description of Artificial Sequence: Synthetic oligonucleotide
gcagccaaauaaaggauag

SEQ ID NO: 815927 - RNA, 19 nt, Artificial Sequence
  Description of Artificial Sequence: Synthetic oligonucleotide
ucauuaucacgacgacauc

SEQ ID NO: 815928 - RNA, 19 nt, Artificial Sequence
  Description of Artificial Sequence: Synthetic oligonucleotide
agaauucccgaaauguuuu

SEQ ID NO: 815929 - RNA, 19 nt, Artificial Sequence
  Description of Artificial Sequence: Synthetic oligonucleotide
caaggcgucuuaucaguuc

SEQ ID NO: 815930 - RNA, 19 nt, Artificial Sequence
  Description of Artificial Sequence: Synthetic oligonucleotide
caguaaaugucaaauuuau

SEQ ID NO: 815931 - RNA, 19 nt, Artificial Sequence
  Description of Artificial Sequence: Synthetic oligonucleotide
cuaugucuaauaguaagua

SEQ ID NO: 815932 - RNA, 19 nt, Artificial Sequence
  Description of Artificial Sequence: Synthetic oligonucleotide
cacgacgacaucucauguc

SEQ ID NO: 815933 - RNA, 19 nt, Artificial Sequence
  Description of Artificial Sequence: Synthetic oligonucleotide
augagaugguuuguuacau

SEQ ID NO: 815934 - RNA, 19 nt, Artificial Sequence
  Description of Artificial Sequence: Synthetic oligonucleotide
ugcuaaccugucacagaca

SEQ ID NO: 815935 - RNA, 19 nt, Artificial Sequence
  Description of Artificial Sequence: Synthetic oligonucleotide
gacccagugucagaucccc

SEQ ID NO: 815936 - RNA, 19 nt, Artificial Sequence
  Description of Artificial Sequence: Synthetic oligonucleotide
aaacucacccuuggagggu

SEQ ID NO: 815937 - RNA, 19 nt, Artificial Sequence
  Description of Artificial Sequence: Synthetic oligonucleotide
cauuuugaaacucacccuu

SEQ ID NO: 815938 - RNA, 19 nt, Artificial Sequence
  Description of Artificial Sequence: Synthetic oligonucleotide
ucaaggcgucuuaucaguu

SEQ ID NO: 815939 - RNA, 19 nt, Artificial Sequence
  Description of Artificial Sequence: Synthetic oligonucleotide
caaguccuggcaaaauuaa

SEQ ID NO: 815940 - RNA, 19 nt, Artificial Sequence
  Description of Artificial Sequence: Synthetic oligonucleotide
ugacuuacuuaagguuccc

SEQ ID NO: 815941 - RNA, 19 nt, Artificial Sequence
  Description of Artificial Sequence: Synthetic oligonucleotide
ugacuugaauuuuccucua

SEQ ID NO: 815942 - RNA, 19 nt, Artificial Sequence
  Description of Artificial Sequence: Synthetic oligonucleotide
ucacccuuggaggguaccc

SEQ ID NO: 815943 - RNA, 19 nt, Artificial Sequence
  Description of Artificial Sequence: Synthetic oligonucleotide
cauuaucacgacgacaucu

SEQ ID NO: 815944 - RNA, 19 nt, Artificial Sequence
  Description of Artificial Sequence: Synthetic oligonucleotide
uuaucaguucgaagcuauu

SEQ ID NO: 815945 - RNA, 19 nt, Artificial Sequence
  Description of Artificial Sequence: Synthetic oligonucleotide
caggaacauccacaacgcc

SEQ ID NO: 815946 - RNA, 19 nt, Artificial Sequence
  Description of Artificial Sequence: Synthetic oligonucleotide
ccaaagcagugauaucacg

SEQ ID NO: 815947 - RNA, 19 nt, Artificial Sequence
  Description of Artificial Sequence: Synthetic oligonucleotide
gaguaaaucaccaccuuuu

SEQ ID NO: 815948 - RNA, 19 nt, Artificial Sequence
  Description of Artificial Sequence: Synthetic oligonucleotide
uccuccacuugaguaaauc

SEQ ID NO: 815949 - RNA, 19 nt, Artificial Sequence
  Description of Artificial Sequence: Synthetic oligonucleotide
ccuccuaugucuaauagua

SEQ ID NO: 815950 - RNA, 19 nt, Artificial Sequence
  Description of Artificial Sequence: Synthetic oligonucleotide
agccugcuaauucuccccu

SEQ ID NO: 815951 - RNA, 19 nt, Artificial Sequence
  Description of Artificial Sequence: Synthetic oligonucleotide
uagauacuuguagcuuccc

SEQ ID NO: 815952 - RNA, 19 nt, Artificial Sequence
  Description of Artificial Sequence: Synthetic oligonucleotide
caacggcagagcugugucc

SEQ ID NO: 815953 - RNA, 19 nt, Artificial Sequence
  Description of Artificial Sequence: Synthetic oligonucleotide
ugguccgcaggaauauuuu

SEQ ID NO: 815954 - RNA, 19 nt, Artificial Sequence
  Description of Artificial Sequence: Synthetic oligonucleotide
uggaaaggacuaccuucuc

SEQ ID NO: 815955 - RNA, 19 nt, Artificial Sequence
  Description of Artificial Sequence: Synthetic oligonucleotide
accugcgucuucuaugcua

SEQ ID NO: 815956 - RNA, 19 nt, Artificial Sequence
  Description of Artificial Sequence: Synthetic oligonucleotide
acaacgccuuccaaguuga

SEQ ID NO: 815957 - RNA, 19 nt, Artificial Sequence
  Description of Artificial Sequence: Synthetic oligonucleotide
gagcacaaaauaauggauu

SEQ ID NO: 815958 - RNA, 19 nt, Artificial Sequence
  Description of Artificial Sequence: Synthetic oligonucleotide
cacuagccugcuaauucuc

SEQ ID NO: 815959 - RNA, 19 nt, Artificial Sequence
  Description of Artificial Sequence: Synthetic oligonucleotide
ucaccccuuuccaguuucc

SEQ ID NO: 815960 - RNA, 19 nt, Artificial Sequence
  Description of Artificial Sequence: Synthetic oligonucleotide
guagcuucccauucugacu

SEQ ID NO: 815961 - RNA, 19 nt, Artificial Sequence
  Description of Artificial Sequence: Synthetic oligonucleotide
cuccacaugacuugaauuu

SEQ ID NO: 815962 - RNA, 19 nt, Artificial Sequence
  Description of Artificial Sequence: Synthetic oligonucleotide
aguugaagucauacuugca

SEQ ID NO: 815963 - RNA, 19 nt, Artificial Sequence
  Description of Artificial Sequence: Synthetic oligonucleotide
ggcaaguuuagaguucuca

SEQ ID NO: 815964 - RNA, 19 nt, Artificial Sequence
  Description of Artificial Sequence: Synthetic oligonucleotide
agaguccuccacaugacuu

SEQ ID NO: 815965 - RNA, 19 nt, Artificial Sequence
  Description of Artificial Sequence: Synthetic oligonucleotide
acuccuccuaugucuaaua

SEQ ID NO: 815966 - RNA, 19 nt, Artificial Sequence
  Description of Artificial Sequence: Synthetic oligonucleotide
ucgaagcuauugggagugg

SEQ ID NO: 815967 - RNA, 19 nt, Artificial Sequence
  Description of Artificial Sequence: Synthetic oligonucleotide
agacaacuaagugcucacu

SEQ ID NO: 815968 - RNA, 19 nt, Artificial Sequence
  Description of Artificial Sequence: Synthetic oligonucleotide
uuugcaggguauggcucca

SEQ ID NO: 815969 - RNA, 19 nt, Artificial Sequence
  Description of Artificial Sequence: Synthetic oligonucleotide
guuaagccuuccacaagca

SEQ ID NO: 815970 - RNA, 19 nt, Artificial Sequence
  Description of Artificial Sequence: Synthetic oligonucleotide
ugacugcgcuucuccaaac

SEQ ID NO: 815971 - RNA, 19 nt, Artificial Sequence
  Description of Artificial Sequence: Synthetic oligonucleotide
uuuguggaucacggaauuu

SEQ ID NO: 815972 - RNA, 19 nt, Artificial Sequence
  Description of Artificial Sequence: Synthetic oligonucleotide
cccauucugacuuacuuaa

SEQ ID NO: 815973 - RNA, 19 nt, Artificial Sequence
  Description of Artificial Sequence: Synthetic oligonucleotide
uuguuacaucuggaaagau

SEQ ID NO: 815974 - RNA, 19 nt, Artificial Sequence
  Description of Artificial Sequence: Synthetic oligonucleotide
cauuuguggaucacggaau

SEQ ID NO: 815975 - RNA, 19 nt, Artificial Sequence
  Description of Artificial Sequence: Synthetic oligonucleotide
cucaugucuucauaacgcu

SEQ ID NO: 815976 - RNA, 19 nt, Artificial Sequence
  Description of Artificial Sequence: Synthetic oligonucleotide
cuuaagguucccagaggua

SEQ ID NO: 815977 - RNA, 19 nt, Artificial Sequence
  Description of Artificial Sequence: Synthetic oligonucleotide
guucgaagcuauugggagu

SEQ ID NO: 815978 - RNA, 19 nt, Artificial Sequence
  Description of Artificial Sequence: Synthetic oligonucleotide
ucauuauagugggcagcaa

SEQ ID NO: 815979 - RNA, 19 nt, Artificial Sequence
  Description of Artificial Sequence: Synthetic oligonucleotide
aacucacccuuggagggua

SEQ ID NO: 815980 - RNA, 19 nt, Artificial Sequence
  Description of Artificial Sequence: Synthetic oligonucleotide
ggguuaagccuuccacaag

SEQ ID NO: 815981 - RNA, 19 nt, Artificial Sequence
  Description of Artificial Sequence: Synthetic oligonucleotide
gcucauuauagugggcagc

SEQ ID NO: 815982 - RNA, 19 nt, Artificial Sequence
  Description of Artificial Sequence: Synthetic oligonucleotide
uggccucaugggaacuccu

SEQ ID NO: 815983 - RNA, 19 nt, Artificial Sequence
  Description of Artificial Sequence: Synthetic oligonucleotide
uccacaucccagguccaaa

SEQ ID NO: 815984 - RNA, 19 nt, Artificial Sequence
  Description of Artificial Sequence: Synthetic oligonucleotide
ucucuacuugcugguccgc

SEQ ID NO: 815985 - RNA, 19 nt, Artificial Sequence
  Description of Artificial Sequence: Synthetic oligonucleotide
cacagacaguaaaugucaa

SEQ ID NO: 815986 - RNA, 19 nt, Artificial Sequence
  Description of Artificial Sequence: Synthetic oligonucleotide
gagaguccuccacaugacu

SEQ ID NO: 815987 - RNA, 19 nt, Artificial Sequence
  Description of Artificial Sequence: Synthetic oligonucleotide
auuccccaauaagaauacu

SEQ ID NO: 815988 - RNA, 19 nt, Artificial Sequence
  Description of Artificial Sequence: Synthetic oligonucleotide
agcauccuacacauuuaga

SEQ ID NO: 815989 - RNA, 19 nt, Artificial Sequence
  Description of Artificial Sequence: Synthetic oligonucleotide
cugacugcgcuucuccaaa

SEQ ID NO: 815990 - RNA, 19 nt, Artificial Sequence
  Description of Artificial Sequence: Synthetic oligonucleotide
cuccuaugucuaauaguaa

SEQ ID NO: 815991 - RNA, 19 nt, Artificial Sequence
  Description of Artificial Sequence: Synthetic oligonucleotide
guaaucuuacuugacuguu

SEQ ID NO: 815992 - RNA, 19 nt, Artificial Sequence
  Description of Artificial Sequence: Synthetic oligonucleotide
gcguuucaagagcauuuug

SEQ ID NO: 815993 - RNA, 19 nt, Artificial Sequence
  Description of Artificial Sequence: Synthetic oligonucleotide
gacaggccuggagugucug

SEQ ID NO: 815994 - RNA, 19 nt, Artificial Sequence
  Description of Artificial Sequence: Synthetic oligonucleotide
ugcgacucugacugcgcuu

SEQ ID NO: 815995 - RNA, 19 nt, Artificial Sequence
  Description of Artificial Sequence: Synthetic oligonucleotide
ucauaucagccugcuccaa

SEQ ID NO: 815996 - RNA, 19 nt, Artificial Sequence
  Description of Artificial Sequence: Synthetic oligonucleotide
gguccgcaggaauauuuuc

SEQ ID NO: 815997 - RNA, 19 nt, Artificial Sequence
  Description of Artificial Sequence: Synthetic oligonucleotide
ucauaacgcuguugacauu

SEQ ID NO: 815998 - RNA, 19 nt, Artificial Sequence
  Description of Artificial Sequence: Synthetic oligonucleotide
auaacgcuguugacauugu

SEQ ID NO: 815999 - RNA, 19 nt, Artificial Sequence
  Description of Artificial Sequence: Synthetic oligonucleotide
ccuaugucuaauaguaagu

SEQ ID NO: 816000 - RNA, 19 nt, Artificial Sequence
  Description of Artificial Sequence: Synthetic oligonucleotide
ccuuccacaagcauuucua

SEQ ID NO: 816001 - RNA, 19 nt, Artificial Sequence
  Description of Artificial Sequence: Synthetic oligonucleotide
gcgucuucuaugcuaaccu

SEQ ID NO: 816002 - RNA, 19 nt, Artificial Sequence
  Description of Artificial Sequence: Synthetic oligonucleotide
acgucaccccuuuccaguu

SEQ ID NO: 816003 - RNA, 19 nt, Artificial Sequence
  Description of Artificial Sequence: Synthetic oligonucleotide
cucacccuuggaggguacc

SEQ ID NO: 816004 - RNA, 19 nt, Artificial Sequence
  Description of Artificial Sequence: Synthetic oligonucleotide
uuccuccacuugaguaaau

SEQ ID NO: 816005 - RNA, 19 nt, Artificial Sequence
  Description of Artificial Sequence: Synthetic oligonucleotide
ggagugcacucugagacaa

SEQ ID NO: 816006 - RNA, 19 nt, Artificial Sequence
  Description of Artificial Sequence: Synthetic oligonucleotide
gcagcaacggcagagcugu

SEQ ID NO: 816007 - RNA, 19 nt, Artificial Sequence
  Description of Artificial Sequence: Synthetic oligonucleotide
gaagcuauugggagugguu

SEQ ID NO: 816008 - RNA, 19 nt, Artificial Sequence
  Description of Artificial Sequence: Synthetic oligonucleotide
cucaugggaacuccuccua

SEQ ID NO: 816009 - RNA, 19 nt, Artificial Sequence
  Description of Artificial Sequence: Synthetic oligonucleotide
cguuucaagagcauuuugu

SEQ ID NO: 816010 - RNA, 19 nt, Artificial Sequence
  Description of Artificial Sequence: Synthetic oligonucleotide
gguccaaagcagugauauc

SEQ ID NO: 816011 - RNA, 19 nt, Artificial Sequence
  Description of Artificial Sequence: Synthetic oligonucleotide
agccccugaucuucauuuu

SEQ ID NO: 816012 - RNA, 19 nt, Artificial Sequence
  Description of Artificial Sequence: Synthetic oligonucleotide
acucacccuuggaggguac

SEQ ID NO: 816013 - RNA, 19 nt, Artificial Sequence
  Description of Artificial Sequence: Synthetic oligonucleotide
cucuacuugcugguccgca

SEQ ID NO: 816014 - RNA, 19 nt, Artificial Sequence
  Description of Artificial Sequence: Synthetic oligonucleotide
cagaaacgucaccccuuuc

SEQ ID NO: 816015 - RNA, 19 nt, Artificial Sequence
  Description of Artificial Sequence: Synthetic oligonucleotide
guucucauuugcaggguau

SEQ ID NO: 816016 - RNA, 19 nt, Artificial Sequence
  Description of Artificial Sequence: Synthetic oligonucleotide
gcgacucugacugcgcuuc

SEQ ID NO: 816017 - RNA, 19 nt, Artificial Sequence
  Description of Artificial Sequence: Synthetic oligonucleotide
accaaccuuuucagaggca

SEQ ID NO: 816018 - RNA, 19 nt, Artificial Sequence
  Description of Artificial Sequence: Synthetic oligonucleotide
gggguggccucaugggaac

SEQ ID NO: 816019 - RNA, 19 nt, Artificial Sequence
  Description of Artificial Sequence: Synthetic oligonucleotide
agcacacacuagccugcua

SEQ ID NO: 816020 - RNA, 19 nt, Artificial Sequence
  Description of Artificial Sequence: Synthetic oligonucleotide
gcaaugggaaauacaccaa

SEQ ID NO: 816021 - RNA, 19 nt, Artificial Sequence
  Description of Artificial Sequence: Synthetic oligonucleotide
gaguucucauuugcagggu

SEQ ID NO: 816022 - RNA, 19 nt, Artificial Sequence
  Description of Artificial Sequence: Synthetic oligonucleotide
gugcauagucaccaaccuu

SEQ ID NO: 816023 - RNA, 19 nt, Artificial Sequence
  Description of Artificial Sequence: Synthetic oligonucleotide
gcaucauaucagccugcuc

SEQ ID NO: 816024 - RNA, 19 nt, Artificial Sequence
  Description of Artificial Sequence: Synthetic oligonucleotide
agcuucccauucugacuua

SEQ ID NO: 816025 - RNA, 19 nt, Artificial Sequence
  Description of Artificial Sequence: Synthetic oligonucleotide
gccaaauaaaggauagcuu

SEQ ID NO: 816026 - RNA, 19 nt, Artificial Sequence
  Description of Artificial Sequence: Synthetic oligonucleotide
ccugucacagacaguaaau

SEQ ID NO: 816027 - RNA, 19 nt, Artificial Sequence
  Description of Artificial Sequence: Synthetic oligonucleotide
gguggccucaugggaacuc

SEQ ID NO: 816028 - RNA, 19 nt, Artificial Sequence
  Description of Artificial Sequence: Synthetic oligonucleotide
acggcagagcuguguccuu

SEQ ID NO: 816029 - RNA, 19 nt, Artificial Sequence
  Description of Artificial Sequence: Synthetic oligonucleotide
gguucccagagguaaucuu

SEQ ID NO: 816030 - RNA, 19 nt, Artificial Sequence
  Description of Artificial Sequence: Synthetic oligonucleotide
ggccucaugggaacuccuc

SEQ ID NO: 816031 - RNA, 19 nt, Artificial Sequence
  Description of Artificial Sequence: Synthetic oligonucleotide
gcagcauccuacacauuua

SEQ ID NO: 816032 - RNA, 19 nt, Artificial Sequence
  Description of Artificial Sequence: Synthetic oligonucleotide
cuucaacaaggagcagugu

SEQ ID NO: 816033 - RNA, 19 nt, Artificial Sequence
  Description of Artificial Sequence: Synthetic oligonucleotide
cccagagguaaucuuacuu

SEQ ID NO: 816034 - RNA, 19 nt, Artificial Sequence
  Description of Artificial Sequence: Synthetic oligonucleotide
cagcaacggcagagcugug

SEQ ID NO: 816035 - RNA, 19 nt, Artificial Sequence
  Description of Artificial Sequence: Synthetic oligonucleotide
caacgccuuccaaguugaa

SEQ ID NO: 816036 - RNA, 19 nt, Artificial Sequence
  Description of Artificial Sequence: Synthetic oligonucleotide
ggguauggcuccagggccu

SEQ ID NO: 816037 - RNA, 19 nt, Artificial Sequence
  Description of Artificial Sequence: Synthetic oligonucleotide
caccccuuuccaguuuccu

SEQ ID NO: 816038 - RNA, 19 nt, Artificial Sequence
  Description of Artificial Sequence: Synthetic oligonucleotide
cugaagcaucaaggcgucu

SEQ ID NO: 816039 - RNA, 19 nt, Artificial Sequence
  Description of Artificial Sequence: Synthetic oligonucleotide
cgaagcuauugggaguggu

SEQ ID NO: 816040 - RNA, 19 nt, Artificial Sequence
  Description of Artificial Sequence: Synthetic oligonucleotide
ccugugugacaggccugga

SEQ ID NO: 816041 - RNA, 19 nt, Artificial Sequence
  Description of Artificial Sequence: Synthetic oligonucleotide
cgacgacaucucaugucuu

SEQ ID NO: 816042 - RNA, 19 nt, Artificial Sequence
  Description of Artificial Sequence: Synthetic oligonucleotide
uagauuauaauuaagcucc

SEQ ID NO: 816043 - RNA, 19 nt, Artificial Sequence
  Description of Artificial Sequence: Synthetic oligonucleotide
aauuuaaguuccuuaauuc

SEQ ID NO: 816044 - RNA, 19 nt, Artificial Sequence
  Description of Artificial Sequence: Synthetic oligonucleotide
aaaaucgucgacaaaaggc

SEQ ID NO: 816045 - RNA, 19 nt, Artificial Sequence
  Description of Artificial Sequence: Synthetic oligonucleotide
uuugguuucaacccaaugg

SEQ ID NO: 816046 - RNA, 19 nt, Artificial Sequence
  Description of Artificial Sequence: Synthetic oligonucleotide
aauucaauugcucuucauc

SEQ ID NO: 816047 - RNA, 19 nt, Artificial Sequence
  Description of Artificial Sequence: Synthetic oligonucleotide
uaaaugugcaaaaucgucg

SEQ ID NO: 816048 - RNA, 19 nt, Artificial Sequence
  Description of Artificial Sequence: Synthetic oligonucleotide
uuauaauuaagcuccuugg

SEQ ID NO: 816049 - RNA, 19 nt, Artificial Sequence
  Description of Artificial Sequence: Synthetic oligonucleotide
uaaguucugaaucaaagac

SEQ ID NO: 816050 - RNA, 19 nt, Artificial Sequence
  Description of Artificial Sequence: Synthetic oligonucleotide
uguaguuuccccauuagca

SEQ ID NO: 816051 - RNA, 19 nt, Artificial Sequence
  Description of Artificial Sequence: Synthetic oligonucleotide
aaauccgaagguuugagca

SEQ ID NO: 816052 - RNA, 19 nt, Artificial Sequence
  Description of Artificial Sequence: Synthetic oligonucleotide
uuaguuuacagagagagcu

SEQ ID NO: 816053 - RNA, 19 nt, Artificial Sequence
  Description of Artificial Sequence: Synthetic oligonucleotide
ucuacagagacucuacaag

SEQ ID NO: 816054 - RNA, 19 nt, Artificial Sequence
  Description of Artificial Sequence: Synthetic oligonucleotide
uucauuucuaguaagcgcu

SEQ ID NO: 816055 - RNA, 19 nt, Artificial Sequence
  Description of Artificial Sequence: Synthetic oligonucleotide
uuuaucacaaacuugucau

SEQ ID NO: 816056 - RNA, 19 nt, Artificial Sequence
  Description of Artificial Sequence: Synthetic oligonucleotide
caccaaaugucuuagaagc

SEQ ID NO: 816057 - RNA, 19 nt, Artificial Sequence
  Description of Artificial Sequence: Synthetic oligonucleotide
uguucucaaguuuacaaag

SEQ ID NO: 816058 - RNA, 19 nt, Artificial Sequence
  Description of Artificial Sequence: Synthetic oligonucleotide
aaauuuaaguuccuuaauu

SEQ ID NO: 816059 - RNA, 19 nt, Artificial Sequence
  Description of Artificial Sequence: Synthetic oligonucleotide
uuuaacgcuugcaugaaug

SEQ ID NO: 816060 - RNA, 19 nt, Artificial Sequence
  Description of Artificial Sequence: Synthetic oligonucleotide
aaccaauucaaucuucuca

SEQ ID NO: 816061 - RNA, 19 nt, Artificial Sequence
  Description of Artificial Sequence: Synthetic oligonucleotide
uucucgacugccuugaucc

SEQ ID NO: 816062 - RNA, 19 nt, Artificial Sequence
  Description of Artificial Sequence: Synthetic oligonucleotide
cuaaggucaaauccgaagg

SEQ ID NO: 816063 - RNA, 19 nt, Artificial Sequence
  Description of Artificial Sequence: Synthetic oligonucleotide
agcaguauuaauguacugc

SEQ ID NO: 816064 - RNA, 19 nt, Artificial Sequence
  Description of Artificial Sequence: Synthetic oligonucleotide
cuagauuauaauuaagcuc

SEQ ID NO: 816065 - RNA, 19 nt, Artificial Sequence
  Description of Artificial Sequence: Synthetic oligonucleotide
uuugguccgaucuuuaacc

SEQ ID NO: 816066 - RNA, 19 nt, Artificial Sequence
  Description of Artificial Sequence: Synthetic oligonucleotide
aauuaagcuccuuggcgac

SEQ ID NO: 816067 - RNA, 19 nt, Artificial Sequence
  Description of Artificial Sequence: Synthetic oligonucleotide
uucgcuuuucgaaacagag

SEQ ID NO: 816068 - RNA, 19 nt, Artificial Sequence
  Description of Artificial Sequence: Synthetic oligonucleotide
ucauccacuuccaauauca

SEQ ID NO: 816069 - RNA, 19 nt, Artificial Sequence
  Description of Artificial Sequence: Synthetic oligonucleotide
ugaacugggacaaugaauu

SEQ ID NO: 816070 - RNA, 19 nt, Artificial Sequence
  Description of Artificial Sequence: Synthetic oligonucleotide
auaguaggccauuacacuc

SEQ ID NO: 816071 - RNA, 19 nt, Artificial Sequence
  Description of Artificial Sequence: Synthetic oligonucleotide
acaagcuuugucuaaaugu

SEQ ID NO: 816072 - RNA, 19 nt, Artificial Sequence
  Description of Artificial Sequence: Synthetic oligonucleotide
gaucacugcucccagauag

SEQ ID NO: 816073 - RNA, 19 nt, Artificial Sequence
  Description of Artificial Sequence: Synthetic oligonucleotide
gagagcuaaggucaaaucc

SEQ ID NO: 816074 - RNA, 19 nt, Artificial Sequence
  Description of Artificial Sequence: Synthetic oligonucleotide
uauaaagcucguaaucuug

SEQ ID NO: 816075 - RNA, 19 nt, Artificial Sequence
  Description of Artificial Sequence: Synthetic oligonucleotide
aagcucguaaucuugccag

SEQ ID NO: 816076 - RNA, 19 nt, Artificial Sequence
  Description of Artificial Sequence: Synthetic oligonucleotide
aaaugugcaaaaucgucga

SEQ ID NO: 816077 - RNA, 19 nt, Artificial Sequence
  Description of Artificial Sequence: Synthetic oligonucleotide
uaauuaagcuccuuggcga

SEQ ID NO: 816078 - RNA, 19 nt, Artificial Sequence
  Description of Artificial Sequence: Synthetic oligonucleotide
uuaauguacugccaucacc

SEQ ID NO: 816079 - RNA, 19 nt, Artificial Sequence
  Description of Artificial Sequence: Synthetic oligonucleotide
agcucaggaagauugaaag

SEQ ID NO: 816080 - RNA, 19 nt, Artificial Sequence
  Description of Artificial Sequence: Synthetic oligonucleotide
uuuaauggaggaaagcuuu

SEQ ID NO: 816081 - RNA, 19 nt, Artificial Sequence
  Description of Artificial Sequence: Synthetic oligonucleotide
ucugcuuuaggcuucggug

SEQ ID NO: 816082 - RNA, 19 nt, Artificial Sequence
  Description of Artificial Sequence: Synthetic oligonucleotide
ucuuaugcuggcaaauuug

SEQ ID NO: 816083 - RNA, 19 nt, Artificial Sequence
  Description of Artificial Sequence: Synthetic oligonucleotide
uucauucucggauaguggc

SEQ ID NO: 816084 - RNA, 19 nt, Artificial Sequence
  Description of Artificial Sequence: Synthetic oligonucleotide
aggaucuagaaauuuaagu

SEQ ID NO: 816085 - RNA, 19 nt, Artificial Sequence
  Description of Artificial Sequence: Synthetic oligonucleotide
ucguaaggcacccggaagg

SEQ ID NO: 816086 - RNA, 19 nt, Artificial Sequence
  Description of Artificial Sequence: Synthetic oligonucleotide
guuguagucacucuugaac

SEQ ID NO: 816087 - RNA, 19 nt, Artificial Sequence
  Description of Artificial Sequence: Synthetic oligonucleotide
ucacauauguccaccagga

SEQ ID NO: 816088 - RNA, 19 nt, Artificial Sequence
  Description of Artificial Sequence: Synthetic oligonucleotide
auuugguccgaucuuuaac

SEQ ID NO: 816089 - RNA, 19 nt, Artificial Sequence
  Description of Artificial Sequence: Synthetic oligonucleotide
auguaguuuccccauuagc

SEQ ID NO: 816090 - RNA, 19 nt, Artificial Sequence
  Description of Artificial Sequence: Synthetic oligonucleotide
ucgacaaaaggcaggaugu

SEQ ID NO: 816091 - RNA, 19 nt, Artificial Sequence
  Description of Artificial Sequence: Synthetic oligonucleotide
aaaucgucgacaaaaggca

SEQ ID NO: 816092 - RNA, 19 nt, Artificial Sequence
  Description of Artificial Sequence: Synthetic oligonucleotide
uccuuuaacgcuugcauga

SEQ ID NO: 816093 - RNA, 19 nt, Artificial Sequence
  Description of Artificial Sequence: Synthetic oligonucleotide
aaugugcaaaaucgucgac

SEQ ID NO: 816094 - RNA, 19 nt, Artificial Sequence
  Description of Artificial Sequence: Synthetic oligonucleotide
ugugguguggacgugaccc

SEQ ID NO: 816095 - RNA, 19 nt, Artificial Sequence
  Description of Artificial Sequence: Synthetic oligonucleotide
caugcaaguccucaggagg

SEQ ID NO: 816096 - RNA, 19 nt, Artificial Sequence
  Description of Artificial Sequence: Synthetic oligonucleotide
caugguuacaaacuuugag

SEQ ID NO: 816097 - RNA, 19 nt, Artificial Sequence
  Description of Artificial Sequence: Synthetic oligonucleotide
cugaaaacgcugaugagug

SEQ ID NO: 816098 - RNA, 19 nt, Artificial Sequence
  Description of Artificial Sequence: Synthetic oligonucleotide
ucgaaacagagccaagaag

SEQ ID NO: 816099 - RNA, 19 nt, Artificial Sequence
  Description of Artificial Sequence: Synthetic oligonucleotide
agcaacacaaguuccagca

SEQ ID NO: 816100 - RNA, 19 nt, Artificial Sequence
  Description of Artificial Sequence: Synthetic oligonucleotide
agagcuaaggucaaauccg

SEQ ID NO: 816101 - RNA, 19 nt, Artificial Sequence
  Description of Artificial Sequence: Synthetic oligonucleotide
cuaaaugugcaaaaucguc

SEQ ID NO: 816102 - RNA, 19 nt, Artificial Sequence
  Description of Artificial Sequence: Synthetic oligonucleotide
uuccccauuagcaacacaa

SEQ ID NO: 816103 - RNA, 19 nt, Artificial Sequence
  Description of Artificial Sequence: Synthetic oligonucleotide
ugguuacaaacuuugagaa

SEQ ID NO: 816104 - RNA, 19 nt, Artificial Sequence
  Description of Artificial Sequence: Synthetic oligonucleotide
ucugaaaacgcugaugagu

SEQ ID NO: 816105 - RNA, 19 nt, Artificial Sequence
  Description of Artificial Sequence: Synthetic oligonucleotide
uuuaguuuacagagagagc

SEQ ID NO: 816106 - RNA, 19 nt, Artificial Sequence
  Description of Artificial Sequence: Synthetic oligonucleotide
cuuaugagugucuagauua

SEQ ID NO: 816107 - RNA, 19 nt, Artificial Sequence
  Description of Artificial Sequence: Synthetic oligonucleotide
ugucuagauuauaauuaag

SEQ ID NO: 816108 - RNA, 19 nt, Artificial Sequence
  Description of Artificial Sequence: Synthetic oligonucleotide
aaagcucguaaucuugcca

SEQ ID NO: 816109 - RNA, 19 nt, Artificial Sequence
  Description of Artificial Sequence: Synthetic oligonucleotide
aagcuuugucuaaaugugc

SEQ ID NO: 816110 - RNA, 19 nt, Artificial Sequence
  Description of Artificial Sequence: Synthetic oligonucleotide
uuacagagagagcuaaggu

SEQ ID NO: 816111 - RNA, 19 nt, Artificial Sequence
  Description of Artificial Sequence: Synthetic oligonucleotide
ugcauacugcucauuugcg

SEQ ID NO: 816112 - RNA, 19 nt, Artificial Sequence
  Description of Artificial Sequence: Synthetic oligonucleotide
cucccuggaauucuuaugc

SEQ ID NO: 816113 - RNA, 19 nt, Artificial Sequence
  Description of Artificial Sequence: Synthetic oligonucleotide
uuacaaacuuugagaacag

SEQ ID NO: 816114 - RNA, 19 nt, Artificial Sequence
  Description of Artificial Sequence: Synthetic oligonucleotide
uucaauugcucuucaucag

SEQ ID NO: 816115 - RNA, 19 nt, Artificial Sequence
  Description of Artificial Sequence: Synthetic oligonucleotide
ucugcugauuuuauguccu

SEQ ID NO: 816116 - RNA, 19 nt, Artificial Sequence
  Description of Artificial Sequence: Synthetic oligonucleotide
guuucaacccaauggcagg

SEQ ID NO: 816117 - RNA, 19 nt, Artificial Sequence
  Description of Artificial Sequence: Synthetic oligonucleotide
uaaggcacccggaaggagc

SEQ ID NO: 816118 - RNA, 19 nt, Artificial Sequence
  Description of Artificial Sequence: Synthetic oligonucleotide
uuugucuaaaugugcaaaa

SEQ ID NO: 816119 - RNA, 19 nt, Artificial Sequence
  Description of Artificial Sequence: Synthetic oligonucleotide
caaaaucgucgacaaaagg

SEQ ID NO: 816120 - RNA, 19 nt, Artificial Sequence
  Description of Artificial Sequence: Synthetic oligonucleotide
gucgacaaaaggcaggaug

SEQ ID NO: 816121 - RNA, 19 nt, Artificial Sequence
  Description of Artificial Sequence: Synthetic oligonucleotide
aauguaguucugaaguugu

SEQ ID NO: 816122 - RNA, 19 nt, Artificial Sequence
  Description of Artificial Sequence: Synthetic oligonucleotide
ugauacugugguguggacg

SEQ ID NO: 816123 - RNA, 19 nt, Artificial Sequence
  Description of Artificial Sequence: Synthetic oligonucleotide
ucaggcuuaaacucuuucu

SEQ ID NO: 816124 - RNA, 19 nt, Artificial Sequence
  Description of Artificial Sequence: Synthetic oligonucleotide
uaggccauuacacucuggu

SEQ ID NO: 816125 - RNA, 19 nt, Artificial Sequence
  Description of Artificial Sequence: Synthetic oligonucleotide
uccacggagaccuucuuca

SEQ ID NO: 816126 - RNA, 19 nt, Artificial Sequence
  Description of Artificial Sequence: Synthetic oligonucleotide
agagagcuaaggucaaauc

SEQ ID NO: 816127 - RNA, 19 nt, Artificial Sequence
  Description of Artificial Sequence: Synthetic oligonucleotide
gacucuacaagcuuugucu

SEQ ID NO: 816128 - RNA, 19 nt, Artificial Sequence
  Description of Artificial Sequence: Synthetic oligonucleotide
agaugcuuuaguaaguucu

SEQ ID NO: 816129 - RNA, 19 nt, Artificial Sequence
  Description of Artificial Sequence: Synthetic oligonucleotide
uacagagacucuacaagcu

SEQ ID NO: 816130 - RNA, 19 nt, Artificial Sequence
  Description of Artificial Sequence: Synthetic oligonucleotide
ccgaauaucugcuuuaggc

SEQ ID NO: 816131 - RNA, 19 nt, Artificial Sequence
  Description of Artificial Sequence: Synthetic oligonucleotide
gcaguauuaauguacugcc

SEQ ID NO: 816132 - RNA, 19 nt, Artificial Sequence
  Description of Artificial Sequence: Synthetic oligonucleotide
ucgcaggcaguacugacag

SEQ ID NO: 816133 - RNA, 19 nt, Artificial Sequence
  Description of Artificial Sequence: Synthetic oligonucleotide
uucugagcaauuuuaggau

SEQ ID NO: 816134 - RNA, 19 nt, Artificial Sequence
  Description of Artificial Sequence: Synthetic oligonucleotide
auccacuuccaauaucauc

SEQ ID NO: 816135 - RNA, 19 nt, Artificial Sequence
  Description of Artificial Sequence: Synthetic oligonucleotide
agacucuacaagcuuuguc

SEQ ID NO: 816136 - RNA, 19 nt, Artificial Sequence
  Description of Artificial Sequence: Synthetic oligonucleotide
cuucauucucggauagugg

SEQ ID NO: 816137 - RNA, 19 nt, Artificial Sequence
  Description of Artificial Sequence: Synthetic oligonucleotide
uccuuaauucuuuucuuaa

SEQ ID NO: 816138 - RNA, 19 nt, Artificial Sequence
  Description of Artificial Sequence: Synthetic oligonucleotide
uuucgaaacagagccaaga

SEQ ID NO: 816139 - RNA, 19 nt, Artificial Sequence
  Description of Artificial Sequence: Synthetic oligonucleotide
aagacuucauucucggaua

SEQ ID NO: 816140 - RNA, 19 nt, Artificial Sequence
  Description of Artificial Sequence: Synthetic oligonucleotide
aagcaaaucuguauuuuca

SEQ ID NO: 816141 - RNA, 19 nt, Artificial Sequence
  Description of Artificial Sequence: Synthetic oligonucleotide
uuagcaacacaaguuccag

SEQ ID NO: 816142 - RNA, 19 nt, Artificial Sequence
  Description of Artificial Sequence: Synthetic oligonucleotide
cacaaacuugucaugcaag

SEQ ID NO: 816143 - RNA, 19 nt, Artificial Sequence
  Description of Artificial Sequence: Synthetic oligonucleotide
aacgcugaugagugaucac

SEQ ID NO: 816144 - RNA, 19 nt, Artificial Sequence
  Description of Artificial Sequence: Synthetic oligonucleotide
acggagaccuucuucaugu

SEQ ID NO: 816145 - RNA, 19 nt, Artificial Sequence
  Description of Artificial Sequence: Synthetic oligonucleotide
uuaacgcuugcaugaaugu

SEQ ID NO: 816146 - RNA, 19 nt, Artificial Sequence
  Description of Artificial Sequence: Synthetic oligonucleotide
ugucucgucagccucaguu

SEQ ID NO: 816147 - RNA, 19 nt, Artificial Sequence
  Description of Artificial Sequence: Synthetic oligonucleotide
uuggacugagacucugccg

SEQ ID NO: 816148 - RNA, 19 nt, Artificial Sequence
  Description of Artificial Sequence: Synthetic oligonucleotide
aauucuuaugcuggcaaau

SEQ ID NO: 816149 - RNA, 19 nt, Artificial Sequence
  Description of Artificial Sequence: Synthetic oligonucleotide
uguugaagcugccuuccca

SEQ ID NO: 816150 - RNA, 19 nt, Artificial Sequence
  Description of Artificial Sequence: Synthetic oligonucleotide
uugauuguuguagucacuc

SEQ ID NO: 816151 - RNA, 19 nt, Artificial Sequence
  Description of Artificial Sequence: Synthetic oligonucleotide
uucuacagagacucuacaa

SEQ ID NO: 816152 - RNA, 19 nt, Artificial Sequence
  Description of Artificial Sequence: Synthetic oligonucleotide
agugucuagauuauaauua

SEQ ID NO: 816153 - RNA, 19 nt, Artificial Sequence
  Description of Artificial Sequence: Synthetic oligonucleotide
cuuuucccgucaauggugc

SEQ ID NO: 816154 - RNA, 19 nt, Artificial Sequence
  Description of Artificial Sequence: Synthetic oligonucleotide
acucugguacaacuguguc

SEQ ID NO: 816155 - RNA, 19 nt, Artificial Sequence
  Description of Artificial Sequence: Synthetic oligonucleotide
acugauucgcuuuucgaaa

SEQ ID NO: 816156 - RNA, 19 nt, Artificial Sequence
  Description of Artificial Sequence: Synthetic oligonucleotide
ucggauaguggcuugggaa

SEQ ID NO: 816157 - RNA, 19 nt, Artificial Sequence
  Description of Artificial Sequence: Synthetic oligonucleotide
ucuucugucgcggaaggca

SEQ ID NO: 816158 - RNA, 19 nt, Artificial Sequence
  Description of Artificial Sequence: Synthetic oligonucleotide
agacuuaugagugucuaga

SEQ ID NO: 816159 - RNA, 19 nt, Artificial Sequence
  Description of Artificial Sequence: Synthetic oligonucleotide
ucuuagaagcaguauuaau

SEQ ID NO: 816160 - RNA, 19 nt, Artificial Sequence
  Description of Artificial Sequence: Synthetic oligonucleotide
ucauuugcgcugcuaacaa

SEQ ID NO: 816161 - RNA, 19 nt, Artificial Sequence
  Description of Artificial Sequence: Synthetic oligonucleotide
augucuuagaagcaguauu

SEQ ID NO: 816162 - RNA, 19 nt, Artificial Sequence
  Description of Artificial Sequence: Synthetic oligonucleotide
aauccgaagguuugagcau

SEQ ID NO: 816163 - RNA, 19 nt, Artificial Sequence
  Description of Artificial Sequence: Synthetic oligonucleotide
uuuucgaaacagagccaag

SEQ ID NO: 816164 - RNA, 19 nt, Artificial Sequence
  Description of Artificial Sequence: Synthetic oligonucleotide
ugacccuucugucaacugu

SEQ ID NO: 816165 - RNA, 19 nt, Artificial Sequence
  Description of Artificial Sequence: Synthetic oligonucleotide
gauacugugguguggacgu

SEQ ID NO: 816166 - RNA, 19 nt, Artificial Sequence
  Description of Artificial Sequence: Synthetic oligonucleotide
uuugcgcugcuaacaaagc

SEQ ID NO: 816167 - RNA, 19 nt, Artificial Sequence
  Description of Artificial Sequence: Synthetic oligonucleotide
ucgcuuuucgaaacagagc

SEQ ID NO: 816168 - RNA, 19 nt, Artificial Sequence
  Description of Artificial Sequence: Synthetic oligonucleotide
aaacgcugaugagugauca

SEQ ID NO: 816169 - RNA, 19 nt, Artificial Sequence
  Description of Artificial Sequence: Synthetic oligonucleotide
agguuugauuguuguaguc

SEQ ID NO: 816170 - RNA, 19 nt, Artificial Sequence
  Description of Artificial Sequence: Synthetic oligonucleotide
aagcaguauuaauguacug

SEQ ID NO: 816171 - RNA, 19 nt, Artificial Sequence
  Description of Artificial Sequence: Synthetic oligonucleotide
uccuuuucccgucaauggu

SEQ ID NO: 816172 - RNA, 19 nt, Artificial Sequence
  Description of Artificial Sequence: Synthetic oligonucleotide
guagucacucuugaacugg

SEQ ID NO: 816173 - RNA, 19 nt, Artificial Sequence
  Description of Artificial Sequence: Synthetic oligonucleotide
ugcucauuugcgcugcuaa

SEQ ID NO: 816174 - RNA, 19 nt, Artificial Sequence
  Description of Artificial Sequence: Synthetic oligonucleotide
uaguaggccauuacacucu

SEQ ID NO: 816175 - RNA, 19 nt, Artificial Sequence
  Description of Artificial Sequence: Synthetic oligonucleotide
gguuugagcauuccgggag

SEQ ID NO: 816176 - RNA, 19 nt, Artificial Sequence
  Description of Artificial Sequence: Synthetic oligonucleotide
ugagugucuagauuauaau

SEQ ID NO: 816177 - RNA, 19 nt, Artificial Sequence
  Description of Artificial Sequence: Synthetic oligonucleotide
cauuuguauucauuuucac

SEQ ID NO: 816178 - RNA, 19 nt, Artificial Sequence
  Description of Artificial Sequence: Synthetic oligonucleotide
ugggacaaugaauucaauu

SEQ ID NO: 816179 - RNA, 19 nt, Artificial Sequence
  Description of Artificial Sequence: Synthetic oligonucleotide
aaaacgcugaugagugauc

SEQ ID NO: 816180 - RNA, 19 nt, Artificial Sequence
  Description of Artificial Sequence: Synthetic oligonucleotide
gcuaaggucaaauccgaag

SEQ ID NO: 816181 - RNA, 19 nt, Artificial Sequence
  Description of Artificial Sequence: Synthetic oligonucleotide
uucuuaugcuggcaaauuu

SEQ ID NO: 816182 - RNA, 19 nt, Artificial Sequence
  Description of Artificial Sequence: Synthetic oligonucleotide
aaugucuuagaagcaguau

SEQ ID NO: 816183 - RNA, 19 nt, Artificial Sequence
  Description of Artificial Sequence: Synthetic oligonucleotide
uacaaacuuugagaacagg

SEQ ID NO: 816184 - RNA, 19 nt, Artificial Sequence
  Description of Artificial Sequence: Synthetic oligonucleotide
ggccauuacacucugguac

SEQ ID NO: 816185 - RNA, 19 nt, Artificial Sequence
  Description of Artificial Sequence: Synthetic oligonucleotide
ucaugguuacaaacuuuga

SEQ ID NO: 816186 - RNA, 19 nt, Artificial Sequence
  Description of Artificial Sequence: Synthetic oligonucleotide
uucgcaggcaguacugaca

SEQ ID NO: 816187 - RNA, 19 nt, Artificial Sequence
  Description of Artificial Sequence: Synthetic oligonucleotide
ucuucaugucaacagcaua

SEQ ID NO: 816188 - RNA, 19 nt, Artificial Sequence
  Description of Artificial Sequence: Synthetic oligonucleotide
ucauguaguuuccccauua

SEQ ID NO: 816189 - RNA, 19 nt, Artificial Sequence
  Description of Artificial Sequence: Synthetic oligonucleotide
ucauucucggauaguggcu

SEQ ID NO: 816190 - RNA, 19 nt, Artificial Sequence
  Description of Artificial Sequence: Synthetic oligonucleotide
agacuucauucucggauag

SEQ ID NO: 816191 - RNA, 19 nt, Artificial Sequence
  Description of Artificial Sequence: Synthetic oligonucleotide
aagcuuuguccgcugagaa

SEQ ID NO: 816192 - RNA, 19 nt, Artificial Sequence
  Description of Artificial Sequence: Synthetic oligonucleotide
agcucguaaucuugccagc

SEQ ID NO: 816193 - RNA, 19 nt, Artificial Sequence
  Description of Artificial Sequence: Synthetic oligonucleotide
cuuugaucucuucgcaggc

SEQ ID NO: 816194 - RNA, 19 nt, Artificial Sequence
  Description of Artificial Sequence: Synthetic oligonucleotide
auuguuguagucacucuug

SEQ ID NO: 816195 - RNA, 19 nt, Artificial Sequence
  Description of Artificial Sequence: Synthetic oligonucleotide
aaucgucgacaaaaggcag

SEQ ID NO: 816196 - RNA, 19 nt, Artificial Sequence
  Description of Artificial Sequence: Synthetic oligonucleotide
guugucuaggagcucugag

SEQ ID NO: 816197 - RNA, 19 nt, Artificial Sequence
  Description of Artificial Sequence: Synthetic oligonucleotide
uuggaggcguucuugcucu

SEQ ID NO: 816198 - RNA, 19 nt, Artificial Sequence
  Description of Artificial Sequence: Synthetic oligonucleotide
cucugagagguuugcauac

SEQ ID NO: 816199 - RNA, 19 nt, Artificial Sequence
  Description of Artificial Sequence: Synthetic oligonucleotide
uguuggcaacaaaaugugu

SEQ ID NO: 816200 - RNA, 19 nt, Artificial Sequence
  Description of Artificial Sequence: Synthetic oligonucleotide
ugauucgcuuuucgaaaca

SEQ ID NO: 816201 - RNA, 19 nt, Artificial Sequence
  Description of Artificial Sequence: Synthetic oligonucleotide
uuuguccgcugagaaaucc

SEQ ID NO: 816202 - RNA, 19 nt, Artificial Sequence
  Description of Artificial Sequence: Synthetic oligonucleotide
agcaacuugcuaaagcucu

SEQ ID NO: 816203 - RNA, 19 nt, Artificial Sequence
  Description of Artificial Sequence: Synthetic oligonucleotide
ucucuucgcaggcaguacu

SEQ ID NO: 816204 - RNA, 19 nt, Artificial Sequence
  Description of Artificial Sequence: Synthetic oligonucleotide
ucuacaagcuuugucuaaa

SEQ ID NO: 816205 - RNA, 19 nt, Artificial Sequence
  Description of Artificial Sequence: Synthetic oligonucleotide
ugcuaacaaagcuggacau

SEQ ID NO: 816206 - RNA, 19 nt, Artificial Sequence
  Description of Artificial Sequence: Synthetic oligonucleotide
ugucgcggaaggcagcccc

SEQ ID NO: 816207 - RNA, 19 nt, Artificial Sequence
  Description of Artificial Sequence: Synthetic oligonucleotide
cugauucgcuuuucgaaac

SEQ ID NO: 816208 - RNA, 19 nt, Artificial Sequence
  Description of Artificial Sequence: Synthetic oligonucleotide
ucucaagcuguugaagcug

SEQ ID NO: 816209 - RNA, 19 nt, Artificial Sequence
  Description of Artificial Sequence: Synthetic oligonucleotide
caauuuuaggaucuagaaa

SEQ ID NO: 816210 - RNA, 19 nt, Artificial Sequence
  Description of Artificial Sequence: Synthetic oligonucleotide
uuguccgcugagaaauccc

SEQ ID NO: 816211 - RNA, 19 nt, Artificial Sequence
  Description of Artificial Sequence: Synthetic oligonucleotide
uucugcauuacaggcuucc

SEQ ID NO: 816212 - RNA, 19 nt, Artificial Sequence
  Description of Artificial Sequence: Synthetic oligonucleotide
auugaaagguucugagcaa

SEQ ID NO: 816213 - RNA, 19 nt, Artificial Sequence
  Description of Artificial Sequence: Synthetic oligonucleotide
uuaagacuucauucucgga

SEQ ID NO: 816214 - RNA, 19 nt, Artificial Sequence
  Description of Artificial Sequence: Synthetic oligonucleotide
cuucugucgcggaaggcag

SEQ ID NO: 816215 - RNA, 19 nt, Artificial Sequence
  Description of Artificial Sequence: Synthetic oligonucleotide
aagguucugagcaauuuua

SEQ ID NO: 816216 - RNA, 19 nt, Artificial Sequence
  Description of Artificial Sequence: Synthetic oligonucleotide
uuaugcuggcaaauuuguc

SEQ ID NO: 816217 - RNA, 19 nt, Artificial Sequence
  Description of Artificial Sequence: Synthetic oligonucleotide
agcagacuauccaucacuc

SEQ ID NO: 816218 - RNA, 19 nt, Artificial Sequence
  Description of Artificial Sequence: Synthetic oligonucleotide
acuuaugagugucuagauu

SEQ ID NO: 816219 - RNA, 19 nt, Artificial Sequence
  Description of Artificial Sequence: Synthetic oligonucleotide
ucgcucuuuggcuauucug

SEQ ID NO: 816220 - RNA, 19 nt, Artificial Sequence
  Description of Artificial Sequence: Synthetic oligonucleotide
gguuucaacccaauggcag

SEQ ID NO: 816221 - RNA, 19 nt, Artificial Sequence
  Description of Artificial Sequence: Synthetic oligonucleotide
uugguccgaucuuuaacca

SEQ ID NO: 816222 - RNA, 19 nt, Artificial Sequence
  Description of Artificial Sequence: Synthetic oligonucleotide
uuggcgacuggaguccugg

SEQ ID NO: 816223 - RNA, 19 nt, Artificial Sequence
  Description of Artificial Sequence: Synthetic oligonucleotide
agagguuugcauacugcuc

SEQ ID NO: 816224 - RNA, 19 nt, Artificial Sequence
  Description of Artificial Sequence: Synthetic oligonucleotide
augugcaaaaucgucgaca

SEQ ID NO: 816225 - RNA, 19 nt, Artificial Sequence
  Description of Artificial Sequence: Synthetic oligonucleotide
uggcuugggaauguuuucc

SEQ ID NO: 816226 - RNA, 19 nt, Artificial Sequence
  Description of Artificial Sequence: Synthetic oligonucleotide
gcgacuggaguccuggugg

SEQ ID NO: 816227 - RNA, 19 nt, Artificial Sequence
  Description of Artificial Sequence: Synthetic oligonucleotide
ggaucuagaaauuuaaguu

SEQ ID NO: 816228 - RNA, 19 nt, Artificial Sequence
  Description of Artificial Sequence: Synthetic oligonucleotide
gcaauuuuaggaucuagaa

SEQ ID NO: 816229 - RNA, 19 nt, Artificial Sequence
  Description of Artificial Sequence: Synthetic oligonucleotide
uuucuugcucccuggaauu

SEQ ID NO: 816230 - RNA, 19 nt, Artificial Sequence
  Description of Artificial Sequence: Synthetic oligonucleotide
cauuggacugagacucugc

SEQ ID NO: 816231 - RNA, 19 nt, Artificial Sequence
  Description of Artificial Sequence: Synthetic oligonucleotide
uucaggaacugauucgcuu

SEQ ID NO: 816232 - RNA, 19 nt, Artificial Sequence
  Description of Artificial Sequence: Synthetic oligonucleotide
aguuuacagagagagcuaa

SEQ ID NO: 816233 - RNA, 19 nt, Artificial Sequence
  Description of Artificial Sequence: Synthetic oligonucleotide
auacugcucauuugcgcug

SEQ ID NO: 816234 - RNA, 19 nt, Artificial Sequence
  Description of Artificial Sequence: Synthetic oligonucleotide
gguacuuuuccucacauau

SEQ ID NO: 816235 - RNA, 19 nt, Artificial Sequence
  Description of Artificial Sequence: Synthetic oligonucleotide
gaauucuuaugcuggcaaa

SEQ ID NO: 816236 - RNA, 19 nt, Artificial Sequence
  Description of Artificial Sequence: Synthetic oligonucleotide
cuugauccucccuguagac

SEQ ID NO: 816237 - RNA, 19 nt, Artificial Sequence
  Description of Artificial Sequence: Synthetic oligonucleotide
uguuguagucacucuugaa

SEQ ID NO: 816238 - RNA, 19 nt, Artificial Sequence
  Description of Artificial Sequence: Synthetic oligonucleotide
augagugucuagauuauaa

SEQ ID NO: 816239 - RNA, 19 nt, Artificial Sequence
  Description of Artificial Sequence: Synthetic oligonucleotide
aaaugucuuagaagcagua

SEQ ID NO: 816240 - RNA, 19 nt, Artificial Sequence
  Description of Artificial Sequence: Synthetic oligonucleotide
uccgaucuuuaaccaauuc

SEQ ID NO: 816241 - RNA, 19 nt, Artificial Sequence
  Description of Artificial Sequence: Synthetic oligonucleotide
ugaaaacgcugaugaguga

SEQ ID NO: 816242 - RNA, 19 nt, Artificial Sequence
  Description of Artificial Sequence: Synthetic oligonucleotide
ucgucgacaaaaggcagga

SEQ ID NO: 816243 - RNA, 19 nt, Artificial Sequence
  Description of Artificial Sequence: Synthetic oligonucleotide
aucgucgacaaaaggcagg

SEQ ID NO: 816244 - RNA, 19 nt, Artificial Sequence
  Description of Artificial Sequence: Synthetic oligonucleotide
cucguaaucuugccagcag

SEQ ID NO: 816245 - RNA, 19 nt, Artificial Sequence
  Description of Artificial Sequence: Synthetic oligonucleotide
uggcaacaaaauguguucu

SEQ ID NO: 816246 - RNA, 19 nt, Artificial Sequence
  Description of Artificial Sequence: Synthetic oligonucleotide
uuucucuagcuggcguugg

SEQ ID NO: 816247 - RNA, 19 nt, Artificial Sequence
  Description of Artificial Sequence: Synthetic oligonucleotide
uaguuuacagagagagcua

SEQ ID NO: 816248 - RNA, 19 nt, Artificial Sequence
  Description of Artificial Sequence: Synthetic oligonucleotide
gaagcaguauuaauguacu

SEQ ID NO: 816249 - RNA, 19 nt, Artificial Sequence
  Description of Artificial Sequence: Synthetic oligonucleotide
ugaugucagguuugauugu

SEQ ID NO: 816250 - RNA, 19 nt, Artificial Sequence
  Description of Artificial Sequence: Synthetic oligonucleotide
uccucacauauguccacca

SEQ ID NO: 816251 - RNA, 19 nt, Artificial Sequence
  Description of Artificial Sequence: Synthetic oligonucleotide
cucguaaggcacccggaag

SEQ ID NO: 816252 - RNA, 19 nt, Artificial Sequence
  Description of Artificial Sequence: Synthetic oligonucleotide
uggcagguuuaauggagga

SEQ ID NO: 816253 - RNA, 19 nt, Artificial Sequence
  Description of Artificial Sequence: Synthetic oligonucleotide
uuugagcauuccgggagcc

SEQ ID NO: 816254 - RNA, 19 nt, Artificial Sequence
  Description of Artificial Sequence: Synthetic oligonucleotide
uucucggauaguggcuugg

SEQ ID NO: 816255 - RNA, 19 nt, Artificial Sequence
  Description of Artificial Sequence: Synthetic oligonucleotide
ugagacucugccgaauauc

SEQ ID NO: 816256 - RNA, 19 nt, Artificial Sequence
  Description of Artificial Sequence: Synthetic oligonucleotide
agaacaggccucugagaca

SEQ ID NO: 816257 - RNA, 19 nt, Artificial Sequence
  Description of Artificial Sequence: Synthetic oligonucleotide
cccuguagacuuaugagug

SEQ ID NO: 816258 - RNA, 19 nt, Artificial Sequence
  Description of Artificial Sequence: Synthetic oligonucleotide
cuuuucgaaacagagccaa

SEQ ID NO: 816259 - RNA, 19 nt, Artificial Sequence
  Description of Artificial Sequence: Synthetic oligonucleotide
ugccgaauaucugcuuuag

SEQ ID NO: 816260 - RNA, 19 nt, Artificial Sequence
  Description of Artificial Sequence: Synthetic oligonucleotide
cucuugaacugggacaaug

SEQ ID NO: 816261 - RNA, 19 nt, Artificial Sequence
  Description of Artificial Sequence: Synthetic oligonucleotide
ucucggauaguggcuuggg

SEQ ID NO: 816262 - RNA, 19 nt, Artificial Sequence
  Description of Artificial Sequence: Synthetic oligonucleotide
uucugaucugcugauuuua

SEQ ID NO: 816263 - RNA, 19 nt, Artificial Sequence
  Description of Artificial Sequence: Synthetic oligonucleotide
cuaacaaagcuggacaucu

SEQ ID NO: 816264 - RNA, 19 nt, Artificial Sequence
  Description of Artificial Sequence: Synthetic oligonucleotide
uuucccgucaauggugccu

SEQ ID NO: 816265 - RNA, 19 nt, Artificial Sequence
  Description of Artificial Sequence: Synthetic oligonucleotide
agguucugagcaauuuuag

SEQ ID NO: 816266 - RNA, 19 nt, Artificial Sequence
  Description of Artificial Sequence: Synthetic oligonucleotide
ugccauugauacuguggug

SEQ ID NO: 816267 - RNA, 19 nt, Artificial Sequence
  Description of Artificial Sequence: Synthetic oligonucleotide
gguuacaaacuuugagaac

SEQ ID NO: 816268 - RNA, 19 nt, Artificial Sequence
  Description of Artificial Sequence: Synthetic oligonucleotide
ccaccaaaugucuuagaag

SEQ ID NO: 816269 - RNA, 19 nt, Artificial Sequence
  Description of Artificial Sequence: Synthetic oligonucleotide
gaacugggacaaugaauuc

SEQ ID NO: 816270 - RNA, 19 nt, Artificial Sequence
  Description of Artificial Sequence: Synthetic oligonucleotide
uuuugauacugaaguccuu

SEQ ID NO: 816271 - RNA, 19 nt, Artificial Sequence
  Description of Artificial Sequence: Synthetic oligonucleotide
acgcugaugagugaucacu

SEQ ID NO: 816272 - RNA, 19 nt, Artificial Sequence
  Description of Artificial Sequence: Synthetic oligonucleotide
cuuaugcuggcaaauuugu

SEQ ID NO: 816273 - RNA, 19 nt, Artificial Sequence
  Description of Artificial Sequence: Synthetic oligonucleotide
cauacugcucauuugcgcu

SEQ ID NO: 816274 - RNA, 19 nt, Artificial Sequence
  Description of Artificial Sequence: Synthetic oligonucleotide
cuguagacuuaugaguguc

SEQ ID NO: 816275 - RNA, 19 nt, Artificial Sequence
  Description of Artificial Sequence: Synthetic oligonucleotide
ucauuucuaguaagcgcuu

SEQ ID NO: 816276 - RNA, 19 nt, Artificial Sequence
  Description of Artificial Sequence: Synthetic oligonucleotide
gcauaguaggccauuacac

SEQ ID NO: 816277 - RNA, 19 nt, Artificial Sequence
  Description of Artificial Sequence: Synthetic oligonucleotide
gguuugauuguuguaguca

SEQ ID NO: 816278 - RNA, 19 nt, Artificial Sequence
  Description of Artificial Sequence: Synthetic oligonucleotide
uuaggcuucgguguccuuu

SEQ ID NO: 816279 - RNA, 19 nt, Artificial Sequence
  Description of Artificial Sequence: Synthetic oligonucleotide
agguuugagcauuccggga

SEQ ID NO: 816280 - RNA, 19 nt, Artificial Sequence
  Description of Artificial Sequence: Synthetic oligonucleotide
cuagcuggcguuggaggcg

SEQ ID NO: 816281 - RNA, 19 nt, Artificial Sequence
  Description of Artificial Sequence: Synthetic oligonucleotide
guacuuuuccucacauaug

SEQ ID NO: 816282 - RNA, 19 nt, Artificial Sequence
  Description of Artificial Sequence: Synthetic oligonucleotide
acugagacucugccgaaua

SEQ ID NO: 816283 - RNA, 19 nt, Artificial Sequence
  Description of Artificial Sequence: Synthetic oligonucleotide
gcauacugcucauuugcgc

SEQ ID NO: 816284 - RNA, 19 nt, Artificial Sequence
  Description of Artificial Sequence: Synthetic oligonucleotide
gcaaaaucgucgacaaaag

SEQ ID NO: 816285 - RNA, 19 nt, Artificial Sequence
  Description of Artificial Sequence: Synthetic oligonucleotide
uccuucucgacugccuuga

SEQ ID NO: 816286 - RNA, 19 nt, Artificial Sequence
  Description of Artificial Sequence: Synthetic oligonucleotide
caguauuaauguacugcca

SEQ ID NO: 816287 - RNA, 19 nt, Artificial Sequence
  Description of Artificial Sequence: Synthetic oligonucleotide
uccucguaaggcacccgga

SEQ ID NO: 816288 - RNA, 19 nt, Artificial Sequence
  Description of Artificial Sequence: Synthetic oligonucleotide
acccggaaggagcucagga

SEQ ID NO: 816289 - RNA, 19 nt, Artificial Sequence
  Description of Artificial Sequence: Synthetic oligonucleotide
uacugcucauuugcgcugc

SEQ ID NO: 816290 - RNA, 19 nt, Artificial Sequence
  Description of Artificial Sequence: Synthetic oligonucleotide
ugguccgaucuuuaaccaa

SEQ ID NO: 816291 - RNA, 19 nt, Artificial Sequence
  Description of Artificial Sequence: Synthetic oligonucleotide
ucgucagccucaguuuuca

SEQ ID NO: 816292 - RNA, 19 nt, Artificial Sequence
  Description of Artificial Sequence: Synthetic oligonucleotide
uucugucgcggaaggcagc

SEQ ID NO: 816293 - RNA, 19 nt, Artificial Sequence
  Description of Artificial Sequence: Synthetic oligonucleotide
aggaaagcuuuguccgcug

SEQ ID NO: 816294 - RNA, 19 nt, Artificial Sequence
  Description of Artificial Sequence: Synthetic oligonucleotide
ugcucccuggaauucuuau

SEQ ID NO: 816295 - RNA, 19 nt, Artificial Sequence
  Description of Artificial Sequence: Synthetic oligonucleotide
uguugucuaggagcucuga

SEQ ID NO: 816296 - RNA, 19 nt, Artificial Sequence
  Description of Artificial Sequence: Synthetic oligonucleotide
cuucucgacugccuugauc

SEQ ID NO: 816297 - RNA, 19 nt, Artificial Sequence
  Description of Artificial Sequence: Synthetic oligonucleotide
auucuuaugcuggcaaauu

SEQ ID NO: 816298 - RNA, 19 nt, Artificial Sequence
  Description of Artificial Sequence: Synthetic oligonucleotide
uaugagugucuagauuaua

SEQ ID NO: 816299 - RNA, 19 nt, Artificial Sequence
  Description of Artificial Sequence: Synthetic oligonucleotide
gagcuaaggucaaauccga

SEQ ID NO: 816300 - RNA, 19 nt, Artificial Sequence
  Description of Artificial Sequence: Synthetic oligonucleotide
uaacgcuugcaugaaugua

SEQ ID NO: 816301 - RNA, 19 nt, Artificial Sequence
  Description of Artificial Sequence: Synthetic oligonucleotide
agauuauaauuaagcuccu

SEQ ID NO: 816302 - RNA, 19 nt, Artificial Sequence
  Description of Artificial Sequence: Synthetic oligonucleotide
auuuuaggaucuagaaauu

SEQ ID NO: 816303 - RNA, 19 nt, Artificial Sequence
  Description of Artificial Sequence: Synthetic oligonucleotide
uccgaagguuugagcauuc

SEQ ID NO: 816304 - RNA, 19 nt, Artificial Sequence
  Description of Artificial Sequence: Synthetic oligonucleotide
cgaucuuuaaccaauucaa

SEQ ID NO: 816305 - RNA, 19 nt, Artificial Sequence
  Description of Artificial Sequence: Synthetic oligonucleotide
gcugcuaacaaagcuggac

SEQ ID NO: 816306 - RNA, 19 nt, Artificial Sequence
  Description of Artificial Sequence: Synthetic oligonucleotide
uggcuauucuggcacgcuu

SEQ ID NO: 816307 - RNA, 19 nt, Artificial Sequence
  Description of Artificial Sequence: Synthetic oligonucleotide
ucugcauuacaggcuuccu

SEQ ID NO: 816308 - RNA, 19 nt, Artificial Sequence
  Description of Artificial Sequence: Synthetic oligonucleotide
uggcacgcuugucauuuuc

SEQ ID NO: 816309 - RNA, 19 nt, Artificial Sequence
  Description of Artificial Sequence: Synthetic oligonucleotide
caaaugucuuagaagcagu

SEQ ID NO: 816310 - RNA, 19 nt, Artificial Sequence
  Description of Artificial Sequence: Synthetic oligonucleotide
ugaucacugcucccagaua

SEQ ID NO: 816311 - RNA, 19 nt, Artificial Sequence
  Description of Artificial Sequence: Synthetic oligonucleotide
uaacaaagcuggacaucuu

SEQ ID NO: 816312 - RNA, 19 nt, Artificial Sequence
  Description of Artificial Sequence: Synthetic oligonucleotide
aggucaaauccgaagguuu

SEQ ID NO: 816313 - RNA, 19 nt, Artificial Sequence
  Description of Artificial Sequence: Synthetic oligonucleotide
gcgcugcuaacaaagcugg

SEQ ID NO: 816314 - RNA, 19 nt, Artificial Sequence
  Description of Artificial Sequence: Synthetic oligonucleotide
ccgaucuuuaaccaauuca

SEQ ID NO: 816315 - RNA, 19 nt, Artificial Sequence
  Description of Artificial Sequence: Synthetic oligonucleotide
cuuuguccgcugagaaauc

SEQ ID NO: 816316 - RNA, 19 nt, Artificial Sequence
  Description of Artificial Sequence: Synthetic oligonucleotide
gaacaggccucugagacau

SEQ ID NO: 816317 - RNA, 19 nt, Artificial Sequence
  Description of Artificial Sequence: Synthetic oligonucleotide
ugcucuucaucaggcagau

SEQ ID NO: 816318 - RNA, 19 nt, Artificial Sequence
  Description of Artificial Sequence: Synthetic oligonucleotide
gguccaccaaaugucuuag

SEQ ID NO: 816319 - RNA, 19 nt, Artificial Sequence
  Description of Artificial Sequence: Synthetic oligonucleotide
auuaagcuccuuggcgacu

SEQ ID NO: 816320 - RNA, 19 nt, Artificial Sequence
  Description of Artificial Sequence: Synthetic oligonucleotide
guagacuuaugagugucua

SEQ ID NO: 816321 - RNA, 19 nt, Artificial Sequence
  Description of Artificial Sequence: Synthetic oligonucleotide
gccgaauaucugcuuuagg

SEQ ID NO: 816322 - RNA, 19 nt, Artificial Sequence
  Description of Artificial Sequence: Synthetic oligonucleotide
uacaggcuuccuucucgac

SEQ ID NO: 816323 - RNA, 19 nt, Artificial Sequence
  Description of Artificial Sequence: Synthetic oligonucleotide
uucuucugucgcggaaggc

SEQ ID NO: 816324 - RNA, 19 nt, Artificial Sequence
  Description of Artificial Sequence: Synthetic oligonucleotide
gcagacuauccaucacucc

SEQ ID NO: 816325 - RNA, 19 nt, Artificial Sequence
  Description of Artificial Sequence: Synthetic oligonucleotide
acgugacccuucugucaac

SEQ ID NO: 816326 - RNA, 19 nt, Artificial Sequence
  Description of Artificial Sequence: Synthetic oligonucleotide
ggagaccuucuucauguca

SEQ ID NO: 816327 - RNA, 19 nt, Artificial Sequence
  Description of Artificial Sequence: Synthetic oligonucleotide
cugcuuuaggcuucggugu

SEQ ID NO: 816328 - RNA, 19 nt, Artificial Sequence
  Description of Artificial Sequence: Synthetic oligonucleotide
guccggguacuuuuccuca

SEQ ID NO: 816329 - RNA, 19 nt, Artificial Sequence
  Description of Artificial Sequence: Synthetic oligonucleotide
ucucgacugccuugauccu

SEQ ID NO: 816330 - RNA, 19 nt, Artificial Sequence
  Description of Artificial Sequence: Synthetic oligonucleotide
cucgucagccucaguuuuc

SEQ ID NO: 816331 - RNA, 19 nt, Artificial Sequence
  Description of Artificial Sequence: Synthetic oligonucleotide
cauuuacuuuuacccagaa

SEQ ID NO: 816332 - RNA, 19 nt, Artificial Sequence
  Description of Artificial Sequence: Synthetic oligonucleotide
gcacgcuugucauuuucug

SEQ ID NO: 816333 - RNA, 19 nt, Artificial Sequence
  Description of Artificial Sequence: Synthetic oligonucleotide
augucagguuugauuguug

SEQ ID NO: 816334 - RNA, 19 nt, Artificial Sequence
  Description of Artificial Sequence: Synthetic oligonucleotide
aggccauuacacucuggua

SEQ ID NO: 816335 - RNA, 19 nt, Artificial Sequence
  Description of Artificial Sequence: Synthetic oligonucleotide
ggauaguggcuugggaaug

SEQ ID NO: 816336 - RNA, 19 nt, Artificial Sequence
  Description of Artificial Sequence: Synthetic oligonucleotide
cagccccugacugcaaggc

SEQ ID NO: 816337 - RNA, 19 nt, Artificial Sequence
  Description of Artificial Sequence: Synthetic oligonucleotide
ggaagugaagcaguguugu

SEQ ID NO: 816338 - RNA, 19 nt, Artificial Sequence
  Description of Artificial Sequence: Synthetic oligonucleotide
cucccagauagaugcuuca

SEQ ID NO: 816339 - RNA, 19 nt, Artificial Sequence
  Description of Artificial Sequence: Synthetic oligonucleotide
uccucccuguagacuuaug

SEQ ID NO: 816340 - RNA, 19 nt, Artificial Sequence
  Description of Artificial Sequence: Synthetic oligonucleotide
ggcgacuggaguccuggug

SEQ ID NO: 816341 - RNA, 19 nt, Artificial Sequence
  Description of Artificial Sequence: Synthetic oligonucleotide
auccgaagguuugagcauu

SEQ ID NO: 816342 - RNA, 19 nt, Artificial Sequence
  Description of Artificial Sequence: Synthetic oligonucleotide
uucccgucaauggugccuu

SEQ ID NO: 816343 - RNA, 19 nt, Artificial Sequence
  Description of Artificial Sequence: Synthetic oligonucleotide
uaucugcuuuaggcuucgg

SEQ ID NO: 816344 - RNA, 19 nt, Artificial Sequence
  Description of Artificial Sequence: Synthetic oligonucleotide
guggcacugguccaccaaa

SEQ ID NO: 816345 - RNA, 19 nt, Artificial Sequence
  Description of Artificial Sequence: Synthetic oligonucleotide
agacucugccgaauaucug

SEQ ID NO: 816346 - RNA, 19 nt, Artificial Sequence
  Description of Artificial Sequence: Synthetic oligonucleotide
cugugguguggacgugacc

SEQ ID NO: 816347 - RNA, 19 nt, Artificial Sequence
  Description of Artificial Sequence: Synthetic oligonucleotide
cucgacugccuugauccuc

SEQ ID NO: 816348 - RNA, 19 nt, Artificial Sequence
  Description of Artificial Sequence: Synthetic oligonucleotide
gcucauuugcgcugcuaac

SEQ ID NO: 816349 - RNA, 19 nt, Artificial Sequence
  Description of Artificial Sequence: Synthetic oligonucleotide
cucggauaguggcuuggga

SEQ ID NO: 816350 - RNA, 19 nt, Artificial Sequence
  Description of Artificial Sequence: Synthetic oligonucleotide
gauuauaauuaagcuccuu

SEQ ID NO: 816351 - RNA, 19 nt, Artificial Sequence
  Description of Artificial Sequence: Synthetic oligonucleotide
gcuaacaaagcuggacauc

SEQ ID NO: 816352 - RNA, 19 nt, Artificial Sequence
  Description of Artificial Sequence: Synthetic oligonucleotide
cauuugcgcugcuaacaaa

SEQ ID NO: 816353 - RNA, 19 nt, Artificial Sequence
  Description of Artificial Sequence: Synthetic oligonucleotide
uugcucccuggaauucuua

SEQ ID NO: 816354 - RNA, 19 nt, Artificial Sequence
  Description of Artificial Sequence: Synthetic oligonucleotide
cuuggcgacuggaguccug

SEQ ID NO: 816355 - RNA, 19 nt, Artificial Sequence
  Description of Artificial Sequence: Synthetic oligonucleotide
ggaaagcuuuguccgcuga

SEQ ID NO: 816356 - RNA, 19 nt, Artificial Sequence
  Description of Artificial Sequence: Synthetic oligonucleotide
cuuccaauaucaucaucuu

SEQ ID NO: 816357 - RNA, 19 nt, Artificial Sequence
  Description of Artificial Sequence: Synthetic oligonucleotide
ggcaguacugacagccaug

SEQ ID NO: 816358 - RNA, 19 nt, Artificial Sequence
  Description of Artificial Sequence: Synthetic oligonucleotide
ccuugauccucccuguaga

SEQ ID NO: 816359 - RNA, 19 nt, Artificial Sequence
  Description of Artificial Sequence: Synthetic oligonucleotide
ccucccuguagacuuauga

SEQ ID NO: 816360 - RNA, 19 nt, Artificial Sequence
  Description of Artificial Sequence: Synthetic oligonucleotide
auguugucuaggagcucug

SEQ ID NO: 816361 - RNA, 19 nt, Artificial Sequence
  Description of Artificial Sequence: Synthetic oligonucleotide
ccagauagaugcuucagau

SEQ ID NO: 816362 - RNA, 19 nt, Artificial Sequence
  Description of Artificial Sequence: Synthetic oligonucleotide
gguggaguugccauugaua

SEQ ID NO: 816363 - RNA, 19 nt, Artificial Sequence
  Description of Artificial Sequence: Synthetic oligonucleotide
cauuccgggagccagcauu

SEQ ID NO: 816364 - RNA, 19 nt, Artificial Sequence
  Description of Artificial Sequence: Synthetic oligonucleotide
cuauucuggcacgcuuguc

SEQ ID NO: 816365 - RNA, 19 nt, Artificial Sequence
  Description of Artificial Sequence: Synthetic oligonucleotide
uucaacccaauggcagguu

SEQ ID NO: 816366 - RNA, 19 nt, Artificial Sequence
  Description of Artificial Sequence: Synthetic oligonucleotide
cccagauagaugcuucaga

SEQ ID NO: 816367 - RNA, 19 nt, Artificial Sequence
  Description of Artificial Sequence: Synthetic oligonucleotide
auacugugguguggacgug

SEQ ID NO: 816368 - RNA, 19 nt, Artificial Sequence
  Description of Artificial Sequence: Synthetic oligonucleotide
ucgcggaaggcagccccug

SEQ ID NO: 816369 - RNA, 19 nt, Artificial Sequence
  Description of Artificial Sequence: Synthetic oligonucleotide
ugguguggacgugacccuu

SEQ ID NO: 816370 - RNA, 19 nt, Artificial Sequence
  Description of Artificial Sequence: Synthetic oligonucleotide
uggcgacuggaguccuggu

SEQ ID NO: 816371 - RNA, 19 nt, Artificial Sequence
  Description of Artificial Sequence: Synthetic oligonucleotide
cccauuagcaacacaaguu

SEQ ID NO: 816372 - RNA, 19 nt, Artificial Sequence
  Description of Artificial Sequence: Synthetic oligonucleotide
gcucguaaucuugccagca

SEQ ID NO: 816373 - RNA, 19 nt, Artificial Sequence
  Description of Artificial Sequence: Synthetic oligonucleotide
gcuuuucgaaacagagcca

SEQ ID NO: 816374 - RNA, 19 nt, Artificial Sequence
  Description of Artificial Sequence: Synthetic oligonucleotide
gcucccagauagaugcuuc

SEQ ID NO: 816375 - RNA, 19 nt, Artificial Sequence
  Description of Artificial Sequence: Synthetic oligonucleotide
gguccgaucuuuaaccaau

SEQ ID NO: 816376 - RNA, 19 nt, Artificial Sequence
  Description of Artificial Sequence: Synthetic oligonucleotide
gacuucauucucggauagu

SEQ ID NO: 816377 - RNA, 19 nt, Artificial Sequence
  Description of Artificial Sequence: Synthetic oligonucleotide
gcuauucuggcacgcuugu

SEQ ID NO: 816378 - RNA, 19 nt, Artificial Sequence
  Description of Artificial Sequence: Synthetic oligonucleotide
cuuuaggcuucgguguccu

SEQ ID NO: 816379 - RNA, 19 nt, Artificial Sequence
  Description of Artificial Sequence: Synthetic oligonucleotide
gcauuacaggcuuccuucu

SEQ ID NO: 816380 - RNA, 19 nt, Artificial Sequence
  Description of Artificial Sequence: Synthetic oligonucleotide
cugagacauuggacugaga

SEQ ID NO: 816381 - RNA, 19 nt, Artificial Sequence
  Description of Artificial Sequence: Synthetic oligonucleotide
ccuuaauucuuuucuuaau

SEQ ID NO: 816382 - RNA, 19 nt, Artificial Sequence
  Description of Artificial Sequence: Synthetic oligonucleotide
gugguguggacgugacccu

SEQ ID NO: 816383 - RNA, 19 nt, Artificial Sequence
  Description of Artificial Sequence: Synthetic oligonucleotide
cugucgcggaaggcagccc

SEQ ID NO: 816384 - RNA, 19 nt, Artificial Sequence
  Description of Artificial Sequence: Synthetic oligonucleotide
ggcacccggaaggagcuca

SEQ ID NO: 816385 - RNA, 19 nt, Artificial Sequence
  Description of Artificial Sequence: Synthetic oligonucleotide
ggguacuuuuccucacaua

SEQ ID NO: 816386 - RNA, 19 nt, Artificial Sequence
  Description of Artificial Sequence: Synthetic oligonucleotide
cugagacucugccgaauau

SEQ ID NO: 816387 - RNA, 19 nt, Artificial Sequence
  Description of Artificial Sequence: Synthetic oligonucleotide
cauccacuuccaauaucau

SEQ ID NO: 816388 - RNA, 19 nt, Artificial Sequence
  Description of Artificial Sequence: Synthetic oligonucleotide
gguguggacgugacccuuc

SEQ ID NO: 816389 - RNA, 19 nt, Artificial Sequence
  Description of Artificial Sequence: Synthetic oligonucleotide
cugccuugauccucccugu

SEQ ID NO: 816390 - RNA, 19 nt, Artificial Sequence
  Description of Artificial Sequence: Synthetic oligonucleotide
acucuugaacugggacaau

SEQ ID NO: 816391 - RNA, 19 nt, Artificial Sequence
  Description of Artificial Sequence: Synthetic oligonucleotide
ccccauuagcaacacaagu

SEQ ID NO: 816392 - RNA, 19 nt, Artificial Sequence
  Description of Artificial Sequence: Synthetic oligonucleotide
gacugagacucugccgaau

SEQ ID NO: 816393 - RNA, 19 nt, Artificial Sequence
  Description of Artificial Sequence: Synthetic oligonucleotide
cucgcucuuuggcuauucu

SEQ ID NO: 816394 - RNA, 19 nt, Artificial Sequence
  Description of Artificial Sequence: Synthetic oligonucleotide
aggcacccggaaggagcuc

SEQ ID NO: 816395 - RNA, 19 nt, Artificial Sequence
  Description of Artificial Sequence: Synthetic oligonucleotide
ccucguaaggcacccggaa

SEQ ID NO: 816396 - RNA, 19 nt, Artificial Sequence
  Description of Artificial Sequence: Synthetic oligonucleotide
cauuucuaguaagcgcuuu

SEQ ID NO: 816397 - RNA, 19 nt, Artificial Sequence
  Description of Artificial Sequence: Synthetic oligonucleotide
ccuguagacuuaugagugu

SEQ ID NO: 816398 - RNA, 19 nt, Artificial Sequence
  Description of Artificial Sequence: Synthetic oligonucleotide
ggcacgcuugucauuuucu

SEQ ID NO: 816399 - RNA, 19 nt, Artificial Sequence
  Description of Artificial Sequence: Synthetic oligonucleotide
cugggacaaugaauucaau

SEQ ID NO: 816400 - RNA, 19 nt, Artificial Sequence
  Description of Artificial Sequence: Synthetic oligonucleotide
ucccgucaauggugccuuu

SEQ ID NO: 816401 - RNA, 19 nt, Artificial Sequence
  Description of Artificial Sequence: Synthetic oligonucleotide
ugcucgcucuuuggcuauu

SEQ ID NO: 816402 - RNA, 19 nt, Artificial Sequence
  Description of Artificial Sequence: Synthetic oligonucleotide
ccuuuaacgcuugcaugaa

SEQ ID NO: 816403 - RNA, 19 nt, Artificial Sequence
  Description of Artificial Sequence: Synthetic oligonucleotide
ccggguacuuuuccucaca

SEQ ID NO: 816404 - RNA, 19 nt, Artificial Sequence
  Description of Artificial Sequence: Synthetic oligonucleotide
gcuggcguuggaggcguuc

SEQ ID NO: 816405 - RNA, 19 nt, Artificial Sequence
  Description of Artificial Sequence: Synthetic oligonucleotide
guccgaucuuuaaccaauu

SEQ ID NO: 816406 - RNA, 19 nt, Artificial Sequence
  Description of Artificial Sequence: Synthetic oligonucleotide
cucugccgaauaucugcuu

SEQ ID NO: 816407 - RNA, 19 nt, Artificial Sequence
  Description of Artificial Sequence: Synthetic oligonucleotide
cguaaggcacccggaagga

SEQ ID NO: 816408 - RNA, 19 nt, Artificial Sequence
  Description of Artificial Sequence: Synthetic oligonucleotide
caggauguccggguacuuu

SEQ ID NO: 816409 - RNA, 19 nt, Artificial Sequence
  Description of Artificial Sequence: Synthetic oligonucleotide
cugcucgcucuuuggcuau

SEQ ID NO: 816410 - RNA, 19 nt, Artificial Sequence
  Description of Artificial Sequence: Synthetic oligonucleotide
gucgcggaaggcagccccu

SEQ ID NO: 816411 - RNA, 19 nt, Artificial Sequence
  Description of Artificial Sequence: Synthetic oligonucleotide
cgacugccuugauccuccc

SEQ ID NO: 816412 - RNA, 19 nt, Artificial Sequence
  Description of Artificial Sequence: Synthetic oligonucleotide
cgcugcuaacaaagcugga

SEQ ID NO: 816413 - RNA, 19 nt, Artificial Sequence
  Description of Artificial Sequence: Synthetic oligonucleotide
ccacggagaccuucuucau

SEQ ID NO: 816414 - RNA, 19 nt, Artificial Sequence
  Description of Artificial Sequence: Synthetic oligonucleotide
cggguacuuuuccucacau

SEQ ID NO: 816415 - RNA, 19 nt, Artificial Sequence
  Description of Artificial Sequence: Synthetic oligonucleotide
cgcggaaggcagccccuga

SEQ ID NO: 816416 - RNA, 19 nt, Artificial Sequence
  Description of Artificial Sequence: Synthetic oligonucleotide
ccuuggcgacuggaguccu

SEQ ID NO: 816417 - RNA, 19 nt, Artificial Sequence
  Description of Artificial Sequence: Synthetic oligonucleotide
cccgucaauggugccuuuu

SEQ ID NO: 816418 - RNA, 19 nt, Artificial Sequence
  Description of Artificial Sequence: Synthetic oligonucleotide
cgucgacaaaaggcaggau

SEQ ID NO: 816419 - RNA, 19 nt, Artificial Sequence
  Description of Artificial Sequence: Synthetic oligonucleotide
agaagggcaacuuaguggc

SEQ ID NO: 816420 - RNA, 19 nt, Artificial Sequence
  Description of Artificial Sequence: Synthetic oligonucleotide
guagauuucauccaccugg

SEQ ID NO: 816421 - RNA, 19 nt, Artificial Sequence
  Description of Artificial Sequence: Synthetic oligonucleotide
aagggcaacaaaauaaagc

SEQ ID NO: 816422 - RNA, 19 nt, Artificial Sequence
  Description of Artificial Sequence: Synthetic oligonucleotide
gaaauaaacugacaugcag

SEQ ID NO: 816423 - RNA, 19 nt, Artificial Sequence
  Description of Artificial Sequence: Synthetic oligonucleotide
uuugguaacgcccucccgg

SEQ ID NO: 816424 - RNA, 19 nt, Artificial Sequence
  Description of Artificial Sequence: Synthetic oligonucleotide
uguacugucaccuggaauc

SEQ ID NO: 816425 - RNA, 19 nt, Artificial Sequence
  Description of Artificial Sequence: Synthetic oligonucleotide
aacggaaacguaccacugc

SEQ ID NO: 816426 - RNA, 19 nt, Artificial Sequence
  Description of Artificial Sequence: Synthetic oligonucleotide
uugaguuuauauucgaugu

SEQ ID NO: 816427 - RNA, 19 nt, Artificial Sequence
  Description of Artificial Sequence: Synthetic oligonucleotide
ugugccaagucuuagcuug

SEQ ID NO: 816428 - RNA, 19 nt, Artificial Sequence
  Description of Artificial Sequence: Synthetic oligonucleotide
gacaagaccaugcagccag

SEQ ID NO: 816429 - RNA, 19 nt, Artificial Sequence
  Description of Artificial Sequence: Synthetic oligonucleotide
agcauggggaccuuguggc

SEQ ID NO: 816430 - RNA, 19 nt, Artificial Sequence
  Description of Artificial Sequence: Synthetic oligonucleotide
ugccguuugacguacauug

SEQ ID NO: 816431 - RNA, 19 nt, Artificial Sequence
  Description of Artificial Sequence: Synthetic oligonucleotide
uguauuguagggacagcgg

SEQ ID NO: 816432 - RNA, 19 nt, Artificial Sequence
  Description of Artificial Sequence: Synthetic oligonucleotide
ucaggaaacggaaacguac

SEQ ID NO: 816433 - RNA, 19 nt, Artificial Sequence
  Description of Artificial Sequence: Synthetic oligonucleotide
cuugaguuuauauucgaug

SEQ ID NO: 816434 - RNA, 19 nt, Artificial Sequence
  Description of Artificial Sequence: Synthetic oligonucleotide
uuauguauuguagggacag

SEQ ID NO: 816435 - RNA, 19 nt, Artificial Sequence
  Description of Artificial Sequence: Synthetic oligonucleotide
aacaguagaacuaucucug

SEQ ID NO: 816436 - RNA, 19 nt, Artificial Sequence
  Description of Artificial Sequence: Synthetic oligonucleotide
ugcaucaggacucaacaca

SEQ ID NO: 816437 - RNA, 19 nt, Artificial Sequence
  Description of Artificial Sequence: Synthetic oligonucleotide
auaguguuccuccaaccac

SEQ ID NO: 816438 - RNA, 19 nt, Artificial Sequence
  Description of Artificial Sequence: Synthetic oligonucleotide
aucaggacucaacacaggg

SEQ ID NO: 816439 - RNA, 19 nt, Artificial Sequence
  Description of Artificial Sequence: Synthetic oligonucleotide
agaagugcuuucaagggcc

SEQ ID NO: 816440 - RNA, 19 nt, Artificial Sequence
  Description of Artificial Sequence: Synthetic oligonucleotide
acggaaacguaccacugcc

SEQ ID NO: 816441 - RNA, 19 nt, Artificial Sequence
  Description of Artificial Sequence: Synthetic oligonucleotide
acgacaauuccugaagugc

SEQ ID NO: 816442 - RNA, 19 nt, Artificial Sequence
  Description of Artificial Sequence: Synthetic oligonucleotide
guuacgacaauuccugaag

SEQ ID NO: 816443 - RNA, 19 nt, Artificial Sequence
  Description of Artificial Sequence: Synthetic oligonucleotide
ucugccuagccuauuaaca

SEQ ID NO: 816444 - RNA, 19 nt, Artificial Sequence
  Description of Artificial Sequence: Synthetic oligonucleotide
uuuacugaccacgaugaag

SEQ ID NO: 816445 - RNA, 19 nt, Artificial Sequence
  Description of Artificial Sequence: Synthetic oligonucleotide
gaauauaggggugacguug

SEQ ID NO: 816446 - RNA, 19 nt, Artificial Sequence
  Description of Artificial Sequence: Synthetic oligonucleotide
ucaugcccgauccugacag

SEQ ID NO: 816447 - RNA, 19 nt, Artificial Sequence
  Description of Artificial Sequence: Synthetic oligonucleotide
uaucuuuuauccacaguca

SEQ ID NO: 816448 - RNA, 19 nt, Artificial Sequence
  Description of Artificial Sequence: Synthetic oligonucleotide
acguacauugcccacaugu

SEQ ID NO: 816449 - RNA, 19 nt, Artificial Sequence
  Description of Artificial Sequence: Synthetic oligonucleotide
aaauagcaccaaguggggc

SEQ ID NO: 816450 - RNA, 19 nt, Artificial Sequence
  Description of Artificial Sequence: Synthetic oligonucleotide
aagucuuagcuuggcagcc

SEQ ID NO: 816451 - RNA, 19 nt, Artificial Sequence
  Description of Artificial Sequence: Synthetic oligonucleotide
aauauaggggugacguugg

SEQ ID NO: 816452 - RNA, 19 nt, Artificial Sequence
  Description of Artificial Sequence: Synthetic oligonucleotide
uggaacaguagaacuaucu

SEQ ID NO: 816453 - RNA, 19 nt, Artificial Sequence
  Description of Artificial Sequence: Synthetic oligonucleotide
guuaaugagccaaccagcg

SEQ ID NO: 816454 - RNA, 19 nt, Artificial Sequence
  Description of Artificial Sequence: Synthetic oligonucleotide
gaugcaucaggacucaaca

SEQ ID NO: 816455 - RNA, 19 nt, Artificial Sequence
  Description of Artificial Sequence: Synthetic oligonucleotide
aucuuuuauccacagucag

SEQ ID NO: 816456 - RNA, 19 nt, Artificial Sequence
  Description of Artificial Sequence: Synthetic oligonucleotide
agcccauuguccucuaccc

SEQ ID NO: 816457 - RNA, 19 nt, Artificial Sequence
  Description of Artificial Sequence: Synthetic oligonucleotide
caccuuauguauuguaggg

SEQ ID NO: 816458 - RNA, 19 nt, Artificial Sequence
  Description of Artificial Sequence: Synthetic oligonucleotide
acaguagaacuaucucugc

SEQ ID NO: 816459 - RNA, 19 nt, Artificial Sequence
  Description of Artificial Sequence: Synthetic oligonucleotide
uguguagauuucauccacc

SEQ ID NO: 816460 - RNA, 19 nt, Artificial Sequence
  Description of Artificial Sequence: Synthetic oligonucleotide
uuugcauggaucuuuucua

SEQ ID NO: 816461 - RNA, 19 nt, Artificial Sequence
  Description of Artificial Sequence: Synthetic oligonucleotide
cuggaauucugucaacugc

SEQ ID NO: 816462 - RNA, 19 nt, Artificial Sequence
  Description of Artificial Sequence: Synthetic oligonucleotide
aacuugaguuuauauucga

SEQ ID NO: 816463 - RNA, 19 nt, Artificial Sequence
  Description of Artificial Sequence: Synthetic oligonucleotide
aauugucuucucccuuccg

SEQ ID NO: 816464 - RNA, 19 nt, Artificial Sequence
  Description of Artificial Sequence: Synthetic oligonucleotide
cuagccuauuaacacacag

SEQ ID NO: 816465 - RNA, 19 nt, Artificial Sequence
  Description of Artificial Sequence: Synthetic oligonucleotide
aagacuuugagaaggucca

SEQ ID NO: 816466 - RNA, 19 nt, Artificial Sequence
  Description of Artificial Sequence: Synthetic oligonucleotide
caagucuuagcuuggcagc

SEQ ID NO: 816467 - RNA, 19 nt, Artificial Sequence
  Description of Artificial Sequence: Synthetic oligonucleotide
auugcccacauguacuguc

SEQ ID NO: 816468 - RNA, 19 nt, Artificial Sequence
  Description of Artificial Sequence: Synthetic oligonucleotide
ggucuuagcgcacaggucc

SEQ ID NO: 816469 - RNA, 19 nt, Artificial Sequence
  Description of Artificial Sequence: Synthetic oligonucleotide
agagcgauugcgcuggaug

SEQ ID NO: 816470 - RNA, 19 nt, Artificial Sequence
  Description of Artificial Sequence: Synthetic oligonucleotide
ucugccucgaacaccgagc

SEQ ID NO: 816471 - RNA, 19 nt, Artificial Sequence
  Description of Artificial Sequence: Synthetic oligonucleotide
gauauucaggaagacuuug

SEQ ID NO: 816472 - RNA, 19 nt, Artificial Sequence
  Description of Artificial Sequence: Synthetic oligonucleotide
ugagccagcaccacaaaua

SEQ ID NO: 816473 - RNA, 19 nt, Artificial Sequence
  Description of Artificial Sequence: Synthetic oligonucleotide
aaacguaccacugccuucu

SEQ ID NO: 816474 - RNA, 19 nt, Artificial Sequence
  Description of Artificial Sequence: Synthetic oligonucleotide
uagccuauuaacacacaga

SEQ ID NO: 816475 - RNA, 19 nt, Artificial Sequence
  Description of Artificial Sequence: Synthetic oligonucleotide
agaggugaccagcaugggg

SEQ ID NO: 816476 - RNA, 19 nt, Artificial Sequence
  Description of Artificial Sequence: Synthetic oligonucleotide
ucaucugucgggccaacca

SEQ ID NO: 816477 - RNA, 19 nt, Artificial Sequence
  Description of Artificial Sequence: Synthetic oligonucleotide
uuacgacaauuccugaagu

SEQ ID NO: 816478 - RNA, 19 nt, Artificial Sequence
  Description of Artificial Sequence: Synthetic oligonucleotide
ucuuuucuaccacugccgu

SEQ ID NO: 816479 - RNA, 19 nt, Artificial Sequence
  Description of Artificial Sequence: Synthetic oligonucleotide
ggguuaaugagccaaccag

SEQ ID NO: 816480 - RNA, 19 nt, Artificial Sequence
  Description of Artificial Sequence: Synthetic oligonucleotide
gaacaguagaacuaucucu

SEQ ID NO: 816481 - RNA, 19 nt, Artificial Sequence
  Description of Artificial Sequence: Synthetic oligonucleotide
caggaaacggaaacguacc

SEQ ID NO: 816482 - RNA, 19 nt, Artificial Sequence
  Description of Artificial Sequence: Synthetic oligonucleotide
uacgacaauuccugaagug

SEQ ID NO: 816483 - RNA, 19 nt, Artificial Sequence
  Description of Artificial Sequence: Synthetic oligonucleotide
caaauagcaccaagugggg

SEQ ID NO: 816484 - RNA, 19 nt, Artificial Sequence
  Description of Artificial Sequence: Synthetic oligonucleotide
uuugaggacucagaagccc

SEQ ID NO: 816485 - RNA, 19 nt, Artificial Sequence
  Description of Artificial Sequence: Synthetic oligonucleotide
aggauauucaggaagacuu

SEQ ID NO: 816486 - RNA, 19 nt, Artificial Sequence
  Description of Artificial Sequence: Synthetic oligonucleotide
cacagucagguagagaagg

SEQ ID NO: 816487 - RNA, 19 nt, Artificial Sequence
  Description of Artificial Sequence: Synthetic oligonucleotide
cacuuuacugaccacgaug

SEQ ID NO: 816488 - RNA, 19 nt, Artificial Sequence
  Description of Artificial Sequence: Synthetic oligonucleotide
uguuccuccaaccaccguu

SEQ ID NO: 816489 - RNA, 19 nt, Artificial Sequence
  Description of Artificial Sequence: Synthetic oligonucleotide
cuugcgaagcagugaacgg

SEQ ID NO: 816490 - RNA, 19 nt, Artificial Sequence
  Description of Artificial Sequence: Synthetic oligonucleotide
ugugaauauaggggugacg

SEQ ID NO: 816491 - RNA, 19 nt, Artificial Sequence
  Description of Artificial Sequence: Synthetic oligonucleotide
accaacuugaguuuauauu

SEQ ID NO: 816492 - RNA, 19 nt, Artificial Sequence
  Description of Artificial Sequence: Synthetic oligonucleotide
gcagagaucacacugguga

SEQ ID NO: 816493 - RNA, 19 nt, Artificial Sequence
  Description of Artificial Sequence: Synthetic oligonucleotide
gguagagcuguuuugagga

SEQ ID NO: 816494 - RNA, 19 nt, Artificial Sequence
  Description of Artificial Sequence: Synthetic oligonucleotide
ugucgggccaaccaccagc

SEQ ID NO: 816495 - RNA, 19 nt, Artificial Sequence
  Description of Artificial Sequence: Synthetic oligonucleotide
uacugggacggauucacca

SEQ ID NO: 816496 - RNA, 19 nt, Artificial Sequence
  Description of Artificial Sequence: Synthetic oligonucleotide
augcaucaggacucaacac

SEQ ID NO: 816497 - RNA, 19 nt, Artificial Sequence
  Description of Artificial Sequence: Synthetic oligonucleotide
gaagcaaguggcaguagcc

SEQ ID NO: 816498 - RNA, 19 nt, Artificial Sequence
  Description of Artificial Sequence: Synthetic oligonucleotide
gaugccuaugcaccauucc

SEQ ID NO: 816499 - RNA, 19 nt, Artificial Sequence
  Description of Artificial Sequence: Synthetic oligonucleotide
cauuugggucaccaggugc

SEQ ID NO: 816500 - RNA, 19 nt, Artificial Sequence
  Description of Artificial Sequence: Synthetic oligonucleotide
ucucccagggcuaguguag

SEQ ID NO: 816501 - RNA, 19 nt, Artificial Sequence
  Description of Artificial Sequence: Synthetic oligonucleotide
ucggggcucaccaucacca

SEQ ID NO: 816502 - RNA, 19 nt, Artificial Sequence
  Description of Artificial Sequence: Synthetic oligonucleotide
auuaacacacagagccgcc

SEQ ID NO: 816503 - RNA, 19 nt, Artificial Sequence
  Description of Artificial Sequence: Synthetic oligonucleotide
acuuaguggccuugagagg

SEQ ID NO: 816504 - RNA, 19 nt, Artificial Sequence
  Description of Artificial Sequence: Synthetic oligonucleotide
gagcgauugcgcuggaugc

SEQ ID NO: 816505 - RNA, 19 nt, Artificial Sequence
  Description of Artificial Sequence: Synthetic oligonucleotide
gaagggcaacaaaauaaag

SEQ ID NO: 816506 - RNA, 19 nt, Artificial Sequence
  Description of Artificial Sequence: Synthetic oligonucleotide
ucaaagcgguacugggacg

SEQ ID NO: 816507 - RNA, 19 nt, Artificial Sequence
  Description of Artificial Sequence: Synthetic oligonucleotide
uccgugacauggccgaugc

SEQ ID NO: 816508 - RNA, 19 nt, Artificial Sequence
  Description of Artificial Sequence: Synthetic oligonucleotide
gaaacggaaacguaccacu

SEQ ID NO: 816509 - RNA, 19 nt, Artificial Sequence
  Description of Artificial Sequence: Synthetic oligonucleotide
ugccuaugcaccauucccu

SEQ ID NO: 816510 - RNA, 19 nt, Artificial Sequence
  Description of Artificial Sequence: Synthetic oligonucleotide
aacgguuggcagcauggcu

SEQ ID NO: 816511 - RNA, 19 nt, Artificial Sequence
  Description of Artificial Sequence: Synthetic oligonucleotide
ugaugucucucagaaaggu

SEQ ID NO: 816512 - RNA, 19 nt, Artificial Sequence
  Description of Artificial Sequence: Synthetic oligonucleotide
uccugcucuuugcuguugg

SEQ ID NO: 816513 - RNA, 19 nt, Artificial Sequence
  Description of Artificial Sequence: Synthetic oligonucleotide
cugccuagccuauuaacac

SEQ ID NO: 816514 - RNA, 19 nt, Artificial Sequence
  Description of Artificial Sequence: Synthetic oligonucleotide
aguuacgacaauuccugaa

SEQ ID NO: 816515 - RNA, 19 nt, Artificial Sequence
  Description of Artificial Sequence: Synthetic oligonucleotide
cacuggugagucaugcccg

SEQ ID NO: 816516 - RNA, 19 nt, Artificial Sequence
  Description of Artificial Sequence: Synthetic oligonucleotide
uuggcgcccaccuucaggu

SEQ ID NO: 816517 - RNA, 19 nt, Artificial Sequence
  Description of Artificial Sequence: Synthetic oligonucleotide
uggccgaugccuuugguaa

SEQ ID NO: 816518 - RNA, 19 nt, Artificial Sequence
  Description of Artificial Sequence: Synthetic oligonucleotide
uugcauggaucuuuucuac

SEQ ID NO: 816519 - RNA, 19 nt, Artificial Sequence
  Description of Artificial Sequence: Synthetic oligonucleotide
agaccaugcagccaggguu

SEQ ID NO: 816520 - RNA, 19 nt, Artificial Sequence
  Description of Artificial Sequence: Synthetic oligonucleotide
cuugagagaagcccgcauc

SEQ ID NO: 816521 - RNA, 19 nt, Artificial Sequence
  Description of Artificial Sequence: Synthetic oligonucleotide
ucauuugggucaccaggug

SEQ ID NO: 816522 - RNA, 19 nt, Artificial Sequence
  Description of Artificial Sequence: Synthetic oligonucleotide
acauccgugacauggccga

SEQ ID NO: 816523 - RNA, 19 nt, Artificial Sequence
  Description of Artificial Sequence: Synthetic oligonucleotide
cuuaguggccuugagagga

SEQ ID NO: 816524 - RNA, 19 nt, Artificial Sequence
  Description of Artificial Sequence: Synthetic oligonucleotide
ccuuauguauuguagggac

SEQ ID NO: 816525 - RNA, 19 nt, Artificial Sequence
  Description of Artificial Sequence: Synthetic oligonucleotide
agauggugggauucaucuc

SEQ ID NO: 816526 - RNA, 19 nt, Artificial Sequence
  Description of Artificial Sequence: Synthetic oligonucleotide
aaacggaaacguaccacug

SEQ ID NO: 816527 - RNA, 19 nt, Artificial Sequence
  Description of Artificial Sequence: Synthetic oligonucleotide
uguuggcacuguacgagga

SEQ ID NO: 816528 - RNA, 19 nt, Artificial Sequence
  Description of Artificial Sequence: Synthetic oligonucleotide
ccaguuacgacaauuccug

SEQ ID NO: 816529 - RNA, 19 nt, Artificial Sequence
  Description of Artificial Sequence: Synthetic oligonucleotide
ugcgaagcagugaacgguc

SEQ ID NO: 816530 - RNA, 19 nt, Artificial Sequence
  Description of Artificial Sequence: Synthetic oligonucleotide
agcgauuccaguguuggca

SEQ ID NO: 816531 - RNA, 19 nt, Artificial Sequence
  Description of Artificial Sequence: Synthetic oligonucleotide
ugccuagccuauuaacaca

SEQ ID NO: 816532 - RNA, 19 nt, Artificial Sequence
  Description of Artificial Sequence: Synthetic oligonucleotide
aggguuaaugagccaacca

SEQ ID NO: 816533 - RNA, 19 nt, Artificial Sequence
  Description of Artificial Sequence: Synthetic oligonucleotide
caccaggugcucaaagcgg

SEQ ID NO: 816534 - RNA, 19 nt, Artificial Sequence
  Description of Artificial Sequence: Synthetic oligonucleotide
agugugaauauagggguga

SEQ ID NO: 816535 - RNA, 19 nt, Artificial Sequence
  Description of Artificial Sequence: Synthetic oligonucleotide
agaacagcccugaauuguc

SEQ ID NO: 816536 - RNA, 19 nt, Artificial Sequence
  Description of Artificial Sequence: Synthetic oligonucleotide
gacaggcagagcgauugcg

SEQ ID NO: 816537 - RNA, 19 nt, Artificial Sequence
  Description of Artificial Sequence: Synthetic oligonucleotide
cacauccgugacauggccg

SEQ ID NO: 816538 - RNA, 19 nt, Artificial Sequence
  Description of Artificial Sequence: Synthetic oligonucleotide
ugcccgauccugacagugg

SEQ ID NO: 816539 - RNA, 19 nt, Artificial Sequence
  Description of Artificial Sequence: Synthetic oligonucleotide
agaacuaucucugccucga

SEQ ID NO: 816540 - RNA, 19 nt, Artificial Sequence
  Description of Artificial Sequence: Synthetic oligonucleotide
cagcauggggaccuugugg

SEQ ID NO: 816541 - RNA, 19 nt, Artificial Sequence
  Description of Artificial Sequence: Synthetic oligonucleotide
gguuaaugagccaaccagc

SEQ ID NO: 816542 - RNA, 19 nt, Artificial Sequence
  Description of Artificial Sequence: Synthetic oligonucleotide
aggaggaucuggggaaacc

SEQ ID NO: 816543 - RNA, 19 nt, Artificial Sequence
  Description of Artificial Sequence: Synthetic oligonucleotide
agagcuguuuugaggacuc

SEQ ID NO: 816544 - RNA, 19 nt, Artificial Sequence
  Description of Artificial Sequence: Synthetic oligonucleotide
gaaacguaccacugccuuc

SEQ ID NO: 816545 - RNA, 19 nt, Artificial Sequence
  Description of Artificial Sequence: Synthetic oligonucleotide
gguggcauggaacaguaga

SEQ ID NO: 816546 - RNA, 19 nt, Artificial Sequence
  Description of Artificial Sequence: Synthetic oligonucleotide
ucugucgggccaaccacca

SEQ ID NO: 816547 - RNA, 19 nt, Artificial Sequence
  Description of Artificial Sequence: Synthetic oligonucleotide
uuuggugugccaagucuua

SEQ ID NO: 816548 - RNA, 19 nt, Artificial Sequence
  Description of Artificial Sequence: Synthetic oligonucleotide
agugaacggucaaagucuc

SEQ ID NO: 816549 - RNA, 19 nt, Artificial Sequence
  Description of Artificial Sequence: Synthetic oligonucleotide
cagagaucacacuggugag

SEQ ID NO: 816550 - RNA, 19 nt, Artificial Sequence
  Description of Artificial Sequence: Synthetic oligonucleotide
cuuauguauuguagggaca

SEQ ID NO: 816551 - RNA, 19 nt, Artificial Sequence
  Description of Artificial Sequence: Synthetic oligonucleotide
ggaagcaaguggcaguagc

SEQ ID NO: 816552 - RNA, 19 nt, Artificial Sequence
  Description of Artificial Sequence: Synthetic oligonucleotide
uguggucuuagcgcacagg

SEQ ID NO: 816553 - RNA, 19 nt, Artificial Sequence
  Description of Artificial Sequence: Synthetic oligonucleotide
ggauucaccaacuugaguu

SEQ ID NO: 816554 - RNA, 19 nt, Artificial Sequence
  Description of Artificial Sequence: Synthetic oligonucleotide
ucacggcagaucccacugg

SEQ ID NO: 816555 - RNA, 19 nt, Artificial Sequence
  Description of Artificial Sequence: Synthetic oligonucleotide
aggaaacggaaacguacca

SEQ ID NO: 816556 - RNA, 19 nt, Artificial Sequence
  Description of Artificial Sequence: Synthetic oligonucleotide
ggugccagcgauuccagug

SEQ ID NO: 816557 - RNA, 19 nt, Artificial Sequence
  Description of Artificial Sequence: Synthetic oligonucleotide
uaugcaccauucccuccag

SEQ ID NO: 816558 - RNA, 19 nt, Artificial Sequence
  Description of Artificial Sequence: Synthetic oligonucleotide
auuugggucaccaggugcu

SEQ ID NO: 816559 - RNA, 19 nt, Artificial Sequence
  Description of Artificial Sequence: Synthetic oligonucleotide
ucaccaugcccuugcgaag

SEQ ID NO: 816560 - RNA, 19 nt, Artificial Sequence
  Description of Artificial Sequence: Synthetic oligonucleotide
agucuuagcuuggcagccc

SEQ ID NO: 816561 - RNA, 19 nt, Artificial Sequence
  Description of Artificial Sequence: Synthetic oligonucleotide
uugcgaagcagugaacggu

SEQ ID NO: 816562 - RNA, 19 nt, Artificial Sequence
  Description of Artificial Sequence: Synthetic oligonucleotide
aucugucgggccaaccacc

SEQ ID NO: 816563 - RNA, 19 nt, Artificial Sequence
  Description of Artificial Sequence: Synthetic oligonucleotide
cucgcagcacacgacaggc

SEQ ID NO: 816564 - RNA, 19 nt, Artificial Sequence
  Description of Artificial Sequence: Synthetic oligonucleotide
auauaggggugacguuggg

SEQ ID NO: 816565 - RNA, 19 nt, Artificial Sequence
  Description of Artificial Sequence: Synthetic oligonucleotide
cucugccuagccuauuaac

SEQ ID NO: 816566 - RNA, 19 nt, Artificial Sequence
  Description of Artificial Sequence: Synthetic oligonucleotide
agagccgccaacgguuggc

SEQ ID NO: 816567 - RNA, 19 nt, Artificial Sequence
  Description of Artificial Sequence: Synthetic oligonucleotide
gggaaaccgcccuugagug

SEQ ID NO: 816568 - RNA, 19 nt, Artificial Sequence
  Description of Artificial Sequence: Synthetic oligonucleotide
uauguauuguagggacagc

SEQ ID NO: 816569 - RNA, 19 nt, Artificial Sequence
  Description of Artificial Sequence: Synthetic oligonucleotide
gacguugggugacugggca

SEQ ID NO: 816570 - RNA, 19 nt, Artificial Sequence
  Description of Artificial Sequence: Synthetic oligonucleotide
guagccacucugccuagcc

SEQ ID NO: 816571 - RNA, 19 nt, Artificial Sequence
  Description of Artificial Sequence: Synthetic oligonucleotide
aauccccgccggaaggugg

SEQ ID NO: 816572 - RNA, 19 nt, Artificial Sequence
  Description of Artificial Sequence: Synthetic oligonucleotide
agccucaccgcgccccucc

SEQ ID NO: 816573 - RNA, 19 nt, Artificial Sequence
  Description of Artificial Sequence: Synthetic oligonucleotide
cucacggcagaucccacug

SEQ ID NO: 816574 - RNA, 19 nt, Artificial Sequence
  Description of Artificial Sequence: Synthetic oligonucleotide
ccaaccaccagcugguccc

SEQ ID NO: 816575 - RNA, 19 nt, Artificial Sequence
  Description of Artificial Sequence: Synthetic oligonucleotide
cuuugguaacgcccucccg

SEQ ID NO: 816576 - RNA, 19 nt, Artificial Sequence
  Description of Artificial Sequence: Synthetic oligonucleotide
agcuguuuugaggacucag

SEQ ID NO: 816577 - RNA, 19 nt, Artificial Sequence
  Description of Artificial Sequence: Synthetic oligonucleotide
uggcauggaacaguagaac

SEQ ID NO: 816578 - RNA, 19 nt, Artificial Sequence
  Description of Artificial Sequence: Synthetic oligonucleotide
accuuauguauuguaggga

SEQ ID NO: 816579 - RNA, 19 nt, Artificial Sequence
  Description of Artificial Sequence: Synthetic oligonucleotide
uauaggggugacguugggu

SEQ ID NO: 816580 - RNA, 19 nt, Artificial Sequence
  Description of Artificial Sequence: Synthetic oligonucleotide
acgguuggcagcauggcug

SEQ ID NO: 816581 - RNA, 19 nt, Artificial Sequence
  Description of Artificial Sequence: Synthetic oligonucleotide
ggauaguguuccuccaacc

SEQ ID NO: 816582 - RNA, 19 nt, Artificial Sequence
  Description of Artificial Sequence: Synthetic oligonucleotide
acagcgguagagcuguuuu

SEQ ID NO: 816583 - RNA, 19 nt, Artificial Sequence
  Description of Artificial Sequence: Synthetic oligonucleotide
uucccuccaguagacaaga

SEQ ID NO: 816584 - RNA, 19 nt, Artificial Sequence
  Description of Artificial Sequence: Synthetic oligonucleotide
ggaagaugcaucaggacuc

SEQ ID NO: 816585 - RNA, 19 nt, Artificial Sequence
  Description of Artificial Sequence: Synthetic oligonucleotide
cuaugcaccauucccucca

SEQ ID NO: 816586 - RNA, 19 nt, Artificial Sequence
  Description of Artificial Sequence: Synthetic oligonucleotide
caucugucgggccaaccac

SEQ ID NO: 816587 - RNA, 19 nt, Artificial Sequence
  Description of Artificial Sequence: Synthetic oligonucleotide
ugggacggauucaccaacu

SEQ ID NO: 816588 - RNA, 19 nt, Artificial Sequence
  Description of Artificial Sequence: Synthetic oligonucleotide
accgcgccccuccuggagc

SEQ ID NO: 816589 - RNA, 19 nt, Artificial Sequence
  Description of Artificial Sequence: Synthetic oligonucleotide
ugaauauaggggugacguu

SEQ ID NO: 816590 - RNA, 19 nt, Artificial Sequence
  Description of Artificial Sequence: Synthetic oligonucleotide
ugaggacccgcuccagcug

SEQ ID NO: 816591 - RNA, 19 nt, Artificial Sequence
  Description of Artificial Sequence: Synthetic oligonucleotide
guauuguagggacagcggu

SEQ ID NO: 816592 - RNA, 19 nt, Artificial Sequence
  Description of Artificial Sequence: Synthetic oligonucleotide
cccuggguccaccagaugg

SEQ ID NO: 816593 - RNA, 19 nt, Artificial Sequence
  Description of Artificial Sequence: Synthetic oligonucleotide
uggugagucaugcccgauc

SEQ ID NO: 816594 - RNA, 19 nt, Artificial Sequence
  Description of Artificial Sequence: Synthetic oligonucleotide
cagucagguagagaagggc

SEQ ID NO: 816595 - RNA, 19 nt, Artificial Sequence
  Description of Artificial Sequence: Synthetic oligonucleotide
agcgguagagcuguuuuga

SEQ ID NO: 816596 - RNA, 19 nt, Artificial Sequence
  Description of Artificial Sequence: Synthetic oligonucleotide
ccaacgguuggcagcaugg

SEQ ID NO: 816597 - RNA, 19 nt, Artificial Sequence
  Description of Artificial Sequence: Synthetic oligonucleotide
gucuuagcuuggcagcccc

SEQ ID NO: 816598 - RNA, 19 nt, Artificial Sequence
  Description of Artificial Sequence: Synthetic oligonucleotide
gaaaccgcccuugagugaa

SEQ ID NO: 816599 - RNA, 19 nt, Artificial Sequence
  Description of Artificial Sequence: Synthetic oligonucleotide
ccuugcgaagcagugaacg

SEQ ID NO: 816600 - RNA, 19 nt, Artificial Sequence
  Description of Artificial Sequence: Synthetic oligonucleotide
gcacagguccacuuuacug

SEQ ID NO: 816601 - RNA, 19 nt, Artificial Sequence
  Description of Artificial Sequence: Synthetic oligonucleotide
cuaguguagcagccugacc

SEQ ID NO: 816602 - RNA, 19 nt, Artificial Sequence
  Description of Artificial Sequence: Synthetic oligonucleotide
aaccgcccuugagugaagg

SEQ ID NO: 816603 - RNA, 19 nt, Artificial Sequence
  Description of Artificial Sequence: Synthetic oligonucleotide
acauggccgaugccuuugg

SEQ ID NO: 816604 - RNA, 19 nt, Artificial Sequence
  Description of Artificial Sequence: Synthetic oligonucleotide
auguacugucaccuggaau

SEQ ID NO: 816605 - RNA, 19 nt, Artificial Sequence
  Description of Artificial Sequence: Synthetic oligonucleotide
gggucuugagagaagcccg

SEQ ID NO: 816606 - RNA, 19 nt, Artificial Sequence
  Description of Artificial Sequence: Synthetic oligonucleotide
aacguaccacugccuucuc

SEQ ID NO: 816607 - RNA, 19 nt, Artificial Sequence
  Description of Artificial Sequence: Synthetic oligonucleotide
acaauuccugaagugcaga

SEQ ID NO: 816608 - RNA, 19 nt, Artificial Sequence
  Description of Artificial Sequence: Synthetic oligonucleotide
gguauucuggguguuucag

SEQ ID NO: 816609 - RNA, 19 nt, Artificial Sequence
  Description of Artificial Sequence: Synthetic oligonucleotide
accuggaauucugucaacu

SEQ ID NO: 816610 - RNA, 19 nt, Artificial Sequence
  Description of Artificial Sequence: Synthetic oligonucleotide
gaccacgaugaagaagggc

SEQ ID NO: 816611 - RNA, 19 nt, Artificial Sequence
  Description of Artificial Sequence: Synthetic oligonucleotide
acugggacggauucaccaa

SEQ ID NO: 816612 - RNA, 19 nt, Artificial Sequence
  Description of Artificial Sequence: Synthetic oligonucleotide
ccaaccagcgggcacacag

SEQ ID NO: 816613 - RNA, 19 nt, Artificial Sequence
  Description of Artificial Sequence: Synthetic oligonucleotide
ggacucaacacaggguagg

SEQ ID NO: 816614 - RNA, 19 nt, Artificial Sequence
  Description of Artificial Sequence: Synthetic oligonucleotide
uggucuuagcgcacagguc

SEQ ID NO: 816615 - RNA, 19 nt, Artificial Sequence
  Description of Artificial Sequence: Synthetic oligonucleotide
gaacggucaaagucuccca

SEQ ID NO: 816616 - RNA, 19 nt, Artificial Sequence
  Description of Artificial Sequence: Synthetic oligonucleotide
agaugccuaugcaccauuc

SEQ ID NO: 816617 - RNA, 19 nt, Artificial Sequence
  Description of Artificial Sequence: Synthetic oligonucleotide
gugcucaaagcgguacugg

SEQ ID NO: 816618 - RNA, 19 nt, Artificial Sequence
  Description of Artificial Sequence: Synthetic oligonucleotide
guacugucaccuggaaucc

SEQ ID NO: 816619 - RNA, 19 nt, Artificial Sequence
  Description of Artificial Sequence: Synthetic oligonucleotide
cuggaauccccgccggaag

SEQ ID NO: 816620 - RNA, 19 nt, Artificial Sequence
  Description of Artificial Sequence: Synthetic oligonucleotide
caagggccaccccaguuac

SEQ ID NO: 816621 - RNA, 19 nt, Artificial Sequence
  Description of Artificial Sequence: Synthetic oligonucleotide
ggacggauucaccaacuug

SEQ ID NO: 816622 - RNA, 19 nt, Artificial Sequence
  Description of Artificial Sequence: Synthetic oligonucleotide
guggucuuagcgcacaggu

SEQ ID NO: 816623 - RNA, 19 nt, Artificial Sequence
  Description of Artificial Sequence: Synthetic oligonucleotide
uccggugcagggucuugag

SEQ ID NO: 816624 - RNA, 19 nt, Artificial Sequence
  Description of Artificial Sequence: Synthetic oligonucleotide
cagggucuugagagaagcc

SEQ ID NO: 816625 - RNA, 19 nt, Artificial Sequence
  Description of Artificial Sequence: Synthetic oligonucleotide
uaggggugacguuggguga

SEQ ID NO: 816626 - RNA, 19 nt, Artificial Sequence
  Description of Artificial Sequence: Synthetic oligonucleotide
uucccguguggugccagcg

SEQ ID NO: 816627 - RNA, 19 nt, Artificial Sequence
  Description of Artificial Sequence: Synthetic oligonucleotide
cuuagcuuggcagccccac

SEQ ID NO: 816628 - RNA, 19 nt, Artificial Sequence
  Description of Artificial Sequence: Synthetic oligonucleotide
aggggugacguugggugac

SEQ ID NO: 816629 - RNA, 19 nt, Artificial Sequence
  Description of Artificial Sequence: Synthetic oligonucleotide
ugccauccggugcaggguc

SEQ ID NO: 816630 - RNA, 19 nt, Artificial Sequence
  Description of Artificial Sequence: Synthetic oligonucleotide
acuguacgaggagcagggc

SEQ ID NO: 816631 - RNA, 19 nt, Artificial Sequence
  Description of Artificial Sequence: Synthetic oligonucleotide
uuagcgcacagguccacuu

SEQ ID NO: 816632 - RNA, 19 nt, Artificial Sequence
  Description of Artificial Sequence: Synthetic oligonucleotide
cugggacggauucaccaac

SEQ ID NO: 816633 - RNA, 19 nt, Artificial Sequence
  Description of Artificial Sequence: Synthetic oligonucleotide
agugguccaagaugccuau

SEQ ID NO: 816634 - RNA, 19 nt, Artificial Sequence
  Description of Artificial Sequence: Synthetic oligonucleotide
gacauggccgaugccuuug

SEQ ID NO: 816635 - RNA, 19 nt, Artificial Sequence
  Description of Artificial Sequence: Synthetic oligonucleotide
acuggugagucaugcccga

SEQ ID NO: 816636 - RNA, 19 nt, Artificial Sequence
  Description of Artificial Sequence: Synthetic oligonucleotide
gggaccuuguggcagccag

SEQ ID NO: 816637 - RNA, 19 nt, Artificial Sequence
  Description of Artificial Sequence: Synthetic oligonucleotide
aagucaccuuauguauugu

SEQ ID NO: 816638 - RNA, 19 nt, Artificial Sequence
  Description of Artificial Sequence: Synthetic oligonucleotide
ugcccacauguacugucac

SEQ ID NO: 816639 - RNA, 19 nt, Artificial Sequence
  Description of Artificial Sequence: Synthetic oligonucleotide
ggguccaccagauggccag

SEQ ID NO: 816640 - RNA, 19 nt, Artificial Sequence
  Description of Artificial Sequence: Synthetic oligonucleotide
ggugacguugggugacugg

SEQ ID NO: 816641 - RNA, 19 nt, Artificial Sequence
  Description of Artificial Sequence: Synthetic oligonucleotide
acuugaguuuauauucgau

SEQ ID NO: 816642 - RNA, 19 nt, Artificial Sequence
  Description of Artificial Sequence: Synthetic oligonucleotide
cguuugacguacauugccc

SEQ ID NO: 816643 - RNA, 19 nt, Artificial Sequence
  Description of Artificial Sequence: Synthetic oligonucleotide
guaacgcccucccggaaca

SEQ ID NO: 816644 - RNA, 19 nt, Artificial Sequence
  Description of Artificial Sequence: Synthetic oligonucleotide
aggcagagcgauugcgcug

SEQ ID NO: 816645 - RNA, 19 nt, Artificial Sequence
  Description of Artificial Sequence: Synthetic oligonucleotide
gugcuuucaagggccaccc

SEQ ID NO: 816646 - RNA, 19 nt, Artificial Sequence
  Description of Artificial Sequence: Synthetic oligonucleotide
auagcaccaaguggggcca

SEQ ID NO: 816647 - RNA, 19 nt, Artificial Sequence
  Description of Artificial Sequence: Synthetic oligonucleotide
caagccccagauguucccg

SEQ ID NO: 816648 - RNA, 19 nt, Artificial Sequence
  Description of Artificial Sequence: Synthetic oligonucleotide
gagaacagcccugaauugu

SEQ ID NO: 816649 - RNA, 19 nt, Artificial Sequence
  Description of Artificial Sequence: Synthetic oligonucleotide
uggccuugagaggagguau

SEQ ID NO: 816650 - RNA, 19 nt, Artificial Sequence
  Description of Artificial Sequence: Synthetic oligonucleotide
guagggacacagucuuuca

SEQ ID NO: 816651 - RNA, 19 nt, Artificial Sequence
  Description of Artificial Sequence: Synthetic oligonucleotide
cucuccacuguggucuuag

SEQ ID NO: 816652 - RNA, 19 nt, Artificial Sequence
  Description of Artificial Sequence: Synthetic oligonucleotide
ugcuuucaagggccacccc

SEQ ID NO: 816653 - RNA, 19 nt, Artificial Sequence
  Description of Artificial Sequence: Synthetic oligonucleotide
ccagcgauuccaguguugg

SEQ ID NO: 816654 - RNA, 19 nt, Artificial Sequence
  Description of Artificial Sequence: Synthetic oligonucleotide
acugccguuugacguacau

SEQ ID NO: 816655 - RNA, 19 nt, Artificial Sequence
  Description of Artificial Sequence: Synthetic oligonucleotide
acggauucaccaacuugag

SEQ ID NO: 816656 - RNA, 19 nt, Artificial Sequence
  Description of Artificial Sequence: Synthetic oligonucleotide
agacuuugagaagguccag

SEQ ID NO: 816657 - RNA, 19 nt, Artificial Sequence
  Description of Artificial Sequence: Synthetic oligonucleotide
agaucacacuggugaguca

SEQ ID NO: 816658 - RNA, 19 nt, Artificial Sequence
  Description of Artificial Sequence: Synthetic oligonucleotide
augcccgauccugacagug

SEQ ID NO: 816659 - RNA, 19 nt, Artificial Sequence
  Description of Artificial Sequence: Synthetic oligonucleotide
gguaacgcccucccggaac

SEQ ID NO: 816660 - RNA, 19 nt, Artificial Sequence
  Description of Artificial Sequence: Synthetic oligonucleotide
cagcgguagagcuguuuug

SEQ ID NO: 816661 - RNA, 19 nt, Artificial Sequence
  Description of Artificial Sequence: Synthetic oligonucleotide
uucuaccacugccguuuga

SEQ ID NO: 816662 - RNA, 19 nt, Artificial Sequence
  Description of Artificial Sequence: Synthetic oligonucleotide
acucugccuagccuauuaa

SEQ ID NO: 816663 - RNA, 19 nt, Artificial Sequence
  Description of Artificial Sequence: Synthetic oligonucleotide
ugccucgaacaccgagcag

SEQ ID NO: 816664 - RNA, 19 nt, Artificial Sequence
  Description of Artificial Sequence: Synthetic oligonucleotide
ugagagaagcccgcaucuc

SEQ ID NO: 816665 - RNA, 19 nt, Artificial Sequence
  Description of Artificial Sequence: Synthetic oligonucleotide
gacagugguccaagaugcc

SEQ ID NO: 816666 - RNA, 19 nt, Artificial Sequence
  Description of Artificial Sequence: Synthetic oligonucleotide
gcauacucucagcuccagg

SEQ ID NO: 816667 - RNA, 19 nt, Artificial Sequence
  Description of Artificial Sequence: Synthetic oligonucleotide
acuguggucuuagcgcaca

SEQ ID NO: 816668 - RNA, 19 nt, Artificial Sequence
  Description of Artificial Sequence: Synthetic oligonucleotide
guggcauggaacaguagaa

SEQ ID NO: 816669 - RNA, 19 nt, Artificial Sequence
  Description of Artificial Sequence: Synthetic oligonucleotide
agcgcacagguccacuuua

SEQ ID NO: 816670 - RNA, 19 nt, Artificial Sequence
  Description of Artificial Sequence: Synthetic oligonucleotide
aucccacuggauaguguuc

SEQ ID NO: 816671 - RNA, 19 nt, Artificial Sequence
  Description of Artificial Sequence: Synthetic oligonucleotide
cacacgacaggcagagcga

SEQ ID NO: 816672 - RNA, 19 nt, Artificial Sequence
  Description of Artificial Sequence: Synthetic oligonucleotide
ucgcagcacacgacaggca

SEQ ID NO: 816673 - RNA, 19 nt, Artificial Sequence
  Description of Artificial Sequence: Synthetic oligonucleotide
ggguguuucaggaaacgga

SEQ ID NO: 816674 - RNA, 19 nt, Artificial Sequence
  Description of Artificial Sequence: Synthetic oligonucleotide
ggacuguguagauuucauc

SEQ ID NO: 816675 - RNA, 19 nt, Artificial Sequence
  Description of Artificial Sequence: Synthetic oligonucleotide
agcgggcacacagaugcug

SEQ ID NO: 816676 - RNA, 19 nt, Artificial Sequence
  Description of Artificial Sequence: Synthetic oligonucleotide
gaagggcaacuuaguggcc

SEQ ID NO: 816677 - RNA, 19 nt, Artificial Sequence
  Description of Artificial Sequence: Synthetic oligonucleotide
caacgguuggcagcauggc

SEQ ID NO: 816678 - RNA, 19 nt, Artificial Sequence
  Description of Artificial Sequence: Synthetic oligonucleotide
cugccucgaacaccgagca

SEQ ID NO: 816679 - RNA, 19 nt, Artificial Sequence
  Description of Artificial Sequence: Synthetic oligonucleotide
cuggguccaccagauggcc

SEQ ID NO: 816680 - RNA, 19 nt, Artificial Sequence
  Description of Artificial Sequence: Synthetic oligonucleotide
cagcgauuccaguguuggc

SEQ ID NO: 816681 - RNA, 19 nt, Artificial Sequence
  Description of Artificial Sequence: Synthetic oligonucleotide
ccuggguccaccagauggc

SEQ ID NO: 816682 - RNA, 19 nt, Artificial Sequence
  Description of Artificial Sequence: Synthetic oligonucleotide
gaagugcuuucaagggcca

SEQ ID NO: 816683 - RNA, 19 nt, Artificial Sequence
  Description of Artificial Sequence: Synthetic oligonucleotide
gaauccccgccggaaggug

SEQ ID NO: 816684 - RNA, 19 nt, Artificial Sequence
  Description of Artificial Sequence: Synthetic oligonucleotide
gccucgaacaccgagcaga

SEQ ID NO: 816685 - RNA, 19 nt, Artificial Sequence
  Description of Artificial Sequence: Synthetic oligonucleotide
ucagguauucuggguguuu

SEQ ID NO: 816686 - RNA, 19 nt, Artificial Sequence
  Description of Artificial Sequence: Synthetic oligonucleotide
uagcgcacagguccacuuu

SEQ ID NO: 816687 - RNA, 19 nt, Artificial Sequence
  Description of Artificial Sequence: Synthetic oligonucleotide
cacgccugagccagcacca

SEQ ID NO: 816688 - RNA, 19 nt, Artificial Sequence
  Description of Artificial Sequence: Synthetic oligonucleotide
gccuagccuauuaacacac

SEQ ID NO: 816689 - RNA, 19 nt, Artificial Sequence
  Description of Artificial Sequence: Synthetic oligonucleotide
cagugguccaagaugccua

SEQ ID NO: 816690 - RNA, 19 nt, Artificial Sequence
  Description of Artificial Sequence: Synthetic oligonucleotide
uucucccuuccggacugcc

SEQ ID NO: 816691 - RNA, 19 nt, Artificial Sequence
  Description of Artificial Sequence: Synthetic oligonucleotide
aagggccaccccaguuacg

SEQ ID NO: 816692 - RNA, 19 nt, Artificial Sequence
  Description of Artificial Sequence: Synthetic oligonucleotide
gagugaagggcaacaaaau

SEQ ID NO: 816693 - RNA, 19 nt, Artificial Sequence
  Description of Artificial Sequence: Synthetic oligonucleotide
gcacauccgugacauggcc

SEQ ID NO: 816694 - RNA, 19 nt, Artificial Sequence
  Description of Artificial Sequence: Synthetic oligonucleotide
cacggcagaucccacugga

SEQ ID NO: 816695 - RNA, 19 nt, Artificial Sequence
  Description of Artificial Sequence: Synthetic oligonucleotide
gaccaugcagccaggguua

SEQ ID NO: 816696 - RNA, 19 nt, Artificial Sequence
  Description of Artificial Sequence: Synthetic oligonucleotide
ucuuagcgcacagguccac

SEQ ID NO: 816697 - RNA, 19 nt, Artificial Sequence
  Description of Artificial Sequence: Synthetic oligonucleotide
ugcugagaacagcccugaa

SEQ ID NO: 816698 - RNA, 19 nt, Artificial Sequence
  Description of Artificial Sequence: Synthetic oligonucleotide
cucccagggcuaguguagc

SEQ ID NO: 816699 - RNA, 19 nt, Artificial Sequence
  Description of Artificial Sequence: Synthetic oligonucleotide
cgggccaaccaccagcugg

SEQ ID NO: 816700 - RNA, 19 nt, Artificial Sequence
  Description of Artificial Sequence: Synthetic oligonucleotide
ggucuugagagaagcccgc

SEQ ID NO: 816701 - RNA, 19 nt, Artificial Sequence
  Description of Artificial Sequence: Synthetic oligonucleotide
ugacauggccgaugccuuu

SEQ ID NO: 816702 - RNA, 19 nt, Artificial Sequence
  Description of Artificial Sequence: Synthetic oligonucleotide
agggcuaguguagcagccu

SEQ ID NO: 816703 - RNA, 19 nt, Artificial Sequence
  Description of Artificial Sequence: Synthetic oligonucleotide
gcgguagagcuguuuugag

SEQ ID NO: 816704 - RNA, 19 nt, Artificial Sequence
  Description of Artificial Sequence: Synthetic oligonucleotide
gccgccaacgguuggcagc

SEQ ID NO: 816705 - RNA, 19 nt, Artificial Sequence
  Description of Artificial Sequence: Synthetic oligonucleotide
gucaugcccgauccugaca

SEQ ID NO: 816706 - RNA, 19 nt, Artificial Sequence
  Description of Artificial Sequence: Synthetic oligonucleotide
ugguaacgcccucccggaa

SEQ ID NO: 816707 - RNA, 19 nt, Artificial Sequence
  Description of Artificial Sequence: Synthetic oligonucleotide
uguccuuugcauggaucuu

SEQ ID NO: 816708 - RNA, 19 nt, Artificial Sequence
  Description of Artificial Sequence: Synthetic oligonucleotide
caguuacgacaauuccuga

SEQ ID NO: 816709 - RNA, 19 nt, Artificial Sequence
  Description of Artificial Sequence: Synthetic oligonucleotide
gcuaguguagcagccugac

SEQ ID NO: 816710 - RNA, 19 nt, Artificial Sequence
  Description of Artificial Sequence: Synthetic oligonucleotide
aguggccuugagaggaggu

SEQ ID NO: 816711 - RNA, 19 nt, Artificial Sequence
  Description of Artificial Sequence: Synthetic oligonucleotide
agccgccaacgguuggcag

SEQ ID NO: 816712 - RNA, 19 nt, Artificial Sequence
  Description of Artificial Sequence: Synthetic oligonucleotide
ugccagcgauuccaguguu

SEQ ID NO: 816713 - RNA, 19 nt, Artificial Sequence
  Description of Artificial Sequence: Synthetic oligonucleotide
acguugggugacugggcaa

SEQ ID NO: 816714 - RNA, 19 nt, Artificial Sequence
  Description of Artificial Sequence: Synthetic oligonucleotide
cugcauacucucagcucca

SEQ ID NO: 816715 - RNA, 19 nt, Artificial Sequence
  Description of Artificial Sequence: Synthetic oligonucleotide
acacgacaggcagagcgau

SEQ ID NO: 816716 - RNA, 19 nt, Artificial Sequence
  Description of Artificial Sequence: Synthetic oligonucleotide
gccuaugcaccauucccuc

SEQ ID NO: 816717 - RNA, 19 nt, Artificial Sequence
  Description of Artificial Sequence: Synthetic oligonucleotide
aaaccgcccuugagugaag

SEQ ID NO: 816718 - RNA, 19 nt, Artificial Sequence
  Description of Artificial Sequence: Synthetic oligonucleotide
cuuuacugaccacgaugaa

SEQ ID NO: 816719 - RNA, 19 nt, Artificial Sequence
  Description of Artificial Sequence: Synthetic oligonucleotide
uggugccagcgauuccagu

SEQ ID NO: 816720 - RNA, 19 nt, Artificial Sequence
  Description of Artificial Sequence: Synthetic oligonucleotide
caaccagcgggcacacaga

SEQ ID NO: 816721 - RNA, 19 nt, Artificial Sequence
  Description of Artificial Sequence: Synthetic oligonucleotide
guacugggacggauucacc

SEQ ID NO: 816722 - RNA, 19 nt, Artificial Sequence
  Description of Artificial Sequence: Synthetic oligonucleotide
ggugcagggucuugagaga

SEQ ID NO: 816723 - RNA, 19 nt, Artificial Sequence
  Description of Artificial Sequence: Synthetic oligonucleotide
guccgcagcuuguccuuug

SEQ ID NO: 816724 - RNA, 19 nt, Artificial Sequence
  Description of Artificial Sequence: Synthetic oligonucleotide
cuaccccaaucugguagac

SEQ ID NO: 816725 - RNA, 19 nt, Artificial Sequence
  Description of Artificial Sequence: Synthetic oligonucleotide
cgacaauuccugaagugca

SEQ ID NO: 816726 - RNA, 19 nt, Artificial Sequence
  Description of Artificial Sequence: Synthetic oligonucleotide
ccaagaugccuaugcacca

SEQ ID NO: 816727 - RNA, 19 nt, Artificial Sequence
  Description of Artificial Sequence: Synthetic oligonucleotide
cccggaacagcaguuuggc

SEQ ID NO: 816728 - RNA, 19 nt, Artificial Sequence
  Description of Artificial Sequence: Synthetic oligonucleotide
ggaaacguaccacugccuu

SEQ ID NO: 816729 - RNA, 19 nt, Artificial Sequence
  Description of Artificial Sequence: Synthetic oligonucleotide
uaacgcccucccggaacag

SEQ ID NO: 816730 - RNA, 19 nt, Artificial Sequence
  Description of Artificial Sequence: Synthetic oligonucleotide
ccggaacagcaguuuggcg

SEQ ID NO: 816731 - RNA, 19 nt, Artificial Sequence
  Description of Artificial Sequence: Synthetic oligonucleotide
agcagauggugggauucau

SEQ ID NO: 816732 - RNA, 19 nt, Artificial Sequence
  Description of Artificial Sequence: Synthetic oligonucleotide
caccaacuugaguuuauau

SEQ ID NO: 816733 - RNA, 19 nt, Artificial Sequence
  Description of Artificial Sequence: Synthetic oligonucleotide
aucuggggaaaccgcccuu

SEQ ID NO: 816734 - RNA, 19 nt, Artificial Sequence
  Description of Artificial Sequence: Synthetic oligonucleotide
gucuuagcgcacaggucca

SEQ ID NO: 816735 - RNA, 19 nt, Artificial Sequence
  Description of Artificial Sequence: Synthetic oligonucleotide
cacucugccuagccuauua

SEQ ID NO: 816736 - RNA, 19 nt, Artificial Sequence
  Description of Artificial Sequence: Synthetic oligonucleotide
agccgccacuucauuuggg

SEQ ID NO: 816737 - RNA, 19 nt, Artificial Sequence
  Description of Artificial Sequence: Synthetic oligonucleotide
gucuugagagaagcccgca

SEQ ID NO: 816738 - RNA, 19 nt, Artificial Sequence
  Description of Artificial Sequence: Synthetic oligonucleotide
gccaacgguuggcagcaug

SEQ ID NO: 816739 - RNA, 19 nt, Artificial Sequence
  Description of Artificial Sequence: Synthetic oligonucleotide
ggaaaccgcccuugaguga

SEQ ID NO: 816740 - RNA, 19 nt, Artificial Sequence
  Description of Artificial Sequence: Synthetic oligonucleotide
ggugacugggcaaacugcu

SEQ ID NO: 816741 - RNA, 19 nt, Artificial Sequence
  Description of Artificial Sequence: Synthetic oligonucleotide
uggggaccuuguggcagcc

SEQ ID NO: 816742 - RNA, 19 nt, Artificial Sequence
  Description of Artificial Sequence: Synthetic oligonucleotide
gccguuugacguacauugc

SEQ ID NO: 816743 - RNA, 19 nt, Artificial Sequence
  Description of Artificial Sequence: Synthetic oligonucleotide
caccgcgccccuccuggag

SEQ ID NO: 816744 - RNA, 19 nt, Artificial Sequence
  Description of Artificial Sequence: Synthetic oligonucleotide
ccagcucgcagcacacgac

SEQ ID NO: 816745 - RNA, 19 nt, Artificial Sequence
  Description of Artificial Sequence: Synthetic oligonucleotide
gagccgccaacgguuggca

SEQ ID NO: 816746 - RNA, 19 nt, Artificial Sequence
  Description of Artificial Sequence: Synthetic oligonucleotide
ccaaccaccguucccaccu

SEQ ID NO: 816747 - RNA, 19 nt, Artificial Sequence
  Description of Artificial Sequence: Synthetic oligonucleotide
ggccaagccccagauguuc

SEQ ID NO: 816748 - RNA, 19 nt, Artificial Sequence
  Description of Artificial Sequence: Synthetic oligonucleotide
ggcacagucagggcuucuc

SEQ ID NO: 816749 - RNA, 19 nt, Artificial Sequence
  Description of Artificial Sequence: Synthetic oligonucleotide
caaccaccguucccaccuc

SEQ ID NO: 816750 - RNA, 19 nt, Artificial Sequence
  Description of Artificial Sequence: Synthetic oligonucleotide
cuuuucuaccacugccguu

SEQ ID NO: 816751 - RNA, 19 nt, Artificial Sequence
  Description of Artificial Sequence: Synthetic oligonucleotide
ccuuuggugugccaagucu

SEQ ID NO: 816752 - RNA, 19 nt, Artificial Sequence
  Description of Artificial Sequence: Synthetic oligonucleotide
guccuuugcauggaucuuu

SEQ ID NO: 816753 - RNA, 19 nt, Artificial Sequence
  Description of Artificial Sequence: Synthetic oligonucleotide
cuccaguagacaagaccau

SEQ ID NO: 816754 - RNA, 19 nt, Artificial Sequence
  Description of Artificial Sequence: Synthetic oligonucleotide
ccgccacuucauuuggguc

SEQ ID NO: 816755 - RNA, 19 nt, Artificial Sequence
  Description of Artificial Sequence: Synthetic oligonucleotide
auccccgccggaagguggu

SEQ ID NO: 816756 - RNA, 19 nt, Artificial Sequence
  Description of Artificial Sequence: Synthetic oligonucleotide
cagcccugaauugucuucu

SEQ ID NO: 816757 - RNA, 19 nt, Artificial Sequence
  Description of Artificial Sequence: Synthetic oligonucleotide
agauggccaggagcauuau

SEQ ID NO: 816758 - RNA, 19 nt, Artificial Sequence
  Description of Artificial Sequence: Synthetic oligonucleotide
gcauggggaccuuguggca

SEQ ID NO: 816759 - RNA, 19 nt, Artificial Sequence
  Description of Artificial Sequence: Synthetic oligonucleotide
gucgggccaaccaccagcu

SEQ ID NO: 816760 - RNA, 19 nt, Artificial Sequence
  Description of Artificial Sequence: Synthetic oligonucleotide
gccgccacuucauuugggu

SEQ ID NO: 816761 - RNA, 19 nt, Artificial Sequence
  Description of Artificial Sequence: Synthetic oligonucleotide
ggcuaguguagcagccuga

SEQ ID NO: 816762 - RNA, 19 nt, Artificial Sequence
  Description of Artificial Sequence: Synthetic oligonucleotide
cacaggguagggacacagu

SEQ ID NO: 816763 - RNA, 19 nt, Artificial Sequence
  Description of Artificial Sequence: Synthetic oligonucleotide
cgcccuugagugaagggca

SEQ ID NO: 816764 - RNA, 19 nt, Artificial Sequence
  Description of Artificial Sequence: Synthetic oligonucleotide
accaugcagccaggguuaa

SEQ ID NO: 816765 - RNA, 19 nt, Artificial Sequence
  Description of Artificial Sequence: Synthetic oligonucleotide
ccuagccuauuaacacaca

SEQ ID NO: 816766 - RNA, 19 nt, Artificial Sequence
  Description of Artificial Sequence: Synthetic oligonucleotide
cauggcuggaagucaccuu

SEQ ID NO: 816767 - RNA, 19 nt, Artificial Sequence
  Description of Artificial Sequence: Synthetic oligonucleotide
cuuagcgcacagguccacu

SEQ ID NO: 816768 - RNA, 19 nt, Artificial Sequence
  Description of Artificial Sequence: Synthetic oligonucleotide
ggauauucaggaagacuuu

SEQ ID NO: 816769 - RNA, 19 nt, Artificial Sequence
  Description of Artificial Sequence: Synthetic oligonucleotide
gccagcgauuccaguguug

SEQ ID NO: 816770 - RNA, 19 nt, Artificial Sequence
  Description of Artificial Sequence: Synthetic oligonucleotide
gccuugagaggagguauaa

SEQ ID NO: 816771 - RNA, 19 nt, Artificial Sequence
  Description of Artificial Sequence: Synthetic oligonucleotide
auguucccguguggugcca

SEQ ID NO: 816772 - RNA, 19 nt, Artificial Sequence
  Description of Artificial Sequence: Synthetic oligonucleotide
gggugacguugggugacug

SEQ ID NO: 816773 - RNA, 19 nt, Artificial Sequence
  Description of Artificial Sequence: Synthetic oligonucleotide
cccuugcgaagcagugaac

SEQ ID NO: 816774 - RNA, 19 nt, Artificial Sequence
  Description of Artificial Sequence: Synthetic oligonucleotide
caagaugccuaugcaccau

SEQ ID NO: 816775 - RNA, 19 nt, Artificial Sequence
  Description of Artificial Sequence: Synthetic oligonucleotide
gacagcgguagagcuguuu

SEQ ID NO: 816776 - RNA, 19 nt, Artificial Sequence
  Description of Artificial Sequence: Synthetic oligonucleotide
caccgagcagaugguggga

SEQ ID NO: 816777 - RNA, 19 nt, Artificial Sequence
  Description of Artificial Sequence: Synthetic oligonucleotide
uccccgccggaagguggug

SEQ ID NO: 816778 - RNA, 19 nt, Artificial Sequence
  Description of Artificial Sequence: Synthetic oligonucleotide
ccacugccguuugacguac

SEQ ID NO: 816779 - RNA, 19 nt, Artificial Sequence
  Description of Artificial Sequence: Synthetic oligonucleotide
cauugcccacauguacugu

SEQ ID NO: 816780 - RNA, 19 nt, Artificial Sequence
  Description of Artificial Sequence: Synthetic oligonucleotide
gcgaagcagugaacgguca

SEQ ID NO: 816781 - RNA, 19 nt, Artificial Sequence
  Description of Artificial Sequence: Synthetic oligonucleotide
gcgcacagguccacuuuac

SEQ ID NO: 816782 - RNA, 19 nt, Artificial Sequence
  Description of Artificial Sequence: Synthetic oligonucleotide
ugaccagcauggggaccuu

SEQ ID NO: 816783 - RNA, 19 nt, Artificial Sequence
  Description of Artificial Sequence: Synthetic oligonucleotide
ccgcgccccuccuggagcc

SEQ ID NO: 816784 - RNA, 19 nt, Artificial Sequence
  Description of Artificial Sequence: Synthetic oligonucleotide
cgacaggcagagcgauugc

SEQ ID NO: 816785 - RNA, 19 nt, Artificial Sequence
  Description of Artificial Sequence: Synthetic oligonucleotide
cccuugagugaagggcaac

SEQ ID NO: 816786 - RNA, 19 nt, Artificial Sequence
  Description of Artificial Sequence: Synthetic oligonucleotide
cacugccguuugacguaca

SEQ ID NO: 816787 - RNA, 19 nt, Artificial Sequence
  Description of Artificial Sequence: Synthetic oligonucleotide
gucccuggguccaccagau

SEQ ID NO: 816788 - RNA, 19 nt, Artificial Sequence
  Description of Artificial Sequence: Synthetic oligonucleotide
ggaauccccgccggaaggu

SEQ ID NO: 816789 - RNA, 19 nt, Artificial Sequence
  Description of Artificial Sequence: Synthetic oligonucleotide
caccccaguuacgacaauu

SEQ ID NO: 816790 - RNA, 19 nt, Artificial Sequence
  Description of Artificial Sequence: Synthetic oligonucleotide
caugcccgauccugacagu

SEQ ID NO: 816791 - RNA, 19 nt, Artificial Sequence
  Description of Artificial Sequence: Synthetic oligonucleotide
cuguccgcagcuuguccuu

SEQ ID NO: 816792 - RNA, 19 nt, Artificial Sequence
  Description of Artificial Sequence: Synthetic oligonucleotide
gggacggauucaccaacuu

SEQ ID NO: 816793 - RNA, 19 nt, Artificial Sequence
  Description of Artificial Sequence: Synthetic oligonucleotide
ccgccaacgguuggcagca

SEQ ID NO: 816794 - RNA, 19 nt, Artificial Sequence
  Description of Artificial Sequence: Synthetic oligonucleotide
ccgugacauggccgaugcc

SEQ ID NO: 816795 - RNA, 19 nt, Artificial Sequence
  Description of Artificial Sequence: Synthetic oligonucleotide
cgaagcagugaacggucaa

SEQ ID NO: 816796 - RNA, 19 nt, Artificial Sequence
  Description of Artificial Sequence: Synthetic oligonucleotide
cccucacggcagaucccac

SEQ ID NO: 816797 - RNA, 19 nt, Artificial Sequence
  Description of Artificial Sequence: Synthetic oligonucleotide
ccggugcagggucuugaga

SEQ ID NO: 816798 - RNA, 19 nt, Artificial Sequence
  Description of Artificial Sequence: Synthetic oligonucleotide
ggccuuuggugugccaagu

SEQ ID NO: 816799 - RNA, 19 nt, Artificial Sequence
  Description of Artificial Sequence: Synthetic oligonucleotide
cacgacaggcagagcgauu

SEQ ID NO: 816800 - RNA, 19 nt, Artificial Sequence
  Description of Artificial Sequence: Synthetic oligonucleotide
ccucgaacaccgagcagau

SEQ ID NO: 816801 - RNA, 19 nt, Artificial Sequence
  Description of Artificial Sequence: Synthetic oligonucleotide
gcccuugagugaagggcaa

SEQ ID NO: 816802 - RNA, 19 nt, Artificial Sequence
  Description of Artificial Sequence: Synthetic oligonucleotide
ccucaccgcgccccuccug

SEQ ID NO: 816803 - RNA, 19 nt, Artificial Sequence
  Description of Artificial Sequence: Synthetic oligonucleotide
cagcgggcacacagaugcu

SEQ ID NO: 816804 - RNA, 19 nt, Artificial Sequence
  Description of Artificial Sequence: Synthetic oligonucleotide
gcgcacuguccucuccacu

SEQ ID NO: 816805 - RNA, 19 nt, Artificial Sequence
  Description of Artificial Sequence: Synthetic oligonucleotide
gcgccccuccuggagccgc

SEQ ID NO: 816806 - RNA, 19 nt, Artificial Sequence
  Description of Artificial Sequence: Synthetic oligonucleotide
ccacuucauuugggucacc

SEQ ID NO: 816807 - RNA, 19 nt, Artificial Sequence
  Description of Artificial Sequence: Synthetic oligonucleotide
cggaaacguaccacugccu

SEQ ID NO: 816808 - RNA, 19 nt, Artificial Sequence
  Description of Artificial Sequence: Synthetic oligonucleotide
ccccuguccgcagcuuguc

SEQ ID NO: 816809 - RNA, 19 nt, Artificial Sequence
  Description of Artificial Sequence: Synthetic oligonucleotide
cuggugagucaugcccgau

SEQ ID NO: 816810 - RNA, 19 nt, Artificial Sequence
  Description of Artificial Sequence: Synthetic oligonucleotide
cccguguggugccagcgau

SEQ ID NO: 816811 - RNA, 19 nt, Artificial Sequence
  Description of Artificial Sequence: Synthetic oligonucleotide
cauccgugacauggccgau

SEQ ID NO: 816812 - RNA, 19 nt, Artificial Sequence
  Description of Artificial Sequence: Synthetic oligonucleotide
cgcacagguccacuuuacu

SEQ ID NO: 816813 - RNA, 19 nt, Artificial Sequence
  Description of Artificial Sequence: Synthetic oligonucleotide
cggaaggugguggcaugga

SEQ ID NO: 816814 - RNA, 19 nt, Artificial Sequence
  Description of Artificial Sequence: Synthetic oligonucleotide
gccucaccgcgccccuccu

SEQ ID NO: 816815 - RNA, 19 nt, Artificial Sequence
  Description of Artificial Sequence: Synthetic oligonucleotide
ccguguggugccagcgauu

SEQ ID NO: 816816 - RNA, 19 nt, Artificial Sequence
  Description of Artificial Sequence: Synthetic oligonucleotide
cggggcucaccaucaccau

SEQ ID NO: 816817 - RNA, 19 nt, Artificial Sequence
  Description of Artificial Sequence: Synthetic oligonucleotide
cgccaacgguuggcagcau

SEQ ID NO: 816818 - RNA, 19 nt, Artificial Sequence
  Description of Artificial Sequence: Synthetic oligonucleotide
aacuuuugaagccaaagcc

SEQ ID NO: 816819 - RNA, 19 nt, Artificial Sequence
  Description of Artificial Sequence: Synthetic oligonucleotide
uguacuucccacaagauca

SEQ ID NO: 816820 - RNA, 19 nt, Artificial Sequence
  Description of Artificial Sequence: Synthetic oligonucleotide
aaagcuucgggcuuccugc

SEQ ID NO: 816821 - RNA, 19 nt, Artificial Sequence
  Description of Artificial Sequence: Synthetic oligonucleotide
uuuuacuagacgaggaagg

SEQ ID NO: 816822 - RNA, 19 nt, Artificial Sequence
  Description of Artificial Sequence: Synthetic oligonucleotide
uauacagucccacaaaaca

SEQ ID NO: 816823 - RNA, 19 nt, Artificial Sequence
  Description of Artificial Sequence: Synthetic oligonucleotide
acaagaacaacugaugggc

SEQ ID NO: 816824 - RNA, 19 nt, Artificial Sequence
  Description of Artificial Sequence: Synthetic oligonucleotide
aacuuggaagaauaguggg

SEQ ID NO: 816825 - RNA, 19 nt, Artificial Sequence
  Description of Artificial Sequence: Synthetic oligonucleotide
auauaaacaaagaguaucc

SEQ ID NO: 816826 - RNA, 19 nt, Artificial Sequence
  Description of Artificial Sequence: Synthetic oligonucleotide
gaucuuugaaucuaauugc

SEQ ID NO: 816827 - RNA, 19 nt, Artificial Sequence
  Description of Artificial Sequence: Synthetic oligonucleotide
cauagaaaggcaaaauuag

SEQ ID NO: 816828 - RNA, 19 nt, Artificial Sequence
  Description of Artificial Sequence: Synthetic oligonucleotide
ucuuguuccagccuuacca

SEQ ID NO: 816829 - RNA, 19 nt, Artificial Sequence
  Description of Artificial Sequence: Synthetic oligonucleotide
aaauggacgacaaaggucu

SEQ ID NO: 816830 - RNA, 19 nt, Artificial Sequence
  Description of Artificial Sequence: Synthetic oligonucleotide
agagugcugacauuaacac

SEQ ID NO: 816831 - RNA, 19 nt, Artificial Sequence
  Description of Artificial Sequence: Synthetic oligonucleotide
aaaggcaaaauuaggcuac

SEQ ID NO: 816832 - RNA, 19 nt, Artificial Sequence
  Description of Artificial Sequence: Synthetic oligonucleotide
auguaacuuauucugcagc

SEQ ID NO: 816833 - RNA, 19 nt, Artificial Sequence
  Description of Artificial Sequence: Synthetic oligonucleotide
uauucuaucucuggcagcg

SEQ ID NO: 816834 - RNA, 19 nt, Artificial Sequence
  Description of Artificial Sequence: Synthetic oligonucleotide
acuuggauguuauuucccc

SEQ ID NO: 816835 - RNA, 19 nt, Artificial Sequence
  Description of Artificial Sequence: Synthetic oligonucleotide
acgacaaaggucuacauga

SEQ ID NO: 816836 - RNA, 19 nt, Artificial Sequence
  Description of Artificial Sequence: Synthetic oligonucleotide
acugcguagcucuuguucc

SEQ ID NO: 816837 - RNA, 19 nt, Artificial Sequence
  Description of Artificial Sequence: Synthetic oligonucleotide
uguuuuagguccuugauuu

SEQ ID NO: 816838 - RNA, 19 nt, Artificial Sequence
  Description of Artificial Sequence: Synthetic oligonucleotide
auugugauguauaaggauc

SEQ ID NO: 816839 - RNA, 19 nt, Artificial Sequence
  Description of Artificial Sequence: Synthetic oligonucleotide
uguuaugcugggcaugacg

SEQ ID NO: 816840 - RNA, 19 nt, Artificial Sequence
  Description of Artificial Sequence: Synthetic oligonucleotide
aacauauacagucccacaa

SEQ ID NO: 816841 - RNA, 19 nt, Artificial Sequence
  Description of Artificial Sequence: Synthetic oligonucleotide
acuuuugaagccaaagccc

SEQ ID NO: 816842 - RNA, 19 nt, Artificial Sequence
  Description of Artificial Sequence: Synthetic oligonucleotide
auuaggcuacuugaaaucc

SEQ ID NO: 816843 - RNA, 19 nt, Artificial Sequence
  Description of Artificial Sequence: Synthetic oligonucleotide
auuauguaacuuauucugc

SEQ ID NO: 816844 - RNA, 19 nt, Artificial Sequence
  Description of Artificial Sequence: Synthetic oligonucleotide
augguuuuaauguguuggc

SEQ ID NO: 816845 - RNA, 19 nt, Artificial Sequence
  Description of Artificial Sequence: Synthetic oligonucleotide
ucuagucagacuuggaugu

SEQ ID NO: 816846 - RNA, 19 nt, Artificial Sequence
  Description of Artificial Sequence: Synthetic oligonucleotide
ucuucaagaggaaacuaug

SEQ ID NO: 816847 - RNA, 19 nt, Artificial Sequence
  Description of Artificial Sequence: Synthetic oligonucleotide
uaacuuauucugcagcagc

SEQ ID NO: 816848 - RNA, 19 nt, Artificial Sequence
  Description of Artificial Sequence: Synthetic oligonucleotide
aagaacaacugaugggcag

SEQ ID NO: 816849 - RNA, 19 nt, Artificial Sequence
  Description of Artificial Sequence: Synthetic oligonucleotide
gaaugcuuccauuuguagc

SEQ ID NO: 816850 - RNA, 19 nt, Artificial Sequence
  Description of Artificial Sequence: Synthetic oligonucleotide
aagaucauuguuuaaucuu

SEQ ID NO: 816851 - RNA, 19 nt, Artificial Sequence
  Description of Artificial Sequence: Synthetic oligonucleotide
uccuuuugcuuucuuaacc

SEQ ID NO: 816852 - RNA, 19 nt, Artificial Sequence
  Description of Artificial Sequence: Synthetic oligonucleotide
auuguuuaaucuuuuacua

SEQ ID NO: 816853 - RNA, 19 nt, Artificial Sequence
  Description of Artificial Sequence: Synthetic oligonucleotide
cugguuguuaggaauacag

SEQ ID NO: 816854 - RNA, 19 nt, Artificial Sequence
  Description of Artificial Sequence: Synthetic oligonucleotide
uccauuaaguccuuaugug

SEQ ID NO: 816855 - RNA, 19 nt, Artificial Sequence
  Description of Artificial Sequence: Synthetic oligonucleotide
uguuauuuauuccaagguu

SEQ ID NO: 816856 - RNA, 19 nt, Artificial Sequence
  Description of Artificial Sequence: Synthetic oligonucleotide
gaucgaggaauccaugucc

SEQ ID NO: 816857 - RNA, 19 nt, Artificial Sequence
  Description of Artificial Sequence: Synthetic oligonucleotide
aaaggcaacagcccgugca

SEQ ID NO: 816858 - RNA, 19 nt, Artificial Sequence
  Description of Artificial Sequence: Synthetic oligonucleotide
agaagcagugcaugagucc

SEQ ID NO: 816859 - RNA, 19 nt, Artificial Sequence
  Description of Artificial Sequence: Synthetic oligonucleotide
uuuaagagauuuucuguac

SEQ ID NO: 816860 - RNA, 19 nt, Artificial Sequence
  Description of Artificial Sequence: Synthetic oligonucleotide
uucuagucagacuuggaug

SEQ ID NO: 816861 - RNA, 19 nt, Artificial Sequence
  Description of Artificial Sequence: Synthetic oligonucleotide
auuaaguccuuaugugcac

SEQ ID NO: 816862 - RNA, 19 nt, Artificial Sequence
  Description of Artificial Sequence: Synthetic oligonucleotide
aacauuugcugcucuggag

SEQ ID NO: 816863 - RNA, 19 nt, Artificial Sequence
  Description of Artificial Sequence: Synthetic oligonucleotide
uucucgauauucuaucucu

SEQ ID NO: 816864 - RNA, 19 nt, Artificial Sequence
  Description of Artificial Sequence: Synthetic oligonucleotide
ugauucuugucucugcgcu

SEQ ID NO: 816865 - RNA, 19 nt, Artificial Sequence
  Description of Artificial Sequence: Synthetic oligonucleotide
guuaugcugggcaugacgg

SEQ ID NO: 816866 - RNA, 19 nt, Artificial Sequence
  Description of Artificial Sequence: Synthetic oligonucleotide
gacauuaacaccucggugu

SEQ ID NO: 816867 - RNA, 19 nt, Artificial Sequence
  Description of Artificial Sequence: Synthetic oligonucleotide
ugcauguaaaacucguucu

SEQ ID NO: 816868 - RNA, 19 nt, Artificial Sequence
  Description of Artificial Sequence: Synthetic oligonucleotide
ugcgucuugucuugcaugg

SEQ ID NO: 816869 - RNA, 19 nt, Artificial Sequence
  Description of Artificial Sequence: Synthetic oligonucleotide
ucuuugaaucuaauugcug

SEQ ID NO: 816870 - RNA, 19 nt, Artificial Sequence
  Description of Artificial Sequence: Synthetic oligonucleotide
acccaauacagugagcagc

SEQ ID NO: 816871 - RNA, 19 nt, Artificial Sequence
  Description of Artificial Sequence: Synthetic oligonucleotide
uuucuacaaagcuucgggc

SEQ ID NO: 816872 - RNA, 19 nt, Artificial Sequence
  Description of Artificial Sequence: Synthetic oligonucleotide
gcuucuagcucucugaucc

SEQ ID NO: 816873 - RNA, 19 nt, Artificial Sequence
  Description of Artificial Sequence: Synthetic oligonucleotide
ucugauccgacuccgcaag

SEQ ID NO: 816874 - RNA, 19 nt, Artificial Sequence
  Description of Artificial Sequence: Synthetic oligonucleotide
aaccgcaucuuguagcuca

SEQ ID NO: 816875 - RNA, 19 nt, Artificial Sequence
  Description of Artificial Sequence: Synthetic oligonucleotide
ugacauuaacaccucggug

SEQ ID NO: 816876 - RNA, 19 nt, Artificial Sequence
  Description of Artificial Sequence: Synthetic oligonucleotide
ucuuaaccgcaucuuguag

SEQ ID NO: 816877 - RNA, 19 nt, Artificial Sequence
  Description of Artificial Sequence: Synthetic oligonucleotide
caugacuucggcuaucuuc

SEQ ID NO: 816878 - RNA, 19 nt, Artificial Sequence
  Description of Artificial Sequence: Synthetic oligonucleotide
acauuaacaccucgguguc

SEQ ID NO: 816879 - RNA, 19 nt, Artificial Sequence
  Description of Artificial Sequence: Synthetic oligonucleotide
auacagucccacaaaacac

SEQ ID NO: 816880 - RNA, 19 nt, Artificial Sequence
  Description of Artificial Sequence: Synthetic oligonucleotide
cucuuguuccacuugccgg

SEQ ID NO: 816881 - RNA, 19 nt, Artificial Sequence
  Description of Artificial Sequence: Synthetic oligonucleotide
caaauggacgacaaagguc

SEQ ID NO: 816882 - RNA, 19 nt, Artificial Sequence
  Description of Artificial Sequence: Synthetic oligonucleotide
auugugagcuucuugcccu

SEQ ID NO: 816883 - RNA, 19 nt, Artificial Sequence
  Description of Artificial Sequence: Synthetic oligonucleotide
uuaaccgcaucuuguagcu

SEQ ID NO: 816884 - RNA, 19 nt, Artificial Sequence
  Description of Artificial Sequence: Synthetic oligonucleotide
cucguucugugcuugagag

SEQ ID NO: 816885 - RNA, 19 nt, Artificial Sequence
  Description of Artificial Sequence: Synthetic oligonucleotide
acaacugaugggcaguucu

SEQ ID NO: 816886 - RNA, 19 nt, Artificial Sequence
  Description of Artificial Sequence: Synthetic oligonucleotide
uuacuauugauaugguuuu

SEQ ID NO: 816887 - RNA, 19 nt, Artificial Sequence
  Description of Artificial Sequence: Synthetic oligonucleotide
aagaaugguuuuaaugugu

SEQ ID NO: 816888 - RNA, 19 nt, Artificial Sequence
  Description of Artificial Sequence: Synthetic oligonucleotide
uuuucucgauauucuaucu

SEQ ID NO: 816889 - RNA, 19 nt, Artificial Sequence
  Description of Artificial Sequence: Synthetic oligonucleotide
uucacaacuccacuggcau

SEQ ID NO: 816890 - RNA, 19 nt, Artificial Sequence
  Description of Artificial Sequence: Synthetic oligonucleotide
uuuaauguguuggccaaga

SEQ ID NO: 816891 - RNA, 19 nt, Artificial Sequence
  Description of Artificial Sequence: Synthetic oligonucleotide
cauuaaguccuuaugugca

SEQ ID NO: 816892 - RNA, 19 nt, Artificial Sequence
  Description of Artificial Sequence: Synthetic oligonucleotide
aaacacaauuaucaacguu

SEQ ID NO: 816893 - RNA, 19 nt, Artificial Sequence
  Description of Artificial Sequence: Synthetic oligonucleotide
aacucguucuccuuuugaa

SEQ ID NO: 816894 - RNA, 19 nt, Artificial Sequence
  Description of Artificial Sequence: Synthetic oligonucleotide
gacgcugcuuuucaaagac

SEQ ID NO: 816895 - RNA, 19 nt, Artificial Sequence
  Description of Artificial Sequence: Synthetic oligonucleotide
uugaccaccagagacgcug

SEQ ID NO: 816896 - RNA, 19 nt, Artificial Sequence
  Description of Artificial Sequence: Synthetic oligonucleotide
gacgacaaaggucuacaug

SEQ ID NO: 816897 - RNA, 19 nt, Artificial Sequence
  Description of Artificial Sequence: Synthetic oligonucleotide
uuagcugguuguuaggaau

SEQ ID NO: 816898 - RNA, 19 nt, Artificial Sequence
  Description of Artificial Sequence: Synthetic oligonucleotide
gaagcugcauguaaaacuc

SEQ ID NO: 816899 - RNA, 19 nt, Artificial Sequence
  Description of Artificial Sequence: Synthetic oligonucleotide
aaggucuacaugaaaauuu

SEQ ID NO: 816900 - RNA, 19 nt, Artificial Sequence
  Description of Artificial Sequence: Synthetic oligonucleotide
uguccggcaauccuuuggc

SEQ ID NO: 816901 - RNA, 19 nt, Artificial Sequence
  Description of Artificial Sequence: Synthetic oligonucleotide
uuaggcuacuugaaaucca

SEQ ID NO: 816902 - RNA, 19 nt, Artificial Sequence
  Description of Artificial Sequence: Synthetic oligonucleotide
uccuuaugugcacuugggc

SEQ ID NO: 816903 - RNA, 19 nt, Artificial Sequence
  Description of Artificial Sequence: Synthetic oligonucleotide
uuuuacuauugauaugguu

SEQ ID NO: 816904 - RNA, 19 nt, Artificial Sequence
  Description of Artificial Sequence: Synthetic oligonucleotide
ugcuuucuuaaccgcaucu

SEQ ID NO: 816905 - RNA, 19 nt, Artificial Sequence
  Description of Artificial Sequence: Synthetic oligonucleotide
uuuacuagacgaggaagga

SEQ ID NO: 816906 - RNA, 19 nt, Artificial Sequence
  Description of Artificial Sequence: Synthetic oligonucleotide
cauugugagcuucuugccc

SEQ ID NO: 816907 - RNA, 19 nt, Artificial Sequence
  Description of Artificial Sequence: Synthetic oligonucleotide
agagaacagguccaacuug

SEQ ID NO: 816908 - RNA, 19 nt, Artificial Sequence
  Description of Artificial Sequence: Synthetic oligonucleotide
ucucgauauucuaucucug

SEQ ID NO: 816909 - RNA, 19 nt, Artificial Sequence
  Description of Artificial Sequence: Synthetic oligonucleotide
auuuucuguacuucccaca

SEQ ID NO: 816910 - RNA, 19 nt, Artificial Sequence
  Description of Artificial Sequence: Synthetic oligonucleotide
cugcauguaaaacucguuc

SEQ ID NO: 816911 - RNA, 19 nt, Artificial Sequence
  Description of Artificial Sequence: Synthetic oligonucleotide
cuagaugcggcagcaaagg

SEQ ID NO: 816912 - RNA, 19 nt, Artificial Sequence
  Description of Artificial Sequence: Synthetic oligonucleotide
ggggcugauagacagaggc

SEQ ID NO: 816913 - RNA, 19 nt, Artificial Sequence
  Description of Artificial Sequence: Synthetic oligonucleotide
aacugaugggcaguucuag

SEQ ID NO: 816914 - RNA, 19 nt, Artificial Sequence
  Description of Artificial Sequence: Synthetic oligonucleotide
gcucacguaacuuuugaag

SEQ ID NO: 816915 - RNA, 19 nt, Artificial Sequence
  Description of Artificial Sequence: Synthetic oligonucleotide
uguauguuaugcugggcau

SEQ ID NO: 816916 - RNA, 19 nt, Artificial Sequence
  Description of Artificial Sequence: Synthetic oligonucleotide
ucuacaaagcuucgggcuu

SEQ ID NO: 816917 - RNA, 19 nt, Artificial Sequence
  Description of Artificial Sequence: Synthetic oligonucleotide
uugauucuugucucugcgc

SEQ ID NO: 816918 - RNA, 19 nt, Artificial Sequence
  Description of Artificial Sequence: Synthetic oligonucleotide
ugguuguuaggaauacagu

SEQ ID NO: 816919 - RNA, 19 nt, Artificial Sequence
  Description of Artificial Sequence: Synthetic oligonucleotide
cacuguauguuaugcuggg

SEQ ID NO: 816920 - RNA, 19 nt, Artificial Sequence
  Description of Artificial Sequence: Synthetic oligonucleotide
ccacaaaacacaauuauca

SEQ ID NO: 816921 - RNA, 19 nt, Artificial Sequence
  Description of Artificial Sequence: Synthetic oligonucleotide
ucuugaccaccagagacgc

SEQ ID NO: 816922 - RNA, 19 nt, Artificial Sequence
  Description of Artificial Sequence: Synthetic oligonucleotide
uccggcaauccuuuggcug

SEQ ID NO: 816923 - RNA, 19 nt, Artificial Sequence
  Description of Artificial Sequence: Synthetic oligonucleotide
guacccaauacagugagca

SEQ ID NO: 816924 - RNA, 19 nt, Artificial Sequence
  Description of Artificial Sequence: Synthetic oligonucleotide
uucagaucuuugaaucuaa

SEQ ID NO: 816925 - RNA, 19 nt, Artificial Sequence
  Description of Artificial Sequence: Synthetic oligonucleotide
aaacugcaaaguccuguga

SEQ ID NO: 816926 - RNA, 19 nt, Artificial Sequence
  Description of Artificial Sequence: Synthetic oligonucleotide
uuguagaauauuguuguua

SEQ ID NO: 816927 - RNA, 19 nt, Artificial Sequence
  Description of Artificial Sequence: Synthetic oligonucleotide
uuauuccaagguuauguuu

SEQ ID NO: 816928 - RNA, 19 nt, Artificial Sequence
  Description of Artificial Sequence: Synthetic oligonucleotide
auacaguucuccauuaagu

SEQ ID NO: 816929 - RNA, 19 nt, Artificial Sequence
  Description of Artificial Sequence: Synthetic oligonucleotide
uaugcugggcaugacggcc

SEQ ID NO: 816930 - RNA, 19 nt, Artificial Sequence
  Description of Artificial Sequence: Synthetic oligonucleotide
auguccggcaauccuuugg

SEQ ID NO: 816931 - RNA, 19 nt, Artificial Sequence
  Description of Artificial Sequence: Synthetic oligonucleotide
ugguuuuaauguguuggcc

SEQ ID NO: 816932 - RNA, 19 nt, Artificial Sequence
  Description of Artificial Sequence: Synthetic oligonucleotide
uaggcuacuugaaauccaa

SEQ ID NO: 816933 - RNA, 19 nt, Artificial Sequence
  Description of Artificial Sequence: Synthetic oligonucleotide
ucuacagguuguagaauau

SEQ ID NO: 816934 - RNA, 19 nt, Artificial Sequence
  Description of Artificial Sequence: Synthetic oligonucleotide
aggaucgaggaauccaugu

SEQ ID NO: 816935 - RNA, 19 nt, Artificial Sequence
  Description of Artificial Sequence: Synthetic oligonucleotide
auuaacaccucgguguccu

SEQ ID NO: 816936 - RNA, 19 nt, Artificial Sequence
  Description of Artificial Sequence: Synthetic oligonucleotide
cuguauguuaugcugggca

SEQ ID NO: 816937 - RNA, 19 nt, Artificial Sequence
  Description of Artificial Sequence: Synthetic oligonucleotide
ggcacuguauguuaugcug

SEQ ID NO: 816938 - RNA, 19 nt, Artificial Sequence
  Description of Artificial Sequence: Synthetic oligonucleotide
gacugcguagcucuuguuc

SEQ ID NO: 816939 - RNA, 19 nt, Artificial Sequence
  Description of Artificial Sequence: Synthetic oligonucleotide
agugcacuucuguuucuuc

SEQ ID NO: 816940 - RNA, 19 nt, Artificial Sequence
  Description of Artificial Sequence: Synthetic oligonucleotide
gugacuucgaggugaggag

SEQ ID NO: 816941 - RNA, 19 nt, Artificial Sequence
  Description of Artificial Sequence: Synthetic oligonucleotide
auguauaaggaucgaggaa

SEQ ID NO: 816942 - RNA, 19 nt, Artificial Sequence
  Description of Artificial Sequence: Synthetic oligonucleotide
cuccgcaagguuucggugc

SEQ ID NO: 816943 - RNA, 19 nt, Artificial Sequence
  Description of Artificial Sequence: Synthetic oligonucleotide
gguuguagaauauuguugu

SEQ ID NO: 816944 - RNA, 19 nt, Artificial Sequence
  Description of Artificial Sequence: Synthetic oligonucleotide
ugugcacuugggcucuugc

SEQ ID NO: 816945 - RNA, 19 nt, Artificial Sequence
  Description of Artificial Sequence: Synthetic oligonucleotide
uucuuaaccgcaucuugua

SEQ ID NO: 816946 - RNA, 19 nt, Artificial Sequence
  Description of Artificial Sequence: Synthetic oligonucleotide
uagcucacguaacuuuuga

SEQ ID NO: 816947 - RNA, 19 nt, Artificial Sequence
  Description of Artificial Sequence: Synthetic oligonucleotide
ugauagacagaggcauuag

SEQ ID NO: 816948 - RNA, 19 nt, Artificial Sequence
  Description of Artificial Sequence: Synthetic oligonucleotide
acuguauguuaugcugggc

SEQ ID NO: 816949 - RNA, 19 nt, Artificial Sequence
  Description of Artificial Sequence: Synthetic oligonucleotide
uuaauguguuggccaagaa

SEQ ID NO: 816950 - RNA, 19 nt, Artificial Sequence
  Description of Artificial Sequence: Synthetic oligonucleotide
gagaacagguccaacuuga

SEQ ID NO: 816951 - RNA, 19 nt, Artificial Sequence
  Description of Artificial Sequence: Synthetic oligonucleotide
uagaugcggcagcaaaggc

SEQ ID NO: 816952 - RNA, 19 nt, Artificial Sequence
  Description of Artificial Sequence: Synthetic oligonucleotide
gaucugacugcguagcucu

SEQ ID NO: 816953 - RNA, 19 nt, Artificial Sequence
  Description of Artificial Sequence: Synthetic oligonucleotide
uggacgacaaaggucuaca

SEQ ID NO: 816954 - RNA, 19 nt, Artificial Sequence
  Description of Artificial Sequence: Synthetic oligonucleotide
cuagacgaggaaggaaugc

SEQ ID NO: 816955 - RNA, 19 nt, Artificial Sequence
  Description of Artificial Sequence: Synthetic oligonucleotide
uuguagcucacguaacuuu

SEQ ID NO: 816956 - RNA, 19 nt, Artificial Sequence
  Description of Artificial Sequence: Synthetic oligonucleotide
uuaccagcgcgucugguuu

SEQ ID NO: 816957 - RNA, 19 nt, Artificial Sequence
  Description of Artificial Sequence: Synthetic oligonucleotide
gugauguauaaggaucgag

SEQ ID NO: 816958 - RNA, 19 nt, Artificial Sequence
  Description of Artificial Sequence: Synthetic oligonucleotide
agcugaucugacugcguag

SEQ ID NO: 816959 - RNA, 19 nt, Artificial Sequence
  Description of Artificial Sequence: Synthetic oligonucleotide
ucgaggaauccauguccgg

SEQ ID NO: 816960 - RNA, 19 nt, Artificial Sequence
  Description of Artificial Sequence: Synthetic oligonucleotide
acggccaugacuucggcua

SEQ ID NO: 816961 - RNA, 19 nt, Artificial Sequence
  Description of Artificial Sequence: Synthetic oligonucleotide
aagcugcauguaaaacucg

SEQ ID NO: 816962 - RNA, 19 nt, Artificial Sequence
  Description of Artificial Sequence: Synthetic oligonucleotide
uugcccucggcuucuagcu

SEQ ID NO: 816963 - RNA, 19 nt, Artificial Sequence
  Description of Artificial Sequence: Synthetic oligonucleotide
ucuagcucucugauccgac

SEQ ID NO: 816964 - RNA, 19 nt, Artificial Sequence
  Description of Artificial Sequence: Synthetic oligonucleotide
ugcuagugcacuucuguuu

SEQ ID NO: 816965 - RNA, 19 nt, Artificial Sequence
  Description of Artificial Sequence: Synthetic oligonucleotide
gucuacagguuguagaaua

SEQ ID NO: 816966 - RNA, 19 nt, Artificial Sequence
  Description of Artificial Sequence: Synthetic oligonucleotide
uccauguccggcaauccuu

SEQ ID NO: 816967 - RNA, 19 nt, Artificial Sequence
  Description of Artificial Sequence: Synthetic oligonucleotide
gcuacuugaaauccaagaa

SEQ ID NO: 816968 - RNA, 19 nt, Artificial Sequence
  Description of Artificial Sequence: Synthetic oligonucleotide
uccgcaagguuucggugca

SEQ ID NO: 816969 - RNA, 19 nt, Artificial Sequence
  Description of Artificial Sequence: Synthetic oligonucleotide
caguucuagucagacuugg

SEQ ID NO: 816970 - RNA, 19 nt, Artificial Sequence
  Description of Artificial Sequence: Synthetic oligonucleotide
ccaagaaugguuuuaaugu

SEQ ID NO: 816971 - RNA, 19 nt, Artificial Sequence
  Description of Artificial Sequence: Synthetic oligonucleotide
agaacaacugaugggcagu

SEQ ID NO: 816972 - RNA, 19 nt, Artificial Sequence
  Description of Artificial Sequence: Synthetic oligonucleotide
acuucggcuaucuucuguu

SEQ ID NO: 816973 - RNA, 19 nt, Artificial Sequence
  Description of Artificial Sequence: Synthetic oligonucleotide
auggacgacaaaggucuac

SEQ ID NO: 816974 - RNA, 19 nt, Artificial Sequence
  Description of Artificial Sequence: Synthetic oligonucleotide
ucggcuaucuucuguuuua

SEQ ID NO: 816975 - RNA, 19 nt, Artificial Sequence
  Description of Artificial Sequence: Synthetic oligonucleotide
uguuaggaauacaguucuc

SEQ ID NO: 816976 - RNA, 19 nt, Artificial Sequence
  Description of Artificial Sequence: Synthetic oligonucleotide
ugugauguauaaggaucga

SEQ ID NO: 816977 - RNA, 19 nt, Artificial Sequence
  Description of Artificial Sequence: Synthetic oligonucleotide
uugucuugcauggcggaga

SEQ ID NO: 816978 - RNA, 19 nt, Artificial Sequence
  Description of Artificial Sequence: Synthetic oligonucleotide
cguucugugcuugagaggg

SEQ ID NO: 816979 - RNA, 19 nt, Artificial Sequence
  Description of Artificial Sequence: Synthetic oligonucleotide
uccgacuccgcaagguuuc

SEQ ID NO: 816980 - RNA, 19 nt, Artificial Sequence
  Description of Artificial Sequence: Synthetic oligonucleotide
gcccaaagucaccacaggg

SEQ ID NO: 816981 - RNA, 19 nt, Artificial Sequence
  Description of Artificial Sequence: Synthetic oligonucleotide
auucuugucucugcgcuga

SEQ ID NO: 816982 - RNA, 19 nt, Artificial Sequence
  Description of Artificial Sequence: Synthetic oligonucleotide
guccuuaugugcacuuggg

SEQ ID NO: 816983 - RNA, 19 nt, Artificial Sequence
  Description of Artificial Sequence: Synthetic oligonucleotide
uucggcuaucuucuguuuu

SEQ ID NO: 816984 - RNA, 19 nt, Artificial Sequence
  Description of Artificial Sequence: Synthetic oligonucleotide
cuugcaggucagcuuuuag

SEQ ID NO: 816985 - RNA, 19 nt, Artificial Sequence
  Description of Artificial Sequence: Synthetic oligonucleotide
ucuugucucugcgcugagg

SEQ ID NO: 816986 - RNA, 19 nt, Artificial Sequence
  Description of Artificial Sequence: Synthetic oligonucleotide
uguugcgucuugucuugca

SEQ ID NO: 816987 - RNA, 19 nt, Artificial Sequence
  Description of Artificial Sequence: Synthetic oligonucleotide
cugaaggauuugucccugg

SEQ ID NO: 816988 - RNA, 19 nt, Artificial Sequence
  Description of Artificial Sequence: Synthetic oligonucleotide
uuccaaaugguugggcaaa

SEQ ID NO: 816989 - RNA, 19 nt, Artificial Sequence
  Description of Artificial Sequence: Synthetic oligonucleotide
uuuguagcacugugacuuc

SEQ ID NO: 816990 - RNA, 19 nt, Artificial Sequence
  Description of Artificial Sequence: Synthetic oligonucleotide
agacgcugcuuuucaaaga

SEQ ID NO: 816991 - RNA, 19 nt, Artificial Sequence
  Description of Artificial Sequence: Synthetic oligonucleotide
ggguacccaauacagugag

SEQ ID NO: 816992 - RNA, 19 nt, Artificial Sequence
  Description of Artificial Sequence: Synthetic oligonucleotide
cuugggcucuugcuagugc

SEQ ID NO: 816993 - RNA, 19 nt, Artificial Sequence
  Description of Artificial Sequence: Synthetic oligonucleotide
ugggcaguucuagucagac

SEQ ID NO: 816994 - RNA, 19 nt, Artificial Sequence
  Description of Artificial Sequence: Synthetic oligonucleotide
guauguuaugcugggcaug

SEQ ID NO: 816995 - RNA, 19 nt, Artificial Sequence
  Description of Artificial Sequence: Synthetic oligonucleotide
ugaucugacugcguagcuc

SEQ ID NO: 816996 - RNA, 19 nt, Artificial Sequence
  Description of Artificial Sequence: Synthetic oligonucleotide
cucguucuccuuuugaacu

SEQ ID NO: 816997 - RNA, 19 nt, Artificial Sequence
  Description of Artificial Sequence: Synthetic oligonucleotide
ugacuucgaggugaggagu

SEQ ID NO: 816998 - RNA, 19 nt, Artificial Sequence
  Description of Artificial Sequence: Synthetic oligonucleotide
gcuagugcacuucuguuuc

SEQ ID NO: 816999 - RNA, 19 nt, Artificial Sequence
  Description of Artificial Sequence: Synthetic oligonucleotide
accagagacgcugcuuuuc

SEQ ID NO: 817000 - RNA, 19 nt, Artificial Sequence
  Description of Artificial Sequence: Synthetic oligonucleotide
uggcugauauucugcuugu

SEQ ID NO: 817001 - RNA, 19 nt, Artificial Sequence
  Description of Artificial Sequence: Synthetic oligonucleotide
uucuagcucucugauccga

SEQ ID NO: 817002 - RNA, 19 nt, Artificial Sequence
  Description of Artificial Sequence: Synthetic oligonucleotide
gcuucaauauaaacaaaga

SEQ ID NO: 817003 - RNA, 19 nt, Artificial Sequence
  Description of Artificial Sequence: Synthetic oligonucleotide
ugauccgacuccgcaaggu

SEQ ID NO: 817004 - RNA, 19 nt, Artificial Sequence
  Description of Artificial Sequence: Synthetic oligonucleotide
acuagacgaggaaggaaug

SEQ ID NO: 817005 - RNA, 19 nt, Artificial Sequence
  Description of Artificial Sequence: Synthetic oligonucleotide
guauaaggaucgaggaauc

SEQ ID NO: 817006 - RNA, 19 nt, Artificial Sequence
  Description of Artificial Sequence: Synthetic oligonucleotide
ugcauggcggagagugcug

SEQ ID NO: 817007 - RNA, 19 nt, Artificial Sequence
  Description of Artificial Sequence: Synthetic oligonucleotide
cuugucuugcauggcggag

SEQ ID NO: 817008 - RNA, 19 nt, Artificial Sequence
  Description of Artificial Sequence: Synthetic oligonucleotide
uugcuagugcacuucuguu

SEQ ID NO: 817009 - RNA, 19 nt, Artificial Sequence
  Description of Artificial Sequence: Synthetic oligonucleotide
agcgcgucugguuugcuua

SEQ ID NO: 817010 - RNA, 19 nt, Artificial Sequence
  Description of Artificial Sequence: Synthetic oligonucleotide
ccuagaugcggcagcaaag

SEQ ID NO: 817011 - RNA, 19 nt, Artificial Sequence
  Description of Artificial Sequence: Synthetic oligonucleotide
agccuuaccagcgcgucug

SEQ ID NO: 817012 - RNA, 19 nt, Artificial Sequence
  Description of Artificial Sequence: Synthetic oligonucleotide
guuuuagguccuugauuuc

SEQ ID NO: 817013 - RNA, 19 nt, Artificial Sequence
  Description of Artificial Sequence: Synthetic oligonucleotide
uuugucccugggcaaucuc

SEQ ID NO: 817014 - RNA, 19 nt, Artificial Sequence
  Description of Artificial Sequence: Synthetic oligonucleotide
cuugcuagugcacuucugu

SEQ ID NO: 817015 - RNA, 19 nt, Artificial Sequence
  Description of Artificial Sequence: Synthetic oligonucleotide
gguguugcgucuugucuug

SEQ ID NO: 817016 - RNA, 19 nt, Artificial Sequence
  Description of Artificial Sequence: Synthetic oligonucleotide
cauugugauguauaaggau

SEQ ID NO: 817017 - RNA, 19 nt, Artificial Sequence
  Description of Artificial Sequence: Synthetic oligonucleotide
agcucacguaacuuuugaa

SEQ ID NO: 817018 - RNA, 19 nt, Artificial Sequence
  Description of Artificial Sequence: Synthetic oligonucleotide
uuagagucuacagguugua

SEQ ID NO: 817019 - RNA, 19 nt, Artificial Sequence
  Description of Artificial Sequence: Synthetic oligonucleotide
uccagccuuaccagcgcgu

SEQ ID NO: 817020 - RNA, 19 nt, Artificial Sequence
  Description of Artificial Sequence: Synthetic oligonucleotide
aucgaguccagaggggcug

SEQ ID NO: 817021 - RNA, 19 nt, Artificial Sequence
  Description of Artificial Sequence: Synthetic oligonucleotide
ucguucuccuuuugaacuu

SEQ ID NO: 817022 - RNA, 19 nt, Artificial Sequence
  Description of Artificial Sequence: Synthetic oligonucleotide
ggcaguucuagucagacuu

SEQ ID NO: 817023 - RNA, 19 nt, Artificial Sequence
  Description of Artificial Sequence: Synthetic oligonucleotide
ucuccccuagaugcggcag

SEQ ID NO: 817024 - RNA, 19 nt, Artificial Sequence
  Description of Artificial Sequence: Synthetic oligonucleotide
caacauuugcugcucugga

SEQ ID NO: 817025 - RNA, 19 nt, Artificial Sequence
  Description of Artificial Sequence: Synthetic oligonucleotide
aggucuacaugaaaauuuu

SEQ ID NO: 817026 - RNA, 19 nt, Artificial Sequence
  Description of Artificial Sequence: Synthetic oligonucleotide
uacuauugauaugguuuuc

SEQ ID NO: 817027 - RNA, 19 nt, Artificial Sequence
  Description of Artificial Sequence: Synthetic oligonucleotide
uucuugucucugcgcugag

SEQ ID NO: 817028 - RNA, 19 nt, Artificial Sequence
  Description of Artificial Sequence: Synthetic oligonucleotide
gagcugaucugacugcgua

SEQ ID NO: 817029 - RNA, 19 nt, Artificial Sequence
  Description of Artificial Sequence: Synthetic oligonucleotide
cuugccggcuggcuugcag

SEQ ID NO: 817030 - RNA, 19 nt, Artificial Sequence
  Description of Artificial Sequence: Synthetic oligonucleotide
ggagagugcugacauuaac

SEQ ID NO: 817031 - RNA, 19 nt, Artificial Sequence
  Description of Artificial Sequence: Synthetic oligonucleotide
uagucagacuuggauguua

SEQ ID NO: 817032 - RNA, 19 nt, Artificial Sequence
  Description of Artificial Sequence: Synthetic oligonucleotide
gcugaucugacugcguagc

SEQ ID NO: 817033 - RNA, 19 nt, Artificial Sequence
  Description of Artificial Sequence: Synthetic oligonucleotide
ucgaggugaggaguucaca

SEQ ID NO: 817034 - RNA, 19 nt, Artificial Sequence
  Description of Artificial Sequence: Synthetic oligonucleotide
ggaucgaggaauccauguc

SEQ ID NO: 817035 - RNA, 19 nt, Artificial Sequence
  Description of Artificial Sequence: Synthetic oligonucleotide
ggaucgaguccagaggggc

SEQ ID NO: 817036 - RNA, 19 nt, Artificial Sequence
  Description of Artificial Sequence: Synthetic oligonucleotide
acucuccccuagaugcggc

SEQ ID NO: 817037 - RNA, 19 nt, Artificial Sequence
  Description of Artificial Sequence: Synthetic oligonucleotide
ugccgcuuugcaucaccca

SEQ ID NO: 817038 - RNA, 19 nt, Artificial Sequence
  Description of Artificial Sequence: Synthetic oligonucleotide
cugauccgacuccgcaagg

SEQ ID NO: 817039 - RNA, 19 nt, Artificial Sequence
  Description of Artificial Sequence: Synthetic oligonucleotide
uuggcugggaugccuccau

SEQ ID NO: 817040 - RNA, 19 nt, Artificial Sequence
  Description of Artificial Sequence: Synthetic oligonucleotide
ccggcaauccuuuggcugc

SEQ ID NO: 817041 - RNA, 19 nt, Artificial Sequence
  Description of Artificial Sequence: Synthetic oligonucleotide
cacucuccccuagaugcgg

SEQ ID NO: 817042 - RNA, 19 nt, Artificial Sequence
  Description of Artificial Sequence: Synthetic oligonucleotide
gcaaauggacgacaaaggu

SEQ ID NO: 817043 - RNA, 19 nt, Artificial Sequence
  Description of Artificial Sequence: Synthetic oligonucleotide
accagcgcgucugguuugc

SEQ ID NO: 817044 - RNA, 19 nt, Artificial Sequence
  Description of Artificial Sequence: Synthetic oligonucleotide
cuacaaagcuucgggcuuc

SEQ ID NO: 817045 - RNA, 19 nt, Artificial Sequence
  Description of Artificial Sequence: Synthetic oligonucleotide
cuccccuagaugcggcagc

SEQ ID NO: 817046 - RNA, 19 nt, Artificial Sequence
  Description of Artificial Sequence: Synthetic oligonucleotide
gugcuugagagggagcuga

SEQ ID NO: 817047 - RNA, 19 nt, Artificial Sequence
  Description of Artificial Sequence: Synthetic oligonucleotide
cacagcuggccuucauuuc

SEQ ID NO: 817048 - RNA, 19 nt, Artificial Sequence
  Description of Artificial Sequence: Synthetic oligonucleotide
ugacggccaugacuucggc

SEQ ID NO: 817049 - RNA, 19 nt, Artificial Sequence
  Description of Artificial Sequence: Synthetic oligonucleotide
cugggcaugacggccauga

SEQ ID NO: 817050 - RNA, 19 nt, Artificial Sequence
  Description of Artificial Sequence: Synthetic oligonucleotide
gcugauauucugcuugucu

SEQ ID NO: 817051 - RNA, 19 nt, Artificial Sequence
  Description of Artificial Sequence: Synthetic oligonucleotide
auguuaugcugggcaugac

SEQ ID NO: 817052 - RNA, 19 nt, Artificial Sequence
  Description of Artificial Sequence: Synthetic oligonucleotide
gacuccgcaagguuucggu

SEQ ID NO: 817053 - RNA, 19 nt, Artificial Sequence
  Description of Artificial Sequence: Synthetic oligonucleotide
gcucagaggacugguggcg

SEQ ID NO: 817054 - RNA, 19 nt, Artificial Sequence
  Description of Artificial Sequence: Synthetic oligonucleotide
ugcagagaacagguccaac

SEQ ID NO: 817055 - RNA, 19 nt, Artificial Sequence
  Description of Artificial Sequence: Synthetic oligonucleotide
uccccuagaugcggcagca

SEQ ID NO: 817056 - RNA, 19 nt, Artificial Sequence
  Description of Artificial Sequence: Synthetic oligonucleotide
agguuucggugcacucucc

SEQ ID NO: 817057 - RNA, 19 nt, Artificial Sequence
  Description of Artificial Sequence: Synthetic oligonucleotide
caaaggcaacagcccgugc

SEQ ID NO: 817058 - RNA, 19 nt, Artificial Sequence
  Description of Artificial Sequence: Synthetic oligonucleotide
cagguuguagaauauuguu

SEQ ID NO: 817059 - RNA, 19 nt, Artificial Sequence
  Description of Artificial Sequence: Synthetic oligonucleotide
auuugucccugggcaaucu

SEQ ID NO: 817060 - RNA, 19 nt, Artificial Sequence
  Description of Artificial Sequence: Synthetic oligonucleotide
ucugagcggaucccucguu

SEQ ID NO: 817061 - RNA, 19 nt, Artificial Sequence
  Description of Artificial Sequence: Synthetic oligonucleotide
aggguacccaauacaguga

SEQ ID NO: 817062 - RNA, 19 nt, Artificial Sequence
  Description of Artificial Sequence: Synthetic oligonucleotide
ugcguagcucuuguuccac

SEQ ID NO: 817063 - RNA, 19 nt, Artificial Sequence
  Description of Artificial Sequence: Synthetic oligonucleotide
aguucuagucagacuugga

SEQ ID NO: 817064 - RNA, 19 nt, Artificial Sequence
  Description of Artificial Sequence: Synthetic oligonucleotide
ccuuaugugcacuugggcu

SEQ ID NO: 817065 - RNA, 19 nt, Artificial Sequence
  Description of Artificial Sequence: Synthetic oligonucleotide
aggcuacuugaaauccaag

SEQ ID NO: 817066 - RNA, 19 nt, Artificial Sequence
  Description of Artificial Sequence: Synthetic oligonucleotide
ggcaaacacacagcuggcc

SEQ ID NO: 817067 - RNA, 19 nt, Artificial Sequence
  Description of Artificial Sequence: Synthetic oligonucleotide
cauguccggcaauccuuug

SEQ ID NO: 817068 - RNA, 19 nt, Artificial Sequence
  Description of Artificial Sequence: Synthetic oligonucleotide
cauggcggagagugcugac

SEQ ID NO: 817069 - RNA, 19 nt, Artificial Sequence
  Description of Artificial Sequence: Synthetic oligonucleotide
uggcggcacuguauguuau

SEQ ID NO: 817070 - RNA, 19 nt, Artificial Sequence
  Description of Artificial Sequence: Synthetic oligonucleotide
gcuuagcugguuguuagga

SEQ ID NO: 817071 - RNA, 19 nt, Artificial Sequence
  Description of Artificial Sequence: Synthetic oligonucleotide
uagugcacuucuguuucuu

SEQ ID NO: 817072 - RNA, 19 nt, Artificial Sequence
  Description of Artificial Sequence: Synthetic oligonucleotide
cucgguguccuucucauuu

SEQ ID NO: 817073 - RNA, 19 nt, Artificial Sequence
  Description of Artificial Sequence: Synthetic oligonucleotide
ugggcaugacggccaugac

SEQ ID NO: 817074 - RNA, 19 nt, Artificial Sequence
  Description of Artificial Sequence: Synthetic oligonucleotide
agacgaggaaggaaugcuu

SEQ ID NO: 817075 - RNA, 19 nt, Artificial Sequence
  Description of Artificial Sequence: Synthetic oligonucleotide
gcggcacuguauguuaugc

SEQ ID NO: 817076 - RNA, 19 nt, Artificial Sequence
  Description of Artificial Sequence: Synthetic oligonucleotide
ggugaggaguucacaacuc

SEQ ID NO: 817077 - RNA, 19 nt, Artificial Sequence
  Description of Artificial Sequence: Synthetic oligonucleotide
cugcguagcucuuguucca

SEQ ID NO: 817078 - RNA, 19 nt, Artificial Sequence
  Description of Artificial Sequence: Synthetic oligonucleotide
cccacaagaucauuguuua

SEQ ID NO: 817079 - RNA, 19 nt, Artificial Sequence
  Description of Artificial Sequence: Synthetic oligonucleotide
aucccucguucugugcuug

SEQ ID NO: 817080 - RNA, 19 nt, Artificial Sequence
  Description of Artificial Sequence: Synthetic oligonucleotide
guuguagaauauuguuguu

SEQ ID NO: 817081 - RNA, 19 nt, Artificial Sequence
  Description of Artificial Sequence: Synthetic oligonucleotide
cagguguugcgucuugucu

SEQ ID NO: 817082 - RNA, 19 nt, Artificial Sequence
  Description of Artificial Sequence: Synthetic oligonucleotide
aauggacgacaaaggucua

SEQ ID NO: 817083 - RNA, 19 nt, Artificial Sequence
  Description of Artificial Sequence: Synthetic oligonucleotide
gucccacaaaacacaauua

SEQ ID NO: 817084 - RNA, 19 nt, Artificial Sequence
  Description of Artificial Sequence: Synthetic oligonucleotide
cagagaacagguccaacuu

SEQ ID NO: 817085 - RNA, 19 nt, Artificial Sequence
  Description of Artificial Sequence: Synthetic oligonucleotide
gauccgacuccgcaagguu

SEQ ID NO: 817086 - RNA, 19 nt, Artificial Sequence
  Description of Artificial Sequence: Synthetic oligonucleotide
ggcggcacuguauguuaug

SEQ ID NO: 817087 - RNA, 19 nt, Artificial Sequence
  Description of Artificial Sequence: Synthetic oligonucleotide
ggaucccucguucugugcu

SEQ ID NO: 817088 - RNA, 19 nt, Artificial Sequence
  Description of Artificial Sequence: Synthetic oligonucleotide
gacggccaugacuucggcu

SEQ ID NO: 817089 - RNA, 19 nt, Artificial Sequence
  Description of Artificial Sequence: Synthetic oligonucleotide
auccgacuccgcaagguuu

SEQ ID NO: 817090 - RNA, 19 nt, Artificial Sequence
  Description of Artificial Sequence: Synthetic oligonucleotide
cuagcucucugauccgacu

SEQ ID NO: 817091 - RNA, 19 nt, Artificial Sequence
  Description of Artificial Sequence: Synthetic oligonucleotide
gcaagguuucggugcacuc

SEQ ID NO: 817092 - RNA, 19 nt, Artificial Sequence
  Description of Artificial Sequence: Synthetic oligonucleotide
uaaccgcaucuuguagcuc

SEQ ID NO: 817093 - RNA, 19 nt, Artificial Sequence
  Description of Artificial Sequence: Synthetic oligonucleotide
cuuaccagcgcgucugguu

SEQ ID NO: 817094 - RNA, 19 nt, Artificial Sequence
  Description of Artificial Sequence: Synthetic oligonucleotide
gguuugcuuagcugguugu

SEQ ID NO: 817095 - RNA, 19 nt, Artificial Sequence
  Description of Artificial Sequence: Synthetic oligonucleotide
ggcuucuagcucucugauc

SEQ ID NO: 817096 - RNA, 19 nt, Artificial Sequence
  Description of Artificial Sequence: Synthetic oligonucleotide
gguacccaauacagugagc

SEQ ID NO: 817097 - RNA, 19 nt, Artificial Sequence
  Description of Artificial Sequence: Synthetic oligonucleotide
caaacacacagcuggccuu

SEQ ID NO: 817098 - RNA, 19 nt, Artificial Sequence
  Description of Artificial Sequence: Synthetic oligonucleotide
gaucgaguccagaggggcu

SEQ ID NO: 817099 - RNA, 19 nt, Artificial Sequence
  Description of Artificial Sequence: Synthetic oligonucleotide
gugcacuugggcucuugcu

SEQ ID NO: 817100 - RNA, 19 nt, Artificial Sequence
  Description of Artificial Sequence: Synthetic oligonucleotide
aggcaaaauuaggcuacuu

SEQ ID NO: 817101 - RNA, 19 nt, Artificial Sequence
  Description of Artificial Sequence: Synthetic oligonucleotide
cucuugcuagugcacuucu

SEQ ID NO: 817102 - RNA, 19 nt, Artificial Sequence
  Description of Artificial Sequence: Synthetic oligonucleotide
caccucgguguccuucuca

SEQ ID NO: 817103 - RNA, 19 nt, Artificial Sequence
  Description of Artificial Sequence: Synthetic oligonucleotide
gcggagagugcugacauua

SEQ ID NO: 817104 - RNA, 19 nt, Artificial Sequence
  Description of Artificial Sequence: Synthetic oligonucleotide
cucuccccuagaugcggca

SEQ ID NO: 817105 - RNA, 19 nt, Artificial Sequence
  Description of Artificial Sequence: Synthetic oligonucleotide
agggccuguugaagaagcu

SEQ ID NO: 817106 - RNA, 19 nt, Artificial Sequence
  Description of Artificial Sequence: Synthetic oligonucleotide
ccagagacgcugcuuuuca

SEQ ID NO: 817107 - RNA, 19 nt, Artificial Sequence
  Description of Artificial Sequence: Synthetic oligonucleotide
guguugcgucuugucuugc

SEQ ID NO: 817108 - RNA, 19 nt, Artificial Sequence
  Description of Artificial Sequence: Synthetic oligonucleotide
gcggaucccucguucugug

SEQ ID NO: 817109 - RNA, 19 nt, Artificial Sequence
  Description of Artificial Sequence: Synthetic oligonucleotide
augggcaguucuagucaga

SEQ ID NO: 817110 - RNA, 19 nt, Artificial Sequence
  Description of Artificial Sequence: Synthetic oligonucleotide
gaacaacugaugggcaguu

SEQ ID NO: 817111 - RNA, 19 nt, Artificial Sequence
  Description of Artificial Sequence: Synthetic oligonucleotide
cgucugguuugcuuagcug

SEQ ID NO: 817112 - RNA, 19 nt, Artificial Sequence
  Description of Artificial Sequence: Synthetic oligonucleotide
gcgcgucugguuugcuuag

SEQ ID NO: 817113 - RNA, 19 nt, Artificial Sequence
  Description of Artificial Sequence: Synthetic oligonucleotide
gaucccucguucugugcuu

SEQ ID NO: 817114 - RNA, 19 nt, Artificial Sequence
  Description of Artificial Sequence: Synthetic oligonucleotide
gacuucgaggugaggaguu

SEQ ID NO: 817115 - RNA, 19 nt, Artificial Sequence
  Description of Artificial Sequence: Synthetic oligonucleotide
gccuuaccagcgcgucugg

SEQ ID NO: 817116 - RNA, 19 nt, Artificial Sequence
  Description of Artificial Sequence: Synthetic oligonucleotide
gggcugauagacagaggca

SEQ ID NO: 817117 - RNA, 19 nt, Artificial Sequence
  Description of Artificial Sequence: Synthetic oligonucleotide
cuagugcacuucuguuucu

SEQ ID NO: 817118 - RNA, 19 nt, Artificial Sequence
  Description of Artificial Sequence: Synthetic oligonucleotide
cagcugccgcuuugcauca

SEQ ID NO: 817119 - RNA, 19 nt, Artificial Sequence
  Description of Artificial Sequence: Synthetic oligonucleotide
agcugccgcuuugcaucac

SEQ ID NO: 817120 - RNA, 19 nt, Artificial Sequence
  Description of Artificial Sequence: Synthetic oligonucleotide
cugaucugacugcguagcu

SEQ ID NO: 817121 - RNA, 19 nt, Artificial Sequence
  Description of Artificial Sequence: Synthetic oligonucleotide
cagaggacugguggcggca

SEQ ID NO: 817122 - RNA, 19 nt, Artificial Sequence
  Description of Artificial Sequence: Synthetic oligonucleotide
cccuagaugcggcagcaaa

SEQ ID NO: 817123 - RNA, 19 nt, Artificial Sequence
  Description of Artificial Sequence: Synthetic oligonucleotide
ccucguucugugcuugaga

SEQ ID NO: 817124 - RNA, 19 nt, Artificial Sequence
  Description of Artificial Sequence: Synthetic oligonucleotide
ccggcuggcuugcagguca

SEQ ID NO: 817125 - RNA, 19 nt, Artificial Sequence
  Description of Artificial Sequence: Synthetic oligonucleotide
cucugcgcugaggcuguuc

SEQ ID NO: 817126 - RNA, 19 nt, Artificial Sequence
  Description of Artificial Sequence: Synthetic oligonucleotide
guccggcaauccuuuggcu

SEQ ID NO: 817127 - RNA, 19 nt, Artificial Sequence
  Description of Artificial Sequence: Synthetic oligonucleotide
gcauggcggagagugcuga

SEQ ID NO: 817128 - RNA, 19 nt, Artificial Sequence
  Description of Artificial Sequence: Synthetic oligonucleotide
ggacgacaaaggucuacau

SEQ ID NO: 817129 - RNA, 19 nt, Artificial Sequence
  Description of Artificial Sequence: Synthetic oligonucleotide
ccagccuuaccagcgcguc

SEQ ID NO: 817130 - RNA, 19 nt, Artificial Sequence
  Description of Artificial Sequence: Synthetic oligonucleotide
gcgucugguuugcuuagcu

SEQ ID NO: 817131 - RNA, 19 nt, Artificial Sequence
  Description of Artificial Sequence: Synthetic oligonucleotide
cuucggcuaucuucuguuu

SEQ ID NO: 817132 - RNA, 19 nt, Artificial Sequence
  Description of Artificial Sequence: Synthetic oligonucleotide
uggcagcguuguggaaagu

SEQ ID NO: 817133 - RNA, 19 nt, Artificial Sequence
  Description of Artificial Sequence: Synthetic oligonucleotide
cccucguucugugcuugag

SEQ ID NO: 817134 - RNA, 19 nt, Artificial Sequence
  Description of Artificial Sequence: Synthetic oligonucleotide
cuugaccaccagagacgcu

SEQ ID NO: 817135 - RNA, 19 nt, Artificial Sequence
  Description of Artificial Sequence: Synthetic oligonucleotide
cguaacuuuugaagccaaa

SEQ ID NO: 817136 - RNA, 19 nt, Artificial Sequence
  Description of Artificial Sequence: Synthetic oligonucleotide
ggcagcguuguggaaaguu

SEQ ID NO: 817137 - RNA, 19 nt, Artificial Sequence
  Description of Artificial Sequence: Synthetic oligonucleotide
ccgacuccgcaagguuucg

SEQ ID NO: 817138 - RNA, 19 nt, Artificial Sequence
  Description of Artificial Sequence: Synthetic oligonucleotide
gcagcguuguggaaaguuu

SEQ ID NO: 817139 - RNA, 19 nt, Artificial Sequence
  Description of Artificial Sequence: Synthetic oligonucleotide
ggaauccauguccggcaau

SEQ ID NO: 817140 - RNA, 19 nt, Artificial Sequence
  Description of Artificial Sequence: Synthetic oligonucleotide
cggaucccucguucugugc

SEQ ID NO: 817141 - RNA, 19 nt, Artificial Sequence
  Description of Artificial Sequence: Synthetic oligonucleotide
cagccuuaccagcgcgucu

SEQ ID NO: 817142 - RNA, 19 nt, Artificial Sequence
  Description of Artificial Sequence: Synthetic oligonucleotide
cgcaucuuguagcucacgu

SEQ ID NO: 817143 - RNA, 19 nt, Artificial Sequence
  Description of Artificial Sequence: Synthetic oligonucleotide
gcugcauguaaaacucguu

SEQ ID NO: 817144 - RNA, 19 nt, Artificial Sequence
  Description of Artificial Sequence: Synthetic oligonucleotide
acuugccggcuggcuugca

SEQ ID NO: 817145 - RNA, 19 nt, Artificial Sequence
  Description of Artificial Sequence: Synthetic oligonucleotide
ccuugauuuccugaucuuu

SEQ ID NO: 817146 - RNA, 19 nt, Artificial Sequence
  Description of Artificial Sequence: Synthetic oligonucleotide
cuagucagacuuggauguu

SEQ ID NO: 817147 - RNA, 19 nt, Artificial Sequence
  Description of Artificial Sequence: Synthetic oligonucleotide
cgacuccgcaagguuucgg

SEQ ID NO: 817148 - RNA, 19 nt, Artificial Sequence
  Description of Artificial Sequence: Synthetic oligonucleotide
cugguuugcuuagcugguu

SEQ ID NO: 817149 - RNA, 19 nt, Artificial Sequence
  Description of Artificial Sequence: Synthetic oligonucleotide
cagcgcgucugguuugcuu

SEQ ID NO: 817150 - RNA, 19 nt, Artificial Sequence
  Description of Artificial Sequence: Synthetic oligonucleotide
gcugggcaugacggccaug

SEQ ID NO: 817151 - RNA, 19 nt, Artificial Sequence
  Description of Artificial Sequence: Synthetic oligonucleotide
cggagagugcugacauuaa

SEQ ID NO: 817152 - RNA, 19 nt, Artificial Sequence
  Description of Artificial Sequence: Synthetic oligonucleotide
cgcgucugguuugcuuagc

SEQ ID NO: 817153 - RNA, 19 nt, Artificial Sequence
  Description of Artificial Sequence: Synthetic oligonucleotide
cccgugcagcaguggcuuc

SEQ ID NO: 817154 - RNA, 19 nt, Artificial Sequence
  Description of Artificial Sequence: Synthetic oligonucleotide
cggcacuguauguuaugcu

SEQ ID NO: 817155 - RNA, 19 nt, Artificial Sequence
  Description of Artificial Sequence: Synthetic oligonucleotide
ccgcaagguuucggugcac

SEQ ID NO: 817156 - RNA, 19 nt, Artificial Sequence
  Description of Artificial Sequence: Synthetic oligonucleotide
cgcaagguuucggugcacu

SEQ ID NO: 817157 - RNA, 19 nt, Artificial Sequence
  Description of Artificial Sequence: Synthetic oligonucleotide
ccgugcagcaguggcuucu

SEQ ID NO: 817158 - RNA, 19 nt, Artificial Sequence
  Description of Artificial Sequence: Synthetic oligonucleotide
ggcccauuucugagcggau

SEQ ID NO: 817159 - RNA, 19 nt, Artificial Sequence
  Description of Artificial Sequence: Synthetic oligonucleotide
cggcuucuagcucucugau

SEQ ID NO: 817160 - RNA, 19 nt, Artificial Sequence
  Description of Artificial Sequence: Synthetic oligonucleotide
ccuuaccagcgcgucuggu

SEQ ID NO: 817161 - RNA, 19 nt, Artificial Sequence
  Description of Artificial Sequence: Synthetic oligonucleotide
ccaugacuucggcuaucuu

SEQ ID NO: 817162 - RNA, 19 nt, Artificial Sequence
  Description of Artificial Sequence: Synthetic oligonucleotide
ccagcgcgucugguuugcu

SEQ ID NO: 817163 - RNA, 19 nt, Artificial Sequence
  Description of Artificial Sequence: Synthetic oligonucleotide
aagacuauuucccagcuuc

SEQ ID NO: 817164 - RNA, 19 nt, Artificial Sequence
  Description of Artificial Sequence: Synthetic oligonucleotide
aauauugaugauuugugug

SEQ ID NO: 817165 - RNA, 19 nt, Artificial Sequence
  Description of Artificial Sequence: Synthetic oligonucleotide
uuuacaaguaauaacauuu

SEQ ID NO: 817166 - RNA, 19 nt, Artificial Sequence
  Description of Artificial Sequence: Synthetic oligonucleotide
aaagauccaucccuggccc

SEQ ID NO: 817167 - RNA, 19 nt, Artificial Sequence
  Description of Artificial Sequence: Synthetic oligonucleotide
uuagaaaagauccaucccu

SEQ ID NO: 817168 - RNA, 19 nt, Artificial Sequence
  Description of Artificial Sequence: Synthetic oligonucleotide
caagauagggagaagaccc

SEQ ID NO: 817169 - RNA, 19 nt, Artificial Sequence
  Description of Artificial Sequence: Synthetic oligonucleotide
guuccaaucauccagcugc

SEQ ID NO: 817170 - RNA, 19 nt, Artificial Sequence
  Description of Artificial Sequence: Synthetic oligonucleotide
aaugcgguuccaaucaucc

SEQ ID NO: 817171 - RNA, 19 nt, Artificial Sequence
  Description of Artificial Sequence: Synthetic oligonucleotide
acugguaccuuucaggcac

SEQ ID NO: 817172 - RNA, 19 nt, Artificial Sequence
  Description of Artificial Sequence: Synthetic oligonucleotide
uguuuaagaacaacuggag

SEQ ID NO: 817173 - RNA, 19 nt, Artificial Sequence
  Description of Artificial Sequence: Synthetic oligonucleotide
agggauucuacuuuguggg

SEQ ID NO: 817174 - RNA, 19 nt, Artificial Sequence
  Description of Artificial Sequence: Synthetic oligonucleotide
aaauagacuuuauuuacaa

SEQ ID NO: 817175 - RNA, 19 nt, Artificial Sequence
  Description of Artificial Sequence: Synthetic oligonucleotide
aauagacuuuauuuacaag

SEQ ID NO: 817176 - RNA, 19 nt, Artificial Sequence
  Description of Artificial Sequence: Synthetic oligonucleotide
uacaaguaauaacauuuag

SEQ ID NO: 817177 - RNA, 19 nt, Artificial Sequence
  Description of Artificial Sequence: Synthetic oligonucleotide
auaguucuauaucccaccc

SEQ ID NO: 817178 - RNA, 19 nt, Artificial Sequence
  Description of Artificial Sequence: Synthetic oligonucleotide
ugauuugugugguacgccg

SEQ ID NO: 817179 - RNA, 19 nt, Artificial Sequence
  Description of Artificial Sequence: Synthetic oligonucleotide
gacaaggucaguucugagg

SEQ ID NO: 817180 - RNA, 19 nt, Artificial Sequence
  Description of Artificial Sequence: Synthetic oligonucleotide
agugaugguugccagacuc

SEQ ID NO: 817181 - RNA, 19 nt, Artificial Sequence
  Description of Artificial Sequence: Synthetic oligonucleotide
agcgauuuggguuggcugc

SEQ ID NO: 817182 - RNA, 19 nt, Artificial Sequence
  Description of Artificial Sequence: Synthetic oligonucleotide
guucugaggacacagguag

SEQ ID NO: 817183 - RNA, 19 nt, Artificial Sequence
  Description of Artificial Sequence: Synthetic oligonucleotide
auuuggguuggcugcaugc

SEQ ID NO: 817184 - RNA, 19 nt, Artificial Sequence
  Description of Artificial Sequence: Synthetic oligonucleotide
agacgcaggacccaucugc

SEQ ID NO: 817185 - RNA, 19 nt, Artificial Sequence
  Description of Artificial Sequence: Synthetic oligonucleotide
gaugcugaaagccauugac

SEQ ID NO: 817186 - RNA, 19 nt, Artificial Sequence
  Description of Artificial Sequence: Synthetic oligonucleotide
gaaguagaggcucuccagg

SEQ ID NO: 817187 - RNA, 19 nt, Artificial Sequence
  Description of Artificial Sequence: Synthetic oligonucleotide
gacucuuuaaugcuuugcc

SEQ ID NO: 817188 - RNA, 19 nt, Artificial Sequence
  Description of Artificial Sequence: Synthetic oligonucleotide
aguucuauaucccacccca

SEQ ID NO: 817189 - RNA, 19 nt, Artificial Sequence
  Description of Artificial Sequence: Synthetic oligonucleotide
ugugugcuauagaaggacg

SEQ ID NO: 817190 - RNA, 19 nt, Artificial Sequence
  Description of Artificial Sequence: Synthetic oligonucleotide
auguucagcugccuguucc

SEQ ID NO: 817191 - RNA, 19 nt, Artificial Sequence
  Description of Artificial Sequence: Synthetic oligonucleotide
uggcaauucguggagaacg

SEQ ID NO: 817192 - RNA, 19 nt, Artificial Sequence
  Description of Artificial Sequence: Synthetic oligonucleotide
agacaaacaucacugucuc

SEQ ID NO: 817193 - RNA, 19 nt, Artificial Sequence
  Description of Artificial Sequence: Synthetic oligonucleotide
ucuauaucccaccccagug

SEQ ID NO: 817194 - RNA, 19 nt, Artificial Sequence
  Description of Artificial Sequence: Synthetic oligonucleotide
cuaaguagagcugaguuac

SEQ ID NO: 817195 - RNA, 19 nt, Artificial Sequence
  Description of Artificial Sequence: Synthetic oligonucleotide
ucggcguaaaguuuccugg

SEQ ID NO: 817196 - RNA, 19 nt, Artificial Sequence
  Description of Artificial Sequence: Synthetic oligonucleotide
ugcaaugcgguuccaauca

SEQ ID NO: 817197 - RNA, 19 nt, Artificial Sequence
  Description of Artificial Sequence: Synthetic oligonucleotide
uugcuagugacacugcaug

SEQ ID NO: 817198 - RNA, 19 nt, Artificial Sequence
  Description of Artificial Sequence: Synthetic oligonucleotide
aucaggagagcccaagcgg

SEQ ID NO: 817199 - RNA, 19 nt, Artificial Sequence
  Description of Artificial Sequence: Synthetic oligonucleotide
uacuuuguggggcaggcgc

SEQ ID NO: 817200 - RNA, 19 nt, Artificial Sequence
  Description of Artificial Sequence: Synthetic oligonucleotide
gaaaagauccaucccuggc

SEQ ID NO: 817201 - RNA, 19 nt, Artificial Sequence
  Description of Artificial Sequence: Synthetic oligonucleotide
agagcuucgagugguaggc

SEQ ID NO: 817202 - RNA, 19 nt, Artificial Sequence
  Description of Artificial Sequence: Synthetic oligonucleotide
guaauauugaugauuugug

SEQ ID NO: 817203 - RNA, 19 nt, Artificial Sequence
  Description of Artificial Sequence: Synthetic oligonucleotide
guuuaagaacaacuggagc

SEQ ID NO: 817204 - RNA, 19 nt, Artificial Sequence
  Description of Artificial Sequence: Synthetic oligonucleotide
uacgccggcgagcagagcg

SEQ ID NO: 817205 - RNA, 19 nt, Artificial Sequence
  Description of Artificial Sequence: Synthetic oligonucleotide
auuugugugguacgccggc

SEQ ID NO: 817206 - RNA, 19 nt, Artificial Sequence
  Description of Artificial Sequence: Synthetic oligonucleotide
aauucguggagaacggcgg

SEQ ID NO: 817207 - RNA, 19 nt, Artificial Sequence
  Description of Artificial Sequence: Synthetic oligonucleotide
caauucguggagaacggcg

SEQ ID NO: 817208 - RNA, 19 nt, Artificial Sequence
  Description of Artificial Sequence: Synthetic oligonucleotide
agcagagcgggucuuacgg

SEQ ID NO: 817209 - RNA, 19 nt, Artificial Sequence
  Description of Artificial Sequence: Synthetic oligonucleotide
uuaagaacaacuggagcug

SEQ ID NO: 817210 - RNA, 19 nt, Artificial Sequence
  Description of Artificial Sequence: Synthetic oligonucleotide
ucacugguaccuuucaggc

SEQ ID NO: 817211 - RNA, 19 nt, Artificial Sequence
  Description of Artificial Sequence: Synthetic oligonucleotide
uagaagacuauuucccagc

SEQ ID NO: 817212 - RNA, 19 nt, Artificial Sequence
  Description of Artificial Sequence: Synthetic oligonucleotide
cuuggucaugguaauauug

SEQ ID NO: 817213 - RNA, 19 nt, Artificial Sequence
  Description of Artificial Sequence: Synthetic oligonucleotide
cuuacggccagagucaggg

SEQ ID NO: 817214 - RNA, 19 nt, Artificial Sequence
  Description of Artificial Sequence: Synthetic oligonucleotide
cuguuuaagaacaacugga

SEQ ID NO: 817215 - RNA, 19 nt, Artificial Sequence
  Description of Artificial Sequence: Synthetic oligonucleotide
agauccaggcugucaauac

SEQ ID NO: 817216 - RNA, 19 nt, Artificial Sequence
  Description of Artificial Sequence: Synthetic oligonucleotide
uauaucccaccccagugca

SEQ ID NO: 817217 - RNA, 19 nt, Artificial Sequence
  Description of Artificial Sequence: Synthetic oligonucleotide
ucucaaacuggccugggaa

SEQ ID NO: 817218 - RNA, 19 nt, Artificial Sequence
  Description of Artificial Sequence: Synthetic oligonucleotide
uuacaaguaauaacauuua

SEQ ID NO: 817219 - RNA, 19 nt, Artificial Sequence
  Description of Artificial Sequence: Synthetic oligonucleotide
acaaguaauaacauuuaga

SEQ ID NO: 817220 - RNA, 19 nt, Artificial Sequence
  Description of Artificial Sequence: Synthetic oligonucleotide
uagagcugaguuaccauca

SEQ ID NO: 817221 - RNA, 19 nt, Artificial Sequence
  Description of Artificial Sequence: Synthetic oligonucleotide
ugguguugacucuuuaaug

SEQ ID NO: 817222 - RNA, 19 nt, Artificial Sequence
  Description of Artificial Sequence: Synthetic oligonucleotide
gacgaguuggcacugucug

SEQ ID NO: 817223 - RNA, 19 nt, Artificial Sequence
  Description of Artificial Sequence: Synthetic oligonucleotide
auuuacaaguaauaacauu

SEQ ID NO: 817224 - RNA, 19 nt, Artificial Sequence
  Description of Artificial Sequence: Synthetic oligonucleotide
gcuuguaauguucagcugc

SEQ ID NO: 817225 - RNA, 19 nt, Artificial Sequence
  Description of Artificial Sequence: Synthetic oligonucleotide
ucuuugaaccuccucuccu

SEQ ID NO: 817226 - RNA, 19 nt, Artificial Sequence
  Description of Artificial Sequence: Synthetic oligonucleotide
ugcaacucugcaaugcggu

SEQ ID NO: 817227 - RNA, 19 nt, Artificial Sequence
  Description of Artificial Sequence: Synthetic oligonucleotide
ccuuagaagacuauuuccc

SEQ ID NO: 817228 - RNA, 19 nt, Artificial Sequence
  Description of Artificial Sequence: Synthetic oligonucleotide
ugcuagugacacugcaugg

SEQ ID NO: 817229 - RNA, 19 nt, Artificial Sequence
  Description of Artificial Sequence: Synthetic oligonucleotide
uguagcuuguaauguucag

SEQ ID NO: 817230 - RNA, 19 nt, Artificial Sequence
  Description of Artificial Sequence: Synthetic oligonucleotide
caucaggagagcccaagcg

SEQ ID NO: 817231 - RNA, 19 nt, Artificial Sequence
  Description of Artificial Sequence: Synthetic oligonucleotide
ugugcuauagaaggacgag

SEQ ID NO: 817232 - RNA, 19 nt, Artificial Sequence
  Description of Artificial Sequence: Synthetic oligonucleotide
cuauaucccaccccagugc

SEQ ID NO: 817233 - RNA, 19 nt, Artificial Sequence
  Description of Artificial Sequence: Synthetic oligonucleotide
uucuauaucccaccccagu

SEQ ID NO: 817234 - RNA, 19 nt, Artificial Sequence
  Description of Artificial Sequence: Synthetic oligonucleotide
acucuuuaaugcuuugccu

SEQ ID NO: 817235 - RNA, 19 nt, Artificial Sequence
  Description of Artificial Sequence: Synthetic oligonucleotide
aagcuguuccuuccuuggg

SEQ ID NO: 817236 - RNA, 19 nt, Artificial Sequence
  Description of Artificial Sequence: Synthetic oligonucleotide
ugggcuacagcagugcugc

SEQ ID NO: 817237 - RNA, 19 nt, Artificial Sequence
  Description of Artificial Sequence: Synthetic oligonucleotide
auaccuggaucuucacugg

SEQ ID NO: 817238 - RNA, 19 nt, Artificial Sequence
  Description of Artificial Sequence: Synthetic oligonucleotide
uacuguccaagcuccaagc

SEQ ID NO: 817239 - RNA, 19 nt, Artificial Sequence
  Description of Artificial Sequence: Synthetic oligonucleotide
uuggcugcaugcuggcucg

SEQ ID NO: 817240 - RNA, 19 nt, Artificial Sequence
  Description of Artificial Sequence: Synthetic oligonucleotide
cuuccguccuucaugccgg

SEQ ID NO: 817241 - RNA, 19 nt, Artificial Sequence
  Description of Artificial Sequence: Synthetic oligonucleotide
agcuucgagugguaggccg

SEQ ID NO: 817242 - RNA, 19 nt, Artificial Sequence
  Description of Artificial Sequence: Synthetic oligonucleotide
ugagacgcaggacccaucu

SEQ ID NO: 817243 - RNA, 19 nt, Artificial Sequence
  Description of Artificial Sequence: Synthetic oligonucleotide
ugggguacccucuuccaag

SEQ ID NO: 817244 - RNA, 19 nt, Artificial Sequence
  Description of Artificial Sequence: Synthetic oligonucleotide
uccgguuuucaucuccuca

SEQ ID NO: 817245 - RNA, 19 nt, Artificial Sequence
  Description of Artificial Sequence: Synthetic oligonucleotide
uaguucuauaucccacccc

SEQ ID NO: 817246 - RNA, 19 nt, Artificial Sequence
  Description of Artificial Sequence: Synthetic oligonucleotide
cuuucaggcaccagacaag

SEQ ID NO: 817247 - RNA, 19 nt, Artificial Sequence
  Description of Artificial Sequence: Synthetic oligonucleotide
ucagguguggaggacacac

SEQ ID NO: 817248 - RNA, 19 nt, Artificial Sequence
  Description of Artificial Sequence: Synthetic oligonucleotide
gaggacacacucuguugcg

SEQ ID NO: 817249 - RNA, 19 nt, Artificial Sequence
  Description of Artificial Sequence: Synthetic oligonucleotide
gauucuacuuuguggggca

SEQ ID NO: 817250 - RNA, 19 nt, Artificial Sequence
  Description of Artificial Sequence: Synthetic oligonucleotide
cugccauuaaggcugcccc

SEQ ID NO: 817251 - RNA, 19 nt, Artificial Sequence
  Description of Artificial Sequence: Synthetic oligonucleotide
ucgagugguaggccgguag

SEQ ID NO: 817252 - RNA, 19 nt, Artificial Sequence
  Description of Artificial Sequence: Synthetic oligonucleotide
guagcuuguaauguucagc

SEQ ID NO: 817253 - RNA, 19 nt, Artificial Sequence
  Description of Artificial Sequence: Synthetic oligonucleotide
gauuugugugguacgccgg

SEQ ID NO: 817254 - RNA, 19 nt, Artificial Sequence
  Description of Artificial Sequence: Synthetic oligonucleotide
uuaggugaagugugagcug

SEQ ID NO: 817255 - RNA, 19 nt, Artificial Sequence
  Description of Artificial Sequence: Synthetic oligonucleotide
uguguuaaggaugcugaaa

SEQ ID NO: 817256 - RNA, 19 nt, Artificial Sequence
  Description of Artificial Sequence: Synthetic oligonucleotide
ugaugguugccagacucag

SEQ ID NO: 817257 - RNA, 19 nt, Artificial Sequence
  Description of Artificial Sequence: Synthetic oligonucleotide
auucguggagaacggcggg

SEQ ID NO: 817258 - RNA, 19 nt, Artificial Sequence
  Description of Artificial Sequence: Synthetic oligonucleotide
guaccuuucaggcaccaga

SEQ ID NO: 817259 - RNA, 19 nt, Artificial Sequence
  Description of Artificial Sequence: Synthetic oligonucleotide
ugacucuuuaaugcuuugc

SEQ ID NO: 817260 - RNA, 19 nt, Artificial Sequence
  Description of Artificial Sequence: Synthetic oligonucleotide
uaucccaccccagugcaag

SEQ ID NO: 817261 - RNA, 19 nt, Artificial Sequence
  Description of Artificial Sequence: Synthetic oligonucleotide
uuggggagcaccacuggac

SEQ ID NO: 817262 - RNA, 19 nt, Artificial Sequence
  Description of Artificial Sequence: Synthetic oligonucleotide
uaagaacaacuggagcugc

SEQ ID NO: 817263 - RNA, 19 nt, Artificial Sequence
  Description of Artificial Sequence: Synthetic oligonucleotide
ugugugguacgccggcgag

SEQ ID NO: 817264 - RNA, 19 nt, Artificial Sequence
  Description of Artificial Sequence: Synthetic oligonucleotide
aucaguugccaccuggaau

SEQ ID NO: 817265 - RNA, 19 nt, Artificial Sequence
  Description of Artificial Sequence: Synthetic oligonucleotide
cucauccuggcaaguaccc

SEQ ID NO: 817266 - RNA, 19 nt, Artificial Sequence
  Description of Artificial Sequence: Synthetic oligonucleotide
acccauauagaagcuguuc

SEQ ID NO: 817267 - RNA, 19 nt, Artificial Sequence
  Description of Artificial Sequence: Synthetic oligonucleotide
ggaggacacacucuguugc

SEQ ID NO: 817268 - RNA, 19 nt, Artificial Sequence
  Description of Artificial Sequence: Synthetic oligonucleotide
cagagcuucgagugguagg

SEQ ID NO: 817269 - RNA, 19 nt, Artificial Sequence
  Description of Artificial Sequence: Synthetic oligonucleotide
ucaugccggucucugggag

SEQ ID NO: 817270 - RNA, 19 nt, Artificial Sequence
  Description of Artificial Sequence: Synthetic oligonucleotide
cccauauagaagcuguucc

SEQ ID NO: 817271 - RNA, 19 nt, Artificial Sequence
  Description of Artificial Sequence: Synthetic oligonucleotide
gaccccauacuguccaagc

SEQ ID NO: 817272 - RNA, 19 nt, Artificial Sequence
  Description of Artificial Sequence: Synthetic oligonucleotide
auugacugucgccgguccg

SEQ ID NO: 817273 - RNA, 19 nt, Artificial Sequence
  Description of Artificial Sequence: Synthetic oligonucleotide
aggcucacggcucuuuaag

SEQ ID NO: 817274 - RNA, 19 nt, Artificial Sequence
  Description of Artificial Sequence: Synthetic oligonucleotide
cugcaacucugcaaugcgg

SEQ ID NO: 817275 - RNA, 19 nt, Artificial Sequence
  Description of Artificial Sequence: Synthetic oligonucleotide
agggagaagaccccauacu

SEQ ID NO: 817276 - RNA, 19 nt, Artificial Sequence
  Description of Artificial Sequence: Synthetic oligonucleotide
ugugguacgccggcgagca

SEQ ID NO: 817277 - RNA, 19 nt, Artificial Sequence
  Description of Artificial Sequence: Synthetic oligonucleotide
gggucuuacggccagaguc

SEQ ID NO: 817278 - RNA, 19 nt, Artificial Sequence
  Description of Artificial Sequence: Synthetic oligonucleotide
aaccugcgccuccaggcuc

SEQ ID NO: 817279 - RNA, 19 nt, Artificial Sequence
  Description of Artificial Sequence: Synthetic oligonucleotide
gcuuccguccuucaugccg

SEQ ID NO: 817280 - RNA, 19 nt, Artificial Sequence
  Description of Artificial Sequence: Synthetic oligonucleotide
uuugugugguacgccggcg

SEQ ID NO: 817281 - RNA, 19 nt, Artificial Sequence
  Description of Artificial Sequence: Synthetic oligonucleotide
gacccguuugcgcugcugc

SEQ ID NO: 817282 - RNA, 19 nt, Artificial Sequence
  Description of Artificial Sequence: Synthetic oligonucleotide
uguuccuuccuuggggagc

SEQ ID NO: 817283 - RNA, 19 nt, Artificial Sequence
  Description of Artificial Sequence: Synthetic oligonucleotide
cucggcguaaaguuuccug

SEQ ID NO: 817284 - RNA, 19 nt, Artificial Sequence
  Description of Artificial Sequence: Synthetic oligonucleotide
aggacacacucuguugcgc

SEQ ID NO: 817285 - RNA, 19 nt, Artificial Sequence
  Description of Artificial Sequence: Synthetic oligonucleotide
aacggcggguaccacucug

SEQ ID NO: 817286 - RNA, 19 nt, Artificial Sequence
  Description of Artificial Sequence: Synthetic oligonucleotide
agaacggcggguaccacuc

SEQ ID NO: 817287 - RNA, 19 nt, Artificial Sequence
  Description of Artificial Sequence: Synthetic oligonucleotide
uggacuccagaggauagca

SEQ ID NO: 817288 - RNA, 19 nt, Artificial Sequence
  Description of Artificial Sequence: Synthetic oligonucleotide
uugugugguacgccggcga

SEQ ID NO: 817289 - RNA, 19 nt, Artificial Sequence
  Description of Artificial Sequence: Synthetic oligonucleotide
aguagagcugaguuaccau

SEQ ID NO: 817290 - RNA, 19 nt, Artificial Sequence
  Description of Artificial Sequence: Synthetic oligonucleotide
uagugacacugcauggggu

SEQ ID NO: 817291 - RNA, 19 nt, Artificial Sequence
  Description of Artificial Sequence: Synthetic oligonucleotide
ucuccgguuuucaucuccu

SEQ ID NO: 817292 - RNA, 19 nt, Artificial Sequence
  Description of Artificial Sequence: Synthetic oligonucleotide
caucagugaugguugccag

SEQ ID NO: 817293 - RNA, 19 nt, Artificial Sequence
  Description of Artificial Sequence: Synthetic oligonucleotide
ucuuacggccagagucagg

SEQ ID NO: 817294 - RNA, 19 nt, Artificial Sequence
  Description of Artificial Sequence: Synthetic oligonucleotide
ugguaggccgguagccagg

SEQ ID NO: 817295 - RNA, 19 nt, Artificial Sequence
  Description of Artificial Sequence: Synthetic oligonucleotide
acccguuugcgcugcugcc

SEQ ID NO: 817296 - RNA, 19 nt, Artificial Sequence
  Description of Artificial Sequence: Synthetic oligonucleotide
uggcucucaaacuggccug

SEQ ID NO: 817297 - RNA, 19 nt, Artificial Sequence
  Description of Artificial Sequence: Synthetic oligonucleotide
cugugugcuauagaaggac

SEQ ID NO: 817298 - RNA, 19 nt, Artificial Sequence
  Description of Artificial Sequence: Synthetic oligonucleotide
aggcaagauagggagaaga

SEQ ID NO: 817299 - RNA, 19 nt, Artificial Sequence
  Description of Artificial Sequence: Synthetic oligonucleotide
agggugcagacaaacauca

SEQ ID NO: 817300 - RNA, 19 nt, Artificial Sequence
  Description of Artificial Sequence: Synthetic oligonucleotide
uuuggguuggcugcaugcu

SEQ ID NO: 817301 - RNA, 19 nt, Artificial Sequence
  Description of Artificial Sequence: Synthetic oligonucleotide
cagcuugcuagugacacug

SEQ ID NO: 817302 - RNA, 19 nt, Artificial Sequence
  Description of Artificial Sequence: Synthetic oligonucleotide
cugaccccgagcaggaaug

SEQ ID NO: 817303 - RNA, 19 nt, Artificial Sequence
  Description of Artificial Sequence: Synthetic oligonucleotide
uccucuccuuagaagacua

SEQ ID NO: 817304 - RNA, 19 nt, Artificial Sequence
  Description of Artificial Sequence: Synthetic oligonucleotide
uggcucggcguaaaguuuc

SEQ ID NO: 817305 - RNA, 19 nt, Artificial Sequence
  Description of Artificial Sequence: Synthetic oligonucleotide
gagcagagcgggucuuacg

SEQ ID NO: 817306 - RNA, 19 nt, Artificial Sequence
  Description of Artificial Sequence: Synthetic oligonucleotide
ggcaucaguugccaccugg

SEQ ID NO: 817307 - RNA, 19 nt, Artificial Sequence
  Description of Artificial Sequence: Synthetic oligonucleotide
ggcguaaaguuuccugggg

SEQ ID NO: 817308 - RNA, 19 nt, Artificial Sequence
  Description of Artificial Sequence: Synthetic oligonucleotide
cauugacugucgccggucc

SEQ ID NO: 817309 - RNA, 19 nt, Artificial Sequence
  Description of Artificial Sequence: Synthetic oligonucleotide
ugcgccuccaggcuccgca

SEQ ID NO: 817310 - RNA, 19 nt, Artificial Sequence
  Description of Artificial Sequence: Synthetic oligonucleotide
gcuagugacacugcauggg

SEQ ID NO: 817311 - RNA, 19 nt, Artificial Sequence
  Description of Artificial Sequence: Synthetic oligonucleotide
acgcaggacccaucugccc

SEQ ID NO: 817312 - RNA, 19 nt, Artificial Sequence
  Description of Artificial Sequence: Synthetic oligonucleotide
aucaucaggagagcccaag

SEQ ID NO: 817313 - RNA, 19 nt, Artificial Sequence
  Description of Artificial Sequence: Synthetic oligonucleotide
cagcgauuuggguuggcug

SEQ ID NO: 817314 - RNA, 19 nt, Artificial Sequence
  Description of Artificial Sequence: Synthetic oligonucleotide
cugaggagacccguuugcg

SEQ ID NO: 817315 - RNA, 19 nt, Artificial Sequence
  Description of Artificial Sequence: Synthetic oligonucleotide
gcaagauagggagaagacc

SEQ ID NO: 817316 - RNA, 19 nt, Artificial Sequence
  Description of Artificial Sequence: Synthetic oligonucleotide
ggauucuacuuuguggggc

SEQ ID NO: 817317 - RNA, 19 nt, Artificial Sequence
  Description of Artificial Sequence: Synthetic oligonucleotide
gugguaggccgguagccag

SEQ ID NO: 817318 - RNA, 19 nt, Artificial Sequence
  Description of Artificial Sequence: Synthetic oligonucleotide
gcggguaccacucugagua

SEQ ID NO: 817319 - RNA, 19 nt, Artificial Sequence
  Description of Artificial Sequence: Synthetic oligonucleotide
gucuccgguuuucaucucc

SEQ ID NO: 817320 - RNA, 19 nt, Artificial Sequence
  Description of Artificial Sequence: Synthetic oligonucleotide
gcaaccugcgccuccaggc

SEQ ID NO: 817321 - RNA, 19 nt, Artificial Sequence
  Description of Artificial Sequence: Synthetic oligonucleotide
gguagugaugccagcaccc

SEQ ID NO: 817322 - RNA, 19 nt, Artificial Sequence
  Description of Artificial Sequence: Synthetic oligonucleotide
ucuuggucaugguaauauu

SEQ ID NO: 817323 - RNA, 19 nt, Artificial Sequence
  Description of Artificial Sequence: Synthetic oligonucleotide
gcucacggcucuuuaaggc

SEQ ID NO: 817324 - RNA, 19 nt, Artificial Sequence
  Description of Artificial Sequence: Synthetic oligonucleotide
ucagcgauuuggguuggcu

SEQ ID NO: 817325 - RNA, 19 nt, Artificial Sequence
  Description of Artificial Sequence: Synthetic oligonucleotide
uucaugccggucucuggga

SEQ ID NO: 817326 - RNA, 19 nt, Artificial Sequence
  Description of Artificial Sequence: Synthetic oligonucleotide
gaaaaggacaaggucaguu

SEQ ID NO: 817327 - RNA, 19 nt, Artificial Sequence
  Description of Artificial Sequence: Synthetic oligonucleotide
uaccuggaucuucacuggu

SEQ ID NO: 817328 - RNA, 19 nt, Artificial Sequence
  Description of Artificial Sequence: Synthetic oligonucleotide
accccgagcaggaaugggg

SEQ ID NO: 817329 - RNA, 19 nt, Artificial Sequence
  Description of Artificial Sequence: Synthetic oligonucleotide
cucacggcucuuuaaggca

SEQ ID NO: 817330 - RNA, 19 nt, Artificial Sequence
  Description of Artificial Sequence: Synthetic oligonucleotide
gggauucuacuuugugggg

SEQ ID NO: 817331 - RNA, 19 nt, Artificial Sequence
  Description of Artificial Sequence: Synthetic oligonucleotide
accccauacuguccaagcu

SEQ ID NO: 817332 - RNA, 19 nt, Artificial Sequence
  Description of Artificial Sequence: Synthetic oligonucleotide
gcuauagaaggacgaguug

SEQ ID NO: 817333 - RNA, 19 nt, Artificial Sequence
  Description of Artificial Sequence: Synthetic oligonucleotide
gccuguuuaagaacaacug

SEQ ID NO: 817334 - RNA, 19 nt, Artificial Sequence
  Description of Artificial Sequence: Synthetic oligonucleotide
agcagacugugugcuauag

SEQ ID NO: 817335 - RNA, 19 nt, Artificial Sequence
  Description of Artificial Sequence: Synthetic oligonucleotide
gacgcaggacccaucugcc

SEQ ID NO: 817336 - RNA, 19 nt, Artificial Sequence
  Description of Artificial Sequence: Synthetic oligonucleotide
ugguacgccggcgagcaga

SEQ ID NO: 817337 - RNA, 19 nt, Artificial Sequence
  Description of Artificial Sequence: Synthetic oligonucleotide
ggcucacggcucuuuaagg

SEQ ID NO: 817338 - RNA, 19 nt, Artificial Sequence
  Description of Artificial Sequence: Synthetic oligonucleotide
auagggagaagaccccaua

SEQ ID NO: 817339 - RNA, 19 nt, Artificial Sequence
  Description of Artificial Sequence: Synthetic oligonucleotide
gcuccaagccuccugggcc

SEQ ID NO: 817340 - RNA, 19 nt, Artificial Sequence
  Description of Artificial Sequence: Synthetic oligonucleotide
gacacugcaugggguaccc

SEQ ID NO: 817341 - RNA, 19 nt, Artificial Sequence
  Description of Artificial Sequence: Synthetic oligonucleotide
agugcugcucugcuuccgu

SEQ ID NO: 817342 - RNA, 19 nt, Artificial Sequence
  Description of Artificial Sequence: Synthetic oligonucleotide
cacugagagggacaguaga

SEQ ID NO: 817343 - RNA, 19 nt, Artificial Sequence
  Description of Artificial Sequence: Synthetic oligonucleotide
gaaccuccucuccuuagaa

SEQ ID NO: 817344 - RNA, 19 nt, Artificial Sequence
  Description of Artificial Sequence: Synthetic oligonucleotide
ggguagugaugccagcacc

SEQ ID NO: 817345 - RNA, 19 nt, Artificial Sequence
  Description of Artificial Sequence: Synthetic oligonucleotide
ggcaauucguggagaacgg

SEQ ID NO: 817346 - RNA, 19 nt, Artificial Sequence
  Description of Artificial Sequence: Synthetic oligonucleotide
cuuaaguccagcugggguu

SEQ ID NO: 817347 - RNA, 19 nt, Artificial Sequence
  Description of Artificial Sequence: Synthetic oligonucleotide
agagcugaguuaccaucau

SEQ ID NO: 817348 - RNA, 19 nt, Artificial Sequence
  Description of Artificial Sequence: Synthetic oligonucleotide
cuguuccuuccuuggggag

SEQ ID NO: 817349 - RNA, 19 nt, Artificial Sequence
  Description of Artificial Sequence: Synthetic oligonucleotide
ugcccaagucucgaagcug

SEQ ID NO: 817350 - RNA, 19 nt, Artificial Sequence
  Description of Artificial Sequence: Synthetic oligonucleotide
guucuauaucccaccccag

SEQ ID NO: 817351 - RNA, 19 nt, Artificial Sequence
  Description of Artificial Sequence: Synthetic oligonucleotide
ugaggcucacggcucuuua

SEQ ID NO: 817352 - RNA, 19 nt, Artificial Sequence
  Description of Artificial Sequence: Synthetic oligonucleotide
agacucagggaaggccugg

SEQ ID NO: 817353 - RNA, 19 nt, Artificial Sequence
  Description of Artificial Sequence: Synthetic oligonucleotide
uacccauauagaagcuguu

SEQ ID NO: 817354 - RNA, 19 nt, Artificial Sequence
  Description of Artificial Sequence: Synthetic oligonucleotide
guguugacucuuuaaugcu

SEQ ID NO: 817355 - RNA, 19 nt, Artificial Sequence
  Description of Artificial Sequence: Synthetic oligonucleotide
aggugaagugugagcugcc

SEQ ID NO: 817356 - RNA, 19 nt, Artificial Sequence
  Description of Artificial Sequence: Synthetic oligonucleotide
gugugcuauagaaggacga

SEQ ID NO: 817357 - RNA, 19 nt, Artificial Sequence
  Description of Artificial Sequence: Synthetic oligonucleotide
gcccaagcgggccagagac

SEQ ID NO: 817358 - RNA, 19 nt, Artificial Sequence
  Description of Artificial Sequence: Synthetic oligonucleotide
acaagggugcagacaaaca

SEQ ID NO: 817359 - RNA, 19 nt, Artificial Sequence
  Description of Artificial Sequence: Synthetic oligonucleotide
aggagacccguuugcgcug

SEQ ID NO: 817360 - RNA, 19 nt, Artificial Sequence
  Description of Artificial Sequence: Synthetic oligonucleotide
uccgccuguuuaagaacaa

SEQ ID NO: 817361 - RNA, 19 nt, Artificial Sequence
  Description of Artificial Sequence: Synthetic oligonucleotide
ggcaagauagggagaagac

SEQ ID NO: 817362 - RNA, 19 nt, Artificial Sequence
  Description of Artificial Sequence: Synthetic oligonucleotide
guacccauauagaagcugu

SEQ ID NO: 817363 - RNA, 19 nt, Artificial Sequence
  Description of Artificial Sequence: Synthetic oligonucleotide
cuucuggcuuagcuggguc

SEQ ID NO: 817364 - RNA, 19 nt, Artificial Sequence
  Description of Artificial Sequence: Synthetic oligonucleotide
ugcuggcucggcguaaagu

SEQ ID NO: 817365 - RNA, 19 nt, Artificial Sequence
  Description of Artificial Sequence: Synthetic oligonucleotide
ccuaucccaccccugagac

SEQ ID NO: 817366 - RNA, 19 nt, Artificial Sequence
  Description of Artificial Sequence: Synthetic oligonucleotide
gcuaaguagagcugaguua

SEQ ID NO: 817367 - RNA, 19 nt, Artificial Sequence
  Description of Artificial Sequence: Synthetic oligonucleotide
ugcaugcuggcucggcgua

SEQ ID NO: 817368 - RNA, 19 nt, Artificial Sequence
  Description of Artificial Sequence: Synthetic oligonucleotide
gguagggccacgcgcacac

SEQ ID NO: 817369 - RNA, 19 nt, Artificial Sequence
  Description of Artificial Sequence: Synthetic oligonucleotide
uucguggagaacggcgggu

SEQ ID NO: 817370 - RNA, 19 nt, Artificial Sequence
  Description of Artificial Sequence: Synthetic oligonucleotide
auucuacuuuguggggcag

SEQ ID NO: 817371 - RNA, 19 nt, Artificial Sequence
  Description of Artificial Sequence: Synthetic oligonucleotide
gagucauggggcgugggaa

SEQ ID NO: 817372 - RNA, 19 nt, Artificial Sequence
  Description of Artificial Sequence: Synthetic oligonucleotide
gagacgcaggacccaucug

SEQ ID NO: 817373 - RNA, 19 nt, Artificial Sequence
  Description of Artificial Sequence: Synthetic oligonucleotide
aagaccccauacuguccaa

SEQ ID NO: 817374 - RNA, 19 nt, Artificial Sequence
  Description of Artificial Sequence: Synthetic oligonucleotide
cugguaccuuucaggcacc

SEQ ID NO: 817375 - RNA, 19 nt, Artificial Sequence
  Description of Artificial Sequence: Synthetic oligonucleotide
guccgccuguuuaagaaca

SEQ ID NO: 817376 - RNA, 19 nt, Artificial Sequence
  Description of Artificial Sequence: Synthetic oligonucleotide
gagcgggucuuacggccag

SEQ ID NO: 817377 - RNA, 19 nt, Artificial Sequence
  Description of Artificial Sequence: Synthetic oligonucleotide
agacuauuucccagcuucu

SEQ ID NO: 817378 - RNA, 19 nt, Artificial Sequence
  Description of Artificial Sequence: Synthetic oligonucleotide
caggcaggcuaaguagagc

SEQ ID NO: 817379 - RNA, 19 nt, Artificial Sequence
  Description of Artificial Sequence: Synthetic oligonucleotide
gucuuacggccagagucag

SEQ ID NO: 817380 - RNA, 19 nt, Artificial Sequence
  Description of Artificial Sequence: Synthetic oligonucleotide
caugggguacccucuucca

SEQ ID NO: 817381 - RNA, 19 nt, Artificial Sequence
  Description of Artificial Sequence: Synthetic oligonucleotide
ugggagucauggggcgugg

SEQ ID NO: 817382 - RNA, 19 nt, Artificial Sequence
  Description of Artificial Sequence: Synthetic oligonucleotide
ucugggagucauggggcgu

SEQ ID NO: 817383 - RNA, 19 nt, Artificial Sequence
  Description of Artificial Sequence: Synthetic oligonucleotide
guguguuaaggaugcugaa

SEQ ID NO: 817384 - RNA, 19 nt, Artificial Sequence
  Description of Artificial Sequence: Synthetic oligonucleotide
ggagcaccacuggacaucc

SEQ ID NO: 817385 - RNA, 19 nt, Artificial Sequence
  Description of Artificial Sequence: Synthetic oligonucleotide
uuacggccagagucaggga

SEQ ID NO: 817386 - RNA, 19 nt, Artificial Sequence
  Description of Artificial Sequence: Synthetic oligonucleotide
ggucuuacggccagaguca

SEQ ID NO: 817387 - RNA, 19 nt, Artificial Sequence
  Description of Artificial Sequence: Synthetic oligonucleotide
gaggcucacggcucuuuaa

SEQ ID NO: 817388 - RNA, 19 nt, Artificial Sequence
  Description of Artificial Sequence: Synthetic oligonucleotide
gcucauccuggcaaguacc

SEQ ID NO: 817389 - RNA, 19 nt, Artificial Sequence
  Description of Artificial Sequence: Synthetic oligonucleotide
uggcuuagcugggucugca

SEQ ID NO: 817390 - RNA, 19 nt, Artificial Sequence
  Description of Artificial Sequence: Synthetic oligonucleotide
agcucagagaaggcacuga

SEQ ID NO: 817391 - RNA, 19 nt, Artificial Sequence
  Description of Artificial Sequence: Synthetic oligonucleotide
ggauagcaggucuucaggu

SEQ ID NO: 817392 - RNA, 19 nt, Artificial Sequence
  Description of Artificial Sequence: Synthetic oligonucleotide
gcugccauuaaggcugccc

SEQ ID NO: 817393 - RNA, 19 nt, Artificial Sequence
  Description of Artificial Sequence: Synthetic oligonucleotide
cacugguaccuuucaggca

SEQ ID NO: 817394 - RNA, 19 nt, Artificial Sequence
  Description of Artificial Sequence: Synthetic oligonucleotide
cuccgcaccugggcaaugg

SEQ ID NO: 817395 - RNA, 19 nt, Artificial Sequence
  Description of Artificial Sequence: Synthetic oligonucleotide
gguccgccuguuuaagaac

SEQ ID NO: 817396 - RNA, 19 nt, Artificial Sequence
  Description of Artificial Sequence: Synthetic oligonucleotide
ggguuaggugaagugugag

SEQ ID NO: 817397 - RNA, 19 nt, Artificial Sequence
  Description of Artificial Sequence: Synthetic oligonucleotide
gcccaagucucgaagcugc

SEQ ID NO: 817398 - RNA, 19 nt, Artificial Sequence
  Description of Artificial Sequence: Synthetic oligonucleotide
aguugccaccuggaauuug

SEQ ID NO: 817399 - RNA, 19 nt, Artificial Sequence
  Description of Artificial Sequence: Synthetic oligonucleotide
ggcgcugggagauggguga

SEQ ID NO: 817400 - RNA, 19 nt, Artificial Sequence
  Description of Artificial Sequence: Synthetic oligonucleotide
gugaugguugccagacuca

SEQ ID NO: 817401 - RNA, 19 nt, Artificial Sequence
  Description of Artificial Sequence: Synthetic oligonucleotide
gcuucgagugguaggccgg

SEQ ID NO: 817402 - RNA, 19 nt, Artificial Sequence
  Description of Artificial Sequence: Synthetic oligonucleotide
gcaggcuaaguagagcuga

SEQ ID NO: 817403 - RNA, 19 nt, Artificial Sequence
  Description of Artificial Sequence: Synthetic oligonucleotide
gacgggcagagcuucgagu

SEQ ID NO: 817404 - RNA, 19 nt, Artificial Sequence
  Description of Artificial Sequence: Synthetic oligonucleotide
ggcucucaaacuggccugg

SEQ ID NO: 817405 - RNA, 19 nt, Artificial Sequence
  Description of Artificial Sequence: Synthetic oligonucleotide
gagcuucgagugguaggcc

SEQ ID NO: 817406 - RNA, 19 nt, Artificial Sequence
  Description of Artificial Sequence: Synthetic oligonucleotide
caucuguagcuuguaaugu

SEQ ID NO: 817407 - RNA, 19 nt, Artificial Sequence
  Description of Artificial Sequence: Synthetic oligonucleotide
ccccauacuguccaagcuc

SEQ ID NO: 817408 - RNA, 19 nt, Artificial Sequence
  Description of Artificial Sequence: Synthetic oligonucleotide
gggucuccgguuuucaucu

SEQ ID NO: 817409 - RNA, 19 nt, Artificial Sequence
  Description of Artificial Sequence: Synthetic oligonucleotide
guggcaauucguggagaac

SEQ ID NO: 817410 - RNA, 19 nt, Artificial Sequence
  Description of Artificial Sequence: Synthetic oligonucleotide
caccagacaagggugcaga

SEQ ID NO: 817411 - RNA, 19 nt, Artificial Sequence
  Description of Artificial Sequence: Synthetic oligonucleotide
ugguaccuuucaggcacca

SEQ ID NO: 817412 - RNA, 19 nt, Artificial Sequence
  Description of Artificial Sequence: Synthetic oligonucleotide
caucaguugccaccuggaa

SEQ ID NO: 817413 - RNA, 19 nt, Artificial Sequence
  Description of Artificial Sequence: Synthetic oligonucleotide
caaugggucuuuggcuuuc

SEQ ID NO: 817414 - RNA, 19 nt, Artificial Sequence
  Description of Artificial Sequence: Synthetic oligonucleotide
cacggcucuuuaaggcauc

SEQ ID NO: 817415 - RNA, 19 nt, Artificial Sequence
  Description of Artificial Sequence: Synthetic oligonucleotide
cauauagaagcuguuccuu

SEQ ID NO: 817416 - RNA, 19 nt, Artificial Sequence
  Description of Artificial Sequence: Synthetic oligonucleotide
gugcuauagaaggacgagu

SEQ ID NO: 817417 - RNA, 19 nt, Artificial Sequence
  Description of Artificial Sequence: Synthetic oligonucleotide
gcaauucguggagaacggc

SEQ ID NO: 817418 - RNA, 19 nt, Artificial Sequence
  Description of Artificial Sequence: Synthetic oligonucleotide
cugagacgcaggacccauc

SEQ ID NO: 817419 - RNA, 19 nt, Artificial Sequence
  Description of Artificial Sequence: Synthetic oligonucleotide
ggagucauggggcguggga

SEQ ID NO: 817420 - RNA, 19 nt, Artificial Sequence
  Description of Artificial Sequence: Synthetic oligonucleotide
cggcguaaaguuuccuggg

SEQ ID NO: 817421 - RNA, 19 nt, Artificial Sequence
  Description of Artificial Sequence: Synthetic oligonucleotide
cacgcgcacacacuggugu

SEQ ID NO: 817422 - RNA, 19 nt, Artificial Sequence
  Description of Artificial Sequence: Synthetic oligonucleotide
guggaggacacacucuguu

SEQ ID NO: 817423 - RNA, 19 nt, Artificial Sequence
  Description of Artificial Sequence: Synthetic oligonucleotide
ggacuccagaggauagcag

SEQ ID NO: 817424 - RNA, 19 nt, Artificial Sequence
  Description of Artificial Sequence: Synthetic oligonucleotide
gugugguacgccggcgagc

SEQ ID NO: 817425 - RNA, 19 nt, Artificial Sequence
  Description of Artificial Sequence: Synthetic oligonucleotide
gauagggagaagaccccau

SEQ ID NO: 817426 - RNA, 19 nt, Artificial Sequence
  Description of Artificial Sequence: Synthetic oligonucleotide
gagcgacgggcagagcuuc

SEQ ID NO: 817427 - RNA, 19 nt, Artificial Sequence
  Description of Artificial Sequence: Synthetic oligonucleotide
ccguuugcgcugcugccgg

SEQ ID NO: 817428 - RNA, 19 nt, Artificial Sequence
  Description of Artificial Sequence: Synthetic oligonucleotide
guugcgcugcugcaacucu

SEQ ID NO: 817429 - RNA, 19 nt, Artificial Sequence
  Description of Artificial Sequence: Synthetic oligonucleotide
gguacgccggcgagcagag

SEQ ID NO: 817430 - RNA, 19 nt, Artificial Sequence
  Description of Artificial Sequence: Synthetic oligonucleotide
caucuaguuucuuggucau

SEQ ID NO: 817431 - RNA, 19 nt, Artificial Sequence
  Description of Artificial Sequence: Synthetic oligonucleotide
aggagcagacugugugcua

SEQ ID NO: 817432 - RNA, 19 nt, Artificial Sequence
  Description of Artificial Sequence: Synthetic oligonucleotide
ccccugagacgcaggaccc

SEQ ID NO: 817433 - RNA, 19 nt, Artificial Sequence
  Description of Artificial Sequence: Synthetic oligonucleotide
gguaggccgguagccaggc

SEQ ID NO: 817434 - RNA, 19 nt, Artificial Sequence
  Description of Artificial Sequence: Synthetic oligonucleotide
cagguagggccacgcgcac

SEQ ID NO: 817435 - RNA, 19 nt, Artificial Sequence
  Description of Artificial Sequence: Synthetic oligonucleotide
gcagacugugugcuauaga

SEQ ID NO: 817436 - RNA, 19 nt, Artificial Sequence
  Description of Artificial Sequence: Synthetic oligonucleotide
ggcaggcuaaguagagcug

SEQ ID NO: 817437 - RNA, 19 nt, Artificial Sequence
  Description of Artificial Sequence: Synthetic oligonucleotide
ggagaccuuugcugggguc

SEQ ID NO: 817438 - RNA, 19 nt, Artificial Sequence
  Description of Artificial Sequence: Synthetic oligonucleotide
uuccguccuucaugccggu

SEQ ID NO: 817439 - RNA, 19 nt, Artificial Sequence
  Description of Artificial Sequence: Synthetic oligonucleotide
caggagugccaggacccug

SEQ ID NO: 817440 - RNA, 19 nt, Artificial Sequence
  Description of Artificial Sequence: Synthetic oligonucleotide
gcugcugccggguagugau

SEQ ID NO: 817441 - RNA, 19 nt, Artificial Sequence
  Description of Artificial Sequence: Synthetic oligonucleotide
agcgacgggcagagcuucg

SEQ ID NO: 817442 - RNA, 19 nt, Artificial Sequence
  Description of Artificial Sequence: Synthetic oligonucleotide
uaaguccagcugggguuuc

SEQ ID NO: 817443 - RNA, 19 nt, Artificial Sequence
  Description of Artificial Sequence: Synthetic oligonucleotide
accuucccauaguucuaua

SEQ ID NO: 817444 - RNA, 19 nt, Artificial Sequence
  Description of Artificial Sequence: Synthetic oligonucleotide
cccguuugcgcugcugccg

SEQ ID NO: 817445 - RNA, 19 nt, Artificial Sequence
  Description of Artificial Sequence: Synthetic oligonucleotide
gcuggcucggcguaaaguu

SEQ ID NO: 817446 - RNA, 19 nt, Artificial Sequence
  Description of Artificial Sequence: Synthetic oligonucleotide
cgagugguaggccgguagc

SEQ ID NO: 817447 - RNA, 19 nt, Artificial Sequence
  Description of Artificial Sequence: Synthetic oligonucleotide
acggcggguaccacucuga

SEQ ID NO: 817448 - RNA, 19 nt, Artificial Sequence
  Description of Artificial Sequence: Synthetic oligonucleotide
cugccggguagugaugcca

SEQ ID NO: 817449 - RNA, 19 nt, Artificial Sequence
  Description of Artificial Sequence: Synthetic oligonucleotide
gacuauuucccagcuucuu

SEQ ID NO: 817450 - RNA, 19 nt, Artificial Sequence
  Description of Artificial Sequence: Synthetic oligonucleotide
gggagcaccacuggacauc

SEQ ID NO: 817451 - RNA, 19 nt, Artificial Sequence
  Description of Artificial Sequence: Synthetic oligonucleotide
uggguguguuaaggaugcu

SEQ ID NO: 817452 - RNA, 19 nt, Artificial Sequence
  Description of Artificial Sequence: Synthetic oligonucleotide
cugccuguuccuucuggcu

SEQ ID NO: 817453 - RNA, 19 nt, Artificial Sequence
  Description of Artificial Sequence: Synthetic oligonucleotide
cucagcgauuuggguuggc

SEQ ID NO: 817454 - RNA, 19 nt, Artificial Sequence
  Description of Artificial Sequence: Synthetic oligonucleotide
agguagggccacgcgcaca

SEQ ID NO: 817455 - RNA, 19 nt, Artificial Sequence
  Description of Artificial Sequence: Synthetic oligonucleotide
ggagacccguuugcgcugc

SEQ ID NO: 817456 - RNA, 19 nt, Artificial Sequence
  Description of Artificial Sequence: Synthetic oligonucleotide
uucgagugguaggccggua

SEQ ID NO: 817457 - RNA, 19 nt, Artificial Sequence
  Description of Artificial Sequence: Synthetic oligonucleotide
auccuggcaaguacccaua

SEQ ID NO: 817458 - RNA, 19 nt, Artificial Sequence
  Description of Artificial Sequence: Synthetic oligonucleotide
auaucccaccccagugcaa

SEQ ID NO: 817459 - RNA, 19 nt, Artificial Sequence
  Description of Artificial Sequence: Synthetic oligonucleotide
caugggcaaccugcgccuc

SEQ ID NO: 817460 - RNA, 19 nt, Artificial Sequence
  Description of Artificial Sequence: Synthetic oligonucleotide
ggacacagguagggccacg

SEQ ID NO: 817461 - RNA, 19 nt, Artificial Sequence
  Description of Artificial Sequence: Synthetic oligonucleotide
gauccaucccuggcccuua

SEQ ID NO: 817462 - RNA, 19 nt, Artificial Sequence
  Description of Artificial Sequence: Synthetic oligonucleotide
guagccaggcaggcuaagu

SEQ ID NO: 817463 - RNA, 19 nt, Artificial Sequence
  Description of Artificial Sequence: Synthetic oligonucleotide
ggcucggcguaaaguuucc

SEQ ID NO: 817464 - RNA, 19 nt, Artificial Sequence
  Description of Artificial Sequence: Synthetic oligonucleotide
caaccugcgccuccaggcu

SEQ ID NO: 817465 - RNA, 19 nt, Artificial Sequence
  Description of Artificial Sequence: Synthetic oligonucleotide
caugccggucucugggagu

SEQ ID NO: 817466 - RNA, 19 nt, Artificial Sequence
  Description of Artificial Sequence: Synthetic oligonucleotide
caugcuggcucggcguaaa

SEQ ID NO: 817467 - RNA, 19 nt, Artificial Sequence
  Description of Artificial Sequence: Synthetic oligonucleotide
gggagucauggggcguggg

SEQ ID NO: 817468 - RNA, 19 nt, Artificial Sequence
  Description of Artificial Sequence: Synthetic oligonucleotide
gcaugggcaaccugcgccu

SEQ ID NO: 817469 - RNA, 19 nt, Artificial Sequence
  Description of Artificial Sequence: Synthetic oligonucleotide
gugguacgccggcgagcag

SEQ ID NO: 817470 - RNA, 19 nt, Artificial Sequence
  Description of Artificial Sequence: Synthetic oligonucleotide
uccguccuucaugccgguc

SEQ ID NO: 817471 - RNA, 19 nt, Artificial Sequence
  Description of Artificial Sequence: Synthetic oligonucleotide
cagguguggaggacacacu

SEQ ID NO: 817472 - RNA, 19 nt, Artificial Sequence
  Description of Artificial Sequence: Synthetic oligonucleotide
cgggcagagcuucgagugg

SEQ ID NO: 817473 - RNA, 19 nt, Artificial Sequence
  Description of Artificial Sequence: Synthetic oligonucleotide
gguguggaggacacacucu

SEQ ID NO: 817474 - RNA, 19 nt, Artificial Sequence
  Description of Artificial Sequence: Synthetic oligonucleotide
gcgauuuggguuggcugca

SEQ ID NO: 817475 - RNA, 19 nt, Artificial Sequence
  Description of Artificial Sequence: Synthetic oligonucleotide
ccgccuguuuaagaacaac

SEQ ID NO: 817476 - RNA, 19 nt, Artificial Sequence
  Description of Artificial Sequence: Synthetic oligonucleotide
ggagcucagagaaggcacu

SEQ ID NO: 817477 - RNA, 19 nt, Artificial Sequence
  Description of Artificial Sequence: Synthetic oligonucleotide
cuggcucggcguaaaguuu

SEQ ID NO: 817478 - RNA, 19 nt, Artificial Sequence
  Description of Artificial Sequence: Synthetic oligonucleotide
guaggccgguagccaggca

SEQ ID NO: 817479 - RNA, 19 nt, Artificial Sequence
  Description of Artificial Sequence: Synthetic oligonucleotide
gaacggcggguaccacucu

SEQ ID NO: 817480 - RNA, 19 nt, Artificial Sequence
  Description of Artificial Sequence: Synthetic oligonucleotide
cacccucagcgauuugggu

SEQ ID NO: 817481 - RNA, 19 nt, Artificial Sequence
  Description of Artificial Sequence: Synthetic oligonucleotide
ugccggucucugggaguca

SEQ ID NO: 817482 - RNA, 19 nt, Artificial Sequence
  Description of Artificial Sequence: Synthetic oligonucleotide
gccgguccgccuguuuaag

SEQ ID NO: 817483 - RNA, 19 nt, Artificial Sequence
  Description of Artificial Sequence: Synthetic oligonucleotide
cguggagaacggcggguac

SEQ ID NO: 817484 - RNA, 19 nt, Artificial Sequence
  Description of Artificial Sequence: Synthetic oligonucleotide
ggacgaguuggcacugucu

SEQ ID NO: 817485 - RNA, 19 nt, Artificial Sequence
  Description of Artificial Sequence: Synthetic oligonucleotide
gccacgcgcacacacuggu

SEQ ID NO: 817486 - RNA, 19 nt, Artificial Sequence
  Description of Artificial Sequence: Synthetic oligonucleotide
ggucuccgguuuucaucuc

SEQ ID NO: 817487 - RNA, 19 nt, Artificial Sequence
  Description of Artificial Sequence: Synthetic oligonucleotide
ccggguagugaugccagca

SEQ ID NO: 817488 - RNA, 19 nt, Artificial Sequence
  Description of Artificial Sequence: Synthetic oligonucleotide
ccucagcgauuuggguugg

SEQ ID NO: 817489 - RNA, 19 nt, Artificial Sequence
  Description of Artificial Sequence: Synthetic oligonucleotide
cgguccgccuguuuaagaa

SEQ ID NO: 817490 - RNA, 19 nt, Artificial Sequence
  Description of Artificial Sequence: Synthetic oligonucleotide
cuucgagugguaggccggu

SEQ ID NO: 817491 - RNA, 19 nt, Artificial Sequence
  Description of Artificial Sequence: Synthetic oligonucleotide
cgacgggcagagcuucgag

SEQ ID NO: 817492 - RNA, 19 nt, Artificial Sequence
  Description of Artificial Sequence: Synthetic oligonucleotide
gggcagagcuucgaguggu

SEQ ID NO: 817493 - RNA, 19 nt, Artificial Sequence
  Description of Artificial Sequence: Synthetic oligonucleotide
ggcggguaccacucugagu

SEQ ID NO: 817494 - RNA, 19 nt, Artificial Sequence
  Description of Artificial Sequence: Synthetic oligonucleotide
ggagaacggcggguaccac

SEQ ID NO: 817495 - RNA, 19 nt, Artificial Sequence
  Description of Artificial Sequence: Synthetic oligonucleotide
guacgccggcgagcagagc

SEQ ID NO: 817496 - RNA, 19 nt, Artificial Sequence
  Description of Artificial Sequence: Synthetic oligonucleotide
cggcggguaccacucugag

SEQ ID NO: 817497 - RNA, 19 nt, Artificial Sequence
  Description of Artificial Sequence: Synthetic oligonucleotide
ggggagcaccacuggacau

SEQ ID NO: 817498 - RNA, 19 nt, Artificial Sequence
  Description of Artificial Sequence: Synthetic oligonucleotide
ccggucucugggagucaug

SEQ ID NO: 817499 - RNA, 19 nt, Artificial Sequence
  Description of Artificial Sequence: Synthetic oligonucleotide
cgcgcacacacugguguug

SEQ ID NO: 817500 - RNA, 19 nt, Artificial Sequence
  Description of Artificial Sequence: Synthetic oligonucleotide
ccgguccgccuguuuaaga

SEQ ID NO: 817501 - RNA, 19 nt, Artificial Sequence
  Description of Artificial Sequence: Synthetic oligonucleotide
gagacccguuugcgcugcu

SEQ ID NO: 817502 - RNA, 19 nt, Artificial Sequence
  Description of Artificial Sequence: Synthetic oligonucleotide
cugcgccuccaggcuccgc

SEQ ID NO: 817503 - RNA, 19 nt, Artificial Sequence
  Description of Artificial Sequence: Synthetic oligonucleotide
ccugaccccgagcaggaau

SEQ ID NO: 817504 - RNA, 19 nt, Artificial Sequence
  Description of Artificial Sequence: Synthetic oligonucleotide
ugucgccgguccgccuguu

SEQ ID NO: 817505 - RNA, 19 nt, Artificial Sequence
  Description of Artificial Sequence: Synthetic oligonucleotide
ggagcgacgggcagagcuu

SEQ ID NO: 817506 - RNA, 19 nt, Artificial Sequence
  Description of Artificial Sequence: Synthetic oligonucleotide
ggcagagcuucgaguggua

SEQ ID NO: 817507 - RNA, 19 nt, Artificial Sequence
  Description of Artificial Sequence: Synthetic oligonucleotide
ggcgugggaagcagcuggu

SEQ ID NO: 817508 - RNA, 19 nt, Artificial Sequence
  Description of Artificial Sequence: Synthetic oligonucleotide
caguugccaccuggaauuu

SEQ ID NO: 817509 - RNA, 19 nt, Artificial Sequence
  Description of Artificial Sequence: Synthetic oligonucleotide
cccugagacgcaggaccca

SEQ ID NO: 817510 - RNA, 19 nt, Artificial Sequence
  Description of Artificial Sequence: Synthetic oligonucleotide
gucgccgguccgccuguuu

SEQ ID NO: 817511 - RNA, 19 nt, Artificial Sequence
  Description of Artificial Sequence: Synthetic oligonucleotide
ccugagacgcaggacccau

SEQ ID NO: 817512 - RNA, 19 nt, Artificial Sequence
  Description of Artificial Sequence: Synthetic oligonucleotide
gcgagcagagcgggucuua

SEQ ID NO: 817513 - RNA, 19 nt, Artificial Sequence
  Description of Artificial Sequence: Synthetic oligonucleotide
gcucggcguaaaguuuccu

SEQ ID NO: 817514 - RNA, 19 nt, Artificial Sequence
  Description of Artificial Sequence: Synthetic oligonucleotide
gcgcugcugccggguagug

SEQ ID NO: 817515 - RNA, 19 nt, Artificial Sequence
  Description of Artificial Sequence: Synthetic oligonucleotide
ccaggacccuggugggucu

SEQ ID NO: 817516 - RNA, 19 nt, Artificial Sequence
  Description of Artificial Sequence: Synthetic oligonucleotide
cgguuccaaucauccagcu

SEQ ID NO: 817517 - RNA, 19 nt, Artificial Sequence
  Description of Artificial Sequence: Synthetic oligonucleotide
gccggucucugggagucau

SEQ ID NO: 817518 - RNA, 19 nt, Artificial Sequence
  Description of Artificial Sequence: Synthetic oligonucleotide
cgccgguccgccuguuuaa

SEQ ID NO: 817519 - RNA, 19 nt, Artificial Sequence
  Description of Artificial Sequence: Synthetic oligonucleotide
ggcgagcagagcgggucuu

SEQ ID NO: 817520 - RNA, 19 nt, Artificial Sequence
  Description of Artificial Sequence: Synthetic oligonucleotide
cgauuuggguuggcugcau

SEQ ID NO: 817521 - RNA, 19 nt, Artificial Sequence
  Description of Artificial Sequence: Synthetic oligonucleotide
acuuguuacacuuaguacc

SEQ ID NO: 817522 - RNA, 19 nt, Artificial Sequence
  Description of Artificial Sequence: Synthetic oligonucleotide
uaagacauuauacugaaag

SEQ ID NO: 817523 - RNA, 19 nt, Artificial Sequence
  Description of Artificial Sequence: Synthetic oligonucleotide
aacgucuuuaaucuaagac

SEQ ID NO: 817524 - RNA, 19 nt, Artificial Sequence
  Description of Artificial Sequence: Synthetic oligonucleotide
gauagaguagcuuucaucc

SEQ ID NO: 817525 - RNA, 19 nt, Artificial Sequence
  Description of Artificial Sequence: Synthetic oligonucleotide
uguuaaauaaaacagcaau

SEQ ID NO: 817526 - RNA, 19 nt, Artificial Sequence
  Description of Artificial Sequence: Synthetic oligonucleotide
aauugcaccacuuuaauua

SEQ ID NO: 817527 - RNA, 19 nt, Artificial Sequence
  Description of Artificial Sequence: Synthetic oligonucleotide
ucucuuagcaguaauacug

SEQ ID NO: 817528 - RNA, 19 nt, Artificial Sequence
  Description of Artificial Sequence: Synthetic oligonucleotide
uuuuaguuuacauuuggcc

SEQ ID NO: 817529 - RNA, 19 nt, Artificial Sequence
  Description of Artificial Sequence: Synthetic oligonucleotide
uuuauuaugcuaaaauagu

SEQ ID NO: 817530 - RNA, 19 nt, Artificial Sequence
  Description of Artificial Sequence: Synthetic oligonucleotide
agaacuauuauauaaguaa

SEQ ID NO: 817531 - RNA, 19 nt, Artificial Sequence
  Description of Artificial Sequence: Synthetic oligonucleotide
uuagcaguaauacuggaug

SEQ ID NO: 817532 - RNA, 19 nt, Artificial Sequence
  Description of Artificial Sequence: Synthetic oligonucleotide
uaagcuacaauaaguauca

SEQ ID NO: 817533 - RNA, 19 nt, Artificial Sequence
  Description of Artificial Sequence: Synthetic oligonucleotide
aauaguggugcuuuuagga

SEQ ID NO: 817534 - RNA, 19 nt, Artificial Sequence
  Description of Artificial Sequence: Synthetic oligonucleotide
uguauauuugguauugcag

SEQ ID NO: 817535 - RNA, 19 nt, Artificial Sequence
  Description of Artificial Sequence: Synthetic oligonucleotide
aacuuguuacacuuaguac

SEQ ID NO: 817536 - RNA, 19 nt, Artificial Sequence
  Description of Artificial Sequence: Synthetic oligonucleotide
uaugcuaaaauaguggugc

SEQ ID NO: 817537 - RNA, 19 nt, Artificial Sequence
  Description of Artificial Sequence: Synthetic oligonucleotide
ugcauacaaagcaacaagg

SEQ ID NO: 817538 - RNA, 19 nt, Artificial Sequence
  Description of Artificial Sequence: Synthetic oligonucleotide
accaaaacguuacacaugg

SEQ ID NO: 817539 - RNA, 19 nt, Artificial Sequence
  Description of Artificial Sequence: Synthetic oligonucleotide
auuaaaauuacuucccaca

SEQ ID NO: 817540 - RNA, 19 nt, Artificial Sequence
  Description of Artificial Sequence: Synthetic oligonucleotide
aaggcaacgucuuuaaucu

SEQ ID NO: 817541 - RNA, 19 nt, Artificial Sequence
  Description of Artificial Sequence: Synthetic oligonucleotide
caacuauaaacauuguucc

SEQ ID NO: 817542 - RNA, 19 nt, Artificial Sequence
  Description of Artificial Sequence: Synthetic oligonucleotide
uguguuaaaguauacagua

SEQ ID NO: 817543 - RNA, 19 nt, Artificial Sequence
  Description of Artificial Sequence: Synthetic oligonucleotide
agauauuaaaggcaacguc

SEQ ID NO: 817544 - RNA, 19 nt, Artificial Sequence
  Description of Artificial Sequence: Synthetic oligonucleotide
gauuugaaaagucuggaca

SEQ ID NO: 817545 - RNA, 19 nt, Artificial Sequence
  Description of Artificial Sequence: Synthetic oligonucleotide
acauccacaguacucgucc

SEQ ID NO: 817546 - RNA, 19 nt, Artificial Sequence
  Description of Artificial Sequence: Synthetic oligonucleotide
aguuacugcaauuaggccu

SEQ ID NO: 817547 - RNA, 19 nt, Artificial Sequence
  Description of Artificial Sequence: Synthetic oligonucleotide
aaauaguggugcuuuuagg

SEQ ID NO: 817548 - RNA, 19 nt, Artificial Sequence
  Description of Artificial Sequence: Synthetic oligonucleotide
uauaauaaggagauuugaa

SEQ ID NO: 817549 - RNA, 19 nt, Artificial Sequence
  Description of Artificial Sequence: Synthetic oligonucleotide
cuauauaggagcucuuugg

SEQ ID NO: 817550 - RNA, 19 nt, Artificial Sequence
  Description of Artificial Sequence: Synthetic oligonucleotide
aaacuuguuacacuuagua

SEQ ID NO: 817551 - RNA, 19 nt, Artificial Sequence
  Description of Artificial Sequence: Synthetic oligonucleotide
aaacauauaauaaggagau

SEQ ID NO: 817552 - RNA, 19 nt, Artificial Sequence
  Description of Artificial Sequence: Synthetic oligonucleotide
auuaugcuaaaauaguggu

SEQ ID NO: 817553 - RNA, 19 nt, Artificial Sequence
  Description of Artificial Sequence: Synthetic oligonucleotide
uacauguacaacauuggug

SEQ ID NO: 817554 - RNA, 19 nt, Artificial Sequence
  Description of Artificial Sequence: Synthetic oligonucleotide
uuaggauuuacauuacugu

SEQ ID NO: 817555 - RNA, 19 nt, Artificial Sequence
  Description of Artificial Sequence: Synthetic oligonucleotide
gucaauuuaaauacugugg

SEQ ID NO: 817556 - RNA, 19 nt, Artificial Sequence
  Description of Artificial Sequence: Synthetic oligonucleotide
guuaauuugccgcacuagg

SEQ ID NO: 817557 - RNA, 19 nt, Artificial Sequence
  Description of Artificial Sequence: Synthetic oligonucleotide
augauuaaaauuacuuccc

SEQ ID NO: 817558 - RNA, 19 nt, Artificial Sequence
  Description of Artificial Sequence: Synthetic oligonucleotide
uaaguaucaaagaagcgaa

SEQ ID NO: 817559 - RNA, 19 nt, Artificial Sequence
  Description of Artificial Sequence: Synthetic oligonucleotide
ucucagaucuuguaaauca

SEQ ID NO: 817560 - RNA, 19 nt, Artificial Sequence
  Description of Artificial Sequence: Synthetic oligonucleotide
gaguagucuauauaggagc

SEQ ID NO: 817561 - RNA, 19 nt, Artificial Sequence
  Description of Artificial Sequence: Synthetic oligonucleotide
uuuaacaaaguuggaaugc

SEQ ID NO: 817562 - RNA, 19 nt, Artificial Sequence
  Description of Artificial Sequence: Synthetic oligonucleotide
aacuuguuaaaucauuaaa

SEQ ID NO: 817563 - RNA, 19 nt, Artificial Sequence
  Description of Artificial Sequence: Synthetic oligonucleotide
ucuugcuagguuuugaccu

SEQ ID NO: 817564 - RNA, 19 nt, Artificial Sequence
  Description of Artificial Sequence: Synthetic oligonucleotide
uuuaaucuaagacauuaua

SEQ ID NO: 817565 - RNA, 19 nt, Artificial Sequence
  Description of Artificial Sequence: Synthetic oligonucleotide
aauagggcaacaguucuuc

SEQ ID NO: 817566 - RNA, 19 nt, Artificial Sequence
  Description of Artificial Sequence: Synthetic oligonucleotide
aauaaguaucaaagaagcg

SEQ ID NO: 817567 - RNA, 19 nt, Artificial Sequence
  Description of Artificial Sequence: Synthetic oligonucleotide
acuaaaccuguauauuugg

SEQ ID NO: 817568 - RNA, 19 nt, Artificial Sequence
  Description of Artificial Sequence: Synthetic oligonucleotide
acgucuuuaaucuaagaca

SEQ ID NO: 817569 - RNA, 19 nt, Artificial Sequence
  Description of Artificial Sequence: Synthetic oligonucleotide
aacguuacacaugggaaac

SEQ ID NO: 817570 - RNA, 19 nt, Artificial Sequence
  Description of Artificial Sequence: Synthetic oligonucleotide
aacccgaagaaucugcucu

SEQ ID NO: 817571 - RNA, 19 nt, Artificial Sequence
  Description of Artificial Sequence: Synthetic oligonucleotide
uuaaugcauacaaagcaac

SEQ ID NO: 817572 - RNA, 19 nt, Artificial Sequence
  Description of Artificial Sequence: Synthetic oligonucleotide
uauaggagcucuuuggacu

SEQ ID NO: 817573 - RNA, 19 nt, Artificial Sequence
  Description of Artificial Sequence: Synthetic oligonucleotide
ugcaauuaggccuugugac

SEQ ID NO: 817574 - RNA, 19 nt, Artificial Sequence
  Description of Artificial Sequence: Synthetic oligonucleotide
uuguuugaaaauauacacu

SEQ ID NO: 817575 - RNA, 19 nt, Artificial Sequence
  Description of Artificial Sequence: Synthetic oligonucleotide
aaacugauagaguagcuuu

SEQ ID NO: 817576 - RNA, 19 nt, Artificial Sequence
  Description of Artificial Sequence: Synthetic oligonucleotide
agagcuacaaugcacccag

SEQ ID NO: 817577 - RNA, 19 nt, Artificial Sequence
  Description of Artificial Sequence: Synthetic oligonucleotide
acaauaaguaucaaagaag

SEQ ID NO: 817578 - RNA, 19 nt, Artificial Sequence
  Description of Artificial Sequence: Synthetic oligonucleotide
uuggucaauuuaaauacug

SEQ ID NO: 817579 - RNA, 19 nt, Artificial Sequence
  Description of Artificial Sequence: Synthetic oligonucleotide
ucuuaagggaaccaccaca

SEQ ID NO: 817580 - RNA, 19 nt, Artificial Sequence
  Description of Artificial Sequence: Synthetic oligonucleotide
uuacacuuaguaccucucg

SEQ ID NO: 817581 - RNA, 19 nt, Artificial Sequence
  Description of Artificial Sequence: Synthetic oligonucleotide
aaagguacuaaaccuguau

SEQ ID NO: 817582 - RNA, 19 nt, Artificial Sequence
  Description of Artificial Sequence: Synthetic oligonucleotide
uacuaaaccuguauauuug

SEQ ID NO: 817583 - RNA, 19 nt, Artificial Sequence
  Description of Artificial Sequence: Synthetic oligonucleotide
acgacuagcuuauauucac

SEQ ID NO: 817584 - RNA, 19 nt, Artificial Sequence
  Description of Artificial Sequence: Synthetic oligonucleotide
uauuguaggaucauauuuu

SEQ ID NO: 817585 - RNA, 19 nt, Artificial Sequence
  Description of Artificial Sequence: Synthetic oligonucleotide
cauauaauaaggagauuug

SEQ ID NO: 817586 - RNA, 19 nt, Artificial Sequence
  Description of Artificial Sequence: Synthetic oligonucleotide
auauaggagcucuuuggac

SEQ ID NO: 817587 - RNA, 19 nt, Artificial Sequence
  Description of Artificial Sequence: Synthetic oligonucleotide
cuuaagggaaccaccacag

SEQ ID NO: 817588 - RNA, 19 nt, Artificial Sequence
  Description of Artificial Sequence: Synthetic oligonucleotide
ucccaacagauauuaaagg

SEQ ID NO: 817589 - RNA, 19 nt, Artificial Sequence
  Description of Artificial Sequence: Synthetic oligonucleotide
ugauuaaaauuacuuccca

SEQ ID NO: 817590 - RNA, 19 nt, Artificial Sequence
  Description of Artificial Sequence: Synthetic oligonucleotide
aagucuggacauuuccuuc

SEQ ID NO: 817591 - RNA, 19 nt, Artificial Sequence
  Description of Artificial Sequence: Synthetic oligonucleotide
ucucucgugacacuggaca

SEQ ID NO: 817592 - RNA, 19 nt, Artificial Sequence
  Description of Artificial Sequence: Synthetic oligonucleotide
aauuugccgcacuagguca

SEQ ID NO: 817593 - RNA, 19 nt, Artificial Sequence
  Description of Artificial Sequence: Synthetic oligonucleotide
auuugaaaagucuggacau

SEQ ID NO: 817594 - RNA, 19 nt, Artificial Sequence
  Description of Artificial Sequence: Synthetic oligonucleotide
aaacguuacacaugggaaa

SEQ ID NO: 817595 - RNA, 19 nt, Artificial Sequence
  Description of Artificial Sequence: Synthetic oligonucleotide
ucuaagacauuauacugaa

SEQ ID NO: 817596 - RNA, 19 nt, Artificial Sequence
  Description of Artificial Sequence: Synthetic oligonucleotide
aaaaucucucgugacacug

SEQ ID NO: 817597 - RNA, 19 nt, Artificial Sequence
  Description of Artificial Sequence: Synthetic oligonucleotide
aaaauugcaccacuuuaau

SEQ ID NO: 817598 - RNA, 19 nt, Artificial Sequence
  Description of Artificial Sequence: Synthetic oligonucleotide
uacacccaaacguuaaugc

SEQ ID NO: 817599 - RNA, 19 nt, Artificial Sequence
  Description of Artificial Sequence: Synthetic oligonucleotide
uuaauuugccgcacuaggu

SEQ ID NO: 817600 - RNA, 19 nt, Artificial Sequence
  Description of Artificial Sequence: Synthetic oligonucleotide
uggaguagucuauauagga

SEQ ID NO: 817601 - RNA, 19 nt, Artificial Sequence
  Description of Artificial Sequence: Synthetic oligonucleotide
aaacuuguuaaaucauuaa

SEQ ID NO: 817602 - RNA, 19 nt, Artificial Sequence
  Description of Artificial Sequence: Synthetic oligonucleotide
ugguauugcagacacacau

SEQ ID NO: 817603 - RNA, 19 nt, Artificial Sequence
  Description of Artificial Sequence: Synthetic oligonucleotide
acauauaauaaggagauuu

SEQ ID NO: 817604 - RNA, 19 nt, Artificial Sequence
  Description of Artificial Sequence: Synthetic oligonucleotide
gacuagcuuauauucacgc

SEQ ID NO: 817605 - RNA, 19 nt, Artificial Sequence
  Description of Artificial Sequence: Synthetic oligonucleotide
uguugaauagggcaacagu

SEQ ID NO: 817606 - RNA, 19 nt, Artificial Sequence
  Description of Artificial Sequence: Synthetic oligonucleotide
uucaagcauacacugcugc

SEQ ID NO: 817607 - RNA, 19 nt, Artificial Sequence
  Description of Artificial Sequence: Synthetic oligonucleotide
aaguauacaguacaccguu

SEQ ID NO: 817608 - RNA, 19 nt, Artificial Sequence
  Description of Artificial Sequence: Synthetic oligonucleotide
ugaccaauuacacaugauu

SEQ ID NO: 817609 - RNA, 19 nt, Artificial Sequence
  Description of Artificial Sequence: Synthetic oligonucleotide
gaacgacuagcuuauauuc

SEQ ID NO: 817610 - RNA, 19 nt, Artificial Sequence
  Description of Artificial Sequence: Synthetic oligonucleotide
ucaagcauacacugcugcg

SEQ ID NO: 817611 - RNA, 19 nt, Artificial Sequence
  Description of Artificial Sequence: Synthetic oligonucleotide
aaccaaagcaaagcccugc

SEQ ID NO: 817612 - RNA, 19 nt, Artificial Sequence
  Description of Artificial Sequence: Synthetic oligonucleotide
cucagagcuacaaugcacc

SEQ ID NO: 817613 - RNA, 19 nt, Artificial Sequence
  Description of Artificial Sequence: Synthetic oligonucleotide
acuauaaacauuguucccu

SEQ ID NO: 817614 - RNA, 19 nt, Artificial Sequence
  Description of Artificial Sequence: Synthetic oligonucleotide
uauacugaaagggcuauca

SEQ ID NO: 817615 - RNA, 19 nt, Artificial Sequence
  Description of Artificial Sequence: Synthetic oligonucleotide
ucguuguaacaucagguug

SEQ ID NO: 817616 - RNA, 19 nt, Artificial Sequence
  Description of Artificial Sequence: Synthetic oligonucleotide
gauauuaaaggcaacgucu

SEQ ID NO: 817617 - RNA, 19 nt, Artificial Sequence
  Description of Artificial Sequence: Synthetic oligonucleotide
uauaugagucuucuauugu

SEQ ID NO: 817618 - RNA, 19 nt, Artificial Sequence
  Description of Artificial Sequence: Synthetic oligonucleotide
guuggauggacacacaauc

SEQ ID NO: 817619 - RNA, 19 nt, Artificial Sequence
  Description of Artificial Sequence: Synthetic oligonucleotide
aucucaaccaaaacguuac

SEQ ID NO: 817620 - RNA, 19 nt, Artificial Sequence
  Description of Artificial Sequence: Synthetic oligonucleotide
uuacauuacuguacucucc

SEQ ID NO: 817621 - RNA, 19 nt, Artificial Sequence
  Description of Artificial Sequence: Synthetic oligonucleotide
uacacuuaguaccucucgc

SEQ ID NO: 817622 - RNA, 19 nt, Artificial Sequence
  Description of Artificial Sequence: Synthetic oligonucleotide
uaauuugccgcacuagguc

SEQ ID NO: 817623 - RNA, 19 nt, Artificial Sequence
  Description of Artificial Sequence: Synthetic oligonucleotide
aaaacguuacacaugggaa

SEQ ID NO: 817624 - RNA, 19 nt, Artificial Sequence
  Description of Artificial Sequence: Synthetic oligonucleotide
agcaacaaggcauuguuaa

SEQ ID NO: 817625 - RNA, 19 nt, Artificial Sequence
  Description of Artificial Sequence: Synthetic oligonucleotide
acguuaaugcauacaaagc

SEQ ID NO: 817626 - RNA, 19 nt, Artificial Sequence
  Description of Artificial Sequence: Synthetic oligonucleotide
agucuucuauuguaggauc

SEQ ID NO: 817627 - RNA, 19 nt, Artificial Sequence
  Description of Artificial Sequence: Synthetic oligonucleotide
aaagcgcuuauuuuguaua

SEQ ID NO: 817628 - RNA, 19 nt, Artificial Sequence
  Description of Artificial Sequence: Synthetic oligonucleotide
aagaacgacuagcuuauau

SEQ ID NO: 817629 - RNA, 19 nt, Artificial Sequence
  Description of Artificial Sequence: Synthetic oligonucleotide
uguacaacauugguggaug

SEQ ID NO: 817630 - RNA, 19 nt, Artificial Sequence
  Description of Artificial Sequence: Synthetic oligonucleotide
aaaacuuguuaaaucauua

SEQ ID NO: 817631 - RNA, 19 nt, Artificial Sequence
  Description of Artificial Sequence: Synthetic oligonucleotide
uaaaccuguauauuuggua

SEQ ID NO: 817632 - RNA, 19 nt, Artificial Sequence
  Description of Artificial Sequence: Synthetic oligonucleotide
ugcacccaggacauuaaag

SEQ ID NO: 817633 - RNA, 19 nt, Artificial Sequence
  Description of Artificial Sequence: Synthetic oligonucleotide
acaccguuuucauacaugu

SEQ ID NO: 817634 - RNA, 19 nt, Artificial Sequence
  Description of Artificial Sequence: Synthetic oligonucleotide
uguuacacuuaguaccucu

SEQ ID NO: 817635 - RNA, 19 nt, Artificial Sequence
  Description of Artificial Sequence: Synthetic oligonucleotide
aggaaaguccguuuaagau

SEQ ID NO: 817636 - RNA, 19 nt, Artificial Sequence
  Description of Artificial Sequence: Synthetic oligonucleotide
uucccuacaacucuuucau

SEQ ID NO: 817637 - RNA, 19 nt, Artificial Sequence
  Description of Artificial Sequence: Synthetic oligonucleotide
acaaaauugcaccacuuua

SEQ ID NO: 817638 - RNA, 19 nt, Artificial Sequence
  Description of Artificial Sequence: Synthetic oligonucleotide
gaagcgaaguuaucuggag

SEQ ID NO: 817639 - RNA, 19 nt, Artificial Sequence
  Description of Artificial Sequence: Synthetic oligonucleotide
uguauaauacaaugauaau

SEQ ID NO: 817640 - RNA, 19 nt, Artificial Sequence
  Description of Artificial Sequence: Synthetic oligonucleotide
uaggauuuacauuacugua

SEQ ID NO: 817641 - RNA, 19 nt, Artificial Sequence
  Description of Artificial Sequence: Synthetic oligonucleotide
aagguacuaaaccuguaua

SEQ ID NO: 817642 - RNA, 19 nt, Artificial Sequence
  Description of Artificial Sequence: Synthetic oligonucleotide
aguaucaaagaagcgaagu

SEQ ID NO: 817643 - RNA, 19 nt, Artificial Sequence
  Description of Artificial Sequence: Synthetic oligonucleotide
caaacguuaaugcauacaa

SEQ ID NO: 817644 - RNA, 19 nt, Artificial Sequence
  Description of Artificial Sequence: Synthetic oligonucleotide
ugacacuggacaguaauca

SEQ ID NO: 817645 - RNA, 19 nt, Artificial Sequence
  Description of Artificial Sequence: Synthetic oligonucleotide
caaaacguuacacauggga

SEQ ID NO: 817646 - RNA, 19 nt, Artificial Sequence
  Description of Artificial Sequence: Synthetic oligonucleotide
gacaguaaucagaaugugc

SEQ ID NO: 817647 - RNA, 19 nt, Artificial Sequence
  Description of Artificial Sequence: Synthetic oligonucleotide
auacauguacaacauuggu

SEQ ID NO: 817648 - RNA, 19 nt, Artificial Sequence
  Description of Artificial Sequence: Synthetic oligonucleotide
cucuagaacuauuauauaa

SEQ ID NO: 817649 - RNA, 19 nt, Artificial Sequence
  Description of Artificial Sequence: Synthetic oligonucleotide
aaggagauuugaaaagucu

SEQ ID NO: 817650 - RNA, 19 nt, Artificial Sequence
  Description of Artificial Sequence: Synthetic oligonucleotide
agguuggucaauuuaaaua

SEQ ID NO: 817651 - RNA, 19 nt, Artificial Sequence
  Description of Artificial Sequence: Synthetic oligonucleotide
auauaauaaggagauuuga

SEQ ID NO: 817652 - RNA, 19 nt, Artificial Sequence
  Description of Artificial Sequence: Synthetic oligonucleotide
uuaagggaaccaccacagg

SEQ ID NO: 817653 - RNA, 19 nt, Artificial Sequence
  Description of Artificial Sequence: Synthetic oligonucleotide
acucuaagaaugcacaguu

SEQ ID NO: 817654 - RNA, 19 nt, Artificial Sequence
  Description of Artificial Sequence: Synthetic oligonucleotide
aagcauacacugcugcgca

SEQ ID NO: 817655 - RNA, 19 nt, Artificial Sequence
  Description of Artificial Sequence: Synthetic oligonucleotide
cuacaaugcacccaggaca

SEQ ID NO: 817656 - RNA, 19 nt, Artificial Sequence
  Description of Artificial Sequence: Synthetic oligonucleotide
cuggcucagagcuacaaug

SEQ ID NO: 817657 - RNA, 19 nt, Artificial Sequence
  Description of Artificial Sequence: Synthetic oligonucleotide
aguccguuuaagauguugg

SEQ ID NO: 817658 - RNA, 19 nt, Artificial Sequence
  Description of Artificial Sequence: Synthetic oligonucleotide
uagucuauauaggagcucu

SEQ ID NO: 817659 - RNA, 19 nt, Artificial Sequence
  Description of Artificial Sequence: Synthetic oligonucleotide
ucagaaugugcaaacugau

SEQ ID NO: 817660 - RNA, 19 nt, Artificial Sequence
  Description of Artificial Sequence: Synthetic oligonucleotide
uccaagucacauuuauuac

SEQ ID NO: 817661 - RNA, 19 nt, Artificial Sequence
  Description of Artificial Sequence: Synthetic oligonucleotide
agagccgacuuuccaacac

SEQ ID NO: 817662 - RNA, 19 nt, Artificial Sequence
  Description of Artificial Sequence: Synthetic oligonucleotide
aaaguaugggguguguuaa

SEQ ID NO: 817663 - RNA, 19 nt, Artificial Sequence
  Description of Artificial Sequence: Synthetic oligonucleotide
acugaaagggcuaucauau

SEQ ID NO: 817664 - RNA, 19 nt, Artificial Sequence
  Description of Artificial Sequence: Synthetic oligonucleotide
aaauugcaccacuuuaauu

SEQ ID NO: 817665 - RNA, 19 nt, Artificial Sequence
  Description of Artificial Sequence: Synthetic oligonucleotide
gguagguuuaacaaaguug

SEQ ID NO: 817666 - RNA, 19 nt, Artificial Sequence
  Description of Artificial Sequence: Synthetic oligonucleotide
ucauccgccucuuaaggga

SEQ ID NO: 817667 - RNA, 19 nt, Artificial Sequence
  Description of Artificial Sequence: Synthetic oligonucleotide
cuugugaccaauuacacau

SEQ ID NO: 817668 - RNA, 19 nt, Artificial Sequence
  Description of Artificial Sequence: Synthetic oligonucleotide
uauauucacgcaugaugca

SEQ ID NO: 817669 - RNA, 19 nt, Artificial Sequence
  Description of Artificial Sequence: Synthetic oligonucleotide
aguagcuuucauccgccuc

SEQ ID NO: 817670 - RNA, 19 nt, Artificial Sequence
  Description of Artificial Sequence: Synthetic oligonucleotide
accaauuacacaugauuaa

SEQ ID NO: 817671 - RNA, 19 nt, Artificial Sequence
  Description of Artificial Sequence: Synthetic oligonucleotide
uuaacccgaagaaucugcu

SEQ ID NO: 817672 - RNA, 19 nt, Artificial Sequence
  Description of Artificial Sequence: Synthetic oligonucleotide
aagcgaaguuaucuggagu

SEQ ID NO: 817673 - RNA, 19 nt, Artificial Sequence
  Description of Artificial Sequence: Synthetic oligonucleotide
agaacgacuagcuuauauu

SEQ ID NO: 817674 - RNA, 19 nt, Artificial Sequence
  Description of Artificial Sequence: Synthetic oligonucleotide
acacacauaugcaugagca

SEQ ID NO: 817675 - RNA, 19 nt, Artificial Sequence
  Description of Artificial Sequence: Synthetic oligonucleotide
uacaccguuuucauacaug

SEQ ID NO: 817676 - RNA, 19 nt, Artificial Sequence
  Description of Artificial Sequence: Synthetic oligonucleotide
uugaccuuguuccuucccu

SEQ ID NO: 817677 - RNA, 19 nt, Artificial Sequence
  Description of Artificial Sequence: Synthetic oligonucleotide
uguuaaucaaagcgcuuau

SEQ ID NO: 817678 - RNA, 19 nt, Artificial Sequence
  Description of Artificial Sequence: Synthetic oligonucleotide
aaaucucucgugacacugg

SEQ ID NO: 817679 - RNA, 19 nt, Artificial Sequence
  Description of Artificial Sequence: Synthetic oligonucleotide
acugcaauuaggccuugug

SEQ ID NO: 817680 - RNA, 19 nt, Artificial Sequence
  Description of Artificial Sequence: Synthetic oligonucleotide
uaaaauuacuucccacauu

SEQ ID NO: 817681 - RNA, 19 nt, Artificial Sequence
  Description of Artificial Sequence: Synthetic oligonucleotide
ucuguuaauuugccgcacu

SEQ ID NO: 817682 - RNA, 19 nt, Artificial Sequence
  Description of Artificial Sequence: Synthetic oligonucleotide
uauucacgcaugaugcaaa

SEQ ID NO: 817683 - RNA, 19 nt, Artificial Sequence
  Description of Artificial Sequence: Synthetic oligonucleotide
uaaggcuuuuaguuuacau

SEQ ID NO: 817684 - RNA, 19 nt, Artificial Sequence
  Description of Artificial Sequence: Synthetic oligonucleotide
ccguuuaagauguugguag

SEQ ID NO: 817685 - RNA, 19 nt, Artificial Sequence
  Description of Artificial Sequence: Synthetic oligonucleotide
aaagggcuaucauauuuua

SEQ ID NO: 817686 - RNA, 19 nt, Artificial Sequence
  Description of Artificial Sequence: Synthetic oligonucleotide
aucuaagacauuauacuga

SEQ ID NO: 817687 - RNA, 19 nt, Artificial Sequence
  Description of Artificial Sequence: Synthetic oligonucleotide
agcuacaauaaguaucaaa

SEQ ID NO: 817688 - RNA, 19 nt, Artificial Sequence
  Description of Artificial Sequence: Synthetic oligonucleotide
acuagcuuauauucacgca

SEQ ID NO: 817689 - RNA, 19 nt, Artificial Sequence
  Description of Artificial Sequence: Synthetic oligonucleotide
ucuacagcugcagaagccu

SEQ ID NO: 817690 - RNA, 19 nt, Artificial Sequence
  Description of Artificial Sequence: Synthetic oligonucleotide
cuuaguaccucucgcgcug

SEQ ID NO: 817691 - RNA, 19 nt, Artificial Sequence
  Description of Artificial Sequence: Synthetic oligonucleotide
auuacuucccacauucaca

SEQ ID NO: 817692 - RNA, 19 nt, Artificial Sequence
  Description of Artificial Sequence: Synthetic oligonucleotide
ucagagccgacuuuccaac

SEQ ID NO: 817693 - RNA, 19 nt, Artificial Sequence
  Description of Artificial Sequence: Synthetic oligonucleotide
ucuuuacacccaaacguua

SEQ ID NO: 817694 - RNA, 19 nt, Artificial Sequence
  Description of Artificial Sequence: Synthetic oligonucleotide
aagcgcuuauuuuguauaa

SEQ ID NO: 817695 - RNA, 19 nt, Artificial Sequence
  Description of Artificial Sequence: Synthetic oligonucleotide
aaguccguuuaagauguug

SEQ ID NO: 817696 - RNA, 19 nt, Artificial Sequence
  Description of Artificial Sequence: Synthetic oligonucleotide
aguaugggguguguuaaag

SEQ ID NO: 817697 - RNA, 19 nt, Artificial Sequence
  Description of Artificial Sequence: Synthetic oligonucleotide
aaagucguuguaacaucag

SEQ ID NO: 817698 - RNA, 19 nt, Artificial Sequence
  Description of Artificial Sequence: Synthetic oligonucleotide
cacuuaguaccucucgcgc

SEQ ID NO: 817699 - RNA, 19 nt, Artificial Sequence
  Description of Artificial Sequence: Synthetic oligonucleotide
acacccaaacguuaaugca

SEQ ID NO: 817700 - RNA, 19 nt, Artificial Sequence
  Description of Artificial Sequence: Synthetic oligonucleotide
ucuuagcaguaauacugga

SEQ ID NO: 817701 - RNA, 19 nt, Artificial Sequence
  Description of Artificial Sequence: Synthetic oligonucleotide
caagcauacacugcugcgc

SEQ ID NO: 817702 - RNA, 19 nt, Artificial Sequence
  Description of Artificial Sequence: Synthetic oligonucleotide
aaccaaaacguuacacaug

SEQ ID NO: 817703 - RNA, 19 nt, Artificial Sequence
  Description of Artificial Sequence: Synthetic oligonucleotide
gauaaugaccuugaauuua

SEQ ID NO: 817704 - RNA, 19 nt, Artificial Sequence
  Description of Artificial Sequence: Synthetic oligonucleotide
aacgacuagcuuauauuca

SEQ ID NO: 817705 - RNA, 19 nt, Artificial Sequence
  Description of Artificial Sequence: Synthetic oligonucleotide
ugguagguuuaacaaaguu

SEQ ID NO: 817706 - RNA, 19 nt, Artificial Sequence
  Description of Artificial Sequence: Synthetic oligonucleotide
ugggguguguuaaaguaua

SEQ ID NO: 817707 - RNA, 19 nt, Artificial Sequence
  Description of Artificial Sequence: Synthetic oligonucleotide
agucguuguaacaucaggu

SEQ ID NO: 817708 - RNA, 19 nt, Artificial Sequence
  Description of Artificial Sequence: Synthetic oligonucleotide
ggcacuguugaauagggca

SEQ ID NO: 817709 - RNA, 19 nt, Artificial Sequence
  Description of Artificial Sequence: Synthetic oligonucleotide
agguuuaacaaaguuggaa

SEQ ID NO: 817710 - RNA, 19 nt, Artificial Sequence
  Description of Artificial Sequence: Synthetic oligonucleotide
aaguaucaaagaagcgaag

SEQ ID NO: 817711 - RNA, 19 nt, Artificial Sequence
  Description of Artificial Sequence: Synthetic oligonucleotide
uuuacacccaaacguuaau

SEQ ID NO: 817712 - RNA, 19 nt, Artificial Sequence
  Description of Artificial Sequence: Synthetic oligonucleotide
cguuguaacaucagguugg

SEQ ID NO: 817713 - RNA, 19 nt, Artificial Sequence
  Description of Artificial Sequence: Synthetic oligonucleotide
ugcgcaucuacuucaacuu

SEQ ID NO: 817714 - RNA, 19 nt, Artificial Sequence
  Description of Artificial Sequence: Synthetic oligonucleotide
acuuaguaccucucgcgcu

SEQ ID NO: 817715 - RNA, 19 nt, Artificial Sequence
  Description of Artificial Sequence: Synthetic oligonucleotide
guucccuucggcucgcugc

SEQ ID NO: 817716 - RNA, 19 nt, Artificial Sequence
  Description of Artificial Sequence: Synthetic oligonucleotide
cucaaccaaaacguuacac

SEQ ID NO: 817717 - RNA, 19 nt, Artificial Sequence
  Description of Artificial Sequence: Synthetic oligonucleotide
uuuugcgggccuucccagg

SEQ ID NO: 817718 - RNA, 19 nt, Artificial Sequence
  Description of Artificial Sequence: Synthetic oligonucleotide
caaagucguuguaacauca

SEQ ID NO: 817719 - RNA, 19 nt, Artificial Sequence
  Description of Artificial Sequence: Synthetic oligonucleotide
gggcuaucauauuuuaaag

SEQ ID NO: 817720 - RNA, 19 nt, Artificial Sequence
  Description of Artificial Sequence: Synthetic oligonucleotide
aguagucuauauaggagcu

SEQ ID NO: 817721 - RNA, 19 nt, Artificial Sequence
  Description of Artificial Sequence: Synthetic oligonucleotide
accuguauauuugguauug

SEQ ID NO: 817722 - RNA, 19 nt, Artificial Sequence
  Description of Artificial Sequence: Synthetic oligonucleotide
agcuuauauucacgcauga

SEQ ID NO: 817723 - RNA, 19 nt, Artificial Sequence
  Description of Artificial Sequence: Synthetic oligonucleotide
uggacauuuccuucccaac

SEQ ID NO: 817724 - RNA, 19 nt, Artificial Sequence
  Description of Artificial Sequence: Synthetic oligonucleotide
auggaguaaaccaaagcaa

SEQ ID NO: 817725 - RNA, 19 nt, Artificial Sequence
  Description of Artificial Sequence: Synthetic oligonucleotide
cacgcaugaugcaaacuug

SEQ ID NO: 817726 - RNA, 19 nt, Artificial Sequence
  Description of Artificial Sequence: Synthetic oligonucleotide
uugguagguuuaacaaagu

SEQ ID NO: 817727 - RNA, 19 nt, Artificial Sequence
  Description of Artificial Sequence: Synthetic oligonucleotide
ucucaaccaaaacguuaca

SEQ ID NO: 817728 - RNA, 19 nt, Artificial Sequence
  Description of Artificial Sequence: Synthetic oligonucleotide
ggcuaucauauuuuaaaga

SEQ ID NO: 817729 - RNA, 19 nt, Artificial Sequence
  Description of Artificial Sequence: Synthetic oligonucleotide
gcagaggacucuaagaaug

SEQ ID NO: 817730 - RNA, 19 nt, Artificial Sequence
  Description of Artificial Sequence: Synthetic oligonucleotide
cucucgugacacuggacag

SEQ ID NO: 817731 - RNA, 19 nt, Artificial Sequence
  Description of Artificial Sequence: Synthetic oligonucleotide
cucuaagaaugcacaguug

SEQ ID NO: 817732 - RNA, 19 nt, Artificial Sequence
  Description of Artificial Sequence: Synthetic oligonucleotide
uguguuaaucaaagcgcuu

SEQ ID NO: 817733 - RNA, 19 nt, Artificial Sequence
  Description of Artificial Sequence: Synthetic oligonucleotide
cucccuguuggauggacac

SEQ ID NO: 817734 - RNA, 19 nt, Artificial Sequence
  Description of Artificial Sequence: Synthetic oligonucleotide
agccgacuuuccaacaccc

SEQ ID NO: 817735 - RNA, 19 nt, Artificial Sequence
  Description of Artificial Sequence: Synthetic oligonucleotide
auuauacugaaagggcuau

SEQ ID NO: 817736 - RNA, 19 nt, Artificial Sequence
  Description of Artificial Sequence: Synthetic oligonucleotide
gagccgacuuuccaacacc

SEQ ID NO: 817737 - RNA, 19 nt, Artificial Sequence
  Description of Artificial Sequence: Synthetic oligonucleotide
auauucacgcaugaugcaa

SEQ ID NO: 817738 - RNA, 19 nt, Artificial Sequence
  Description of Artificial Sequence: Synthetic oligonucleotide
gcaauuaggccuugugacc

SEQ ID NO: 817739 - RNA, 19 nt, Artificial Sequence
  Description of Artificial Sequence: Synthetic oligonucleotide
gguuuaacaaaguuggaau

SEQ ID NO: 817740 - RNA, 19 nt, Artificial Sequence
  Description of Artificial Sequence: Synthetic oligonucleotide
cuuguuacacuuaguaccu

SEQ ID NO: 817741 - RNA, 19 nt, Artificial Sequence
  Description of Artificial Sequence: Synthetic oligonucleotide
acuguacucuccaauacaa

SEQ ID NO: 817742 - RNA, 19 nt, Artificial Sequence
  Description of Artificial Sequence: Synthetic oligonucleotide
uaguuuacauuuggccacc

SEQ ID NO: 817743 - RNA, 19 nt, Artificial Sequence
  Description of Artificial Sequence: Synthetic oligonucleotide
cuuuacacccaaacguuaa

SEQ ID NO: 817744 - RNA, 19 nt, Artificial Sequence
  Description of Artificial Sequence: Synthetic oligonucleotide
uaggccuugugaccaauua

SEQ ID NO: 817745 - RNA, 19 nt, Artificial Sequence
  Description of Artificial Sequence: Synthetic oligonucleotide
gcaguaauacuggauguag

SEQ ID NO: 817746 - RNA, 19 nt, Artificial Sequence
  Description of Artificial Sequence: Synthetic oligonucleotide
uccguuuaagauguuggua

SEQ ID NO: 817747 - RNA, 19 nt, Artificial Sequence
  Description of Artificial Sequence: Synthetic oligonucleotide
aguuggaaugcuggcacug

SEQ ID NO: 817748 - RNA, 19 nt, Artificial Sequence
  Description of Artificial Sequence: Synthetic oligonucleotide
aguacaccguuuucauaca

SEQ ID NO: 817749 - RNA, 19 nt, Artificial Sequence
  Description of Artificial Sequence: Synthetic oligonucleotide
aauuaggccuugugaccaa

SEQ ID NO: 817750 - RNA, 19 nt, Artificial Sequence
  Description of Artificial Sequence: Synthetic oligonucleotide
cuauuguaggaucauauuu

SEQ ID NO: 817751 - RNA, 19 nt, Artificial Sequence
  Description of Artificial Sequence: Synthetic oligonucleotide
cuagcuuauauucacgcau

SEQ ID NO: 817752 - RNA, 19 nt, Artificial Sequence
  Description of Artificial Sequence: Synthetic oligonucleotide
cugcaauuaggccuuguga

SEQ ID NO: 817753 - RNA, 19 nt, Artificial Sequence
  Description of Artificial Sequence: Synthetic oligonucleotide
auacugaaagggcuaucau

SEQ ID NO: 817754 - RNA, 19 nt, Artificial Sequence
  Description of Artificial Sequence: Synthetic oligonucleotide
augcuaaaauaguggugcu

SEQ ID NO: 817755 - RNA, 19 nt, Artificial Sequence
  Description of Artificial Sequence: Synthetic oligonucleotide
caauuaggccuugugacca

SEQ ID NO: 817756 - RNA, 19 nt, Artificial Sequence
  Description of Artificial Sequence: Synthetic oligonucleotide
ucuucuauuguaggaucau

SEQ ID NO: 817757 - RNA, 19 nt, Artificial Sequence
  Description of Artificial Sequence: Synthetic oligonucleotide
gugauggaguaaaccaaag

SEQ ID NO: 817758 - RNA, 19 nt, Artificial Sequence
  Description of Artificial Sequence: Synthetic oligonucleotide
auacaaaguauggggugug

SEQ ID NO: 817759 - RNA, 19 nt, Artificial Sequence
  Description of Artificial Sequence: Synthetic oligonucleotide
caaaguaugggguguguua

SEQ ID NO: 817760 - RNA, 19 nt, Artificial Sequence
  Description of Artificial Sequence: Synthetic oligonucleotide
caccacuuuaauuaaggcu

SEQ ID NO: 817761 - RNA, 19 nt, Artificial Sequence
  Description of Artificial Sequence: Synthetic oligonucleotide
guuccguuccugcaguauc

SEQ ID NO: 817762 - RNA, 19 nt, Artificial Sequence
  Description of Artificial Sequence: Synthetic oligonucleotide
uaacaggcaaagguacuaa

SEQ ID NO: 817763 - RNA, 19 nt, Artificial Sequence
  Description of Artificial Sequence: Synthetic oligonucleotide
guugaauagggcaacaguu

SEQ ID NO: 817764 - RNA, 19 nt, Artificial Sequence
  Description of Artificial Sequence: Synthetic oligonucleotide
gugcaaacugauagaguag

SEQ ID NO: 817765 - RNA, 19 nt, Artificial Sequence
  Description of Artificial Sequence: Synthetic oligonucleotide
caucucaaccaaaacguua

SEQ ID NO: 817766 - RNA, 19 nt, Artificial Sequence
  Description of Artificial Sequence: Synthetic oligonucleotide
uuucuauaugagucuucua

SEQ ID NO: 817767 - RNA, 19 nt, Artificial Sequence
  Description of Artificial Sequence: Synthetic oligonucleotide
uaacccgaagaaucugcuc

SEQ ID NO: 817768 - RNA, 19 nt, Artificial Sequence
  Description of Artificial Sequence: Synthetic oligonucleotide
caaaguuggaaugcuggca

SEQ ID NO: 817769 - RNA, 19 nt, Artificial Sequence
  Description of Artificial Sequence: Synthetic oligonucleotide
uucccuucggcucgcugcu

SEQ ID NO: 817770 - RNA, 19 nt, Artificial Sequence
  Description of Artificial Sequence: Synthetic oligonucleotide
aucuuuacacccaaacguu

SEQ ID NO: 817771 - RNA, 19 nt, Artificial Sequence
  Description of Artificial Sequence: Synthetic oligonucleotide
uccgcguucccuucggcuc

SEQ ID NO: 817772 - RNA, 19 nt, Artificial Sequence
  Description of Artificial Sequence: Synthetic oligonucleotide
uacaacauugguggaugaa

SEQ ID NO: 817773 - RNA, 19 nt, Artificial Sequence
  Description of Artificial Sequence: Synthetic oligonucleotide
cuguguuaaucaaagcgcu

SEQ ID NO: 817774 - RNA, 19 nt, Artificial Sequence
  Description of Artificial Sequence: Synthetic oligonucleotide
guguuaaucaaagcgcuua

SEQ ID NO: 817775 - RNA, 19 nt, Artificial Sequence
  Description of Artificial Sequence: Synthetic oligonucleotide
uucuguuaauuugccgcac

SEQ ID NO: 817776 - RNA, 19 nt, Artificial Sequence
  Description of Artificial Sequence: Synthetic oligonucleotide
guaccucucgcgcugucac

SEQ ID NO: 817777 - RNA, 19 nt, Artificial Sequence
  Description of Artificial Sequence: Synthetic oligonucleotide
gccacggcggucuuugccg

SEQ ID NO: 817778 - RNA, 19 nt, Artificial Sequence
  Description of Artificial Sequence: Synthetic oligonucleotide
agaaucauuggaacaucau

SEQ ID NO: 817779 - RNA, 19 nt, Artificial Sequence
  Description of Artificial Sequence: Synthetic oligonucleotide
uacaaaguauggggugugu

SEQ ID NO: 817780 - RNA, 19 nt, Artificial Sequence
  Description of Artificial Sequence: Synthetic oligonucleotide
agccugaaaaugauuuaca

SEQ ID NO: 817781 - RNA, 19 nt, Artificial Sequence
  Description of Artificial Sequence: Synthetic oligonucleotide
ucucgugacacuggacagu

SEQ ID NO: 817782 - RNA, 19 nt, Artificial Sequence
  Description of Artificial Sequence: Synthetic oligonucleotide
uuauacugaaagggcuauc

SEQ ID NO: 817783 - RNA, 19 nt, Artificial Sequence
  Description of Artificial Sequence: Synthetic oligonucleotide
ugcuaaaauaguggugcuu

SEQ ID NO: 817784 - RNA, 19 nt, Artificial Sequence
  Description of Artificial Sequence: Synthetic oligonucleotide
ugcuuucuauaugagucuu

SEQ ID NO: 817785 - RNA, 19 nt, Artificial Sequence
  Description of Artificial Sequence: Synthetic oligonucleotide
aaugcacccaggacauuaa

SEQ ID NO: 817786 - RNA, 19 nt, Artificial Sequence
  Description of Artificial Sequence: Synthetic oligonucleotide
aagaucucauuaacauuua

SEQ ID NO: 817787 - RNA, 19 nt, Artificial Sequence
  Description of Artificial Sequence: Synthetic oligonucleotide
ccgcacuaggucauaaaag

SEQ ID NO: 817788 - RNA, 19 nt, Artificial Sequence
  Description of Artificial Sequence: Synthetic oligonucleotide
cuuagcaguaauacuggau

SEQ ID NO: 817789 - RNA, 19 nt, Artificial Sequence
  Description of Artificial Sequence: Synthetic oligonucleotide
cacuguugaauagggcaac

SEQ ID NO: 817790 - RNA, 19 nt, Artificial Sequence
  Description of Artificial Sequence: Synthetic oligonucleotide
acgcaugaugcaaacuugu

SEQ ID NO: 817791 - RNA, 19 nt, Artificial Sequence
  Description of Artificial Sequence: Synthetic oligonucleotide
cuaaaccuguauauuuggu

SEQ ID NO: 817792 - RNA, 19 nt, Artificial Sequence
  Description of Artificial Sequence: Synthetic oligonucleotide
ggccuugugaccaauuaca

SEQ ID NO: 817793 - RNA, 19 nt, Artificial Sequence
  Description of Artificial Sequence: Synthetic oligonucleotide
cuuuaaucuaagacauuau

SEQ ID NO: 817794 - RNA, 19 nt, Artificial Sequence
  Description of Artificial Sequence: Synthetic oligonucleotide
agcaguaauacuggaugua

SEQ ID NO: 817795 - RNA, 19 nt, Artificial Sequence
  Description of Artificial Sequence: Synthetic oligonucleotide
gcaauaguuacugcaauua

SEQ ID NO: 817796 - RNA, 19 nt, Artificial Sequence
  Description of Artificial Sequence: Synthetic oligonucleotide
guacucuccaauacaaagu

SEQ ID NO: 817797 - RNA, 19 nt, Artificial Sequence
  Description of Artificial Sequence: Synthetic oligonucleotide
gugagaaucuacagcugca

SEQ ID NO: 817798 - RNA, 19 nt, Artificial Sequence
  Description of Artificial Sequence: Synthetic oligonucleotide
cugcgcaucuacuucaacu

SEQ ID NO: 817799 - RNA, 19 nt, Artificial Sequence
  Description of Artificial Sequence: Synthetic oligonucleotide
aagcaacaaggcauuguua

SEQ ID NO: 817800 - RNA, 19 nt, Artificial Sequence
  Description of Artificial Sequence: Synthetic oligonucleotide
gagucuucuauuguaggau

SEQ ID NO: 817801 - RNA, 19 nt, Artificial Sequence
  Description of Artificial Sequence: Synthetic oligonucleotide
acaaaguaugggguguguu

SEQ ID NO: 817802 - RNA, 19 nt, Artificial Sequence
  Description of Artificial Sequence: Synthetic oligonucleotide
ugcgggccuucccaggcac

SEQ ID NO: 817803 - RNA, 19 nt, Artificial Sequence
  Description of Artificial Sequence: Synthetic oligonucleotide
gucguuguaacaucagguu

SEQ ID NO: 817804 - RNA, 19 nt, Artificial Sequence
  Description of Artificial Sequence: Synthetic oligonucleotide
cacaguuguuccauugucu

SEQ ID NO: 817805 - RNA, 19 nt, Artificial Sequence
  Description of Artificial Sequence: Synthetic oligonucleotide
cacacauaugcaugagcaa

SEQ ID NO: 817806 - RNA, 19 nt, Artificial Sequence
  Description of Artificial Sequence: Synthetic oligonucleotide
cuaacaggcaaagguacua

SEQ ID NO: 817807 - RNA, 19 nt, Artificial Sequence
  Description of Artificial Sequence: Synthetic oligonucleotide
guagucuauauaggagcuc

SEQ ID NO: 817808 - RNA, 19 nt, Artificial Sequence
  Description of Artificial Sequence: Synthetic oligonucleotide
aucucucgugacacuggac

SEQ ID NO: 817809 - RNA, 19 nt, Artificial Sequence
  Description of Artificial Sequence: Synthetic oligonucleotide
gcaacgucuuuaaucuaag

SEQ ID NO: 817810 - RNA, 19 nt, Artificial Sequence
  Description of Artificial Sequence: Synthetic oligonucleotide
cacccaaacguuaaugcau

SEQ ID NO: 817811 - RNA, 19 nt, Artificial Sequence
  Description of Artificial Sequence: Synthetic oligonucleotide
acuggacaguaaucagaau

SEQ ID NO: 817812 - RNA, 19 nt, Artificial Sequence
  Description of Artificial Sequence: Synthetic oligonucleotide
aguaccucucgcgcuguca

SEQ ID NO: 817813 - RNA, 19 nt, Artificial Sequence
  Description of Artificial Sequence: Synthetic oligonucleotide
uuaguaccucucgcgcugu

SEQ ID NO: 817814 - RNA, 19 nt, Artificial Sequence
  Description of Artificial Sequence: Synthetic oligonucleotide
cauuacuguacucuccaau

SEQ ID NO: 817815 - RNA, 19 nt, Artificial Sequence
  Description of Artificial Sequence: Synthetic oligonucleotide
ggcuuuuaguuuacauuug

SEQ ID NO: 817816 - RNA, 19 nt, Artificial Sequence
  Description of Artificial Sequence: Synthetic oligonucleotide
guuacugcaauuaggccuu

SEQ ID NO: 817817 - RNA, 19 nt, Artificial Sequence
  Description of Artificial Sequence: Synthetic oligonucleotide
cugcugcgcaucuacuuca

SEQ ID NO: 817818 - RNA, 19 nt, Artificial Sequence
  Description of Artificial Sequence: Synthetic oligonucleotide
ccucuuaagggaaccacca

SEQ ID NO: 817819 - RNA, 19 nt, Artificial Sequence
  Description of Artificial Sequence: Synthetic oligonucleotide
agcgcuuauuuuguauaau

SEQ ID NO: 817820 - RNA, 19 nt, Artificial Sequence
  Description of Artificial Sequence: Synthetic oligonucleotide
cuaagacauuauacugaaa

SEQ ID NO: 817821 - RNA, 19 nt, Artificial Sequence
  Description of Artificial Sequence: Synthetic oligonucleotide
caaugcacccaggacauua

SEQ ID NO: 817822 - RNA, 19 nt, Artificial Sequence
  Description of Artificial Sequence: Synthetic oligonucleotide
gcgcuuauuuuguauaaua

SEQ ID NO: 817823 - RNA, 19 nt, Artificial Sequence
  Description of Artificial Sequence: Synthetic oligonucleotide
ggcaacgucuuuaaucuaa

SEQ ID NO: 817824 - RNA, 19 nt, Artificial Sequence
  Description of Artificial Sequence: Synthetic oligonucleotide
gccucuuaagggaaccacc

SEQ ID NO: 817825 - RNA, 19 nt, Artificial Sequence
  Description of Artificial Sequence: Synthetic oligonucleotide
ucgcgcugucaccgggucc

SEQ ID NO: 817826 - RNA, 19 nt, Artificial Sequence
  Description of Artificial Sequence: Synthetic oligonucleotide
guccguuuaagauguuggu

SEQ ID NO: 817827 - RNA, 19 nt, Artificial Sequence
  Description of Artificial Sequence: Synthetic oligonucleotide
ccaauacaaaguauggggu

SEQ ID NO: 817828 - RNA, 19 nt, Artificial Sequence
  Description of Artificial Sequence: Synthetic oligonucleotide
uuguuacacuuaguaccuc

SEQ ID NO: 817829 - RNA, 19 nt, Artificial Sequence
  Description of Artificial Sequence: Synthetic oligonucleotide
ugccgcacuaggucauaaa

SEQ ID NO: 817830 - RNA, 19 nt, Artificial Sequence
  Description of Artificial Sequence: Synthetic oligonucleotide
uugcgggccuucccaggca

SEQ ID NO: 817831 - RNA, 19 nt, Artificial Sequence
  Description of Artificial Sequence: Synthetic oligonucleotide
cuaagaaugcacaguuguu

SEQ ID NO: 817832 - RNA, 19 nt, Artificial Sequence
  Description of Artificial Sequence: Synthetic oligonucleotide
cgacuagcuuauauucacg

SEQ ID NO: 817833 - RNA, 19 nt, Artificial Sequence
  Description of Artificial Sequence: Synthetic oligonucleotide
acguuacacaugggaaaca

SEQ ID NO: 817834 - RNA, 19 nt, Artificial Sequence
  Description of Artificial Sequence: Synthetic oligonucleotide
ucccuguuggauggacaca

SEQ ID NO: 817835 - RNA, 19 nt, Artificial Sequence
  Description of Artificial Sequence: Synthetic oligonucleotide
aagcuacaauaaguaucaa

SEQ ID NO: 817836 - RNA, 19 nt, Artificial Sequence
  Description of Artificial Sequence: Synthetic oligonucleotide
ggguguguuaaaguauaca

SEQ ID NO: 817837 - RNA, 19 nt, Artificial Sequence
  Description of Artificial Sequence: Synthetic oligonucleotide
ccaaaacguuacacauggg

SEQ ID NO: 817838 - RNA, 19 nt, Artificial Sequence
  Description of Artificial Sequence: Synthetic oligonucleotide
gccgcacuaggucauaaaa

SEQ ID NO: 817839 - RNA, 19 nt, Artificial Sequence
  Description of Artificial Sequence: Synthetic oligonucleotide
guuaucuggaguagucuau

SEQ ID NO: 817840 - RNA, 19 nt, Artificial Sequence
  Description of Artificial Sequence: Synthetic oligonucleotide
cagagcuacaaugcaccca

SEQ ID NO: 817841 - RNA, 19 nt, Artificial Sequence
  Description of Artificial Sequence: Synthetic oligonucleotide
cuucggcucgcugcucccg

SEQ ID NO: 817842 - RNA, 19 nt, Artificial Sequence
  Description of Artificial Sequence: Synthetic oligonucleotide
cugucaccggguccccgcc

SEQ ID NO: 817843 - RNA, 19 nt, Artificial Sequence
  Description of Artificial Sequence: Synthetic oligonucleotide
ccuugugaccaauuacaca

SEQ ID NO: 817844 - RNA, 19 nt, Artificial Sequence
  Description of Artificial Sequence: Synthetic oligonucleotide
uuguaacaucagguugguc

SEQ ID NO: 817845 - RNA, 19 nt, Artificial Sequence
  Description of Artificial Sequence: Synthetic oligonucleotide
cauccgccucuuaagggaa

SEQ ID NO: 817846 - RNA, 19 nt, Artificial Sequence
  Description of Artificial Sequence: Synthetic oligonucleotide
auccgccucuuaagggaac

SEQ ID NO: 817847 - RNA, 19 nt, Artificial Sequence
  Description of Artificial Sequence: Synthetic oligonucleotide
auuaggccuugugaccaau

SEQ ID NO: 817848 - RNA, 19 nt, Artificial Sequence
  Description of Artificial Sequence: Synthetic oligonucleotide
uuacugcaauuaggccuug

SEQ ID NO: 817849 - RNA, 19 nt, Artificial Sequence
  Description of Artificial Sequence: Synthetic oligonucleotide
ucgugacacuggacaguaa

SEQ ID NO: 817850 - RNA, 19 nt, Artificial Sequence
  Description of Artificial Sequence: Synthetic oligonucleotide
gccuugugaccaauuacac

SEQ ID NO: 817851 - RNA, 19 nt, Artificial Sequence
  Description of Artificial Sequence: Synthetic oligonucleotide
cucgugacacuggacagua

SEQ ID NO: 817852 - RNA, 19 nt, Artificial Sequence
  Description of Artificial Sequence: Synthetic oligonucleotide
gcaaagguacuaaaccugu

SEQ ID NO: 817853 - RNA, 19 nt, Artificial Sequence
  Description of Artificial Sequence: Synthetic oligonucleotide
guuguaacaucagguuggu

SEQ ID NO: 817854 - RNA, 19 nt, Artificial Sequence
  Description of Artificial Sequence: Synthetic oligonucleotide
uaguaccucucgcgcuguc

SEQ ID NO: 817855 - RNA, 19 nt, Artificial Sequence
  Description of Artificial Sequence: Synthetic oligonucleotide
gguauugcagacacacaua

SEQ ID NO: 817856 - RNA, 19 nt, Artificial Sequence
  Description of Artificial Sequence: Synthetic oligonucleotide
cagagccgacuuuccaaca

SEQ ID NO: 817857 - RNA, 19 nt, Artificial Sequence
  Description of Artificial Sequence: Synthetic oligonucleotide
aggcaacgucuuuaaucua

SEQ ID NO: 817858 - RNA, 19 nt, Artificial Sequence
  Description of Artificial Sequence: Synthetic oligonucleotide
cccaaacguuaaugcauac

SEQ ID NO: 817859 - RNA, 19 nt, Artificial Sequence
  Description of Artificial Sequence: Synthetic oligonucleotide
cacggcggucuuugccgcc

SEQ ID NO: 817860 - RNA, 19 nt, Artificial Sequence
  Description of Artificial Sequence: Synthetic oligonucleotide
cauugucuugcuagguuuu

SEQ ID NO: 817861 - RNA, 19 nt, Artificial Sequence
  Description of Artificial Sequence: Synthetic oligonucleotide
uuugccgcacuaggucaua

SEQ ID NO: 817862 - RNA, 19 nt, Artificial Sequence
  Description of Artificial Sequence: Synthetic oligonucleotide
cuugcuagguuuugaccuu

SEQ ID NO: 817863 - RNA, 19 nt, Artificial Sequence
  Description of Artificial Sequence: Synthetic oligonucleotide
guuaaucaaagcgcuuauu

SEQ ID NO: 817864 - RNA, 19 nt, Artificial Sequence
  Description of Artificial Sequence: Synthetic oligonucleotide
agucuauauaggagcucuu

SEQ ID NO: 817865 - RNA, 19 nt, Artificial Sequence
  Description of Artificial Sequence: Synthetic oligonucleotide
ucgccgucgcuccgcguuc

SEQ ID NO: 817866 - RNA, 19 nt, Artificial Sequence
  Description of Artificial Sequence: Synthetic oligonucleotide
ccaaacguuaaugcauaca

SEQ ID NO: 817867 - RNA, 19 nt, Artificial Sequence
  Description of Artificial Sequence: Synthetic oligonucleotide
caccggguccccgccgucg

SEQ ID NO: 817868 - RNA, 19 nt, Artificial Sequence
  Description of Artificial Sequence: Synthetic oligonucleotide
caccguuuucauacaugua

SEQ ID NO: 817869 - RNA, 19 nt, Artificial Sequence
  Description of Artificial Sequence: Synthetic oligonucleotide
ggcgccacggcggucuuug

SEQ ID NO: 817870 - RNA, 19 nt, Artificial Sequence
  Description of Artificial Sequence: Synthetic oligonucleotide
gcggucuuugccgccgccg

SEQ ID NO: 817871 - RNA, 19 nt, Artificial Sequence
  Description of Artificial Sequence: Synthetic oligonucleotide
cccuucggcucgcugcucc

SEQ ID NO: 817872 - RNA, 19 nt, Artificial Sequence
  Description of Artificial Sequence: Synthetic oligonucleotide
ccgcguucccuucggcucg

SEQ ID NO: 817873 - RNA, 19 nt, Artificial Sequence
  Description of Artificial Sequence: Synthetic oligonucleotide
aaaguccguuuaagauguu

SEQ ID NO: 817874 - RNA, 19 nt, Artificial Sequence
  Description of Artificial Sequence: Synthetic oligonucleotide
ucaccggguccccgccguc

SEQ ID NO: 817875 - RNA, 19 nt, Artificial Sequence
  Description of Artificial Sequence: Synthetic oligonucleotide
cuccgcguucccuucggcu

SEQ ID NO: 817876 - RNA, 19 nt, Artificial Sequence
  Description of Artificial Sequence: Synthetic oligonucleotide
ccacggcggucuuugccgc

SEQ ID NO: 817877 - RNA, 19 nt, Artificial Sequence
  Description of Artificial Sequence: Synthetic oligonucleotide
gugaccaauuacacaugau

SEQ ID NO: 817878 - RNA, 19 nt, Artificial Sequence
  Description of Artificial Sequence: Synthetic oligonucleotide
ccauugucuugcuagguuu

SEQ ID NO: 817879 - RNA, 19 nt, Artificial Sequence
  Description of Artificial Sequence: Synthetic oligonucleotide
ccuucggcucgcugcuccc

SEQ ID NO: 817880 - RNA, 19 nt, Artificial Sequence
  Description of Artificial Sequence: Synthetic oligonucleotide
gucgccgucgcuccgcguu

SEQ ID NO: 817881 - RNA, 19 nt, Artificial Sequence
  Description of Artificial Sequence: Synthetic oligonucleotide
ccucucgcgcugucaccgg

SEQ ID NO: 817882 - RNA, 19 nt, Artificial Sequence
  Description of Artificial Sequence: Synthetic oligonucleotide
cccggagccaagaacgacu

SEQ ID NO: 817883 - RNA, 19 nt, Artificial Sequence
  Description of Artificial Sequence: Synthetic oligonucleotide
ggcggucuuugccgccgcc

SEQ ID NO: 817884 - RNA, 19 nt, Artificial Sequence
  Description of Artificial Sequence: Synthetic oligonucleotide
gcuccgcguucccuucggc

SEQ ID NO: 817885 - RNA, 19 nt, Artificial Sequence
  Description of Artificial Sequence: Synthetic oligonucleotide
cacugucuccacagguuuu

SEQ ID NO: 817886 - RNA, 19 nt, Artificial Sequence
  Description of Artificial Sequence: Synthetic oligonucleotide
cgccucuuaagggaaccac

SEQ ID NO: 817887 - RNA, 19 nt, Artificial Sequence
  Description of Artificial Sequence: Synthetic oligonucleotide
cgugacacuggacaguaau

SEQ ID NO: 817888 - RNA, 19 nt, Artificial Sequence
  Description of Artificial Sequence: Synthetic oligonucleotide
cgccacggcggucuuugcc

SEQ ID NO: 817889 - RNA, 19 nt, Artificial Sequence
  Description of Artificial Sequence: Synthetic oligonucleotide
ucccuucggcucgcugcuc

SEQ ID NO: 817890 - RNA, 19 nt, Artificial Sequence
  Description of Artificial Sequence: Synthetic oligonucleotide
gccgccgccgccgccgccg

SEQ ID NO: 817891 - RNA, 19 nt, Artificial Sequence
  Description of Artificial Sequence: Synthetic oligonucleotide
cgcuccgcguucccuucgg

SEQ ID NO: 817892 - RNA, 19 nt, Artificial Sequence
  Description of Artificial Sequence: Synthetic oligonucleotide
ccccggagccaagaacgac

SEQ ID NO: 817893 - RNA, 19 nt, Artificial Sequence
  Description of Artificial Sequence: Synthetic oligonucleotide
cccgccgccgccgccgccg

SEQ ID NO: 817894 - RNA, 19 nt, Artificial Sequence
  Description of Artificial Sequence: Synthetic oligonucleotide
gcgccacggcggucuuugc

SEQ ID NO: 817895 - RNA, 19 nt, Artificial Sequence
  Description of Artificial Sequence: Synthetic oligonucleotide
cucccggcgccacggcggu

SEQ ID NO: 817896 - RNA, 19 nt, Artificial Sequence
  Description of Artificial Sequence: Synthetic oligonucleotide
ccgcccgccgccgccgccg

SEQ ID NO: 817897 - RNA, 19 nt, Artificial Sequence
  Description of Artificial Sequence: Synthetic oligonucleotide
gccgccgccgccgccgcuc

SEQ ID NO: 817898 - RNA, 19 nt, Artificial Sequence
  Description of Artificial Sequence: Synthetic oligonucleotide
ucccggcgccacggcgguc

SEQ ID NO: 817899 - RNA, 19 nt, Artificial Sequence
  Description of Artificial Sequence: Synthetic oligonucleotide
cggcggucuuugccgccgc

SEQ ID NO: 817900 - RNA, 19 nt, Artificial Sequence
  Description of Artificial Sequence: Synthetic oligonucleotide
cgcguucccuucggcucgc

SEQ ID NO: 817901 - RNA, 19 nt, Artificial Sequence
  Description of Artificial Sequence: Synthetic oligonucleotide
cgccgucgcuccgcguucc

SEQ ID NO: 817902 - RNA, 19 nt, Artificial Sequence
  Description of Artificial Sequence: Synthetic oligonucleotide
cccggcgccacggcggucu

SEQ ID NO: 817903 - RNA, 19 nt, Artificial Sequence
  Description of Artificial Sequence: Synthetic oligonucleotide
cgucgcuccgcguucccuu

SEQ ID NO: 817904 - RNA, 19 nt, Artificial Sequence
  Description of Artificial Sequence: Synthetic oligonucleotide
ccgccgccgccgccgccgc

SEQ ID NO: 817905 - RNA, 19 nt, Artificial Sequence
  Description of Artificial Sequence: Synthetic oligonucleotide
gcccgccgccgccgccgcc

SEQ ID NO: 817906 - RNA, 19 nt, Artificial Sequence
  Description of Artificial Sequence: Synthetic oligonucleotide
cgcccgccgccgccgccgc

SEQ ID NO: 817907 - RNA, 19 nt, Artificial Sequence
  Description of Artificial Sequence: Synthetic oligonucleotide
cgccgccgccgccgccgcc

SEQ ID NO: 817908 - RNA, 19 nt, Artificial Sequence
  Description of Artificial Sequence: Synthetic oligonucleotide
ccggcgccacggcggucuu

SEQ ID NO: 817909 - RNA, 19 nt, Artificial Sequence
  Description of Artificial Sequence: Synthetic oligonucleotide
cgccgccgccgccgccgcu

SEQ ID NO: 817910 - RNA, 19 nt, Artificial Sequence
  Description of Artificial Sequence: Synthetic oligonucleotide
cggcgccacggcggucuuu

SEQ ID NO: 817911 - RNA, 19 nt, Artificial Sequence
  Description of Artificial Sequence: Synthetic oligonucleotide
uuugauggaaccaagaugu

SEQ ID NO: 817912 - RNA, 19 nt, Artificial Sequence
  Description of Artificial Sequence: Synthetic oligonucleotide
auuaauaacugucaaaucu

SEQ ID NO: 817913 - RNA, 19 nt, Artificial Sequence
  Description of Artificial Sequence: Synthetic oligonucleotide
acagacauaacuuuauugg

SEQ ID NO: 817914 - RNA, 19 nt, Artificial Sequence
  Description of Artificial Sequence: Synthetic oligonucleotide
agccgaaagauucugagcc

SEQ ID NO: 817915 - RNA, 19 nt, Artificial Sequence
  Description of Artificial Sequence: Synthetic oligonucleotide
auaucuccacaucagaugc

SEQ ID NO: 817916 - RNA, 19 nt, Artificial Sequence
  Description of Artificial Sequence: Synthetic oligonucleotide
uucaaaccgguuuugaugg

SEQ ID NO: 817917 - RNA, 19 nt, Artificial Sequence
  Description of Artificial Sequence: Synthetic oligonucleotide
uaucauaauggacaaaggc

SEQ ID NO: 817918 - RNA, 19 nt, Artificial Sequence
  Description of Artificial Sequence: Synthetic oligonucleotide
aagauucugagccccaccc

SEQ ID NO: 817919 - RNA, 19 nt, Artificial Sequence
  Description of Artificial Sequence: Synthetic oligonucleotide
aaucgaugaagucagccag

SEQ ID NO: 817920 - RNA, 19 nt, Artificial Sequence
  Description of Artificial Sequence: Synthetic oligonucleotide
gacacaagccuucaaaccg

SEQ ID NO: 817921 - RNA, 19 nt, Artificial Sequence
  Description of Artificial Sequence: Synthetic oligonucleotide
cuuaucauaauggacaaag

SEQ ID NO: 817922 - RNA, 19 nt, Artificial Sequence
  Description of Artificial Sequence: Synthetic oligonucleotide
ugauauucaccaaagcccc

SEQ ID NO: 817923 - RNA, 19 nt, Artificial Sequence
  Description of Artificial Sequence: Synthetic oligonucleotide
uugauauuaauaacuguca

SEQ ID NO: 817924 - RNA, 19 nt, Artificial Sequence
  Description of Artificial Sequence: Synthetic oligonucleotide
uuuauuggauacaaagugu

SEQ ID NO: 817925 - RNA, 19 nt, Artificial Sequence
  Description of Artificial Sequence: Synthetic oligonucleotide
ugcacggugguuuucaggg

SEQ ID NO: 817926 - RNA, 19 nt, Artificial Sequence
  Description of Artificial Sequence: Synthetic oligonucleotide
aaagauucugagccccacc

SEQ ID NO: 817927 - RNA, 19 nt, Artificial Sequence
  Description of Artificial Sequence: Synthetic oligonucleotide
auauuaauaacugucaaau

SEQ ID NO: 817928 - RNA, 19 nt, Artificial Sequence
  Description of Artificial Sequence: Synthetic oligonucleotide
ugcauuacugauauucacc

SEQ ID NO: 817929 - RNA, 19 nt, Artificial Sequence
  Description of Artificial Sequence: Synthetic oligonucleotide
cucaagacuaucuucguag

SEQ ID NO: 817930 - RNA, 19 nt, Artificial Sequence
  Description of Artificial Sequence: Synthetic oligonucleotide
uuacugauauucaccaaag

SEQ ID NO: 817931 - RNA, 19 nt, Artificial Sequence
  Description of Artificial Sequence: Synthetic oligonucleotide
gauaucuccacaucagaug

SEQ ID NO: 817932 - RNA, 19 nt, Artificial Sequence
  Description of Artificial Sequence: Synthetic oligonucleotide
ucuucaacaagcuccugag

SEQ ID NO: 817933 - RNA, 19 nt, Artificial Sequence
  Description of Artificial Sequence: Synthetic oligonucleotide
uuaauaacugucaaaucuu

SEQ ID NO: 817934 - RNA, 19 nt, Artificial Sequence
  Description of Artificial Sequence: Synthetic oligonucleotide
auuacugauauucaccaaa

SEQ ID NO: 817935 - RNA, 19 nt, Artificial Sequence
  Description of Artificial Sequence: Synthetic oligonucleotide
ugucaaaucuucuuccaug

SEQ ID NO: 817936 - RNA, 19 nt, Artificial Sequence
  Description of Artificial Sequence: Synthetic oligonucleotide
ugauauuaauaacugucaa

SEQ ID NO: 817937 - RNA, 19 nt, Artificial Sequence
  Description of Artificial Sequence: Synthetic oligonucleotide
agaaacgcucuccaacagc

SEQ ID NO: 817938 - RNA, 19 nt, Artificial Sequence
  Description of Artificial Sequence: Synthetic oligonucleotide
acuaucuucguaggaaggc

SEQ ID NO: 817939 - RNA, 19 nt, Artificial Sequence
  Description of Artificial Sequence: Synthetic oligonucleotide
uuauuggauacaaaguguu

SEQ ID NO: 817940 - RNA, 19 nt, Artificial Sequence
  Description of Artificial Sequence: Synthetic oligonucleotide
cuucaaaccgguuuugaug

SEQ ID NO: 817941 - RNA, 19 nt, Artificial Sequence
  Description of Artificial Sequence: Synthetic oligonucleotide
ucaagacuaucuucguagg

SEQ ID NO: 817942 - RNA, 19 nt, Artificial Sequence
  Description of Artificial Sequence: Synthetic oligonucleotide
gauauuaauaacugucaaa

SEQ ID NO: 817943 - RNA, 19 nt, Artificial Sequence
  Description of Artificial Sequence: Synthetic oligonucleotide
ugcuccgaagccaagacac

SEQ ID NO: 817944 - RNA, 19 nt, Artificial Sequence
  Description of Artificial Sequence: Synthetic oligonucleotide
ugucacaggaccagaaaca

SEQ ID NO: 817945 - RNA, 19 nt, Artificial Sequence
  Description of Artificial Sequence: Synthetic oligonucleotide
aucauaauggacaaaggcu

SEQ ID NO: 817946 - RNA, 19 nt, Artificial Sequence
  Description of Artificial Sequence: Synthetic oligonucleotide
gaaauugcgccuacugugg

SEQ ID NO: 817947 - RNA, 19 nt, Artificial Sequence
  Description of Artificial Sequence: Synthetic oligonucleotide
aaauugcgccuacuguggg

SEQ ID NO: 817948 - RNA, 19 nt, Artificial Sequence
  Description of Artificial Sequence: Synthetic oligonucleotide
auacaaaguguuagggugc

SEQ ID NO: 817949 - RNA, 19 nt, Artificial Sequence
  Description of Artificial Sequence: Synthetic oligonucleotide
aaaugcggggcccagugga

SEQ ID NO: 817950 - RNA, 19 nt, Artificial Sequence
  Description of Artificial Sequence: Synthetic oligonucleotide
agacuaucuucguaggaag

SEQ ID NO: 817951 - RNA, 19 nt, Artificial Sequence
  Description of Artificial Sequence: Synthetic oligonucleotide
ugggaaugggaccugucag

SEQ ID NO: 817952 - RNA, 19 nt, Artificial Sequence
  Description of Artificial Sequence: Synthetic oligonucleotide
cuacuguugauauuaauaa

SEQ ID NO: 817953 - RNA, 19 nt, Artificial Sequence
  Description of Artificial Sequence: Synthetic oligonucleotide
auaacugucaaaucuucuu

SEQ ID NO: 817954 - RNA, 19 nt, Artificial Sequence
  Description of Artificial Sequence: Synthetic oligonucleotide
uggugcaagugucacagga

SEQ ID NO: 817955 - RNA, 19 nt, Artificial Sequence
  Description of Artificial Sequence: Synthetic oligonucleotide
aaggauaucuccacaucag

SEQ ID NO: 817956 - RNA, 19 nt, Artificial Sequence
  Description of Artificial Sequence: Synthetic oligonucleotide
cuuccuuaucauaauggac

SEQ ID NO: 817957 - RNA, 19 nt, Artificial Sequence
  Description of Artificial Sequence: Synthetic oligonucleotide
gaaggggaggaacucgggg

SEQ ID NO: 817958 - RNA, 19 nt, Artificial Sequence
  Description of Artificial Sequence: Synthetic oligonucleotide
ggaaauugcgccuacugug

SEQ ID NO: 817959 - RNA, 19 nt, Artificial Sequence
  Description of Artificial Sequence: Synthetic oligonucleotide
auaauggacaaaggcuggc

SEQ ID NO: 817960 - RNA, 19 nt, Artificial Sequence
  Description of Artificial Sequence: Synthetic oligonucleotide
gaggaaauugcgccuacug

SEQ ID NO: 817961 - RNA, 19 nt, Artificial Sequence
  Description of Artificial Sequence: Synthetic oligonucleotide
caugagcccaggcaaaugc

SEQ ID NO: 817962 - RNA, 19 nt, Artificial Sequence
  Description of Artificial Sequence: Synthetic oligonucleotide
uaucuucguaggaaggcug

SEQ ID NO: 817963 - RNA, 19 nt, Artificial Sequence
  Description of Artificial Sequence: Synthetic oligonucleotide
uacuguugauauuaauaac

SEQ ID NO: 817964 - RNA, 19 nt, Artificial Sequence
  Description of Artificial Sequence: Synthetic oligonucleotide
aacaagcuccugaggaggc

SEQ ID NO: 817965 - RNA, 19 nt, Artificial Sequence
  Description of Artificial Sequence: Synthetic oligonucleotide
aaaccgguuuugauggaac

SEQ ID NO: 817966 - RNA, 19 nt, Artificial Sequence
  Description of Artificial Sequence: Synthetic oligonucleotide
ugggaugcauaucggagca

SEQ ID NO: 817967 - RNA, 19 nt, Artificial Sequence
  Description of Artificial Sequence: Synthetic oligonucleotide
aucacuacuguugauauua

SEQ ID NO: 817968 - RNA, 19 nt, Artificial Sequence
  Description of Artificial Sequence: Synthetic oligonucleotide
uguuagggugcagaagggg

SEQ ID NO: 817969 - RNA, 19 nt, Artificial Sequence
  Description of Artificial Sequence: Synthetic oligonucleotide
uggaguugcgggcaguucu

SEQ ID NO: 817970 - RNA, 19 nt, Artificial Sequence
  Description of Artificial Sequence: Synthetic oligonucleotide
cagcugaggaaauugcgcc

SEQ ID NO: 817971 - RNA, 19 nt, Artificial Sequence
  Description of Artificial Sequence: Synthetic oligonucleotide
auggcauagggccagcuga

SEQ ID NO: 817972 - RNA, 19 nt, Artificial Sequence
  Description of Artificial Sequence: Synthetic oligonucleotide
uauucaccaaagccccuag

SEQ ID NO: 817973 - RNA, 19 nt, Artificial Sequence
  Description of Artificial Sequence: Synthetic oligonucleotide
uaacaacccagaaacgcuc

SEQ ID NO: 817974 - RNA, 19 nt, Artificial Sequence
  Description of Artificial Sequence: Synthetic oligonucleotide
ucgcuuuccaaggauaucu

SEQ ID NO: 817975 - RNA, 19 nt, Artificial Sequence
  Description of Artificial Sequence: Synthetic oligonucleotide
gucacuagugcuucugagc

SEQ ID NO: 817976 - RNA, 19 nt, Artificial Sequence
  Description of Artificial Sequence: Synthetic oligonucleotide
uaucggagcagaucccucc

SEQ ID NO: 817977 - RNA, 19 nt, Artificial Sequence
  Description of Artificial Sequence: Synthetic oligonucleotide
cugggaugcauaucggagc

SEQ ID NO: 817978 - RNA, 19 nt, Artificial Sequence
  Description of Artificial Sequence: Synthetic oligonucleotide
aggaaauugcgccuacugu

SEQ ID NO: 817979 - RNA, 19 nt, Artificial Sequence
  Description of Artificial Sequence: Synthetic oligonucleotide
cgcaauaagcacaugagcc

SEQ ID NO: 817980 - RNA, 19 nt, Artificial Sequence
  Description of Artificial Sequence: Synthetic oligonucleotide
gaugcacaggggcaacggg

SEQ ID NO: 817981 - RNA, 19 nt, Artificial Sequence
  Description of Artificial Sequence: Synthetic oligonucleotide
agaucccuccaggauagcc

SEQ ID NO: 817982 - RNA, 19 nt, Artificial Sequence
  Description of Artificial Sequence: Synthetic oligonucleotide
aagugguuggcuguugcug

SEQ ID NO: 817983 - RNA, 19 nt, Artificial Sequence
  Description of Artificial Sequence: Synthetic oligonucleotide
uauuggauacaaaguguua

SEQ ID NO: 817984 - RNA, 19 nt, Artificial Sequence
  Description of Artificial Sequence: Synthetic oligonucleotide
uccuuaucauaauggacaa

SEQ ID NO: 817985 - RNA, 19 nt, Artificial Sequence
  Description of Artificial Sequence: Synthetic oligonucleotide
aagccuucaaaccgguuuu

SEQ ID NO: 817986 - RNA, 19 nt, Artificial Sequence
  Description of Artificial Sequence: Synthetic oligonucleotide
aguccccucuuccagaagu

SEQ ID NO: 817987 - RNA, 19 nt, Artificial Sequence
  Description of Artificial Sequence: Synthetic oligonucleotide
aauugcgccuacuguggga

SEQ ID NO: 817988 - RNA, 19 nt, Artificial Sequence
  Description of Artificial Sequence: Synthetic oligonucleotide
uucgcggcuguaacaaccc

SEQ ID NO: 817989 - RNA, 19 nt, Artificial Sequence
  Description of Artificial Sequence: Synthetic oligonucleotide
cuguaacaacccagaaacg

SEQ ID NO: 817990 - RNA, 19 nt, Artificial Sequence
  Description of Artificial Sequence: Synthetic oligonucleotide
acaggggcaacggggaccc

SEQ ID NO: 817991 - RNA, 19 nt, Artificial Sequence
  Description of Artificial Sequence: Synthetic oligonucleotide
cagacauaacuuuauugga

SEQ ID NO: 817992 - RNA, 19 nt, Artificial Sequence
  Description of Artificial Sequence: Synthetic oligonucleotide
aagccccuagagccgaaag

SEQ ID NO: 817993 - RNA, 19 nt, Artificial Sequence
  Description of Artificial Sequence: Synthetic oligonucleotide
acggaagccccucggguac

SEQ ID NO: 817994 - RNA, 19 nt, Artificial Sequence
  Description of Artificial Sequence: Synthetic oligonucleotide
auggacaaaggcuggccug

SEQ ID NO: 817995 - RNA, 19 nt, Artificial Sequence
  Description of Artificial Sequence: Synthetic oligonucleotide
aauaagcacaugagcccag

SEQ ID NO: 817996 - RNA, 19 nt, Artificial Sequence
  Description of Artificial Sequence: Synthetic oligonucleotide
ggguaugcuagguggaggg

SEQ ID NO: 817997 - RNA, 19 nt, Artificial Sequence
  Description of Artificial Sequence: Synthetic oligonucleotide
ggugguggcaccuugucac

SEQ ID NO: 817998 - RNA, 19 nt, Artificial Sequence
  Description of Artificial Sequence: Synthetic oligonucleotide
gcauuacugauauucacca

SEQ ID NO: 817999 - RNA, 19 nt, Artificial Sequence
  Description of Artificial Sequence: Synthetic oligonucleotide
caaacuccacaucuucuac

SEQ ID NO: 818000 - RNA, 19 nt, Artificial Sequence
  Description of Artificial Sequence: Synthetic oligonucleotide
ggacaaucgaugaagucag

SEQ ID NO: 818001 - RNA, 19 nt, Artificial Sequence
  Description of Artificial Sequence: Synthetic oligonucleotide
uaugcuagguggagggguc

SEQ ID NO: 818002 - RNA, 19 nt, Artificial Sequence
  Description of Artificial Sequence: Synthetic oligonucleotide
guugcgggcaguucuucag

SEQ ID NO: 818003 - RNA, 19 nt, Artificial Sequence
  Description of Artificial Sequence: Synthetic oligonucleotide
uccgaagccaagacacaca

SEQ ID NO: 818004 - RNA, 19 nt, Artificial Sequence
  Description of Artificial Sequence: Synthetic oligonucleotide
aggccuaagugguuggcug

SEQ ID NO: 818005 - RNA, 19 nt, Artificial Sequence
  Description of Artificial Sequence: Synthetic oligonucleotide
acuagugcuucugagcaga

SEQ ID NO: 818006 - RNA, 19 nt, Artificial Sequence
  Description of Artificial Sequence: Synthetic oligonucleotide
gugcauuacugauauucac

SEQ ID NO: 818007 - RNA, 19 nt, Artificial Sequence
  Description of Artificial Sequence: Synthetic oligonucleotide
caggagucccuucagggac

SEQ ID NO: 818008 - RNA, 19 nt, Artificial Sequence
  Description of Artificial Sequence: Synthetic oligonucleotide
agcagacgcagucgcgggc

SEQ ID NO: 818009 - RNA, 19 nt, Artificial Sequence
  Description of Artificial Sequence: Synthetic oligonucleotide
augcauaucggagcagauc

SEQ ID NO: 818010 - RNA, 19 nt, Artificial Sequence
  Description of Artificial Sequence: Synthetic oligonucleotide
agcagaucccuccaggaua

SEQ ID NO: 818011 - RNA, 19 nt, Artificial Sequence
  Description of Artificial Sequence: Synthetic oligonucleotide
uugauggaaccaagaugug

SEQ ID NO: 818012 - RNA, 19 nt, Artificial Sequence
  Description of Artificial Sequence: Synthetic oligonucleotide
uagagccgaaagauucuga

SEQ ID NO: 818013 - RNA, 19 nt, Artificial Sequence
  Description of Artificial Sequence: Synthetic oligonucleotide
agagaggccuaagugguug

SEQ ID NO: 818014 - RNA, 19 nt, Artificial Sequence
  Description of Artificial Sequence: Synthetic oligonucleotide
acaacccagaaacgcucuc

SEQ ID NO: 818015 - RNA, 19 nt, Artificial Sequence
  Description of Artificial Sequence: Synthetic oligonucleotide
ucuucguaggaaggcuggg

SEQ ID NO: 818016 - RNA, 19 nt, Artificial Sequence
  Description of Artificial Sequence: Synthetic oligonucleotide
aggauagccacagccagcu

SEQ ID NO: 818017 - RNA, 19 nt, Artificial Sequence
  Description of Artificial Sequence: Synthetic oligonucleotide
gggacaaucgaugaaguca

SEQ ID NO: 818018 - RNA, 19 nt, Artificial Sequence
  Description of Artificial Sequence: Synthetic oligonucleotide
ugccugacggugguggagg

SEQ ID NO: 818019 - RNA, 19 nt, Artificial Sequence
  Description of Artificial Sequence: Synthetic oligonucleotide
augcagccgcaauaagcac

SEQ ID NO: 818020 - RNA, 19 nt, Artificial Sequence
  Description of Artificial Sequence: Synthetic oligonucleotide
aucuucguaggaaggcugg

SEQ ID NO: 818021 - RNA, 19 nt, Artificial Sequence
  Description of Artificial Sequence: Synthetic oligonucleotide
ugaaugcuccgaagccaag

SEQ ID NO: 818022 - RNA, 19 nt, Artificial Sequence
  Description of Artificial Sequence: Synthetic oligonucleotide
ucugccucgggcuguauuu

SEQ ID NO: 818023 - RNA, 19 nt, Artificial Sequence
  Description of Artificial Sequence: Synthetic oligonucleotide
cacugucccaugcagccgc

SEQ ID NO: 818024 - RNA, 19 nt, Artificial Sequence
  Description of Artificial Sequence: Synthetic oligonucleotide
gcaacggggaccccguucg

SEQ ID NO: 818025 - RNA, 19 nt, Artificial Sequence
  Description of Artificial Sequence: Synthetic oligonucleotide
aacggggaccccguucgcg

SEQ ID NO: 818026 - RNA, 19 nt, Artificial Sequence
  Description of Artificial Sequence: Synthetic oligonucleotide
caaaucuucuuccauggcu

SEQ ID NO: 818027 - RNA, 19 nt, Artificial Sequence
  Description of Artificial Sequence: Synthetic oligonucleotide
agaggagaccucaagacua

SEQ ID NO: 818028 - RNA, 19 nt, Artificial Sequence
  Description of Artificial Sequence: Synthetic oligonucleotide
cucggguacaaucaccaca

SEQ ID NO: 818029 - RNA, 19 nt, Artificial Sequence
  Description of Artificial Sequence: Synthetic oligonucleotide
guaagagcccagguucagg

SEQ ID NO: 818030 - RNA, 19 nt, Artificial Sequence
  Description of Artificial Sequence: Synthetic oligonucleotide
guucgcggcuguaacaacc

SEQ ID NO: 818031 - RNA, 19 nt, Artificial Sequence
  Description of Artificial Sequence: Synthetic oligonucleotide
caaaguguuagggugcaga

SEQ ID NO: 818032 - RNA, 19 nt, Artificial Sequence
  Description of Artificial Sequence: Synthetic oligonucleotide
ugugucgucuugcuccuuu

SEQ ID NO: 818033 - RNA, 19 nt, Artificial Sequence
  Description of Artificial Sequence: Synthetic oligonucleotide
ucacuacuguugauauuaa

SEQ ID NO: 818034 - RNA, 19 nt, Artificial Sequence
  Description of Artificial Sequence: Synthetic oligonucleotide
cuccauuguggauggugag

SEQ ID NO: 818035 - RNA, 19 nt, Artificial Sequence
  Description of Artificial Sequence: Synthetic oligonucleotide
caauaagcacaugagccca

SEQ ID NO: 818036 - RNA, 19 nt, Artificial Sequence
  Description of Artificial Sequence: Synthetic oligonucleotide
cagaaacgcucuccaacag

SEQ ID NO: 818037 - RNA, 19 nt, Artificial Sequence
  Description of Artificial Sequence: Synthetic oligonucleotide
uccuccugcugaaccaaac

SEQ ID NO: 818038 - RNA, 19 nt, Artificial Sequence
  Description of Artificial Sequence: Synthetic oligonucleotide
cuugucaccuccacccuca

SEQ ID NO: 818039 - RNA, 19 nt, Artificial Sequence
  Description of Artificial Sequence: Synthetic oligonucleotide
agggguuaagagucaggcu

SEQ ID NO: 818040 - RNA, 19 nt, Artificial Sequence
  Description of Artificial Sequence: Synthetic oligonucleotide
cuagagccgaaagauucug

SEQ ID NO: 818041 - RNA, 19 nt, Artificial Sequence
  Description of Artificial Sequence: Synthetic oligonucleotide
cugcacggugguuuucagg

SEQ ID NO: 818042 - RNA, 19 nt, Artificial Sequence
  Description of Artificial Sequence: Synthetic oligonucleotide
agggacggaagccccucgg

SEQ ID NO: 818043 - RNA, 19 nt, Artificial Sequence
  Description of Artificial Sequence: Synthetic oligonucleotide
gaggacucuucuucaacaa

SEQ ID NO: 818044 - RNA, 19 nt, Artificial Sequence
  Description of Artificial Sequence: Synthetic oligonucleotide
gugggaaugggaccuguca

SEQ ID NO: 818045 - RNA, 19 nt, Artificial Sequence
  Description of Artificial Sequence: Synthetic oligonucleotide
cccuagagccgaaagauuc

SEQ ID NO: 818046 - RNA, 19 nt, Artificial Sequence
  Description of Artificial Sequence: Synthetic oligonucleotide
ugguuuucagggccaggaa

SEQ ID NO: 818047 - RNA, 19 nt, Artificial Sequence
  Description of Artificial Sequence: Synthetic oligonucleotide
caagaugugcauuacugau

SEQ ID NO: 818048 - RNA, 19 nt, Artificial Sequence
  Description of Artificial Sequence: Synthetic oligonucleotide
agccccuagagccgaaaga

SEQ ID NO: 818049 - RNA, 19 nt, Artificial Sequence
  Description of Artificial Sequence: Synthetic oligonucleotide
aguugcgggcaguucuuca

SEQ ID NO: 818050 - RNA, 19 nt, Artificial Sequence
  Description of Artificial Sequence: Synthetic oligonucleotide
ugcgccuacugugggaaug

SEQ ID NO: 818051 - RNA, 19 nt, Artificial Sequence
  Description of Artificial Sequence: Synthetic oligonucleotide
ucaaaccgguuuugaugga

SEQ ID NO: 818052 - RNA, 19 nt, Artificial Sequence
  Description of Artificial Sequence: Synthetic oligonucleotide
cugggugggacagacacca

SEQ ID NO: 818053 - RNA, 19 nt, Artificial Sequence
  Description of Artificial Sequence: Synthetic oligonucleotide
cuccgaagccaagacacac

SEQ ID NO: 818054 - RNA, 19 nt, Artificial Sequence
  Description of Artificial Sequence: Synthetic oligonucleotide
accucaagacuaucuucgu

SEQ ID NO: 818055 - RNA, 19 nt, Artificial Sequence
  Description of Artificial Sequence: Synthetic oligonucleotide
ugcggggcccaguggauug

SEQ ID NO: 818056 - RNA, 19 nt, Artificial Sequence
  Description of Artificial Sequence: Synthetic oligonucleotide
cacuagugcuucugagcag

SEQ ID NO: 818057 - RNA, 19 nt, Artificial Sequence
  Description of Artificial Sequence: Synthetic oligonucleotide
ccuaccaacaaggacagca

SEQ ID NO: 818058 - RNA, 19 nt, Artificial Sequence
  Description of Artificial Sequence: Synthetic oligonucleotide
auugcgccuacugugggaa

SEQ ID NO: 818059 - RNA, 19 nt, Artificial Sequence
  Description of Artificial Sequence: Synthetic oligonucleotide
gaaccaagaugugcauuac

SEQ ID NO: 818060 - RNA, 19 nt, Artificial Sequence
  Description of Artificial Sequence: Synthetic oligonucleotide
accgguuuugauggaacca

SEQ ID NO: 818061 - RNA, 19 nt, Artificial Sequence
  Description of Artificial Sequence: Synthetic oligonucleotide
cugaaugcuccgaagccaa

SEQ ID NO: 818062 - RNA, 19 nt, Artificial Sequence
  Description of Artificial Sequence: Synthetic oligonucleotide
auaucggagcagaucccuc

SEQ ID NO: 818063 - RNA, 19 nt, Artificial Sequence
  Description of Artificial Sequence: Synthetic oligonucleotide
guaacaacccagaaacgcu

SEQ ID NO: 818064 - RNA, 19 nt, Artificial Sequence
  Description of Artificial Sequence: Synthetic oligonucleotide
ucccaugcagccgcaauaa

SEQ ID NO: 818065 - RNA, 19 nt, Artificial Sequence
  Description of Artificial Sequence: Synthetic oligonucleotide
caagacuaucuucguagga

SEQ ID NO: 818066 - RNA, 19 nt, Artificial Sequence
  Description of Artificial Sequence: Synthetic oligonucleotide
gcaaaugcggggcccagug

SEQ ID NO: 818067 - RNA, 19 nt, Artificial Sequence
  Description of Artificial Sequence: Synthetic oligonucleotide
aucggagcagaucccucca

SEQ ID NO: 818068 - RNA, 19 nt, Artificial Sequence
  Description of Artificial Sequence: Synthetic oligonucleotide
ugcgggcaguucuucagaa

SEQ ID NO: 818069 - RNA, 19 nt, Artificial Sequence
  Description of Artificial Sequence: Synthetic oligonucleotide
auauucaccaaagccccua

SEQ ID NO: 818070 - RNA, 19 nt, Artificial Sequence
  Description of Artificial Sequence: Synthetic oligonucleotide
ccgaagccaagacacacag

SEQ ID NO: 818071 - RNA, 19 nt, Artificial Sequence
  Description of Artificial Sequence: Synthetic oligonucleotide
ccgcaauaagcacaugagc

SEQ ID NO: 818072 - RNA, 19 nt, Artificial Sequence
  Description of Artificial Sequence: Synthetic oligonucleotide
ccuuuuccuguggagaugc

SEQ ID NO: 818073 - RNA, 19 nt, Artificial Sequence
  Description of Artificial Sequence: Synthetic oligonucleotide
auggaaccaagaugugcau

SEQ ID NO: 818074 - RNA, 19 nt, Artificial Sequence
  Description of Artificial Sequence: Synthetic oligonucleotide
aggacugccugacgguggu

SEQ ID NO: 818075 - RNA, 19 nt, Artificial Sequence
  Description of Artificial Sequence: Synthetic oligonucleotide
ugaggaaauugcgccuacu

SEQ ID NO: 818076 - RNA, 19 nt, Artificial Sequence
  Description of Artificial Sequence: Synthetic oligonucleotide
cuaccucuccuccugcuga

SEQ ID NO: 818077 - RNA, 19 nt, Artificial Sequence
  Description of Artificial Sequence: Synthetic oligonucleotide
caguaagagcccagguuca

SEQ ID NO: 818078 - RNA, 19 nt, Artificial Sequence
  Description of Artificial Sequence: Synthetic oligonucleotide
gacggaagccccucgggua

SEQ ID NO: 818079 - RNA, 19 nt, Artificial Sequence
  Description of Artificial Sequence: Synthetic oligonucleotide
ggaccagaaacaggugggg

SEQ ID NO: 818080 - RNA, 19 nt, Artificial Sequence
  Description of Artificial Sequence: Synthetic oligonucleotide
gccagcugaggaaauugcg

SEQ ID NO: 818081 - RNA, 19 nt, Artificial Sequence
  Description of Artificial Sequence: Synthetic oligonucleotide
ggaugcacaggggcaacgg

SEQ ID NO: 818082 - RNA, 19 nt, Artificial Sequence
  Description of Artificial Sequence: Synthetic oligonucleotide
cugaggaaauugcgccuac

SEQ ID NO: 818083 - RNA, 19 nt, Artificial Sequence
  Description of Artificial Sequence: Synthetic oligonucleotide
gacucuucuucaacaagcu

SEQ ID NO: 818084 - RNA, 19 nt, Artificial Sequence
  Description of Artificial Sequence: Synthetic oligonucleotide
agucgcuuuccaaggauau

SEQ ID NO: 818085 - RNA, 19 nt, Artificial Sequence
  Description of Artificial Sequence: Synthetic oligonucleotide
gguuuugauggaaccaaga

SEQ ID NO: 818086 - RNA, 19 nt, Artificial Sequence
  Description of Artificial Sequence: Synthetic oligonucleotide
aggagaccucaagacuauc

SEQ ID NO: 818087 - RNA, 19 nt, Artificial Sequence
  Description of Artificial Sequence: Synthetic oligonucleotide
ggaugcauaucggagcaga

SEQ ID NO: 818088 - RNA, 19 nt, Artificial Sequence
  Description of Artificial Sequence: Synthetic oligonucleotide
ccaagaugugcauuacuga

SEQ ID NO: 818089 - RNA, 19 nt, Artificial Sequence
  Description of Artificial Sequence: Synthetic oligonucleotide
gguaugcuagguggagggg

SEQ ID NO: 818090 - RNA, 19 nt, Artificial Sequence
  Description of Artificial Sequence: Synthetic oligonucleotide
gggacggaagccccucggg

SEQ ID NO: 818091 - RNA, 19 nt, Artificial Sequence
  Description of Artificial Sequence: Synthetic oligonucleotide
gggguaugcuagguggagg

SEQ ID NO: 818092 - RNA, 19 nt, Artificial Sequence
  Description of Artificial Sequence: Synthetic oligonucleotide
agcgugggagccgucucag

SEQ ID NO: 818093 - RNA, 19 nt, Artificial Sequence
  Description of Artificial Sequence: Synthetic oligonucleotide
agcagacacaagccuucaa

SEQ ID NO: 818094 - RNA, 19 nt, Artificial Sequence
  Description of Artificial Sequence: Synthetic oligonucleotide
gucggugggccaguagcag

SEQ ID NO: 818095 - RNA, 19 nt, Artificial Sequence
  Description of Artificial Sequence: Synthetic oligonucleotide
ugguggcaccuugucaccu

SEQ ID NO: 818096 - RNA, 19 nt, Artificial Sequence
  Description of Artificial Sequence: Synthetic oligonucleotide
gacagacaccaggcuuggg

SEQ ID NO: 818097 - RNA, 19 nt, Artificial Sequence
  Description of Artificial Sequence: Synthetic oligonucleotide
cugucaggaggaggaacug

SEQ ID NO: 818098 - RNA, 19 nt, Artificial Sequence
  Description of Artificial Sequence: Synthetic oligonucleotide
ccucgggcuguauuuuggg

SEQ ID NO: 818099 - RNA, 19 nt, Artificial Sequence
  Description of Artificial Sequence: Synthetic oligonucleotide
aaugcggggcccaguggau

SEQ ID NO: 818100 - RNA, 19 nt, Artificial Sequence
  Description of Artificial Sequence: Synthetic oligonucleotide
cagggacggaagccccucg

SEQ ID NO: 818101 - RNA, 19 nt, Artificial Sequence
  Description of Artificial Sequence: Synthetic oligonucleotide
ccccuaccaacaaggacag

SEQ ID NO: 818102 - RNA, 19 nt, Artificial Sequence
  Description of Artificial Sequence: Synthetic oligonucleotide
gagucgcuuuccaaggaua

SEQ ID NO: 818103 - RNA, 19 nt, Artificial Sequence
  Description of Artificial Sequence: Synthetic oligonucleotide
cuaucuucguaggaaggcu

SEQ ID NO: 818104 - RNA, 19 nt, Artificial Sequence
  Description of Artificial Sequence: Synthetic oligonucleotide
ggggacaaucgaugaaguc

SEQ ID NO: 818105 - RNA, 19 nt, Artificial Sequence
  Description of Artificial Sequence: Synthetic oligonucleotide
cugccccugguucuuccac

SEQ ID NO: 818106 - RNA, 19 nt, Artificial Sequence
  Description of Artificial Sequence: Synthetic oligonucleotide
cuugggacagagaggccua

SEQ ID NO: 818107 - RNA, 19 nt, Artificial Sequence
  Description of Artificial Sequence: Synthetic oligonucleotide
gcaccuugucaccuccacc

SEQ ID NO: 818108 - RNA, 19 nt, Artificial Sequence
  Description of Artificial Sequence: Synthetic oligonucleotide
caaaccgguuuugauggaa

SEQ ID NO: 818109 - RNA, 19 nt, Artificial Sequence
  Description of Artificial Sequence: Synthetic oligonucleotide
gucccaugcagccgcaaua

SEQ ID NO: 818110 - RNA, 19 nt, Artificial Sequence
  Description of Artificial Sequence: Synthetic oligonucleotide
cauaucggagcagaucccu

SEQ ID NO: 818111 - RNA, 19 nt, Artificial Sequence
  Description of Artificial Sequence: Synthetic oligonucleotide
ggagucuguagguggcaga

SEQ ID NO: 818112 - RNA, 19 nt, Artificial Sequence
  Description of Artificial Sequence: Synthetic oligonucleotide
gucgcuuuccaaggauauc

SEQ ID NO: 818113 - RNA, 19 nt, Artificial Sequence
  Description of Artificial Sequence: Synthetic oligonucleotide
gguuaagagucaggcucug

SEQ ID NO: 818114 - RNA, 19 nt, Artificial Sequence
  Description of Artificial Sequence: Synthetic oligonucleotide
gcucuccccuaccaacaag

SEQ ID NO: 818115 - RNA, 19 nt, Artificial Sequence
  Description of Artificial Sequence: Synthetic oligonucleotide
gaugcauaucggagcagau

SEQ ID NO: 818116 - RNA, 19 nt, Artificial Sequence
  Description of Artificial Sequence: Synthetic oligonucleotide
gcgccuacugugggaaugg

SEQ ID NO: 818117 - RNA, 19 nt, Artificial Sequence
  Description of Artificial Sequence: Synthetic oligonucleotide
gcauaucggagcagauccc

SEQ ID NO: 818118 - RNA, 19 nt, Artificial Sequence
  Description of Artificial Sequence: Synthetic oligonucleotide
acggugguuuucagggcca

SEQ ID NO: 818119 - RNA, 19 nt, Artificial Sequence
  Description of Artificial Sequence: Synthetic oligonucleotide
ggagaccucaagacuaucu

SEQ ID NO: 818120 - RNA, 19 nt, Artificial Sequence
  Description of Artificial Sequence: Synthetic oligonucleotide
cuagugcuucugagcagaa

SEQ ID NO: 818121 - RNA, 19 nt, Artificial Sequence
  Description of Artificial Sequence: Synthetic oligonucleotide
ggacaaaggcuggccuggg

SEQ ID NO: 818122 - RNA, 19 nt, Artificial Sequence
  Description of Artificial Sequence: Synthetic oligonucleotide
cgguuuugauggaaccaag

SEQ ID NO: 818123 - RNA, 19 nt, Artificial Sequence
  Description of Artificial Sequence: Synthetic oligonucleotide
ggacugcaacaccugcuga

SEQ ID NO: 818124 - RNA, 19 nt, Artificial Sequence
  Description of Artificial Sequence: Synthetic oligonucleotide
caacggggaccccguucgc

SEQ ID NO: 818125 - RNA, 19 nt, Artificial Sequence
  Description of Artificial Sequence: Synthetic oligonucleotide
ggcaacggggaccccguuc

SEQ ID NO: 818126 - RNA, 19 nt, Artificial Sequence
  Description of Artificial Sequence: Synthetic oligonucleotide
gguggcaccuugucaccuc

SEQ ID NO: 818127 - RNA, 19 nt, Artificial Sequence
  Description of Artificial Sequence: Synthetic oligonucleotide
cggagcagaucccuccagg

SEQ ID NO: 818128 - RNA, 19 nt, Artificial Sequence
  Description of Artificial Sequence: Synthetic oligonucleotide
caguccccucuuccagaag

SEQ ID NO: 818129 - RNA, 19 nt, Artificial Sequence
  Description of Artificial Sequence: Synthetic oligonucleotide
gagccgucucaggcccugg

SEQ ID NO: 818130 - RNA, 19 nt, Artificial Sequence
  Description of Artificial Sequence: Synthetic oligonucleotide
ccugucaggaggaggaacu

SEQ ID NO: 818131 - RNA, 19 nt, Artificial Sequence
  Description of Artificial Sequence: Synthetic oligonucleotide
cacaagccuucaaaccggu

SEQ ID NO: 818132 - RNA, 19 nt, Artificial Sequence
  Description of Artificial Sequence: Synthetic oligonucleotide
gggguguaucagagcagag

SEQ ID NO: 818133 - RNA, 19 nt, Artificial Sequence
  Description of Artificial Sequence: Synthetic oligonucleotide
uugcgccuacugugggaau

SEQ ID NO: 818134 - RNA, 19 nt, Artificial Sequence
  Description of Artificial Sequence: Synthetic oligonucleotide
gaggagaccucaagacuau

SEQ ID NO: 818135 - RNA, 19 nt, Artificial Sequence
  Description of Artificial Sequence: Synthetic oligonucleotide
gucccacuaggagccagga

SEQ ID NO: 818136 - RNA, 19 nt, Artificial Sequence
  Description of Artificial Sequence: Synthetic oligonucleotide
cagcgugggagccgucuca

SEQ ID NO: 818137 - RNA, 19 nt, Artificial Sequence
  Description of Artificial Sequence: Synthetic oligonucleotide
ccaggcaaaugcggggccc

SEQ ID NO: 818138 - RNA, 19 nt, Artificial Sequence
  Description of Artificial Sequence: Synthetic oligonucleotide
caggcaaaugcggggccca

SEQ ID NO: 818139 - RNA, 19 nt, Artificial Sequence
  Description of Artificial Sequence: Synthetic oligonucleotide
ggguuaagagucaggcucu

SEQ ID NO: 818140 - RNA, 19 nt, Artificial Sequence
  Description of Artificial Sequence: Synthetic oligonucleotide
cagggcgagagggcaccag

SEQ ID NO: 818141 - RNA, 19 nt, Artificial Sequence
  Description of Artificial Sequence: Synthetic oligonucleotide
gcugaggaaauugcgccua

SEQ ID NO: 818142 - RNA, 19 nt, Artificial Sequence
  Description of Artificial Sequence: Synthetic oligonucleotide
cugggaggggagcaccucu

SEQ ID NO: 818143 - RNA, 19 nt, Artificial Sequence
  Description of Artificial Sequence: Synthetic oligonucleotide
cccaugcagccgcaauaag

SEQ ID NO: 818144 - RNA, 19 nt, Artificial Sequence
  Description of Artificial Sequence: Synthetic oligonucleotide
ggacggaagccccucgggu

SEQ ID NO: 818145 - RNA, 19 nt, Artificial Sequence
  Description of Artificial Sequence: Synthetic oligonucleotide
ccgguuuugauggaaccaa

SEQ ID NO: 818146 - RNA, 19 nt, Artificial Sequence
  Description of Artificial Sequence: Synthetic oligonucleotide
accccguucgcggcuguaa

SEQ ID NO: 818147 - RNA, 19 nt, Artificial Sequence
  Description of Artificial Sequence: Synthetic oligonucleotide
gcgagagggcaccaggccu

SEQ ID NO: 818148 - RNA, 19 nt, Artificial Sequence
  Description of Artificial Sequence: Synthetic oligonucleotide
gcgugggagccgucucagg

SEQ ID NO: 818149 - RNA, 19 nt, Artificial Sequence
  Description of Artificial Sequence: Synthetic oligonucleotide
cagaucccuccaggauagc

SEQ ID NO: 818150 - RNA, 19 nt, Artificial Sequence
  Description of Artificial Sequence: Synthetic oligonucleotide
ccuagagccgaaagauucu

SEQ ID NO: 818151 - RNA, 19 nt, Artificial Sequence
  Description of Artificial Sequence: Synthetic oligonucleotide
gggucccacuaggagccag

SEQ ID NO: 818152 - RNA, 19 nt, Artificial Sequence
  Description of Artificial Sequence: Synthetic oligonucleotide
ccucaagacuaucuucgua

SEQ ID NO: 818153 - RNA, 19 nt, Artificial Sequence
  Description of Artificial Sequence: Synthetic oligonucleotide
gccugagcucugaagggga

SEQ ID NO: 818154 - RNA, 19 nt, Artificial Sequence
  Description of Artificial Sequence: Synthetic oligonucleotide
gccccucggguacaaucac

SEQ ID NO: 818155 - RNA, 19 nt, Artificial Sequence
  Description of Artificial Sequence: Synthetic oligonucleotide
gagucccuucagggaccag

SEQ ID NO: 818156 - RNA, 19 nt, Artificial Sequence
  Description of Artificial Sequence: Synthetic oligonucleotide
gcaacaccugcugaaugcu

SEQ ID NO: 818157 - RNA, 19 nt, Artificial Sequence
  Description of Artificial Sequence: Synthetic oligonucleotide
gcacaggggcaacggggac

SEQ ID NO: 818158 - RNA, 19 nt, Artificial Sequence
  Description of Artificial Sequence: Synthetic oligonucleotide
augcggggcccaguggauu

SEQ ID NO: 818159 - RNA, 19 nt, Artificial Sequence
  Description of Artificial Sequence: Synthetic oligonucleotide
gggaggacugccugacggu

SEQ ID NO: 818160 - RNA, 19 nt, Artificial Sequence
  Description of Artificial Sequence: Synthetic oligonucleotide
ggagucccuucagggacca

SEQ ID NO: 818161 - RNA, 19 nt, Artificial Sequence
  Description of Artificial Sequence: Synthetic oligonucleotide
ccccguucgcggcuguaac

SEQ ID NO: 818162 - RNA, 19 nt, Artificial Sequence
  Description of Artificial Sequence: Synthetic oligonucleotide
ccagcgugggagccgucuc

SEQ ID NO: 818163 - RNA, 19 nt, Artificial Sequence
  Description of Artificial Sequence: Synthetic oligonucleotide
gcuccgaagccaagacaca

SEQ ID NO: 818164 - RNA, 19 nt, Artificial Sequence
  Description of Artificial Sequence: Synthetic oligonucleotide
cccguucgcggcuguaaca

SEQ ID NO: 818165 - RNA, 19 nt, Artificial Sequence
  Description of Artificial Sequence: Synthetic oligonucleotide
gugucgucuugcuccuuuu

SEQ ID NO: 818166 - RNA, 19 nt, Artificial Sequence
  Description of Artificial Sequence: Synthetic oligonucleotide
cguucgcggcuguaacaac

SEQ ID NO: 818167 - RNA, 19 nt, Artificial Sequence
  Description of Artificial Sequence: Synthetic oligonucleotide
gcggggcccaguggauugg

SEQ ID NO: 818168 - RNA, 19 nt, Artificial Sequence
  Description of Artificial Sequence: Synthetic oligonucleotide
cagagcagagcaggucacu

SEQ ID NO: 818169 - RNA, 19 nt, Artificial Sequence
  Description of Artificial Sequence: Synthetic oligonucleotide
ccguucgcggcuguaacaa

SEQ ID NO: 818170 - RNA, 19 nt, Artificial Sequence
  Description of Artificial Sequence: Synthetic oligonucleotide
ccugacggugguggaggug

SEQ ID NO: 818171 - RNA, 19 nt, Artificial Sequence
  Description of Artificial Sequence: Synthetic oligonucleotide
ggacugccugacgguggug

SEQ ID NO: 818172 - RNA, 19 nt, Artificial Sequence
  Description of Artificial Sequence: Synthetic oligonucleotide
gaccccguucgcggcugua

SEQ ID NO: 818173 - RNA, 19 nt, Artificial Sequence
  Description of Artificial Sequence: Synthetic oligonucleotide
cugggucaggugguggcuu

SEQ ID NO: 818174 - RNA, 19 nt, Artificial Sequence
  Description of Artificial Sequence: Synthetic oligonucleotide
gguggagguccaccuucuu

SEQ ID NO: 818175 - RNA, 19 nt, Artificial Sequence
  Description of Artificial Sequence: Synthetic oligonucleotide
gccugacggugguggaggu

SEQ ID NO: 818176 - RNA, 19 nt, Artificial Sequence
  Description of Artificial Sequence: Synthetic oligonucleotide
cggcuguaacaacccagaa

SEQ ID NO: 818177 - RNA, 19 nt, Artificial Sequence
  Description of Artificial Sequence: Synthetic oligonucleotide
ccccuagagccgaaagauu

SEQ ID NO: 818178 - RNA, 19 nt, Artificial Sequence
  Description of Artificial Sequence: Synthetic oligonucleotide
ggcugucggugggccagua

SEQ ID NO: 818179 - RNA, 19 nt, Artificial Sequence
  Description of Artificial Sequence: Synthetic oligonucleotide
ggaccccguucgcggcugu

SEQ ID NO: 818180 - RNA, 19 nt, Artificial Sequence
  Description of Artificial Sequence: Synthetic oligonucleotide
gggcaacggggaccccguu

SEQ ID NO: 818181 - RNA, 19 nt, Artificial Sequence
  Description of Artificial Sequence: Synthetic oligonucleotide
cccuggaguugcgggcagu

SEQ ID NO: 818182 - RNA, 19 nt, Artificial Sequence
  Description of Artificial Sequence: Synthetic oligonucleotide
aaggauugaaguuuugccc

SEQ ID NO: 818183 - RNA, 19 nt, Artificial Sequence
  Description of Artificial Sequence: Synthetic oligonucleotide
ugaacuucgagccugagcc

SEQ ID NO: 818184 - RNA, 19 nt, Artificial Sequence
  Description of Artificial Sequence: Synthetic oligonucleotide
gaaguuguggguuauacgc

SEQ ID NO: 818185 - RNA, 19 nt, Artificial Sequence
  Description of Artificial Sequence: Synthetic oligonucleotide
uaaauauaaguccagcuac

SEQ ID NO: 818186 - RNA, 19 nt, Artificial Sequence
  Description of Artificial Sequence: Synthetic oligonucleotide
cauuaauaaaugaacuucg

SEQ ID NO: 818187 - RNA, 19 nt, Artificial Sequence
  Description of Artificial Sequence: Synthetic oligonucleotide
aaguaaucauccaagcucc

SEQ ID NO: 818188 - RNA, 19 nt, Artificial Sequence
  Description of Artificial Sequence: Synthetic oligonucleotide
uauaaguccagcuacuagc

SEQ ID NO: 818189 - RNA, 19 nt, Artificial Sequence
  Description of Artificial Sequence: Synthetic oligonucleotide
uuuauuguguccaacacau

SEQ ID NO: 818190 - RNA, 19 nt, Artificial Sequence
  Description of Artificial Sequence: Synthetic oligonucleotide
cuucuuggaguuaagaggg

SEQ ID NO: 818191 - RNA, 19 nt, Artificial Sequence
  Description of Artificial Sequence: Synthetic oligonucleotide
uuaagaggggacaaaagug

SEQ ID NO: 818192 - RNA, 19 nt, Artificial Sequence
  Description of Artificial Sequence: Synthetic oligonucleotide
cucaauagagcccacauag

SEQ ID NO: 818193 - RNA, 19 nt, Artificial Sequence
  Description of Artificial Sequence: Synthetic oligonucleotide
ucuaacucagguaaggugu

SEQ ID NO: 818194 - RNA, 19 nt, Artificial Sequence
  Description of Artificial Sequence: Synthetic oligonucleotide
uuauacgcucacuugauag

SEQ ID NO: 818195 - RNA, 19 nt, Artificial Sequence
  Description of Artificial Sequence: Synthetic oligonucleotide
ggcauauaaauacagagag

SEQ ID NO: 818196 - RNA, 19 nt, Artificial Sequence
  Description of Artificial Sequence: Synthetic oligonucleotide
aggaaauugagagaguugg

SEQ ID NO: 818197 - RNA, 19 nt, Artificial Sequence
  Description of Artificial Sequence: Synthetic oligonucleotide
agcaaucaaguucacuugc

SEQ ID NO: 818198 - RNA, 19 nt, Artificial Sequence
  Description of Artificial Sequence: Synthetic oligonucleotide
uauguagacauaagugucc

SEQ ID NO: 818199 - RNA, 19 nt, Artificial Sequence
  Description of Artificial Sequence: Synthetic oligonucleotide
caggcauauaaauacagag

SEQ ID NO: 818200 - RNA, 19 nt, Artificial Sequence
  Description of Artificial Sequence: Synthetic oligonucleotide
aauaccuggucacuuucuc

SEQ ID NO: 818201 - RNA, 19 nt, Artificial Sequence
  Description of Artificial Sequence: Synthetic oligonucleotide
agagacacuauguagacau

SEQ ID NO: 818202 - RNA, 19 nt, Artificial Sequence
  Description of Artificial Sequence: Synthetic oligonucleotide
ucuaaguaaucauccaagc

SEQ ID NO: 818203 - RNA, 19 nt, Artificial Sequence
  Description of Artificial Sequence: Synthetic oligonucleotide
aacgaggagggcuggacac

SEQ ID NO: 818204 - RNA, 19 nt, Artificial Sequence
  Description of Artificial Sequence: Synthetic oligonucleotide
agcacauauaacugugcgc

SEQ ID NO: 818205 - RNA, 19 nt, Artificial Sequence
  Description of Artificial Sequence: Synthetic oligonucleotide
aaauugagagaguuggaau

SEQ ID NO: 818206 - RNA, 19 nt, Artificial Sequence
  Description of Artificial Sequence: Synthetic oligonucleotide
acgacguugcuccugaagg

SEQ ID NO: 818207 - RNA, 19 nt, Artificial Sequence
  Description of Artificial Sequence: Synthetic oligonucleotide
uagugucuaacucagguaa

SEQ ID NO: 818208 - RNA, 19 nt, Artificial Sequence
  Description of Artificial Sequence: Synthetic oligonucleotide
aacugugcgcucauaauac

SEQ ID NO: 818209 - RNA, 19 nt, Artificial Sequence
  Description of Artificial Sequence: Synthetic oligonucleotide
uaucccaccuucaccaagg

SEQ ID NO: 818210 - RNA, 19 nt, Artificial Sequence
  Description of Artificial Sequence: Synthetic oligonucleotide
ucacuugauagcacaagcc

SEQ ID NO: 818211 - RNA, 19 nt, Artificial Sequence
  Description of Artificial Sequence: Synthetic oligonucleotide
uauaacugugcgcucauaa

SEQ ID NO: 818212 - RNA, 19 nt, Artificial Sequence
  Description of Artificial Sequence: Synthetic oligonucleotide
gucuacacgacguugcucc

SEQ ID NO: 818213 - RNA, 19 nt, Artificial Sequence
  Description of Artificial Sequence: Synthetic oligonucleotide
acuugauagcacaagcccc

SEQ ID NO: 818214 - RNA, 19 nt, Artificial Sequence
  Description of Artificial Sequence: Synthetic oligonucleotide
cuuacugacuggaagaaca

SEQ ID NO: 818215 - RNA, 19 nt, Artificial Sequence
  Description of Artificial Sequence: Synthetic oligonucleotide
uguucuugcgacugagggg

SEQ ID NO: 818216 - RNA, 19 nt, Artificial Sequence
  Description of Artificial Sequence: Synthetic oligonucleotide
aaggcucuaaguaaucauc

SEQ ID NO: 818217 - RNA, 19 nt, Artificial Sequence
  Description of Artificial Sequence: Synthetic oligonucleotide
auauaaguccagcuacuag

SEQ ID NO: 818218 - RNA, 19 nt, Artificial Sequence
  Description of Artificial Sequence: Synthetic oligonucleotide
augaacuucgagccugagc

SEQ ID NO: 818219 - RNA, 19 nt, Artificial Sequence
  Description of Artificial Sequence: Synthetic oligonucleotide
cacuugauagcacaagccc

SEQ ID NO: 818220 - RNA, 19 nt, Artificial Sequence
  Description of Artificial Sequence: Synthetic oligonucleotide
aggauugaaguuuugccca

SEQ ID NO: 818221 - RNA, 19 nt, Artificial Sequence
  Description of Artificial Sequence: Synthetic oligonucleotide
aacgauucucgacugucug

SEQ ID NO: 818222 - RNA, 19 nt, Artificial Sequence
  Description of Artificial Sequence: Synthetic oligonucleotide
uguuauuggcaggaaauug

SEQ ID NO: 818223 - RNA, 19 nt, Artificial Sequence
  Description of Artificial Sequence: Synthetic oligonucleotide
aguuguggguuauacgcuc

SEQ ID NO: 818224 - RNA, 19 nt, Artificial Sequence
  Description of Artificial Sequence: Synthetic oligonucleotide
uucccuuacugacuggaag

SEQ ID NO: 818225 - RNA, 19 nt, Artificial Sequence
  Description of Artificial Sequence: Synthetic oligonucleotide
uauacgcucacuugauagc

SEQ ID NO: 818226 - RNA, 19 nt, Artificial Sequence
  Description of Artificial Sequence: Synthetic oligonucleotide
uuacugacuggaagaacag

SEQ ID NO: 818227 - RNA, 19 nt, Artificial Sequence
  Description of Artificial Sequence: Synthetic oligonucleotide
gaagagacacuauguagac

SEQ ID NO: 818228 - RNA, 19 nt, Artificial Sequence
  Description of Artificial Sequence: Synthetic oligonucleotide
agaaaaugugauguaagcu

SEQ ID NO: 818229 - RNA, 19 nt, Artificial Sequence
  Description of Artificial Sequence: Synthetic oligonucleotide
uggccuagaaggcuguucc

SEQ ID NO: 818230 - RNA, 19 nt, Artificial Sequence
  Description of Artificial Sequence: Synthetic oligonucleotide
uaacugugcgcucauaaua

SEQ ID NO: 818231 - RNA, 19 nt, Artificial Sequence
  Description of Artificial Sequence: Synthetic oligonucleotide
gaggagccaacccuaaacc

SEQ ID NO: 818232 - RNA, 19 nt, Artificial Sequence
  Description of Artificial Sequence: Synthetic oligonucleotide
  modified_base (18)..(18): a, c, u, g, unknown or other
ucaaccaaugaccucugnu

SEQ ID NO: 818233 - RNA, 19 nt, Artificial Sequence
  Description of Artificial Sequence: Synthetic oligonucleotide
agaagcucaaggcgggcac

SEQ ID NO: 818234 - RNA, 19 nt, Artificial Sequence
  Description of Artificial Sequence: Synthetic oligonucleotide
aggacguagccaucagugc

SEQ ID NO: 818235 - RNA, 19 nt, Artificial Sequence
  Description of Artificial Sequence: Synthetic oligonucleotide
aaauauaaguccagcuacu

SEQ ID NO: 818236 - RNA, 19 nt, Artificial Sequence
  Description of Artificial Sequence: Synthetic oligonucleotide
guuggaaucccugauagga

SEQ ID NO: 818237 - RNA, 19 nt, Artificial Sequence
  Description of Artificial Sequence: Synthetic oligonucleotide
ugucaggcauauaaauaca

SEQ ID NO: 818238 - RNA, 19 nt, Artificial Sequence
  Description of Artificial Sequence: Synthetic oligonucleotide
agcucaacucgcugaaacg

SEQ ID NO: 818239 - RNA, 19 nt, Artificial Sequence
  Description of Artificial Sequence: Synthetic oligonucleotide
  modified_base (3)..(3): a, c, u, g, unknown or other
ugnucccagagcaggaaga

SEQ ID NO: 818240 - RNA, 19 nt, Artificial Sequence
  Description of Artificial Sequence: Synthetic oligonucleotide
gagaccccgaguaucauag

SEQ ID NO: 818241 - RNA, 19 nt, Artificial Sequence
  Description of Artificial Sequence: Synthetic oligonucleotide
ucccuuacugacuggaaga

SEQ ID NO: 818242 - RNA, 19 nt, Artificial Sequence
  Description of Artificial Sequence: Synthetic oligonucleotide
ugggauagcgaagaaagaa

SEQ ID NO: 818243 - RNA, 19 nt, Artificial Sequence
  Description of Artificial Sequence: Synthetic oligonucleotide
agcacucccgcugaggcgc

SEQ ID NO: 818244 - RNA, 19 nt, Artificial Sequence
  Description of Artificial Sequence: Synthetic oligonucleotide
ugggcaaguccacaggcug

SEQ ID NO: 818245 - RNA, 19 nt, Artificial Sequence
  Description of Artificial Sequence: Synthetic oligonucleotide
acccacuaugggcaagucc

SEQ ID NO: 818246 - RNA, 19 nt, Artificial Sequence
  Description of Artificial Sequence: Synthetic oligonucleotide
agauggguggagaucagac

SEQ ID NO: 818247 - RNA, 19 nt, Artificial Sequence
  Description of Artificial Sequence: Synthetic oligonucleotide
ggauagcgaagaaagaagg

SEQ ID NO: 818248 - RNA, 19 nt, Artificial Sequence
  Description of Artificial Sequence: Synthetic oligonucleotide
aaaaugccacucccaggag

SEQ ID NO: 818249 - RNA, 19 nt, Artificial Sequence
  Description of Artificial Sequence: Synthetic oligonucleotide
guuaagaggggacaaaagu

SEQ ID NO: 818250 - RNA, 19 nt, Artificial Sequence
  Description of Artificial Sequence: Synthetic oligonucleotide
caaggugucaggcauauaa

SEQ ID NO: 818251 - RNA, 19 nt, Artificial Sequence
  Description of Artificial Sequence: Synthetic oligonucleotide
uggguuauacgcucacuug

SEQ ID NO: 818252 - RNA, 19 nt, Artificial Sequence
  Description of Artificial Sequence: Synthetic oligonucleotide
ucaauagagcccacauaga

SEQ ID NO: 818253 - RNA, 19 nt, Artificial Sequence
  Description of Artificial Sequence: Synthetic oligonucleotide
agcggcuuaucccaccuuc

SEQ ID NO: 818254 - RNA, 19 nt, Artificial Sequence
  Description of Artificial Sequence: Synthetic oligonucleotide
gaaguuuugcccacagaug

SEQ ID NO: 818255 - RNA, 19 nt, Artificial Sequence
  Description of Artificial Sequence: Synthetic oligonucleotide
ccgaguaucauagaaacgc

SEQ ID NO: 818256 - RNA, 19 nt, Artificial Sequence
  Description of Artificial Sequence: Synthetic oligonucleotide
aaggucaggguaagggacg

SEQ ID NO: 818257 - RNA, 19 nt, Artificial Sequence
  Description of Artificial Sequence: Synthetic oligonucleotide
ccaugcuuagccuucaacc

SEQ ID NO: 818258 - RNA, 19 nt, Artificial Sequence
  Description of Artificial Sequence: Synthetic oligonucleotide
uggggacuaccauggaagg

SEQ ID NO: 818259 - RNA, 19 nt, Artificial Sequence
  Description of Artificial Sequence: Synthetic oligonucleotide
ggucugucucaauagagcc

SEQ ID NO: 818260 - RNA, 19 nt, Artificial Sequence
  Description of Artificial Sequence: Synthetic oligonucleotide
uccugaaggucacacuugu

SEQ ID NO: 818261 - RNA, 19 nt, Artificial Sequence
  Description of Artificial Sequence: Synthetic oligonucleotide
cauagaaacgcaccugcuc

SEQ ID NO: 818262 - RNA, 19 nt, Artificial Sequence
  Description of Artificial Sequence: Synthetic oligonucleotide
  modified_base (9)..(9): a, c, u, g, unknown or other
gaccucugnucccagagca

SEQ ID NO: 818263 - RNA, 19 nt, Artificial Sequence
  Description of Artificial Sequence: Synthetic oligonucleotide
aauauaaguccagcuacua

SEQ ID NO: 818264 - RNA, 19 nt, Artificial Sequence
  Description of Artificial Sequence: Synthetic oligonucleotide
auuaauaaaugaacuucga

SEQ ID NO: 818265 - RNA, 19 nt, Artificial Sequence
  Description of Artificial Sequence: Synthetic oligonucleotide
agauaaaugaaaggcucca

SEQ ID NO: 818266 - RNA, 19 nt, Artificial Sequence
  Description of Artificial Sequence: Synthetic oligonucleotide
uucuuggaguuaagagggg

SEQ ID NO: 818267 - RNA, 19 nt, Artificial Sequence
  Description of Artificial Sequence: Synthetic oligonucleotide
agggacgaggagccaaccc

SEQ ID NO: 818268 - RNA, 19 nt, Artificial Sequence
  Description of Artificial Sequence: Synthetic oligonucleotide
gaugccuggccacacacga

SEQ ID NO: 818269 - RNA, 19 nt, Artificial Sequence
  Description of Artificial Sequence: Synthetic oligonucleotide
cuugauagcacaagcccca

SEQ ID NO: 818270 - RNA, 19 nt, Artificial Sequence
  Description of Artificial Sequence: Synthetic oligonucleotide
aggaccacgauggugaccu

SEQ ID NO: 818271 - RNA, 19 nt, Artificial Sequence
  Description of Artificial Sequence: Synthetic oligonucleotide
uggagaaaaugugauguaa

SEQ ID NO: 818272 - RNA, 19 nt, Artificial Sequence
  Description of Artificial Sequence: Synthetic oligonucleotide
ucauagaaacgcaccugcu

SEQ ID NO: 818273 - RNA, 19 nt, Artificial Sequence
  Description of Artificial Sequence: Synthetic oligonucleotide
auaacagcaguugugguuu

SEQ ID NO: 818274 - RNA, 19 nt, Artificial Sequence
  Description of Artificial Sequence: Synthetic oligonucleotide
uacacgacguugcuccuga

SEQ ID NO: 818275 - RNA, 19 nt, Artificial Sequence
  Description of Artificial Sequence: Synthetic oligonucleotide
gaaacgauucucgacuguc

SEQ ID NO: 818276 - RNA, 19 nt, Artificial Sequence
  Description of Artificial Sequence: Synthetic oligonucleotide
ucgagccugagccuguaga

SEQ ID NO: 818277 - RNA, 19 nt, Artificial Sequence
  Description of Artificial Sequence: Synthetic oligonucleotide
agggucuacacgacguugc

SEQ ID NO: 818278 - RNA, 19 nt, Artificial Sequence
  Description of Artificial Sequence: Synthetic oligonucleotide
aaggcggauuugcucuggg

SEQ ID NO: 818279 - RNA, 19 nt, Artificial Sequence
  Description of Artificial Sequence: Synthetic oligonucleotide
cucuaccucaaccaaugac

SEQ ID NO: 818280 - RNA, 19 nt, Artificial Sequence
  Description of Artificial Sequence: Synthetic oligonucleotide
guaacaguggagaaaaugu

SEQ ID NO: 818281 - RNA, 19 nt, Artificial Sequence
  Description of Artificial Sequence: Synthetic oligonucleotide
aacgcaccugcucccgcac

SEQ ID NO: 818282 - RNA, 19 nt, Artificial Sequence
  Description of Artificial Sequence: Synthetic oligonucleotide
ugcucaaggauugaaguuu

SEQ ID NO: 818283 - RNA, 19 nt, Artificial Sequence
  Description of Artificial Sequence: Synthetic oligonucleotide
gugucuaacucagguaagg

SEQ ID NO: 818284 - RNA, 19 nt, Artificial Sequence
  Description of Artificial Sequence: Synthetic oligonucleotide
ccugauaggagccggaccc

SEQ ID NO: 818285 - RNA, 19 nt, Artificial Sequence
  Description of Artificial Sequence: Synthetic oligonucleotide
gguaacaguggagaaaaug

SEQ ID NO: 818286 - RNA, 19 nt, Artificial Sequence
  Description of Artificial Sequence: Synthetic oligonucleotide
acauauaacugugcgcuca

SEQ ID NO: 818287 - RNA, 19 nt, Artificial Sequence
  Description of Artificial Sequence: Synthetic oligonucleotide
aaggggugguaucggaggu

SEQ ID NO: 818288 - RNA, 19 nt, Artificial Sequence
  Description of Artificial Sequence: Synthetic oligonucleotide
ggagaaaaugugauguaag

SEQ ID NO: 818289 - RNA, 19 nt, Artificial Sequence
  Description of Artificial Sequence: Synthetic oligonucleotide
auaacugugcgcucauaau

SEQ ID NO: 818290 - RNA, 19 nt, Artificial Sequence
  Description of Artificial Sequence: Synthetic oligonucleotide
auucucgacugucugugcu

SEQ ID NO: 818291 - RNA, 19 nt, Artificial Sequence
  Description of Artificial Sequence: Synthetic oligonucleotide
aguuaagaggggacaaaag

SEQ ID NO: 818292 - RNA, 19 nt, Artificial Sequence
  Description of Artificial Sequence: Synthetic oligonucleotide
uugggauagcgaagaaaga

SEQ ID NO: 818293 - RNA, 19 nt, Artificial Sequence
  Description of Artificial Sequence: Synthetic oligonucleotide
gucaggguaagggacgagg

SEQ ID NO: 818294 - RNA, 19 nt, Artificial Sequence
  Description of Artificial Sequence: Synthetic oligonucleotide
aggugucaggcauauaaau

SEQ ID NO: 818295 - RNA, 19 nt, Artificial Sequence
  Description of Artificial Sequence: Synthetic oligonucleotide
uguguccaacacauuaaua

SEQ ID NO: 818296 - RNA, 19 nt, Artificial Sequence
  Description of Artificial Sequence: Synthetic oligonucleotide
augggguugggauagcgaa

SEQ ID NO: 818297 - RNA, 19 nt, Artificial Sequence
  Description of Artificial Sequence: Synthetic oligonucleotide
aaucaucucagaacccaca

SEQ ID NO: 818298 - RNA, 19 nt, Artificial Sequence
  Description of Artificial Sequence: Synthetic oligonucleotide
aggcauauaaauacagaga

SEQ ID NO: 818299 - RNA, 19 nt, Artificial Sequence
  Description of Artificial Sequence: Synthetic oligonucleotide
gcugcuagugcuuugccug

SEQ ID NO: 818300 - RNA, 19 nt, Artificial Sequence
  Description of Artificial Sequence: Synthetic oligonucleotide
aacucagguaaggugugca

SEQ ID NO: 818301 - RNA, 19 nt, Artificial Sequence
  Description of Artificial Sequence: Synthetic oligonucleotide
  modified_base (2)..(2): a, c, u, g, unknown or other
gnucccagagcaggaagag

SEQ ID NO: 818302 - RNA, 19 nt, Artificial Sequence
  Description of Artificial Sequence: Synthetic oligonucleotide
uagugcuuugccugguucu

SEQ ID NO: 818303 - RNA, 19 nt, Artificial Sequence
  Description of Artificial Sequence: Synthetic oligonucleotide
gugguucccguacaggagc

SEQ ID NO: 818304 - RNA, 19 nt, Artificial Sequence
  Description of Artificial Sequence: Synthetic oligonucleotide
cugaaacgauucucgacug

SEQ ID NO: 818305 - RNA, 19 nt, Artificial Sequence
  Description of Artificial Sequence: Synthetic oligonucleotide
acccuaaaccagcacauau

SEQ ID NO: 818306 - RNA, 19 nt, Artificial Sequence
  Description of Artificial Sequence: Synthetic oligonucleotide
ugggguugggauagcgaag

SEQ ID NO: 818307 - RNA, 19 nt, Artificial Sequence
  Description of Artificial Sequence: Synthetic oligonucleotide
caagccacuggcuuuaaaa

SEQ ID NO: 818308 - RNA, 19 nt, Artificial Sequence
  Description of Artificial Sequence: Synthetic oligonucleotide
uguucaggcaucugaggua

SEQ ID NO: 818309 - RNA, 19 nt, Artificial Sequence
  Description of Artificial Sequence: Synthetic oligonucleotide
uucucgacugucugugcug

SEQ ID NO: 818310 - RNA, 19 nt, Artificial Sequence
  Description of Artificial Sequence: Synthetic oligonucleotide
aaacgcaccugcucccgca

SEQ ID NO: 818311 - RNA, 19 nt, Artificial Sequence
  Description of Artificial Sequence: Synthetic oligonucleotide
ugcuuagccuucaacccuc

SEQ ID NO: 818312 - RNA, 19 nt, Artificial Sequence
  Description of Artificial Sequence: Synthetic oligonucleotide
ucgacugucugugcuguag

SEQ ID NO: 818313 - RNA, 19 nt, Artificial Sequence
  Description of Artificial Sequence: Synthetic oligonucleotide
gaaucccugauaggagccg

SEQ ID NO: 818314 - RNA, 19 nt, Artificial Sequence
  Description of Artificial Sequence: Synthetic oligonucleotide
auaccuggucacuuucuca

SEQ ID NO: 818315 - RNA, 19 nt, Artificial Sequence
  Description of Artificial Sequence: Synthetic oligonucleotide
ugucuaacucagguaaggu

SEQ ID NO: 818316 - RNA, 19 nt, Artificial Sequence
  Description of Artificial Sequence: Synthetic oligonucleotide
caacucgcugaaacgauuc

SEQ ID NO: 818317 - RNA, 19 nt, Artificial Sequence
  Description of Artificial Sequence: Synthetic oligonucleotide
aaguuguggguuauacgcu

SEQ ID NO: 818318 - RNA, 19 nt, Artificial Sequence
  Description of Artificial Sequence: Synthetic oligonucleotide
acucgcugaaacgauucuc

SEQ ID NO: 818319 - RNA, 19 nt, Artificial Sequence
  Description of Artificial Sequence: Synthetic oligonucleotide
guaucauagaaacgcaccu

SEQ ID NO: 818320 - RNA, 19 nt, Artificial Sequence
  Description of Artificial Sequence: Synthetic oligonucleotide
cagcucaacucgcugaaac

SEQ ID NO: 818321 - RNA, 19 nt, Artificial Sequence
  Description of Artificial Sequence: Synthetic oligonucleotide
acaacgaggagggcuggac

SEQ ID NO: 818322 - RNA, 19 nt, Artificial Sequence
  Description of Artificial Sequence: Synthetic oligonucleotide
  modified_base (4)..(4): a, c, u, g, unknown or other
cugnucccagagcaggaag

SEQ ID NO: 818323 - RNA, 19 nt, Artificial Sequence
  Description of Artificial Sequence: Synthetic oligonucleotide
caguugugguuuuauugug

SEQ ID NO: 818324 - RNA, 19 nt, Artificial Sequence
  Description of Artificial Sequence: Synthetic oligonucleotide
aaacgauucucgacugucu

SEQ ID NO: 818325 - RNA, 19 nt, Artificial Sequence
  Description of Artificial Sequence: Synthetic oligonucleotide
caucagggucuacacgacg

SEQ ID NO: 818326 - RNA, 19 nt, Artificial Sequence
  Description of Artificial Sequence: Synthetic oligonucleotide
auacgcucacuugauagca

SEQ ID NO: 818327 - RNA, 19 nt, Artificial Sequence
  Description of Artificial Sequence: Synthetic oligonucleotide
aaacaacgaggagggcugg

SEQ ID NO: 818328 - RNA, 19 nt, Artificial Sequence
  Description of Artificial Sequence: Synthetic oligonucleotide
gauaacagcaguugugguu

SEQ ID NO: 818329 - RNA, 19 nt, Artificial Sequence
  Description of Artificial Sequence: Synthetic oligonucleotide
ugauagcacaagccccagc

SEQ ID NO: 818330 - RNA, 19 nt, Artificial Sequence
  Description of Artificial Sequence: Synthetic oligonucleotide
ucaacucgcugaaacgauu

SEQ ID NO: 818331 - RNA, 19 nt, Artificial Sequence
  Description of Artificial Sequence: Synthetic oligonucleotide
gggauagcgaagaaagaag

SEQ ID NO: 818332 - RNA, 19 nt, Artificial Sequence
  Description of Artificial Sequence: Synthetic oligonucleotide
gagccaacccuaaaccagc

SEQ ID NO: 818333 - RNA, 19 nt, Artificial Sequence
  Description of Artificial Sequence: Synthetic oligonucleotide
ggacuugucgauuuccuuc

SEQ ID NO: 818334 - RNA, 19 nt, Artificial Sequence
  Description of Artificial Sequence: Synthetic oligonucleotide
aaugggguugggauagcga

SEQ ID NO: 818335 - RNA, 19 nt, Artificial Sequence
  Description of Artificial Sequence: Synthetic oligonucleotide
aggagcggcuuaucccacc

SEQ ID NO: 818336 - RNA, 19 nt, Artificial Sequence
  Description of Artificial Sequence: Synthetic oligonucleotide
gauaggagccggacccugg

SEQ ID NO: 818337 - RNA, 19 nt, Artificial Sequence
  Description of Artificial Sequence: Synthetic oligonucleotide
ucauaauaccuggucacuu

SEQ ID NO: 818338 - RNA, 19 nt, Artificial Sequence
  Description of Artificial Sequence: Synthetic oligonucleotide
aaugaacuucgagccugag

SEQ ID NO: 818339 - RNA, 19 nt, Artificial Sequence
  Description of Artificial Sequence: Synthetic oligonucleotide
cuaaguaaucauccaagcu

SEQ ID NO: 818340 - RNA, 19 nt, Artificial Sequence
  Description of Artificial Sequence: Synthetic oligonucleotide
gucccacucuaccucaacc

SEQ ID NO: 818341 - RNA, 19 nt, Artificial Sequence
  Description of Artificial Sequence: Synthetic oligonucleotide
ucuugcuggccagauaaau

SEQ ID NO: 818342 - RNA, 19 nt, Artificial Sequence
  Description of Artificial Sequence: Synthetic oligonucleotide
cuucaccaaggugucaggc

SEQ ID NO: 818343 - RNA, 19 nt, Artificial Sequence
  Description of Artificial Sequence: Synthetic oligonucleotide
acgcucacuugauagcaca

SEQ ID NO: 818344 - RNA, 19 nt, Artificial Sequence
  Description of Artificial Sequence: Synthetic oligonucleotide
cugcuagugcuuugccugg

SEQ ID NO: 818345 - RNA, 19 nt, Artificial Sequence
  Description of Artificial Sequence: Synthetic oligonucleotide
ugcccucgacccauccugg

SEQ ID NO: 818346 - RNA, 19 nt, Artificial Sequence
  Description of Artificial Sequence: Synthetic oligonucleotide
uggaguuaagaggggacaa

SEQ ID NO: 818347 - RNA, 19 nt, Artificial Sequence
  Description of Artificial Sequence: Synthetic oligonucleotide
acgauucucgacugucugu

SEQ ID NO: 818348 - RNA, 19 nt, Artificial Sequence
  Description of Artificial Sequence: Synthetic oligonucleotide
agcugcuagugcuuugccu

SEQ ID NO: 818349 - RNA, 19 nt, Artificial Sequence
  Description of Artificial Sequence: Synthetic oligonucleotide
agacauaaguguccaggua

SEQ ID NO: 818350 - RNA, 19 nt, Artificial Sequence
  Description of Artificial Sequence: Synthetic oligonucleotide
gugcccucgacccauccug

SEQ ID NO: 818351 - RNA, 19 nt, Artificial Sequence
  Description of Artificial Sequence: Synthetic oligonucleotide
ggguuauacgcucacuuga

SEQ ID NO: 818352 - RNA, 19 nt, Artificial Sequence
  Description of Artificial Sequence: Synthetic oligonucleotide
uacgcucacuugauagcac

SEQ ID NO: 818353 - RNA, 19 nt, Artificial Sequence
  Description of Artificial Sequence: Synthetic oligonucleotide
ucgcugaaacgauucucga

SEQ ID NO: 818354 - RNA, 19 nt, Artificial Sequence
  Description of Artificial Sequence: Synthetic oligonucleotide
cuagugcuuugccugguuc

SEQ ID NO: 818355 - RNA, 19 nt, Artificial Sequence
  Description of Artificial Sequence: Synthetic oligonucleotide
cccacuaugggcaagucca

SEQ ID NO: 818356 - RNA, 19 nt, Artificial Sequence
  Description of Artificial Sequence: Synthetic oligonucleotide
gcugaaacgauucucgacu

SEQ ID NO: 818357 - RNA, 19 nt, Artificial Sequence
  Description of Artificial Sequence: Synthetic oligonucleotide
agcaccuugaagaggguga

SEQ ID NO: 818358 - RNA, 19 nt, Artificial Sequence
  Description of Artificial Sequence: Synthetic oligonucleotide
agugucuaacucagguaag

SEQ ID NO: 818359 - RNA, 19 nt, Artificial Sequence
  Description of Artificial Sequence: Synthetic oligonucleotide
gaccccgaguaucauagaa

SEQ ID NO: 818360 - RNA, 19 nt, Artificial Sequence
  Description of Artificial Sequence: Synthetic oligonucleotide
aucagggucuacacgacgu

SEQ ID NO: 818361 - RNA, 19 nt, Artificial Sequence
  Description of Artificial Sequence: Synthetic oligonucleotide
cauccuggaaugggguugg

SEQ ID NO: 818362 - RNA, 19 nt, Artificial Sequence
  Description of Artificial Sequence: Synthetic oligonucleotide
aaggugucaggcauauaaa

SEQ ID NO: 818363 - RNA, 19 nt, Artificial Sequence
  Description of Artificial Sequence: Synthetic oligonucleotide
cacgacguugcuccugaag

SEQ ID NO: 818364 - RNA, 19 nt, Artificial Sequence
  Description of Artificial Sequence: Synthetic oligonucleotide
ccccgaguaucauagaaac

SEQ ID NO: 818365 - RNA, 19 nt, Artificial Sequence
  Description of Artificial Sequence: Synthetic oligonucleotide
gagggagcggcggucagcc

SEQ ID NO: 818366 - RNA, 19 nt, Artificial Sequence
  Description of Artificial Sequence: Synthetic oligonucleotide
cuuuugcaccccugugccc

SEQ ID NO: 818367 - RNA, 19 nt, Artificial Sequence
  Description of Artificial Sequence: Synthetic oligonucleotide
gaaacgcaccugcucccgc

SEQ ID NO: 818368 - RNA, 19 nt, Artificial Sequence
  Description of Artificial Sequence: Synthetic oligonucleotide
gucugucucaauagagccc

SEQ ID NO: 818369 - RNA, 19 nt, Artificial Sequence
  Description of Artificial Sequence: Synthetic oligonucleotide
uugauagcacaagccccag

SEQ ID NO: 818370 - RNA, 19 nt, Artificial Sequence
  Description of Artificial Sequence: Synthetic oligonucleotide
cuuagccuucaacccuccg

SEQ ID NO: 818371 - RNA, 19 nt, Artificial Sequence
  Description of Artificial Sequence: Synthetic oligonucleotide
guagugucuaacucaggua

SEQ ID NO: 818372 - RNA, 19 nt, Artificial Sequence
  Description of Artificial Sequence: Synthetic oligonucleotide
ugugcccucgacccauccu

SEQ ID NO: 818373 - RNA, 19 nt, Artificial Sequence
  Description of Artificial Sequence: Synthetic oligonucleotide
gaccacgauggugaccucc

SEQ ID NO: 818374 - RNA, 19 nt, Artificial Sequence
  Description of Artificial Sequence: Synthetic oligonucleotide
cucgacccauccuggaaug

SEQ ID NO: 818375 - RNA, 19 nt, Artificial Sequence
  Description of Artificial Sequence: Synthetic oligonucleotide
acgaggagggcuggacacc

SEQ ID NO: 818376 - RNA, 19 nt, Artificial Sequence
  Description of Artificial Sequence: Synthetic oligonucleotide
  modified_base (5)..(5): a, c, u, g, unknown or other
ucugnucccagagcaggaa

SEQ ID NO: 818377 - RNA, 19 nt, Artificial Sequence
  Description of Artificial Sequence: Synthetic oligonucleotide
ggacguagccaucagugca

SEQ ID NO: 818378 - RNA, 19 nt, Artificial Sequence
  Description of Artificial Sequence: Synthetic oligonucleotide
ugauaggagccggacccug

SEQ ID NO: 818379 - RNA, 19 nt, Artificial Sequence
  Description of Artificial Sequence: Synthetic oligonucleotide
gagaaggggugguaucgga

SEQ ID NO: 818380 - RNA, 19 nt, Artificial Sequence
  Description of Artificial Sequence: Synthetic oligonucleotide
ucucgacugucugugcugu

SEQ ID NO: 818381 - RNA, 19 nt, Artificial Sequence
  Description of Artificial Sequence: Synthetic oligonucleotide
guagguguagcaccuugaa

SEQ ID NO: 818382 - RNA, 19 nt, Artificial Sequence
  Description of Artificial Sequence: Synthetic oligonucleotide
cucaaggauugaaguuuug

SEQ ID NO: 818383 - RNA, 19 nt, Artificial Sequence
  Description of Artificial Sequence: Synthetic oligonucleotide
caauagagcccacauagau

SEQ ID NO: 818384 - RNA, 19 nt, Artificial Sequence
  Description of Artificial Sequence: Synthetic oligonucleotide
gacguugcuccugaagguc

SEQ ID NO: 818385 - RNA, 19 nt, Artificial Sequence
  Description of Artificial Sequence: Synthetic oligonucleotide
cuggccacacacgaccacc

SEQ ID NO: 818386 - RNA, 19 nt, Artificial Sequence
  Description of Artificial Sequence: Synthetic oligonucleotide
ugggcacuuuggcaugcca

SEQ ID NO: 818387 - RNA, 19 nt, Artificial Sequence
  Description of Artificial Sequence: Synthetic oligonucleotide
uucgagccugagccuguag

SEQ ID NO: 818388 - RNA, 19 nt, Artificial Sequence
  Description of Artificial Sequence: Synthetic oligonucleotide
cacauauaacugugcgcuc

SEQ ID NO: 818389 - RNA, 19 nt, Artificial Sequence
  Description of Artificial Sequence: Synthetic oligonucleotide
ggcuuaucccaccuucacc

SEQ ID NO: 818390 - RNA, 19 nt, Artificial Sequence
  Description of Artificial Sequence: Synthetic oligonucleotide
acccacaacgugguucccg

SEQ ID NO: 818391 - RNA, 19 nt, Artificial Sequence
  Description of Artificial Sequence: Synthetic oligonucleotide
  modified_base (7)..(7): a, c, u, g, unknown or other
ccucugnucccagagcagg

SEQ ID NO: 818392 - RNA, 19 nt, Artificial Sequence
  Description of Artificial Sequence: Synthetic oligonucleotide
gaagcucaaggcgggcacc

SEQ ID NO: 818393 - RNA, 19 nt, Artificial Sequence
  Description of Artificial Sequence: Synthetic oligonucleotide
ucgacccauccuggaaugg

SEQ ID NO: 818394 - RNA, 19 nt, Artificial Sequence
  Description of Artificial Sequence: Synthetic oligonucleotide
gcacauauaacugugcgcu

SEQ ID NO: 818395 - RNA, 19 nt, Artificial Sequence
  Description of Artificial Sequence: Synthetic oligonucleotide
uggacuugucgauuuccuu

SEQ ID NO: 818396 - RNA, 19 nt, Artificial Sequence
  Description of Artificial Sequence: Synthetic oligonucleotide
ggcuggacacccacuaugg

SEQ ID NO: 818397 - RNA, 19 nt, Artificial Sequence
  Description of Artificial Sequence: Synthetic oligonucleotide
caacgugguucccguacag

SEQ ID NO: 818398 - RNA, 19 nt, Artificial Sequence
  Description of Artificial Sequence: Synthetic oligonucleotide
gagccugagccuguagaug

SEQ ID NO: 818399 - RNA, 19 nt, Artificial Sequence
  Description of Artificial Sequence: Synthetic oligonucleotide
ucuacacgacguugcuccu

SEQ ID NO: 818400 - RNA, 19 nt, Artificial Sequence
  Description of Artificial Sequence: Synthetic oligonucleotide
ucagggucuacacgacguu

SEQ ID NO: 818401 - RNA, 19 nt, Artificial Sequence
  Description of Artificial Sequence: Synthetic oligonucleotide
ccuaaaccagcacauauaa

SEQ ID NO: 818402 - RNA, 19 nt, Artificial Sequence
  Description of Artificial Sequence: Synthetic oligonucleotide
gcaguugugguuuuauugu

SEQ ID NO: 818403 - RNA, 19 nt, Artificial Sequence
  Description of Artificial Sequence: Synthetic oligonucleotide
cuugcagcucuuccccaug

SEQ ID NO: 818404 - RNA, 19 nt, Artificial Sequence
  Description of Artificial Sequence: Synthetic oligonucleotide
cugagguaaggaggagggg

SEQ ID NO: 818405 - RNA, 19 nt, Artificial Sequence
  Description of Artificial Sequence: Synthetic oligonucleotide
guuauacgcucacuugaua

SEQ ID NO: 818406 - RNA, 19 nt, Artificial Sequence
  Description of Artificial Sequence: Synthetic oligonucleotide
agaugccuggccacacacg

SEQ ID NO: 818407 - RNA, 19 nt, Artificial Sequence
  Description of Artificial Sequence: Synthetic oligonucleotide
ggauugaaguuuugcccac

SEQ ID NO: 818408 - RNA, 19 nt, Artificial Sequence
  Description of Artificial Sequence: Synthetic oligonucleotide
ugcuuugccugguucuguu

SEQ ID NO: 818409 - RNA, 19 nt, Artificial Sequence
  Description of Artificial Sequence: Synthetic oligonucleotide
cucaaggcgggcaccagaa

SEQ ID NO: 818410 - RNA, 19 nt, Artificial Sequence
  Description of Artificial Sequence: Synthetic oligonucleotide
aacaacgaggagggcugga

SEQ ID NO: 818411 - RNA, 19 nt, Artificial Sequence
  Description of Artificial Sequence: Synthetic oligonucleotide
caccccugugcccucgacc

SEQ ID NO: 818412 - RNA, 19 nt, Artificial Sequence
  Description of Artificial Sequence: Synthetic oligonucleotide
ugcccuuguucuugcgacu

SEQ ID NO: 818413 - RNA, 19 nt, Artificial Sequence
  Description of Artificial Sequence: Synthetic oligonucleotide
cccgaguaucauagaaacg

SEQ ID NO: 818414 - RNA, 19 nt, Artificial Sequence
  Description of Artificial Sequence: Synthetic oligonucleotide
cagccauccaaggaaccac

SEQ ID NO: 818415 - RNA, 19 nt, Artificial Sequence
  Description of Artificial Sequence: Synthetic oligonucleotide
uccuggaaugggguuggga

SEQ ID NO: 818416 - RNA, 19 nt, Artificial Sequence
  Description of Artificial Sequence: Synthetic oligonucleotide
uuuccugccccaggcagau

SEQ ID NO: 818417 - RNA, 19 nt, Artificial Sequence
  Description of Artificial Sequence: Synthetic oligonucleotide
acguagccaucagugcagg

SEQ ID NO: 818418 - RNA, 19 nt, Artificial Sequence
  Description of Artificial Sequence: Synthetic oligonucleotide
uaccucaaccaaugaccuc

SEQ ID NO: 818419 - RNA, 19 nt, Artificial Sequence
  Description of Artificial Sequence: Synthetic oligonucleotide
cucggucugucucaauaga

SEQ ID NO: 818420 - RNA, 19 nt, Artificial Sequence
  Description of Artificial Sequence: Synthetic oligonucleotide
cuguguuauuggcaggaaa

SEQ ID NO: 818421 - RNA, 19 nt, Artificial Sequence
  Description of Artificial Sequence: Synthetic oligonucleotide
aaggggcgggccagcaauc

SEQ ID NO: 818422 - RNA, 19 nt, Artificial Sequence
  Description of Artificial Sequence: Synthetic oligonucleotide
gcugcucaaggauugaagu

SEQ ID NO: 818423 - RNA, 19 nt, Artificial Sequence
  Description of Artificial Sequence: Synthetic oligonucleotide
uggggagaaggggugguau

SEQ ID NO: 818424 - RNA, 19 nt, Artificial Sequence
  Description of Artificial Sequence: Synthetic oligonucleotide
cuucaacaagccaggggaa

SEQ ID NO: 818425 - RNA, 19 nt, Artificial Sequence
  Description of Artificial Sequence: Synthetic oligonucleotide
uaggagccggacccuggac

SEQ ID NO: 818426 - RNA, 19 nt, Artificial Sequence
  Description of Artificial Sequence: Synthetic oligonucleotide
cagggucuacacgacguug

SEQ ID NO: 818427 - RNA, 19 nt, Artificial Sequence
  Description of Artificial Sequence: Synthetic oligonucleotide
gugugcacaucagaagcuc

SEQ ID NO: 818428 - RNA, 19 nt, Artificial Sequence
  Description of Artificial Sequence: Synthetic oligonucleotide
ggcucuaaguaaucaucca

SEQ ID NO: 818429 - RNA, 19 nt, Artificial Sequence
  Description of Artificial Sequence: Synthetic oligonucleotide
ccucggucugucucaauag

SEQ ID NO: 818430 - RNA, 19 nt, Artificial Sequence
  Description of Artificial Sequence: Synthetic oligonucleotide
guaagggacgaggagccaa

SEQ ID NO: 818431 - RNA, 19 nt, Artificial Sequence
  Description of Artificial Sequence: Synthetic oligonucleotide
ucaaggggcgggccagcaa

SEQ ID NO: 818432 - RNA, 19 nt, Artificial Sequence
  Description of Artificial Sequence: Synthetic oligonucleotide
  modified_base (6)..(6): a, c, u, g, unknown or other
cucugnucccagagcagga

SEQ ID NO: 818433 - RNA, 19 nt, Artificial Sequence
  Description of Artificial Sequence: Synthetic oligonucleotide
ucccugauaggagccggac

SEQ ID NO: 818434 - RNA, 19 nt, Artificial Sequence
  Description of Artificial Sequence: Synthetic oligonucleotide
guggguuauacgcucacuu

SEQ ID NO: 818435 - RNA, 19 nt, Artificial Sequence
  Description of Artificial Sequence: Synthetic oligonucleotide
gcucaacucgcugaaacga

SEQ ID NO: 818436 - RNA, 19 nt, Artificial Sequence
  Description of Artificial Sequence: Synthetic oligonucleotide
gacacccacuaugggcaag

SEQ ID NO: 818437 - RNA, 19 nt, Artificial Sequence
  Description of Artificial Sequence: Synthetic oligonucleotide
gcucacuugauagcacaag

SEQ ID NO: 818438 - RNA, 19 nt, Artificial Sequence
  Description of Artificial Sequence: Synthetic oligonucleotide
ggugucaggcauauaaaua

SEQ ID NO: 818439 - RNA, 19 nt, Artificial Sequence
  Description of Artificial Sequence: Synthetic oligonucleotide
guuguggguuauacgcuca

SEQ ID NO: 818440 - RNA, 19 nt, Artificial Sequence
  Description of Artificial Sequence: Synthetic oligonucleotide
aguaaucauccaagcuccu

SEQ ID NO: 818441 - RNA, 19 nt, Artificial Sequence
  Description of Artificial Sequence: Synthetic oligonucleotide
ggggacuaccauggaaggg

SEQ ID NO: 818442 - RNA, 19 nt, Artificial Sequence
  Description of Artificial Sequence: Synthetic oligonucleotide
caacgaggagggcuggaca

SEQ ID NO: 818443 - RNA, 19 nt, Artificial Sequence
  Description of Artificial Sequence: Synthetic oligonucleotide
gguaucggagguggccugg

SEQ ID NO: 818444 - RNA, 19 nt, Artificial Sequence
  Description of Artificial Sequence: Synthetic oligonucleotide
  modified_base (8)..(8): a, c, u, g, unknown or other
accucugnucccagagcag

SEQ ID NO: 818445 - RNA, 19 nt, Artificial Sequence
  Description of Artificial Sequence: Synthetic oligonucleotide
gcugaggcgccccuccgag

SEQ ID NO: 818446 - RNA, 19 nt, Artificial Sequence
  Description of Artificial Sequence: Synthetic oligonucleotide
cgaggagccaacccuaaac

SEQ ID NO: 818447 - RNA, 19 nt, Artificial Sequence
  Description of Artificial Sequence: Synthetic oligonucleotide
cuacacgacguugcuccug

SEQ ID NO: 818448 - RNA, 19 nt, Artificial Sequence
  Description of Artificial Sequence: Synthetic oligonucleotide
accccgaguaucauagaaa

SEQ ID NO: 818449 - RNA, 19 nt, Artificial Sequence
  Description of Artificial Sequence: Synthetic oligonucleotide
aacagcaguugugguuuua

SEQ ID NO: 818450 - RNA, 19 nt, Artificial Sequence
  Description of Artificial Sequence: Synthetic oligonucleotide
gacuaccauggaaggguca

SEQ ID NO: 818451 - RNA, 19 nt, Artificial Sequence
  Description of Artificial Sequence: Synthetic oligonucleotide
ggaaauugagagaguugga

SEQ ID NO: 818452 - RNA, 19 nt, Artificial Sequence
  Description of Artificial Sequence: Synthetic oligonucleotide
gggacuaccauggaagggu

SEQ ID NO: 818453 - RNA, 19 nt, Artificial Sequence
  Description of Artificial Sequence: Synthetic oligonucleotide
aggucaggguaagggacga

SEQ ID NO: 818454 - RNA, 19 nt, Artificial Sequence
  Description of Artificial Sequence: Synthetic oligonucleotide
gggagcggcggucagccac

SEQ ID NO: 818455 - RNA, 19 nt, Artificial Sequence
  Description of Artificial Sequence: Synthetic oligonucleotide
gguggggacuaccauggaa

SEQ ID NO: 818456 - RNA, 19 nt, Artificial Sequence
  Description of Artificial Sequence: Synthetic oligonucleotide
gcgaagaaagaagggcagc

SEQ ID NO: 818457 - RNA, 19 nt, Artificial Sequence
  Description of Artificial Sequence: Synthetic oligonucleotide
gcggcggucagccaccgac

SEQ ID NO: 818458 - RNA, 19 nt, Artificial Sequence
  Description of Artificial Sequence: Synthetic oligonucleotide
uuugcaccccugugcccuc

SEQ ID NO: 818459 - RNA, 19 nt, Artificial Sequence
  Description of Artificial Sequence: Synthetic oligonucleotide
gaacuucgagccugagccu

SEQ ID NO: 818460 - RNA, 19 nt, Artificial Sequence
  Description of Artificial Sequence: Synthetic oligonucleotide
ucccguacaggagcugcuc

SEQ ID NO: 818461 - RNA, 19 nt, Artificial Sequence
  Description of Artificial Sequence: Synthetic oligonucleotide
agaccccgaguaucauaga

SEQ ID NO: 818462 - RNA, 19 nt, Artificial Sequence
  Description of Artificial Sequence: Synthetic oligonucleotide
guaaggaggaggggcuaga

SEQ ID NO: 818463 - RNA, 19 nt, Artificial Sequence
  Description of Artificial Sequence: Synthetic oligonucleotide
guuuccugccccaggcaga

SEQ ID NO: 818464 - RNA, 19 nt, Artificial Sequence
  Description of Artificial Sequence: Synthetic oligonucleotide
accagaaguuguggguuau

SEQ ID NO: 818465 - RNA, 19 nt, Artificial Sequence
  Description of Artificial Sequence: Synthetic oligonucleotide
guaucggagguggccuggc

SEQ ID NO: 818466 - RNA, 19 nt, Artificial Sequence
  Description of Artificial Sequence: Synthetic oligonucleotide
gguugggauagcgaagaaa

SEQ ID NO: 818467 - RNA, 19 nt, Artificial Sequence
  Description of Artificial Sequence: Synthetic oligonucleotide
gguagguguagcaccuuga

SEQ ID NO: 818468 - RNA, 19 nt, Artificial Sequence
  Description of Artificial Sequence: Synthetic oligonucleotide
ggccuagaaggcuguuccc

SEQ ID NO: 818469 - RNA, 19 nt, Artificial Sequence
  Description of Artificial Sequence: Synthetic oligonucleotide
aggcgggcaccagaaguug

SEQ ID NO: 818470 - RNA, 19 nt, Artificial Sequence
  Description of Artificial Sequence: Synthetic oligonucleotide
ucccggagaccccgaguau

SEQ ID NO: 818471 - RNA, 19 nt, Artificial Sequence
  Description of Artificial Sequence: Synthetic oligonucleotide
caccuugaagagggugaag

SEQ ID NO: 818472 - RNA, 19 nt, Artificial Sequence
  Description of Artificial Sequence: Synthetic oligonucleotide
cucauaauaccuggucacu

SEQ ID NO: 818473 - RNA, 19 nt, Artificial Sequence
  Description of Artificial Sequence: Synthetic oligonucleotide
cagaagcucaaggcgggca

SEQ ID NO: 818474 - RNA, 19 nt, Artificial Sequence
  Description of Artificial Sequence: Synthetic oligonucleotide
ccauccuggaaugggguug

SEQ ID NO: 818475 - RNA, 19 nt, Artificial Sequence
  Description of Artificial Sequence: Synthetic oligonucleotide
cccugauaggagccggacc

SEQ ID NO: 818476 - RNA, 19 nt, Artificial Sequence
  Description of Artificial Sequence: Synthetic oligonucleotide
cucaacucgcugaaacgau

SEQ ID NO: 818477 - RNA, 19 nt, Artificial Sequence
  Description of Artificial Sequence: Synthetic oligonucleotide
cgauucucgacugucugug

SEQ ID NO: 818478 - RNA, 19 nt, Artificial Sequence
  Description of Artificial Sequence: Synthetic oligonucleotide
cgcugaaacgauucucgac

SEQ ID NO: 818479 - RNA, 19 nt, Artificial Sequence
  Description of Artificial Sequence: Synthetic oligonucleotide
gagcugcucaaggauugaa

SEQ ID NO: 818480 - RNA, 19 nt, Artificial Sequence
  Description of Artificial Sequence: Synthetic oligonucleotide
aggcgccccuccgaguggg

SEQ ID NO: 818481 - RNA, 19 nt, Artificial Sequence
  Description of Artificial Sequence: Synthetic oligonucleotide
  modified_base (19)..(19): a, c, u, g, unknown or other
cucaaccaaugaccucugn

SEQ ID NO: 818482 - RNA, 19 nt, Artificial Sequence
  Description of Artificial Sequence: Synthetic oligonucleotide
caggaggcccaagccacug

SEQ ID NO: 818483 - RNA, 19 nt, Artificial Sequence
  Description of Artificial Sequence: Synthetic oligonucleotide
auauaacugugcgcucaua

SEQ ID NO: 818484 - RNA, 19 nt, Artificial Sequence
  Description of Artificial Sequence: Synthetic oligonucleotide
cacuugcacuucuuggagu

SEQ ID NO: 818485 - RNA, 19 nt, Artificial Sequence
  Description of Artificial Sequence: Synthetic oligonucleotide
gaggagcggcuuaucccac

SEQ ID NO: 818486 - RNA, 19 nt, Artificial Sequence
  Description of Artificial Sequence: Synthetic oligonucleotide
cacuaugggcaaguccaca

SEQ ID NO: 818487 - RNA, 19 nt, Artificial Sequence
  Description of Artificial Sequence: Synthetic oligonucleotide
gugguaucggagguggccu

SEQ ID NO: 818488 - RNA, 19 nt, Artificial Sequence
  Description of Artificial Sequence: Synthetic oligonucleotide
ggggagaaggggugguauc

SEQ ID NO: 818489 - RNA, 19 nt, Artificial Sequence
  Description of Artificial Sequence: Synthetic oligonucleotide
cauauaacugugcgcucau

SEQ ID NO: 818490 - RNA, 19 nt, Artificial Sequence
  Description of Artificial Sequence: Synthetic oligonucleotide
cugcucaaggauugaaguu

SEQ ID NO: 818491 - RNA, 19 nt, Artificial Sequence
  Description of Artificial Sequence: Synthetic oligonucleotide
cgaguaucauagaaacgca

SEQ ID NO: 818492 - RNA, 19 nt, Artificial Sequence
  Description of Artificial Sequence: Synthetic oligonucleotide
ggcggucagccaccgacac

SEQ ID NO: 818493 - RNA, 19 nt, Artificial Sequence
  Description of Artificial Sequence: Synthetic oligonucleotide
ucaacccuccggggucccc

SEQ ID NO: 818494 - RNA, 19 nt, Artificial Sequence
  Description of Artificial Sequence: Synthetic oligonucleotide
ggaguuaagaggggacaaa

SEQ ID NO: 818495 - RNA, 19 nt, Artificial Sequence
  Description of Artificial Sequence: Synthetic oligonucleotide
cucggccccaucccggaga

SEQ ID NO: 818496 - RNA, 19 nt, Artificial Sequence
  Description of Artificial Sequence: Synthetic oligonucleotide
ccuuacugacuggaagaac

SEQ ID NO: 818497 - RNA, 19 nt, Artificial Sequence
  Description of Artificial Sequence: Synthetic oligonucleotide
gcuggccagauaaaugaaa

SEQ ID NO: 818498 - RNA, 19 nt, Artificial Sequence
  Description of Artificial Sequence: Synthetic oligonucleotide
ccuggcuguagugucuaac

SEQ ID NO: 818499 - RNA, 19 nt, Artificial Sequence
  Description of Artificial Sequence: Synthetic oligonucleotide
ccacuaugggcaaguccac

SEQ ID NO: 818500 - RNA, 19 nt, Artificial Sequence
  Description of Artificial Sequence: Synthetic oligonucleotide
auccuggaaugggguuggg

SEQ ID NO: 818501 - RNA, 19 nt, Artificial Sequence
  Description of Artificial Sequence: Synthetic oligonucleotide
gagcggcggucagccaccg

SEQ ID NO: 818502 - RNA, 19 nt, Artificial Sequence
  Description of Artificial Sequence: Synthetic oligonucleotide
aggggcgggccagcaauca

SEQ ID NO: 818503 - RNA, 19 nt, Artificial Sequence
  Description of Artificial Sequence: Synthetic oligonucleotide
cccuggugguuaaaggaga

SEQ ID NO: 818504 - RNA, 19 nt, Artificial Sequence
  Description of Artificial Sequence: Synthetic oligonucleotide
aucuugcuggccagauaaa

SEQ ID NO: 818505 - RNA, 19 nt, Artificial Sequence
  Description of Artificial Sequence: Synthetic oligonucleotide
gguuauacgcucacuugau

SEQ ID NO: 818506 - RNA, 19 nt, Artificial Sequence
  Description of Artificial Sequence: Synthetic oligonucleotide
ggagcggcggucagccacc

SEQ ID NO: 818507 - RNA, 19 nt, Artificial Sequence
  Description of Artificial Sequence: Synthetic oligonucleotide
gucaaggggcgggccagca

SEQ ID NO: 818508 - RNA, 19 nt, Artificial Sequence
  Description of Artificial Sequence: Synthetic oligonucleotide
gcuuagccuucaacccucc

SEQ ID NO: 818509 - RNA, 19 nt, Artificial Sequence
  Description of Artificial Sequence: Synthetic oligonucleotide
ggagcggcuuaucccaccu

SEQ ID NO: 818510 - RNA, 19 nt, Artificial Sequence
  Description of Artificial Sequence: Synthetic oligonucleotide
cccgcugaggcgccccucc

SEQ ID NO: 818511 - RNA, 19 nt, Artificial Sequence
  Description of Artificial Sequence: Synthetic oligonucleotide
acacgacguugcuccugaa

SEQ ID NO: 818512 - RNA, 19 nt, Artificial Sequence
  Description of Artificial Sequence: Synthetic oligonucleotide
ggucaggguaagggacgag

SEQ ID NO: 818513 - RNA, 19 nt, Artificial Sequence
  Description of Artificial Sequence: Synthetic oligonucleotide
ggaaugggguugggauagc

SEQ ID NO: 818514 - RNA, 19 nt, Artificial Sequence
  Description of Artificial Sequence: Synthetic oligonucleotide
aggcuggugcuguguuauu

SEQ ID NO: 818515 - RNA, 19 nt, Artificial Sequence
  Description of Artificial Sequence: Synthetic oligonucleotide
cucgccuguucuggggaga

SEQ ID NO: 818516 - RNA, 19 nt, Artificial Sequence
  Description of Artificial Sequence: Synthetic oligonucleotide
gguucccguacaggagcug

SEQ ID NO: 818517 - RNA, 19 nt, Artificial Sequence
  Description of Artificial Sequence: Synthetic oligonucleotide
ggacgaggagccaacccua

SEQ ID NO: 818518 - RNA, 19 nt, Artificial Sequence
  Description of Artificial Sequence: Synthetic oligonucleotide
agggagcggcggucagcca

SEQ ID NO: 818519 - RNA, 19 nt, Artificial Sequence
  Description of Artificial Sequence: Synthetic oligonucleotide
gcaccuugaagagggugaa

SEQ ID NO: 818520 - RNA, 19 nt, Artificial Sequence
  Description of Artificial Sequence: Synthetic oligonucleotide
cccggagaccccgaguauc

SEQ ID NO: 818521 - RNA, 19 nt, Artificial Sequence
  Description of Artificial Sequence: Synthetic oligonucleotide
cggcuuaucccaccuucac

SEQ ID NO: 818522 - RNA, 19 nt, Artificial Sequence
  Description of Artificial Sequence: Synthetic oligonucleotide
gguaagggacgaggagcca

SEQ ID NO: 818523 - RNA, 19 nt, Artificial Sequence
  Description of Artificial Sequence: Synthetic oligonucleotide
cccucggucugucucaaua

SEQ ID NO: 818524 - RNA, 19 nt, Artificial Sequence
  Description of Artificial Sequence: Synthetic oligonucleotide
gggucuacacgacguugcu

SEQ ID NO: 818525 - RNA, 19 nt, Artificial Sequence
  Description of Artificial Sequence: Synthetic oligonucleotide
gcuagaggagcggcuuauc

SEQ ID NO: 818526 - RNA, 19 nt, Artificial Sequence
  Description of Artificial Sequence: Synthetic oligonucleotide
guccagcuacuagccaaaa

SEQ ID NO: 818527 - RNA, 19 nt, Artificial Sequence
  Description of Artificial Sequence: Synthetic oligonucleotide
ccaucccggagaccccgag

SEQ ID NO: 818528 - RNA, 19 nt, Artificial Sequence
  Description of Artificial Sequence: Synthetic oligonucleotide
cccguacaggagcugcuca

SEQ ID NO: 818529 - RNA, 19 nt, Artificial Sequence
  Description of Artificial Sequence: Synthetic oligonucleotide
cggacccuggacugggcac

SEQ ID NO: 818530 - RNA, 19 nt, Artificial Sequence
  Description of Artificial Sequence: Synthetic oligonucleotide
cagcaguugugguuuuauu

SEQ ID NO: 818531 - RNA, 19 nt, Artificial Sequence
  Description of Artificial Sequence: Synthetic oligonucleotide
caucccggagaccccgagu

SEQ ID NO: 818532 - RNA, 19 nt, Artificial Sequence
  Description of Artificial Sequence: Synthetic oligonucleotide
cccuuacugacuggaagaa

SEQ ID NO: 818533 - RNA, 19 nt, Artificial Sequence
  Description of Artificial Sequence: Synthetic oligonucleotide
cugauaggagccggacccu

SEQ ID NO: 818534 - RNA, 19 nt, Artificial Sequence
  Description of Artificial Sequence: Synthetic oligonucleotide
cgccccuccgagugggccg

SEQ ID NO: 818535 - RNA, 19 nt, Artificial Sequence
  Description of Artificial Sequence: Synthetic oligonucleotide
gguggagaucagacagaaa

SEQ ID NO: 818536 - RNA, 19 nt, Artificial Sequence
  Description of Artificial Sequence: Synthetic oligonucleotide
cucgacugucugugcugua

SEQ ID NO: 818537 - RNA, 19 nt, Artificial Sequence
  Description of Artificial Sequence: Synthetic oligonucleotide
gcucaaggauugaaguuuu

SEQ ID NO: 818538 - RNA, 19 nt, Artificial Sequence
  Description of Artificial Sequence: Synthetic oligonucleotide
cucccgcaccccucggucu

SEQ ID NO: 818539 - RNA, 19 nt, Artificial Sequence
  Description of Artificial Sequence: Synthetic oligonucleotide
ucccgcugaggcgccccuc

SEQ ID NO: 818540 - RNA, 19 nt, Artificial Sequence
  Description of Artificial Sequence: Synthetic oligonucleotide
ggacccuggacugggcacu

SEQ ID NO: 818541 - RNA, 19 nt, Artificial Sequence
  Description of Artificial Sequence: Synthetic oligonucleotide
gggcuagaggagcggcuua

SEQ ID NO: 818542 - RNA, 19 nt, Artificial Sequence
  Description of Artificial Sequence: Synthetic oligonucleotide
ccgcugaggcgccccuccg

SEQ ID NO: 818543 - RNA, 19 nt, Artificial Sequence
  Description of Artificial Sequence: Synthetic oligonucleotide
ggggcgggccagcaaucaa

SEQ ID NO: 818544 - RNA, 19 nt, Artificial Sequence
  Description of Artificial Sequence: Synthetic oligonucleotide
gggcaaguccacaggcugu

SEQ ID NO: 818545 - RNA, 19 nt, Artificial Sequence
  Description of Artificial Sequence: Synthetic oligonucleotide
ggguggggacuaccaugga

SEQ ID NO: 818546 - RNA, 19 nt, Artificial Sequence
  Description of Artificial Sequence: Synthetic oligonucleotide
cccgcagcacucccgcuga

SEQ ID NO: 818547 - RNA, 19 nt, Artificial Sequence
  Description of Artificial Sequence: Synthetic oligonucleotide
ccucgacccauccuggaau

SEQ ID NO: 818548 - RNA, 19 nt, Artificial Sequence
  Description of Artificial Sequence: Synthetic oligonucleotide
gagcggcuuaucccaccuu

SEQ ID NO: 818549 - RNA, 19 nt, Artificial Sequence
  Description of Artificial Sequence: Synthetic oligonucleotide
gcgccccuccgagugggcc

SEQ ID NO: 818550 - RNA, 19 nt, Artificial Sequence
  Description of Artificial Sequence: Synthetic oligonucleotide
cgcucacuugauagcacaa

SEQ ID NO: 818551 - RNA, 19 nt, Artificial Sequence
  Description of Artificial Sequence: Synthetic oligonucleotide
cagcuccuaggaagcugcu

SEQ ID NO: 818552 - RNA, 19 nt, Artificial Sequence
  Description of Artificial Sequence: Synthetic oligonucleotide
ggcuagaggagcggcuuau

SEQ ID NO: 818553 - RNA, 19 nt, Artificial Sequence
  Description of Artificial Sequence: Synthetic oligonucleotide
cugaggcgccccuccgagu

SEQ ID NO: 818554 - RNA, 19 nt, Artificial Sequence
  Description of Artificial Sequence: Synthetic oligonucleotide
gcuagugcuuugccugguu

SEQ ID NO: 818555 - RNA, 19 nt, Artificial Sequence
  Description of Artificial Sequence: Synthetic oligonucleotide
gcagcucaacucgcugaaa

SEQ ID NO: 818556 - RNA, 19 nt, Artificial Sequence
  Description of Artificial Sequence: Synthetic oligonucleotide
ggaccacgauggugaccuc

SEQ ID NO: 818557 - RNA, 19 nt, Artificial Sequence
  Description of Artificial Sequence: Synthetic oligonucleotide
caaggccugucagcuccua

SEQ ID NO: 818558 - RNA, 19 nt, Artificial Sequence
  Description of Artificial Sequence: Synthetic oligonucleotide
cgacguugcuccugaaggu

SEQ ID NO: 818559 - RNA, 19 nt, Artificial Sequence
  Description of Artificial Sequence: Synthetic oligonucleotide
ggcgggcaccagaaguugu

SEQ ID NO: 818560 - RNA, 19 nt, Artificial Sequence
  Description of Artificial Sequence: Synthetic oligonucleotide
gacccuggacugggcacuu

SEQ ID NO: 818561 - RNA, 19 nt, Artificial Sequence
  Description of Artificial Sequence: Synthetic oligonucleotide
caccgacacuucccacagu

SEQ ID NO: 818562 - RNA, 19 nt, Artificial Sequence
  Description of Artificial Sequence: Synthetic oligonucleotide
ccagaaguuguggguuaua

SEQ ID NO: 818563 - RNA, 19 nt, Artificial Sequence
  Description of Artificial Sequence: Synthetic oligonucleotide
ggcgccccuccgagugggc

SEQ ID NO: 818564 - RNA, 19 nt, Artificial Sequence
  Description of Artificial Sequence: Synthetic oligonucleotide
gcaaggccugucagcuccu

SEQ ID NO: 818565 - RNA, 19 nt, Artificial Sequence
  Description of Artificial Sequence: Synthetic oligonucleotide
gcgggccagcaaucaaguu

SEQ ID NO: 818566 - RNA, 19 nt, Artificial Sequence
  Description of Artificial Sequence: Synthetic oligonucleotide
cgcaccccucggucugucu

SEQ ID NO: 818567 - RNA, 19 nt, Artificial Sequence
  Description of Artificial Sequence: Synthetic oligonucleotide
cggagaccccgaguaucau

SEQ ID NO: 818568 - RNA, 19 nt, Artificial Sequence
  Description of Artificial Sequence: Synthetic oligonucleotide
uuuauauagacucugguuc

SEQ ID NO: 818569 - RNA, 19 nt, Artificial Sequence
  Description of Artificial Sequence: Synthetic oligonucleotide
ucuaggacaaaccagcggg

SEQ ID NO: 818570 - RNA, 19 nt, Artificial Sequence
  Description of Artificial Sequence: Synthetic oligonucleotide
auaauaacgcagcuggugc

SEQ ID NO: 818571 - RNA, 19 nt, Artificial Sequence
  Description of Artificial Sequence: Synthetic oligonucleotide
aaggauaccaccugagugg

SEQ ID NO: 818572 - RNA, 19 nt, Artificial Sequence
  Description of Artificial Sequence: Synthetic oligonucleotide
uuuacaagcccaaugcagg

SEQ ID NO: 818573 - RNA, 19 nt, Artificial Sequence
  Description of Artificial Sequence: Synthetic oligonucleotide
uagauauacaccuaacgag

SEQ ID NO: 818574 - RNA, 19 nt, Artificial Sequence
  Description of Artificial Sequence: Synthetic oligonucleotide
uuguguaucugaaucagcc

SEQ ID NO: 818575 - RNA, 19 nt, Artificial Sequence
  Description of Artificial Sequence: Synthetic oligonucleotide
agauauacaccuaacgagc

SEQ ID NO: 818576 - RNA, 19 nt, Artificial Sequence
  Description of Artificial Sequence: Synthetic oligonucleotide
guaguuguagaacaugggg

SEQ ID NO: 818577 - RNA, 19 nt, Artificial Sequence
  Description of Artificial Sequence: Synthetic oligonucleotide
ucucucuuuauauagacuc

SEQ ID NO: 818578 - RNA, 19 nt, Artificial Sequence
  Description of Artificial Sequence: Synthetic oligonucleotide
aacgacuggaagcagagca

SEQ ID NO: 818579 - RNA, 19 nt, Artificial Sequence
  Description of Artificial Sequence: Synthetic oligonucleotide
agggguaccacguccaucc

SEQ ID NO: 818580 - RNA, 19 nt, Artificial Sequence
  Description of Artificial Sequence: Synthetic oligonucleotide
ugagauggcaucagguugg

SEQ ID NO: 818581 - RNA, 19 nt, Artificial Sequence
  Description of Artificial Sequence: Synthetic oligonucleotide
uaaccgaggaacuugaggu

SEQ ID NO: 818582 - RNA, 19 nt, Artificial Sequence
  Description of Artificial Sequence: Synthetic oligonucleotide
aucagguuggacucgaggg

SEQ ID NO: 818583 - RNA, 19 nt, Artificial Sequence
  Description of Artificial Sequence: Synthetic oligonucleotide
uuaggggcaccuauggugg

SEQ ID NO: 818584 - RNA, 19 nt, Artificial Sequence
  Description of Artificial Sequence: Synthetic oligonucleotide
ugaaacgauggccaaagga

SEQ ID NO: 818585 - RNA, 19 nt, Artificial Sequence
  Description of Artificial Sequence: Synthetic oligonucleotide
ucgguggucauaauaacgc

SEQ ID NO: 818586 - RNA, 19 nt, Artificial Sequence
  Description of Artificial Sequence: Synthetic oligonucleotide
agggcaaccagguacacag

SEQ ID NO: 818587 - RNA, 19 nt, Artificial Sequence
  Description of Artificial Sequence: Synthetic oligonucleotide
guagauauacaccuaacga

SEQ ID NO: 818588 - RNA, 19 nt, Artificial Sequence
  Description of Artificial Sequence: Synthetic oligonucleotide
ucauaacacggccauacca

SEQ ID NO: 818589 - RNA, 19 nt, Artificial Sequence
  Description of Artificial Sequence: Synthetic oligonucleotide
agauuggacacauugcugu

SEQ ID NO: 818590 - RNA, 19 nt, Artificial Sequence
  Description of Artificial Sequence: Synthetic oligonucleotide
ucuuuauauagacucuggu

SEQ ID NO: 818591 - RNA, 19 nt, Artificial Sequence
  Description of Artificial Sequence: Synthetic oligonucleotide
gaaucagccauuccgaguc

SEQ ID NO: 818592 - RNA, 19 nt, Artificial Sequence
  Description of Artificial Sequence: Synthetic oligonucleotide
gauauacaccuaacgagcg

SEQ ID NO: 818593 - RNA, 19 nt, Artificial Sequence
  Description of Artificial Sequence: Synthetic oligonucleotide
aacacggccauaccacacg

SEQ ID NO: 818594 - RNA, 19 nt, Artificial Sequence
  Description of Artificial Sequence: Synthetic oligonucleotide
uuauauagacucugguucu

SEQ ID NO: 818595 - RNA, 19 nt, Artificial Sequence
  Description of Artificial Sequence: Synthetic oligonucleotide
agaaggucggccuagcucu

SEQ ID NO: 818596 - RNA, 19 nt, Artificial Sequence
  Description of Artificial Sequence: Synthetic oligonucleotide
agaaguuguaaacgcgacg

SEQ ID NO: 818597 - RNA, 19 nt, Artificial Sequence
  Description of Artificial Sequence: Synthetic oligonucleotide
ugguucuagaaacaacagc

SEQ ID NO: 818598 - RNA, 19 nt, Artificial Sequence
  Description of Artificial Sequence: Synthetic oligonucleotide
auggugguaaccgaggaac

SEQ ID NO: 818599 - RNA, 19 nt, Artificial Sequence
  Description of Artificial Sequence: Synthetic oligonucleotide
aaacaccucaauaggcacc

SEQ ID NO: 818600 - RNA, 19 nt, Artificial Sequence
  Description of Artificial Sequence: Synthetic oligonucleotide
cuuaggggcaccuauggug

SEQ ID NO: 818601 - RNA, 19 nt, Artificial Sequence
  Description of Artificial Sequence: Synthetic oligonucleotide
ucaauacgcucauagucag

SEQ ID NO: 818602 - RNA, 19 nt, Artificial Sequence
  Description of Artificial Sequence: Synthetic oligonucleotide
cauggggaacuguaaaugg

SEQ ID NO: 818603 - RNA, 19 nt, Artificial Sequence
  Description of Artificial Sequence: Synthetic oligonucleotide
ucuguaacgacuggaagca

SEQ ID NO: 818604 - RNA, 19 nt, Artificial Sequence
  Description of Artificial Sequence: Synthetic oligonucleotide
aaaccagcgggcuuuccag

SEQ ID NO: 818605 - RNA, 19 nt, Artificial Sequence
  Description of Artificial Sequence: Synthetic oligonucleotide
uuuacacggucccaggugu

SEQ ID NO: 818606 - RNA, 19 nt, Artificial Sequence
  Description of Artificial Sequence: Synthetic oligonucleotide
guaaccgaggaacuugagg

SEQ ID NO: 818607 - RNA, 19 nt, Artificial Sequence
  Description of Artificial Sequence: Synthetic oligonucleotide
uguaacgacuggaagcaga

SEQ ID NO: 818608 - RNA, 19 nt, Artificial Sequence
  Description of Artificial Sequence: Synthetic oligonucleotide
uauacaccuaacgagcggc

SEQ ID NO: 818609 - RNA, 19 nt, Artificial Sequence
  Description of Artificial Sequence: Synthetic oligonucleotide
cucgguggucauaauaacg

SEQ ID NO: 818610 - RNA, 19 nt, Artificial Sequence
  Description of Artificial Sequence: Synthetic oligonucleotide
caaggauaccaccugagug

SEQ ID NO: 818611 - RNA, 19 nt, Artificial Sequence
  Description of Artificial Sequence: Synthetic oligonucleotide
aggauagccacuccuuuuc

SEQ ID NO: 818612 - RNA, 19 nt, Artificial Sequence
  Description of Artificial Sequence: Synthetic oligonucleotide
ugagcuagggguaccacgu

SEQ ID NO: 818613 - RNA, 19 nt, Artificial Sequence
  Description of Artificial Sequence: Synthetic oligonucleotide
auauacaccuaacgagcgg

SEQ ID NO: 818614 - RNA, 19 nt, Artificial Sequence
  Description of Artificial Sequence: Synthetic oligonucleotide
caucaacagucuuaggggc

SEQ ID NO: 818615 - RNA, 19 nt, Artificial Sequence
  Description of Artificial Sequence: Synthetic oligonucleotide
aaucagccauuccgagucc

SEQ ID NO: 818616 - RNA, 19 nt, Artificial Sequence
  Description of Artificial Sequence: Synthetic oligonucleotide
aaacggcucagccaugaca

SEQ ID NO: 818617 - RNA, 19 nt, Artificial Sequence
  Description of Artificial Sequence: Synthetic oligonucleotide
caaucuagaaacugcagga

SEQ ID NO: 818618 - RNA, 19 nt, Artificial Sequence
  Description of Artificial Sequence: Synthetic oligonucleotide
acggccauaccacacggcg

SEQ ID NO: 818619 - RNA, 19 nt, Artificial Sequence
  Description of Artificial Sequence: Synthetic oligonucleotide
cucaauacgcucauaguca

SEQ ID NO: 818620 - RNA, 19 nt, Artificial Sequence
  Description of Artificial Sequence: Synthetic oligonucleotide
ggguggacuauuuacaagc

SEQ ID NO: 818621 - RNA, 19 nt, Artificial Sequence
  Description of Artificial Sequence: Synthetic oligonucleotide
aacgcgacguguugucuuc

SEQ ID NO: 818622 - RNA, 19 nt, Artificial Sequence
  Description of Artificial Sequence: Synthetic oligonucleotide
uguaccauggccgcguccc

SEQ ID NO: 818623 - RNA, 19 nt, Artificial Sequence
  Description of Artificial Sequence: Synthetic oligonucleotide
agcgcagaaaggaagccgc

SEQ ID NO: 818624 - RNA, 19 nt, Artificial Sequence
  Description of Artificial Sequence: Synthetic oligonucleotide
ugugaagccacugcuuugc

SEQ ID NO: 818625 - RNA, 19 nt, Artificial Sequence
  Description of Artificial Sequence: Synthetic oligonucleotide
aaaggauagccacuccuuu

SEQ ID NO: 818626 - RNA, 19 nt, Artificial Sequence
  Description of Artificial Sequence: Synthetic oligonucleotide
accccuaguggucuguaac

SEQ ID NO: 818627 - RNA, 19 nt, Artificial Sequence
  Description of Artificial Sequence: Synthetic oligonucleotide
cagcucaauacgcucauag

SEQ ID NO: 818628 - RNA, 19 nt, Artificial Sequence
  Description of Artificial Sequence: Synthetic oligonucleotide
gucuuaggggcaccuaugg

SEQ ID NO: 818629 - RNA, 19 nt, Artificial Sequence
  Description of Artificial Sequence: Synthetic oligonucleotide
ugcauauguguaguuguag

SEQ ID NO: 818630 - RNA, 19 nt, Artificial Sequence
  Description of Artificial Sequence: Synthetic oligonucleotide
aguguagaaaucccacacu

SEQ ID NO: 818631 - RNA, 19 nt, Artificial Sequence
  Description of Artificial Sequence: Synthetic oligonucleotide
agggcuguaccauggccgc

SEQ ID NO: 818632 - RNA, 19 nt, Artificial Sequence
  Description of Artificial Sequence: Synthetic oligonucleotide
aacaccucaauaggcacca

SEQ ID NO: 818633 - RNA, 19 nt, Artificial Sequence
  Description of Artificial Sequence: Synthetic oligonucleotide
acucgguggucauaauaac

SEQ ID NO: 818634 - RNA, 19 nt, Artificial Sequence
  Description of Artificial Sequence: Synthetic oligonucleotide
uccacuaccagcaccgaua

SEQ ID NO: 818635 - RNA, 19 nt, Artificial Sequence
  Description of Artificial Sequence: Synthetic oligonucleotide
agugcgguagaaugggucu

SEQ ID NO: 818636 - RNA, 19 nt, Artificial Sequence
  Description of Artificial Sequence: Synthetic oligonucleotide
aaguuguaaacgcgacgug

SEQ ID NO: 818637 - RNA, 19 nt, Artificial Sequence
  Description of Artificial Sequence: Synthetic oligonucleotide
uguucguuaguucucucuu

SEQ ID NO: 818638 - RNA, 19 nt, Artificial Sequence
  Description of Artificial Sequence: Synthetic oligonucleotide
aguugacaccaguagugag

SEQ ID NO: 818639 - RNA, 19 nt, Artificial Sequence
  Description of Artificial Sequence: Synthetic oligonucleotide
uucucucuuuauauagacu

SEQ ID NO: 818640 - RNA, 19 nt, Artificial Sequence
  Description of Artificial Sequence: Synthetic oligonucleotide
uuaguucucucuuuauaua

SEQ ID NO: 818641 - RNA, 19 nt, Artificial Sequence
  Description of Artificial Sequence: Synthetic oligonucleotide
agcaccgauauuugcagca

SEQ ID NO: 818642 - RNA, 19 nt, Artificial Sequence
  Description of Artificial Sequence: Synthetic oligonucleotide
guacagggugcccucauag

SEQ ID NO: 818643 - RNA, 19 nt, Artificial Sequence
  Description of Artificial Sequence: Synthetic oligonucleotide
ugaaucagccauuccgagu

SEQ ID NO: 818644 - RNA, 19 nt, Artificial Sequence
  Description of Artificial Sequence: Synthetic oligonucleotide
cauacucccacacagaccu

SEQ ID NO: 818645 - RNA, 19 nt, Artificial Sequence
  Description of Artificial Sequence: Synthetic oligonucleotide
acguguugucuucacauca

SEQ ID NO: 818646 - RNA, 19 nt, Artificial Sequence
  Description of Artificial Sequence: Synthetic oligonucleotide
uuguucguuaguucucucu

SEQ ID NO: 818647 - RNA, 19 nt, Artificial Sequence
  Description of Artificial Sequence: Synthetic oligonucleotide
gaaguuguaaacgcgacgu

SEQ ID NO: 818648 - RNA, 19 nt, Artificial Sequence
  Description of Artificial Sequence: Synthetic oligonucleotide
guugacaccaguagugagc

SEQ ID NO: 818649 - RNA, 19 nt, Artificial Sequence
  Description of Artificial Sequence: Synthetic oligonucleotide
uaauaacgcagcuggugcu

SEQ ID NO: 818650 - RNA, 19 nt, Artificial Sequence
  Description of Artificial Sequence: Synthetic oligonucleotide
caauaaguuagagcuggcc

SEQ ID NO: 818651 - RNA, 19 nt, Artificial Sequence
  Description of Artificial Sequence: Synthetic oligonucleotide
aguuguaaacgcgacgugu

SEQ ID NO: 818652 - RNA, 19 nt, Artificial Sequence
  Description of Artificial Sequence: Synthetic oligonucleotide
uaacgagcggcgguggugg

SEQ ID NO: 818653 - RNA, 19 nt, Artificial Sequence
  Description of Artificial Sequence: Synthetic oligonucleotide
uucguuaguucucucuuua

SEQ ID NO: 818654 - RNA, 19 nt, Artificial Sequence
  Description of Artificial Sequence: Synthetic oligonucleotide
aggaucuguucucacucuc

SEQ ID NO: 818655 - RNA, 19 nt, Artificial Sequence
  Description of Artificial Sequence: Synthetic oligonucleotide
cacaaucuagaaacugcag

SEQ ID NO: 818656 - RNA, 19 nt, Artificial Sequence
  Description of Artificial Sequence: Synthetic oligonucleotide
uauagacucugguucuaga

SEQ ID NO: 818657 - RNA, 19 nt, Artificial Sequence
  Description of Artificial Sequence: Synthetic oligonucleotide
cagcuuguguaucugaauc

SEQ ID NO: 818658 - RNA, 19 nt, Artificial Sequence
  Description of Artificial Sequence: Synthetic oligonucleotide
caucagguuggacucgagg

SEQ ID NO: 818659 - RNA, 19 nt, Artificial Sequence
  Description of Artificial Sequence: Synthetic oligonucleotide
uuuccagcguucagaaggu

SEQ ID NO: 818660 - RNA, 19 nt, Artificial Sequence
  Description of Artificial Sequence: Synthetic oligonucleotide
ugguaaccgaggaacuuga

SEQ ID NO: 818661 - RNA, 19 nt, Artificial Sequence
  Description of Artificial Sequence: Synthetic oligonucleotide
ccucaaauacugucgaggg

SEQ ID NO: 818662 - RNA, 19 nt, Artificial Sequence
  Description of Artificial Sequence: Synthetic oligonucleotide
uguccucgggugcauaugu

SEQ ID NO: 818663 - RNA, 19 nt, Artificial Sequence
  Description of Artificial Sequence: Synthetic oligonucleotide
uggucauaauaacgcagcu

SEQ ID NO: 818664 - RNA, 19 nt, Artificial Sequence
  Description of Artificial Sequence: Synthetic oligonucleotide
guaacgacuggaagcagag

SEQ ID NO: 818665 - RNA, 19 nt, Artificial Sequence
  Description of Artificial Sequence: Synthetic oligonucleotide
uccgaaagcggcgggaugc

SEQ ID NO: 818666 - RNA, 19 nt, Artificial Sequence
  Description of Artificial Sequence: Synthetic oligonucleotide
uguaaacgcgacguguugu

SEQ ID NO: 818667 - RNA, 19 nt, Artificial Sequence
  Description of Artificial Sequence: Synthetic oligonucleotide
guagaacugacugaacuca

SEQ ID NO: 818668 - RNA, 19 nt, Artificial Sequence
  Description of Artificial Sequence: Synthetic oligonucleotide
gcucaauacgcucauaguc

SEQ ID NO: 818669 - RNA, 19 nt, Artificial Sequence
  Description of Artificial Sequence: Synthetic oligonucleotide
gaagguccgaaagcggcgg

SEQ ID NO: 818670 - RNA, 19 nt, Artificial Sequence
  Description of Artificial Sequence: Synthetic oligonucleotide
cagaaguuguaaacgcgac

SEQ ID NO: 818671 - RNA, 19 nt, Artificial Sequence
  Description of Artificial Sequence: Synthetic oligonucleotide
ggaugcauggugguaaccg

SEQ ID NO: 818672 - RNA, 19 nt, Artificial Sequence
  Description of Artificial Sequence: Synthetic oligonucleotide
caugacaccacaauaaguu

SEQ ID NO: 818673 - RNA, 19 nt, Artificial Sequence
  Description of Artificial Sequence: Synthetic oligonucleotide
cuaggacaaaccagcgggc

SEQ ID NO: 818674 - RNA, 19 nt, Artificial Sequence
  Description of Artificial Sequence: Synthetic oligonucleotide
cauuccgaguccuccagug

SEQ ID NO: 818675 - RNA, 19 nt, Artificial Sequence
  Description of Artificial Sequence: Synthetic oligonucleotide
guggacuauuuacaagccc

SEQ ID NO: 818676 - RNA, 19 nt, Artificial Sequence
  Description of Artificial Sequence: Synthetic oligonucleotide
cuguagauauacaccuaac

SEQ ID NO: 818677 - RNA, 19 nt, Artificial Sequence
  Description of Artificial Sequence: Synthetic oligonucleotide
ugcuccgucgggcagccug

SEQ ID NO: 818678 - RNA, 19 nt, Artificial Sequence
  Description of Artificial Sequence: Synthetic oligonucleotide
agcguucagaaggucggcc

SEQ ID NO: 818679 - RNA, 19 nt, Artificial Sequence
  Description of Artificial Sequence: Synthetic oligonucleotide
gagcgcagaaaggaagccg

SEQ ID NO: 818680 - RNA, 19 nt, Artificial Sequence
  Description of Artificial Sequence: Synthetic oligonucleotide
acaauaaguuagagcuggc

SEQ ID NO: 818681 - RNA, 19 nt, Artificial Sequence
  Description of Artificial Sequence: Synthetic oligonucleotide
ucuuaggggcaccuauggu

SEQ ID NO: 818682 - RNA, 19 nt, Artificial Sequence
  Description of Artificial Sequence: Synthetic oligonucleotide
uaacacggccauaccacac

SEQ ID NO: 818683 - RNA, 19 nt, Artificial Sequence
  Description of Artificial Sequence: Synthetic oligonucleotide
cagagugcgguagaauggg

SEQ ID NO: 818684 - RNA, 19 nt, Artificial Sequence
  Description of Artificial Sequence: Synthetic oligonucleotide
aaacgcgacguguugucuu

SEQ ID NO: 818685 - RNA, 19 nt, Artificial Sequence
  Description of Artificial Sequence: Synthetic oligonucleotide
aagguccgaaagcggcggg

SEQ ID NO: 818686 - RNA, 19 nt, Artificial Sequence
  Description of Artificial Sequence: Synthetic oligonucleotide
uaaggucgcagcaccucug

SEQ ID NO: 818687 - RNA, 19 nt, Artificial Sequence
  Description of Artificial Sequence: Synthetic oligonucleotide
accgaggaacuugagguag

SEQ ID NO: 818688 - RNA, 19 nt, Artificial Sequence
  Description of Artificial Sequence: Synthetic oligonucleotide
uacaccuaacgagcggcgg

SEQ ID NO: 818689 - RNA, 19 nt, Artificial Sequence
  Description of Artificial Sequence: Synthetic oligonucleotide
agcucaauacgcucauagu

SEQ ID NO: 818690 - RNA, 19 nt, Artificial Sequence
  Description of Artificial Sequence: Synthetic oligonucleotide
uccucgggugcauaugugu

SEQ ID NO: 818691 - RNA, 19 nt, Artificial Sequence
  Description of Artificial Sequence: Synthetic oligonucleotide
ucucaucaacagucuuagg

SEQ ID NO: 818692 - RNA, 19 nt, Artificial Sequence
  Description of Artificial Sequence: Synthetic oligonucleotide
ucaacagucuuaggggcac

SEQ ID NO: 818693 - RNA, 19 nt, Artificial Sequence
  Description of Artificial Sequence: Synthetic oligonucleotide
cucgggugcauauguguag

SEQ ID NO: 818694 - RNA, 19 nt, Artificial Sequence
  Description of Artificial Sequence: Synthetic oligonucleotide
aaggucgcagcaccucugu

SEQ ID NO: 818695 - RNA, 19 nt, Artificial Sequence
  Description of Artificial Sequence: Synthetic oligonucleotide
aaacgauggccaaaggaua

SEQ ID NO: 818696 - RNA, 19 nt, Artificial Sequence
  Description of Artificial Sequence: Synthetic oligonucleotide
gccucaaauacugucgagg

SEQ ID NO: 818697 - RNA, 19 nt, Artificial Sequence
  Description of Artificial Sequence: Synthetic oligonucleotide
auggaccugguguacacaa

SEQ ID NO: 818698 - RNA, 19 nt, Artificial Sequence
  Description of Artificial Sequence: Synthetic oligonucleotide
cacucgguggucauaauaa

SEQ ID NO: 818699 - RNA, 19 nt, Artificial Sequence
  Description of Artificial Sequence: Synthetic oligonucleotide
acgauggccaaaggauagc

SEQ ID NO: 818700 - RNA, 19 nt, Artificial Sequence
  Description of Artificial Sequence: Synthetic oligonucleotide
ucauaggaucuguucucac

SEQ ID NO: 818701 - RNA, 19 nt, Artificial Sequence
  Description of Artificial Sequence: Synthetic oligonucleotide
gaguggugaugucccagcc

SEQ ID NO: 818702 - RNA, 19 nt, Artificial Sequence
  Description of Artificial Sequence: Synthetic oligonucleotide
agggcggcugucauaacac

SEQ ID NO: 818703 - RNA, 19 nt, Artificial Sequence
  Description of Artificial Sequence: Synthetic oligonucleotide
ggugggguacaguugacac

SEQ ID NO: 818704 - RNA, 19 nt, Artificial Sequence
  Description of Artificial Sequence: Synthetic oligonucleotide
aauaacgcagcuggugcuu

SEQ ID NO: 818705 - RNA, 19 nt, Artificial Sequence
  Description of Artificial Sequence: Synthetic oligonucleotide
uggugguaaccgaggaacu

SEQ ID NO: 818706 - RNA, 19 nt, Artificial Sequence
  Description of Artificial Sequence: Synthetic oligonucleotide
cuccuguagauauacaccu

SEQ ID NO: 818707 - RNA, 19 nt, Artificial Sequence
  Description of Artificial Sequence: Synthetic oligonucleotide
guaaacgcgacguguuguc

SEQ ID NO: 818708 - RNA, 19 nt, Artificial Sequence
  Description of Artificial Sequence: Synthetic oligonucleotide
cagaaggucggccuagcuc

SEQ ID NO: 818709 - RNA, 19 nt, Artificial Sequence
  Description of Artificial Sequence: Synthetic oligonucleotide
augacaccacaauaaguua

SEQ ID NO: 818710 - RNA, 19 nt, Artificial Sequence
  Description of Artificial Sequence: Synthetic oligonucleotide
aacagucuuaggggcaccu

SEQ ID NO: 818711 - RNA, 19 nt, Artificial Sequence
  Description of Artificial Sequence: Synthetic oligonucleotide
gcugaaacgauggccaaag

SEQ ID NO: 818712 - RNA, 19 nt, Artificial Sequence
  Description of Artificial Sequence: Synthetic oligonucleotide
caggccguuccucuucugg

SEQ ID NO: 818713 - RNA, 19 nt, Artificial Sequence
  Description of Artificial Sequence: Synthetic oligonucleotide
gugguaaccgaggaacuug

SEQ ID NO: 818714 - RNA, 19 nt, Artificial Sequence
  Description of Artificial Sequence: Synthetic oligonucleotide
uacagggugcuggugcucc

SEQ ID NO: 818715 - RNA, 19 nt, Artificial Sequence
  Description of Artificial Sequence: Synthetic oligonucleotide
gacguguugucuucacauc

SEQ ID NO: 818716 - RNA, 19 nt, Artificial Sequence
  Description of Artificial Sequence: Synthetic oligonucleotide
gucauaacacggccauacc

SEQ ID NO: 818717 - RNA, 19 nt, Artificial Sequence
  Description of Artificial Sequence: Synthetic oligonucleotide
gugggguacaguugacacc

SEQ ID NO: 818718 - RNA, 19 nt, Artificial Sequence
  Description of Artificial Sequence: Synthetic oligonucleotide
ggucuguaacgacuggaag

SEQ ID NO: 818719 - RNA, 19 nt, Artificial Sequence
  Description of Artificial Sequence: Synthetic oligonucleotide
ucgagggcggcugucauaa

SEQ ID NO: 818720 - RNA, 19 nt, Artificial Sequence
  Description of Artificial Sequence: Synthetic oligonucleotide
aauggaccugguguacaca

SEQ ID NO: 818721 - RNA, 19 nt, Artificial Sequence
  Description of Artificial Sequence: Synthetic oligonucleotide
gccaugacaccacaauaag

SEQ ID NO: 818722 - RNA, 19 nt, Artificial Sequence
  Description of Artificial Sequence: Synthetic oligonucleotide
gugagcgcagaaaggaagc

SEQ ID NO: 818723 - RNA, 19 nt, Artificial Sequence
  Description of Artificial Sequence: Synthetic oligonucleotide
acaccuaacgagcggcggu

SEQ ID NO: 818724 - RNA, 19 nt, Artificial Sequence
  Description of Artificial Sequence: Synthetic oligonucleotide
agccaugacaccacaauaa

SEQ ID NO: 818725 - RNA, 19 nt, Artificial Sequence
  Description of Artificial Sequence: Synthetic oligonucleotide
ccagagugcgguagaaugg

SEQ ID NO: 818726 - RNA, 19 nt, Artificial Sequence
  Description of Artificial Sequence: Synthetic oligonucleotide
accgauauuugcagcagcu

SEQ ID NO: 818727 - RNA, 19 nt, Artificial Sequence
  Description of Artificial Sequence: Synthetic oligonucleotide
uggccgcgucccuaaacgg

SEQ ID NO: 818728 - RNA, 19 nt, Artificial Sequence
  Description of Artificial Sequence: Synthetic oligonucleotide
uaggacaaaccagcgggcu

SEQ ID NO: 818729 - RNA, 19 nt, Artificial Sequence
  Description of Artificial Sequence: Synthetic oligonucleotide
ggccauaccacacggcgcc

SEQ ID NO: 818730 - RNA, 19 nt, Artificial Sequence
  Description of Artificial Sequence: Synthetic oligonucleotide
cugaaacgauggccaaagg

SEQ ID NO: 818731 - RNA, 19 nt, Artificial Sequence
  Description of Artificial Sequence: Synthetic oligonucleotide
cugccggcccucaaggcgc

SEQ ID NO: 818732 - RNA, 19 nt, Artificial Sequence
  Description of Artificial Sequence: Synthetic oligonucleotide
caccgauauuugcagcagc

SEQ ID NO: 818733 - RNA, 19 nt, Artificial Sequence
  Description of Artificial Sequence: Synthetic oligonucleotide
cauaccacacggcgccugc

SEQ ID NO: 818734 - RNA, 19 nt, Artificial Sequence
  Description of Artificial Sequence: Synthetic oligonucleotide
uccgacaggcagcucugga

SEQ ID NO: 818735 - RNA, 19 nt, Artificial Sequence
  Description of Artificial Sequence: Synthetic oligonucleotide
auacaccuaacgagcggcg

SEQ ID NO: 818736 - RNA, 19 nt, Artificial Sequence
  Description of Artificial Sequence: Synthetic oligonucleotide
ggucauaauaacgcagcug

SEQ ID NO: 818737 - RNA, 19 nt, Artificial Sequence
  Description of Artificial Sequence: Synthetic oligonucleotide
uaaacauggccggggcggc

SEQ ID NO: 818738 - RNA, 19 nt, Artificial Sequence
  Description of Artificial Sequence: Synthetic oligonucleotide
acugucgagggccggggcu

SEQ ID NO: 818739 - RNA, 19 nt, Artificial Sequence
  Description of Artificial Sequence: Synthetic oligonucleotide
gggcuguaaacauggccgg

SEQ ID NO: 818740 - RNA, 19 nt, Artificial Sequence
  Description of Artificial Sequence: Synthetic oligonucleotide
ucguuaguucucucuuuau

SEQ ID NO: 818741 - RNA, 19 nt, Artificial Sequence
  Description of Artificial Sequence: Synthetic oligonucleotide
uaaacggcucagccaugac

SEQ ID NO: 818742 - RNA, 19 nt, Artificial Sequence
  Description of Artificial Sequence: Synthetic oligonucleotide
uuggacucgagggcggcug

SEQ ID NO: 818743 - RNA, 19 nt, Artificial Sequence
  Description of Artificial Sequence: Synthetic oligonucleotide
gucgcagcaccucuguguc

SEQ ID NO: 818744 - RNA, 19 nt, Artificial Sequence
  Description of Artificial Sequence: Synthetic oligonucleotide
ucgggugcauauguguagu

SEQ ID NO: 818745 - RNA, 19 nt, Artificial Sequence
  Description of Artificial Sequence: Synthetic oligonucleotide
guucagaaggucggccuag

SEQ ID NO: 818746 - RNA, 19 nt, Artificial Sequence
  Description of Artificial Sequence: Synthetic oligonucleotide
auacugucgagggccgggg

SEQ ID NO: 818747 - RNA, 19 nt, Artificial Sequence
  Description of Artificial Sequence: Synthetic oligonucleotide
ucggccuagcucugucucc

SEQ ID NO: 818748 - RNA, 19 nt, Artificial Sequence
  Description of Artificial Sequence: Synthetic oligonucleotide
uaaacgcgacguguugucu

SEQ ID NO: 818749 - RNA, 19 nt, Artificial Sequence
  Description of Artificial Sequence: Synthetic oligonucleotide
ggugcauauguguaguugu

SEQ ID NO: 818750 - RNA, 19 nt, Artificial Sequence
  Description of Artificial Sequence: Synthetic oligonucleotide
gagugcgguagaauggguc

SEQ ID NO: 818751 - RNA, 19 nt, Artificial Sequence
  Description of Artificial Sequence: Synthetic oligonucleotide
ggaccugguguacacaauc

SEQ ID NO: 818752 - RNA, 19 nt, Artificial Sequence
  Description of Artificial Sequence: Synthetic oligonucleotide
aucaacagucuuaggggca

SEQ ID NO: 818753 - RNA, 19 nt, Artificial Sequence
  Description of Artificial Sequence: Synthetic oligonucleotide
aggucggccuagcucuguc

SEQ ID NO: 818754 - RNA, 19 nt, Artificial Sequence
  Description of Artificial Sequence: Synthetic oligonucleotide
cauccgacaggcagcucug

SEQ ID NO: 818755 - RNA, 19 nt, Artificial Sequence
  Description of Artificial Sequence: Synthetic oligonucleotide
gguggacuauuuacaagcc

SEQ ID NO: 818756 - RNA, 19 nt, Artificial Sequence
  Description of Artificial Sequence: Synthetic oligonucleotide
gggguggacuauuuacaag

SEQ ID NO: 818757 - RNA, 19 nt, Artificial Sequence
  Description of Artificial Sequence: Synthetic oligonucleotide
uggugggguacaguugaca

SEQ ID NO: 818758 - RNA, 19 nt, Artificial Sequence
  Description of Artificial Sequence: Synthetic oligonucleotide
uucagaaggucggccuagc

SEQ ID NO: 818759 - RNA, 19 nt, Artificial Sequence
  Description of Artificial Sequence: Synthetic oligonucleotide
cacacagaccugcauggca

SEQ ID NO: 818760 - RNA, 19 nt, Artificial Sequence
  Description of Artificial Sequence: Synthetic oligonucleotide
uacugucgagggccggggc

SEQ ID NO: 818761 - RNA, 19 nt, Artificial Sequence
  Description of Artificial Sequence: Synthetic oligonucleotide
uaacgacuggaagcagagc

SEQ ID NO: 818762 - RNA, 19 nt, Artificial Sequence
  Description of Artificial Sequence: Synthetic oligonucleotide
cacggcgccugcucugugg

SEQ ID NO: 818763 - RNA, 19 nt, Artificial Sequence
  Description of Artificial Sequence: Synthetic oligonucleotide
auacgcucauagucagagu

SEQ ID NO: 818764 - RNA, 19 nt, Artificial Sequence
  Description of Artificial Sequence: Synthetic oligonucleotide
auaacgcagcuggugcuug

SEQ ID NO: 818765 - RNA, 19 nt, Artificial Sequence
  Description of Artificial Sequence: Synthetic oligonucleotide
acaaaccagcgggcuuucc

SEQ ID NO: 818766 - RNA, 19 nt, Artificial Sequence
  Description of Artificial Sequence: Synthetic oligonucleotide
cuaacgagcggcgguggug

SEQ ID NO: 818767 - RNA, 19 nt, Artificial Sequence
  Description of Artificial Sequence: Synthetic oligonucleotide
acuugagguagaacugacu

SEQ ID NO: 818768 - RNA, 19 nt, Artificial Sequence
  Description of Artificial Sequence: Synthetic oligonucleotide
acaccaguagugagcuagg

SEQ ID NO: 818769 - RNA, 19 nt, Artificial Sequence
  Description of Artificial Sequence: Synthetic oligonucleotide
ggcggcugucauaacacgg

SEQ ID NO: 818770 - RNA, 19 nt, Artificial Sequence
  Description of Artificial Sequence: Synthetic oligonucleotide
gccggggcuguaaacaugg

SEQ ID NO: 818771 - RNA, 19 nt, Artificial Sequence
  Description of Artificial Sequence: Synthetic oligonucleotide
caccaguagugagcuaggg

SEQ ID NO: 818772 - RNA, 19 nt, Artificial Sequence
  Description of Artificial Sequence: Synthetic oligonucleotide
cucauaggaucuguucuca

SEQ ID NO: 818773 - RNA, 19 nt, Artificial Sequence
  Description of Artificial Sequence: Synthetic oligonucleotide
gucggccuagcucugucuc

SEQ ID NO: 818774 - RNA, 19 nt, Artificial Sequence
  Description of Artificial Sequence: Synthetic oligonucleotide
uccgguccacccacugcug

SEQ ID NO: 818775 - RNA, 19 nt, Artificial Sequence
  Description of Artificial Sequence: Synthetic oligonucleotide
ccucauaggaucuguucuc

SEQ ID NO: 818776 - RNA, 19 nt, Artificial Sequence
  Description of Artificial Sequence: Synthetic oligonucleotide
gggugcauauguguaguug

SEQ ID NO: 818777 - RNA, 19 nt, Artificial Sequence
  Description of Artificial Sequence: Synthetic oligonucleotide
agaacugacugaacucaaa

SEQ ID NO: 818778 - RNA, 19 nt, Artificial Sequence
  Description of Artificial Sequence: Synthetic oligonucleotide
aggggucaggcauccgaca

SEQ ID NO: 818779 - RNA, 19 nt, Artificial Sequence
  Description of Artificial Sequence: Synthetic oligonucleotide
caagcgugagauggcauca

SEQ ID NO: 818780 - RNA, 19 nt, Artificial Sequence
  Description of Artificial Sequence: Synthetic oligonucleotide
accuaacgagcggcggugg

SEQ ID NO: 818781 - RNA, 19 nt, Artificial Sequence
  Description of Artificial Sequence: Synthetic oligonucleotide
cacggccauaccacacggc

SEQ ID NO: 818782 - RNA, 19 nt, Artificial Sequence
  Description of Artificial Sequence: Synthetic oligonucleotide
gguacaguugacaccagua

SEQ ID NO: 818783 - RNA, 19 nt, Artificial Sequence
  Description of Artificial Sequence: Synthetic oligonucleotide
cugacgagagcuggaugug

SEQ ID NO: 818784 - RNA, 19 nt, Artificial Sequence
  Description of Artificial Sequence: Synthetic oligonucleotide
gagguagaacugacugaac

SEQ ID NO: 818785 - RNA, 19 nt, Artificial Sequence
  Description of Artificial Sequence: Synthetic oligonucleotide
uggacucgagggcggcugu

SEQ ID NO: 818786 - RNA, 19 nt, Artificial Sequence
  Description of Artificial Sequence: Synthetic oligonucleotide
uccugccggcccucaaggc

SEQ ID NO: 818787 - RNA, 19 nt, Artificial Sequence
  Description of Artificial Sequence: Synthetic oligonucleotide
aucagccauuccgaguccu

SEQ ID NO: 818788 - RNA, 19 nt, Artificial Sequence
  Description of Artificial Sequence: Synthetic oligonucleotide
uuuccacuagcaggcggaa

SEQ ID NO: 818789 - RNA, 19 nt, Artificial Sequence
  Description of Artificial Sequence: Synthetic oligonucleotide
uugcucagccgguccacau

SEQ ID NO: 818790 - RNA, 19 nt, Artificial Sequence
  Description of Artificial Sequence: Synthetic oligonucleotide
caccuaacgagcggcggug

SEQ ID NO: 818791 - RNA, 19 nt, Artificial Sequence
  Description of Artificial Sequence: Synthetic oligonucleotide
ccuaguggucuguaacgac

SEQ ID NO: 818792 - RNA, 19 nt, Artificial Sequence
  Description of Artificial Sequence: Synthetic oligonucleotide
acggcgccugcucugugga

SEQ ID NO: 818793 - RNA, 19 nt, Artificial Sequence
  Description of Artificial Sequence: Synthetic oligonucleotide
uggugcuccgucgggcagc

SEQ ID NO: 818794 - RNA, 19 nt, Artificial Sequence
  Description of Artificial Sequence: Synthetic oligonucleotide
cuguaccauggccgcgucc

SEQ ID NO: 818795 - RNA, 19 nt, Artificial Sequence
  Description of Artificial Sequence: Synthetic oligonucleotide
agguuggacucgagggcgg

SEQ ID NO: 818796 - RNA, 19 nt, Artificial Sequence
  Description of Artificial Sequence: Synthetic oligonucleotide
gcaaccagguacacaggcc

SEQ ID NO: 818797 - RNA, 19 nt, Artificial Sequence
  Description of Artificial Sequence: Synthetic oligonucleotide
caaacuccauggggaacug

SEQ ID NO: 818798 - RNA, 19 nt, Artificial Sequence
  Description of Artificial Sequence: Synthetic oligonucleotide
aggucgcagcaccucugug

SEQ ID NO: 818799 - RNA, 19 nt, Artificial Sequence
  Description of Artificial Sequence: Synthetic oligonucleotide
caauacgcucauagucaga

SEQ ID NO: 818800 - RNA, 19 nt, Artificial Sequence
  Description of Artificial Sequence: Synthetic oligonucleotide
gccauuccgaguccuccag

SEQ ID NO: 818801 - RNA, 19 nt, Artificial Sequence
  Description of Artificial Sequence: Synthetic oligonucleotide
gggcggcugucauaacacg

SEQ ID NO: 818802 - RNA, 19 nt, Artificial Sequence
  Description of Artificial Sequence: Synthetic oligonucleotide
guccgaaagcggcgggaug

SEQ ID NO: 818803 - RNA, 19 nt, Artificial Sequence
  Description of Artificial Sequence: Synthetic oligonucleotide
cagccaugacaccacaaua

SEQ ID NO: 818804 - RNA, 19 nt, Artificial Sequence
  Description of Artificial Sequence: Synthetic oligonucleotide
gagggccggggcuguaaac

SEQ ID NO: 818805 - RNA, 19 nt, Artificial Sequence
  Description of Artificial Sequence: Synthetic oligonucleotide
uagggguaccacguccauc

SEQ ID NO: 818806 - RNA, 19 nt, Artificial Sequence
  Description of Artificial Sequence: Synthetic oligonucleotide
aggcauccgacaggcagcu

SEQ ID NO: 818807 - RNA, 19 nt, Artificial Sequence
  Description of Artificial Sequence: Synthetic oligonucleotide
ucaggccguuccucuucug

SEQ ID NO: 818808 - RNA, 19 nt, Artificial Sequence
  Description of Artificial Sequence: Synthetic oligonucleotide
uggauccgguccacccacu

SEQ ID NO: 818809 - RNA, 19 nt, Artificial Sequence
  Description of Artificial Sequence: Synthetic oligonucleotide
gaccugguguacacaaucu

SEQ ID NO: 818810 - RNA, 19 nt, Artificial Sequence
  Description of Artificial Sequence: Synthetic oligonucleotide
aaggucggccuagcucugu

SEQ ID NO: 818811 - RNA, 19 nt, Artificial Sequence
  Description of Artificial Sequence: Synthetic oligonucleotide
cagugagcgcagaaaggaa

SEQ ID NO: 818812 - RNA, 19 nt, Artificial Sequence
  Description of Artificial Sequence: Synthetic oligonucleotide
guuguaaacgcgacguguu

SEQ ID NO: 818813 - RNA, 19 nt, Artificial Sequence
  Description of Artificial Sequence: Synthetic oligonucleotide
gcauggugguaaccgagga

SEQ ID NO: 818814 - RNA, 19 nt, Artificial Sequence
  Description of Artificial Sequence: Synthetic oligonucleotide
uucaccugccuugccucaa

SEQ ID NO: 818815 - RNA, 19 nt, Artificial Sequence
  Description of Artificial Sequence: Synthetic oligonucleotide
gaaggucggccuagcucug

SEQ ID NO: 818816 - RNA, 19 nt, Artificial Sequence
  Description of Artificial Sequence: Synthetic oligonucleotide
gacucgagggcggcuguca

SEQ ID NO: 818817 - RNA, 19 nt, Artificial Sequence
  Description of Artificial Sequence: Synthetic oligonucleotide
auccgacaggcagcucugg

SEQ ID NO: 818818 - RNA, 19 nt, Artificial Sequence
  Description of Artificial Sequence: Synthetic oligonucleotide
gacgagagcuggauguggu

SEQ ID NO: 818819 - RNA, 19 nt, Artificial Sequence
  Description of Artificial Sequence: Synthetic oligonucleotide
ccugacgagagcuggaugu

SEQ ID NO: 818820 - RNA, 19 nt, Artificial Sequence
  Description of Artificial Sequence: Synthetic oligonucleotide
caacagucuuaggggcacc

SEQ ID NO: 818821 - RNA, 19 nt, Artificial Sequence
  Description of Artificial Sequence: Synthetic oligonucleotide
gguaaccgaggaacuugag

SEQ ID NO: 818822 - RNA, 19 nt, Artificial Sequence
  Description of Artificial Sequence: Synthetic oligonucleotide
agccccagcucaauacgcu

SEQ ID NO: 818823 - RNA, 19 nt, Artificial Sequence
  Description of Artificial Sequence: Synthetic oligonucleotide
gcaccgauauuugcagcag

SEQ ID NO: 818824 - RNA, 19 nt, Artificial Sequence
  Description of Artificial Sequence: Synthetic oligonucleotide
ggucgcagcaccucugugu

SEQ ID NO: 818825 - RNA, 19 nt, Artificial Sequence
  Description of Artificial Sequence: Synthetic oligonucleotide
ccacaggucccuccuguag

SEQ ID NO: 818826 - RNA, 19 nt, Artificial Sequence
  Description of Artificial Sequence: Synthetic oligonucleotide
guguccucgggugcauaug

SEQ ID NO: 818827 - RNA, 19 nt, Artificial Sequence
  Description of Artificial Sequence: Synthetic oligonucleotide
agguccgaaagcggcggga

SEQ ID NO: 818828 - RNA, 19 nt, Artificial Sequence
  Description of Artificial Sequence: Synthetic oligonucleotide
cuccaucaggccguuccuc

SEQ ID NO: 818829 - RNA, 19 nt, Artificial Sequence
  Description of Artificial Sequence: Synthetic oligonucleotide
gugcauauguguaguugua

SEQ ID NO: 818830 - RNA, 19 nt, Artificial Sequence
  Description of Artificial Sequence: Synthetic oligonucleotide
cagucuuaggggcaccuau

SEQ ID NO: 818831 - RNA, 19 nt, Artificial Sequence
  Description of Artificial Sequence: Synthetic oligonucleotide
acauugcuguaaggucgca

SEQ ID NO: 818832 - RNA, 19 nt, Artificial Sequence
  Description of Artificial Sequence: Synthetic oligonucleotide
ggccgcgucccuaaacggc

SEQ ID NO: 818833 - RNA, 19 nt, Artificial Sequence
  Description of Artificial Sequence: Synthetic oligonucleotide
ccacuccuuuuccacuagc

SEQ ID NO: 818834 - RNA, 19 nt, Artificial Sequence
  Description of Artificial Sequence: Synthetic oligonucleotide
ggcaccuauggugggugug

SEQ ID NO: 818835 - RNA, 19 nt, Artificial Sequence
  Description of Artificial Sequence: Synthetic oligonucleotide
acagucuuaggggcaccua

SEQ ID NO: 818836 - RNA, 19 nt, Artificial Sequence
  Description of Artificial Sequence: Synthetic oligonucleotide
gggaugcauggugguaacc

SEQ ID NO: 818837 - RNA, 19 nt, Artificial Sequence
  Description of Artificial Sequence: Synthetic oligonucleotide
ugccggcccucaaggcgcu

SEQ ID NO: 818838 - RNA, 19 nt, Artificial Sequence
  Description of Artificial Sequence: Synthetic oligonucleotide
gguuggacucgagggcggc

SEQ ID NO: 818839 - RNA, 19 nt, Artificial Sequence
  Description of Artificial Sequence: Synthetic oligonucleotide
ccaugacaccacaauaagu

SEQ ID NO: 818840 - RNA, 19 nt, Artificial Sequence
  Description of Artificial Sequence: Synthetic oligonucleotide
cccuaaacggcucagccau

SEQ ID NO: 818841 - RNA, 19 nt, Artificial Sequence
  Description of Artificial Sequence: Synthetic oligonucleotide
gcgacguguugucuucaca

SEQ ID NO: 818842 - RNA, 19 nt, Artificial Sequence
  Description of Artificial Sequence: Synthetic oligonucleotide
ggcaucagguuggacucga

SEQ ID NO: 818843 - RNA, 19 nt, Artificial Sequence
  Description of Artificial Sequence: Synthetic oligonucleotide
ccuaaacggcucagccaug

SEQ ID NO: 818844 - RNA, 19 nt, Artificial Sequence
  Description of Artificial Sequence: Synthetic oligonucleotide
cagggcaaccagguacaca

SEQ ID NO: 818845 - RNA, 19 nt, Artificial Sequence
  Description of Artificial Sequence: Synthetic oligonucleotide
gacugaacucaaacuccau

SEQ ID NO: 818846 - RNA, 19 nt, Artificial Sequence
  Description of Artificial Sequence: Synthetic oligonucleotide
gcgggaugcauggugguaa

SEQ ID NO: 818847 - RNA, 19 nt, Artificial Sequence
  Description of Artificial Sequence: Synthetic oligonucleotide
guacagggugcuggugcuc

SEQ ID NO: 818848 - RNA, 19 nt, Artificial Sequence
  Description of Artificial Sequence: Synthetic oligonucleotide
ggguacaguugacaccagu

SEQ ID NO: 818849 - RNA, 19 nt, Artificial Sequence
  Description of Artificial Sequence: Synthetic oligonucleotide
ggcgcugcgcagccuuuac

SEQ ID NO: 818850 - RNA, 19 nt, Artificial Sequence
  Description of Artificial Sequence: Synthetic oligonucleotide
cggccauaccacacggcgc

SEQ ID NO: 818851 - RNA, 19 nt, Artificial Sequence
  Description of Artificial Sequence: Synthetic oligonucleotide
acgcgacguguugucuuca

SEQ ID NO: 818852 - RNA, 19 nt, Artificial Sequence
  Description of Artificial Sequence: Synthetic oligonucleotide
caccccuaguggucuguaa

SEQ ID NO: 818853 - RNA, 19 nt, Artificial Sequence
  Description of Artificial Sequence: Synthetic oligonucleotide
cccuaguggucuguaacga

SEQ ID NO: 818854 - RNA, 19 nt, Artificial Sequence
  Description of Artificial Sequence: Synthetic oligonucleotide
ggacaaaccagcgggcuuu

SEQ ID NO: 818855 - RNA, 19 nt, Artificial Sequence
  Description of Artificial Sequence: Synthetic oligonucleotide
ggcugaaacgauggccaaa

SEQ ID NO: 818856 - RNA, 19 nt, Artificial Sequence
  Description of Artificial Sequence: Synthetic oligonucleotide
gccggggcggcccugccca

SEQ ID NO: 818857 - RNA, 19 nt, Artificial Sequence
  Description of Artificial Sequence: Synthetic oligonucleotide
ccaaggauaccaccugagu

SEQ ID NO: 818858 - RNA, 19 nt, Artificial Sequence
  Description of Artificial Sequence: Synthetic oligonucleotide
ccucgggugcauaugugua

SEQ ID NO: 818859 - RNA, 19 nt, Artificial Sequence
  Description of Artificial Sequence: Synthetic oligonucleotide
ccacucgguggucauaaua

SEQ ID NO: 818860 - RNA, 19 nt, Artificial Sequence
  Description of Artificial Sequence: Synthetic oligonucleotide
gcaucagguuggacucgag

SEQ ID NO: 818861 - RNA, 19 nt, Artificial Sequence
  Description of Artificial Sequence: Synthetic oligonucleotide
ggauaccaccugaguggug

SEQ ID NO: 818862 - RNA, 19 nt, Artificial Sequence
  Description of Artificial Sequence: Synthetic oligonucleotide
gcgguggugggguacaguu

SEQ ID NO: 818863 - RNA, 19 nt, Artificial Sequence
  Description of Artificial Sequence: Synthetic oligonucleotide
gcgugagauggcaucaggu

SEQ ID NO: 818864 - RNA, 19 nt, Artificial Sequence
  Description of Artificial Sequence: Synthetic oligonucleotide
ccacacggcgccugcucug

SEQ ID NO: 818865 - RNA, 19 nt, Artificial Sequence
  Description of Artificial Sequence: Synthetic oligonucleotide
gcgucccuaaacggcucag

SEQ ID NO: 818866 - RNA, 19 nt, Artificial Sequence
  Description of Artificial Sequence: Synthetic oligonucleotide
ccauaccacacggcgccug

SEQ ID NO: 818867 - RNA, 19 nt, Artificial Sequence
  Description of Artificial Sequence: Synthetic oligonucleotide
ggugguaaccgaggaacuu

SEQ ID NO: 818868 - RNA, 19 nt, Artificial Sequence
  Description of Artificial Sequence: Synthetic oligonucleotide
cgucccuaaacggcucagc

SEQ ID NO: 818869 - RNA, 19 nt, Artificial Sequence
  Description of Artificial Sequence: Synthetic oligonucleotide
cuagggguaccacguccau

SEQ ID NO: 818870 - RNA, 19 nt, Artificial Sequence
  Description of Artificial Sequence: Synthetic oligonucleotide
gcuucaugaaggccccuuu

SEQ ID NO: 818871 - RNA, 19 nt, Artificial Sequence
  Description of Artificial Sequence: Synthetic oligonucleotide
guuggacucgagggcggcu

SEQ ID NO: 818872 - RNA, 19 nt, Artificial Sequence
  Description of Artificial Sequence: Synthetic oligonucleotide
ggucggccuagcucugucu

SEQ ID NO: 818873 - RNA, 19 nt, Artificial Sequence
  Description of Artificial Sequence: Synthetic oligonucleotide
gucaggcauccgacaggca

SEQ ID NO: 818874 - RNA, 19 nt, Artificial Sequence
  Description of Artificial Sequence: Synthetic oligonucleotide
ccugcccaccccuaguggu

SEQ ID NO: 818875 - RNA, 19 nt, Artificial Sequence
  Description of Artificial Sequence: Synthetic oligonucleotide
gcgcugcgcagccuuuaca

SEQ ID NO: 818876 - RNA, 19 nt, Artificial Sequence
  Description of Artificial Sequence: Synthetic oligonucleotide
cgcgacguguugucuucac

SEQ ID NO: 818877 - RNA, 19 nt, Artificial Sequence
  Description of Artificial Sequence: Synthetic oligonucleotide
gcucagggccucaaauacu

SEQ ID NO: 818878 - RNA, 19 nt, Artificial Sequence
  Description of Artificial Sequence: Synthetic oligonucleotide
gccgcgucccuaaacggcu

SEQ ID NO: 818879 - RNA, 19 nt, Artificial Sequence
  Description of Artificial Sequence: Synthetic oligonucleotide
gguccgaaagcggcgggau

SEQ ID NO: 818880 - RNA, 19 nt, Artificial Sequence
  Description of Artificial Sequence: Synthetic oligonucleotide
ccgacaggcagcucuggau

SEQ ID NO: 818881 - RNA, 19 nt, Artificial Sequence
  Description of Artificial Sequence: Synthetic oligonucleotide
cggcccucaaggcgcugcg

SEQ ID NO: 818882 - RNA, 19 nt, Artificial Sequence
  Description of Artificial Sequence: Synthetic oligonucleotide
cacacggcgccugcucugu

SEQ ID NO: 818883 - RNA, 19 nt, Artificial Sequence
  Description of Artificial Sequence: Synthetic oligonucleotide
ggcgggaugcaugguggua

SEQ ID NO: 818884 - RNA, 19 nt, Artificial Sequence
  Description of Artificial Sequence: Synthetic oligonucleotide
ccgcgucccuaaacggcuc

SEQ ID NO: 818885 - RNA, 19 nt, Artificial Sequence
  Description of Artificial Sequence: Synthetic oligonucleotide
caggucccuccuguagaua

SEQ ID NO: 818886 - RNA, 19 nt, Artificial Sequence
  Description of Artificial Sequence: Synthetic oligonucleotide
cgaggaacuugagguagaa

SEQ ID NO: 818887 - RNA, 19 nt, Artificial Sequence
  Description of Artificial Sequence: Synthetic oligonucleotide
gggcaccuauggugggugu

SEQ ID NO: 818888 - RNA, 19 nt, Artificial Sequence
  Description of Artificial Sequence: Synthetic oligonucleotide
gcggcgguggugggguaca

SEQ ID NO: 818889 - RNA, 19 nt, Artificial Sequence
  Description of Artificial Sequence: Synthetic oligonucleotide
ccgaaagcggcgggaugca

SEQ ID NO: 818890 - RNA, 19 nt, Artificial Sequence
  Description of Artificial Sequence: Synthetic oligonucleotide
ccuaacgagcggcgguggu

SEQ ID NO: 818891 - RNA, 19 nt, Artificial Sequence
  Description of Artificial Sequence: Synthetic oligonucleotide
cggccuagcucugucucca

SEQ ID NO: 818892 - RNA, 19 nt, Artificial Sequence
  Description of Artificial Sequence: Synthetic oligonucleotide
ccgauauuugcagcagcuu

SEQ ID NO: 818893 - RNA, 19 nt, Artificial Sequence
  Description of Artificial Sequence: Synthetic oligonucleotide
ggcauccgacaggcagcuc

SEQ ID NO: 818894 - RNA, 19 nt, Artificial Sequence
  Description of Artificial Sequence: Synthetic oligonucleotide
ccaggucaaugacacccuu

SEQ ID NO: 818895 - RNA, 19 nt, Artificial Sequence
  Description of Artificial Sequence: Synthetic oligonucleotide
gccuugccucaaacaccuc

SEQ ID NO: 818896 - RNA, 19 nt, Artificial Sequence
  Description of Artificial Sequence: Synthetic oligonucleotide
ccacgguggcugaaacgau

SEQ ID NO: 818897 - RNA, 19 nt, Artificial Sequence
  Description of Artificial Sequence: Synthetic oligonucleotide
gccauaccacacggcgccu

SEQ ID NO: 818898 - RNA, 19 nt, Artificial Sequence
  Description of Artificial Sequence: Synthetic oligonucleotide
ccaccccuaguggucugua

SEQ ID NO: 818899 - RNA, 19 nt, Artificial Sequence
  Description of Artificial Sequence: Synthetic oligonucleotide
ccggggcggcccugcccac

SEQ ID NO: 818900 - RNA, 19 nt, Artificial Sequence
  Description of Artificial Sequence: Synthetic oligonucleotide
cgggugcauauguguaguu

SEQ ID NO: 818901 - RNA, 19 nt, Artificial Sequence
  Description of Artificial Sequence: Synthetic oligonucleotide
cggcgggaugcaugguggu

SEQ ID NO: 818902 - RNA, 19 nt, Artificial Sequence
  Description of Artificial Sequence: Synthetic oligonucleotide
cgaaagcggcgggaugcau

SEQ ID NO: 818903 - RNA, 19 nt, Artificial Sequence
  Description of Artificial Sequence: Synthetic oligonucleotide
uuuaucauaauuuuguuga

SEQ ID NO: 818904 - RNA, 19 nt, Artificial Sequence
  Description of Artificial Sequence: Synthetic oligonucleotide
aaaugcaaaagcaaggugc

SEQ ID NO: 818905 - RNA, 19 nt, Artificial Sequence
  Description of Artificial Sequence: Synthetic oligonucleotide
agaauaaacagucaucugg

SEQ ID NO: 818906 - RNA, 19 nt, Artificial Sequence
  Description of Artificial Sequence: Synthetic oligonucleotide
cauaauauuucuucuaggg

SEQ ID NO: 818907 - RNA, 19 nt, Artificial Sequence
  Description of Artificial Sequence: Synthetic oligonucleotide
aaguaucauagccagugcc

SEQ ID NO: 818908 - RNA, 19 nt, Artificial Sequence
  Description of Artificial Sequence: Synthetic oligonucleotide
uggaauuugacacagucca

SEQ ID NO: 818909 - RNA, 19 nt, Artificial Sequence
  Description of Artificial Sequence: Synthetic oligonucleotide
aagcacauuauaugguacc

SEQ ID NO: 818910 - RNA, 19 nt, Artificial Sequence
  Description of Artificial Sequence: Synthetic oligonucleotide
agaacaagagagcagcccc

SEQ ID NO: 818911 - RNA, 19 nt, Artificial Sequence
  Description of Artificial Sequence: Synthetic oligonucleotide
aauagccgcacugaguucc

SEQ ID NO: 818912 - RNA, 19 nt, Artificial Sequence
  Description of Artificial Sequence: Synthetic oligonucleotide
ugggcuaaaggccagacug

SEQ ID NO: 818913 - RNA, 19 nt, Artificial Sequence
  Description of Artificial Sequence: Synthetic oligonucleotide
ugcauauauccucagcggg

SEQ ID NO: 818914 - RNA, 19 nt, Artificial Sequence
  Description of Artificial Sequence: Synthetic oligonucleotide
caauguucaguuaagcuac

SEQ ID NO: 818915 - RNA, 19 nt, Artificial Sequence
  Description of Artificial Sequence: Synthetic oligonucleotide
gagaaguacugacagagug

SEQ ID NO: 818916 - RNA, 19 nt, Artificial Sequence
  Description of Artificial Sequence: Synthetic oligonucleotide
gaauuugacacaguccacg

SEQ ID NO: 818917 - RNA, 19 nt, Artificial Sequence
  Description of Artificial Sequence: Synthetic oligonucleotide
acagcucucaacuggaguc

SEQ ID NO: 818918 - RNA, 19 nt, Artificial Sequence
  Description of Artificial Sequence: Synthetic oligonucleotide
guuccaguaacccuacugg

SEQ ID NO: 818919 - RNA, 19 nt, Artificial Sequence
  Description of Artificial Sequence: Synthetic oligonucleotide
aaaagcacauuauauggua

SEQ ID NO: 818920 - RNA, 19 nt, Artificial Sequence
  Description of Artificial Sequence: Synthetic oligonucleotide
ucuucuaggguagagaagu

SEQ ID NO: 818921 - RNA, 19 nt, Artificial Sequence
  Description of Artificial Sequence: Synthetic oligonucleotide
aacccuacugggaagaggg

SEQ ID NO: 818922 - RNA, 19 nt, Artificial Sequence
  Description of Artificial Sequence: Synthetic oligonucleotide
aaugcuagguuuccuccuc

SEQ ID NO: 818923 - RNA, 19 nt, Artificial Sequence
  Description of Artificial Sequence: Synthetic oligonucleotide
ugaauagccgcacugaguu

SEQ ID NO: 818924 - RNA, 19 nt, Artificial Sequence
  Description of Artificial Sequence: Synthetic oligonucleotide
uuaccguugggagaaaagg

SEQ ID NO: 818925 - RNA, 19 nt, Artificial Sequence
  Description of Artificial Sequence: Synthetic oligonucleotide
ucuaggguagagaaguacu

SEQ ID NO: 818926 - RNA, 19 nt, Artificial Sequence
  Description of Artificial Sequence: Synthetic oligonucleotide
gauacaugggcuaccaaag

SEQ ID NO: 818927 - RNA, 19 nt, Artificial Sequence
  Description of Artificial Sequence: Synthetic oligonucleotide
acaagcuagacggauacgg

SEQ ID NO: 818928 - RNA, 19 nt, Artificial Sequence
  Description of Artificial Sequence: Synthetic oligonucleotide
gaggcaucaagccugagca

SEQ ID NO: 818929 - RNA, 19 nt, Artificial Sequence
  Description of Artificial Sequence: Synthetic oligonucleotide
aaccuuggacaaucgacuc

SEQ ID NO: 818930 - RNA, 19 nt, Artificial Sequence
  Description of Artificial Sequence: Synthetic oligonucleotide
uucaguuaagcuaccugcc

SEQ ID NO: 818931 - RNA, 19 nt, Artificial Sequence
  Description of Artificial Sequence: Synthetic oligonucleotide
acggauacgggaugugucc

SEQ ID NO: 818932 - RNA, 19 nt, Artificial Sequence
  Description of Artificial Sequence: Synthetic oligonucleotide
uguucaguuaagcuaccug

SEQ ID NO: 818933 - RNA, 19 nt, Artificial Sequence
  Description of Artificial Sequence: Synthetic oligonucleotide
cuugauacucuccugcaag

SEQ ID NO: 818934 - RNA, 19 nt, Artificial Sequence
  Description of Artificial Sequence: Synthetic oligonucleotide
uaugguaccccuuucuccu

SEQ ID NO: 818935 - RNA, 19 nt, Artificial Sequence
  Description of Artificial Sequence: Synthetic oligonucleotide
uguacacucaagacauugc

SEQ ID NO: 818936 - RNA, 19 nt, Artificial Sequence
  Description of Artificial Sequence: Synthetic oligonucleotide
uccuugacccgcuugauac

SEQ ID NO: 818937 - RNA, 19 nt, Artificial Sequence
  Description of Artificial Sequence: Synthetic oligonucleotide
auuauaugguaccccuuuc

SEQ ID NO: 818938 - RNA, 19 nt, Artificial Sequence
  Description of Artificial Sequence: Synthetic oligonucleotide
gucuacagcugcuacagag

SEQ ID NO: 818939 - RNA, 19 nt, Artificial Sequence
  Description of Artificial Sequence: Synthetic oligonucleotide
ucaguuuuagcaaguccug

SEQ ID NO: 818940 - RNA, 19 nt, Artificial Sequence
  Description of Artificial Sequence: Synthetic oligonucleotide
agcacauuauaugguaccc

SEQ ID NO: 818941 - RNA, 19 nt, Artificial Sequence
  Description of Artificial Sequence: Synthetic oligonucleotide
ucgacucaagugcugaggc

SEQ ID NO: 818942 - RNA, 19 nt, Artificial Sequence
  Description of Artificial Sequence: Synthetic oligonucleotide
uuccaguaacccuacuggg

SEQ ID NO: 818943 - RNA, 19 nt, Artificial Sequence
  Description of Artificial Sequence: Synthetic oligonucleotide
aaaagcgucccagaggcca

SEQ ID NO: 818944 - RNA, 19 nt, Artificial Sequence
  Description of Artificial Sequence: Synthetic oligonucleotide
agaagcuugcuaucagagg

SEQ ID NO: 818945 - RNA, 19 nt, Artificial Sequence
  Description of Artificial Sequence: Synthetic oligonucleotide
uguugggcgcuccacagcc

SEQ ID NO: 818946 - RNA, 19 nt, Artificial Sequence
  Description of Artificial Sequence: Synthetic oligonucleotide
uguaaacuaaauacauuuu

SEQ ID NO: 818947 - RNA, 19 nt, Artificial Sequence
  Description of Artificial Sequence: Synthetic oligonucleotide
ucuguguuauagaaggcau

SEQ ID NO: 818948 - RNA, 19 nt, Artificial Sequence
  Description of Artificial Sequence: Synthetic oligonucleotide
ugaccaguuuuccagcccc

SEQ ID NO: 818949 - RNA, 19 nt, Artificial Sequence
  Description of Artificial Sequence: Synthetic oligonucleotide
ucaagccugagcauacagc

SEQ ID NO: 818950 - RNA, 19 nt, Artificial Sequence
  Description of Artificial Sequence: Synthetic oligonucleotide
aaccucaaaauuccaagua

SEQ ID NO: 818951 - RNA, 19 nt, Artificial Sequence
  Description of Artificial Sequence: Synthetic oligonucleotide
uugccaaguaguuugaauu

SEQ ID NO: 818952 - RNA, 19 nt, Artificial Sequence
  Description of Artificial Sequence: Synthetic oligonucleotide
ggacaaucgacucaagugc

SEQ ID NO: 818953 - RNA, 19 nt, Artificial Sequence
  Description of Artificial Sequence: Synthetic oligonucleotide
uaucauaauuuuguugaug

SEQ ID NO: 818954 - RNA, 19 nt, Artificial Sequence
  Description of Artificial Sequence: Synthetic oligonucleotide
ugccaaguaguuugaauug

SEQ ID NO: 818955 - RNA, 19 nt, Artificial Sequence
  Description of Artificial Sequence: Synthetic oligonucleotide
cauugaagggagaaagaac

SEQ ID NO: 818956 - RNA, 19 nt, Artificial Sequence
  Description of Artificial Sequence: Synthetic oligonucleotide
uauaugguaccccuuucuc

SEQ ID NO: 818957 - RNA, 19 nt, Artificial Sequence
  Description of Artificial Sequence: Synthetic oligonucleotide
aagcuagacggauacggga

SEQ ID NO: 818958 - RNA, 19 nt, Artificial Sequence
  Description of Artificial Sequence: Synthetic oligonucleotide
cugcauauauccucagcgg

SEQ ID NO: 818959 - RNA, 19 nt, Artificial Sequence
  Description of Artificial Sequence: Synthetic oligonucleotide
ugcuagaucaucccuuccu

SEQ ID NO: 818960 - RNA, 19 nt, Artificial Sequence
  Description of Artificial Sequence: Synthetic oligonucleotide
aguacuuaccguugggaga

SEQ ID NO: 818961 - RNA, 19 nt, Artificial Sequence
  Description of Artificial Sequence: Synthetic oligonucleotide
caacuuuaaccgcuggucc

SEQ ID NO: 818962 - RNA, 19 nt, Artificial Sequence
  Description of Artificial Sequence: Synthetic oligonucleotide
uauauccucagcggguacg

SEQ ID NO: 818963 - RNA, 19 nt, Artificial Sequence
  Description of Artificial Sequence: Synthetic oligonucleotide
cucagaauaaacagucauc

SEQ ID NO: 818964 - RNA, 19 nt, Artificial Sequence
  Description of Artificial Sequence: Synthetic oligonucleotide
uccgaucaaaagaccacag

SEQ ID NO: 818965 - RNA, 19 nt, Artificial Sequence
  Description of Artificial Sequence: Synthetic oligonucleotide
ucccugauacagcacagug

SEQ ID NO: 818966 - RNA, 19 nt, Artificial Sequence
  Description of Artificial Sequence: Synthetic oligonucleotide
agucccugucaccacuucc

SEQ ID NO: 818967 - RNA, 19 nt, Artificial Sequence
  Description of Artificial Sequence: Synthetic oligonucleotide
uacaugggcuaccaaaguc

SEQ ID NO: 818968 - RNA, 19 nt, Artificial Sequence
  Description of Artificial Sequence: Synthetic oligonucleotide
uaccguugggagaaaagga

SEQ ID NO: 818969 - RNA, 19 nt, Artificial Sequence
  Description of Artificial Sequence: Synthetic oligonucleotide
caggccaugaacuguacac

SEQ ID NO: 818970 - RNA, 19 nt, Artificial Sequence
  Description of Artificial Sequence: Synthetic oligonucleotide
cuaccaaagucugaauucc

SEQ ID NO: 818971 - RNA, 19 nt, Artificial Sequence
  Description of Artificial Sequence: Synthetic oligonucleotide
uguugauggugcuagggau

SEQ ID NO: 818972 - RNA, 19 nt, Artificial Sequence
  Description of Artificial Sequence: Synthetic oligonucleotide
aaucgacucaagugcugag

SEQ ID NO: 818973 - RNA, 19 nt, Artificial Sequence
  Description of Artificial Sequence: Synthetic oligonucleotide
gguucuaucauuauggaaa

SEQ ID NO: 818974 - RNA, 19 nt, Artificial Sequence
  Description of Artificial Sequence: Synthetic oligonucleotide
acugaguuccccuguuggg

SEQ ID NO: 818975 - RNA, 19 nt, Artificial Sequence
  Description of Artificial Sequence: Synthetic oligonucleotide
aaagcacgggaccucggug

SEQ ID NO: 818976 - RNA, 19 nt, Artificial Sequence
  Description of Artificial Sequence: Synthetic oligonucleotide
ggugaagcucccuaggucc

SEQ ID NO: 818977 - RNA, 19 nt, Artificial Sequence
  Description of Artificial Sequence: Synthetic oligonucleotide
acagagugcagccaguaaa

SEQ ID NO: 818978 - RNA, 19 nt, Artificial Sequence
  Description of Artificial Sequence: Synthetic oligonucleotide
guuggugaagcucccuagg

SEQ ID NO: 818979 - RNA, 19 nt, Artificial Sequence
  Description of Artificial Sequence: Synthetic oligonucleotide
caagcuagacggauacggg

SEQ ID NO: 818980 - RNA, 19 nt, Artificial Sequence
  Description of Artificial Sequence: Synthetic oligonucleotide
cuaggguagagaaguacug

SEQ ID NO: 818981 - RNA, 19 nt, Artificial Sequence
  Description of Artificial Sequence: Synthetic oligonucleotide
acacguacagaguugucca

SEQ ID NO: 818982 - RNA, 19 nt, Artificial Sequence
  Description of Artificial Sequence: Synthetic oligonucleotide
uaucauagccagugccagg

SEQ ID NO: 818983 - RNA, 19 nt, Artificial Sequence
  Description of Artificial Sequence: Synthetic oligonucleotide
auuugacacaguccacguc

SEQ ID NO: 818984 - RNA, 19 nt, Artificial Sequence
  Description of Artificial Sequence: Synthetic oligonucleotide
uuuuguugauggugcuagg

SEQ ID NO: 818985 - RNA, 19 nt, Artificial Sequence
  Description of Artificial Sequence: Synthetic oligonucleotide
auaaucauugaagggagaa

SEQ ID NO: 818986 - RNA, 19 nt, Artificial Sequence
  Description of Artificial Sequence: Synthetic oligonucleotide
uuuuggaccgcaagcucca

SEQ ID NO: 818987 - RNA, 19 nt, Artificial Sequence
  Description of Artificial Sequence: Synthetic oligonucleotide
cuuaccguugggagaaaag

SEQ ID NO: 818988 - RNA, 19 nt, Artificial Sequence
  Description of Artificial Sequence: Synthetic oligonucleotide
aagcacgggaccucgguga

SEQ ID NO: 818989 - RNA, 19 nt, Artificial Sequence
  Description of Artificial Sequence: Synthetic oligonucleotide
accucaaaauuccaaguau

SEQ ID NO: 818990 - RNA, 19 nt, Artificial Sequence
  Description of Artificial Sequence: Synthetic oligonucleotide
gacauaucuucagaacaag

SEQ ID NO: 818991 - RNA, 19 nt, Artificial Sequence
  Description of Artificial Sequence: Synthetic oligonucleotide
aauauaggcuguaggggcu

SEQ ID NO: 818992 - RNA, 19 nt, Artificial Sequence
  Description of Artificial Sequence: Synthetic oligonucleotide
caaaagaccacagccuggc

SEQ ID NO: 818993 - RNA, 19 nt, Artificial Sequence
  Description of Artificial Sequence: Synthetic oligonucleotide
cuugugugauuccagucac

SEQ ID NO: 818994 - RNA, 19 nt, Artificial Sequence
  Description of Artificial Sequence: Synthetic oligonucleotide
aucaagccugagcauacag

SEQ ID NO: 818995 - RNA, 19 nt, Artificial Sequence
  Description of Artificial Sequence: Synthetic oligonucleotide
gguacguccgaucaaaaga

SEQ ID NO: 818996 - RNA, 19 nt, Artificial Sequence
  Description of Artificial Sequence: Synthetic oligonucleotide
caaggugccugcauagagc

SEQ ID NO: 818997 - RNA, 19 nt, Artificial Sequence
  Description of Artificial Sequence: Synthetic oligonucleotide
ucacugauucaguuuuagc

SEQ ID NO: 818998 - RNA, 19 nt, Artificial Sequence
  Description of Artificial Sequence: Synthetic oligonucleotide
uggugcuagggauggaacc

SEQ ID NO: 818999 - RNA, 19 nt, Artificial Sequence
  Description of Artificial Sequence: Synthetic oligonucleotide
gauggaaccuuggacaauc

SEQ ID NO: 819000 - RNA, 19 nt, Artificial Sequence
  Description of Artificial Sequence: Synthetic oligonucleotide
ucccacaacuuuaaccgcu

SEQ ID NO: 819001 - RNA, 19 nt, Artificial Sequence
  Description of Artificial Sequence: Synthetic oligonucleotide
cucccuaggucccaguacc

SEQ ID NO: 819002 - RNA, 19 nt, Artificial Sequence
  Description of Artificial Sequence: Synthetic oligonucleotide
cgaucaaaagaccacagcc

SEQ ID NO: 819003 - RNA, 19 nt, Artificial Sequence
  Description of Artificial Sequence: Synthetic oligonucleotide
cagaguuguccauggaggc

SEQ ID NO: 819004 - RNA, 19 nt, Artificial Sequence
  Description of Artificial Sequence: Synthetic oligonucleotide
aguauucagcagcugcucu

SEQ ID NO: 819005 - RNA, 19 nt, Artificial Sequence
  Description of Artificial Sequence: Synthetic oligonucleotide
auauauccucagcggguac

SEQ ID NO: 819006 - RNA, 19 nt, Artificial Sequence
  Description of Artificial Sequence: Synthetic oligonucleotide
ccacuggcaaaauauaggc

SEQ ID NO: 819007 - RNA, 19 nt, Artificial Sequence
  Description of Artificial Sequence: Synthetic oligonucleotide
uggcaguacggucauggga

SEQ ID NO: 819008 - RNA, 19 nt, Artificial Sequence
  Description of Artificial Sequence: Synthetic oligonucleotide
uuaugcaggaguugucaaa

SEQ ID NO: 819009 - RNA, 19 nt, Artificial Sequence
  Description of Artificial Sequence: Synthetic oligonucleotide
uuuugucaguggaaccugu

SEQ ID NO: 819010 - RNA, 19 nt, Artificial Sequence
  Description of Artificial Sequence: Synthetic oligonucleotide
gugagugugggguagggga

SEQ ID NO: 819011 - RNA, 19 nt, Artificial Sequence
  Description of Artificial Sequence: Synthetic oligonucleotide
uguccaguguacacgccca

SEQ ID NO: 819012 - RNA, 19 nt, Artificial Sequence
  Description of Artificial Sequence: Synthetic oligonucleotide
ggaguugucaaacccagca

SEQ ID NO: 819013 - RNA, 19 nt, Artificial Sequence
  Description of Artificial Sequence: Synthetic oligonucleotide
ugguucuaucauuauggaa

SEQ ID NO: 819014 - RNA, 19 nt, Artificial Sequence
  Description of Artificial Sequence: Synthetic oligonucleotide
guacguccgaucaaaagac

SEQ ID NO: 819015 - RNA, 19 nt, Artificial Sequence
  Description of Artificial Sequence: Synthetic oligonucleotide
ugacccgugaauagccgca

SEQ ID NO: 819016 - RNA, 19 nt, Artificial Sequence
  Description of Artificial Sequence: Synthetic oligonucleotide
acgagcucacccgaagagc

SEQ ID NO: 819017 - RNA, 19 nt, Artificial Sequence
  Description of Artificial Sequence: Synthetic oligonucleotide
aucgacucaagugcugagg

SEQ ID NO: 819018 - RNA, 19 nt, Artificial Sequence
  Description of Artificial Sequence: Synthetic oligonucleotide
uacguccgaucaaaagacc

SEQ ID NO: 819019 - RNA, 19 nt, Artificial Sequence
  Description of Artificial Sequence: Synthetic oligonucleotide
uaacccuacugggaagagg

SEQ ID NO: 819020 - RNA, 19 nt, Artificial Sequence
  Description of Artificial Sequence: Synthetic oligonucleotide
augccaaguacuuaccguu

SEQ ID NO: 819021 - RNA, 19 nt, Artificial Sequence
  Description of Artificial Sequence: Synthetic oligonucleotide
ccauaauauuucuucuagg

SEQ ID NO: 819022 - RNA, 19 nt, Artificial Sequence
  Description of Artificial Sequence: Synthetic oligonucleotide
cugaauucccugaaccuca

SEQ ID NO: 819023 - RNA, 19 nt, Artificial Sequence
  Description of Artificial Sequence: Synthetic oligonucleotide
uggaaccuuggacaaucga

SEQ ID NO: 819024 - RNA, 19 nt, Artificial Sequence
  Description of Artificial Sequence: Synthetic oligonucleotide
ucuccugauacaugggcua

SEQ ID NO: 819025 - RNA, 19 nt, Artificial Sequence
  Description of Artificial Sequence: Synthetic oligonucleotide
uguccucgcaggaucuuca

SEQ ID NO: 819026 - RNA, 19 nt, Artificial Sequence
  Description of Artificial Sequence: Synthetic oligonucleotide
ggaugccaaguacuuaccg

SEQ ID NO: 819027 - RNA, 19 nt, Artificial Sequence
  Description of Artificial Sequence: Synthetic oligonucleotide
caugggcuaccaaagucug

SEQ ID NO: 819028 - RNA, 19 nt, Artificial Sequence
  Description of Artificial Sequence: Synthetic oligonucleotide
auacuguccguguggccuc

SEQ ID NO: 819029 - RNA, 19 nt, Artificial Sequence
  Description of Artificial Sequence: Synthetic oligonucleotide
auacaugggcuaccaaagu

SEQ ID NO: 819030 - RNA, 19 nt, Artificial Sequence
  Description of Artificial Sequence: Synthetic oligonucleotide
ucccaguaccugauggaca

SEQ ID NO: 819031 - RNA, 19 nt, Artificial Sequence
  Description of Artificial Sequence: Synthetic oligonucleotide
uacgggauguguccacaug

SEQ ID NO: 819032 - RNA, 19 nt, Artificial Sequence
  Description of Artificial Sequence: Synthetic oligonucleotide
gauacuguccguguggccu

SEQ ID NO: 819033 - RNA, 19 nt, Artificial Sequence
  Description of Artificial Sequence: Synthetic oligonucleotide
aguaacccuacugggaaga

SEQ ID NO: 819034 - RNA, 19 nt, Artificial Sequence
  Description of Artificial Sequence: Synthetic oligonucleotide
gaucaaaagaccacagccu

SEQ ID NO: 819035 - RNA, 19 nt, Artificial Sequence
  Description of Artificial Sequence: Synthetic oligonucleotide
cugaguuccccuguugggc

SEQ ID NO: 819036 - RNA, 19 nt, Artificial Sequence
  Description of Artificial Sequence: Synthetic oligonucleotide
gaugccaaguacuuaccgu

SEQ ID NO: 819037 - RNA, 19 nt, Artificial Sequence
  Description of Artificial Sequence: Synthetic oligonucleotide
cacgagcucacccgaagag

SEQ ID NO: 819038 - RNA, 19 nt, Artificial Sequence
  Description of Artificial Sequence: Synthetic oligonucleotide
cucggugacccgugaauag

SEQ ID NO: 819039 - RNA, 19 nt, Artificial Sequence
  Description of Artificial Sequence: Synthetic oligonucleotide
gguguguugcagcacgugc

SEQ ID NO: 819040 - RNA, 19 nt, Artificial Sequence
  Description of Artificial Sequence: Synthetic oligonucleotide
ugauacucuccugcaagac

SEQ ID NO: 819041 - RNA, 19 nt, Artificial Sequence
  Description of Artificial Sequence: Synthetic oligonucleotide
acagccggacaguuuuguc

SEQ ID NO: 819042 - RNA, 19 nt, Artificial Sequence
  Description of Artificial Sequence: Synthetic oligonucleotide
caccacuucccuugagggg

SEQ ID NO: 819043 - RNA, 19 nt, Artificial Sequence
  Description of Artificial Sequence: Synthetic oligonucleotide
aacaagagagcagccccga

SEQ ID NO: 819044 - RNA, 19 nt, Artificial Sequence
  Description of Artificial Sequence: Synthetic oligonucleotide
uugaauugggguggaauuu

SEQ ID NO: 819045 - RNA, 19 nt, Artificial Sequence
  Description of Artificial Sequence: Synthetic oligonucleotide
cucaauguucaguuaagcu

SEQ ID NO: 819046 - RNA, 19 nt, Artificial Sequence
  Description of Artificial Sequence: Synthetic oligonucleotide
cuucccuugagggguagcc

SEQ ID NO: 819047 - RNA, 19 nt, Artificial Sequence
  Description of Artificial Sequence: Synthetic oligonucleotide
uguguugcagcacgugcuu

SEQ ID NO: 819048 - RNA, 19 nt, Artificial Sequence
  Description of Artificial Sequence: Synthetic oligonucleotide
ccucaaaauuccaaguauc

SEQ ID NO: 819049 - RNA, 19 nt, Artificial Sequence
  Description of Artificial Sequence: Synthetic oligonucleotide
agcacgugcuucugauguc

SEQ ID NO: 819050 - RNA, 19 nt, Artificial Sequence
  Description of Artificial Sequence: Synthetic oligonucleotide
accuuggacaaucgacuca

SEQ ID NO: 819051 - RNA, 19 nt, Artificial Sequence
  Description of Artificial Sequence: Synthetic oligonucleotide
gaccgcaagcuccagagcu

SEQ ID NO: 819052 - RNA, 19 nt, Artificial Sequence
  Description of Artificial Sequence: Synthetic oligonucleotide
cacauuauaugguaccccu

SEQ ID NO: 819053 - RNA, 19 nt, Artificial Sequence
  Description of Artificial Sequence: Synthetic oligonucleotide
caaccagaccgcugucugg

SEQ ID NO: 819054 - RNA, 19 nt, Artificial Sequence
  Description of Artificial Sequence: Synthetic oligonucleotide
ucggugacccgugaauagc

SEQ ID NO: 819055 - RNA, 19 nt, Artificial Sequence
  Description of Artificial Sequence: Synthetic oligonucleotide
gcaaggugccugcauagag

SEQ ID NO: 819056 - RNA, 19 nt, Artificial Sequence
  Description of Artificial Sequence: Synthetic oligonucleotide
guacuuaccguugggagaa

SEQ ID NO: 819057 - RNA, 19 nt, Artificial Sequence
  Description of Artificial Sequence: Synthetic oligonucleotide
gugacccgugaauagccgc

SEQ ID NO: 819058 - RNA, 19 nt, Artificial Sequence
  Description of Artificial Sequence: Synthetic oligonucleotide
gccaaguaguuugaauugg

SEQ ID NO: 819059 - RNA, 19 nt, Artificial Sequence
  Description of Artificial Sequence: Synthetic oligonucleotide
caaaagcacauuauauggu

SEQ ID NO: 819060 - RNA, 19 nt, Artificial Sequence
  Description of Artificial Sequence: Synthetic oligonucleotide
ugcccaccauaauauuucu

SEQ ID NO: 819061 - RNA, 19 nt, Artificial Sequence
  Description of Artificial Sequence: Synthetic oligonucleotide
gcggaugccaaguacuuac

SEQ ID NO: 819062 - RNA, 19 nt, Artificial Sequence
  Description of Artificial Sequence: Synthetic oligonucleotide
ugcgaggaaccuugugcug

SEQ ID NO: 819063 - RNA, 19 nt, Artificial Sequence
  Description of Artificial Sequence: Synthetic oligonucleotide
gacggauacgggauguguc

SEQ ID NO: 819064 - RNA, 19 nt, Artificial Sequence
  Description of Artificial Sequence: Synthetic oligonucleotide
acguccgaucaaaagacca

SEQ ID NO: 819065 - RNA, 19 nt, Artificial Sequence
  Description of Artificial Sequence: Synthetic oligonucleotide
cagccggacaguuuuguca

SEQ ID NO: 819066 - RNA, 19 nt, Artificial Sequence
  Description of Artificial Sequence: Synthetic oligonucleotide
caguaacccuacugggaag

SEQ ID NO: 819067 - RNA, 19 nt, Artificial Sequence
  Description of Artificial Sequence: Synthetic oligonucleotide
accagaccgcugucugggc

SEQ ID NO: 819068 - RNA, 19 nt, Artificial Sequence
  Description of Artificial Sequence: Synthetic oligonucleotide
aggaguugucaaacccagc

SEQ ID NO: 819069 - RNA, 19 nt, Artificial Sequence
  Description of Artificial Sequence: Synthetic oligonucleotide
uuagcaaguccuggacugu

SEQ ID NO: 819070 - RNA, 19 nt, Artificial Sequence
  Description of Artificial Sequence: Synthetic oligonucleotide
cuacagaggaguucugcaa

SEQ ID NO: 819071 - RNA, 19 nt, Artificial Sequence
  Description of Artificial Sequence: Synthetic oligonucleotide
acguacagaguuguccaug

SEQ ID NO: 819072 - RNA, 19 nt, Artificial Sequence
  Description of Artificial Sequence: Synthetic oligonucleotide
ggguacguccgaucaaaag

SEQ ID NO: 819073 - RNA, 19 nt, Artificial Sequence
  Description of Artificial Sequence: Synthetic oligonucleotide
uuaagcuaccugccugcuu

SEQ ID NO: 819074 - RNA, 19 nt, Artificial Sequence
  Description of Artificial Sequence: Synthetic oligonucleotide
guauuauccuccucacucu

SEQ ID NO: 819075 - RNA, 19 nt, Artificial Sequence
  Description of Artificial Sequence: Synthetic oligonucleotide
cugguucuaucauuaugga

SEQ ID NO: 819076 - RNA, 19 nt, Artificial Sequence
  Description of Artificial Sequence: Synthetic oligonucleotide
gucccacaacuuuaaccgc

SEQ ID NO: 819077 - RNA, 19 nt, Artificial Sequence
  Description of Artificial Sequence: Synthetic oligonucleotide
ugucuacagcugcuacaga

SEQ ID NO: 819078 - RNA, 19 nt, Artificial Sequence
  Description of Artificial Sequence: Synthetic oligonucleotide
auauaggcuguaggggcug

SEQ ID NO: 819079 - RNA, 19 nt, Artificial Sequence
  Description of Artificial Sequence: Synthetic oligonucleotide
accguugggagaaaaggaa

SEQ ID NO: 819080 - RNA, 19 nt, Artificial Sequence
  Description of Artificial Sequence: Synthetic oligonucleotide
gauacgggauguguccaca

SEQ ID NO: 819081 - RNA, 19 nt, Artificial Sequence
  Description of Artificial Sequence: Synthetic oligonucleotide
cagagugcagccaguaaaa

SEQ ID NO: 819082 - RNA, 19 nt, Artificial Sequence
  Description of Artificial Sequence: Synthetic oligonucleotide
gaauugggguggaauuuga

SEQ ID NO: 819083 - RNA, 19 nt, Artificial Sequence
  Description of Artificial Sequence: Synthetic oligonucleotide
caguguacacgcccacgag

SEQ ID NO: 819084 - RNA, 19 nt, Artificial Sequence
  Description of Artificial Sequence: Synthetic oligonucleotide
gaauagccgcacugaguuc

SEQ ID NO: 819085 - RNA, 19 nt, Artificial Sequence
  Description of Artificial Sequence: Synthetic oligonucleotide
gcuacagaggaguucugca

SEQ ID NO: 819086 - RNA, 19 nt, Artificial Sequence
  Description of Artificial Sequence: Synthetic oligonucleotide
agacggauacgggaugugu

SEQ ID NO: 819087 - RNA, 19 nt, Artificial Sequence
  Description of Artificial Sequence: Synthetic oligonucleotide
ugacccgcuugauacucuc

SEQ ID NO: 819088 - RNA, 19 nt, Artificial Sequence
  Description of Artificial Sequence: Synthetic oligonucleotide
cacgugcuucugauguccc

SEQ ID NO: 819089 - RNA, 19 nt, Artificial Sequence
  Description of Artificial Sequence: Synthetic oligonucleotide
aguacggucaugggaccca

SEQ ID NO: 819090 - RNA, 19 nt, Artificial Sequence
  Description of Artificial Sequence: Synthetic oligonucleotide
acuucccuugagggguagc

SEQ ID NO: 819091 - RNA, 19 nt, Artificial Sequence
  Description of Artificial Sequence: Synthetic oligonucleotide
aguaccugauggacauauc

SEQ ID NO: 819092 - RNA, 19 nt, Artificial Sequence
  Description of Artificial Sequence: Synthetic oligonucleotide
guccgaucaaaagaccaca

SEQ ID NO: 819093 - RNA, 19 nt, Artificial Sequence
  Description of Artificial Sequence: Synthetic oligonucleotide
ccaaguacuuaccguuggg

SEQ ID NO: 819094 - RNA, 19 nt, Artificial Sequence
  Description of Artificial Sequence: Synthetic oligonucleotide
agcuugcuaucagaggaga

SEQ ID NO: 819095 - RNA, 19 nt, Artificial Sequence
  Description of Artificial Sequence: Synthetic oligonucleotide
uuuaaccgcugguccucac

SEQ ID NO: 819096 - RNA, 19 nt, Artificial Sequence
  Description of Artificial Sequence: Synthetic oligonucleotide
gaaagcacgggaccucggu

SEQ ID NO: 819097 - RNA, 19 nt, Artificial Sequence
  Description of Artificial Sequence: Synthetic oligonucleotide
gucccaguaccugauggac

SEQ ID NO: 819098 - RNA, 19 nt, Artificial Sequence
  Description of Artificial Sequence: Synthetic oligonucleotide
gacaaucgacucaagugcu

SEQ ID NO: 819099 - RNA, 19 nt, Artificial Sequence
  Description of Artificial Sequence: Synthetic oligonucleotide
ucccuaggucccaguaccu

SEQ ID NO: 819100 - RNA, 19 nt, Artificial Sequence
  Description of Artificial Sequence: Synthetic oligonucleotide
acgucagccagguguccug

SEQ ID NO: 819101 - RNA, 19 nt, Artificial Sequence
  Description of Artificial Sequence: Synthetic oligonucleotide
cauuauaugguaccccuuu

SEQ ID NO: 819102 - RNA, 19 nt, Artificial Sequence
  Description of Artificial Sequence: Synthetic oligonucleotide
aucacugcaagagcucaau

SEQ ID NO: 819103 - RNA, 19 nt, Artificial Sequence
  Description of Artificial Sequence: Synthetic oligonucleotide
auacgggauguguccacau

SEQ ID NO: 819104 - RNA, 19 nt, Artificial Sequence
  Description of Artificial Sequence: Synthetic oligonucleotide
ccgaucaaaagaccacagc

SEQ ID NO: 819105 - RNA, 19 nt, Artificial Sequence
  Description of Artificial Sequence: Synthetic oligonucleotide
accgcugucugggcuaaag

SEQ ID NO: 819106 - RNA, 19 nt, Artificial Sequence
  Description of Artificial Sequence: Synthetic oligonucleotide
ugacagagugcagccagua

SEQ ID NO: 819107 - RNA, 19 nt, Artificial Sequence
  Description of Artificial Sequence: Synthetic oligonucleotide
cuguugggcgcuccacagc

SEQ ID NO: 819108 - RNA, 19 nt, Artificial Sequence
  Description of Artificial Sequence: Synthetic oligonucleotide
uagacggauacgggaugug

SEQ ID NO: 819109 - RNA, 19 nt, Artificial Sequence
  Description of Artificial Sequence: Synthetic oligonucleotide
gcacauuauaugguacccc

SEQ ID NO: 819110 - RNA, 19 nt, Artificial Sequence
  Description of Artificial Sequence: Synthetic oligonucleotide
ggacauaucuucagaacaa

SEQ ID NO: 819111 - RNA, 19 nt, Artificial Sequence
  Description of Artificial Sequence: Synthetic oligonucleotide
agccgcacugaguuccccu

SEQ ID NO: 819112 - RNA, 19 nt, Artificial Sequence
  Description of Artificial Sequence: Synthetic oligonucleotide
uuuggaccgcaagcuccag

SEQ ID NO: 819113 - RNA, 19 nt, Artificial Sequence
  Description of Artificial Sequence: Synthetic oligonucleotide
gucugcgaggaaccuugug

SEQ ID NO: 819114 - RNA, 19 nt, Artificial Sequence
  Description of Artificial Sequence: Synthetic oligonucleotide
ugucugcgaggaaccuugu

SEQ ID NO: 819115 - RNA, 19 nt, Artificial Sequence
  Description of Artificial Sequence: Synthetic oligonucleotide
caguacggucaugggaccc

SEQ ID NO: 819116 - RNA, 19 nt, Artificial Sequence
  Description of Artificial Sequence: Synthetic oligonucleotide
acgugcuucugauguccca

SEQ ID NO: 819117 - RNA, 19 nt, Artificial Sequence
  Description of Artificial Sequence: Synthetic oligonucleotide
uggcaaaauauaggcugua

SEQ ID NO: 819118 - RNA, 19 nt, Artificial Sequence
  Description of Artificial Sequence: Synthetic oligonucleotide
ggugagugugggguagggg

SEQ ID NO: 819119 - RNA, 19 nt, Artificial Sequence
  Description of Artificial Sequence: Synthetic oligonucleotide
ggugacccgugaauagccg

SEQ ID NO: 819120 - RNA, 19 nt, Artificial Sequence
  Description of Artificial Sequence: Synthetic oligonucleotide
ccagacacguacagaguug

SEQ ID NO: 819121 - RNA, 19 nt, Artificial Sequence
  Description of Artificial Sequence: Synthetic oligonucleotide
cugcgaggaaccuugugcu

SEQ ID NO: 819122 - RNA, 19 nt, Artificial Sequence
  Description of Artificial Sequence: Synthetic oligonucleotide
cagccagaagcuugcuauc

SEQ ID NO: 819123 - RNA, 19 nt, Artificial Sequence
  Description of Artificial Sequence: Synthetic oligonucleotide
caugggacccacuggcaaa

SEQ ID NO: 819124 - RNA, 19 nt, Artificial Sequence
  Description of Artificial Sequence: Synthetic oligonucleotide
guguuauagaaggcauaga

SEQ ID NO: 819125 - RNA, 19 nt, Artificial Sequence
  Description of Artificial Sequence: Synthetic oligonucleotide
aagcgucccagaggccaag

SEQ ID NO: 819126 - RNA, 19 nt, Artificial Sequence
  Description of Artificial Sequence: Synthetic oligonucleotide
agacacguacagaguuguc

SEQ ID NO: 819127 - RNA, 19 nt, Artificial Sequence
  Description of Artificial Sequence: Synthetic oligonucleotide
cgugaauagccgcacugag

SEQ ID NO: 819128 - RNA, 19 nt, Artificial Sequence
  Description of Artificial Sequence: Synthetic oligonucleotide
acuuaccguugggagaaaa

SEQ ID NO: 819129 - RNA, 19 nt, Artificial Sequence
  Description of Artificial Sequence: Synthetic oligonucleotide
guccucaccagcggaugcc

SEQ ID NO: 819130 - RNA, 19 nt, Artificial Sequence
  Description of Artificial Sequence: Synthetic oligonucleotide
agcucccuaggucccagua

SEQ ID NO: 819131 - RNA, 19 nt, Artificial Sequence
  Description of Artificial Sequence: Synthetic oligonucleotide
caacuguuccaguaacccu

SEQ ID NO: 819132 - RNA, 19 nt, Artificial Sequence
  Description of Artificial Sequence: Synthetic oligonucleotide
ugccaaugcuagguuuccu

SEQ ID NO: 819133 - RNA, 19 nt, Artificial Sequence
  Description of Artificial Sequence: Synthetic oligonucleotide
acauuauaugguaccccuu

SEQ ID NO: 819134 - RNA, 19 nt, Artificial Sequence
  Description of Artificial Sequence: Synthetic oligonucleotide
uacggucaugggacccacu

SEQ ID NO: 819135 - RNA, 19 nt, Artificial Sequence
  Description of Artificial Sequence: Synthetic oligonucleotide
cagcggguacguccgauca

SEQ ID NO: 819136 - RNA, 19 nt, Artificial Sequence
  Description of Artificial Sequence: Synthetic oligonucleotide
gacccgugaauagccgcac

SEQ ID NO: 819137 - RNA, 19 nt, Artificial Sequence
  Description of Artificial Sequence: Synthetic oligonucleotide
ggucccaguaccugaugga

SEQ ID NO: 819138 - RNA, 19 nt, Artificial Sequence
  Description of Artificial Sequence: Synthetic oligonucleotide
acccgugaauagccgcacu

SEQ ID NO: 819139 - RNA, 19 nt, Artificial Sequence
  Description of Artificial Sequence: Synthetic oligonucleotide
gacccacuggcaaaauaua

SEQ ID NO: 819140 - RNA, 19 nt, Artificial Sequence
  Description of Artificial Sequence: Synthetic oligonucleotide
cgcaggaucuucaucucug

SEQ ID NO: 819141 - RNA, 19 nt, Artificial Sequence
  Description of Artificial Sequence: Synthetic oligonucleotide
cccgugaauagccgcacug

SEQ ID NO: 819142 - RNA, 19 nt, Artificial Sequence
  Description of Artificial Sequence: Synthetic oligonucleotide
guccaguguacacgcccac

SEQ ID NO: 819143 - RNA, 19 nt, Artificial Sequence
  Description of Artificial Sequence: Synthetic oligonucleotide
ccacaacuuuaaccgcugg

SEQ ID NO: 819144 - RNA, 19 nt, Artificial Sequence
  Description of Artificial Sequence: Synthetic oligonucleotide
cguccgaucaaaagaccac

SEQ ID NO: 819145 - RNA, 19 nt, Artificial Sequence
  Description of Artificial Sequence: Synthetic oligonucleotide
gcaguacggucaugggacc

SEQ ID NO: 819146 - RNA, 19 nt, Artificial Sequence
  Description of Artificial Sequence: Synthetic oligonucleotide
agcggguacguccgaucaa

SEQ ID NO: 819147 - RNA, 19 nt, Artificial Sequence
  Description of Artificial Sequence: Synthetic oligonucleotide
gccucucaguucuuuaaaa

SEQ ID NO: 819148 - RNA, 19 nt, Artificial Sequence
  Description of Artificial Sequence: Synthetic oligonucleotide
gaggaguucugcaacuguu

SEQ ID NO: 819149 - RNA, 19 nt, Artificial Sequence
  Description of Artificial Sequence: Synthetic oligonucleotide
gugaauagccgcacugagu

SEQ ID NO: 819150 - RNA, 19 nt, Artificial Sequence
  Description of Artificial Sequence: Synthetic oligonucleotide
gaggaaccuugugcuguac

SEQ ID NO: 819151 - RNA, 19 nt, Artificial Sequence
  Description of Artificial Sequence: Synthetic oligonucleotide
gcuugauacucuccugcaa

SEQ ID NO: 819152 - RNA, 19 nt, Artificial Sequence
  Description of Artificial Sequence: Synthetic oligonucleotide
ccuaggucccaguaccuga

SEQ ID NO: 819153 - RNA, 19 nt, Artificial Sequence
  Description of Artificial Sequence: Synthetic oligonucleotide
gccccgagcugucugcgag

SEQ ID NO: 819154 - RNA, 19 nt, Artificial Sequence
  Description of Artificial Sequence: Synthetic oligonucleotide
ggaaagcacgggaccucgg

SEQ ID NO: 819155 - RNA, 19 nt, Artificial Sequence
  Description of Artificial Sequence: Synthetic oligonucleotide
gaccaguuuuccagcccca

SEQ ID NO: 819156 - RNA, 19 nt, Artificial Sequence
  Description of Artificial Sequence: Synthetic oligonucleotide
ggacccacuggcaaaauau

SEQ ID NO: 819157 - RNA, 19 nt, Artificial Sequence
  Description of Artificial Sequence: Synthetic oligonucleotide
ccgcugucugggcuaaagg

SEQ ID NO: 819158 - RNA, 19 nt, Artificial Sequence
  Description of Artificial Sequence: Synthetic oligonucleotide
agccuggcaguacggucau

SEQ ID NO: 819159 - RNA, 19 nt, Artificial Sequence
  Description of Artificial Sequence: Synthetic oligonucleotide
guguccucgcaggaucuuc

SEQ ID NO: 819160 - RNA, 19 nt, Artificial Sequence
  Description of Artificial Sequence: Synthetic oligonucleotide
cuagacggauacgggaugu

SEQ ID NO: 819161 - RNA, 19 nt, Artificial Sequence
  Description of Artificial Sequence: Synthetic oligonucleotide
augggcuaccaaagucuga

SEQ ID NO: 819162 - RNA, 19 nt, Artificial Sequence
  Description of Artificial Sequence: Synthetic oligonucleotide
ggaccgcaagcuccagagc

SEQ ID NO: 819163 - RNA, 19 nt, Artificial Sequence
  Description of Artificial Sequence: Synthetic oligonucleotide
gcagccccgagcugucugc

SEQ ID NO: 819164 - RNA, 19 nt, Artificial Sequence
  Description of Artificial Sequence: Synthetic oligonucleotide
caguaccugauggacauau

SEQ ID NO: 819165 - RNA, 19 nt, Artificial Sequence
  Description of Artificial Sequence: Synthetic oligonucleotide
gaccucggugacccgugaa

SEQ ID NO: 819166 - RNA, 19 nt, Artificial Sequence
  Description of Artificial Sequence: Synthetic oligonucleotide
agcggaugccaaguacuua

SEQ ID NO: 819167 - RNA, 19 nt, Artificial Sequence
  Description of Artificial Sequence: Synthetic oligonucleotide
ggccucucaguucuuuaaa

SEQ ID NO: 819168 - RNA, 19 nt, Artificial Sequence
  Description of Artificial Sequence: Synthetic oligonucleotide
ccagucaccaggaggaggu

SEQ ID NO: 819169 - RNA, 19 nt, Artificial Sequence
  Description of Artificial Sequence: Synthetic oligonucleotide
cagccccgagcugucugcg

SEQ ID NO: 819170 - RNA, 19 nt, Artificial Sequence
  Description of Artificial Sequence: Synthetic oligonucleotide
cugauacaugggcuaccaa

SEQ ID NO: 819171 - RNA, 19 nt, Artificial Sequence
  Description of Artificial Sequence: Synthetic oligonucleotide
uacuguccguguggccucu

SEQ ID NO: 819172 - RNA, 19 nt, Artificial Sequence
  Description of Artificial Sequence: Synthetic oligonucleotide
cccacgagcucacccgaag

SEQ ID NO: 819173 - RNA, 19 nt, Artificial Sequence
  Description of Artificial Sequence: Synthetic oligonucleotide
ccguugggagaaaaggaaa

SEQ ID NO: 819174 - RNA, 19 nt, Artificial Sequence
  Description of Artificial Sequence: Synthetic oligonucleotide
guuaagcuaccugccugcu

SEQ ID NO: 819175 - RNA, 19 nt, Artificial Sequence
  Description of Artificial Sequence: Synthetic oligonucleotide
agcuaccugccugcuugca

SEQ ID NO: 819176 - RNA, 19 nt, Artificial Sequence
  Description of Artificial Sequence: Synthetic oligonucleotide
ccugauacaugggcuacca

SEQ ID NO: 819177 - RNA, 19 nt, Artificial Sequence
  Description of Artificial Sequence: Synthetic oligonucleotide
acgggaccucggugacccg

SEQ ID NO: 819178 - RNA, 19 nt, Artificial Sequence
  Description of Artificial Sequence: Synthetic oligonucleotide
auaggcuguaggggcugau

SEQ ID NO: 819179 - RNA, 19 nt, Artificial Sequence
  Description of Artificial Sequence: Synthetic oligonucleotide
gcuagaucaucccuuccuu

SEQ ID NO: 819180 - RNA, 19 nt, Artificial Sequence
  Description of Artificial Sequence: Synthetic oligonucleotide
ccagcggaugccaaguacu

SEQ ID NO: 819181 - RNA, 19 nt, Artificial Sequence
  Description of Artificial Sequence: Synthetic oligonucleotide
cacugccaaugcuagguuu

SEQ ID NO: 819182 - RNA, 19 nt, Artificial Sequence
  Description of Artificial Sequence: Synthetic oligonucleotide
uacuuaccguugggagaaa

SEQ ID NO: 819183 - RNA, 19 nt, Artificial Sequence
  Description of Artificial Sequence: Synthetic oligonucleotide
gggacccacuggcaaaaua

SEQ ID NO: 819184 - RNA, 19 nt, Artificial Sequence
  Description of Artificial Sequence: Synthetic oligonucleotide
guaccccuuucuccugaua

SEQ ID NO: 819185 - RNA, 19 nt, Artificial Sequence
  Description of Artificial Sequence: Synthetic oligonucleotide
acccuacugggaagaggga

SEQ ID NO: 819186 - RNA, 19 nt, Artificial Sequence
  Description of Artificial Sequence: Synthetic oligonucleotide
ccccgagcugucugcgagg

SEQ ID NO: 819187 - RNA, 19 nt, Artificial Sequence
  Description of Artificial Sequence: Synthetic oligonucleotide
cccugauacagcacagugu

SEQ ID NO: 819188 - RNA, 19 nt, Artificial Sequence
  Description of Artificial Sequence: Synthetic oligonucleotide
gcggguacguccgaucaaa

SEQ ID NO: 819189 - RNA, 19 nt, Artificial Sequence
  Description of Artificial Sequence: Synthetic oligonucleotide
guggaaccuguugccaagu

SEQ ID NO: 819190 - RNA, 19 nt, Artificial Sequence
  Description of Artificial Sequence: Synthetic oligonucleotide
cacguacagaguuguccau

SEQ ID NO: 819191 - RNA, 19 nt, Artificial Sequence
  Description of Artificial Sequence: Synthetic oligonucleotide
cagguguguugcagcacgu

SEQ ID NO: 819192 - RNA, 19 nt, Artificial Sequence
  Description of Artificial Sequence: Synthetic oligonucleotide
gguguccugcauauauccu

SEQ ID NO: 819193 - RNA, 19 nt, Artificial Sequence
  Description of Artificial Sequence: Synthetic oligonucleotide
cccuaggucccaguaccug

SEQ ID NO: 819194 - RNA, 19 nt, Artificial Sequence
  Description of Artificial Sequence: Synthetic oligonucleotide
gguaggcaugucccugaua

SEQ ID NO: 819195 - RNA, 19 nt, Artificial Sequence
  Description of Artificial Sequence: Synthetic oligonucleotide
ccgugaauagccgcacuga

SEQ ID NO: 819196 - RNA, 19 nt, Artificial Sequence
  Description of Artificial Sequence: Synthetic oligonucleotide
cgcuugauacucuccugca

SEQ ID NO: 819197 - RNA, 19 nt, Artificial Sequence
  Description of Artificial Sequence: Synthetic oligonucleotide
ccacgagcucacccgaaga

SEQ ID NO: 819198 - RNA, 19 nt, Artificial Sequence
  Description of Artificial Sequence: Synthetic oligonucleotide
cacagccggacaguuuugu

SEQ ID NO: 819199 - RNA, 19 nt, Artificial Sequence
  Description of Artificial Sequence: Synthetic oligonucleotide
cccuacugggaagagggaa

SEQ ID NO: 819200 - RNA, 19 nt, Artificial Sequence
  Description of Artificial Sequence: Synthetic oligonucleotide
cccagacacguacagaguu

SEQ ID NO: 819201 - RNA, 19 nt, Artificial Sequence
  Description of Artificial Sequence: Synthetic oligonucleotide
cacgucagccagguguccu

SEQ ID NO: 819202 - RNA, 19 nt, Artificial Sequence
  Description of Artificial Sequence: Synthetic oligonucleotide
ggcgcuccacagccggaca

SEQ ID NO: 819203 - RNA, 19 nt, Artificial Sequence
  Description of Artificial Sequence: Synthetic oligonucleotide
guccucgcaggaucuucau

SEQ ID NO: 819204 - RNA, 19 nt, Artificial Sequence
  Description of Artificial Sequence: Synthetic oligonucleotide
gggcucuuuugcaaucacu

SEQ ID NO: 819205 - RNA, 19 nt, Artificial Sequence
  Description of Artificial Sequence: Synthetic oligonucleotide
gugcuagggauggaaccuu

SEQ ID NO: 819206 - RNA, 19 nt, Artificial Sequence
  Description of Artificial Sequence: Synthetic oligonucleotide
gccagacuggugauacugu

SEQ ID NO: 819207 - RNA, 19 nt, Artificial Sequence
  Description of Artificial Sequence: Synthetic oligonucleotide
ccucggugacccgugaaua

SEQ ID NO: 819208 - RNA, 19 nt, Artificial Sequence
  Description of Artificial Sequence: Synthetic oligonucleotide
cccgagcugucugcgagga

SEQ ID NO: 819209 - RNA, 19 nt, Artificial Sequence
  Description of Artificial Sequence: Synthetic oligonucleotide
ggauggaaccuuggacaau

SEQ ID NO: 819210 - RNA, 19 nt, Artificial Sequence
  Description of Artificial Sequence: Synthetic oligonucleotide
cucagcggguacguccgau

SEQ ID NO: 819211 - RNA, 19 nt, Artificial Sequence
  Description of Artificial Sequence: Synthetic oligonucleotide
cggauacgggaugugucca

SEQ ID NO: 819212 - RNA, 19 nt, Artificial Sequence
  Description of Artificial Sequence: Synthetic oligonucleotide
ccucaccagcggaugccaa

SEQ ID NO: 819213 - RNA, 19 nt, Artificial Sequence
  Description of Artificial Sequence: Synthetic oligonucleotide
gccggacaguuuugucagu

SEQ ID NO: 819214 - RNA, 19 nt, Artificial Sequence
  Description of Artificial Sequence: Synthetic oligonucleotide
cggguacguccgaucaaaa

SEQ ID NO: 819215 - RNA, 19 nt, Artificial Sequence
  Description of Artificial Sequence: Synthetic oligonucleotide
ccucagcggguacguccga

SEQ ID NO: 819216 - RNA, 19 nt, Artificial Sequence
  Description of Artificial Sequence: Synthetic oligonucleotide
ccgcacugaguuccccugu

SEQ ID NO: 819217 - RNA, 19 nt, Artificial Sequence
  Description of Artificial Sequence: Synthetic oligonucleotide
ccaguaccugauggacaua

SEQ ID NO: 819218 - RNA, 19 nt, Artificial Sequence
  Description of Artificial Sequence: Synthetic oligonucleotide
ccgagcugucugcgaggaa

SEQ ID NO: 819219 - RNA, 19 nt, Artificial Sequence
  Description of Artificial Sequence: Synthetic oligonucleotide
ccgcaagcuccagagcuuu

SEQ ID NO: 819220 - RNA, 19 nt, Artificial Sequence
  Description of Artificial Sequence: Synthetic oligonucleotide
aauguuucuucauagaggc

SEQ ID NO: 819221 - RNA, 19 nt, Artificial Sequence
  Description of Artificial Sequence: Synthetic oligonucleotide
guuaaugucauagagauug

SEQ ID NO: 819222 - RNA, 19 nt, Artificial Sequence
  Description of Artificial Sequence: Synthetic oligonucleotide
gauggaauguauuuguggg

SEQ ID NO: 819223 - RNA, 19 nt, Artificial Sequence
  Description of Artificial Sequence: Synthetic oligonucleotide
aaguggauggccccguucc

SEQ ID NO: 819224 - RNA, 19 nt, Artificial Sequence
  Description of Artificial Sequence: Synthetic oligonucleotide
aagaacugugaguagauga

SEQ ID NO: 819225 - RNA, 19 nt, Artificial Sequence
  Description of Artificial Sequence: Synthetic oligonucleotide
uuguuaaugucauagagau

SEQ ID NO: 819226 - RNA, 19 nt, Artificial Sequence
  Description of Artificial Sequence: Synthetic oligonucleotide
uugugcuuuagaauguugg

SEQ ID NO: 819227 - RNA, 19 nt, Artificial Sequence
  Description of Artificial Sequence: Synthetic oligonucleotide
agcuccauacccuggaugc

SEQ ID NO: 819228 - RNA, 19 nt, Artificial Sequence
  Description of Artificial Sequence: Synthetic oligonucleotide
auaaagggacugcagcucc

SEQ ID NO: 819229 - RNA, 19 nt, Artificial Sequence
  Description of Artificial Sequence: Synthetic oligonucleotide
aauauuggugggcacugag

SEQ ID NO: 819230 - RNA, 19 nt, Artificial Sequence
  Description of Artificial Sequence: Synthetic oligonucleotide
uuaaagccucgauaaaggg

SEQ ID NO: 819231 - RNA, 19 nt, Artificial Sequence
  Description of Artificial Sequence: Synthetic oligonucleotide
aggaagugugcauaggugg

SEQ ID NO: 819232 - RNA, 19 nt, Artificial Sequence
  Description of Artificial Sequence: Synthetic oligonucleotide
ucccauguguccuagauga

SEQ ID NO: 819233 - RNA, 19 nt, Artificial Sequence
  Description of Artificial Sequence: Synthetic oligonucleotide
ucaaacaguugcauggagc

SEQ ID NO: 819234 - RNA, 19 nt, Artificial Sequence
  Description of Artificial Sequence: Synthetic oligonucleotide
ucgauaaagggacugcagc

SEQ ID NO: 819235 - RNA, 19 nt, Artificial Sequence
  Description of Artificial Sequence: Synthetic oligonucleotide
agaaugguaaucuucuccu

SEQ ID NO: 819236 - RNA, 19 nt, Artificial Sequence
  Description of Artificial Sequence: Synthetic oligonucleotide
aauguuggcgagcugggcu

SEQ ID NO: 819237 - RNA, 19 nt, Artificial Sequence
  Description of Artificial Sequence: Synthetic oligonucleotide
ugaguagaugacuuugaag

SEQ ID NO: 819238 - RNA, 19 nt, Artificial Sequence
  Description of Artificial Sequence: Synthetic oligonucleotide
uguucuaaguuuauuuuau

SEQ ID NO: 819239 - RNA, 19 nt, Artificial Sequence
  Description of Artificial Sequence: Synthetic oligonucleotide
gauguaaccauccuuguua

SEQ ID NO: 819240 - RNA, 19 nt, Artificial Sequence
  Description of Artificial Sequence: Synthetic oligonucleotide
ucuagauggggugaagggg

SEQ ID NO: 819241 - RNA, 19 nt, Artificial Sequence
  Description of Artificial Sequence: Synthetic oligonucleotide
uguauuugugggaauguuc

SEQ ID NO: 819242 - RNA, 19 nt, Artificial Sequence
  Description of Artificial Sequence: Synthetic oligonucleotide
ugucuugggaguaaacugu

SEQ ID NO: 819243 - RNA, 19 nt, Artificial Sequence
  Description of Artificial Sequence: Synthetic oligonucleotide
aguugcauggagcucauga

SEQ ID NO: 819244 - RNA, 19 nt, Artificial Sequence
  Description of Artificial Sequence: Synthetic oligonucleotide
uucuuggugaacuugguua

SEQ ID NO: 819245 - RNA, 19 nt, Artificial Sequence
  Description of Artificial Sequence: Synthetic oligonucleotide
uagaugacuuugaaggucu

SEQ ID NO: 819246 - RNA, 19 nt, Artificial Sequence
  Description of Artificial Sequence: Synthetic oligonucleotide
aacaguugcauggagcuca

SEQ ID NO: 819247 - RNA, 19 nt, Artificial Sequence
  Description of Artificial Sequence: Synthetic oligonucleotide
uuuagaauguuggcgagcu

SEQ ID NO: 819248 - RNA, 19 nt, Artificial Sequence
  Description of Artificial Sequence: Synthetic oligonucleotide
ugugggaauguuccucugg

SEQ ID NO: 819249 - RNA, 19 nt, Artificial Sequence
  Description of Artificial Sequence: Synthetic oligonucleotide
agauugaaggcccacuuga

SEQ ID NO: 819250 - RNA, 19 nt, Artificial Sequence
  Description of Artificial Sequence: Synthetic oligonucleotide
uccuagaugacauucucaa

SEQ ID NO: 819251 - RNA, 19 nt, Artificial Sequence
  Description of Artificial Sequence: Synthetic oligonucleotide
guaaccauccuuguuaaug

SEQ ID NO: 819252 - RNA, 19 nt, Artificial Sequence
  Description of Artificial Sequence: Synthetic oligonucleotide
aaaguggauggccccguuc

SEQ ID NO: 819253 - RNA, 19 nt, Artificial Sequence
  Description of Artificial Sequence: Synthetic oligonucleotide
uaaccauccuuguuaaugu

SEQ ID NO: 819254 - RNA, 19 nt, Artificial Sequence
  Description of Artificial Sequence: Synthetic oligonucleotide
gacauggguuccaagaugc

SEQ ID NO: 819255 - RNA, 19 nt, Artificial Sequence
  Description of Artificial Sequence: Synthetic oligonucleotide
agugagaagaacuggccgu

SEQ ID NO: 819256 - RNA, 19 nt, Artificial Sequence
  Description of Artificial Sequence: Synthetic oligonucleotide
cuggagacuucccuuaucc

SEQ ID NO: 819257 - RNA, 19 nt, Artificial Sequence
  Description of Artificial Sequence: Synthetic oligonucleotide
uccucaaaguggauggccc

SEQ ID NO: 819258 - RNA, 19 nt, Artificial Sequence
  Description of Artificial Sequence: Synthetic oligonucleotide
caagaugccgaacugcuug

SEQ ID NO: 819259 - RNA, 19 nt, Artificial Sequence
  Description of Artificial Sequence: Synthetic oligonucleotide
aauguauuugugggaaugu

SEQ ID NO: 819260 - RNA, 19 nt, Artificial Sequence
  Description of Artificial Sequence: Synthetic oligonucleotide
aaccauccuuguuaauguc

SEQ ID NO: 819261 - RNA, 19 nt, Artificial Sequence
  Description of Artificial Sequence: Synthetic oligonucleotide
gauggagagcccaaccacg

SEQ ID NO: 819262 - RNA, 19 nt, Artificial Sequence
  Description of Artificial Sequence: Synthetic oligonucleotide
uugggaguaaacuguucag

SEQ ID NO: 819263 - RNA, 19 nt, Artificial Sequence
  Description of Artificial Sequence: Synthetic oligonucleotide
aagugugcauagguggugg

SEQ ID NO: 819264 - RNA, 19 nt, Artificial Sequence
  Description of Artificial Sequence: Synthetic oligonucleotide
uugauggaauguauuugug

SEQ ID NO: 819265 - RNA, 19 nt, Artificial Sequence
  Description of Artificial Sequence: Synthetic oligonucleotide
cugucuugggaguaaacug

SEQ ID NO: 819266 - RNA, 19 nt, Artificial Sequence
  Description of Artificial Sequence: Synthetic oligonucleotide
ucgucaauggucaccacuc

SEQ ID NO: 819267 - RNA, 19 nt, Artificial Sequence
  Description of Artificial Sequence: Synthetic oligonucleotide
ugccaugcagacaugcggc

SEQ ID NO: 819268 - RNA, 19 nt, Artificial Sequence
  Description of Artificial Sequence: Synthetic oligonucleotide
uuguucuaaguuuauuuua

SEQ ID NO: 819269 - RNA, 19 nt, Artificial Sequence
  Description of Artificial Sequence: Synthetic oligonucleotide
auuugugggaauguuccuc

SEQ ID NO: 819270 - RNA, 19 nt, Artificial Sequence
  Description of Artificial Sequence: Synthetic oligonucleotide
caggauugaggcuucuccg

SEQ ID NO: 819271 - RNA, 19 nt, Artificial Sequence
  Description of Artificial Sequence: Synthetic oligonucleotide
gauggauugugugugugug

SEQ ID NO: 819272 - RNA, 19 nt, Artificial Sequence
  Description of Artificial Sequence: Synthetic oligonucleotide
ucguccuuuugacaggucu

SEQ ID NO: 819273 - RNA, 19 nt, Artificial Sequence
  Description of Artificial Sequence: Synthetic oligonucleotide
gauugugugugugugugug

SEQ ID NO: 819274 - RNA, 19 nt, Artificial Sequence
  Description of Artificial Sequence: Synthetic oligonucleotide
gaugggaucagugcagccc

SEQ ID NO: 819275 - RNA, 19 nt, Artificial Sequence
  Description of Artificial Sequence: Synthetic oligonucleotide
ggugaacuugguuagggcc

SEQ ID NO: 819276 - RNA, 19 nt, Artificial Sequence
  Description of Artificial Sequence: Synthetic oligonucleotide
gugagaagcaaugaccacc

SEQ ID NO: 819277 - RNA, 19 nt, Artificial Sequence
  Description of Artificial Sequence: Synthetic oligonucleotide
agaaacucgucaaugguca

SEQ ID NO: 819278 - RNA, 19 nt, Artificial Sequence
  Description of Artificial Sequence: Synthetic oligonucleotide
gcaaugaccacccaggguc

SEQ ID NO: 819279 - RNA, 19 nt, Artificial Sequence
  Description of Artificial Sequence: Synthetic oligonucleotide
auauaggacugaauauugg

SEQ ID NO: 819280 - RNA, 19 nt, Artificial Sequence
  Description of Artificial Sequence: Synthetic oligonucleotide
aaaauauauaggacugaau

SEQ ID NO: 819281 - RNA, 19 nt, Artificial Sequence
  Description of Artificial Sequence: Synthetic oligonucleotide
gggacauggucccuuaugg

SEQ ID NO: 819282 - RNA, 19 nt, Artificial Sequence
  Description of Artificial Sequence: Synthetic oligonucleotide
uuaaugucauagagauuga

SEQ ID NO: 819283 - RNA, 19 nt, Artificial Sequence
  Description of Artificial Sequence: Synthetic oligonucleotide
uguguguuugugugugugc

SEQ ID NO: 819284 - RNA, 19 nt, Artificial Sequence
  Description of Artificial Sequence: Synthetic oligonucleotide
aagggagacgcuucugcca

SEQ ID NO: 819285 - RNA, 19 nt, Artificial Sequence
  Description of Artificial Sequence: Synthetic oligonucleotide
uguguccuagaugacauuc

SEQ ID NO: 819286 - RNA, 19 nt, Artificial Sequence
  Description of Artificial Sequence: Synthetic oligonucleotide
ucuggcuggugucgcaccg

SEQ ID NO: 819287 - RNA, 19 nt, Artificial Sequence
  Description of Artificial Sequence: Synthetic oligonucleotide
cacugagacaggaaccacc

SEQ ID NO: 819288 - RNA, 19 nt, Artificial Sequence
  Description of Artificial Sequence: Synthetic oligonucleotide
uggauugugugugugugug

SEQ ID NO: 819289 - RNA, 19 nt, Artificial Sequence
  Description of Artificial Sequence: Synthetic oligonucleotide
auaggacugaauauuggug

SEQ ID NO: 819290 - RNA, 19 nt, Artificial Sequence
  Description of Artificial Sequence: Synthetic oligonucleotide
agaugggaucagugcagcc

SEQ ID NO: 819291 - RNA, 19 nt, Artificial Sequence
  Description of Artificial Sequence: Synthetic oligonucleotide
cugccaugcagacaugcgg

SEQ ID NO: 819292 - RNA, 19 nt, Artificial Sequence
  Description of Artificial Sequence: Synthetic oligonucleotide
uguccuagaugacauucuc

SEQ ID NO: 819293 - RNA, 19 nt, Artificial Sequence
  Description of Artificial Sequence: Synthetic oligonucleotide
guguguguguguuugugug

SEQ ID NO: 819294 - RNA, 19 nt, Artificial Sequence
  Description of Artificial Sequence: Synthetic oligonucleotide
gagauugaaggcccacuug

SEQ ID NO: 819295 - RNA, 19 nt, Artificial Sequence
  Description of Artificial Sequence: Synthetic oligonucleotide
gguggggcaggcuagaaug

SEQ ID NO: 819296 - RNA, 19 nt, Artificial Sequence
  Description of Artificial Sequence: Synthetic oligonucleotide
uaacaugcugccuggggac

SEQ ID NO: 819297 - RNA, 19 nt, Artificial Sequence
  Description of Artificial Sequence: Synthetic oligonucleotide
accacgaaguccucaaagu

SEQ ID NO: 819298 - RNA, 19 nt, Artificial Sequence
  Description of Artificial Sequence: Synthetic oligonucleotide
cucgauaaagggacugcag

SEQ ID NO: 819299 - RNA, 19 nt, Artificial Sequence
  Description of Artificial Sequence: Synthetic oligonucleotide
uguguguguguguuugugu

SEQ ID NO: 819300 - RNA, 19 nt, Artificial Sequence
  Description of Artificial Sequence: Synthetic oligonucleotide
uguugaccuugccugguca

SEQ ID NO: 819301 - RNA, 19 nt, Artificial Sequence
  Description of Artificial Sequence: Synthetic oligonucleotide
aaugaccacccaggguccc

SEQ ID NO: 819302 - RNA, 19 nt, Artificial Sequence
  Description of Artificial Sequence: Synthetic oligonucleotide
guaacaugcugccugggga

SEQ ID NO: 819303 - RNA, 19 nt, Artificial Sequence
  Description of Artificial Sequence: Synthetic oligonucleotide
cuagauggggugaagggga

SEQ ID NO: 819304 - RNA, 19 nt, Artificial Sequence
  Description of Artificial Sequence: Synthetic oligonucleotide
auggaauguauuuguggga

SEQ ID NO: 819305 - RNA, 19 nt, Artificial Sequence
  Description of Artificial Sequence: Synthetic oligonucleotide
uggacauggguuccaagau

SEQ ID NO: 819306 - RNA, 19 nt, Artificial Sequence
  Description of Artificial Sequence: Synthetic oligonucleotide
gauaaagggacugcagcuc

SEQ ID NO: 819307 - RNA, 19 nt, Artificial Sequence
  Description of Artificial Sequence: Synthetic oligonucleotide
aagaugccgaacugcuuga

SEQ ID NO: 819308 - RNA, 19 nt, Artificial Sequence
  Description of Artificial Sequence: Synthetic oligonucleotide
auagagauugaaggcccac

SEQ ID NO: 819309 - RNA, 19 nt, Artificial Sequence
  Description of Artificial Sequence: Synthetic oligonucleotide
ggagacuucccuuauccug

SEQ ID NO: 819310 - RNA, 19 nt, Artificial Sequence
  Description of Artificial Sequence: Synthetic oligonucleotide
aguggauggccccguuccc

SEQ ID NO: 819311 - RNA, 19 nt, Artificial Sequence
  Description of Artificial Sequence: Synthetic oligonucleotide
cugccuuuccucuggagac

SEQ ID NO: 819312 - RNA, 19 nt, Artificial Sequence
  Description of Artificial Sequence: Synthetic oligonucleotide
uguucucguccuuuugaca

SEQ ID NO: 819313 - RNA, 19 nt, Artificial Sequence
  Description of Artificial Sequence: Synthetic oligonucleotide
uugugugugugugugugug

SEQ ID NO: 819314 - RNA, 19 nt, Artificial Sequence
  Description of Artificial Sequence: Synthetic oligonucleotide
ucacaugcccuggacaggc

SEQ ID NO: 819315 - RNA, 19 nt, Artificial Sequence
  Description of Artificial Sequence: Synthetic oligonucleotide
gauugaaggcccacuugag

SEQ ID NO: 819316 - RNA, 19 nt, Artificial Sequence
  Description of Artificial Sequence: Synthetic oligonucleotide
gagcuacggguguuggugg

SEQ ID NO: 819317 - RNA, 19 nt, Artificial Sequence
  Description of Artificial Sequence: Synthetic oligonucleotide
gaggaagugugcauaggug

SEQ ID NO: 819318 - RNA, 19 nt, Artificial Sequence
  Description of Artificial Sequence: Synthetic oligonucleotide
uauuugugggaauguuccu

SEQ ID NO: 819319 - RNA, 19 nt, Artificial Sequence
  Description of Artificial Sequence: Synthetic oligonucleotide
gaaccacccucccaggcug

SEQ ID NO: 819320 - RNA, 19 nt, Artificial Sequence
  Description of Artificial Sequence: Synthetic oligonucleotide
uucuuaaagccucgauaaa

SEQ ID NO: 819321 - RNA, 19 nt, Artificial Sequence
  Description of Artificial Sequence: Synthetic oligonucleotide
cauucuuaaagccucgaua

SEQ ID NO: 819322 - RNA, 19 nt, Artificial Sequence
  Description of Artificial Sequence: Synthetic oligonucleotide
agagauugaaggcccacuu

SEQ ID NO: 819323 - RNA, 19 nt, Artificial Sequence
  Description of Artificial Sequence: Synthetic oligonucleotide
uguguguguguuugugugu

SEQ ID NO: 819324 - RNA, 19 nt, Artificial Sequence
  Description of Artificial Sequence: Synthetic oligonucleotide
ugggaguaaacuguucagu

SEQ ID NO: 819325 - RNA, 19 nt, Artificial Sequence
  Description of Artificial Sequence: Synthetic oligonucleotide
ugguugggcgugcagccag

SEQ ID NO: 819326 - RNA, 19 nt, Artificial Sequence
  Description of Artificial Sequence: Synthetic oligonucleotide
cuuuagaauguuggcgagc

SEQ ID NO: 819327 - RNA, 19 nt, Artificial Sequence
  Description of Artificial Sequence: Synthetic oligonucleotide
guagaugacuuugaagguc

SEQ ID NO: 819328 - RNA, 19 nt, Artificial Sequence
  Description of Artificial Sequence: Synthetic oligonucleotide
ugucgcaccguggacaacu

SEQ ID NO: 819329 - RNA, 19 nt, Artificial Sequence
  Description of Artificial Sequence: Synthetic oligonucleotide
ucucaaacaguugcaugga

SEQ ID NO: 819330 - RNA, 19 nt, Artificial Sequence
  Description of Artificial Sequence: Synthetic oligonucleotide
agggcgcaccccuaggccg

SEQ ID NO: 819331 - RNA, 19 nt, Artificial Sequence
  Description of Artificial Sequence: Synthetic oligonucleotide
cugugaguagaugacuuug

SEQ ID NO: 819332 - RNA, 19 nt, Artificial Sequence
  Description of Artificial Sequence: Synthetic oligonucleotide
auguaaccauccuuguuaa

SEQ ID NO: 819333 - RNA, 19 nt, Artificial Sequence
  Description of Artificial Sequence: Synthetic oligonucleotide
gaccccgcggaggagaagg

SEQ ID NO: 819334 - RNA, 19 nt, Artificial Sequence
  Description of Artificial Sequence: Synthetic oligonucleotide
ggcaaugaacagcagcacc

SEQ ID NO: 819335 - RNA, 19 nt, Artificial Sequence
  Description of Artificial Sequence: Synthetic oligonucleotide
gcucacaugcccuggacag

SEQ ID NO: 819336 - RNA, 19 nt, Artificial Sequence
  Description of Artificial Sequence: Synthetic oligonucleotide
ugguugauguaaccauccu

SEQ ID NO: 819337 - RNA, 19 nt, Artificial Sequence
  Description of Artificial Sequence: Synthetic oligonucleotide
uuagagcugauguggucuc

SEQ ID NO: 819338 - RNA, 19 nt, Artificial Sequence
  Description of Artificial Sequence: Synthetic oligonucleotide
gaagaacugugaguagaug

SEQ ID NO: 819339 - RNA, 19 nt, Artificial Sequence
  Description of Artificial Sequence: Synthetic oligonucleotide
cacuugagcuucucauggg

SEQ ID NO: 819340 - RNA, 19 nt, Artificial Sequence
  Description of Artificial Sequence: Synthetic oligonucleotide
ucaugggaccgucccucgg

SEQ ID NO: 819341 - RNA, 19 nt, Artificial Sequence
  Description of Artificial Sequence: Synthetic oligonucleotide
gacaacuccaguucacugu

SEQ ID NO: 819342 - RNA, 19 nt, Artificial Sequence
  Description of Artificial Sequence: Synthetic oligonucleotide
cucaaaguggauggccccg

SEQ ID NO: 819343 - RNA, 19 nt, Artificial Sequence
  Description of Artificial Sequence: Synthetic oligonucleotide
uguggucucccauccccag

SEQ ID NO: 819344 - RNA, 19 nt, Artificial Sequence
  Description of Artificial Sequence: Synthetic oligonucleotide
ggagagcccaaccacgaag

SEQ ID NO: 819345 - RNA, 19 nt, Artificial Sequence
  Description of Artificial Sequence: Synthetic oligonucleotide
ggcgcaacuuuccaaauca

SEQ ID NO: 819346 - RNA, 19 nt, Artificial Sequence
  Description of Artificial Sequence: Synthetic oligonucleotide
caaugaccacccagggucc

SEQ ID NO: 819347 - RNA, 19 nt, Artificial Sequence
  Description of Artificial Sequence: Synthetic oligonucleotide
ugugugugugugucugucu

SEQ ID NO: 819348 - RNA, 19 nt, Artificial Sequence
  Description of Artificial Sequence: Synthetic oligonucleotide
gacgcuucugccaugcaga

SEQ ID NO: 819349 - RNA, 19 nt, Artificial Sequence
  Description of Artificial Sequence: Synthetic oligonucleotide
gagcccaaccacgaagucc

SEQ ID NO: 819350 - RNA, 19 nt, Artificial Sequence
  Description of Artificial Sequence: Synthetic oligonucleotide
agcccaaccacgaaguccu

SEQ ID NO: 819351 - RNA, 19 nt, Artificial Sequence
  Description of Artificial Sequence: Synthetic oligonucleotide
gaagugugcauagguggug

SEQ ID NO: 819352 - RNA, 19 nt, Artificial Sequence
  Description of Artificial Sequence: Synthetic oligonucleotide
aucaggauggagaugggau

SEQ ID NO: 819353 - RNA, 19 nt, Artificial Sequence
  Description of Artificial Sequence: Synthetic oligonucleotide
aucugugugugugugucug

SEQ ID NO: 819354 - RNA, 19 nt, Artificial Sequence
  Description of Artificial Sequence: Synthetic oligonucleotide
uagagauugaaggcccacu

SEQ ID NO: 819355 - RNA, 19 nt, Artificial Sequence
  Description of Artificial Sequence: Synthetic oligonucleotide
agacuucccuuauccuggg

SEQ ID NO: 819356 - RNA, 19 nt, Artificial Sequence
  Description of Artificial Sequence: Synthetic oligonucleotide
ucccuuauccuggggcugg

SEQ ID NO: 819357 - RNA, 19 nt, Artificial Sequence
  Description of Artificial Sequence: Synthetic oligonucleotide
auggguuccaagaugccga

SEQ ID NO: 819358 - RNA, 19 nt, Artificial Sequence
  Description of Artificial Sequence: Synthetic oligonucleotide
uccccaugcucauggcuag

SEQ ID NO: 819359 - RNA, 19 nt, Artificial Sequence
  Description of Artificial Sequence: Synthetic oligonucleotide
agcuacggguguugguggg

SEQ ID NO: 819360 - RNA, 19 nt, Artificial Sequence
  Description of Artificial Sequence: Synthetic oligonucleotide
auugugugugugugugugu

SEQ ID NO: 819361 - RNA, 19 nt, Artificial Sequence
  Description of Artificial Sequence: Synthetic oligonucleotide
guguguguguguguguuug

SEQ ID NO: 819362 - RNA, 19 nt, Artificial Sequence
  Description of Artificial Sequence: Synthetic oligonucleotide
acucauucuuaaagccucg

SEQ ID NO: 819363 - RNA, 19 nt, Artificial Sequence
  Description of Artificial Sequence: Synthetic oligonucleotide
gagaugggaucagugcagc

SEQ ID NO: 819364 - RNA, 19 nt, Artificial Sequence
  Description of Artificial Sequence: Synthetic oligonucleotide
uggacaacuccaguucacu

SEQ ID NO: 819365 - RNA, 19 nt, Artificial Sequence
  Description of Artificial Sequence: Synthetic oligonucleotide
gguccaagcccucuggcug

SEQ ID NO: 819366 - RNA, 19 nt, Artificial Sequence
  Description of Artificial Sequence: Synthetic oligonucleotide
guguguguguuugugugug

SEQ ID NO: 819367 - RNA, 19 nt, Artificial Sequence
  Description of Artificial Sequence: Synthetic oligonucleotide
uguccauuuucuggaagaa

SEQ ID NO: 819368 - RNA, 19 nt, Artificial Sequence
  Description of Artificial Sequence: Synthetic oligonucleotide
accguggacaacuccaguu

SEQ ID NO: 819369 - RNA, 19 nt, Artificial Sequence
  Description of Artificial Sequence: Synthetic oligonucleotide
auggauugugugugugugu

SEQ ID NO: 819370 - RNA, 19 nt, Artificial Sequence
  Description of Artificial Sequence: Synthetic oligonucleotide
uucucaugggaccgucccu

SEQ ID NO: 819371 - RNA, 19 nt, Artificial Sequence
  Description of Artificial Sequence: Synthetic oligonucleotide
ucuggggaacacccaggga

SEQ ID NO: 819372 - RNA, 19 nt, Artificial Sequence
  Description of Artificial Sequence: Synthetic oligonucleotide
ugugugugugugugugugu

SEQ ID NO: 819373 - RNA, 19 nt, Artificial Sequence
  Description of Artificial Sequence: Synthetic oligonucleotide
agauggggugaaggggacc

SEQ ID NO: 819374 - RNA, 19 nt, Artificial Sequence
  Description of Artificial Sequence: Synthetic oligonucleotide
uggugucgcaccguggaca

SEQ ID NO: 819375 - RNA, 19 nt, Artificial Sequence
  Description of Artificial Sequence: Synthetic oligonucleotide
agggagacgcuucugccau

SEQ ID NO: 819376 - RNA, 19 nt, Artificial Sequence
  Description of Artificial Sequence: Synthetic oligonucleotide
ucacaagcacaggaacccc

SEQ ID NO: 819377 - RNA, 19 nt, Artificial Sequence
  Description of Artificial Sequence: Synthetic oligonucleotide
gcuuuagaauguuggcgag

SEQ ID NO: 819378 - RNA, 19 nt, Artificial Sequence
  Description of Artificial Sequence: Synthetic oligonucleotide
uccuuuguucuaaguuuau

SEQ ID NO: 819379 - RNA, 19 nt, Artificial Sequence
  Description of Artificial Sequence: Synthetic oligonucleotide
ggagcuacggguguuggug

SEQ ID NO: 819380 - RNA, 19 nt, Artificial Sequence
  Description of Artificial Sequence: Synthetic oligonucleotide
gugugugugugugugugug

SEQ ID NO: 819381 - RNA, 19 nt, Artificial Sequence
  Description of Artificial Sequence: Synthetic oligonucleotide
uguguguguguguguuugu

SEQ ID NO: 819382 - RNA, 19 nt, Artificial Sequence
  Description of Artificial Sequence: Synthetic oligonucleotide
ucucguccuuuugacaggu

SEQ ID NO: 819383 - RNA, 19 nt, Artificial Sequence
  Description of Artificial Sequence: Synthetic oligonucleotide
ggacauggguuccaagaug

SEQ ID NO: 819384 - RNA, 19 nt, Artificial Sequence
  Description of Artificial Sequence: Synthetic oligonucleotide
gugaguagaugacuuugaa

SEQ ID NO: 819385 - RNA, 19 nt, Artificial Sequence
  Description of Artificial Sequence: Synthetic oligonucleotide
aaggcgacagugagaagaa

SEQ ID NO: 819386 - RNA, 19 nt, Artificial Sequence
  Description of Artificial Sequence: Synthetic oligonucleotide
gguguggcggcccaucaug

SEQ ID NO: 819387 - RNA, 19 nt, Artificial Sequence
  Description of Artificial Sequence: Synthetic oligonucleotide
ugcaucugugugugugugu

SEQ ID NO: 819388 - RNA, 19 nt, Artificial Sequence
  Description of Artificial Sequence: Synthetic oligonucleotide
uguguguguuugugugugu

SEQ ID NO: 819389 - RNA, 19 nt, Artificial Sequence
  Description of Artificial Sequence: Synthetic oligonucleotide
guguguguuugugugugug

SEQ ID NO: 819390 - RNA, 19 nt, Artificial Sequence
  Description of Artificial Sequence: Synthetic oligonucleotide
guguguuugugugugugca

SEQ ID NO: 819391 - RNA, 19 nt, Artificial Sequence
  Description of Artificial Sequence: Synthetic oligonucleotide
ucugugugugugugucugu

SEQ ID NO: 819392 - RNA, 19 nt, Artificial Sequence
  Description of Artificial Sequence: Synthetic oligonucleotide
uggcuggugucgcaccgug

SEQ ID NO: 819393 - RNA, 19 nt, Artificial Sequence
  Description of Artificial Sequence: Synthetic oligonucleotide
ucaaaguggauggccccgu

SEQ ID NO: 819394 - RNA, 19 nt, Artificial Sequence
  Description of Artificial Sequence: Synthetic oligonucleotide
ucuguugaccuugccuggu

SEQ ID NO: 819395 - RNA, 19 nt, Artificial Sequence
  Description of Artificial Sequence: Synthetic oligonucleotide
gccugugggacacucauuc

SEQ ID NO: 819396 - RNA, 19 nt, Artificial Sequence
  Description of Artificial Sequence: Synthetic oligonucleotide
ugagaagaacuggccguga

SEQ ID NO: 819397 - RNA, 19 nt, Artificial Sequence
  Description of Artificial Sequence: Synthetic oligonucleotide
cagggacucucagaacugg

SEQ ID NO: 819398 - RNA, 19 nt, Artificial Sequence
  Description of Artificial Sequence: Synthetic oligonucleotide
cauggcuagcuucagcuua

SEQ ID NO: 819399 - RNA, 19 nt, Artificial Sequence
  Description of Artificial Sequence: Synthetic oligonucleotide
cauagagauugaaggccca

SEQ ID NO: 819400 - RNA, 19 nt, Artificial Sequence
  Description of Artificial Sequence: Synthetic oligonucleotide
uugaccuugccuggucaca

SEQ ID NO: 819401 - RNA, 19 nt, Artificial Sequence
  Description of Artificial Sequence: Synthetic oligonucleotide
guguguguguguguuugug

SEQ ID NO: 819402 - RNA, 19 nt, Artificial Sequence
  Description of Artificial Sequence: Synthetic oligonucleotide
cacaagcacaggaacccca

SEQ ID NO: 819403 - RNA, 19 nt, Artificial Sequence
  Description of Artificial Sequence: Synthetic oligonucleotide
cauguguccuagaugacau

SEQ ID NO: 819404 - RNA, 19 nt, Artificial Sequence
  Description of Artificial Sequence: Synthetic oligonucleotide
caucaugucauagauggau

SEQ ID NO: 819405 - RNA, 19 nt, Artificial Sequence
  Description of Artificial Sequence: Synthetic oligonucleotide
augcccauggcgagcgugg

SEQ ID NO: 819406 - RNA, 19 nt, Artificial Sequence
  Description of Artificial Sequence: Synthetic oligonucleotide
gcgacagugagaagaacug

SEQ ID NO: 819407 - RNA, 19 nt, Artificial Sequence
  Description of Artificial Sequence: Synthetic oligonucleotide
ucgcaccguggacaacucc

SEQ ID NO: 819408 - RNA, 19 nt, Artificial Sequence
  Description of Artificial Sequence: Synthetic oligonucleotide
agccucgauaaagggacug

SEQ ID NO: 819409 - RNA, 19 nt, Artificial Sequence
  Description of Artificial Sequence: Synthetic oligonucleotide
ugugucugucuugggagua

SEQ ID NO: 819410 - RNA, 19 nt, Artificial Sequence
  Description of Artificial Sequence: Synthetic oligonucleotide
ggcuagaaugguaaucuuc

SEQ ID NO: 819411 - RNA, 19 nt, Artificial Sequence
  Description of Artificial Sequence: Synthetic oligonucleotide
aucaugucauagauggauu

SEQ ID NO: 819412 - RNA, 19 nt, Artificial Sequence
  Description of Artificial Sequence: Synthetic oligonucleotide
gcugauguggucucccauc

SEQ ID NO: 819413 - RNA, 19 nt, Artificial Sequence
  Description of Artificial Sequence: Synthetic oligonucleotide
cacaggauggauugugugu

SEQ ID NO: 819414 - RNA, 19 nt, Artificial Sequence
  Description of Artificial Sequence: Synthetic oligonucleotide
uggagagcccaaccacgaa

SEQ ID NO: 819415 - RNA, 19 nt, Artificial Sequence
  Description of Artificial Sequence: Synthetic oligonucleotide
gggaagaacugugaguaga

SEQ ID NO: 819416 - RNA, 19 nt, Artificial Sequence
  Description of Artificial Sequence: Synthetic oligonucleotide
uguguguguguguguguuu

SEQ ID NO: 819417 - RNA, 19 nt, Artificial Sequence
  Description of Artificial Sequence: Synthetic oligonucleotide
uggguuccaagaugccgaa

SEQ ID NO: 819418 - RNA, 19 nt, Artificial Sequence
  Description of Artificial Sequence: Synthetic oligonucleotide
cucuggcuggugucgcacc

SEQ ID NO: 819419 - RNA, 19 nt, Artificial Sequence
  Description of Artificial Sequence: Synthetic oligonucleotide
uugaggcuucuccgggcgu

SEQ ID NO: 819420 - RNA, 19 nt, Artificial Sequence
  Description of Artificial Sequence: Synthetic oligonucleotide
uggcggcccaucaugucau

SEQ ID NO: 819421 - RNA, 19 nt, Artificial Sequence
  Description of Artificial Sequence: Synthetic oligonucleotide
gaauauuggugggcacuga

SEQ ID NO: 819422 - RNA, 19 nt, Artificial Sequence
  Description of Artificial Sequence: Synthetic oligonucleotide
agaugacuuugaaggucuc

SEQ ID NO: 819423 - RNA, 19 nt, Artificial Sequence
  Description of Artificial Sequence: Synthetic oligonucleotide
gaccgucccucggagcagg

SEQ ID NO: 819424 - RNA, 19 nt, Artificial Sequence
  Description of Artificial Sequence: Synthetic oligonucleotide
gcgugagaagcaaugacca

SEQ ID NO: 819425 - RNA, 19 nt, Artificial Sequence
  Description of Artificial Sequence: Synthetic oligonucleotide
agaaggcgacagugagaag

SEQ ID NO: 819426 - RNA, 19 nt, Artificial Sequence
  Description of Artificial Sequence: Synthetic oligonucleotide
agaugccgaacugcuugag

SEQ ID NO: 819427 - RNA, 19 nt, Artificial Sequence
  Description of Artificial Sequence: Synthetic oligonucleotide
cugugugugugugucuguc

SEQ ID NO: 819428 - RNA, 19 nt, Artificial Sequence
  Description of Artificial Sequence: Synthetic oligonucleotide
gaugacuuugaaggucucu

SEQ ID NO: 819429 - RNA, 19 nt, Artificial Sequence
  Description of Artificial Sequence: Synthetic oligonucleotide
agacaugcggccagucugu

SEQ ID NO: 819430 - RNA, 19 nt, Artificial Sequence
  Description of Artificial Sequence: Synthetic oligonucleotide
gggacucucagaacugggc

SEQ ID NO: 819431 - RNA, 19 nt, Artificial Sequence
  Description of Artificial Sequence: Synthetic oligonucleotide
gugcaucugugugugugug

SEQ ID NO: 819432 - RNA, 19 nt, Artificial Sequence
  Description of Artificial Sequence: Synthetic oligonucleotide
agcccgggcgcaacuuucc

SEQ ID NO: 819433 - RNA, 19 nt, Artificial Sequence
  Description of Artificial Sequence: Synthetic oligonucleotide
ggaucagugcagcccugag

SEQ ID NO: 819434 - RNA, 19 nt, Artificial Sequence
  Description of Artificial Sequence: Synthetic oligonucleotide
gagcugauguggucuccca

SEQ ID NO: 819435 - RNA, 19 nt, Artificial Sequence
  Description of Artificial Sequence: Synthetic oligonucleotide
ucaggcgagcacaguccuc

SEQ ID NO: 819436 - RNA, 19 nt, Artificial Sequence
  Description of Artificial Sequence: Synthetic oligonucleotide
gccgugaugcuggagcccg

SEQ ID NO: 819437 - RNA, 19 nt, Artificial Sequence
  Description of Artificial Sequence: Synthetic oligonucleotide
gcuggugucgcaccgugga

SEQ ID NO: 819438 - RNA, 19 nt, Artificial Sequence
  Description of Artificial Sequence: Synthetic oligonucleotide
gggaccgucccucggagca

SEQ ID NO: 819439 - RNA, 19 nt, Artificial Sequence
  Description of Artificial Sequence: Synthetic oligonucleotide
aggcgacagugagaagaac

SEQ ID NO: 819440 - RNA, 19 nt, Artificial Sequence
  Description of Artificial Sequence: Synthetic oligonucleotide
aggcuagaaugguaaucuu

SEQ ID NO: 819441 - RNA, 19 nt, Artificial Sequence
  Description of Artificial Sequence: Synthetic oligonucleotide
cuguugaccuugccugguc

SEQ ID NO: 819442 - RNA, 19 nt, Artificial Sequence
  Description of Artificial Sequence: Synthetic oligonucleotide
cugaauauuggugggcacu

SEQ ID NO: 819443 - RNA, 19 nt, Artificial Sequence
  Description of Artificial Sequence: Synthetic oligonucleotide
ugcggccagucuguguccc

SEQ ID NO: 819444 - RNA, 19 nt, Artificial Sequence
  Description of Artificial Sequence: Synthetic oligonucleotide
guggacaacuccaguucac

SEQ ID NO: 819445 - RNA, 19 nt, Artificial Sequence
  Description of Artificial Sequence: Synthetic oligonucleotide
cuuauccuggggcuggccu

SEQ ID NO: 819446 - RNA, 19 nt, Artificial Sequence
  Description of Artificial Sequence: Synthetic oligonucleotide
ggcgagcacaguccucagg

SEQ ID NO: 819447 - RNA, 19 nt, Artificial Sequence
  Description of Artificial Sequence: Synthetic oligonucleotide
gagcguggcugggaccagg

SEQ ID NO: 819448 - RNA, 19 nt, Artificial Sequence
  Description of Artificial Sequence: Synthetic oligonucleotide
aacuggccgugaugcugga

SEQ ID NO: 819449 - RNA, 19 nt, Artificial Sequence
  Description of Artificial Sequence: Synthetic oligonucleotide
gcaucuguguguguguguc

SEQ ID NO: 819450 - RNA, 19 nt, Artificial Sequence
  Description of Artificial Sequence: Synthetic oligonucleotide
caugcccuggacaggcgga

SEQ ID NO: 819451 - RNA, 19 nt, Artificial Sequence
  Description of Artificial Sequence: Synthetic oligonucleotide
agaugggaguccaccugug

SEQ ID NO: 819452 - RNA, 19 nt, Artificial Sequence
  Description of Artificial Sequence: Synthetic oligonucleotide
aagccucgauaaagggacu

SEQ ID NO: 819453 - RNA, 19 nt, Artificial Sequence
  Description of Artificial Sequence: Synthetic oligonucleotide
gggaguaaacuguucaguu

SEQ ID NO: 819454 - RNA, 19 nt, Artificial Sequence
  Description of Artificial Sequence: Synthetic oligonucleotide
gaaccccagugggaagggc

SEQ ID NO: 819455 - RNA, 19 nt, Artificial Sequence
  Description of Artificial Sequence: Synthetic oligonucleotide
uggccccguucccaucagc

SEQ ID NO: 819456 - RNA, 19 nt, Artificial Sequence
  Description of Artificial Sequence: Synthetic oligonucleotide
ugcacccaagggagacgcu

SEQ ID NO: 819457 - RNA, 19 nt, Artificial Sequence
  Description of Artificial Sequence: Synthetic oligonucleotide
augcccuggacaggcggag

SEQ ID NO: 819458 - RNA, 19 nt, Artificial Sequence
  Description of Artificial Sequence: Synthetic oligonucleotide
gcucaggcgagcacagucc

SEQ ID NO: 819459 - RNA, 19 nt, Artificial Sequence
  Description of Artificial Sequence: Synthetic oligonucleotide
uccgggcgugagaagcaau

SEQ ID NO: 819460 - RNA, 19 nt, Artificial Sequence
  Description of Artificial Sequence: Synthetic oligonucleotide
ucccugagccagggaaagc

SEQ ID NO: 819461 - RNA, 19 nt, Artificial Sequence
  Description of Artificial Sequence: Synthetic oligonucleotide
ggcgacagugagaagaacu

SEQ ID NO: 819462 - RNA, 19 nt, Artificial Sequence
  Description of Artificial Sequence: Synthetic oligonucleotide
gcgagcacaguccucaggu

SEQ ID NO: 819463 - RNA, 19 nt, Artificial Sequence
  Description of Artificial Sequence: Synthetic oligonucleotide
ccguggacaacuccaguuc

SEQ ID NO: 819464 - RNA, 19 nt, Artificial Sequence
  Description of Artificial Sequence: Synthetic oligonucleotide
ggaaccccagugggaaggg

SEQ ID NO: 819465 - RNA, 19 nt, Artificial Sequence
  Description of Artificial Sequence: Synthetic oligonucleotide
auguggucucccaucccca

SEQ ID NO: 819466 - RNA, 19 nt, Artificial Sequence
  Description of Artificial Sequence: Synthetic oligonucleotide
auggccccguucccaucag

SEQ ID NO: 819467 - RNA, 19 nt, Artificial Sequence
  Description of Artificial Sequence: Synthetic oligonucleotide
ugcguccucccgccaggac

SEQ ID NO: 819468 - RNA, 19 nt, Artificial Sequence
  Description of Artificial Sequence: Synthetic oligonucleotide
gugugugugugucugucuu

SEQ ID NO: 819469 - RNA, 19 nt, Artificial Sequence
  Description of Artificial Sequence: Synthetic oligonucleotide
cagcccugagaugggaguc

SEQ ID NO: 819470 - RNA, 19 nt, Artificial Sequence
  Description of Artificial Sequence: Synthetic oligonucleotide
ccgggcgugagaagcaaug

SEQ ID NO: 819471 - RNA, 19 nt, Artificial Sequence
  Description of Artificial Sequence: Synthetic oligonucleotide
ccagaggugcguccucccg

SEQ ID NO: 819472 - RNA, 19 nt, Artificial Sequence
  Description of Artificial Sequence: Synthetic oligonucleotide
gccucgauaaagggacugc

SEQ ID NO: 819473 - RNA, 19 nt, Artificial Sequence
  Description of Artificial Sequence: Synthetic oligonucleotide
ggugucgcaccguggacaa

SEQ ID NO: 819474 - RNA, 19 nt, Artificial Sequence
  Description of Artificial Sequence: Synthetic oligonucleotide
ccucggagcaggauggaga

SEQ ID NO: 819475 - RNA, 19 nt, Artificial Sequence
  Description of Artificial Sequence: Synthetic oligonucleotide
ugcccauggcgagcguggc

SEQ ID NO: 819476 - RNA, 19 nt, Artificial Sequence
  Description of Artificial Sequence: Synthetic oligonucleotide
guggauggccccguuccca

SEQ ID NO: 819477 - RNA, 19 nt, Artificial Sequence
  Description of Artificial Sequence: Synthetic oligonucleotide
gcuacggguguuggugggg

SEQ ID NO: 819478 - RNA, 19 nt, Artificial Sequence
  Description of Artificial Sequence: Synthetic oligonucleotide
cccauggcgagcguggcug

SEQ ID NO: 819479 - RNA, 19 nt, Artificial Sequence
  Description of Artificial Sequence: Synthetic oligonucleotide
ucaggggcggcggcucaca

SEQ ID NO: 819480 - RNA, 19 nt, Artificial Sequence
  Description of Artificial Sequence: Synthetic oligonucleotide
cucguccuuuugacagguc

SEQ ID NO: 819481 - RNA, 19 nt, Artificial Sequence
  Description of Artificial Sequence: Synthetic oligonucleotide
ccauguguccuagaugaca

SEQ ID NO: 819482 - RNA, 19 nt, Artificial Sequence
  Description of Artificial Sequence: Synthetic oligonucleotide
gagcccgggcgcaacuuuc

SEQ ID NO: 819483 - RNA, 19 nt, Artificial Sequence
  Description of Artificial Sequence: Synthetic oligonucleotide
uggcuagcuucagcuuaga

SEQ ID NO: 819484 - RNA, 19 nt, Artificial Sequence
  Description of Artificial Sequence: Synthetic oligonucleotide
cguccucccgccaggacag

SEQ ID NO: 819485 - RNA, 19 nt, Artificial Sequence
  Description of Artificial Sequence: Synthetic oligonucleotide
auggcgagcguggcuggga

SEQ ID NO: 819486 - RNA, 19 nt, Artificial Sequence
  Description of Artificial Sequence: Synthetic oligonucleotide
cauccuuguuaaugucaua

SEQ ID NO: 819487 - RNA, 19 nt, Artificial Sequence
  Description of Artificial Sequence: Synthetic oligonucleotide
cgugagaagcaaugaccac

SEQ ID NO: 819488 - RNA, 19 nt, Artificial Sequence
  Description of Artificial Sequence: Synthetic oligonucleotide
ggaagugugcauagguggu

SEQ ID NO: 819489 - RNA, 19 nt, Artificial Sequence
  Description of Artificial Sequence: Synthetic oligonucleotide
gcgcaacuuuccaaaucag

SEQ ID NO: 819490 - RNA, 19 nt, Artificial Sequence
  Description of Artificial Sequence: Synthetic oligonucleotide
cccugguugggcgugcagc

SEQ ID NO: 819491 - RNA, 19 nt, Artificial Sequence
  Description of Artificial Sequence: Synthetic oligonucleotide
cucaggcgagcacaguccu

SEQ ID NO: 819492 - RNA, 19 nt, Artificial Sequence
  Description of Artificial Sequence: Synthetic oligonucleotide
cgucccucggagcaggaug

SEQ ID NO: 819493 - RNA, 19 nt, Artificial Sequence
  Description of Artificial Sequence: Synthetic oligonucleotide
gcccaucaugucauagaug

SEQ ID NO: 819494 - RNA, 19 nt, Artificial Sequence
  Description of Artificial Sequence: Synthetic oligonucleotide
cgauaaagggacugcagcu

SEQ ID NO: 819495 - RNA, 19 nt, Artificial Sequence
  Description of Artificial Sequence: Synthetic oligonucleotide
ccuggacaggcggagcuac

SEQ ID NO: 819496 - RNA, 19 nt, Artificial Sequence
  Description of Artificial Sequence: Synthetic oligonucleotide
gcgagcguggcugggacca

SEQ ID NO: 819497 - RNA, 19 nt, Artificial Sequence
  Description of Artificial Sequence: Synthetic oligonucleotide
acaguugcauggagcucau

SEQ ID NO: 819498 - RNA, 19 nt, Artificial Sequence
  Description of Artificial Sequence: Synthetic oligonucleotide
ggccccguucccaucagca

SEQ ID NO: 819499 - RNA, 19 nt, Artificial Sequence
  Description of Artificial Sequence: Synthetic oligonucleotide
caccacagccauggcgcac

SEQ ID NO: 819500 - RNA, 19 nt, Artificial Sequence
  Description of Artificial Sequence: Synthetic oligonucleotide
caucugugugugugugucu

SEQ ID NO: 819501 - RNA, 19 nt, Artificial Sequence
  Description of Artificial Sequence: Synthetic oligonucleotide
ccucgauaaagggacugca

SEQ ID NO: 819502 - RNA, 19 nt, Artificial Sequence
  Description of Artificial Sequence: Synthetic oligonucleotide
ccauggcgagcguggcugg

SEQ ID NO: 819503 - RNA, 19 nt, Artificial Sequence
  Description of Artificial Sequence: Synthetic oligonucleotide
ccuugccuggucacagguc

SEQ ID NO: 819504 - RNA, 19 nt, Artificial Sequence
  Description of Artificial Sequence: Synthetic oligonucleotide
guguguguguguguguguu

SEQ ID NO: 819505 - RNA, 19 nt, Artificial Sequence
  Description of Artificial Sequence: Synthetic oligonucleotide
gcagacaugcggccagucu

SEQ ID NO: 819506 - RNA, 19 nt, Artificial Sequence
  Description of Artificial Sequence: Synthetic oligonucleotide
cccgcggaggagaaggcga

SEQ ID NO: 819507 - RNA, 19 nt, Artificial Sequence
  Description of Artificial Sequence: Synthetic oligonucleotide
ggauugugugugugugugu

SEQ ID NO: 819508 - RNA, 19 nt, Artificial Sequence
  Description of Artificial Sequence: Synthetic oligonucleotide
uggcugggaccagggcgca

SEQ ID NO: 819509 - RNA, 19 nt, Artificial Sequence
  Description of Artificial Sequence: Synthetic oligonucleotide
ggcggagcuacggguguug

SEQ ID NO: 819510 - RNA, 19 nt, Artificial Sequence
  Description of Artificial Sequence: Synthetic oligonucleotide
gcacugagacaggaaccac

SEQ ID NO: 819511 - RNA, 19 nt, Artificial Sequence
  Description of Artificial Sequence: Synthetic oligonucleotide
gccggagccucccgcccgg

SEQ ID NO: 819512 - RNA, 19 nt, Artificial Sequence
  Description of Artificial Sequence: Synthetic oligonucleotide
gggaucagugcagcccuga

SEQ ID NO: 819513 - RNA, 19 nt, Artificial Sequence
  Description of Artificial Sequence: Synthetic oligonucleotide
ccgggcgcaacuuuccaaa

SEQ ID NO: 819514 - RNA, 19 nt, Artificial Sequence
  Description of Artificial Sequence: Synthetic oligonucleotide
gucgcaccguggacaacuc

SEQ ID NO: 819515 - RNA, 19 nt, Artificial Sequence
  Description of Artificial Sequence: Synthetic oligonucleotide
cugguugggcgugcagcca

SEQ ID NO: 819516 - RNA, 19 nt, Artificial Sequence
  Description of Artificial Sequence: Synthetic oligonucleotide
ggcgagcugggcuggggaa

SEQ ID NO: 819517 - RNA, 19 nt, Artificial Sequence
  Description of Artificial Sequence: Synthetic oligonucleotide
ggaccgucccucggagcag

SEQ ID NO: 819518 - RNA, 19 nt, Artificial Sequence
  Description of Artificial Sequence: Synthetic oligonucleotide
ggccgugaugcuggagccc

SEQ ID NO: 819519 - RNA, 19 nt, Artificial Sequence
  Description of Artificial Sequence: Synthetic oligonucleotide
cugagacaggaaccacccu

SEQ ID NO: 819520 - RNA, 19 nt, Artificial Sequence
  Description of Artificial Sequence: Synthetic oligonucleotide
caguugcauggagcucaug

SEQ ID NO: 819521 - RNA, 19 nt, Artificial Sequence
  Description of Artificial Sequence: Synthetic oligonucleotide
caccccuaggccgugcacu

SEQ ID NO: 819522 - RNA, 19 nt, Artificial Sequence
  Description of Artificial Sequence: Synthetic oligonucleotide
cccggcuucaggggcggcg

SEQ ID NO: 819523 - RNA, 19 nt, Artificial Sequence
  Description of Artificial Sequence: Synthetic oligonucleotide
ccgcccggcuucaggggcg

SEQ ID NO: 819524 - RNA, 19 nt, Artificial Sequence
  Description of Artificial Sequence: Synthetic oligonucleotide
aggaccccgcggaggagaa

SEQ ID NO: 819525 - RNA, 19 nt, Artificial Sequence
  Description of Artificial Sequence: Synthetic oligonucleotide
ccgugaugcuggagcccgg

SEQ ID NO: 819526 - RNA, 19 nt, Artificial Sequence
  Description of Artificial Sequence: Synthetic oligonucleotide
ccccgcggaggagaaggcg

SEQ ID NO: 819527 - RNA, 19 nt, Artificial Sequence
  Description of Artificial Sequence: Synthetic oligonucleotide
ggguuccaagaugccgaac

SEQ ID NO: 819528 - RNA, 19 nt, Artificial Sequence
  Description of Artificial Sequence: Synthetic oligonucleotide
caggcggagcuacgggugu

SEQ ID NO: 819529 - RNA, 19 nt, Artificial Sequence
  Description of Artificial Sequence: Synthetic oligonucleotide
guccucccgccaggacagg

SEQ ID NO: 819530 - RNA, 19 nt, Artificial Sequence
  Description of Artificial Sequence: Synthetic oligonucleotide
gcaccccuaggccgugcac

SEQ ID NO: 819531 - RNA, 19 nt, Artificial Sequence
  Description of Artificial Sequence: Synthetic oligonucleotide
gcggccagucugugucccc

SEQ ID NO: 819532 - RNA, 19 nt, Artificial Sequence
  Description of Artificial Sequence: Synthetic oligonucleotide
ggcaggcuagaaugguaau

SEQ ID NO: 819533 - RNA, 19 nt, Artificial Sequence
  Description of Artificial Sequence: Synthetic oligonucleotide
ggggcaggcuagaauggua

SEQ ID NO: 819534 - RNA, 19 nt, Artificial Sequence
  Description of Artificial Sequence: Synthetic oligonucleotide
cgaacugcuugaggacggc

SEQ ID NO: 819535 - RNA, 19 nt, Artificial Sequence
  Description of Artificial Sequence: Synthetic oligonucleotide
cuccgggcgugagaagcaa

SEQ ID NO: 819536 - RNA, 19 nt, Artificial Sequence
  Description of Artificial Sequence: Synthetic oligonucleotide
ccucccauguguccuagau

SEQ ID NO: 819537 - RNA, 19 nt, Artificial Sequence
  Description of Artificial Sequence: Synthetic oligonucleotide
aggcggagcuacggguguu

SEQ ID NO: 819538 - RNA, 19 nt, Artificial Sequence
  Description of Artificial Sequence: Synthetic oligonucleotide
gugcguccucccgccagga

SEQ ID NO: 819539 - RNA, 19 nt, Artificial Sequence
  Description of Artificial Sequence: Synthetic oligonucleotide
caaaguggauggccccguu

SEQ ID NO: 819540 - RNA, 19 nt, Artificial Sequence
  Description of Artificial Sequence: Synthetic oligonucleotide
gugucgcaccguggacaac

SEQ ID NO: 819541 - RNA, 19 nt, Artificial Sequence
  Description of Artificial Sequence: Synthetic oligonucleotide
gcccucuggcuggugucgc

SEQ ID NO: 819542 - RNA, 19 nt, Artificial Sequence
  Description of Artificial Sequence: Synthetic oligonucleotide
cgggccggagccucccgcc

SEQ ID NO: 819543 - RNA, 19 nt, Artificial Sequence
  Description of Artificial Sequence: Synthetic oligonucleotide
gcccgggcgcaacuuucca

SEQ ID NO: 819544 - RNA, 19 nt, Artificial Sequence
  Description of Artificial Sequence: Synthetic oligonucleotide
cccuuauccuggggcuggc

SEQ ID NO: 819545 - RNA, 19 nt, Artificial Sequence
  Description of Artificial Sequence: Synthetic oligonucleotide
cuaagggguggggcaggcu

SEQ ID NO: 819546 - RNA, 19 nt, Artificial Sequence
  Description of Artificial Sequence: Synthetic oligonucleotide
ggcgugcagccagaggcua

SEQ ID NO: 819547 - RNA, 19 nt, Artificial Sequence
  Description of Artificial Sequence: Synthetic oligonucleotide
ggagccucccgcccggcuu

SEQ ID NO: 819548 - RNA, 19 nt, Artificial Sequence
  Description of Artificial Sequence: Synthetic oligonucleotide
cccgggcgcaacuuuccaa

SEQ ID NO: 819549 - RNA, 19 nt, Artificial Sequence
  Description of Artificial Sequence: Synthetic oligonucleotide
ggagcccgggcgcaacuuu

SEQ ID NO: 819550 - RNA, 19 nt, Artificial Sequence
  Description of Artificial Sequence: Synthetic oligonucleotide
ccaagaugccgaacugcuu

SEQ ID NO: 819551 - RNA, 19 nt, Artificial Sequence
  Description of Artificial Sequence: Synthetic oligonucleotide
cgggcgugagaagcaauga

SEQ ID NO: 819552 - RNA, 19 nt, Artificial Sequence
  Description of Artificial Sequence: Synthetic oligonucleotide
gccccguucccaucagcau

SEQ ID NO: 819553 - RNA, 19 nt, Artificial Sequence
  Description of Artificial Sequence: Synthetic oligonucleotide
gggcgugcagccagaggcu

SEQ ID NO: 819554 - RNA, 19 nt, Artificial Sequence
  Description of Artificial Sequence: Synthetic oligonucleotide
ggcgcaccccuaggccgug

SEQ ID NO: 819555 - RNA, 19 nt, Artificial Sequence
  Description of Artificial Sequence: Synthetic oligonucleotide
ccucccgccaggacagggu

SEQ ID NO: 819556 - RNA, 19 nt, Artificial Sequence
  Description of Artificial Sequence: Synthetic oligonucleotide
caucuccucuuugguugau

SEQ ID NO: 819557 - RNA, 19 nt, Artificial Sequence
  Description of Artificial Sequence: Synthetic oligonucleotide
gggguggggcaggcuagaa

SEQ ID NO: 819558 - RNA, 19 nt, Artificial Sequence
  Description of Artificial Sequence: Synthetic oligonucleotide
gcggcggcucacaugcccu

SEQ ID NO: 819559 - RNA, 19 nt, Artificial Sequence
  Description of Artificial Sequence: Synthetic oligonucleotide
ggcggcccaucaugucaua

SEQ ID NO: 819560 - RNA, 19 nt, Artificial Sequence
  Description of Artificial Sequence: Synthetic oligonucleotide
ccuaggccgugcacugccu

SEQ ID NO: 819561 - RNA, 19 nt, Artificial Sequence
  Description of Artificial Sequence: Synthetic oligonucleotide
gggcgcaccccuaggccgu

SEQ ID NO: 819562 - RNA, 19 nt, Artificial Sequence
  Description of Artificial Sequence: Synthetic oligonucleotide
caggggcggcggcucacau

SEQ ID NO: 819563 - RNA, 19 nt, Artificial Sequence
  Description of Artificial Sequence: Synthetic oligonucleotide
gcgcaccccuaggccgugc

SEQ ID NO: 819564 - RNA, 19 nt, Artificial Sequence
  Description of Artificial Sequence: Synthetic oligonucleotide
gggcugcaguugauggaau

SEQ ID NO: 819565 - RNA, 19 nt, Artificial Sequence
  Description of Artificial Sequence: Synthetic oligonucleotide
cgagcguggcugggaccag

SEQ ID NO: 819566 - RNA, 19 nt, Artificial Sequence
  Description of Artificial Sequence: Synthetic oligonucleotide
ccauacccuggaugcccau

SEQ ID NO: 819567 - RNA, 19 nt, Artificial Sequence
  Description of Artificial Sequence: Synthetic oligonucleotide
ccguucccaucagcaucaa

SEQ ID NO: 819568 - RNA, 19 nt, Artificial Sequence
  Description of Artificial Sequence: Synthetic oligonucleotide
ccgccaggacaggguaggu

SEQ ID NO: 819569 - RNA, 19 nt, Artificial Sequence
  Description of Artificial Sequence: Synthetic oligonucleotide
cggagccucccgcccggcu

SEQ ID NO: 819570 - RNA, 19 nt, Artificial Sequence
  Description of Artificial Sequence: Synthetic oligonucleotide
auggaaguugacuugaacg

SEQ ID NO: 819571 - RNA, 19 nt, Artificial Sequence
  Description of Artificial Sequence: Synthetic oligonucleotide
ugaaaacugguccuuauag

SEQ ID NO: 819572 - RNA, 19 nt, Artificial Sequence
  Description of Artificial Sequence: Synthetic oligonucleotide
cuuguaaccauacucagag

SEQ ID NO: 819573 - RNA, 19 nt, Artificial Sequence
  Description of Artificial Sequence: Synthetic oligonucleotide
uuuccuuuaggaaugaccu

SEQ ID NO: 819574 - RNA, 19 nt, Artificial Sequence
  Description of Artificial Sequence: Synthetic oligonucleotide
aucgacgugagccuggucc

SEQ ID NO: 819575 - RNA, 19 nt, Artificial Sequence
  Description of Artificial Sequence: Synthetic oligonucleotide
uauuauguacugcaguugc

SEQ ID NO: 819576 - RNA, 19 nt, Artificial Sequence
  Description of Artificial Sequence: Synthetic oligonucleotide
uuauggaaaagguaugugc

SEQ ID NO: 819577 - RNA, 19 nt, Artificial Sequence
  Description of Artificial Sequence: Synthetic oligonucleotide
cuuguaaucgacgugagcc

SEQ ID NO: 819578 - RNA, 19 nt, Artificial Sequence
  Description of Artificial Sequence: Synthetic oligonucleotide
uuaguucccguucaaaugc

SEQ ID NO: 819579 - RNA, 19 nt, Artificial Sequence
  Description of Artificial Sequence: Synthetic oligonucleotide
uuaacauccagucuaguuc

SEQ ID NO: 819580 - RNA, 19 nt, Artificial Sequence
  Description of Artificial Sequence: Synthetic oligonucleotide
cuuauguaaugucugagcc

SEQ ID NO: 819581 - RNA, 19 nt, Artificial Sequence
  Description of Artificial Sequence: Synthetic oligonucleotide
auuacguuucucuuuggcg

SEQ ID NO: 819582 - RNA, 19 nt, Artificial Sequence
  Description of Artificial Sequence: Synthetic oligonucleotide
uauaauuucacccguggau

SEQ ID NO: 819583 - RNA, 19 nt, Artificial Sequence
  Description of Artificial Sequence: Synthetic oligonucleotide
uuugauuucgucaaccuuu

SEQ ID NO: 819584 - RNA, 19 nt, Artificial Sequence
  Description of Artificial Sequence: Synthetic oligonucleotide
uucauuacguuucucuuug

SEQ ID NO: 819585 - RNA, 19 nt, Artificial Sequence
  Description of Artificial Sequence: Synthetic oligonucleotide
uuaucuuugauuucgucaa

SEQ ID NO: 819586 - RNA, 19 nt, Artificial Sequence
  Description of Artificial Sequence: Synthetic oligonucleotide
auuucgucaaccuuugucu

SEQ ID NO: 819587 - RNA, 19 nt, Artificial Sequence
  Description of Artificial Sequence: Synthetic oligonucleotide
  modified_base (4)..(4): a, c, u, g, unknown or other
gaunuaagggaauggcagc

SEQ ID NO: 819588 - RNA, 19 nt, Artificial Sequence
  Description of Artificial Sequence: Synthetic oligonucleotide
cuaaaacuuugcuagacug

SEQ ID NO: 819589 - RNA, 19 nt, Artificial Sequence
  Description of Artificial Sequence: Synthetic oligonucleotide
ucauuccguucuuagaugg

SEQ ID NO: 819590 - RNA, 19 nt, Artificial Sequence
  Description of Artificial Sequence: Synthetic oligonucleotide
aaggccgauacucugagga

SEQ ID NO: 819591 - RNA, 19 nt, Artificial Sequence
  Description of Artificial Sequence: Synthetic oligonucleotide
uguuuacugaagaugguga

SEQ ID NO: 819592 - RNA, 19 nt, Artificial Sequence
  Description of Artificial Sequence: Synthetic oligonucleotide
ucgagacucagaaggaugg

SEQ ID NO: 819593 - RNA, 19 nt, Artificial Sequence
  Description of Artificial Sequence: Synthetic oligonucleotide
aauggcagcucugauuggc

SEQ ID NO: 819594 - RNA, 19 nt, Artificial Sequence
  Description of Artificial Sequence: Synthetic oligonucleotide
cuuauaauuucacccgugg

SEQ ID NO: 819595 - RNA, 19 nt, Artificial Sequence
  Description of Artificial Sequence: Synthetic oligonucleotide
uuugaguuguucaaucugu

SEQ ID NO: 819596 - RNA, 19 nt, Artificial Sequence
  Description of Artificial Sequence: Synthetic oligonucleotide
uauguaaugucugagccug

SEQ ID NO: 819597 - RNA, 19 nt, Artificial Sequence
  Description of Artificial Sequence: Synthetic oligonucleotide
auaacugaacucuguaauc

SEQ ID NO: 819598 - RNA, 19 nt, Artificial Sequence
  Description of Artificial Sequence: Synthetic oligonucleotide
aacuuugcuagacugcaug

SEQ ID NO: 819599 - RNA, 19 nt, Artificial Sequence
  Description of Artificial Sequence: Synthetic oligonucleotide
uuuaguucccguucaaaug

SEQ ID NO: 819600 - RNA, 19 nt, Artificial Sequence
  Description of Artificial Sequence: Synthetic oligonucleotide
uaaaacuuugcuagacugc

SEQ ID NO: 819601 - RNA, 19 nt, Artificial Sequence
  Description of Artificial Sequence: Synthetic oligonucleotide
uagauaacauggaaguuga

SEQ ID NO: 819602 - RNA, 19 nt, Artificial Sequence
  Description of Artificial Sequence: Synthetic oligonucleotide
ucuuagauggaaaacucaa

SEQ ID NO: 819603 - RNA, 19 nt, Artificial Sequence
  Description of Artificial Sequence: Synthetic oligonucleotide
agccuuauaauuucacccg

SEQ ID NO: 819604 - RNA, 19 nt, Artificial Sequence
  Description of Artificial Sequence: Synthetic oligonucleotide
uggguuauuauguacugca

SEQ ID NO: 819605 - RNA, 19 nt, Artificial Sequence
  Description of Artificial Sequence: Synthetic oligonucleotide
uuuaggaaugaccucucug

SEQ ID NO: 819606 - RNA, 19 nt, Artificial Sequence
  Description of Artificial Sequence: Synthetic oligonucleotide
gugcucgagacucagaagg

SEQ ID NO: 819607 - RNA, 19 nt, Artificial Sequence
  Description of Artificial Sequence: Synthetic oligonucleotide
uuacguuucucuuuggcgu

SEQ ID NO: 819608 - RNA, 19 nt, Artificial Sequence
  Description of Artificial Sequence: Synthetic oligonucleotide
agugaaugggaccuguaag

SEQ ID NO: 819609 - RNA, 19 nt, Artificial Sequence
  Description of Artificial Sequence: Synthetic oligonucleotide
uuccauugaguacaguuca

SEQ ID NO: 819610 - RNA, 19 nt, Artificial Sequence
  Description of Artificial Sequence: Synthetic oligonucleotide
uucccuaugggacaaggug

SEQ ID NO: 819611 - RNA, 19 nt, Artificial Sequence
  Description of Artificial Sequence: Synthetic oligonucleotide
cuuugaaacgcucugcuuc

SEQ ID NO: 819612 - RNA, 19 nt, Artificial Sequence
  Description of Artificial Sequence: Synthetic oligonucleotide
ucgggcacgaacaauuugc

SEQ ID NO: 819613 - RNA, 19 nt, Artificial Sequence
  Description of Artificial Sequence: Synthetic oligonucleotide
  modified_base (7)..(7): a, c, u, g, unknown or other
gaggaunuaagggaauggc

SEQ ID NO: 819614 - RNA, 19 nt, Artificial Sequence
  Description of Artificial Sequence: Synthetic oligonucleotide
ugauacugcaugcaauucu

SEQ ID NO: 819615 - RNA, 19 nt, Artificial Sequence
  Description of Artificial Sequence: Synthetic oligonucleotide
uuuccauugaguacaguuc

SEQ ID NO: 819616 - RNA, 19 nt, Artificial Sequence
  Description of Artificial Sequence: Synthetic oligonucleotide
ugaauucgguccuugaagu

SEQ ID NO: 819617 - RNA, 19 nt, Artificial Sequence
  Description of Artificial Sequence: Synthetic oligonucleotide
uuauaauuucacccgugga

SEQ ID NO: 819618 - RNA, 19 nt, Artificial Sequence
  Description of Artificial Sequence: Synthetic oligonucleotide
aauugucuauguuuguuua

SEQ ID NO: 819619 - RNA, 19 nt, Artificial Sequence
  Description of Artificial Sequence: Synthetic oligonucleotide
aaaaggagcaccucccaaa

SEQ ID NO: 819620 - RNA, 19 nt, Artificial Sequence
  Description of Artificial Sequence: Synthetic oligonucleotide
caccuuuuggacuuggagc

SEQ ID NO: 819621 - RNA, 19 nt, Artificial Sequence
  Description of Artificial Sequence: Synthetic oligonucleotide
ucaaccuuugucuaugaau

SEQ ID NO: 819622 - RNA, 19 nt, Artificial Sequence
  Description of Artificial Sequence: Synthetic oligonucleotide
gauuucgucaaccuuuguc

SEQ ID NO: 819623 - RNA, 19 nt, Artificial Sequence
  Description of Artificial Sequence: Synthetic oligonucleotide
ugguccuuuagacuugugc

SEQ ID NO: 819624 - RNA, 19 nt, Artificial Sequence
  Description of Artificial Sequence: Synthetic oligonucleotide
aaaagguaugugcgguguc

SEQ ID NO: 819625 - RNA, 19 nt, Artificial Sequence
  Description of Artificial Sequence: Synthetic oligonucleotide
aaccuuugucuaugaauuc

SEQ ID NO: 819626 - RNA, 19 nt, Artificial Sequence
  Description of Artificial Sequence: Synthetic oligonucleotide
uuucuuaagucucguaguc

SEQ ID NO: 819627 - RNA, 19 nt, Artificial Sequence
  Description of Artificial Sequence: Synthetic oligonucleotide
gaaguugacuugaacgagg

SEQ ID NO: 819628 - RNA, 19 nt, Artificial Sequence
  Description of Artificial Sequence: Synthetic oligonucleotide
uuuucuggaguaaauccuc

SEQ ID NO: 819629 - RNA, 19 nt, Artificial Sequence
  Description of Artificial Sequence: Synthetic oligonucleotide
aauucgguccuugaagucu

SEQ ID NO: 819630 - RNA, 19 nt, Artificial Sequence
  Description of Artificial Sequence: Synthetic oligonucleotide
augaaaaggagcaccuccc

SEQ ID NO: 819631 - RNA, 19 nt, Artificial Sequence
  Description of Artificial Sequence: Synthetic oligonucleotide
aucacuuaucccucgaagu

SEQ ID NO: 819632 - RNA, 19 nt, Artificial Sequence
  Description of Artificial Sequence: Synthetic oligonucleotide
uuuucgggcacgaacaauu

SEQ ID NO: 819633 - RNA, 19 nt, Artificial Sequence
  Description of Artificial Sequence: Synthetic oligonucleotide
ucaccuaauuuccuggcac

SEQ ID NO: 819634 - RNA, 19 nt, Artificial Sequence
  Description of Artificial Sequence: Synthetic oligonucleotide
aucauaguauuuucgggca

SEQ ID NO: 819635 - RNA, 19 nt, Artificial Sequence
  Description of Artificial Sequence: Synthetic oligonucleotide
uuuggcguaguuucuuaag

SEQ ID NO: 819636 - RNA, 19 nt, Artificial Sequence
  Description of Artificial Sequence: Synthetic oligonucleotide
uauucuucccuaugggaca

SEQ ID NO: 819637 - RNA, 19 nt, Artificial Sequence
  Description of Artificial Sequence: Synthetic oligonucleotide
uuauguaaugucugagccu

SEQ ID NO: 819638 - RNA, 19 nt, Artificial Sequence
  Description of Artificial Sequence: Synthetic oligonucleotide
uuccucauaugguuuagug

SEQ ID NO: 819639 - RNA, 19 nt, Artificial Sequence
  Description of Artificial Sequence: Synthetic oligonucleotide
ugugcggugucuccaagcc

SEQ ID NO: 819640 - RNA, 19 nt, Artificial Sequence
  Description of Artificial Sequence: Synthetic oligonucleotide
ucgacuucagggaaccacc

SEQ ID NO: 819641 - RNA, 19 nt, Artificial Sequence
  Description of Artificial Sequence: Synthetic oligonucleotide
uugauuucgucaaccuuug

SEQ ID NO: 819642 - RNA, 19 nt, Artificial Sequence
  Description of Artificial Sequence: Synthetic oligonucleotide
ucuugacaaggguaguaag

SEQ ID NO: 819643 - RNA, 19 nt, Artificial Sequence
  Description of Artificial Sequence: Synthetic oligonucleotide
  modified_base (5)..(5): a, c, u, g, unknown or other
ggaunuaagggaauggcag

SEQ ID NO: 819644 - RNA, 19 nt, Artificial Sequence
  Description of Artificial Sequence: Synthetic oligonucleotide
ucacuuaucccucgaaguc

SEQ ID NO: 819645 - RNA, 19 nt, Artificial Sequence
  Description of Artificial Sequence: Synthetic oligonucleotide
agcuaaaacuuugcuagac

SEQ ID NO: 819646 - RNA, 19 nt, Artificial Sequence
  Description of Artificial Sequence: Synthetic oligonucleotide
uuugaaacgcucugcuucu

SEQ ID NO: 819647 - RNA, 19 nt, Artificial Sequence
  Description of Artificial Sequence: Synthetic oligonucleotide
cuugcaaucucuuguuaug

SEQ ID NO: 819648 - RNA, 19 nt, Artificial Sequence
  Description of Artificial Sequence: Synthetic oligonucleotide
auuuccaccgugcaccucu

SEQ ID NO: 819649 - RNA, 19 nt, Artificial Sequence
  Description of Artificial Sequence: Synthetic oligonucleotide
ugacgcuccugugauaugg

SEQ ID NO: 819650 - RNA, 19 nt, Artificial Sequence
  Description of Artificial Sequence: Synthetic oligonucleotide
accuuugucuaugaauucg

SEQ ID NO: 819651 - RNA, 19 nt, Artificial Sequence
  Description of Artificial Sequence: Synthetic oligonucleotide
uaucccucgaaguccaaug

SEQ ID NO: 819652 - RNA, 19 nt, Artificial Sequence
  Description of Artificial Sequence: Synthetic oligonucleotide
uugaguuguucaaucugug

SEQ ID NO: 819653 - RNA, 19 nt, Artificial Sequence
  Description of Artificial Sequence: Synthetic oligonucleotide
cagucuaguucagagagcc

SEQ ID NO: 819654 - RNA, 19 nt, Artificial Sequence
  Description of Artificial Sequence: Synthetic oligonucleotide
guaguuuuccauugaguac

SEQ ID NO: 819655 - RNA, 19 nt, Artificial Sequence
  Description of Artificial Sequence: Synthetic oligonucleotide
ugaacgagguauucuuccc

SEQ ID NO: 819656 - RNA, 19 nt, Artificial Sequence
  Description of Artificial Sequence: Synthetic oligonucleotide
uaauugucuauguuuguuu

SEQ ID NO: 819657 - RNA, 19 nt, Artificial Sequence
  Description of Artificial Sequence: Synthetic oligonucleotide
gaaauggaaacugcuccag

SEQ ID NO: 819658 - RNA, 19 nt, Artificial Sequence
  Description of Artificial Sequence: Synthetic oligonucleotide
ugaaacgcucugcuucuag

SEQ ID NO: 819659 - RNA, 19 nt, Artificial Sequence
  Description of Artificial Sequence: Synthetic oligonucleotide
uuuguuuacugaagauggu

SEQ ID NO: 819660 - RNA, 19 nt, Artificial Sequence
  Description of Artificial Sequence: Synthetic oligonucleotide
cugaacucuguaaucauca

SEQ ID NO: 819661 - RNA, 19 nt, Artificial Sequence
  Description of Artificial Sequence: Synthetic oligonucleotide
  modified_base (11)..(11): a, c, u, g, unknown or other
uagggaggaunuaagggaa

SEQ ID NO: 819662 - RNA, 19 nt, Artificial Sequence
  Description of Artificial Sequence: Synthetic oligonucleotide
aaagguaugugcggugucu

SEQ ID NO: 819663 - RNA, 19 nt, Artificial Sequence
  Description of Artificial Sequence: Synthetic oligonucleotide
caucacuuaucccucgaag

SEQ ID NO: 819664 - RNA, 19 nt, Artificial Sequence
  Description of Artificial Sequence: Synthetic oligonucleotide
guauucuucccuaugggac

SEQ ID NO: 819665 - RNA, 19 nt, Artificial Sequence
  Description of Artificial Sequence: Synthetic oligonucleotide
ggcacgaacaauuugcuga

SEQ ID NO: 819666 - RNA, 19 nt, Artificial Sequence
  Description of Artificial Sequence: Synthetic oligonucleotide
acuugaacgagguauucuu

SEQ ID NO: 819667 - RNA, 19 nt, Artificial Sequence
  Description of Artificial Sequence: Synthetic oligonucleotide
gagacauagagaaauggaa

SEQ ID NO: 819668 - RNA, 19 nt, Artificial Sequence
  Description of Artificial Sequence: Synthetic oligonucleotide
ucgaaguccaauguucucu

SEQ ID NO: 819669 - RNA, 19 nt, Artificial Sequence
  Description of Artificial Sequence: Synthetic oligonucleotide
uguaaugucugagccugag

SEQ ID NO: 819670 - RNA, 19 nt, Artificial Sequence
  Description of Artificial Sequence: Synthetic oligonucleotide
uuuaggaagccuccuuguc

SEQ ID NO: 819671 - RNA, 19 nt, Artificial Sequence
  Description of Artificial Sequence: Synthetic oligonucleotide
augugcggugucuccaagc

SEQ ID NO: 819672 - RNA, 19 nt, Artificial Sequence
  Description of Artificial Sequence: Synthetic oligonucleotide
aucgucgucauucuggguu

SEQ ID NO: 819673 - RNA, 19 nt, Artificial Sequence
  Description of Artificial Sequence: Synthetic oligonucleotide
acauaacugaacucuguaa

SEQ ID NO: 819674 - RNA, 19 nt, Artificial Sequence
  Description of Artificial Sequence: Synthetic oligonucleotide
uucccuuuaggaagccucc

SEQ ID NO: 819675 - RNA, 19 nt, Artificial Sequence
  Description of Artificial Sequence: Synthetic oligonucleotide
aaggcuacauucauucacu

SEQ ID NO: 819676 - RNA, 19 nt, Artificial Sequence
  Description of Artificial Sequence: Synthetic oligonucleotide
agcaucgucgucauucugg

SEQ ID NO: 819677 - RNA, 19 nt, Artificial Sequence
  Description of Artificial Sequence: Synthetic oligonucleotide
  modified_base (3)..(3): a, c, u, g, unknown or other
aunuaagggaauggcagcu

SEQ ID NO: 819678 - RNA, 19 nt, Artificial Sequence
  Description of Artificial Sequence: Synthetic oligonucleotide
aaaauccuggccugggcuu

SEQ ID NO: 819679 - RNA, 19 nt, Artificial Sequence
  Description of Artificial Sequence: Synthetic oligonucleotide
cuaucugcugcucgguugc

SEQ ID NO: 819680 - RNA, 19 nt, Artificial Sequence
  Description of Artificial Sequence: Synthetic oligonucleotide
ucucugauacugcaugcaa

SEQ ID NO: 819681 - RNA, 19 nt, Artificial Sequence
  Description of Artificial Sequence: Synthetic oligonucleotide
agacucagaaggaugguag

SEQ ID NO: 819682 - RNA, 19 nt, Artificial Sequence
  Description of Artificial Sequence: Synthetic oligonucleotide
uuggaguuuccuuuaggaa

SEQ ID NO: 819683 - RNA, 19 nt, Artificial Sequence
  Description of Artificial Sequence: Synthetic oligonucleotide
agguaugugcggugucucc

SEQ ID NO: 819684 - RNA, 19 nt, Artificial Sequence
  Description of Artificial Sequence: Synthetic oligonucleotide
gcagccguagcuuugaaac

SEQ ID NO: 819685 - RNA, 19 nt, Artificial Sequence
  Description of Artificial Sequence: Synthetic oligonucleotide
uuguaaucgacgugagccu

SEQ ID NO: 819686 - RNA, 19 nt, Artificial Sequence
  Description of Artificial Sequence: Synthetic oligonucleotide
acauagagaaauggaaacu

SEQ ID NO: 819687 - RNA, 19 nt, Artificial Sequence
  Description of Artificial Sequence: Synthetic oligonucleotide
uccggaagaaagcaucguc

SEQ ID NO: 819688 - RNA, 19 nt, Artificial Sequence
  Description of Artificial Sequence: Synthetic oligonucleotide
aagcuaaaacuuugcuaga

SEQ ID NO: 819689 - RNA, 19 nt, Artificial Sequence
  Description of Artificial Sequence: Synthetic oligonucleotide
ucauaguauuuucgggcac

SEQ ID NO: 819690 - RNA, 19 nt, Artificial Sequence
  Description of Artificial Sequence: Synthetic oligonucleotide
ucuucccuaugggacaagg

SEQ ID NO: 819691 - RNA, 19 nt, Artificial Sequence
  Description of Artificial Sequence: Synthetic oligonucleotide
guauuuucgggcacgaaca

SEQ ID NO: 819692 - RNA, 19 nt, Artificial Sequence
  Description of Artificial Sequence: Synthetic oligonucleotide
ugcuauuugcugcuuccac

SEQ ID NO: 819693 - RNA, 19 nt, Artificial Sequence
  Description of Artificial Sequence: Synthetic oligonucleotide
aaacgcucugcuucuaguu

SEQ ID NO: 819694 - RNA, 19 nt, Artificial Sequence
  Description of Artificial Sequence: Synthetic oligonucleotide
ucuaguucagagagccgcu

SEQ ID NO: 819695 - RNA, 19 nt, Artificial Sequence
  Description of Artificial Sequence: Synthetic oligonucleotide
uccguucuuagauggaaaa

SEQ ID NO: 819696 - RNA, 19 nt, Artificial Sequence
  Description of Artificial Sequence: Synthetic oligonucleotide
ucuaugaauucgguccuug

SEQ ID NO: 819697 - RNA, 19 nt, Artificial Sequence
  Description of Artificial Sequence: Synthetic oligonucleotide
uccaagccuuauaauuuca

SEQ ID NO: 819698 - RNA, 19 nt, Artificial Sequence
  Description of Artificial Sequence: Synthetic oligonucleotide
ucaccgucaguccuaucug

SEQ ID NO: 819699 - RNA, 19 nt, Artificial Sequence
  Description of Artificial Sequence: Synthetic oligonucleotide
acuuugcuagacugcaugu

SEQ ID NO: 819700 - RNA, 19 nt, Artificial Sequence
  Description of Artificial Sequence: Synthetic oligonucleotide
aaggagcaccucccaaaag

SEQ ID NO: 819701 - RNA, 19 nt, Artificial Sequence
  Description of Artificial Sequence: Synthetic oligonucleotide
cuuauggaaaagguaugug

SEQ ID NO: 819702 - RNA, 19 nt, Artificial Sequence
  Description of Artificial Sequence: Synthetic oligonucleotide
uguaaucgacgugagccug

SEQ ID NO: 819703 - RNA, 19 nt, Artificial Sequence
  Description of Artificial Sequence: Synthetic oligonucleotide
auaauuucacccguggauu

SEQ ID NO: 819704 - RNA, 19 nt, Artificial Sequence
  Description of Artificial Sequence: Synthetic oligonucleotide
cucgagacucagaaggaug

SEQ ID NO: 819705 - RNA, 19 nt, Artificial Sequence
  Description of Artificial Sequence: Synthetic oligonucleotide
aacgagguauucuucccua

SEQ ID NO: 819706 - RNA, 19 nt, Artificial Sequence
  Description of Artificial Sequence: Synthetic oligonucleotide
ucauuacguuucucuuugg

SEQ ID NO: 819707 - RNA, 19 nt, Artificial Sequence
  Description of Artificial Sequence: Synthetic oligonucleotide
ugcuuguaaucgacgugag

SEQ ID NO: 819708 - RNA, 19 nt, Artificial Sequence
  Description of Artificial Sequence: Synthetic oligonucleotide
gcaccaugacuucuuaugg

SEQ ID NO: 819709 - RNA, 19 nt, Artificial Sequence
  Description of Artificial Sequence: Synthetic oligonucleotide
aaguugacuugaacgaggu

SEQ ID NO: 819710 - RNA, 19 nt, Artificial Sequence
  Description of Artificial Sequence: Synthetic oligonucleotide
caugacuucuuauggaaaa

SEQ ID NO: 819711 - RNA, 19 nt, Artificial Sequence
  Description of Artificial Sequence: Synthetic oligonucleotide
uauuuucgggcacgaacaa

SEQ ID NO: 819712 - RNA, 19 nt, Artificial Sequence
  Description of Artificial Sequence: Synthetic oligonucleotide
ccuuauguaaugucugagc

SEQ ID NO: 819713 - RNA, 19 nt, Artificial Sequence
  Description of Artificial Sequence: Synthetic oligonucleotide
cacuuaucccucgaagucc

SEQ ID NO: 819714 - RNA, 19 nt, Artificial Sequence
  Description of Artificial Sequence: Synthetic oligonucleotide
ucggagcuagacauguuuc

SEQ ID NO: 819715 - RNA, 19 nt, Artificial Sequence
  Description of Artificial Sequence: Synthetic oligonucleotide
uucgggcacgaacaauuug

SEQ ID NO: 819716 - RNA, 19 nt, Artificial Sequence
  Description of Artificial Sequence: Synthetic oligonucleotide
ugcggugucuccaagccuu

SEQ ID NO: 819717 - RNA, 19 nt, Artificial Sequence
  Description of Artificial Sequence: Synthetic oligonucleotide
uugcaaucucuuguuaugu

SEQ ID NO: 819718 - RNA, 19 nt, Artificial Sequence
  Description of Artificial Sequence: Synthetic oligonucleotide
caucuuuagauaacaugga

SEQ ID NO: 819719 - RNA, 19 nt, Artificial Sequence
  Description of Artificial Sequence: Synthetic oligonucleotide
  modified_base (6)..(6): a, c, u, g, unknown or other
aggaunuaagggaauggca

SEQ ID NO: 819720 - RNA, 19 nt, Artificial Sequence
  Description of Artificial Sequence: Synthetic oligonucleotide
aggugcucgagacucagaa

SEQ ID NO: 819721 - RNA, 19 nt, Artificial Sequence
  Description of Artificial Sequence: Synthetic oligonucleotide
agccugguccuuuagacuu

SEQ ID NO: 819722 - RNA, 19 nt, Artificial Sequence
  Description of Artificial Sequence: Synthetic oligonucleotide
guaguaaggaggucauguc

SEQ ID NO: 819723 - RNA, 19 nt, Artificial Sequence
  Description of Artificial Sequence: Synthetic oligonucleotide
uucucugauacugcaugca

SEQ ID NO: 819724 - RNA, 19 nt, Artificial Sequence
  Description of Artificial Sequence: Synthetic oligonucleotide
uaugugcggugucuccaag

SEQ ID NO: 819725 - RNA, 19 nt, Artificial Sequence
  Description of Artificial Sequence: Synthetic oligonucleotide
ugagucggagcuagacaug

SEQ ID NO: 819726 - RNA, 19 nt, Artificial Sequence
  Description of Artificial Sequence: Synthetic oligonucleotide
ucgucaaccuuugucuaug

SEQ ID NO: 819727 - RNA, 19 nt, Artificial Sequence
  Description of Artificial Sequence: Synthetic oligonucleotide
uguuagccacuuccuggcc

SEQ ID NO: 819728 - RNA, 19 nt, Artificial Sequence
  Description of Artificial Sequence: Synthetic oligonucleotide
uggcucaccuaauuuccug

SEQ ID NO: 819729 - RNA, 19 nt, Artificial Sequence
  Description of Artificial Sequence: Synthetic oligonucleotide
  modified_base (8)..(8): a, c, u, g, unknown or other
ggaggaunuaagggaaugg

SEQ ID NO: 819730 - RNA, 19 nt, Artificial Sequence
  Description of Artificial Sequence: Synthetic oligonucleotide
ggcucaccuaauuuccugg

SEQ ID NO: 819731 - RNA, 19 nt, Artificial Sequence
  Description of Artificial Sequence: Synthetic oligonucleotide
uuucgucaaccuuugucua

SEQ ID NO: 819732 - RNA, 19 nt, Artificial Sequence
  Description of Artificial Sequence: Synthetic oligonucleotide
gaauucgguccuugaaguc

SEQ ID NO: 819733 - RNA, 19 nt, Artificial Sequence
  Description of Artificial Sequence: Synthetic oligonucleotide
uuccguucuuagauggaaa

SEQ ID NO: 819734 - RNA, 19 nt, Artificial Sequence
  Description of Artificial Sequence: Synthetic oligonucleotide
gguauucuucccuauggga

SEQ ID NO: 819735 - RNA, 19 nt, Artificial Sequence
  Description of Artificial Sequence: Synthetic oligonucleotide
cagccguagcuuugaaacg

SEQ ID NO: 819736 - RNA, 19 nt, Artificial Sequence
  Description of Artificial Sequence: Synthetic oligonucleotide
cauggaauuuugagcacca

SEQ ID NO: 819737 - RNA, 19 nt, Artificial Sequence
  Description of Artificial Sequence: Synthetic oligonucleotide
caguccuaucugcugcucg

SEQ ID NO: 819738 - RNA, 19 nt, Artificial Sequence
  Description of Artificial Sequence: Synthetic oligonucleotide
uuccugacgcuccugugau

SEQ ID NO: 819739 - RNA, 19 nt, Artificial Sequence
  Description of Artificial Sequence: Synthetic oligonucleotide
ggggcagaaggcuacauuc

SEQ ID NO: 819740 - RNA, 19 nt, Artificial Sequence
  Description of Artificial Sequence: Synthetic oligonucleotide
uuggcucaccuaauuuccu

SEQ ID NO: 819741 - RNA, 19 nt, Artificial Sequence
  Description of Artificial Sequence: Synthetic oligonucleotide
uggggcuuugagucggagc

SEQ ID NO: 819742 - RNA, 19 nt, Artificial Sequence
  Description of Artificial Sequence: Synthetic oligonucleotide
aagcaucgucgucauucug

SEQ ID NO: 819743 - RNA, 19 nt, Artificial Sequence
  Description of Artificial Sequence: Synthetic oligonucleotide
ucuuuaguucccguucaaa

SEQ ID NO: 819744 - RNA, 19 nt, Artificial Sequence
  Description of Artificial Sequence: Synthetic oligonucleotide
guaaucgacgugagccugg

SEQ ID NO: 819745 - RNA, 19 nt, Artificial Sequence
  Description of Artificial Sequence: Synthetic oligonucleotide
ugcucgacuucagggaacc

SEQ ID NO: 819746 - RNA, 19 nt, Artificial Sequence
  Description of Artificial Sequence: Synthetic oligonucleotide
  modified_base (2)..(2): a, c, u, g, unknown or other
unuaagggaauggcagcuc

SEQ ID NO: 819747 - RNA, 19 nt, Artificial Sequence
  Description of Artificial Sequence: Synthetic oligonucleotide
uucuuuaguucccguucaa

SEQ ID NO: 819748 - RNA, 19 nt, Artificial Sequence
  Description of Artificial Sequence: Synthetic oligonucleotide
uuuuggacuuggagcugca

SEQ ID NO: 819749 - RNA, 19 nt, Artificial Sequence
  Description of Artificial Sequence: Synthetic oligonucleotide
aguccaauguucucuugua

SEQ ID NO: 819750 - RNA, 19 nt, Artificial Sequence
  Description of Artificial Sequence: Synthetic oligonucleotide
aaucgacgugagccugguc

SEQ ID NO: 819751 - RNA, 19 nt, Artificial Sequence
  Description of Artificial Sequence: Synthetic oligonucleotide
cuaguuccggaagaaagca

SEQ ID NO: 819752 - RNA, 19 nt, Artificial Sequence
  Description of Artificial Sequence: Synthetic oligonucleotide
aucccucgaaguccaaugu

SEQ ID NO: 819753 - RNA, 19 nt, Artificial Sequence
  Description of Artificial Sequence: Synthetic oligonucleotide
uucgucaaccuuugucuau

SEQ ID NO: 819754 - RNA, 19 nt, Artificial Sequence
  Description of Artificial Sequence: Synthetic oligonucleotide
cucgacuucagggaaccac

SEQ ID NO: 819755 - RNA, 19 nt, Artificial Sequence
  Description of Artificial Sequence: Synthetic oligonucleotide
accgugcaccucuucaucu

SEQ ID NO: 819756 - RNA, 19 nt, Artificial Sequence
  Description of Artificial Sequence: Synthetic oligonucleotide
ggaaguugacuugaacgag

SEQ ID NO: 819757 - RNA, 19 nt, Artificial Sequence
  Description of Artificial Sequence: Synthetic oligonucleotide
ucgacgugagccugguccu

SEQ ID NO: 819758 - RNA, 19 nt, Artificial Sequence
  Description of Artificial Sequence: Synthetic oligonucleotide
ucuuuggcguaguuucuua

SEQ ID NO: 819759 - RNA, 19 nt, Artificial Sequence
  Description of Artificial Sequence: Synthetic oligonucleotide
ggugaagcuaaaacuuugc

SEQ ID NO: 819760 - RNA, 19 nt, Artificial Sequence
  Description of Artificial Sequence: Synthetic oligonucleotide
aggccgauacucugaggag

SEQ ID NO: 819761 - RNA, 19 nt, Artificial Sequence
  Description of Artificial Sequence: Synthetic oligonucleotide
uuuuaacauccagucuagu

SEQ ID NO: 819762 - RNA, 19 nt, Artificial Sequence
  Description of Artificial Sequence: Synthetic oligonucleotide
ucgucauucuggguuauua

SEQ ID NO: 819763 - RNA, 19 nt, Artificial Sequence
  Description of Artificial Sequence: Synthetic oligonucleotide
caccgucaguccuaucugc

SEQ ID NO: 819764 - RNA, 19 nt, Artificial Sequence
  Description of Artificial Sequence: Synthetic oligonucleotide
cacccguggauucugcuuc

SEQ ID NO: 819765 - RNA, 19 nt, Artificial Sequence
  Description of Artificial Sequence: Synthetic oligonucleotide
acuuguaaccauacucaga

SEQ ID NO: 819766 - RNA, 19 nt, Artificial Sequence
  Description of Artificial Sequence: Synthetic oligonucleotide
auaguauuuucgggcacga

SEQ ID NO: 819767 - RNA, 19 nt, Artificial Sequence
  Description of Artificial Sequence: Synthetic oligonucleotide
auuccguucuuagauggaa

SEQ ID NO: 819768 - RNA, 19 nt, Artificial Sequence
  Description of Artificial Sequence: Synthetic oligonucleotide
acuuaucccucgaagucca

SEQ ID NO: 819769 - RNA, 19 nt, Artificial Sequence
  Description of Artificial Sequence: Synthetic oligonucleotide
uuucgggcacgaacaauuu

SEQ ID NO: 819770 - RNA, 19 nt, Artificial Sequence
  Description of Artificial Sequence: Synthetic oligonucleotide
auuauguacugcaguugcu

SEQ ID NO: 819771 - RNA, 19 nt, Artificial Sequence
  Description of Artificial Sequence: Synthetic oligonucleotide
gaaaagguaugugcggugu

SEQ ID NO: 819772 - RNA, 19 nt, Artificial Sequence
  Description of Artificial Sequence: Synthetic oligonucleotide
cuaauuuccuggcacuugu

SEQ ID NO: 819773 - RNA, 19 nt, Artificial Sequence
  Description of Artificial Sequence: Synthetic oligonucleotide
uugcucgacuucagggaac

SEQ ID NO: 819774 - RNA, 19 nt, Artificial Sequence
  Description of Artificial Sequence: Synthetic oligonucleotide
agauaacauggaaguugac

SEQ ID NO: 819775 - RNA, 19 nt, Artificial Sequence
  Description of Artificial Sequence: Synthetic oligonucleotide
uggcacuuguaaccauacu

SEQ ID NO: 819776 - RNA, 19 nt, Artificial Sequence
  Description of Artificial Sequence: Synthetic oligonucleotide
ugcagccguagcuuugaaa

SEQ ID NO: 819777 - RNA, 19 nt, Artificial Sequence
  Description of Artificial Sequence: Synthetic oligonucleotide
ugauuucgucaaccuuugu

SEQ ID NO: 819778 - RNA, 19 nt, Artificial Sequence
  Description of Artificial Sequence: Synthetic oligonucleotide
uuucuucccggguucucau

SEQ ID NO: 819779 - RNA, 19 nt, Artificial Sequence
  Description of Artificial Sequence: Synthetic oligonucleotide
ugccgacgccuccucauca

SEQ ID NO: 819780 - RNA, 19 nt, Artificial Sequence
  Description of Artificial Sequence: Synthetic oligonucleotide
aacauccagucuaguucag

SEQ ID NO: 819781 - RNA, 19 nt, Artificial Sequence
  Description of Artificial Sequence: Synthetic oligonucleotide
guaaugucugagccugaga

SEQ ID NO: 819782 - RNA, 19 nt, Artificial Sequence
  Description of Artificial Sequence: Synthetic oligonucleotide
ucugagccugagauuucuc

SEQ ID NO: 819783 - RNA, 19 nt, Artificial Sequence
  Description of Artificial Sequence: Synthetic oligonucleotide
ggccgauacucugaggagg

SEQ ID NO: 819784 - RNA, 19 nt, Artificial Sequence
  Description of Artificial Sequence: Synthetic oligonucleotide
ucugccgacgccuccucau

SEQ ID NO: 819785 - RNA, 19 nt, Artificial Sequence
  Description of Artificial Sequence: Synthetic oligonucleotide
uucacccguggauucugcu

SEQ ID NO: 819786 - RNA, 19 nt, Artificial Sequence
  Description of Artificial Sequence: Synthetic oligonucleotide
ucccggguucucauccuca

SEQ ID NO: 819787 - RNA, 19 nt, Artificial Sequence
  Description of Artificial Sequence: Synthetic oligonucleotide
acccguggauucugcuucg

SEQ ID NO: 819788 - RNA, 19 nt, Artificial Sequence
  Description of Artificial Sequence: Synthetic oligonucleotide
gaacgagguauucuucccu

SEQ ID NO: 819789 - RNA, 19 nt, Artificial Sequence
  Description of Artificial Sequence: Synthetic oligonucleotide
gaaacgcucugcuucuagu

SEQ ID NO: 819790 - RNA, 19 nt, Artificial Sequence
  Description of Artificial Sequence: Synthetic oligonucleotide
gguaguaaggaggucaugu

SEQ ID NO: 819791 - RNA, 19 nt, Artificial Sequence
  Description of Artificial Sequence: Synthetic oligonucleotide
ccuuauaauuucacccgug

SEQ ID NO: 819792 - RNA, 19 nt, Artificial Sequence
  Description of Artificial Sequence: Synthetic oligonucleotide
  modified_base (9)..(9): a, c, u, g, unknown or other
gggaggaunuaagggaaug

SEQ ID NO: 819793 - RNA, 19 nt, Artificial Sequence
  Description of Artificial Sequence: Synthetic oligonucleotide
ucccucgaaguccaauguu

SEQ ID NO: 819794 - RNA, 19 nt, Artificial Sequence
  Description of Artificial Sequence: Synthetic oligonucleotide
cuugcucgacuucagggaa

SEQ ID NO: 819795 - RNA, 19 nt, Artificial Sequence
  Description of Artificial Sequence: Synthetic oligonucleotide
ucgucgucauucuggguua

SEQ ID NO: 819796 - RNA, 19 nt, Artificial Sequence
  Description of Artificial Sequence: Synthetic oligonucleotide
gcacgaacaauuugcugac

SEQ ID NO: 819797 - RNA, 19 nt, Artificial Sequence
  Description of Artificial Sequence: Synthetic oligonucleotide
uuaucccucgaaguccaau

SEQ ID NO: 819798 - RNA, 19 nt, Artificial Sequence
  Description of Artificial Sequence: Synthetic oligonucleotide
caaggccgauacucugagg

SEQ ID NO: 819799 - RNA, 19 nt, Artificial Sequence
  Description of Artificial Sequence: Synthetic oligonucleotide
ucacccguggauucugcuu

SEQ ID NO: 819800 - RNA, 19 nt, Artificial Sequence
  Description of Artificial Sequence: Synthetic oligonucleotide
ggugacuuucuggacauga

SEQ ID NO: 819801 - RNA, 19 nt, Artificial Sequence
  Description of Artificial Sequence: Synthetic oligonucleotide
cuuagauggaaaacucaau

SEQ ID NO: 819802 - RNA, 19 nt, Artificial Sequence
  Description of Artificial Sequence: Synthetic oligonucleotide
cuaguucagagagccgcug

SEQ ID NO: 819803 - RNA, 19 nt, Artificial Sequence
  Description of Artificial Sequence: Synthetic oligonucleotide
uaaucgacgugagccuggu

SEQ ID NO: 819804 - RNA, 19 nt, Artificial Sequence
  Description of Artificial Sequence: Synthetic oligonucleotide
ggugcucgagacucagaag

SEQ ID NO: 819805 - RNA, 19 nt, Artificial Sequence
  Description of Artificial Sequence: Synthetic oligonucleotide
ccaagccuuauaauuucac

SEQ ID NO: 819806 - RNA, 19 nt, Artificial Sequence
  Description of Artificial Sequence: Synthetic oligonucleotide
uuccggaagaaagcaucgu

SEQ ID NO: 819807 - RNA, 19 nt, Artificial Sequence
  Description of Artificial Sequence: Synthetic oligonucleotide
cugugcuauuugcugcuuc

SEQ ID NO: 819808 - RNA, 19 nt, Artificial Sequence
  Description of Artificial Sequence: Synthetic oligonucleotide
gguccgcacuccaugaugc

SEQ ID NO: 819809 - RNA, 19 nt, Artificial Sequence
  Description of Artificial Sequence: Synthetic oligonucleotide
ccuaucugcugcucgguug

SEQ ID NO: 819810 - RNA, 19 nt, Artificial Sequence
  Description of Artificial Sequence: Synthetic oligonucleotide
cuuuaggaagccuccuugu

SEQ ID NO: 819811 - RNA, 19 nt, Artificial Sequence
  Description of Artificial Sequence: Synthetic oligonucleotide
cuuuggcguaguuucuuaa

SEQ ID NO: 819812 - RNA, 19 nt, Artificial Sequence
  Description of Artificial Sequence: Synthetic oligonucleotide
ggcguaguuucuuaagucu

SEQ ID NO: 819813 - RNA, 19 nt, Artificial Sequence
  Description of Artificial Sequence: Synthetic oligonucleotide
cacgaacaauuugcugacg

SEQ ID NO: 819814 - RNA, 19 nt, Artificial Sequence
  Description of Artificial Sequence: Synthetic oligonucleotide
gcucaccuaauuuccuggc

SEQ ID NO: 819815 - RNA, 19 nt, Artificial Sequence
  Description of Artificial Sequence: Synthetic oligonucleotide
acgagguauucuucccuau

SEQ ID NO: 819816 - RNA, 19 nt, Artificial Sequence
  Description of Artificial Sequence: Synthetic oligonucleotide
cagugaaugggaccuguaa

SEQ ID NO: 819817 - RNA, 19 nt, Artificial Sequence
  Description of Artificial Sequence: Synthetic oligonucleotide
uucgguccuugaagucuug

SEQ ID NO: 819818 - RNA, 19 nt, Artificial Sequence
  Description of Artificial Sequence: Synthetic oligonucleotide
cucugcuuguaaucgacgu

SEQ ID NO: 819819 - RNA, 19 nt, Artificial Sequence
  Description of Artificial Sequence: Synthetic oligonucleotide
auuuucgggcacgaacaau

SEQ ID NO: 819820 - RNA, 19 nt, Artificial Sequence
  Description of Artificial Sequence: Synthetic oligonucleotide
uugguccgcacuccaugau

SEQ ID NO: 819821 - RNA, 19 nt, Artificial Sequence
  Description of Artificial Sequence: Synthetic oligonucleotide
uuagugccuggugaagcua

SEQ ID NO: 819822 - RNA, 19 nt, Artificial Sequence
  Description of Artificial Sequence: Synthetic oligonucleotide
aggcuacauucauucacuu

SEQ ID NO: 819823 - RNA, 19 nt, Artificial Sequence
  Description of Artificial Sequence: Synthetic oligonucleotide
cuucauuacguuucucuuu

SEQ ID NO: 819824 - RNA, 19 nt, Artificial Sequence
  Description of Artificial Sequence: Synthetic oligonucleotide
agggaauggcagcucugau

SEQ ID NO: 819825 - RNA, 19 nt, Artificial Sequence
  Description of Artificial Sequence: Synthetic oligonucleotide
ccuguaaggugacuuucug

SEQ ID NO: 819826 - RNA, 19 nt, Artificial Sequence
  Description of Artificial Sequence: Synthetic oligonucleotide
gcuaaaacuuugcuagacu

SEQ ID NO: 819827 - RNA, 19 nt, Artificial Sequence
  Description of Artificial Sequence: Synthetic oligonucleotide
aguugacuugaacgaggua

SEQ ID NO: 819828 - RNA, 19 nt, Artificial Sequence
  Description of Artificial Sequence: Synthetic oligonucleotide
ugagggcaaggccgauacu

SEQ ID NO: 819829 - RNA, 19 nt, Artificial Sequence
  Description of Artificial Sequence: Synthetic oligonucleotide
ucccuuuaggaagccuccu

SEQ ID NO: 819830 - RNA, 19 nt, Artificial Sequence
  Description of Artificial Sequence: Synthetic oligonucleotide
gagucggagcuagacaugu

SEQ ID NO: 819831 - RNA, 19 nt, Artificial Sequence
  Description of Artificial Sequence: Synthetic oligonucleotide
guaugugcggugucuccaa

SEQ ID NO: 819832 - RNA, 19 nt, Artificial Sequence
  Description of Artificial Sequence: Synthetic oligonucleotide
  modified_base (10)..(10): a, c, u, g, unknown or other
agggaggaunuaagggaau

SEQ ID NO: 819833 - RNA, 19 nt, Artificial Sequence
  Description of Artificial Sequence: Synthetic oligonucleotide
caccgugcaccucuucauc

SEQ ID NO: 819834 - RNA, 19 nt, Artificial Sequence
  Description of Artificial Sequence: Synthetic oligonucleotide
gucaaccuuugucuaugaa

SEQ ID NO: 819835 - RNA, 19 nt, Artificial Sequence
  Description of Artificial Sequence: Synthetic oligonucleotide
ggaaccaccuuuuggacuu

SEQ ID NO: 819836 - RNA, 19 nt, Artificial Sequence
  Description of Artificial Sequence: Synthetic oligonucleotide
uaguauuuucgggcacgaa

SEQ ID NO: 819837 - RNA, 19 nt, Artificial Sequence
  Description of Artificial Sequence: Synthetic oligonucleotide
ccagucuaguucagagagc

SEQ ID NO: 819838 - RNA, 19 nt, Artificial Sequence
  Description of Artificial Sequence: Synthetic oligonucleotide
accgucaguccuaucugcu

SEQ ID NO: 819839 - RNA, 19 nt, Artificial Sequence
  Description of Artificial Sequence: Synthetic oligonucleotide
gggcacgaacaauuugcug

SEQ ID NO: 819840 - RNA, 19 nt, Artificial Sequence
  Description of Artificial Sequence: Synthetic oligonucleotide
cggagcuagacauguuucc

SEQ ID NO: 819841 - RNA, 19 nt, Artificial Sequence
  Description of Artificial Sequence: Synthetic oligonucleotide
aggguaguaaggaggucau

SEQ ID NO: 819842 - RNA, 19 nt, Artificial Sequence
  Description of Artificial Sequence: Synthetic oligonucleotide
gucggagcuagacauguuu

SEQ ID NO: 819843 - RNA, 19 nt, Artificial Sequence
  Description of Artificial Sequence: Synthetic oligonucleotide
cucugauacugcaugcaau

SEQ ID NO: 819844 - RNA, 19 nt, Artificial Sequence
  Description of Artificial Sequence: Synthetic oligonucleotide
gcguaguuucuuaagucuc

SEQ ID NO: 819845 - RNA, 19 nt, Artificial Sequence
  Description of Artificial Sequence: Synthetic oligonucleotide
ccuaauuuccuggcacuug

SEQ ID NO: 819846 - RNA, 19 nt, Artificial Sequence
  Description of Artificial Sequence: Synthetic oligonucleotide
uucuucccuaugggacaag

SEQ ID NO: 819847 - RNA, 19 nt, Artificial Sequence
  Description of Artificial Sequence: Synthetic oligonucleotide
guucucuuguaacuuuauu

SEQ ID NO: 819848 - RNA, 19 nt, Artificial Sequence
  Description of Artificial Sequence: Synthetic oligonucleotide
caccuaauuuccuggcacu

SEQ ID NO: 819849 - RNA, 19 nt, Artificial Sequence
  Description of Artificial Sequence: Synthetic oligonucleotide
ccuuuaggaaugaccucuc

SEQ ID NO: 819850 - RNA, 19 nt, Artificial Sequence
  Description of Artificial Sequence: Synthetic oligonucleotide
cugacgcuccugugauaug

SEQ ID NO: 819851 - RNA, 19 nt, Artificial Sequence
  Description of Artificial Sequence: Synthetic oligonucleotide
uuuccaccgugcaccucuu

SEQ ID NO: 819852 - RNA, 19 nt, Artificial Sequence
  Description of Artificial Sequence: Synthetic oligonucleotide
caaggguaguaaggagguc

SEQ ID NO: 819853 - RNA, 19 nt, Artificial Sequence
  Description of Artificial Sequence: Synthetic oligonucleotide
ccauacucagagaaggggu

SEQ ID NO: 819854 - RNA, 19 nt, Artificial Sequence
  Description of Artificial Sequence: Synthetic oligonucleotide
cuucccuaugggacaaggu

SEQ ID NO: 819855 - RNA, 19 nt, Artificial Sequence
  Description of Artificial Sequence: Synthetic oligonucleotide
ccguucuuagauggaaaac

SEQ ID NO: 819856 - RNA, 19 nt, Artificial Sequence
  Description of Artificial Sequence: Synthetic oligonucleotide
gccuuauaauuucacccgu

SEQ ID NO: 819857 - RNA, 19 nt, Artificial Sequence
  Description of Artificial Sequence: Synthetic oligonucleotide
cugccgacgccuccucauc

SEQ ID NO: 819858 - RNA, 19 nt, Artificial Sequence
  Description of Artificial Sequence: Synthetic oligonucleotide
auguaaugucugagccuga

SEQ ID NO: 819859 - RNA, 19 nt, Artificial Sequence
  Description of Artificial Sequence: Synthetic oligonucleotide
ccgucaguccuaucugcug

SEQ ID NO: 819860 - RNA, 19 nt, Artificial Sequence
  Description of Artificial Sequence: Synthetic oligonucleotide
ggcaaggccgauacucuga

SEQ ID NO: 819861 - RNA, 19 nt, Artificial Sequence
  Description of Artificial Sequence: Synthetic oligonucleotide
ggagcuagacauguuuccu

SEQ ID NO: 819862 - RNA, 19 nt, Artificial Sequence
  Description of Artificial Sequence: Synthetic oligonucleotide
uccugacgcuccugugaua

SEQ ID NO: 819863 - RNA, 19 nt, Artificial Sequence
  Description of Artificial Sequence: Synthetic oligonucleotide
cuucgucuucaucccaggu

SEQ ID NO: 819864 - RNA, 19 nt, Artificial Sequence
  Description of Artificial Sequence: Synthetic oligonucleotide
gcuucuaguuccggaagaa

SEQ ID NO: 819865 - RNA, 19 nt, Artificial Sequence
  Description of Artificial Sequence: Synthetic oligonucleotide
acgugagccugguccuuua

SEQ ID NO: 819866 - RNA, 19 nt, Artificial Sequence
  Description of Artificial Sequence: Synthetic oligonucleotide
gggaauggcagcucugauu

SEQ ID NO: 819867 - RNA, 19 nt, Artificial Sequence
  Description of Artificial Sequence: Synthetic oligonucleotide
cuuaucccucgaaguccaa

SEQ ID NO: 819868 - RNA, 19 nt, Artificial Sequence
  Description of Artificial Sequence: Synthetic oligonucleotide
ggguaguaaggaggucaug

SEQ ID NO: 819869 - RNA, 19 nt, Artificial Sequence
  Description of Artificial Sequence: Synthetic oligonucleotide
ucucaccgucaguccuauc

SEQ ID NO: 819870 - RNA, 19 nt, Artificial Sequence
  Description of Artificial Sequence: Synthetic oligonucleotide
ccguagcuuugaaacgcuc

SEQ ID NO: 819871 - RNA, 19 nt, Artificial Sequence
  Description of Artificial Sequence: Synthetic oligonucleotide
ccgugcaccucuucaucuc

SEQ ID NO: 819872 - RNA, 19 nt, Artificial Sequence
  Description of Artificial Sequence: Synthetic oligonucleotide
gccgacgccuccucaucac

SEQ ID NO: 819873 - RNA, 19 nt, Artificial Sequence
  Description of Artificial Sequence: Synthetic oligonucleotide
ggucagagacauagagaaa

SEQ ID NO: 819874 - RNA, 19 nt, Artificial Sequence
  Description of Artificial Sequence: Synthetic oligonucleotide
cguagcuuugaaacgcucu

SEQ ID NO: 819875 - RNA, 19 nt, Artificial Sequence
  Description of Artificial Sequence: Synthetic oligonucleotide
ggaccuguaaggugacuuu

SEQ ID NO: 819876 - RNA, 19 nt, Artificial Sequence
  Description of Artificial Sequence: Synthetic oligonucleotide
cgauacucugaggaggcca

SEQ ID NO: 819877 - RNA, 19 nt, Artificial Sequence
  Description of Artificial Sequence: Synthetic oligonucleotide
ccguucaaaugcuucaguu

SEQ ID NO: 819878 - RNA, 19 nt, Artificial Sequence
  Description of Artificial Sequence: Synthetic oligonucleotide
agucggagcuagacauguu

SEQ ID NO: 819879 - RNA, 19 nt, Artificial Sequence
  Description of Artificial Sequence: Synthetic oligonucleotide
ccgauacucugaggaggcc

SEQ ID NO: 819880 - RNA, 19 nt, Artificial Sequence
  Description of Artificial Sequence: Synthetic oligonucleotide
cgugagccugguccuuuag

SEQ ID NO: 819881 - RNA, 19 nt, Artificial Sequence
  Description of Artificial Sequence: Synthetic oligonucleotide
ccugacgcuccugugauau

SEQ ID NO: 819882 - RNA, 19 nt, Artificial Sequence
  Description of Artificial Sequence: Synthetic oligonucleotide
ccgcugauugaguuucucu

SEQ ID NO: 819883 - RNA, 19 nt, Artificial Sequence
  Description of Artificial Sequence: Synthetic oligonucleotide
ccggguucucauccucauc

SEQ ID NO: 819884 - RNA, 19 nt, Artificial Sequence
  Description of Artificial Sequence: Synthetic oligonucleotide
gugcugcguuuuguugcuc

SEQ ID NO: 819885 - RNA, 19 nt, Artificial Sequence
  Description of Artificial Sequence: Synthetic oligonucleotide
ccucuucaccuuauguaau

SEQ ID NO: 819886 - RNA, 19 nt, Artificial Sequence
  Description of Artificial Sequence: Synthetic oligonucleotide
  modified_base (17)..(17): a, c, u, g, unknown or other
ggaugguagggaggaunua

SEQ ID NO: 819887 - RNA, 19 nt, Artificial Sequence
  Description of Artificial Sequence: Synthetic oligonucleotide
cgucaaccuuugucuauga

SEQ ID NO: 819888 - RNA, 19 nt, Artificial Sequence
  Description of Artificial Sequence: Synthetic oligonucleotide
gucucaccgucaguccuau

SEQ ID NO: 819889 - RNA, 19 nt, Artificial Sequence
  Description of Artificial Sequence: Synthetic oligonucleotide
gcagaaggcuacauucauu

SEQ ID NO: 819890 - RNA, 19 nt, Artificial Sequence
  Description of Artificial Sequence: Synthetic oligonucleotide
gcucgagacucagaaggau

SEQ ID NO: 819891 - RNA, 19 nt, Artificial Sequence
  Description of Artificial Sequence: Synthetic oligonucleotide
gcuuugagucggagcuaga

SEQ ID NO: 819892 - RNA, 19 nt, Artificial Sequence
  Description of Artificial Sequence: Synthetic oligonucleotide
gccguagcuuugaaacgcu

SEQ ID NO: 819893 - RNA, 19 nt, Artificial Sequence
  Description of Artificial Sequence: Synthetic oligonucleotide
cgaaguccaauguucucuu

SEQ ID NO: 819894 - RNA, 19 nt, Artificial Sequence
  Description of Artificial Sequence: Synthetic oligonucleotide
gcucgacuucagggaacca

SEQ ID NO: 819895 - RNA, 19 nt, Artificial Sequence
  Description of Artificial Sequence: Synthetic oligonucleotide
gucgucauucuggguuauu

SEQ ID NO: 819896 - RNA, 19 nt, Artificial Sequence
  Description of Artificial Sequence: Synthetic oligonucleotide
cccggguucucauccucau

SEQ ID NO: 819897 - RNA, 19 nt, Artificial Sequence
  Description of Artificial Sequence: Synthetic oligonucleotide
ccgacgccuccucaucacu

SEQ ID NO: 819898 - RNA, 19 nt, Artificial Sequence
  Description of Artificial Sequence: Synthetic oligonucleotide
gcggugucuccaagccuua

SEQ ID NO: 819899 - RNA, 19 nt, Artificial Sequence
  Description of Artificial Sequence: Synthetic oligonucleotide
cgagacucagaaggauggu

SEQ ID NO: 819900 - RNA, 19 nt, Artificial Sequence
  Description of Artificial Sequence: Synthetic oligonucleotide
cgacgccuccucaucacuu

SEQ ID NO: 819901 - RNA, 19 nt, Artificial Sequence
  Description of Artificial Sequence: Synthetic oligonucleotide
cccguggauucugcuucgu

SEQ ID NO: 819902 - RNA, 19 nt, Artificial Sequence
  Description of Artificial Sequence: Synthetic oligonucleotide
uuuaugacggcaaugaaag

SEQ ID NO: 819903 - RNA, 19 nt, Artificial Sequence
  Description of Artificial Sequence: Synthetic oligonucleotide
aaugaauucacacgaacag

SEQ ID NO: 819904 - RNA, 19 nt, Artificial Sequence
  Description of Artificial Sequence: Synthetic oligonucleotide
auuacauucaccugcgugc

SEQ ID NO: 819905 - RNA, 19 nt, Artificial Sequence
  Description of Artificial Sequence: Synthetic oligonucleotide
auuaagggcagacauaucg

SEQ ID NO: 819906 - RNA, 19 nt, Artificial Sequence
  Description of Artificial Sequence: Synthetic oligonucleotide
aauucaacuggccaggauc

SEQ ID NO: 819907 - RNA, 19 nt, Artificial Sequence
  Description of Artificial Sequence: Synthetic oligonucleotide
aagaacuguaguuugacag

SEQ ID NO: 819908 - RNA, 19 nt, Artificial Sequence
  Description of Artificial Sequence: Synthetic oligonucleotide
uuguuuucaauacucaggg

SEQ ID NO: 819909 - RNA, 19 nt, Artificial Sequence
  Description of Artificial Sequence: Synthetic oligonucleotide
gaaagaacugaacugauug

SEQ ID NO: 819910 - RNA, 19 nt, Artificial Sequence
  Description of Artificial Sequence: Synthetic oligonucleotide
uacaaauugacucagccac

SEQ ID NO: 819911 - RNA, 19 nt, Artificial Sequence
  Description of Artificial Sequence: Synthetic oligonucleotide
uuugagacuaguaaggacu

SEQ ID NO: 819912 - RNA, 19 nt, Artificial Sequence
  Description of Artificial Sequence: Synthetic oligonucleotide
uauaauauuugcaaaaguu

SEQ ID NO: 819913 - RNA, 19 nt, Artificial Sequence
  Description of Artificial Sequence: Synthetic oligonucleotide
uccuuagucuguuugaugg

SEQ ID NO: 819914 - RNA, 19 nt, Artificial Sequence
  Description of Artificial Sequence: Synthetic oligonucleotide
aaagaaaggauuacccugc

SEQ ID NO: 819915 - RNA, 19 nt, Artificial Sequence
  Description of Artificial Sequence: Synthetic oligonucleotide
uuuaacauacucuucuuug

SEQ ID NO: 819916 - RNA, 19 nt, Artificial Sequence
  Description of Artificial Sequence: Synthetic oligonucleotide
uuuccuauguccaaagacc

SEQ ID NO: 819917 - RNA, 19 nt, Artificial Sequence
  Description of Artificial Sequence: Synthetic oligonucleotide
uguacuuugagacuaguaa

SEQ ID NO: 819918 - RNA, 19 nt, Artificial Sequence
  Description of Artificial Sequence: Synthetic oligonucleotide
aggagguacaaauugacuc

SEQ ID NO: 819919 - RNA, 19 nt, Artificial Sequence
  Description of Artificial Sequence: Synthetic oligonucleotide
uccuauuacauucaccugc

SEQ ID NO: 819920 - RNA, 19 nt, Artificial Sequence
  Description of Artificial Sequence: Synthetic oligonucleotide
gauguuuagacagagcucc

SEQ ID NO: 819921 - RNA, 19 nt, Artificial Sequence
  Description of Artificial Sequence: Synthetic oligonucleotide
uuuguauuaucaauuggug

SEQ ID NO: 819922 - RNA, 19 nt, Artificial Sequence
  Description of Artificial Sequence: Synthetic oligonucleotide
ugggaugauguuuagacag

SEQ ID NO: 819923 - RNA, 19 nt, Artificial Sequence
  Description of Artificial Sequence: Synthetic oligonucleotide
uuaacauacucuucuuugg

SEQ ID NO: 819924 - RNA, 19 nt, Artificial Sequence
  Description of Artificial Sequence: Synthetic oligonucleotide
uaucaauugguguagagaa

SEQ ID NO: 819925 - RNA, 19 nt, Artificial Sequence
  Description of Artificial Sequence: Synthetic oligonucleotide
agucauugcuagcugagcc

SEQ ID NO: 819926 - RNA, 19 nt, Artificial Sequence
  Description of Artificial Sequence: Synthetic oligonucleotide
auaucaucaaguacaaacc

SEQ ID NO: 819927 - RNA, 19 nt, Artificial Sequence
  Description of Artificial Sequence: Synthetic oligonucleotide
acugaaagugcagugaccc

SEQ ID NO: 819928 - RNA, 19 nt, Artificial Sequence
  Description of Artificial Sequence: Synthetic oligonucleotide
uccuuuuguacuuugagac

SEQ ID NO: 819929 - RNA, 19 nt, Artificial Sequence
  Description of Artificial Sequence: Synthetic oligonucleotide
auuaagauuguuuucaaua

SEQ ID NO: 819930 - RNA, 19 nt, Artificial Sequence
  Description of Artificial Sequence: Synthetic oligonucleotide
aauauuugcaaaaguuggg

SEQ ID NO: 819931 - RNA, 19 nt, Artificial Sequence
  Description of Artificial Sequence: Synthetic oligonucleotide
uucaagauaacucgguugu

SEQ ID NO: 819932 - RNA, 19 nt, Artificial Sequence
  Description of Artificial Sequence: Synthetic oligonucleotide
gauagucuauaauauuugc

SEQ ID NO: 819933 - RNA, 19 nt, Artificial Sequence
  Description of Artificial Sequence: Synthetic oligonucleotide
uauuacauucaccugcgug

SEQ ID NO: 819934 - RNA, 19 nt, Artificial Sequence
  Description of Artificial Sequence: Synthetic oligonucleotide
gauuguuuucaauacucag

SEQ ID NO: 819935 - RNA, 19 nt, Artificial Sequence
  Description of Artificial Sequence: Synthetic oligonucleotide
uguaagaaggguaggauau

SEQ ID NO: 819936 - RNA, 19 nt, Artificial Sequence
  Description of Artificial Sequence: Synthetic oligonucleotide
uuaaagaaaggauuacccu

SEQ ID NO: 819937 - RNA, 19 nt, Artificial Sequence
  Description of Artificial Sequence: Synthetic oligonucleotide
ugugaguaaaaguacauuu

SEQ ID NO: 819938 - RNA, 19 nt, Artificial Sequence
  Description of Artificial Sequence: Synthetic oligonucleotide
aagaacugaacugauugag

SEQ ID NO: 819939 - RNA, 19 nt, Artificial Sequence
  Description of Artificial Sequence: Synthetic oligonucleotide
guugggaugauguuuagac

SEQ ID NO: 819940 - RNA, 19 nt, Artificial Sequence
  Description of Artificial Sequence: Synthetic oligonucleotide
acuguaguuugacagagug

SEQ ID NO: 819941 - RNA, 19 nt, Artificial Sequence
  Description of Artificial Sequence: Synthetic oligonucleotide
uaaaauucccaugaggacu

SEQ ID NO: 819942 - RNA, 19 nt, Artificial Sequence
  Description of Artificial Sequence: Synthetic oligonucleotide
aagauuuacaagccaaaau

SEQ ID NO: 819943 - RNA, 19 nt, Artificial Sequence
  Description of Artificial Sequence: Synthetic oligonucleotide
uaucaucaaguacaaacca

SEQ ID NO: 819944 - RNA, 19 nt, Artificial Sequence
  Description of Artificial Sequence: Synthetic oligonucleotide
cagacuaaugaauucacac

SEQ ID NO: 819945 - RNA, 19 nt, Artificial Sequence
  Description of Artificial Sequence: Synthetic oligonucleotide
uugagauuaagauuguuuu

SEQ ID NO: 819946 - RNA, 19 nt, Artificial Sequence
  Description of Artificial Sequence: Synthetic oligonucleotide
uuaaagaccuugucaaucu

SEQ ID NO: 819947 - RNA, 19 nt, Artificial Sequence
  Description of Artificial Sequence: Synthetic oligonucleotide
ucaauugguguagagaaca

SEQ ID NO: 819948 - RNA, 19 nt, Artificial Sequence
  Description of Artificial Sequence: Synthetic oligonucleotide
agacauaucgguuggucuc

SEQ ID NO: 819949 - RNA, 19 nt, Artificial Sequence
  Description of Artificial Sequence: Synthetic oligonucleotide
uggauagucuauaauauuu

SEQ ID NO: 819950 - RNA, 19 nt, Artificial Sequence
  Description of Artificial Sequence: Synthetic oligonucleotide
guacuuugagacuaguaag

SEQ ID NO: 819951 - RNA, 19 nt, Artificial Sequence
  Description of Artificial Sequence: Synthetic oligonucleotide
uguaaaccugcuuaccgag

SEQ ID NO: 819952 - RNA, 19 nt, Artificial Sequence
  Description of Artificial Sequence: Synthetic oligonucleotide
aaagaacugaacugauuga

SEQ ID NO: 819953 - RNA, 19 nt, Artificial Sequence
  Description of Artificial Sequence: Synthetic oligonucleotide
ugcacagcgauguaaaccu

SEQ ID NO: 819954 - RNA, 19 nt, Artificial Sequence
  Description of Artificial Sequence: Synthetic oligonucleotide
ugggagugcuaacagaaag

SEQ ID NO: 819955 - RNA, 19 nt, Artificial Sequence
  Description of Artificial Sequence: Synthetic oligonucleotide
auucaagauaacucgguug

SEQ ID NO: 819956 - RNA, 19 nt, Artificial Sequence
  Description of Artificial Sequence: Synthetic oligonucleotide
caaagagauuauuaagggc

SEQ ID NO: 819957 - RNA, 19 nt, Artificial Sequence
  Description of Artificial Sequence: Synthetic oligonucleotide
aggaaaauuaacaaauucu

SEQ ID NO: 819958 - RNA, 19 nt, Artificial Sequence
  Description of Artificial Sequence: Synthetic oligonucleotide
uuaccgaggacugaaagug

SEQ ID NO: 819959 - RNA, 19 nt, Artificial Sequence
  Description of Artificial Sequence: Synthetic oligonucleotide
uuauuaagggcagacauau

SEQ ID NO: 819960 - RNA, 19 nt, Artificial Sequence
  Description of Artificial Sequence: Synthetic oligonucleotide
uaaauaccuaaaauuccca

SEQ ID NO: 819961 - RNA, 19 nt, Artificial Sequence
  Description of Artificial Sequence: Synthetic oligonucleotide
uuguauuaucaauuggugu

SEQ ID NO: 819962 - RNA, 19 nt, Artificial Sequence
  Description of Artificial Sequence: Synthetic oligonucleotide
uuaccaucaacuuaagguu

SEQ ID NO: 819963 - RNA, 19 nt, Artificial Sequence
  Description of Artificial Sequence: Synthetic oligonucleotide
aauugacucagccacugau

SEQ ID NO: 819964 - RNA, 19 nt, Artificial Sequence
  Description of Artificial Sequence: Synthetic oligonucleotide
uaacuuuggguuucugagg

SEQ ID NO: 819965 - RNA, 19 nt, Artificial Sequence
  Description of Artificial Sequence: Synthetic oligonucleotide
ggaaaauuaacaaauucug

SEQ ID NO: 819966 - RNA, 19 nt, Artificial Sequence
  Description of Artificial Sequence: Synthetic oligonucleotide
augaauucacacgaacagc

SEQ ID NO: 819967 - RNA, 19 nt, Artificial Sequence
  Description of Artificial Sequence: Synthetic oligonucleotide
cuucaaguguaagugaugc

SEQ ID NO: 819968 - RNA, 19 nt, Artificial Sequence
  Description of Artificial Sequence: Synthetic oligonucleotide
gagauuaagauuguuuuca

SEQ ID NO: 819969 - RNA, 19 nt, Artificial Sequence
  Description of Artificial Sequence: Synthetic oligonucleotide
auuaucaauugguguagag

SEQ ID NO: 819970 - RNA, 19 nt, Artificial Sequence
  Description of Artificial Sequence: Synthetic oligonucleotide
uguggguuaaagaaaggau

SEQ ID NO: 819971 - RNA, 19 nt, Artificial Sequence
  Description of Artificial Sequence: Synthetic oligonucleotide
auucaacuggccaggaucc

SEQ ID NO: 819972 - RNA, 19 nt, Artificial Sequence
  Description of Artificial Sequence: Synthetic oligonucleotide
uguugaacccggaagucug

SEQ ID NO: 819973 - RNA, 19 nt, Artificial Sequence
  Description of Artificial Sequence: Synthetic oligonucleotide
aaagaacuguaguuugaca

SEQ ID NO: 819974 - RNA, 19 nt, Artificial Sequence
  Description of Artificial Sequence: Synthetic oligonucleotide
uuaucaauugguguagaga

SEQ ID NO: 819975 - RNA, 19 nt, Artificial Sequence
  Description of Artificial Sequence: Synthetic oligonucleotide
augugcaacguuugucucc

SEQ ID NO: 819976 - RNA, 19 nt, Artificial Sequence
  Description of Artificial Sequence: Synthetic oligonucleotide
uaaaccugcuuaccgagga

SEQ ID NO: 819977 - RNA, 19 nt, Artificial Sequence
  Description of Artificial Sequence: Synthetic oligonucleotide
ucaaguguaagugaugcuc

SEQ ID NO: 819978 - RNA, 19 nt, Artificial Sequence
  Description of Artificial Sequence: Synthetic oligonucleotide
uuucaagucauugcuagcu

SEQ ID NO: 819979 - RNA, 19 nt, Artificial Sequence
  Description of Artificial Sequence: Synthetic oligonucleotide
uggcauuuagaccauuugu

SEQ ID NO: 819980 - RNA, 19 nt, Artificial Sequence
  Description of Artificial Sequence: Synthetic oligonucleotide
acuugaagcagaaagcuug

SEQ ID NO: 819981 - RNA, 19 nt, Artificial Sequence
  Description of Artificial Sequence: Synthetic oligonucleotide
uaugacggcaaugaaagaa

SEQ ID NO: 819982 - RNA, 19 nt, Artificial Sequence
  Description of Artificial Sequence: Synthetic oligonucleotide
aaggauuacccugcauacc

SEQ ID NO: 819983 - RNA, 19 nt, Artificial Sequence
  Description of Artificial Sequence: Synthetic oligonucleotide
cuaaugaauucacacgaac

SEQ ID NO: 819984 - RNA, 19 nt, Artificial Sequence
  Description of Artificial Sequence: Synthetic oligonucleotide
cuaaaauucccaugaggac

SEQ ID NO: 819985 - RNA, 19 nt, Artificial Sequence
  Description of Artificial Sequence: Synthetic oligonucleotide
aggauuacccugcauacca

SEQ ID NO: 819986 - RNA, 19 nt, Artificial Sequence
  Description of Artificial Sequence: Synthetic oligonucleotide
uguaagagaaaauccucaa

SEQ ID NO: 819987 - RNA, 19 nt, Artificial Sequence
  Description of Artificial Sequence: Synthetic oligonucleotide
uuccuauguccaaagaccu

SEQ ID NO: 819988 - RNA, 19 nt, Artificial Sequence
  Description of Artificial Sequence: Synthetic oligonucleotide
gacgugaagguacuugaag

SEQ ID NO: 819989 - RNA, 19 nt, Artificial Sequence
  Description of Artificial Sequence: Synthetic oligonucleotide
auucacacgaacagcaagg

SEQ ID NO: 819990 - RNA, 19 nt, Artificial Sequence
  Description of Artificial Sequence: Synthetic oligonucleotide
gauuauuaagggcagacau

SEQ ID NO: 819991 - RNA, 19 nt, Artificial Sequence
  Description of Artificial Sequence: Synthetic oligonucleotide
acugcuauucaagauaacu

SEQ ID NO: 819992 - RNA, 19 nt, Artificial Sequence
  Description of Artificial Sequence: Synthetic oligonucleotide
uuuauucugcagcccaucu

SEQ ID NO: 819993 - RNA, 19 nt, Artificial Sequence
  Description of Artificial Sequence: Synthetic oligonucleotide
uccuuuaugacggcaauga

SEQ ID NO: 819994 - RNA, 19 nt, Artificial Sequence
  Description of Artificial Sequence: Synthetic oligonucleotide
uuauccaaguacuccaaaa

SEQ ID NO: 819995 - RNA, 19 nt, Artificial Sequence
  Description of Artificial Sequence: Synthetic oligonucleotide
uuuuguacuuugagacuag

SEQ ID NO: 819996 - RNA, 19 nt, Artificial Sequence
  Description of Artificial Sequence: Synthetic oligonucleotide
ugaagaggcguuuguaaga

SEQ ID NO: 819997 - RNA, 19 nt, Artificial Sequence
  Description of Artificial Sequence: Synthetic oligonucleotide
gaucucaaaggaaggagcc

SEQ ID NO: 819998 - RNA, 19 nt, Artificial Sequence
  Description of Artificial Sequence: Synthetic oligonucleotide
ugagauuaagauuguuuuc

SEQ ID NO: 819999 - RNA, 19 nt, Artificial Sequence
  Description of Artificial Sequence: Synthetic oligonucleotide
cauguuguccaucaaugug

SEQ ID NO: 820000 - RNA, 19 nt, Artificial Sequence
  Description of Artificial Sequence: Synthetic oligonucleotide
aucaucaaguacaaaccac

SEQ ID NO: 820001 - RNA, 19 nt, Artificial Sequence
  Description of Artificial Sequence: Synthetic oligonucleotide
cugcuauucaagauaacuc

SEQ ID NO: 820002 - RNA, 19 nt, Artificial Sequence
  Description of Artificial Sequence: Synthetic oligonucleotide
aaaggcugcucaaugaggu

SEQ ID NO: 820003 - RNA, 19 nt, Artificial Sequence
  Description of Artificial Sequence: Synthetic oligonucleotide
aaaauccucaaugacuuua

SEQ ID NO: 820004 - RNA, 19 nt, Artificial Sequence
  Description of Artificial Sequence: Synthetic oligonucleotide
agcgauguaaaccugcuua

SEQ ID NO: 820005 - RNA, 19 nt, Artificial Sequence
  Description of Artificial Sequence: Synthetic oligonucleotide
ucaagucauugcuagcuga

SEQ ID NO: 820006 - RNA, 19 nt, Artificial Sequence
  Description of Artificial Sequence: Synthetic oligonucleotide
ucuuuggugauucccaguu

SEQ ID NO: 820007 - RNA, 19 nt, Artificial Sequence
  Description of Artificial Sequence: Synthetic oligonucleotide
ucuucaagccagcugcaca

SEQ ID NO: 820008 - RNA, 19 nt, Artificial Sequence
  Description of Artificial Sequence: Synthetic oligonucleotide
uguuguuaaagaccuuguc

SEQ ID NO: 820009 - RNA, 19 nt, Artificial Sequence
  Description of Artificial Sequence: Synthetic oligonucleotide
uguuguaagaaggguagga

SEQ ID NO: 820010 - RNA, 19 nt, Artificial Sequence
  Description of Artificial Sequence: Synthetic oligonucleotide
caagauaacucgguugucc

SEQ ID NO: 820011 - RNA, 19 nt, Artificial Sequence
  Description of Artificial Sequence: Synthetic oligonucleotide
ucagccacugauuugguuu

SEQ ID NO: 820012 - RNA, 19 nt, Artificial Sequence
  Description of Artificial Sequence: Synthetic oligonucleotide
gucauugcuagcugagccg

SEQ ID NO: 820013 - RNA, 19 nt, Artificial Sequence
  Description of Artificial Sequence: Synthetic oligonucleotide
cuacuggucauaguagugg

SEQ ID NO: 820014 - RNA, 19 nt, Artificial Sequence
  Description of Artificial Sequence: Synthetic oligonucleotide
uaagaaggguaggauauca

SEQ ID NO: 820015 - RNA, 19 nt, Artificial Sequence
  Description of Artificial Sequence: Synthetic oligonucleotide
gagauuauuaagggcagac

SEQ ID NO: 820016 - RNA, 19 nt, Artificial Sequence
  Description of Artificial Sequence: Synthetic oligonucleotide
gaagaggcguuuguaagag

SEQ ID NO: 820017 - RNA, 19 nt, Artificial Sequence
  Description of Artificial Sequence: Synthetic oligonucleotide
caguuagaaggucugcucc

SEQ ID NO: 820018 - RNA, 19 nt, Artificial Sequence
  Description of Artificial Sequence: Synthetic oligonucleotide
uauucaagauaacucgguu

SEQ ID NO: 820019 - RNA, 19 nt, Artificial Sequence
  Description of Artificial Sequence: Synthetic oligonucleotide
uauuugcaaaaguugggau

SEQ ID NO: 820020 - RNA, 19 nt, Artificial Sequence
  Description of Artificial Sequence: Synthetic oligonucleotide
uucaagucauugcuagcug

SEQ ID NO: 820021 - RNA, 19 nt, Artificial Sequence
  Description of Artificial Sequence: Synthetic oligonucleotide
uguguuccgacuccagucu

SEQ ID NO: 820022 - RNA, 19 nt, Artificial Sequence
  Description of Artificial Sequence: Synthetic oligonucleotide
uacuccaaaaucuuuccua

SEQ ID NO: 820023 - RNA, 19 nt, Artificial Sequence
  Description of Artificial Sequence: Synthetic oligonucleotide
cuuugagacuaguaaggac

SEQ ID NO: 820024 - RNA, 19 nt, Artificial Sequence
  Description of Artificial Sequence: Synthetic oligonucleotide
ugaacugauugagauuaag

SEQ ID NO: 820025 - RNA, 19 nt, Artificial Sequence
  Description of Artificial Sequence: Synthetic oligonucleotide
uaagcagacuaaugaauuc

SEQ ID NO: 820026 - RNA, 19 nt, Artificial Sequence
  Description of Artificial Sequence: Synthetic oligonucleotide
aaggguaggauaucaucaa

SEQ ID NO: 820027 - RNA, 19 nt, Artificial Sequence
  Description of Artificial Sequence: Synthetic oligonucleotide
cuggaggagguacaaauug

SEQ ID NO: 820028 - RNA, 19 nt, Artificial Sequence
  Description of Artificial Sequence: Synthetic oligonucleotide
aaacugcuauucaagauaa

SEQ ID NO: 820029 - RNA, 19 nt, Artificial Sequence
  Description of Artificial Sequence: Synthetic oligonucleotide
uagagaacaucaugcugag

SEQ ID NO: 820030 - RNA, 19 nt, Artificial Sequence
  Description of Artificial Sequence: Synthetic oligonucleotide
augacggcaaugaaagaac

SEQ ID NO: 820031 - RNA, 19 nt, Artificial Sequence
  Description of Artificial Sequence: Synthetic oligonucleotide
uucacacgaacagcaaggg

SEQ ID NO: 820032 - RNA, 19 nt, Artificial Sequence
  Description of Artificial Sequence: Synthetic oligonucleotide
cacacgaacagcaagggaa

SEQ ID NO: 820033 - RNA, 19 nt, Artificial Sequence
  Description of Artificial Sequence: Synthetic oligonucleotide
uaucgguuggucucuguug

SEQ ID NO: 820034 - RNA, 19 nt, Artificial Sequence
  Description of Artificial Sequence: Synthetic oligonucleotide
uuguaagaaggguaggaua

SEQ ID NO: 820035 - RNA, 19 nt, Artificial Sequence
  Description of Artificial Sequence: Synthetic oligonucleotide
ccuaaaauucccaugagga

SEQ ID NO: 820036 - RNA, 19 nt, Artificial Sequence
  Description of Artificial Sequence: Synthetic oligonucleotide
acccggaagucugaaagcc

SEQ ID NO: 820037 - RNA, 19 nt, Artificial Sequence
  Description of Artificial Sequence: Synthetic oligonucleotide
cuguaguuugacagagugg

SEQ ID NO: 820038 - RNA, 19 nt, Artificial Sequence
  Description of Artificial Sequence: Synthetic oligonucleotide
cuuuaugacggcaaugaaa

SEQ ID NO: 820039 - RNA, 19 nt, Artificial Sequence
  Description of Artificial Sequence: Synthetic oligonucleotide
aauacucaggggaaugaga

SEQ ID NO: 820040 - RNA, 19 nt, Artificial Sequence
  Description of Artificial Sequence: Synthetic oligonucleotide
cugauucaccaccaguuag

SEQ ID NO: 820041 - RNA, 19 nt, Artificial Sequence
  Description of Artificial Sequence: Synthetic oligonucleotide
aacguuugucuccucggga

SEQ ID NO: 820042 - RNA, 19 nt, Artificial Sequence
  Description of Artificial Sequence: Synthetic oligonucleotide
acaagccaaaauaaauauc

SEQ ID NO: 820043 - RNA, 19 nt, Artificial Sequence
  Description of Artificial Sequence: Synthetic oligonucleotide
gcuuguaccacugaagaag

SEQ ID NO: 820044 - RNA, 19 nt, Artificial Sequence
  Description of Artificial Sequence: Synthetic oligonucleotide
cuuagucuguuugaugggc

SEQ ID NO: 820045 - RNA, 19 nt, Artificial Sequence
  Description of Artificial Sequence: Synthetic oligonucleotide
auagucuauaauauuugca

SEQ ID NO: 820046 - RNA, 19 nt, Artificial Sequence
  Description of Artificial Sequence: Synthetic oligonucleotide
uaccuaaaauucccaugag

SEQ ID NO: 820047 - RNA, 19 nt, Artificial Sequence
  Description of Artificial Sequence: Synthetic oligonucleotide
aggcagaauuaauuuaaca

SEQ ID NO: 820048 - RNA, 19 nt, Artificial Sequence
  Description of Artificial Sequence: Synthetic oligonucleotide
uccagcaugugcaacguuu

SEQ ID NO: 820049 - RNA, 19 nt, Artificial Sequence
  Description of Artificial Sequence: Synthetic oligonucleotide
uugggaugauguuuagaca

SEQ ID NO: 820050 - RNA, 19 nt, Artificial Sequence
  Description of Artificial Sequence: Synthetic oligonucleotide
ugaaagugcagugacccuc

SEQ ID NO: 820051 - RNA, 19 nt, Artificial Sequence
  Description of Artificial Sequence: Synthetic oligonucleotide
aguuagaaggucugcucca

SEQ ID NO: 820052 - RNA, 19 nt, Artificial Sequence
  Description of Artificial Sequence: Synthetic oligonucleotide
cacagcgauguaaaccugc

SEQ ID NO: 820053 - RNA, 19 nt, Artificial Sequence
  Description of Artificial Sequence: Synthetic oligonucleotide
ugacggcaaugaaagaacu

SEQ ID NO: 820054 - RNA, 19 nt, Artificial Sequence
  Description of Artificial Sequence: Synthetic oligonucleotide
aagaaaggauuacccugca

SEQ ID NO: 820055 - RNA, 19 nt, Artificial Sequence
  Description of Artificial Sequence: Synthetic oligonucleotide
cuugggagugcuaacagaa

SEQ ID NO: 820056 - RNA, 19 nt, Artificial Sequence
  Description of Artificial Sequence: Synthetic oligonucleotide
guacaaauugacucagcca

SEQ ID NO: 820057 - RNA, 19 nt, Artificial Sequence
  Description of Artificial Sequence: Synthetic oligonucleotide
auagcugguucaugcuaac

SEQ ID NO: 820058 - RNA, 19 nt, Artificial Sequence
  Description of Artificial Sequence: Synthetic oligonucleotide
uuacauucaccugcgugcc

SEQ ID NO: 820059 - RNA, 19 nt, Artificial Sequence
  Description of Artificial Sequence: Synthetic oligonucleotide
aucguggucacuccagcug

SEQ ID NO: 820060 - RNA, 19 nt, Artificial Sequence
  Description of Artificial Sequence: Synthetic oligonucleotide
uccagcuuaguccuguguu

SEQ ID NO: 820061 - RNA, 19 nt, Artificial Sequence
  Description of Artificial Sequence: Synthetic oligonucleotide
ucaauacucaggggaauga

SEQ ID NO: 820062 - RNA, 19 nt, Artificial Sequence
  Description of Artificial Sequence: Synthetic oligonucleotide
ucuguccuauuacauucac

SEQ ID NO: 820063 - RNA, 19 nt, Artificial Sequence
  Description of Artificial Sequence: Synthetic oligonucleotide
aaauucaacuggccaggau

SEQ ID NO: 820064 - RNA, 19 nt, Artificial Sequence
  Description of Artificial Sequence: Synthetic oligonucleotide
cuguuugaugggcacaaug

SEQ ID NO: 820065 - RNA, 19 nt, Artificial Sequence
  Description of Artificial Sequence: Synthetic oligonucleotide
aucuuuccuaagcagacua

SEQ ID NO: 820066 - RNA, 19 nt, Artificial Sequence
  Description of Artificial Sequence: Synthetic oligonucleotide
ucaucguggucacuccagc

SEQ ID NO: 820067 - RNA, 19 nt, Artificial Sequence
  Description of Artificial Sequence: Synthetic oligonucleotide
ggauggauagucuauaaua

SEQ ID NO: 820068 - RNA, 19 nt, Artificial Sequence
  Description of Artificial Sequence: Synthetic oligonucleotide
aggcagucuguccuauuac

SEQ ID NO: 820069 - RNA, 19 nt, Artificial Sequence
  Description of Artificial Sequence: Synthetic oligonucleotide
aacugaacugauugagauu

SEQ ID NO: 820070 - RNA, 19 nt, Artificial Sequence
  Description of Artificial Sequence: Synthetic oligonucleotide
gagggaauuuguuguaaga

SEQ ID NO: 820071 - RNA, 19 nt, Artificial Sequence
  Description of Artificial Sequence: Synthetic oligonucleotide
aggguaggauaucaucaag

SEQ ID NO: 820072 - RNA, 19 nt, Artificial Sequence
  Description of Artificial Sequence: Synthetic oligonucleotide
uggauggauagucuauaau

SEQ ID NO: 820073 - RNA, 19 nt, Artificial Sequence
  Description of Artificial Sequence: Synthetic oligonucleotide
ugauugagauuaagauugu

SEQ ID NO: 820074 - RNA, 19 nt, Artificial Sequence
  Description of Artificial Sequence: Synthetic oligonucleotide
agauuaagauuguuuucaa

SEQ ID NO: 820075 - RNA, 19 nt, Artificial Sequence
  Description of Artificial Sequence: Synthetic oligonucleotide
ccuauuacauucaccugcg

SEQ ID NO: 820076 - RNA, 19 nt, Artificial Sequence
  Description of Artificial Sequence: Synthetic oligonucleotide
uuguuguaagaaggguagg

SEQ ID NO: 820077 - RNA, 19 nt, Artificial Sequence
  Description of Artificial Sequence: Synthetic oligonucleotide
ucuguuuauucugcagccc

SEQ ID NO: 820078 - RNA, 19 nt, Artificial Sequence
  Description of Artificial Sequence: Synthetic oligonucleotide
gguucaugcuaacuuuggg

SEQ ID NO: 820079 - RNA, 19 nt, Artificial Sequence
  Description of Artificial Sequence: Synthetic oligonucleotide
cugcuguuuaaacacagga

SEQ ID NO: 820080 - RNA, 19 nt, Artificial Sequence
  Description of Artificial Sequence: Synthetic oligonucleotide
uuuugguuaggagcaaauc

SEQ ID NO: 820081 - RNA, 19 nt, Artificial Sequence
  Description of Artificial Sequence: Synthetic oligonucleotide
ucacccgaaaagaucuuuc

SEQ ID NO: 820082 - RNA, 19 nt, Artificial Sequence
  Description of Artificial Sequence: Synthetic oligonucleotide
aaguugggaugauguuuag

SEQ ID NO: 820083 - RNA, 19 nt, Artificial Sequence
  Description of Artificial Sequence: Synthetic oligonucleotide
cucgguuguccuuuuguac

SEQ ID NO: 820084 - RNA, 19 nt, Artificial Sequence
  Description of Artificial Sequence: Synthetic oligonucleotide
cuguguuccgacuccaguc

SEQ ID NO: 820085 - RNA, 19 nt, Artificial Sequence
  Description of Artificial Sequence: Synthetic oligonucleotide
caagggaagauguuuguaa

SEQ ID NO: 820086 - RNA, 19 nt, Artificial Sequence
  Description of Artificial Sequence: Synthetic oligonucleotide
uaccaucaacuuaagguuu

SEQ ID NO: 820087 - RNA, 19 nt, Artificial Sequence
  Description of Artificial Sequence: Synthetic oligonucleotide
caacguuugucuccucggg

SEQ ID NO: 820088 - RNA, 19 nt, Artificial Sequence
  Description of Artificial Sequence: Synthetic oligonucleotide
aaucuuuccuaagcagacu

SEQ ID NO: 820089 - RNA, 19 nt, Artificial Sequence
  Description of Artificial Sequence: Synthetic oligonucleotide
ucguggucacuccagcugu

SEQ ID NO: 820090 - RNA, 19 nt, Artificial Sequence
  Description of Artificial Sequence: Synthetic oligonucleotide
cuguccuauuacauucacc

SEQ ID NO: 820091 - RNA, 19 nt, Artificial Sequence
  Description of Artificial Sequence: Synthetic oligonucleotide
cauuuagaccauuugucaa

SEQ ID NO: 820092 - RNA, 19 nt, Artificial Sequence
  Description of Artificial Sequence: Synthetic oligonucleotide
ugacuggcauguugaaccc

SEQ ID NO: 820093 - RNA, 19 nt, Artificial Sequence
  Description of Artificial Sequence: Synthetic oligonucleotide
agcugguucaugcuaacuu

SEQ ID NO: 820094 - RNA, 19 nt, Artificial Sequence
  Description of Artificial Sequence: Synthetic oligonucleotide
ggaaggaacagacgugaag

SEQ ID NO: 820095 - RNA, 19 nt, Artificial Sequence
  Description of Artificial Sequence: Synthetic oligonucleotide
cagcaagggaagauguuug

SEQ ID NO: 820096 - RNA, 19 nt, Artificial Sequence
  Description of Artificial Sequence: Synthetic oligonucleotide
uauuaucaauugguguaga

SEQ ID NO: 820097 - RNA, 19 nt, Artificial Sequence
  Description of Artificial Sequence: Synthetic oligonucleotide
acuuugagacuaguaagga

SEQ ID NO: 820098 - RNA, 19 nt, Artificial Sequence
  Description of Artificial Sequence: Synthetic oligonucleotide
agggaauuuguuguaagaa

SEQ ID NO: 820099 - RNA, 19 nt, Artificial Sequence
  Description of Artificial Sequence: Synthetic oligonucleotide
ucacacgaacagcaaggga

SEQ ID NO: 820100 - RNA, 19 nt, Artificial Sequence
  Description of Artificial Sequence: Synthetic oligonucleotide
ugguuaggagcaaauccau

SEQ ID NO: 820101 - RNA, 19 nt, Artificial Sequence
  Description of Artificial Sequence: Synthetic oligonucleotide
ucuuuccuaagcagacuaa

SEQ ID NO: 820102 - RNA, 19 nt, Artificial Sequence
  Description of Artificial Sequence: Synthetic oligonucleotide
uucaaguguaagugaugcu

SEQ ID NO: 820103 - RNA, 19 nt, Artificial Sequence
  Description of Artificial Sequence: Synthetic oligonucleotide
ugagacuaguaaggacugg

SEQ ID NO: 820104 - RNA, 19 nt, Artificial Sequence
  Description of Artificial Sequence: Synthetic oligonucleotide
agaauuaauuuaacauacu

SEQ ID NO: 820105 - RNA, 19 nt, Artificial Sequence
  Description of Artificial Sequence: Synthetic oligonucleotide
agauuauuaagggcagaca

SEQ ID NO: 820106 - RNA, 19 nt, Artificial Sequence
  Description of Artificial Sequence: Synthetic oligonucleotide
ggaacagacgugaagguac

SEQ ID NO: 820107 - RNA, 19 nt, Artificial Sequence
  Description of Artificial Sequence: Synthetic oligonucleotide
aaauccucaaugacuuuaa

SEQ ID NO: 820108 - RNA, 19 nt, Artificial Sequence
  Description of Artificial Sequence: Synthetic oligonucleotide
gaagcaggugcucucuguc

SEQ ID NO: 820109 - RNA, 19 nt, Artificial Sequence
  Description of Artificial Sequence: Synthetic oligonucleotide
guucaugcuaacuuugggu

SEQ ID NO: 820110 - RNA, 19 nt, Artificial Sequence
  Description of Artificial Sequence: Synthetic oligonucleotide
ggauagucuauaauauuug

SEQ ID NO: 820111 - RNA, 19 nt, Artificial Sequence
  Description of Artificial Sequence: Synthetic oligonucleotide
guaagugaugcucuuuucu

SEQ ID NO: 820112 - RNA, 19 nt, Artificial Sequence
  Description of Artificial Sequence: Synthetic oligonucleotide
caaguacaaaccacuuauc

SEQ ID NO: 820113 - RNA, 19 nt, Artificial Sequence
  Description of Artificial Sequence: Synthetic oligonucleotide
accucacccgaaaagaucu

SEQ ID NO: 820114 - RNA, 19 nt, Artificial Sequence
  Description of Artificial Sequence: Synthetic oligonucleotide
cucgggagcacucauuuga

SEQ ID NO: 820115 - RNA, 19 nt, Artificial Sequence
  Description of Artificial Sequence: Synthetic oligonucleotide
cuuaguccuguguuccgac

SEQ ID NO: 820116 - RNA, 19 nt, Artificial Sequence
  Description of Artificial Sequence: Synthetic oligonucleotide
agaggcguuuguaagagaa

SEQ ID NO: 820117 - RNA, 19 nt, Artificial Sequence
  Description of Artificial Sequence: Synthetic oligonucleotide
ucuccuuuaugacggcaau

SEQ ID NO: 820118 - RNA, 19 nt, Artificial Sequence
  Description of Artificial Sequence: Synthetic oligonucleotide
accacuuauccaaguacuc

SEQ ID NO: 820119 - RNA, 19 nt, Artificial Sequence
  Description of Artificial Sequence: Synthetic oligonucleotide
cuuuuguacuuugagacua

SEQ ID NO: 820120 - RNA, 19 nt, Artificial Sequence
  Description of Artificial Sequence: Synthetic oligonucleotide
agcaagggaagauguuugu

SEQ ID NO: 820121 - RNA, 19 nt, Artificial Sequence
  Description of Artificial Sequence: Synthetic oligonucleotide
gauagcugguucaugcuaa

SEQ ID NO: 820122 - RNA, 19 nt, Artificial Sequence
  Description of Artificial Sequence: Synthetic oligonucleotide
caauacucaggggaaugag

SEQ ID NO: 820123 - RNA, 19 nt, Artificial Sequence
  Description of Artificial Sequence: Synthetic oligonucleotide
guaaaccugcuuaccgagg

SEQ ID NO: 820124 - RNA, 19 nt, Artificial Sequence
  Description of Artificial Sequence: Synthetic oligonucleotide
uacucaggggaaugagaug

SEQ ID NO: 820125 - RNA, 19 nt, Artificial Sequence
  Description of Artificial Sequence: Synthetic oligonucleotide
caugcuaacuuuggguuuc

SEQ ID NO: 820126 - RNA, 19 nt, Artificial Sequence
  Description of Artificial Sequence: Synthetic oligonucleotide
aacugcuauucaagauaac

SEQ ID NO: 820127 - RNA, 19 nt, Artificial Sequence
  Description of Artificial Sequence: Synthetic oligonucleotide
ugagaugaggcaguacuuu

SEQ ID NO: 820128 - RNA, 19 nt, Artificial Sequence
  Description of Artificial Sequence: Synthetic oligonucleotide
uccucgggagcacucauuu

SEQ ID NO: 820129 - RNA, 19 nt, Artificial Sequence
  Description of Artificial Sequence: Synthetic oligonucleotide
gacggcaaugaaagaacug

SEQ ID NO: 820130 - RNA, 19 nt, Artificial Sequence
  Description of Artificial Sequence: Synthetic oligonucleotide
gucugucaaguccuuaguc

SEQ ID NO: 820131 - RNA, 19 nt, Artificial Sequence
  Description of Artificial Sequence: Synthetic oligonucleotide
gggagugcuaacagaaagg

SEQ ID NO: 820132 - RNA, 19 nt, Artificial Sequence
  Description of Artificial Sequence: Synthetic oligonucleotide
ggcauuuagaccauuuguc

SEQ ID NO: 820133 - RNA, 19 nt, Artificial Sequence
  Description of Artificial Sequence: Synthetic oligonucleotide
acacgaacagcaagggaag

SEQ ID NO: 820134 - RNA, 19 nt, Artificial Sequence
  Description of Artificial Sequence: Synthetic oligonucleotide
aggcguuuguaagagaaaa

SEQ ID NO: 820135 - RNA, 19 nt, Artificial Sequence
  Description of Artificial Sequence: Synthetic oligonucleotide
cagacgugaagguacuuga

SEQ ID NO: 820136 - RNA, 19 nt, Artificial Sequence
  Description of Artificial Sequence: Synthetic oligonucleotide
auaucgguuggucucuguu

SEQ ID NO: 820137 - RNA, 19 nt, Artificial Sequence
  Description of Artificial Sequence: Synthetic oligonucleotide
agauguuuguaaacaggca

SEQ ID NO: 820138 - RNA, 19 nt, Artificial Sequence
  Description of Artificial Sequence: Synthetic oligonucleotide
caaugaggucauguugucc

SEQ ID NO: 820139 - RNA, 19 nt, Artificial Sequence
  Description of Artificial Sequence: Synthetic oligonucleotide
accaguuagaaggucugcu

SEQ ID NO: 820140 - RNA, 19 nt, Artificial Sequence
  Description of Artificial Sequence: Synthetic oligonucleotide
uuaucucaucaggaggggu

SEQ ID NO: 820141 - RNA, 19 nt, Artificial Sequence
  Description of Artificial Sequence: Synthetic oligonucleotide
agguacaaauugacucagc

SEQ ID NO: 820142 - RNA, 19 nt, Artificial Sequence
  Description of Artificial Sequence: Synthetic oligonucleotide
auuauuaagggcagacaua

SEQ ID NO: 820143 - RNA, 19 nt, Artificial Sequence
  Description of Artificial Sequence: Synthetic oligonucleotide
cugcauaccaaaggcaguc

SEQ ID NO: 820144 - RNA, 19 nt, Artificial Sequence
  Description of Artificial Sequence: Synthetic oligonucleotide
gcuccaauguuguuaaaga

SEQ ID NO: 820145 - RNA, 19 nt, Artificial Sequence
  Description of Artificial Sequence: Synthetic oligonucleotide
cagcuuaguccuguguucc

SEQ ID NO: 820146 - RNA, 19 nt, Artificial Sequence
  Description of Artificial Sequence: Synthetic oligonucleotide
gcuuaccgaggacugaaag

SEQ ID NO: 820147 - RNA, 19 nt, Artificial Sequence
  Description of Artificial Sequence: Synthetic oligonucleotide
guggaaggaacagacguga

SEQ ID NO: 820148 - RNA, 19 nt, Artificial Sequence
  Description of Artificial Sequence: Synthetic oligonucleotide
ggacugaaagugcagugac

SEQ ID NO: 820149 - RNA, 19 nt, Artificial Sequence
  Description of Artificial Sequence: Synthetic oligonucleotide
gguaggauaucaucaagua

SEQ ID NO: 820150 - RNA, 19 nt, Artificial Sequence
  Description of Artificial Sequence: Synthetic oligonucleotide
guaguuugacagagugggg

SEQ ID NO: 820151 - RNA, 19 nt, Artificial Sequence
  Description of Artificial Sequence: Synthetic oligonucleotide
guccuauuacauucaccug

SEQ ID NO: 820152 - RNA, 19 nt, Artificial Sequence
  Description of Artificial Sequence: Synthetic oligonucleotide
uccuauguccaaagaccuc

SEQ ID NO: 820153 - RNA, 19 nt, Artificial Sequence
  Description of Artificial Sequence: Synthetic oligonucleotide
cccugcauaccaaaggcag

SEQ ID NO: 820154 - RNA, 19 nt, Artificial Sequence
  Description of Artificial Sequence: Synthetic oligonucleotide
uugggagugcuaacagaaa

SEQ ID NO: 820155 - RNA, 19 nt, Artificial Sequence
  Description of Artificial Sequence: Synthetic oligonucleotide
agucaucguggucacucca

SEQ ID NO: 820156 - RNA, 19 nt, Artificial Sequence
  Description of Artificial Sequence: Synthetic oligonucleotide
gcguuuguaagagaaaauc

SEQ ID NO: 820157 - RNA, 19 nt, Artificial Sequence
  Description of Artificial Sequence: Synthetic oligonucleotide
guaaggacuggaucuuuaa

SEQ ID NO: 820158 - RNA, 19 nt, Artificial Sequence
  Description of Artificial Sequence: Synthetic oligonucleotide
cuauucaagauaacucggu

SEQ ID NO: 820159 - RNA, 19 nt, Artificial Sequence
  Description of Artificial Sequence: Synthetic oligonucleotide
gugcuaacagaaaggcugc

SEQ ID NO: 820160 - RNA, 19 nt, Artificial Sequence
  Description of Artificial Sequence: Synthetic oligonucleotide
gugaguaaaaguacauuua

SEQ ID NO: 820161 - RNA, 19 nt, Artificial Sequence
  Description of Artificial Sequence: Synthetic oligonucleotide
caguggaaggaacagacgu

SEQ ID NO: 820162 - RNA, 19 nt, Artificial Sequence
  Description of Artificial Sequence: Synthetic oligonucleotide
caccucacccgaaaagauc

SEQ ID NO: 820163 - RNA, 19 nt, Artificial Sequence
  Description of Artificial Sequence: Synthetic oligonucleotide
uggaaggaacagacgugaa

SEQ ID NO: 820164 - RNA, 19 nt, Artificial Sequence
  Description of Artificial Sequence: Synthetic oligonucleotide
guagaccauggguagcaca

SEQ ID NO: 820165 - RNA, 19 nt, Artificial Sequence
  Description of Artificial Sequence: Synthetic oligonucleotide
caaguguaagugaugcucu

SEQ ID NO: 820166 - RNA, 19 nt, Artificial Sequence
  Description of Artificial Sequence: Synthetic oligonucleotide
cuuguaccacugaagaagu

SEQ ID NO: 820167 - RNA, 19 nt, Artificial Sequence
  Description of Artificial Sequence: Synthetic oligonucleotide
agcccauguuggcauuuag

SEQ ID NO: 820168 - RNA, 19 nt, Artificial Sequence
  Description of Artificial Sequence: Synthetic oligonucleotide
gaagaaguucugguuugga

SEQ ID NO: 820169 - RNA, 19 nt, Artificial Sequence
  Description of Artificial Sequence: Synthetic oligonucleotide
acucgguuguccuuuugua

SEQ ID NO: 820170 - RNA, 19 nt, Artificial Sequence
  Description of Artificial Sequence: Synthetic oligonucleotide
aaguucaggcagaauuaau

SEQ ID NO: 820171 - RNA, 19 nt, Artificial Sequence
  Description of Artificial Sequence: Synthetic oligonucleotide
aagugcagugacccuccaa

SEQ ID NO: 820172 - RNA, 19 nt, Artificial Sequence
  Description of Artificial Sequence: Synthetic oligonucleotide
ucgggagcacucauuugau

SEQ ID NO: 820173 - RNA, 19 nt, Artificial Sequence
  Description of Artificial Sequence: Synthetic oligonucleotide
uggagggaauuuguuguaa

SEQ ID NO: 820174 - RNA, 19 nt, Artificial Sequence
  Description of Artificial Sequence: Synthetic oligonucleotide
uugcuagcugagccgcuac

SEQ ID NO: 820175 - RNA, 19 nt, Artificial Sequence
  Description of Artificial Sequence: Synthetic oligonucleotide
cacccgaaaagaucuuuca

SEQ ID NO: 820176 - RNA, 19 nt, Artificial Sequence
  Description of Artificial Sequence: Synthetic oligonucleotide
aucucaaaggaaggagccu

SEQ ID NO: 820177 - RNA, 19 nt, Artificial Sequence
  Description of Artificial Sequence: Synthetic oligonucleotide
aguugggaugauguuuaga

SEQ ID NO: 820178 - RNA, 19 nt, Artificial Sequence
  Description of Artificial Sequence: Synthetic oligonucleotide
aguccuuagucuguuugau

SEQ ID NO: 820179 - RNA, 19 nt, Artificial Sequence
  Description of Artificial Sequence: Synthetic oligonucleotide
cuugugaguaaaaguacau

SEQ ID NO: 820180 - RNA, 19 nt, Artificial Sequence
  Description of Artificial Sequence: Synthetic oligonucleotide
ucaagauaacucgguuguc

SEQ ID NO: 820181 - RNA, 19 nt, Artificial Sequence
  Description of Artificial Sequence: Synthetic oligonucleotide
ugcauaccaaaggcagucu

SEQ ID NO: 820182 - RNA, 19 nt, Artificial Sequence
  Description of Artificial Sequence: Synthetic oligonucleotide
agauaacucgguuguccuu

SEQ ID NO: 820183 - RNA, 19 nt, Artificial Sequence
  Description of Artificial Sequence: Synthetic oligonucleotide
gcgauguaaaccugcuuac

SEQ ID NO: 820184 - RNA, 19 nt, Artificial Sequence
  Description of Artificial Sequence: Synthetic oligonucleotide
gggcagacauaucgguugg

SEQ ID NO: 820185 - RNA, 19 nt, Artificial Sequence
  Description of Artificial Sequence: Synthetic oligonucleotide
guuuauucugcagcccauc

SEQ ID NO: 820186 - RNA, 19 nt, Artificial Sequence
  Description of Artificial Sequence: Synthetic oligonucleotide
uggcuccugcuguuuaaac

SEQ ID NO: 820187 - RNA, 19 nt, Artificial Sequence
  Description of Artificial Sequence: Synthetic oligonucleotide
ccacuuauccaaguacucc

SEQ ID NO: 820188 - RNA, 19 nt, Artificial Sequence
  Description of Artificial Sequence: Synthetic oligonucleotide
ugacuuccagcaugugcaa

SEQ ID NO: 820189 - RNA, 19 nt, Artificial Sequence
  Description of Artificial Sequence: Synthetic oligonucleotide
ccugcuguuuaaacacagg

SEQ ID NO: 820190 - RNA, 19 nt, Artificial Sequence
  Description of Artificial Sequence: Synthetic oligonucleotide
uugggauagcugguucaug

SEQ ID NO: 820191 - RNA, 19 nt, Artificial Sequence
  Description of Artificial Sequence: Synthetic oligonucleotide
aagggcagacauaucgguu

SEQ ID NO: 820192 - RNA, 19 nt, Artificial Sequence
  Description of Artificial Sequence: Synthetic oligonucleotide
acagcgauguaaaccugcu

SEQ ID NO: 820193 - RNA, 19 nt, Artificial Sequence
  Description of Artificial Sequence: Synthetic oligonucleotide
gauaacucgguuguccuuu

SEQ ID NO: 820194 - RNA, 19 nt, Artificial Sequence
  Description of Artificial Sequence: Synthetic oligonucleotide
ugcuuaccgaggacugaaa

SEQ ID NO: 820195 - RNA, 19 nt, Artificial Sequence
  Description of Artificial Sequence: Synthetic oligonucleotide
cauaccaaaggcagucugu

SEQ ID NO: 820196 - RNA, 19 nt, Artificial Sequence
  Description of Artificial Sequence: Synthetic oligonucleotide
accgaggacugaaagugca

SEQ ID NO: 820197 - RNA, 19 nt, Artificial Sequence
  Description of Artificial Sequence: Synthetic oligonucleotide
uaguaguggguggcugugc

SEQ ID NO: 820198 - RNA, 19 nt, Artificial Sequence
  Description of Artificial Sequence: Synthetic oligonucleotide
guggguuaaagaaaggauu

SEQ ID NO: 820199 - RNA, 19 nt, Artificial Sequence
  Description of Artificial Sequence: Synthetic oligonucleotide
cacucauuugauuuccuau

SEQ ID NO: 820200 - RNA, 19 nt, Artificial Sequence
  Description of Artificial Sequence: Synthetic oligonucleotide
ugggcaccucacccgaaaa

SEQ ID NO: 820201 - RNA, 19 nt, Artificial Sequence
  Description of Artificial Sequence: Synthetic oligonucleotide
aucuccuuuaugacggcaa

SEQ ID NO: 820202 - RNA, 19 nt, Artificial Sequence
  Description of Artificial Sequence: Synthetic oligonucleotide
aaagaucuuucaagucauu

SEQ ID NO: 820203 - RNA, 19 nt, Artificial Sequence
  Description of Artificial Sequence: Synthetic oligonucleotide
uguagaccauggguagcac

SEQ ID NO: 820204 - RNA, 19 nt, Artificial Sequence
  Description of Artificial Sequence: Synthetic oligonucleotide
gauuggcuccugcuguuua

SEQ ID NO: 820205 - RNA, 19 nt, Artificial Sequence
  Description of Artificial Sequence: Synthetic oligonucleotide
aggaacagacgugaaggua

SEQ ID NO: 820206 - RNA, 19 nt, Artificial Sequence
  Description of Artificial Sequence: Synthetic oligonucleotide
aguguaagugaugcucuuu

SEQ ID NO: 820207 - RNA, 19 nt, Artificial Sequence
  Description of Artificial Sequence: Synthetic oligonucleotide
guguuccgacuccagucug

SEQ ID NO: 820208 - RNA, 19 nt, Artificial Sequence
  Description of Artificial Sequence: Synthetic oligonucleotide
agacuaguaaggacuggau

SEQ ID NO: 820209 - RNA, 19 nt, Artificial Sequence
  Description of Artificial Sequence: Synthetic oligonucleotide
gccgcuacuggucauagua

SEQ ID NO: 820210 - RNA, 19 nt, Artificial Sequence
  Description of Artificial Sequence: Synthetic oligonucleotide
ggguuaaagaaaggauuac

SEQ ID NO: 820211 - RNA, 19 nt, Artificial Sequence
  Description of Artificial Sequence: Synthetic oligonucleotide
gcuccuguucuuuugcuaa

SEQ ID NO: 820212 - RNA, 19 nt, Artificial Sequence
  Description of Artificial Sequence: Synthetic oligonucleotide
guuguaagaaggguaggau

SEQ ID NO: 820213 - RNA, 19 nt, Artificial Sequence
  Description of Artificial Sequence: Synthetic oligonucleotide
aguaaggacuggaucuuua

SEQ ID NO: 820214 - RNA, 19 nt, Artificial Sequence
  Description of Artificial Sequence: Synthetic oligonucleotide
ugcuaacagaaaggcugcu

SEQ ID NO: 820215 - RNA, 19 nt, Artificial Sequence
  Description of Artificial Sequence: Synthetic oligonucleotide
uuggguuucugagggccaa

SEQ ID NO: 820216 - RNA, 19 nt, Artificial Sequence
  Description of Artificial Sequence: Synthetic oligonucleotide
accugcuuaccgaggacug

SEQ ID NO: 820217 - RNA, 19 nt, Artificial Sequence
  Description of Artificial Sequence: Synthetic oligonucleotide
auaacucgguuguccuuuu

SEQ ID NO: 820218 - RNA, 19 nt, Artificial Sequence
  Description of Artificial Sequence: Synthetic oligonucleotide
gcuacuggucauaguagug

SEQ ID NO: 820219 - RNA, 19 nt, Artificial Sequence
  Description of Artificial Sequence: Synthetic oligonucleotide
gggcaccucacccgaaaag

SEQ ID NO: 820220 - RNA, 19 nt, Artificial Sequence
  Description of Artificial Sequence: Synthetic oligonucleotide
augggcaccucacccgaaa

SEQ ID NO: 820221 - RNA, 19 nt, Artificial Sequence
  Description of Artificial Sequence: Synthetic oligonucleotide
gguagcacacuguucuuua

SEQ ID NO: 820222 - RNA, 19 nt, Artificial Sequence
  Description of Artificial Sequence: Synthetic oligonucleotide
ugcguugcccaggccuggg

SEQ ID NO: 820223 - RNA, 19 nt, Artificial Sequence
  Description of Artificial Sequence: Synthetic oligonucleotide
ccgaaaagaucuuucaagu

SEQ ID NO: 820224 - RNA, 19 nt, Artificial Sequence
  Description of Artificial Sequence: Synthetic oligonucleotide
guuagaaggucugcuccaa

SEQ ID NO: 820225 - RNA, 19 nt, Artificial Sequence
  Description of Artificial Sequence: Synthetic oligonucleotide
ggcaguacuuuuccagcca

SEQ ID NO: 820226 - RNA, 19 nt, Artificial Sequence
  Description of Artificial Sequence: Synthetic oligonucleotide
gacauaucgguuggucucu

SEQ ID NO: 820227 - RNA, 19 nt, Artificial Sequence
  Description of Artificial Sequence: Synthetic oligonucleotide
accaucaacuuaagguuuu

SEQ ID NO: 820228 - RNA, 19 nt, Artificial Sequence
  Description of Artificial Sequence: Synthetic oligonucleotide
cauggauggauagucuaua

SEQ ID NO: 820229 - RNA, 19 nt, Artificial Sequence
  Description of Artificial Sequence: Synthetic oligonucleotide
cuccugcuguuuaaacaca

SEQ ID NO: 820230 - RNA, 19 nt, Artificial Sequence
  Description of Artificial Sequence: Synthetic oligonucleotide
gaaggucugcuccaauguu

SEQ ID NO: 820231 - RNA, 19 nt, Artificial Sequence
  Description of Artificial Sequence: Synthetic oligonucleotide
ggauagcugguucaugcua

SEQ ID NO: 820232 - RNA, 19 nt, Artificial Sequence
  Description of Artificial Sequence: Synthetic oligonucleotide
auugcuagcugagccgcua

SEQ ID NO: 820233 - RNA, 19 nt, Artificial Sequence
  Description of Artificial Sequence: Synthetic oligonucleotide
cuggauuggcuccugcugu

SEQ ID NO: 820234 - RNA, 19 nt, Artificial Sequence
  Description of Artificial Sequence: Synthetic oligonucleotide
aacagacgugaagguacuu

SEQ ID NO: 820235 - RNA, 19 nt, Artificial Sequence
  Description of Artificial Sequence: Synthetic oligonucleotide
ugagccgcuacuggucaua

SEQ ID NO: 820236 - RNA, 19 nt, Artificial Sequence
  Description of Artificial Sequence: Synthetic oligonucleotide
ccgcuacuggucauaguag

SEQ ID NO: 820237 - RNA, 19 nt, Artificial Sequence
  Description of Artificial Sequence: Synthetic oligonucleotide
accauggguagcacacugu

SEQ ID NO: 820238 - RNA, 19 nt, Artificial Sequence
  Description of Artificial Sequence: Synthetic oligonucleotide
gcagacauaucgguugguc

SEQ ID NO: 820239 - RNA, 19 nt, Artificial Sequence
  Description of Artificial Sequence: Synthetic oligonucleotide
cccggaagucugaaagccc

SEQ ID NO: 820240 - RNA, 19 nt, Artificial Sequence
  Description of Artificial Sequence: Synthetic oligonucleotide
gaggcguuuguaagagaaa

SEQ ID NO: 820241 - RNA, 19 nt, Artificial Sequence
  Description of Artificial Sequence: Synthetic oligonucleotide
uggguagcacacuguucuu

SEQ ID NO: 820242 - RNA, 19 nt, Artificial Sequence
  Description of Artificial Sequence: Synthetic oligonucleotide
agaccauggguagcacacu

SEQ ID NO: 820243 - RNA, 19 nt, Artificial Sequence
  Description of Artificial Sequence: Synthetic oligonucleotide
ccggaagucugaaagccca

SEQ ID NO: 820244 - RNA, 19 nt, Artificial Sequence
  Description of Artificial Sequence: Synthetic oligonucleotide
gaacagacgugaagguacu

SEQ ID NO: 820245 - RNA, 19 nt, Artificial Sequence
  Description of Artificial Sequence: Synthetic oligonucleotide
gauugagauuaagauuguu

SEQ ID NO: 820246 - RNA, 19 nt, Artificial Sequence
  Description of Artificial Sequence: Synthetic oligonucleotide
guugaacccggaagucuga

SEQ ID NO: 820247 - RNA, 19 nt, Artificial Sequence
  Description of Artificial Sequence: Synthetic oligonucleotide
ggguaggauaucaucaagu

SEQ ID NO: 820248 - RNA, 19 nt, Artificial Sequence
  Description of Artificial Sequence: Synthetic oligonucleotide
agcacucauuugauuuccu

SEQ ID NO: 820249 - RNA, 19 nt, Artificial Sequence
  Description of Artificial Sequence: Synthetic oligonucleotide
cugcuuaccgaggacugaa

SEQ ID NO: 820250 - RNA, 19 nt, Artificial Sequence
  Description of Artificial Sequence: Synthetic oligonucleotide
caucuccuuuaugacggca

SEQ ID NO: 820251 - RNA, 19 nt, Artificial Sequence
  Description of Artificial Sequence: Synthetic oligonucleotide
cugaacugauugagauuaa

SEQ ID NO: 820252 - RNA, 19 nt, Artificial Sequence
  Description of Artificial Sequence: Synthetic oligonucleotide
gcugagccgcuacugguca

SEQ ID NO: 820253 - RNA, 19 nt, Artificial Sequence
  Description of Artificial Sequence: Synthetic oligonucleotide
ugcugacuuccagcaugug

SEQ ID NO: 820254 - RNA, 19 nt, Artificial Sequence
  Description of Artificial Sequence: Synthetic oligonucleotide
ccagagucaucguggucac

SEQ ID NO: 820255 - RNA, 19 nt, Artificial Sequence
  Description of Artificial Sequence: Synthetic oligonucleotide
caucguggucacuccagcu

SEQ ID NO: 820256 - RNA, 19 nt, Artificial Sequence
  Description of Artificial Sequence: Synthetic oligonucleotide
ggcugcguugcccaggccu

SEQ ID NO: 820257 - RNA, 19 nt, Artificial Sequence
  Description of Artificial Sequence: Synthetic oligonucleotide
auucaccugcgugcccaug

SEQ ID NO: 820258 - RNA, 19 nt, Artificial Sequence
  Description of Artificial Sequence: Synthetic oligonucleotide
uuggauugacuggcauguu

SEQ ID NO: 820259 - RNA, 19 nt, Artificial Sequence
  Description of Artificial Sequence: Synthetic oligonucleotide
cugaaagugcagugacccu

SEQ ID NO: 820260 - RNA, 19 nt, Artificial Sequence
  Description of Artificial Sequence: Synthetic oligonucleotide
agccgcuacuggucauagu

SEQ ID NO: 820261 - RNA, 19 nt, Artificial Sequence
  Description of Artificial Sequence: Synthetic oligonucleotide
cugcgugcccauggcugcg

SEQ ID NO: 820262 - RNA, 19 nt, Artificial Sequence
  Description of Artificial Sequence: Synthetic oligonucleotide
gcacucauuugauuuccua

SEQ ID NO: 820263 - RNA, 19 nt, Artificial Sequence
  Description of Artificial Sequence: Synthetic oligonucleotide
cacgaacagcaagggaaga

SEQ ID NO: 820264 - RNA, 19 nt, Artificial Sequence
  Description of Artificial Sequence: Synthetic oligonucleotide
gcuuaguccuguguuccga

SEQ ID NO: 820265 - RNA, 19 nt, Artificial Sequence
  Description of Artificial Sequence: Synthetic oligonucleotide
agccacugauuugguuucu

SEQ ID NO: 820266 - RNA, 19 nt, Artificial Sequence
  Description of Artificial Sequence: Synthetic oligonucleotide
gguuuggauugacuggcau

SEQ ID NO: 820267 - RNA, 19 nt, Artificial Sequence
  Description of Artificial Sequence: Synthetic oligonucleotide
gucuccucgggagcacuca

SEQ ID NO: 820268 - RNA, 19 nt, Artificial Sequence
  Description of Artificial Sequence: Synthetic oligonucleotide
ggaaugagaugaggcagua

SEQ ID NO: 820269 - RNA, 19 nt, Artificial Sequence
  Description of Artificial Sequence: Synthetic oligonucleotide
ugcgugcccauggcugcgu

SEQ ID NO: 820270 - RNA, 19 nt, Artificial Sequence
  Description of Artificial Sequence: Synthetic oligonucleotide
cuauuacauucaccugcgu

SEQ ID NO: 820271 - RNA, 19 nt, Artificial Sequence
  Description of Artificial Sequence: Synthetic oligonucleotide
cauaucgguuggucucugu

SEQ ID NO: 820272 - RNA, 19 nt, Artificial Sequence
  Description of Artificial Sequence: Synthetic oligonucleotide
gcaagggaagauguuugua

SEQ ID NO: 820273 - RNA, 19 nt, Artificial Sequence
  Description of Artificial Sequence: Synthetic oligonucleotide
ccucgggagcacucauuug

SEQ ID NO: 820274 - RNA, 19 nt, Artificial Sequence
  Description of Artificial Sequence: Synthetic oligonucleotide
ggauuacccugcauaccaa

SEQ ID NO: 820275 - RNA, 19 nt, Artificial Sequence
  Description of Artificial Sequence: Synthetic oligonucleotide
cauugcuagcugagccgcu

SEQ ID NO: 820276 - RNA, 19 nt, Artificial Sequence
  Description of Artificial Sequence: Synthetic oligonucleotide
ggcguuuguaagagaaaau

SEQ ID NO: 820277 - RNA, 19 nt, Artificial Sequence
  Description of Artificial Sequence: Synthetic oligonucleotide
cucacccgaaaagaucuuu

SEQ ID NO: 820278 - RNA, 19 nt, Artificial Sequence
  Description of Artificial Sequence: Synthetic oligonucleotide
ccugcauaccaaaggcagu

SEQ ID NO: 820279 - RNA, 19 nt, Artificial Sequence
  Description of Artificial Sequence: Synthetic oligonucleotide
gugcaacguuugucuccuc

SEQ ID NO: 820280 - RNA, 19 nt, Artificial Sequence
  Description of Artificial Sequence: Synthetic oligonucleotide
gguuaggagcaaauccauu

SEQ ID NO: 820281 - RNA, 19 nt, Artificial Sequence
  Description of Artificial Sequence: Synthetic oligonucleotide
cgcuacuggucauaguagu

SEQ ID NO: 820282 - RNA, 19 nt, Artificial Sequence
  Description of Artificial Sequence: Synthetic oligonucleotide
ccugcuuaccgaggacuga

SEQ ID NO: 820283 - RNA, 19 nt, Artificial Sequence
  Description of Artificial Sequence: Synthetic oligonucleotide
cagcgauguaaaccugcuu

SEQ ID NO: 820284 - RNA, 19 nt, Artificial Sequence
  Description of Artificial Sequence: Synthetic oligonucleotide
cuccucgggagcacucauu

SEQ ID NO: 820285 - RNA, 19 nt, Artificial Sequence
  Description of Artificial Sequence: Synthetic oligonucleotide
cugagccgcuacuggucau

SEQ ID NO: 820286 - RNA, 19 nt, Artificial Sequence
  Description of Artificial Sequence: Synthetic oligonucleotide
cgguuguccuuuuguacuu

SEQ ID NO: 820287 - RNA, 19 nt, Artificial Sequence
  Description of Artificial Sequence: Synthetic oligonucleotide
ccucacccgaaaagaucuu

SEQ ID NO: 820288 - RNA, 19 nt, Artificial Sequence
  Description of Artificial Sequence: Synthetic oligonucleotide
cgggagcacucauuugauu

SEQ ID NO: 820289 - RNA, 19 nt, Artificial Sequence
  Description of Artificial Sequence: Synthetic oligonucleotide
uuuaaagucaaucauaaca

SEQ ID NO: 820290 - RNA, 19 nt, Artificial Sequence
  Description of Artificial Sequence: Synthetic oligonucleotide
auaaauauuuaccaugucc

SEQ ID NO: 820291 - RNA, 19 nt, Artificial Sequence
  Description of Artificial Sequence: Synthetic oligonucleotide
uuuaccauguccuauaucc

SEQ ID NO: 820292 - RNA, 19 nt, Artificial Sequence
  Description of Artificial Sequence: Synthetic oligonucleotide
ucaaucauaacaaagucgu

SEQ ID NO: 820293 - RNA, 19 nt, Artificial Sequence
  Description of Artificial Sequence: Synthetic oligonucleotide
aguaagaucaagcaggcag

SEQ ID NO: 820294 - RNA, 19 nt, Artificial Sequence
  Description of Artificial Sequence: Synthetic oligonucleotide
gacaguaagaucaagcagg

SEQ ID NO: 820295 - RNA, 19 nt, Artificial Sequence
  Description of Artificial Sequence: Synthetic oligonucleotide
aagaaugucgucuuuagaa

SEQ ID NO: 820296 - RNA, 19 nt, Artificial Sequence
  Description of Artificial Sequence: Synthetic oligonucleotide
ucuaaugaguaacagcugc

SEQ ID NO: 820297 - RNA, 19 nt, Artificial Sequence
  Description of Artificial Sequence: Synthetic oligonucleotide
cauuauguagagcugaagg

SEQ ID NO: 820298 - RNA, 19 nt, Artificial Sequence
  Description of Artificial Sequence: Synthetic oligonucleotide
uguccuauauccaagcagc

SEQ ID NO: 820299 - RNA, 19 nt, Artificial Sequence
  Description of Artificial Sequence: Synthetic oligonucleotide
aaagaagguagguagacaa

SEQ ID NO: 820300 - RNA, 19 nt, Artificial Sequence
  Description of Artificial Sequence: Synthetic oligonucleotide
augcagauuacuaacaagc

SEQ ID NO: 820301 - RNA, 19 nt, Artificial Sequence
  Description of Artificial Sequence: Synthetic oligonucleotide
aaagucgucauguguauug

SEQ ID NO: 820302 - RNA, 19 nt, Artificial Sequence
  Description of Artificial Sequence: Synthetic oligonucleotide
aguauccacguucucaccc

SEQ ID NO: 820303 - RNA, 19 nt, Artificial Sequence
  Description of Artificial Sequence: Synthetic oligonucleotide
ucuugauuauauuuuaccu

SEQ ID NO: 820304 - RNA, 19 nt, Artificial Sequence
  Description of Artificial Sequence: Synthetic oligonucleotide
ugacuuauuacucaagcaa

SEQ ID NO: 820305 - RNA, 19 nt, Artificial Sequence
  Description of Artificial Sequence: Synthetic oligonucleotide
uaagucaaccaaaagcuca

SEQ ID NO: 820306 - RNA, 19 nt, Artificial Sequence
  Description of Artificial Sequence: Synthetic oligonucleotide
aaauaucugauuucucuga

SEQ ID NO: 820307 - RNA, 19 nt, Artificial Sequence
  Description of Artificial Sequence: Synthetic oligonucleotide
cuugauuauauuuuaccug

SEQ ID NO: 820308 - RNA, 19 nt, Artificial Sequence
  Description of Artificial Sequence: Synthetic oligonucleotide
aauucuugggagcaaacau

SEQ ID NO: 820309 - RNA, 19 nt, Artificial Sequence
  Description of Artificial Sequence: Synthetic oligonucleotide
aaaugcucccacuuuucgg

SEQ ID NO: 820310 - RNA, 19 nt, Artificial Sequence
  Description of Artificial Sequence: Synthetic oligonucleotide
agagucuuccacgauagcc

SEQ ID NO: 820311 - RNA, 19 nt, Artificial Sequence
  Description of Artificial Sequence: Synthetic oligonucleotide
aggaauaguuccucagucc

SEQ ID NO: 820312 - RNA, 19 nt, Artificial Sequence
  Description of Artificial Sequence: Synthetic oligonucleotide
aaugcucccacuuuucgga

SEQ ID NO: 820313 - RNA, 19 nt, Artificial Sequence
  Description of Artificial Sequence: Synthetic oligonucleotide
ugucauuuggccaccacug

SEQ ID NO: 820314 - RNA, 19 nt, Artificial Sequence
  Description of Artificial Sequence: Synthetic oligonucleotide
aacccagggccauauacgg

SEQ ID NO: 820315 - RNA, 19 nt, Artificial Sequence
  Description of Artificial Sequence: Synthetic oligonucleotide
auauccaagcagcagcaac

SEQ ID NO: 820316 - RNA, 19 nt, Artificial Sequence
  Description of Artificial Sequence: Synthetic oligonucleotide
aaaucugguucaguaggcc

SEQ ID NO: 820317 - RNA, 19 nt, Artificial Sequence
  Description of Artificial Sequence: Synthetic oligonucleotide
uuuguugacaaaugcuccc

SEQ ID NO: 820318 - RNA, 19 nt, Artificial Sequence
  Description of Artificial Sequence: Synthetic oligonucleotide
uaacaagcaguugugagcc

SEQ ID NO: 820319 - RNA, 19 nt, Artificial Sequence
  Description of Artificial Sequence: Synthetic oligonucleotide
aggaauccaagucuuccgc

SEQ ID NO: 820320 - RNA, 19 nt, Artificial Sequence
  Description of Artificial Sequence: Synthetic oligonucleotide
guagacaacacuuccugag

SEQ ID NO: 820321 - RNA, 19 nt, Artificial Sequence
  Description of Artificial Sequence: Synthetic oligonucleotide
ugaagguuuaagucaacca

SEQ ID NO: 820322 - RNA, 19 nt, Artificial Sequence
  Description of Artificial Sequence: Synthetic oligonucleotide
gucaaucauaacaaagucg

SEQ ID NO: 820323 - RNA, 19 nt, Artificial Sequence
  Description of Artificial Sequence: Synthetic oligonucleotide
ugcugaagcucccaugagg

SEQ ID NO: 820324 - RNA, 19 nt, Artificial Sequence
  Description of Artificial Sequence: Synthetic oligonucleotide
uuucggacaaagauagucu

SEQ ID NO: 820325 - RNA, 19 nt, Artificial Sequence
  Description of Artificial Sequence: Synthetic oligonucleotide
aaugucuauggaaaggcug

SEQ ID NO: 820326 - RNA, 19 nt, Artificial Sequence
  Description of Artificial Sequence: Synthetic oligonucleotide
ugguaaggaauccaagucu

SEQ ID NO: 820327 - RNA, 19 nt, Artificial Sequence
  Description of Artificial Sequence: Synthetic oligonucleotide
auuuuaccuggucccagcc

SEQ ID NO: 820328 - RNA, 19 nt, Artificial Sequence
  Description of Artificial Sequence: Synthetic oligonucleotide
cuuuauuggaaaucucuug

SEQ ID NO: 820329 - RNA, 19 nt, Artificial Sequence
  Description of Artificial Sequence: Synthetic oligonucleotide
agaucaagcaggcaggggu

SEQ ID NO: 820330 - RNA, 19 nt, Artificial Sequence
  Description of Artificial Sequence: Synthetic oligonucleotide
gaagguuuaagucaaccaa

SEQ ID NO: 820331 - RNA, 19 nt, Artificial Sequence
  Description of Artificial Sequence: Synthetic oligonucleotide
ugcuguuagauacagucuc

SEQ ID NO: 820332 - RNA, 19 nt, Artificial Sequence
  Description of Artificial Sequence: Synthetic oligonucleotide
gggauucugaaauucacgg

SEQ ID NO: 820333 - RNA, 19 nt, Artificial Sequence
  Description of Artificial Sequence: Synthetic oligonucleotide
aaaggguauguccaaacuu

SEQ ID NO: 820334 - RNA, 19 nt, Artificial Sequence
  Description of Artificial Sequence: Synthetic oligonucleotide
aagguccccaaguccaucg

SEQ ID NO: 820335 - RNA, 19 nt, Artificial Sequence
  Description of Artificial Sequence: Synthetic oligonucleotide
aaggguauguccaaacuug

SEQ ID NO: 820336 - RNA, 19 nt, Artificial Sequence
  Description of Artificial Sequence: Synthetic oligonucleotide
guauguccaaacuugucag

SEQ ID NO: 820337 - RNA, 19 nt, Artificial Sequence
  Description of Artificial Sequence: Synthetic oligonucleotide
aagguuucgacaaaggcau

SEQ ID NO: 820338 - RNA, 19 nt, Artificial Sequence
  Description of Artificial Sequence: Synthetic oligonucleotide
uugacuuauuacucaagca

SEQ ID NO: 820339 - RNA, 19 nt, Artificial Sequence
  Description of Artificial Sequence: Synthetic oligonucleotide
aauauuuaccauguccuau

SEQ ID NO: 820340 - RNA, 19 nt, Artificial Sequence
  Description of Artificial Sequence: Synthetic oligonucleotide
uguuacaugcagauuacua

SEQ ID NO: 820341 - RNA, 19 nt, Artificial Sequence
  Description of Artificial Sequence: Synthetic oligonucleotide
augucuauggaaaggcugc

SEQ ID NO: 820342 - RNA, 19 nt, Artificial Sequence
  Description of Artificial Sequence: Synthetic oligonucleotide
aucgaauucucggacauuc

SEQ ID NO: 820343 - RNA, 19 nt, Artificial Sequence
  Description of Artificial Sequence: Synthetic oligonucleotide
auguccuauauccaagcag

SEQ ID NO: 820344 - RNA, 19 nt, Artificial Sequence
  Description of Artificial Sequence: Synthetic oligonucleotide
aaguauccacguucucacc

SEQ ID NO: 820345 - RNA, 19 nt, Artificial Sequence
  Description of Artificial Sequence: Synthetic oligonucleotide
guaaaagguccccaagucc

SEQ ID NO: 820346 - RNA, 19 nt, Artificial Sequence
  Description of Artificial Sequence: Synthetic oligonucleotide
gaaugugccugauccaaag

SEQ ID NO: 820347 - RNA, 19 nt, Artificial Sequence
  Description of Artificial Sequence: Synthetic oligonucleotide
gauuauauuuuaccugguc

SEQ ID NO: 820348 - RNA, 19 nt, Artificial Sequence
  Description of Artificial Sequence: Synthetic oligonucleotide
aaggcaucgaauucucgga

SEQ ID NO: 820349 - RNA, 19 nt, Artificial Sequence
  Description of Artificial Sequence: Synthetic oligonucleotide
agcagguuuaaagucaauc

SEQ ID NO: 820350 - RNA, 19 nt, Artificial Sequence
  Description of Artificial Sequence: Synthetic oligonucleotide
ugcaagguuucgacaaagg

SEQ ID NO: 820351 - RNA, 19 nt, Artificial Sequence
  Description of Artificial Sequence: Synthetic oligonucleotide
aagucgucauguguauugc

SEQ ID NO: 820352 - RNA, 19 nt, Artificial Sequence
  Description of Artificial Sequence: Synthetic oligonucleotide
guagguagacaacacuucc

SEQ ID NO: 820353 - RNA, 19 nt, Artificial Sequence
  Description of Artificial Sequence: Synthetic oligonucleotide
cucauguacagccagcuuc

SEQ ID NO: 820354 - RNA, 19 nt, Artificial Sequence
  Description of Artificial Sequence: Synthetic oligonucleotide
aagguagguagacaacacu

SEQ ID NO: 820355 - RNA, 19 nt, Artificial Sequence
  Description of Artificial Sequence: Synthetic oligonucleotide
uuauuacucaagcaacaau

SEQ ID NO: 820356 - RNA, 19 nt, Artificial Sequence
  Description of Artificial Sequence: Synthetic oligonucleotide
aaauauuuaccauguccua

SEQ ID NO: 820357 - RNA, 19 nt, Artificial Sequence
  Description of Artificial Sequence: Synthetic oligonucleotide
caagucuuccgccauagac

SEQ ID NO: 820358 - RNA, 19 nt, Artificial Sequence
  Description of Artificial Sequence: Synthetic oligonucleotide
aggcacuugacuuauuacu

SEQ ID NO: 820359 - RNA, 19 nt, Artificial Sequence
  Description of Artificial Sequence: Synthetic oligonucleotide
guaagaucaagcaggcagg

SEQ ID NO: 820360 - RNA, 19 nt, Artificial Sequence
  Description of Artificial Sequence: Synthetic oligonucleotide
caagguuucgacaaaggca

SEQ ID NO: 820361 - RNA, 19 nt, Artificial Sequence
  Description of Artificial Sequence: Synthetic oligonucleotide
gaaccaucagcugggaggg

SEQ ID NO: 820362 - RNA, 19 nt, Artificial Sequence
  Description of Artificial Sequence: Synthetic oligonucleotide
gacacugcuaaccccaaac

SEQ ID NO: 820363 - RNA, 19 nt, Artificial Sequence
  Description of Artificial Sequence: Synthetic oligonucleotide
guucaguaggccaugaaug

SEQ ID NO: 820364 - RNA, 19 nt, Artificial Sequence
  Description of Artificial Sequence: Synthetic oligonucleotide
uucaguaggccaugaaugu

SEQ ID NO: 820365 - RNA, 19 nt, Artificial Sequence
  Description of Artificial Sequence: Synthetic oligonucleotide
ucgacaaaggcaucgaauu

SEQ ID NO: 820366 - RNA, 19 nt, Artificial Sequence
  Description of Artificial Sequence: Synthetic oligonucleotide
uugccaaguauccacguuc

SEQ ID NO: 820367 - RNA, 19 nt, Artificial Sequence
  Description of Artificial Sequence: Synthetic oligonucleotide
aucauaacaaagucgucau

SEQ ID NO: 820368 - RNA, 19 nt, Artificial Sequence
  Description of Artificial Sequence: Synthetic oligonucleotide
caugcagauuacuaacaag

SEQ ID NO: 820369 - RNA, 19 nt, Artificial Sequence
  Description of Artificial Sequence: Synthetic oligonucleotide
ucucuugauuauauuuuac

SEQ ID NO: 820370 - RNA, 19 nt, Artificial Sequence
  Description of Artificial Sequence: Synthetic oligonucleotide
caguaggccaugaaugugc

SEQ ID NO: 820371 - RNA, 19 nt, Artificial Sequence
  Description of Artificial Sequence: Synthetic oligonucleotide
auagacugggcuccaaugu

SEQ ID NO: 820372 - RNA, 19 nt, Artificial Sequence
  Description of Artificial Sequence: Synthetic oligonucleotide
cauagggaaggaaccaccc

SEQ ID NO: 820373 - RNA, 19 nt, Artificial Sequence
  Description of Artificial Sequence: Synthetic oligonucleotide
uauuuuaccuggucccagc

SEQ ID NO: 820374 - RNA, 19 nt, Artificial Sequence
  Description of Artificial Sequence: Synthetic oligonucleotide
gaggaauaguuccucaguc

SEQ ID NO: 820375 - RNA, 19 nt, Artificial Sequence
  Description of Artificial Sequence: Synthetic oligonucleotide
aagucaaccaaaagcucag

SEQ ID NO: 820376 - RNA, 19 nt, Artificial Sequence
  Description of Artificial Sequence: Synthetic oligonucleotide
aagaagguagguagacaac

SEQ ID NO: 820377 - RNA, 19 nt, Artificial Sequence
  Description of Artificial Sequence: Synthetic oligonucleotide
uucgacaaaggcaucgaau

SEQ ID NO: 820378 - RNA, 19 nt, Artificial Sequence
  Description of Artificial Sequence: Synthetic oligonucleotide
ucggacaaagauagucucc

SEQ ID NO: 820379 - RNA, 19 nt, Artificial Sequence
  Description of Artificial Sequence: Synthetic oligonucleotide
uagacaacacuuccugaga

SEQ ID NO: 820380 - RNA, 19 nt, Artificial Sequence
  Description of Artificial Sequence: Synthetic oligonucleotide
aagucuuccgccauagacu

SEQ ID NO: 820381 - RNA, 19 nt, Artificial Sequence
  Description of Artificial Sequence: Synthetic oligonucleotide
agaaugucgucuuuagaaa

SEQ ID NO: 820382 - RNA, 19 nt, Artificial Sequence
  Description of Artificial Sequence: Synthetic oligonucleotide
ucauuuggccaccacugcu

SEQ ID NO: 820383 - RNA, 19 nt, Artificial Sequence
  Description of Artificial Sequence: Synthetic oligonucleotide
agaagguagguagacaaca

SEQ ID NO: 820384 - RNA, 19 nt, Artificial Sequence
  Description of Artificial Sequence: Synthetic oligonucleotide
aggugcaugagucaccagu

SEQ ID NO: 820385 - RNA, 19 nt, Artificial Sequence
  Description of Artificial Sequence: Synthetic oligonucleotide
ucaaccaaaagcucagcuu

SEQ ID NO: 820386 - RNA, 19 nt, Artificial Sequence
  Description of Artificial Sequence: Synthetic oligonucleotide
agucucagugacucgagca

SEQ ID NO: 820387 - RNA, 19 nt, Artificial Sequence
  Description of Artificial Sequence: Synthetic oligonucleotide
ugagccacccgcucuaaug

SEQ ID NO: 820388 - RNA, 19 nt, Artificial Sequence
  Description of Artificial Sequence: Synthetic oligonucleotide
cagccgaaggaacagaaug

SEQ ID NO: 820389 - RNA, 19 nt, Artificial Sequence
  Description of Artificial Sequence: Synthetic oligonucleotide
acuguuacugcaagguuuc

SEQ ID NO: 820390 - RNA, 19 nt, Artificial Sequence
  Description of Artificial Sequence: Synthetic oligonucleotide
ugguuucucaaaagggaac

SEQ ID NO: 820391 - RNA, 19 nt, Artificial Sequence
  Description of Artificial Sequence: Synthetic oligonucleotide
auauuuaccauguccuaua

SEQ ID NO: 820392 - RNA, 19 nt, Artificial Sequence
  Description of Artificial Sequence: Synthetic oligonucleotide
cugguaaggaauccaaguc

SEQ ID NO: 820393 - RNA, 19 nt, Artificial Sequence
  Description of Artificial Sequence: Synthetic oligonucleotide
uccaaacuugucaggguca

SEQ ID NO: 820394 - RNA, 19 nt, Artificial Sequence
  Description of Artificial Sequence: Synthetic oligonucleotide
uauacggacucuggaauug

SEQ ID NO: 820395 - RNA, 19 nt, Artificial Sequence
  Description of Artificial Sequence: Synthetic oligonucleotide
uucggacaaagauagucuc

SEQ ID NO: 820396 - RNA, 19 nt, Artificial Sequence
  Description of Artificial Sequence: Synthetic oligonucleotide
aggcaucgaauucucggac

SEQ ID NO: 820397 - RNA, 19 nt, Artificial Sequence
  Description of Artificial Sequence: Synthetic oligonucleotide
ugauuauauuuuaccuggu

SEQ ID NO: 820398 - RNA, 19 nt, Artificial Sequence
  Description of Artificial Sequence: Synthetic oligonucleotide
aguguuacaugcagauuac

SEQ ID NO: 820399 - RNA, 19 nt, Artificial Sequence
  Description of Artificial Sequence: Synthetic oligonucleotide
cagauuacuaacaagcagu

SEQ ID NO: 820400 - RNA, 19 nt, Artificial Sequence
  Description of Artificial Sequence: Synthetic oligonucleotide
aguugcagaguagaccagg

SEQ ID NO: 820401 - RNA, 19 nt, Artificial Sequence
  Description of Artificial Sequence: Synthetic oligonucleotide
acaagcaguugugagccac

SEQ ID NO: 820402 - RNA, 19 nt, Artificial Sequence
  Description of Artificial Sequence: Synthetic oligonucleotide
uaugcacaggggaaaggcu

SEQ ID NO: 820403 - RNA, 19 nt, Artificial Sequence
  Description of Artificial Sequence: Synthetic oligonucleotide
gacuuguaggucccauagg

SEQ ID NO: 820404 - RNA, 19 nt, Artificial Sequence
  Description of Artificial Sequence: Synthetic oligonucleotide
uucaccauaggaucagcau

SEQ ID NO: 820405 - RNA, 19 nt, Artificial Sequence
  Description of Artificial Sequence: Synthetic oligonucleotide
gcagauuacuaacaagcag

SEQ ID NO: 820406 - RNA, 19 nt, Artificial Sequence
  Description of Artificial Sequence: Synthetic oligonucleotide
acucuggaauuggagaggg

SEQ ID NO: 820407 - RNA, 19 nt, Artificial Sequence
  Description of Artificial Sequence: Synthetic oligonucleotide
uguuagauacagucucagu

SEQ ID NO: 820408 - RNA, 19 nt, Artificial Sequence
  Description of Artificial Sequence: Synthetic oligonucleotide
cugaagguuuaagucaacc

SEQ ID NO: 820409 - RNA, 19 nt, Artificial Sequence
  Description of Artificial Sequence: Synthetic oligonucleotide
aguuggucuagagacuauc

SEQ ID NO: 820410 - RNA, 19 nt, Artificial Sequence
  Description of Artificial Sequence: Synthetic oligonucleotide
aacauggcaaaggguaugu

SEQ ID NO: 820411 - RNA, 19 nt, Artificial Sequence
  Description of Artificial Sequence: Synthetic oligonucleotide
cugagucuugccaaguauc

SEQ ID NO: 820412 - RNA, 19 nt, Artificial Sequence
  Description of Artificial Sequence: Synthetic oligonucleotide
ugcugauggucccugcuga

SEQ ID NO: 820413 - RNA, 19 nt, Artificial Sequence
  Description of Artificial Sequence: Synthetic oligonucleotide
cucaggacacuguuacugc

SEQ ID NO: 820414 - RNA, 19 nt, Artificial Sequence
  Description of Artificial Sequence: Synthetic oligonucleotide
caguguuacaugcagauua

SEQ ID NO: 820415 - RNA, 19 nt, Artificial Sequence
  Description of Artificial Sequence: Synthetic oligonucleotide
uccuauauccaagcagcag

SEQ ID NO: 820416 - RNA, 19 nt, Artificial Sequence
  Description of Artificial Sequence: Synthetic oligonucleotide
ugucagggucaccugguug

SEQ ID NO: 820417 - RNA, 19 nt, Artificial Sequence
  Description of Artificial Sequence: Synthetic oligonucleotide
agacaccuccuccuucccc

SEQ ID NO: 820418 - RNA, 19 nt, Artificial Sequence
  Description of Artificial Sequence: Synthetic oligonucleotide
uaccauguccuauauccaa

SEQ ID NO: 820419 - RNA, 19 nt, Artificial Sequence
  Description of Artificial Sequence: Synthetic oligonucleotide
gccagugacaaucagggac

SEQ ID NO: 820420 - RNA, 19 nt, Artificial Sequence
  Description of Artificial Sequence: Synthetic oligonucleotide
aagaucaagcaggcagggg

SEQ ID NO: 820421 - RNA, 19 nt, Artificial Sequence
  Description of Artificial Sequence: Synthetic oligonucleotide
auucacgguaaaagguccc

SEQ ID NO: 820422 - RNA, 19 nt, Artificial Sequence
  Description of Artificial Sequence: Synthetic oligonucleotide
gucuacagaggccacuggc

SEQ ID NO: 820423 - RNA, 19 nt, Artificial Sequence
  Description of Artificial Sequence: Synthetic oligonucleotide
aguccaucggaagaauguc

SEQ ID NO: 820424 - RNA, 19 nt, Artificial Sequence
  Description of Artificial Sequence: Synthetic oligonucleotide
gaauucucggacauucuuc

SEQ ID NO: 820425 - RNA, 19 nt, Artificial Sequence
  Description of Artificial Sequence: Synthetic oligonucleotide
ggacuuguaggucccauag

SEQ ID NO: 820426 - RNA, 19 nt, Artificial Sequence
  Description of Artificial Sequence: Synthetic oligonucleotide
agugucauuuggccaccac

SEQ ID NO: 820427 - RNA, 19 nt, Artificial Sequence
  Description of Artificial Sequence: Synthetic oligonucleotide
ugacaaucagggaccagaa

SEQ ID NO: 820428 - RNA, 19 nt, Artificial Sequence
  Description of Artificial Sequence: Synthetic oligonucleotide
gucaguugcagaguagacc

SEQ ID NO: 820429 - RNA, 19 nt, Artificial Sequence
  Description of Artificial Sequence: Synthetic oligonucleotide
ucgucauguguauugccac

SEQ ID NO: 820430 - RNA, 19 nt, Artificial Sequence
  Description of Artificial Sequence: Synthetic oligonucleotide
cagaaaacuuuauuggaaa

SEQ ID NO: 820431 - RNA, 19 nt, Artificial Sequence
  Description of Artificial Sequence: Synthetic oligonucleotide
acuuauuacucaagcaaca

SEQ ID NO: 820432 - RNA, 19 nt, Artificial Sequence
  Description of Artificial Sequence: Synthetic oligonucleotide
gacaaucagggaccagaag

SEQ ID NO: 820433 - RNA, 19 nt, Artificial Sequence
  Description of Artificial Sequence: Synthetic oligonucleotide
agccgaaggaacagaaugg

SEQ ID NO: 820434 - RNA, 19 nt, Artificial Sequence
  Description of Artificial Sequence: Synthetic oligonucleotide
acgguaaaagguccccaag

SEQ ID NO: 820435 - RNA, 19 nt, Artificial Sequence
  Description of Artificial Sequence: Synthetic oligonucleotide
uguuacugcaagguuucga

SEQ ID NO: 820436 - RNA, 19 nt, Artificial Sequence
  Description of Artificial Sequence: Synthetic oligonucleotide
aacaauaccugaagguuua

SEQ ID NO: 820437 - RNA, 19 nt, Artificial Sequence
  Description of Artificial Sequence: Synthetic oligonucleotide
gaagaaugucgucuuuaga

SEQ ID NO: 820438 - RNA, 19 nt, Artificial Sequence
  Description of Artificial Sequence: Synthetic oligonucleotide
gagguucucugcugggucc

SEQ ID NO: 820439 - RNA, 19 nt, Artificial Sequence
  Description of Artificial Sequence: Synthetic oligonucleotide
uagacugggcuccaauguc

SEQ ID NO: 820440 - RNA, 19 nt, Artificial Sequence
  Description of Artificial Sequence: Synthetic oligonucleotide
gauuacuaacaagcaguug

SEQ ID NO: 820441 - RNA, 19 nt, Artificial Sequence
  Description of Artificial Sequence: Synthetic oligonucleotide
cuccugaucggccugggug

SEQ ID NO: 820442 - RNA, 19 nt, Artificial Sequence
  Description of Artificial Sequence: Synthetic oligonucleotide
aaagcagguuuaaagucaa

SEQ ID NO: 820443 - RNA, 19 nt, Artificial Sequence
  Description of Artificial Sequence: Synthetic oligonucleotide
gguuucgacaaaggcaucg

SEQ ID NO: 820444 - RNA, 19 nt, Artificial Sequence
  Description of Artificial Sequence: Synthetic oligonucleotide
caagagguaccccaccuuc

SEQ ID NO: 820445 - RNA, 19 nt, Artificial Sequence
  Description of Artificial Sequence: Synthetic oligonucleotide
gcaagguuucgacaaaggc

SEQ ID NO: 820446 - RNA, 19 nt, Artificial Sequence
  Description of Artificial Sequence: Synthetic oligonucleotide
uucucauguacagccagcu

SEQ ID NO: 820447 - RNA, 19 nt, Artificial Sequence
  Description of Artificial Sequence: Synthetic oligonucleotide
auauuuuaccuggucccag

SEQ ID NO: 820448 - RNA, 19 nt, Artificial Sequence
  Description of Artificial Sequence: Synthetic oligonucleotide
cucugguaaggaauccaag

SEQ ID NO: 820449 - RNA, 19 nt, Artificial Sequence
  Description of Artificial Sequence: Synthetic oligonucleotide
ugcugagcacauuucucug

SEQ ID NO: 820450 - RNA, 19 nt, Artificial Sequence
  Description of Artificial Sequence: Synthetic oligonucleotide
cauaacaaagucgucaugu

SEQ ID NO: 820451 - RNA, 19 nt, Artificial Sequence
  Description of Artificial Sequence: Synthetic oligonucleotide
uuucgacaaaggcaucgaa

SEQ ID NO: 820452 - RNA, 19 nt, Artificial Sequence
  Description of Artificial Sequence: Synthetic oligonucleotide
caaaggcaucgaauucucg

SEQ ID NO: 820453 - RNA, 19 nt, Artificial Sequence
  Description of Artificial Sequence: Synthetic oligonucleotide
agcaagagguaccccaccu

SEQ ID NO: 820454 - RNA, 19 nt, Artificial Sequence
  Description of Artificial Sequence: Synthetic oligonucleotide
gaaggaaccacccugccuu

SEQ ID NO: 820455 - RNA, 19 nt, Artificial Sequence
  Description of Artificial Sequence: Synthetic oligonucleotide
acccgcucuaaugaguaac

SEQ ID NO: 820456 - RNA, 19 nt, Artificial Sequence
  Description of Artificial Sequence: Synthetic oligonucleotide
cuccaaugucuauggaaag

SEQ ID NO: 820457 - RNA, 19 nt, Artificial Sequence
  Description of Artificial Sequence: Synthetic oligonucleotide
caguccacccugaaggaug

SEQ ID NO: 820458 - RNA, 19 nt, Artificial Sequence
  Description of Artificial Sequence: Synthetic oligonucleotide
ucaguaggccaugaaugug

SEQ ID NO: 820459 - RNA, 19 nt, Artificial Sequence
  Description of Artificial Sequence: Synthetic oligonucleotide
uucacgguaaaaggucccc

SEQ ID NO: 820460 - RNA, 19 nt, Artificial Sequence
  Description of Artificial Sequence: Synthetic oligonucleotide
uccgccauagacugggcuc

SEQ ID NO: 820461 - RNA, 19 nt, Artificial Sequence
  Description of Artificial Sequence: Synthetic oligonucleotide
acugcugagcacauuucuc

SEQ ID NO: 820462 - RNA, 19 nt, Artificial Sequence
  Description of Artificial Sequence: Synthetic oligonucleotide
ggacauucuucucauguac

SEQ ID NO: 820463 - RNA, 19 nt, Artificial Sequence
  Description of Artificial Sequence: Synthetic oligonucleotide
caaguccaucggaagaaug

SEQ ID NO: 820464 - RNA, 19 nt, Artificial Sequence
  Description of Artificial Sequence: Synthetic oligonucleotide
uacuaacaagcaguuguga

SEQ ID NO: 820465 - RNA, 19 nt, Artificial Sequence
  Description of Artificial Sequence: Synthetic oligonucleotide
ugaaugugccugauccaaa

SEQ ID NO: 820466 - RNA, 19 nt, Artificial Sequence
  Description of Artificial Sequence: Synthetic oligonucleotide
acguucucaccccacucag

SEQ ID NO: 820467 - RNA, 19 nt, Artificial Sequence
  Description of Artificial Sequence: Synthetic oligonucleotide
ugaggcccgucccucacug

SEQ ID NO: 820468 - RNA, 19 nt, Artificial Sequence
  Description of Artificial Sequence: Synthetic oligonucleotide
cuguuagauacagucucag

SEQ ID NO: 820469 - RNA, 19 nt, Artificial Sequence
  Description of Artificial Sequence: Synthetic oligonucleotide
auauacggacucuggaauu

SEQ ID NO: 820470 - RNA, 19 nt, Artificial Sequence
  Description of Artificial Sequence: Synthetic oligonucleotide
gaaggugcaugagucacca

SEQ ID NO: 820471 - RNA, 19 nt, Artificial Sequence
  Description of Artificial Sequence: Synthetic oligonucleotide
ucuugccaaguauccacgu

SEQ ID NO: 820472 - RNA, 19 nt, Artificial Sequence
  Description of Artificial Sequence: Synthetic oligonucleotide
aguccacccugaaggaugc

SEQ ID NO: 820473 - RNA, 19 nt, Artificial Sequence
  Description of Artificial Sequence: Synthetic oligonucleotide
gaggagguucucugcuggg

SEQ ID NO: 820474 - RNA, 19 nt, Artificial Sequence
  Description of Artificial Sequence: Synthetic oligonucleotide
cugcucuagucucagugac

SEQ ID NO: 820475 - RNA, 19 nt, Artificial Sequence
  Description of Artificial Sequence: Synthetic oligonucleotide
ucuuccacgauagccucac

SEQ ID NO: 820476 - RNA, 19 nt, Artificial Sequence
  Description of Artificial Sequence: Synthetic oligonucleotide
cugcggauacucaggacac

SEQ ID NO: 820477 - RNA, 19 nt, Artificial Sequence
  Description of Artificial Sequence: Synthetic oligonucleotide
ggggauucaccauaggauc

SEQ ID NO: 820478 - RNA, 19 nt, Artificial Sequence
  Description of Artificial Sequence: Synthetic oligonucleotide
gacacuguuacugcaaggu

SEQ ID NO: 820479 - RNA, 19 nt, Artificial Sequence
  Description of Artificial Sequence: Synthetic oligonucleotide
ucaccagucucuccugauc

SEQ ID NO: 820480 - RNA, 19 nt, Artificial Sequence
  Description of Artificial Sequence: Synthetic oligonucleotide
augcucccacuuuucggac

SEQ ID NO: 820481 - RNA, 19 nt, Artificial Sequence
  Description of Artificial Sequence: Synthetic oligonucleotide
cacuuuucggacaaagaua

SEQ ID NO: 820482 - RNA, 19 nt, Artificial Sequence
  Description of Artificial Sequence: Synthetic oligonucleotide
gagccacccgcucuaauga

SEQ ID NO: 820483 - RNA, 19 nt, Artificial Sequence
  Description of Artificial Sequence: Synthetic oligonucleotide
ggaauccaagucuuccgcc

SEQ ID NO: 820484 - RNA, 19 nt, Artificial Sequence
  Description of Artificial Sequence: Synthetic oligonucleotide
gcaggcaggggucaguugc

SEQ ID NO: 820485 - RNA, 19 nt, Artificial Sequence
  Description of Artificial Sequence: Synthetic oligonucleotide
uucccugauaggucuggga

SEQ ID NO: 820486 - RNA, 19 nt, Artificial Sequence
  Description of Artificial Sequence: Synthetic oligonucleotide
ggggauucugaaauucacg

SEQ ID NO: 820487 - RNA, 19 nt, Artificial Sequence
  Description of Artificial Sequence: Synthetic oligonucleotide
ggaugcugcggauacucag

SEQ ID NO: 820488 - RNA, 19 nt, Artificial Sequence
  Description of Artificial Sequence: Synthetic oligonucleotide
uucucaccccacucagugc

SEQ ID NO: 820489 - RNA, 19 nt, Artificial Sequence
  Description of Artificial Sequence: Synthetic oligonucleotide
ggacacaaaggcuacuguc

SEQ ID NO: 820490 - RNA, 19 nt, Artificial Sequence
  Description of Artificial Sequence: Synthetic oligonucleotide
agucucuccugaucggccu

SEQ ID NO: 820491 - RNA, 19 nt, Artificial Sequence
  Description of Artificial Sequence: Synthetic oligonucleotide
uuccgccauagacugggcu

SEQ ID NO: 820492 - RNA, 19 nt, Artificial Sequence
  Description of Artificial Sequence: Synthetic oligonucleotide
gucccauagggaaggaacc

SEQ ID NO: 820493 - RNA, 19 nt, Artificial Sequence
  Description of Artificial Sequence: Synthetic oligonucleotide
cuuguaggucccauaggga

SEQ ID NO: 820494 - RNA, 19 nt, Artificial Sequence
  Description of Artificial Sequence: Synthetic oligonucleotide
gauucaccauaggaucagc

SEQ ID NO: 820495 - RNA, 19 nt, Artificial Sequence
  Description of Artificial Sequence: Synthetic oligonucleotide
cagucucuccugaucggcc

SEQ ID NO: 820496 - RNA, 19 nt, Artificial Sequence
  Description of Artificial Sequence: Synthetic oligonucleotide
cagugacacugcuaacccc

SEQ ID NO: 820497 - RNA, 19 nt, Artificial Sequence
  Description of Artificial Sequence: Synthetic oligonucleotide
cugggugccgugagcaggc

SEQ ID NO: 820498 - RNA, 19 nt, Artificial Sequence
  Description of Artificial Sequence: Synthetic oligonucleotide
uguggaggaaagacccuuu

SEQ ID NO: 820499 - RNA, 19 nt, Artificial Sequence
  Description of Artificial Sequence: Synthetic oligonucleotide
gagcaagagguaccccacc

SEQ ID NO: 820500 - RNA, 19 nt, Artificial Sequence
  Description of Artificial Sequence: Synthetic oligonucleotide
aggaaccaucagcugggag

SEQ ID NO: 820501 - RNA, 19 nt, Artificial Sequence
  Description of Artificial Sequence: Synthetic oligonucleotide
ggugccgugagcaggcugg

SEQ ID NO: 820502 - RNA, 19 nt, Artificial Sequence
  Description of Artificial Sequence: Synthetic oligonucleotide
ucaccccacucagugcugg

SEQ ID NO: 820503 - RNA, 19 nt, Artificial Sequence
  Description of Artificial Sequence: Synthetic oligonucleotide
gauagccucacagcaggca

SEQ ID NO: 820504 - RNA, 19 nt, Artificial Sequence
  Description of Artificial Sequence: Synthetic oligonucleotide
agauuacuaacaagcaguu

SEQ ID NO: 820505 - RNA, 19 nt, Artificial Sequence
  Description of Artificial Sequence: Synthetic oligonucleotide
cucuagucucagugacucg

SEQ ID NO: 820506 - RNA, 19 nt, Artificial Sequence
  Description of Artificial Sequence: Synthetic oligonucleotide
agguuuaagucaaccaaaa

SEQ ID NO: 820507 - RNA, 19 nt, Artificial Sequence
  Description of Artificial Sequence: Synthetic oligonucleotide
agacauaugcacaggggaa

SEQ ID NO: 820508 - RNA, 19 nt, Artificial Sequence
  Description of Artificial Sequence: Synthetic oligonucleotide
gucgucauguguauugcca

SEQ ID NO: 820509 - RNA, 19 nt, Artificial Sequence
  Description of Artificial Sequence: Synthetic oligonucleotide
gaucaagcaggcagggguc

SEQ ID NO: 820510 - RNA, 19 nt, Artificial Sequence
  Description of Artificial Sequence: Synthetic oligonucleotide
auucaccauaggaucagca

SEQ ID NO: 820511 - RNA, 19 nt, Artificial Sequence
  Description of Artificial Sequence: Synthetic oligonucleotide
aaggugcaugagucaccag

SEQ ID NO: 820512 - RNA, 19 nt, Artificial Sequence
  Description of Artificial Sequence: Synthetic oligonucleotide
cucaagcaacaauaccuga

SEQ ID NO: 820513 - RNA, 19 nt, Artificial Sequence
  Description of Artificial Sequence: Synthetic oligonucleotide
ccauagggaaggaaccacc

SEQ ID NO: 820514 - RNA, 19 nt, Artificial Sequence
  Description of Artificial Sequence: Synthetic oligonucleotide
gucaaccaaaagcucagcu

SEQ ID NO: 820515 - RNA, 19 nt, Artificial Sequence
  Description of Artificial Sequence: Synthetic oligonucleotide
gcaaaggguauguccaaac

SEQ ID NO: 820516 - RNA, 19 nt, Artificial Sequence
  Description of Artificial Sequence: Synthetic oligonucleotide
agcaaacauggcaaagggu

SEQ ID NO: 820517 - RNA, 19 nt, Artificial Sequence
  Description of Artificial Sequence: Synthetic oligonucleotide
ugcucccacuuuucggaca

SEQ ID NO: 820518 - RNA, 19 nt, Artificial Sequence
  Description of Artificial Sequence: Synthetic oligonucleotide
ccauguccuauauccaagc

SEQ ID NO: 820519 - RNA, 19 nt, Artificial Sequence
  Description of Artificial Sequence: Synthetic oligonucleotide
cauauacggacucuggaau

SEQ ID NO: 820520 - RNA, 19 nt, Artificial Sequence
  Description of Artificial Sequence: Synthetic oligonucleotide
cugagugcaggcugccgug

SEQ ID NO: 820521 - RNA, 19 nt, Artificial Sequence
  Description of Artificial Sequence: Synthetic oligonucleotide
cauguccuauauccaagca

SEQ ID NO: 820522 - RNA, 19 nt, Artificial Sequence
  Description of Artificial Sequence: Synthetic oligonucleotide
agcaacugagggaggaugu

SEQ ID NO: 820523 - RNA, 19 nt, Artificial Sequence
  Description of Artificial Sequence: Synthetic oligonucleotide
uacucaggacacuguuacu

SEQ ID NO: 820524 - RNA, 19 nt, Artificial Sequence
  Description of Artificial Sequence: Synthetic oligonucleotide
ucucauguacagccagcuu

SEQ ID NO: 820525 - RNA, 19 nt, Artificial Sequence
  Description of Artificial Sequence: Synthetic oligonucleotide
gugccugauccaaaggcug

SEQ ID NO: 820526 - RNA, 19 nt, Artificial Sequence
  Description of Artificial Sequence: Synthetic oligonucleotide
ggcacuugacuuauuacuc

SEQ ID NO: 820527 - RNA, 19 nt, Artificial Sequence
  Description of Artificial Sequence: Synthetic oligonucleotide
acggacucuggaauuggag

SEQ ID NO: 820528 - RNA, 19 nt, Artificial Sequence
  Description of Artificial Sequence: Synthetic oligonucleotide
gggagcaagagguacccca

SEQ ID NO: 820529 - RNA, 19 nt, Artificial Sequence
  Description of Artificial Sequence: Synthetic oligonucleotide
agagggaggaauaguuccu

SEQ ID NO: 820530 - RNA, 19 nt, Artificial Sequence
  Description of Artificial Sequence: Synthetic oligonucleotide
ggauucaccauaggaucag

SEQ ID NO: 820531 - RNA, 19 nt, Artificial Sequence
  Description of Artificial Sequence: Synthetic oligonucleotide
gccgugagcaggcugguug

SEQ ID NO: 820532 - RNA, 19 nt, Artificial Sequence
  Description of Artificial Sequence: Synthetic oligonucleotide
gacaacacuuccugagagu

SEQ ID NO: 820533 - RNA, 19 nt, Artificial Sequence
  Description of Artificial Sequence: Synthetic oligonucleotide
gaauuggagagggaggaau

SEQ ID NO: 820534 - RNA, 19 nt, Artificial Sequence
  Description of Artificial Sequence: Synthetic oligonucleotide
agccacccgcucuaaugag

SEQ ID NO: 820535 - RNA, 19 nt, Artificial Sequence
  Description of Artificial Sequence: Synthetic oligonucleotide
ggcacaguccacccugaag

SEQ ID NO: 820536 - RNA, 19 nt, Artificial Sequence
  Description of Artificial Sequence: Synthetic oligonucleotide
cugcuggguccacaggaag

SEQ ID NO: 820537 - RNA, 19 nt, Artificial Sequence
  Description of Artificial Sequence: Synthetic oligonucleotide
cugagagucuuccacgaua

SEQ ID NO: 820538 - RNA, 19 nt, Artificial Sequence
  Description of Artificial Sequence: Synthetic oligonucleotide
cagugucccggccaccagc

SEQ ID NO: 820539 - RNA, 19 nt, Artificial Sequence
  Description of Artificial Sequence: Synthetic oligonucleotide
gaaaggcugcucagcugag

SEQ ID NO: 820540 - RNA, 19 nt, Artificial Sequence
  Description of Artificial Sequence: Synthetic oligonucleotide
cuggaaugucaggugguug

SEQ ID NO: 820541 - RNA, 19 nt, Artificial Sequence
  Description of Artificial Sequence: Synthetic oligonucleotide
gguagguagacaacacuuc

SEQ ID NO: 820542 - RNA, 19 nt, Artificial Sequence
  Description of Artificial Sequence: Synthetic oligonucleotide
gugucauuuggccaccacu

SEQ ID NO: 820543 - RNA, 19 nt, Artificial Sequence
  Description of Artificial Sequence: Synthetic oligonucleotide
gguagacaacacuuccuga

SEQ ID NO: 820544 - RNA, 19 nt, Artificial Sequence
  Description of Artificial Sequence: Synthetic oligonucleotide
guggucucuggggauuccg

SEQ ID NO: 820545 - RNA, 19 nt, Artificial Sequence
  Description of Artificial Sequence: Synthetic oligonucleotide
ugacucucacuuggucucc

SEQ ID NO: 820546 - RNA, 19 nt, Artificial Sequence
  Description of Artificial Sequence: Synthetic oligonucleotide
caggugguugacaguaaga

SEQ ID NO: 820547 - RNA, 19 nt, Artificial Sequence
  Description of Artificial Sequence: Synthetic oligonucleotide
ugccagugacaaucaggga

SEQ ID NO: 820548 - RNA, 19 nt, Artificial Sequence
  Description of Artificial Sequence: Synthetic oligonucleotide
ugacacugcuaaccccaaa

SEQ ID NO: 820549 - RNA, 19 nt, Artificial Sequence
  Description of Artificial Sequence: Synthetic oligonucleotide
aggguauguccaaacuugu

SEQ ID NO: 820550 - RNA, 19 nt, Artificial Sequence
  Description of Artificial Sequence: Synthetic oligonucleotide
guuucgacaaaggcaucga

SEQ ID NO: 820551 - RNA, 19 nt, Artificial Sequence
  Description of Artificial Sequence: Synthetic oligonucleotide
cgcucuaaugaguaacagc

SEQ ID NO: 820552 - RNA, 19 nt, Artificial Sequence
  Description of Artificial Sequence: Synthetic oligonucleotide
gcacuugacuuauuacuca

SEQ ID NO: 820553 - RNA, 19 nt, Artificial Sequence
  Description of Artificial Sequence: Synthetic oligonucleotide
ccugauaggucugggacac

SEQ ID NO: 820554 - RNA, 19 nt, Artificial Sequence
  Description of Artificial Sequence: Synthetic oligonucleotide
caacaauaccugaagguuu

SEQ ID NO: 820555 - RNA, 19 nt, Artificial Sequence
  Description of Artificial Sequence: Synthetic oligonucleotide
ucggaagaaugucgucuuu

SEQ ID NO: 820556 - RNA, 19 nt, Artificial Sequence
  Description of Artificial Sequence: Synthetic oligonucleotide
cacuguuacugcaagguuu

SEQ ID NO: 820557 - RNA, 19 nt, Artificial Sequence
  Description of Artificial Sequence: Synthetic oligonucleotide
ggaaaggcuccaguguuac

SEQ ID NO: 820558 - RNA, 19 nt, Artificial Sequence
  Description of Artificial Sequence: Synthetic oligonucleotide
ugcugcggauacucaggac

SEQ ID NO: 820559 - RNA, 19 nt, Artificial Sequence
  Description of Artificial Sequence: Synthetic oligonucleotide
gccauauacggacucugga

SEQ ID NO: 820560 - RNA, 19 nt, Artificial Sequence
  Description of Artificial Sequence: Synthetic oligonucleotide
caucggaagaaugucgucu

SEQ ID NO: 820561 - RNA, 19 nt, Artificial Sequence
  Description of Artificial Sequence: Synthetic oligonucleotide
gguaccccaccuuccuucc

SEQ ID NO: 820562 - RNA, 19 nt, Artificial Sequence
  Description of Artificial Sequence: Synthetic oligonucleotide
gguucaguaggccaugaau

SEQ ID NO: 820563 - RNA, 19 nt, Artificial Sequence
  Description of Artificial Sequence: Synthetic oligonucleotide
agugacaaucagggaccag

SEQ ID NO: 820564 - RNA, 19 nt, Artificial Sequence
  Description of Artificial Sequence: Synthetic oligonucleotide
ggcaucgaauucucggaca

SEQ ID NO: 820565 - RNA, 19 nt, Artificial Sequence
  Description of Artificial Sequence: Synthetic oligonucleotide
ggccauauacggacucugg

SEQ ID NO: 820566 - RNA, 19 nt, Artificial Sequence
  Description of Artificial Sequence: Synthetic oligonucleotide
caaugucuauggaaaggcu

SEQ ID NO: 820567 - RNA, 19 nt, Artificial Sequence
  Description of Artificial Sequence: Synthetic oligonucleotide
ugaucggccugggugccgu

SEQ ID NO: 820568 - RNA, 19 nt, Artificial Sequence
  Description of Artificial Sequence: Synthetic oligonucleotide
gguugacaguaagaucaag

SEQ ID NO: 820569 - RNA, 19 nt, Artificial Sequence
  Description of Artificial Sequence: Synthetic oligonucleotide
ccauauacggacucuggaa

SEQ ID NO: 820570 - RNA, 19 nt, Artificial Sequence
  Description of Artificial Sequence: Synthetic oligonucleotide
cagggccauauacggacuc

SEQ ID NO: 820571 - RNA, 19 nt, Artificial Sequence
  Description of Artificial Sequence: Synthetic oligonucleotide
agacguggucucuggggau

SEQ ID NO: 820572 - RNA, 19 nt, Artificial Sequence
  Description of Artificial Sequence: Synthetic oligonucleotide
cucggacauucuucucaug

SEQ ID NO: 820573 - RNA, 19 nt, Artificial Sequence
  Description of Artificial Sequence: Synthetic oligonucleotide
ggcaucuucccugauaggu

SEQ ID NO: 820574 - RNA, 19 nt, Artificial Sequence
  Description of Artificial Sequence: Synthetic oligonucleotide
ggauucugaaauucacggu

SEQ ID NO: 820575 - RNA, 19 nt, Artificial Sequence
  Description of Artificial Sequence: Synthetic oligonucleotide
cugcuguuagauacagucu

SEQ ID NO: 820576 - RNA, 19 nt, Artificial Sequence
  Description of Artificial Sequence: Synthetic oligonucleotide
ggcugguugggagcaagag

SEQ ID NO: 820577 - RNA, 19 nt, Artificial Sequence
  Description of Artificial Sequence: Synthetic oligonucleotide
cagaguagaccaggcagga

SEQ ID NO: 820578 - RNA, 19 nt, Artificial Sequence
  Description of Artificial Sequence: Synthetic oligonucleotide
ugggagcaagagguacccc

SEQ ID NO: 820579 - RNA, 19 nt, Artificial Sequence
  Description of Artificial Sequence: Synthetic oligonucleotide
guccuauauccaagcagca

SEQ ID NO: 820580 - RNA, 19 nt, Artificial Sequence
  Description of Artificial Sequence: Synthetic oligonucleotide
ccgugagcaggcugguugg

SEQ ID NO: 820581 - RNA, 19 nt, Artificial Sequence
  Description of Artificial Sequence: Synthetic oligonucleotide
caggcugccguggagggga

SEQ ID NO: 820582 - RNA, 19 nt, Artificial Sequence
  Description of Artificial Sequence: Synthetic oligonucleotide
agaacagggcaggcuggca

SEQ ID NO: 820583 - RNA, 19 nt, Artificial Sequence
  Description of Artificial Sequence: Synthetic oligonucleotide
agguuucgacaaaggcauc

SEQ ID NO: 820584 - RNA, 19 nt, Artificial Sequence
  Description of Artificial Sequence: Synthetic oligonucleotide
ugccuuucaccuggccaga

SEQ ID NO: 820585 - RNA, 19 nt, Artificial Sequence
  Description of Artificial Sequence: Synthetic oligonucleotide
ggggaugcugcggauacuc

SEQ ID NO: 820586 - RNA, 19 nt, Artificial Sequence
  Description of Artificial Sequence: Synthetic oligonucleotide
gcaacaauaccugaagguu

SEQ ID NO: 820587 - RNA, 19 nt, Artificial Sequence
  Description of Artificial Sequence: Synthetic oligonucleotide
ggucaguugcagaguagac

SEQ ID NO: 820588 - RNA, 19 nt, Artificial Sequence
  Description of Artificial Sequence: Synthetic oligonucleotide
cacaggggaaaggcuccag

SEQ ID NO: 820589 - RNA, 19 nt, Artificial Sequence
  Description of Artificial Sequence: Synthetic oligonucleotide
gcaucuucccugauagguc

SEQ ID NO: 820590 - RNA, 19 nt, Artificial Sequence
  Description of Artificial Sequence: Synthetic oligonucleotide
ggguuuguugacaaaugcu

SEQ ID NO: 820591 - RNA, 19 nt, Artificial Sequence
  Description of Artificial Sequence: Synthetic oligonucleotide
gaggcccgucccucacugc

SEQ ID NO: 820592 - RNA, 19 nt, Artificial Sequence
  Description of Artificial Sequence: Synthetic oligonucleotide
gguaaggaauccaagucuu

SEQ ID NO: 820593 - RNA, 19 nt, Artificial Sequence
  Description of Artificial Sequence: Synthetic oligonucleotide
caccccacucagugcuggc

SEQ ID NO: 820594 - RNA, 19 nt, Artificial Sequence
  Description of Artificial Sequence: Synthetic oligonucleotide
ccugcucuagucucaguga

SEQ ID NO: 820595 - RNA, 19 nt, Artificial Sequence
  Description of Artificial Sequence: Synthetic oligonucleotide
cucacuuggucuccuugcu

SEQ ID NO: 820596 - RNA, 19 nt, Artificial Sequence
  Description of Artificial Sequence: Synthetic oligonucleotide
cucuccugaucggccuggg

SEQ ID NO: 820597 - RNA, 19 nt, Artificial Sequence
  Description of Artificial Sequence: Synthetic oligonucleotide
accccacucagugcuggcu

SEQ ID NO: 820598 - RNA, 19 nt, Artificial Sequence
  Description of Artificial Sequence: Synthetic oligonucleotide
agggacuuguaggucccau

SEQ ID NO: 820599 - RNA, 19 nt, Artificial Sequence
  Description of Artificial Sequence: Synthetic oligonucleotide
gugacucgagcagcaggac

SEQ ID NO: 820600 - RNA, 19 nt, Artificial Sequence
  Description of Artificial Sequence: Synthetic oligonucleotide
caggcaggggucaguugca

SEQ ID NO: 820601 - RNA, 19 nt, Artificial Sequence
  Description of Artificial Sequence: Synthetic oligonucleotide
gguccccaucagaaggugc

SEQ ID NO: 820602 - RNA, 19 nt, Artificial Sequence
  Description of Artificial Sequence: Synthetic oligonucleotide
cucuggaauuggagaggga

SEQ ID NO: 820603 - RNA, 19 nt, Artificial Sequence
  Description of Artificial Sequence: Synthetic oligonucleotide
ccaucagaaggugcaugag

SEQ ID NO: 820604 - RNA, 19 nt, Artificial Sequence
  Description of Artificial Sequence: Synthetic oligonucleotide
ccgccauagacugggcucc

SEQ ID NO: 820605 - RNA, 19 nt, Artificial Sequence
  Description of Artificial Sequence: Synthetic oligonucleotide
ccgaaggaacagaauggca

SEQ ID NO: 820606 - RNA, 19 nt, Artificial Sequence
  Description of Artificial Sequence: Synthetic oligonucleotide
aaccaucagcugggaggga

SEQ ID NO: 820607 - RNA, 19 nt, Artificial Sequence
  Description of Artificial Sequence: Synthetic oligonucleotide
cagaagaacagggcaggcu

SEQ ID NO: 820608 - RNA, 19 nt, Artificial Sequence
  Description of Artificial Sequence: Synthetic oligonucleotide
gcaucgaauucucggacau

SEQ ID NO: 820609 - RNA, 19 nt, Artificial Sequence
  Description of Artificial Sequence: Synthetic oligonucleotide
aggucccauagggaaggaa

SEQ ID NO: 820610 - RNA, 19 nt, Artificial Sequence
  Description of Artificial Sequence: Synthetic oligonucleotide
gcaugagucaccagucucu

SEQ ID NO: 820611 - RNA, 19 nt, Artificial Sequence
  Description of Artificial Sequence: Synthetic oligonucleotide
cuuguaaacccagggccau

SEQ ID NO: 820612 - RNA, 19 nt, Artificial Sequence
  Description of Artificial Sequence: Synthetic oligonucleotide
ccgcucuaaugaguaacag

SEQ ID NO: 820613 - RNA, 19 nt, Artificial Sequence
  Description of Artificial Sequence: Synthetic oligonucleotide
cuugccaaguauccacguu

SEQ ID NO: 820614 - RNA, 19 nt, Artificial Sequence
  Description of Artificial Sequence: Synthetic oligonucleotide
cccugcugaagcucccaug

SEQ ID NO: 820615 - RNA, 19 nt, Artificial Sequence
  Description of Artificial Sequence: Synthetic oligonucleotide
guuccucaguccugcucua

SEQ ID NO: 820616 - RNA, 19 nt, Artificial Sequence
  Description of Artificial Sequence: Synthetic oligonucleotide
ggcaggggucaguugcaga

SEQ ID NO: 820617 - RNA, 19 nt, Artificial Sequence
  Description of Artificial Sequence: Synthetic oligonucleotide
ggaauuggagagggaggaa

SEQ ID NO: 820618 - RNA, 19 nt, Artificial Sequence
  Description of Artificial Sequence: Synthetic oligonucleotide
gcugauggucccugcugaa

SEQ ID NO: 820619 - RNA, 19 nt, Artificial Sequence
  Description of Artificial Sequence: Synthetic oligonucleotide
ccacccgcucuaaugagua

SEQ ID NO: 820620 - RNA, 19 nt, Artificial Sequence
  Description of Artificial Sequence: Synthetic oligonucleotide
gacguggucucuggggauu

SEQ ID NO: 820621 - RNA, 19 nt, Artificial Sequence
  Description of Artificial Sequence: Synthetic oligonucleotide
ggcuggcagccgaaggaac

SEQ ID NO: 820622 - RNA, 19 nt, Artificial Sequence
  Description of Artificial Sequence: Synthetic oligonucleotide
cacccgcucuaaugaguaa

SEQ ID NO: 820623 - RNA, 19 nt, Artificial Sequence
  Description of Artificial Sequence: Synthetic oligonucleotide
ugggugccgugagcaggcu

SEQ ID NO: 820624 - RNA, 19 nt, Artificial Sequence
  Description of Artificial Sequence: Synthetic oligonucleotide
gaguuggucuagagacuau

SEQ ID NO: 820625 - RNA, 19 nt, Artificial Sequence
  Description of Artificial Sequence: Synthetic oligonucleotide
gguccaagagcagggacuu

SEQ ID NO: 820626 - RNA, 19 nt, Artificial Sequence
  Description of Artificial Sequence: Synthetic oligonucleotide
cgguaaaagguccccaagu

SEQ ID NO: 820627 - RNA, 19 nt, Artificial Sequence
  Description of Artificial Sequence: Synthetic oligonucleotide
cugauaggucugggacaca

SEQ ID NO: 820628 - RNA, 19 nt, Artificial Sequence
  Description of Artificial Sequence: Synthetic oligonucleotide
gcaagagguaccccaccuu

SEQ ID NO: 820629 - RNA, 19 nt, Artificial Sequence
  Description of Artificial Sequence: Synthetic oligonucleotide
ccaagucuuccgccauaga

SEQ ID NO: 820630 - RNA, 19 nt, Artificial Sequence
  Description of Artificial Sequence: Synthetic oligonucleotide
caucgaauucucggacauu

SEQ ID NO: 820631 - RNA, 19 nt, Artificial Sequence
  Description of Artificial Sequence: Synthetic oligonucleotide
ccauagacugggcuccaau

SEQ ID NO: 820632 - RNA, 19 nt, Artificial Sequence
  Description of Artificial Sequence: Synthetic oligonucleotide
gccacccgcucuaaugagu

SEQ ID NO: 820633 - RNA, 19 nt, Artificial Sequence
  Description of Artificial Sequence: Synthetic oligonucleotide
gccuuucaccuggccagaa

SEQ ID NO: 820634 - RNA, 19 nt, Artificial Sequence
  Description of Artificial Sequence: Synthetic oligonucleotide
cggauacucaggacacugu

SEQ ID NO: 820635 - RNA, 19 nt, Artificial Sequence
  Description of Artificial Sequence: Synthetic oligonucleotide
gcagcaacugagggaggau

SEQ ID NO: 820636 - RNA, 19 nt, Artificial Sequence
  Description of Artificial Sequence: Synthetic oligonucleotide
cucccacuuuucggacaaa

SEQ ID NO: 820637 - RNA, 19 nt, Artificial Sequence
  Description of Artificial Sequence: Synthetic oligonucleotide
gccauagacugggcuccaa

SEQ ID NO: 820638 - RNA, 19 nt, Artificial Sequence
  Description of Artificial Sequence: Synthetic oligonucleotide
ccgucccucacugcuguua

SEQ ID NO: 820639 - RNA, 19 nt, Artificial Sequence
  Description of Artificial Sequence: Synthetic oligonucleotide
ggccaugaaugugccugau

SEQ ID NO: 820640 - RNA, 19 nt, Artificial Sequence
  Description of Artificial Sequence: Synthetic oligonucleotide
ccaguguuacaugcagauu

SEQ ID NO: 820641 - RNA, 19 nt, Artificial Sequence
  Description of Artificial Sequence: Synthetic oligonucleotide
ccgcuggagccaucugagu

SEQ ID NO: 820642 - RNA, 19 nt, Artificial Sequence
  Description of Artificial Sequence: Synthetic oligonucleotide
cgccauagacugggcucca

SEQ ID NO: 820643 - RNA, 19 nt, Artificial Sequence
  Description of Artificial Sequence: Synthetic oligonucleotide
cccgucccucacugcuguu

SEQ ID NO: 820644 - RNA, 19 nt, Artificial Sequence
  Description of Artificial Sequence: Synthetic oligonucleotide
aauaucagcgaacuugggc

SEQ ID NO: 820645 - RNA, 19 nt, Artificial Sequence
  Description of Artificial Sequence: Synthetic oligonucleotide
auaucagcgaacuugggcc

SEQ ID NO: 820646 - RNA, 19 nt, Artificial Sequence
  Description of Artificial Sequence: Synthetic oligonucleotide
aagaaauuggcccaacaag

SEQ ID NO: 820647 - RNA, 19 nt, Artificial Sequence
  Description of Artificial Sequence: Synthetic oligonucleotide
aaauuggcccaacaagggc

SEQ ID NO: 820648 - RNA, 19 nt, Artificial Sequence
  Description of Artificial Sequence: Synthetic oligonucleotide
aaguccauauucuacccuc

SEQ ID NO: 820649 - RNA, 19 nt, Artificial Sequence
  Description of Artificial Sequence: Synthetic oligonucleotide
uacucugugaugaucauca

SEQ ID NO: 820650 - RNA, 19 nt, Artificial Sequence
  Description of Artificial Sequence: Synthetic oligonucleotide
aaucggacaccuugcauac

SEQ ID NO: 820651 - RNA, 19 nt, Artificial Sequence
  Description of Artificial Sequence: Synthetic oligonucleotide
uuccuauggaugaagaagc

SEQ ID NO: 820652 - RNA, 19 nt, Artificial Sequence
  Description of Artificial Sequence: Synthetic oligonucleotide
uugaguacagccugguugg

SEQ ID NO: 820653 - RNA, 19 nt, Artificial Sequence
  Description of Artificial Sequence: Synthetic oligonucleotide
auaaguuaagguuucaaaa

SEQ ID NO: 820654 - RNA, 19 nt, Artificial Sequence
  Description of Artificial Sequence: Synthetic oligonucleotide
cagucaauggucuuggugc

SEQ ID NO: 820655 - RNA, 19 nt, Artificial Sequence
  Description of Artificial Sequence: Synthetic oligonucleotide
ucuugagggagucaggggc

SEQ ID NO: 820656 - RNA, 19 nt, Artificial Sequence
  Description of Artificial Sequence: Synthetic oligonucleotide
uguauuuagagacgacacc

SEQ ID NO: 820657 - RNA, 19 nt, Artificial Sequence
  Description of Artificial Sequence: Synthetic oligonucleotide
gacgacacccucuaggcgg

SEQ ID NO: 820658 - RNA, 19 nt, Artificial Sequence
  Description of Artificial Sequence: Synthetic oligonucleotide
uuguauuuagagacgacac

SEQ ID NO: 820659 - RNA, 19 nt, Artificial Sequence
  Description of Artificial Sequence: Synthetic oligonucleotide
gauggguggaucucggugg

SEQ ID NO: 820660 - RNA, 19 nt, Artificial Sequence
  Description of Artificial Sequence: Synthetic oligonucleotide
accgaauagggauuuugcc

SEQ ID NO: 820661 - RNA, 19 nt, Artificial Sequence
  Description of Artificial Sequence: Synthetic oligonucleotide
aaaucggacaccuugcaua

SEQ ID NO: 820662 - RNA, 19 nt, Artificial Sequence
  Description of Artificial Sequence: Synthetic oligonucleotide
acacacucaaucuuuccac

SEQ ID NO: 820663 - RNA, 19 nt, Artificial Sequence
  Description of Artificial Sequence: Synthetic oligonucleotide
guauuuagagacgacaccc

SEQ ID NO: 820664 - RNA, 19 nt, Artificial Sequence
  Description of Artificial Sequence: Synthetic oligonucleotide
agagacgacacccucuagg

SEQ ID NO: 820665 - RNA, 19 nt, Artificial Sequence
  Description of Artificial Sequence: Synthetic oligonucleotide
guugugauggcugaacugg

SEQ ID NO: 820666 - RNA, 19 nt, Artificial Sequence
  Description of Artificial Sequence: Synthetic oligonucleotide
guugacaagaauguuucgg

SEQ ID NO: 820667 - RNA, 19 nt, Artificial Sequence
  Description of Artificial Sequence: Synthetic oligonucleotide
ugccuugcaacacaggaug

SEQ ID NO: 820668 - RNA, 19 nt, Artificial Sequence
  Description of Artificial Sequence: Synthetic oligonucleotide
acuuggaaaauagacaucu

SEQ ID NO: 820669 - RNA, 19 nt, Artificial Sequence
  Description of Artificial Sequence: Synthetic oligonucleotide
uucaauuguucugacuugg

SEQ ID NO: 820670 - RNA, 19 nt, Artificial Sequence
  Description of Artificial Sequence: Synthetic oligonucleotide
ugcacguaguucauauugg

SEQ ID NO: 820671 - RNA, 19 nt, Artificial Sequence
  Description of Artificial Sequence: Synthetic oligonucleotide
acaagaauguuucgggcag

SEQ ID NO: 820672 - RNA, 19 nt, Artificial Sequence
  Description of Artificial Sequence: Synthetic oligonucleotide
uauacacuucuccaaacuc

SEQ ID NO: 820673 - RNA, 19 nt, Artificial Sequence
  Description of Artificial Sequence: Synthetic oligonucleotide
gaaauuggcccaacaaggg

SEQ ID NO: 820674 - RNA, 19 nt, Artificial Sequence
  Description of Artificial Sequence: Synthetic oligonucleotide
agucaauggucuuggugcc

SEQ ID NO: 820675 - RNA, 19 nt, Artificial Sequence
  Description of Artificial Sequence: Synthetic oligonucleotide
acaauaucagcgaacuugg

SEQ ID NO: 820676 - RNA, 19 nt, Artificial Sequence
  Description of Artificial Sequence: Synthetic oligonucleotide
ucggugguaaacuugagua

SEQ ID NO: 820677 - RNA, 19 nt, Artificial Sequence
  Description of Artificial Sequence: Synthetic oligonucleotide
ucggacacuguacggaagg

SEQ ID NO: 820678 - RNA, 19 nt, Artificial Sequence
  Description of Artificial Sequence: Synthetic oligonucleotide
uauuccagagcagaaauaa

SEQ ID NO: 820679 - RNA, 19 nt, Artificial Sequence
  Description of Artificial Sequence: Synthetic oligonucleotide
uauucuacccucuaccaau

SEQ ID NO: 820680 - RNA, 19 nt, Artificial Sequence
  Description of Artificial Sequence: Synthetic oligonucleotide
ugcaucaugagcugguaga

SEQ ID NO: 820681 - RNA, 19 nt, Artificial Sequence
  Description of Artificial Sequence: Synthetic oligonucleotide
ucuccguaagucaucaccu

SEQ ID NO: 820682 - RNA, 19 nt, Artificial Sequence
  Description of Artificial Sequence: Synthetic oligonucleotide
uuuagagacgacacccucu

SEQ ID NO: 820683 - RNA, 19 nt, Artificial Sequence
  Description of Artificial Sequence: Synthetic oligonucleotide
aagacgaaccccaauccuc

SEQ ID NO: 820684 - RNA, 19 nt, Artificial Sequence
  Description of Artificial Sequence: Synthetic oligonucleotide
ugaugggaaggucuguuca

SEQ ID NO: 820685 - RNA, 19 nt, Artificial Sequence
  Description of Artificial Sequence: Synthetic oligonucleotide
gguaaacuugaguacagcc

SEQ ID NO: 820686 - RNA, 19 nt, Artificial Sequence
  Description of Artificial Sequence: Synthetic oligonucleotide
cuauggaugaagaagccga

SEQ ID NO: 820687 - RNA, 19 nt, Artificial Sequence
  Description of Artificial Sequence: Synthetic oligonucleotide
guagccagcuuucagaguc

SEQ ID NO: 820688 - RNA, 19 nt, Artificial Sequence
  Description of Artificial Sequence: Synthetic oligonucleotide
uuugccgccacuaguggug

SEQ ID NO: 820689 - RNA, 19 nt, Artificial Sequence
  Description of Artificial Sequence: Synthetic oligonucleotide
gugcacguaguucauauug

SEQ ID NO: 820690 - RNA, 19 nt, Artificial Sequence
  Description of Artificial Sequence: Synthetic oligonucleotide
uauuuagagacgacacccu

SEQ ID NO: 820691 - RNA, 19 nt, Artificial Sequence
  Description of Artificial Sequence: Synthetic oligonucleotide
uaucagcgaacuugggccg

SEQ ID NO: 820692 - RNA, 19 nt, Artificial Sequence
  Description of Artificial Sequence: Synthetic oligonucleotide
uucagaaaggucccacgug

SEQ ID NO: 820693 - RNA, 19 nt, Artificial Sequence
  Description of Artificial Sequence: Synthetic oligonucleotide
cuuggugccgcucuagccc

SEQ ID NO: 820694 - RNA, 19 nt, Artificial Sequence
  Description of Artificial Sequence: Synthetic oligonucleotide
ucggacaccuugcauacca

SEQ ID NO: 820695 - RNA, 19 nt, Artificial Sequence
  Description of Artificial Sequence: Synthetic oligonucleotide
uguugacaagaauguuucg

SEQ ID NO: 820696 - RNA, 19 nt, Artificial Sequence
  Description of Artificial Sequence: Synthetic oligonucleotide
cuaccaaugaggguggggc

SEQ ID NO: 820697 - RNA, 19 nt, Artificial Sequence
  Description of Artificial Sequence: Synthetic oligonucleotide
acaucuucggaggacuggc

SEQ ID NO: 820698 - RNA, 19 nt, Artificial Sequence
  Description of Artificial Sequence: Synthetic oligonucleotide
gcgacagucguccaaaggg

SEQ ID NO: 820699 - RNA, 19 nt, Artificial Sequence
  Description of Artificial Sequence: Synthetic oligonucleotide
gauggggauccccacagug

SEQ ID NO: 820700 - RNA, 19 nt, Artificial Sequence
  Description of Artificial Sequence: Synthetic oligonucleotide
ugguagauggcagaagggc

SEQ ID NO: 820701 - RNA, 19 nt, Artificial Sequence
  Description of Artificial Sequence: Synthetic oligonucleotide
cucaugguuugacagcucc

SEQ ID NO: 820702 - RNA, 19 nt, Artificial Sequence
  Description of Artificial Sequence: Synthetic oligonucleotide
aaaaucggacaccuugcau

SEQ ID NO: 820703 - RNA, 19 nt, Artificial Sequence
  Description of Artificial Sequence: Synthetic oligonucleotide
gcuccaaucaccuucugcc

SEQ ID NO: 820704 - RNA, 19 nt, Artificial Sequence
  Description of Artificial Sequence: Synthetic oligonucleotide
cacacugggaaugcaaugg

SEQ ID NO: 820705 - RNA, 19 nt, Artificial Sequence
  Description of Artificial Sequence: Synthetic oligonucleotide
ucagcgcccaaccucagcu

SEQ ID NO: 820706 - RNA, 19 nt, Artificial Sequence
  Description of Artificial Sequence: Synthetic oligonucleotide
aaccccaauccucuugaug

SEQ ID NO: 820707 - RNA, 19 nt, Artificial Sequence
  Description of Artificial Sequence: Synthetic oligonucleotide
uccauauucuacccucuac

SEQ ID NO: 820708 - RNA, 19 nt, Artificial Sequence
  Description of Artificial Sequence: Synthetic oligonucleotide
cacguaguucauauuggcc

SEQ ID NO: 820709 - RNA, 19 nt, Artificial Sequence
  Description of Artificial Sequence: Synthetic oligonucleotide
agcgcccaaccucagcucc

SEQ ID NO: 820710 - RNA, 19 nt, Artificial Sequence
  Description of Artificial Sequence: Synthetic oligonucleotide
auagggauuuugccgccac

SEQ ID NO: 820711 - RNA, 19 nt, Artificial Sequence
  Description of Artificial Sequence: Synthetic oligonucleotide
uuagagacgacacccucua

SEQ ID NO: 820712 - RNA, 19 nt, Artificial Sequence
  Description of Artificial Sequence: Synthetic oligonucleotide
guacuguugcauuuugaug

SEQ ID NO: 820713 - RNA, 19 nt, Artificial Sequence
  Description of Artificial Sequence: Synthetic oligonucleotide
uauggaugaagaagccgac

SEQ ID NO: 820714 - RNA, 19 nt, Artificial Sequence
  Description of Artificial Sequence: Synthetic oligonucleotide
uccuauggaugaagaagcc

SEQ ID NO: 820715 - RNA, 19 nt, Artificial Sequence
  Description of Artificial Sequence: Synthetic oligonucleotide
aaguguuccguguacuguu

SEQ ID NO: 820716 - RNA, 19 nt, Artificial Sequence
  Description of Artificial Sequence: Synthetic oligonucleotide
ccgaauagggauuuugccg

SEQ ID NO: 820717 - RNA, 19 nt, Artificial Sequence
  Description of Artificial Sequence: Synthetic oligonucleotide
agauggguguggcuccacc

SEQ ID NO: 820718 - RNA, 19 nt, Artificial Sequence
  Description of Artificial Sequence: Synthetic oligonucleotide
cugacagcgacagucgucc

SEQ ID NO: 820719 - RNA, 19 nt, Artificial Sequence
  Description of Artificial Sequence: Synthetic oligonucleotide
ugcaauggggacucagaug

SEQ ID NO: 820720 - RNA, 19 nt, Artificial Sequence
  Description of Artificial Sequence: Synthetic oligonucleotide
gaaggucuguucagaaagg

SEQ ID NO: 820721 - RNA, 19 nt, Artificial Sequence
  Description of Artificial Sequence: Synthetic oligonucleotide
ucgcucaggaaauccacgc

SEQ ID NO: 820722 - RNA, 19 nt, Artificial Sequence
  Description of Artificial Sequence: Synthetic oligonucleotide
uguugcauuuugaugcuuu

SEQ ID NO: 820723 - RNA, 19 nt, Artificial Sequence
  Description of Artificial Sequence: Synthetic oligonucleotide
ugcccuagucaucuggucu

SEQ ID NO: 820724 - RNA, 19 nt, Artificial Sequence
  Description of Artificial Sequence: Synthetic oligonucleotide
ucaauuguucugacuugga

SEQ ID NO: 820725 - RNA, 19 nt, Artificial Sequence
  Description of Artificial Sequence: Synthetic oligonucleotide
caccgaauagggauuuugc

SEQ ID NO: 820726 - RNA, 19 nt, Artificial Sequence
  Description of Artificial Sequence: Synthetic oligonucleotide
aaaccucaacacaaacaag

SEQ ID NO: 820727 - RNA, 19 nt, Artificial Sequence
  Description of Artificial Sequence: Synthetic oligonucleotide
gaaugucuacugcagggca

SEQ ID NO: 820728 - RNA, 19 nt, Artificial Sequence
  Description of Artificial Sequence: Synthetic oligonucleotide
aaugcaauggggacucaga

SEQ ID NO: 820729 - RNA, 19 nt, Artificial Sequence
  Description of Artificial Sequence: Synthetic oligonucleotide
aacuugcgguaggaaaugg

SEQ ID NO: 820730 - RNA, 19 nt, Artificial Sequence
  Description of Artificial Sequence: Synthetic oligonucleotide
uugcgguaggaaauggccu

SEQ ID NO: 820731 - RNA, 19 nt, Artificial Sequence
  Description of Artificial Sequence: Synthetic oligonucleotide
gacgcaaugccacgaagca

SEQ ID NO: 820732 - RNA, 19 nt, Artificial Sequence
  Description of Artificial Sequence: Synthetic oligonucleotide
uuggggucuucauaagugu

SEQ ID NO: 820733 - RNA, 19 nt, Artificial Sequence
  Description of Artificial Sequence: Synthetic oligonucleotide
ucuaccaaugagggugggg

SEQ ID NO: 820734 - RNA, 19 nt, Artificial Sequence
  Description of Artificial Sequence: Synthetic oligonucleotide
aaugcgcuucugguggccg

SEQ ID NO: 820735 - RNA, 19 nt, Artificial Sequence
  Description of Artificial Sequence: Synthetic oligonucleotide
uugauggcgacagguaucu

SEQ ID NO: 820736 - RNA, 19 nt, Artificial Sequence
  Description of Artificial Sequence: Synthetic oligonucleotide
gaccucaugguuugacagc

SEQ ID NO: 820737 - RNA, 19 nt, Artificial Sequence
  Description of Artificial Sequence: Synthetic oligonucleotide
aguaagaaauuggcccaac

SEQ ID NO: 820738 - RNA, 19 nt, Artificial Sequence
  Description of Artificial Sequence: Synthetic oligonucleotide
gacuggcgggcucucaggg

SEQ ID NO: 820739 - RNA, 19 nt, Artificial Sequence
  Description of Artificial Sequence: Synthetic oligonucleotide
auauucuacccucuaccaa

SEQ ID NO: 820740 - RNA, 19 nt, Artificial Sequence
  Description of Artificial Sequence: Synthetic oligonucleotide
acuugcgguaggaaauggc

SEQ ID NO: 820741 - RNA, 19 nt, Artificial Sequence
  Description of Artificial Sequence: Synthetic oligonucleotide
cuugauggcgacagguauc

SEQ ID NO: 820742 - RNA, 19 nt, Artificial Sequence
  Description of Artificial Sequence: Synthetic oligonucleotide
gaauagggauuuugccgcc

SEQ ID NO: 820743 - RNA, 19 nt, Artificial Sequence
  Description of Artificial Sequence: Synthetic oligonucleotide
uguucugacuuggaaaaua

SEQ ID NO: 820744 - RNA, 19 nt, Artificial Sequence
  Description of Artificial Sequence: Synthetic oligonucleotide
acuagugguguagguggcc

SEQ ID NO: 820745 - RNA, 19 nt, Artificial Sequence
  Description of Artificial Sequence: Synthetic oligonucleotide
agacgacacccucuaggcg

SEQ ID NO: 820746 - RNA, 19 nt, Artificial Sequence
  Description of Artificial Sequence: Synthetic oligonucleotide
gaaugcaauggggacucag

SEQ ID NO: 820747 - RNA, 19 nt, Artificial Sequence
  Description of Artificial Sequence: Synthetic oligonucleotide
ugccaugaaguguuccgug

SEQ ID NO: 820748 - RNA, 19 nt, Artificial Sequence
  Description of Artificial Sequence: Synthetic oligonucleotide
aggggcuucaauuguucug

SEQ ID NO: 820749 - RNA, 19 nt, Artificial Sequence
  Description of Artificial Sequence: Synthetic oligonucleotide
uuuugccgccacuaguggu

SEQ ID NO: 820750 - RNA, 19 nt, Artificial Sequence
  Description of Artificial Sequence: Synthetic oligonucleotide
ucggaugagcuuguccagg

SEQ ID NO: 820751 - RNA, 19 nt, Artificial Sequence
  Description of Artificial Sequence: Synthetic oligonucleotide
ugcgguaggaaauggccuc

SEQ ID NO: 820752 - RNA, 19 nt, Artificial Sequence
  Description of Artificial Sequence: Synthetic oligonucleotide
aagggcaguccaugggugu

SEQ ID NO: 820753 - RNA, 19 nt, Artificial Sequence
  Description of Artificial Sequence: Synthetic oligonucleotide
cgaauagggauuuugccgc

SEQ ID NO: 820754 - RNA, 19 nt, Artificial Sequence
  Description of Artificial Sequence: Synthetic oligonucleotide
guaagaaauuggcccaaca

SEQ ID NO: 820755 - RNA, 19 nt, Artificial Sequence
  Description of Artificial Sequence: Synthetic oligonucleotide
uguuccguguacuguugca

SEQ ID NO: 820756 - RNA, 19 nt, Artificial Sequence
  Description of Artificial Sequence: Synthetic oligonucleotide
aaauccacgcgcugcuuuu

SEQ ID NO: 820757 - RNA, 19 nt, Artificial Sequence
  Description of Artificial Sequence: Synthetic oligonucleotide
caauaucagcgaacuuggg

SEQ ID NO: 820758 - RNA, 19 nt, Artificial Sequence
  Description of Artificial Sequence: Synthetic oligonucleotide
ugcagcacgcugaacucac

SEQ ID NO: 820759 - RNA, 19 nt, Artificial Sequence
  Description of Artificial Sequence: Synthetic oligonucleotide
gauggcgacagguaucucu

SEQ ID NO: 820760 - RNA, 19 nt, Artificial Sequence
  Description of Artificial Sequence: Synthetic oligonucleotide
cuucaugccggacgcaaug

SEQ ID NO: 820761 - RNA, 19 nt, Artificial Sequence
  Description of Artificial Sequence: Synthetic oligonucleotide
gaagccgucauugauggcu

SEQ ID NO: 820762 - RNA, 19 nt, Artificial Sequence
  Description of Artificial Sequence: Synthetic oligonucleotide
cccaauaaaaucaguaaca

SEQ ID NO: 820763 - RNA, 19 nt, Artificial Sequence
  Description of Artificial Sequence: Synthetic oligonucleotide
uggaucucggugguaaacu

SEQ ID NO: 820764 - RNA, 19 nt, Artificial Sequence
  Description of Artificial Sequence: Synthetic oligonucleotide
aggaaauccacgcgcugcu

SEQ ID NO: 820765 - RNA, 19 nt, Artificial Sequence
  Description of Artificial Sequence: Synthetic oligonucleotide
ugcugacaauaucagcgaa

SEQ ID NO: 820766 - RNA, 19 nt, Artificial Sequence
  Description of Artificial Sequence: Synthetic oligonucleotide
augcaauggggacucagau

SEQ ID NO: 820767 - RNA, 19 nt, Artificial Sequence
  Description of Artificial Sequence: Synthetic oligonucleotide
uacggugcccuagucaucu

SEQ ID NO: 820768 - RNA, 19 nt, Artificial Sequence
  Description of Artificial Sequence: Synthetic oligonucleotide
cuggucuugggcucagcgc

SEQ ID NO: 820769 - RNA, 19 nt, Artificial Sequence
  Description of Artificial Sequence: Synthetic oligonucleotide
ccuaaggaacuuauccagg

SEQ ID NO: 820770 - RNA, 19 nt, Artificial Sequence
  Description of Artificial Sequence: Synthetic oligonucleotide
gaucucggugguaaacuug

SEQ ID NO: 820771 - RNA, 19 nt, Artificial Sequence
  Description of Artificial Sequence: Synthetic oligonucleotide
gaacuuauccagggccccg

SEQ ID NO: 820772 - RNA, 19 nt, Artificial Sequence
  Description of Artificial Sequence: Synthetic oligonucleotide
agcacugcaucaugagcug

SEQ ID NO: 820773 - RNA, 19 nt, Artificial Sequence
  Description of Artificial Sequence: Synthetic oligonucleotide
gaacuugcgguaggaaaug

SEQ ID NO: 820774 - RNA, 19 nt, Artificial Sequence
  Description of Artificial Sequence: Synthetic oligonucleotide
ggucuugagggagucaggg

SEQ ID NO: 820775 - RNA, 19 nt, Artificial Sequence
  Description of Artificial Sequence: Synthetic oligonucleotide
gacaggccaaaaucggaca

SEQ ID NO: 820776 - RNA, 19 nt, Artificial Sequence
  Description of Artificial Sequence: Synthetic oligonucleotide
cacacacucaaucuuucca

SEQ ID NO: 820777 - RNA, 19 nt, Artificial Sequence
  Description of Artificial Sequence: Synthetic oligonucleotide
gacagucguccaaaggggc

SEQ ID NO: 820778 - RNA, 19 nt, Artificial Sequence
  Description of Artificial Sequence: Synthetic oligonucleotide
augucuacugcagggcauc

SEQ ID NO: 820779 - RNA, 19 nt, Artificial Sequence
  Description of Artificial Sequence: Synthetic oligonucleotide
uacggaaggggacucccuc

SEQ ID NO: 820780 - RNA, 19 nt, Artificial Sequence
  Description of Artificial Sequence: Synthetic oligonucleotide
aauagggauuuugccgcca

SEQ ID NO: 820781 - RNA, 19 nt, Artificial Sequence
  Description of Artificial Sequence: Synthetic oligonucleotide
acacccucuaggcggauga

SEQ ID NO: 820782 - RNA, 19 nt, Artificial Sequence
  Description of Artificial Sequence: Synthetic oligonucleotide
accucaugguuugacagcu

SEQ ID NO: 820783 - RNA, 19 nt, Artificial Sequence
  Description of Artificial Sequence: Synthetic oligonucleotide
aguaacacugacagcgaca

SEQ ID NO: 820784 - RNA, 19 nt, Artificial Sequence
  Description of Artificial Sequence: Synthetic oligonucleotide
aauccacgcgcugcuuuuc

SEQ ID NO: 820785 - RNA, 19 nt, Artificial Sequence
  Description of Artificial Sequence: Synthetic oligonucleotide
gaagccgacuccugccagc

SEQ ID NO: 820786 - RNA, 19 nt, Artificial Sequence
  Description of Artificial Sequence: Synthetic oligonucleotide
cucuaggcggaugauguug

SEQ ID NO: 820787 - RNA, 19 nt, Artificial Sequence
  Description of Artificial Sequence: Synthetic oligonucleotide
uccacgcgcugcuuuuccg

SEQ ID NO: 820788 - RNA, 19 nt, Artificial Sequence
  Description of Artificial Sequence: Synthetic oligonucleotide
gugguaaacuugaguacag

SEQ ID NO: 820789 - RNA, 19 nt, Artificial Sequence
  Description of Artificial Sequence: Synthetic oligonucleotide
gggaagacgaaccccaauc

SEQ ID NO: 820790 - RNA, 19 nt, Artificial Sequence
  Description of Artificial Sequence: Synthetic oligonucleotide
aaugucuacugcagggcau

SEQ ID NO: 820791 - RNA, 19 nt, Artificial Sequence
  Description of Artificial Sequence: Synthetic oligonucleotide
agaagccgacuccugccag

SEQ ID NO: 820792 - RNA, 19 nt, Artificial Sequence
  Description of Artificial Sequence: Synthetic oligonucleotide
acuugggccggcgggagcg

SEQ ID NO: 820793 - RNA, 19 nt, Artificial Sequence
  Description of Artificial Sequence: Synthetic oligonucleotide
caucuucggaggacuggcg

SEQ ID NO: 820794 - RNA, 19 nt, Artificial Sequence
  Description of Artificial Sequence: Synthetic oligonucleotide
aggacuggcgggcucucag

SEQ ID NO: 820795 - RNA, 19 nt, Artificial Sequence
  Description of Artificial Sequence: Synthetic oligonucleotide
uucaugccggacgcaaugc

SEQ ID NO: 820796 - RNA, 19 nt, Artificial Sequence
  Description of Artificial Sequence: Synthetic oligonucleotide
ucguccaaaggggcuagag

SEQ ID NO: 820797 - RNA, 19 nt, Artificial Sequence
  Description of Artificial Sequence: Synthetic oligonucleotide
aaccgcuggugcugggcag

SEQ ID NO: 820798 - RNA, 19 nt, Artificial Sequence
  Description of Artificial Sequence: Synthetic oligonucleotide
uucuacccucuaccaauga

SEQ ID NO: 820799 - RNA, 19 nt, Artificial Sequence
  Description of Artificial Sequence: Synthetic oligonucleotide
acgaaccccaauccucuug

SEQ ID NO: 820800 - RNA, 19 nt, Artificial Sequence
  Description of Artificial Sequence: Synthetic oligonucleotide
ugggaaggucuguucagaa

SEQ ID NO: 820801 - RNA, 19 nt, Artificial Sequence
  Description of Artificial Sequence: Synthetic oligonucleotide
acuguacggaaggggacuc

SEQ ID NO: 820802 - RNA, 19 nt, Artificial Sequence
  Description of Artificial Sequence: Synthetic oligonucleotide
aggggcuagagaugaggug

SEQ ID NO: 820803 - RNA, 19 nt, Artificial Sequence
  Description of Artificial Sequence: Synthetic oligonucleotide
gaagacgaaccccaauccu

SEQ ID NO: 820804 - RNA, 19 nt, Artificial Sequence
  Description of Artificial Sequence: Synthetic oligonucleotide
uucaggggcuucaauuguu

SEQ ID NO: 820805 - RNA, 19 nt, Artificial Sequence
  Description of Artificial Sequence: Synthetic oligonucleotide
acacuguacggaaggggac

SEQ ID NO: 820806 - RNA, 19 nt, Artificial Sequence
  Description of Artificial Sequence: Synthetic oligonucleotide
gaagggcaguccaugggug

SEQ ID NO: 820807 - RNA, 19 nt, Artificial Sequence
  Description of Artificial Sequence: Synthetic oligonucleotide
caguaacacugacagcgac

SEQ ID NO: 820808 - RNA, 19 nt, Artificial Sequence
  Description of Artificial Sequence: Synthetic oligonucleotide
acugacagcgacagucguc

SEQ ID NO: 820809 - RNA, 19 nt, Artificial Sequence
  Description of Artificial Sequence: Synthetic oligonucleotide
guuugacagcucccaguag

SEQ ID NO: 820810 - RNA, 19 nt, Artificial Sequence
  Description of Artificial Sequence: Synthetic oligonucleotide
uguccaccgaauagggauu

SEQ ID NO: 820811 - RNA, 19 nt, Artificial Sequence
  Description of Artificial Sequence: Synthetic oligonucleotide
augccggacgcaaugccac

SEQ ID NO: 820812 - RNA, 19 nt, Artificial Sequence
  Description of Artificial Sequence: Synthetic oligonucleotide
cacuagugguguagguggc

SEQ ID NO: 820813 - RNA, 19 nt, Artificial Sequence
  Description of Artificial Sequence: Synthetic oligonucleotide
agcgaacuugggccggcgg

SEQ ID NO: 820814 - RNA, 19 nt, Artificial Sequence
  Description of Artificial Sequence: Synthetic oligonucleotide
gcacguaguucauauuggc

SEQ ID NO: 820815 - RNA, 19 nt, Artificial Sequence
  Description of Artificial Sequence: Synthetic oligonucleotide
acucggacacuguacggaa

SEQ ID NO: 820816 - RNA, 19 nt, Artificial Sequence
  Description of Artificial Sequence: Synthetic oligonucleotide
cuuacggugcccuagucau

SEQ ID NO: 820817 - RNA, 19 nt, Artificial Sequence
  Description of Artificial Sequence: Synthetic oligonucleotide
acggaagccgucauugaug

SEQ ID NO: 820818 - RNA, 19 nt, Artificial Sequence
  Description of Artificial Sequence: Synthetic oligonucleotide
uccguguacuguugcauuu

SEQ ID NO: 820819 - RNA, 19 nt, Artificial Sequence
  Description of Artificial Sequence: Synthetic oligonucleotide
ggcgcuguccaccgaauag

SEQ ID NO: 820820 - RNA, 19 nt, Artificial Sequence
  Description of Artificial Sequence: Synthetic oligonucleotide
caugguuugacagcuccca

SEQ ID NO: 820821 - RNA, 19 nt, Artificial Sequence
  Description of Artificial Sequence: Synthetic oligonucleotide
ggggacucccucugaaccg

SEQ ID NO: 820822 - RNA, 19 nt, Artificial Sequence
  Description of Artificial Sequence: Synthetic oligonucleotide
uuccguguacuguugcauu

SEQ ID NO: 820823 - RNA, 19 nt, Artificial Sequence
  Description of Artificial Sequence: Synthetic oligonucleotide
gacuuggaaaauagacauc

SEQ ID NO: 820824 - RNA, 19 nt, Artificial Sequence
  Description of Artificial Sequence: Synthetic oligonucleotide
ccuauggaugaagaagccg

SEQ ID NO: 820825 - RNA, 19 nt, Artificial Sequence
  Description of Artificial Sequence: Synthetic oligonucleotide
ugaguacagccugguuggg

SEQ ID NO: 820826 - RNA, 19 nt, Artificial Sequence
  Description of Artificial Sequence: Synthetic oligonucleotide
uagggauuuugccgccacu

SEQ ID NO: 820827 - RNA, 19 nt, Artificial Sequence
  Description of Artificial Sequence: Synthetic oligonucleotide
acaagggcggagggcaggg

SEQ ID NO: 820828 - RNA, 19 nt, Artificial Sequence
  Description of Artificial Sequence: Synthetic oligonucleotide
cucggacacuguacggaag

SEQ ID NO: 820829 - RNA, 19 nt, Artificial Sequence
  Description of Artificial Sequence: Synthetic oligonucleotide
ugccggacgcaaugccacg

SEQ ID NO: 820830 - RNA, 19 nt, Artificial Sequence
  Description of Artificial Sequence: Synthetic oligonucleotide
ggacgcaaugccacgaagc

SEQ ID NO: 820831 - RNA, 19 nt, Artificial Sequence
  Description of Artificial Sequence: Synthetic oligonucleotide
guguuccguguacuguugc

SEQ ID NO: 820832 - RNA, 19 nt, Artificial Sequence
  Description of Artificial Sequence: Synthetic oligonucleotide
cagcacacgggacaggcca

SEQ ID NO: 820833 - RNA, 19 nt, Artificial Sequence
  Description of Artificial Sequence: Synthetic oligonucleotide
ucauauuggccagguacuu

SEQ ID NO: 820834 - RNA, 19 nt, Artificial Sequence
  Description of Artificial Sequence: Synthetic oligonucleotide
gcugaggugaacuugcggu

SEQ ID NO: 820835 - RNA, 19 nt, Artificial Sequence
  Description of Artificial Sequence: Synthetic oligonucleotide
cuggcgggcucucaggguc

SEQ ID NO: 820836 - RNA, 19 nt, Artificial Sequence
  Description of Artificial Sequence: Synthetic oligonucleotide
caugccggacgcaaugcca

SEQ ID NO: 820837 - RNA, 19 nt, Artificial Sequence
  Description of Artificial Sequence: Synthetic oligonucleotide
accgcuggugcugggcagc

SEQ ID NO: 820838 - RNA, 19 nt, Artificial Sequence
  Description of Artificial Sequence: Synthetic oligonucleotide
aucagcgaacuugggccgg

SEQ ID NO: 820839 - RNA, 19 nt, Artificial Sequence
  Description of Artificial Sequence: Synthetic oligonucleotide
gcgaacuugggccggcggg

SEQ ID NO: 820840 - RNA, 19 nt, Artificial Sequence
  Description of Artificial Sequence: Synthetic oligonucleotide
gcugaacucaccauccuuc

SEQ ID NO: 820841 - RNA, 19 nt, Artificial Sequence
  Description of Artificial Sequence: Synthetic oligonucleotide
acgauuccauagcuccaca

SEQ ID NO: 820842 - RNA, 19 nt, Artificial Sequence
  Description of Artificial Sequence: Synthetic oligonucleotide
aaggucccacguggcaguc

SEQ ID NO: 820843 - RNA, 19 nt, Artificial Sequence
  Description of Artificial Sequence: Synthetic oligonucleotide
agggauuuugccgccacua

SEQ ID NO: 820844 - RNA, 19 nt, Artificial Sequence
  Description of Artificial Sequence: Synthetic oligonucleotide
aucggacaccuugcauacc

SEQ ID NO: 820845 - RNA, 19 nt, Artificial Sequence
  Description of Artificial Sequence: Synthetic oligonucleotide
ggagcgguccugcugccag

SEQ ID NO: 820846 - RNA, 19 nt, Artificial Sequence
  Description of Artificial Sequence: Synthetic oligonucleotide
ggacaggccaaaaucggac

SEQ ID NO: 820847 - RNA, 19 nt, Artificial Sequence
  Description of Artificial Sequence: Synthetic oligonucleotide
gacagcgacagucguccaa

SEQ ID NO: 820848 - RNA, 19 nt, Artificial Sequence
  Description of Artificial Sequence: Synthetic oligonucleotide
acagucguccaaaggggcu

SEQ ID NO: 820849 - RNA, 19 nt, Artificial Sequence
  Description of Artificial Sequence: Synthetic oligonucleotide
uuacggugcccuagucauc

SEQ ID NO: 820850 - RNA, 19 nt, Artificial Sequence
  Description of Artificial Sequence: Synthetic oligonucleotide
cgacagucguccaaagggg

SEQ ID NO: 820851 - RNA, 19 nt, Artificial Sequence
  Description of Artificial Sequence: Synthetic oligonucleotide
ggccccguucuccauauac

SEQ ID NO: 820852 - RNA, 19 nt, Artificial Sequence
  Description of Artificial Sequence: Synthetic oligonucleotide
uggcccaacaagggcggag

SEQ ID NO: 820853 - RNA, 19 nt, Artificial Sequence
  Description of Artificial Sequence: Synthetic oligonucleotide
ggggcuucaauuguucuga

SEQ ID NO: 820854 - RNA, 19 nt, Artificial Sequence
  Description of Artificial Sequence: Synthetic oligonucleotide
cugcaagucuggccagccc

SEQ ID NO: 820855 - RNA, 19 nt, Artificial Sequence
  Description of Artificial Sequence: Synthetic oligonucleotide
cacgcgcugcuuuuccgug

SEQ ID NO: 820856 - RNA, 19 nt, Artificial Sequence
  Description of Artificial Sequence: Synthetic oligonucleotide
agucguccaaaggggcuag

SEQ ID NO: 820857 - RNA, 19 nt, Artificial Sequence
  Description of Artificial Sequence: Synthetic oligonucleotide
ggcuuguauuuagagacga

SEQ ID NO: 820858 - RNA, 19 nt, Artificial Sequence
  Description of Artificial Sequence: Synthetic oligonucleotide
ggaacuuauccagggcccc

SEQ ID NO: 820859 - RNA, 19 nt, Artificial Sequence
  Description of Artificial Sequence: Synthetic oligonucleotide
gggaaugcaauggggacuc

SEQ ID NO: 820860 - RNA, 19 nt, Artificial Sequence
  Description of Artificial Sequence: Synthetic oligonucleotide
gcuagagaugagguggcug

SEQ ID NO: 820861 - RNA, 19 nt, Artificial Sequence
  Description of Artificial Sequence: Synthetic oligonucleotide
gggcuuguauuuagagacg

SEQ ID NO: 820862 - RNA, 19 nt, Artificial Sequence
  Description of Artificial Sequence: Synthetic oligonucleotide
gacggaagccgucauugau

SEQ ID NO: 820863 - RNA, 19 nt, Artificial Sequence
  Description of Artificial Sequence: Synthetic oligonucleotide
aggauggguggaucucggu

SEQ ID NO: 820864 - RNA, 19 nt, Artificial Sequence
  Description of Artificial Sequence: Synthetic oligonucleotide
gcuuacggugcccuaguca

SEQ ID NO: 820865 - RNA, 19 nt, Artificial Sequence
  Description of Artificial Sequence: Synthetic oligonucleotide
ucagcgaacuugggccggc

SEQ ID NO: 820866 - RNA, 19 nt, Artificial Sequence
  Description of Artificial Sequence: Synthetic oligonucleotide
gcgcuguccaccgaauagg

SEQ ID NO: 820867 - RNA, 19 nt, Artificial Sequence
  Description of Artificial Sequence: Synthetic oligonucleotide
uccugcaagucuggccagc

SEQ ID NO: 820868 - RNA, 19 nt, Artificial Sequence
  Description of Artificial Sequence: Synthetic oligonucleotide
acuggcgggcucucagggu

SEQ ID NO: 820869 - RNA, 19 nt, Artificial Sequence
  Description of Artificial Sequence: Synthetic oligonucleotide
uggggagacggaagccguc

SEQ ID NO: 820870 - RNA, 19 nt, Artificial Sequence
  Description of Artificial Sequence: Synthetic oligonucleotide
ggcccaacaagggcggagg

SEQ ID NO: 820871 - RNA, 19 nt, Artificial Sequence
  Description of Artificial Sequence: Synthetic oligonucleotide
cacucggacacuguacgga

SEQ ID NO: 820872 - RNA, 19 nt, Artificial Sequence
  Description of Artificial Sequence: Synthetic oligonucleotide
acccucuaccaaugagggu

SEQ ID NO: 820873 - RNA, 19 nt, Artificial Sequence
  Description of Artificial Sequence: Synthetic oligonucleotide
gcgggagcgguccugcugc

SEQ ID NO: 820874 - RNA, 19 nt, Artificial Sequence
  Description of Artificial Sequence: Synthetic oligonucleotide
auggcgacagguaucucuu

SEQ ID NO: 820875 - RNA, 19 nt, Artificial Sequence
  Description of Artificial Sequence: Synthetic oligonucleotide
cuugcaacacaggaugggu

SEQ ID NO: 820876 - RNA, 19 nt, Artificial Sequence
  Description of Artificial Sequence: Synthetic oligonucleotide
augccacgaagcaugccca

SEQ ID NO: 820877 - RNA, 19 nt, Artificial Sequence
  Description of Artificial Sequence: Synthetic oligonucleotide
caaugcgcuucugguggcc

SEQ ID NO: 820878 - RNA, 19 nt, Artificial Sequence
  Description of Artificial Sequence: Synthetic oligonucleotide
cagcgacagucguccaaag

SEQ ID NO: 820879 - RNA, 19 nt, Artificial Sequence
  Description of Artificial Sequence: Synthetic oligonucleotide
ccaaaggggcuagagauga

SEQ ID NO: 820880 - RNA, 19 nt, Artificial Sequence
  Description of Artificial Sequence: Synthetic oligonucleotide
cuguacggaaggggacucc

SEQ ID NO: 820881 - RNA, 19 nt, Artificial Sequence
  Description of Artificial Sequence: Synthetic oligonucleotide
uggcgcuguccaccgaaua

SEQ ID NO: 820882 - RNA, 19 nt, Artificial Sequence
  Description of Artificial Sequence: Synthetic oligonucleotide
uugagggagucaggggcuc

SEQ ID NO: 820883 - RNA, 19 nt, Artificial Sequence
  Description of Artificial Sequence: Synthetic oligonucleotide
agggccgcucuccguaagu

SEQ ID NO: 820884 - RNA, 19 nt, Artificial Sequence
  Description of Artificial Sequence: Synthetic oligonucleotide
cgggacaggccaaaaucgg

SEQ ID NO: 820885 - RNA, 19 nt, Artificial Sequence
  Description of Artificial Sequence: Synthetic oligonucleotide
acgcgcugcuuuuccgugu

SEQ ID NO: 820886 - RNA, 19 nt, Artificial Sequence
  Description of Artificial Sequence: Synthetic oligonucleotide
cugaaccgcuggugcuggg

SEQ ID NO: 820887 - RNA, 19 nt, Artificial Sequence
  Description of Artificial Sequence: Synthetic oligonucleotide
gcugcagcacgcugaacuc

SEQ ID NO: 820888 - RNA, 19 nt, Artificial Sequence
  Description of Artificial Sequence: Synthetic oligonucleotide
gccuugcaacacaggaugg

SEQ ID NO: 820889 - RNA, 19 nt, Artificial Sequence
  Description of Artificial Sequence: Synthetic oligonucleotide
gggauccccacaguguuca

SEQ ID NO: 820890 - RNA, 19 nt, Artificial Sequence
  Description of Artificial Sequence: Synthetic oligonucleotide
gacucccucugaaccgcug

SEQ ID NO: 820891 - RNA, 19 nt, Artificial Sequence
  Description of Artificial Sequence: Synthetic oligonucleotide
ggaaauggccucuggcgcu

SEQ ID NO: 820892 - RNA, 19 nt, Artificial Sequence
  Description of Artificial Sequence: Synthetic oligonucleotide
aaggucccugccacacacu

SEQ ID NO: 820893 - RNA, 19 nt, Artificial Sequence
  Description of Artificial Sequence: Synthetic oligonucleotide
acgcaaugccacgaagcau

SEQ ID NO: 820894 - RNA, 19 nt, Artificial Sequence
  Description of Artificial Sequence: Synthetic oligonucleotide
uucugguggccgggaagac

SEQ ID NO: 820895 - RNA, 19 nt, Artificial Sequence
  Description of Artificial Sequence: Synthetic oligonucleotide
ggggcuuacggugcccuag

SEQ ID NO: 820896 - RNA, 19 nt, Artificial Sequence
  Description of Artificial Sequence: Synthetic oligonucleotide
cggugguaaacuugaguac

SEQ ID NO: 820897 - RNA, 19 nt, Artificial Sequence
  Description of Artificial Sequence: Synthetic oligonucleotide
gcuguugacaagaauguuu

SEQ ID NO: 820898 - RNA, 19 nt, Artificial Sequence
  Description of Artificial Sequence: Synthetic oligonucleotide
ccaccgaauagggauuuug

SEQ ID NO: 820899 - RNA, 19 nt, Artificial Sequence
  Description of Artificial Sequence: Synthetic oligonucleotide
gcccaacaagggcggaggg

SEQ ID NO: 820900 - RNA, 19 nt, Artificial Sequence
  Description of Artificial Sequence: Synthetic oligonucleotide
gcuuguauuuagagacgac

SEQ ID NO: 820901 - RNA, 19 nt, Artificial Sequence
  Description of Artificial Sequence: Synthetic oligonucleotide
gggacucccucugaaccgc

SEQ ID NO: 820902 - RNA, 19 nt, Artificial Sequence
  Description of Artificial Sequence: Synthetic oligonucleotide
agcgguccugcugccagca

SEQ ID NO: 820903 - RNA, 19 nt, Artificial Sequence
  Description of Artificial Sequence: Synthetic oligonucleotide
cuccaaucaccuucugccu

SEQ ID NO: 820904 - RNA, 19 nt, Artificial Sequence
  Description of Artificial Sequence: Synthetic oligonucleotide
gccgccacuagugguguag

SEQ ID NO: 820905 - RNA, 19 nt, Artificial Sequence
  Description of Artificial Sequence: Synthetic oligonucleotide
cuagugguguagguggccu

SEQ ID NO: 820906 - RNA, 19 nt, Artificial Sequence
  Description of Artificial Sequence: Synthetic oligonucleotide
cagcgcccaaccucagcuc

SEQ ID NO: 820907 - RNA, 19 nt, Artificial Sequence
  Description of Artificial Sequence: Synthetic oligonucleotide
cguguacuguugcauuuug

SEQ ID NO: 820908 - RNA, 19 nt, Artificial Sequence
  Description of Artificial Sequence: Synthetic oligonucleotide
uagauggguguggcuccac

SEQ ID NO: 820909 - RNA, 19 nt, Artificial Sequence
  Description of Artificial Sequence: Synthetic oligonucleotide
guuccguguacuguugcau

SEQ ID NO: 820910 - RNA, 19 nt, Artificial Sequence
  Description of Artificial Sequence: Synthetic oligonucleotide
auggguguggggagacgga

SEQ ID NO: 820911 - RNA, 19 nt, Artificial Sequence
  Description of Artificial Sequence: Synthetic oligonucleotide
acgacacccucuaggcgga

SEQ ID NO: 820912 - RNA, 19 nt, Artificial Sequence
  Description of Artificial Sequence: Synthetic oligonucleotide
cagcgaacuugggccggcg

SEQ ID NO: 820913 - RNA, 19 nt, Artificial Sequence
  Description of Artificial Sequence: Synthetic oligonucleotide
agggcacacugggaaugca

SEQ ID NO: 820914 - RNA, 19 nt, Artificial Sequence
  Description of Artificial Sequence: Synthetic oligonucleotide
cccaacaagggcggagggc

SEQ ID NO: 820915 - RNA, 19 nt, Artificial Sequence
  Description of Artificial Sequence: Synthetic oligonucleotide
cagugacucuccugcaagu

SEQ ID NO: 820916 - RNA, 19 nt, Artificial Sequence
  Description of Artificial Sequence: Synthetic oligonucleotide
cacuguacggaaggggacu

SEQ ID NO: 820917 - RNA, 19 nt, Artificial Sequence
  Description of Artificial Sequence: Synthetic oligonucleotide
ggugaacuugcgguaggaa

SEQ ID NO: 820918 - RNA, 19 nt, Artificial Sequence
  Description of Artificial Sequence: Synthetic oligonucleotide
gccacgaagcaugcccacc

SEQ ID NO: 820919 - RNA, 19 nt, Artificial Sequence
  Description of Artificial Sequence: Synthetic oligonucleotide
caagggcggagggcagggc

SEQ ID NO: 820920 - RNA, 19 nt, Artificial Sequence
  Description of Artificial Sequence: Synthetic oligonucleotide
ggggagacggaagccguca

SEQ ID NO: 820921 - RNA, 19 nt, Artificial Sequence
  Description of Artificial Sequence: Synthetic oligonucleotide
cagucguccaaaggggcua

SEQ ID NO: 820922 - RNA, 19 nt, Artificial Sequence
  Description of Artificial Sequence: Synthetic oligonucleotide
uccaccgaauagggauuuu

SEQ ID NO: 820923 - RNA, 19 nt, Artificial Sequence
  Description of Artificial Sequence: Synthetic oligonucleotide
ugauggcgacagguaucuc

SEQ ID NO: 820924 - RNA, 19 nt, Artificial Sequence
  Description of Artificial Sequence: Synthetic oligonucleotide
cagccacucggacacugua

SEQ ID NO: 820925 - RNA, 19 nt, Artificial Sequence
  Description of Artificial Sequence: Synthetic oligonucleotide
agccgucauugauggcuuu

SEQ ID NO: 820926 - RNA, 19 nt, Artificial Sequence
  Description of Artificial Sequence: Synthetic oligonucleotide
gguggccgggaagacgaac

SEQ ID NO: 820927 - RNA, 19 nt, Artificial Sequence
  Description of Artificial Sequence: Synthetic oligonucleotide
ggcuuacggugcccuaguc

SEQ ID NO: 820928 - RNA, 19 nt, Artificial Sequence
  Description of Artificial Sequence: Synthetic oligonucleotide
cagccugggaaugucuacu

SEQ ID NO: 820929 - RNA, 19 nt, Artificial Sequence
  Description of Artificial Sequence: Synthetic oligonucleotide
ggaucucggugguaaacuu

SEQ ID NO: 820930 - RNA, 19 nt, Artificial Sequence
  Description of Artificial Sequence: Synthetic oligonucleotide
gccgucauugauggcuuuc

SEQ ID NO: 820931 - RNA, 19 nt, Artificial Sequence
  Description of Artificial Sequence: Synthetic oligonucleotide
gaggacuggcgggcucuca

SEQ ID NO: 820932 - RNA, 19 nt, Artificial Sequence
  Description of Artificial Sequence: Synthetic oligonucleotide
ccaugaaguguuccgugua

SEQ ID NO: 820933 - RNA, 19 nt, Artificial Sequence
  Description of Artificial Sequence: Synthetic oligonucleotide
ccucuguccccagccuugg

SEQ ID NO: 820934 - RNA, 19 nt, Artificial Sequence
  Description of Artificial Sequence: Synthetic oligonucleotide
ccgccacuagugguguagg

SEQ ID NO: 820935 - RNA, 19 nt, Artificial Sequence
  Description of Artificial Sequence: Synthetic oligonucleotide
cggacgcaaugccacgaag

SEQ ID NO: 820936 - RNA, 19 nt, Artificial Sequence
  Description of Artificial Sequence: Synthetic oligonucleotide
gcaucaugagcugguagau

SEQ ID NO: 820937 - RNA, 19 nt, Artificial Sequence
  Description of Artificial Sequence: Synthetic oligonucleotide
cccuagucaucuggucuug

SEQ ID NO: 820938 - RNA, 19 nt, Artificial Sequence
  Description of Artificial Sequence: Synthetic oligonucleotide
gggccgcucuccguaaguc

SEQ ID NO: 820939 - RNA, 19 nt, Artificial Sequence
  Description of Artificial Sequence: Synthetic oligonucleotide
gucguccaaaggggcuaga

SEQ ID NO: 820940 - RNA, 19 nt, Artificial Sequence
  Description of Artificial Sequence: Synthetic oligonucleotide
caacacaggauggguggau

SEQ ID NO: 820941 - RNA, 19 nt, Artificial Sequence
  Description of Artificial Sequence: Synthetic oligonucleotide
gccggacgcaaugccacga

SEQ ID NO: 820942 - RNA, 19 nt, Artificial Sequence
  Description of Artificial Sequence: Synthetic oligonucleotide
guccaccgaauagggauuu

SEQ ID NO: 820943 - RNA, 19 nt, Artificial Sequence
  Description of Artificial Sequence: Synthetic oligonucleotide
gggcuuacggugcccuagu

SEQ ID NO: 820944 - RNA, 19 nt, Artificial Sequence
  Description of Artificial Sequence: Synthetic oligonucleotide
ggaaugcaauggggacuca

SEQ ID NO: 820945 - RNA, 19 nt, Artificial Sequence
  Description of Artificial Sequence: Synthetic oligonucleotide
ccauauacucugugaugau

SEQ ID NO: 820946 - RNA, 19 nt, Artificial Sequence
  Description of Artificial Sequence: Synthetic oligonucleotide
cucuggcgcuguccaccga

SEQ ID NO: 820947 - RNA, 19 nt, Artificial Sequence
  Description of Artificial Sequence: Synthetic oligonucleotide
cuggcgcuguccaccgaau

SEQ ID NO: 820948 - RNA, 19 nt, Artificial Sequence
  Description of Artificial Sequence: Synthetic oligonucleotide
gccgcucuccguaagucau

SEQ ID NO: 820949 - RNA, 19 nt, Artificial Sequence
  Description of Artificial Sequence: Synthetic oligonucleotide
ccggcgggagcgguccugc

SEQ ID NO: 820950 - RNA, 19 nt, Artificial Sequence
  Description of Artificial Sequence: Synthetic oligonucleotide
gcgguaggaaauggccucu

SEQ ID NO: 820951 - RNA, 19 nt, Artificial Sequence
  Description of Artificial Sequence: Synthetic oligonucleotide
ccuucucgauggcugugua

SEQ ID NO: 820952 - RNA, 19 nt, Artificial Sequence
  Description of Artificial Sequence: Synthetic oligonucleotide
ggaggacuggcgggcucuc

SEQ ID NO: 820953 - RNA, 19 nt, Artificial Sequence
  Description of Artificial Sequence: Synthetic oligonucleotide
ggcuagagaugagguggcu

SEQ ID NO: 820954 - RNA, 19 nt, Artificial Sequence
  Description of Artificial Sequence: Synthetic oligonucleotide
ggucccggugcacguaguu

SEQ ID NO: 820955 - RNA, 19 nt, Artificial Sequence
  Description of Artificial Sequence: Synthetic oligonucleotide
ccacgcgcugcuuuuccgu

SEQ ID NO: 820956 - RNA, 19 nt, Artificial Sequence
  Description of Artificial Sequence: Synthetic oligonucleotide
ccgcuggugcugggcagcc

SEQ ID NO: 820957 - RNA, 19 nt, Artificial Sequence
  Description of Artificial Sequence: Synthetic oligonucleotide
gcgguccugcugccagcac

SEQ ID NO: 820958 - RNA, 19 nt, Artificial Sequence
  Description of Artificial Sequence: Synthetic oligonucleotide
gcacacgggacaggccaaa

SEQ ID NO: 820959 - RNA, 19 nt, Artificial Sequence
  Description of Artificial Sequence: Synthetic oligonucleotide
gggagcgguccugcugcca

SEQ ID NO: 820960 - RNA, 19 nt, Artificial Sequence
  Description of Artificial Sequence: Synthetic oligonucleotide
ccggacgcaaugccacgaa

SEQ ID NO: 820961 - RNA, 19 nt, Artificial Sequence
  Description of Artificial Sequence: Synthetic oligonucleotide
ccuccuuccuauggaugaa

SEQ ID NO: 820962 - RNA, 19 nt, Artificial Sequence
  Description of Artificial Sequence: Synthetic oligonucleotide
ccgggaagacgaaccccaa

SEQ ID NO: 820963 - RNA, 19 nt, Artificial Sequence
  Description of Artificial Sequence: Synthetic oligonucleotide
ccuugcauaccagguugcu

SEQ ID NO: 820964 - RNA, 19 nt, Artificial Sequence
  Description of Artificial Sequence: Synthetic oligonucleotide
ggacucccucugaaccgcu

SEQ ID NO: 820965 - RNA, 19 nt, Artificial Sequence
  Description of Artificial Sequence: Synthetic oligonucleotide
cgcgcugcuuuuccgugua

SEQ ID NO: 820966 - RNA, 19 nt, Artificial Sequence
  Description of Artificial Sequence: Synthetic oligonucleotide
cacccucuaggcggaugau

SEQ ID NO: 820967 - RNA, 19 nt, Artificial Sequence
  Description of Artificial Sequence: Synthetic oligonucleotide
ccguguacuguugcauuuu

SEQ ID NO: 820968 - RNA, 19 nt, Artificial Sequence
  Description of Artificial Sequence: Synthetic oligonucleotide
gcgcccaaccucagcuccu

SEQ ID NO: 820969 - RNA, 19 nt, Artificial Sequence
  Description of Artificial Sequence: Synthetic oligonucleotide
cgccacuagugguguaggu

SEQ ID NO: 820970 - RNA, 19 nt, Artificial Sequence
  Description of Artificial Sequence: Synthetic oligonucleotide
gucccacguggcagucaau

SEQ ID NO: 820971 - RNA, 19 nt, Artificial Sequence
  Description of Artificial Sequence: Synthetic oligonucleotide
ggcgggcucucaggguccu

SEQ ID NO: 820972 - RNA, 19 nt, Artificial Sequence
  Description of Artificial Sequence: Synthetic oligonucleotide
ccggugcacguaguucaua

SEQ ID NO: 820973 - RNA, 19 nt, Artificial Sequence
  Description of Artificial Sequence: Synthetic oligonucleotide
gggccccguucuccauaua

SEQ ID NO: 820974 - RNA, 19 nt, Artificial Sequence
  Description of Artificial Sequence: Synthetic oligonucleotide
cgacacccucuaggcggau

SEQ ID NO: 820975 - RNA, 19 nt, Artificial Sequence
  Description of Artificial Sequence: Synthetic oligonucleotide
aaaagaaccagugucaacc

SEQ ID NO: 820976 - RNA, 19 nt, Artificial Sequence
  Description of Artificial Sequence: Synthetic oligonucleotide
aauaccugaucccacgacc

SEQ ID NO: 820977 - RNA, 19 nt, Artificial Sequence
  Description of Artificial Sequence: Synthetic oligonucleotide
agugucaacccacagaccc

SEQ ID NO: 820978 - RNA, 19 nt, Artificial Sequence
  Description of Artificial Sequence: Synthetic oligonucleotide
aagaaguacagcuuacaac

SEQ ID NO: 820979 - RNA, 19 nt, Artificial Sequence
  Description of Artificial Sequence: Synthetic oligonucleotide
agagugaguagccauaaac

SEQ ID NO: 820980 - RNA, 19 nt, Artificial Sequence
  Description of Artificial Sequence: Synthetic oligonucleotide
agugaguagccauaaacac

SEQ ID NO: 820981 - RNA, 19 nt, Artificial Sequence
  Description of Artificial Sequence: Synthetic oligonucleotide
ucccugauagcuaacauag

SEQ ID NO: 820982 - RNA, 19 nt, Artificial Sequence
  Description of Artificial Sequence: Synthetic oligonucleotide
aauauuuccugcucggcug

SEQ ID NO: 820983 - RNA, 19 nt, Artificial Sequence
  Description of Artificial Sequence: Synthetic oligonucleotide
aacacaaaccgucuccagg

SEQ ID NO: 820984 - RNA, 19 nt, Artificial Sequence
  Description of Artificial Sequence: Synthetic oligonucleotide
acaaccuagagccaagagg

SEQ ID NO: 820985 - RNA, 19 nt, Artificial Sequence
  Description of Artificial Sequence: Synthetic oligonucleotide
uagucaaacguccagaauc

SEQ ID NO: 820986 - RNA, 19 nt, Artificial Sequence
  Description of Artificial Sequence: Synthetic oligonucleotide
uuuaauccgguccaagacc

SEQ ID NO: 820987 - RNA, 19 nt, Artificial Sequence
  Description of Artificial Sequence: Synthetic oligonucleotide
ucuucgaacucauggaagg

SEQ ID NO: 820988 - RNA, 19 nt, Artificial Sequence
  Description of Artificial Sequence: Synthetic oligonucleotide
uuugcuuuguaagaaaagc

SEQ ID NO: 820989 - RNA, 19 nt, Artificial Sequence
  Description of Artificial Sequence: Synthetic oligonucleotide
ugaguagccauaaacacaa

SEQ ID NO: 820990 - RNA, 19 nt, Artificial Sequence
  Description of Artificial Sequence: Synthetic oligonucleotide
aguagccauaaacacaaac

SEQ ID NO: 820991 - RNA, 19 nt, Artificial Sequence
  Description of Artificial Sequence: Synthetic oligonucleotide
gaugcuuccgccuacaguc

SEQ ID NO: 820992 - RNA, 19 nt, Artificial Sequence
  Description of Artificial Sequence: Synthetic oligonucleotide
gaaagggccauauagguca

SEQ ID NO: 820993 - RNA, 19 nt, Artificial Sequence
  Description of Artificial Sequence: Synthetic oligonucleotide
ucucccuccagacagaaca

SEQ ID NO: 820994 - RNA, 19 nt, Artificial Sequence
  Description of Artificial Sequence: Synthetic oligonucleotide
auagccaauaccugauccc

SEQ ID NO: 820995 - RNA, 19 nt, Artificial Sequence
  Description of Artificial Sequence: Synthetic oligonucleotide
aaaaccuggaacaggcagc

SEQ ID NO: 820996 - RNA, 19 nt, Artificial Sequence
  Description of Artificial Sequence: Synthetic oligonucleotide
aaaguuguggccagggugg

SEQ ID NO: 820997 - RNA, 19 nt, Artificial Sequence
  Description of Artificial Sequence: Synthetic oligonucleotide
ugggauaagccacaggacc

SEQ ID NO: 820998 - RNA, 19 nt, Artificial Sequence
  Description of Artificial Sequence: Synthetic oligonucleotide
caaacguccagaaucuugg

SEQ ID NO: 820999 - RNA, 19 nt, Artificial Sequence
  Description of Artificial Sequence: Synthetic oligonucleotide
aaaaguguuugcuuuguaa

SEQ ID NO: 821000 - RNA, 19 nt, Artificial Sequence
  Description of Artificial Sequence: Synthetic oligonucleotide
uugcuuuguaagaaaagcc

SEQ ID NO: 821001 - RNA, 19 nt, Artificial Sequence
  Description of Artificial Sequence: Synthetic oligonucleotide
ugauagcuaacauaggccu

SEQ ID NO: 821002 - RNA, 19 nt, Artificial Sequence
  Description of Artificial Sequence: Synthetic oligonucleotide
cacgcauagcaguagaugg

SEQ ID NO: 821003 - RNA, 19 nt, Artificial Sequence
  Description of Artificial Sequence: Synthetic oligonucleotide
aaccucucccuccagacag

SEQ ID NO: 821004 - RNA, 19 nt, Artificial Sequence
  Description of Artificial Sequence: Synthetic oligonucleotide
uuuuacgaaaagaaccagu

SEQ ID NO: 821005 - RNA, 19 nt, Artificial Sequence
  Description of Artificial Sequence: Synthetic oligonucleotide
gaagcgaugcucuaucgcc

SEQ ID NO: 821006 - RNA, 19 nt, Artificial Sequence
  Description of Artificial Sequence: Synthetic oligonucleotide
gggaaagucaccuagggcc

SEQ ID NO: 821007 - RNA, 19 nt, Artificial Sequence
  Description of Artificial Sequence: Synthetic oligonucleotide
uguaagggaaacagggccc

SEQ ID NO: 821008 - RNA, 19 nt, Artificial Sequence
  Description of Artificial Sequence: Synthetic oligonucleotide
cugauagcuaacauaggcc

SEQ ID NO: 821009 - RNA, 19 nt, Artificial Sequence
  Description of Artificial Sequence: Synthetic oligonucleotide
uuaauccgguccaagaccu

SEQ ID NO: 821010 - RNA, 19 nt, Artificial Sequence
  Description of Artificial Sequence: Synthetic oligonucleotide
ugucccuaggcccagaggu

SEQ ID NO: 821011 - RNA, 19 nt, Artificial Sequence
  Description of Artificial Sequence: Synthetic oligonucleotide
agaagcgaugcucuaucgc

SEQ ID NO: 821012 - RNA, 19 nt, Artificial Sequence
  Description of Artificial Sequence: Synthetic oligonucleotide
ucaaacguccagaaucuug

SEQ ID NO: 821013 - RNA, 19 nt, Artificial Sequence
  Description of Artificial Sequence: Synthetic oligonucleotide
uucuuuugaggcgucaccg

SEQ ID NO: 821014 - RNA, 19 nt, Artificial Sequence
  Description of Artificial Sequence: Synthetic oligonucleotide
cuguaagggaaacagggcc

SEQ ID NO: 821015 - RNA, 19 nt, Artificial Sequence
  Description of Artificial Sequence: Synthetic oligonucleotide
ugaccuguaagggaaacag

SEQ ID NO: 821016 - RNA, 19 nt, Artificial Sequence
  Description of Artificial Sequence: Synthetic oligonucleotide
aaacguccagaaucuuggc

SEQ ID NO: 821017 - RNA, 19 nt, Artificial Sequence
  Description of Artificial Sequence: Synthetic oligonucleotide
aaaguagcaggguggucuc

SEQ ID NO: 821018 - RNA, 19 nt, Artificial Sequence
  Description of Artificial Sequence: Synthetic oligonucleotide
agcuauagucaccuugugg

SEQ ID NO: 821019 - RNA, 19 nt, Artificial Sequence
  Description of Artificial Sequence: Synthetic oligonucleotide
aaagccugcaaaguagcag

SEQ ID NO: 821020 - RNA, 19 nt, Artificial Sequence
  Description of Artificial Sequence: Synthetic oligonucleotide
uccaucaguaauauuuccu

SEQ ID NO: 821021 - RNA, 19 nt, Artificial Sequence
  Description of Artificial Sequence: Synthetic oligonucleotide
uucuucgaacucauggaag

SEQ ID NO: 821022 - RNA, 19 nt, Artificial Sequence
  Description of Artificial Sequence: Synthetic oligonucleotide
aucaguaauauuuccugcu

SEQ ID NO: 821023 - RNA, 19 nt, Artificial Sequence
  Description of Artificial Sequence: Synthetic oligonucleotide
ugguaccucacaaaguugu

SEQ ID NO: 821024 - RNA, 19 nt, Artificial Sequence
  Description of Artificial Sequence: Synthetic oligonucleotide
gacacugggagauagaagu

SEQ ID NO: 821025 - RNA, 19 nt, Artificial Sequence
  Description of Artificial Sequence: Synthetic oligonucleotide
cugucaagccuucagggcg

SEQ ID NO: 821026 - RNA, 19 nt, Artificial Sequence
  Description of Artificial Sequence: Synthetic oligonucleotide
ggccauauaggucaggccg

SEQ ID NO: 821027 - RNA, 19 nt, Artificial Sequence
  Description of Artificial Sequence: Synthetic oligonucleotide
auaguagucaaacguccag

SEQ ID NO: 821028 - RNA, 19 nt, Artificial Sequence
  Description of Artificial Sequence: Synthetic oligonucleotide
aggccgauuucuaagaugg

SEQ ID NO: 821029 - RNA, 19 nt, Artificial Sequence
  Description of Artificial Sequence: Synthetic oligonucleotide
ggugaugccagcuauaguc

SEQ ID NO: 821030 - RNA, 19 nt, Artificial Sequence
  Description of Artificial Sequence: Synthetic oligonucleotide
ucauggaccgggcugaggu

SEQ ID NO: 821031 - RNA, 19 nt, Artificial Sequence
  Description of Artificial Sequence: Synthetic oligonucleotide
ucgaacaacaggccacagg

SEQ ID NO: 821032 - RNA, 19 nt, Artificial Sequence
  Description of Artificial Sequence: Synthetic oligonucleotide
ucuaucgcccucuuccucc

SEQ ID NO: 821033 - RNA, 19 nt, Artificial Sequence
  Description of Artificial Sequence: Synthetic oligonucleotide
aauccgguccaagaccugg

SEQ ID NO: 821034 - RNA, 19 nt, Artificial Sequence
  Description of Artificial Sequence: Synthetic oligonucleotide
aguagauggugaugccagc

SEQ ID NO: 821035 - RNA, 19 nt, Artificial Sequence
  Description of Artificial Sequence: Synthetic oligonucleotide
acacaaaccgucuccagga

SEQ ID NO: 821036 - RNA, 19 nt, Artificial Sequence
  Description of Artificial Sequence: Synthetic oligonucleotide
cuuccuguagaagcgaugc

SEQ ID NO: 821037 - RNA, 19 nt, Artificial Sequence
  Description of Artificial Sequence: Synthetic oligonucleotide
gaaccuuuaauccggucca

SEQ ID NO: 821038 - RNA, 19 nt, Artificial Sequence
  Description of Artificial Sequence: Synthetic oligonucleotide
aagcaaacaaggaaggaaa

SEQ ID NO: 821039 - RNA, 19 nt, Artificial Sequence
  Description of Artificial Sequence: Synthetic oligonucleotide
auauaggucaggccgauuu

SEQ ID NO: 821040 - RNA, 19 nt, Artificial Sequence
  Description of Artificial Sequence: Synthetic oligonucleotide
uguccaucaguaauauuuc

SEQ ID NO: 821041 - RNA, 19 nt, Artificial Sequence
  Description of Artificial Sequence: Synthetic oligonucleotide
auagucaccuuguggaacu

SEQ ID NO: 821042 - RNA, 19 nt, Artificial Sequence
  Description of Artificial Sequence: Synthetic oligonucleotide
gcuaacauaggccugugug

SEQ ID NO: 821043 - RNA, 19 nt, Artificial Sequence
  Description of Artificial Sequence: Synthetic oligonucleotide
ugggagauagaaguguggc

SEQ ID NO: 821044 - RNA, 19 nt, Artificial Sequence
  Description of Artificial Sequence: Synthetic oligonucleotide
agaagcuuugauaguaguc

SEQ ID NO: 821045 - RNA, 19 nt, Artificial Sequence
  Description of Artificial Sequence: Synthetic oligonucleotide
aagcgaugcucuaucgccc

SEQ ID NO: 821046 - RNA, 19 nt, Artificial Sequence
  Description of Artificial Sequence: Synthetic oligonucleotide
uagaagcgaugcucuaucg

SEQ ID NO: 821047 - RNA, 19 nt, Artificial Sequence
  Description of Artificial Sequence: Synthetic oligonucleotide
uaaacacaaaccgucucca

SEQ ID NO: 821048 - RNA, 19 nt, Artificial Sequence
  Description of Artificial Sequence: Synthetic oligonucleotide
gaagaaguacagcuuacaa

SEQ ID NO: 821049 - RNA, 19 nt, Artificial Sequence
  Description of Artificial Sequence: Synthetic oligonucleotide
guugccaguaacugccagg

SEQ ID NO: 821050 - RNA, 19 nt, Artificial Sequence
  Description of Artificial Sequence: Synthetic oligonucleotide
agggccauauaggucaggc

SEQ ID NO: 821051 - RNA, 19 nt, Artificial Sequence
  Description of Artificial Sequence: Synthetic oligonucleotide
uucagggcggacguaaucc

SEQ ID NO: 821052 - RNA, 19 nt, Artificial Sequence
  Description of Artificial Sequence: Synthetic oligonucleotide
acguaauccccucucacca

SEQ ID NO: 821053 - RNA, 19 nt, Artificial Sequence
  Description of Artificial Sequence: Synthetic oligonucleotide
gagugaguagccauaaaca

SEQ ID NO: 821054 - RNA, 19 nt, Artificial Sequence
  Description of Artificial Sequence: Synthetic oligonucleotide
aaaccucaaggaucuguca

SEQ ID NO: 821055 - RNA, 19 nt, Artificial Sequence
  Description of Artificial Sequence: Synthetic oligonucleotide
agguacuccuggcaauggc

SEQ ID NO: 821056 - RNA, 19 nt, Artificial Sequence
  Description of Artificial Sequence: Synthetic oligonucleotide
acaaaacucccagcugucc

SEQ ID NO: 821057 - RNA, 19 nt, Artificial Sequence
  Description of Artificial Sequence: Synthetic oligonucleotide
uucgaacucauggaaggcc

SEQ ID NO: 821058 - RNA, 19 nt, Artificial Sequence
  Description of Artificial Sequence: Synthetic oligonucleotide
caagagggcgugaagcagc

SEQ ID NO: 821059 - RNA, 19 nt, Artificial Sequence
  Description of Artificial Sequence: Synthetic oligonucleotide
caccuuuauauaaauucuc

SEQ ID NO: 821060 - RNA, 19 nt, Artificial Sequence
  Description of Artificial Sequence: Synthetic oligonucleotide
cucccuugugcccugacgc

SEQ ID NO: 821061 - RNA, 19 nt, Artificial Sequence
  Description of Artificial Sequence: Synthetic oligonucleotide
cccaccuuuauauaaauuc

SEQ ID NO: 821062 - RNA, 19 nt, Artificial Sequence
  Description of Artificial Sequence: Synthetic oligonucleotide
acuagccacgcauagcagu

SEQ ID NO: 821063 - RNA, 19 nt, Artificial Sequence
  Description of Artificial Sequence: Synthetic oligonucleotide
caaaggguucaccucacac

SEQ ID NO: 821064 - RNA, 19 nt, Artificial Sequence
  Description of Artificial Sequence: Synthetic oligonucleotide
uuugaggcgucaccgcaug

SEQ ID NO: 821065 - RNA, 19 nt, Artificial Sequence
  Description of Artificial Sequence: Synthetic oligonucleotide
aagaaccagugucaaccca

SEQ ID NO: 821066 - RNA, 19 nt, Artificial Sequence
  Description of Artificial Sequence: Synthetic oligonucleotide
aacucauggaaggccagug

SEQ ID NO: 821067 - RNA, 19 nt, Artificial Sequence
  Description of Artificial Sequence: Synthetic oligonucleotide
gcagcgaaccuuuaauccg

SEQ ID NO: 821068 - RNA, 19 nt, Artificial Sequence
  Description of Artificial Sequence: Synthetic oligonucleotide
aguggcacuagccacgcau

SEQ ID NO: 821069 - RNA, 19 nt, Artificial Sequence
  Description of Artificial Sequence: Synthetic oligonucleotide
caccacuucggcuccauag

SEQ ID NO: 821070 - RNA, 19 nt, Artificial Sequence
  Description of Artificial Sequence: Synthetic oligonucleotide
ugagggguggcccugucaa

SEQ ID NO: 821071 - RNA, 19 nt, Artificial Sequence
  Description of Artificial Sequence: Synthetic oligonucleotide
cagggugaacaccagcccg

SEQ ID NO: 821072 - RNA, 19 nt, Artificial Sequence
  Description of Artificial Sequence: Synthetic oligonucleotide
cuacaguccugccuggagc

SEQ ID NO: 821073 - RNA, 19 nt, Artificial Sequence
  Description of Artificial Sequence: Synthetic oligonucleotide
uuguaagaaaagccugcaa

SEQ ID NO: 821074 - RNA, 19 nt, Artificial Sequence
  Description of Artificial Sequence: Synthetic oligonucleotide
uuugaccugcuuccuagaa

SEQ ID NO: 821075 - RNA, 19 nt, Artificial Sequence
  Description of Artificial Sequence: Synthetic oligonucleotide
uggaagaaguacagcuuac

SEQ ID NO: 821076 - RNA, 19 nt, Artificial Sequence
  Description of Artificial Sequence: Synthetic oligonucleotide
auagcuaacauaggccugu

SEQ ID NO: 821077 - RNA, 19 nt, Artificial Sequence
  Description of Artificial Sequence: Synthetic oligonucleotide
ugaugcuuccgccuacagu

SEQ ID NO: 821078 - RNA, 19 nt, Artificial Sequence
  Description of Artificial Sequence: Synthetic oligonucleotide
caaggaucugucacagaag

SEQ ID NO: 821079 - RNA, 19 nt, Artificial Sequence
  Description of Artificial Sequence: Synthetic oligonucleotide
cacgaccacagucacgugc

SEQ ID NO: 821080 - RNA, 19 nt, Artificial Sequence
  Description of Artificial Sequence: Synthetic oligonucleotide
uugccaguaacugccagga

SEQ ID NO: 821081 - RNA, 19 nt, Artificial Sequence
  Description of Artificial Sequence: Synthetic oligonucleotide
ccagaaagggccauauagg

SEQ ID NO: 821082 - RNA, 19 nt, Artificial Sequence
  Description of Artificial Sequence: Synthetic oligonucleotide
gagaaacccggcuggccgg

SEQ ID NO: 821083 - RNA, 19 nt, Artificial Sequence
  Description of Artificial Sequence: Synthetic oligonucleotide
uauaggucaggccgauuuc

SEQ ID NO: 821084 - RNA, 19 nt, Artificial Sequence
  Description of Artificial Sequence: Synthetic oligonucleotide
guacaaaacucccagcugu

SEQ ID NO: 821085 - RNA, 19 nt, Artificial Sequence
  Description of Artificial Sequence: Synthetic oligonucleotide
aggauugaugcuuccgccu

SEQ ID NO: 821086 - RNA, 19 nt, Artificial Sequence
  Description of Artificial Sequence: Synthetic oligonucleotide
gauagcuaacauaggccug

SEQ ID NO: 821087 - RNA, 19 nt, Artificial Sequence
  Description of Artificial Sequence: Synthetic oligonucleotide
agccaccagccuuguaucc

SEQ ID NO: 821088 - RNA, 19 nt, Artificial Sequence
  Description of Artificial Sequence: Synthetic oligonucleotide
uucuaagaugguaccucac

SEQ ID NO: 821089 - RNA, 19 nt, Artificial Sequence
  Description of Artificial Sequence: Synthetic oligonucleotide
guagaagcgaugcucuauc

SEQ ID NO: 821090 - RNA, 19 nt, Artificial Sequence
  Description of Artificial Sequence: Synthetic oligonucleotide
ugcccuagaguccccaccu

SEQ ID NO: 821091 - RNA, 19 nt, Artificial Sequence
  Description of Artificial Sequence: Synthetic oligonucleotide
uagccaauaccugauccca

SEQ ID NO: 821092 - RNA, 19 nt, Artificial Sequence
  Description of Artificial Sequence: Synthetic oligonucleotide
uacaaaacucccagcuguc

SEQ ID NO: 821093 - RNA, 19 nt, Artificial Sequence
  Description of Artificial Sequence: Synthetic oligonucleotide
gugugugcacuccacauuc

SEQ ID NO: 821094 - RNA, 19 nt, Artificial Sequence
  Description of Artificial Sequence: Synthetic oligonucleotide
cuccacugggauaagccac

SEQ ID NO: 821095 - RNA, 19 nt, Artificial Sequence
  Description of Artificial Sequence: Synthetic oligonucleotide
guccaucaguaauauuucc

SEQ ID NO: 821096 - RNA, 19 nt, Artificial Sequence
  Description of Artificial Sequence: Synthetic oligonucleotide
uggcacuagccacgcauag

SEQ ID NO: 821097 - RNA, 19 nt, Artificial Sequence
  Description of Artificial Sequence: Synthetic oligonucleotide
ccgauuucuaagaugguac

SEQ ID NO: 821098 - RNA, 19 nt, Artificial Sequence
  Description of Artificial Sequence: Synthetic oligonucleotide
gaucccacgaccacaguca

SEQ ID NO: 821099 - RNA, 19 nt, Artificial Sequence
  Description of Artificial Sequence: Synthetic oligonucleotide
agucaaacguccagaaucu

SEQ ID NO: 821100 - RNA, 19 nt, Artificial Sequence
  Description of Artificial Sequence: Synthetic oligonucleotide
accucaaggaucugucaca

SEQ ID NO: 821101 - RNA, 19 nt, Artificial Sequence
  Description of Artificial Sequence: Synthetic oligonucleotide
ucagggcggacguaauccc

SEQ ID NO: 821102 - RNA, 19 nt, Artificial Sequence
  Description of Artificial Sequence: Synthetic oligonucleotide
gaccuguaagggaaacagg

SEQ ID NO: 821103 - RNA, 19 nt, Artificial Sequence
  Description of Artificial Sequence: Synthetic oligonucleotide
ugcccugacgccaccgaag

SEQ ID NO: 821104 - RNA, 19 nt, Artificial Sequence
  Description of Artificial Sequence: Synthetic oligonucleotide
uuuugaggcgucaccgcau

SEQ ID NO: 821105 - RNA, 19 nt, Artificial Sequence
  Description of Artificial Sequence: Synthetic oligonucleotide
uugcccuagaguccccacc

SEQ ID NO: 821106 - RNA, 19 nt, Artificial Sequence
  Description of Artificial Sequence: Synthetic oligonucleotide
gcuuugauaguagucaaac

SEQ ID NO: 821107 - RNA, 19 nt, Artificial Sequence
  Description of Artificial Sequence: Synthetic oligonucleotide
agcaaacaaggaaggaaag

SEQ ID NO: 821108 - RNA, 19 nt, Artificial Sequence
  Description of Artificial Sequence: Synthetic oligonucleotide
aaguagcaggguggucucc

SEQ ID NO: 821109 - RNA, 19 nt, Artificial Sequence
  Description of Artificial Sequence: Synthetic oligonucleotide
uugaugcuuccgccuacag

SEQ ID NO: 821110 - RNA, 19 nt, Artificial Sequence
  Description of Artificial Sequence: Synthetic oligonucleotide
agucacgugcucccgugag

SEQ ID NO: 821111 - RNA, 19 nt, Artificial Sequence
  Description of Artificial Sequence: Synthetic oligonucleotide
uccugcuacuguccugucc

SEQ ID NO: 821112 - RNA, 19 nt, Artificial Sequence
  Description of Artificial Sequence: Synthetic oligonucleotide
uguagaagcgaugcucuau

SEQ ID NO: 821113 - RNA, 19 nt, Artificial Sequence
  Description of Artificial Sequence: Synthetic oligonucleotide
ugugugugcacuccacauu

SEQ ID NO: 821114 - RNA, 19 nt, Artificial Sequence
  Description of Artificial Sequence: Synthetic oligonucleotide
aggucagggcaucacuuug

SEQ ID NO: 821115 - RNA, 19 nt, Artificial Sequence
  Description of Artificial Sequence: Synthetic oligonucleotide
cugggauaagccacaggac

SEQ ID NO: 821116 - RNA, 19 nt, Artificial Sequence
  Description of Artificial Sequence: Synthetic oligonucleotide
caaagaagcuuugauagua

SEQ ID NO: 821117 - RNA, 19 nt, Artificial Sequence
  Description of Artificial Sequence: Synthetic oligonucleotide
cgaaccuuuaauccggucc

SEQ ID NO: 821118 - RNA, 19 nt, Artificial Sequence
  Description of Artificial Sequence: Synthetic oligonucleotide
ccugcuuccuagaagguug

SEQ ID NO: 821119 - RNA, 19 nt, Artificial Sequence
  Description of Artificial Sequence: Synthetic oligonucleotide
cuccauagccaauaccuga

SEQ ID NO: 821120 - RNA, 19 nt, Artificial Sequence
  Description of Artificial Sequence: Synthetic oligonucleotide
uuccuagaagguugucaug

SEQ ID NO: 821121 - RNA, 19 nt, Artificial Sequence
  Description of Artificial Sequence: Synthetic oligonucleotide
uguaguggauggagggguc

SEQ ID NO: 821122 - RNA, 19 nt, Artificial Sequence
  Description of Artificial Sequence: Synthetic oligonucleotide
ucucccugauagcuaacau

SEQ ID NO: 821123 - RNA, 19 nt, Artificial Sequence
  Description of Artificial Sequence: Synthetic oligonucleotide
gacgccaccgaaggaagcc

SEQ ID NO: 821124 - RNA, 19 nt, Artificial Sequence
  Description of Artificial Sequence: Synthetic oligonucleotide
ucucgaacaacaggccaca

SEQ ID NO: 821125 - RNA, 19 nt, Artificial Sequence
  Description of Artificial Sequence: Synthetic oligonucleotide
acauguuccaggggcaaug

SEQ ID NO: 821126 - RNA, 19 nt, Artificial Sequence
  Description of Artificial Sequence: Synthetic oligonucleotide
gugaguagccauaaacaca

SEQ ID NO: 821127 - RNA, 19 nt, Artificial Sequence
  Description of Artificial Sequence: Synthetic oligonucleotide
agugagguugccaguaacu

SEQ ID NO: 821128 - RNA, 19 nt, Artificial Sequence
  Description of Artificial Sequence: Synthetic oligonucleotide
auaggucaggccgauuucu

SEQ ID NO: 821129 - RNA, 19 nt, Artificial Sequence
  Description of Artificial Sequence: Synthetic oligonucleotide
ucacgugcucccgugaggu

SEQ ID NO: 821130 - RNA, 19 nt, Artificial Sequence
  Description of Artificial Sequence: Synthetic oligonucleotide
agcaccccugagaaggggc

SEQ ID NO: 821131 - RNA, 19 nt, Artificial Sequence
  Description of Artificial Sequence: Synthetic oligonucleotide
ggucaggccgauuucuaag

SEQ ID NO: 821132 - RNA, 19 nt, Artificial Sequence
  Description of Artificial Sequence: Synthetic oligonucleotide
gaggcgucaccgcaugcgc

SEQ ID NO: 821133 - RNA, 19 nt, Artificial Sequence
  Description of Artificial Sequence: Synthetic oligonucleotide
aggucguagccccuggggu

SEQ ID NO: 821134 - RNA, 19 nt, Artificial Sequence
  Description of Artificial Sequence: Synthetic oligonucleotide
auuuccugcucggcugccc

SEQ ID NO: 821135 - RNA, 19 nt, Artificial Sequence
  Description of Artificial Sequence: Synthetic oligonucleotide
aggccaacguagcacagau

SEQ ID NO: 821136 - RNA, 19 nt, Artificial Sequence
  Description of Artificial Sequence: Synthetic oligonucleotide
acugggagauagaagugug

SEQ ID NO: 821137 - RNA, 19 nt, Artificial Sequence
  Description of Artificial Sequence: Synthetic oligonucleotide
aaguuguggccaggguggg

SEQ ID NO: 821138 - RNA, 19 nt, Artificial Sequence
  Description of Artificial Sequence: Synthetic oligonucleotide
cagugcuccaaagagccac

SEQ ID NO: 821139 - RNA, 19 nt, Artificial Sequence
  Description of Artificial Sequence: Synthetic oligonucleotide
cugacgccaccgaaggaag

SEQ ID NO: 821140 - RNA, 19 nt, Artificial Sequence
  Description of Artificial Sequence: Synthetic oligonucleotide
cuucgaacucauggaaggc

SEQ ID NO: 821141 - RNA, 19 nt, Artificial Sequence
  Description of Artificial Sequence: Synthetic oligonucleotide
caaaacucccagcugucca

SEQ ID NO: 821142 - RNA, 19 nt, Artificial Sequence
  Description of Artificial Sequence: Synthetic oligonucleotide
caggucguagccccugggg

SEQ ID NO: 821143 - RNA, 19 nt, Artificial Sequence
  Description of Artificial Sequence: Synthetic oligonucleotide
cuuuugaggcgucaccgca

SEQ ID NO: 821144 - RNA, 19 nt, Artificial Sequence
  Description of Artificial Sequence: Synthetic oligonucleotide
aagggaaacagggcccaca

SEQ ID NO: 821145 - RNA, 19 nt, Artificial Sequence
  Description of Artificial Sequence: Synthetic oligonucleotide
cagcagcgaaccuuuaauc

SEQ ID NO: 821146 - RNA, 19 nt, Artificial Sequence
  Description of Artificial Sequence: Synthetic oligonucleotide
ucaggccgauuucuaagau

SEQ ID NO: 821147 - RNA, 19 nt, Artificial Sequence
  Description of Artificial Sequence: Synthetic oligonucleotide
caugugcucccuugugccc

SEQ ID NO: 821148 - RNA, 19 nt, Artificial Sequence
  Description of Artificial Sequence: Synthetic oligonucleotide
agggugaacaccagcccgg

SEQ ID NO: 821149 - RNA, 19 nt, Artificial Sequence
  Description of Artificial Sequence: Synthetic oligonucleotide
agggccagugcuccaaaga

SEQ ID NO: 821150 - RNA, 19 nt, Artificial Sequence
  Description of Artificial Sequence: Synthetic oligonucleotide
cuaacauaggccugugugu

SEQ ID NO: 821151 - RNA, 19 nt, Artificial Sequence
  Description of Artificial Sequence: Synthetic oligonucleotide
cagacccucugagaaaccc

SEQ ID NO: 821152 - RNA, 19 nt, Artificial Sequence
  Description of Artificial Sequence: Synthetic oligonucleotide
gcuccaaagagccacugca

SEQ ID NO: 821153 - RNA, 19 nt, Artificial Sequence
  Description of Artificial Sequence: Synthetic oligonucleotide
cuuguauccucucgaacaa

SEQ ID NO: 821154 - RNA, 19 nt, Artificial Sequence
  Description of Artificial Sequence: Synthetic oligonucleotide
guggacagaacugcaucag

SEQ ID NO: 821155 - RNA, 19 nt, Artificial Sequence
  Description of Artificial Sequence: Synthetic oligonucleotide
auaccugaucccacgacca

SEQ ID NO: 821156 - RNA, 19 nt, Artificial Sequence
  Description of Artificial Sequence: Synthetic oligonucleotide
cucaccaaaggguucaccu

SEQ ID NO: 821157 - RNA, 19 nt, Artificial Sequence
  Description of Artificial Sequence: Synthetic oligonucleotide
gucaggccgauuucuaaga

SEQ ID NO: 821158 - RNA, 19 nt, Artificial Sequence
  Description of Artificial Sequence: Synthetic oligonucleotide
agacccucugagaaacccg

SEQ ID NO: 821159 - RNA, 19 nt, Artificial Sequence
  Description of Artificial Sequence: Synthetic oligonucleotide
uuccuguagaagcgaugcu

SEQ ID NO: 821160 - RNA, 19 nt, Artificial Sequence
  Description of Artificial Sequence: Synthetic oligonucleotide
gucacgugcucccgugagg

SEQ ID NO: 821161 - RNA, 19 nt, Artificial Sequence
  Description of Artificial Sequence: Synthetic oligonucleotide
ugucaacccacagacccuc

SEQ ID NO: 821162 - RNA, 19 nt, Artificial Sequence
  Description of Artificial Sequence: Synthetic oligonucleotide
gaagguugucauggaccgg

SEQ ID NO: 821163 - RNA, 19 nt, Artificial Sequence
  Description of Artificial Sequence: Synthetic oligonucleotide
ccuguaagggaaacagggc

SEQ ID NO: 821164 - RNA, 19 nt, Artificial Sequence
  Description of Artificial Sequence: Synthetic oligonucleotide
caccgcaugcgcugugugg

SEQ ID NO: 821165 - RNA, 19 nt, Artificial Sequence
  Description of Artificial Sequence: Synthetic oligonucleotide
aggacacugggagauagaa

SEQ ID NO: 821166 - RNA, 19 nt, Artificial Sequence
  Description of Artificial Sequence: Synthetic oligonucleotide
cccugucaagccuucaggg

SEQ ID NO: 821167 - RNA, 19 nt, Artificial Sequence
  Description of Artificial Sequence: Synthetic oligonucleotide
ucccuugugcccugacgcc

SEQ ID NO: 821168 - RNA, 19 nt, Artificial Sequence
  Description of Artificial Sequence: Synthetic oligonucleotide
aaggccaacguagcacaga

SEQ ID NO: 821169 - RNA, 19 nt, Artificial Sequence
  Description of Artificial Sequence: Synthetic oligonucleotide
gcuucuucgaacucaugga

SEQ ID NO: 821170 - RNA, 19 nt, Artificial Sequence
  Description of Artificial Sequence: Synthetic oligonucleotide
ugacgccaccgaaggaagc

SEQ ID NO: 821171 - RNA, 19 nt, Artificial Sequence
  Description of Artificial Sequence: Synthetic oligonucleotide
gaaagucaccuagggccag

SEQ ID NO: 821172 - RNA, 19 nt, Artificial Sequence
  Description of Artificial Sequence: Synthetic oligonucleotide
agcgaugcucuaucgcccu

SEQ ID NO: 821173 - RNA, 19 nt, Artificial Sequence
  Description of Artificial Sequence: Synthetic oligonucleotide
aacguagcacagauccaga

SEQ ID NO: 821174 - RNA, 19 nt, Artificial Sequence
  Description of Artificial Sequence: Synthetic oligonucleotide
uuugcccuagaguccccac

SEQ ID NO: 821175 - RNA, 19 nt, Artificial Sequence
  Description of Artificial Sequence: Synthetic oligonucleotide
ggaaccucucccuccagac

SEQ ID NO: 821176 - RNA, 19 nt, Artificial Sequence
  Description of Artificial Sequence: Synthetic oligonucleotide
uaccugaucccacgaccac

SEQ ID NO: 821177 - RNA, 19 nt, Artificial Sequence
  Description of Artificial Sequence: Synthetic oligonucleotide
uaauccgguccaagaccug

SEQ ID NO: 821178 - RNA, 19 nt, Artificial Sequence
  Description of Artificial Sequence: Synthetic oligonucleotide
cuuccuagaagguugucau

SEQ ID NO: 821179 - RNA, 19 nt, Artificial Sequence
  Description of Artificial Sequence: Synthetic oligonucleotide
uggugaugccagcuauagu

SEQ ID NO: 821180 - RNA, 19 nt, Artificial Sequence
  Description of Artificial Sequence: Synthetic oligonucleotide
aggccugugugugcacucc

SEQ ID NO: 821181 - RNA, 19 nt, Artificial Sequence
  Description of Artificial Sequence: Synthetic oligonucleotide
uaguggauggagggguccc

SEQ ID NO: 821182 - RNA, 19 nt, Artificial Sequence
  Description of Artificial Sequence: Synthetic oligonucleotide
aaaccgucuccaggaaggu

SEQ ID NO: 821183 - RNA, 19 nt, Artificial Sequence
  Description of Artificial Sequence: Synthetic oligonucleotide
acgccaccgaaggaagccc

SEQ ID NO: 821184 - RNA, 19 nt, Artificial Sequence
  Description of Artificial Sequence: Synthetic oligonucleotide
ugcuuccgccuacaguccu

SEQ ID NO: 821185 - RNA, 19 nt, Artificial Sequence
  Description of Artificial Sequence: Synthetic oligonucleotide
ucggcuccauagccaauac

SEQ ID NO: 821186 - RNA, 19 nt, Artificial Sequence
  Description of Artificial Sequence: Synthetic oligonucleotide
aguagcaggguggucucca

SEQ ID NO: 821187 - RNA, 19 nt, Artificial Sequence
  Description of Artificial Sequence: Synthetic oligonucleotide
uugaggcgucaccgcaugc

SEQ ID NO: 821188 - RNA, 19 nt, Artificial Sequence
  Description of Artificial Sequence: Synthetic oligonucleotide
augcuuccgccuacagucc

SEQ ID NO: 821189 - RNA, 19 nt, Artificial Sequence
  Description of Artificial Sequence: Synthetic oligonucleotide
cagggcggacguaaucccc

SEQ ID NO: 821190 - RNA, 19 nt, Artificial Sequence
  Description of Artificial Sequence: Synthetic oligonucleotide
accgcaugcgcugugugga

SEQ ID NO: 821191 - RNA, 19 nt, Artificial Sequence
  Description of Artificial Sequence: Synthetic oligonucleotide
guaagggaaacagggccca

SEQ ID NO: 821192 - RNA, 19 nt, Artificial Sequence
  Description of Artificial Sequence: Synthetic oligonucleotide
cagugcgucagccgcugcc

SEQ ID NO: 821193 - RNA, 19 nt, Artificial Sequence
  Description of Artificial Sequence: Synthetic oligonucleotide
guaguggauggaggggucc

SEQ ID NO: 821194 - RNA, 19 nt, Artificial Sequence
  Description of Artificial Sequence: Synthetic oligonucleotide
uaggucaggccgauuucua

SEQ ID NO: 821195 - RNA, 19 nt, Artificial Sequence
  Description of Artificial Sequence: Synthetic oligonucleotide
cacuagccacgcauagcag

SEQ ID NO: 821196 - RNA, 19 nt, Artificial Sequence
  Description of Artificial Sequence: Synthetic oligonucleotide
agcuaacauaggccugugu

SEQ ID NO: 821197 - RNA, 19 nt, Artificial Sequence
  Description of Artificial Sequence: Synthetic oligonucleotide
gaggggucccgccucugug

SEQ ID NO: 821198 - RNA, 19 nt, Artificial Sequence
  Description of Artificial Sequence: Synthetic oligonucleotide
cacugggauaagccacagg

SEQ ID NO: 821199 - RNA, 19 nt, Artificial Sequence
  Description of Artificial Sequence: Synthetic oligonucleotide
ggacagaacugcaucaguc

SEQ ID NO: 821200 - RNA, 19 nt, Artificial Sequence
  Description of Artificial Sequence: Synthetic oligonucleotide
cuucagggcggacguaauc

SEQ ID NO: 821201 - RNA, 19 nt, Artificial Sequence
  Description of Artificial Sequence: Synthetic oligonucleotide
cuagccacgcauagcagua

SEQ ID NO: 821202 - RNA, 19 nt, Artificial Sequence
  Description of Artificial Sequence: Synthetic oligonucleotide
gagcccaccacagguacuc

SEQ ID NO: 821203 - RNA, 19 nt, Artificial Sequence
  Description of Artificial Sequence: Synthetic oligonucleotide
agccugcaaaguagcaggg

SEQ ID NO: 821204 - RNA, 19 nt, Artificial Sequence
  Description of Artificial Sequence: Synthetic oligonucleotide
cucccugauagcuaacaua

SEQ ID NO: 821205 - RNA, 19 nt, Artificial Sequence
  Description of Artificial Sequence: Synthetic oligonucleotide
cuggcaauggcuggaccug

SEQ ID NO: 821206 - RNA, 19 nt, Artificial Sequence
  Description of Artificial Sequence: Synthetic oligonucleotide
cuuccgccuacaguccugc

SEQ ID NO: 821207 - RNA, 19 nt, Artificial Sequence
  Description of Artificial Sequence: Synthetic oligonucleotide
auggaaggccagugcguca

SEQ ID NO: 821208 - RNA, 19 nt, Artificial Sequence
  Description of Artificial Sequence: Synthetic oligonucleotide
gaaccagugucaacccaca

SEQ ID NO: 821209 - RNA, 19 nt, Artificial Sequence
  Description of Artificial Sequence: Synthetic oligonucleotide
agaaacccggcuggccggg

SEQ ID NO: 821210 - RNA, 19 nt, Artificial Sequence
  Description of Artificial Sequence: Synthetic oligonucleotide
gcccugacgccaccgaagg

SEQ ID NO: 821211 - RNA, 19 nt, Artificial Sequence
  Description of Artificial Sequence: Synthetic oligonucleotide
gagggguggcccugucaag

SEQ ID NO: 821212 - RNA, 19 nt, Artificial Sequence
  Description of Artificial Sequence: Synthetic oligonucleotide
uagccacgcauagcaguag

SEQ ID NO: 821213 - RNA, 19 nt, Artificial Sequence
  Description of Artificial Sequence: Synthetic oligonucleotide
auaggccugugugugcacu

SEQ ID NO: 821214 - RNA, 19 nt, Artificial Sequence
  Description of Artificial Sequence: Synthetic oligonucleotide
uggcaauggcuggaccugc

SEQ ID NO: 821215 - RNA, 19 nt, Artificial Sequence
  Description of Artificial Sequence: Synthetic oligonucleotide
ccuguccugagcccuaaag

SEQ ID NO: 821216 - RNA, 19 nt, Artificial Sequence
  Description of Artificial Sequence: Synthetic oligonucleotide
caggacaaaggccaacgua

SEQ ID NO: 821217 - RNA, 19 nt, Artificial Sequence
  Description of Artificial Sequence: Synthetic oligonucleotide
agugcgucagccgcugcca

SEQ ID NO: 821218 - RNA, 19 nt, Artificial Sequence
  Description of Artificial Sequence: Synthetic oligonucleotide
acgcauagcaguagauggu

SEQ ID NO: 821219 - RNA, 19 nt, Artificial Sequence
  Description of Artificial Sequence: Synthetic oligonucleotide
ucuguccaucaguaauauu

SEQ ID NO: 821220 - RNA, 19 nt, Artificial Sequence
  Description of Artificial Sequence: Synthetic oligonucleotide
aaccuuuaauccgguccaa

SEQ ID NO: 821221 - RNA, 19 nt, Artificial Sequence
  Description of Artificial Sequence: Synthetic oligonucleotide
ugccaguaacugccaggac

SEQ ID NO: 821222 - RNA, 19 nt, Artificial Sequence
  Description of Artificial Sequence: Synthetic oligonucleotide
cauagcaguagauggugau

SEQ ID NO: 821223 - RNA, 19 nt, Artificial Sequence
  Description of Artificial Sequence: Synthetic oligonucleotide
cacuucggcuccauagcca

SEQ ID NO: 821224 - RNA, 19 nt, Artificial Sequence
  Description of Artificial Sequence: Synthetic oligonucleotide
gcccagagguucuagguga

SEQ ID NO: 821225 - RNA, 19 nt, Artificial Sequence
  Description of Artificial Sequence: Synthetic oligonucleotide
cagcccggcagcugacagg

SEQ ID NO: 821226 - RNA, 19 nt, Artificial Sequence
  Description of Artificial Sequence: Synthetic oligonucleotide
auccgguccaagaccuggg

SEQ ID NO: 821227 - RNA, 19 nt, Artificial Sequence
  Description of Artificial Sequence: Synthetic oligonucleotide
gcucccuugugcccugacg

SEQ ID NO: 821228 - RNA, 19 nt, Artificial Sequence
  Description of Artificial Sequence: Synthetic oligonucleotide
uagcuaacauaggccugug

SEQ ID NO: 821229 - RNA, 19 nt, Artificial Sequence
  Description of Artificial Sequence: Synthetic oligonucleotide
agggcauccucucccugau

SEQ ID NO: 821230 - RNA, 19 nt, Artificial Sequence
  Description of Artificial Sequence: Synthetic oligonucleotide
agggcgugaagcagcacca

SEQ ID NO: 821231 - RNA, 19 nt, Artificial Sequence
  Description of Artificial Sequence: Synthetic oligonucleotide
cuccacauucaugcucuac

SEQ ID NO: 821232 - RNA, 19 nt, Artificial Sequence
  Description of Artificial Sequence: Synthetic oligonucleotide
ccacuucggcuccauagcc

SEQ ID NO: 821233 - RNA, 19 nt, Artificial Sequence
  Description of Artificial Sequence: Synthetic oligonucleotide
gggccauauaggucaggcc

SEQ ID NO: 821234 - RNA, 19 nt, Artificial Sequence
  Description of Artificial Sequence: Synthetic oligonucleotide
cauaggccugugugugcac

SEQ ID NO: 821235 - RNA, 19 nt, Artificial Sequence
  Description of Artificial Sequence: Synthetic oligonucleotide
ugucauggaccgggcugag

SEQ ID NO: 821236 - RNA, 19 nt, Artificial Sequence
  Description of Artificial Sequence: Synthetic oligonucleotide
gauccagaaagggccauau

SEQ ID NO: 821237 - RNA, 19 nt, Artificial Sequence
  Description of Artificial Sequence: Synthetic oligonucleotide
ggguccaagacuccucuaa

SEQ ID NO: 821238 - RNA, 19 nt, Artificial Sequence
  Description of Artificial Sequence: Synthetic oligonucleotide
gguaccucacaaaguugug

SEQ ID NO: 821239 - RNA, 19 nt, Artificial Sequence
  Description of Artificial Sequence: Synthetic oligonucleotide
ggauugaugcuuccgccua

SEQ ID NO: 821240 - RNA, 19 nt, Artificial Sequence
  Description of Artificial Sequence: Synthetic oligonucleotide
gucauggaccgggcugagg

SEQ ID NO: 821241 - RNA, 19 nt, Artificial Sequence
  Description of Artificial Sequence: Synthetic oligonucleotide
ccucuaaucuucacaggga

SEQ ID NO: 821242 - RNA, 19 nt, Artificial Sequence
  Description of Artificial Sequence: Synthetic oligonucleotide
cccugauagcuaacauagg

SEQ ID NO: 821243 - RNA, 19 nt, Artificial Sequence
  Description of Artificial Sequence: Synthetic oligonucleotide
auccagaaagggccauaua

SEQ ID NO: 821244 - RNA, 19 nt, Artificial Sequence
  Description of Artificial Sequence: Synthetic oligonucleotide
cucgaacaacaggccacag

SEQ ID NO: 821245 - RNA, 19 nt, Artificial Sequence
  Description of Artificial Sequence: Synthetic oligonucleotide
cccggcagcugacagggcc

SEQ ID NO: 821246 - RNA, 19 nt, Artificial Sequence
  Description of Artificial Sequence: Synthetic oligonucleotide
guccccaccucaguggcca

SEQ ID NO: 821247 - RNA, 19 nt, Artificial Sequence
  Description of Artificial Sequence: Synthetic oligonucleotide
caggggcaauggcuggaag

SEQ ID NO: 821248 - RNA, 19 nt, Artificial Sequence
  Description of Artificial Sequence: Synthetic oligonucleotide
guacagcuuacaaccuaga

SEQ ID NO: 821249 - RNA, 19 nt, Artificial Sequence
  Description of Artificial Sequence: Synthetic oligonucleotide
gggcuguaguggauggagg

SEQ ID NO: 821250 - RNA, 19 nt, Artificial Sequence
  Description of Artificial Sequence: Synthetic oligonucleotide
agggcggacguaauccccu

SEQ ID NO: 821251 - RNA, 19 nt, Artificial Sequence
  Description of Artificial Sequence: Synthetic oligonucleotide
ggcuggaccugcccugugc

SEQ ID NO: 821252 - RNA, 19 nt, Artificial Sequence
  Description of Artificial Sequence: Synthetic oligonucleotide
cugcuacuguccuguccug

SEQ ID NO: 821253 - RNA, 19 nt, Artificial Sequence
  Description of Artificial Sequence: Synthetic oligonucleotide
ccacgcauagcaguagaug

SEQ ID NO: 821254 - RNA, 19 nt, Artificial Sequence
  Description of Artificial Sequence: Synthetic oligonucleotide
uuccgccuacaguccugcc

SEQ ID NO: 821255 - RNA, 19 nt, Artificial Sequence
  Description of Artificial Sequence: Synthetic oligonucleotide
cuaucgcccucuuccucca

SEQ ID NO: 821256 - RNA, 19 nt, Artificial Sequence
  Description of Artificial Sequence: Synthetic oligonucleotide
gggaaaccgggcucuucug

SEQ ID NO: 821257 - RNA, 19 nt, Artificial Sequence
  Description of Artificial Sequence: Synthetic oligonucleotide
ccucucaagacagcacccc

SEQ ID NO: 821258 - RNA, 19 nt, Artificial Sequence
  Description of Artificial Sequence: Synthetic oligonucleotide
ggcacuagccacgcauagc

SEQ ID NO: 821259 - RNA, 19 nt, Artificial Sequence
  Description of Artificial Sequence: Synthetic oligonucleotide
gcuggccgggcccagccag

SEQ ID NO: 821260 - RNA, 19 nt, Artificial Sequence
  Description of Artificial Sequence: Synthetic oligonucleotide
gggguggcccugucaagcc

SEQ ID NO: 821261 - RNA, 19 nt, Artificial Sequence
  Description of Artificial Sequence: Synthetic oligonucleotide
uaucgcccucuuccuccac

SEQ ID NO: 821262 - RNA, 19 nt, Artificial Sequence
  Description of Artificial Sequence: Synthetic oligonucleotide
ggcgugaagcagcaccaca

SEQ ID NO: 821263 - RNA, 19 nt, Artificial Sequence
  Description of Artificial Sequence: Synthetic oligonucleotide
ccgccucugugcaagcacc

SEQ ID NO: 821264 - RNA, 19 nt, Artificial Sequence
  Description of Artificial Sequence: Synthetic oligonucleotide
gaacucauggaaggccagu

SEQ ID NO: 821265 - RNA, 19 nt, Artificial Sequence
  Description of Artificial Sequence: Synthetic oligonucleotide
agauccagaaagggccaua

SEQ ID NO: 821266 - RNA, 19 nt, Artificial Sequence
  Description of Artificial Sequence: Synthetic oligonucleotide
ccagcuauagucaccuugu

SEQ ID NO: 821267 - RNA, 19 nt, Artificial Sequence
  Description of Artificial Sequence: Synthetic oligonucleotide
augcgcuguguggacagaa

SEQ ID NO: 821268 - RNA, 19 nt, Artificial Sequence
  Description of Artificial Sequence: Synthetic oligonucleotide
caccaaagugagguugcca

SEQ ID NO: 821269 - RNA, 19 nt, Artificial Sequence
  Description of Artificial Sequence: Synthetic oligonucleotide
agcgaaccuuuaauccggu

SEQ ID NO: 821270 - RNA, 19 nt, Artificial Sequence
  Description of Artificial Sequence: Synthetic oligonucleotide
gccgauuucuaagauggua

SEQ ID NO: 821271 - RNA, 19 nt, Artificial Sequence
  Description of Artificial Sequence: Synthetic oligonucleotide
gguacuccuggcaauggcu

SEQ ID NO: 821272 - RNA, 19 nt, Artificial Sequence
  Description of Artificial Sequence: Synthetic oligonucleotide
cacaaaccgucuccaggaa

SEQ ID NO: 821273 - RNA, 19 nt, Artificial Sequence
  Description of Artificial Sequence: Synthetic oligonucleotide
cuggccgggcccagccagc

SEQ ID NO: 821274 - RNA, 19 nt, Artificial Sequence
  Description of Artificial Sequence: Synthetic oligonucleotide
cccagagguucuaggugag

SEQ ID NO: 821275 - RNA, 19 nt, Artificial Sequence
  Description of Artificial Sequence: Synthetic oligonucleotide
gcggacguaauccccucuc

SEQ ID NO: 821276 - RNA, 19 nt, Artificial Sequence
  Description of Artificial Sequence: Synthetic oligonucleotide
gccauauaggucaggccga

SEQ ID NO: 821277 - RNA, 19 nt, Artificial Sequence
  Description of Artificial Sequence: Synthetic oligonucleotide
ugcuuccuagaagguuguc

SEQ ID NO: 821278 - RNA, 19 nt, Artificial Sequence
  Description of Artificial Sequence: Synthetic oligonucleotide
gaaacccggcuggccgggc

SEQ ID NO: 821279 - RNA, 19 nt, Artificial Sequence
  Description of Artificial Sequence: Synthetic oligonucleotide
cgaacucauggaaggccag

SEQ ID NO: 821280 - RNA, 19 nt, Artificial Sequence
  Description of Artificial Sequence: Synthetic oligonucleotide
ccaauaccugaucccacga

SEQ ID NO: 821281 - RNA, 19 nt, Artificial Sequence
  Description of Artificial Sequence: Synthetic oligonucleotide
caggguccaagacuccucu

SEQ ID NO: 821282 - RNA, 19 nt, Artificial Sequence
  Description of Artificial Sequence: Synthetic oligonucleotide
ggcuagugguggcugcauc

SEQ ID NO: 821283 - RNA, 19 nt, Artificial Sequence
  Description of Artificial Sequence: Synthetic oligonucleotide
accuagggccaguggggua

SEQ ID NO: 821284 - RNA, 19 nt, Artificial Sequence
  Description of Artificial Sequence: Synthetic oligonucleotide
cuagaguccccaccucagu

SEQ ID NO: 821285 - RNA, 19 nt, Artificial Sequence
  Description of Artificial Sequence: Synthetic oligonucleotide
cugggaaaccgggcucuuc

SEQ ID NO: 821286 - RNA, 19 nt, Artificial Sequence
  Description of Artificial Sequence: Synthetic oligonucleotide
ccugacgccaccgaaggaa

SEQ ID NO: 821287 - RNA, 19 nt, Artificial Sequence
  Description of Artificial Sequence: Synthetic oligonucleotide
ggagggcauccucucccug

SEQ ID NO: 821288 - RNA, 19 nt, Artificial Sequence
  Description of Artificial Sequence: Synthetic oligonucleotide
ccaggguccaagacuccuc

SEQ ID NO: 821289 - RNA, 19 nt, Artificial Sequence
  Description of Artificial Sequence: Synthetic oligonucleotide
cacgugcucccgugagguc

SEQ ID NO: 821290 - RNA, 19 nt, Artificial Sequence
  Description of Artificial Sequence: Synthetic oligonucleotide
agguugccaguaacugcca

SEQ ID NO: 821291 - RNA, 19 nt, Artificial Sequence
  Description of Artificial Sequence: Synthetic oligonucleotide
ccccugaccuguaagggaa

SEQ ID NO: 821292 - RNA, 19 nt, Artificial Sequence
  Description of Artificial Sequence: Synthetic oligonucleotide
ccagcccggcagcugacag

SEQ ID NO: 821293 - RNA, 19 nt, Artificial Sequence
  Description of Artificial Sequence: Synthetic oligonucleotide
aggcgucaccgcaugcgcu

SEQ ID NO: 821294 - RNA, 19 nt, Artificial Sequence
  Description of Artificial Sequence: Synthetic oligonucleotide
cacagguacuccuggcaau

SEQ ID NO: 821295 - RNA, 19 nt, Artificial Sequence
  Description of Artificial Sequence: Synthetic oligonucleotide
ggacaggucguagccccug

SEQ ID NO: 821296 - RNA, 19 nt, Artificial Sequence
  Description of Artificial Sequence: Synthetic oligonucleotide
gaugcucuaucgcccucuu

SEQ ID NO: 821297 - RNA, 19 nt, Artificial Sequence
  Description of Artificial Sequence: Synthetic oligonucleotide
guggcacuagccacgcaua

SEQ ID NO: 821298 - RNA, 19 nt, Artificial Sequence
  Description of Artificial Sequence: Synthetic oligonucleotide
gugcccugacgccaccgaa

SEQ ID NO: 821299 - RNA, 19 nt, Artificial Sequence
  Description of Artificial Sequence: Synthetic oligonucleotide
gggugaacaccagcccggc

SEQ ID NO: 821300 - RNA, 19 nt, Artificial Sequence
  Description of Artificial Sequence: Synthetic oligonucleotide
gcgcuguguggacagaacu

SEQ ID NO: 821301 - RNA, 19 nt, Artificial Sequence
  Description of Artificial Sequence: Synthetic oligonucleotide
ugcagccaccagccuugua

SEQ ID NO: 821302 - RNA, 19 nt, Artificial Sequence
  Description of Artificial Sequence: Synthetic oligonucleotide
ucguagccccugggguuug

SEQ ID NO: 821303 - RNA, 19 nt, Artificial Sequence
  Description of Artificial Sequence: Synthetic oligonucleotide
gguccaagacuccucuaau

SEQ ID NO: 821304 - RNA, 19 nt, Artificial Sequence
  Description of Artificial Sequence: Synthetic oligonucleotide
cugcuuccuagaagguugu

SEQ ID NO: 821305 - RNA, 19 nt, Artificial Sequence
  Description of Artificial Sequence: Synthetic oligonucleotide
gcgucagccgcugccauga

SEQ ID NO: 821306 - RNA, 19 nt, Artificial Sequence
  Description of Artificial Sequence: Synthetic oligonucleotide
cccuagaguccccaccuca

SEQ ID NO: 821307 - RNA, 19 nt, Artificial Sequence
  Description of Artificial Sequence: Synthetic oligonucleotide
gaguagccauaaacacaaa

SEQ ID NO: 821308 - RNA, 19 nt, Artificial Sequence
  Description of Artificial Sequence: Synthetic oligonucleotide
caccagcccggcagcugac

SEQ ID NO: 821309 - RNA, 19 nt, Artificial Sequence
  Description of Artificial Sequence: Synthetic oligonucleotide
gucccgccucugugcaagc

SEQ ID NO: 821310 - RNA, 19 nt, Artificial Sequence
  Description of Artificial Sequence: Synthetic oligonucleotide
ccuagagccaagagggcgu

SEQ ID NO: 821311 - RNA, 19 nt, Artificial Sequence
  Description of Artificial Sequence: Synthetic oligonucleotide
gugucaacccacagacccu

SEQ ID NO: 821312 - RNA, 19 nt, Artificial Sequence
  Description of Artificial Sequence: Synthetic oligonucleotide
gcgaaccuuuaauccgguc

SEQ ID NO: 821313 - RNA, 19 nt, Artificial Sequence
  Description of Artificial Sequence: Synthetic oligonucleotide
caaaggccucuagccucug

SEQ ID NO: 821314 - RNA, 19 nt, Artificial Sequence
  Description of Artificial Sequence: Synthetic oligonucleotide
gcaaaguagcagggugguc

SEQ ID NO: 821315 - RNA, 19 nt, Artificial Sequence
  Description of Artificial Sequence: Synthetic oligonucleotide
agcccuccccaggauugau

SEQ ID NO: 821316 - RNA, 19 nt, Artificial Sequence
  Description of Artificial Sequence: Synthetic oligonucleotide
gggcggacguaauccccuc

SEQ ID NO: 821317 - RNA, 19 nt, Artificial Sequence
  Description of Artificial Sequence: Synthetic oligonucleotide
ccaaaggguucaccucaca

SEQ ID NO: 821318 - RNA, 19 nt, Artificial Sequence
  Description of Artificial Sequence: Synthetic oligonucleotide
ccaaagugagguugccagu

SEQ ID NO: 821319 - RNA, 19 nt, Artificial Sequence
  Description of Artificial Sequence: Synthetic oligonucleotide
gucagccgcugccaugauu

SEQ ID NO: 821320 - RNA, 19 nt, Artificial Sequence
  Description of Artificial Sequence: Synthetic oligonucleotide
caguccugccuggagccua

SEQ ID NO: 821321 - RNA, 19 nt, Artificial Sequence
  Description of Artificial Sequence: Synthetic oligonucleotide
ccccugggguuugaccugc

SEQ ID NO: 821322 - RNA, 19 nt, Artificial Sequence
  Description of Artificial Sequence: Synthetic oligonucleotide
ccagagcccaccacaggua

SEQ ID NO: 821323 - RNA, 19 nt, Artificial Sequence
  Description of Artificial Sequence: Synthetic oligonucleotide
gucguagccccugggguuu

SEQ ID NO: 821324 - RNA, 19 nt, Artificial Sequence
  Description of Artificial Sequence: Synthetic oligonucleotide
gccccugucccuaggccca

SEQ ID NO: 821325 - RNA, 19 nt, Artificial Sequence
  Description of Artificial Sequence: Synthetic oligonucleotide
ccagugcuccaaagagcca

SEQ ID NO: 821326 - RNA, 19 nt, Artificial Sequence
  Description of Artificial Sequence: Synthetic oligonucleotide
ccgcaugcgcuguguggac

SEQ ID NO: 821327 - RNA, 19 nt, Artificial Sequence
  Description of Artificial Sequence: Synthetic oligonucleotide
gcccuagaguccccaccuc

SEQ ID NO: 821328 - RNA, 19 nt, Artificial Sequence
  Description of Artificial Sequence: Synthetic oligonucleotide
gucaaacguccagaaucuu

SEQ ID NO: 821329 - RNA, 19 nt, Artificial Sequence
  Description of Artificial Sequence: Synthetic oligonucleotide
ggccaacguagcacagauc

SEQ ID NO: 821330 - RNA, 19 nt, Artificial Sequence
  Description of Artificial Sequence: Synthetic oligonucleotide
cguaauccccucucaccaa

SEQ ID NO: 821331 - RNA, 19 nt, Artificial Sequence
  Description of Artificial Sequence: Synthetic oligonucleotide
ccagugcgucagccgcugc

SEQ ID NO: 821332 - RNA, 19 nt, Artificial Sequence
  Description of Artificial Sequence: Synthetic oligonucleotide
cggacguaauccccucuca

SEQ ID NO: 821333 - RNA, 19 nt, Artificial Sequence
  Description of Artificial Sequence: Synthetic oligonucleotide
ggcggacguaauccccucu

SEQ ID NO: 821334 - RNA, 19 nt, Artificial Sequence
  Description of Artificial Sequence: Synthetic oligonucleotide
ggaagguguacagccccau

SEQ ID NO: 821335 - RNA, 19 nt, Artificial Sequence
  Description of Artificial Sequence: Synthetic oligonucleotide
caguggcacuagccacgca

SEQ ID NO: 821336 - RNA, 19 nt, Artificial Sequence
  Description of Artificial Sequence: Synthetic oligonucleotide
ccacgaccacagucacgug

SEQ ID NO: 821337 - RNA, 19 nt, Artificial Sequence
  Description of Artificial Sequence: Synthetic oligonucleotide
gucccuaggcccagagguu

SEQ ID NO: 821338 - RNA, 19 nt, Artificial Sequence
  Description of Artificial Sequence: Synthetic oligonucleotide
gccugcaaaguagcagggu

SEQ ID NO: 821339 - RNA, 19 nt, Artificial Sequence
  Description of Artificial Sequence: Synthetic oligonucleotide
gggguuugaccugcuuccu

SEQ ID NO: 821340 - RNA, 19 nt, Artificial Sequence
  Description of Artificial Sequence: Synthetic oligonucleotide
cauauaggucaggccgauu

SEQ ID NO: 821341 - RNA, 19 nt, Artificial Sequence
  Description of Artificial Sequence: Synthetic oligonucleotide
cagccgcugccaugauucu

SEQ ID NO: 821342 - RNA, 19 nt, Artificial Sequence
  Description of Artificial Sequence: Synthetic oligonucleotide
ccgggcucuucuguccauc

SEQ ID NO: 821343 - RNA, 19 nt, Artificial Sequence
  Description of Artificial Sequence: Synthetic oligonucleotide
cccgugaggucagggcauc

SEQ ID NO: 821344 - RNA, 19 nt, Artificial Sequence
  Description of Artificial Sequence: Synthetic oligonucleotide
ggccgauuucuaagauggu

SEQ ID NO: 821345 - RNA, 19 nt, Artificial Sequence
  Description of Artificial Sequence: Synthetic oligonucleotide
gugcucccuugugcccuga

SEQ ID NO: 821346 - RNA, 19 nt, Artificial Sequence
  Description of Artificial Sequence: Synthetic oligonucleotide
ccccaccuuuauauaaauu

SEQ ID NO: 821347 - RNA, 19 nt, Artificial Sequence
  Description of Artificial Sequence: Synthetic oligonucleotide
cccugacgccaccgaagga

SEQ ID NO: 821348 - RNA, 19 nt, Artificial Sequence
  Description of Artificial Sequence: Synthetic oligonucleotide
ccauauaggucaggccgau

SEQ ID NO: 821349 - RNA, 19 nt, Artificial Sequence
  Description of Artificial Sequence: Synthetic oligonucleotide
ccuucagggcggacguaau

SEQ ID NO: 821350 - RNA, 19 nt, Artificial Sequence
  Description of Artificial Sequence: Synthetic oligonucleotide
cgcaugcgcuguguggaca

SEQ ID NO: 821351 - RNA, 19 nt, Artificial Sequence
  Description of Artificial Sequence: Synthetic oligonucleotide
cgaugcucuaucgcccucu

SEQ ID NO: 821352 - RNA, 19 nt, Artificial Sequence
  Description of Artificial Sequence: Synthetic oligonucleotide
ccgugaggucagggcauca

SEQ ID NO: 821353 - RNA, 19 nt, Artificial Sequence
  Description of Artificial Sequence: Synthetic oligonucleotide
gcgucaccgcaugcgcugu

SEQ ID NO: 821354 - RNA, 19 nt, Artificial Sequence
  Description of Artificial Sequence: Synthetic oligonucleotide
gggcagcagcgaaccuuua

SEQ ID NO: 821355 - RNA, 19 nt, Artificial Sequence
  Description of Artificial Sequence: Synthetic oligonucleotide
ccgcugccaugauucuuuu

SEQ ID NO: 821356 - RNA, 19 nt, Artificial Sequence
  Description of Artificial Sequence: Synthetic oligonucleotide
cgucagccgcugccaugau

SEQ ID NO: 821357 - RNA, 19 nt, Artificial Sequence
  Description of Artificial Sequence: Synthetic oligonucleotide
aagaauuuuguccaugccc

SEQ ID NO: 821358 - RNA, 19 nt, Artificial Sequence
  Description of Artificial Sequence: Synthetic oligonucleotide
auagcaaauaaauuagacc

SEQ ID NO: 821359 - RNA, 19 nt, Artificial Sequence
  Description of Artificial Sequence: Synthetic oligonucleotide
uguucauuaaaucuugccg

SEQ ID NO: 821360 - RNA, 19 nt, Artificial Sequence
  Description of Artificial Sequence: Synthetic oligonucleotide
ugacauaucaacuaaaacu

SEQ ID NO: 821361 - RNA, 19 nt, Artificial Sequence
  Description of Artificial Sequence: Synthetic oligonucleotide
aauacgcucaaccuucucc

SEQ ID NO: 821362 - RNA, 19 nt, Artificial Sequence
  Description of Artificial Sequence: Synthetic oligonucleotide
caacuuaaggcuaucaugg

SEQ ID NO: 821363 - RNA, 19 nt, Artificial Sequence
  Description of Artificial Sequence: Synthetic oligonucleotide
uggauaaucccucacaagc

SEQ ID NO: 821364 - RNA, 19 nt, Artificial Sequence
  Description of Artificial Sequence: Synthetic oligonucleotide
aguuguacgaccuucacug

SEQ ID NO: 821365 - RNA, 19 nt, Artificial Sequence
  Description of Artificial Sequence: Synthetic oligonucleotide
cuaaauaggagucugccag

SEQ ID NO: 821366 - RNA, 19 nt, Artificial Sequence
  Description of Artificial Sequence: Synthetic oligonucleotide
uaaauuaacugucuguuaa

SEQ ID NO: 821367 - RNA, 19 nt, Artificial Sequence
  Description of Artificial Sequence: Synthetic oligonucleotide
agcuucuacagcuaacucc

SEQ ID NO: 821368 - RNA, 19 nt, Artificial Sequence
  Description of Artificial Sequence: Synthetic oligonucleotide
aaaacagaaggucagcuaa

SEQ ID NO: 821369 - RNA, 19 nt, Artificial Sequence
  Description of Artificial Sequence: Synthetic oligonucleotide
aauaaaggaugacaggcga

SEQ ID NO: 821370 - RNA, 19 nt, Artificial Sequence
  Description of Artificial Sequence: Synthetic oligonucleotide
auaggagucugccagacuc

SEQ ID NO: 821371 - RNA, 19 nt, Artificial Sequence
  Description of Artificial Sequence: Synthetic oligonucleotide
aaaauuuguuguguggcac

SEQ ID NO: 821372 - RNA, 19 nt, Artificial Sequence
  Description of Artificial Sequence: Synthetic oligonucleotide
uugguuaccauuagagagg

SEQ ID NO: 821373 - RNA, 19 nt, Artificial Sequence
  Description of Artificial Sequence: Synthetic oligonucleotide
uuaaagauucugcuucccg

SEQ ID NO: 821374 - RNA, 19 nt, Artificial Sequence
  Description of Artificial Sequence: Synthetic oligonucleotide
auuucggcaaccuuugccg

SEQ ID NO: 821375 - RNA, 19 nt, Artificial Sequence
  Description of Artificial Sequence: Synthetic oligonucleotide
aggauaaugucguuccugc

SEQ ID NO: 821376 - RNA, 19 nt, Artificial Sequence
  Description of Artificial Sequence: Synthetic oligonucleotide
caugcaaagaccuuucagc

SEQ ID NO: 821377 - RNA, 19 nt, Artificial Sequence
  Description of Artificial Sequence: Synthetic oligonucleotide
uaaaacuuuagcugcuggg

SEQ ID NO: 821378 - RNA, 19 nt, Artificial Sequence
  Description of Artificial Sequence: Synthetic oligonucleotide
uucaucguaaccgugauca

SEQ ID NO: 821379 - RNA, 19 nt, Artificial Sequence
  Description of Artificial Sequence: Synthetic oligonucleotide
uuuacuggcaaguuuugcc

SEQ ID NO: 821380 - RNA, 19 nt, Artificial Sequence
  Description of Artificial Sequence: Synthetic oligonucleotide
auugcuacagcuucuuuuc

SEQ ID NO: 821381 - RNA, 19 nt, Artificial Sequence
  Description of Artificial Sequence: Synthetic oligonucleotide
aagaauacgcucaaccuuc

SEQ ID NO: 821382 - RNA, 19 nt, Artificial Sequence
  Description of Artificial Sequence: Synthetic oligonucleotide
caauuaaagauucugcuuc

SEQ ID NO: 821383 - RNA, 19 nt, Artificial Sequence
  Description of Artificial Sequence: Synthetic oligonucleotide
uccucgauaaguuugcagc

SEQ ID NO: 821384 - RNA, 19 nt, Artificial Sequence
  Description of Artificial Sequence: Synthetic oligonucleotide
auuuugucgguauccauuc

SEQ ID NO: 821385 - RNA, 19 nt, Artificial Sequence
  Description of Artificial Sequence: Synthetic oligonucleotide
uugucagcuauaaugguug

SEQ ID NO: 821386 - RNA, 19 nt, Artificial Sequence
  Description of Artificial Sequence: Synthetic oligonucleotide
uauaaaucagcugaauugu

SEQ ID NO: 821387 - RNA, 19 nt, Artificial Sequence
  Description of Artificial Sequence: Synthetic oligonucleotide
aguauuugcaauaagaauu

SEQ ID NO: 821388 - RNA, 19 nt, Artificial Sequence
  Description of Artificial Sequence: Synthetic oligonucleotide
uugaggauaaugucguucc

SEQ ID NO: 821389 - RNA, 19 nt, Artificial Sequence
  Description of Artificial Sequence: Synthetic oligonucleotide
uuaacugucuguuaauaaa

SEQ ID NO: 821390 - RNA, 19 nt, Artificial Sequence
  Description of Artificial Sequence: Synthetic oligonucleotide
uucgggauaauuauaaauu

SEQ ID NO: 821391 - RNA, 19 nt, Artificial Sequence
  Description of Artificial Sequence: Synthetic oligonucleotide
aaagugguccuuaugauga

SEQ ID NO: 821392 - RNA, 19 nt, Artificial Sequence
  Description of Artificial Sequence: Synthetic oligonucleotide
acauucuuagugcuuuagc

SEQ ID NO: 821393 - RNA, 19 nt, Artificial Sequence
  Description of Artificial Sequence: Synthetic oligonucleotide
ugaucaacagcagagguca

SEQ ID NO: 821394 - RNA, 19 nt, Artificial Sequence
  Description of Artificial Sequence: Synthetic oligonucleotide
ugugauacccaguacugcc

SEQ ID NO: 821395 - RNA, 19 nt, Artificial Sequence
  Description of Artificial Sequence: Synthetic oligonucleotide
uuagagaggcaucucgucc

SEQ ID NO: 821396 - RNA, 19 nt, Artificial Sequence
  Description of Artificial Sequence: Synthetic oligonucleotide
ucuauuucggcaaccuuug

SEQ ID NO: 821397 - RNA, 19 nt, Artificial Sequence
  Description of Artificial Sequence: Synthetic oligonucleotide
uauuucggcaaccuuugcc

SEQ ID NO: 821398 - RNA, 19 nt, Artificial Sequence
  Description of Artificial Sequence: Synthetic oligonucleotide
cuuaugaugaguaaggagu

SEQ ID NO: 821399 - RNA, 19 nt, Artificial Sequence
  Description of Artificial Sequence: Synthetic oligonucleotide
aaggcuaucauggacacau

SEQ ID NO: 821400 - RNA, 19 nt, Artificial Sequence
  Description of Artificial Sequence: Synthetic oligonucleotide
uacaauaguacaagccuca

SEQ ID NO: 821401 - RNA, 19 nt, Artificial Sequence
  Description of Artificial Sequence: Synthetic oligonucleotide
uguccuaggaucuuucaca

SEQ ID NO: 821402 - RNA, 19 nt, Artificial Sequence
  Description of Artificial Sequence: Synthetic oligonucleotide
gcuuagaagaauuuugucc

SEQ ID NO: 821403 - RNA, 19 nt, Artificial Sequence
  Description of Artificial Sequence: Synthetic oligonucleotide
uaaagugguccuuaugaug

SEQ ID NO: 821404 - RNA, 19 nt, Artificial Sequence
  Description of Artificial Sequence: Synthetic oligonucleotide
uugacauaucaacuaaaac

SEQ ID NO: 821405 - RNA, 19 nt, Artificial Sequence
  Description of Artificial Sequence: Synthetic oligonucleotide
aaauaggagucugccagac

SEQ ID NO: 821406 - RNA, 19 nt, Artificial Sequence
  Description of Artificial Sequence: Synthetic oligonucleotide
agcuauaaugguuggcaac

SEQ ID NO: 821407 - RNA, 19 nt, Artificial Sequence
  Description of Artificial Sequence: Synthetic oligonucleotide
gaguaaggaguuuugagga

SEQ ID NO: 821408 - RNA, 19 nt, Artificial Sequence
  Description of Artificial Sequence: Synthetic oligonucleotide
auuuaucccaugcuuaaga

SEQ ID NO: 821409 - RNA, 19 nt, Artificial Sequence
  Description of Artificial Sequence: Synthetic oligonucleotide
uccaaucaugacuuccucg

SEQ ID NO: 821410 - RNA, 19 nt, Artificial Sequence
  Description of Artificial Sequence: Synthetic oligonucleotide
uaguacaagccucaccaag

SEQ ID NO: 821411 - RNA, 19 nt, Artificial Sequence
  Description of Artificial Sequence: Synthetic oligonucleotide
aaucuugccggaauuugac

SEQ ID NO: 821412 - RNA, 19 nt, Artificial Sequence
  Description of Artificial Sequence: Synthetic oligonucleotide
uuugucgguauccauucca

SEQ ID NO: 821413 - RNA, 19 nt, Artificial Sequence
  Description of Artificial Sequence: Synthetic oligonucleotide
uaagaauacgcucaaccuu

SEQ ID NO: 821414 - RNA, 19 nt, Artificial Sequence
  Description of Artificial Sequence: Synthetic oligonucleotide
cuugaugacauggauggcc

SEQ ID NO: 821415 - RNA, 19 nt, Artificial Sequence
  Description of Artificial Sequence: Synthetic oligonucleotide
cuuaaggcuaucauggaca

SEQ ID NO: 821416 - RNA, 19 nt, Artificial Sequence
  Description of Artificial Sequence: Synthetic oligonucleotide
agcaugagccaucagcauc

SEQ ID NO: 821417 - RNA, 19 nt, Artificial Sequence
  Description of Artificial Sequence: Synthetic oligonucleotide
cuaucauggacacaucaac

SEQ ID NO: 821418 - RNA, 19 nt, Artificial Sequence
  Description of Artificial Sequence: Synthetic oligonucleotide
ucuaaauaggagucugcca

SEQ ID NO: 821419 - RNA, 19 nt, Artificial Sequence
  Description of Artificial Sequence: Synthetic oligonucleotide
ucauauccaguccaguagu

SEQ ID NO: 821420 - RNA, 19 nt, Artificial Sequence
  Description of Artificial Sequence: Synthetic oligonucleotide
uuacuggcaaguuuugcca

SEQ ID NO: 821421 - RNA, 19 nt, Artificial Sequence
  Description of Artificial Sequence: Synthetic oligonucleotide
aaguggaggcaaucucacc

SEQ ID NO: 821422 - RNA, 19 nt, Artificial Sequence
  Description of Artificial Sequence: Synthetic oligonucleotide
uauuuugucgguauccauu

SEQ ID NO: 821423 - RNA, 19 nt, Artificial Sequence
  Description of Artificial Sequence: Synthetic oligonucleotide
uucuuagugcuuuagcaaa

SEQ ID NO: 821424 - RNA, 19 nt, Artificial Sequence
  Description of Artificial Sequence: Synthetic oligonucleotide
acgaccuucacugugagca

SEQ ID NO: 821425 - RNA, 19 nt, Artificial Sequence
  Description of Artificial Sequence: Synthetic oligonucleotide
acaacuucacuaugaacug

SEQ ID NO: 821426 - RNA, 19 nt, Artificial Sequence
  Description of Artificial Sequence: Synthetic oligonucleotide
auuagacccauguuuaaaa

SEQ ID NO: 821427 - RNA, 19 nt, Artificial Sequence
  Description of Artificial Sequence: Synthetic oligonucleotide
aaugguaccuuccuucaua

SEQ ID NO: 821428 - RNA, 19 nt, Artificial Sequence
  Description of Artificial Sequence: Synthetic oligonucleotide
uucauuaaaucuugccgga

SEQ ID NO: 821429 - RNA, 19 nt, Artificial Sequence
  Description of Artificial Sequence: Synthetic oligonucleotide
uguacgaccuucacuguga

SEQ ID NO: 821430 - RNA, 19 nt, Artificial Sequence
  Description of Artificial Sequence: Synthetic oligonucleotide
ugacccgagagccaaauau

SEQ ID NO: 821431 - RNA, 19 nt, Artificial Sequence
  Description of Artificial Sequence: Synthetic oligonucleotide
uaaucccucacaagccgcg

SEQ ID NO: 821432 - RNA, 19 nt, Artificial Sequence
  Description of Artificial Sequence: Synthetic oligonucleotide
uccgggugaucaaaagugg

SEQ ID NO: 821433 - RNA, 19 nt, Artificial Sequence
  Description of Artificial Sequence: Synthetic oligonucleotide
uauccaguccaguaguugu

SEQ ID NO: 821434 - RNA, 19 nt, Artificial Sequence
  Description of Artificial Sequence: Synthetic oligonucleotide
ucaucuaaauaggagucug

SEQ ID NO: 821435 - RNA, 19 nt, Artificial Sequence
  Description of Artificial Sequence: Synthetic oligonucleotide
cauucuuagugcuuuagca

SEQ ID NO: 821436 - RNA, 19 nt, Artificial Sequence
  Description of Artificial Sequence: Synthetic oligonucleotide
ucuacagcuaacuccguaa

SEQ ID NO: 821437 - RNA, 19 nt, Artificial Sequence
  Description of Artificial Sequence: Synthetic oligonucleotide
agaauuuuguccaugcccu

SEQ ID NO: 821438 - RNA, 19 nt, Artificial Sequence
  Description of Artificial Sequence: Synthetic oligonucleotide
aguacaagccucaccaagg

SEQ ID NO: 821439 - RNA, 19 nt, Artificial Sequence
  Description of Artificial Sequence: Synthetic oligonucleotide
aguuguucgggauaauuau

SEQ ID NO: 821440 - RNA, 19 nt, Artificial Sequence
  Description of Artificial Sequence: Synthetic oligonucleotide
guauggaaaaugaaauagc

SEQ ID NO: 821441 - RNA, 19 nt, Artificial Sequence
  Description of Artificial Sequence: Synthetic oligonucleotide
uaaugguuggcaacauucu

SEQ ID NO: 821442 - RNA, 19 nt, Artificial Sequence
  Description of Artificial Sequence: Synthetic oligonucleotide
auucuuagugcuuuagcaa

SEQ ID NO: 821443 - RNA, 19 nt, Artificial Sequence
  Description of Artificial Sequence: Synthetic oligonucleotide
augacaggcgagcuguuuc

SEQ ID NO: 821444 - RNA, 19 nt, Artificial Sequence
  Description of Artificial Sequence: Synthetic oligonucleotide
uuuaucccaugcuuaagaa

SEQ ID NO: 821445 - RNA, 19 nt, Artificial Sequence
  Description of Artificial Sequence: Synthetic oligonucleotide
ugaucagggacacguuucc

SEQ ID NO: 821446 - RNA, 19 nt, Artificial Sequence
  Description of Artificial Sequence: Synthetic oligonucleotide
uaaaucuugccggaauuug

SEQ ID NO: 821447 - RNA, 19 nt, Artificial Sequence
  Description of Artificial Sequence: Synthetic oligonucleotide
cuccgggugaucaaaagug

SEQ ID NO: 821448 - RNA, 19 nt, Artificial Sequence
  Description of Artificial Sequence: Synthetic oligonucleotide
uuagacccauguuuaaaac

SEQ ID NO: 821449 - RNA, 19 nt, Artificial Sequence
  Description of Artificial Sequence: Synthetic oligonucleotide
guccuuaugaugaguaagg

SEQ ID NO: 821450 - RNA, 19 nt, Artificial Sequence
  Description of Artificial Sequence: Synthetic oligonucleotide
ucgggauaauuauaaauua

SEQ ID NO: 821451 - RNA, 19 nt, Artificial Sequence
  Description of Artificial Sequence: Synthetic oligonucleotide
uugaacccuugacauauca

SEQ ID NO: 821452 - RNA, 19 nt, Artificial Sequence
  Description of Artificial Sequence: Synthetic oligonucleotide
aaucaugacuuccucgaua

SEQ ID NO: 821453 - RNA, 19 nt, Artificial Sequence
  Description of Artificial Sequence: Synthetic oligonucleotide
uuugccguggaaucaacuc

SEQ ID NO: 821454 - RNA, 19 nt, Artificial Sequence
  Description of Artificial Sequence: Synthetic oligonucleotide
accugcaaaaucugcaugu

SEQ ID NO: 821455 - RNA, 19 nt, Artificial Sequence
  Description of Artificial Sequence: Synthetic oligonucleotide
uuaaggcuaucauggacac

SEQ ID NO: 821456 - RNA, 19 nt, Artificial Sequence
  Description of Artificial Sequence: Synthetic oligonucleotide
ccggaauuugacuucaucg

SEQ ID NO: 821457 - RNA, 19 nt, Artificial Sequence
  Description of Artificial Sequence: Synthetic oligonucleotide
ugccgcuucacuuggaaac

SEQ ID NO: 821458 - RNA, 19 nt, Artificial Sequence
  Description of Artificial Sequence: Synthetic oligonucleotide
aauuaacugucuguuaaua

SEQ ID NO: 821459 - RNA, 19 nt, Artificial Sequence
  Description of Artificial Sequence: Synthetic oligonucleotide
uuugaggauaaugucguuc

SEQ ID NO: 821460 - RNA, 19 nt, Artificial Sequence
  Description of Artificial Sequence: Synthetic oligonucleotide
gguuccgacgaacucagcg

SEQ ID NO: 821461 - RNA, 19 nt, Artificial Sequence
  Description of Artificial Sequence: Synthetic oligonucleotide
ugcacucaagagaaccugc

SEQ ID NO: 821462 - RNA, 19 nt, Artificial Sequence
  Description of Artificial Sequence: Synthetic oligonucleotide
auuaaaucuugccggaauu

SEQ ID NO: 821463 - RNA, 19 nt, Artificial Sequence
  Description of Artificial Sequence: Synthetic oligonucleotide
uuguacgaccuucacugug

SEQ ID NO: 821464 - RNA, 19 nt, Artificial Sequence
  Description of Artificial Sequence: Synthetic oligonucleotide
auacgcucaaccuucuccu

SEQ ID NO: 821465 - RNA, 19 nt, Artificial Sequence
  Description of Artificial Sequence: Synthetic oligonucleotide
aacuuaaggcuaucaugga

SEQ ID NO: 821466 - RNA, 19 nt, Artificial Sequence
  Description of Artificial Sequence: Synthetic oligonucleotide
uucggcucucucuucauca

SEQ ID NO: 821467 - RNA, 19 nt, Artificial Sequence
  Description of Artificial Sequence: Synthetic oligonucleotide
uguuucggcucucucuuca

SEQ ID NO: 821468 - RNA, 19 nt, Artificial Sequence
  Description of Artificial Sequence: Synthetic oligonucleotide
auaaugucguuccugcaau

SEQ ID NO: 821469 - RNA, 19 nt, Artificial Sequence
  Description of Artificial Sequence: Synthetic oligonucleotide
cagagagcaacagcaaugg

SEQ ID NO: 821470 - RNA, 19 nt, Artificial Sequence
  Description of Artificial Sequence: Synthetic oligonucleotide
uaaauaggagucugccaga

SEQ ID NO: 821471 - RNA, 19 nt, Artificial Sequence
  Description of Artificial Sequence: Synthetic oligonucleotide
gacauaucaacuaaaacuu

SEQ ID NO: 821472 - RNA, 19 nt, Artificial Sequence
  Description of Artificial Sequence: Synthetic oligonucleotide
uaguuguacgaccuucacu

SEQ ID NO: 821473 - RNA, 19 nt, Artificial Sequence
  Description of Artificial Sequence: Synthetic oligonucleotide
ugccguggaaucaacucug

SEQ ID NO: 821474 - RNA, 19 nt, Artificial Sequence
  Description of Artificial Sequence: Synthetic oligonucleotide
uuccucgauaaguuugcag

SEQ ID NO: 821475 - RNA, 19 nt, Artificial Sequence
  Description of Artificial Sequence: Synthetic oligonucleotide
ggcgauggcaccaauaaag

SEQ ID NO: 821476 - RNA, 19 nt, Artificial Sequence
  Description of Artificial Sequence: Synthetic oligonucleotide
gggauaauuauaaauuaac

SEQ ID NO: 821477 - RNA, 19 nt, Artificial Sequence
  Description of Artificial Sequence: Synthetic oligonucleotide
ucuugccggaauuugacuu

SEQ ID NO: 821478 - RNA, 19 nt, Artificial Sequence
  Description of Artificial Sequence: Synthetic oligonucleotide
uuuuacuggcaaguuuugc

SEQ ID NO: 821479 - RNA, 19 nt, Artificial Sequence
  Description of Artificial Sequence: Synthetic oligonucleotide
ucuuagugcuuuagcaaaa

SEQ ID NO: 821480 - RNA, 19 nt, Artificial Sequence
  Description of Artificial Sequence: Synthetic oligonucleotide
gaaccugccgcuucacuug

SEQ ID NO: 821481 - RNA, 19 nt, Artificial Sequence
  Description of Artificial Sequence: Synthetic oligonucleotide
aaccgugaucaacagcaga

SEQ ID NO: 821482 - RNA, 19 nt, Artificial Sequence
  Description of Artificial Sequence: Synthetic oligonucleotide
guuccgacgaacucagcgc

SEQ ID NO: 821483 - RNA, 19 nt, Artificial Sequence
  Description of Artificial Sequence: Synthetic oligonucleotide
accgugaucaacagcagag

SEQ ID NO: 821484 - RNA, 19 nt, Artificial Sequence
  Description of Artificial Sequence: Synthetic oligonucleotide
auaaguuugcagcuuccaa

SEQ ID NO: 821485 - RNA, 19 nt, Artificial Sequence
  Description of Artificial Sequence: Synthetic oligonucleotide
uuccgacgaacucagcgca

SEQ ID NO: 821486 - RNA, 19 nt, Artificial Sequence
  Description of Artificial Sequence: Synthetic oligonucleotide
cauaucaacuaaaacuuua

SEQ ID NO: 821487 - RNA, 19 nt, Artificial Sequence
  Description of Artificial Sequence: Synthetic oligonucleotide
ucagcgcaguggauaaucc

SEQ ID NO: 821488 - RNA, 19 nt, Artificial Sequence
  Description of Artificial Sequence: Synthetic oligonucleotide
aucaaaaguggaggcaauc

SEQ ID NO: 821489 - RNA, 19 nt, Artificial Sequence
  Description of Artificial Sequence: Synthetic oligonucleotide
aaccugccgcuucacuugg

SEQ ID NO: 821490 - RNA, 19 nt, Artificial Sequence
  Description of Artificial Sequence: Synthetic oligonucleotide
aauaggagucugccagacu

SEQ ID NO: 821491 - RNA, 19 nt, Artificial Sequence
  Description of Artificial Sequence: Synthetic oligonucleotide
gauuaccagagcccuucag

SEQ ID NO: 821492 - RNA, 19 nt, Artificial Sequence
  Description of Artificial Sequence: Synthetic oligonucleotide
acgaacucagcgcagugga

SEQ ID NO: 821493 - RNA, 19 nt, Artificial Sequence
  Description of Artificial Sequence: Synthetic oligonucleotide
uuaccauuagagaggcauc

SEQ ID NO: 821494 - RNA, 19 nt, Artificial Sequence
  Description of Artificial Sequence: Synthetic oligonucleotide
gaggauaaugucguuccug

SEQ ID NO: 821495 - RNA, 19 nt, Artificial Sequence
  Description of Artificial Sequence: Synthetic oligonucleotide
caacucugacccgagagcc

SEQ ID NO: 821496 - RNA, 19 nt, Artificial Sequence
  Description of Artificial Sequence: Synthetic oligonucleotide
ugguuaccauuagagaggc

SEQ ID NO: 821497 - RNA, 19 nt, Artificial Sequence
  Description of Artificial Sequence: Synthetic oligonucleotide
aagugguccuuaugaugag

SEQ ID NO: 821498 - RNA, 19 nt, Artificial Sequence
  Description of Artificial Sequence: Synthetic oligonucleotide
uuuugucgguauccauucc

SEQ ID NO: 821499 - RNA, 19 nt, Artificial Sequence
  Description of Artificial Sequence: Synthetic oligonucleotide
uaccauuagagaggcaucu

SEQ ID NO: 821500 - RNA, 19 nt, Artificial Sequence
  Description of Artificial Sequence: Synthetic oligonucleotide
gucaacagcgccucucuug

SEQ ID NO: 821501 - RNA, 19 nt, Artificial Sequence
  Description of Artificial Sequence: Synthetic oligonucleotide
acaauaguacaagccucac

SEQ ID NO: 821502 - RNA, 19 nt, Artificial Sequence
  Description of Artificial Sequence: Synthetic oligonucleotide
guggauaaucccucacaag

SEQ ID NO: 821503 - RNA, 19 nt, Artificial Sequence
  Description of Artificial Sequence: Synthetic oligonucleotide
cucagaacaaccuccucca

SEQ ID NO: 821504 - RNA, 19 nt, Artificial Sequence
  Description of Artificial Sequence: Synthetic oligonucleotide
uuauuuugucgguauccau

SEQ ID NO: 821505 - RNA, 19 nt, Artificial Sequence
  Description of Artificial Sequence: Synthetic oligonucleotide
uggaaucaacucugacccg

SEQ ID NO: 821506 - RNA, 19 nt, Artificial Sequence
  Description of Artificial Sequence: Synthetic oligonucleotide
ccuaggaucuuucacaguc

SEQ ID NO: 821507 - RNA, 19 nt, Artificial Sequence
  Description of Artificial Sequence: Synthetic oligonucleotide
ugcuuaagaauacgcucaa

SEQ ID NO: 821508 - RNA, 19 nt, Artificial Sequence
  Description of Artificial Sequence: Synthetic oligonucleotide
cauugguuaccauuagaga

SEQ ID NO: 821509 - RNA, 19 nt, Artificial Sequence
  Description of Artificial Sequence: Synthetic oligonucleotide
cuuagugcuuuagcaaaag

SEQ ID NO: 821510 - RNA, 19 nt, Artificial Sequence
  Description of Artificial Sequence: Synthetic oligonucleotide
aacuuauaaaucagcugaa

SEQ ID NO: 821511 - RNA, 19 nt, Artificial Sequence
  Description of Artificial Sequence: Synthetic oligonucleotide
caccaaacaguuguucggg

SEQ ID NO: 821512 - RNA, 19 nt, Artificial Sequence
  Description of Artificial Sequence: Synthetic oligonucleotide
cugcaauguucauuaaauc

SEQ ID NO: 821513 - RNA, 19 nt, Artificial Sequence
  Description of Artificial Sequence: Synthetic oligonucleotide
auggcaccaauaaaggaug

SEQ ID NO: 821514 - RNA, 19 nt, Artificial Sequence
  Description of Artificial Sequence: Synthetic oligonucleotide
auaaaggaugacaggcgag

SEQ ID NO: 821515 - RNA, 19 nt, Artificial Sequence
  Description of Artificial Sequence: Synthetic oligonucleotide
uccuuaugaugaguaagga

SEQ ID NO: 821516 - RNA, 19 nt, Artificial Sequence
  Description of Artificial Sequence: Synthetic oligonucleotide
uaacuccguaaaguggucc

SEQ ID NO: 821517 - RNA, 19 nt, Artificial Sequence
  Description of Artificial Sequence: Synthetic oligonucleotide
ccuuaugaugaguaaggag

SEQ ID NO: 821518 - RNA, 19 nt, Artificial Sequence
  Description of Artificial Sequence: Synthetic oligonucleotide
uaaugucguuccugcaaug

SEQ ID NO: 821519 - RNA, 19 nt, Artificial Sequence
  Description of Artificial Sequence: Synthetic oligonucleotide
cguggaaucaacucugacc

SEQ ID NO: 821520 - RNA, 19 nt, Artificial Sequence
  Description of Artificial Sequence: Synthetic oligonucleotide
guuaccauuagagaggcau

SEQ ID NO: 821521 - RNA, 19 nt, Artificial Sequence
  Description of Artificial Sequence: Synthetic oligonucleotide
ugaggauaaugucguuccu

SEQ ID NO: 821522 - RNA, 19 nt, Artificial Sequence
  Description of Artificial Sequence: Synthetic oligonucleotide
uguucgggauaauuauaaa

SEQ ID NO: 821523 - RNA, 19 nt, Artificial Sequence
  Description of Artificial Sequence: Synthetic oligonucleotide
cuugccggaauuugacuuc

SEQ ID NO: 821524 - RNA, 19 nt, Artificial Sequence
  Description of Artificial Sequence: Synthetic oligonucleotide
ucguaaccgugaucaacag

SEQ ID NO: 821525 - RNA, 19 nt, Artificial Sequence
  Description of Artificial Sequence: Synthetic oligonucleotide
auacccaguacugccaugu

SEQ ID NO: 821526 - RNA, 19 nt, Artificial Sequence
  Description of Artificial Sequence: Synthetic oligonucleotide
caucauugguuaccauuag

SEQ ID NO: 821527 - RNA, 19 nt, Artificial Sequence
  Description of Artificial Sequence: Synthetic oligonucleotide
gguccuuaugaugaguaag

SEQ ID NO: 821528 - RNA, 19 nt, Artificial Sequence
  Description of Artificial Sequence: Synthetic oligonucleotide
guugucaacaccaauguuu

SEQ ID NO: 821529 - RNA, 19 nt, Artificial Sequence
  Description of Artificial Sequence: Synthetic oligonucleotide
cuguccuaggaucuuucac

SEQ ID NO: 821530 - RNA, 19 nt, Artificial Sequence
  Description of Artificial Sequence: Synthetic oligonucleotide
guucgggauaauuauaaau

SEQ ID NO: 821531 - RNA, 19 nt, Artificial Sequence
  Description of Artificial Sequence: Synthetic oligonucleotide
ggcaaguuuugccacagca

SEQ ID NO: 821532 - RNA, 19 nt, Artificial Sequence
  Description of Artificial Sequence: Synthetic oligonucleotide
ccuccagauuaccagagcc

SEQ ID NO: 821533 - RNA, 19 nt, Artificial Sequence
  Description of Artificial Sequence: Synthetic oligonucleotide
ggauaaucccucacaagcc

SEQ ID NO: 821534 - RNA, 19 nt, Artificial Sequence
  Description of Artificial Sequence: Synthetic oligonucleotide
caucguaaccgugaucaac

SEQ ID NO: 821535 - RNA, 19 nt, Artificial Sequence
  Description of Artificial Sequence: Synthetic oligonucleotide
aguaacagagguagugcca

SEQ ID NO: 821536 - RNA, 19 nt, Artificial Sequence
  Description of Artificial Sequence: Synthetic oligonucleotide
gaaucaacucugacccgag

SEQ ID NO: 821537 - RNA, 19 nt, Artificial Sequence
  Description of Artificial Sequence: Synthetic oligonucleotide
accacgaaguacaauagua

SEQ ID NO: 821538 - RNA, 19 nt, Artificial Sequence
  Description of Artificial Sequence: Synthetic oligonucleotide
aguaguuguacgaccuuca

SEQ ID NO: 821539 - RNA, 19 nt, Artificial Sequence
  Description of Artificial Sequence: Synthetic oligonucleotide
augaugaguaaggaguuuu

SEQ ID NO: 821540 - RNA, 19 nt, Artificial Sequence
  Description of Artificial Sequence: Synthetic oligonucleotide
gucgguauccauuccagua

SEQ ID NO: 821541 - RNA, 19 nt, Artificial Sequence
  Description of Artificial Sequence: Synthetic oligonucleotide
ucggcucucucuucaucag

SEQ ID NO: 821542 - RNA, 19 nt, Artificial Sequence
  Description of Artificial Sequence: Synthetic oligonucleotide
aucuugccggaauuugacu

SEQ ID NO: 821543 - RNA, 19 nt, Artificial Sequence
  Description of Artificial Sequence: Synthetic oligonucleotide
guaguuguacgaccuucac

SEQ ID NO: 821544 - RNA, 19 nt, Artificial Sequence
  Description of Artificial Sequence: Synthetic oligonucleotide
cagauuaccagagcccuuc

SEQ ID NO: 821545 - RNA, 19 nt, Artificial Sequence
  Description of Artificial Sequence: Synthetic oligonucleotide
aggcaucucguccacugcu

SEQ ID NO: 821546 - RNA, 19 nt, Artificial Sequence
  Description of Artificial Sequence: Synthetic oligonucleotide
gcuauaaugguuggcaaca

SEQ ID NO: 821547 - RNA, 19 nt, Artificial Sequence
  Description of Artificial Sequence: Synthetic oligonucleotide
ugucgguauccauuccagu

SEQ ID NO: 821548 - RNA, 19 nt, Artificial Sequence
  Description of Artificial Sequence: Synthetic oligonucleotide
caugcucuauuucggcaac

SEQ ID NO: 821549 - RNA, 19 nt, Artificial Sequence
  Description of Artificial Sequence: Synthetic oligonucleotide
agcuccgggugaucaaaag

SEQ ID NO: 821550 - RNA, 19 nt, Artificial Sequence
  Description of Artificial Sequence: Synthetic oligonucleotide
cagcgcaguggauaauccc

SEQ ID NO: 821551 - RNA, 19 nt, Artificial Sequence
  Description of Artificial Sequence: Synthetic oligonucleotide
aggucagcuaaauguucca

SEQ ID NO: 821552 - RNA, 19 nt, Artificial Sequence
  Description of Artificial Sequence: Synthetic oligonucleotide
uccgacgaacucagcgcag

SEQ ID NO: 821553 - RNA, 19 nt, Artificial Sequence
  Description of Artificial Sequence: Synthetic oligonucleotide
aaacagaaggucagcuaaa

SEQ ID NO: 821554 - RNA, 19 nt, Artificial Sequence
  Description of Artificial Sequence: Synthetic oligonucleotide
cugugauacccaguacugc

SEQ ID NO: 821555 - RNA, 19 nt, Artificial Sequence
  Description of Artificial Sequence: Synthetic oligonucleotide
caucuugaacccuugacau

SEQ ID NO: 821556 - RNA, 19 nt, Artificial Sequence
  Description of Artificial Sequence: Synthetic oligonucleotide
acggcaggggaaaggaagg

SEQ ID NO: 821557 - RNA, 19 nt, Artificial Sequence
  Description of Artificial Sequence: Synthetic oligonucleotide
augacuuccucgauaaguu

SEQ ID NO: 821558 - RNA, 19 nt, Artificial Sequence
  Description of Artificial Sequence: Synthetic oligonucleotide
caguuguucgggauaauua

SEQ ID NO: 821559 - RNA, 19 nt, Artificial Sequence
  Description of Artificial Sequence: Synthetic oligonucleotide
ugguccuuaugaugaguaa

SEQ ID NO: 821560 - RNA, 19 nt, Artificial Sequence
  Description of Artificial Sequence: Synthetic oligonucleotide
cuaacuccguaaagugguc

SEQ ID NO: 821561 - RNA, 19 nt, Artificial Sequence
  Description of Artificial Sequence: Synthetic oligonucleotide
cuauuucggcaaccuuugc

SEQ ID NO: 821562 - RNA, 19 nt, Artificial Sequence
  Description of Artificial Sequence: Synthetic oligonucleotide
cucguccacugcuuagaag

SEQ ID NO: 821563 - RNA, 19 nt, Artificial Sequence
  Description of Artificial Sequence: Synthetic oligonucleotide
guacgaccuucacugugag

SEQ ID NO: 821564 - RNA, 19 nt, Artificial Sequence
  Description of Artificial Sequence: Synthetic oligonucleotide
ggacacguuuccucggugc

SEQ ID NO: 821565 - RNA, 19 nt, Artificial Sequence
  Description of Artificial Sequence: Synthetic oligonucleotide
aucugcacugucauagccu

SEQ ID NO: 821566 - RNA, 19 nt, Artificial Sequence
  Description of Artificial Sequence: Synthetic oligonucleotide
gcgauggcaccaauaaagg

SEQ ID NO: 821567 - RNA, 19 nt, Artificial Sequence
  Description of Artificial Sequence: Synthetic oligonucleotide
aauggcgauggcaccaaua

SEQ ID NO: 821568 - RNA, 19 nt, Artificial Sequence
  Description of Artificial Sequence: Synthetic oligonucleotide
gacaggcgagcuguuucgg

SEQ ID NO: 821569 - RNA, 19 nt, Artificial Sequence
  Description of Artificial Sequence: Synthetic oligonucleotide
cucagcgcaguggauaauc

SEQ ID NO: 821570 - RNA, 19 nt, Artificial Sequence
  Description of Artificial Sequence: Synthetic oligonucleotide
caguggauaaucccucaca

SEQ ID NO: 821571 - RNA, 19 nt, Artificial Sequence
  Description of Artificial Sequence: Synthetic oligonucleotide
uaugaugaguaaggaguuu

SEQ ID NO: 821572 - RNA, 19 nt, Artificial Sequence
  Description of Artificial Sequence: Synthetic oligonucleotide
uugccggaauuugacuuca

SEQ ID NO: 821573 - RNA, 19 nt, Artificial Sequence
  Description of Artificial Sequence: Synthetic oligonucleotide
caaacaguuguucgggaua

SEQ ID NO: 821574 - RNA, 19 nt, Artificial Sequence
  Description of Artificial Sequence: Synthetic oligonucleotide
caugacuuccucgauaagu

SEQ ID NO: 821575 - RNA, 19 nt, Artificial Sequence
  Description of Artificial Sequence: Synthetic oligonucleotide
uccguaaagugguccuuau

SEQ ID NO: 821576 - RNA, 19 nt, Artificial Sequence
  Description of Artificial Sequence: Synthetic oligonucleotide
gugaucagggacacguuuc

SEQ ID NO: 821577 - RNA, 19 nt, Artificial Sequence
  Description of Artificial Sequence: Synthetic oligonucleotide
agauuaccagagcccuuca

SEQ ID NO: 821578 - RNA, 19 nt, Artificial Sequence
  Description of Artificial Sequence: Synthetic oligonucleotide
cccggaguaguucugcugc

SEQ ID NO: 821579 - RNA, 19 nt, Artificial Sequence
  Description of Artificial Sequence: Synthetic oligonucleotide
cacggagaaucaccucugc

SEQ ID NO: 821580 - RNA, 19 nt, Artificial Sequence
  Description of Artificial Sequence: Synthetic oligonucleotide
uacgaccuucacugugagc

SEQ ID NO: 821581 - RNA, 19 nt, Artificial Sequence
  Description of Artificial Sequence: Synthetic oligonucleotide
guaaagugguccuuaugau

SEQ ID NO: 821582 - RNA, 19 nt, Artificial Sequence
  Description of Artificial Sequence: Synthetic oligonucleotide
gaacucagcgcaguggaua

SEQ ID NO: 821583 - RNA, 19 nt, Artificial Sequence
  Description of Artificial Sequence: Synthetic oligonucleotide
uggcgauggcaccaauaaa

SEQ ID NO: 821584 - RNA, 19 nt, Artificial Sequence
  Description of Artificial Sequence: Synthetic oligonucleotide
gaauacgcucaaccuucuc

SEQ ID NO: 821585 - RNA, 19 nt, Artificial Sequence
  Description of Artificial Sequence: Synthetic oligonucleotide
agggacacguuuccucggu

SEQ ID NO: 821586 - RNA, 19 nt, Artificial Sequence
  Description of Artificial Sequence: Synthetic oligonucleotide
cuccaaucaugacuuccuc

SEQ ID NO: 821587 - RNA, 19 nt, Artificial Sequence
  Description of Artificial Sequence: Synthetic oligonucleotide
uggcaaguuuugccacagc

SEQ ID NO: 821588 - RNA, 19 nt, Artificial Sequence
  Description of Artificial Sequence: Synthetic oligonucleotide
ucaucguaaccgugaucaa

SEQ ID NO: 821589 - RNA, 19 nt, Artificial Sequence
  Description of Artificial Sequence: Synthetic oligonucleotide
acauaucaacuaaaacuuu

SEQ ID NO: 821590 - RNA, 19 nt, Artificial Sequence
  Description of Artificial Sequence: Synthetic oligonucleotide
ucugacccgagagccaaau

SEQ ID NO: 821591 - RNA, 19 nt, Artificial Sequence
  Description of Artificial Sequence: Synthetic oligonucleotide
cauuaaaucuugccggaau

SEQ ID NO: 821592 - RNA, 19 nt, Artificial Sequence
  Description of Artificial Sequence: Synthetic oligonucleotide
ugccuugguggcuucucuc

SEQ ID NO: 821593 - RNA, 19 nt, Artificial Sequence
  Description of Artificial Sequence: Synthetic oligonucleotide
cuacagcuaacuccguaaa

SEQ ID NO: 821594 - RNA, 19 nt, Artificial Sequence
  Description of Artificial Sequence: Synthetic oligonucleotide
cauguucaauagccaugac

SEQ ID NO: 821595 - RNA, 19 nt, Artificial Sequence
  Description of Artificial Sequence: Synthetic oligonucleotide
ggaaacucucugugauacc

SEQ ID NO: 821596 - RNA, 19 nt, Artificial Sequence
  Description of Artificial Sequence: Synthetic oligonucleotide
gacacguuuccucggugcu

SEQ ID NO: 821597 - RNA, 19 nt, Artificial Sequence
  Description of Artificial Sequence: Synthetic oligonucleotide
guuguucgggauaauuaua

SEQ ID NO: 821598 - RNA, 19 nt, Artificial Sequence
  Description of Artificial Sequence: Synthetic oligonucleotide
gcuaacuccguaaaguggu

SEQ ID NO: 821599 - RNA, 19 nt, Artificial Sequence
  Description of Artificial Sequence: Synthetic oligonucleotide
gugauacccaguacugcca

SEQ ID NO: 821600 - RNA, 19 nt, Artificial Sequence
  Description of Artificial Sequence: Synthetic oligonucleotide
cagcuauaaugguuggcaa

SEQ ID NO: 821601 - RNA, 19 nt, Artificial Sequence
  Description of Artificial Sequence: Synthetic oligonucleotide
agaauacgcucaaccuucu

SEQ ID NO: 821602 - RNA, 19 nt, Artificial Sequence
  Description of Artificial Sequence: Synthetic oligonucleotide
cgggugaucaaaaguggag

SEQ ID NO: 821603 - RNA, 19 nt, Artificial Sequence
  Description of Artificial Sequence: Synthetic oligonucleotide
ugguaccuuccuucauauc

SEQ ID NO: 821604 - RNA, 19 nt, Artificial Sequence
  Description of Artificial Sequence: Synthetic oligonucleotide
ggguugucaacaccaaugu

SEQ ID NO: 821605 - RNA, 19 nt, Artificial Sequence
  Description of Artificial Sequence: Synthetic oligonucleotide
gaacaaccuccuccauaga

SEQ ID NO: 821606 - RNA, 19 nt, Artificial Sequence
  Description of Artificial Sequence: Synthetic oligonucleotide
guuuccucggugcugcuuu

SEQ ID NO: 821607 - RNA, 19 nt, Artificial Sequence
  Description of Artificial Sequence: Synthetic oligonucleotide
cugcauguucaauagccau

SEQ ID NO: 821608 - RNA, 19 nt, Artificial Sequence
  Description of Artificial Sequence: Synthetic oligonucleotide
acaagccgcgccgggaaga

SEQ ID NO: 821609 - RNA, 19 nt, Artificial Sequence
  Description of Artificial Sequence: Synthetic oligonucleotide
agaggucaacagcgccucu

SEQ ID NO: 821610 - RNA, 19 nt, Artificial Sequence
  Description of Artificial Sequence: Synthetic oligonucleotide
ggaguaguucugcugccaa

SEQ ID NO: 821611 - RNA, 19 nt, Artificial Sequence
  Description of Artificial Sequence: Synthetic oligonucleotide
gcaaaagacuccauugcua

SEQ ID NO: 821612 - RNA, 19 nt, Artificial Sequence
  Description of Artificial Sequence: Synthetic oligonucleotide
gccggaauuugacuucauc

SEQ ID NO: 821613 - RNA, 19 nt, Artificial Sequence
  Description of Artificial Sequence: Synthetic oligonucleotide
gaucaaaaguggaggcaau

SEQ ID NO: 821614 - RNA, 19 nt, Artificial Sequence
  Description of Artificial Sequence: Synthetic oligonucleotide
ugccggaauuugacuucau

SEQ ID NO: 821615 - RNA, 19 nt, Artificial Sequence
  Description of Artificial Sequence: Synthetic oligonucleotide
caacauucuuagugcuuua

SEQ ID NO: 821616 - RNA, 19 nt, Artificial Sequence
  Description of Artificial Sequence: Synthetic oligonucleotide
ucggugcugcuuugaugau

SEQ ID NO: 821617 - RNA, 19 nt, Artificial Sequence
  Description of Artificial Sequence: Synthetic oligonucleotide
gcuuaagaauacgcucaac

SEQ ID NO: 821618 - RNA, 19 nt, Artificial Sequence
  Description of Artificial Sequence: Synthetic oligonucleotide
gggacacguuuccucggug

SEQ ID NO: 821619 - RNA, 19 nt, Artificial Sequence
  Description of Artificial Sequence: Synthetic oligonucleotide
caagccgcgccgggaagac

SEQ ID NO: 821620 - RNA, 19 nt, Artificial Sequence
  Description of Artificial Sequence: Synthetic oligonucleotide
ccguaaagugguccuuaug

SEQ ID NO: 821621 - RNA, 19 nt, Artificial Sequence
  Description of Artificial Sequence: Synthetic oligonucleotide
ggaagacggcaggggaaag

SEQ ID NO: 821622 - RNA, 19 nt, Artificial Sequence
  Description of Artificial Sequence: Synthetic oligonucleotide
ggucagcuaaauguuccaa

SEQ ID NO: 821623 - RNA, 19 nt, Artificial Sequence
  Description of Artificial Sequence: Synthetic oligonucleotide
cauauccaguccaguaguu

SEQ ID NO: 821624 - RNA, 19 nt, Artificial Sequence
  Description of Artificial Sequence: Synthetic oligonucleotide
gcuccgggugaucaaaagu

SEQ ID NO: 821625 - RNA, 19 nt, Artificial Sequence
  Description of Artificial Sequence: Synthetic oligonucleotide
cggaauuugacuucaucgu

SEQ ID NO: 821626 - RNA, 19 nt, Artificial Sequence
  Description of Artificial Sequence: Synthetic oligonucleotide
gguggugaucagggacacg

SEQ ID NO: 821627 - RNA, 19 nt, Artificial Sequence
  Description of Artificial Sequence: Synthetic oligonucleotide
gcaaccuuugccguggaau

SEQ ID NO: 821628 - RNA, 19 nt, Artificial Sequence
  Description of Artificial Sequence: Synthetic oligonucleotide
ccgggugaucaaaagugga

SEQ ID NO: 821629 - RNA, 19 nt, Artificial Sequence
  Description of Artificial Sequence: Synthetic oligonucleotide
gggaagacggcaggggaaa

SEQ ID NO: 821630 - RNA, 19 nt, Artificial Sequence
  Description of Artificial Sequence: Synthetic oligonucleotide
ccucgauaaguuugcagcu

SEQ ID NO: 821631 - RNA, 19 nt, Artificial Sequence
  Description of Artificial Sequence: Synthetic oligonucleotide
ggcguuccacaccugcaaa

SEQ ID NO: 821632 - RNA, 19 nt, Artificial Sequence
  Description of Artificial Sequence: Synthetic oligonucleotide
caaucaugacuuccucgau

SEQ ID NO: 821633 - RNA, 19 nt, Artificial Sequence
  Description of Artificial Sequence: Synthetic oligonucleotide
gcgccgggaagacggcagg

SEQ ID NO: 821634 - RNA, 19 nt, Artificial Sequence
  Description of Artificial Sequence: Synthetic oligonucleotide
cuauaaugguuggcaacau

SEQ ID NO: 821635 - RNA, 19 nt, Artificial Sequence
  Description of Artificial Sequence: Synthetic oligonucleotide
cgauggcaccaauaaagga

SEQ ID NO: 821636 - RNA, 19 nt, Artificial Sequence
  Description of Artificial Sequence: Synthetic oligonucleotide
guuucggcucucucuucau

SEQ ID NO: 821637 - RNA, 19 nt, Artificial Sequence
  Description of Artificial Sequence: Synthetic oligonucleotide
caaugguaccuuccuucau

SEQ ID NO: 821638 - RNA, 19 nt, Artificial Sequence
  Description of Artificial Sequence: Synthetic oligonucleotide
cucgauaaguuugcagcuu

SEQ ID NO: 821639 - RNA, 19 nt, Artificial Sequence
  Description of Artificial Sequence: Synthetic oligonucleotide
gcgcaguggauaaucccuc

SEQ ID NO: 821640 - RNA, 19 nt, Artificial Sequence
  Description of Artificial Sequence: Synthetic oligonucleotide
cagcaugagccaucagcau

SEQ ID NO: 821641 - RNA, 19 nt, Artificial Sequence
  Description of Artificial Sequence: Synthetic oligonucleotide
caucagcuccagccuugaa

SEQ ID NO: 821642 - RNA, 19 nt, Artificial Sequence
  Description of Artificial Sequence: Synthetic oligonucleotide
cgacgaacucagcgcagug

SEQ ID NO: 821643 - RNA, 19 nt, Artificial Sequence
  Description of Artificial Sequence: Synthetic oligonucleotide
gguuaccauuagagaggca

SEQ ID NO: 821644 - RNA, 19 nt, Artificial Sequence
  Description of Artificial Sequence: Synthetic oligonucleotide
ggcaaccuuugccguggaa

SEQ ID NO: 821645 - RNA, 19 nt, Artificial Sequence
  Description of Artificial Sequence: Synthetic oligonucleotide
gccguggaaucaacucuga

SEQ ID NO: 821646 - RNA, 19 nt, Artificial Sequence
  Description of Artificial Sequence: Synthetic oligonucleotide
gccucaccaagggcaacuc

SEQ ID NO: 821647 - RNA, 19 nt, Artificial Sequence
  Description of Artificial Sequence: Synthetic oligonucleotide
ccgcuucacuuggaaacuc

SEQ ID NO: 821648 - RNA, 19 nt, Artificial Sequence
  Description of Artificial Sequence: Synthetic oligonucleotide
gccgcuucacuuggaaacu

SEQ ID NO: 821649 - RNA, 19 nt, Artificial Sequence
  Description of Artificial Sequence: Synthetic oligonucleotide
ggcgagcuguuucggcucu

SEQ ID NO: 821650 - RNA, 19 nt, Artificial Sequence
  Description of Artificial Sequence: Synthetic oligonucleotide
cccgagagccaaauauuuu

SEQ ID NO: 821651 - RNA, 19 nt, Artificial Sequence
  Description of Artificial Sequence: Synthetic oligonucleotide
ggucaacagcgccucucuu

SEQ ID NO: 821652 - RNA, 19 nt, Artificial Sequence
  Description of Artificial Sequence: Synthetic oligonucleotide
ccacugcuuagaagaauuu

SEQ ID NO: 821653 - RNA, 19 nt, Artificial Sequence
  Description of Artificial Sequence: Synthetic oligonucleotide
gacucccuccuagcuucuu

SEQ ID NO: 821654 - RNA, 19 nt, Artificial Sequence
  Description of Artificial Sequence: Synthetic oligonucleotide
ccgacgaacucagcgcagu

SEQ ID NO: 821655 - RNA, 19 nt, Artificial Sequence
  Description of Artificial Sequence: Synthetic oligonucleotide
cguuccugcaauguucauu

SEQ ID NO: 821656 - RNA, 19 nt, Artificial Sequence
  Description of Artificial Sequence: Synthetic oligonucleotide
gccgcgccgggaagacggc

SEQ ID NO: 821657 - RNA, 19 nt, Artificial Sequence
  Description of Artificial Sequence: Synthetic oligonucleotide
cgguauccauuccaguauu

SEQ ID NO: 821658 - RNA, 19 nt, Artificial Sequence
  Description of Artificial Sequence: Synthetic oligonucleotide
ccgcgccgggaagacggca

SEQ ID NO: 821659 - RNA, 19 nt, Artificial Sequence
  Description of Artificial Sequence: Synthetic oligonucleotide
uuauuagaccccaacaugg

SEQ ID NO: 821660 - RNA, 19 nt, Artificial Sequence
  Description of Artificial Sequence: Synthetic oligonucleotide
uuuaauuccuaucaaguac

SEQ ID NO: 821661 - RNA, 19 nt, Artificial Sequence
  Description of Artificial Sequence: Synthetic oligonucleotide
uuuuguauaagacucgguc

SEQ ID NO: 821662 - RNA, 19 nt, Artificial Sequence
  Description of Artificial Sequence: Synthetic oligonucleotide
uuuauuagaccccaacaug

SEQ ID NO: 821663 - RNA, 19 nt, Artificial Sequence
  Description of Artificial Sequence: Synthetic oligonucleotide
agauccgucuuuuaauucc

SEQ ID NO: 821664 - RNA, 19 nt, Artificial Sequence
  Description of Artificial Sequence: Synthetic oligonucleotide
uuaauuccuaucaaguaca

SEQ ID NO: 821665 - RNA, 19 nt, Artificial Sequence
  Description of Artificial Sequence: Synthetic oligonucleotide
aaguugaaaguccccaaac

SEQ ID NO: 821666 - RNA, 19 nt, Artificial Sequence
  Description of Artificial Sequence: Synthetic oligonucleotide
ugucucugaacccugaggc

SEQ ID NO: 821667 - RNA, 19 nt, Artificial Sequence
  Description of Artificial Sequence: Synthetic oligonucleotide
cagguagccacaaagagag

SEQ ID NO: 821668 - RNA, 19 nt, Artificial Sequence
  Description of Artificial Sequence: Synthetic oligonucleotide
aaccagaugaggucccugc

SEQ ID NO: 821669 - RNA, 19 nt, Artificial Sequence
  Description of Artificial Sequence: Synthetic oligonucleotide
aagaggaguacuucauggg

SEQ ID NO: 821670 - RNA, 19 nt, Artificial Sequence
  Description of Artificial Sequence: Synthetic oligonucleotide
uguagucagccucaguggg

SEQ ID NO: 821671 - RNA, 19 nt, Artificial Sequence
  Description of Artificial Sequence: Synthetic oligonucleotide
ugugacguaggcaagcuga

SEQ ID NO: 821672 - RNA, 19 nt, Artificial Sequence
  Description of Artificial Sequence: Synthetic oligonucleotide
gagguaaguaagcaacucg

SEQ ID NO: 821673 - RNA, 19 nt, Artificial Sequence
  Description of Artificial Sequence: Synthetic oligonucleotide
uguaggaugggagaaagug

SEQ ID NO: 821674 - RNA, 19 nt, Artificial Sequence
  Description of Artificial Sequence: Synthetic oligonucleotide
caagaggaguacuucaugg

SEQ ID NO: 821675 - RNA, 19 nt, Artificial Sequence
  Description of Artificial Sequence: Synthetic oligonucleotide
ugcaggagguccaaggagg

SEQ ID NO: 821676 - RNA, 19 nt, Artificial Sequence
  Description of Artificial Sequence: Synthetic oligonucleotide
caaacuuguaggaugggag

SEQ ID NO: 821677 - RNA, 19 nt, Artificial Sequence
  Description of Artificial Sequence: Synthetic oligonucleotide
gaacaagccauacacagga

SEQ ID NO: 821678 - RNA, 19 nt, Artificial Sequence
  Description of Artificial Sequence: Synthetic oligonucleotide
uugucaaggaugcacguca

SEQ ID NO: 821679 - RNA, 19 nt, Artificial Sequence
  Description of Artificial Sequence: Synthetic oligonucleotide
aguuuauuagaccccaaca

SEQ ID NO: 821680 - RNA, 19 nt, Artificial Sequence
  Description of Artificial Sequence: Synthetic oligonucleotide
gacauacaaguccugagug

SEQ ID NO: 821681 - RNA, 19 nt, Artificial Sequence
  Description of Artificial Sequence: Synthetic oligonucleotide
gacgugaugaagaggaagg

SEQ ID NO: 821682 - RNA, 19 nt, Artificial Sequence
  Description of Artificial Sequence: Synthetic oligonucleotide
uuugagauccgucuuuuaa

SEQ ID NO: 821683 - RNA, 19 nt, Artificial Sequence
  Description of Artificial Sequence: Synthetic oligonucleotide
gacuucaagauacagugca

SEQ ID NO: 821684 - RNA, 19 nt, Artificial Sequence
  Description of Artificial Sequence: Synthetic oligonucleotide
agccauaguuuauuagacc

SEQ ID NO: 821685 - RNA, 19 nt, Artificial Sequence
  Description of Artificial Sequence: Synthetic oligonucleotide
ugcugaucauuccaggaag

SEQ ID NO: 821686 - RNA, 19 nt, Artificial Sequence
  Description of Artificial Sequence: Synthetic oligonucleotide
ucgaccucugagcagaacc

SEQ ID NO: 821687 - RNA, 19 nt, Artificial Sequence
  Description of Artificial Sequence: Synthetic oligonucleotide
agacgugucucccacuccc

SEQ ID NO: 821688 - RNA, 19 nt, Artificial Sequence
  Description of Artificial Sequence: Synthetic oligonucleotide
uggaaugcugaaaggaggc

SEQ ID NO: 821689 - RNA, 19 nt, Artificial Sequence
  Description of Artificial Sequence: Synthetic oligonucleotide
gaugcguguaguuacugug

SEQ ID NO: 821690 - RNA, 19 nt, Artificial Sequence
  Description of Artificial Sequence: Synthetic oligonucleotide
ucgaagccccugaagaugg

SEQ ID NO: 821691 - RNA, 19 nt, Artificial Sequence
  Description of Artificial Sequence: Synthetic oligonucleotide
agacagucacuccacacgg

SEQ ID NO: 821692 - RNA, 19 nt, Artificial Sequence
  Description of Artificial Sequence: Synthetic oligonucleotide
ucuagccauaguuuauuag

SEQ ID NO: 821693 - RNA, 19 nt, Artificial Sequence
  Description of Artificial Sequence: Synthetic oligonucleotide
acacgaugcguguaguuac

SEQ ID NO: 821694 - RNA, 19 nt, Artificial Sequence
  Description of Artificial Sequence: Synthetic oligonucleotide
ugacauacaaguccugagu

SEQ ID NO: 821695 - RNA, 19 nt, Artificial Sequence
  Description of Artificial Sequence: Synthetic oligonucleotide
aagauggacccuuucuuca

SEQ ID NO: 821696 - RNA, 19 nt, Artificial Sequence
  Description of Artificial Sequence: Synthetic oligonucleotide
gguugcuugguuuugcugg

SEQ ID NO: 821697 - RNA, 19 nt, Artificial Sequence
  Description of Artificial Sequence: Synthetic oligonucleotide
ugaucugggacacgaugcg

SEQ ID NO: 821698 - RNA, 19 nt, Artificial Sequence
  Description of Artificial Sequence: Synthetic oligonucleotide
guagucagcgugcucaggg

SEQ ID NO: 821699 - RNA, 19 nt, Artificial Sequence
  Description of Artificial Sequence: Synthetic oligonucleotide
aaugacauacaaguccuga

SEQ ID NO: 821700 - RNA, 19 nt, Artificial Sequence
  Description of Artificial Sequence: Synthetic oligonucleotide
gaugucacccuuguggcgg

SEQ ID NO: 821701 - RNA, 19 nt, Artificial Sequence
  Description of Artificial Sequence: Synthetic oligonucleotide
uguagaggaccccaugcgc

SEQ ID NO: 821702 - RNA, 19 nt, Artificial Sequence
  Description of Artificial Sequence: Synthetic oligonucleotide
ugugcagcaugcaaacuug

SEQ ID NO: 821703 - RNA, 19 nt, Artificial Sequence
  Description of Artificial Sequence: Synthetic oligonucleotide
aucugcuccuagcagggcc

SEQ ID NO: 821704 - RNA, 19 nt, Artificial Sequence
  Description of Artificial Sequence: Synthetic oligonucleotide
aacaccucaucaaaccggg

SEQ ID NO: 821705 - RNA, 19 nt, Artificial Sequence
  Description of Artificial Sequence: Synthetic oligonucleotide
caucaaaccggguagugac

SEQ ID NO: 821706 - RNA, 19 nt, Artificial Sequence
  Description of Artificial Sequence: Synthetic oligonucleotide
uaagacucggucuguguag

SEQ ID NO: 821707 - RNA, 19 nt, Artificial Sequence
  Description of Artificial Sequence: Synthetic oligonucleotide
cagaacaccucaucaaacc

SEQ ID NO: 821708 - RNA, 19 nt, Artificial Sequence
  Description of Artificial Sequence: Synthetic oligonucleotide
gcuauguugagguccaugg

SEQ ID NO: 821709 - RNA, 19 nt, Artificial Sequence
  Description of Artificial Sequence: Synthetic oligonucleotide
cuagccauaguuuauuaga

SEQ ID NO: 821710 - RNA, 19 nt, Artificial Sequence
  Description of Artificial Sequence: Synthetic oligonucleotide
uuagaccccaacauggcaa

SEQ ID NO: 821711 - RNA, 19 nt, Artificial Sequence
  Description of Artificial Sequence: Synthetic oligonucleotide
cacaaagagagccauguuc

SEQ ID NO: 821712 - RNA, 19 nt, Artificial Sequence
  Description of Artificial Sequence: Synthetic oligonucleotide
uaaguaagcaacucguguu

SEQ ID NO: 821713 - RNA, 19 nt, Artificial Sequence
  Description of Artificial Sequence: Synthetic oligonucleotide
ucccugcgaauaaacaggg

SEQ ID NO: 821714 - RNA, 19 nt, Artificial Sequence
  Description of Artificial Sequence: Synthetic oligonucleotide
uccuaucaaguacaguucu

SEQ ID NO: 821715 - RNA, 19 nt, Artificial Sequence
  Description of Artificial Sequence: Synthetic oligonucleotide
agugagacgugaugaagag

SEQ ID NO: 821716 - RNA, 19 nt, Artificial Sequence
  Description of Artificial Sequence: Synthetic oligonucleotide
augacauacaaguccugag

SEQ ID NO: 821717 - RNA, 19 nt, Artificial Sequence
  Description of Artificial Sequence: Synthetic oligonucleotide
uuagaggugcugucguagg

SEQ ID NO: 821718 - RNA, 19 nt, Artificial Sequence
  Description of Artificial Sequence: Synthetic oligonucleotide
cucuagauagcuccggggc

SEQ ID NO: 821719 - RNA, 19 nt, Artificial Sequence
  Description of Artificial Sequence: Synthetic oligonucleotide
auguagaggaccccaugcg

SEQ ID NO: 821720 - RNA, 19 nt, Artificial Sequence
  Description of Artificial Sequence: Synthetic oligonucleotide
uaauuccuaucaaguacag

SEQ ID NO: 821721 - RNA, 19 nt, Artificial Sequence
  Description of Artificial Sequence: Synthetic oligonucleotide
cucguguugucaaggaugc

SEQ ID NO: 821722 - RNA, 19 nt, Artificial Sequence
  Description of Artificial Sequence: Synthetic oligonucleotide
accucaucaaaccggguag

SEQ ID NO: 821723 - RNA, 19 nt, Artificial Sequence
  Description of Artificial Sequence: Synthetic oligonucleotide
auagucuggaccuggccag

SEQ ID NO: 821724 - RNA, 19 nt, Artificial Sequence
  Description of Artificial Sequence: Synthetic oligonucleotide
uaagacuucccucuagaua

SEQ ID NO: 821725 - RNA, 19 nt, Artificial Sequence
  Description of Artificial Sequence: Synthetic oligonucleotide
uccugaacuccaaugacau

SEQ ID NO: 821726 - RNA, 19 nt, Artificial Sequence
  Description of Artificial Sequence: Synthetic oligonucleotide
uucauuguuuguuucugaa

SEQ ID NO: 821727 - RNA, 19 nt, Artificial Sequence
  Description of Artificial Sequence: Synthetic oligonucleotide
aacuccaaugacauacaag

SEQ ID NO: 821728 - RNA, 19 nt, Artificial Sequence
  Description of Artificial Sequence: Synthetic oligonucleotide
auaaacagggacauguaga

SEQ ID NO: 821729 - RNA, 19 nt, Artificial Sequence
  Description of Artificial Sequence: Synthetic oligonucleotide
acucguccaccacucaggc

SEQ ID NO: 821730 - RNA, 19 nt, Artificial Sequence
  Description of Artificial Sequence: Synthetic oligonucleotide
uacuguggagcacucgacc

SEQ ID NO: 821731 - RNA, 19 nt, Artificial Sequence
  Description of Artificial Sequence: Synthetic oligonucleotide
agaggaguacuucauggga

SEQ ID NO: 821732 - RNA, 19 nt, Artificial Sequence
  Description of Artificial Sequence: Synthetic oligonucleotide
gaaaguggauuucugccuc

SEQ ID NO: 821733 - RNA, 19 nt, Artificial Sequence
  Description of Artificial Sequence: Synthetic oligonucleotide
cucaguggggagcagaaac

SEQ ID NO: 821734 - RNA, 19 nt, Artificial Sequence
  Description of Artificial Sequence: Synthetic oligonucleotide
guaggaugggagaaagugg

SEQ ID NO: 821735 - RNA, 19 nt, Artificial Sequence
  Description of Artificial Sequence: Synthetic oligonucleotide
ucaaacuuguaggauggga

SEQ ID NO: 821736 - RNA, 19 nt, Artificial Sequence
  Description of Artificial Sequence: Synthetic oligonucleotide
uggucugcggagcuuguag

SEQ ID NO: 821737 - RNA, 19 nt, Artificial Sequence
  Description of Artificial Sequence: Synthetic oligonucleotide
uugagauccgucuuuuaau

SEQ ID NO: 821738 - RNA, 19 nt, Artificial Sequence
  Description of Artificial Sequence: Synthetic oligonucleotide
aagacucggucuguguagg

SEQ ID NO: 821739 - RNA, 19 nt, Artificial Sequence
  Description of Artificial Sequence: Synthetic oligonucleotide
uaagcaacucguguuguca

SEQ ID NO: 821740 - RNA, 19 nt, Artificial Sequence
  Description of Artificial Sequence: Synthetic oligonucleotide
guuacuguggagcacucga

SEQ ID NO: 821741 - RNA, 19 nt, Artificial Sequence
  Description of Artificial Sequence: Synthetic oligonucleotide
cuuucacccggaacaagcc

SEQ ID NO: 821742 - RNA, 19 nt, Artificial Sequence
  Description of Artificial Sequence: Synthetic oligonucleotide
augggguuugucucugaac

SEQ ID NO: 821743 - RNA, 19 nt, Artificial Sequence
  Description of Artificial Sequence: Synthetic oligonucleotide
uauaagacucggucugugu

SEQ ID NO: 821744 - RNA, 19 nt, Artificial Sequence
  Description of Artificial Sequence: Synthetic oligonucleotide
cuuguaggaugggagaaag

SEQ ID NO: 821745 - RNA, 19 nt, Artificial Sequence
  Description of Artificial Sequence: Synthetic oligonucleotide
acaguucucggucaaacuu

SEQ ID NO: 821746 - RNA, 19 nt, Artificial Sequence
  Description of Artificial Sequence: Synthetic oligonucleotide
ugagauccgucuuuuaauu

SEQ ID NO: 821747 - RNA, 19 nt, Artificial Sequence
  Description of Artificial Sequence: Synthetic oligonucleotide
gucccugcgaauaaacagg

SEQ ID NO: 821748 - RNA, 19 nt, Artificial Sequence
  Description of Artificial Sequence: Synthetic oligonucleotide
uguaggaagguguccucug

SEQ ID NO: 821749 - RNA, 19 nt, Artificial Sequence
  Description of Artificial Sequence: Synthetic oligonucleotide
acauacaaguccugagugu

SEQ ID NO: 821750 - RNA, 19 nt, Artificial Sequence
  Description of Artificial Sequence: Synthetic oligonucleotide
guacuugucugacuucaag

SEQ ID NO: 821751 - RNA, 19 nt, Artificial Sequence
  Description of Artificial Sequence: Synthetic oligonucleotide
ucugcuccuagcagggccc

SEQ ID NO: 821752 - RNA, 19 nt, Artificial Sequence
  Description of Artificial Sequence: Synthetic oligonucleotide
agcaugcaaacuugccaac

SEQ ID NO: 821753 - RNA, 19 nt, Artificial Sequence
  Description of Artificial Sequence: Synthetic oligonucleotide
caucuccagagguaaagug

SEQ ID NO: 821754 - RNA, 19 nt, Artificial Sequence
  Description of Artificial Sequence: Synthetic oligonucleotide
acucccgccugucagagca

SEQ ID NO: 821755 - RNA, 19 nt, Artificial Sequence
  Description of Artificial Sequence: Synthetic oligonucleotide
uuuggaagcugucccugga

SEQ ID NO: 821756 - RNA, 19 nt, Artificial Sequence
  Description of Artificial Sequence: Synthetic oligonucleotide
uuucacccggaacaagcca

SEQ ID NO: 821757 - RNA, 19 nt, Artificial Sequence
  Description of Artificial Sequence: Synthetic oligonucleotide
aggcggaaaguugaaaguc

SEQ ID NO: 821758 - RNA, 19 nt, Artificial Sequence
  Description of Artificial Sequence: Synthetic oligonucleotide
agcacucgaccucugagca

SEQ ID NO: 821759 - RNA, 19 nt, Artificial Sequence
  Description of Artificial Sequence: Synthetic oligonucleotide
ugcguguaguuacugugga

SEQ ID NO: 821760 - RNA, 19 nt, Artificial Sequence
  Description of Artificial Sequence: Synthetic oligonucleotide
gguaaagugagacgugaug

SEQ ID NO: 821761 - RNA, 19 nt, Artificial Sequence
  Description of Artificial Sequence: Synthetic oligonucleotide
ggucccugcgaauaaacag

SEQ ID NO: 821762 - RNA, 19 nt, Artificial Sequence
  Description of Artificial Sequence: Synthetic oligonucleotide
caugcgcugcugaugacag

SEQ ID NO: 821763 - RNA, 19 nt, Artificial Sequence
  Description of Artificial Sequence: Synthetic oligonucleotide
ggcaccaaagaacaagccc

SEQ ID NO: 821764 - RNA, 19 nt, Artificial Sequence
  Description of Artificial Sequence: Synthetic oligonucleotide
auaagacucggucugugua

SEQ ID NO: 821765 - RNA, 19 nt, Artificial Sequence
  Description of Artificial Sequence: Synthetic oligonucleotide
agucagcgugcucaggguc

SEQ ID NO: 821766 - RNA, 19 nt, Artificial Sequence
  Description of Artificial Sequence: Synthetic oligonucleotide
acucguguugucaaggaug

SEQ ID NO: 821767 - RNA, 19 nt, Artificial Sequence
  Description of Artificial Sequence: Synthetic oligonucleotide
gagcacucgaccucugagc

SEQ ID NO: 821768 - RNA, 19 nt, Artificial Sequence
  Description of Artificial Sequence: Synthetic oligonucleotide
cucggucuguguaggaagg

SEQ ID NO: 821769 - RNA, 19 nt, Artificial Sequence
  Description of Artificial Sequence: Synthetic oligonucleotide
agaugucacccuuguggcg

SEQ ID NO: 821770 - RNA, 19 nt, Artificial Sequence
  Description of Artificial Sequence: Synthetic oligonucleotide
agacgugaugaagaggaag

SEQ ID NO: 821771 - RNA, 19 nt, Artificial Sequence
  Description of Artificial Sequence: Synthetic oligonucleotide
ugacuuggacggcauaguc

SEQ ID NO: 821772 - RNA, 19 nt, Artificial Sequence
  Description of Artificial Sequence: Synthetic oligonucleotide
cauagucuggaccuggcca

SEQ ID NO: 821773 - RNA, 19 nt, Artificial Sequence
  Description of Artificial Sequence: Synthetic oligonucleotide
accagaugaggucccugcg

SEQ ID NO: 821774 - RNA, 19 nt, Artificial Sequence
  Description of Artificial Sequence: Synthetic oligonucleotide
aacucguguugucaaggau

SEQ ID NO: 821775 - RNA, 19 nt, Artificial Sequence
  Description of Artificial Sequence: Synthetic oligonucleotide
auaagacuucccucuagau

SEQ ID NO: 821776 - RNA, 19 nt, Artificial Sequence
  Description of Artificial Sequence: Synthetic oligonucleotide
caggagugccagcacaucc

SEQ ID NO: 821777 - RNA, 19 nt, Artificial Sequence
  Description of Artificial Sequence: Synthetic oligonucleotide
ccugcgaauaaacagggac

SEQ ID NO: 821778 - RNA, 19 nt, Artificial Sequence
  Description of Artificial Sequence: Synthetic oligonucleotide
ggucuuagggaucuccugc

SEQ ID NO: 821779 - RNA, 19 nt, Artificial Sequence
  Description of Artificial Sequence: Synthetic oligonucleotide
gacccuuucuucaucuccc

SEQ ID NO: 821780 - RNA, 19 nt, Artificial Sequence
  Description of Artificial Sequence: Synthetic oligonucleotide
uucaugggacagaugucac

SEQ ID NO: 821781 - RNA, 19 nt, Artificial Sequence
  Description of Artificial Sequence: Synthetic oligonucleotide
agugcagacagcacuggag

SEQ ID NO: 821782 - RNA, 19 nt, Artificial Sequence
  Description of Artificial Sequence: Synthetic oligonucleotide
ggucaaacuugccagcagc

SEQ ID NO: 821783 - RNA, 19 nt, Artificial Sequence
  Description of Artificial Sequence: Synthetic oligonucleotide
cugcgaauaaacagggaca

SEQ ID NO: 821784 - RNA, 19 nt, Artificial Sequence
  Description of Artificial Sequence: Synthetic oligonucleotide
gcuaaugggauguugucuc

SEQ ID NO: 821785 - RNA, 19 nt, Artificial Sequence
  Description of Artificial Sequence: Synthetic oligonucleotide
uggucuuagggaucuccug

SEQ ID NO: 821786 - RNA, 19 nt, Artificial Sequence
  Description of Artificial Sequence: Synthetic oligonucleotide
cauaagacuucccucuaga

SEQ ID NO: 821787 - RNA, 19 nt, Artificial Sequence
  Description of Artificial Sequence: Synthetic oligonucleotide
gacggcauagucuggaccu

SEQ ID NO: 821788 - RNA, 19 nt, Artificial Sequence
  Description of Artificial Sequence: Synthetic oligonucleotide
uagggauuugugucuggca

SEQ ID NO: 821789 - RNA, 19 nt, Artificial Sequence
  Description of Artificial Sequence: Synthetic oligonucleotide
acauacugagggcccagug

SEQ ID NO: 821790 - RNA, 19 nt, Artificial Sequence
  Description of Artificial Sequence: Synthetic oligonucleotide
gagauccgucuuuuaauuc

SEQ ID NO: 821791 - RNA, 19 nt, Artificial Sequence
  Description of Artificial Sequence: Synthetic oligonucleotide
auagcuccggggcuccggg

SEQ ID NO: 821792 - RNA, 19 nt, Artificial Sequence
  Description of Artificial Sequence: Synthetic oligonucleotide
cucugggagguaaguaagc

SEQ ID NO: 821793 - RNA, 19 nt, Artificial Sequence
  Description of Artificial Sequence: Synthetic oligonucleotide
acagucacuccacacggau

SEQ ID NO: 821794 - RNA, 19 nt, Artificial Sequence
  Description of Artificial Sequence: Synthetic oligonucleotide
gcuuuuguauaagacucgg

SEQ ID NO: 821795 - RNA, 19 nt, Artificial Sequence
  Description of Artificial Sequence: Synthetic oligonucleotide
cucgguggcugguagggag

SEQ ID NO: 821796 - RNA, 19 nt, Artificial Sequence
  Description of Artificial Sequence: Synthetic oligonucleotide
uggaugguucugcuguagu

SEQ ID NO: 821797 - RNA, 19 nt, Artificial Sequence
  Description of Artificial Sequence: Synthetic oligonucleotide
aaguacaguucucggucaa

SEQ ID NO: 821798 - RNA, 19 nt, Artificial Sequence
  Description of Artificial Sequence: Synthetic oligonucleotide
uguauaagacucggucugu

SEQ ID NO: 821799 - RNA, 19 nt, Artificial Sequence
  Description of Artificial Sequence: Synthetic oligonucleotide
ugcugaugacagcaacaca

SEQ ID NO: 821800 - RNA, 19 nt, Artificial Sequence
  Description of Artificial Sequence: Synthetic oligonucleotide
augcguguaguuacugugg

SEQ ID NO: 821801 - RNA, 19 nt, Artificial Sequence
  Description of Artificial Sequence: Synthetic oligonucleotide
agcaacucguguugucaag

SEQ ID NO: 821802 - RNA, 19 nt, Artificial Sequence
  Description of Artificial Sequence: Synthetic oligonucleotide
ugacuagccuggucugcgg

SEQ ID NO: 821803 - RNA, 19 nt, Artificial Sequence
  Description of Artificial Sequence: Synthetic oligonucleotide
agcuaaugggauguugucu

SEQ ID NO: 821804 - RNA, 19 nt, Artificial Sequence
  Description of Artificial Sequence: Synthetic oligonucleotide
uccgucuuuuaauuccuau

SEQ ID NO: 821805 - RNA, 19 nt, Artificial Sequence
  Description of Artificial Sequence: Synthetic oligonucleotide
gaugggagaaaguggauuu

SEQ ID NO: 821806 - RNA, 19 nt, Artificial Sequence
  Description of Artificial Sequence: Synthetic oligonucleotide
ugucugacuucaagauaca

SEQ ID NO: 821807 - RNA, 19 nt, Artificial Sequence
  Description of Artificial Sequence: Synthetic oligonucleotide
uguggcggcuuuuguauaa

SEQ ID NO: 821808 - RNA, 19 nt, Artificial Sequence
  Description of Artificial Sequence: Synthetic oligonucleotide
gugugugcagcaugcaaac

SEQ ID NO: 821809 - RNA, 19 nt, Artificial Sequence
  Description of Artificial Sequence: Synthetic oligonucleotide
ucugcggagcuuguaguca

SEQ ID NO: 821810 - RNA, 19 nt, Artificial Sequence
  Description of Artificial Sequence: Synthetic oligonucleotide
cuugaucccagggcaagag

SEQ ID NO: 821811 - RNA, 19 nt, Artificial Sequence
  Description of Artificial Sequence: Synthetic oligonucleotide
ucagaggucaccggaugga

SEQ ID NO: 821812 - RNA, 19 nt, Artificial Sequence
  Description of Artificial Sequence: Synthetic oligonucleotide
uagaggaccccaugcgcug

SEQ ID NO: 821813 - RNA, 19 nt, Artificial Sequence
  Description of Artificial Sequence: Synthetic oligonucleotide
uuuugcuggaaugcugaaa

SEQ ID NO: 821814 - RNA, 19 nt, Artificial Sequence
  Description of Artificial Sequence: Synthetic oligonucleotide
uggaccuggccaguccucg

SEQ ID NO: 821815 - RNA, 19 nt, Artificial Sequence
  Description of Artificial Sequence: Synthetic oligonucleotide
ggaggcuauguugaggucc

SEQ ID NO: 821816 - RNA, 19 nt, Artificial Sequence
  Description of Artificial Sequence: Synthetic oligonucleotide
uuguaggaugggagaaagu

SEQ ID NO: 821817 - RNA, 19 nt, Artificial Sequence
  Description of Artificial Sequence: Synthetic oligonucleotide
cuccgugugacguaggcaa

SEQ ID NO: 821818 - RNA, 19 nt, Artificial Sequence
  Description of Artificial Sequence: Synthetic oligonucleotide
cuccaaugacauacaaguc

SEQ ID NO: 821819 - RNA, 19 nt, Artificial Sequence
  Description of Artificial Sequence: Synthetic oligonucleotide
ugcugaaaggaggcauggg

SEQ ID NO: 821820 - RNA, 19 nt, Artificial Sequence
  Description of Artificial Sequence: Synthetic oligonucleotide
ucuuagggaucuccugcaa

SEQ ID NO: 821821 - RNA, 19 nt, Artificial Sequence
  Description of Artificial Sequence: Synthetic oligonucleotide
acguaggcaagcugacuug

SEQ ID NO: 821822 - RNA, 19 nt, Artificial Sequence
  Description of Artificial Sequence: Synthetic oligonucleotide
aguuacuguggagcacucg

SEQ ID NO: 821823 - RNA, 19 nt, Artificial Sequence
  Description of Artificial Sequence: Synthetic oligonucleotide
ccauaguuuauuagacccc

SEQ ID NO: 821824 - RNA, 19 nt, Artificial Sequence
  Description of Artificial Sequence: Synthetic oligonucleotide
cugcuuagaggugcugucg

SEQ ID NO: 821825 - RNA, 19 nt, Artificial Sequence
  Description of Artificial Sequence: Synthetic oligonucleotide
ugcuugguuuugcuggaau

SEQ ID NO: 821826 - RNA, 19 nt, Artificial Sequence
  Description of Artificial Sequence: Synthetic oligonucleotide
uccgugugacguaggcaag

SEQ ID NO: 821827 - RNA, 19 nt, Artificial Sequence
  Description of Artificial Sequence: Synthetic oligonucleotide
cugcacuagagcgguaggg

SEQ ID NO: 821828 - RNA, 19 nt, Artificial Sequence
  Description of Artificial Sequence: Synthetic oligonucleotide
aguaagcaacucguguugu

SEQ ID NO: 821829 - RNA, 19 nt, Artificial Sequence
  Description of Artificial Sequence: Synthetic oligonucleotide
guagucagccucagugggg

SEQ ID NO: 821830 - RNA, 19 nt, Artificial Sequence
  Description of Artificial Sequence: Synthetic oligonucleotide
cugaucauuccaggaagac

SEQ ID NO: 821831 - RNA, 19 nt, Artificial Sequence
  Description of Artificial Sequence: Synthetic oligonucleotide
ugacauccccugcacuaga

SEQ ID NO: 821832 - RNA, 19 nt, Artificial Sequence
  Description of Artificial Sequence: Synthetic oligonucleotide
agcuacucguccaccacuc

SEQ ID NO: 821833 - RNA, 19 nt, Artificial Sequence
  Description of Artificial Sequence: Synthetic oligonucleotide
guauaagacucggucugug

SEQ ID NO: 821834 - RNA, 19 nt, Artificial Sequence
  Description of Artificial Sequence: Synthetic oligonucleotide
agccucuagccauaguuua

SEQ ID NO: 821835 - RNA, 19 nt, Artificial Sequence
  Description of Artificial Sequence: Synthetic oligonucleotide
aucugggacacgaugcgug

SEQ ID NO: 821836 - RNA, 19 nt, Artificial Sequence
  Description of Artificial Sequence: Synthetic oligonucleotide
gauagcuccggggcuccgg

SEQ ID NO: 821837 - RNA, 19 nt, Artificial Sequence
  Description of Artificial Sequence: Synthetic oligonucleotide
aagccauacacaggacggu

SEQ ID NO: 821838 - RNA, 19 nt, Artificial Sequence
  Description of Artificial Sequence: Synthetic oligonucleotide
cucgaagccccugaagaug

SEQ ID NO: 821839 - RNA, 19 nt, Artificial Sequence
  Description of Artificial Sequence: Synthetic oligonucleotide
gugagacgugaugaagagg

SEQ ID NO: 821840 - RNA, 19 nt, Artificial Sequence
  Description of Artificial Sequence: Synthetic oligonucleotide
ucccucuagauagcuccgg

SEQ ID NO: 821841 - RNA, 19 nt, Artificial Sequence
  Description of Artificial Sequence: Synthetic oligonucleotide
cuagauagcuccggggcuc

SEQ ID NO: 821842 - RNA, 19 nt, Artificial Sequence
  Description of Artificial Sequence: Synthetic oligonucleotide
ggagcacucgaccucugag

SEQ ID NO: 821843 - RNA, 19 nt, Artificial Sequence
  Description of Artificial Sequence: Synthetic oligonucleotide
ggaaguacccagcucaucu

SEQ ID NO: 821844 - RNA, 19 nt, Artificial Sequence
  Description of Artificial Sequence: Synthetic oligonucleotide
agauggacccuuucuucau

SEQ ID NO: 821845 - RNA, 19 nt, Artificial Sequence
  Description of Artificial Sequence: Synthetic oligonucleotide
ugggacagaugucacccuu

SEQ ID NO: 821846 - RNA, 19 nt, Artificial Sequence
  Description of Artificial Sequence: Synthetic oligonucleotide
acuagagcgguagggauuu

SEQ ID NO: 821847 - RNA, 19 nt, Artificial Sequence
  Description of Artificial Sequence: Synthetic oligonucleotide
uuuugagauccgucuuuua

SEQ ID NO: 821848 - RNA, 19 nt, Artificial Sequence
  Description of Artificial Sequence: Synthetic oligonucleotide
cguguaguuacuguggagc

SEQ ID NO: 821849 - RNA, 19 nt, Artificial Sequence
  Description of Artificial Sequence: Synthetic oligonucleotide
guaagcaacucguguuguc

SEQ ID NO: 821850 - RNA, 19 nt, Artificial Sequence
  Description of Artificial Sequence: Synthetic oligonucleotide
agaggaccccaugcgcugc

SEQ ID NO: 821851 - RNA, 19 nt, Artificial Sequence
  Description of Artificial Sequence: Synthetic oligonucleotide
ggcuuuuguauaagacucg

SEQ ID NO: 821852 - RNA, 19 nt, Artificial Sequence
  Description of Artificial Sequence: Synthetic oligonucleotide
cuuggacggcauagucugg

SEQ ID NO: 821853 - RNA, 19 nt, Artificial Sequence
  Description of Artificial Sequence: Synthetic oligonucleotide
gcaacucguguugucaagg

SEQ ID NO: 821854 - RNA, 19 nt, Artificial Sequence
  Description of Artificial Sequence: Synthetic oligonucleotide
auacaaguccugaguguag

SEQ ID NO: 821855 - RNA, 19 nt, Artificial Sequence
  Description of Artificial Sequence: Synthetic oligonucleotide
gacguaggcaagcugacuu

SEQ ID NO: 821856 - RNA, 19 nt, Artificial Sequence
  Description of Artificial Sequence: Synthetic oligonucleotide
caaguacaguucucgguca

SEQ ID NO: 821857 - RNA, 19 nt, Artificial Sequence
  Description of Artificial Sequence: Synthetic oligonucleotide
cagcuaaugggauguuguc

SEQ ID NO: 821858 - RNA, 19 nt, Artificial Sequence
  Description of Artificial Sequence: Synthetic oligonucleotide
uagucagcgugcucagggu

SEQ ID NO: 821859 - RNA, 19 nt, Artificial Sequence
  Description of Artificial Sequence: Synthetic oligonucleotide
cauacaaguccugagugua

SEQ ID NO: 821860 - RNA, 19 nt, Artificial Sequence
  Description of Artificial Sequence: Synthetic oligonucleotide
gacacgaugcguguaguua

SEQ ID NO: 821861 - RNA, 19 nt, Artificial Sequence
  Description of Artificial Sequence: Synthetic oligonucleotide
gugcugaucauuccaggaa

SEQ ID NO: 821862 - RNA, 19 nt, Artificial Sequence
  Description of Artificial Sequence: Synthetic oligonucleotide
agccauacacaggacggug

SEQ ID NO: 821863 - RNA, 19 nt, Artificial Sequence
  Description of Artificial Sequence: Synthetic oligonucleotide
cugaaaggaggcauggggu

SEQ ID NO: 821864 - RNA, 19 nt, Artificial Sequence
  Description of Artificial Sequence: Synthetic oligonucleotide
ggcggaaaguugaaagucc

SEQ ID NO: 821865 - RNA, 19 nt, Artificial Sequence
  Description of Artificial Sequence: Synthetic oligonucleotide
gcaagaggaguacuucaug

SEQ ID NO: 821866 - RNA, 19 nt, Artificial Sequence
  Description of Artificial Sequence: Synthetic oligonucleotide
gggguugucucucugugca

SEQ ID NO: 821867 - RNA, 19 nt, Artificial Sequence
  Description of Artificial Sequence: Synthetic oligonucleotide
uguuccagguagccacaaa

SEQ ID NO: 821868 - RNA, 19 nt, Artificial Sequence
  Description of Artificial Sequence: Synthetic oligonucleotide
agagcgguagggauuugug

SEQ ID NO: 821869 - RNA, 19 nt, Artificial Sequence
  Description of Artificial Sequence: Synthetic oligonucleotide
guaguuacuguggagcacu

SEQ ID NO: 821870 - RNA, 19 nt, Artificial Sequence
  Description of Artificial Sequence: Synthetic oligonucleotide
uagagcgguagggauuugu

SEQ ID NO: 821871 - RNA, 19 nt, Artificial Sequence
  Description of Artificial Sequence: Synthetic oligonucleotide
augcgcugcugaugacagc

SEQ ID NO: 821872 - RNA, 19 nt, Artificial Sequence
  Description of Artificial Sequence: Synthetic oligonucleotide
ggaggugcugaucauucca

SEQ ID NO: 821873 - RNA, 19 nt, Artificial Sequence
  Description of Artificial Sequence: Synthetic oligonucleotide
ugggaaguacccagcucau

SEQ ID NO: 821874 - RNA, 19 nt, Artificial Sequence
  Description of Artificial Sequence: Synthetic oligonucleotide
gucagcgugcucagggucc

SEQ ID NO: 821875 - RNA, 19 nt, Artificial Sequence
  Description of Artificial Sequence: Synthetic oligonucleotide
gacgugucucccacucccg

SEQ ID NO: 821876 - RNA, 19 nt, Artificial Sequence
  Description of Artificial Sequence: Synthetic oligonucleotide
ccucuagauagcuccgggg

SEQ ID NO: 821877 - RNA, 19 nt, Artificial Sequence
  Description of Artificial Sequence: Synthetic oligonucleotide
cuugucugacuucaagaua

SEQ ID NO: 821878 - RNA, 19 nt, Artificial Sequence
  Description of Artificial Sequence: Synthetic oligonucleotide
ggaaggcuuccacagcuac

SEQ ID NO: 821879 - RNA, 19 nt, Artificial Sequence
  Description of Artificial Sequence: Synthetic oligonucleotide
gaagccccugaagauggac

SEQ ID NO: 821880 - RNA, 19 nt, Artificial Sequence
  Description of Artificial Sequence: Synthetic oligonucleotide
aggcaugggguuugucucu

SEQ ID NO: 821881 - RNA, 19 nt, Artificial Sequence
  Description of Artificial Sequence: Synthetic oligonucleotide
ggaugcacgucagagguca

SEQ ID NO: 821882 - RNA, 19 nt, Artificial Sequence
  Description of Artificial Sequence: Synthetic oligonucleotide
uggcccuccuaaggaaagg

SEQ ID NO: 821883 - RNA, 19 nt, Artificial Sequence
  Description of Artificial Sequence: Synthetic oligonucleotide
aagguguccucugcuuaga

SEQ ID NO: 821884 - RNA, 19 nt, Artificial Sequence
  Description of Artificial Sequence: Synthetic oligonucleotide
ggaugguucugcuguaguc

SEQ ID NO: 821885 - RNA, 19 nt, Artificial Sequence
  Description of Artificial Sequence: Synthetic oligonucleotide
gaaccagaugaggucccug

SEQ ID NO: 821886 - RNA, 19 nt, Artificial Sequence
  Description of Artificial Sequence: Synthetic oligonucleotide
ugcggagcuuguagucagc

SEQ ID NO: 821887 - RNA, 19 nt, Artificial Sequence
  Description of Artificial Sequence: Synthetic oligonucleotide
cacgucagaggucaccgga

SEQ ID NO: 821888 - RNA, 19 nt, Artificial Sequence
  Description of Artificial Sequence: Synthetic oligonucleotide
gucugcggagcuuguaguc

SEQ ID NO: 821889 - RNA, 19 nt, Artificial Sequence
  Description of Artificial Sequence: Synthetic oligonucleotide
agccauguuccggucuggg

SEQ ID NO: 821890 - RNA, 19 nt, Artificial Sequence
  Description of Artificial Sequence: Synthetic oligonucleotide
cagagcagcccuccugaac

SEQ ID NO: 821891 - RNA, 19 nt, Artificial Sequence
  Description of Artificial Sequence: Synthetic oligonucleotide
ggacggcauagucuggacc

SEQ ID NO: 821892 - RNA, 19 nt, Artificial Sequence
  Description of Artificial Sequence: Synthetic oligonucleotide
gggguuugucucugaaccc

SEQ ID NO: 821893 - RNA, 19 nt, Artificial Sequence
  Description of Artificial Sequence: Synthetic oligonucleotide
caacucguguugucaagga

SEQ ID NO: 821894 - RNA, 19 nt, Artificial Sequence
  Description of Artificial Sequence: Synthetic oligonucleotide
cacagcuacucguccacca

SEQ ID NO: 821895 - RNA, 19 nt, Artificial Sequence
  Description of Artificial Sequence: Synthetic oligonucleotide
acuuguaggaugggagaaa

SEQ ID NO: 821896 - RNA, 19 nt, Artificial Sequence
  Description of Artificial Sequence: Synthetic oligonucleotide
ucucucccuggccucacuu

SEQ ID NO: 821897 - RNA, 19 nt, Artificial Sequence
  Description of Artificial Sequence: Synthetic oligonucleotide
cugggagguaaguaagcaa

SEQ ID NO: 821898 - RNA, 19 nt, Artificial Sequence
  Description of Artificial Sequence: Synthetic oligonucleotide
gugugacguaggcaagcug

SEQ ID NO: 821899 - RNA, 19 nt, Artificial Sequence
  Description of Artificial Sequence: Synthetic oligonucleotide
acccggaacaagccauaca

SEQ ID NO: 821900 - RNA, 19 nt, Artificial Sequence
  Description of Artificial Sequence: Synthetic oligonucleotide
ugacguaggcaagcugacu

SEQ ID NO: 821901 - RNA, 19 nt, Artificial Sequence
  Description of Artificial Sequence: Synthetic oligonucleotide
gcggaaaguugaaaguccc

SEQ ID NO: 821902 - RNA, 19 nt, Artificial Sequence
  Description of Artificial Sequence: Synthetic oligonucleotide
ccgucuuuuaauuccuauc

SEQ ID NO: 821903 - RNA, 19 nt, Artificial Sequence
  Description of Artificial Sequence: Synthetic oligonucleotide
cagacgugucucccacucc

SEQ ID NO: 821904 - RNA, 19 nt, Artificial Sequence
  Description of Artificial Sequence: Synthetic oligonucleotide
cacucgaccucugagcaga

SEQ ID NO: 821905 - RNA, 19 nt, Artificial Sequence
  Description of Artificial Sequence: Synthetic oligonucleotide
aggcucgguggcugguagg

SEQ ID NO: 821906 - RNA, 19 nt, Artificial Sequence
  Description of Artificial Sequence: Synthetic oligonucleotide
cauacugagggcccagugu

SEQ ID NO: 821907 - RNA, 19 nt, Artificial Sequence
  Description of Artificial Sequence: Synthetic oligonucleotide
uccucucugggagguaagu

SEQ ID NO: 821908 - RNA, 19 nt, Artificial Sequence
  Description of Artificial Sequence: Synthetic oligonucleotide
gccauacacaggacggugg

SEQ ID NO: 821909 - RNA, 19 nt, Artificial Sequence
  Description of Artificial Sequence: Synthetic oligonucleotide
guuccggucugggaaguac

SEQ ID NO: 821910 - RNA, 19 nt, Artificial Sequence
  Description of Artificial Sequence: Synthetic oligonucleotide
agaggucaccggauggaug

SEQ ID NO: 821911 - RNA, 19 nt, Artificial Sequence
  Description of Artificial Sequence: Synthetic oligonucleotide
gucuguguaggaagguguc

SEQ ID NO: 821912 - RNA, 19 nt, Artificial Sequence
  Description of Artificial Sequence: Synthetic oligonucleotide
gagcgguagggauuugugu

SEQ ID NO: 821913 - RNA, 19 nt, Artificial Sequence
  Description of Artificial Sequence: Synthetic oligonucleotide
ccaacauggcaagaggcac

SEQ ID NO: 821914 - RNA, 19 nt, Artificial Sequence
  Description of Artificial Sequence: Synthetic oligonucleotide
ggcccuccuaaggaaaggg

SEQ ID NO: 821915 - RNA, 19 nt, Artificial Sequence
  Description of Artificial Sequence: Synthetic oligonucleotide
gcauagucuggaccuggcc

SEQ ID NO: 821916 - RNA, 19 nt, Artificial Sequence
  Description of Artificial Sequence: Synthetic oligonucleotide
ggcucgguggcugguaggg

SEQ ID NO: 821917 - RNA, 19 nt, Artificial Sequence
  Description of Artificial Sequence: Synthetic oligonucleotide
ggugaagcugacgcccagg

SEQ ID NO: 821918 - RNA, 19 nt, Artificial Sequence
  Description of Artificial Sequence: Synthetic oligonucleotide
uggacccuuucuucaucuc

SEQ ID NO: 821919 - RNA, 19 nt, Artificial Sequence
  Description of Artificial Sequence: Synthetic oligonucleotide
ugcagacgugucucccacu

SEQ ID NO: 821920 - RNA, 19 nt, Artificial Sequence
  Description of Artificial Sequence: Synthetic oligonucleotide
gugcagcaugcaaacuugc

SEQ ID NO: 821921 - RNA, 19 nt, Artificial Sequence
  Description of Artificial Sequence: Synthetic oligonucleotide
ggcacauuccggggcaggg

SEQ ID NO: 821922 - RNA, 19 nt, Artificial Sequence
  Description of Artificial Sequence: Synthetic oligonucleotide
uuguggcggcuuuuguaua

SEQ ID NO: 821923 - RNA, 19 nt, Artificial Sequence
  Description of Artificial Sequence: Synthetic oligonucleotide
guuuugcuggaaugcugaa

SEQ ID NO: 821924 - RNA, 19 nt, Artificial Sequence
  Description of Artificial Sequence: Synthetic oligonucleotide
gucaaggaugcacgucaga

SEQ ID NO: 821925 - RNA, 19 nt, Artificial Sequence
  Description of Artificial Sequence: Synthetic oligonucleotide
gcagacgugucucccacuc

SEQ ID NO: 821926 - RNA, 19 nt, Artificial Sequence
  Description of Artificial Sequence: Synthetic oligonucleotide
ugccuccgugugacguagg

SEQ ID NO: 821927 - RNA, 19 nt, Artificial Sequence
  Description of Artificial Sequence: Synthetic oligonucleotide
gacucggucuguguaggaa

SEQ ID NO: 821928 - RNA, 19 nt, Artificial Sequence
  Description of Artificial Sequence: Synthetic oligonucleotide
gugacguaggcaagcugac

SEQ ID NO: 821929 - RNA, 19 nt, Artificial Sequence
  Description of Artificial Sequence: Synthetic oligonucleotide
caagcccaaucucuuucca

SEQ ID NO: 821930 - RNA, 19 nt, Artificial Sequence
  Description of Artificial Sequence: Synthetic oligonucleotide
ucggucuguguaggaaggu

SEQ ID NO: 821931 - RNA, 19 nt, Artificial Sequence
  Description of Artificial Sequence: Synthetic oligonucleotide
aggugccuccgugugacgu

SEQ ID NO: 821932 - RNA, 19 nt, Artificial Sequence
  Description of Artificial Sequence: Synthetic oligonucleotide
aggaugcacgucagagguc

SEQ ID NO: 821933 - RNA, 19 nt, Artificial Sequence
  Description of Artificial Sequence: Synthetic oligonucleotide
cccucuagauagcuccggg

SEQ ID NO: 821934 - RNA, 19 nt, Artificial Sequence
  Description of Artificial Sequence: Synthetic oligonucleotide
ucccaaugucaaacuugua

SEQ ID NO: 821935 - RNA, 19 nt, Artificial Sequence
  Description of Artificial Sequence: Synthetic oligonucleotide
guggcggcuuuuguauaag

SEQ ID NO: 821936 - RNA, 19 nt, Artificial Sequence
  Description of Artificial Sequence: Synthetic oligonucleotide
gcguguaguuacuguggag

SEQ ID NO: 821937 - RNA, 19 nt, Artificial Sequence
  Description of Artificial Sequence: Synthetic oligonucleotide
caugggguuugucucugaa

SEQ ID NO: 821938 - RNA, 19 nt, Artificial Sequence
  Description of Artificial Sequence: Synthetic oligonucleotide
ucccgccugucagagcagc

SEQ ID NO: 821939 - RNA, 19 nt, Artificial Sequence
  Description of Artificial Sequence: Synthetic oligonucleotide
gugccuccgugugacguag

SEQ ID NO: 821940 - RNA, 19 nt, Artificial Sequence
  Description of Artificial Sequence: Synthetic oligonucleotide
gcugguagggagcccggug

SEQ ID NO: 821941 - RNA, 19 nt, Artificial Sequence
  Description of Artificial Sequence: Synthetic oligonucleotide
ggcuauguugagguccaug

SEQ ID NO: 821942 - RNA, 19 nt, Artificial Sequence
  Description of Artificial Sequence: Synthetic oligonucleotide
ccaccacucaggcggaaag

SEQ ID NO: 821943 - RNA, 19 nt, Artificial Sequence
  Description of Artificial Sequence: Synthetic oligonucleotide
gacagucacuccacacgga

SEQ ID NO: 821944 - RNA, 19 nt, Artificial Sequence
  Description of Artificial Sequence: Synthetic oligonucleotide
cuaaugggauguugucucu

SEQ ID NO: 821945 - RNA, 19 nt, Artificial Sequence
  Description of Artificial Sequence: Synthetic oligonucleotide
caggacgguggucugaagu

SEQ ID NO: 821946 - RNA, 19 nt, Artificial Sequence
  Description of Artificial Sequence: Synthetic oligonucleotide
cuguguaggaagguguccu

SEQ ID NO: 821947 - RNA, 19 nt, Artificial Sequence
  Description of Artificial Sequence: Synthetic oligonucleotide
ugcuccuagcagggccccg

SEQ ID NO: 821948 - RNA, 19 nt, Artificial Sequence
  Description of Artificial Sequence: Synthetic oligonucleotide
gaacaagcccaaucucuuu

SEQ ID NO: 821949 - RNA, 19 nt, Artificial Sequence
  Description of Artificial Sequence: Synthetic oligonucleotide
gucucugaacccugaggcu

SEQ ID NO: 821950 - RNA, 19 nt, Artificial Sequence
  Description of Artificial Sequence: Synthetic oligonucleotide
ccugcacuagagcgguagg

SEQ ID NO: 821951 - RNA, 19 nt, Artificial Sequence
  Description of Artificial Sequence: Synthetic oligonucleotide
cugggucuugcuucaggaa

SEQ ID NO: 821952 - RNA, 19 nt, Artificial Sequence
  Description of Artificial Sequence: Synthetic oligonucleotide
gggacagaugucacccuug

SEQ ID NO: 821953 - RNA, 19 nt, Artificial Sequence
  Description of Artificial Sequence: Synthetic oligonucleotide
caugcaaacuugccaacuu

SEQ ID NO: 821954 - RNA, 19 nt, Artificial Sequence
  Description of Artificial Sequence: Synthetic oligonucleotide
accccaugcgcugcugaug

SEQ ID NO: 821955 - RNA, 19 nt, Artificial Sequence
  Description of Artificial Sequence: Synthetic oligonucleotide
cguaggcaagcugacuugg

SEQ ID NO: 821956 - RNA, 19 nt, Artificial Sequence
  Description of Artificial Sequence: Synthetic oligonucleotide
cacauuccggggcagggcu

SEQ ID NO: 821957 - RNA, 19 nt, Artificial Sequence
  Description of Artificial Sequence: Synthetic oligonucleotide
acggcauagucuggaccug

SEQ ID NO: 821958 - RNA, 19 nt, Artificial Sequence
  Description of Artificial Sequence: Synthetic oligonucleotide
ucguguugucaaggaugca

SEQ ID NO: 821959 - RNA, 19 nt, Artificial Sequence
  Description of Artificial Sequence: Synthetic oligonucleotide
ccucacuuucacccggaac

SEQ ID NO: 821960 - RNA, 19 nt, Artificial Sequence
  Description of Artificial Sequence: Synthetic oligonucleotide
guaggcaagcugacuugga

SEQ ID NO: 821961 - RNA, 19 nt, Artificial Sequence
  Description of Artificial Sequence: Synthetic oligonucleotide
ggaaugcugaaaggaggca

SEQ ID NO: 821962 - RNA, 19 nt, Artificial Sequence
  Description of Artificial Sequence: Synthetic oligonucleotide
agauagcuccggggcuccg

SEQ ID NO: 821963 - RNA, 19 nt, Artificial Sequence
  Description of Artificial Sequence: Synthetic oligonucleotide
ccccaaaccagaacaccuc

SEQ ID NO: 821964 - RNA, 19 nt, Artificial Sequence
  Description of Artificial Sequence: Synthetic oligonucleotide
gcugaucauuccaggaaga

SEQ ID NO: 821965 - RNA, 19 nt, Artificial Sequence
  Description of Artificial Sequence: Synthetic oligonucleotide
gccuccgugugacguaggc

SEQ ID NO: 821966 - RNA, 19 nt, Artificial Sequence
  Description of Artificial Sequence: Synthetic oligonucleotide
gagacgugaugaagaggaa

SEQ ID NO: 821967 - RNA, 19 nt, Artificial Sequence
  Description of Artificial Sequence: Synthetic oligonucleotide
gaugcacgucagaggucac

SEQ ID NO: 821968 - RNA, 19 nt, Artificial Sequence
  Description of Artificial Sequence: Synthetic oligonucleotide
gcacucgaccucugagcag

SEQ ID NO: 821969 - RNA, 19 nt, Artificial Sequence
  Description of Artificial Sequence: Synthetic oligonucleotide
caggugccuccgugugacg

SEQ ID NO: 821970 - RNA, 19 nt, Artificial Sequence
  Description of Artificial Sequence: Synthetic oligonucleotide
acgucagaggucaccggau

SEQ ID NO: 821971 - RNA, 19 nt, Artificial Sequence
  Description of Artificial Sequence: Synthetic oligonucleotide
gcccugacuagccuggucu

SEQ ID NO: 821972 - RNA, 19 nt, Artificial Sequence
  Description of Artificial Sequence: Synthetic oligonucleotide
cccaaaccagaacaccuca

SEQ ID NO: 821973 - RNA, 19 nt, Artificial Sequence
  Description of Artificial Sequence: Synthetic oligonucleotide
ccaggugccuccgugugac

SEQ ID NO: 821974 - RNA, 19 nt, Artificial Sequence
  Description of Artificial Sequence: Synthetic oligonucleotide
cccugcacuagagcgguag

SEQ ID NO: 821975 - RNA, 19 nt, Artificial Sequence
  Description of Artificial Sequence: Synthetic oligonucleotide
aggaugggagaaaguggau

SEQ ID NO: 821976 - RNA, 19 nt, Artificial Sequence
  Description of Artificial Sequence: Synthetic oligonucleotide
ccaguacuugucugacuuc

SEQ ID NO: 821977 - RNA, 19 nt, Artificial Sequence
  Description of Artificial Sequence: Synthetic oligonucleotide
ggacagaugucacccuugu

SEQ ID NO: 821978 - RNA, 19 nt, Artificial Sequence
  Description of Artificial Sequence: Synthetic oligonucleotide
gcgaauaaacagggacaug

SEQ ID NO: 821979 - RNA, 19 nt, Artificial Sequence
  Description of Artificial Sequence: Synthetic oligonucleotide
cacucccgccugucagagc

SEQ ID NO: 821980 - RNA, 19 nt, Artificial Sequence
  Description of Artificial Sequence: Synthetic oligonucleotide
cugcuccuagcagggcccc

SEQ ID NO: 821981 - RNA, 19 nt, Artificial Sequence
  Description of Artificial Sequence: Synthetic oligonucleotide
cucccgccugucagagcag

SEQ ID NO: 821982 - RNA, 19 nt, Artificial Sequence
  Description of Artificial Sequence: Synthetic oligonucleotide
uguuccggucugggaagua

SEQ ID NO: 821983 - RNA, 19 nt, Artificial Sequence
  Description of Artificial Sequence: Synthetic oligonucleotide
cagacagcacuggagcucu

SEQ ID NO: 821984 - RNA, 19 nt, Artificial Sequence
  Description of Artificial Sequence: Synthetic oligonucleotide
ggcaugggguuugucucug

SEQ ID NO: 821985 - RNA, 19 nt, Artificial Sequence
  Description of Artificial Sequence: Synthetic oligonucleotide
gaguguagucagccucagu

SEQ ID NO: 821986 - RNA, 19 nt, Artificial Sequence
  Description of Artificial Sequence: Synthetic oligonucleotide
cacuagagcgguagggauu

SEQ ID NO: 821987 - RNA, 19 nt, Artificial Sequence
  Description of Artificial Sequence: Synthetic oligonucleotide
cucaggcggaaaguugaaa

SEQ ID NO: 821988 - RNA, 19 nt, Artificial Sequence
  Description of Artificial Sequence: Synthetic oligonucleotide
ggaucuccugcaaggaugu

SEQ ID NO: 821989 - RNA, 19 nt, Artificial Sequence
  Description of Artificial Sequence: Synthetic oligonucleotide
cacgaugcguguaguuacu

SEQ ID NO: 821990 - RNA, 19 nt, Artificial Sequence
  Description of Artificial Sequence: Synthetic oligonucleotide
ccgugugacguaggcaagc

SEQ ID NO: 821991 - RNA, 19 nt, Artificial Sequence
  Description of Artificial Sequence: Synthetic oligonucleotide
cccugacuagccuggucug

SEQ ID NO: 821992 - RNA, 19 nt, Artificial Sequence
  Description of Artificial Sequence: Synthetic oligonucleotide
ggucugcggagcuuguagu

SEQ ID NO: 821993 - RNA, 19 nt, Artificial Sequence
  Description of Artificial Sequence: Synthetic oligonucleotide
ccccaugcgcugcugauga

SEQ ID NO: 821994 - RNA, 19 nt, Artificial Sequence
  Description of Artificial Sequence: Synthetic oligonucleotide
cagcuacucguccaccacu

SEQ ID NO: 821995 - RNA, 19 nt, Artificial Sequence
  Description of Artificial Sequence: Synthetic oligonucleotide
gcgguagggauuugugucu

SEQ ID NO: 821996 - RNA, 19 nt, Artificial Sequence
  Description of Artificial Sequence: Synthetic oligonucleotide
gcccaggugccuccgugug

SEQ ID NO: 821997 - RNA, 19 nt, Artificial Sequence
  Description of Artificial Sequence: Synthetic oligonucleotide
ugcugucguagguguccuu

SEQ ID NO: 821998 - RNA, 19 nt, Artificial Sequence
  Description of Artificial Sequence: Synthetic oligonucleotide
gaccccaugcgcugcugau

SEQ ID NO: 821999 - RNA, 19 nt, Artificial Sequence
  Description of Artificial Sequence: Synthetic oligonucleotide
ggaugggagaaaguggauu

SEQ ID NO: 822000 - RNA, 19 nt, Artificial Sequence
  Description of Artificial Sequence: Synthetic oligonucleotide
gcuacucguccaccacuca

SEQ ID NO: 822001 - RNA, 19 nt, Artificial Sequence
  Description of Artificial Sequence: Synthetic oligonucleotide
ccgccugucagagcagccc

SEQ ID NO: 822002 - RNA, 19 nt, Artificial Sequence
  Description of Artificial Sequence: Synthetic oligonucleotide
auccgucuuuuaauuccua

SEQ ID NO: 822003 - RNA, 19 nt, Artificial Sequence
  Description of Artificial Sequence: Synthetic oligonucleotide
gcuuagaggugcugucgua

SEQ ID NO: 822004 - RNA, 19 nt, Artificial Sequence
  Description of Artificial Sequence: Synthetic oligonucleotide
gcacuagagcgguagggau

SEQ ID NO: 822005 - RNA, 19 nt, Artificial Sequence
  Description of Artificial Sequence: Synthetic oligonucleotide
cuagagcgguagggauuug

SEQ ID NO: 822006 - RNA, 19 nt, Artificial Sequence
  Description of Artificial Sequence: Synthetic oligonucleotide
gaggaccccaugcgcugcu

SEQ ID NO: 822007 - RNA, 19 nt, Artificial Sequence
  Description of Artificial Sequence: Synthetic oligonucleotide
gggaaguacccagcucauc

SEQ ID NO: 822008 - RNA, 19 nt, Artificial Sequence
  Description of Artificial Sequence: Synthetic oligonucleotide
gacgguggucugaagucuu

SEQ ID NO: 822009 - RNA, 19 nt, Artificial Sequence
  Description of Artificial Sequence: Synthetic oligonucleotide
ccaugcgcugcugaugaca

SEQ ID NO: 822010 - RNA, 19 nt, Artificial Sequence
  Description of Artificial Sequence: Synthetic oligonucleotide
ggugccuccgugugacgua

SEQ ID NO: 822011 - RNA, 19 nt, Artificial Sequence
  Description of Artificial Sequence: Synthetic oligonucleotide
ccacucccgccugucagag

SEQ ID NO: 822012 - RNA, 19 nt, Artificial Sequence
  Description of Artificial Sequence: Synthetic oligonucleotide
gggguggggucuguaguga

SEQ ID NO: 822013 - RNA, 19 nt, Artificial Sequence
  Description of Artificial Sequence: Synthetic oligonucleotide
ccacagcuacucguccacc

SEQ ID NO: 822014 - RNA, 19 nt, Artificial Sequence
  Description of Artificial Sequence: Synthetic oligonucleotide
ccgcuggccauaagacuuc

SEQ ID NO: 822015 - RNA, 19 nt, Artificial Sequence
  Description of Artificial Sequence: Synthetic oligonucleotide
cggucuguguaggaaggug

SEQ ID NO: 822016 - RNA, 19 nt, Artificial Sequence
  Description of Artificial Sequence: Synthetic oligonucleotide
ccauggcugguggugugug

SEQ ID NO: 822017 - RNA, 19 nt, Artificial Sequence
  Description of Artificial Sequence: Synthetic oligonucleotide
ggacgguggucugaagucu

SEQ ID NO: 822018 - RNA, 19 nt, Artificial Sequence
  Description of Artificial Sequence: Synthetic oligonucleotide
caguccucgcccacucagu

SEQ ID NO: 822019 - RNA, 19 nt, Artificial Sequence
  Description of Artificial Sequence: Synthetic oligonucleotide
cagcccuccugaacuccaa

SEQ ID NO: 822020 - RNA, 19 nt, Artificial Sequence
  Description of Artificial Sequence: Synthetic oligonucleotide
ggacacgaugcguguaguu

SEQ ID NO: 822021 - RNA, 19 nt, Artificial Sequence
  Description of Artificial Sequence: Synthetic oligonucleotide
cacauacugagggcccagu

SEQ ID NO: 822022 - RNA, 19 nt, Artificial Sequence
  Description of Artificial Sequence: Synthetic oligonucleotide
cugggacacgaugcgugua

SEQ ID NO: 822023 - RNA, 19 nt, Artificial Sequence
  Description of Artificial Sequence: Synthetic oligonucleotide
ccggguagugacauccccu

SEQ ID NO: 822024 - RNA, 19 nt, Artificial Sequence
  Description of Artificial Sequence: Synthetic oligonucleotide
cccugcgaauaaacaggga

SEQ ID NO: 822025 - RNA, 19 nt, Artificial Sequence
  Description of Artificial Sequence: Synthetic oligonucleotide
cgguagggauuugugucug

SEQ ID NO: 822026 - RNA, 19 nt, Artificial Sequence
  Description of Artificial Sequence: Synthetic oligonucleotide
cccacucccgccugucaga

SEQ ID NO: 822027 - RNA, 19 nt, Artificial Sequence
  Description of Artificial Sequence: Synthetic oligonucleotide
aggcuauguugagguccau

SEQ ID NO: 822028 - RNA, 19 nt, Artificial Sequence
  Description of Artificial Sequence: Synthetic oligonucleotide
ccuccgugugacguaggca

SEQ ID NO: 822029 - RNA, 19 nt, Artificial Sequence
  Description of Artificial Sequence: Synthetic oligonucleotide
cuggucugcggagcuugua

SEQ ID NO: 822030 - RNA, 19 nt, Artificial Sequence
  Description of Artificial Sequence: Synthetic oligonucleotide
cccaugcgcugcugaugac

SEQ ID NO: 822031 - RNA, 19 nt, Artificial Sequence
  Description of Artificial Sequence: Synthetic oligonucleotide
gccugcuagggcccaggcu

SEQ ID NO: 822032 - RNA, 19 nt, Artificial Sequence
  Description of Artificial Sequence: Synthetic oligonucleotide
cgaugcguguaguuacugu

SEQ ID NO: 822033 - RNA, 19 nt, Artificial Sequence
  Description of Artificial Sequence: Synthetic oligonucleotide
cagcgugcucaggguccac

SEQ ID NO: 822034 - RNA, 19 nt, Artificial Sequence
  Description of Artificial Sequence: Synthetic oligonucleotide
gggacacgaugcguguagu

SEQ ID NO: 822035 - RNA, 19 nt, Artificial Sequence
  Description of Artificial Sequence: Synthetic oligonucleotide
ccucaucaaaccggguagu

SEQ ID NO: 822036 - RNA, 19 nt, Artificial Sequence
  Description of Artificial Sequence: Synthetic oligonucleotide
gucacccuuguggcggcuu

SEQ ID NO: 822037 - RNA, 19 nt, Artificial Sequence
  Description of Artificial Sequence: Synthetic oligonucleotide
cccacucagucuggcccuc

SEQ ID NO: 822038 - RNA, 19 nt, Artificial Sequence
  Description of Artificial Sequence: Synthetic oligonucleotide
cgugugacguaggcaagcu

SEQ ID NO: 822039 - RNA, 19 nt, Artificial Sequence
  Description of Artificial Sequence: Synthetic oligonucleotide
gcgcugcugaugacagcaa

SEQ ID NO: 822040 - RNA, 19 nt, Artificial Sequence
  Description of Artificial Sequence: Synthetic oligonucleotide
ccagggcaagaggaguacu

SEQ ID NO: 822041 - RNA, 19 nt, Artificial Sequence
  Description of Artificial Sequence: Synthetic oligonucleotide
ggcuagggcuuggaugguu

SEQ ID NO: 822042 - RNA, 19 nt, Artificial Sequence
  Description of Artificial Sequence: Synthetic oligonucleotide
cacccuuguggcggcuuuu

SEQ ID NO: 822043 - RNA, 19 nt, Artificial Sequence
  Description of Artificial Sequence: Synthetic oligonucleotide
ccgagcugcaguggccagu

SEQ ID NO: 822044 - RNA, 19 nt, Artificial Sequence
  Description of Artificial Sequence: Synthetic oligonucleotide
ccccugcacuagagcggua

SEQ ID NO: 822045 - RNA, 19 nt, Artificial Sequence
  Description of Artificial Sequence: Synthetic oligonucleotide
uuaaacucuagccaggagc

SEQ ID NO: 822046 - RNA, 19 nt, Artificial Sequence
  Description of Artificial Sequence: Synthetic oligonucleotide
aaccacaugucgcucaagc

SEQ ID NO: 822047 - RNA, 19 nt, Artificial Sequence
  Description of Artificial Sequence: Synthetic oligonucleotide
uuuaaugagcacauacugc

SEQ ID NO: 822048 - RNA, 19 nt, Artificial Sequence
  Description of Artificial Sequence: Synthetic oligonucleotide
ucauucucgaaccacagga

SEQ ID NO: 822049 - RNA, 19 nt, Artificial Sequence
  Description of Artificial Sequence: Synthetic oligonucleotide
aaccagaaggauaagugcc

SEQ ID NO: 822050 - RNA, 19 nt, Artificial Sequence
  Description of Artificial Sequence: Synthetic oligonucleotide
aguuguacgguccacguag

SEQ ID NO: 822051 - RNA, 19 nt, Artificial Sequence
  Description of Artificial Sequence: Synthetic oligonucleotide
aacgcgauucuugauaaac

SEQ ID NO: 822052 - RNA, 19 nt, Artificial Sequence
  Description of Artificial Sequence: Synthetic oligonucleotide
uuuucacuguugcugagag

SEQ ID NO: 822053 - RNA, 19 nt, Artificial Sequence
  Description of Artificial Sequence: Synthetic oligonucleotide
uggucuuaaacucuagcca

SEQ ID NO: 822054 - RNA, 19 nt, Artificial Sequence
  Description of Artificial Sequence: Synthetic oligonucleotide
aaucaucugcaguuuguag

SEQ ID NO: 822055 - RNA, 19 nt, Artificial Sequence
  Description of Artificial Sequence: Synthetic oligonucleotide
uggaguagcucccaggaug

SEQ ID NO: 822056 - RNA, 19 nt, Artificial Sequence
  Description of Artificial Sequence: Synthetic oligonucleotide
ugggguaccaccauccagc

SEQ ID NO: 822057 - RNA, 19 nt, Artificial Sequence
  Description of Artificial Sequence: Synthetic oligonucleotide
ucgaaccacaggaaguagg

SEQ ID NO: 822058 - RNA, 19 nt, Artificial Sequence
  Description of Artificial Sequence: Synthetic oligonucleotide
ugaaucagccgcuccacag

SEQ ID NO: 822059 - RNA, 19 nt, Artificial Sequence
  Description of Artificial Sequence: Synthetic oligonucleotide
ucuggaaaaggccuugguc

SEQ ID NO: 822060 - RNA, 19 nt, Artificial Sequence
  Description of Artificial Sequence: Synthetic oligonucleotide
auucucgaaccacaggaag

SEQ ID NO: 822061 - RNA, 19 nt, Artificial Sequence
  Description of Artificial Sequence: Synthetic oligonucleotide
guacgguccacguagauga

SEQ ID NO: 822062 - RNA, 19 nt, Artificial Sequence
  Description of Artificial Sequence: Synthetic oligonucleotide
gaugaaguggaccaggccu

SEQ ID NO: 822063 - RNA, 19 nt, Artificial Sequence
  Description of Artificial Sequence: Synthetic oligonucleotide
ggucuuaaacucuagccag

SEQ ID NO: 822064 - RNA, 19 nt, Artificial Sequence
  Description of Artificial Sequence: Synthetic oligonucleotide
ucggaagacaucuuuucac

SEQ ID NO: 822065 - RNA, 19 nt, Artificial Sequence
  Description of Artificial Sequence: Synthetic oligonucleotide
aaguacuccucagggaggg

SEQ ID NO: 822066 - RNA, 19 nt, Artificial Sequence
  Description of Artificial Sequence: Synthetic oligonucleotide
gauggugcacaguugucgc

SEQ ID NO: 822067 - RNA, 19 nt, Artificial Sequence
  Description of Artificial Sequence: Synthetic oligonucleotide
uguggcaucagcccucgga

SEQ ID NO: 822068 - RNA, 19 nt, Artificial Sequence
  Description of Artificial Sequence: Synthetic oligonucleotide
uucucgaaccacaggaagu

SEQ ID NO: 822069 - RNA, 19 nt, Artificial Sequence
  Description of Artificial Sequence: Synthetic oligonucleotide
cauggugacauuccuccgg

SEQ ID NO: 822070 - RNA, 19 nt, Artificial Sequence
  Description of Artificial Sequence: Synthetic oligonucleotide
ugucgcuucagcuuuccac

SEQ ID NO: 822071 - RNA, 19 nt, Artificial Sequence
  Description of Artificial Sequence: Synthetic oligonucleotide
agcagguguaaaguacucc

SEQ ID NO: 822072 - RNA, 19 nt, Artificial Sequence
  Description of Artificial Sequence: Synthetic oligonucleotide
cugaaucuccuguccaacg

SEQ ID NO: 822073 - RNA, 19 nt, Artificial Sequence
  Description of Artificial Sequence: Synthetic oligonucleotide
aggucuguggggaugacgg

SEQ ID NO: 822074 - RNA, 19 nt, Artificial Sequence
  Description of Artificial Sequence: Synthetic oligonucleotide
uguccaacgcgauucuuga

SEQ ID NO: 822075 - RNA, 19 nt, Artificial Sequence
  Description of Artificial Sequence: Synthetic oligonucleotide
uccaacgcgauucuugaua

SEQ ID NO: 822076 - RNA, 19 nt, Artificial Sequence
  Description of Artificial Sequence: Synthetic oligonucleotide
gacaguaguuuucuuucac

SEQ ID NO: 822077 - RNA, 19 nt, Artificial Sequence
  Description of Artificial Sequence: Synthetic oligonucleotide
accgucaccagcccgaagu

SEQ ID NO: 822078 - RNA, 19 nt, Artificial Sequence
  Description of Artificial Sequence: Synthetic oligonucleotide
uccuguaguagucgccucc

SEQ ID NO: 822079 - RNA, 19 nt, Artificial Sequence
  Description of Artificial Sequence: Synthetic oligonucleotide
guaguagucgccucccagc

SEQ ID NO: 822080 - RNA, 19 nt, Artificial Sequence
  Description of Artificial Sequence: Synthetic oligonucleotide
cauugauggcaaugaacag

SEQ ID NO: 822081 - RNA, 19 nt, Artificial Sequence
  Description of Artificial Sequence: Synthetic oligonucleotide
ucuuaaacucuagccagga

SEQ ID NO: 822082 - RNA, 19 nt, Artificial Sequence
  Description of Artificial Sequence: Synthetic oligonucleotide
gaaagugcuuccacacccg

SEQ ID NO: 822083 - RNA, 19 nt, Artificial Sequence
  Description of Artificial Sequence: Synthetic oligonucleotide
caguuuguagcccauguca

SEQ ID NO: 822084 - RNA, 19 nt, Artificial Sequence
  Description of Artificial Sequence: Synthetic oligonucleotide
aaagugcuuccacacccga

SEQ ID NO: 822085 - RNA, 19 nt, Artificial Sequence
  Description of Artificial Sequence: Synthetic oligonucleotide
uguacgguccacguagaug

SEQ ID NO: 822086 - RNA, 19 nt, Artificial Sequence
  Description of Artificial Sequence: Synthetic oligonucleotide
cagccugaaccacaugucg

SEQ ID NO: 822087 - RNA, 19 nt, Artificial Sequence
  Description of Artificial Sequence: Synthetic oligonucleotide
agugcacaagcaggaaggc

SEQ ID NO: 822088 - RNA, 19 nt, Artificial Sequence
  Description of Artificial Sequence: Synthetic oligonucleotide
gggauggagguccugaacc

SEQ ID NO: 822089 - RNA, 19 nt, Artificial Sequence
  Description of Artificial Sequence: Synthetic oligonucleotide
aggagcuuccuguaguagu

SEQ ID NO: 822090 - RNA, 19 nt, Artificial Sequence
  Description of Artificial Sequence: Synthetic oligonucleotide
guggcaucagcccucggag

SEQ ID NO: 822091 - RNA, 19 nt, Artificial Sequence
  Description of Artificial Sequence: Synthetic oligonucleotide
caucugcccaguuguacgg

SEQ ID NO: 822092 - RNA, 19 nt, Artificial Sequence
  Description of Artificial Sequence: Synthetic oligonucleotide
cuggaaaaggccuuggucu

SEQ ID NO: 822093 - RNA, 19 nt, Artificial Sequence
  Description of Artificial Sequence: Synthetic oligonucleotide
gaaguaggagcagcggaag

SEQ ID NO: 822094 - RNA, 19 nt, Artificial Sequence
  Description of Artificial Sequence: Synthetic oligonucleotide
gauaagugccaggagaucu

SEQ ID NO: 822095 - RNA, 19 nt, Artificial Sequence
  Description of Artificial Sequence: Synthetic oligonucleotide
ugugggccuccccugcugg

SEQ ID NO: 822096 - RNA, 19 nt, Artificial Sequence
  Description of Artificial Sequence: Synthetic oligonucleotide
cuguccaacgcgauucuug

SEQ ID NO: 822097 - RNA, 19 nt, Artificial Sequence
  Description of Artificial Sequence: Synthetic oligonucleotide
agccugaaccacaugucgc

SEQ ID NO: 822098 - RNA, 19 nt, Artificial Sequence
  Description of Artificial Sequence: Synthetic oligonucleotide
ggugucuugggugggaugg

SEQ ID NO: 822099 - RNA, 19 nt, Artificial Sequence
  Description of Artificial Sequence: Synthetic oligonucleotide
cuccaauggggacugaguc

SEQ ID NO: 822100 - RNA, 19 nt, Artificial Sequence
  Description of Artificial Sequence: Synthetic oligonucleotide
uuucccaacucggaagaca

SEQ ID NO: 822101 - RNA, 19 nt, Artificial Sequence
  Description of Artificial Sequence: Synthetic oligonucleotide
agcaccauguuaaugccug

SEQ ID NO: 822102 - RNA, 19 nt, Artificial Sequence
  Description of Artificial Sequence: Synthetic oligonucleotide
gucgcuucagcuuuccaca

SEQ ID NO: 822103 - RNA, 19 nt, Artificial Sequence
  Description of Artificial Sequence: Synthetic oligonucleotide
cagcaguugguagaggacc

SEQ ID NO: 822104 - RNA, 19 nt, Artificial Sequence
  Description of Artificial Sequence: Synthetic oligonucleotide
gucuuaaacucuagccagg

SEQ ID NO: 822105 - RNA, 19 nt, Artificial Sequence
  Description of Artificial Sequence: Synthetic oligonucleotide
guaccugcgugccagccgc

SEQ ID NO: 822106 - RNA, 19 nt, Artificial Sequence
  Description of Artificial Sequence: Synthetic oligonucleotide
cacguagaugaaguggacc

SEQ ID NO: 822107 - RNA, 19 nt, Artificial Sequence
  Description of Artificial Sequence: Synthetic oligonucleotide
aacaaagggcugggaucgc

SEQ ID NO: 822108 - RNA, 19 nt, Artificial Sequence
  Description of Artificial Sequence: Synthetic oligonucleotide
uuugacgaaggcggccagg

SEQ ID NO: 822109 - RNA, 19 nt, Artificial Sequence
  Description of Artificial Sequence: Synthetic oligonucleotide
aguagucgccucccagcac

SEQ ID NO: 822110 - RNA, 19 nt, Artificial Sequence
  Description of Artificial Sequence: Synthetic oligonucleotide
cauacugccuagggcaggg

SEQ ID NO: 822111 - RNA, 19 nt, Artificial Sequence
  Description of Artificial Sequence: Synthetic oligonucleotide
agccucuacagcgaagcuc

SEQ ID NO: 822112 - RNA, 19 nt, Artificial Sequence
  Description of Artificial Sequence: Synthetic oligonucleotide
ugaaccacaugucgcucaa

SEQ ID NO: 822113 - RNA, 19 nt, Artificial Sequence
  Description of Artificial Sequence: Synthetic oligonucleotide
guagauggugcacaguugu

SEQ ID NO: 822114 - RNA, 19 nt, Artificial Sequence
  Description of Artificial Sequence: Synthetic oligonucleotide
ucgcucaagcgucucgaug

SEQ ID NO: 822115 - RNA, 19 nt, Artificial Sequence
  Description of Artificial Sequence: Synthetic oligonucleotide
ugcuucacuucuggaaaag

SEQ ID NO: 822116 - RNA, 19 nt, Artificial Sequence
  Description of Artificial Sequence: Synthetic oligonucleotide
gggacaguaguuuucuuuc

SEQ ID NO: 822117 - RNA, 19 nt, Artificial Sequence
  Description of Artificial Sequence: Synthetic oligonucleotide
cacauacugccuagggcag

SEQ ID NO: 822118 - RNA, 19 nt, Artificial Sequence
  Description of Artificial Sequence: Synthetic oligonucleotide
aauggggacugaguccucu

SEQ ID NO: 822119 - RNA, 19 nt, Artificial Sequence
  Description of Artificial Sequence: Synthetic oligonucleotide
gauggagguccugaaccag

SEQ ID NO: 822120 - RNA, 19 nt, Artificial Sequence
  Description of Artificial Sequence: Synthetic oligonucleotide
gaugcugucuguguccguc

SEQ ID NO: 822121 - RNA, 19 nt, Artificial Sequence
  Description of Artificial Sequence: Synthetic oligonucleotide
aaucuccuguccaacgcga

SEQ ID NO: 822122 - RNA, 19 nt, Artificial Sequence
  Description of Artificial Sequence: Synthetic oligonucleotide
aaacucuagccaggagcuc

SEQ ID NO: 822123 - RNA, 19 nt, Artificial Sequence
  Description of Artificial Sequence: Synthetic oligonucleotide
agcgucucgaugcccagcu

SEQ ID NO: 822124 - RNA, 19 nt, Artificial Sequence
  Description of Artificial Sequence: Synthetic oligonucleotide
cuucaccaacaggaaaucc

SEQ ID NO: 822125 - RNA, 19 nt, Artificial Sequence
  Description of Artificial Sequence: Synthetic oligonucleotide
ugaacucugcucgcccggg

SEQ ID NO: 822126 - RNA, 19 nt, Artificial Sequence
  Description of Artificial Sequence: Synthetic oligonucleotide
gggacgaaguuccuuccgg

SEQ ID NO: 822127 - RNA, 19 nt, Artificial Sequence
  Description of Artificial Sequence: Synthetic oligonucleotide
gaugacggacaggugcaag

SEQ ID NO: 822128 - RNA, 19 nt, Artificial Sequence
  Description of Artificial Sequence: Synthetic oligonucleotide
agggugcucgcaccauggc

SEQ ID NO: 822129 - RNA, 19 nt, Artificial Sequence
  Description of Artificial Sequence: Synthetic oligonucleotide
gcaaugaacaggcacucuc

SEQ ID NO: 822130 - RNA, 19 nt, Artificial Sequence
  Description of Artificial Sequence: Synthetic oligonucleotide
guuuuggcugcucaggggu

SEQ ID NO: 822131 - RNA, 19 nt, Artificial Sequence
  Description of Artificial Sequence: Synthetic oligonucleotide
cugaacucugcucgcccgg

SEQ ID NO: 822132 - RNA, 19 nt, Artificial Sequence
  Description of Artificial Sequence: Synthetic oligonucleotide
ucgcuucagcuuuccacag

SEQ ID NO: 822133 - RNA, 19 nt, Artificial Sequence
  Description of Artificial Sequence: Synthetic oligonucleotide
gcuuccacacccgagcacg

SEQ ID NO: 822134 - RNA, 19 nt, Artificial Sequence
  Description of Artificial Sequence: Synthetic oligonucleotide
aggauaagugccaggagau

SEQ ID NO: 822135 - RNA, 19 nt, Artificial Sequence
  Description of Artificial Sequence: Synthetic oligonucleotide
aagugcuuccacacccgag

SEQ ID NO: 822136 - RNA, 19 nt, Artificial Sequence
  Description of Artificial Sequence: Synthetic oligonucleotide
uuucacuguugcugagaga

SEQ ID NO: 822137 - RNA, 19 nt, Artificial Sequence
  Description of Artificial Sequence: Synthetic oligonucleotide
auaagugccaggagaucug

SEQ ID NO: 822138 - RNA, 19 nt, Artificial Sequence
  Description of Artificial Sequence: Synthetic oligonucleotide
gaacucugcucgcccgggg

SEQ ID NO: 822139 - RNA, 19 nt, Artificial Sequence
  Description of Artificial Sequence: Synthetic oligonucleotide
ccaucugcccaguuguacg

SEQ ID NO: 822140 - RNA, 19 nt, Artificial Sequence
  Description of Artificial Sequence: Synthetic oligonucleotide
ugucgcucaagcgucucga

SEQ ID NO: 822141 - RNA, 19 nt, Artificial Sequence
  Description of Artificial Sequence: Synthetic oligonucleotide
uuuuggcugcucagggguc

SEQ ID NO: 822142 - RNA, 19 nt, Artificial Sequence
  Description of Artificial Sequence: Synthetic oligonucleotide
aacucggaagacaucuuuu

SEQ ID NO: 822143 - RNA, 19 nt, Artificial Sequence
  Description of Artificial Sequence: Synthetic oligonucleotide
aguuuguagcccaugucau

SEQ ID NO: 822144 - RNA, 19 nt, Artificial Sequence
  Description of Artificial Sequence: Synthetic oligonucleotide
cugcccaguuguacggucc

SEQ ID NO: 822145 - RNA, 19 nt, Artificial Sequence
  Description of Artificial Sequence: Synthetic oligonucleotide
ugacggacaggugcaaggu

SEQ ID NO: 822146 - RNA, 19 nt, Artificial Sequence
  Description of Artificial Sequence: Synthetic oligonucleotide
agcggaaguccccuuccug

SEQ ID NO: 822147 - RNA, 19 nt, Artificial Sequence
  Description of Artificial Sequence: Synthetic oligonucleotide
cucggaagacaucuuuuca

SEQ ID NO: 822148 - RNA, 19 nt, Artificial Sequence
  Description of Artificial Sequence: Synthetic oligonucleotide
uggaccaggccugggaagu

SEQ ID NO: 822149 - RNA, 19 nt, Artificial Sequence
  Description of Artificial Sequence: Synthetic oligonucleotide
uggcuuugacgaaggcggc

SEQ ID NO: 822150 - RNA, 19 nt, Artificial Sequence
  Description of Artificial Sequence: Synthetic oligonucleotide
aguguggcaucagcccucg

SEQ ID NO: 822151 - RNA, 19 nt, Artificial Sequence
  Description of Artificial Sequence: Synthetic oligonucleotide
uuuggcugcucaggggucu

SEQ ID NO: 822152 - RNA, 19 nt, Artificial Sequence
  Description of Artificial Sequence: Synthetic oligonucleotide
agguaccugcgugccagcc

SEQ ID NO: 822153 - RNA, 19 nt, Artificial Sequence
  Description of Artificial Sequence: Synthetic oligonucleotide
cgcucaagcgucucgaugc

SEQ ID NO: 822154 - RNA, 19 nt, Artificial Sequence
  Description of Artificial Sequence: Synthetic oligonucleotide
caguagggagaagccaucc

SEQ ID NO: 822155 - RNA, 19 nt, Artificial Sequence
  Description of Artificial Sequence: Synthetic oligonucleotide
ggugcgguggccaggaagc

SEQ ID NO: 822156 - RNA, 19 nt, Artificial Sequence
  Description of Artificial Sequence: Synthetic oligonucleotide
agcagcuuacagugcacaa

SEQ ID NO: 822157 - RNA, 19 nt, Artificial Sequence
  Description of Artificial Sequence: Synthetic oligonucleotide
aggagcagcggaagucccc

SEQ ID NO: 822158 - RNA, 19 nt, Artificial Sequence
  Description of Artificial Sequence: Synthetic oligonucleotide
acauacugccuagggcagg

SEQ ID NO: 822159 - RNA, 19 nt, Artificial Sequence
  Description of Artificial Sequence: Synthetic oligonucleotide
gguaccugcgugccagccg

SEQ ID NO: 822160 - RNA, 19 nt, Artificial Sequence
  Description of Artificial Sequence: Synthetic oligonucleotide
ucuggggaguguggcauca

SEQ ID NO: 822161 - RNA, 19 nt, Artificial Sequence
  Description of Artificial Sequence: Synthetic oligonucleotide
guaguagcgcaggagcuuc

SEQ ID NO: 822162 - RNA, 19 nt, Artificial Sequence
  Description of Artificial Sequence: Synthetic oligonucleotide
gugcucgcaccauggcugg

SEQ ID NO: 822163 - RNA, 19 nt, Artificial Sequence
  Description of Artificial Sequence: Synthetic oligonucleotide
caccauggugacauuccuc

SEQ ID NO: 822164 - RNA, 19 nt, Artificial Sequence
  Description of Artificial Sequence: Synthetic oligonucleotide
cuuugacgaaggcggccag

SEQ ID NO: 822165 - RNA, 19 nt, Artificial Sequence
  Description of Artificial Sequence: Synthetic oligonucleotide
agucgcuccuucaugaguu

SEQ ID NO: 822166 - RNA, 19 nt, Artificial Sequence
  Description of Artificial Sequence: Synthetic oligonucleotide
cuuccacacccgagcacgc

SEQ ID NO: 822167 - RNA, 19 nt, Artificial Sequence
  Description of Artificial Sequence: Synthetic oligonucleotide
acgcgauucuugauaaacu

SEQ ID NO: 822168 - RNA, 19 nt, Artificial Sequence
  Description of Artificial Sequence: Synthetic oligonucleotide
aggugcaaggucaguagcu

SEQ ID NO: 822169 - RNA, 19 nt, Artificial Sequence
  Description of Artificial Sequence: Synthetic oligonucleotide
uuguacgguccacguagau

SEQ ID NO: 822170 - RNA, 19 nt, Artificial Sequence
  Description of Artificial Sequence: Synthetic oligonucleotide
uggugucuugggugggaug

SEQ ID NO: 822171 - RNA, 19 nt, Artificial Sequence
  Description of Artificial Sequence: Synthetic oligonucleotide
gaaaaggccuuggucuuaa

SEQ ID NO: 822172 - RNA, 19 nt, Artificial Sequence
  Description of Artificial Sequence: Synthetic oligonucleotide
guagucgccucccagcacu

SEQ ID NO: 822173 - RNA, 19 nt, Artificial Sequence
  Description of Artificial Sequence: Synthetic oligonucleotide
gcgauucuugauaaacuug

SEQ ID NO: 822174 - RNA, 19 nt, Artificial Sequence
  Description of Artificial Sequence: Synthetic oligonucleotide
ucaccagcccgaagugcac

SEQ ID NO: 822175 - RNA, 19 nt, Artificial Sequence
  Description of Artificial Sequence: Synthetic oligonucleotide
ugcagguaccugcgugcca

SEQ ID NO: 822176 - RNA, 19 nt, Artificial Sequence
  Description of Artificial Sequence: Synthetic oligonucleotide
uugucgcuucagcuuucca

SEQ ID NO: 822177 - RNA, 19 nt, Artificial Sequence
  Description of Artificial Sequence: Synthetic oligonucleotide
uggcgcaggucuccaacaa

SEQ ID NO: 822178 - RNA, 19 nt, Artificial Sequence
  Description of Artificial Sequence: Synthetic oligonucleotide
agcgaagcucugcuccugu

SEQ ID NO: 822179 - RNA, 19 nt, Artificial Sequence
  Description of Artificial Sequence: Synthetic oligonucleotide
ggggacgaaguuccuuccg

SEQ ID NO: 822180 - RNA, 19 nt, Artificial Sequence
  Description of Artificial Sequence: Synthetic oligonucleotide
acuccaauggggacugagu

SEQ ID NO: 822181 - RNA, 19 nt, Artificial Sequence
  Description of Artificial Sequence: Synthetic oligonucleotide
ccugaacucugcucgcccg

SEQ ID NO: 822182 - RNA, 19 nt, Artificial Sequence
  Description of Artificial Sequence: Synthetic oligonucleotide
cugccugaacucugcucgc

SEQ ID NO: 822183 - RNA, 19 nt, Artificial Sequence
  Description of Artificial Sequence: Synthetic oligonucleotide
cuacagcgaagcucugcuc

SEQ ID NO: 822184 - RNA, 19 nt, Artificial Sequence
  Description of Artificial Sequence: Synthetic oligonucleotide
guagcucauagcaccugac

SEQ ID NO: 822185 - RNA, 19 nt, Artificial Sequence
  Description of Artificial Sequence: Synthetic oligonucleotide
cucauagcaccugacaggu

SEQ ID NO: 822186 - RNA, 19 nt, Artificial Sequence
  Description of Artificial Sequence: Synthetic oligonucleotide
gcgcaggucuccaacaaag

SEQ ID NO: 822187 - RNA, 19 nt, Artificial Sequence
  Description of Artificial Sequence: Synthetic oligonucleotide
ugccugaacucugcucgcc

SEQ ID NO: 822188 - RNA, 19 nt, Artificial Sequence
  Description of Artificial Sequence: Synthetic oligonucleotide
caagcgucucgaugcccag

SEQ ID NO: 822189 - RNA, 19 nt, Artificial Sequence
  Description of Artificial Sequence: Synthetic oligonucleotide
guccaccgucaccagcccg

SEQ ID NO: 822190 - RNA, 19 nt, Artificial Sequence
  Description of Artificial Sequence: Synthetic oligonucleotide
guagcgcaggagcuuccug

SEQ ID NO: 822191 - RNA, 19 nt, Artificial Sequence
  Description of Artificial Sequence: Synthetic oligonucleotide
guugucgcuucagcuuucc

SEQ ID NO: 822192 - RNA, 19 nt, Artificial Sequence
  Description of Artificial Sequence: Synthetic oligonucleotide
uauccgugggugggguacc

SEQ ID NO: 822193 - RNA, 19 nt, Artificial Sequence
  Description of Artificial Sequence: Synthetic oligonucleotide
cagggcgcuuccaggcucc

SEQ ID NO: 822194 - RNA, 19 nt, Artificial Sequence
  Description of Artificial Sequence: Synthetic oligonucleotide
ccaggagaucugcugggcg

SEQ ID NO: 822195 - RNA, 19 nt, Artificial Sequence
  Description of Artificial Sequence: Synthetic oligonucleotide
uguggggcaccaggggaca

SEQ ID NO: 822196 - RNA, 19 nt, Artificial Sequence
  Description of Artificial Sequence: Synthetic oligonucleotide
gccauccagcaguugguag

SEQ ID NO: 822197 - RNA, 19 nt, Artificial Sequence
  Description of Artificial Sequence: Synthetic oligonucleotide
agccgguagauggugcaca

SEQ ID NO: 822198 - RNA, 19 nt, Artificial Sequence
  Description of Artificial Sequence: Synthetic oligonucleotide
cagggagggagaugcuguc

SEQ ID NO: 822199 - RNA, 19 nt, Artificial Sequence
  Description of Artificial Sequence: Synthetic oligonucleotide
agcgcaggagcuuccugua

SEQ ID NO: 822200 - RNA, 19 nt, Artificial Sequence
  Description of Artificial Sequence: Synthetic oligonucleotide
acucugcucgcccggggaa

SEQ ID NO: 822201 - RNA, 19 nt, Artificial Sequence
  Description of Artificial Sequence: Synthetic oligonucleotide
ggacgaaguuccuuccgga

SEQ ID NO: 822202 - RNA, 19 nt, Artificial Sequence
  Description of Artificial Sequence: Synthetic oligonucleotide
agguucugaggggcggcuc

SEQ ID NO: 822203 - RNA, 19 nt, Artificial Sequence
  Description of Artificial Sequence: Synthetic oligonucleotide
ggagguccugaaccagaag

SEQ ID NO: 822204 - RNA, 19 nt, Artificial Sequence
  Description of Artificial Sequence: Synthetic oligonucleotide
ggugaaucagccgcuccac

SEQ ID NO: 822205 - RNA, 19 nt, Artificial Sequence
  Description of Artificial Sequence: Synthetic oligonucleotide
uacgguccacguagaugaa

SEQ ID NO: 822206 - RNA, 19 nt, Artificial Sequence
  Description of Artificial Sequence: Synthetic oligonucleotide
gccgguagauggugcacag

SEQ ID NO: 822207 - RNA, 19 nt, Artificial Sequence
  Description of Artificial Sequence: Synthetic oligonucleotide
ccauggugacauuccuccg

SEQ ID NO: 822208 - RNA, 19 nt, Artificial Sequence
  Description of Artificial Sequence: Synthetic oligonucleotide
gucgccucccagcacucca

SEQ ID NO: 822209 - RNA, 19 nt, Artificial Sequence
  Description of Artificial Sequence: Synthetic oligonucleotide
caucagcccucggagggug

SEQ ID NO: 822210 - RNA, 19 nt, Artificial Sequence
  Description of Artificial Sequence: Synthetic oligonucleotide
cgauucuugauaaacuugu

SEQ ID NO: 822211 - RNA, 19 nt, Artificial Sequence
  Description of Artificial Sequence: Synthetic oligonucleotide
cccaguuguacgguccacg

SEQ ID NO: 822212 - RNA, 19 nt, Artificial Sequence
  Description of Artificial Sequence: Synthetic oligonucleotide
ccacacccgagcacgcugg

SEQ ID NO: 822213 - RNA, 19 nt, Artificial Sequence
  Description of Artificial Sequence: Synthetic oligonucleotide
uagucgccucccagcacuc

SEQ ID NO: 822214 - RNA, 19 nt, Artificial Sequence
  Description of Artificial Sequence: Synthetic oligonucleotide
caccagcccgaagugcacc

SEQ ID NO: 822215 - RNA, 19 nt, Artificial Sequence
  Description of Artificial Sequence: Synthetic oligonucleotide
cccgaagugcaccucgaac

SEQ ID NO: 822216 - RNA, 19 nt, Artificial Sequence
  Description of Artificial Sequence: Synthetic oligonucleotide
ccaacgcgauucuugauaa

SEQ ID NO: 822217 - RNA, 19 nt, Artificial Sequence
  Description of Artificial Sequence: Synthetic oligonucleotide
aggggccccuuucccaacu

SEQ ID NO: 822218 - RNA, 19 nt, Artificial Sequence
  Description of Artificial Sequence: Synthetic oligonucleotide
ggggugaaucagccgcucc

SEQ ID NO: 822219 - RNA, 19 nt, Artificial Sequence
  Description of Artificial Sequence: Synthetic oligonucleotide
gcucaagcgucucgaugcc

SEQ ID NO: 822220 - RNA, 19 nt, Artificial Sequence
  Description of Artificial Sequence: Synthetic oligonucleotide
gccugaacucugcucgccc

SEQ ID NO: 822221 - RNA, 19 nt, Artificial Sequence
  Description of Artificial Sequence: Synthetic oligonucleotide
gcuuugacgaaggcggcca

SEQ ID NO: 822222 - RNA, 19 nt, Artificial Sequence
  Description of Artificial Sequence: Synthetic oligonucleotide
uuccacacccgagcacgcu

SEQ ID NO: 822223 - RNA, 19 nt, Artificial Sequence
  Description of Artificial Sequence: Synthetic oligonucleotide
acacccgagcacgcugguc

SEQ ID NO: 822224 - RNA, 19 nt, Artificial Sequence
  Description of Artificial Sequence: Synthetic oligonucleotide
guuguacgguccacguaga

SEQ ID NO: 822225 - RNA, 19 nt, Artificial Sequence
  Description of Artificial Sequence: Synthetic oligonucleotide
cuggaguugacagccugaa

SEQ ID NO: 822226 - RNA, 19 nt, Artificial Sequence
  Description of Artificial Sequence: Synthetic oligonucleotide
gcggcucuugcuguaguag

SEQ ID NO: 822227 - RNA, 19 nt, Artificial Sequence
  Description of Artificial Sequence: Synthetic oligonucleotide
ggacaccauggugacauuc

SEQ ID NO: 822228 - RNA, 19 nt, Artificial Sequence
  Description of Artificial Sequence: Synthetic oligonucleotide
gugggauggagguccugaa

SEQ ID NO: 822229 - RNA, 19 nt, Artificial Sequence
  Description of Artificial Sequence: Synthetic oligonucleotide
acccgagcacgcuggucca

SEQ ID NO: 822230 - RNA, 19 nt, Artificial Sequence
  Description of Artificial Sequence: Synthetic oligonucleotide
cugaguccucugagaggac

SEQ ID NO: 822231 - RNA, 19 nt, Artificial Sequence
  Description of Artificial Sequence: Synthetic oligonucleotide
cagguaccugcgugccagc

SEQ ID NO: 822232 - RNA, 19 nt, Artificial Sequence
  Description of Artificial Sequence: Synthetic oligonucleotide
aucugcccaguuguacggu

SEQ ID NO: 822233 - RNA, 19 nt, Artificial Sequence
  Description of Artificial Sequence: Synthetic oligonucleotide
ggagcagguguaaaguacu

SEQ ID NO: 822234 - RNA, 19 nt, Artificial Sequence
  Description of Artificial Sequence: Synthetic oligonucleotide
ugggaucgcagggcgcuuc

SEQ ID NO: 822235 - RNA, 19 nt, Artificial Sequence
  Description of Artificial Sequence: Synthetic oligonucleotide
ggcgcagggugcucgcacc

SEQ ID NO: 822236 - RNA, 19 nt, Artificial Sequence
  Description of Artificial Sequence: Synthetic oligonucleotide
ggauaagugccaggagauc

SEQ ID NO: 822237 - RNA, 19 nt, Artificial Sequence
  Description of Artificial Sequence: Synthetic oligonucleotide
cucgcccggggaaggagca

SEQ ID NO: 822238 - RNA, 19 nt, Artificial Sequence
  Description of Artificial Sequence: Synthetic oligonucleotide
cuccggcucuucaccaaca

SEQ ID NO: 822239 - RNA, 19 nt, Artificial Sequence
  Description of Artificial Sequence: Synthetic oligonucleotide
ccacaugucgcucaagcgu

SEQ ID NO: 822240 - RNA, 19 nt, Artificial Sequence
  Description of Artificial Sequence: Synthetic oligonucleotide
ccaguagggagaagccauc

SEQ ID NO: 822241 - RNA, 19 nt, Artificial Sequence
  Description of Artificial Sequence: Synthetic oligonucleotide
caacucggaagacaucuuu

SEQ ID NO: 822242 - RNA, 19 nt, Artificial Sequence
  Description of Artificial Sequence: Synthetic oligonucleotide
aggggacaguaguuuucuu

SEQ ID NO: 822243 - RNA, 19 nt, Artificial Sequence
  Description of Artificial Sequence: Synthetic oligonucleotide
uaccugcgugccagccgca

SEQ ID NO: 822244 - RNA, 19 nt, Artificial Sequence
  Description of Artificial Sequence: Synthetic oligonucleotide
gcgguggccaggaagcuca

SEQ ID NO: 822245 - RNA, 19 nt, Artificial Sequence
  Description of Artificial Sequence: Synthetic oligonucleotide
gggaucgcagggcgcuucc

SEQ ID NO: 822246 - RNA, 19 nt, Artificial Sequence
  Description of Artificial Sequence: Synthetic oligonucleotide
gccugaaccacaugucgcu

SEQ ID NO: 822247 - RNA, 19 nt, Artificial Sequence
  Description of Artificial Sequence: Synthetic oligonucleotide
caccucgaacagguacuug

SEQ ID NO: 822248 - RNA, 19 nt, Artificial Sequence
  Description of Artificial Sequence: Synthetic oligonucleotide
cagccgguagauggugcac

SEQ ID NO: 822249 - RNA, 19 nt, Artificial Sequence
  Description of Artificial Sequence: Synthetic oligonucleotide
cagcgaagcucugcuccug

SEQ ID NO: 822250 - RNA, 19 nt, Artificial Sequence
  Description of Artificial Sequence: Synthetic oligonucleotide
guaggacaccauggugaca

SEQ ID NO: 822251 - RNA, 19 nt, Artificial Sequence
  Description of Artificial Sequence: Synthetic oligonucleotide
aucuccuguccaacgcgau

SEQ ID NO: 822252 - RNA, 19 nt, Artificial Sequence
  Description of Artificial Sequence: Synthetic oligonucleotide
caguuguacgguccacgua

SEQ ID NO: 822253 - RNA, 19 nt, Artificial Sequence
  Description of Artificial Sequence: Synthetic oligonucleotide
uccgugggugggguaccac

SEQ ID NO: 822254 - RNA, 19 nt, Artificial Sequence
  Description of Artificial Sequence: Synthetic oligonucleotide
gguucugaggggcggcucu

SEQ ID NO: 822255 - RNA, 19 nt, Artificial Sequence
  Description of Artificial Sequence: Synthetic oligonucleotide
caacgcgauucuugauaaa

SEQ ID NO: 822256 - RNA, 19 nt, Artificial Sequence
  Description of Artificial Sequence: Synthetic oligonucleotide
cccaacucggaagacaucu

SEQ ID NO: 822257 - RNA, 19 nt, Artificial Sequence
  Description of Artificial Sequence: Synthetic oligonucleotide
gcucagccgguagauggug

SEQ ID NO: 822258 - RNA, 19 nt, Artificial Sequence
  Description of Artificial Sequence: Synthetic oligonucleotide
ggucuguggggaugacgga

SEQ ID NO: 822259 - RNA, 19 nt, Artificial Sequence
  Description of Artificial Sequence: Synthetic oligonucleotide
guguggcaucagcccucgg

SEQ ID NO: 822260 - RNA, 19 nt, Artificial Sequence
  Description of Artificial Sequence: Synthetic oligonucleotide
caccgucaccagcccgaag

SEQ ID NO: 822261 - RNA, 19 nt, Artificial Sequence
  Description of Artificial Sequence: Synthetic oligonucleotide
ggagaucugcugggcgcag

SEQ ID NO: 822262 - RNA, 19 nt, Artificial Sequence
  Description of Artificial Sequence: Synthetic oligonucleotide
ggcgcaggucuccaacaaa

SEQ ID NO: 822263 - RNA, 19 nt, Artificial Sequence
  Description of Artificial Sequence: Synthetic oligonucleotide
ugcucgcaccauggcugga

SEQ ID NO: 822264 - RNA, 19 nt, Artificial Sequence
  Description of Artificial Sequence: Synthetic oligonucleotide
gggcgcagggugcucgcac

SEQ ID NO: 822265 - RNA, 19 nt, Artificial Sequence
  Description of Artificial Sequence: Synthetic oligonucleotide
ccugaaccacaugucgcuc

SEQ ID NO: 822266 - RNA, 19 nt, Artificial Sequence
  Description of Artificial Sequence: Synthetic oligonucleotide
ccaugucauucucgaacca

SEQ ID NO: 822267 - RNA, 19 nt, Artificial Sequence
  Description of Artificial Sequence: Synthetic oligonucleotide
ccgagcacgcugguccagg

SEQ ID NO: 822268 - RNA, 19 nt, Artificial Sequence
  Description of Artificial Sequence: Synthetic oligonucleotide
ccaguuguacgguccacgu

SEQ ID NO: 822269 - RNA, 19 nt, Artificial Sequence
  Description of Artificial Sequence: Synthetic oligonucleotide
cuggaguagcucccaggau

SEQ ID NO: 822270 - RNA, 19 nt, Artificial Sequence
  Description of Artificial Sequence: Synthetic oligonucleotide
gucgcucaagcgucucgau

SEQ ID NO: 822271 - RNA, 19 nt, Artificial Sequence
  Description of Artificial Sequence: Synthetic oligonucleotide
guccaacgcgauucuugau

SEQ ID NO: 822272 - RNA, 19 nt, Artificial Sequence
  Description of Artificial Sequence: Synthetic oligonucleotide
ggcugggaucgcagggcgc

SEQ ID NO: 822273 - RNA, 19 nt, Artificial Sequence
  Description of Artificial Sequence: Synthetic oligonucleotide
cgcgauucuugauaaacuu

SEQ ID NO: 822274 - RNA, 19 nt, Artificial Sequence
  Description of Artificial Sequence: Synthetic oligonucleotide
gcaaggucaguagcucaua

SEQ ID NO: 822275 - RNA, 19 nt, Artificial Sequence
  Description of Artificial Sequence: Synthetic oligonucleotide
gcgcagggugcucgcacca

SEQ ID NO: 822276 - RNA, 19 nt, Artificial Sequence
  Description of Artificial Sequence: Synthetic oligonucleotide
gucgcuccuucaugaguuu

SEQ ID NO: 822277 - RNA, 19 nt, Artificial Sequence
  Description of Artificial Sequence: Synthetic oligonucleotide
ggaucgcagggcgcuucca

SEQ ID NO: 822278 - RNA, 19 nt, Artificial Sequence
  Description of Artificial Sequence: Synthetic oligonucleotide
gcccaguuguacgguccac

SEQ ID NO: 822279 - RNA, 19 nt, Artificial Sequence
  Description of Artificial Sequence: Synthetic oligonucleotide
cugcucgcccggggaagga

SEQ ID NO: 822280 - RNA, 19 nt, Artificial Sequence
  Description of Artificial Sequence: Synthetic oligonucleotide
cacacccgagcacgcuggu

SEQ ID NO: 822281 - RNA, 19 nt, Artificial Sequence
  Description of Artificial Sequence: Synthetic oligonucleotide
guucugaggggcggcucuu

SEQ ID NO: 822282 - RNA, 19 nt, Artificial Sequence
  Description of Artificial Sequence: Synthetic oligonucleotide
ccagaggaugcugccugaa

SEQ ID NO: 822283 - RNA, 19 nt, Artificial Sequence
  Description of Artificial Sequence: Synthetic oligonucleotide
cccgagcacgcugguccag

SEQ ID NO: 822284 - RNA, 19 nt, Artificial Sequence
  Description of Artificial Sequence: Synthetic oligonucleotide
gcuccucguggggccugag

SEQ ID NO: 822285 - RNA, 19 nt, Artificial Sequence
  Description of Artificial Sequence: Synthetic oligonucleotide
ccaacucggaagacaucuu

SEQ ID NO: 822286 - RNA, 19 nt, Artificial Sequence
  Description of Artificial Sequence: Synthetic oligonucleotide
gcaccucgaacagguacuu

SEQ ID NO: 822287 - RNA, 19 nt, Artificial Sequence
  Description of Artificial Sequence: Synthetic oligonucleotide
cccucggagggugcccuca

SEQ ID NO: 822288 - RNA, 19 nt, Artificial Sequence
  Description of Artificial Sequence: Synthetic oligonucleotide
gcccucggagggugcccuc

SEQ ID NO: 822289 - RNA, 19 nt, Artificial Sequence
  Description of Artificial Sequence: Synthetic oligonucleotide
ccccgcucagggcuggagu

SEQ ID NO: 822290 - RNA, 19 nt, Artificial Sequence
  Description of Artificial Sequence: Synthetic oligonucleotide
cugggaucgcagggcgcuu

SEQ ID NO: 822291 - RNA, 19 nt, Artificial Sequence
  Description of Artificial Sequence: Synthetic oligonucleotide
ccuguccaacgcgauucuu

SEQ ID NO: 822292 - RNA, 19 nt, Artificial Sequence
  Description of Artificial Sequence: Synthetic oligonucleotide
cgcagggugcucgcaccau

SEQ ID NO: 822293 - RNA, 19 nt, Artificial Sequence
  Description of Artificial Sequence: Synthetic oligonucleotide
uuacuuaugaaaauaaugg

SEQ ID NO: 822294 - RNA, 19 nt, Artificial Sequence
  Description of Artificial Sequence: Synthetic oligonucleotide
aaaauaaugggaaagauag

SEQ ID NO: 822295 - RNA, 19 nt, Artificial Sequence
  Description of Artificial Sequence: Synthetic oligonucleotide
uuaaugaaaacaaaugagu

SEQ ID NO: 822296 - RNA, 19 nt, Artificial Sequence
  Description of Artificial Sequence: Synthetic oligonucleotide
gacacguuugcauagagag

SEQ ID NO: 822297 - RNA, 19 nt, Artificial Sequence
  Description of Artificial Sequence: Synthetic oligonucleotide
aauaggaacuuuauuuccc

SEQ ID NO: 822298 - RNA, 19 nt, Artificial Sequence
  Description of Artificial Sequence: Synthetic oligonucleotide
aaugaagguaaacaggcga

SEQ ID NO: 822299 - RNA, 19 nt, Artificial Sequence
  Description of Artificial Sequence: Synthetic oligonucleotide
ugguaaauagcuaagucca

SEQ ID NO: 822300 - RNA, 19 nt, Artificial Sequence
  Description of Artificial Sequence: Synthetic oligonucleotide
aguuauugaaauuaagacu

SEQ ID NO: 822301 - RNA, 19 nt, Artificial Sequence
  Description of Artificial Sequence: Synthetic oligonucleotide
uacuuaugaaaauaauggg

SEQ ID NO: 822302 - RNA, 19 nt, Artificial Sequence
  Description of Artificial Sequence: Synthetic oligonucleotide
uggauagaggaguaaaugg

SEQ ID NO: 822303 - RNA, 19 nt, Artificial Sequence
  Description of Artificial Sequence: Synthetic oligonucleotide
auuauguucaccuugcuau

SEQ ID NO: 822304 - RNA, 19 nt, Artificial Sequence
  Description of Artificial Sequence: Synthetic oligonucleotide
agcuaugaagcucacaagg

SEQ ID NO: 822305 - RNA, 19 nt, Artificial Sequence
  Description of Artificial Sequence: Synthetic oligonucleotide
aacaggcgaauuuugcagc

SEQ ID NO: 822306 - RNA, 19 nt, Artificial Sequence
  Description of Artificial Sequence: Synthetic oligonucleotide
uucaugacugcauugaucu

SEQ ID NO: 822307 - RNA, 19 nt, Artificial Sequence
  Description of Artificial Sequence: Synthetic oligonucleotide
aaugcaugguaacauaaca

SEQ ID NO: 822308 - RNA, 19 nt, Artificial Sequence
  Description of Artificial Sequence: Synthetic oligonucleotide
aaauuaagacucuagguua

SEQ ID NO: 822309 - RNA, 19 nt, Artificial Sequence
  Description of Artificial Sequence: Synthetic oligonucleotide
aaacaggcgaauuuugcag

SEQ ID NO: 822310 - RNA, 19 nt, Artificial Sequence
  Description of Artificial Sequence: Synthetic oligonucleotide
uggauuaacaacugaagug

SEQ ID NO: 822311 - RNA, 19 nt, Artificial Sequence
  Description of Artificial Sequence: Synthetic oligonucleotide
ugagcuaugaagcucacaa

SEQ ID NO: 822312 - RNA, 19 nt, Artificial Sequence
  Description of Artificial Sequence: Synthetic oligonucleotide
aacaagucaauggauagag

SEQ ID NO: 822313 - RNA, 19 nt, Artificial Sequence
  Description of Artificial Sequence: Synthetic oligonucleotide
uauacaccagaccacaggc

SEQ ID NO: 822314 - RNA, 19 nt, Artificial Sequence
  Description of Artificial Sequence: Synthetic oligonucleotide
ugugaaguggcaugcaggg

SEQ ID NO: 822315 - RNA, 19 nt, Artificial Sequence
  Description of Artificial Sequence: Synthetic oligonucleotide
aguaaauggauuaacaacu

SEQ ID NO: 822316 - RNA, 19 nt, Artificial Sequence
  Description of Artificial Sequence: Synthetic oligonucleotide
auugcugaccagcucaccc

SEQ ID NO: 822317 - RNA, 19 nt, Artificial Sequence
  Description of Artificial Sequence: Synthetic oligonucleotide
uuuggagucaaacacuuaa

SEQ ID NO: 822318 - RNA, 19 nt, Artificial Sequence
  Description of Artificial Sequence: Synthetic oligonucleotide
uguaaagaagucccaaaca

SEQ ID NO: 822319 - RNA, 19 nt, Artificial Sequence
  Description of Artificial Sequence: Synthetic oligonucleotide
cucccuauauaucauaggg

SEQ ID NO: 822320 - RNA, 19 nt, Artificial Sequence
  Description of Artificial Sequence: Synthetic oligonucleotide
uuugcuuaaaacagucuug

SEQ ID NO: 822321 - RNA, 19 nt, Artificial Sequence
  Description of Artificial Sequence: Synthetic oligonucleotide
uaaauagcuaaguccagcc

SEQ ID NO: 822322 - RNA, 19 nt, Artificial Sequence
  Description of Artificial Sequence: Synthetic oligonucleotide
aaguguuuuagaguuauug

SEQ ID NO: 822323 - RNA, 19 nt, Artificial Sequence
  Description of Artificial Sequence: Synthetic oligonucleotide
aggaacuuuauuucccacc

SEQ ID NO: 822324 - RNA, 19 nt, Artificial Sequence
  Description of Artificial Sequence: Synthetic oligonucleotide
guuacuuaugaaaauaaug

SEQ ID NO: 822325 - RNA, 19 nt, Artificial Sequence
  Description of Artificial Sequence: Synthetic oligonucleotide
cuauauaucauaggggugc

SEQ ID NO: 822326 - RNA, 19 nt, Artificial Sequence
  Description of Artificial Sequence: Synthetic oligonucleotide
guaaagaagucccaaacac

SEQ ID NO: 822327 - RNA, 19 nt, Artificial Sequence
  Description of Artificial Sequence: Synthetic oligonucleotide
gguaacauaacagacaagc

SEQ ID NO: 822328 - RNA, 19 nt, Artificial Sequence
  Description of Artificial Sequence: Synthetic oligonucleotide
gagucaaacacuuaacaca

SEQ ID NO: 822329 - RNA, 19 nt, Artificial Sequence
  Description of Artificial Sequence: Synthetic oligonucleotide
ugaaccgaauuuuauauuc

SEQ ID NO: 822330 - RNA, 19 nt, Artificial Sequence
  Description of Artificial Sequence: Synthetic oligonucleotide
aaugaacccucaaauugcc

SEQ ID NO: 822331 - RNA, 19 nt, Artificial Sequence
  Description of Artificial Sequence: Synthetic oligonucleotide
ucaaggaauagugacacug

SEQ ID NO: 822332 - RNA, 19 nt, Artificial Sequence
  Description of Artificial Sequence: Synthetic oligonucleotide
gauauuauuugucuuuaca

SEQ ID NO: 822333 - RNA, 19 nt, Artificial Sequence
  Description of Artificial Sequence: Synthetic oligonucleotide
uuuugcuuaaaacagucuu

SEQ ID NO: 822334 - RNA, 19 nt, Artificial Sequence
  Description of Artificial Sequence: Synthetic oligonucleotide
ucccuauauaucauagggg

SEQ ID NO: 822335 - RNA, 19 nt, Artificial Sequence
  Description of Artificial Sequence: Synthetic oligonucleotide
ugaacaauuaggccuagaa

SEQ ID NO: 822336 - RNA, 19 nt, Artificial Sequence
  Description of Artificial Sequence: Synthetic oligonucleotide
aaacaaggggaguccacac

SEQ ID NO: 822337 - RNA, 19 nt, Artificial Sequence
  Description of Artificial Sequence: Synthetic oligonucleotide
ucucacagguacaagaggu

SEQ ID NO: 822338 - RNA, 19 nt, Artificial Sequence
  Description of Artificial Sequence: Synthetic oligonucleotide
uugcuuaaaacagucuugg

SEQ ID NO: 822339 - RNA, 19 nt, Artificial Sequence
  Description of Artificial Sequence: Synthetic oligonucleotide
cacguuugcauagagaggg

SEQ ID NO: 822340 - RNA, 19 nt, Artificial Sequence
  Description of Artificial Sequence: Synthetic oligonucleotide
aauagcuaaguccagccuu

SEQ ID NO: 822341 - RNA, 19 nt, Artificial Sequence
  Description of Artificial Sequence: Synthetic oligonucleotide
uuaguaaguguuuuagagu

SEQ ID NO: 822342 - RNA, 19 nt, Artificial Sequence
  Description of Artificial Sequence: Synthetic oligonucleotide
ugcaugguaacauaacaga

SEQ ID NO: 822343 - RNA, 19 nt, Artificial Sequence
  Description of Artificial Sequence: Synthetic oligonucleotide
agugauaaaguagagacaa

SEQ ID NO: 822344 - RNA, 19 nt, Artificial Sequence
  Description of Artificial Sequence: Synthetic oligonucleotide
  modified_base (4)..(4): a, c, u, g, unknown or other
ugunuggggccucucacag

SEQ ID NO: 822345 - RNA, 19 nt, Artificial Sequence
  Description of Artificial Sequence: Synthetic oligonucleotide
acaaggggaguccacacac

SEQ ID NO: 822346 - RNA, 19 nt, Artificial Sequence
  Description of Artificial Sequence: Synthetic oligonucleotide
uaauacuucagacaccuuu

SEQ ID NO: 822347 - RNA, 19 nt, Artificial Sequence
  Description of Artificial Sequence: Synthetic oligonucleotide
ugagcccuaaacaagggga

SEQ ID NO: 822348 - RNA, 19 nt, Artificial Sequence
  Description of Artificial Sequence: Synthetic oligonucleotide
augggaauuauguucaccu

SEQ ID NO: 822349 - RNA, 19 nt, Artificial Sequence
  Description of Artificial Sequence: Synthetic oligonucleotide
uaaaccuugucaguuuugg

SEQ ID NO: 822350 - RNA, 19 nt, Artificial Sequence
  Description of Artificial Sequence: Synthetic oligonucleotide
uaguaaguguuuuagaguu

SEQ ID NO: 822351 - RNA, 19 nt, Artificial Sequence
  Description of Artificial Sequence: Synthetic oligonucleotide
acuagagcggcccauaacu

SEQ ID NO: 822352 - RNA, 19 nt, Artificial Sequence
  Description of Artificial Sequence: Synthetic oligonucleotide
uggagucaaacacuuaaca

SEQ ID NO: 822353 - RNA, 19 nt, Artificial Sequence
  Description of Artificial Sequence: Synthetic oligonucleotide
aaggguacugucgugcucg

SEQ ID NO: 822354 - RNA, 19 nt, Artificial Sequence
  Description of Artificial Sequence: Synthetic oligonucleotide
auggauuaacaacugaagu

SEQ ID NO: 822355 - RNA, 19 nt, Artificial Sequence
  Description of Artificial Sequence: Synthetic oligonucleotide
uagaguuauugaaauuaag

SEQ ID NO: 822356 - RNA, 19 nt, Artificial Sequence
  Description of Artificial Sequence: Synthetic oligonucleotide
cuaggcaccacaugagucg

SEQ ID NO: 822357 - RNA, 19 nt, Artificial Sequence
  Description of Artificial Sequence: Synthetic oligonucleotide
aauuaagacucuagguuag

SEQ ID NO: 822358 - RNA, 19 nt, Artificial Sequence
  Description of Artificial Sequence: Synthetic oligonucleotide
uggggaaacugguagaucu

SEQ ID NO: 822359 - RNA, 19 nt, Artificial Sequence
  Description of Artificial Sequence: Synthetic oligonucleotide
ugagucgcuggcuugauga

SEQ ID NO: 822360 - RNA, 19 nt, Artificial Sequence
  Description of Artificial Sequence: Synthetic oligonucleotide
uaggccuagaaucacuggc

SEQ ID NO: 822361 - RNA, 19 nt, Artificial Sequence
  Description of Artificial Sequence: Synthetic oligonucleotide
aaauggauuaacaacugaa

SEQ ID NO: 822362 - RNA, 19 nt, Artificial Sequence
  Description of Artificial Sequence: Synthetic oligonucleotide
uccaggguacuucagggag

SEQ ID NO: 822363 - RNA, 19 nt, Artificial Sequence
  Description of Artificial Sequence: Synthetic oligonucleotide
uguagcaccucuagggcag

SEQ ID NO: 822364 - RNA, 19 nt, Artificial Sequence
  Description of Artificial Sequence: Synthetic oligonucleotide
acacacacacacaauauac

SEQ ID NO: 822365 - RNA, 19 nt, Artificial Sequence
  Description of Artificial Sequence: Synthetic oligonucleotide
uuagaguuauugaaauuaa

SEQ ID NO: 822366 - RNA, 19 nt, Artificial Sequence
  Description of Artificial Sequence: Synthetic oligonucleotide
ugaacccucaaauugcccu

SEQ ID NO: 822367 - RNA, 19 nt, Artificial Sequence
  Description of Artificial Sequence: Synthetic oligonucleotide
gaaugaacccucaaauugc

SEQ ID NO: 822368 - RNA, 19 nt, Artificial Sequence
  Description of Artificial Sequence: Synthetic oligonucleotide
gucuuaggggcauugagcc

SEQ ID NO: 822369 - RNA, 19 nt, Artificial Sequence
  Description of Artificial Sequence: Synthetic oligonucleotide
aacuuguggaguucgcucu

SEQ ID NO: 822370 - RNA, 19 nt, Artificial Sequence
  Description of Artificial Sequence: Synthetic oligonucleotide
agauauuauuugucuuuac

SEQ ID NO: 822371 - RNA, 19 nt, Artificial Sequence
  Description of Artificial Sequence: Synthetic oligonucleotide
  modified_base (2)..(2): a, c, u, g, unknown or other
unuggggccucucacaggu

SEQ ID NO: 822372 - RNA, 19 nt, Artificial Sequence
  Description of Artificial Sequence: Synthetic oligonucleotide
caugacuagaggcagauga

SEQ ID NO: 822373 - RNA, 19 nt, Artificial Sequence
  Description of Artificial Sequence: Synthetic oligonucleotide
ucgugcucgaaccagcuug

SEQ ID NO: 822374 - RNA, 19 nt, Artificial Sequence
  Description of Artificial Sequence: Synthetic oligonucleotide
aaaugaagguaaacaggcg

SEQ ID NO: 822375 - RNA, 19 nt, Artificial Sequence
  Description of Artificial Sequence: Synthetic oligonucleotide
guauacaccagaccacagg

SEQ ID NO: 822376 - RNA, 19 nt, Artificial Sequence
  Description of Artificial Sequence: Synthetic oligonucleotide
uccgucaaggaauagugac

SEQ ID NO: 822377 - RNA, 19 nt, Artificial Sequence
  Description of Artificial Sequence: Synthetic oligonucleotide
uaugaagcucacaagguuu

SEQ ID NO: 822378 - RNA, 19 nt, Artificial Sequence
  Description of Artificial Sequence: Synthetic oligonucleotide
cuugucuuuccucaagggc

SEQ ID NO: 822379 - RNA, 19 nt, Artificial Sequence
  Description of Artificial Sequence: Synthetic oligonucleotide
agucuugguaaauagcuaa

SEQ ID NO: 822380 - RNA, 19 nt, Artificial Sequence
  Description of Artificial Sequence: Synthetic oligonucleotide
cuguaaagaagucccaaac

SEQ ID NO: 822381 - RNA, 19 nt, Artificial Sequence
  Description of Artificial Sequence: Synthetic oligonucleotide
uuaacaacugaagugguuu

SEQ ID NO: 822382 - RNA, 19 nt, Artificial Sequence
  Description of Artificial Sequence: Synthetic oligonucleotide
auuuaguaaguguuuuaga

SEQ ID NO: 822383 - RNA, 19 nt, Artificial Sequence
  Description of Artificial Sequence: Synthetic oligonucleotide
ucucccuauauaucauagg

SEQ ID NO: 822384 - RNA, 19 nt, Artificial Sequence
  Description of Artificial Sequence: Synthetic oligonucleotide
uccacacacacacacaaua

SEQ ID NO: 822385 - RNA, 19 nt, Artificial Sequence
  Description of Artificial Sequence: Synthetic oligonucleotide
ugaugaacaauuaggccua

SEQ ID NO: 822386 - RNA, 19 nt, Artificial Sequence
  Description of Artificial Sequence: Synthetic oligonucleotide
ugacacuguaaauggaaga

SEQ ID NO: 822387 - RNA, 19 nt, Artificial Sequence
  Description of Artificial Sequence: Synthetic oligonucleotide
uguguuacuuaugaaaaua

SEQ ID NO: 822388 - RNA, 19 nt, Artificial Sequence
  Description of Artificial Sequence: Synthetic oligonucleotide
aguccaacaucaguucugc

SEQ ID NO: 822389 - RNA, 19 nt, Artificial Sequence
  Description of Artificial Sequence: Synthetic oligonucleotide
uuauugaaauuaagacucu

SEQ ID NO: 822390 - RNA, 19 nt, Artificial Sequence
  Description of Artificial Sequence: Synthetic oligonucleotide
uggaguucgcucuuggaga

SEQ ID NO: 822391 - RNA, 19 nt, Artificial Sequence
  Description of Artificial Sequence: Synthetic oligonucleotide
acagucuugguaaauagcu

SEQ ID NO: 822392 - RNA, 19 nt, Artificial Sequence
  Description of Artificial Sequence: Synthetic oligonucleotide
uaagaggagccacuggccu

SEQ ID NO: 822393 - RNA, 19 nt, Artificial Sequence
  Description of Artificial Sequence: Synthetic oligonucleotide
uagaggaguaaauggauua

SEQ ID NO: 822394 - RNA, 19 nt, Artificial Sequence
  Description of Artificial Sequence: Synthetic oligonucleotide
cuguaaauggaagaccagc

SEQ ID NO: 822395 - RNA, 19 nt, Artificial Sequence
  Description of Artificial Sequence: Synthetic oligonucleotide
auauacagugucccuaaga

SEQ ID NO: 822396 - RNA, 19 nt, Artificial Sequence
  Description of Artificial Sequence: Synthetic oligonucleotide
cuuguagcaccucuagggc

SEQ ID NO: 822397 - RNA, 19 nt, Artificial Sequence
  Description of Artificial Sequence: Synthetic oligonucleotide
uguauacaccagaccacag

SEQ ID NO: 822398 - RNA, 19 nt, Artificial Sequence
  Description of Artificial Sequence: Synthetic oligonucleotide
cauguauacaccagaccac

SEQ ID NO: 822399 - RNA, 19 nt, Artificial Sequence
  Description of Artificial Sequence: Synthetic oligonucleotide
auaggaacuuuauuuccca

SEQ ID NO: 822400 - RNA, 19 nt, Artificial Sequence
  Description of Artificial Sequence: Synthetic oligonucleotide
cuuugacacguuugcauag

SEQ ID NO: 822401 - RNA, 19 nt, Artificial Sequence
  Description of Artificial Sequence: Synthetic oligonucleotide
uuaggccuagaaucacugg

SEQ ID NO: 822402 - RNA, 19 nt, Artificial Sequence
  Description of Artificial Sequence: Synthetic oligonucleotide
auaucauaggggugcuuuc

SEQ ID NO: 822403 - RNA, 19 nt, Artificial Sequence
  Description of Artificial Sequence: Synthetic oligonucleotide
uuguugcccaccuucaccu

SEQ ID NO: 822404 - RNA, 19 nt, Artificial Sequence
  Description of Artificial Sequence: Synthetic oligonucleotide
cuaagaggagccacuggcc

SEQ ID NO: 822405 - RNA, 19 nt, Artificial Sequence
  Description of Artificial Sequence: Synthetic oligonucleotide
guguuuuagaguuauugaa

SEQ ID NO: 822406 - RNA, 19 nt, Artificial Sequence
  Description of Artificial Sequence: Synthetic oligonucleotide
cucucccuauauaucauag

SEQ ID NO: 822407 - RNA, 19 nt, Artificial Sequence
  Description of Artificial Sequence: Synthetic oligonucleotide
ugagcacauugauugggag

SEQ ID NO: 822408 - RNA, 19 nt, Artificial Sequence
  Description of Artificial Sequence: Synthetic oligonucleotide
uugacacguuugcauagag

SEQ ID NO: 822409 - RNA, 19 nt, Artificial Sequence
  Description of Artificial Sequence: Synthetic oligonucleotide
gaaggcguuggucuccucc

SEQ ID NO: 822410 - RNA, 19 nt, Artificial Sequence
  Description of Artificial Sequence: Synthetic oligonucleotide
aaguaacaaugaccuugac

SEQ ID NO: 822411 - RNA, 19 nt, Artificial Sequence
  Description of Artificial Sequence: Synthetic oligonucleotide
aaacaagucaauggauaga

SEQ ID NO: 822412 - RNA, 19 nt, Artificial Sequence
  Description of Artificial Sequence: Synthetic oligonucleotide
uuggagucaaacacuuaac

SEQ ID NO: 822413 - RNA, 19 nt, Artificial Sequence
  Description of Artificial Sequence: Synthetic oligonucleotide
uauaucauaggggugcuuu

SEQ ID NO: 822414 - RNA, 19 nt, Artificial Sequence
  Description of Artificial Sequence: Synthetic oligonucleotide
aaccgaauuuuauauucuu

SEQ ID NO: 822415 - RNA, 19 nt, Artificial Sequence
  Description of Artificial Sequence: Synthetic oligonucleotide
aacaaggggaguccacaca

SEQ ID NO: 822416 - RNA, 19 nt, Artificial Sequence
  Description of Artificial Sequence: Synthetic oligonucleotide
acugagcacauugauuggg

SEQ ID NO: 822417 - RNA, 19 nt, Artificial Sequence
  Description of Artificial Sequence: Synthetic oligonucleotide
ucuauguaagaagguuuag

SEQ ID NO: 822418 - RNA, 19 nt, Artificial Sequence
  Description of Artificial Sequence: Synthetic oligonucleotide
ugcaguucaccucugccuc

SEQ ID NO: 822419 - RNA, 19 nt, Artificial Sequence
  Description of Artificial Sequence: Synthetic oligonucleotide
aguccacacacacacacaa

SEQ ID NO: 822420 - RNA, 19 nt, Artificial Sequence
  Description of Artificial Sequence: Synthetic oligonucleotide
aaggaauagugacacugua

SEQ ID NO: 822421 - RNA, 19 nt, Artificial Sequence
  Description of Artificial Sequence: Synthetic oligonucleotide
aaaccuugucaguuuugga

SEQ ID NO: 822422 - RNA, 19 nt, Artificial Sequence
  Description of Artificial Sequence: Synthetic oligonucleotide
gaauuuugcagcauguaua

SEQ ID NO: 822423 - RNA, 19 nt, Artificial Sequence
  Description of Artificial Sequence: Synthetic oligonucleotide
ucuugguaaauagcuaagu

SEQ ID NO: 822424 - RNA, 19 nt, Artificial Sequence
  Description of Artificial Sequence: Synthetic oligonucleotide
aauggauagaggaguaaau

SEQ ID NO: 822425 - RNA, 19 nt, Artificial Sequence
  Description of Artificial Sequence: Synthetic oligonucleotide
ggaauagugacacuguaaa

SEQ ID NO: 822426 - RNA, 19 nt, Artificial Sequence
  Description of Artificial Sequence: Synthetic oligonucleotide
guaaacaggcgaauuuugc

SEQ ID NO: 822427 - RNA, 19 nt, Artificial Sequence
  Description of Artificial Sequence: Synthetic oligonucleotide
gcucacaagguuuccaagg

SEQ ID NO: 822428 - RNA, 19 nt, Artificial Sequence
  Description of Artificial Sequence: Synthetic oligonucleotide
uuguagcaccucuagggca

SEQ ID NO: 822429 - RNA, 19 nt, Artificial Sequence
  Description of Artificial Sequence: Synthetic oligonucleotide
cagaauaggaacuuuauuu

SEQ ID NO: 822430 - RNA, 19 nt, Artificial Sequence
  Description of Artificial Sequence: Synthetic oligonucleotide
caaacacuuaacacacaug

SEQ ID NO: 822431 - RNA, 19 nt, Artificial Sequence
  Description of Artificial Sequence: Synthetic oligonucleotide
ugacuagaggcagaugagc

SEQ ID NO: 822432 - RNA, 19 nt, Artificial Sequence
  Description of Artificial Sequence: Synthetic oligonucleotide
aagcucacaagguuuccaa

SEQ ID NO: 822433 - RNA, 19 nt, Artificial Sequence
  Description of Artificial Sequence: Synthetic oligonucleotide
ccucaaauugcccuaauac

SEQ ID NO: 822434 - RNA, 19 nt, Artificial Sequence
  Description of Artificial Sequence: Synthetic oligonucleotide
guacaaaguggaaggaaag

SEQ ID NO: 822435 - RNA, 19 nt, Artificial Sequence
  Description of Artificial Sequence: Synthetic oligonucleotide
aaggcguuggucuccuccu

SEQ ID NO: 822436 - RNA, 19 nt, Artificial Sequence
  Description of Artificial Sequence: Synthetic oligonucleotide
ggggcauugagccucagug

SEQ ID NO: 822437 - RNA, 19 nt, Artificial Sequence
  Description of Artificial Sequence: Synthetic oligonucleotide
guuuuagaaaugcauggua

SEQ ID NO: 822438 - RNA, 19 nt, Artificial Sequence
  Description of Artificial Sequence: Synthetic oligonucleotide
guacugucgugcucgaacc

SEQ ID NO: 822439 - RNA, 19 nt, Artificial Sequence
  Description of Artificial Sequence: Synthetic oligonucleotide
uucagggagugcccguggg

SEQ ID NO: 822440 - RNA, 19 nt, Artificial Sequence
  Description of Artificial Sequence: Synthetic oligonucleotide
gagcuaugaagcucacaag

SEQ ID NO: 822441 - RNA, 19 nt, Artificial Sequence
  Description of Artificial Sequence: Synthetic oligonucleotide
  modified_base (7)..(7): a, c, u, g, unknown or other
ugcugunuggggccucuca

SEQ ID NO: 822442 - RNA, 19 nt, Artificial Sequence
  Description of Artificial Sequence: Synthetic oligonucleotide
ucgcucuuggagauggugu

SEQ ID NO: 822443 - RNA, 19 nt, Artificial Sequence
  Description of Artificial Sequence: Synthetic oligonucleotide
cucucacagguacaagagg

SEQ ID NO: 822444 - RNA, 19 nt, Artificial Sequence
  Description of Artificial Sequence: Synthetic oligonucleotide
auagagagggguagcuggc

SEQ ID NO: 822445 - RNA, 19 nt, Artificial Sequence
  Description of Artificial Sequence: Synthetic oligonucleotide
agugugagcccuaaacaag

SEQ ID NO: 822446 - RNA, 19 nt, Artificial Sequence
  Description of Artificial Sequence: Synthetic oligonucleotide
agugucccuaagaggagcc

SEQ ID NO: 822447 - RNA, 19 nt, Artificial Sequence
  Description of Artificial Sequence: Synthetic oligonucleotide
gcagacacuauucuccugc

SEQ ID NO: 822448 - RNA, 19 nt, Artificial Sequence
  Description of Artificial Sequence: Synthetic oligonucleotide
acgccuaggcaccacauga

SEQ ID NO: 822449 - RNA, 19 nt, Artificial Sequence
  Description of Artificial Sequence: Synthetic oligonucleotide
aacugcuccgucaaggaau

SEQ ID NO: 822450 - RNA, 19 nt, Artificial Sequence
  Description of Artificial Sequence: Synthetic oligonucleotide
uagauauuauuugucuuua

SEQ ID NO: 822451 - RNA, 19 nt, Artificial Sequence
  Description of Artificial Sequence: Synthetic oligonucleotide
cuagggcagagacaagggc

SEQ ID NO: 822452 - RNA, 19 nt, Artificial Sequence
  Description of Artificial Sequence: Synthetic oligonucleotide
cauaggggugcuuucuaug

SEQ ID NO: 822453 - RNA, 19 nt, Artificial Sequence
  Description of Artificial Sequence: Synthetic oligonucleotide
cuuaggggcauugagccuc

SEQ ID NO: 822454 - RNA, 19 nt, Artificial Sequence
  Description of Artificial Sequence: Synthetic oligonucleotide
aggaguaaauggauuaaca

SEQ ID NO: 822455 - RNA, 19 nt, Artificial Sequence
  Description of Artificial Sequence: Synthetic oligonucleotide
cuaaacaaggggaguccac

SEQ ID NO: 822456 - RNA, 19 nt, Artificial Sequence
  Description of Artificial Sequence: Synthetic oligonucleotide
gguuuccaaggccugaacc

SEQ ID NO: 822457 - RNA, 19 nt, Artificial Sequence
  Description of Artificial Sequence: Synthetic oligonucleotide
uuaagacucuagguuagaa

SEQ ID NO: 822458 - RNA, 19 nt, Artificial Sequence
  Description of Artificial Sequence: Synthetic oligonucleotide
auacaccagaccacaggcc

SEQ ID NO: 822459 - RNA, 19 nt, Artificial Sequence
  Description of Artificial Sequence: Synthetic oligonucleotide
cagcauguauacaccagac

SEQ ID NO: 822460 - RNA, 19 nt, Artificial Sequence
  Description of Artificial Sequence: Synthetic oligonucleotide
gauagauauuauuugucuu

SEQ ID NO: 822461 - RNA, 19 nt, Artificial Sequence
  Description of Artificial Sequence: Synthetic oligonucleotide
agcggcccauaacugcucc

SEQ ID NO: 822462 - RNA, 19 nt, Artificial Sequence
  Description of Artificial Sequence: Synthetic oligonucleotide
auguauacaccagaccaca

SEQ ID NO: 822463 - RNA, 19 nt, Artificial Sequence
  Description of Artificial Sequence: Synthetic oligonucleotide
uauugaaauuaagacucua

SEQ ID NO: 822464 - RNA, 19 nt, Artificial Sequence
  Description of Artificial Sequence: Synthetic oligonucleotide
agccucaucguccgugggg

SEQ ID NO: 822465 - RNA, 19 nt, Artificial Sequence
  Description of Artificial Sequence: Synthetic oligonucleotide
agcucacaagguuuccaag

SEQ ID NO: 822466 - RNA, 19 nt, Artificial Sequence
  Description of Artificial Sequence: Synthetic oligonucleotide
ugaauucgcuucaggugcu

SEQ ID NO: 822467 - RNA, 19 nt, Artificial Sequence
  Description of Artificial Sequence: Synthetic oligonucleotide
uauauaucauaggggugcu

SEQ ID NO: 822468 - RNA, 19 nt, Artificial Sequence
  Description of Artificial Sequence: Synthetic oligonucleotide
auugagccucaguggacuc

SEQ ID NO: 822469 - RNA, 19 nt, Artificial Sequence
  Description of Artificial Sequence: Synthetic oligonucleotide
aggcgaauuuugcagcaug

SEQ ID NO: 822470 - RNA, 19 nt, Artificial Sequence
  Description of Artificial Sequence: Synthetic oligonucleotide
gguacugucgugcucgaac

SEQ ID NO: 822471 - RNA, 19 nt, Artificial Sequence
  Description of Artificial Sequence: Synthetic oligonucleotide
aucaggcaaucuguguuac

SEQ ID NO: 822472 - RNA, 19 nt, Artificial Sequence
  Description of Artificial Sequence: Synthetic oligonucleotide
uuugacacguuugcauaga

SEQ ID NO: 822473 - RNA, 19 nt, Artificial Sequence
  Description of Artificial Sequence: Synthetic oligonucleotide
cugcauugaucucugcaac

SEQ ID NO: 822474 - RNA, 19 nt, Artificial Sequence
  Description of Artificial Sequence: Synthetic oligonucleotide
gucucuuacccagugugag

SEQ ID NO: 822475 - RNA, 19 nt, Artificial Sequence
  Description of Artificial Sequence: Synthetic oligonucleotide
ggauccacccuggacaugg

SEQ ID NO: 822476 - RNA, 19 nt, Artificial Sequence
  Description of Artificial Sequence: Synthetic oligonucleotide
cuauguaagaagguuuaga

SEQ ID NO: 822477 - RNA, 19 nt, Artificial Sequence
  Description of Artificial Sequence: Synthetic oligonucleotide
ggaguccacacacacacac

SEQ ID NO: 822478 - RNA, 19 nt, Artificial Sequence
  Description of Artificial Sequence: Synthetic oligonucleotide
gcuuaaaacagucuuggua

SEQ ID NO: 822479 - RNA, 19 nt, Artificial Sequence
  Description of Artificial Sequence: Synthetic oligonucleotide
gagcccuaaacaaggggag

SEQ ID NO: 822480 - RNA, 19 nt, Artificial Sequence
  Description of Artificial Sequence: Synthetic oligonucleotide
acaggcgaauuuugcagca

SEQ ID NO: 822481 - RNA, 19 nt, Artificial Sequence
  Description of Artificial Sequence: Synthetic oligonucleotide
gaacaauuaggccuagaau

SEQ ID NO: 822482 - RNA, 19 nt, Artificial Sequence
  Description of Artificial Sequence: Synthetic oligonucleotide
cuagagcggcccauaacug

SEQ ID NO: 822483 - RNA, 19 nt, Artificial Sequence
  Description of Artificial Sequence: Synthetic oligonucleotide
guaacauaacagacaagca

SEQ ID NO: 822484 - RNA, 19 nt, Artificial Sequence
  Description of Artificial Sequence: Synthetic oligonucleotide
cacacacacacaauauaca

SEQ ID NO: 822485 - RNA, 19 nt, Artificial Sequence
  Description of Artificial Sequence: Synthetic oligonucleotide
ucccaacugagcacauuga

SEQ ID NO: 822486 - RNA, 19 nt, Artificial Sequence
  Description of Artificial Sequence: Synthetic oligonucleotide
uugcguuucucuuccuggu

SEQ ID NO: 822487 - RNA, 19 nt, Artificial Sequence
  Description of Artificial Sequence: Synthetic oligonucleotide
gucuugguaaauagcuaag

SEQ ID NO: 822488 - RNA, 19 nt, Artificial Sequence
  Description of Artificial Sequence: Synthetic oligonucleotide
uguggaguucgcucuugga

SEQ ID NO: 822489 - RNA, 19 nt, Artificial Sequence
  Description of Artificial Sequence: Synthetic oligonucleotide
aagugguuuuagaaaugca

SEQ ID NO: 822490 - RNA, 19 nt, Artificial Sequence
  Description of Artificial Sequence: Synthetic oligonucleotide
uaacaacugaagugguuuu

SEQ ID NO: 822491 - RNA, 19 nt, Artificial Sequence
  Description of Artificial Sequence: Synthetic oligonucleotide
augaacccucaaauugccc

SEQ ID NO: 822492 - RNA, 19 nt, Artificial Sequence
  Description of Artificial Sequence: Synthetic oligonucleotide
gggucucuuacccagugug

SEQ ID NO: 822493 - RNA, 19 nt, Artificial Sequence
  Description of Artificial Sequence: Synthetic oligonucleotide
ugucgugcucgaaccagcu

SEQ ID NO: 822494 - RNA, 19 nt, Artificial Sequence
  Description of Artificial Sequence: Synthetic oligonucleotide
uucgcucuuggagauggug

SEQ ID NO: 822495 - RNA, 19 nt, Artificial Sequence
  Description of Artificial Sequence: Synthetic oligonucleotide
augacuagaggcagaugag

SEQ ID NO: 822496 - RNA, 19 nt, Artificial Sequence
  Description of Artificial Sequence: Synthetic oligonucleotide
acugucgugcucgaaccag

SEQ ID NO: 822497 - RNA, 19 nt, Artificial Sequence
  Description of Artificial Sequence: Synthetic oligonucleotide
ggauagaggaguaaaugga

SEQ ID NO: 822498 - RNA, 19 nt, Artificial Sequence
  Description of Artificial Sequence: Synthetic oligonucleotide
ugcuccgucaaggaauagu

SEQ ID NO: 822499 - RNA, 19 nt, Artificial Sequence
  Description of Artificial Sequence: Synthetic oligonucleotide
acacguuugcauagagagg

SEQ ID NO: 822500 - RNA, 19 nt, Artificial Sequence
  Description of Artificial Sequence: Synthetic oligonucleotide
aacaacugaagugguuuua

SEQ ID NO: 822501 - RNA, 19 nt, Artificial Sequence
  Description of Artificial Sequence: Synthetic oligonucleotide
ugucccuaagaggagccac

SEQ ID NO: 822502 - RNA, 19 nt, Artificial Sequence
  Description of Artificial Sequence: Synthetic oligonucleotide
acuagaggcagaugagcua

SEQ ID NO: 822503 - RNA, 19 nt, Artificial Sequence
  Description of Artificial Sequence: Synthetic oligonucleotide
auuuuccucagagcaucag

SEQ ID NO: 822504 - RNA, 19 nt, Artificial Sequence
  Description of Artificial Sequence: Synthetic oligonucleotide
uacugucgugcucgaacca

SEQ ID NO: 822505 - RNA, 19 nt, Artificial Sequence
  Description of Artificial Sequence: Synthetic oligonucleotide
ucaauggauagaggaguaa

SEQ ID NO: 822506 - RNA, 19 nt, Artificial Sequence
  Description of Artificial Sequence: Synthetic oligonucleotide
ucuuaggggcauugagccu

SEQ ID NO: 822507 - RNA, 19 nt, Artificial Sequence
  Description of Artificial Sequence: Synthetic oligonucleotide
  modified_base (3)..(3): a, c, u, g, unknown or other
gunuggggccucucacagg

SEQ ID NO: 822508 - RNA, 19 nt, Artificial Sequence
  Description of Artificial Sequence: Synthetic oligonucleotide
gguaaacaggcgaauuuug

SEQ ID NO: 822509 - RNA, 19 nt, Artificial Sequence
  Description of Artificial Sequence: Synthetic oligonucleotide
ucaucguccguggggaaac

SEQ ID NO: 822510 - RNA, 19 nt, Artificial Sequence
  Description of Artificial Sequence: Synthetic oligonucleotide
augaagguaaacaggcgaa

SEQ ID NO: 822511 - RNA, 19 nt, Artificial Sequence
  Description of Artificial Sequence: Synthetic oligonucleotide
cugucgugcucgaaccagc

SEQ ID NO: 822512 - RNA, 19 nt, Artificial Sequence
  Description of Artificial Sequence: Synthetic oligonucleotide
ggcauugagccucagugga

SEQ ID NO: 822513 - RNA, 19 nt, Artificial Sequence
  Description of Artificial Sequence: Synthetic oligonucleotide
ggucuuaggggcauugagc

SEQ ID NO: 822514 - RNA, 19 nt, Artificial Sequence
  Description of Artificial Sequence: Synthetic oligonucleotide
ucacuagagcggcccauaa

SEQ ID NO: 822515 - RNA, 19 nt, Artificial Sequence
  Description of Artificial Sequence: Synthetic oligonucleotide
accuugacaugacagccuu

SEQ ID NO: 822516 - RNA, 19 nt, Artificial Sequence
  Description of Artificial Sequence: Synthetic oligonucleotide
agaggaguaaauggauuaa

SEQ ID NO: 822517 - RNA, 19 nt, Artificial Sequence
  Description of Artificial Sequence: Synthetic oligonucleotide
gaagcucacaagguuucca

SEQ ID NO: 822518 - RNA, 19 nt, Artificial Sequence
  Description of Artificial Sequence: Synthetic oligonucleotide
ccuauauaucauaggggug

SEQ ID NO: 822519 - RNA, 19 nt, Artificial Sequence
  Description of Artificial Sequence: Synthetic oligonucleotide
uaggcaccacaugagucgc

SEQ ID NO: 822520 - RNA, 19 nt, Artificial Sequence
  Description of Artificial Sequence: Synthetic oligonucleotide
ugggaauuauguucaccuu

SEQ ID NO: 822521 - RNA, 19 nt, Artificial Sequence
  Description of Artificial Sequence: Synthetic oligonucleotide
caggccacgccuaggcacc

SEQ ID NO: 822522 - RNA, 19 nt, Artificial Sequence
  Description of Artificial Sequence: Synthetic oligonucleotide
caugcagggccugagccug

SEQ ID NO: 822523 - RNA, 19 nt, Artificial Sequence
  Description of Artificial Sequence: Synthetic oligonucleotide
guaagaagguuuagagguc

SEQ ID NO: 822524 - RNA, 19 nt, Artificial Sequence
  Description of Artificial Sequence: Synthetic oligonucleotide
auagaggaguaaauggauu

SEQ ID NO: 822525 - RNA, 19 nt, Artificial Sequence
  Description of Artificial Sequence: Synthetic oligonucleotide
uuaggggcauugagccuca

SEQ ID NO: 822526 - RNA, 19 nt, Artificial Sequence
  Description of Artificial Sequence: Synthetic oligonucleotide
gucgcuggcuugaugauga

SEQ ID NO: 822527 - RNA, 19 nt, Artificial Sequence
  Description of Artificial Sequence: Synthetic oligonucleotide
auuaagacucuagguuaga

SEQ ID NO: 822528 - RNA, 19 nt, Artificial Sequence
  Description of Artificial Sequence: Synthetic oligonucleotide
gaauagugacacuguaaau

SEQ ID NO: 822529 - RNA, 19 nt, Artificial Sequence
  Description of Artificial Sequence: Synthetic oligonucleotide
gacuagaggcagaugagcu

SEQ ID NO: 822530 - RNA, 19 nt, Artificial Sequence
  Description of Artificial Sequence: Synthetic oligonucleotide
gcuccgucaaggaauagug

SEQ ID NO: 822531 - RNA, 19 nt, Artificial Sequence
  Description of Artificial Sequence: Synthetic oligonucleotide
gccuagaaucacuggcugg

SEQ ID NO: 822532 - RNA, 19 nt, Artificial Sequence
  Description of Artificial Sequence: Synthetic oligonucleotide
cagggagugcccgugggag

SEQ ID NO: 822533 - RNA, 19 nt, Artificial Sequence
  Description of Artificial Sequence: Synthetic oligonucleotide
cccagugugagcccuaaac

SEQ ID NO: 822534 - RNA, 19 nt, Artificial Sequence
  Description of Artificial Sequence: Synthetic oligonucleotide
ucaggcaaucuguguuacu

SEQ ID NO: 822535 - RNA, 19 nt, Artificial Sequence
  Description of Artificial Sequence: Synthetic oligonucleotide
agaggcagaugagcuauga

SEQ ID NO: 822536 - RNA, 19 nt, Artificial Sequence
  Description of Artificial Sequence: Synthetic oligonucleotide
gcaccucuagggcagagac

SEQ ID NO: 822537 - RNA, 19 nt, Artificial Sequence
  Description of Artificial Sequence: Synthetic oligonucleotide
caggguacuucagggagug

SEQ ID NO: 822538 - RNA, 19 nt, Artificial Sequence
  Description of Artificial Sequence: Synthetic oligonucleotide
gauuaacaacugaaguggu

SEQ ID NO: 822539 - RNA, 19 nt, Artificial Sequence
  Description of Artificial Sequence: Synthetic oligonucleotide
ucgaaccagcuuguugccc

SEQ ID NO: 822540 - RNA, 19 nt, Artificial Sequence
  Description of Artificial Sequence: Synthetic oligonucleotide
cagugucccuaagaggagc

SEQ ID NO: 822541 - RNA, 19 nt, Artificial Sequence
  Description of Artificial Sequence: Synthetic oligonucleotide
aggccuagaaucacuggcu

SEQ ID NO: 822542 - RNA, 19 nt, Artificial Sequence
  Description of Artificial Sequence: Synthetic oligonucleotide
cuugacaugacagccuucu

SEQ ID NO: 822543 - RNA, 19 nt, Artificial Sequence
  Description of Artificial Sequence: Synthetic oligonucleotide
cugggucucuuacccagug

SEQ ID NO: 822544 - RNA, 19 nt, Artificial Sequence
  Description of Artificial Sequence: Synthetic oligonucleotide
uugagccucaguggacuca

SEQ ID NO: 822545 - RNA, 19 nt, Artificial Sequence
  Description of Artificial Sequence: Synthetic oligonucleotide
agagcggcccauaacugcu

SEQ ID NO: 822546 - RNA, 19 nt, Artificial Sequence
  Description of Artificial Sequence: Synthetic oligonucleotide
cccuauauaucauaggggu

SEQ ID NO: 822547 - RNA, 19 nt, Artificial Sequence
  Description of Artificial Sequence: Synthetic oligonucleotide
cacuagagcggcccauaac

SEQ ID NO: 822548 - RNA, 19 nt, Artificial Sequence
  Description of Artificial Sequence: Synthetic oligonucleotide
accgaauuuuauauucuuu

SEQ ID NO: 822549 - RNA, 19 nt, Artificial Sequence
  Description of Artificial Sequence: Synthetic oligonucleotide
  modified_base (5)..(5): a, c, u, g, unknown or other
cugunuggggccucucaca

SEQ ID NO: 822550 - RNA, 19 nt, Artificial Sequence
  Description of Artificial Sequence: Synthetic oligonucleotide
cacacacacacacaauaua

SEQ ID NO: 822551 - RNA, 19 nt, Artificial Sequence
  Description of Artificial Sequence: Synthetic oligonucleotide
uacuucagggagugcccgu

SEQ ID NO: 822552 - RNA, 19 nt, Artificial Sequence
  Description of Artificial Sequence: Synthetic oligonucleotide
acucugaaugaacccucaa

SEQ ID NO: 822553 - RNA, 19 nt, Artificial Sequence
  Description of Artificial Sequence: Synthetic oligonucleotide
cucacaaccuuccccucca

SEQ ID NO: 822554 - RNA, 19 nt, Artificial Sequence
  Description of Artificial Sequence: Synthetic oligonucleotide
caaggaauagugacacugu

SEQ ID NO: 822555 - RNA, 19 nt, Artificial Sequence
  Description of Artificial Sequence: Synthetic oligonucleotide
auuuugcagcauguauaca

SEQ ID NO: 822556 - RNA, 19 nt, Artificial Sequence
  Description of Artificial Sequence: Synthetic oligonucleotide
acagguacaagaggucuua

SEQ ID NO: 822557 - RNA, 19 nt, Artificial Sequence
  Description of Artificial Sequence: Synthetic oligonucleotide
uucucguggagcucccguu

SEQ ID NO: 822558 - RNA, 19 nt, Artificial Sequence
  Description of Artificial Sequence: Synthetic oligonucleotide
ggccuagaaucacuggcug

SEQ ID NO: 822559 - RNA, 19 nt, Artificial Sequence
  Description of Artificial Sequence: Synthetic oligonucleotide
agucgcuggcuugaugaug

SEQ ID NO: 822560 - RNA, 19 nt, Artificial Sequence
  Description of Artificial Sequence: Synthetic oligonucleotide
  modified_base (6)..(6): a, c, u, g, unknown or other
gcugunuggggccucucac

SEQ ID NO: 822561 - RNA, 19 nt, Artificial Sequence
  Description of Artificial Sequence: Synthetic oligonucleotide
cauugauugggagcaggca

SEQ ID NO: 822562 - RNA, 19 nt, Artificial Sequence
  Description of Artificial Sequence: Synthetic oligonucleotide
ccuaggcaccacaugaguc

SEQ ID NO: 822563 - RNA, 19 nt, Artificial Sequence
  Description of Artificial Sequence: Synthetic oligonucleotide
ggacucacaaccuuccccu

SEQ ID NO: 822564 - RNA, 19 nt, Artificial Sequence
  Description of Artificial Sequence: Synthetic oligonucleotide
accacaugagucgcuggcu

SEQ ID NO: 822565 - RNA, 19 nt, Artificial Sequence
  Description of Artificial Sequence: Synthetic oligonucleotide
acaagaggucuuaggggca

SEQ ID NO: 822566 - RNA, 19 nt, Artificial Sequence
  Description of Artificial Sequence: Synthetic oligonucleotide
acguuugcauagagagggg

SEQ ID NO: 822567 - RNA, 19 nt, Artificial Sequence
  Description of Artificial Sequence: Synthetic oligonucleotide
cacucugaaugaacccuca

SEQ ID NO: 822568 - RNA, 19 nt, Artificial Sequence
  Description of Artificial Sequence: Synthetic oligonucleotide
caaugaccuugacaugaca

SEQ ID NO: 822569 - RNA, 19 nt, Artificial Sequence
  Description of Artificial Sequence: Synthetic oligonucleotide
gaugagcuaugaagcucac

SEQ ID NO: 822570 - RNA, 19 nt, Artificial Sequence
  Description of Artificial Sequence: Synthetic oligonucleotide
cacgccuaggcaccacaug

SEQ ID NO: 822571 - RNA, 19 nt, Artificial Sequence
  Description of Artificial Sequence: Synthetic oligonucleotide
cuccgucaaggaauaguga

SEQ ID NO: 822572 - RNA, 19 nt, Artificial Sequence
  Description of Artificial Sequence: Synthetic oligonucleotide
aggggcauugagccucagu

SEQ ID NO: 822573 - RNA, 19 nt, Artificial Sequence
  Description of Artificial Sequence: Synthetic oligonucleotide
gggagugauaaaguagaga

SEQ ID NO: 822574 - RNA, 19 nt, Artificial Sequence
  Description of Artificial Sequence: Synthetic oligonucleotide
cauaacagacaagcaagcu

SEQ ID NO: 822575 - RNA, 19 nt, Artificial Sequence
  Description of Artificial Sequence: Synthetic oligonucleotide
caaggguacugucgugcuc

SEQ ID NO: 822576 - RNA, 19 nt, Artificial Sequence
  Description of Artificial Sequence: Synthetic oligonucleotide
cauugcugaccagcucacc

SEQ ID NO: 822577 - RNA, 19 nt, Artificial Sequence
  Description of Artificial Sequence: Synthetic oligonucleotide
gaguccacacacacacaca

SEQ ID NO: 822578 - RNA, 19 nt, Artificial Sequence
  Description of Artificial Sequence: Synthetic oligonucleotide
caguucaccucugccucag

SEQ ID NO: 822579 - RNA, 19 nt, Artificial Sequence
  Description of Artificial Sequence: Synthetic oligonucleotide
agcccuaaacaaggggagu

SEQ ID NO: 822580 - RNA, 19 nt, Artificial Sequence
  Description of Artificial Sequence: Synthetic oligonucleotide
gugcccgugggagugauaa

SEQ ID NO: 822581 - RNA, 19 nt, Artificial Sequence
  Description of Artificial Sequence: Synthetic oligonucleotide
augaacaauuaggccuaga

SEQ ID NO: 822582 - RNA, 19 nt, Artificial Sequence
  Description of Artificial Sequence: Synthetic oligonucleotide
gucaauggauagaggagua

SEQ ID NO: 822583 - RNA, 19 nt, Artificial Sequence
  Description of Artificial Sequence: Synthetic oligonucleotide
gcucgaacuucucguggag

SEQ ID NO: 822584 - RNA, 19 nt, Artificial Sequence
  Description of Artificial Sequence: Synthetic oligonucleotide
augagcuaugaagcucaca

SEQ ID NO: 822585 - RNA, 19 nt, Artificial Sequence
  Description of Artificial Sequence: Synthetic oligonucleotide
agggagugcccgugggagu

SEQ ID NO: 822586 - RNA, 19 nt, Artificial Sequence
  Description of Artificial Sequence: Synthetic oligonucleotide
gggaaagauagauauuauu

SEQ ID NO: 822587 - RNA, 19 nt, Artificial Sequence
  Description of Artificial Sequence: Synthetic oligonucleotide
ccuaauacuucagacaccu

SEQ ID NO: 822588 - RNA, 19 nt, Artificial Sequence
  Description of Artificial Sequence: Synthetic oligonucleotide
cuagaggcagaugagcuau

SEQ ID NO: 822589 - RNA, 19 nt, Artificial Sequence
  Description of Artificial Sequence: Synthetic oligonucleotide
uuacccagugugagcccua

SEQ ID NO: 822590 - RNA, 19 nt, Artificial Sequence
  Description of Artificial Sequence: Synthetic oligonucleotide
ccugaaccgaauuuuauau

SEQ ID NO: 822591 - RNA, 19 nt, Artificial Sequence
  Description of Artificial Sequence: Synthetic oligonucleotide
caaggggaguccacacaca

SEQ ID NO: 822592 - RNA, 19 nt, Artificial Sequence
  Description of Artificial Sequence: Synthetic oligonucleotide
cuguguuacuuaugaaaau

SEQ ID NO: 822593 - RNA, 19 nt, Artificial Sequence
  Description of Artificial Sequence: Synthetic oligonucleotide
gcaguugaaggcguugguc

SEQ ID NO: 822594 - RNA, 19 nt, Artificial Sequence
  Description of Artificial Sequence: Synthetic oligonucleotide
aucguccguggggaaacug

SEQ ID NO: 822595 - RNA, 19 nt, Artificial Sequence
  Description of Artificial Sequence: Synthetic oligonucleotide
acugcuccgucaaggaaua

SEQ ID NO: 822596 - RNA, 19 nt, Artificial Sequence
  Description of Artificial Sequence: Synthetic oligonucleotide
agcaccucuagggcagaga

SEQ ID NO: 822597 - RNA, 19 nt, Artificial Sequence
  Description of Artificial Sequence: Synthetic oligonucleotide
gccugaaccgaauuuuaua

SEQ ID NO: 822598 - RNA, 19 nt, Artificial Sequence
  Description of Artificial Sequence: Synthetic oligonucleotide
gcauagagagggguagcug

SEQ ID NO: 822599 - RNA, 19 nt, Artificial Sequence
  Description of Artificial Sequence: Synthetic oligonucleotide
aucacuagagcggcccaua

SEQ ID NO: 822600 - RNA, 19 nt, Artificial Sequence
  Description of Artificial Sequence: Synthetic oligonucleotide
aguggcaugcagggccuga

SEQ ID NO: 822601 - RNA, 19 nt, Artificial Sequence
  Description of Artificial Sequence: Synthetic oligonucleotide
gaccuugacaugacagccu

SEQ ID NO: 822602 - RNA, 19 nt, Artificial Sequence
  Description of Artificial Sequence: Synthetic oligonucleotide
gaguucgcucuuggagaug

SEQ ID NO: 822603 - RNA, 19 nt, Artificial Sequence
  Description of Artificial Sequence: Synthetic oligonucleotide
aguucaccucugccucaga

SEQ ID NO: 822604 - RNA, 19 nt, Artificial Sequence
  Description of Artificial Sequence: Synthetic oligonucleotide
ccgucaaggaauagugaca

SEQ ID NO: 822605 - RNA, 19 nt, Artificial Sequence
  Description of Artificial Sequence: Synthetic oligonucleotide
auauaucauaggggugcuu

SEQ ID NO: 822606 - RNA, 19 nt, Artificial Sequence
  Description of Artificial Sequence: Synthetic oligonucleotide
caagcaagcuggcuuuccu

SEQ ID NO: 822607 - RNA, 19 nt, Artificial Sequence
  Description of Artificial Sequence: Synthetic oligonucleotide
cauucaugacugcauugau

SEQ ID NO: 822608 - RNA, 19 nt, Artificial Sequence
  Description of Artificial Sequence: Synthetic oligonucleotide
cugaaccgaauuuuauauu

SEQ ID NO: 822609 - RNA, 19 nt, Artificial Sequence
  Description of Artificial Sequence: Synthetic oligonucleotide
aggguacugucgugcucga

SEQ ID NO: 822610 - RNA, 19 nt, Artificial Sequence
  Description of Artificial Sequence: Synthetic oligonucleotide
caccucuagggcagagaca

SEQ ID NO: 822611 - RNA, 19 nt, Artificial Sequence
  Description of Artificial Sequence: Synthetic oligonucleotide
guggggaaacugguagauc

SEQ ID NO: 822612 - RNA, 19 nt, Artificial Sequence
  Description of Artificial Sequence: Synthetic oligonucleotide
uacccagugugagcccuaa

SEQ ID NO: 822613 - RNA, 19 nt, Artificial Sequence
  Description of Artificial Sequence: Synthetic oligonucleotide
ccaccucucccuauauauc

SEQ ID NO: 822614 - RNA, 19 nt, Artificial Sequence
  Description of Artificial Sequence: Synthetic oligonucleotide
gagggguagcuggccggag

SEQ ID NO: 822615 - RNA, 19 nt, Artificial Sequence
  Description of Artificial Sequence: Synthetic oligonucleotide
cuuugccuccaagccagga

SEQ ID NO: 822616 - RNA, 19 nt, Artificial Sequence
  Description of Artificial Sequence: Synthetic oligonucleotide
ucucccaacugagcacauu

SEQ ID NO: 822617 - RNA, 19 nt, Artificial Sequence
  Description of Artificial Sequence: Synthetic oligonucleotide
ugucaccuuguagcaccuc

SEQ ID NO: 822618 - RNA, 19 nt, Artificial Sequence
  Description of Artificial Sequence: Synthetic oligonucleotide
ggcgugggucuuguugggg

SEQ ID NO: 822619 - RNA, 19 nt, Artificial Sequence
  Description of Artificial Sequence: Synthetic oligonucleotide
ugcccgugggagugauaaa

SEQ ID NO: 822620 - RNA, 19 nt, Artificial Sequence
  Description of Artificial Sequence: Synthetic oligonucleotide
gcggcccauaacugcuccg

SEQ ID NO: 822621 - RNA, 19 nt, Artificial Sequence
  Description of Artificial Sequence: Synthetic oligonucleotide
cuucucguggagcucccgu

SEQ ID NO: 822622 - RNA, 19 nt, Artificial Sequence
  Description of Artificial Sequence: Synthetic oligonucleotide
cucaucguccguggggaaa

SEQ ID NO: 822623 - RNA, 19 nt, Artificial Sequence
  Description of Artificial Sequence: Synthetic oligonucleotide
ggaguucgcucuuggagau

SEQ ID NO: 822624 - RNA, 19 nt, Artificial Sequence
  Description of Artificial Sequence: Synthetic oligonucleotide
ccuaaacaaggggagucca

SEQ ID NO: 822625 - RNA, 19 nt, Artificial Sequence
  Description of Artificial Sequence: Synthetic oligonucleotide
gcauugagccucaguggac

SEQ ID NO: 822626 - RNA, 19 nt, Artificial Sequence
  Description of Artificial Sequence: Synthetic oligonucleotide
ggcgaauuuugcagcaugu

SEQ ID NO: 822627 - RNA, 19 nt, Artificial Sequence
  Description of Artificial Sequence: Synthetic oligonucleotide
guagcuggccggaggccca

SEQ ID NO: 822628 - RNA, 19 nt, Artificial Sequence
  Description of Artificial Sequence: Synthetic oligonucleotide
cugcuguuccauuuacauu

SEQ ID NO: 822629 - RNA, 19 nt, Artificial Sequence
  Description of Artificial Sequence: Synthetic oligonucleotide
gugucccuaagaggagcca

SEQ ID NO: 822630 - RNA, 19 nt, Artificial Sequence
  Description of Artificial Sequence: Synthetic oligonucleotide
gagucgcuggcuugaugau

SEQ ID NO: 822631 - RNA, 19 nt, Artificial Sequence
  Description of Artificial Sequence: Synthetic oligonucleotide
gagcggcccauaacugcuc

SEQ ID NO: 822632 - RNA, 19 nt, Artificial Sequence
  Description of Artificial Sequence: Synthetic oligonucleotide
aggauccacccuggacaug

SEQ ID NO: 822633 - RNA, 19 nt, Artificial Sequence
  Description of Artificial Sequence: Synthetic oligonucleotide
cgaauuuugcagcauguau

SEQ ID NO: 822634 - RNA, 19 nt, Artificial Sequence
  Description of Artificial Sequence: Synthetic oligonucleotide
ccuugacaugacagccuuc

SEQ ID NO: 822635 - RNA, 19 nt, Artificial Sequence
  Description of Artificial Sequence: Synthetic oligonucleotide
gcgaauuuugcagcaugua

SEQ ID NO: 822636 - RNA, 19 nt, Artificial Sequence
  Description of Artificial Sequence: Synthetic oligonucleotide
gccagaauaggaacuuuau

SEQ ID NO: 822637 - RNA, 19 nt, Artificial Sequence
  Description of Artificial Sequence: Synthetic oligonucleotide
cugcuccgucaaggaauag

SEQ ID NO: 822638 - RNA, 19 nt, Artificial Sequence
  Description of Artificial Sequence: Synthetic oligonucleotide
guagcaccucuagggcaga

SEQ ID NO: 822639 - RNA, 19 nt, Artificial Sequence
  Description of Artificial Sequence: Synthetic oligonucleotide
  modified_base (18)..(18): a, c, u, g, unknown or other
cacuauucuccugcugunu

SEQ ID NO: 822640 - RNA, 19 nt, Artificial Sequence
  Description of Artificial Sequence: Synthetic oligonucleotide
ccgugggagugauaaagua

SEQ ID NO: 822641 - RNA, 19 nt, Artificial Sequence
  Description of Artificial Sequence: Synthetic oligonucleotide
ggccucucacagguacaag

SEQ ID NO: 822642 - RNA, 19 nt, Artificial Sequence
  Description of Artificial Sequence: Synthetic oligonucleotide
gccacgccuaggcaccaca

SEQ ID NO: 822643 - RNA, 19 nt, Artificial Sequence
  Description of Artificial Sequence: Synthetic oligonucleotide
ccacacacacacacaauau

SEQ ID NO: 822644 - RNA, 19 nt, Artificial Sequence
  Description of Artificial Sequence: Synthetic oligonucleotide
aggcaccacaugagucgcu

SEQ ID NO: 822645 - RNA, 19 nt, Artificial Sequence
  Description of Artificial Sequence: Synthetic oligonucleotide
cccucaaauugcccuaaua

SEQ ID NO: 822646 - RNA, 19 nt, Artificial Sequence
  Description of Artificial Sequence: Synthetic oligonucleotide
gggccucucacagguacaa

SEQ ID NO: 822647 - RNA, 19 nt, Artificial Sequence
  Description of Artificial Sequence: Synthetic oligonucleotide
cccaacugagcacauugau

SEQ ID NO: 822648 - RNA, 19 nt, Artificial Sequence
  Description of Artificial Sequence: Synthetic oligonucleotide
cuggccggaggcccaggua

SEQ ID NO: 822649 - RNA, 19 nt, Artificial Sequence
  Description of Artificial Sequence: Synthetic oligonucleotide
aggccacgccuaggcacca

SEQ ID NO: 822650 - RNA, 19 nt, Artificial Sequence
  Description of Artificial Sequence: Synthetic oligonucleotide
ccaaggguacugucgugcu

SEQ ID NO: 822651 - RNA, 19 nt, Artificial Sequence
  Description of Artificial Sequence: Synthetic oligonucleotide
caucacuagagcggcccau

SEQ ID NO: 822652 - RNA, 19 nt, Artificial Sequence
  Description of Artificial Sequence: Synthetic oligonucleotide
gggaguccacacacacaca

SEQ ID NO: 822653 - RNA, 19 nt, Artificial Sequence
  Description of Artificial Sequence: Synthetic oligonucleotide
guccacacacacacacaau

SEQ ID NO: 822654 - RNA, 19 nt, Artificial Sequence
  Description of Artificial Sequence: Synthetic oligonucleotide
gucgugcucgaaccagcuu

SEQ ID NO: 822655 - RNA, 19 nt, Artificial Sequence
  Description of Artificial Sequence: Synthetic oligonucleotide
cccgugggagugauaaagu

SEQ ID NO: 822656 - RNA, 19 nt, Artificial Sequence
  Description of Artificial Sequence: Synthetic oligonucleotide
ggggccucucacagguaca

SEQ ID NO: 822657 - RNA, 19 nt, Artificial Sequence
  Description of Artificial Sequence: Synthetic oligonucleotide
ccaggguacuucagggagu

SEQ ID NO: 822658 - RNA, 19 nt, Artificial Sequence
  Description of Artificial Sequence: Synthetic oligonucleotide
ggccugaaccgaauuuuau

SEQ ID NO: 822659 - RNA, 19 nt, Artificial Sequence
  Description of Artificial Sequence: Synthetic oligonucleotide
caggcgaauuuugcagcau

SEQ ID NO: 822660 - RNA, 19 nt, Artificial Sequence
  Description of Artificial Sequence: Synthetic oligonucleotide
guucgcucuuggagauggu

SEQ ID NO: 822661 - RNA, 19 nt, Artificial Sequence
  Description of Artificial Sequence: Synthetic oligonucleotide
gcucacccaugaucuugau

SEQ ID NO: 822662 - RNA, 19 nt, Artificial Sequence
  Description of Artificial Sequence: Synthetic oligonucleotide
ccacgccuaggcaccacau

SEQ ID NO: 822663 - RNA, 19 nt, Artificial Sequence
  Description of Artificial Sequence: Synthetic oligonucleotide
cacccuggacauggauuuu

SEQ ID NO: 822664 - RNA, 19 nt, Artificial Sequence
  Description of Artificial Sequence: Synthetic oligonucleotide
gggguccacuucagucugu

SEQ ID NO: 822665 - RNA, 19 nt, Artificial Sequence
  Description of Artificial Sequence: Synthetic oligonucleotide
aguaauauagucuacaucu

SEQ ID NO: 822666 - RNA, 19 nt, Artificial Sequence
  Description of Artificial Sequence: Synthetic oligonucleotide
uucgaaauacucaagacag

SEQ ID NO: 822667 - RNA, 19 nt, Artificial Sequence
  Description of Artificial Sequence: Synthetic oligonucleotide
aauucgaaauacucaagac

SEQ ID NO: 822668 - RNA, 19 nt, Artificial Sequence
  Description of Artificial Sequence: Synthetic oligonucleotide
aagacauauaacaagagug

SEQ ID NO: 822669 - RNA, 19 nt, Artificial Sequence
  Description of Artificial Sequence: Synthetic oligonucleotide
aauaaaguaguaccgauua

SEQ ID NO: 822670 - RNA, 19 nt, Artificial Sequence
  Description of Artificial Sequence: Synthetic oligonucleotide
aaauucgaaauacucaaga

SEQ ID NO: 822671 - RNA, 19 nt, Artificial Sequence
  Description of Artificial Sequence: Synthetic oligonucleotide
uaauauagucuacaucugg

SEQ ID NO: 822672 - RNA, 19 nt, Artificial Sequence
  Description of Artificial Sequence: Synthetic oligonucleotide
auaauguuauuuucgcugg

SEQ ID NO: 822673 - RNA, 19 nt, Artificial Sequence
  Description of Artificial Sequence: Synthetic oligonucleotide
gguaaaccgagauagaacg

SEQ ID NO: 822674 - RNA, 19 nt, Artificial Sequence
  Description of Artificial Sequence: Synthetic oligonucleotide
uagaaugucaguugguucc

SEQ ID NO: 822675 - RNA, 19 nt, Artificial Sequence
  Description of Artificial Sequence: Synthetic oligonucleotide
aggugcucaauuuauaguc

SEQ ID NO: 822676 - RNA, 19 nt, Artificial Sequence
  Description of Artificial Sequence: Synthetic oligonucleotide
aaucgacgaaguuucagag

SEQ ID NO: 822677 - RNA, 19 nt, Artificial Sequence
  Description of Artificial Sequence: Synthetic oligonucleotide
auauaacaagaguggagcc

SEQ ID NO: 822678 - RNA, 19 nt, Artificial Sequence
  Description of Artificial Sequence: Synthetic oligonucleotide
ucgacgaaguuucagagca

SEQ ID NO: 822679 - RNA, 19 nt, Artificial Sequence
  Description of Artificial Sequence: Synthetic oligonucleotide
cauauaacaagaguggagc

SEQ ID NO: 822680 - RNA, 19 nt, Artificial Sequence
  Description of Artificial Sequence: Synthetic oligonucleotide
uuauaagugucgcagauuu

SEQ ID NO: 822681 - RNA, 19 nt, Artificial Sequence
  Description of Artificial Sequence: Synthetic oligonucleotide
aaaacugacgcaauccuag

SEQ ID NO: 822682 - RNA, 19 nt, Artificial Sequence
  Description of Artificial Sequence: Synthetic oligonucleotide
uaaaguaguaccgauuacc

SEQ ID NO: 822683 - RNA, 19 nt, Artificial Sequence
  Description of Artificial Sequence: Synthetic oligonucleotide
aucacaauggaaucgacga

SEQ ID NO: 822684 - RNA, 19 nt, Artificial Sequence
  Description of Artificial Sequence: Synthetic oligonucleotide
aauuuauaguccaggaaag

SEQ ID NO: 822685 - RNA, 19 nt, Artificial Sequence
  Description of Artificial Sequence: Synthetic oligonucleotide
ucuuauaauaauguuauuu

SEQ ID NO: 822686 - RNA, 19 nt, Artificial Sequence
  Description of Artificial Sequence: Synthetic oligonucleotide
uuuaguaauauagucuaca

SEQ ID NO: 822687 - RNA, 19 nt, Artificial Sequence
  Description of Artificial Sequence: Synthetic oligonucleotide
auucgaaauacucaagaca

SEQ ID NO: 822688 - RNA, 19 nt, Artificial Sequence
  Description of Artificial Sequence: Synthetic oligonucleotide
uucaagcacucucagaagc

SEQ ID NO: 822689 - RNA, 19 nt, Artificial Sequence
  Description of Artificial Sequence: Synthetic oligonucleotide
ugugcgcuuaucacaaugg

SEQ ID NO: 822690 - RNA, 19 nt, Artificial Sequence
  Description of Artificial Sequence: Synthetic oligonucleotide
aaacugacgcaauccuagc

SEQ ID NO: 822691 - RNA, 19 nt, Artificial Sequence
  Description of Artificial Sequence: Synthetic oligonucleotide
ucgcagauuugcaucaugg

SEQ ID NO: 822692 - RNA, 19 nt, Artificial Sequence
  Description of Artificial Sequence: Synthetic oligonucleotide
cuacguacgacacggauag

SEQ ID NO: 822693 - RNA, 19 nt, Artificial Sequence
  Description of Artificial Sequence: Synthetic oligonucleotide
acugccaguuuacacacac

SEQ ID NO: 822694 - RNA, 19 nt, Artificial Sequence
  Description of Artificial Sequence: Synthetic oligonucleotide
aagaguggagcccuucauc

SEQ ID NO: 822695 - RNA, 19 nt, Artificial Sequence
  Description of Artificial Sequence: Synthetic oligonucleotide
aggaaaacugacgcaaucc

SEQ ID NO: 822696 - RNA, 19 nt, Artificial Sequence
  Description of Artificial Sequence: Synthetic oligonucleotide
uuaauaaaguaguaccgau

SEQ ID NO: 822697 - RNA, 19 nt, Artificial Sequence
  Description of Artificial Sequence: Synthetic oligonucleotide
uucaccgcgccaaugaagc

SEQ ID NO: 822698 - RNA, 19 nt, Artificial Sequence
  Description of Artificial Sequence: Synthetic oligonucleotide
uguaacagaaaaucauuaa

SEQ ID NO: 822699 - RNA, 19 nt, Artificial Sequence
  Description of Artificial Sequence: Synthetic oligonucleotide
uuuacacacacaggggugg

SEQ ID NO: 822700 - RNA, 19 nt, Artificial Sequence
  Description of Artificial Sequence: Synthetic oligonucleotide
aacgcugggacacugguaa

SEQ ID NO: 822701 - RNA, 19 nt, Artificial Sequence
  Description of Artificial Sequence: Synthetic oligonucleotide
guaccgauuaccaacagug

SEQ ID NO: 822702 - RNA, 19 nt, Artificial Sequence
  Description of Artificial Sequence: Synthetic oligonucleotide
auaaaguaguaccgauuac

SEQ ID NO: 822703 - RNA, 19 nt, Artificial Sequence
  Description of Artificial Sequence: Synthetic oligonucleotide
aaugaaagaugucggccca

SEQ ID NO: 822704 - RNA, 19 nt, Artificial Sequence
  Description of Artificial Sequence: Synthetic oligonucleotide
caauuuauaguccaggaaa

SEQ ID NO: 822705 - RNA, 19 nt, Artificial Sequence
  Description of Artificial Sequence: Synthetic oligonucleotide
uguuugugcgcuuaucaca

SEQ ID NO: 822706 - RNA, 19 nt, Artificial Sequence
  Description of Artificial Sequence: Synthetic oligonucleotide
uauaacaagaguggagccc

SEQ ID NO: 822707 - RNA, 19 nt, Artificial Sequence
  Description of Artificial Sequence: Synthetic oligonucleotide
gauagugggagguuggguc

SEQ ID NO: 822708 - RNA, 19 nt, Artificial Sequence
  Description of Artificial Sequence: Synthetic oligonucleotide
aauugcugaagccgaucuc

SEQ ID NO: 822709 - RNA, 19 nt, Artificial Sequence
  Description of Artificial Sequence: Synthetic oligonucleotide
uuaguaauauagucuacau

SEQ ID NO: 822710 - RNA, 19 nt, Artificial Sequence
  Description of Artificial Sequence: Synthetic oligonucleotide
ucuuccggaaagaacagaa

SEQ ID NO: 822711 - RNA, 19 nt, Artificial Sequence
  Description of Artificial Sequence: Synthetic oligonucleotide
aaaguaguaccgauuacca

SEQ ID NO: 822712 - RNA, 19 nt, Artificial Sequence
  Description of Artificial Sequence: Synthetic oligonucleotide
auggaaucgacgaaguuuc

SEQ ID NO: 822713 - RNA, 19 nt, Artificial Sequence
  Description of Artificial Sequence: Synthetic oligonucleotide
guaguggcuauacaugucc

SEQ ID NO: 822714 - RNA, 19 nt, Artificial Sequence
  Description of Artificial Sequence: Synthetic oligonucleotide
aucgacgaaguuucagagc

SEQ ID NO: 822715 - RNA, 19 nt, Artificial Sequence
  Description of Artificial Sequence: Synthetic oligonucleotide
cuuuggcucgcgaugauag

SEQ ID NO: 822716 - RNA, 19 nt, Artificial Sequence
  Description of Artificial Sequence: Synthetic oligonucleotide
uuacagugugcccuucgcg

SEQ ID NO: 822717 - RNA, 19 nt, Artificial Sequence
  Description of Artificial Sequence: Synthetic oligonucleotide
cucaaagcaggacaggcag

SEQ ID NO: 822718 - RNA, 19 nt, Artificial Sequence
  Description of Artificial Sequence: Synthetic oligonucleotide
uaguaauauagucuacauc

SEQ ID NO: 822719 - RNA, 19 nt, Artificial Sequence
  Description of Artificial Sequence: Synthetic oligonucleotide
uacgacacggauagaaugu

SEQ ID NO: 822720 - RNA, 19 nt, Artificial Sequence
  Description of Artificial Sequence: Synthetic oligonucleotide
uacagugugcccuucgcgc

SEQ ID NO: 822721 - RNA, 19 nt, Artificial Sequence
  Description of Artificial Sequence: Synthetic oligonucleotide
aaagagcgagugcuucugg

SEQ ID NO: 822722 - RNA, 19 nt, Artificial Sequence
  Description of Artificial Sequence: Synthetic oligonucleotide
ucauucuacguacgacacg

SEQ ID NO: 822723 - RNA, 19 nt, Artificial Sequence
  Description of Artificial Sequence: Synthetic oligonucleotide
ugacgcaauccuagcaacg

SEQ ID NO: 822724 - RNA, 19 nt, Artificial Sequence
  Description of Artificial Sequence: Synthetic oligonucleotide
gauagaacgcuggcgaugc

SEQ ID NO: 822725 - RNA, 19 nt, Artificial Sequence
  Description of Artificial Sequence: Synthetic oligonucleotide
ugguaaaccgagauagaac

SEQ ID NO: 822726 - RNA, 19 nt, Artificial Sequence
  Description of Artificial Sequence: Synthetic oligonucleotide
gaaucgacgaaguuucaga

SEQ ID NO: 822727 - RNA, 19 nt, Artificial Sequence
  Description of Artificial Sequence: Synthetic oligonucleotide
uauagucuacaucuggauu

SEQ ID NO: 822728 - RNA, 19 nt, Artificial Sequence
  Description of Artificial Sequence: Synthetic oligonucleotide
acugaacgaacugugaaug

SEQ ID NO: 822729 - RNA, 19 nt, Artificial Sequence
  Description of Artificial Sequence: Synthetic oligonucleotide
uaaaccgagauagaacgcu

SEQ ID NO: 822730 - RNA, 19 nt, Artificial Sequence
  Description of Artificial Sequence: Synthetic oligonucleotide
ucaguguuuguguugcgga

SEQ ID NO: 822731 - RNA, 19 nt, Artificial Sequence
  Description of Artificial Sequence: Synthetic oligonucleotide
accgagauagaacgcuggc

SEQ ID NO: 822732 - RNA, 19 nt, Artificial Sequence
  Description of Artificial Sequence: Synthetic oligonucleotide
cacacaaccccacauguac

SEQ ID NO: 822733 - RNA, 19 nt, Artificial Sequence
  Description of Artificial Sequence: Synthetic oligonucleotide
caaugaagcgauucauggc

SEQ ID NO: 822734 - RNA, 19 nt, Artificial Sequence
  Description of Artificial Sequence: Synthetic oligonucleotide
caacagugcuguuugugcg

SEQ ID NO: 822735 - RNA, 19 nt, Artificial Sequence
  Description of Artificial Sequence: Synthetic oligonucleotide
aacgaacugugaauguggg

SEQ ID NO: 822736 - RNA, 19 nt, Artificial Sequence
  Description of Artificial Sequence: Synthetic oligonucleotide
cugguaaccggugaggcgg

SEQ ID NO: 822737 - RNA, 19 nt, Artificial Sequence
  Description of Artificial Sequence: Synthetic oligonucleotide
guacgacacggauagaaug

SEQ ID NO: 822738 - RNA, 19 nt, Artificial Sequence
  Description of Artificial Sequence: Synthetic oligonucleotide
uugugcgcuuaucacaaug

SEQ ID NO: 822739 - RNA, 19 nt, Artificial Sequence
  Description of Artificial Sequence: Synthetic oligonucleotide
ucucuggcgacuacuuucc

SEQ ID NO: 822740 - RNA, 19 nt, Artificial Sequence
  Description of Artificial Sequence: Synthetic oligonucleotide
agaagccggugccaggagc

SEQ ID NO: 822741 - RNA, 19 nt, Artificial Sequence
  Description of Artificial Sequence: Synthetic oligonucleotide
aacugacgcaauccuagca

SEQ ID NO: 822742 - RNA, 19 nt, Artificial Sequence
  Description of Artificial Sequence: Synthetic oligonucleotide
acauauaacaagaguggag

SEQ ID NO: 822743 - RNA, 19 nt, Artificial Sequence
  Description of Artificial Sequence: Synthetic oligonucleotide
uuguucaccgcgccaauga

SEQ ID NO: 822744 - RNA, 19 nt, Artificial Sequence
  Description of Artificial Sequence: Synthetic oligonucleotide
cucgcgaugauagugggag

SEQ ID NO: 822745 - RNA, 19 nt, Artificial Sequence
  Description of Artificial Sequence: Synthetic oligonucleotide
accgauuaccaacagugcu

SEQ ID NO: 822746 - RNA, 19 nt, Artificial Sequence
  Description of Artificial Sequence: Synthetic oligonucleotide
aacugugaauguggguggc

SEQ ID NO: 822747 - RNA, 19 nt, Artificial Sequence
  Description of Artificial Sequence: Synthetic oligonucleotide
ugcucaauuuauaguccag

SEQ ID NO: 822748 - RNA, 19 nt, Artificial Sequence
  Description of Artificial Sequence: Synthetic oligonucleotide
aucauucuacguacgacac

SEQ ID NO: 822749 - RNA, 19 nt, Artificial Sequence
  Description of Artificial Sequence: Synthetic oligonucleotide
uggcucgcgaugauagugg

SEQ ID NO: 822750 - RNA, 19 nt, Artificial Sequence
  Description of Artificial Sequence: Synthetic oligonucleotide
ucuacguacgacacggaua

SEQ ID NO: 822751 - RNA, 19 nt, Artificial Sequence
  Description of Artificial Sequence: Synthetic oligonucleotide
auucccggauccuucuugg

SEQ ID NO: 822752 - RNA, 19 nt, Artificial Sequence
  Description of Artificial Sequence: Synthetic oligonucleotide
caucauucuacguacgaca

SEQ ID NO: 822753 - RNA, 19 nt, Artificial Sequence
  Description of Artificial Sequence: Synthetic oligonucleotide
auacucaagacagggucac

SEQ ID NO: 822754 - RNA, 19 nt, Artificial Sequence
  Description of Artificial Sequence: Synthetic oligonucleotide
uacacagcccaacuuuaca

SEQ ID NO: 822755 - RNA, 19 nt, Artificial Sequence
  Description of Artificial Sequence: Synthetic oligonucleotide
ggaaaggugucccaggcgc

SEQ ID NO: 822756 - RNA, 19 nt, Artificial Sequence
  Description of Artificial Sequence: Synthetic oligonucleotide
acgcaauccuagcaacgcc

SEQ ID NO: 822757 - RNA, 19 nt, Artificial Sequence
  Description of Artificial Sequence: Synthetic oligonucleotide
gcaagcuucauccaagcug

SEQ ID NO: 822758 - RNA, 19 nt, Artificial Sequence
  Description of Artificial Sequence: Synthetic oligonucleotide
cauggcguuaaagagcgag

SEQ ID NO: 822759 - RNA, 19 nt, Artificial Sequence
  Description of Artificial Sequence: Synthetic oligonucleotide
agaggcccgccucaguggc

SEQ ID NO: 822760 - RNA, 19 nt, Artificial Sequence
  Description of Artificial Sequence: Synthetic oligonucleotide
cacgucgcgaagcagacug

SEQ ID NO: 822761 - RNA, 19 nt, Artificial Sequence
  Description of Artificial Sequence: Synthetic oligonucleotide
ugcgcuuaucacaauggaa

SEQ ID NO: 822762 - RNA, 19 nt, Artificial Sequence
  Description of Artificial Sequence: Synthetic oligonucleotide
guugucuagcuccggcucg

SEQ ID NO: 822763 - RNA, 19 nt, Artificial Sequence
  Description of Artificial Sequence: Synthetic oligonucleotide
aaccgagauagaacgcugg

SEQ ID NO: 822764 - RNA, 19 nt, Artificial Sequence
  Description of Artificial Sequence: Synthetic oligonucleotide
gauucccggauccuucuug

SEQ ID NO: 822765 - RNA, 19 nt, Artificial Sequence
  Description of Artificial Sequence: Synthetic oligonucleotide
uggcuauacaugucccggg

SEQ ID NO: 822766 - RNA, 19 nt, Artificial Sequence
  Description of Artificial Sequence: Synthetic oligonucleotide
gcagauuugcaucauggug

SEQ ID NO: 822767 - RNA, 19 nt, Artificial Sequence
  Description of Artificial Sequence: Synthetic oligonucleotide
gacauauaacaagagugga

SEQ ID NO: 822768 - RNA, 19 nt, Artificial Sequence
  Description of Artificial Sequence: Synthetic oligonucleotide
acugacgcaauccuagcaa

SEQ ID NO: 822769 - RNA, 19 nt, Artificial Sequence
  Description of Artificial Sequence: Synthetic oligonucleotide
uaccgauuaccaacagugc

SEQ ID NO: 822770 - RNA, 19 nt, Artificial Sequence
  Description of Artificial Sequence: Synthetic oligonucleotide
cuagcuuuggcucgcgaug

SEQ ID NO: 822771 - RNA, 19 nt, Artificial Sequence
  Description of Artificial Sequence: Synthetic oligonucleotide
aaguaguaccgauuaccaa

SEQ ID NO: 822772 - RNA, 19 nt, Artificial Sequence
  Description of Artificial Sequence: Synthetic oligonucleotide
ucaucauucuacguacgac

SEQ ID NO: 822773 - RNA, 19 nt, Artificial Sequence
  Description of Artificial Sequence: Synthetic oligonucleotide
aguaccgauuaccaacagu

SEQ ID NO: 822774 - RNA, 19 nt, Artificial Sequence
  Description of Artificial Sequence: Synthetic oligonucleotide
aagugucgcagauuugcau

SEQ ID NO: 822775 - RNA, 19 nt, Artificial Sequence
  Description of Artificial Sequence: Synthetic oligonucleotide
aacaagaguggagcccuuc

SEQ ID NO: 822776 - RNA, 19 nt, Artificial Sequence
  Description of Artificial Sequence: Synthetic oligonucleotide
gcugaaugaaagaugucgg

SEQ ID NO: 822777 - RNA, 19 nt, Artificial Sequence
  Description of Artificial Sequence: Synthetic oligonucleotide
uaguggcuauacauguccc

SEQ ID NO: 822778 - RNA, 19 nt, Artificial Sequence
  Description of Artificial Sequence: Synthetic oligonucleotide
gacagggucacuguuacaa

SEQ ID NO: 822779 - RNA, 19 nt, Artificial Sequence
  Description of Artificial Sequence: Synthetic oligonucleotide
uucuacguacgacacggau

SEQ ID NO: 822780 - RNA, 19 nt, Artificial Sequence
  Description of Artificial Sequence: Synthetic oligonucleotide
gacgcaauccuagcaacgc

SEQ ID NO: 822781 - RNA, 19 nt, Artificial Sequence
  Description of Artificial Sequence: Synthetic oligonucleotide
uuucugucgcagcccagcc

SEQ ID NO: 822782 - RNA, 19 nt, Artificial Sequence
  Description of Artificial Sequence: Synthetic oligonucleotide
cuagcuccggcucggagag

SEQ ID NO: 822783 - RNA, 19 nt, Artificial Sequence
  Description of Artificial Sequence: Synthetic oligonucleotide
auagugggagguugggucu

SEQ ID NO: 822784 - RNA, 19 nt, Artificial Sequence
  Description of Artificial Sequence: Synthetic oligonucleotide
cuuaucacaauggaaucga

SEQ ID NO: 822785 - RNA, 19 nt, Artificial Sequence
  Description of Artificial Sequence: Synthetic oligonucleotide
guaauauagucuacaucug

SEQ ID NO: 822786 - RNA, 19 nt, Artificial Sequence
  Description of Artificial Sequence: Synthetic oligonucleotide
uggcguuaaagagcgagug

SEQ ID NO: 822787 - RNA, 19 nt, Artificial Sequence
  Description of Artificial Sequence: Synthetic oligonucleotide
ugguuauaagugucgcaga

SEQ ID NO: 822788 - RNA, 19 nt, Artificial Sequence
  Description of Artificial Sequence: Synthetic oligonucleotide
aaauagcuuggagggaaga

SEQ ID NO: 822789 - RNA, 19 nt, Artificial Sequence
  Description of Artificial Sequence: Synthetic oligonucleotide
aaaccgagauagaacgcug

SEQ ID NO: 822790 - RNA, 19 nt, Artificial Sequence
  Description of Artificial Sequence: Synthetic oligonucleotide
ucacaauggaaucgacgaa

SEQ ID NO: 822791 - RNA, 19 nt, Artificial Sequence
  Description of Artificial Sequence: Synthetic oligonucleotide
gcuuaucacaauggaaucg

SEQ ID NO: 822792 - RNA, 19 nt, Artificial Sequence
  Description of Artificial Sequence: Synthetic oligonucleotide
uuguguugcggauggcggc

SEQ ID NO: 822793 - RNA, 19 nt, Artificial Sequence
  Description of Artificial Sequence: Synthetic oligonucleotide
caagcacucucagaagccg

SEQ ID NO: 822794 - RNA, 19 nt, Artificial Sequence
  Description of Artificial Sequence: Synthetic oligonucleotide
aacuuuacagugugcccuu

SEQ ID NO: 822795 - RNA, 19 nt, Artificial Sequence
  Description of Artificial Sequence: Synthetic oligonucleotide
aggcgggauucccggaucc

SEQ ID NO: 822796 - RNA, 19 nt, Artificial Sequence
  Description of Artificial Sequence: Synthetic oligonucleotide
cugugaauguggguggcgg

SEQ ID NO: 822797 - RNA, 19 nt, Artificial Sequence
  Description of Artificial Sequence: Synthetic oligonucleotide
uucgcgccccacaaccagg

SEQ ID NO: 822798 - RNA, 19 nt, Artificial Sequence
  Description of Artificial Sequence: Synthetic oligonucleotide
acaagaguggagcccuuca

SEQ ID NO: 822799 - RNA, 19 nt, Artificial Sequence
  Description of Artificial Sequence: Synthetic oligonucleotide
guuaaagagcgagugcuuc

SEQ ID NO: 822800 - RNA, 19 nt, Artificial Sequence
  Description of Artificial Sequence: Synthetic oligonucleotide
cugacgcaauccuagcaac

SEQ ID NO: 822801 - RNA, 19 nt, Artificial Sequence
  Description of Artificial Sequence: Synthetic oligonucleotide
gaagccggugccaggagcc

SEQ ID NO: 822802 - RNA, 19 nt, Artificial Sequence
  Description of Artificial Sequence: Synthetic oligonucleotide
gagaggcccgccucagugg

SEQ ID NO: 822803 - RNA, 19 nt, Artificial Sequence
  Description of Artificial Sequence: Synthetic oligonucleotide
ugcgaggcugcuccuagcu

SEQ ID NO: 822804 - RNA, 19 nt, Artificial Sequence
  Description of Artificial Sequence: Synthetic oligonucleotide
ucggagaggggcacgucgc

SEQ ID NO: 822805 - RNA, 19 nt, Artificial Sequence
  Description of Artificial Sequence: Synthetic oligonucleotide
aaccggugaggcgggauuc

SEQ ID NO: 822806 - RNA, 19 nt, Artificial Sequence
  Description of Artificial Sequence: Synthetic oligonucleotide
cucguugucuagcuccggc

SEQ ID NO: 822807 - RNA, 19 nt, Artificial Sequence
  Description of Artificial Sequence: Synthetic oligonucleotide
uaguaccgauuaccaacag

SEQ ID NO: 822808 - RNA, 19 nt, Artificial Sequence
  Description of Artificial Sequence: Synthetic oligonucleotide
ugugaauguggguggcggu

SEQ ID NO: 822809 - RNA, 19 nt, Artificial Sequence
  Description of Artificial Sequence: Synthetic oligonucleotide
gacacugguaaaccgagau

SEQ ID NO: 822810 - RNA, 19 nt, Artificial Sequence
  Description of Artificial Sequence: Synthetic oligonucleotide
ucguugucuagcuccggcu

SEQ ID NO: 822811 - RNA, 19 nt, Artificial Sequence
  Description of Artificial Sequence: Synthetic oligonucleotide
gugcucaauuuauagucca

SEQ ID NO: 822812 - RNA, 19 nt, Artificial Sequence
  Description of Artificial Sequence: Synthetic oligonucleotide
cucgcucccagcuggcggg

SEQ ID NO: 822813 - RNA, 19 nt, Artificial Sequence
  Description of Artificial Sequence: Synthetic oligonucleotide
ccaggugcucaauuuauag

SEQ ID NO: 822814 - RNA, 19 nt, Artificial Sequence
  Description of Artificial Sequence: Synthetic oligonucleotide
cacucucagaagccggugc

SEQ ID NO: 822815 - RNA, 19 nt, Artificial Sequence
  Description of Artificial Sequence: Synthetic oligonucleotide
ggugaggcgggauucccgg

SEQ ID NO: 822816 - RNA, 19 nt, Artificial Sequence
  Description of Artificial Sequence: Synthetic oligonucleotide
auagaacgcuggcgaugcc

SEQ ID NO: 822817 - RNA, 19 nt, Artificial Sequence
  Description of Artificial Sequence: Synthetic oligonucleotide
guaaaccgagauagaacgc

SEQ ID NO: 822818 - RNA, 19 nt, Artificial Sequence
  Description of Artificial Sequence: Synthetic oligonucleotide
guaguaccgauuaccaaca

SEQ ID NO: 822819 - RNA, 19 nt, Artificial Sequence
  Description of Artificial Sequence: Synthetic oligonucleotide
acacggauagaaugucagu

SEQ ID NO: 822820 - RNA, 19 nt, Artificial Sequence
  Description of Artificial Sequence: Synthetic oligonucleotide
uguucaccgcgccaaugaa

SEQ ID NO: 822821 - RNA, 19 nt, Artificial Sequence
  Description of Artificial Sequence: Synthetic oligonucleotide
ugguaaccggugaggcggg

SEQ ID NO: 822822 - RNA, 19 nt, Artificial Sequence
  Description of Artificial Sequence: Synthetic oligonucleotide
acgacacggauagaauguc

SEQ ID NO: 822823 - RNA, 19 nt, Artificial Sequence
  Description of Artificial Sequence: Synthetic oligonucleotide
aagcgauucauggcguuaa

SEQ ID NO: 822824 - RNA, 19 nt, Artificial Sequence
  Description of Artificial Sequence: Synthetic oligonucleotide
guuugugcgcuuaucacaa

SEQ ID NO: 822825 - RNA, 19 nt, Artificial Sequence
  Description of Artificial Sequence: Synthetic oligonucleotide
uagcuuuggcucgcgauga

SEQ ID NO: 822826 - RNA, 19 nt, Artificial Sequence
  Description of Artificial Sequence: Synthetic oligonucleotide
acguacgacacggauagaa

SEQ ID NO: 822827 - RNA, 19 nt, Artificial Sequence
  Description of Artificial Sequence: Synthetic oligonucleotide
cccacuaggauguccuugg

SEQ ID NO: 822828 - RNA, 19 nt, Artificial Sequence
  Description of Artificial Sequence: Synthetic oligonucleotide
cccaacuuuacagugugcc

SEQ ID NO: 822829 - RNA, 19 nt, Artificial Sequence
  Description of Artificial Sequence: Synthetic oligonucleotide
ucaccgcgccaaugaagcg

SEQ ID NO: 822830 - RNA, 19 nt, Artificial Sequence
  Description of Artificial Sequence: Synthetic oligonucleotide
cacucgaugucguugcgga

SEQ ID NO: 822831 - RNA, 19 nt, Artificial Sequence
  Description of Artificial Sequence: Synthetic oligonucleotide
uguguugcggauggcggcu

SEQ ID NO: 822832 - RNA, 19 nt, Artificial Sequence
  Description of Artificial Sequence: Synthetic oligonucleotide
ggugcucaauuuauagucc

SEQ ID NO: 822833 - RNA, 19 nt, Artificial Sequence
  Description of Artificial Sequence: Synthetic oligonucleotide
ccgauuaccaacagugcug

SEQ ID NO: 822834 - RNA, 19 nt, Artificial Sequence
  Description of Artificial Sequence: Synthetic oligonucleotide
ugaggcgggauucccggau

SEQ ID NO: 822835 - RNA, 19 nt, Artificial Sequence
  Description of Artificial Sequence: Synthetic oligonucleotide
aacgccagggccuccucuu

SEQ ID NO: 822836 - RNA, 19 nt, Artificial Sequence
  Description of Artificial Sequence: Synthetic oligonucleotide
augcgaggcugcuccuagc

SEQ ID NO: 822837 - RNA, 19 nt, Artificial Sequence
  Description of Artificial Sequence: Synthetic oligonucleotide
cggauagaaugucaguugg

SEQ ID NO: 822838 - RNA, 19 nt, Artificial Sequence
  Description of Artificial Sequence: Synthetic oligonucleotide
guccuuggacuuccaggcg

SEQ ID NO: 822839 - RNA, 19 nt, Artificial Sequence
  Description of Artificial Sequence: Synthetic oligonucleotide
guucaccgcgccaaugaag

SEQ ID NO: 822840 - RNA, 19 nt, Artificial Sequence
  Description of Artificial Sequence: Synthetic oligonucleotide
uuauuuucgcuggccgagu

SEQ ID NO: 822841 - RNA, 19 nt, Artificial Sequence
  Description of Artificial Sequence: Synthetic oligonucleotide
ggaaucgacgaaguuucag

SEQ ID NO: 822842 - RNA, 19 nt, Artificial Sequence
  Description of Artificial Sequence: Synthetic oligonucleotide
acgaacugugaaugugggu

SEQ ID NO: 822843 - RNA, 19 nt, Artificial Sequence
  Description of Artificial Sequence: Synthetic oligonucleotide
uggaaucgacgaaguuuca

SEQ ID NO: 822844 - RNA, 19 nt, Artificial Sequence
  Description of Artificial Sequence: Synthetic oligonucleotide
agagcgagugcuucugguu

SEQ ID NO: 822845 - RNA, 19 nt, Artificial Sequence
  Description of Artificial Sequence: Synthetic oligonucleotide
ucggcccagucccauuccc

SEQ ID NO: 822846 - RNA, 19 nt, Artificial Sequence
  Description of Artificial Sequence: Synthetic oligonucleotide
cuucgcgccccacaaccag

SEQ ID NO: 822847 - RNA, 19 nt, Artificial Sequence
  Description of Artificial Sequence: Synthetic oligonucleotide
ggcguuaaagagcgagugc

SEQ ID NO: 822848 - RNA, 19 nt, Artificial Sequence
  Description of Artificial Sequence: Synthetic oligonucleotide
uaaccggugaggcgggauu

SEQ ID NO: 822849 - RNA, 19 nt, Artificial Sequence
  Description of Artificial Sequence: Synthetic oligonucleotide
cgugaugcgaggcugcucc

SEQ ID NO: 822850 - RNA, 19 nt, Artificial Sequence
  Description of Artificial Sequence: Synthetic oligonucleotide
gagcgagugcuucugguua

SEQ ID NO: 822851 - RNA, 19 nt, Artificial Sequence
  Description of Artificial Sequence: Synthetic oligonucleotide
acgaaguuucagagcaaag

SEQ ID NO: 822852 - RNA, 19 nt, Artificial Sequence
  Description of Artificial Sequence: Synthetic oligonucleotide
uguugcggauggcggcugc

SEQ ID NO: 822853 - RNA, 19 nt, Artificial Sequence
  Description of Artificial Sequence: Synthetic oligonucleotide
cccgcacccagccagaagc

SEQ ID NO: 822854 - RNA, 19 nt, Artificial Sequence
  Description of Artificial Sequence: Synthetic oligonucleotide
acacugguaaaccgagaua

SEQ ID NO: 822855 - RNA, 19 nt, Artificial Sequence
  Description of Artificial Sequence: Synthetic oligonucleotide
ggcuuugcgggugaguuug

SEQ ID NO: 822856 - RNA, 19 nt, Artificial Sequence
  Description of Artificial Sequence: Synthetic oligonucleotide
augaaagaugucggcccag

SEQ ID NO: 822857 - RNA, 19 nt, Artificial Sequence
  Description of Artificial Sequence: Synthetic oligonucleotide
agcccugcgugaugcgagg

SEQ ID NO: 822858 - RNA, 19 nt, Artificial Sequence
  Description of Artificial Sequence: Synthetic oligonucleotide
ucuccccugcacccgcacc

SEQ ID NO: 822859 - RNA, 19 nt, Artificial Sequence
  Description of Artificial Sequence: Synthetic oligonucleotide
cugguuucugucgcagccc

SEQ ID NO: 822860 - RNA, 19 nt, Artificial Sequence
  Description of Artificial Sequence: Synthetic oligonucleotide
uccggcucggagaggggca

SEQ ID NO: 822861 - RNA, 19 nt, Artificial Sequence
  Description of Artificial Sequence: Synthetic oligonucleotide
caagacagggucacuguua

SEQ ID NO: 822862 - RNA, 19 nt, Artificial Sequence
  Description of Artificial Sequence: Synthetic oligonucleotide
agugugcccuucgcgcccc

SEQ ID NO: 822863 - RNA, 19 nt, Artificial Sequence
  Description of Artificial Sequence: Synthetic oligonucleotide
cagcccugcgugaugcgag

SEQ ID NO: 822864 - RNA, 19 nt, Artificial Sequence
  Description of Artificial Sequence: Synthetic oligonucleotide
ucggccgcaucugugcucu

SEQ ID NO: 822865 - RNA, 19 nt, Artificial Sequence
  Description of Artificial Sequence: Synthetic oligonucleotide
accggugaggcgggauucc

SEQ ID NO: 822866 - RNA, 19 nt, Artificial Sequence
  Description of Artificial Sequence: Synthetic oligonucleotide
gugcgcuuaucacaaugga

SEQ ID NO: 822867 - RNA, 19 nt, Artificial Sequence
  Description of Artificial Sequence: Synthetic oligonucleotide
agaggggcacgucgcgaag

SEQ ID NO: 822868 - RNA, 19 nt, Artificial Sequence
  Description of Artificial Sequence: Synthetic oligonucleotide
ggucgugcgcuccuccagg

SEQ ID NO: 822869 - RNA, 19 nt, Artificial Sequence
  Description of Artificial Sequence: Synthetic oligonucleotide
agcgccgugcccuggcaug

SEQ ID NO: 822870 - RNA, 19 nt, Artificial Sequence
  Description of Artificial Sequence: Synthetic oligonucleotide
cugcgugaugcgaggcugc

SEQ ID NO: 822871 - RNA, 19 nt, Artificial Sequence
  Description of Artificial Sequence: Synthetic oligonucleotide
agcaaacgcugggacacug

SEQ ID NO: 822872 - RNA, 19 nt, Artificial Sequence
  Description of Artificial Sequence: Synthetic oligonucleotide
uuucgcuggccgaguggca

SEQ ID NO: 822873 - RNA, 19 nt, Artificial Sequence
  Description of Artificial Sequence: Synthetic oligonucleotide
ucgugauggggcccucuuc

SEQ ID NO: 822874 - RNA, 19 nt, Artificial Sequence
  Description of Artificial Sequence: Synthetic oligonucleotide
guuguucaccgcgccaaug

SEQ ID NO: 822875 - RNA, 19 nt, Artificial Sequence
  Description of Artificial Sequence: Synthetic oligonucleotide
cuuccggaaagaacagaaa

SEQ ID NO: 822876 - RNA, 19 nt, Artificial Sequence
  Description of Artificial Sequence: Synthetic oligonucleotide
ccggaaagaacagaaaaga

SEQ ID NO: 822877 - RNA, 19 nt, Artificial Sequence
  Description of Artificial Sequence: Synthetic oligonucleotide
uucgcuggccgaguggcaa

SEQ ID NO: 822878 - RNA, 19 nt, Artificial Sequence
  Description of Artificial Sequence: Synthetic oligonucleotide
gagaggggcacgucgcgaa

SEQ ID NO: 822879 - RNA, 19 nt, Artificial Sequence
  Description of Artificial Sequence: Synthetic oligonucleotide
uggcgacuacuuuccuuug

SEQ ID NO: 822880 - RNA, 19 nt, Artificial Sequence
  Description of Artificial Sequence: Synthetic oligonucleotide
uccuagcuuuggcucgcga

SEQ ID NO: 822881 - RNA, 19 nt, Artificial Sequence
  Description of Artificial Sequence: Synthetic oligonucleotide
cugcggucacugaacgaac

SEQ ID NO: 822882 - RNA, 19 nt, Artificial Sequence
  Description of Artificial Sequence: Synthetic oligonucleotide
uggggugccacaggacuac

SEQ ID NO: 822883 - RNA, 19 nt, Artificial Sequence
  Description of Artificial Sequence: Synthetic oligonucleotide
acggugugcagcccacgca

SEQ ID NO: 822884 - RNA, 19 nt, Artificial Sequence
  Description of Artificial Sequence: Synthetic oligonucleotide
ggcucgcgaugauaguggg

SEQ ID NO: 822885 - RNA, 19 nt, Artificial Sequence
  Description of Artificial Sequence: Synthetic oligonucleotide
gcgugaaagggauggggug

SEQ ID NO: 822886 - RNA, 19 nt, Artificial Sequence
  Description of Artificial Sequence: Synthetic oligonucleotide
augaagcgauucauggcgu

SEQ ID NO: 822887 - RNA, 19 nt, Artificial Sequence
  Description of Artificial Sequence: Synthetic oligonucleotide
ugcccucccaaguguggca

SEQ ID NO: 822888 - RNA, 19 nt, Artificial Sequence
  Description of Artificial Sequence: Synthetic oligonucleotide
aacccagcgccgugcccug

SEQ ID NO: 822889 - RNA, 19 nt, Artificial Sequence
  Description of Artificial Sequence: Synthetic oligonucleotide
ggcgacuacuuuccuuugc

SEQ ID NO: 822890 - RNA, 19 nt, Artificial Sequence
  Description of Artificial Sequence: Synthetic oligonucleotide
acugguaaaccgagauaga

SEQ ID NO: 822891 - RNA, 19 nt, Artificial Sequence
  Description of Artificial Sequence: Synthetic oligonucleotide
gguuauaagugucgcagau

SEQ ID NO: 822892 - RNA, 19 nt, Artificial Sequence
  Description of Artificial Sequence: Synthetic oligonucleotide
cgagauagaacgcuggcga

SEQ ID NO: 822893 - RNA, 19 nt, Artificial Sequence
  Description of Artificial Sequence: Synthetic oligonucleotide
acacaaccccacauguaca

SEQ ID NO: 822894 - RNA, 19 nt, Artificial Sequence
  Description of Artificial Sequence: Synthetic oligonucleotide
gcugggacacugguaaacc

SEQ ID NO: 822895 - RNA, 19 nt, Artificial Sequence
  Description of Artificial Sequence: Synthetic oligonucleotide
uuugugcgcuuaucacaau

SEQ ID NO: 822896 - RNA, 19 nt, Artificial Sequence
  Description of Artificial Sequence: Synthetic oligonucleotide
gucgcagcccagcccugcg

SEQ ID NO: 822897 - RNA, 19 nt, Artificial Sequence
  Description of Artificial Sequence: Synthetic oligonucleotide
gucgugcgcuccuccaggc

SEQ ID NO: 822898 - RNA, 19 nt, Artificial Sequence
  Description of Artificial Sequence: Synthetic oligonucleotide
ccgagauagaacgcuggcg

SEQ ID NO: 822899 - RNA, 19 nt, Artificial Sequence
  Description of Artificial Sequence: Synthetic oligonucleotide
ggcuauacaugucccggga

SEQ ID NO: 822900 - RNA, 19 nt, Artificial Sequence
  Description of Artificial Sequence: Synthetic oligonucleotide
gcgauucauggcguuaaag

SEQ ID NO: 822901 - RNA, 19 nt, Artificial Sequence
  Description of Artificial Sequence: Synthetic oligonucleotide
ggcgagcaaacgcugggac

SEQ ID NO: 822902 - RNA, 19 nt, Artificial Sequence
  Description of Artificial Sequence: Synthetic oligonucleotide
cccuucgcgccccacaacc

SEQ ID NO: 822903 - RNA, 19 nt, Artificial Sequence
  Description of Artificial Sequence: Synthetic oligonucleotide
uguuggcuuugcgggugag

SEQ ID NO: 822904 - RNA, 19 nt, Artificial Sequence
  Description of Artificial Sequence: Synthetic oligonucleotide
gaagcgauucauggcguua

SEQ ID NO: 822905 - RNA, 19 nt, Artificial Sequence
  Description of Artificial Sequence: Synthetic oligonucleotide
ggugguaguggaacugcug

SEQ ID NO: 822906 - RNA, 19 nt, Artificial Sequence
  Description of Artificial Sequence: Synthetic oligonucleotide
gcaauccuagcaacgccag

SEQ ID NO: 822907 - RNA, 19 nt, Artificial Sequence
  Description of Artificial Sequence: Synthetic oligonucleotide
caggugcucaauuuauagu

SEQ ID NO: 822908 - RNA, 19 nt, Artificial Sequence
  Description of Artificial Sequence: Synthetic oligonucleotide
gaggcgggauucccggauc

SEQ ID NO: 822909 - RNA, 19 nt, Artificial Sequence
  Description of Artificial Sequence: Synthetic oligonucleotide
gagauagaacgcuggcgau

SEQ ID NO: 822910 - RNA, 19 nt, Artificial Sequence
  Description of Artificial Sequence: Synthetic oligonucleotide
cccgaugucuccuccuccc

SEQ ID NO: 822911 - RNA, 19 nt, Artificial Sequence
  Description of Artificial Sequence: Synthetic oligonucleotide
ugucgcagcccagcccugc

SEQ ID NO: 822912 - RNA, 19 nt, Artificial Sequence
  Description of Artificial Sequence: Synthetic oligonucleotide
cacugaacgaacugugaau

SEQ ID NO: 822913 - RNA, 19 nt, Artificial Sequence
  Description of Artificial Sequence: Synthetic oligonucleotide
agcgauucauggcguuaaa

SEQ ID NO: 822914 - RNA, 19 nt, Artificial Sequence
  Description of Artificial Sequence: Synthetic oligonucleotide
ccgaucuccugcuuguauc

SEQ ID NO: 822915 - RNA, 19 nt, Artificial Sequence
  Description of Artificial Sequence: Synthetic oligonucleotide
acgccgaccucguugucua

SEQ ID NO: 822916 - RNA, 19 nt, Artificial Sequence
  Description of Artificial Sequence: Synthetic oligonucleotide
cucaagacagggucacugu

SEQ ID NO: 822917 - RNA, 19 nt, Artificial Sequence
  Description of Artificial Sequence: Synthetic oligonucleotide
uacucaagacagggucacu

SEQ ID NO: 822918 - RNA, 19 nt, Artificial Sequence
  Description of Artificial Sequence: Synthetic oligonucleotide
gcguuaaagagcgagugcu

SEQ ID NO: 822919 - RNA, 19 nt, Artificial Sequence
  Description of Artificial Sequence: Synthetic oligonucleotide
ccauguuguucaccgcgcc

SEQ ID NO: 822920 - RNA, 19 nt, Artificial Sequence
  Description of Artificial Sequence: Synthetic oligonucleotide
gucgcgaagcagacugggc

SEQ ID NO: 822921 - RNA, 19 nt, Artificial Sequence
  Description of Artificial Sequence: Synthetic oligonucleotide
ccccacucgaugucguugc

SEQ ID NO: 822922 - RNA, 19 nt, Artificial Sequence
  Description of Artificial Sequence: Synthetic oligonucleotide
ggagagcacggugugcagc

SEQ ID NO: 822923 - RNA, 19 nt, Artificial Sequence
  Description of Artificial Sequence: Synthetic oligonucleotide
ugcgugaugcgaggcugcu

SEQ ID NO: 822924 - RNA, 19 nt, Artificial Sequence
  Description of Artificial Sequence: Synthetic oligonucleotide
uccuaccuccacgccgacc

SEQ ID NO: 822925 - RNA, 19 nt, Artificial Sequence
  Description of Artificial Sequence: Synthetic oligonucleotide
guggcaacccagcgccgug

SEQ ID NO: 822926 - RNA, 19 nt, Artificial Sequence
  Description of Artificial Sequence: Synthetic oligonucleotide
gcgcuuaucacaauggaau

SEQ ID NO: 822927 - RNA, 19 nt, Artificial Sequence
  Description of Artificial Sequence: Synthetic oligonucleotide
cacggauagaaugucaguu

SEQ ID NO: 822928 - RNA, 19 nt, Artificial Sequence
  Description of Artificial Sequence: Synthetic oligonucleotide
cugccaguuuacacacaca

SEQ ID NO: 822929 - RNA, 19 nt, Artificial Sequence
  Description of Artificial Sequence: Synthetic oligonucleotide
ucucgugauggggcccucu

SEQ ID NO: 822930 - RNA, 19 nt, Artificial Sequence
  Description of Artificial Sequence: Synthetic oligonucleotide
guuauaagugucgcagauu

SEQ ID NO: 822931 - RNA, 19 nt, Artificial Sequence
  Description of Artificial Sequence: Synthetic oligonucleotide
acgucgcgaagcagacugg

SEQ ID NO: 822932 - RNA, 19 nt, Artificial Sequence
  Description of Artificial Sequence: Synthetic oligonucleotide
caccgcgccaaugaagcga

SEQ ID NO: 822933 - RNA, 19 nt, Artificial Sequence
  Description of Artificial Sequence: Synthetic oligonucleotide
gggucgugcgcuccuccag

SEQ ID NO: 822934 - RNA, 19 nt, Artificial Sequence
  Description of Artificial Sequence: Synthetic oligonucleotide
gcgagcaaacgcugggaca

SEQ ID NO: 822935 - RNA, 19 nt, Artificial Sequence
  Description of Artificial Sequence: Synthetic oligonucleotide
accgcgccaaugaagcgau

SEQ ID NO: 822936 - RNA, 19 nt, Artificial Sequence
  Description of Artificial Sequence: Synthetic oligonucleotide
ccucucuaacucugguuuc

SEQ ID NO: 822937 - RNA, 19 nt, Artificial Sequence
  Description of Artificial Sequence: Synthetic oligonucleotide
auucuacguacgacacgga

SEQ ID NO: 822938 - RNA, 19 nt, Artificial Sequence
  Description of Artificial Sequence: Synthetic oligonucleotide
gcgacuacuuuccuuugcu

SEQ ID NO: 822939 - RNA, 19 nt, Artificial Sequence
  Description of Artificial Sequence: Synthetic oligonucleotide
cugaagccgaucuccugcu

SEQ ID NO: 822940 - RNA, 19 nt, Artificial Sequence
  Description of Artificial Sequence: Synthetic oligonucleotide
ccgaguggcaagcuucauc

SEQ ID NO: 822941 - RNA, 19 nt, Artificial Sequence
  Description of Artificial Sequence: Synthetic oligonucleotide
gagcgggcgagcaaacgcu

SEQ ID NO: 822942 - RNA, 19 nt, Artificial Sequence
  Description of Artificial Sequence: Synthetic oligonucleotide
ucgcucccagcuggcgggg

SEQ ID NO: 822943 - RNA, 19 nt, Artificial Sequence
  Description of Artificial Sequence: Synthetic oligonucleotide
cgcaauccuagcaacgcca

SEQ ID NO: 822944 - RNA, 19 nt, Artificial Sequence
  Description of Artificial Sequence: Synthetic oligonucleotide
cuuugcgggugaguuugga

SEQ ID NO: 822945 - RNA, 19 nt, Artificial Sequence
  Description of Artificial Sequence: Synthetic oligonucleotide
caucccaggugcucaauuu

SEQ ID NO: 822946 - RNA, 19 nt, Artificial Sequence
  Description of Artificial Sequence: Synthetic oligonucleotide
cuccuagcuuuggcucgcg

SEQ ID NO: 822947 - RNA, 19 nt, Artificial Sequence
  Description of Artificial Sequence: Synthetic oligonucleotide
ggcuggugcagaacucccc

SEQ ID NO: 822948 - RNA, 19 nt, Artificial Sequence
  Description of Artificial Sequence: Synthetic oligonucleotide
cagcccaacuuuacagugu

SEQ ID NO: 822949 - RNA, 19 nt, Artificial Sequence
  Description of Artificial Sequence: Synthetic oligonucleotide
uggccgagcgggcgagcaa

SEQ ID NO: 822950 - RNA, 19 nt, Artificial Sequence
  Description of Artificial Sequence: Synthetic oligonucleotide
uacguacgacacggauaga

SEQ ID NO: 822951 - RNA, 19 nt, Artificial Sequence
  Description of Artificial Sequence: Synthetic oligonucleotide
gggcacgucgcgaagcaga

SEQ ID NO: 822952 - RNA, 19 nt, Artificial Sequence
  Description of Artificial Sequence: Synthetic oligonucleotide
caagaguggagcccuucau

SEQ ID NO: 822953 - RNA, 19 nt, Artificial Sequence
  Description of Artificial Sequence: Synthetic oligonucleotide
ggcacgucgcgaagcagac

SEQ ID NO: 822954 - RNA, 19 nt, Artificial Sequence
  Description of Artificial Sequence: Synthetic oligonucleotide
acgcugggacacugguaaa

SEQ ID NO: 822955 - RNA, 19 nt, Artificial Sequence
  Description of Artificial Sequence: Synthetic oligonucleotide
gugaggcgggauucccgga

SEQ ID NO: 822956 - RNA, 19 nt, Artificial Sequence
  Description of Artificial Sequence: Synthetic oligonucleotide
cuggcgcacugccaguuua

SEQ ID NO: 822957 - RNA, 19 nt, Artificial Sequence
  Description of Artificial Sequence: Synthetic oligonucleotide
cacgcaggugguaguggaa

SEQ ID NO: 822958 - RNA, 19 nt, Artificial Sequence
  Description of Artificial Sequence: Synthetic oligonucleotide
guguugcggauggcggcug

SEQ ID NO: 822959 - RNA, 19 nt, Artificial Sequence
  Description of Artificial Sequence: Synthetic oligonucleotide
gagcagcacguaguggcua

SEQ ID NO: 822960 - RNA, 19 nt, Artificial Sequence
  Description of Artificial Sequence: Synthetic oligonucleotide
ggauagaaugucaguuggu

SEQ ID NO: 822961 - RNA, 19 nt, Artificial Sequence
  Description of Artificial Sequence: Synthetic oligonucleotide
gccgaccucguugucuagc

SEQ ID NO: 822962 - RNA, 19 nt, Artificial Sequence
  Description of Artificial Sequence: Synthetic oligonucleotide
ggcgugaaagggauggggu

SEQ ID NO: 822963 - RNA, 19 nt, Artificial Sequence
  Description of Artificial Sequence: Synthetic oligonucleotide
gcuccuagcuuuggcucgc

SEQ ID NO: 822964 - RNA, 19 nt, Artificial Sequence
  Description of Artificial Sequence: Synthetic oligonucleotide
cugucgcagcccagcccug

SEQ ID NO: 822965 - RNA, 19 nt, Artificial Sequence
  Description of Artificial Sequence: Synthetic oligonucleotide
ggagcccuucaucauucua

SEQ ID NO: 822966 - RNA, 19 nt, Artificial Sequence
  Description of Artificial Sequence: Synthetic oligonucleotide
ugugcccuucgcgccccac

SEQ ID NO: 822967 - RNA, 19 nt, Artificial Sequence
  Description of Artificial Sequence: Synthetic oligonucleotide
cgucgcgaagcagacuggg

SEQ ID NO: 822968 - RNA, 19 nt, Artificial Sequence
  Description of Artificial Sequence: Synthetic oligonucleotide
ccgccucuccccugcaccc

SEQ ID NO: 822969 - RNA, 19 nt, Artificial Sequence
  Description of Artificial Sequence: Synthetic oligonucleotide
agaugucggcccaguccca

SEQ ID NO: 822970 - RNA, 19 nt, Artificial Sequence
  Description of Artificial Sequence: Synthetic oligonucleotide
gaugucggcccagucccau

SEQ ID NO: 822971 - RNA, 19 nt, Artificial Sequence
  Description of Artificial Sequence: Synthetic oligonucleotide
cccacucgaugucguugcg

SEQ ID NO: 822972 - RNA, 19 nt, Artificial Sequence
  Description of Artificial Sequence: Synthetic oligonucleotide
gcuuugcgggugaguuugg

SEQ ID NO: 822973 - RNA, 19 nt, Artificial Sequence
  Description of Artificial Sequence: Synthetic oligonucleotide
cccacgcaggugguagugg

SEQ ID NO: 822974 - RNA, 19 nt, Artificial Sequence
  Description of Artificial Sequence: Synthetic oligonucleotide
ggggucgugcgcuccucca

SEQ ID NO: 822975 - RNA, 19 nt, Artificial Sequence
  Description of Artificial Sequence: Synthetic oligonucleotide
cuccuaccuccacgccgac

SEQ ID NO: 822976 - RNA, 19 nt, Artificial Sequence
  Description of Artificial Sequence: Synthetic oligonucleotide
gccggugccaggagccugc

SEQ ID NO: 822977 - RNA, 19 nt, Artificial Sequence
  Description of Artificial Sequence: Synthetic oligonucleotide
cgacacggauagaauguca

SEQ ID NO: 822978 - RNA, 19 nt, Artificial Sequence
  Description of Artificial Sequence: Synthetic oligonucleotide
gcgccgugcccuggcaugg

SEQ ID NO: 822979 - RNA, 19 nt, Artificial Sequence
  Description of Artificial Sequence: Synthetic oligonucleotide
cgcugggacacugguaaac

SEQ ID NO: 822980 - RNA, 19 nt, Artificial Sequence
  Description of Artificial Sequence: Synthetic oligonucleotide
ggccgaguggcaagcuuca

SEQ ID NO: 822981 - RNA, 19 nt, Artificial Sequence
  Description of Artificial Sequence: Synthetic oligonucleotide
ccuagcuuuggcucgcgau

SEQ ID NO: 822982 - RNA, 19 nt, Artificial Sequence
  Description of Artificial Sequence: Synthetic oligonucleotide
gcccacgcaggugguagug

SEQ ID NO: 822983 - RNA, 19 nt, Artificial Sequence
  Description of Artificial Sequence: Synthetic oligonucleotide
cacgccgaccucguugucu

SEQ ID NO: 822984 - RNA, 19 nt, Artificial Sequence
  Description of Artificial Sequence: Synthetic oligonucleotide
gugaugcgaggcugcuccu

SEQ ID NO: 822985 - RNA, 19 nt, Artificial Sequence
  Description of Artificial Sequence: Synthetic oligonucleotide
gggcgagcaaacgcuggga

SEQ ID NO: 822986 - RNA, 19 nt, Artificial Sequence
  Description of Artificial Sequence: Synthetic oligonucleotide
guaaccggugaggcgggau

SEQ ID NO: 822987 - RNA, 19 nt, Artificial Sequence
  Description of Artificial Sequence: Synthetic oligonucleotide
gagcaaacgcugggacacu

SEQ ID NO: 822988 - RNA, 19 nt, Artificial Sequence
  Description of Artificial Sequence: Synthetic oligonucleotide
gcggggagaggcccgccuc

SEQ ID NO: 822989 - RNA, 19 nt, Artificial Sequence
  Description of Artificial Sequence: Synthetic oligonucleotide
ccuucgcgccccacaacca

SEQ ID NO: 822990 - RNA, 19 nt, Artificial Sequence
  Description of Artificial Sequence: Synthetic oligonucleotide
cccaggugcucaauuuaua

SEQ ID NO: 822991 - RNA, 19 nt, Artificial Sequence
  Description of Artificial Sequence: Synthetic oligonucleotide
gcucgcgaugauaguggga

SEQ ID NO: 822992 - RNA, 19 nt, Artificial Sequence
  Description of Artificial Sequence: Synthetic oligonucleotide
gccgaucuccugcuuguau

SEQ ID NO: 822993 - RNA, 19 nt, Artificial Sequence
  Description of Artificial Sequence: Synthetic oligonucleotide
cgauuaccaacagugcugu

SEQ ID NO: 822994 - RNA, 19 nt, Artificial Sequence
  Description of Artificial Sequence: Synthetic oligonucleotide
cucucgugauggggcccuc

SEQ ID NO: 822995 - RNA, 19 nt, Artificial Sequence
  Description of Artificial Sequence: Synthetic oligonucleotide
gcccugcgugaugcgaggc

SEQ ID NO: 822996 - RNA, 19 nt, Artificial Sequence
  Description of Artificial Sequence: Synthetic oligonucleotide
gcccuucaucauucuacgu

SEQ ID NO: 822997 - RNA, 19 nt, Artificial Sequence
  Description of Artificial Sequence: Synthetic oligonucleotide
cucuggcgacuacuuuccu

SEQ ID NO: 822998 - RNA, 19 nt, Artificial Sequence
  Description of Artificial Sequence: Synthetic oligonucleotide
cguacgacacggauagaau

SEQ ID NO: 822999 - RNA, 19 nt, Artificial Sequence
  Description of Artificial Sequence: Synthetic oligonucleotide
ccgaccucguugucuagcu

SEQ ID NO: 823000 - RNA, 19 nt, Artificial Sequence
  Description of Artificial Sequence: Synthetic oligonucleotide
gcccuucgcgccccacaac

SEQ ID NO: 823001 - RNA, 19 nt, Artificial Sequence
  Description of Artificial Sequence: Synthetic oligonucleotide
gguaaccggugaggcggga

SEQ ID NO: 823002 - RNA, 19 nt, Artificial Sequence
  Description of Artificial Sequence: Synthetic oligonucleotide
cggggucgugcgcuccucc

SEQ ID NO: 823003 - RNA, 19 nt, Artificial Sequence
  Description of Artificial Sequence: Synthetic oligonucleotide
gcgugaugcgaggcugcuc

SEQ ID NO: 823004 - RNA, 19 nt, Artificial Sequence
  Description of Artificial Sequence: Synthetic oligonucleotide
cgcuggccgaguggcaagc

SEQ ID NO: 823005 - RNA, 19 nt, Artificial Sequence
  Description of Artificial Sequence: Synthetic oligonucleotide
gccgagcgggcgagcaaac

SEQ ID NO: 823006 - RNA, 19 nt, Artificial Sequence
  Description of Artificial Sequence: Synthetic oligonucleotide
ggauucccggauccuucuu

SEQ ID NO: 823007 - RNA, 19 nt, Artificial Sequence
  Description of Artificial Sequence: Synthetic oligonucleotide
cguuaaagagcgagugcuu

SEQ ID NO: 823008 - RNA, 19 nt, Artificial Sequence
  Description of Artificial Sequence: Synthetic oligonucleotide
cgacgaaguuucagagcaa

SEQ ID NO: 823009 - RNA, 19 nt, Artificial Sequence
  Description of Artificial Sequence: Synthetic oligonucleotide
cacccgcacccagccagaa

SEQ ID NO: 823010 - RNA, 19 nt, Artificial Sequence
  Description of Artificial Sequence: Synthetic oligonucleotide
ggccggggucgugcgcucc

SEQ ID NO: 823011 - RNA, 19 nt, Artificial Sequence
  Description of Artificial Sequence: Synthetic oligonucleotide
ggcccgccucaguggcccc

SEQ ID NO: 823012 - RNA, 19 nt, Artificial Sequence
  Description of Artificial Sequence: Synthetic oligonucleotide
cuccccacucgaugucguu

SEQ ID NO: 823013 - RNA, 19 nt, Artificial Sequence
  Description of Artificial Sequence: Synthetic oligonucleotide
cgagugcuucugguuauaa

SEQ ID NO: 823014 - RNA, 19 nt, Artificial Sequence
  Description of Artificial Sequence: Synthetic oligonucleotide
gcgagugcuucugguuaua

SEQ ID NO: 823015 - RNA, 19 nt, Artificial Sequence
  Description of Artificial Sequence: Synthetic oligonucleotide
gcagcacguaguggcuaua

SEQ ID NO: 823016 - RNA, 19 nt, Artificial Sequence
  Description of Artificial Sequence: Synthetic oligonucleotide
cccugcgugaugcgaggcu

SEQ ID NO: 823017 - RNA, 19 nt, Artificial Sequence
  Description of Artificial Sequence: Synthetic oligonucleotide
ccgaugucuccuccucccu

SEQ ID NO: 823018 - RNA, 19 nt, Artificial Sequence
  Description of Artificial Sequence: Synthetic oligonucleotide
gcgggauucccggauccuu

SEQ ID NO: 823019 - RNA, 19 nt, Artificial Sequence
  Description of Artificial Sequence: Synthetic oligonucleotide
gccggggucgugcgcuccu

SEQ ID NO: 823020 - RNA, 19 nt, Artificial Sequence
  Description of Artificial Sequence: Synthetic oligonucleotide
gcacgucgcgaagcagacu

SEQ ID NO: 823021 - RNA, 19 nt, Artificial Sequence
  Description of Artificial Sequence: Synthetic oligonucleotide
gcccgccucaguggcccca

SEQ ID NO: 823022 - RNA, 19 nt, Artificial Sequence
  Description of Artificial Sequence: Synthetic oligonucleotide
ccccucucuggcgacuacu

SEQ ID NO: 823023 - RNA, 19 nt, Artificial Sequence
  Description of Artificial Sequence: Synthetic oligonucleotide
ccggggucgugcgcuccuc

SEQ ID NO: 823024 - RNA, 19 nt, Artificial Sequence
  Description of Artificial Sequence: Synthetic oligonucleotide
cgccgugcccuggcauggc

SEQ ID NO: 823025 - RNA, 19 nt, Artificial Sequence
  Description of Artificial Sequence: Synthetic oligonucleotide
gccgaguggcaagcuucau

SEQ ID NO: 823026 - RNA, 19 nt, Artificial Sequence
  Description of Artificial Sequence: Synthetic oligonucleotide
cccgccucaguggccccaa

SEQ ID NO: 823027 - RNA, 19 nt, Artificial Sequence
  Description of Artificial Sequence: Synthetic oligonucleotide
ccggcccgagagggugcug

SEQ ID NO: 823028 - RNA, 19 nt, Artificial Sequence
  Description of Artificial Sequence: Synthetic oligonucleotide
ccgcgccaaugaagcgauu

SEQ ID NO: 823029 - RNA, 19 nt, Artificial Sequence
  Description of Artificial Sequence: Synthetic oligonucleotide
aaaggaaccggacuuccgc

SEQ ID NO: 823030 - RNA, 19 nt, Artificial Sequence
  Description of Artificial Sequence: Synthetic oligonucleotide
uauaccugcacccucauca

SEQ ID NO: 823031 - RNA, 19 nt, Artificial Sequence
  Description of Artificial Sequence: Synthetic oligonucleotide
auacuucgaagacacaacc

SEQ ID NO: 823032 - RNA, 19 nt, Artificial Sequence
  Description of Artificial Sequence: Synthetic oligonucleotide
uaucagucgaaucaagucu

SEQ ID NO: 823033 - RNA, 19 nt, Artificial Sequence
  Description of Artificial Sequence: Synthetic oligonucleotide
auaacugccgcucauccuc

SEQ ID NO: 823034 - RNA, 19 nt, Artificial Sequence
  Description of Artificial Sequence: Synthetic oligonucleotide
uacucgaucaauguagucc

SEQ ID NO: 823035 - RNA, 19 nt, Artificial Sequence
  Description of Artificial Sequence: Synthetic oligonucleotide
guugaaggcugacugauag

SEQ ID NO: 823036 - RNA, 19 nt, Artificial Sequence
  Description of Artificial Sequence: Synthetic oligonucleotide
aucuccuuaaggcuuuucg

SEQ ID NO: 823037 - RNA, 19 nt, Artificial Sequence
  Description of Artificial Sequence: Synthetic oligonucleotide
uuaaccuccgagcggagcc

SEQ ID NO: 823038 - RNA, 19 nt, Artificial Sequence
  Description of Artificial Sequence: Synthetic oligonucleotide
guuuauacuucgaagacac

SEQ ID NO: 823039 - RNA, 19 nt, Artificial Sequence
  Description of Artificial Sequence: Synthetic oligonucleotide
uauggcguccauaacagaa

SEQ ID NO: 823040 - RNA, 19 nt, Artificial Sequence
  Description of Artificial Sequence: Synthetic oligonucleotide
uuauacuucgaagacacaa

SEQ ID NO: 823041 - RNA, 19 nt, Artificial Sequence
  Description of Artificial Sequence: Synthetic oligonucleotide
uauacuucgaagacacaac

SEQ ID NO: 823042 - RNA, 19 nt, Artificial Sequence
  Description of Artificial Sequence: Synthetic oligonucleotide
gauauggcguccauaacag

SEQ ID NO: 823043 - RNA, 19 nt, Artificial Sequence
  Description of Artificial Sequence: Synthetic oligonucleotide
uccuacugcagccuguucc

SEQ ID NO: 823044 - RNA, 19 nt, Artificial Sequence
  Description of Artificial Sequence: Synthetic oligonucleotide
ucuaucagucgaaucaagu

SEQ ID NO: 823045 - RNA, 19 nt, Artificial Sequence
  Description of Artificial Sequence: Synthetic oligonucleotide
aggacgucaccuuugaucu

SEQ ID NO: 823046 - RNA, 19 nt, Artificial Sequence
  Description of Artificial Sequence: Synthetic oligonucleotide
cuaugguagcguuucagcc

SEQ ID NO: 823047 - RNA, 19 nt, Artificial Sequence
  Description of Artificial Sequence: Synthetic oligonucleotide
ucuuuauuggccucuucug

SEQ ID NO: 823048 - RNA, 19 nt, Artificial Sequence
  Description of Artificial Sequence: Synthetic oligonucleotide
guaagucuggcuaugguag

SEQ ID NO: 823049 - RNA, 19 nt, Artificial Sequence
  Description of Artificial Sequence: Synthetic oligonucleotide
ugugucuuggaccuccucu

SEQ ID NO: 823050 - RNA, 19 nt, Artificial Sequence
  Description of Artificial Sequence: Synthetic oligonucleotide
aguacguaggagcaggaca

SEQ ID NO: 823051 - RNA, 19 nt, Artificial Sequence
  Description of Artificial Sequence: Synthetic oligonucleotide
aucuacucgaucaauguag

SEQ ID NO: 823052 - RNA, 19 nt, Artificial Sequence
  Description of Artificial Sequence: Synthetic oligonucleotide
auguaguccccagauauac

SEQ ID NO: 823053 - RNA, 19 nt, Artificial Sequence
  Description of Artificial Sequence: Synthetic oligonucleotide
ucaucuacucgaucaaugu

SEQ ID NO: 823054 - RNA, 19 nt, Artificial Sequence
  Description of Artificial Sequence: Synthetic oligonucleotide
cuaucagucgaaucaaguc

SEQ ID NO: 823055 - RNA, 19 nt, Artificial Sequence
  Description of Artificial Sequence: Synthetic oligonucleotide
uccgacuccuuucucaggc

SEQ ID NO: 823056 - RNA, 19 nt, Artificial Sequence
  Description of Artificial Sequence: Synthetic oligonucleotide
uguuuauacuucgaagaca

SEQ ID NO: 823057 - RNA, 19 nt, Artificial Sequence
  Description of Artificial Sequence: Synthetic oligonucleotide
gacacaaccaccacgucug

SEQ ID NO: 823058 - RNA, 19 nt, Artificial Sequence
  Description of Artificial Sequence: Synthetic oligonucleotide
aucacaaaggaaccggacu

SEQ ID NO: 823059 - RNA, 19 nt, Artificial Sequence
  Description of Artificial Sequence: Synthetic oligonucleotide
uaacgcaucucgcucagcu

SEQ ID NO: 823060 - RNA, 19 nt, Artificial Sequence
  Description of Artificial Sequence: Synthetic oligonucleotide
ugaguuuauccagaguggc

SEQ ID NO: 823061 - RNA, 19 nt, Artificial Sequence
  Description of Artificial Sequence: Synthetic oligonucleotide
uuucgugucuucaucaguu

SEQ ID NO: 823062 - RNA, 19 nt, Artificial Sequence
  Description of Artificial Sequence: Synthetic oligonucleotide
gaggacgucaccuuugauc

SEQ ID NO: 823063 - RNA, 19 nt, Artificial Sequence
  Description of Artificial Sequence: Synthetic oligonucleotide
aauaacugccgcucauccu

SEQ ID NO: 823064 - RNA, 19 nt, Artificial Sequence
  Description of Artificial Sequence: Synthetic oligonucleotide
auugccguaagucuggcua

SEQ ID NO: 823065 - RNA, 19 nt, Artificial Sequence
  Description of Artificial Sequence: Synthetic oligonucleotide
ggaucuggaugccauaacg

SEQ ID NO: 823066 - RNA, 19 nt, Artificial Sequence
  Description of Artificial Sequence: Synthetic oligonucleotide
ucucuggcgcucuuuauug

SEQ ID NO: 823067 - RNA, 19 nt, Artificial Sequence
  Description of Artificial Sequence: Synthetic oligonucleotide
acaaaggaaccggacuucc

SEQ ID NO: 823068 - RNA, 19 nt, Artificial Sequence
  Description of Artificial Sequence: Synthetic oligonucleotide
cucauagcgcuguuuauac

SEQ ID NO: 823069 - RNA, 19 nt, Artificial Sequence
  Description of Artificial Sequence: Synthetic oligonucleotide
ucuuucucgaacucuccca

SEQ ID NO: 823070 - RNA, 19 nt, Artificial Sequence
  Description of Artificial Sequence: Synthetic oligonucleotide
gagaaguccgaauggucag

SEQ ID NO: 823071 - RNA, 19 nt, Artificial Sequence
  Description of Artificial Sequence: Synthetic oligonucleotide
ucaugcagcaucuuccaaa

SEQ ID NO: 823072 - RNA, 19 nt, Artificial Sequence
  Description of Artificial Sequence: Synthetic oligonucleotide
ucuacucgaucaauguagu

SEQ ID NO: 823073 - RNA, 19 nt, Artificial Sequence
  Description of Artificial Sequence: Synthetic oligonucleotide
cauugggaggguuggaagc

SEQ ID NO: 823074 - RNA, 19 nt, Artificial Sequence
  Description of Artificial Sequence: Synthetic oligonucleotide
ucuggaauccuuggaaggc

SEQ ID NO: 823075 - RNA, 19 nt, Artificial Sequence
  Description of Artificial Sequence: Synthetic oligonucleotide
ugcuuggaggccuuggcug

SEQ ID NO: 823076 - RNA, 19 nt, Artificial Sequence
  Description of Artificial Sequence: Synthetic oligonucleotide
uuuugaucucaaucuuccc

SEQ ID NO: 823077 - RNA, 19 nt, Artificial Sequence
  Description of Artificial Sequence: Synthetic oligonucleotide
gaucuggaugccauaacgc

SEQ ID NO: 823078 - RNA, 19 nt, Artificial Sequence
  Description of Artificial Sequence: Synthetic oligonucleotide
uuuugagggacagucuucu

SEQ ID NO: 823079 - RNA, 19 nt, Artificial Sequence
  Description of Artificial Sequence: Synthetic oligonucleotide
guagccgagguagaggacg

SEQ ID NO: 823080 - RNA, 19 nt, Artificial Sequence
  Description of Artificial Sequence: Synthetic oligonucleotide
ucccaugacaggcaacggc

SEQ ID NO: 823081 - RNA, 19 nt, Artificial Sequence
  Description of Artificial Sequence: Synthetic oligonucleotide
aagucuggcuaugguagcg

SEQ ID NO: 823082 - RNA, 19 nt, Artificial Sequence
  Description of Artificial Sequence: Synthetic oligonucleotide
aggguuccgguucuccugc

SEQ ID NO: 823083 - RNA, 19 nt, Artificial Sequence
  Description of Artificial Sequence: Synthetic oligonucleotide
gcaggcggcacucauagcg

SEQ ID NO: 823084 - RNA, 19 nt, Artificial Sequence
  Description of Artificial Sequence: Synthetic oligonucleotide
aguuagccagcgugugucc

SEQ ID NO: 823085 - RNA, 19 nt, Artificial Sequence
  Description of Artificial Sequence: Synthetic oligonucleotide
ucgaaucaagucugcuggg

SEQ ID NO: 823086 - RNA, 19 nt, Artificial Sequence
  Description of Artificial Sequence: Synthetic oligonucleotide
agcggagccgcucacgguc

SEQ ID NO: 823087 - RNA, 19 nt, Artificial Sequence
  Description of Artificial Sequence: Synthetic oligonucleotide
cuuuucgugucuucaucag

SEQ ID NO: 823088 - RNA, 19 nt, Artificial Sequence
  Description of Artificial Sequence: Synthetic oligonucleotide
auaugguacugcuggauau

SEQ ID NO: 823089 - RNA, 19 nt, Artificial Sequence
  Description of Artificial Sequence: Synthetic oligonucleotide
ugacugauaguagccgagg

SEQ ID NO: 823090 - RNA, 19 nt, Artificial Sequence
  Description of Artificial Sequence: Synthetic oligonucleotide
uguaguccccagauauacc

SEQ ID NO: 823091 - RNA, 19 nt, Artificial Sequence
  Description of Artificial Sequence: Synthetic oligonucleotide
ucucacaauuuugaucuca

SEQ ID NO: 823092 - RNA, 19 nt, Artificial Sequence
  Description of Artificial Sequence: Synthetic oligonucleotide
auugggcucaacaauucag

SEQ ID NO: 823093 - RNA, 19 nt, Artificial Sequence
  Description of Artificial Sequence: Synthetic oligonucleotide
agcgggugccucuuccucc

SEQ ID NO: 823094 - RNA, 19 nt, Artificial Sequence
  Description of Artificial Sequence: Synthetic oligonucleotide
ggauauggcguccauaaca

SEQ ID NO: 823095 - RNA, 19 nt, Artificial Sequence
  Description of Artificial Sequence: Synthetic oligonucleotide
guagcguuucagccgaugc

SEQ ID NO: 823096 - RNA, 19 nt, Artificial Sequence
  Description of Artificial Sequence: Synthetic oligonucleotide
guccucaccgccuggagag

SEQ ID NO: 823097 - RNA, 19 nt, Artificial Sequence
  Description of Artificial Sequence: Synthetic oligonucleotide
cugacugauaguagccgag

SEQ ID NO: 823098 - RNA, 19 nt, Artificial Sequence
  Description of Artificial Sequence: Synthetic oligonucleotide
ugaugaguuuauccagagu

SEQ ID NO: 823099 - RNA, 19 nt, Artificial Sequence
  Description of Artificial Sequence: Synthetic oligonucleotide
uccuuguguuccuuggcug

SEQ ID NO: 823100 - RNA, 19 nt, Artificial Sequence
  Description of Artificial Sequence: Synthetic oligonucleotide
agccgagaaguccgaaugg

SEQ ID NO: 823101 - RNA, 19 nt, Artificial Sequence
  Description of Artificial Sequence: Synthetic oligonucleotide
uucucgaacucucccaaua

SEQ ID NO: 823102 - RNA, 19 nt, Artificial Sequence
  Description of Artificial Sequence: Synthetic oligonucleotide
uuuauacuucgaagacaca

SEQ ID NO: 823103 - RNA, 19 nt, Artificial Sequence
  Description of Artificial Sequence: Synthetic oligonucleotide
auucaggcucccgacggcc

SEQ ID NO: 823104 - RNA, 19 nt, Artificial Sequence
  Description of Artificial Sequence: Synthetic oligonucleotide
ugccauaacgcaucucgcu

SEQ ID NO: 823105 - RNA, 19 nt, Artificial Sequence
  Description of Artificial Sequence: Synthetic oligonucleotide
uccaaccugcccuuuugcc

SEQ ID NO: 823106 - RNA, 19 nt, Artificial Sequence
  Description of Artificial Sequence: Synthetic oligonucleotide
augguagcguuucagccga

SEQ ID NO: 823107 - RNA, 19 nt, Artificial Sequence
  Description of Artificial Sequence: Synthetic oligonucleotide
ucagucgaaucaagucugc

SEQ ID NO: 823108 - RNA, 19 nt, Artificial Sequence
  Description of Artificial Sequence: Synthetic oligonucleotide
ugggcucaacaauucagga

SEQ ID NO: 823109 - RNA, 19 nt, Artificial Sequence
  Description of Artificial Sequence: Synthetic oligonucleotide
uauugccugcucccguucc

SEQ ID NO: 823110 - RNA, 19 nt, Artificial Sequence
  Description of Artificial Sequence: Synthetic oligonucleotide
cucuuucucgaacucuccc

SEQ ID NO: 823111 - RNA, 19 nt, Artificial Sequence
  Description of Artificial Sequence: Synthetic oligonucleotide
ugccucuggagguaggcca

SEQ ID NO: 823112 - RNA, 19 nt, Artificial Sequence
  Description of Artificial Sequence: Synthetic oligonucleotide
uguagccucaggguuccgg

SEQ ID NO: 823113 - RNA, 19 nt, Artificial Sequence
  Description of Artificial Sequence: Synthetic oligonucleotide
gaagacacaaccaccacgu

SEQ ID NO: 823114 - RNA, 19 nt, Artificial Sequence
  Description of Artificial Sequence: Synthetic oligonucleotide
caaaggaaccggacuuccg

SEQ ID NO: 823115 - RNA, 19 nt, Artificial Sequence
  Description of Artificial Sequence: Synthetic oligonucleotide
aguucagagcuuggcuucc

SEQ ID NO: 823116 - RNA, 19 nt, Artificial Sequence
  Description of Artificial Sequence: Synthetic oligonucleotide
cagggugacaaagaauggc

SEQ ID NO: 823117 - RNA, 19 nt, Artificial Sequence
  Description of Artificial Sequence: Synthetic oligonucleotide
uagaggacgucaccuuuga

SEQ ID NO: 823118 - RNA, 19 nt, Artificial Sequence
  Description of Artificial Sequence: Synthetic oligonucleotide
uguuccuuggcugggcuga

SEQ ID NO: 823119 - RNA, 19 nt, Artificial Sequence
  Description of Artificial Sequence: Synthetic oligonucleotide
uagcguuucagccgaugcu

SEQ ID NO: 823120 - RNA, 19 nt, Artificial Sequence
  Description of Artificial Sequence: Synthetic oligonucleotide
ucaguuagccagcgugugu

SEQ ID NO: 823121 - RNA, 19 nt, Artificial Sequence
  Description of Artificial Sequence: Synthetic oligonucleotide
agcguuucagccgaugcug

SEQ ID NO: 823122 - RNA, 19 nt, Artificial Sequence
  Description of Artificial Sequence: Synthetic oligonucleotide
cucccuuucccgcuggaag

SEQ ID NO: 823123 - RNA, 19 nt, Artificial Sequence
  Description of Artificial Sequence: Synthetic oligonucleotide
uccgaaacagccugggguu

SEQ ID NO: 823124 - RNA, 19 nt, Artificial Sequence
  Description of Artificial Sequence: Synthetic oligonucleotide
ugucagggccaguauugcc

SEQ ID NO: 823125 - RNA, 19 nt, Artificial Sequence
  Description of Artificial Sequence: Synthetic oligonucleotide
uuauuggccucuucugcuc

SEQ ID NO: 823126 - RNA, 19 nt, Artificial Sequence
  Description of Artificial Sequence: Synthetic oligonucleotide
cucuaucagucgaaucaag

SEQ ID NO: 823127 - RNA, 19 nt, Artificial Sequence
  Description of Artificial Sequence: Synthetic oligonucleotide
ggugacaaagaauggccug

SEQ ID NO: 823128 - RNA, 19 nt, Artificial Sequence
  Description of Artificial Sequence: Synthetic oligonucleotide
uguccucaccgccuggaga

SEQ ID NO: 823129 - RNA, 19 nt, Artificial Sequence
  Description of Artificial Sequence: Synthetic oligonucleotide
gaaggcugacugauaguag

SEQ ID NO: 823130 - RNA, 19 nt, Artificial Sequence
  Description of Artificial Sequence: Synthetic oligonucleotide
uggcuguuucaucauccca

SEQ ID NO: 823131 - RNA, 19 nt, Artificial Sequence
  Description of Artificial Sequence: Synthetic oligonucleotide
uugguuccaccuuucaguu

SEQ ID NO: 823132 - RNA, 19 nt, Artificial Sequence
  Description of Artificial Sequence: Synthetic oligonucleotide
auauaccugcacccucauc

SEQ ID NO: 823133 - RNA, 19 nt, Artificial Sequence
  Description of Artificial Sequence: Synthetic oligonucleotide
caaccugcccuuuugccuc

SEQ ID NO: 823134 - RNA, 19 nt, Artificial Sequence
  Description of Artificial Sequence: Synthetic oligonucleotide
gcuaugguagcguuucagc

SEQ ID NO: 823135 - RNA, 19 nt, Artificial Sequence
  Description of Artificial Sequence: Synthetic oligonucleotide
auagcgcuguuuauacuuc

SEQ ID NO: 823136 - RNA, 19 nt, Artificial Sequence
  Description of Artificial Sequence: Synthetic oligonucleotide
cauaacgcaucucgcucag

SEQ ID NO: 823137 - RNA, 19 nt, Artificial Sequence
  Description of Artificial Sequence: Synthetic oligonucleotide
uccgugguaucaucuccag

SEQ ID NO: 823138 - RNA, 19 nt, Artificial Sequence
  Description of Artificial Sequence: Synthetic oligonucleotide
ucaguacguaggagcagga

SEQ ID NO: 823139 - RNA, 19 nt, Artificial Sequence
  Description of Artificial Sequence: Synthetic oligonucleotide
augccauaacgcaucucgc

SEQ ID NO: 823140 - RNA, 19 nt, Artificial Sequence
  Description of Artificial Sequence: Synthetic oligonucleotide
uuauccagaguggcuguca

SEQ ID NO: 823141 - RNA, 19 nt, Artificial Sequence
  Description of Artificial Sequence: Synthetic oligonucleotide
caauguaguccccagauau

SEQ ID NO: 823142 - RNA, 19 nt, Artificial Sequence
  Description of Artificial Sequence: Synthetic oligonucleotide
cuggcgcucuuuauuggcc

SEQ ID NO: 823143 - RNA, 19 nt, Artificial Sequence
  Description of Artificial Sequence: Synthetic oligonucleotide
gauucaggcucccgacggc

SEQ ID NO: 823144 - RNA, 19 nt, Artificial Sequence
  Description of Artificial Sequence: Synthetic oligonucleotide
agauauaccugcacccuca

SEQ ID NO: 823145 - RNA, 19 nt, Artificial Sequence
  Description of Artificial Sequence: Synthetic oligonucleotide
agguaggccauguacucau

SEQ ID NO: 823146 - RNA, 19 nt, Artificial Sequence
  Description of Artificial Sequence: Synthetic oligonucleotide
uccuccgaaacagccuggg

SEQ ID NO: 823147 - RNA, 19 nt, Artificial Sequence
  Description of Artificial Sequence: Synthetic oligonucleotide
caagggcucaucuacucga

SEQ ID NO: 823148 - RNA, 19 nt, Artificial Sequence
  Description of Artificial Sequence: Synthetic oligonucleotide
cuggagagccccacacgcg

SEQ ID NO: 823149 - RNA, 19 nt, Artificial Sequence
  Description of Artificial Sequence: Synthetic oligonucleotide
cuuccaaccugcccuuuug

SEQ ID NO: 823150 - RNA, 19 nt, Artificial Sequence
  Description of Artificial Sequence: Synthetic oligonucleotide
uucuccucaugcugcuuug

SEQ ID NO: 823151 - RNA, 19 nt, Artificial Sequence
  Description of Artificial Sequence: Synthetic oligonucleotide
gccgcucacggucugaggg

SEQ ID NO: 823152 - RNA, 19 nt, Artificial Sequence
  Description of Artificial Sequence: Synthetic oligonucleotide
aaccuccgagcggagccgc

SEQ ID NO: 823153 - RNA, 19 nt, Artificial Sequence
  Description of Artificial Sequence: Synthetic oligonucleotide
cucgccccacacuuggcgg

SEQ ID NO: 823154 - RNA, 19 nt, Artificial Sequence
  Description of Artificial Sequence: Synthetic oligonucleotide
cugaagcuuggcucugccc

SEQ ID NO: 823155 - RNA, 19 nt, Artificial Sequence
  Description of Artificial Sequence: Synthetic oligonucleotide
guaggccauguacucauca

SEQ ID NO: 823156 - RNA, 19 nt, Artificial Sequence
  Description of Artificial Sequence: Synthetic oligonucleotide
cucuggcgcucuuuauugg

SEQ ID NO: 823157 - RNA, 19 nt, Artificial Sequence
  Description of Artificial Sequence: Synthetic oligonucleotide
caggaagauucuggaaucc

SEQ ID NO: 823158 - RNA, 19 nt, Artificial Sequence
  Description of Artificial Sequence: Synthetic oligonucleotide
cagauauaccugcacccuc

SEQ ID NO: 823159 - RNA, 19 nt, Artificial Sequence
  Description of Artificial Sequence: Synthetic oligonucleotide
ucuccuuucucugggguua

SEQ ID NO: 823160 - RNA, 19 nt, Artificial Sequence
  Description of Artificial Sequence: Synthetic oligonucleotide
cucacaauuuugaucucaa

SEQ ID NO: 823161 - RNA, 19 nt, Artificial Sequence
  Description of Artificial Sequence: Synthetic oligonucleotide
cccaguugaaggcugacug

SEQ ID NO: 823162 - RNA, 19 nt, Artificial Sequence
  Description of Artificial Sequence: Synthetic oligonucleotide
uaaccuccgagcggagccg

SEQ ID NO: 823163 - RNA, 19 nt, Artificial Sequence
  Description of Artificial Sequence: Synthetic oligonucleotide
uggcguccauaacagaauu

SEQ ID NO: 823164 - RNA, 19 nt, Artificial Sequence
  Description of Artificial Sequence: Synthetic oligonucleotide
guacguaggagcaggacaa

SEQ ID NO: 823165 - RNA, 19 nt, Artificial Sequence
  Description of Artificial Sequence: Synthetic oligonucleotide
gaucucugagucuuccaua

SEQ ID NO: 823166 - RNA, 19 nt, Artificial Sequence
  Description of Artificial Sequence: Synthetic oligonucleotide
aucaguuagccagcgugug

SEQ ID NO: 823167 - RNA, 19 nt, Artificial Sequence
  Description of Artificial Sequence: Synthetic oligonucleotide
ggcucaacaauucaggaau

SEQ ID NO: 823168 - RNA, 19 nt, Artificial Sequence
  Description of Artificial Sequence: Synthetic oligonucleotide
aacagacagggagcaucuc

SEQ ID NO: 823169 - RNA, 19 nt, Artificial Sequence
  Description of Artificial Sequence: Synthetic oligonucleotide
cagucaggaagauucugga

SEQ ID NO: 823170 - RNA, 19 nt, Artificial Sequence
  Description of Artificial Sequence: Synthetic oligonucleotide
caguuagccagcguguguc

SEQ ID NO: 823171 - RNA, 19 nt, Artificial Sequence
  Description of Artificial Sequence: Synthetic oligonucleotide
agagccgagaaguccgaau

SEQ ID NO: 823172 - RNA, 19 nt, Artificial Sequence
  Description of Artificial Sequence: Synthetic oligonucleotide
cuuaaccuccgagcggagc

SEQ ID NO: 823173 - RNA, 19 nt, Artificial Sequence
  Description of Artificial Sequence: Synthetic oligonucleotide
gcuuuucgugucuucauca

SEQ ID NO: 823174 - RNA, 19 nt, Artificial Sequence
  Description of Artificial Sequence: Synthetic oligonucleotide
gggcucaucuacucgauca

SEQ ID NO: 823175 - RNA, 19 nt, Artificial Sequence
  Description of Artificial Sequence: Synthetic oligonucleotide
acucauagcgcuguuuaua

SEQ ID NO: 823176 - RNA, 19 nt, Artificial Sequence
  Description of Artificial Sequence: Synthetic oligonucleotide
ucuggcuaugguagcguuu

SEQ ID NO: 823177 - RNA, 19 nt, Artificial Sequence
  Description of Artificial Sequence: Synthetic oligonucleotide
cugcccucccaugacaggc

SEQ ID NO: 823178 - RNA, 19 nt, Artificial Sequence
  Description of Artificial Sequence: Synthetic oligonucleotide
uucagccgaugcugcuugg

SEQ ID NO: 823179 - RNA, 19 nt, Artificial Sequence
  Description of Artificial Sequence: Synthetic oligonucleotide
cuacucgaucaauguaguc

SEQ ID NO: 823180 - RNA, 19 nt, Artificial Sequence
  Description of Artificial Sequence: Synthetic oligonucleotide
cauaugguacugcuggaua

SEQ ID NO: 823181 - RNA, 19 nt, Artificial Sequence
  Description of Artificial Sequence: Synthetic oligonucleotide
cucucccaauaacugccgc

SEQ ID NO: 823182 - RNA, 19 nt, Artificial Sequence
  Description of Artificial Sequence: Synthetic oligonucleotide
cauagcgcuguuuauacuu

SEQ ID NO: 823183 - RNA, 19 nt, Artificial Sequence
  Description of Artificial Sequence: Synthetic oligonucleotide
acccauugccguaagucug

SEQ ID NO: 823184 - RNA, 19 nt, Artificial Sequence
  Description of Artificial Sequence: Synthetic oligonucleotide
auaacgcaucucgcucagc

SEQ ID NO: 823185 - RNA, 19 nt, Artificial Sequence
  Description of Artificial Sequence: Synthetic oligonucleotide
caggguuccgguucuccug

SEQ ID NO: 823186 - RNA, 19 nt, Artificial Sequence
  Description of Artificial Sequence: Synthetic oligonucleotide
auauggcguccauaacaga

SEQ ID NO: 823187 - RNA, 19 nt, Artificial Sequence
  Description of Artificial Sequence: Synthetic oligonucleotide
cuucaacagacagggagca

SEQ ID NO: 823188 - RNA, 19 nt, Artificial Sequence
  Description of Artificial Sequence: Synthetic oligonucleotide
uuuauccagaguggcuguc

SEQ ID NO: 823189 - RNA, 19 nt, Artificial Sequence
  Description of Artificial Sequence: Synthetic oligonucleotide
cugcccuuuugccuccggg

SEQ ID NO: 823190 - RNA, 19 nt, Artificial Sequence
  Description of Artificial Sequence: Synthetic oligonucleotide
cugggguuacuccagcaga

SEQ ID NO: 823191 - RNA, 19 nt, Artificial Sequence
  Description of Artificial Sequence: Synthetic oligonucleotide
cuccucaugcugcuuugac

SEQ ID NO: 823192 - RNA, 19 nt, Artificial Sequence
  Description of Artificial Sequence: Synthetic oligonucleotide
uuggacccauugccguaag

SEQ ID NO: 823193 - RNA, 19 nt, Artificial Sequence
  Description of Artificial Sequence: Synthetic oligonucleotide
uuccuccuccuccuccucu

SEQ ID NO: 823194 - RNA, 19 nt, Artificial Sequence
  Description of Artificial Sequence: Synthetic oligonucleotide
ucccguuccgacuccuuuc

SEQ ID NO: 823195 - RNA, 19 nt, Artificial Sequence
  Description of Artificial Sequence: Synthetic oligonucleotide
ucccugcaccaagauauug

SEQ ID NO: 823196 - RNA, 19 nt, Artificial Sequence
  Description of Artificial Sequence: Synthetic oligonucleotide
acacgcgucgguaauugcu

SEQ ID NO: 823197 - RNA, 19 nt, Artificial Sequence
  Description of Artificial Sequence: Synthetic oligonucleotide
gcguccauaacagaauuca

SEQ ID NO: 823198 - RNA, 19 nt, Artificial Sequence
  Description of Artificial Sequence: Synthetic oligonucleotide
uuccgguucuccugcccug

SEQ ID NO: 823199 - RNA, 19 nt, Artificial Sequence
  Description of Artificial Sequence: Synthetic oligonucleotide
cucguuaccuucagcucca

SEQ ID NO: 823200 - RNA, 19 nt, Artificial Sequence
  Description of Artificial Sequence: Synthetic oligonucleotide
cuuuugguuccaccuuuca

SEQ ID NO: 823201 - RNA, 19 nt, Artificial Sequence
  Description of Artificial Sequence: Synthetic oligonucleotide
ccguugagaucacacuugg

SEQ ID NO: 823202 - RNA, 19 nt, Artificial Sequence
  Description of Artificial Sequence: Synthetic oligonucleotide
cuccgaaacagccuggggu

SEQ ID NO: 823203 - RNA, 19 nt, Artificial Sequence
  Description of Artificial Sequence: Synthetic oligonucleotide
gaaucccaggcccuuggua

SEQ ID NO: 823204 - RNA, 19 nt, Artificial Sequence
  Description of Artificial Sequence: Synthetic oligonucleotide
ggacuuccgcuucucgggg

SEQ ID NO: 823205 - RNA, 19 nt, Artificial Sequence
  Description of Artificial Sequence: Synthetic oligonucleotide
aaccggacuuccgcuucuc

SEQ ID NO: 823206 - RNA, 19 nt, Artificial Sequence
  Description of Artificial Sequence: Synthetic oligonucleotide
cccauugccguaagucugg

SEQ ID NO: 823207 - RNA, 19 nt, Artificial Sequence
  Description of Artificial Sequence: Synthetic oligonucleotide
uagccagcguguguccucc

SEQ ID NO: 823208 - RNA, 19 nt, Artificial Sequence
  Description of Artificial Sequence: Synthetic oligonucleotide
ucaucccgauccccagugu

SEQ ID NO: 823209 - RNA, 19 nt, Artificial Sequence
  Description of Artificial Sequence: Synthetic oligonucleotide
ccccagauauaccugcacc

SEQ ID NO: 823210 - RNA, 19 nt, Artificial Sequence
  Description of Artificial Sequence: Synthetic oligonucleotide
ucucggggccucccguuga

SEQ ID NO: 823211 - RNA, 19 nt, Artificial Sequence
  Description of Artificial Sequence: Synthetic oligonucleotide
agaaguccgaauggucagu

SEQ ID NO: 823212 - RNA, 19 nt, Artificial Sequence
  Description of Artificial Sequence: Synthetic oligonucleotide
gccauaacgcaucucgcuc

SEQ ID NO: 823213 - RNA, 19 nt, Artificial Sequence
  Description of Artificial Sequence: Synthetic oligonucleotide
aucccaguugaaggcugac

SEQ ID NO: 823214 - RNA, 19 nt, Artificial Sequence
  Description of Artificial Sequence: Synthetic oligonucleotide
ccgaauggucaguacguag

SEQ ID NO: 823215 - RNA, 19 nt, Artificial Sequence
  Description of Artificial Sequence: Synthetic oligonucleotide
ccggccuuaaccuccgagc

SEQ ID NO: 823216 - RNA, 19 nt, Artificial Sequence
  Description of Artificial Sequence: Synthetic oligonucleotide
cucauugggcucaacaauu

SEQ ID NO: 823217 - RNA, 19 nt, Artificial Sequence
  Description of Artificial Sequence: Synthetic oligonucleotide
caucuacucgaucaaugua

SEQ ID NO: 823218 - RNA, 19 nt, Artificial Sequence
  Description of Artificial Sequence: Synthetic oligonucleotide
ggccuuaaccuccgagcgg

SEQ ID NO: 823219 - RNA, 19 nt, Artificial Sequence
  Description of Artificial Sequence: Synthetic oligonucleotide
ucagccgaugcugcuugga

SEQ ID NO: 823220 - RNA, 19 nt, Artificial Sequence
  Description of Artificial Sequence: Synthetic oligonucleotide
cugagucuuccauauggua

SEQ ID NO: 823221 - RNA, 19 nt, Artificial Sequence
  Description of Artificial Sequence: Synthetic oligonucleotide
acggcaggaucuggaugcc

SEQ ID NO: 823222 - RNA, 19 nt, Artificial Sequence
  Description of Artificial Sequence: Synthetic oligonucleotide
gcugacugauaguagccga

SEQ ID NO: 823223 - RNA, 19 nt, Artificial Sequence
  Description of Artificial Sequence: Synthetic oligonucleotide
cacacgcgucgguaauugc

SEQ ID NO: 823224 - RNA, 19 nt, Artificial Sequence
  Description of Artificial Sequence: Synthetic oligonucleotide
uggacccauugccguaagu

SEQ ID NO: 823225 - RNA, 19 nt, Artificial Sequence
  Description of Artificial Sequence: Synthetic oligonucleotide
ugucucuggcgcucuuuau

SEQ ID NO: 823226 - RNA, 19 nt, Artificial Sequence
  Description of Artificial Sequence: Synthetic oligonucleotide
guguuccuuggcugggcug

SEQ ID NO: 823227 - RNA, 19 nt, Artificial Sequence
  Description of Artificial Sequence: Synthetic oligonucleotide
agucuggcuaugguagcgu

SEQ ID NO: 823228 - RNA, 19 nt, Artificial Sequence
  Description of Artificial Sequence: Synthetic oligonucleotide
acgcgucgguaauugcucu

SEQ ID NO: 823229 - RNA, 19 nt, Artificial Sequence
  Description of Artificial Sequence: Synthetic oligonucleotide
gaaguccgaauggucagua

SEQ ID NO: 823230 - RNA, 19 nt, Artificial Sequence
  Description of Artificial Sequence: Synthetic oligonucleotide
cccguugagaucacacuug

SEQ ID NO: 823231 - RNA, 19 nt, Artificial Sequence
  Description of Artificial Sequence: Synthetic oligonucleotide
uuugagggacagucuucuu

SEQ ID NO: 823232 - RNA, 19 nt, Artificial Sequence
  Description of Artificial Sequence: Synthetic oligonucleotide
ccagcguguguccuccucg

SEQ ID NO: 823233 - RNA, 19 nt, Artificial Sequence
  Description of Artificial Sequence: Synthetic oligonucleotide
uccgguucuccugcccugc

SEQ ID NO: 823234 - RNA, 19 nt, Artificial Sequence
  Description of Artificial Sequence: Synthetic oligonucleotide
cucacggucugagggcagc

SEQ ID NO: 823235 - RNA, 19 nt, Artificial Sequence
  Description of Artificial Sequence: Synthetic oligonucleotide
uccgaauggucaguacgua

SEQ ID NO: 823236 - RNA, 19 nt, Artificial Sequence
  Description of Artificial Sequence: Synthetic oligonucleotide
guauugccugcucccguuc

SEQ ID NO: 823237 - RNA, 19 nt, Artificial Sequence
  Description of Artificial Sequence: Synthetic oligonucleotide
aggaaccggacuuccgcuu

SEQ ID NO: 823238 - RNA, 19 nt, Artificial Sequence
  Description of Artificial Sequence: Synthetic oligonucleotide
ucgccccacacuuggcggu

SEQ ID NO: 823239 - RNA, 19 nt, Artificial Sequence
  Description of Artificial Sequence: Synthetic oligonucleotide
auggcguccauaacagaau

SEQ ID NO: 823240 - RNA, 19 nt, Artificial Sequence
  Description of Artificial Sequence: Synthetic oligonucleotide
ccuuaaggcuuuucguguc

SEQ ID NO: 823241 - RNA, 19 nt, Artificial Sequence
  Description of Artificial Sequence: Synthetic oligonucleotide
cgagaaguccgaaugguca

SEQ ID NO: 823242 - RNA, 19 nt, Artificial Sequence
  Description of Artificial Sequence: Synthetic oligonucleotide
ccucccguugagaucacac

SEQ ID NO: 823243 - RNA, 19 nt, Artificial Sequence
  Description of Artificial Sequence: Synthetic oligonucleotide
ccuccgugguaucaucucc

SEQ ID NO: 823244 - RNA, 19 nt, Artificial Sequence
  Description of Artificial Sequence: Synthetic oligonucleotide
caguacguaggagcaggac

SEQ ID NO: 823245 - RNA, 19 nt, Artificial Sequence
  Description of Artificial Sequence: Synthetic oligonucleotide
gggcucaacaauucaggaa

SEQ ID NO: 823246 - RNA, 19 nt, Artificial Sequence
  Description of Artificial Sequence: Synthetic oligonucleotide
ucaggaaucccaggcccuu

SEQ ID NO: 823247 - RNA, 19 nt, Artificial Sequence
  Description of Artificial Sequence: Synthetic oligonucleotide
agcuugccucuggagguag

SEQ ID NO: 823248 - RNA, 19 nt, Artificial Sequence
  Description of Artificial Sequence: Synthetic oligonucleotide
cucaugcugcuuugacuca

SEQ ID NO: 823249 - RNA, 19 nt, Artificial Sequence
  Description of Artificial Sequence: Synthetic oligonucleotide
guagccucaggguuccggu

SEQ ID NO: 823250 - RNA, 19 nt, Artificial Sequence
  Description of Artificial Sequence: Synthetic oligonucleotide
agcgcuguuuauacuucga

SEQ ID NO: 823251 - RNA, 19 nt, Artificial Sequence
  Description of Artificial Sequence: Synthetic oligonucleotide
gcaccaagauauugaagaa

SEQ ID NO: 823252 - RNA, 19 nt, Artificial Sequence
  Description of Artificial Sequence: Synthetic oligonucleotide
agggccaguauugccugcu

SEQ ID NO: 823253 - RNA, 19 nt, Artificial Sequence
  Description of Artificial Sequence: Synthetic oligonucleotide
caucccaguugaaggcuga

SEQ ID NO: 823254 - RNA, 19 nt, Artificial Sequence
  Description of Artificial Sequence: Synthetic oligonucleotide
agaggacgucaccuuugau

SEQ ID NO: 823255 - RNA, 19 nt, Artificial Sequence
  Description of Artificial Sequence: Synthetic oligonucleotide
cggccuuaaccuccgagcg

SEQ ID NO: 823256 - RNA, 19 nt, Artificial Sequence
  Description of Artificial Sequence: Synthetic oligonucleotide
ccaguauugccugcucccg

SEQ ID NO: 823257 - RNA, 19 nt, Artificial Sequence
  Description of Artificial Sequence: Synthetic oligonucleotide
ccggaugacuuugaccugc

SEQ ID NO: 823258 - RNA, 19 nt, Artificial Sequence
  Description of Artificial Sequence: Synthetic oligonucleotide
gauauaccugcacccucau

SEQ ID NO: 823259 - RNA, 19 nt, Artificial Sequence
  Description of Artificial Sequence: Synthetic oligonucleotide
agagccccacacgcgucgg

SEQ ID NO: 823260 - RNA, 19 nt, Artificial Sequence
  Description of Artificial Sequence: Synthetic oligonucleotide
gccuuaaccuccgagcgga

SEQ ID NO: 823261 - RNA, 19 nt, Artificial Sequence
  Description of Artificial Sequence: Synthetic oligonucleotide
uccuccuccuccuccucuu

SEQ ID NO: 823262 - RNA, 19 nt, Artificial Sequence
  Description of Artificial Sequence: Synthetic oligonucleotide
gucucacaauuuugaucuc

SEQ ID NO: 823263 - RNA, 19 nt, Artificial Sequence
  Description of Artificial Sequence: Synthetic oligonucleotide
gguuccgguucuccugccc

SEQ ID NO: 823264 - RNA, 19 nt, Artificial Sequence
  Description of Artificial Sequence: Synthetic oligonucleotide
ccauaacgcaucucgcuca

SEQ ID NO: 823265 - RNA, 19 nt, Artificial Sequence
  Description of Artificial Sequence: Synthetic oligonucleotide
cuuggcggucugugucuug

SEQ ID NO: 823266 - RNA, 19 nt, Artificial Sequence
  Description of Artificial Sequence: Synthetic oligonucleotide
guuccgguucuccugcccu

SEQ ID NO: 823267 - RNA, 19 nt, Artificial Sequence
  Description of Artificial Sequence: Synthetic oligonucleotide
gggccucccguugagauca

SEQ ID NO: 823268 - RNA, 19 nt, Artificial Sequence
  Description of Artificial Sequence: Synthetic oligonucleotide
guccgaauggucaguacgu

SEQ ID NO: 823269 - RNA, 19 nt, Artificial Sequence
  Description of Artificial Sequence: Synthetic oligonucleotide
ugccugcucccguuccgac

SEQ ID NO: 823270 - RNA, 19 nt, Artificial Sequence
  Description of Artificial Sequence: Synthetic oligonucleotide
cguguguccuccucguuac

SEQ ID NO: 823271 - RNA, 19 nt, Artificial Sequence
  Description of Artificial Sequence: Synthetic oligonucleotide
ggucaguacguaggagcag

SEQ ID NO: 823272 - RNA, 19 nt, Artificial Sequence
  Description of Artificial Sequence: Synthetic oligonucleotide
ccgagaaguccgaaugguc

SEQ ID NO: 823273 - RNA, 19 nt, Artificial Sequence
  Description of Artificial Sequence: Synthetic oligonucleotide
cuuggacccauugccguaa

SEQ ID NO: 823274 - RNA, 19 nt, Artificial Sequence
  Description of Artificial Sequence: Synthetic oligonucleotide
guguguccuccucguuacc

SEQ ID NO: 823275 - RNA, 19 nt, Artificial Sequence
  Description of Artificial Sequence: Synthetic oligonucleotide
cacggucugagggcagcag

SEQ ID NO: 823276 - RNA, 19 nt, Artificial Sequence
  Description of Artificial Sequence: Synthetic oligonucleotide
gguagcguuucagccgaug

SEQ ID NO: 823277 - RNA, 19 nt, Artificial Sequence
  Description of Artificial Sequence: Synthetic oligonucleotide
cucggggccucccguugag

SEQ ID NO: 823278 - RNA, 19 nt, Artificial Sequence
  Description of Artificial Sequence: Synthetic oligonucleotide
ucguuaccuucagcuccag

SEQ ID NO: 823279 - RNA, 19 nt, Artificial Sequence
  Description of Artificial Sequence: Synthetic oligonucleotide
cgaaucaagucugcugggc

SEQ ID NO: 823280 - RNA, 19 nt, Artificial Sequence
  Description of Artificial Sequence: Synthetic oligonucleotide
aguugaaggcugacugaua

SEQ ID NO: 823281 - RNA, 19 nt, Artificial Sequence
  Description of Artificial Sequence: Synthetic oligonucleotide
cucccguugagaucacacu

SEQ ID NO: 823282 - RNA, 19 nt, Artificial Sequence
  Description of Artificial Sequence: Synthetic oligonucleotide
cacccucaucacaaaggaa

SEQ ID NO: 823283 - RNA, 19 nt, Artificial Sequence
  Description of Artificial Sequence: Synthetic oligonucleotide
gcccuugguaagcgggugc

SEQ ID NO: 823284 - RNA, 19 nt, Artificial Sequence
  Description of Artificial Sequence: Synthetic oligonucleotide
ccgugguaucaucuccagg

SEQ ID NO: 823285 - RNA, 19 nt, Artificial Sequence
  Description of Artificial Sequence: Synthetic oligonucleotide
uccucaccgccuggagagc

SEQ ID NO: 823286 - RNA, 19 nt, Artificial Sequence
  Description of Artificial Sequence: Synthetic oligonucleotide
ccuccgaaacagccugggg

SEQ ID NO: 823287 - RNA, 19 nt, Artificial Sequence
  Description of Artificial Sequence: Synthetic oligonucleotide
cuuccuccuccuccuccuc

SEQ ID NO: 823288 - RNA, 19 nt, Artificial Sequence
  Description of Artificial Sequence: Synthetic oligonucleotide
cuuggucucgccccacacu

SEQ ID NO: 823289 - RNA, 19 nt, Artificial Sequence
  Description of Artificial Sequence: Synthetic oligonucleotide
gcgcuguuuauacuucgaa

SEQ ID NO: 823290 - RNA, 19 nt, Artificial Sequence
  Description of Artificial Sequence: Synthetic oligonucleotide
agccgagguagaggacguc

SEQ ID NO: 823291 - RNA, 19 nt, Artificial Sequence
  Description of Artificial Sequence: Synthetic oligonucleotide
cccuugguaagcgggugcc

SEQ ID NO: 823292 - RNA, 19 nt, Artificial Sequence
  Description of Artificial Sequence: Synthetic oligonucleotide
ccuuucucugggguuacuc

SEQ ID NO: 823293 - RNA, 19 nt, Artificial Sequence
  Description of Artificial Sequence: Synthetic oligonucleotide
caguugaaggcugacugau

SEQ ID NO: 823294 - RNA, 19 nt, Artificial Sequence
  Description of Artificial Sequence: Synthetic oligonucleotide
aggcccuugguaagcgggu

SEQ ID NO: 823295 - RNA, 19 nt, Artificial Sequence
  Description of Artificial Sequence: Synthetic oligonucleotide
uccuuucucugggguuacu

SEQ ID NO: 823296 - RNA, 19 nt, Artificial Sequence
  Description of Artificial Sequence: Synthetic oligonucleotide
ggcguccauaacagaauuc

SEQ ID NO: 823297 - RNA, 19 nt, Artificial Sequence
  Description of Artificial Sequence: Synthetic oligonucleotide
ccgacuccuuucucaggcc

SEQ ID NO: 823298 - RNA, 19 nt, Artificial Sequence
  Description of Artificial Sequence: Synthetic oligonucleotide
cgcgcggguagcaggagcc

SEQ ID NO: 823299 - RNA, 19 nt, Artificial Sequence
  Description of Artificial Sequence: Synthetic oligonucleotide
gccgagguagaggacguca

SEQ ID NO: 823300 - RNA, 19 nt, Artificial Sequence
  Description of Artificial Sequence: Synthetic oligonucleotide
cacuuggcggucugugucu

SEQ ID NO: 823301 - RNA, 19 nt, Artificial Sequence
  Description of Artificial Sequence: Synthetic oligonucleotide
gcguuucagccgaugcugc

SEQ ID NO: 823302 - RNA, 19 nt, Artificial Sequence
  Description of Artificial Sequence: Synthetic oligonucleotide
gguagaggacgucaccuuu

SEQ ID NO: 823303 - RNA, 19 nt, Artificial Sequence
  Description of Artificial Sequence: Synthetic oligonucleotide
ccgcucacggucugagggc

SEQ ID NO: 823304 - RNA, 19 nt, Artificial Sequence
  Description of Artificial Sequence: Synthetic oligonucleotide
agcguguguccuccucguu

SEQ ID NO: 823305 - RNA, 19 nt, Artificial Sequence
  Description of Artificial Sequence: Synthetic oligonucleotide
guuagccagcguguguccu

SEQ ID NO: 823306 - RNA, 19 nt, Artificial Sequence
  Description of Artificial Sequence: Synthetic oligonucleotide
cuccgagcggagccgcuca

SEQ ID NO: 823307 - RNA, 19 nt, Artificial Sequence
  Description of Artificial Sequence: Synthetic oligonucleotide
ccacacgcgucgguaauug

SEQ ID NO: 823308 - RNA, 19 nt, Artificial Sequence
  Description of Artificial Sequence: Synthetic oligonucleotide
acuuggcggucugugucuu

SEQ ID NO: 823309 - RNA, 19 nt, Artificial Sequence
  Description of Artificial Sequence: Synthetic oligonucleotide
ccgucagccgcgcggguag

SEQ ID NO: 823310 - RNA, 19 nt, Artificial Sequence
  Description of Artificial Sequence: Synthetic oligonucleotide
acgucaccuuugaucucug

SEQ ID NO: 823311 - RNA, 19 nt, Artificial Sequence
  Description of Artificial Sequence: Synthetic oligonucleotide
ugguagcguuucagccgau

SEQ ID NO: 823312 - RNA, 19 nt, Artificial Sequence
  Description of Artificial Sequence: Synthetic oligonucleotide
ucggggccucccguugaga

SEQ ID NO: 823313 - RNA, 19 nt, Artificial Sequence
  Description of Artificial Sequence: Synthetic oligonucleotide
ccuccucguuaccuucagc

SEQ ID NO: 823314 - RNA, 19 nt, Artificial Sequence
  Description of Artificial Sequence: Synthetic oligonucleotide
cauugccguaagucuggcu

SEQ ID NO: 823315 - RNA, 19 nt, Artificial Sequence
  Description of Artificial Sequence: Synthetic oligonucleotide
ccuuaaccuccgagcggag

SEQ ID NO: 823316 - RNA, 19 nt, Artificial Sequence
  Description of Artificial Sequence: Synthetic oligonucleotide
agccccacacgcgucggua

SEQ ID NO: 823317 - RNA, 19 nt, Artificial Sequence
  Description of Artificial Sequence: Synthetic oligonucleotide
ccucuaucagucgaaucaa

SEQ ID NO: 823318 - RNA, 19 nt, Artificial Sequence
  Description of Artificial Sequence: Synthetic oligonucleotide
ugccggccuuaaccuccga

SEQ ID NO: 823319 - RNA, 19 nt, Artificial Sequence
  Description of Artificial Sequence: Synthetic oligonucleotide
cacaaccaccacgucugaa

SEQ ID NO: 823320 - RNA, 19 nt, Artificial Sequence
  Description of Artificial Sequence: Synthetic oligonucleotide
cugcuggauauggcgucca

SEQ ID NO: 823321 - RNA, 19 nt, Artificial Sequence
  Description of Artificial Sequence: Synthetic oligonucleotide
cagucgaaucaagucugcu

SEQ ID NO: 823322 - RNA, 19 nt, Artificial Sequence
  Description of Artificial Sequence: Synthetic oligonucleotide
ccauugccguaagucuggc

SEQ ID NO: 823323 - RNA, 19 nt, Artificial Sequence
  Description of Artificial Sequence: Synthetic oligonucleotide
agccagcguguguccuccu

SEQ ID NO: 823324 - RNA, 19 nt, Artificial Sequence
  Description of Artificial Sequence: Synthetic oligonucleotide
cagcguguguccuccucgu

SEQ ID NO: 823325 - RNA, 19 nt, Artificial Sequence
  Description of Artificial Sequence: Synthetic oligonucleotide
gggccaguauugccugcuc

SEQ ID NO: 823326 - RNA, 19 nt, Artificial Sequence
  Description of Artificial Sequence: Synthetic oligonucleotide
gccgagaaguccgaauggu

SEQ ID NO: 823327 - RNA, 19 nt, Artificial Sequence
  Description of Artificial Sequence: Synthetic oligonucleotide
ccuuggcugggcugacauc

SEQ ID NO: 823328 - RNA, 19 nt, Artificial Sequence
  Description of Artificial Sequence: Synthetic oligonucleotide
ccagauauaccugcacccu

SEQ ID NO: 823329 - RNA, 19 nt, Artificial Sequence
  Description of Artificial Sequence: Synthetic oligonucleotide
ggcuuuugagggacagucu

SEQ ID NO: 823330 - RNA, 19 nt, Artificial Sequence
  Description of Artificial Sequence: Synthetic oligonucleotide
gucagccgcgcggguagca

SEQ ID NO: 823331 - RNA, 19 nt, Artificial Sequence
  Description of Artificial Sequence: Synthetic oligonucleotide
cugggcugacaucuccuuu

SEQ ID NO: 823332 - RNA, 19 nt, Artificial Sequence
  Description of Artificial Sequence: Synthetic oligonucleotide
gcucacggucugagggcag

SEQ ID NO: 823333 - RNA, 19 nt, Artificial Sequence
  Description of Artificial Sequence: Synthetic oligonucleotide
cagagccgagaaguccgaa

SEQ ID NO: 823334 - RNA, 19 nt, Artificial Sequence
  Description of Artificial Sequence: Synthetic oligonucleotide
gagccccacacgcgucggu

SEQ ID NO: 823335 - RNA, 19 nt, Artificial Sequence
  Description of Artificial Sequence: Synthetic oligonucleotide
cgcgucgguaauugcucuc

SEQ ID NO: 823336 - RNA, 19 nt, Artificial Sequence
  Description of Artificial Sequence: Synthetic oligonucleotide
ccgaugcugcuuggaggcc

SEQ ID NO: 823337 - RNA, 19 nt, Artificial Sequence
  Description of Artificial Sequence: Synthetic oligonucleotide
gccccacacgcgucgguaa

SEQ ID NO: 823338 - RNA, 19 nt, Artificial Sequence
  Description of Artificial Sequence: Synthetic oligonucleotide
gcucaucuacucgaucaau

SEQ ID NO: 823339 - RNA, 19 nt, Artificial Sequence
  Description of Artificial Sequence: Synthetic oligonucleotide
cagcuugccucuggaggua

SEQ ID NO: 823340 - RNA, 19 nt, Artificial Sequence
  Description of Artificial Sequence: Synthetic oligonucleotide
gcgcggguagcaggagccc

SEQ ID NO: 823341 - RNA, 19 nt, Artificial Sequence
  Description of Artificial Sequence: Synthetic oligonucleotide
ccauaugguacugcuggau

SEQ ID NO: 823342 - RNA, 19 nt, Artificial Sequence
  Description of Artificial Sequence: Synthetic oligonucleotide
ccguaagucuggcuauggu

SEQ ID NO: 823343 - RNA, 19 nt, Artificial Sequence
  Description of Artificial Sequence: Synthetic oligonucleotide
cccuuuugguuccaccuuu

SEQ ID NO: 823344 - RNA, 19 nt, Artificial Sequence
  Description of Artificial Sequence: Synthetic oligonucleotide
cccguuccgacuccuuucu

SEQ ID NO: 823345 - RNA, 19 nt, Artificial Sequence
  Description of Artificial Sequence: Synthetic oligonucleotide
ccgcuggaagugaauggcu

SEQ ID NO: 823346 - RNA, 19 nt, Artificial Sequence
  Description of Artificial Sequence: Synthetic oligonucleotide
ccuuucccgcuggaaguga

SEQ ID NO: 823347 - RNA, 19 nt, Artificial Sequence
  Description of Artificial Sequence: Synthetic oligonucleotide
ccccacacuuggcggucug

SEQ ID NO: 823348 - RNA, 19 nt, Artificial Sequence
  Description of Artificial Sequence: Synthetic oligonucleotide
ggucugugucuuggaccuc

SEQ ID NO: 823349 - RNA, 19 nt, Artificial Sequence
  Description of Artificial Sequence: Synthetic oligonucleotide
ccguuccgacuccuuucuc

SEQ ID NO: 823350 - RNA, 19 nt, Artificial Sequence
  Description of Artificial Sequence: Synthetic oligonucleotide
gcgcucuuuauuggccucu

SEQ ID NO: 823351 - RNA, 19 nt, Artificial Sequence
  Description of Artificial Sequence: Synthetic oligonucleotide
cuuccgcuucucggggccu

SEQ ID NO: 823352 - RNA, 19 nt, Artificial Sequence
  Description of Artificial Sequence: Synthetic oligonucleotide
gccucccguugagaucaca

SEQ ID NO: 823353 - RNA, 19 nt, Artificial Sequence
  Description of Artificial Sequence: Synthetic oligonucleotide
ccgcuucucggggccuccc

SEQ ID NO: 823354 - RNA, 19 nt, Artificial Sequence
  Description of Artificial Sequence: Synthetic oligonucleotide
ggggccuccgugguaucau

SEQ ID NO: 823355 - RNA, 19 nt, Artificial Sequence
  Description of Artificial Sequence: Synthetic oligonucleotide
cgaugcugcuuggaggccu

SEQ ID NO: 823356 - RNA, 19 nt, Artificial Sequence
  Description of Artificial Sequence: Synthetic oligonucleotide
cgucagccgcgcggguagc

SEQ ID NO: 823357 - RNA, 19 nt, Artificial Sequence
  Description of Artificial Sequence: Synthetic oligonucleotide
cggggccucccguugagau

SEQ ID NO: 823358 - RNA, 19 nt, Artificial Sequence
  Description of Artificial Sequence: Synthetic oligonucleotide
cgccccacacuuggcgguc

SEQ ID NO: 823359 - RNA, 19 nt, Artificial Sequence
  Description of Artificial Sequence: Synthetic oligonucleotide
cccgucagccgcgcgggua

SEQ ID NO: 823360 - RNA, 19 nt, Artificial Sequence
  Description of Artificial Sequence: Synthetic oligonucleotide
ccccgucagccgcgcgggu

SEQ ID NO: 823361 - RNA, 19 nt, Artificial Sequence
  Description of Artificial Sequence: Synthetic oligonucleotide
aaaaccacuaggcuggaac

SEQ ID NO: 823362 - RNA, 19 nt, Artificial Sequence
  Description of Artificial Sequence: Synthetic oligonucleotide
uguagggucaccacgaugg

SEQ ID NO: 823363 - RNA, 19 nt, Artificial Sequence
  Description of Artificial Sequence: Synthetic oligonucleotide
ucauuggacaggcagagcg

SEQ ID NO: 823364 - RNA, 19 nt, Artificial Sequence
  Description of Artificial Sequence: Synthetic oligonucleotide
uacaccauuacugggaucg

SEQ ID NO: 823365 - RNA, 19 nt, Artificial Sequence
  Description of Artificial Sequence: Synthetic oligonucleotide
agugcaacgagguugguag

SEQ ID NO: 823366 - RNA, 19 nt, Artificial Sequence
  Description of Artificial Sequence: Synthetic oligonucleotide
aagacaugguauucagggc

SEQ ID NO: 823367 - RNA, 19 nt, Artificial Sequence
  Description of Artificial Sequence: Synthetic oligonucleotide
ucgaacagaaacuggaugc

SEQ ID NO: 823368 - RNA, 19 nt, Artificial Sequence
  Description of Artificial Sequence: Synthetic oligonucleotide
cugaagaccacacacuugg

SEQ ID NO: 823369 - RNA, 19 nt, Artificial Sequence
  Description of Artificial Sequence: Synthetic oligonucleotide
gagaaugggagccacgagg

SEQ ID NO: 823370 - RNA, 19 nt, Artificial Sequence
  Description of Artificial Sequence: Synthetic oligonucleotide
ucucugagcaacaaguucu

SEQ ID NO: 823371 - RNA, 19 nt, Artificial Sequence
  Description of Artificial Sequence: Synthetic oligonucleotide
uugauagaggacuucacug

SEQ ID NO: 823372 - RNA, 19 nt, Artificial Sequence
  Description of Artificial Sequence: Synthetic oligonucleotide
gagaagaagaguuguuggg

SEQ ID NO: 823373 - RNA, 19 nt, Artificial Sequence
  Description of Artificial Sequence: Synthetic oligonucleotide
gagacuauauuguaggguc

SEQ ID NO: 823374 - RNA, 19 nt, Artificial Sequence
  Description of Artificial Sequence: Synthetic oligonucleotide
uggggugugcaucagagcc

SEQ ID NO: 823375 - RNA, 19 nt, Artificial Sequence
  Description of Artificial Sequence: Synthetic oligonucleotide
cucacacucgacaugagag

SEQ ID NO: 823376 - RNA, 19 nt, Artificial Sequence
  Description of Artificial Sequence: Synthetic oligonucleotide
ucugcaucaggacaggccu

SEQ ID NO: 823377 - RNA, 19 nt, Artificial Sequence
  Description of Artificial Sequence: Synthetic oligonucleotide
aagaagaguuguuggggag

SEQ ID NO: 823378 - RNA, 19 nt, Artificial Sequence
  Description of Artificial Sequence: Synthetic oligonucleotide
ucgcauggcacucucaccc

SEQ ID NO: 823379 - RNA, 19 nt, Artificial Sequence
  Description of Artificial Sequence: Synthetic oligonucleotide
aaccgagguguuuggagac

SEQ ID NO: 823380 - RNA, 19 nt, Artificial Sequence
  Description of Artificial Sequence: Synthetic oligonucleotide
guagccaccccugaaaugg

SEQ ID NO: 823381 - RNA, 19 nt, Artificial Sequence
  Description of Artificial Sequence: Synthetic oligonucleotide
ugcuuugcacgcuugaaga

SEQ ID NO: 823382 - RNA, 19 nt, Artificial Sequence
  Description of Artificial Sequence: Synthetic oligonucleotide
gauccgagaacagaaucgg

SEQ ID NO: 823383 - RNA, 19 nt, Artificial Sequence
  Description of Artificial Sequence: Synthetic oligonucleotide
aacucaaugaagacuugag

SEQ ID NO: 823384 - RNA, 19 nt, Artificial Sequence
  Description of Artificial Sequence: Synthetic oligonucleotide
uguggaugcaucucugagc

SEQ ID NO: 823385 - RNA, 19 nt, Artificial Sequence
  Description of Artificial Sequence: Synthetic oligonucleotide
ucacacucgacaugagagg

SEQ ID NO: 823386 - RNA, 19 nt, Artificial Sequence
  Description of Artificial Sequence: Synthetic oligonucleotide
agauugcucugacagaucu

SEQ ID NO: 823387 - RNA, 19 nt, Artificial Sequence
  Description of Artificial Sequence: Synthetic oligonucleotide
uugagcucgaacagaaacu

SEQ ID NO: 823388 - RNA, 19 nt, Artificial Sequence
  Description of Artificial Sequence: Synthetic oligonucleotide
ugcccuuccagccaugccc

SEQ ID NO: 823389 - RNA, 19 nt, Artificial Sequence
  Description of Artificial Sequence: Synthetic oligonucleotide
gaggcauucucauuggaca

SEQ ID NO: 823390 - RNA, 19 nt, Artificial Sequence
  Description of Artificial Sequence: Synthetic oligonucleotide
aaauggacagcggcaacuc

SEQ ID NO: 823391 - RNA, 19 nt, Artificial Sequence
  Description of Artificial Sequence: Synthetic oligonucleotide
gaguagugcaacgagguug

SEQ ID NO: 823392 - RNA, 19 nt, Artificial Sequence
  Description of Artificial Sequence: Synthetic oligonucleotide
uggagacuauauuguaggg

SEQ ID NO: 823393 - RNA, 19 nt, Artificial Sequence
  Description of Artificial Sequence: Synthetic oligonucleotide
acucucacccuucaccacg

SEQ ID NO: 823394 - RNA, 19 nt, Artificial Sequence
  Description of Artificial Sequence: Synthetic oligonucleotide
agcagaucccuuucuuccc

SEQ ID NO: 823395 - RNA, 19 nt, Artificial Sequence
  Description of Artificial Sequence: Synthetic oligonucleotide
gggaguuccauccaggacc

SEQ ID NO: 823396 - RNA, 19 nt, Artificial Sequence
  Description of Artificial Sequence: Synthetic oligonucleotide
gagcgacuggccuugauug

SEQ ID NO: 823397 - RNA, 19 nt, Artificial Sequence
  Description of Artificial Sequence: Synthetic oligonucleotide
ugagcaacaaguucuugau

SEQ ID NO: 823398 - RNA, 19 nt, Artificial Sequence
  Description of Artificial Sequence: Synthetic oligonucleotide
ucggacaaucacuuccagg

SEQ ID NO: 823399 - RNA, 19 nt, Artificial Sequence
  Description of Artificial Sequence: Synthetic oligonucleotide
aggguguugagcgacuggc

SEQ ID NO: 823400 - RNA, 19 nt, Artificial Sequence
  Description of Artificial Sequence: Synthetic oligonucleotide
uuugcacgcuugaagaauc

SEQ ID NO: 823401 - RNA, 19 nt, Artificial Sequence
  Description of Artificial Sequence: Synthetic oligonucleotide
aguagugcaacgagguugg

SEQ ID NO: 823402 - RNA, 19 nt, Artificial Sequence
  Description of Artificial Sequence: Synthetic oligonucleotide
gauggggugugcaucagag

SEQ ID NO: 823403 - RNA, 19 nt, Artificial Sequence
  Description of Artificial Sequence: Synthetic oligonucleotide
guaaccgagguguuuggag

SEQ ID NO: 823404 - RNA, 19 nt, Artificial Sequence
  Description of Artificial Sequence: Synthetic oligonucleotide
ucccucucagaucgcaugg

SEQ ID NO: 823405 - RNA, 19 nt, Artificial Sequence
  Description of Artificial Sequence: Synthetic oligonucleotide
gagaucaggaccccuacuc

SEQ ID NO: 823406 - RNA, 19 nt, Artificial Sequence
  Description of Artificial Sequence: Synthetic oligonucleotide
uaaccgagguguuuggaga

SEQ ID NO: 823407 - RNA, 19 nt, Artificial Sequence
  Description of Artificial Sequence: Synthetic oligonucleotide
cauacuugacuuugcugcc

SEQ ID NO: 823408 - RNA, 19 nt, Artificial Sequence
  Description of Artificial Sequence: Synthetic oligonucleotide
aggaugacccaccagggga

SEQ ID NO: 823409 - RNA, 19 nt, Artificial Sequence
  Description of Artificial Sequence: Synthetic oligonucleotide
gaggacuucacugugaugu

SEQ ID NO: 823410 - RNA, 19 nt, Artificial Sequence
  Description of Artificial Sequence: Synthetic oligonucleotide
gugccaaucagcauccagg

SEQ ID NO: 823411 - RNA, 19 nt, Artificial Sequence
  Description of Artificial Sequence: Synthetic oligonucleotide
acugggaucguuguggaug

SEQ ID NO: 823412 - RNA, 19 nt, Artificial Sequence
  Description of Artificial Sequence: Synthetic oligonucleotide
caguuacuccucuggaugg

SEQ ID NO: 823413 - RNA, 19 nt, Artificial Sequence
  Description of Artificial Sequence: Synthetic oligonucleotide
ugguagggugaccaggagc

SEQ ID NO: 823414 - RNA, 19 nt, Artificial Sequence
  Description of Artificial Sequence: Synthetic oligonucleotide
agcugagagaaggagauca

SEQ ID NO: 823415 - RNA, 19 nt, Artificial Sequence
  Description of Artificial Sequence: Synthetic oligonucleotide
uucccauuggcaaucucgu

SEQ ID NO: 823416 - RNA, 19 nt, Artificial Sequence
  Description of Artificial Sequence: Synthetic oligonucleotide
agcacacuaaggucagagg

SEQ ID NO: 823417 - RNA, 19 nt, Artificial Sequence
  Description of Artificial Sequence: Synthetic oligonucleotide
guuguuggggaguagccac

SEQ ID NO: 823418 - RNA, 19 nt, Artificial Sequence
  Description of Artificial Sequence: Synthetic oligonucleotide
uucgugggcaucaucucca

SEQ ID NO: 823419 - RNA, 19 nt, Artificial Sequence
  Description of Artificial Sequence: Synthetic oligonucleotide
cggacaaucacuuccaggg

SEQ ID NO: 823420 - RNA, 19 nt, Artificial Sequence
  Description of Artificial Sequence: Synthetic oligonucleotide
uucaccgcgugguacuggg

SEQ ID NO: 823421 - RNA, 19 nt, Artificial Sequence
  Description of Artificial Sequence: Synthetic oligonucleotide
gaucgcauggcacucucac

SEQ ID NO: 823422 - RNA, 19 nt, Artificial Sequence
  Description of Artificial Sequence: Synthetic oligonucleotide
acuauauuguagggucacc

SEQ ID NO: 823423 - RNA, 19 nt, Artificial Sequence
  Description of Artificial Sequence: Synthetic oligonucleotide
cacgaucaaagcuguagag

SEQ ID NO: 823424 - RNA, 19 nt, Artificial Sequence
  Description of Artificial Sequence: Synthetic oligonucleotide
aucucguggggccacauga

SEQ ID NO: 823425 - RNA, 19 nt, Artificial Sequence
  Description of Artificial Sequence: Synthetic oligonucleotide
cacacuaaggucagaggac

SEQ ID NO: 823426 - RNA, 19 nt, Artificial Sequence
  Description of Artificial Sequence: Synthetic oligonucleotide
uggccuugauuggagaccg

SEQ ID NO: 823427 - RNA, 19 nt, Artificial Sequence
  Description of Artificial Sequence: Synthetic oligonucleotide
aucgcauggcacucucacc

SEQ ID NO: 823428 - RNA, 19 nt, Artificial Sequence
  Description of Artificial Sequence: Synthetic oligonucleotide
acuaggcuggaacagcaca

SEQ ID NO: 823429 - RNA, 19 nt, Artificial Sequence
  Description of Artificial Sequence: Synthetic oligonucleotide
ugcaacgagguugguaggg

SEQ ID NO: 823430 - RNA, 19 nt, Artificial Sequence
  Description of Artificial Sequence: Synthetic oligonucleotide
cacacgaucaaagcuguag

SEQ ID NO: 823431 - RNA, 19 nt, Artificial Sequence
  Description of Artificial Sequence: Synthetic oligonucleotide
acacgaucaaagcuguaga

SEQ ID NO: 823432 - RNA, 19 nt, Artificial Sequence
  Description of Artificial Sequence: Synthetic oligonucleotide
ccaaucagcauccaggaug

SEQ ID NO: 823433 - RNA, 19 nt, Artificial Sequence
  Description of Artificial Sequence: Synthetic oligonucleotide
cauuggacaggcagagcgg

SEQ ID NO: 823434 - RNA, 19 nt, Artificial Sequence
  Description of Artificial Sequence: Synthetic oligonucleotide
auacuugacuuugcugccc

SEQ ID NO: 823435 - RNA, 19 nt, Artificial Sequence
  Description of Artificial Sequence: Synthetic oligonucleotide
acagcggcaacucaaugaa

SEQ ID NO: 823436 - RNA, 19 nt, Artificial Sequence
  Description of Artificial Sequence: Synthetic oligonucleotide
ggcaccucucuucauaggg

SEQ ID NO: 823437 - RNA, 19 nt, Artificial Sequence
  Description of Artificial Sequence: Synthetic oligonucleotide
cuaggcuggaacagcacac

SEQ ID NO: 823438 - RNA, 19 nt, Artificial Sequence
  Description of Artificial Sequence: Synthetic oligonucleotide
cugucggucuucccgaagg

SEQ ID NO: 823439 - RNA, 19 nt, Artificial Sequence
  Description of Artificial Sequence: Synthetic oligonucleotide
ugaagacuugagcucgaac

SEQ ID NO: 823440 - RNA, 19 nt, Artificial Sequence
  Description of Artificial Sequence: Synthetic oligonucleotide
ugucgcugauccgagaaca

SEQ ID NO: 823441 - RNA, 19 nt, Artificial Sequence
  Description of Artificial Sequence: Synthetic oligonucleotide
uacuugacuuugcugccca

SEQ ID NO: 823442 - RNA, 19 nt, Artificial Sequence
  Description of Artificial Sequence: Synthetic oligonucleotide
cuucccaggccccuguccg

SEQ ID NO: 823443 - RNA, 19 nt, Artificial Sequence
  Description of Artificial Sequence: Synthetic oligonucleotide
cuucgugggcaucaucucc

SEQ ID NO: 823444 - RNA, 19 nt, Artificial Sequence
  Description of Artificial Sequence: Synthetic oligonucleotide
ucguggggccacaugaugu

SEQ ID NO: 823445 - RNA, 19 nt, Artificial Sequence
  Description of Artificial Sequence: Synthetic oligonucleotide
ucggucuucccgaaggauc

SEQ ID NO: 823446 - RNA, 19 nt, Artificial Sequence
  Description of Artificial Sequence: Synthetic oligonucleotide
aaccacuaggcuggaacag

SEQ ID NO: 823447 - RNA, 19 nt, Artificial Sequence
  Description of Artificial Sequence: Synthetic oligonucleotide
auggggugugcaucagagc

SEQ ID NO: 823448 - RNA, 19 nt, Artificial Sequence
  Description of Artificial Sequence: Synthetic oligonucleotide
ugugugcuaggcuggugag

SEQ ID NO: 823449 - RNA, 19 nt, Artificial Sequence
  Description of Artificial Sequence: Synthetic oligonucleotide
ggccacaugauguugagga

SEQ ID NO: 823450 - RNA, 19 nt, Artificial Sequence
  Description of Artificial Sequence: Synthetic oligonucleotide
uaugaauggcugcccacuc

SEQ ID NO: 823451 - RNA, 19 nt, Artificial Sequence
  Description of Artificial Sequence: Synthetic oligonucleotide
aguacaccauuacugggau

SEQ ID NO: 823452 - RNA, 19 nt, Artificial Sequence
  Description of Artificial Sequence: Synthetic oligonucleotide
cuccgcagaguccagggcc

SEQ ID NO: 823453 - RNA, 19 nt, Artificial Sequence
  Description of Artificial Sequence: Synthetic oligonucleotide
uguuggcucggacaaucac

SEQ ID NO: 823454 - RNA, 19 nt, Artificial Sequence
  Description of Artificial Sequence: Synthetic oligonucleotide
cacacucgacaugagaggc

SEQ ID NO: 823455 - RNA, 19 nt, Artificial Sequence
  Description of Artificial Sequence: Synthetic oligonucleotide
cugauccgagaacagaauc

SEQ ID NO: 823456 - RNA, 19 nt, Artificial Sequence
  Description of Artificial Sequence: Synthetic oligonucleotide
gacaugguauucagggcag

SEQ ID NO: 823457 - RNA, 19 nt, Artificial Sequence
  Description of Artificial Sequence: Synthetic oligonucleotide
agggacuucacagcuaugu

SEQ ID NO: 823458 - RNA, 19 nt, Artificial Sequence
  Description of Artificial Sequence: Synthetic oligonucleotide
gauguuggcucggacaauc

SEQ ID NO: 823459 - RNA, 19 nt, Artificial Sequence
  Description of Artificial Sequence: Synthetic oligonucleotide
gacaugagaggcauucuca

SEQ ID NO: 823460 - RNA, 19 nt, Artificial Sequence
  Description of Artificial Sequence: Synthetic oligonucleotide
ggaugguugggucuuggag

SEQ ID NO: 823461 - RNA, 19 nt, Artificial Sequence
  Description of Artificial Sequence: Synthetic oligonucleotide
acaugagaggcauucucau

SEQ ID NO: 823462 - RNA, 19 nt, Artificial Sequence
  Description of Artificial Sequence: Synthetic oligonucleotide
cagaucuuaucuucaccac

SEQ ID NO: 823463 - RNA, 19 nt, Artificial Sequence
  Description of Artificial Sequence: Synthetic oligonucleotide
cuauauuguagggucacca

SEQ ID NO: 823464 - RNA, 19 nt, Artificial Sequence
  Description of Artificial Sequence: Synthetic oligonucleotide
cucugucuaaggcacuuug

SEQ ID NO: 823465 - RNA, 19 nt, Artificial Sequence
  Description of Artificial Sequence: Synthetic oligonucleotide
acacuaaggucagaggaca

SEQ ID NO: 823466 - RNA, 19 nt, Artificial Sequence
  Description of Artificial Sequence: Synthetic oligonucleotide
uuguuggggaguagccacc

SEQ ID NO: 823467 - RNA, 19 nt, Artificial Sequence
  Description of Artificial Sequence: Synthetic oligonucleotide
accauuacugggaucguug

SEQ ID NO: 823468 - RNA, 19 nt, Artificial Sequence
  Description of Artificial Sequence: Synthetic oligonucleotide
agcugcagauugcucugac

SEQ ID NO: 823469 - RNA, 19 nt, Artificial Sequence
  Description of Artificial Sequence: Synthetic oligonucleotide
ugagcgacuggccuugauu

SEQ ID NO: 823470 - RNA, 19 nt, Artificial Sequence
  Description of Artificial Sequence: Synthetic oligonucleotide
uguugagcgacuggccuug

SEQ ID NO: 823471 - RNA, 19 nt, Artificial Sequence
  Description of Artificial Sequence: Synthetic oligonucleotide
agcucgaacagaaacugga

SEQ ID NO: 823472 - RNA, 19 nt, Artificial Sequence
  Description of Artificial Sequence: Synthetic oligonucleotide
cacggccacacgaucaaag

SEQ ID NO: 823473 - RNA, 19 nt, Artificial Sequence
  Description of Artificial Sequence: Synthetic oligonucleotide
ugccccguuaggcagugac

SEQ ID NO: 823474 - RNA, 19 nt, Artificial Sequence
  Description of Artificial Sequence: Synthetic oligonucleotide
cagggugacauuucucuuc

SEQ ID NO: 823475 - RNA, 19 nt, Artificial Sequence
  Description of Artificial Sequence: Synthetic oligonucleotide
uccgcagaguccagggccc

SEQ ID NO: 823476 - RNA, 19 nt, Artificial Sequence
  Description of Artificial Sequence: Synthetic oligonucleotide
uugcacgcuugaagaaucc

SEQ ID NO: 823477 - RNA, 19 nt, Artificial Sequence
  Description of Artificial Sequence: Synthetic oligonucleotide
ucacugaucguggccaaca

SEQ ID NO: 823478 - RNA, 19 nt, Artificial Sequence
  Description of Artificial Sequence: Synthetic oligonucleotide
gcacacuaaggucagagga

SEQ ID NO: 823479 - RNA, 19 nt, Artificial Sequence
  Description of Artificial Sequence: Synthetic oligonucleotide
agcgacuggccuugauugg

SEQ ID NO: 823480 - RNA, 19 nt, Artificial Sequence
  Description of Artificial Sequence: Synthetic oligonucleotide
ugcuguccacauccaggcg

SEQ ID NO: 823481 - RNA, 19 nt, Artificial Sequence
  Description of Artificial Sequence: Synthetic oligonucleotide
ccugaguagugcaacgagg

SEQ ID NO: 823482 - RNA, 19 nt, Artificial Sequence
  Description of Artificial Sequence: Synthetic oligonucleotide
accguaaccgagguguuug

SEQ ID NO: 823483 - RNA, 19 nt, Artificial Sequence
  Description of Artificial Sequence: Synthetic oligonucleotide
agaccgugaucucauacuu

SEQ ID NO: 823484 - RNA, 19 nt, Artificial Sequence
  Description of Artificial Sequence: Synthetic oligonucleotide
aucguuguggaugcaucuc

SEQ ID NO: 823485 - RNA, 19 nt, Artificial Sequence
  Description of Artificial Sequence: Synthetic oligonucleotide
aggacaggccugcccuucc

SEQ ID NO: 823486 - RNA, 19 nt, Artificial Sequence
  Description of Artificial Sequence: Synthetic oligonucleotide
ugcaucaggacaggccugc

SEQ ID NO: 823487 - RNA, 19 nt, Artificial Sequence
  Description of Artificial Sequence: Synthetic oligonucleotide
uggggaguagccaccccug

SEQ ID NO: 823488 - RNA, 19 nt, Artificial Sequence
  Description of Artificial Sequence: Synthetic oligonucleotide
cuuggccgugcccugggcg

SEQ ID NO: 823489 - RNA, 19 nt, Artificial Sequence
  Description of Artificial Sequence: Synthetic oligonucleotide
cacgggaguuccauccagg

SEQ ID NO: 823490 - RNA, 19 nt, Artificial Sequence
  Description of Artificial Sequence: Synthetic oligonucleotide
agaagaguuguuggggagu

SEQ ID NO: 823491 - RNA, 19 nt, Artificial Sequence
  Description of Artificial Sequence: Synthetic oligonucleotide
uccagccaugccccguuag

SEQ ID NO: 823492 - RNA, 19 nt, Artificial Sequence
  Description of Artificial Sequence: Synthetic oligonucleotide
ugucggucuucccgaagga

SEQ ID NO: 823493 - RNA, 19 nt, Artificial Sequence
  Description of Artificial Sequence: Synthetic oligonucleotide
gagcucgaacagaaacugg

SEQ ID NO: 823494 - RNA, 19 nt, Artificial Sequence
  Description of Artificial Sequence: Synthetic oligonucleotide
cucggggugcuuugcacgc

SEQ ID NO: 823495 - RNA, 19 nt, Artificial Sequence
  Description of Artificial Sequence: Synthetic oligonucleotide
cauuacugggaucguugug

SEQ ID NO: 823496 - RNA, 19 nt, Artificial Sequence
  Description of Artificial Sequence: Synthetic oligonucleotide
uuggccgugcccugggcgc

SEQ ID NO: 823497 - RNA, 19 nt, Artificial Sequence
  Description of Artificial Sequence: Synthetic oligonucleotide
ccgagaacagaaucgggcc

SEQ ID NO: 823498 - RNA, 19 nt, Artificial Sequence
  Description of Artificial Sequence: Synthetic oligonucleotide
ccaguuacuccucuggaug

SEQ ID NO: 823499 - RNA, 19 nt, Artificial Sequence
  Description of Artificial Sequence: Synthetic oligonucleotide
gagaccgugaucucauacu

SEQ ID NO: 823500 - RNA, 19 nt, Artificial Sequence
  Description of Artificial Sequence: Synthetic oligonucleotide
caccgcgugguacuggggc

SEQ ID NO: 823501 - RNA, 19 nt, Artificial Sequence
  Description of Artificial Sequence: Synthetic oligonucleotide
ugcacgcuugaagaauccc

SEQ ID NO: 823502 - RNA, 19 nt, Artificial Sequence
  Description of Artificial Sequence: Synthetic oligonucleotide
ugaguagugcaacgagguu

SEQ ID NO: 823503 - RNA, 19 nt, Artificial Sequence
  Description of Artificial Sequence: Synthetic oligonucleotide
ugcagcacggccacacgau

SEQ ID NO: 823504 - RNA, 19 nt, Artificial Sequence
  Description of Artificial Sequence: Synthetic oligonucleotide
cugaguagugcaacgaggu

SEQ ID NO: 823505 - RNA, 19 nt, Artificial Sequence
  Description of Artificial Sequence: Synthetic oligonucleotide
aggcuggaacucugugucg

SEQ ID NO: 823506 - RNA, 19 nt, Artificial Sequence
  Description of Artificial Sequence: Synthetic oligonucleotide
caaagcuguagagugggca

SEQ ID NO: 823507 - RNA, 19 nt, Artificial Sequence
  Description of Artificial Sequence: Synthetic oligonucleotide
caacgagguugguagggug

SEQ ID NO: 823508 - RNA, 19 nt, Artificial Sequence
  Description of Artificial Sequence: Synthetic oligonucleotide
cugaggacgggcugggguc

SEQ ID NO: 823509 - RNA, 19 nt, Artificial Sequence
  Description of Artificial Sequence: Synthetic oligonucleotide
augguauucagggcagcug

SEQ ID NO: 823510 - RNA, 19 nt, Artificial Sequence
  Description of Artificial Sequence: Synthetic oligonucleotide
gguugguagggugaccagg

SEQ ID NO: 823511 - RNA, 19 nt, Artificial Sequence
  Description of Artificial Sequence: Synthetic oligonucleotide
acgggaguuccauccagga

SEQ ID NO: 823512 - RNA, 19 nt, Artificial Sequence
  Description of Artificial Sequence: Synthetic oligonucleotide
uggacagcggcaacucaau

SEQ ID NO: 823513 - RNA, 19 nt, Artificial Sequence
  Description of Artificial Sequence: Synthetic oligonucleotide
augcagcacggccacacga

SEQ ID NO: 823514 - RNA, 19 nt, Artificial Sequence
  Description of Artificial Sequence: Synthetic oligonucleotide
ucucgcggccuccuauccc

SEQ ID NO: 823515 - RNA, 19 nt, Artificial Sequence
  Description of Artificial Sequence: Synthetic oligonucleotide
gaucguuguggaugcaucu

SEQ ID NO: 823516 - RNA, 19 nt, Artificial Sequence
  Description of Artificial Sequence: Synthetic oligonucleotide
guugguagggugaccagga

SEQ ID NO: 823517 - RNA, 19 nt, Artificial Sequence
  Description of Artificial Sequence: Synthetic oligonucleotide
ugaucguggccaacagcaa

SEQ ID NO: 823518 - RNA, 19 nt, Artificial Sequence
  Description of Artificial Sequence: Synthetic oligonucleotide
ggugccaaucagcauccag

SEQ ID NO: 823519 - RNA, 19 nt, Artificial Sequence
  Description of Artificial Sequence: Synthetic oligonucleotide
caccacgccagagaagaag

SEQ ID NO: 823520 - RNA, 19 nt, Artificial Sequence
  Description of Artificial Sequence: Synthetic oligonucleotide
ggccacacgaucaaagcug

SEQ ID NO: 823521 - RNA, 19 nt, Artificial Sequence
  Description of Artificial Sequence: Synthetic oligonucleotide
ugcccacucagugcaaaca

SEQ ID NO: 823522 - RNA, 19 nt, Artificial Sequence
  Description of Artificial Sequence: Synthetic oligonucleotide
gaugcaucucugagcaaca

SEQ ID NO: 823523 - RNA, 19 nt, Artificial Sequence
  Description of Artificial Sequence: Synthetic oligonucleotide
gguccaaguacaccauuac

SEQ ID NO: 823524 - RNA, 19 nt, Artificial Sequence
  Description of Artificial Sequence: Synthetic oligonucleotide
guagagugggcagcugaag

SEQ ID NO: 823525 - RNA, 19 nt, Artificial Sequence
  Description of Artificial Sequence: Synthetic oligonucleotide
agacuauauuguaggguca

SEQ ID NO: 823526 - RNA, 19 nt, Artificial Sequence
  Description of Artificial Sequence: Synthetic oligonucleotide
auuguagggucaccacgau

SEQ ID NO: 823527 - RNA, 19 nt, Artificial Sequence
  Description of Artificial Sequence: Synthetic oligonucleotide
accacgccagagaagaaga

SEQ ID NO: 823528 - RNA, 19 nt, Artificial Sequence
  Description of Artificial Sequence: Synthetic oligonucleotide
agguguuuggagacuauau

SEQ ID NO: 823529 - RNA, 19 nt, Artificial Sequence
  Description of Artificial Sequence: Synthetic oligonucleotide
caugcagcacggccacacg

SEQ ID NO: 823530 - RNA, 19 nt, Artificial Sequence
  Description of Artificial Sequence: Synthetic oligonucleotide
cacugaucguggccaacag

SEQ ID NO: 823531 - RNA, 19 nt, Artificial Sequence
  Description of Artificial Sequence: Synthetic oligonucleotide
auccgagaacagaaucggg

SEQ ID NO: 823532 - RNA, 19 nt, Artificial Sequence
  Description of Artificial Sequence: Synthetic oligonucleotide
ggagaccgugaucucauac

SEQ ID NO: 823533 - RNA, 19 nt, Artificial Sequence
  Description of Artificial Sequence: Synthetic oligonucleotide
gauuggagaccgugaucuc

SEQ ID NO: 823534 - RNA, 19 nt, Artificial Sequence
  Description of Artificial Sequence: Synthetic oligonucleotide
gguacagcagccacuuccc

SEQ ID NO: 823535 - RNA, 19 nt, Artificial Sequence
  Description of Artificial Sequence: Synthetic oligonucleotide
agguugguagggugaccag

SEQ ID NO: 823536 - RNA, 19 nt, Artificial Sequence
  Description of Artificial Sequence: Synthetic oligonucleotide
caacucaaugaagacuuga

SEQ ID NO: 823537 - RNA, 19 nt, Artificial Sequence
  Description of Artificial Sequence: Synthetic oligonucleotide
caggguguugagcgacugg

SEQ ID NO: 823538 - RNA, 19 nt, Artificial Sequence
  Description of Artificial Sequence: Synthetic oligonucleotide
guuacuccucuggauggug

SEQ ID NO: 823539 - RNA, 19 nt, Artificial Sequence
  Description of Artificial Sequence: Synthetic oligonucleotide
ucucguggggccacaugau

SEQ ID NO: 823540 - RNA, 19 nt, Artificial Sequence
  Description of Artificial Sequence: Synthetic oligonucleotide
gaagaguuguuggggagua

SEQ ID NO: 823541 - RNA, 19 nt, Artificial Sequence
  Description of Artificial Sequence: Synthetic oligonucleotide
agagcggcuucuccgcaga

SEQ ID NO: 823542 - RNA, 19 nt, Artificial Sequence
  Description of Artificial Sequence: Synthetic oligonucleotide
gccugaguagugcaacgag

SEQ ID NO: 823543 - RNA, 19 nt, Artificial Sequence
  Description of Artificial Sequence: Synthetic oligonucleotide
ugggguacagcagccacuu

SEQ ID NO: 823544 - RNA, 19 nt, Artificial Sequence
  Description of Artificial Sequence: Synthetic oligonucleotide
ucagaucgcauggcacucu

SEQ ID NO: 823545 - RNA, 19 nt, Artificial Sequence
  Description of Artificial Sequence: Synthetic oligonucleotide
gguugggucuuggagagca

SEQ ID NO: 823546 - RNA, 19 nt, Artificial Sequence
  Description of Artificial Sequence: Synthetic oligonucleotide
gaaucgggccuggaccagc

SEQ ID NO: 823547 - RNA, 19 nt, Artificial Sequence
  Description of Artificial Sequence: Synthetic oligonucleotide
cuugauuggagaccgugau

SEQ ID NO: 823548 - RNA, 19 nt, Artificial Sequence
  Description of Artificial Sequence: Synthetic oligonucleotide
uagugcaacgagguuggua

SEQ ID NO: 823549 - RNA, 19 nt, Artificial Sequence
  Description of Artificial Sequence: Synthetic oligonucleotide
uagccaccccugaaaugga

SEQ ID NO: 823550 - RNA, 19 nt, Artificial Sequence
  Description of Artificial Sequence: Synthetic oligonucleotide
cucucgcggccuccuaucc

SEQ ID NO: 823551 - RNA, 19 nt, Artificial Sequence
  Description of Artificial Sequence: Synthetic oligonucleotide
auggcccgaagcuugucuu

SEQ ID NO: 823552 - RNA, 19 nt, Artificial Sequence
  Description of Artificial Sequence: Synthetic oligonucleotide
aaucgggccuggaccagcu

SEQ ID NO: 823553 - RNA, 19 nt, Artificial Sequence
  Description of Artificial Sequence: Synthetic oligonucleotide
gcagguuggugaucgucag

SEQ ID NO: 823554 - RNA, 19 nt, Artificial Sequence
  Description of Artificial Sequence: Synthetic oligonucleotide
aguuacuccucuggauggu

SEQ ID NO: 823555 - RNA, 19 nt, Artificial Sequence
  Description of Artificial Sequence: Synthetic oligonucleotide
acccagaucagggugccaa

SEQ ID NO: 823556 - RNA, 19 nt, Artificial Sequence
  Description of Artificial Sequence: Synthetic oligonucleotide
cagauugcucugacagauc

SEQ ID NO: 823557 - RNA, 19 nt, Artificial Sequence
  Description of Artificial Sequence: Synthetic oligonucleotide
cacauccaggcggaggaug

SEQ ID NO: 823558 - RNA, 19 nt, Artificial Sequence
  Description of Artificial Sequence: Synthetic oligonucleotide
uggugaucgucagcuccag

SEQ ID NO: 823559 - RNA, 19 nt, Artificial Sequence
  Description of Artificial Sequence: Synthetic oligonucleotide
ucuacccgcaugggguaca

SEQ ID NO: 823560 - RNA, 19 nt, Artificial Sequence
  Description of Artificial Sequence: Synthetic oligonucleotide
cucagaucgcauggcacuc

SEQ ID NO: 823561 - RNA, 19 nt, Artificial Sequence
  Description of Artificial Sequence: Synthetic oligonucleotide
ggaguugccccaguuacuc

SEQ ID NO: 823562 - RNA, 19 nt, Artificial Sequence
  Description of Artificial Sequence: Synthetic oligonucleotide
gccaugccccguuaggcag

SEQ ID NO: 823563 - RNA, 19 nt, Artificial Sequence
  Description of Artificial Sequence: Synthetic oligonucleotide
guauucagggcagcugaga

SEQ ID NO: 823564 - RNA, 19 nt, Artificial Sequence
  Description of Artificial Sequence: Synthetic oligonucleotide
uugccccaguuacuccucu

SEQ ID NO: 823565 - RNA, 19 nt, Artificial Sequence
  Description of Artificial Sequence: Synthetic oligonucleotide
accgcgugguacuggggca

SEQ ID NO: 823566 - RNA, 19 nt, Artificial Sequence
  Description of Artificial Sequence: Synthetic oligonucleotide
gucgcugauccgagaacag

SEQ ID NO: 823567 - RNA, 19 nt, Artificial Sequence
  Description of Artificial Sequence: Synthetic oligonucleotide
ccgaaggaucuucaccgcg

SEQ ID NO: 823568 - RNA, 19 nt, Artificial Sequence
  Description of Artificial Sequence: Synthetic oligonucleotide
gaccaggagcuugucgcug

SEQ ID NO: 823569 - RNA, 19 nt, Artificial Sequence
  Description of Artificial Sequence: Synthetic oligonucleotide
uccgguugcuccagcucuc

SEQ ID NO: 823570 - RNA, 19 nt, Artificial Sequence
  Description of Artificial Sequence: Synthetic oligonucleotide
cucauuggacaggcagagc

SEQ ID NO: 823571 - RNA, 19 nt, Artificial Sequence
  Description of Artificial Sequence: Synthetic oligonucleotide
cacugugauguuggcucgg

SEQ ID NO: 823572 - RNA, 19 nt, Artificial Sequence
  Description of Artificial Sequence: Synthetic oligonucleotide
gugucgcugauccgagaac

SEQ ID NO: 823573 - RNA, 19 nt, Artificial Sequence
  Description of Artificial Sequence: Synthetic oligonucleotide
cagaucgcauggcacucuc

SEQ ID NO: 823574 - RNA, 19 nt, Artificial Sequence
  Description of Artificial Sequence: Synthetic oligonucleotide
ugccccaguuacuccucug

SEQ ID NO: 823575 - RNA, 19 nt, Artificial Sequence
  Description of Artificial Sequence: Synthetic oligonucleotide
ucccugacccucugucuaa

SEQ ID NO: 823576 - RNA, 19 nt, Artificial Sequence
  Description of Artificial Sequence: Synthetic oligonucleotide
acacuuggccgugcccugg

SEQ ID NO: 823577 - RNA, 19 nt, Artificial Sequence
  Description of Artificial Sequence: Synthetic oligonucleotide
cacuuggccgugcccuggg

SEQ ID NO: 823578 - RNA, 19 nt, Artificial Sequence
  Description of Artificial Sequence: Synthetic oligonucleotide
acugugauguuggcucgga

SEQ ID NO: 823579 - RNA, 19 nt, Artificial Sequence
  Description of Artificial Sequence: Synthetic oligonucleotide
ggugaucgucagcuccagg

SEQ ID NO: 823580 - RNA, 19 nt, Artificial Sequence
  Description of Artificial Sequence: Synthetic oligonucleotide
ggcaacucaaugaagacuu

SEQ ID NO: 823581 - RNA, 19 nt, Artificial Sequence
  Description of Artificial Sequence: Synthetic oligonucleotide
ccuccuaucccugcugucc

SEQ ID NO: 823582 - RNA, 19 nt, Artificial Sequence
  Description of Artificial Sequence: Synthetic oligonucleotide
guuggggaguagccacccc

SEQ ID NO: 823583 - RNA, 19 nt, Artificial Sequence
  Description of Artificial Sequence: Synthetic oligonucleotide
acuggcacgggaguuccau

SEQ ID NO: 823584 - RNA, 19 nt, Artificial Sequence
  Description of Artificial Sequence: Synthetic oligonucleotide
cagcacggccacacgauca

SEQ ID NO: 823585 - RNA, 19 nt, Artificial Sequence
  Description of Artificial Sequence: Synthetic oligonucleotide
agaaucgggccuggaccag

SEQ ID NO: 823586 - RNA, 19 nt, Artificial Sequence
  Description of Artificial Sequence: Synthetic oligonucleotide
caaccacagccaugggguc

SEQ ID NO: 823587 - RNA, 19 nt, Artificial Sequence
  Description of Artificial Sequence: Synthetic oligonucleotide
agugacuggcacgggaguu

SEQ ID NO: 823588 - RNA, 19 nt, Artificial Sequence
  Description of Artificial Sequence: Synthetic oligonucleotide
ugccaccguaaccgaggug

SEQ ID NO: 823589 - RNA, 19 nt, Artificial Sequence
  Description of Artificial Sequence: Synthetic oligonucleotide
caccaggggacuccuucug

SEQ ID NO: 823590 - RNA, 19 nt, Artificial Sequence
  Description of Artificial Sequence: Synthetic oligonucleotide
augacccaccaggggacuc

SEQ ID NO: 823591 - RNA, 19 nt, Artificial Sequence
  Description of Artificial Sequence: Synthetic oligonucleotide
ucaccacgauggcccgaag

SEQ ID NO: 823592 - RNA, 19 nt, Artificial Sequence
  Description of Artificial Sequence: Synthetic oligonucleotide
agaggacacuggccaccag

SEQ ID NO: 823593 - RNA, 19 nt, Artificial Sequence
  Description of Artificial Sequence: Synthetic oligonucleotide
gcggcaacucaaugaagac

SEQ ID NO: 823594 - RNA, 19 nt, Artificial Sequence
  Description of Artificial Sequence: Synthetic oligonucleotide
gguguugagcgacuggccu

SEQ ID NO: 823595 - RNA, 19 nt, Artificial Sequence
  Description of Artificial Sequence: Synthetic oligonucleotide
cuccuaucccugcugucca

SEQ ID NO: 823596 - RNA, 19 nt, Artificial Sequence
  Description of Artificial Sequence: Synthetic oligonucleotide
uugagcgacuggccuugau

SEQ ID NO: 823597 - RNA, 19 nt, Artificial Sequence
  Description of Artificial Sequence: Synthetic oligonucleotide
ggacaaucacuuccaggga

SEQ ID NO: 823598 - RNA, 19 nt, Artificial Sequence
  Description of Artificial Sequence: Synthetic oligonucleotide
gaaagugaccugggcaccu

SEQ ID NO: 823599 - RNA, 19 nt, Artificial Sequence
  Description of Artificial Sequence: Synthetic oligonucleotide
guacaccauuacugggauc

SEQ ID NO: 823600 - RNA, 19 nt, Artificial Sequence
  Description of Artificial Sequence: Synthetic oligonucleotide
ggagacuauauuguagggu

SEQ ID NO: 823601 - RNA, 19 nt, Artificial Sequence
  Description of Artificial Sequence: Synthetic oligonucleotide
uacugggaucguuguggau

SEQ ID NO: 823602 - RNA, 19 nt, Artificial Sequence
  Description of Artificial Sequence: Synthetic oligonucleotide
acacucgacaugagaggca

SEQ ID NO: 823603 - RNA, 19 nt, Artificial Sequence
  Description of Artificial Sequence: Synthetic oligonucleotide
uuccagaggcggccccaga

SEQ ID NO: 823604 - RNA, 19 nt, Artificial Sequence
  Description of Artificial Sequence: Synthetic oligonucleotide
ggaucguuguggaugcauc

SEQ ID NO: 823605 - RNA, 19 nt, Artificial Sequence
  Description of Artificial Sequence: Synthetic oligonucleotide
gccaccguaaccgaggugu

SEQ ID NO: 823606 - RNA, 19 nt, Artificial Sequence
  Description of Artificial Sequence: Synthetic oligonucleotide
uggcaaucucguggggcca

SEQ ID NO: 823607 - RNA, 19 nt, Artificial Sequence
  Description of Artificial Sequence: Synthetic oligonucleotide
aggugcuguuccagaggcg

SEQ ID NO: 823608 - RNA, 19 nt, Artificial Sequence
  Description of Artificial Sequence: Synthetic oligonucleotide
ccguuaggcagugacuggc

SEQ ID NO: 823609 - RNA, 19 nt, Artificial Sequence
  Description of Artificial Sequence: Synthetic oligonucleotide
gcacgggaguuccauccag

SEQ ID NO: 823610 - RNA, 19 nt, Artificial Sequence
  Description of Artificial Sequence: Synthetic oligonucleotide
cuggcacgggaguuccauc

SEQ ID NO: 823611 - RNA, 19 nt, Artificial Sequence
  Description of Artificial Sequence: Synthetic oligonucleotide
ccuugauuggagaccguga

SEQ ID NO: 823612 - RNA, 19 nt, Artificial Sequence
  Description of Artificial Sequence: Synthetic oligonucleotide
gggcaccucucuucauagg

SEQ ID NO: 823613 - RNA, 19 nt, Artificial Sequence
  Description of Artificial Sequence: Synthetic oligonucleotide
gcagaucccuuucuuccca

SEQ ID NO: 823614 - RNA, 19 nt, Artificial Sequence
  Description of Artificial Sequence: Synthetic oligonucleotide
auguuggcucggacaauca

SEQ ID NO: 823615 - RNA, 19 nt, Artificial Sequence
  Description of Artificial Sequence: Synthetic oligonucleotide
ucgcugccaccguaaccga

SEQ ID NO: 823616 - RNA, 19 nt, Artificial Sequence
  Description of Artificial Sequence: Synthetic oligonucleotide
accgagguguuuggagacu

SEQ ID NO: 823617 - RNA, 19 nt, Artificial Sequence
  Description of Artificial Sequence: Synthetic oligonucleotide
gguggacuagggaggggag

SEQ ID NO: 823618 - RNA, 19 nt, Artificial Sequence
  Description of Artificial Sequence: Synthetic oligonucleotide
cuuugcacgcuugaagaau

SEQ ID NO: 823619 - RNA, 19 nt, Artificial Sequence
  Description of Artificial Sequence: Synthetic oligonucleotide
ggcccggacgccugaguag

SEQ ID NO: 823620 - RNA, 19 nt, Artificial Sequence
  Description of Artificial Sequence: Synthetic oligonucleotide
acgucccucucagaucgca

SEQ ID NO: 823621 - RNA, 19 nt, Artificial Sequence
  Description of Artificial Sequence: Synthetic oligonucleotide
gcagauugcucugacagau

SEQ ID NO: 823622 - RNA, 19 nt, Artificial Sequence
  Description of Artificial Sequence: Synthetic oligonucleotide
uggcucggacaaucacuuc

SEQ ID NO: 823623 - RNA, 19 nt, Artificial Sequence
  Description of Artificial Sequence: Synthetic oligonucleotide
agcuugucgcugccaccgu

SEQ ID NO: 823624 - RNA, 19 nt, Artificial Sequence
  Description of Artificial Sequence: Synthetic oligonucleotide
uggagaccgugaucucaua

SEQ ID NO: 823625 - RNA, 19 nt, Artificial Sequence
  Description of Artificial Sequence: Synthetic oligonucleotide
cuacccgcaugggguacag

SEQ ID NO: 823626 - RNA, 19 nt, Artificial Sequence
  Description of Artificial Sequence: Synthetic oligonucleotide
ucgcggccuccuaucccug

SEQ ID NO: 823627 - RNA, 19 nt, Artificial Sequence
  Description of Artificial Sequence: Synthetic oligonucleotide
cagggacuucacagcuaug

SEQ ID NO: 823628 - RNA, 19 nt, Artificial Sequence
  Description of Artificial Sequence: Synthetic oligonucleotide
gcuucgugggcaucaucuc

SEQ ID NO: 823629 - RNA, 19 nt, Artificial Sequence
  Description of Artificial Sequence: Synthetic oligonucleotide
ccguaaccgagguguuugg

SEQ ID NO: 823630 - RNA, 19 nt, Artificial Sequence
  Description of Artificial Sequence: Synthetic oligonucleotide
caugguauucagggcagcu

SEQ ID NO: 823631 - RNA, 19 nt, Artificial Sequence
  Description of Artificial Sequence: Synthetic oligonucleotide
acaccauuacugggaucgu

SEQ ID NO: 823632 - RNA, 19 nt, Artificial Sequence
  Description of Artificial Sequence: Synthetic oligonucleotide
caugccccguuaggcagug

SEQ ID NO: 823633 - RNA, 19 nt, Artificial Sequence
  Description of Artificial Sequence: Synthetic oligonucleotide
agaucgcauggcacucuca

SEQ ID NO: 823634 - RNA, 19 nt, Artificial Sequence
  Description of Artificial Sequence: Synthetic oligonucleotide
ggcggaggaugguuggguc

SEQ ID NO: 823635 - RNA, 19 nt, Artificial Sequence
  Description of Artificial Sequence: Synthetic oligonucleotide
ggguguugagcgacuggcc

SEQ ID NO: 823636 - RNA, 19 nt, Artificial Sequence
  Description of Artificial Sequence: Synthetic oligonucleotide
gucaccacgauggcccgaa

SEQ ID NO: 823637 - RNA, 19 nt, Artificial Sequence
  Description of Artificial Sequence: Synthetic oligonucleotide
gcaacucaaugaagacuug

SEQ ID NO: 823638 - RNA, 19 nt, Artificial Sequence
  Description of Artificial Sequence: Synthetic oligonucleotide
cacgucccucucagaucgc

SEQ ID NO: 823639 - RNA, 19 nt, Artificial Sequence
  Description of Artificial Sequence: Synthetic oligonucleotide
ggaccccuacuccccauuc

SEQ ID NO: 823640 - RNA, 19 nt, Artificial Sequence
  Description of Artificial Sequence: Synthetic oligonucleotide
aucgucagcuccaggccua

SEQ ID NO: 823641 - RNA, 19 nt, Artificial Sequence
  Description of Artificial Sequence: Synthetic oligonucleotide
agggcccggacgccugagu

SEQ ID NO: 823642 - RNA, 19 nt, Artificial Sequence
  Description of Artificial Sequence: Synthetic oligonucleotide
ggguccaaguacaccauua

SEQ ID NO: 823643 - RNA, 19 nt, Artificial Sequence
  Description of Artificial Sequence: Synthetic oligonucleotide
ggcacgggaguuccaucca

SEQ ID NO: 823644 - RNA, 19 nt, Artificial Sequence
  Description of Artificial Sequence: Synthetic oligonucleotide
guguugagcgacuggccuu

SEQ ID NO: 823645 - RNA, 19 nt, Artificial Sequence
  Description of Artificial Sequence: Synthetic oligonucleotide
agaggcggccccagacaug

SEQ ID NO: 823646 - RNA, 19 nt, Artificial Sequence
  Description of Artificial Sequence: Synthetic oligonucleotide
acgauggcccgaagcuugu

SEQ ID NO: 823647 - RNA, 19 nt, Artificial Sequence
  Description of Artificial Sequence: Synthetic oligonucleotide
cacucgacaugagaggcau

SEQ ID NO: 823648 - RNA, 19 nt, Artificial Sequence
  Description of Artificial Sequence: Synthetic oligonucleotide
cugugucgcugauccgaga

SEQ ID NO: 823649 - RNA, 19 nt, Artificial Sequence
  Description of Artificial Sequence: Synthetic oligonucleotide
ccgugaucucauacuugac

SEQ ID NO: 823650 - RNA, 19 nt, Artificial Sequence
  Description of Artificial Sequence: Synthetic oligonucleotide
ggacuccuucugcaaccac

SEQ ID NO: 823651 - RNA, 19 nt, Artificial Sequence
  Description of Artificial Sequence: Synthetic oligonucleotide
gcgacuggccuugauugga

SEQ ID NO: 823652 - RNA, 19 nt, Artificial Sequence
  Description of Artificial Sequence: Synthetic oligonucleotide
ggacuagggaggggagagc

SEQ ID NO: 823653 - RNA, 19 nt, Artificial Sequence
  Description of Artificial Sequence: Synthetic oligonucleotide
cacccuucaccacgccaga

SEQ ID NO: 823654 - RNA, 19 nt, Artificial Sequence
  Description of Artificial Sequence: Synthetic oligonucleotide
cgacuggccuugauuggag

SEQ ID NO: 823655 - RNA, 19 nt, Artificial Sequence
  Description of Artificial Sequence: Synthetic oligonucleotide
ugggcuucgugggcaucau

SEQ ID NO: 823656 - RNA, 19 nt, Artificial Sequence
  Description of Artificial Sequence: Synthetic oligonucleotide
ggggaguagccaccccuga

SEQ ID NO: 823657 - RNA, 19 nt, Artificial Sequence
  Description of Artificial Sequence: Synthetic oligonucleotide
gcucucgcggccuccuauc

SEQ ID NO: 823658 - RNA, 19 nt, Artificial Sequence
  Description of Artificial Sequence: Synthetic oligonucleotide
guccgagggcagguuggug

SEQ ID NO: 823659 - RNA, 19 nt, Artificial Sequence
  Description of Artificial Sequence: Synthetic oligonucleotide
ggcaaucucguggggccac

SEQ ID NO: 823660 - RNA, 19 nt, Artificial Sequence
  Description of Artificial Sequence: Synthetic oligonucleotide
ggagaucaggaccccuacu

SEQ ID NO: 823661 - RNA, 19 nt, Artificial Sequence
  Description of Artificial Sequence: Synthetic oligonucleotide
cuaucccugcuguccacau

SEQ ID NO: 823662 - RNA, 19 nt, Artificial Sequence
  Description of Artificial Sequence: Synthetic oligonucleotide
gaauggcugcccacucagu

SEQ ID NO: 823663 - RNA, 19 nt, Artificial Sequence
  Description of Artificial Sequence: Synthetic oligonucleotide
ccggacgccugaguagugc

SEQ ID NO: 823664 - RNA, 19 nt, Artificial Sequence
  Description of Artificial Sequence: Synthetic oligonucleotide
cccucucagaucgcauggc

SEQ ID NO: 823665 - RNA, 19 nt, Artificial Sequence
  Description of Artificial Sequence: Synthetic oligonucleotide
cagcuccaggccuaugaau

SEQ ID NO: 823666 - RNA, 19 nt, Artificial Sequence
  Description of Artificial Sequence: Synthetic oligonucleotide
ccauuacugggaucguugu

SEQ ID NO: 823667 - RNA, 19 nt, Artificial Sequence
  Description of Artificial Sequence: Synthetic oligonucleotide
gcaucagagcccucccacu

SEQ ID NO: 823668 - RNA, 19 nt, Artificial Sequence
  Description of Artificial Sequence: Synthetic oligonucleotide
cgggaguuccauccaggac

SEQ ID NO: 823669 - RNA, 19 nt, Artificial Sequence
  Description of Artificial Sequence: Synthetic oligonucleotide
ccccagcucacacucgaca

SEQ ID NO: 823670 - RNA, 19 nt, Artificial Sequence
  Description of Artificial Sequence: Synthetic oligonucleotide
acccucugucuaaggcacu

SEQ ID NO: 823671 - RNA, 19 nt, Artificial Sequence
  Description of Artificial Sequence: Synthetic oligonucleotide
gcccaggguguugagcgac

SEQ ID NO: 823672 - RNA, 19 nt, Artificial Sequence
  Description of Artificial Sequence: Synthetic oligonucleotide
ccgguugcuccagcucucg

SEQ ID NO: 823673 - RNA, 19 nt, Artificial Sequence
  Description of Artificial Sequence: Synthetic oligonucleotide
gcggaggaugguugggucu

SEQ ID NO: 823674 - RNA, 19 nt, Artificial Sequence
  Description of Artificial Sequence: Synthetic oligonucleotide
gcucuacccgcauggggua

SEQ ID NO: 823675 - RNA, 19 nt, Artificial Sequence
  Description of Artificial Sequence: Synthetic oligonucleotide
ggggugcuuugcacgcuug

SEQ ID NO: 823676 - RNA, 19 nt, Artificial Sequence
  Description of Artificial Sequence: Synthetic oligonucleotide
gccacacgaucaaagcugu

SEQ ID NO: 823677 - RNA, 19 nt, Artificial Sequence
  Description of Artificial Sequence: Synthetic oligonucleotide
gucggucuucccgaaggau

SEQ ID NO: 823678 - RNA, 19 nt, Artificial Sequence
  Description of Artificial Sequence: Synthetic oligonucleotide
gcuugucgcugccaccgua

SEQ ID NO: 823679 - RNA, 19 nt, Artificial Sequence
  Description of Artificial Sequence: Synthetic oligonucleotide
gacuggcacgggaguucca

SEQ ID NO: 823680 - RNA, 19 nt, Artificial Sequence
  Description of Artificial Sequence: Synthetic oligonucleotide
gggcccggacgccugagua

SEQ ID NO: 823681 - RNA, 19 nt, Artificial Sequence
  Description of Artificial Sequence: Synthetic oligonucleotide
guugagcgacuggccuuga

SEQ ID NO: 823682 - RNA, 19 nt, Artificial Sequence
  Description of Artificial Sequence: Synthetic oligonucleotide
ggccuccuaucccugcugu

SEQ ID NO: 823683 - RNA, 19 nt, Artificial Sequence
  Description of Artificial Sequence: Synthetic oligonucleotide
gcaacgagguugguagggu

SEQ ID NO: 823684 - RNA, 19 nt, Artificial Sequence
  Description of Artificial Sequence: Synthetic oligonucleotide
gcucgaacagaaacuggau

SEQ ID NO: 823685 - RNA, 19 nt, Artificial Sequence
  Description of Artificial Sequence: Synthetic oligonucleotide
cgcugccaccguaaccgag

SEQ ID NO: 823686 - RNA, 19 nt, Artificial Sequence
  Description of Artificial Sequence: Synthetic oligonucleotide
gcugauccgagaacagaau

SEQ ID NO: 823687 - RNA, 19 nt, Artificial Sequence
  Description of Artificial Sequence: Synthetic oligonucleotide
gggaucguuguggaugcau

SEQ ID NO: 823688 - RNA, 19 nt, Artificial Sequence
  Description of Artificial Sequence: Synthetic oligonucleotide
acucgacaugagaggcauu

SEQ ID NO: 823689 - RNA, 19 nt, Artificial Sequence
  Description of Artificial Sequence: Synthetic oligonucleotide
cccaguuacuccucuggau

SEQ ID NO: 823690 - RNA, 19 nt, Artificial Sequence
  Description of Artificial Sequence: Synthetic oligonucleotide
ggacgccugaguagugcaa

SEQ ID NO: 823691 - RNA, 19 nt, Artificial Sequence
  Description of Artificial Sequence: Synthetic oligonucleotide
ccugagacagugacaugau

SEQ ID NO: 823692 - RNA, 19 nt, Artificial Sequence
  Description of Artificial Sequence: Synthetic oligonucleotide
caggccccuguccgcccuc

SEQ ID NO: 823693 - RNA, 19 nt, Artificial Sequence
  Description of Artificial Sequence: Synthetic oligonucleotide
gggguacagcagccacuuc

SEQ ID NO: 823694 - RNA, 19 nt, Artificial Sequence
  Description of Artificial Sequence: Synthetic oligonucleotide
cgagaacagaaucgggccu

SEQ ID NO: 823695 - RNA, 19 nt, Artificial Sequence
  Description of Artificial Sequence: Synthetic oligonucleotide
caccauuacugggaucguu

SEQ ID NO: 823696 - RNA, 19 nt, Artificial Sequence
  Description of Artificial Sequence: Synthetic oligonucleotide
cggacgccugaguagugca

SEQ ID NO: 823697 - RNA, 19 nt, Artificial Sequence
  Description of Artificial Sequence: Synthetic oligonucleotide
cgugcccugggcgcagucc

SEQ ID NO: 823698 - RNA, 19 nt, Artificial Sequence
  Description of Artificial Sequence: Synthetic oligonucleotide
ccgcgugguacuggggcac

SEQ ID NO: 823699 - RNA, 19 nt, Artificial Sequence
  Description of Artificial Sequence: Synthetic oligonucleotide
gcaaucucguggggccaca

SEQ ID NO: 823700 - RNA, 19 nt, Artificial Sequence
  Description of Artificial Sequence: Synthetic oligonucleotide
cccggacgccugaguagug

SEQ ID NO: 823701 - RNA, 19 nt, Artificial Sequence
  Description of Artificial Sequence: Synthetic oligonucleotide
ccgcagaguccagggcccg

SEQ ID NO: 823702 - RNA, 19 nt, Artificial Sequence
  Description of Artificial Sequence: Synthetic oligonucleotide
cguaaccgagguguuugga

SEQ ID NO: 823703 - RNA, 19 nt, Artificial Sequence
  Description of Artificial Sequence: Synthetic oligonucleotide
cgcggccuccuaucccugc

SEQ ID NO: 823704 - RNA, 19 nt, Artificial Sequence
  Description of Artificial Sequence: Synthetic oligonucleotide
ggucaccacgauggcccga

SEQ ID NO: 823705 - RNA, 19 nt, Artificial Sequence
  Description of Artificial Sequence: Synthetic oligonucleotide
ccaccaggggacuccuucu

SEQ ID NO: 823706 - RNA, 19 nt, Artificial Sequence
  Description of Artificial Sequence: Synthetic oligonucleotide
gcccggacgccugaguagu

SEQ ID NO: 823707 - RNA, 19 nt, Artificial Sequence
  Description of Artificial Sequence: Synthetic oligonucleotide
guagugcaacgagguuggu

SEQ ID NO: 823708 - RNA, 19 nt, Artificial Sequence
  Description of Artificial Sequence: Synthetic oligonucleotide
gcauggcacucucacccuu

SEQ ID NO: 823709 - RNA, 19 nt, Artificial Sequence
  Description of Artificial Sequence: Synthetic oligonucleotide
cggccacacgaucaaagcu

SEQ ID NO: 823710 - RNA, 19 nt, Artificial Sequence
  Description of Artificial Sequence: Synthetic oligonucleotide
caaucucguggggccacau

SEQ ID NO: 823711 - RNA, 19 nt, Artificial Sequence
  Description of Artificial Sequence: Synthetic oligonucleotide
cggcaacucaaugaagacu

SEQ ID NO: 823712 - RNA, 19 nt, Artificial Sequence
  Description of Artificial Sequence: Synthetic oligonucleotide
caggaccccuacuccccau

SEQ ID NO: 823713 - RNA, 19 nt, Artificial Sequence
  Description of Artificial Sequence: Synthetic oligonucleotide
caccguaaccgagguguuu

SEQ ID NO: 823714 - RNA, 19 nt, Artificial Sequence
  Description of Artificial Sequence: Synthetic oligonucleotide
ccaugccccguuaggcagu

SEQ ID NO: 823715 - RNA, 19 nt, Artificial Sequence
  Description of Artificial Sequence: Synthetic oligonucleotide
ccacacgaucaaagcugua

SEQ ID NO: 823716 - RNA, 19 nt, Artificial Sequence
  Description of Artificial Sequence: Synthetic oligonucleotide
gcacggccacacgaucaaa

SEQ ID NO: 823717 - RNA, 19 nt, Artificial Sequence
  Description of Artificial Sequence: Synthetic oligonucleotide
ccgugcccugggcgcaguc

SEQ ID NO: 823718 - RNA, 19 nt, Artificial Sequence
  Description of Artificial Sequence: Synthetic oligonucleotide
cccucugucuaaggcacuu

SEQ ID NO: 823719 - RNA, 19 nt, Artificial Sequence
  Description of Artificial Sequence: Synthetic oligonucleotide
ccaccguaaccgagguguu

SEQ ID NO: 823720 - RNA, 19 nt, Artificial Sequence
  Description of Artificial Sequence: Synthetic oligonucleotide
cgucccucucagaucgcau

SEQ ID NO: 823721 - RNA, 19 nt, Artificial Sequence
  Description of Artificial Sequence: Synthetic oligonucleotide
cgugguacuggggcacagu

SEQ ID NO: 823722 - RNA, 19 nt, Artificial Sequence
  Description of Artificial Sequence: Synthetic oligonucleotide
cgcgugguacuggggcaca

SEQ ID NO: 823723 - RNA, 19 nt, Artificial Sequence
  Description of Artificial Sequence: Synthetic oligonucleotide
cggggugcuuugcacgcuu

SEQ ID NO: 823724 - RNA, 19 nt, Artificial Sequence
  Description of Artificial Sequence: Synthetic oligonucleotide
aagaaugacacguaggccc

SEQ ID NO: 823725 - RNA, 19 nt, Artificial Sequence
  Description of Artificial Sequence: Synthetic oligonucleotide
uacacaacuaaacagaucu

SEQ ID NO: 823726 - RNA, 19 nt, Artificial Sequence
  Description of Artificial Sequence: Synthetic oligonucleotide
  modified_base (14)..(14): a, c, u, g, unknown or other
ucauaaauuaacunuaaaa

SEQ ID NO: 823727 - RNA, 19 nt, Artificial Sequence
  Description of Artificial Sequence: Synthetic oligonucleotide
aagagauacucauuaaaac

SEQ ID NO: 823728 - RNA, 19 nt, Artificial Sequence
  Description of Artificial Sequence: Synthetic oligonucleotide
aauucauugagugucugcc

SEQ ID NO: 823729 - RNA, 19 nt, Artificial Sequence
  Description of Artificial Sequence: Synthetic oligonucleotide
uaaucaaagaggcugagug

SEQ ID NO: 823730 - RNA, 19 nt, Artificial Sequence
  Description of Artificial Sequence: Synthetic oligonucleotide
ucuguuaggaaauauuuag

SEQ ID NO: 823731 - RNA, 19 nt, Artificial Sequence
  Description of Artificial Sequence: Synthetic oligonucleotide
gaaauauuuagguaaggag

SEQ ID NO: 823732 - RNA, 19 nt, Artificial Sequence
  Description of Artificial Sequence: Synthetic oligonucleotide
uuagcaacagcacucaugc

SEQ ID NO: 823733 - RNA, 19 nt, Artificial Sequence
  Description of Artificial Sequence: Synthetic oligonucleotide
ugcuauguaacaaaagaag

SEQ ID NO: 823734 - RNA, 19 nt, Artificial Sequence
  Description of Artificial Sequence: Synthetic oligonucleotide
ucugcuauguaacaaaaga

SEQ ID NO: 823735 - RNA, 19 nt, Artificial Sequence
  Description of Artificial Sequence: Synthetic oligonucleotide
uaagugacucugaagagcg

SEQ ID NO: 823736 - RNA, 19 nt, Artificial Sequence
  Description of Artificial Sequence: Synthetic oligonucleotide
uaaguucaaaucuggagcg

SEQ ID NO: 823737 - RNA, 19 nt, Artificial Sequence
  Description of Artificial Sequence: Synthetic oligonucleotide
auuccuacauccgagaagc

SEQ ID NO: 823738 - RNA, 19 nt, Artificial Sequence
  Description of Artificial Sequence: Synthetic oligonucleotide
uuuauucacaccaauuaga

SEQ ID NO: 823739 - RNA, 19 nt, Artificial Sequence
  Description of Artificial Sequence: Synthetic oligonucleotide
aacauauugcauuaauaca

SEQ ID NO: 823740 - RNA, 19 nt, Artificial Sequence
  Description of Artificial Sequence: Synthetic oligonucleotide
ucucucuucauuaagacau

SEQ ID NO: 823741 - RNA, 19 nt, Artificial Sequence
  Description of Artificial Sequence: Synthetic oligonucleotide
aauagcauaagugacucug

SEQ ID NO: 823742 - RNA, 19 nt, Artificial Sequence
  Description of Artificial Sequence: Synthetic oligonucleotide
uguaauugaguugaagagg

SEQ ID NO: 823743 - RNA, 19 nt, Artificial Sequence
  Description of Artificial Sequence: Synthetic oligonucleotide
uuguaauugaguugaagag

SEQ ID NO: 823744 - RNA, 19 nt, Artificial Sequence
  Description of Artificial Sequence: Synthetic oligonucleotide
agaagccuauguuagaaac

SEQ ID NO: 823745 - RNA, 19 nt, Artificial Sequence
  Description of Artificial Sequence: Synthetic oligonucleotide
auucacaccaauuagaaua

SEQ ID NO: 823746 - RNA, 19 nt, Artificial Sequence
  Description of Artificial Sequence: Synthetic oligonucleotide
aaauguuucugcuauguaa

SEQ ID NO: 823747 - RNA, 19 nt, Artificial Sequence
  Description of Artificial Sequence: Synthetic oligonucleotide
uaacuacacaacuaaacag

SEQ ID NO: 823748 - RNA, 19 nt, Artificial Sequence
  Description of Artificial Sequence: Synthetic oligonucleotide
auaacuacacaacuaaaca

SEQ ID NO: 823749 - RNA, 19 nt, Artificial Sequence
  Description of Artificial Sequence: Synthetic oligonucleotide
uuuugauaacuacacaacu

SEQ ID NO: 823750 - RNA, 19 nt, Artificial Sequence
  Description of Artificial Sequence: Synthetic oligonucleotide
aaaacguccauguuccaug

SEQ ID NO: 823751 - RNA, 19 nt, Artificial Sequence
  Description of Artificial Sequence: Synthetic oligonucleotide
cauuaaaacucucuauugg

SEQ ID NO: 823752 - RNA, 19 nt, Artificial Sequence
  Description of Artificial Sequence: Synthetic oligonucleotide
uaugccacuggaucgagcg

SEQ ID NO: 823753 - RNA, 19 nt, Artificial Sequence
  Description of Artificial Sequence: Synthetic oligonucleotide
guuacuauaguuucucaag

SEQ ID NO: 823754 - RNA, 19 nt, Artificial Sequence
  Description of Artificial Sequence: Synthetic oligonucleotide
ucuuucaacucuaagugga

SEQ ID NO: 823755 - RNA, 19 nt, Artificial Sequence
  Description of Artificial Sequence: Synthetic oligonucleotide
acucgcuggauucagaagg

SEQ ID NO: 823756 - RNA, 19 nt, Artificial Sequence
  Description of Artificial Sequence: Synthetic oligonucleotide
gaaaucagcauucccagug

SEQ ID NO: 823757 - RNA, 19 nt, Artificial Sequence
  Description of Artificial Sequence: Synthetic oligonucleotide
auauugaagaagccuuugc

SEQ ID NO: 823758 - RNA, 19 nt, Artificial Sequence
  Description of Artificial Sequence: Synthetic oligonucleotide
aaacaugccgacuuggaga

SEQ ID NO: 823759 - RNA, 19 nt, Artificial Sequence
  Description of Artificial Sequence: Synthetic oligonucleotide
uugauaacuacacaacuaa

SEQ ID NO: 823760 - RNA, 19 nt, Artificial Sequence
  Description of Artificial Sequence: Synthetic oligonucleotide
aauuccuacauccgagaag

SEQ ID NO: 823761 - RNA, 19 nt, Artificial Sequence
  Description of Artificial Sequence: Synthetic oligonucleotide
aacaugccgacuuggagag

SEQ ID NO: 823762 - RNA, 19 nt, Artificial Sequence
  Description of Artificial Sequence: Synthetic oligonucleotide
aguuuuacgaaauuggcua

SEQ ID NO: 823763 - RNA, 19 nt, Artificial Sequence
  Description of Artificial Sequence: Synthetic oligonucleotide
aaucagaucccauucgaga

SEQ ID NO: 823764 - RNA, 19 nt, Artificial Sequence
  Description of Artificial Sequence: Synthetic oligonucleotide
uugacaauaguuucaagaa

SEQ ID NO: 823765 - RNA, 19 nt, Artificial Sequence
  Description of Artificial Sequence: Synthetic oligonucleotide
uuccuuaguuuucagagca

SEQ ID NO: 823766 - RNA, 19 nt, Artificial Sequence
  Description of Artificial Sequence: Synthetic oligonucleotide
uucccaauagcauaaguga

SEQ ID NO: 823767 - RNA, 19 nt, Artificial Sequence
  Description of Artificial Sequence: Synthetic oligonucleotide
uuaaaacucucuauuggcu

SEQ ID NO: 823768 - RNA, 19 nt, Artificial Sequence
  Description of Artificial Sequence: Synthetic oligonucleotide
gauaacuacacaacuaaac

SEQ ID NO: 823769 - RNA, 19 nt, Artificial Sequence
  Description of Artificial Sequence: Synthetic oligonucleotide
gacuaauguccauuguucg

SEQ ID NO: 823770 - RNA, 19 nt, Artificial Sequence
  Description of Artificial Sequence: Synthetic oligonucleotide
uuuagcaacagcacucaug

SEQ ID NO: 823771 - RNA, 19 nt, Artificial Sequence
  Description of Artificial Sequence: Synthetic oligonucleotide
uuacuauaguuucucaaga

SEQ ID NO: 823772 - RNA, 19 nt, Artificial Sequence
  Description of Artificial Sequence: Synthetic oligonucleotide
uucgauagauuucuuuaag

SEQ ID NO: 823773 - RNA, 19 nt, Artificial Sequence
  Description of Artificial Sequence: Synthetic oligonucleotide
agcacgugcaaauucauug

SEQ ID NO: 823774 - RNA, 19 nt, Artificial Sequence
  Description of Artificial Sequence: Synthetic oligonucleotide
ugauucaucugacaucagc

SEQ ID NO: 823775 - RNA, 19 nt, Artificial Sequence
  Description of Artificial Sequence: Synthetic oligonucleotide
uguuuauaauuccauuaga

SEQ ID NO: 823776 - RNA, 19 nt, Artificial Sequence
  Description of Artificial Sequence: Synthetic oligonucleotide
acauagucaauccggcggc

SEQ ID NO: 823777 - RNA, 19 nt, Artificial Sequence
  Description of Artificial Sequence: Synthetic oligonucleotide
auagguucuagucuguaug

SEQ ID NO: 823778 - RNA, 19 nt, Artificial Sequence
  Description of Artificial Sequence: Synthetic oligonucleotide
uuugauaacuacacaacua

SEQ ID NO: 823779 - RNA, 19 nt, Artificial Sequence
  Description of Artificial Sequence: Synthetic oligonucleotide
gauagauuucuuuaaguaa

SEQ ID NO: 823780 - RNA, 19 nt, Artificial Sequence
  Description of Artificial Sequence: Synthetic oligonucleotide
uauuauauguuguuuucaa

SEQ ID NO: 823781 - RNA, 19 nt, Artificial Sequence
  Description of Artificial Sequence: Synthetic oligonucleotide
aacuacacaacuaaacaga

SEQ ID NO: 823782 - RNA, 19 nt, Artificial Sequence
  Description of Artificial Sequence: Synthetic oligonucleotide
augcaagucugcucaaugc

SEQ ID NO: 823783 - RNA, 19 nt, Artificial Sequence
  Description of Artificial Sequence: Synthetic oligonucleotide
auaagcagagauuccaugu

SEQ ID NO: 823784 - RNA, 19 nt, Artificial Sequence
  Description of Artificial Sequence: Synthetic oligonucleotide
uauguuagaaacugcugcu

SEQ ID NO: 823785 - RNA, 19 nt, Artificial Sequence
  Description of Artificial Sequence: Synthetic oligonucleotide
uguauuauauguuguuuuc

SEQ ID NO: 823786 - RNA, 19 nt, Artificial Sequence
  Description of Artificial Sequence: Synthetic oligonucleotide
uucugcuucaacuacucga

SEQ ID NO: 823787 - RNA, 19 nt, Artificial Sequence
  Description of Artificial Sequence: Synthetic oligonucleotide
acagcacucaugcuggaac

SEQ ID NO: 823788 - RNA, 19 nt, Artificial Sequence
  Description of Artificial Sequence: Synthetic oligonucleotide
uacgaaauuggcuaucuuc

SEQ ID NO: 823789 - RNA, 19 nt, Artificial Sequence
  Description of Artificial Sequence: Synthetic oligonucleotide
aauauuuagguaaggaguu

SEQ ID NO: 823790 - RNA, 19 nt, Artificial Sequence
  Description of Artificial Sequence: Synthetic oligonucleotide
uguucgauagauuucuuua

SEQ ID NO: 823791 - RNA, 19 nt, Artificial Sequence
  Description of Artificial Sequence: Synthetic oligonucleotide
ugucuguuaggaaauauuu

SEQ ID NO: 823792 - RNA, 19 nt, Artificial Sequence
  Description of Artificial Sequence: Synthetic oligonucleotide
uuucuauacuguccaaaug

SEQ ID NO: 823793 - RNA, 19 nt, Artificial Sequence
  Description of Artificial Sequence: Synthetic oligonucleotide
ccaauuagaauacauacac

SEQ ID NO: 823794 - RNA, 19 nt, Artificial Sequence
  Description of Artificial Sequence: Synthetic oligonucleotide
agaacauagucaauccggc

SEQ ID NO: 823795 - RNA, 19 nt, Artificial Sequence
  Description of Artificial Sequence: Synthetic oligonucleotide
uagcauaaguuucuuaaaa

SEQ ID NO: 823796 - RNA, 19 nt, Artificial Sequence
  Description of Artificial Sequence: Synthetic oligonucleotide
acauauugcauuaauacaa

SEQ ID NO: 823797 - RNA, 19 nt, Artificial Sequence
  Description of Artificial Sequence: Synthetic oligonucleotide
gaaacaugccgacuuggag

SEQ ID NO: 823798 - RNA, 19 nt, Artificial Sequence
  Description of Artificial Sequence: Synthetic oligonucleotide
ugcuuuaaguuuuacgaaa

SEQ ID NO: 823799 - RNA, 19 nt, Artificial Sequence
  Description of Artificial Sequence: Synthetic oligonucleotide
uacucgauuuucuucuucc

SEQ ID NO: 823800 - RNA, 19 nt, Artificial Sequence
  Description of Artificial Sequence: Synthetic oligonucleotide
uguaaaauuuggcuuguuu

SEQ ID NO: 823801 - RNA, 19 nt, Artificial Sequence
  Description of Artificial Sequence: Synthetic oligonucleotide
aaagugcuaauguaaucaa

SEQ ID NO: 823802 - RNA, 19 nt, Artificial Sequence
  Description of Artificial Sequence: Synthetic oligonucleotide
uccguuuaacauuccaacc

SEQ ID NO: 823803 - RNA, 19 nt, Artificial Sequence
  Description of Artificial Sequence: Synthetic oligonucleotide
gaccauagguucuagucug

SEQ ID NO: 823804 - RNA, 19 nt, Artificial Sequence
  Description of Artificial Sequence: Synthetic oligonucleotide
gaacauagucaauccggcg

SEQ ID NO: 823805 - RNA, 19 nt, Artificial Sequence
  Description of Artificial Sequence: Synthetic oligonucleotide
uuaauacccauugacaaua

SEQ ID NO: 823806 - RNA, 19 nt, Artificial Sequence
  Description of Artificial Sequence: Synthetic oligonucleotide
aaaguuagggguucuucau

SEQ ID NO: 823807 - RNA, 19 nt, Artificial Sequence
  Description of Artificial Sequence: Synthetic oligonucleotide
uuucucaagaaguccauau

SEQ ID NO: 823808 - RNA, 19 nt, Artificial Sequence
  Description of Artificial Sequence: Synthetic oligonucleotide
uuuaauacccauugacaau

SEQ ID NO: 823809 - RNA, 19 nt, Artificial Sequence
  Description of Artificial Sequence: Synthetic oligonucleotide
ucaagaaguccauauuuaa

SEQ ID NO: 823810 - RNA, 19 nt, Artificial Sequence
  Description of Artificial Sequence: Synthetic oligonucleotide
guaaaauuuggcuuguuua

SEQ ID NO: 823811 - RNA, 19 nt, Artificial Sequence
  Description of Artificial Sequence: Synthetic oligonucleotide
aauguguauuauauguugu

SEQ ID NO: 823812 - RNA, 19 nt, Artificial Sequence
  Description of Artificial Sequence: Synthetic oligonucleotide
uaguaaaaugcaagucugc

SEQ ID NO: 823813 - RNA, 19 nt, Artificial Sequence
  Description of Artificial Sequence: Synthetic oligonucleotide
gcauaagugacucugaaga

SEQ ID NO: 823814 - RNA, 19 nt, Artificial Sequence
  Description of Artificial Sequence: Synthetic oligonucleotide
uuggcuuguuuauaauucc

SEQ ID NO: 823815 - RNA, 19 nt, Artificial Sequence
  Description of Artificial Sequence: Synthetic oligonucleotide
accucggauagugagaaac

SEQ ID NO: 823816 - RNA, 19 nt, Artificial Sequence
  Description of Artificial Sequence: Synthetic oligonucleotide
ucgagaaaggcuuucuuuc

SEQ ID NO: 823817 - RNA, 19 nt, Artificial Sequence
  Description of Artificial Sequence: Synthetic oligonucleotide
ucgauagauuucuuuaagu

SEQ ID NO: 823818 - RNA, 19 nt, Artificial Sequence
  Description of Artificial Sequence: Synthetic oligonucleotide
gcugcuuuaaguuuuacga

SEQ ID NO: 823819 - RNA, 19 nt, Artificial Sequence
  Description of Artificial Sequence: Synthetic oligonucleotide
uuugcaugcuacaaaucuc

SEQ ID NO: 823820 - RNA, 19 nt, Artificial Sequence
  Description of Artificial Sequence: Synthetic oligonucleotide
aguugaagaggugugagca

SEQ ID NO: 823821 - RNA, 19 nt, Artificial Sequence
  Description of Artificial Sequence: Synthetic oligonucleotide
ugacaauaguuucaagaaa

SEQ ID NO: 823822 - RNA, 19 nt, Artificial Sequence
  Description of Artificial Sequence: Synthetic oligonucleotide
uuuccuuaguuuucagagc

SEQ ID NO: 823823 - RNA, 19 nt, Artificial Sequence
  Description of Artificial Sequence: Synthetic oligonucleotide
uucugcuauguaacaaaag

SEQ ID NO: 823824 - RNA, 19 nt, Artificial Sequence
  Description of Artificial Sequence: Synthetic oligonucleotide
gaaauuggcuaucuucuuc

SEQ ID NO: 823825 - RNA, 19 nt, Artificial Sequence
  Description of Artificial Sequence: Synthetic oligonucleotide
ugugauguggaaugagaac

SEQ ID NO: 823826 - RNA, 19 nt, Artificial Sequence
  Description of Artificial Sequence: Synthetic oligonucleotide
ugagaacuauguaaacaac

SEQ ID NO: 823827 - RNA, 19 nt, Artificial Sequence
  Description of Artificial Sequence: Synthetic oligonucleotide
uugcauuaauacaaagaaa

SEQ ID NO: 823828 - RNA, 19 nt, Artificial Sequence
  Description of Artificial Sequence: Synthetic oligonucleotide
uagguucuagucuguaugc

SEQ ID NO: 823829 - RNA, 19 nt, Artificial Sequence
  Description of Artificial Sequence: Synthetic oligonucleotide
agagcgaagagauacucau

SEQ ID NO: 823830 - RNA, 19 nt, Artificial Sequence
  Description of Artificial Sequence: Synthetic oligonucleotide
uacccauugacaauaguuu

SEQ ID NO: 823831 - RNA, 19 nt, Artificial Sequence
  Description of Artificial Sequence: Synthetic oligonucleotide
aucaauccuguccacaccu

SEQ ID NO: 823832 - RNA, 19 nt, Artificial Sequence
  Description of Artificial Sequence: Synthetic oligonucleotide
aguucaaaucuggagcgac

SEQ ID NO: 823833 - RNA, 19 nt, Artificial Sequence
  Description of Artificial Sequence: Synthetic oligonucleotide
aucuggagcgaccauaggu

SEQ ID NO: 823834 - RNA, 19 nt, Artificial Sequence
  Description of Artificial Sequence: Synthetic oligonucleotide
ucggauagugagaaacaug

SEQ ID NO: 823835 - RNA, 19 nt, Artificial Sequence
  Description of Artificial Sequence: Synthetic oligonucleotide
uguggaaugagaacagcuu

SEQ ID NO: 823836 - RNA, 19 nt, Artificial Sequence
  Description of Artificial Sequence: Synthetic oligonucleotide
uuucugcuauguaacaaaa

SEQ ID NO: 823837 - RNA, 19 nt, Artificial Sequence
  Description of Artificial Sequence: Synthetic oligonucleotide
ugucccacgccuuuuaaaa

SEQ ID NO: 823838 - RNA, 19 nt, Artificial Sequence
  Description of Artificial Sequence: Synthetic oligonucleotide
agcgaagagauacucauua

SEQ ID NO: 823839 - RNA, 19 nt, Artificial Sequence
  Description of Artificial Sequence: Synthetic oligonucleotide
ugaguugaagaggugugag

SEQ ID NO: 823840 - RNA, 19 nt, Artificial Sequence
  Description of Artificial Sequence: Synthetic oligonucleotide
ucccauucgagaaaggcuu

SEQ ID NO: 823841 - RNA, 19 nt, Artificial Sequence
  Description of Artificial Sequence: Synthetic oligonucleotide
uuuacgaaauuggcuaucu

SEQ ID NO: 823842 - RNA, 19 nt, Artificial Sequence
  Description of Artificial Sequence: Synthetic oligonucleotide
uaagcagagauuccauguc

SEQ ID NO: 823843 - RNA, 19 nt, Artificial Sequence
  Description of Artificial Sequence: Synthetic oligonucleotide
ugauaacuacacaacuaaa

SEQ ID NO: 823844 - RNA, 19 nt, Artificial Sequence
  Description of Artificial Sequence: Synthetic oligonucleotide
uacuauaguuucucaagaa

SEQ ID NO: 823845 - RNA, 19 nt, Artificial Sequence
  Description of Artificial Sequence: Synthetic oligonucleotide
uaauacccauugacaauag

SEQ ID NO: 823846 - RNA, 19 nt, Artificial Sequence
  Description of Artificial Sequence: Synthetic oligonucleotide
gauauugaagaagccuuug

SEQ ID NO: 823847 - RNA, 19 nt, Artificial Sequence
  Description of Artificial Sequence: Synthetic oligonucleotide
auuauauguuguuuucaaa

SEQ ID NO: 823848 - RNA, 19 nt, Artificial Sequence
  Description of Artificial Sequence: Synthetic oligonucleotide
aauacccauugacaauagu

SEQ ID NO: 823849 - RNA, 19 nt, Artificial Sequence
  Description of Artificial Sequence: Synthetic oligonucleotide
guaguucucaucaauccug

SEQ ID NO: 823850 - RNA, 19 nt, Artificial Sequence
  Description of Artificial Sequence: Synthetic oligonucleotide
auagugagaaacaugccga

SEQ ID NO: 823851 - RNA, 19 nt, Artificial Sequence
  Description of Artificial Sequence: Synthetic oligonucleotide
ucccacgccuuuuaaaaug

SEQ ID NO: 823852 - RNA, 19 nt, Artificial Sequence
  Description of Artificial Sequence: Synthetic oligonucleotide
uucaaaucuggagcgacca

SEQ ID NO: 823853 - RNA, 19 nt, Artificial Sequence
  Description of Artificial Sequence: Synthetic oligonucleotide
aaaauguuucugcuaugua

SEQ ID NO: 823854 - RNA, 19 nt, Artificial Sequence
  Description of Artificial Sequence: Synthetic oligonucleotide
cauaagcagagauuccaug

SEQ ID NO: 823855 - RNA, 19 nt, Artificial Sequence
  Description of Artificial Sequence: Synthetic oligonucleotide
cacuggaucgagcggaugg

SEQ ID NO: 823856 - RNA, 19 nt, Artificial Sequence
  Description of Artificial Sequence: Synthetic oligonucleotide
ucuggagcgaccauagguu

SEQ ID NO: 823857 - RNA, 19 nt, Artificial Sequence
  Description of Artificial Sequence: Synthetic oligonucleotide
acagccuagcauaaguuuc

SEQ ID NO: 823858 - RNA, 19 nt, Artificial Sequence
  Description of Artificial Sequence: Synthetic oligonucleotide
uggaucgagcggaugguag

SEQ ID NO: 823859 - RNA, 19 nt, Artificial Sequence
  Description of Artificial Sequence: Synthetic oligonucleotide
aagucugcucaaugcuggg

SEQ ID NO: 823860 - RNA, 19 nt, Artificial Sequence
  Description of Artificial Sequence: Synthetic oligonucleotide
guuugcaugcuacaaaucu

SEQ ID NO: 823861 - RNA, 19 nt, Artificial Sequence
  Description of Artificial Sequence: Synthetic oligonucleotide
acaagagggcgguaucuuc

SEQ ID NO: 823862 - RNA, 19 nt, Artificial Sequence
  Description of Artificial Sequence: Synthetic oligonucleotide
uaaguaacaagagggcggu

SEQ ID NO: 823863 - RNA, 19 nt, Artificial Sequence
  Description of Artificial Sequence: Synthetic oligonucleotide
uggcuuguuuauaauucca

SEQ ID NO: 823864 - RNA, 19 nt, Artificial Sequence
  Description of Artificial Sequence: Synthetic oligonucleotide
aagagggcgguaucuucag

SEQ ID NO: 823865 - RNA, 19 nt, Artificial Sequence
  Description of Artificial Sequence: Synthetic oligonucleotide
acgaaauuggcuaucuucu

SEQ ID NO: 823866 - RNA, 19 nt, Artificial Sequence
  Description of Artificial Sequence: Synthetic oligonucleotide
cuuucaacucuaaguggag

SEQ ID NO: 823867 - RNA, 19 nt, Artificial Sequence
  Description of Artificial Sequence: Synthetic oligonucleotide
gucccuuugucacagcagc

SEQ ID NO: 823868 - RNA, 19 nt, Artificial Sequence
  Description of Artificial Sequence: Synthetic oligonucleotide
cauguuacuauaguuucuc

SEQ ID NO: 823869 - RNA, 19 nt, Artificial Sequence
  Description of Artificial Sequence: Synthetic oligonucleotide
ugaagagcgaagagauacu

SEQ ID NO: 823870 - RNA, 19 nt, Artificial Sequence
  Description of Artificial Sequence: Synthetic oligonucleotide
cuuuccuaaguaauccuca

SEQ ID NO: 823871 - RNA, 19 nt, Artificial Sequence
  Description of Artificial Sequence: Synthetic oligonucleotide
acauccgagaagccuaugu

SEQ ID NO: 823872 - RNA, 19 nt, Artificial Sequence
  Description of Artificial Sequence: Synthetic oligonucleotide
ugagaacagcuuuuaaguu

SEQ ID NO: 823873 - RNA, 19 nt, Artificial Sequence
  Description of Artificial Sequence: Synthetic oligonucleotide
caaaguuagggguucuuca

SEQ ID NO: 823874 - RNA, 19 nt, Artificial Sequence
  Description of Artificial Sequence: Synthetic oligonucleotide
ucuauuggcuuuucuugaa

SEQ ID NO: 823875 - RNA, 19 nt, Artificial Sequence
  Description of Artificial Sequence: Synthetic oligonucleotide
aguuagggguucuucauuu

SEQ ID NO: 823876 - RNA, 19 nt, Artificial Sequence
  Description of Artificial Sequence: Synthetic oligonucleotide
caugccgacuuggagagcc

SEQ ID NO: 823877 - RNA, 19 nt, Artificial Sequence
  Description of Artificial Sequence: Synthetic oligonucleotide
uggaaugagaacagcuuuu

SEQ ID NO: 823878 - RNA, 19 nt, Artificial Sequence
  Description of Artificial Sequence: Synthetic oligonucleotide
ucaacucuaaguggagucu

SEQ ID NO: 823879 - RNA, 19 nt, Artificial Sequence
  Description of Artificial Sequence: Synthetic oligonucleotide
agugucuuucugucccacg

SEQ ID NO: 823880 - RNA, 19 nt, Artificial Sequence
  Description of Artificial Sequence: Synthetic oligonucleotide
caacuaaacagaucugaga

SEQ ID NO: 823881 - RNA, 19 nt, Artificial Sequence
  Description of Artificial Sequence: Synthetic oligonucleotide
accaauuagaauacauaca

SEQ ID NO: 823882 - RNA, 19 nt, Artificial Sequence
  Description of Artificial Sequence: Synthetic oligonucleotide
uagcauaagugacucugaa

SEQ ID NO: 823883 - RNA, 19 nt, Artificial Sequence
  Description of Artificial Sequence: Synthetic oligonucleotide
cauuagaaacagccuucgg

SEQ ID NO: 823884 - RNA, 19 nt, Artificial Sequence
  Description of Artificial Sequence: Synthetic oligonucleotide
uccuaguaaaaugcaaguc

SEQ ID NO: 823885 - RNA, 19 nt, Artificial Sequence
  Description of Artificial Sequence: Synthetic oligonucleotide
ucagaucccauucgagaaa

SEQ ID NO: 823886 - RNA, 19 nt, Artificial Sequence
  Description of Artificial Sequence: Synthetic oligonucleotide
guaauugaguugaagaggu

SEQ ID NO: 823887 - RNA, 19 nt, Artificial Sequence
  Description of Artificial Sequence: Synthetic oligonucleotide
auaacauauugcauuaaua

SEQ ID NO: 823888 - RNA, 19 nt, Artificial Sequence
  Description of Artificial Sequence: Synthetic oligonucleotide
auacccauugacaauaguu

SEQ ID NO: 823889 - RNA, 19 nt, Artificial Sequence
  Description of Artificial Sequence: Synthetic oligonucleotide
cauugagugucugccaagc

SEQ ID NO: 823890 - RNA, 19 nt, Artificial Sequence
  Description of Artificial Sequence: Synthetic oligonucleotide
aaagaaagaaugacacgua

SEQ ID NO: 823891 - RNA, 19 nt, Artificial Sequence
  Description of Artificial Sequence: Synthetic oligonucleotide
uucccagugucuguuagga

SEQ ID NO: 823892 - RNA, 19 nt, Artificial Sequence
  Description of Artificial Sequence: Synthetic oligonucleotide
agauacucauuaaaacucu

SEQ ID NO: 823893 - RNA, 19 nt, Artificial Sequence
  Description of Artificial Sequence: Synthetic oligonucleotide
aaguuagggguucuucauu

SEQ ID NO: 823894 - RNA, 19 nt, Artificial Sequence
  Description of Artificial Sequence: Synthetic oligonucleotide
aguaacaagagggcgguau

SEQ ID NO: 823895 - RNA, 19 nt, Artificial Sequence
  Description of Artificial Sequence: Synthetic oligonucleotide
aaaaugcaagucugcucaa

SEQ ID NO: 823896 - RNA, 19 nt, Artificial Sequence
  Description of Artificial Sequence: Synthetic oligonucleotide
cugcuauguaacaaaagaa

SEQ ID NO: 823897 - RNA, 19 nt, Artificial Sequence
  Description of Artificial Sequence: Synthetic oligonucleotide
aacuuccuaguaaaaugca

SEQ ID NO: 823898 - RNA, 19 nt, Artificial Sequence
  Description of Artificial Sequence: Synthetic oligonucleotide
acgguaguucucaucaauc

SEQ ID NO: 823899 - RNA, 19 nt, Artificial Sequence
  Description of Artificial Sequence: Synthetic oligonucleotide
ucgagcggaugguagauau

SEQ ID NO: 823900 - RNA, 19 nt, Artificial Sequence
  Description of Artificial Sequence: Synthetic oligonucleotide
uuccuaaguaauccucauc

SEQ ID NO: 823901 - RNA, 19 nt, Artificial Sequence
  Description of Artificial Sequence: Synthetic oligonucleotide
gaauugauugaccacuuuu

SEQ ID NO: 823902 - RNA, 19 nt, Artificial Sequence
  Description of Artificial Sequence: Synthetic oligonucleotide
auacucauuaaaacucucu

SEQ ID NO: 823903 - RNA, 19 nt, Artificial Sequence
  Description of Artificial Sequence: Synthetic oligonucleotide
guagauauugaagaagccu

SEQ ID NO: 823904 - RNA, 19 nt, Artificial Sequence
  Description of Artificial Sequence: Synthetic oligonucleotide
ccauguuacuguuuuauuc

SEQ ID NO: 823905 - RNA, 19 nt, Artificial Sequence
  Description of Artificial Sequence: Synthetic oligonucleotide
uugaguugaagagguguga

SEQ ID NO: 823906 - RNA, 19 nt, Artificial Sequence
  Description of Artificial Sequence: Synthetic oligonucleotide
uuguucgauagauuucuuu

SEQ ID NO: 823907 - RNA, 19 nt, Artificial Sequence
  Description of Artificial Sequence: Synthetic oligonucleotide
ugaagaggugugagcacgu

SEQ ID NO: 823908 - RNA, 19 nt, Artificial Sequence
  Description of Artificial Sequence: Synthetic oligonucleotide
ugcuucaaaucagauccca

SEQ ID NO: 823909 - RNA, 19 nt, Artificial Sequence
  Description of Artificial Sequence: Synthetic oligonucleotide
cacguaggccccaagugac

SEQ ID NO: 823910 - RNA, 19 nt, Artificial Sequence
  Description of Artificial Sequence: Synthetic oligonucleotide
uccuacauccgagaagccu

SEQ ID NO: 823911 - RNA, 19 nt, Artificial Sequence
  Description of Artificial Sequence: Synthetic oligonucleotide
agucaauccggcggccucc

SEQ ID NO: 823912 - RNA, 19 nt, Artificial Sequence
  Description of Artificial Sequence: Synthetic oligonucleotide
uaacaagagggcgguaucu

SEQ ID NO: 823913 - RNA, 19 nt, Artificial Sequence
  Description of Artificial Sequence: Synthetic oligonucleotide
acgccuuuuaaaaugaauu

SEQ ID NO: 823914 - RNA, 19 nt, Artificial Sequence
  Description of Artificial Sequence: Synthetic oligonucleotide
guucgauagauuucuuuaa

SEQ ID NO: 823915 - RNA, 19 nt, Artificial Sequence
  Description of Artificial Sequence: Synthetic oligonucleotide
cauucccagugucuguuag

SEQ ID NO: 823916 - RNA, 19 nt, Artificial Sequence
  Description of Artificial Sequence: Synthetic oligonucleotide
gccuuugugauguggaaug

SEQ ID NO: 823917 - RNA, 19 nt, Artificial Sequence
  Description of Artificial Sequence: Synthetic oligonucleotide
uuuuacgaaauuggcuauc

SEQ ID NO: 823918 - RNA, 19 nt, Artificial Sequence
  Description of Artificial Sequence: Synthetic oligonucleotide
uuuagguaaggaguuuaua

SEQ ID NO: 823919 - RNA, 19 nt, Artificial Sequence
  Description of Artificial Sequence: Synthetic oligonucleotide
aacaucaaggucacaugau

SEQ ID NO: 823920 - RNA, 19 nt, Artificial Sequence
  Description of Artificial Sequence: Synthetic oligonucleotide
aagagcgaagagauacuca

SEQ ID NO: 823921 - RNA, 19 nt, Artificial Sequence
  Description of Artificial Sequence: Synthetic oligonucleotide
cuacacaacuaaacagauc

SEQ ID NO: 823922 - RNA, 19 nt, Artificial Sequence
  Description of Artificial Sequence: Synthetic oligonucleotide
uguccaaaugugguacuga

SEQ ID NO: 823923 - RNA, 19 nt, Artificial Sequence
  Description of Artificial Sequence: Synthetic oligonucleotide
auccgagaagccuauguua

SEQ ID NO: 823924 - RNA, 19 nt, Artificial Sequence
  Description of Artificial Sequence: Synthetic oligonucleotide
cuuggagagcccaaggcaa

SEQ ID NO: 823925 - RNA, 19 nt, Artificial Sequence
  Description of Artificial Sequence: Synthetic oligonucleotide
caucaauccuguccacacc

SEQ ID NO: 823926 - RNA, 19 nt, Artificial Sequence
  Description of Artificial Sequence: Synthetic oligonucleotide
auccauguuacuguuuuau

SEQ ID NO: 823927 - RNA, 19 nt, Artificial Sequence
  Description of Artificial Sequence: Synthetic oligonucleotide
ugaauugauugaccacuuu

SEQ ID NO: 823928 - RNA, 19 nt, Artificial Sequence
  Description of Artificial Sequence: Synthetic oligonucleotide
acuacacaacuaaacagau

SEQ ID NO: 823929 - RNA, 19 nt, Artificial Sequence
  Description of Artificial Sequence: Synthetic oligonucleotide
aguuugcaugcuacaaauc

SEQ ID NO: 823930 - RNA, 19 nt, Artificial Sequence
  Description of Artificial Sequence: Synthetic oligonucleotide
agagcagucuucauaaauu

SEQ ID NO: 823931 - RNA, 19 nt, Artificial Sequence
  Description of Artificial Sequence: Synthetic oligonucleotide
agggcgaucgccaccacag

SEQ ID NO: 823932 - RNA, 19 nt, Artificial Sequence
  Description of Artificial Sequence: Synthetic oligonucleotide
cugauguuacagagcaguc

SEQ ID NO: 823933 - RNA, 19 nt, Artificial Sequence
  Description of Artificial Sequence: Synthetic oligonucleotide
uccuuaguuuucagagcac

SEQ ID NO: 823934 - RNA, 19 nt, Artificial Sequence
  Description of Artificial Sequence: Synthetic oligonucleotide
uggagcgaccauagguucu

SEQ ID NO: 823935 - RNA, 19 nt, Artificial Sequence
  Description of Artificial Sequence: Synthetic oligonucleotide
guaacaagagggcgguauc

SEQ ID NO: 823936 - RNA, 19 nt, Artificial Sequence
  Description of Artificial Sequence: Synthetic oligonucleotide
aaguucaaaucuggagcga

SEQ ID NO: 823937 - RNA, 19 nt, Artificial Sequence
  Description of Artificial Sequence: Synthetic oligonucleotide
cuagcauaaguuucuuaaa

SEQ ID NO: 823938 - RNA, 19 nt, Artificial Sequence
  Description of Artificial Sequence: Synthetic oligonucleotide
uccaaaugugguacugauu

SEQ ID NO: 823939 - RNA, 19 nt, Artificial Sequence
  Description of Artificial Sequence: Synthetic oligonucleotide
auacuguccaaauguggua

SEQ ID NO: 823940 - RNA, 19 nt, Artificial Sequence
  Description of Artificial Sequence: Synthetic oligonucleotide
agugacucugaagagcgaa

SEQ ID NO: 823941 - RNA, 19 nt, Artificial Sequence
  Description of Artificial Sequence: Synthetic oligonucleotide
uccauguuacuguuuuauu

SEQ ID NO: 823942 - RNA, 19 nt, Artificial Sequence
  Description of Artificial Sequence: Synthetic oligonucleotide
aaaugcaagucugcucaau

SEQ ID NO: 823943 - RNA, 19 nt, Artificial Sequence
  Description of Artificial Sequence: Synthetic oligonucleotide
caagagggcgguaucuuca

SEQ ID NO: 823944 - RNA, 19 nt, Artificial Sequence
  Description of Artificial Sequence: Synthetic oligonucleotide
ggagcaaagggcgaucgcc

SEQ ID NO: 823945 - RNA, 19 nt, Artificial Sequence
  Description of Artificial Sequence: Synthetic oligonucleotide
aacucuaaguggagucucu

SEQ ID NO: 823946 - RNA, 19 nt, Artificial Sequence
  Description of Artificial Sequence: Synthetic oligonucleotide
auucgagaaaggcuuucuu

SEQ ID NO: 823947 - RNA, 19 nt, Artificial Sequence
  Description of Artificial Sequence: Synthetic oligonucleotide
aagccuuugcagguaggga

SEQ ID NO: 823948 - RNA, 19 nt, Artificial Sequence
  Description of Artificial Sequence: Synthetic oligonucleotide
aagcgugugccaccacgca

SEQ ID NO: 823949 - RNA, 19 nt, Artificial Sequence
  Description of Artificial Sequence: Synthetic oligonucleotide
aucgccaccacagagccuu

SEQ ID NO: 823950 - RNA, 19 nt, Artificial Sequence
  Description of Artificial Sequence: Synthetic oligonucleotide
aaagggcgaucgccaccac

SEQ ID NO: 823951 - RNA, 19 nt, Artificial Sequence
  Description of Artificial Sequence: Synthetic oligonucleotide
acaccaauuagaauacaua

SEQ ID NO: 823952 - RNA, 19 nt, Artificial Sequence
  Description of Artificial Sequence: Synthetic oligonucleotide
cuuuuagcaacagcacuca

SEQ ID NO: 823953 - RNA, 19 nt, Artificial Sequence
  Description of Artificial Sequence: Synthetic oligonucleotide
gaaacagccuucggacccc

SEQ ID NO: 823954 - RNA, 19 nt, Artificial Sequence
  Description of Artificial Sequence: Synthetic oligonucleotide
uguaugccacuggaucgag

SEQ ID NO: 823955 - RNA, 19 nt, Artificial Sequence
  Description of Artificial Sequence: Synthetic oligonucleotide
gucacaugauucaucugac

SEQ ID NO: 823956 - RNA, 19 nt, Artificial Sequence
  Description of Artificial Sequence: Synthetic oligonucleotide
cugcuuuaaguuuuacgaa

SEQ ID NO: 823957 - RNA, 19 nt, Artificial Sequence
  Description of Artificial Sequence: Synthetic oligonucleotide
uuacgaaauuggcuaucuu

SEQ ID NO: 823958 - RNA, 19 nt, Artificial Sequence
  Description of Artificial Sequence: Synthetic oligonucleotide
uggaaaguucuggacuuuc

SEQ ID NO: 823959 - RNA, 19 nt, Artificial Sequence
  Description of Artificial Sequence: Synthetic oligonucleotide
ugauaaagcccugcuucaa

SEQ ID NO: 823960 - RNA, 19 nt, Artificial Sequence
  Description of Artificial Sequence: Synthetic oligonucleotide
ucaauccuguccacaccuc

SEQ ID NO: 823961 - RNA, 19 nt, Artificial Sequence
  Description of Artificial Sequence: Synthetic oligonucleotide
gagaagccuauguuagaaa

SEQ ID NO: 823962 - RNA, 19 nt, Artificial Sequence
  Description of Artificial Sequence: Synthetic oligonucleotide
gcgaccauagguucuaguc

SEQ ID NO: 823963 - RNA, 19 nt, Artificial Sequence
  Description of Artificial Sequence: Synthetic oligonucleotide
uagucaauccggcggccuc

SEQ ID NO: 823964 - RNA, 19 nt, Artificial Sequence
  Description of Artificial Sequence: Synthetic oligonucleotide
cuggagcgaccauagguuc

SEQ ID NO: 823965 - RNA, 19 nt, Artificial Sequence
  Description of Artificial Sequence: Synthetic oligonucleotide
auagcauaagugacucuga

SEQ ID NO: 823966 - RNA, 19 nt, Artificial Sequence
  Description of Artificial Sequence: Synthetic oligonucleotide
guccacaccucggauagug

SEQ ID NO: 823967 - RNA, 19 nt, Artificial Sequence
  Description of Artificial Sequence: Synthetic oligonucleotide
agugucuguuaggaaauau

SEQ ID NO: 823968 - RNA, 19 nt, Artificial Sequence
  Description of Artificial Sequence: Synthetic oligonucleotide
augccacuggaucgagcgg

SEQ ID NO: 823969 - RNA, 19 nt, Artificial Sequence
  Description of Artificial Sequence: Synthetic oligonucleotide
uuccaggguuccaugcaaa

SEQ ID NO: 823970 - RNA, 19 nt, Artificial Sequence
  Description of Artificial Sequence: Synthetic oligonucleotide
acucucuauuggcuuuucu

SEQ ID NO: 823971 - RNA, 19 nt, Artificial Sequence
  Description of Artificial Sequence: Synthetic oligonucleotide
ugucugccaagcacuuuuc

SEQ ID NO: 823972 - RNA, 19 nt, Artificial Sequence
  Description of Artificial Sequence: Synthetic oligonucleotide
cuucaacuacucgauuuuc

SEQ ID NO: 823973 - RNA, 19 nt, Artificial Sequence
  Description of Artificial Sequence: Synthetic oligonucleotide
agggagacgguaguucuca

SEQ ID NO: 823974 - RNA, 19 nt, Artificial Sequence
  Description of Artificial Sequence: Synthetic oligonucleotide
agauuccauguccaucuuu

SEQ ID NO: 823975 - RNA, 19 nt, Artificial Sequence
  Description of Artificial Sequence: Synthetic oligonucleotide
ugccuuugugauguggaau

SEQ ID NO: 823976 - RNA, 19 nt, Artificial Sequence
  Description of Artificial Sequence: Synthetic oligonucleotide
agauauugaagaagccuuu

SEQ ID NO: 823977 - RNA, 19 nt, Artificial Sequence
  Description of Artificial Sequence: Synthetic oligonucleotide
agcuugaaaagagcaucca

SEQ ID NO: 823978 - RNA, 19 nt, Artificial Sequence
  Description of Artificial Sequence: Synthetic oligonucleotide
caacucuaaguggagucuc

SEQ ID NO: 823979 - RNA, 19 nt, Artificial Sequence
  Description of Artificial Sequence: Synthetic oligonucleotide
ccuuuccuaaguaauccuc

SEQ ID NO: 823980 - RNA, 19 nt, Artificial Sequence
  Description of Artificial Sequence: Synthetic oligonucleotide
uagggagacgguaguucuc

SEQ ID NO: 823981 - RNA, 19 nt, Artificial Sequence
  Description of Artificial Sequence: Synthetic oligonucleotide
guagggagacgguaguucu

SEQ ID NO: 823982 - RNA, 19 nt, Artificial Sequence
  Description of Artificial Sequence: Synthetic oligonucleotide
gaagaggugugagcacgug

SEQ ID NO: 823983 - RNA, 19 nt, Artificial Sequence
  Description of Artificial Sequence: Synthetic oligonucleotide
accacgcacagccuagcau

SEQ ID NO: 823984 - RNA, 19 nt, Artificial Sequence
  Description of Artificial Sequence: Synthetic oligonucleotide
aacagcacucaugcuggaa

SEQ ID NO: 823985 - RNA, 19 nt, Artificial Sequence
  Description of Artificial Sequence: Synthetic oligonucleotide
aaugacacguaggccccaa

SEQ ID NO: 823986 - RNA, 19 nt, Artificial Sequence
  Description of Artificial Sequence: Synthetic oligonucleotide
auauuuagguaaggaguuu

SEQ ID NO: 823987 - RNA, 19 nt, Artificial Sequence
  Description of Artificial Sequence: Synthetic oligonucleotide
cggaugguagauauugaag

SEQ ID NO: 823988 - RNA, 19 nt, Artificial Sequence
  Description of Artificial Sequence: Synthetic oligonucleotide
acauaagcagagauuccau

SEQ ID NO: 823989 - RNA, 19 nt, Artificial Sequence
  Description of Artificial Sequence: Synthetic oligonucleotide
ggaccccggagacuuagag

SEQ ID NO: 823990 - RNA, 19 nt, Artificial Sequence
  Description of Artificial Sequence: Synthetic oligonucleotide
cuguccaaaugugguacug

SEQ ID NO: 823991 - RNA, 19 nt, Artificial Sequence
  Description of Artificial Sequence: Synthetic oligonucleotide
agcgaccauagguucuagu

SEQ ID NO: 823992 - RNA, 19 nt, Artificial Sequence
  Description of Artificial Sequence: Synthetic oligonucleotide
gagggcgguaucuucagau

SEQ ID NO: 823993 - RNA, 19 nt, Artificial Sequence
  Description of Artificial Sequence: Synthetic oligonucleotide
gguaaggaguuuauaguaa

SEQ ID NO: 823994 - RNA, 19 nt, Artificial Sequence
  Description of Artificial Sequence: Synthetic oligonucleotide
auagucaauccggcggccu

SEQ ID NO: 823995 - RNA, 19 nt, Artificial Sequence
  Description of Artificial Sequence: Synthetic oligonucleotide
guuuuacgaaauuggcuau

SEQ ID NO: 823996 - RNA, 19 nt, Artificial Sequence
  Description of Artificial Sequence: Synthetic oligonucleotide
gucuguuaggaaauauuua

SEQ ID NO: 823997 - RNA, 19 nt, Artificial Sequence
  Description of Artificial Sequence: Synthetic oligonucleotide
gacgguaguucucaucaau

SEQ ID NO: 823998 - RNA, 19 nt, Artificial Sequence
  Description of Artificial Sequence: Synthetic oligonucleotide
augacacguaggccccaag

SEQ ID NO: 823999 - RNA, 19 nt, Artificial Sequence
  Description of Artificial Sequence: Synthetic oligonucleotide
ccaaaugugguacugauuu

SEQ ID NO: 824000 - RNA, 19 nt, Artificial Sequence
  Description of Artificial Sequence: Synthetic oligonucleotide
ccacaccucggauagugag

SEQ ID NO: 824001 - RNA, 19 nt, Artificial Sequence
  Description of Artificial Sequence: Synthetic oligonucleotide
acuacucgauuuucuucuu

SEQ ID NO: 824002 - RNA, 19 nt, Artificial Sequence
  Description of Artificial Sequence: Synthetic oligonucleotide
gggcgguaucuucagauuc

SEQ ID NO: 824003 - RNA, 19 nt, Artificial Sequence
  Description of Artificial Sequence: Synthetic oligonucleotide
agccuucggaccccggaga

SEQ ID NO: 824004 - RNA, 19 nt, Artificial Sequence
  Description of Artificial Sequence: Synthetic oligonucleotide
ggauagugagaaacaugcc

SEQ ID NO: 824005 - RNA, 19 nt, Artificial Sequence
  Description of Artificial Sequence: Synthetic oligonucleotide
caaaucuggagcgaccaua

SEQ ID NO: 824006 - RNA, 19 nt, Artificial Sequence
  Description of Artificial Sequence: Synthetic oligonucleotide
ggcgguaucuucagauucc

SEQ ID NO: 824007 - RNA, 19 nt, Artificial Sequence
  Description of Artificial Sequence: Synthetic oligonucleotide
gcacgugcaaauucauuga

SEQ ID NO: 824008 - RNA, 19 nt, Artificial Sequence
  Description of Artificial Sequence: Synthetic oligonucleotide
gguagggagacgguaguuc

SEQ ID NO: 824009 - RNA, 19 nt, Artificial Sequence
  Description of Artificial Sequence: Synthetic oligonucleotide
gagcugauaaagcccugcu

SEQ ID NO: 824010 - RNA, 19 nt, Artificial Sequence
  Description of Artificial Sequence: Synthetic oligonucleotide
caagggguauccccaucuc

SEQ ID NO: 824011 - RNA, 19 nt, Artificial Sequence
  Description of Artificial Sequence: Synthetic oligonucleotide
ggguuccaugcaaaguuag

SEQ ID NO: 824012 - RNA, 19 nt, Artificial Sequence
  Description of Artificial Sequence: Synthetic oligonucleotide
cccauugacaauaguuuca

SEQ ID NO: 824013 - RNA, 19 nt, Artificial Sequence
  Description of Artificial Sequence: Synthetic oligonucleotide
cccagugucuguuaggaaa

SEQ ID NO: 824014 - RNA, 19 nt, Artificial Sequence
  Description of Artificial Sequence: Synthetic oligonucleotide
agggcgguaucuucagauu

SEQ ID NO: 824015 - RNA, 19 nt, Artificial Sequence
  Description of Artificial Sequence: Synthetic oligonucleotide
cgauagauuucuuuaagua

SEQ ID NO: 824016 - RNA, 19 nt, Artificial Sequence
  Description of Artificial Sequence: Synthetic oligonucleotide
caggguuccaugcaaaguu

SEQ ID NO: 824017 - RNA, 19 nt, Artificial Sequence
  Description of Artificial Sequence: Synthetic oligonucleotide
agacgguaguucucaucaa

SEQ ID NO: 824018 - RNA, 19 nt, Artificial Sequence
  Description of Artificial Sequence: Synthetic oligonucleotide
agagggcgguaucuucaga

SEQ ID NO: 824019 - RNA, 19 nt, Artificial Sequence
  Description of Artificial Sequence: Synthetic oligonucleotide
ggaucgagcggaugguaga

SEQ ID NO: 824020 - RNA, 19 nt, Artificial Sequence
  Description of Artificial Sequence: Synthetic oligonucleotide
ucccagugucuguuaggaa

SEQ ID NO: 824021 - RNA, 19 nt, Artificial Sequence
  Description of Artificial Sequence: Synthetic oligonucleotide
gucaauccggcggccuccg

SEQ ID NO: 824022 - RNA, 19 nt, Artificial Sequence
  Description of Artificial Sequence: Synthetic oligonucleotide
gcggaugguagauauugaa

SEQ ID NO: 824023 - RNA, 19 nt, Artificial Sequence
  Description of Artificial Sequence: Synthetic oligonucleotide
cuguaugccacuggaucga

SEQ ID NO: 824024 - RNA, 19 nt, Artificial Sequence
  Description of Artificial Sequence: Synthetic oligonucleotide
ggagacgguaguucucauc

SEQ ID NO: 824025 - RNA, 19 nt, Artificial Sequence
  Description of Artificial Sequence: Synthetic oligonucleotide
ccuacauccgagaagccua

SEQ ID NO: 824026 - RNA, 19 nt, Artificial Sequence
  Description of Artificial Sequence: Synthetic oligonucleotide
cgaucgccaccacagagcc

SEQ ID NO: 824027 - RNA, 19 nt, Artificial Sequence
  Description of Artificial Sequence: Synthetic oligonucleotide
gcaaagggcgaucgccacc

SEQ ID NO: 824028 - RNA, 19 nt, Artificial Sequence
  Description of Artificial Sequence: Synthetic oligonucleotide
acaugccgacuuggagagc

SEQ ID NO: 824029 - RNA, 19 nt, Artificial Sequence
  Description of Artificial Sequence: Synthetic oligonucleotide
ggaaaguucuggacuuuca

SEQ ID NO: 824030 - RNA, 19 nt, Artificial Sequence
  Description of Artificial Sequence: Synthetic oligonucleotide
auguuccaugagaacuaug

SEQ ID NO: 824031 - RNA, 19 nt, Artificial Sequence
  Description of Artificial Sequence: Synthetic oligonucleotide
uacauccgagaagccuaug

SEQ ID NO: 824032 - RNA, 19 nt, Artificial Sequence
  Description of Artificial Sequence: Synthetic oligonucleotide
gaggugugagcacgugcaa

SEQ ID NO: 824033 - RNA, 19 nt, Artificial Sequence
  Description of Artificial Sequence: Synthetic oligonucleotide
guaugccacuggaucgagc

SEQ ID NO: 824034 - RNA, 19 nt, Artificial Sequence
  Description of Artificial Sequence: Synthetic oligonucleotide
agcggaugguagauauuga

SEQ ID NO: 824035 - RNA, 19 nt, Artificial Sequence
  Description of Artificial Sequence: Synthetic oligonucleotide
acucuaaguggagucucuu

SEQ ID NO: 824036 - RNA, 19 nt, Artificial Sequence
  Description of Artificial Sequence: Synthetic oligonucleotide
cagccuagcauaaguuucu

SEQ ID NO: 824037 - RNA, 19 nt, Artificial Sequence
  Description of Artificial Sequence: Synthetic oligonucleotide
agucuguaugccacuggau

SEQ ID NO: 824038 - RNA, 19 nt, Artificial Sequence
  Description of Artificial Sequence: Synthetic oligonucleotide
ccguuuaacauuccaaccu

SEQ ID NO: 824039 - RNA, 19 nt, Artificial Sequence
  Description of Artificial Sequence: Synthetic oligonucleotide
ggugugagcacgugcaaau

SEQ ID NO: 824040 - RNA, 19 nt, Artificial Sequence
  Description of Artificial Sequence: Synthetic oligonucleotide
gacaucagcuuugauucuu

SEQ ID NO: 824041 - RNA, 19 nt, Artificial Sequence
  Description of Artificial Sequence: Synthetic oligonucleotide
gcgaucgccaccacagagc

SEQ ID NO: 824042 - RNA, 19 nt, Artificial Sequence
  Description of Artificial Sequence: Synthetic oligonucleotide
cagugucuuucugucccac

SEQ ID NO: 824043 - RNA, 19 nt, Artificial Sequence
  Description of Artificial Sequence: Synthetic oligonucleotide
cucucuucauuaagacaua

SEQ ID NO: 824044 - RNA, 19 nt, Artificial Sequence
  Description of Artificial Sequence: Synthetic oligonucleotide
gcauccauguuacuguuuu

SEQ ID NO: 824045 - RNA, 19 nt, Artificial Sequence
  Description of Artificial Sequence: Synthetic oligonucleotide
gagcgaccauagguucuag

SEQ ID NO: 824046 - RNA, 19 nt, Artificial Sequence
  Description of Artificial Sequence: Synthetic oligonucleotide
cacgcacagccuagcauaa

SEQ ID NO: 824047 - RNA, 19 nt, Artificial Sequence
  Description of Artificial Sequence: Synthetic oligonucleotide
ccuccguuuaacauuccaa

SEQ ID NO: 824048 - RNA, 19 nt, Artificial Sequence
  Description of Artificial Sequence: Synthetic oligonucleotide
auuguucgauagauuucuu

SEQ ID NO: 824049 - RNA, 19 nt, Artificial Sequence
  Description of Artificial Sequence: Synthetic oligonucleotide
aaguaacaagagggcggua

SEQ ID NO: 824050 - RNA, 19 nt, Artificial Sequence
  Description of Artificial Sequence: Synthetic oligonucleotide
ccucggauagugagaaaca

SEQ ID NO: 824051 - RNA, 19 nt, Artificial Sequence
  Description of Artificial Sequence: Synthetic oligonucleotide
ucaauccggcggccuccgu

SEQ ID NO: 824052 - RNA, 19 nt, Artificial Sequence
  Description of Artificial Sequence: Synthetic oligonucleotide
gcgaagagauacucauuaa

SEQ ID NO: 824053 - RNA, 19 nt, Artificial Sequence
  Description of Artificial Sequence: Synthetic oligonucleotide
cauccgagaagccuauguu

SEQ ID NO: 824054 - RNA, 19 nt, Artificial Sequence
  Description of Artificial Sequence: Synthetic oligonucleotide
cauucgagaaaggcuuucu

SEQ ID NO: 824055 - RNA, 19 nt, Artificial Sequence
  Description of Artificial Sequence: Synthetic oligonucleotide
cccacgccuuuuaaaauga

SEQ ID NO: 824056 - RNA, 19 nt, Artificial Sequence
  Description of Artificial Sequence: Synthetic oligonucleotide
gaucgagcggaugguagau

SEQ ID NO: 824057 - RNA, 19 nt, Artificial Sequence
  Description of Artificial Sequence: Synthetic oligonucleotide
gccuccguuuaacauucca

SEQ ID NO: 824058 - RNA, 19 nt, Artificial Sequence
  Description of Artificial Sequence: Synthetic oligonucleotide
ugggcccaagggguauccc

SEQ ID NO: 824059 - RNA, 19 nt, Artificial Sequence
  Description of Artificial Sequence: Synthetic oligonucleotide
gagcauccauguuacuguu

SEQ ID NO: 824060 - RNA, 19 nt, Artificial Sequence
  Description of Artificial Sequence: Synthetic oligonucleotide
ccauugacaauaguuucaa

SEQ ID NO: 824061 - RNA, 19 nt, Artificial Sequence
  Description of Artificial Sequence: Synthetic oligonucleotide
cauaggagcaaagggcgau

SEQ ID NO: 824062 - RNA, 19 nt, Artificial Sequence
  Description of Artificial Sequence: Synthetic oligonucleotide
uccggcggccuccguuuaa

SEQ ID NO: 824063 - RNA, 19 nt, Artificial Sequence
  Description of Artificial Sequence: Synthetic oligonucleotide
cucggauagugagaaacau

SEQ ID NO: 824064 - RNA, 19 nt, Artificial Sequence
  Description of Artificial Sequence: Synthetic oligonucleotide
ccacgcacagccuagcaua

SEQ ID NO: 824065 - RNA, 19 nt, Artificial Sequence
  Description of Artificial Sequence: Synthetic oligonucleotide
gcuacaaaucucucuucau

SEQ ID NO: 824066 - RNA, 19 nt, Artificial Sequence
  Description of Artificial Sequence: Synthetic oligonucleotide
gccaccacgcacagccuag

SEQ ID NO: 824067 - RNA, 19 nt, Artificial Sequence
  Description of Artificial Sequence: Synthetic oligonucleotide
gccuucggaccccggagac

SEQ ID NO: 824068 - RNA, 19 nt, Artificial Sequence
  Description of Artificial Sequence: Synthetic oligonucleotide
gcgugugccaccacgcaca

SEQ ID NO: 824069 - RNA, 19 nt, Artificial Sequence
  Description of Artificial Sequence: Synthetic oligonucleotide
acguaggccccaagugaca

SEQ ID NO: 824070 - RNA, 19 nt, Artificial Sequence
  Description of Artificial Sequence: Synthetic oligonucleotide
gucccacgccuuuuaaaau

SEQ ID NO: 824071 - RNA, 19 nt, Artificial Sequence
  Description of Artificial Sequence: Synthetic oligonucleotide
caccacgcacagccuagca

SEQ ID NO: 824072 - RNA, 19 nt, Artificial Sequence
  Description of Artificial Sequence: Synthetic oligonucleotide
cuacauccgagaagccuau

SEQ ID NO: 824073 - RNA, 19 nt, Artificial Sequence
  Description of Artificial Sequence: Synthetic oligonucleotide
cagguagggagacgguagu

SEQ ID NO: 824074 - RNA, 19 nt, Artificial Sequence
  Description of Artificial Sequence: Synthetic oligonucleotide
uucggaccccggagacuua

SEQ ID NO: 824075 - RNA, 19 nt, Artificial Sequence
  Description of Artificial Sequence: Synthetic oligonucleotide
cuucggaccccggagacuu

SEQ ID NO: 824076 - RNA, 19 nt, Artificial Sequence
  Description of Artificial Sequence: Synthetic oligonucleotide
cggccuccguuuaacauuc

SEQ ID NO: 824077 - RNA, 19 nt, Artificial Sequence
  Description of Artificial Sequence: Synthetic oligonucleotide
ggagcgaccauagguucua

SEQ ID NO: 824078 - RNA, 19 nt, Artificial Sequence
  Description of Artificial Sequence: Synthetic oligonucleotide
gccuagcauaaguuucuua

SEQ ID NO: 824079 - RNA, 19 nt, Artificial Sequence
  Description of Artificial Sequence: Synthetic oligonucleotide
cgagaagccuauguuagaa

SEQ ID NO: 824080 - RNA, 19 nt, Artificial Sequence
  Description of Artificial Sequence: Synthetic oligonucleotide
ccaagggguauccccaucu

SEQ ID NO: 824081 - RNA, 19 nt, Artificial Sequence
  Description of Artificial Sequence: Synthetic oligonucleotide
ccagugucuguuaggaaau

SEQ ID NO: 824082 - RNA, 19 nt, Artificial Sequence
  Description of Artificial Sequence: Synthetic oligonucleotide
gagcacgugcaaauucauu

SEQ ID NO: 824083 - RNA, 19 nt, Artificial Sequence
  Description of Artificial Sequence: Synthetic oligonucleotide
cagcauucccagugucugu

SEQ ID NO: 824084 - RNA, 19 nt, Artificial Sequence
  Description of Artificial Sequence: Synthetic oligonucleotide
cgaccauagguucuagucu

SEQ ID NO: 824085 - RNA, 19 nt, Artificial Sequence
  Description of Artificial Sequence: Synthetic oligonucleotide
gcggccuccguuuaacauu

SEQ ID NO: 824086 - RNA, 19 nt, Artificial Sequence
  Description of Artificial Sequence: Synthetic oligonucleotide
auccggcggccuccguuua

SEQ ID NO: 824087 - RNA, 19 nt, Artificial Sequence
  Description of Artificial Sequence: Synthetic oligonucleotide
ggcggccuccguuuaacau

SEQ ID NO: 824088 - RNA, 19 nt, Artificial Sequence
  Description of Artificial Sequence: Synthetic oligonucleotide
caauccggcggccuccguu

SEQ ID NO: 824089 - RNA, 19 nt, Artificial Sequence
  Description of Artificial Sequence: Synthetic oligonucleotide
gcuucaaaucagaucccau

SEQ ID NO: 824090 - RNA, 19 nt, Artificial Sequence
  Description of Artificial Sequence: Synthetic oligonucleotide
gcauucccagugucuguua

SEQ ID NO: 824091 - RNA, 19 nt, Artificial Sequence
  Description of Artificial Sequence: Synthetic oligonucleotide
cccaagggguauccccauc

SEQ ID NO: 824092 - RNA, 19 nt, Artificial Sequence
  Description of Artificial Sequence: Synthetic oligonucleotide
ccaccacgcacagccuagc

SEQ ID NO: 824093 - RNA, 19 nt, Artificial Sequence
  Description of Artificial Sequence: Synthetic oligonucleotide
gaucgccaccacagagccu

SEQ ID NO: 824094 - RNA, 19 nt, Artificial Sequence
  Description of Artificial Sequence: Synthetic oligonucleotide
gugugagcacgugcaaauu

SEQ ID NO: 824095 - RNA, 19 nt, Artificial Sequence
  Description of Artificial Sequence: Synthetic oligonucleotide
cugcuucaacuacucgauu

SEQ ID NO: 824096 - RNA, 19 nt, Artificial Sequence
  Description of Artificial Sequence: Synthetic oligonucleotide
ccggcggccuccguuuaac

SEQ ID NO: 824097 - RNA, 19 nt, Artificial Sequence
  Description of Artificial Sequence: Synthetic oligonucleotide
gggguauccccaucuccuu

SEQ ID NO: 824098 - RNA, 19 nt, Artificial Sequence
  Description of Artificial Sequence: Synthetic oligonucleotide
cgguaucuucagauuccca

SEQ ID NO: 824099 - RNA, 19 nt, Artificial Sequence
  Description of Artificial Sequence: Synthetic oligonucleotide
ccacuggaucgagcggaug

SEQ ID NO: 824100 - RNA, 19 nt, Artificial Sequence
  Description of Artificial Sequence: Synthetic oligonucleotide
ggccuccguuuaacauucc

SEQ ID NO: 824101 - RNA, 19 nt, Artificial Sequence
  Description of Artificial Sequence: Synthetic oligonucleotide
ccccggagacuuagagaca

SEQ ID NO: 824102 - RNA, 19 nt, Artificial Sequence
  Description of Artificial Sequence: Synthetic oligonucleotide
gccgacuuggagagcccaa

SEQ ID NO: 824103 - RNA, 19 nt, Artificial Sequence
  Description of Artificial Sequence: Synthetic oligonucleotide
aggccccaagugacagcuu

SEQ ID NO: 824104 - RNA, 19 nt, Artificial Sequence
  Description of Artificial Sequence: Synthetic oligonucleotide
cccauucgagaaaggcuuu

SEQ ID NO: 824105 - RNA, 19 nt, Artificial Sequence
  Description of Artificial Sequence: Synthetic oligonucleotide
gcccaagggguauccccau

SEQ ID NO: 824106 - RNA, 19 nt, Artificial Sequence
  Description of Artificial Sequence: Synthetic oligonucleotide
gcccugcuucaaaucagau

SEQ ID NO: 824107 - RNA, 19 nt, Artificial Sequence
  Description of Artificial Sequence: Synthetic oligonucleotide
gcucaaugcuggggcugcu

SEQ ID NO: 824108 - RNA, 19 nt, Artificial Sequence
  Description of Artificial Sequence: Synthetic oligonucleotide
cggcggccuccguuuaaca

SEQ ID NO: 824109 - RNA, 19 nt, Artificial Sequence
  Description of Artificial Sequence: Synthetic oligonucleotide
ccuucggaccccggagacu

SEQ ID NO: 824110 - RNA, 19 nt, Artificial Sequence
  Description of Artificial Sequence: Synthetic oligonucleotide
auaaguauagcacacuccc

SEQ ID NO: 824111 - RNA, 19 nt, Artificial Sequence
  Description of Artificial Sequence: Synthetic oligonucleotide
agcauauucacauaacccc

SEQ ID NO: 824112 - RNA, 19 nt, Artificial Sequence
  Description of Artificial Sequence: Synthetic oligonucleotide
uuaacuagguucuuaaucc

SEQ ID NO: 824113 - RNA, 19 nt, Artificial Sequence
  Description of Artificial Sequence: Synthetic oligonucleotide
aaugccuucugguaaacac

SEQ ID NO: 824114 - RNA, 19 nt, Artificial Sequence
  Description of Artificial Sequence: Synthetic oligonucleotide
auagcauauucacauaacc

SEQ ID NO: 824115 - RNA, 19 nt, Artificial Sequence
  Description of Artificial Sequence: Synthetic oligonucleotide
aauccuuccggauauagug

SEQ ID NO: 824116 - RNA, 19 nt, Artificial Sequence
  Description of Artificial Sequence: Synthetic oligonucleotide
uccuaaaguuguaagaagg

SEQ ID NO: 824117 - RNA, 19 nt, Artificial Sequence
  Description of Artificial Sequence: Synthetic oligonucleotide
uuuagauaaguauagcaca

SEQ ID NO: 824118 - RNA, 19 nt, Artificial Sequence
  Description of Artificial Sequence: Synthetic oligonucleotide
agucaaauggacaaggccc

SEQ ID NO: 824119 - RNA, 19 nt, Artificial Sequence
  Description of Artificial Sequence: Synthetic oligonucleotide
uuuaacuagguucuuaauc

SEQ ID NO: 824120 - RNA, 19 nt, Artificial Sequence
  Description of Artificial Sequence: Synthetic oligonucleotide
cuuuagauaaguauagcac

SEQ ID NO: 824121 - RNA, 19 nt, Artificial Sequence
  Description of Artificial Sequence: Synthetic oligonucleotide
aagggugccaaguaauugg

SEQ ID NO: 824122 - RNA, 19 nt, Artificial Sequence
  Description of Artificial Sequence: Synthetic oligonucleotide
aagauguucaaaugccuuc

SEQ ID NO: 824123 - RNA, 19 nt, Artificial Sequence
  Description of Artificial Sequence: Synthetic oligonucleotide
agaaaguugaccuucuucu

SEQ ID NO: 824124 - RNA, 19 nt, Artificial Sequence
  Description of Artificial Sequence: Synthetic oligonucleotide
ugcuuguuaagcuggaggg

SEQ ID NO: 824125 - RNA, 19 nt, Artificial Sequence
  Description of Artificial Sequence: Synthetic oligonucleotide
agauaaguauagcacacuc

SEQ ID NO: 824126 - RNA, 19 nt, Artificial Sequence
  Description of Artificial Sequence: Synthetic oligonucleotide
auaaaaguucuucaucgag

SEQ ID NO: 824127 - RNA, 19 nt, Artificial Sequence
  Description of Artificial Sequence: Synthetic oligonucleotide
ucugcguaagcucucuugg

SEQ ID NO: 824128 - RNA, 19 nt, Artificial Sequence
  Description of Artificial Sequence: Synthetic oligonucleotide
aagaaacacauuccaaugu

SEQ ID NO: 824129 - RNA, 19 nt, Artificial Sequence
  Description of Artificial Sequence: Synthetic oligonucleotide
uuacuaaaggguuacauuu

SEQ ID NO: 824130 - RNA, 19 nt, Artificial Sequence
  Description of Artificial Sequence: Synthetic oligonucleotide
uauggucucaccuaagaga

SEQ ID NO: 824131 - RNA, 19 nt, Artificial Sequence
  Description of Artificial Sequence: Synthetic oligonucleotide
ucuucaucgaguaaugguc

SEQ ID NO: 824132 - RNA, 19 nt, Artificial Sequence
  Description of Artificial Sequence: Synthetic oligonucleotide
cuugauuggagcccaaagg

SEQ ID NO: 824133 - RNA, 19 nt, Artificial Sequence
  Description of Artificial Sequence: Synthetic oligonucleotide
uucacauaaccccugaguc

SEQ ID NO: 824134 - RNA, 19 nt, Artificial Sequence
  Description of Artificial Sequence: Synthetic oligonucleotide
guaucuuccagauugguca

SEQ ID NO: 824135 - RNA, 19 nt, Artificial Sequence
  Description of Artificial Sequence: Synthetic oligonucleotide
uccuacagcaccugaaggg

SEQ ID NO: 824136 - RNA, 19 nt, Artificial Sequence
  Description of Artificial Sequence: Synthetic oligonucleotide
aacugcuuuagauaaguau

SEQ ID NO: 824137 - RNA, 19 nt, Artificial Sequence
  Description of Artificial Sequence: Synthetic oligonucleotide
uguaaguagaguaauccua

SEQ ID NO: 824138 - RNA, 19 nt, Artificial Sequence
  Description of Artificial Sequence: Synthetic oligonucleotide
agauuguacagaaucuucc

SEQ ID NO: 824139 - RNA, 19 nt, Artificial Sequence
  Description of Artificial Sequence: Synthetic oligonucleotide
cuugagauuaucagcacac

SEQ ID NO: 824140 - RNA, 19 nt, Artificial Sequence
  Description of Artificial Sequence: Synthetic oligonucleotide
uaauccuaaaguuguaaga

SEQ ID NO: 824141 - RNA, 19 nt, Artificial Sequence
  Description of Artificial Sequence: Synthetic oligonucleotide
auauaguggagauggauca

SEQ ID NO: 824142 - RNA, 19 nt, Artificial Sequence
  Description of Artificial Sequence: Synthetic oligonucleotide
aauccuaaaguuguaagaa

SEQ ID NO: 824143 - RNA, 19 nt, Artificial Sequence
  Description of Artificial Sequence: Synthetic oligonucleotide
uagucaaauggacaaggcc

SEQ ID NO: 824144 - RNA, 19 nt, Artificial Sequence
  Description of Artificial Sequence: Synthetic oligonucleotide
uuccccagcauuauguaag

SEQ ID NO: 824145 - RNA, 19 nt, Artificial Sequence
  Description of Artificial Sequence: Synthetic oligonucleotide
ucccaagauguucaaaugc

SEQ ID NO: 824146 - RNA, 19 nt, Artificial Sequence
  Description of Artificial Sequence: Synthetic oligonucleotide
uauauggucucaccuaaga

SEQ ID NO: 824147 - RNA, 19 nt, Artificial Sequence
  Description of Artificial Sequence: Synthetic oligonucleotide
aacaccgagcuguaaguag

SEQ ID NO: 824148 - RNA, 19 nt, Artificial Sequence
  Description of Artificial Sequence: Synthetic oligonucleotide
guaauccuaaaguuguaag

SEQ ID NO: 824149 - RNA, 19 nt, Artificial Sequence
  Description of Artificial Sequence: Synthetic oligonucleotide
aguucagguuuacuaaagg

SEQ ID NO: 824150 - RNA, 19 nt, Artificial Sequence
  Description of Artificial Sequence: Synthetic oligonucleotide
uucugguaaacaccgagcu

SEQ ID NO: 824151 - RNA, 19 nt, Artificial Sequence
  Description of Artificial Sequence: Synthetic oligonucleotide
uguccuagagcuugauugg

SEQ ID NO: 824152 - RNA, 19 nt, Artificial Sequence
  Description of Artificial Sequence: Synthetic oligonucleotide
ucuauauggucucaccuaa

SEQ ID NO: 824153 - RNA, 19 nt, Artificial Sequence
  Description of Artificial Sequence: Synthetic oligonucleotide
gaguaauggucucugauca

SEQ ID NO: 824154 - RNA, 19 nt, Artificial Sequence
  Description of Artificial Sequence: Synthetic oligonucleotide
ucuacugcuuucuuguaga

SEQ ID NO: 824155 - RNA, 19 nt, Artificial Sequence
  Description of Artificial Sequence: Synthetic oligonucleotide
aguaaguggaucuucccca

SEQ ID NO: 824156 - RNA, 19 nt, Artificial Sequence
  Description of Artificial Sequence: Synthetic oligonucleotide
acaacucuguauuugguga

SEQ ID NO: 824157 - RNA, 19 nt, Artificial Sequence
  Description of Artificial Sequence: Synthetic oligonucleotide
ugucugaaagaguuccagg

SEQ ID NO: 824158 - RNA, 19 nt, Artificial Sequence
  Description of Artificial Sequence: Synthetic oligonucleotide
cauagucaaauggacaagg

SEQ ID NO: 824159 - RNA, 19 nt, Artificial Sequence
  Description of Artificial Sequence: Synthetic oligonucleotide
uaauuggcucguuuuaggc

SEQ ID NO: 824160 - RNA, 19 nt, Artificial Sequence
  Description of Artificial Sequence: Synthetic oligonucleotide
ucagguuuacuaaaggguu

SEQ ID NO: 824161 - RNA, 19 nt, Artificial Sequence
  Description of Artificial Sequence: Synthetic oligonucleotide
auggucucaccuaagagac

SEQ ID NO: 824162 - RNA, 19 nt, Artificial Sequence
  Description of Artificial Sequence: Synthetic oligonucleotide
uuuacuaaaggguuacauu

SEQ ID NO: 824163 - RNA, 19 nt, Artificial Sequence
  Description of Artificial Sequence: Synthetic oligonucleotide
gauaaguauagcacacucc

SEQ ID NO: 824164 - RNA, 19 nt, Artificial Sequence
  Description of Artificial Sequence: Synthetic oligonucleotide
uugaucaucacagcgcacc

SEQ ID NO: 824165 - RNA, 19 nt, Artificial Sequence
  Description of Artificial Sequence: Synthetic oligonucleotide
auucccaagauguucaaau

SEQ ID NO: 824166 - RNA, 19 nt, Artificial Sequence
  Description of Artificial Sequence: Synthetic oligonucleotide
uguucugaugcuucuguug

SEQ ID NO: 824167 - RNA, 19 nt, Artificial Sequence
  Description of Artificial Sequence: Synthetic oligonucleotide
aaauggacaaggcccagau

SEQ ID NO: 824168 - RNA, 19 nt, Artificial Sequence
  Description of Artificial Sequence: Synthetic oligonucleotide
gauauaguggagauggauc

SEQ ID NO: 824169 - RNA, 19 nt, Artificial Sequence
  Description of Artificial Sequence: Synthetic oligonucleotide
auauggucucaccuaagag

SEQ ID NO: 824170 - RNA, 19 nt, Artificial Sequence
  Description of Artificial Sequence: Synthetic oligonucleotide
uaguucagguuuacuaaag

SEQ ID NO: 824171 - RNA, 19 nt, Artificial Sequence
  Description of Artificial Sequence: Synthetic oligonucleotide
ucuggcgagaacucuacug

SEQ ID NO: 824172 - RNA, 19 nt, Artificial Sequence
  Description of Artificial Sequence: Synthetic oligonucleotide
auaguggagauggaucagc

SEQ ID NO: 824173 - RNA, 19 nt, Artificial Sequence
  Description of Artificial Sequence: Synthetic oligonucleotide
auuggugcggugcuuugac

SEQ ID NO: 824174 - RNA, 19 nt, Artificial Sequence
  Description of Artificial Sequence: Synthetic oligonucleotide
cuggaauagcacaagcuac

SEQ ID NO: 824175 - RNA, 19 nt, Artificial Sequence
  Description of Artificial Sequence: Synthetic oligonucleotide
ucaagccuauccuagcaug

SEQ ID NO: 824176 - RNA, 19 nt, Artificial Sequence
  Description of Artificial Sequence: Synthetic oligonucleotide
ucaccuaagagacccuccc

SEQ ID NO: 824177 - RNA, 19 nt, Artificial Sequence
  Description of Artificial Sequence: Synthetic oligonucleotide
uauguaagucaggucaugc

SEQ ID NO: 824178 - RNA, 19 nt, Artificial Sequence
  Description of Artificial Sequence: Synthetic oligonucleotide
uaaacaccgagcuguaagu

SEQ ID NO: 824179 - RNA, 19 nt, Artificial Sequence
  Description of Artificial Sequence: Synthetic oligonucleotide
aagagacccuccccacucc

SEQ ID NO: 824180 - RNA, 19 nt, Artificial Sequence
  Description of Artificial Sequence: Synthetic oligonucleotide
agggucguaagucagugca

SEQ ID NO: 824181 - RNA, 19 nt, Artificial Sequence
  Description of Artificial Sequence: Synthetic oligonucleotide
ugcuuggacauagauagca

SEQ ID NO: 824182 - RNA, 19 nt, Artificial Sequence
  Description of Artificial Sequence: Synthetic oligonucleotide
uauccuagcaugucuuucu

SEQ ID NO: 824183 - RNA, 19 nt, Artificial Sequence
  Description of Artificial Sequence: Synthetic oligonucleotide
ugcguaagcucucuuggca

SEQ ID NO: 824184 - RNA, 19 nt, Artificial Sequence
  Description of Artificial Sequence: Synthetic oligonucleotide
aagacaucgccuguccuag

SEQ ID NO: 824185 - RNA, 19 nt, Artificial Sequence
  Description of Artificial Sequence: Synthetic oligonucleotide
cuucugguaaacaccgagc

SEQ ID NO: 824186 - RNA, 19 nt, Artificial Sequence
  Description of Artificial Sequence: Synthetic oligonucleotide
aacagggcuggccucuauc

SEQ ID NO: 824187 - RNA, 19 nt, Artificial Sequence
  Description of Artificial Sequence: Synthetic oligonucleotide
agguuuacuaaaggguuac

SEQ ID NO: 824188 - RNA, 19 nt, Artificial Sequence
  Description of Artificial Sequence: Synthetic oligonucleotide
cuggcgagaacucuacugc

SEQ ID NO: 824189 - RNA, 19 nt, Artificial Sequence
  Description of Artificial Sequence: Synthetic oligonucleotide
uuugucacccugguuauac

SEQ ID NO: 824190 - RNA, 19 nt, Artificial Sequence
  Description of Artificial Sequence: Synthetic oligonucleotide
ucucuccacaauaggaaac

SEQ ID NO: 824191 - RNA, 19 nt, Artificial Sequence
  Description of Artificial Sequence: Synthetic oligonucleotide
acaagcuacaacucuguau

SEQ ID NO: 824192 - RNA, 19 nt, Artificial Sequence
  Description of Artificial Sequence: Synthetic oligonucleotide
ucugguaaacaccgagcug

SEQ ID NO: 824193 - RNA, 19 nt, Artificial Sequence
  Description of Artificial Sequence: Synthetic oligonucleotide
uaaguauagcacacuccca

SEQ ID NO: 824194 - RNA, 19 nt, Artificial Sequence
  Description of Artificial Sequence: Synthetic oligonucleotide
uucuauauggucucaccua

SEQ ID NO: 824195 - RNA, 19 nt, Artificial Sequence
  Description of Artificial Sequence: Synthetic oligonucleotide
uccuagagcuugauuggag

SEQ ID NO: 824196 - RNA, 19 nt, Artificial Sequence
  Description of Artificial Sequence: Synthetic oligonucleotide
uaacuagguucuuaaucca

SEQ ID NO: 824197 - RNA, 19 nt, Artificial Sequence
  Description of Artificial Sequence: Synthetic oligonucleotide
acuaaaggguuacauuuau

SEQ ID NO: 824198 - RNA, 19 nt, Artificial Sequence
  Description of Artificial Sequence: Synthetic oligonucleotide
agaucuggccaccugcuug

SEQ ID NO: 824199 - RNA, 19 nt, Artificial Sequence
  Description of Artificial Sequence: Synthetic oligonucleotide
guacuguuguccuugagaa

SEQ ID NO: 824200 - RNA, 19 nt, Artificial Sequence
  Description of Artificial Sequence: Synthetic oligonucleotide
uuguaagaaggucuguauu

SEQ ID NO: 824201 - RNA, 19 nt, Artificial Sequence
  Description of Artificial Sequence: Synthetic oligonucleotide
uggucauaugaccacuuuc

SEQ ID NO: 824202 - RNA, 19 nt, Artificial Sequence
  Description of Artificial Sequence: Synthetic oligonucleotide
uauggcagaucucccaauc

SEQ ID NO: 824203 - RNA, 19 nt, Artificial Sequence
  Description of Artificial Sequence: Synthetic oligonucleotide
agguucuuaauccaagguu

SEQ ID NO: 824204 - RNA, 19 nt, Artificial Sequence
  Description of Artificial Sequence: Synthetic oligonucleotide
gguuacauuuauccaggcg

SEQ ID NO: 824205 - RNA, 19 nt, Artificial Sequence
  Description of Artificial Sequence: Synthetic oligonucleotide
ucucccucguuccuggaug

SEQ ID NO: 824206 - RNA, 19 nt, Artificial Sequence
  Description of Artificial Sequence: Synthetic oligonucleotide
acugcuuuagauaaguaua

SEQ ID NO: 824207 - RNA, 19 nt, Artificial Sequence
  Description of Artificial Sequence: Synthetic oligonucleotide
aauaaagaucuggccaccu

SEQ ID NO: 824208 - RNA, 19 nt, Artificial Sequence
  Description of Artificial Sequence: Synthetic oligonucleotide
gcuuuagauaaguauagca

SEQ ID NO: 824209 - RNA, 19 nt, Artificial Sequence
  Description of Artificial Sequence: Synthetic oligonucleotide
auaaagaucuggccaccug

SEQ ID NO: 824210 - RNA, 19 nt, Artificial Sequence
  Description of Artificial Sequence: Synthetic oligonucleotide
ucgaguaauggucucugau

SEQ ID NO: 824211 - RNA, 19 nt, Artificial Sequence
  Description of Artificial Sequence: Synthetic oligonucleotide
accacaggcuacuaaccag

SEQ ID NO: 824212 - RNA, 19 nt, Artificial Sequence
  Description of Artificial Sequence: Synthetic oligonucleotide
ugacucuuggagcuauaca

SEQ ID NO: 824213 - RNA, 19 nt, Artificial Sequence
  Description of Artificial Sequence: Synthetic oligonucleotide
gacaucgccuguccuagag

SEQ ID NO: 824214 - RNA, 19 nt, Artificial Sequence
  Description of Artificial Sequence: Synthetic oligonucleotide
cagauuguacagaaucuuc

SEQ ID NO: 824215 - RNA, 19 nt, Artificial Sequence
  Description of Artificial Sequence: Synthetic oligonucleotide
ucguaagucagugcauucc

SEQ ID NO: 824216 - RNA, 19 nt, Artificial Sequence
  Description of Artificial Sequence: Synthetic oligonucleotide
caggucaugcuuguuaagc

SEQ ID NO: 824217 - RNA, 19 nt, Artificial Sequence
  Description of Artificial Sequence: Synthetic oligonucleotide
cagaaucuuccaaucgaag

SEQ ID NO: 824218 - RNA, 19 nt, Artificial Sequence
  Description of Artificial Sequence: Synthetic oligonucleotide
ugcugaacugcuuuagaua

SEQ ID NO: 824219 - RNA, 19 nt, Artificial Sequence
  Description of Artificial Sequence: Synthetic oligonucleotide
ggaucuuugacugguuugg

SEQ ID NO: 824220 - RNA, 19 nt, Artificial Sequence
  Description of Artificial Sequence: Synthetic oligonucleotide
auguaagucaggucaugcu

SEQ ID NO: 824221 - RNA, 19 nt, Artificial Sequence
  Description of Artificial Sequence: Synthetic oligonucleotide
uaagaaggucuguauuuuc

SEQ ID NO: 824222 - RNA, 19 nt, Artificial Sequence
  Description of Artificial Sequence: Synthetic oligonucleotide
ugccacguauuucuucuug

SEQ ID NO: 824223 - RNA, 19 nt, Artificial Sequence
  Description of Artificial Sequence: Synthetic oligonucleotide
aauccaagguuuguguuua

SEQ ID NO: 824224 - RNA, 19 nt, Artificial Sequence
  Description of Artificial Sequence: Synthetic oligonucleotide
guuauacagcagcacagca

SEQ ID NO: 824225 - RNA, 19 nt, Artificial Sequence
  Description of Artificial Sequence: Synthetic oligonucleotide
ccagcauuauguaagucag

SEQ ID NO: 824226 - RNA, 19 nt, Artificial Sequence
  Description of Artificial Sequence: Synthetic oligonucleotide
auauucacauaaccccuga

SEQ ID NO: 824227 - RNA, 19 nt, Artificial Sequence
  Description of Artificial Sequence: Synthetic oligonucleotide
ugcuuuagauaaguauagc

SEQ ID NO: 824228 - RNA, 19 nt, Artificial Sequence
  Description of Artificial Sequence: Synthetic oligonucleotide
ugcaauuggucuugugccu

SEQ ID NO: 824229 - RNA, 19 nt, Artificial Sequence
  Description of Artificial Sequence: Synthetic oligonucleotide
uauaguggagauggaucag

SEQ ID NO: 824230 - RNA, 19 nt, Artificial Sequence
  Description of Artificial Sequence: Synthetic oligonucleotide
uagagcuugauuggagccc

SEQ ID NO: 824231 - RNA, 19 nt, Artificial Sequence
  Description of Artificial Sequence: Synthetic oligonucleotide
cuuccaaucgaagggugcc

SEQ ID NO: 824232 - RNA, 19 nt, Artificial Sequence
  Description of Artificial Sequence: Synthetic oligonucleotide
caaaguggaggacuuucug

SEQ ID NO: 824233 - RNA, 19 nt, Artificial Sequence
  Description of Artificial Sequence: Synthetic oligonucleotide
aagccuauccuagcauguc

SEQ ID NO: 824234 - RNA, 19 nt, Artificial Sequence
  Description of Artificial Sequence: Synthetic oligonucleotide
cuccuacagcaccugaagg

SEQ ID NO: 824235 - RNA, 19 nt, Artificial Sequence
  Description of Artificial Sequence: Synthetic oligonucleotide
ggaaaaucagugcuuggac

SEQ ID NO: 824236 - RNA, 19 nt, Artificial Sequence
  Description of Artificial Sequence: Synthetic oligonucleotide
gcuacuaaccagaaguccc

SEQ ID NO: 824237 - RNA, 19 nt, Artificial Sequence
  Description of Artificial Sequence: Synthetic oligonucleotide
aguaauccuaaaguuguaa

SEQ ID NO: 824238 - RNA, 19 nt, Artificial Sequence
  Description of Artificial Sequence: Synthetic oligonucleotide
uucaagccuauccuagcau

SEQ ID NO: 824239 - RNA, 19 nt, Artificial Sequence
  Description of Artificial Sequence: Synthetic oligonucleotide
uuauguaagucaggucaug

SEQ ID NO: 824240 - RNA, 19 nt, Artificial Sequence
  Description of Artificial Sequence: Synthetic oligonucleotide
agcgaugguggcuuuguga

SEQ ID NO: 824241 - RNA, 19 nt, Artificial Sequence
  Description of Artificial Sequence: Synthetic oligonucleotide
agguuuguguuuacagugg

SEQ ID NO: 824242 - RNA, 19 nt, Artificial Sequence
  Description of Artificial Sequence: Synthetic oligonucleotide
guaaguagaguaauccuaa

SEQ ID NO: 824243 - RNA, 19 nt, Artificial Sequence
  Description of Artificial Sequence: Synthetic oligonucleotide
guauuuucuggcgagaacu

SEQ ID NO: 824244 - RNA, 19 nt, Artificial Sequence
  Description of Artificial Sequence: Synthetic oligonucleotide
gaaugcugaugcauacugc

SEQ ID NO: 824245 - RNA, 19 nt, Artificial Sequence
  Description of Artificial Sequence: Synthetic oligonucleotide
agggugccaaguaauuggc

SEQ ID NO: 824246 - RNA, 19 nt, Artificial Sequence
  Description of Artificial Sequence: Synthetic oligonucleotide
agucaggucaugcuuguua

SEQ ID NO: 824247 - RNA, 19 nt, Artificial Sequence
  Description of Artificial Sequence: Synthetic oligonucleotide
uagauaaguauagcacacu

SEQ ID NO: 824248 - RNA, 19 nt, Artificial Sequence
  Description of Artificial Sequence: Synthetic oligonucleotide
uauagcacacucccagguu

SEQ ID NO: 824249 - RNA, 19 nt, Artificial Sequence
  Description of Artificial Sequence: Synthetic oligonucleotide
uccaaaguggaggacuuuc

SEQ ID NO: 824250 - RNA, 19 nt, Artificial Sequence
  Description of Artificial Sequence: Synthetic oligonucleotide
ucuuucuauauggucucac

SEQ ID NO: 824251 - RNA, 19 nt, Artificial Sequence
  Description of Artificial Sequence: Synthetic oligonucleotide
gucucccuccaguaagugg

SEQ ID NO: 824252 - RNA, 19 nt, Artificial Sequence
  Description of Artificial Sequence: Synthetic oligonucleotide
ggucucaccuaagagaccc

SEQ ID NO: 824253 - RNA, 19 nt, Artificial Sequence
  Description of Artificial Sequence: Synthetic oligonucleotide
caucaugcugccugcugcc

SEQ ID NO: 824254 - RNA, 19 nt, Artificial Sequence
  Description of Artificial Sequence: Synthetic oligonucleotide
gaagacaucgccuguccua

SEQ ID NO: 824255 - RNA, 19 nt, Artificial Sequence
  Description of Artificial Sequence: Synthetic oligonucleotide
uauuuggugagggcaacau

SEQ ID NO: 824256 - RNA, 19 nt, Artificial Sequence
  Description of Artificial Sequence: Synthetic oligonucleotide
acaggcuacuaaccagaag

SEQ ID NO: 824257 - RNA, 19 nt, Artificial Sequence
  Description of Artificial Sequence: Synthetic oligonucleotide
cagaguacuguuguccuug

SEQ ID NO: 824258 - RNA, 19 nt, Artificial Sequence
  Description of Artificial Sequence: Synthetic oligonucleotide
guaauggucucugaucauc

SEQ ID NO: 824259 - RNA, 19 nt, Artificial Sequence
  Description of Artificial Sequence: Synthetic oligonucleotide
ucaguggcggcuuuauguu

SEQ ID NO: 824260 - RNA, 19 nt, Artificial Sequence
  Description of Artificial Sequence: Synthetic oligonucleotide
agccuauccuagcaugucu

SEQ ID NO: 824261 - RNA, 19 nt, Artificial Sequence
  Description of Artificial Sequence: Synthetic oligonucleotide
ugcggugcuuugacuuugg

SEQ ID NO: 824262 - RNA, 19 nt, Artificial Sequence
  Description of Artificial Sequence: Synthetic oligonucleotide
cugagaacagcacaugucu

SEQ ID NO: 824263 - RNA, 19 nt, Artificial Sequence
  Description of Artificial Sequence: Synthetic oligonucleotide
uuccggauauaguggagau

SEQ ID NO: 824264 - RNA, 19 nt, Artificial Sequence
  Description of Artificial Sequence: Synthetic oligonucleotide
guuauggcagaucucccaa

SEQ ID NO: 824265 - RNA, 19 nt, Artificial Sequence
  Description of Artificial Sequence: Synthetic oligonucleotide
guguuuacaguggggacug

SEQ ID NO: 824266 - RNA, 19 nt, Artificial Sequence
  Description of Artificial Sequence: Synthetic oligonucleotide
ucgccuguccuagagcuug

SEQ ID NO: 824267 - RNA, 19 nt, Artificial Sequence
  Description of Artificial Sequence: Synthetic oligonucleotide
uucaucgaguaauggucuc

SEQ ID NO: 824268 - RNA, 19 nt, Artificial Sequence
  Description of Artificial Sequence: Synthetic oligonucleotide
auaugaccacuuucuuucu

SEQ ID NO: 824269 - RNA, 19 nt, Artificial Sequence
  Description of Artificial Sequence: Synthetic oligonucleotide
ccuagagcuugauuggagc

SEQ ID NO: 824270 - RNA, 19 nt, Artificial Sequence
  Description of Artificial Sequence: Synthetic oligonucleotide
cuucaagccuauccuagca

SEQ ID NO: 824271 - RNA, 19 nt, Artificial Sequence
  Description of Artificial Sequence: Synthetic oligonucleotide
cugcguaagcucucuuggc

SEQ ID NO: 824272 - RNA, 19 nt, Artificial Sequence
  Description of Artificial Sequence: Synthetic oligonucleotide
aagcgaugguggcuuugug

SEQ ID NO: 824273 - RNA, 19 nt, Artificial Sequence
  Description of Artificial Sequence: Synthetic oligonucleotide
gucaaauggacaaggccca

SEQ ID NO: 824274 - RNA, 19 nt, Artificial Sequence
  Description of Artificial Sequence: Synthetic oligonucleotide
uuugacugguuugguccag

SEQ ID NO: 824275 - RNA, 19 nt, Artificial Sequence
  Description of Artificial Sequence: Synthetic oligonucleotide
uugugccuugcugaacugc

SEQ ID NO: 824276 - RNA, 19 nt, Artificial Sequence
  Description of Artificial Sequence: Synthetic oligonucleotide
guccccaugggucugcauc

SEQ ID NO: 824277 - RNA, 19 nt, Artificial Sequence
  Description of Artificial Sequence: Synthetic oligonucleotide
ccuucugguaaacaccgag

SEQ ID NO: 824278 - RNA, 19 nt, Artificial Sequence
  Description of Artificial Sequence: Synthetic oligonucleotide
aaacaccgagcuguaagua

SEQ ID NO: 824279 - RNA, 19 nt, Artificial Sequence
  Description of Artificial Sequence: Synthetic oligonucleotide
acagaaucuuccaaucgaa

SEQ ID NO: 824280 - RNA, 19 nt, Artificial Sequence
  Description of Artificial Sequence: Synthetic oligonucleotide
caucgaguaauggucucug

SEQ ID NO: 824281 - RNA, 19 nt, Artificial Sequence
  Description of Artificial Sequence: Synthetic oligonucleotide
uuauggcagaucucccaau

SEQ ID NO: 824282 - RNA, 19 nt, Artificial Sequence
  Description of Artificial Sequence: Synthetic oligonucleotide
gcaucaugcugccugcugc

SEQ ID NO: 824283 - RNA, 19 nt, Artificial Sequence
  Description of Artificial Sequence: Synthetic oligonucleotide
ggcggcuuuauguuuuccc

SEQ ID NO: 824284 - RNA, 19 nt, Artificial Sequence
  Description of Artificial Sequence: Synthetic oligonucleotide
cuagcaugucuuucuucuc

SEQ ID NO: 824285 - RNA, 19 nt, Artificial Sequence
  Description of Artificial Sequence: Synthetic oligonucleotide
uguuaagcuggagggcacu

SEQ ID NO: 824286 - RNA, 19 nt, Artificial Sequence
  Description of Artificial Sequence: Synthetic oligonucleotide
uccccagcauuauguaagu

SEQ ID NO: 824287 - RNA, 19 nt, Artificial Sequence
  Description of Artificial Sequence: Synthetic oligonucleotide
uccggauauaguggagaug

SEQ ID NO: 824288 - RNA, 19 nt, Artificial Sequence
  Description of Artificial Sequence: Synthetic oligonucleotide
uggucucaccuaagagacc

SEQ ID NO: 824289 - RNA, 19 nt, Artificial Sequence
  Description of Artificial Sequence: Synthetic oligonucleotide
caccuaagagacccucccc

SEQ ID NO: 824290 - RNA, 19 nt, Artificial Sequence
  Description of Artificial Sequence: Synthetic oligonucleotide
caccgagcuguaaguagag

SEQ ID NO: 824291 - RNA, 19 nt, Artificial Sequence
  Description of Artificial Sequence: Synthetic oligonucleotide
ucucaccuaagagacccuc

SEQ ID NO: 824292 - RNA, 19 nt, Artificial Sequence
  Description of Artificial Sequence: Synthetic oligonucleotide
uacuguuguccuugagaaa

SEQ ID NO: 824293 - RNA, 19 nt, Artificial Sequence
  Description of Artificial Sequence: Synthetic oligonucleotide
cugacucuuggagcuauac

SEQ ID NO: 824294 - RNA, 19 nt, Artificial Sequence
  Description of Artificial Sequence: Synthetic oligonucleotide
accccugagucuccugaag

SEQ ID NO: 824295 - RNA, 19 nt, Artificial Sequence
  Description of Artificial Sequence: Synthetic oligonucleotide
acaccgagcuguaaguaga

SEQ ID NO: 824296 - RNA, 19 nt, Artificial Sequence
  Description of Artificial Sequence: Synthetic oligonucleotide
guauagcacacucccaggu

SEQ ID NO: 824297 - RNA, 19 nt, Artificial Sequence
  Description of Artificial Sequence: Synthetic oligonucleotide
aaccccugagucuccugaa

SEQ ID NO: 824298 - RNA, 19 nt, Artificial Sequence
  Description of Artificial Sequence: Synthetic oligonucleotide
gucguaagucagugcauuc

SEQ ID NO: 824299 - RNA, 19 nt, Artificial Sequence
  Description of Artificial Sequence: Synthetic oligonucleotide
cuucaucgaguaauggucu

SEQ ID NO: 824300 - RNA, 19 nt, Artificial Sequence
  Description of Artificial Sequence: Synthetic oligonucleotide
uucuggcgagaacucuacu

SEQ ID NO: 824301 - RNA, 19 nt, Artificial Sequence
  Description of Artificial Sequence: Synthetic oligonucleotide
ccacguauuucuucuugcc

SEQ ID NO: 824302 - RNA, 19 nt, Artificial Sequence
  Description of Artificial Sequence: Synthetic oligonucleotide
ggcuacuaaccagaagucc

SEQ ID NO: 824303 - RNA, 19 nt, Artificial Sequence
  Description of Artificial Sequence: Synthetic oligonucleotide
uuccaaucgaagggugcca

SEQ ID NO: 824304 - RNA, 19 nt, Artificial Sequence
  Description of Artificial Sequence: Synthetic oligonucleotide
ugccaaguaauuggcucgu

SEQ ID NO: 824305 - RNA, 19 nt, Artificial Sequence
  Description of Artificial Sequence: Synthetic oligonucleotide
cucguuccuggaugauggg

SEQ ID NO: 824306 - RNA, 19 nt, Artificial Sequence
  Description of Artificial Sequence: Synthetic oligonucleotide
gccacguauuucuucuugc

SEQ ID NO: 824307 - RNA, 19 nt, Artificial Sequence
  Description of Artificial Sequence: Synthetic oligonucleotide
uccaaucgaagggugccaa

SEQ ID NO: 824308 - RNA, 19 nt, Artificial Sequence
  Description of Artificial Sequence: Synthetic oligonucleotide
gcaugcuucauaauccuuc

SEQ ID NO: 824309 - RNA, 19 nt, Artificial Sequence
  Description of Artificial Sequence: Synthetic oligonucleotide
cuuccggauauaguggaga

SEQ ID NO: 824310 - RNA, 19 nt, Artificial Sequence
  Description of Artificial Sequence: Synthetic oligonucleotide
uucucccucguuccuggau

SEQ ID NO: 824311 - RNA, 19 nt, Artificial Sequence
  Description of Artificial Sequence: Synthetic oligonucleotide
guuaagcuggagggcacug

SEQ ID NO: 824312 - RNA, 19 nt, Artificial Sequence
  Description of Artificial Sequence: Synthetic oligonucleotide
gcuucaagccuauccuagc

SEQ ID NO: 824313 - RNA, 19 nt, Artificial Sequence
  Description of Artificial Sequence: Synthetic oligonucleotide
ugguaaacaccgagcugua

SEQ ID NO: 824314 - RNA, 19 nt, Artificial Sequence
  Description of Artificial Sequence: Synthetic oligonucleotide
ggcggaaaaucagugcuug

SEQ ID NO: 824315 - RNA, 19 nt, Artificial Sequence
  Description of Artificial Sequence: Synthetic oligonucleotide
ggucauaugaccacuuucu

SEQ ID NO: 824316 - RNA, 19 nt, Artificial Sequence
  Description of Artificial Sequence: Synthetic oligonucleotide
aggcggacagcuucugcgu

SEQ ID NO: 824317 - RNA, 19 nt, Artificial Sequence
  Description of Artificial Sequence: Synthetic oligonucleotide
cagggucguaagucagugc

SEQ ID NO: 824318 - RNA, 19 nt, Artificial Sequence
  Description of Artificial Sequence: Synthetic oligonucleotide
caggcggaaaaucagugcu

SEQ ID NO: 824319 - RNA, 19 nt, Artificial Sequence
  Description of Artificial Sequence: Synthetic oligonucleotide
uguuuacaguggggacugg

SEQ ID NO: 824320 - RNA, 19 nt, Artificial Sequence
  Description of Artificial Sequence: Synthetic oligonucleotide
ggcugaauuggugcggugc

SEQ ID NO: 824321 - RNA, 19 nt, Artificial Sequence
  Description of Artificial Sequence: Synthetic oligonucleotide
guaguuggcagggucguaa

SEQ ID NO: 824322 - RNA, 19 nt, Artificial Sequence
  Description of Artificial Sequence: Synthetic oligonucleotide
cacagcgcacccuggguuc

SEQ ID NO: 824323 - RNA, 19 nt, Artificial Sequence
  Description of Artificial Sequence: Synthetic oligonucleotide
caucgccuguccuagagcu

SEQ ID NO: 824324 - RNA, 19 nt, Artificial Sequence
  Description of Artificial Sequence: Synthetic oligonucleotide
ucguuuuaggcagcugaua

SEQ ID NO: 824325 - RNA, 19 nt, Artificial Sequence
  Description of Artificial Sequence: Synthetic oligonucleotide
uugacugguuugguccaga

SEQ ID NO: 824326 - RNA, 19 nt, Artificial Sequence
  Description of Artificial Sequence: Synthetic oligonucleotide
cuacuaaccagaagucccu

SEQ ID NO: 824327 - RNA, 19 nt, Artificial Sequence
  Description of Artificial Sequence: Synthetic oligonucleotide
guaagucagugcauuccca

SEQ ID NO: 824328 - RNA, 19 nt, Artificial Sequence
  Description of Artificial Sequence: Synthetic oligonucleotide
cagugcuuggacauagaua

SEQ ID NO: 824329 - RNA, 19 nt, Artificial Sequence
  Description of Artificial Sequence: Synthetic oligonucleotide
ccaggcggaaaaucagugc

SEQ ID NO: 824330 - RNA, 19 nt, Artificial Sequence
  Description of Artificial Sequence: Synthetic oligonucleotide
cuucaguggcggcuuuaug

SEQ ID NO: 824331 - RNA, 19 nt, Artificial Sequence
  Description of Artificial Sequence: Synthetic oligonucleotide
cgaguaauggucucugauc

SEQ ID NO: 824332 - RNA, 19 nt, Artificial Sequence
  Description of Artificial Sequence: Synthetic oligonucleotide
uccuuccaggcggaaaauc

SEQ ID NO: 824333 - RNA, 19 nt, Artificial Sequence
  Description of Artificial Sequence: Synthetic oligonucleotide
gcauagucaaauggacaag

SEQ ID NO: 824334 - RNA, 19 nt, Artificial Sequence
  Description of Artificial Sequence: Synthetic oligonucleotide
gcggaaaaucagugcuugg

SEQ ID NO: 824335 - RNA, 19 nt, Artificial Sequence
  Description of Artificial Sequence: Synthetic oligonucleotide
caccugcuugagauuauca

SEQ ID NO: 824336 - RNA, 19 nt, Artificial Sequence
  Description of Artificial Sequence: Synthetic oligonucleotide
acuugccuccacaguggac

SEQ ID NO: 824337 - RNA, 19 nt, Artificial Sequence
  Description of Artificial Sequence: Synthetic oligonucleotide
aguggcggcuuuauguuuu

SEQ ID NO: 824338 - RNA, 19 nt, Artificial Sequence
  Description of Artificial Sequence: Synthetic oligonucleotide
caagccuauccuagcaugu

SEQ ID NO: 824339 - RNA, 19 nt, Artificial Sequence
  Description of Artificial Sequence: Synthetic oligonucleotide
gcugauagcugccacguau

SEQ ID NO: 824340 - RNA, 19 nt, Artificial Sequence
  Description of Artificial Sequence: Synthetic oligonucleotide
gaagcgaugguggcuuugu

SEQ ID NO: 824341 - RNA, 19 nt, Artificial Sequence
  Description of Artificial Sequence: Synthetic oligonucleotide
caaauggacaaggcccaga

SEQ ID NO: 824342 - RNA, 19 nt, Artificial Sequence
  Description of Artificial Sequence: Synthetic oligonucleotide
gcagggucguaagucagug

SEQ ID NO: 824343 - RNA, 19 nt, Artificial Sequence
  Description of Artificial Sequence: Synthetic oligonucleotide
aguuagaauggggcuucau

SEQ ID NO: 824344 - RNA, 19 nt, Artificial Sequence
  Description of Artificial Sequence: Synthetic oligonucleotide
uggcuccaauggaagcgau

SEQ ID NO: 824345 - RNA, 19 nt, Artificial Sequence
  Description of Artificial Sequence: Synthetic oligonucleotide
gaguaauccuaaaguugua

SEQ ID NO: 824346 - RNA, 19 nt, Artificial Sequence
  Description of Artificial Sequence: Synthetic oligonucleotide
uggcggcuuuauguuuucc

SEQ ID NO: 824347 - RNA, 19 nt, Artificial Sequence
  Description of Artificial Sequence: Synthetic oligonucleotide
ccacaggcuacuaaccaga

SEQ ID NO: 824348 - RNA, 19 nt, Artificial Sequence
  Description of Artificial Sequence: Synthetic oligonucleotide
gugcggugcuuugacuuug

SEQ ID NO: 824349 - RNA, 19 nt, Artificial Sequence
  Description of Artificial Sequence: Synthetic oligonucleotide
cucccucguuccuggauga

SEQ ID NO: 824350 - RNA, 19 nt, Artificial Sequence
  Description of Artificial Sequence: Synthetic oligonucleotide
gucauaugaccacuuucuu

SEQ ID NO: 824351 - RNA, 19 nt, Artificial Sequence
  Description of Artificial Sequence: Synthetic oligonucleotide
agacaucgccuguccuaga

SEQ ID NO: 824352 - RNA, 19 nt, Artificial Sequence
  Description of Artificial Sequence: Synthetic oligonucleotide
uguaguuggcagggucgua

SEQ ID NO: 824353 - RNA, 19 nt, Artificial Sequence
  Description of Artificial Sequence: Synthetic oligonucleotide
cagagucaaauuccagagu

SEQ ID NO: 824354 - RNA, 19 nt, Artificial Sequence
  Description of Artificial Sequence: Synthetic oligonucleotide
ccaaucgaagggugccaag

SEQ ID NO: 824355 - RNA, 19 nt, Artificial Sequence
  Description of Artificial Sequence: Synthetic oligonucleotide
ggauauaguggagauggau

SEQ ID NO: 824356 - RNA, 19 nt, Artificial Sequence
  Description of Artificial Sequence: Synthetic oligonucleotide
ccuuccggauauaguggag

SEQ ID NO: 824357 - RNA, 19 nt, Artificial Sequence
  Description of Artificial Sequence: Synthetic oligonucleotide
cucguuuuaggcagcugau

SEQ ID NO: 824358 - RNA, 19 nt, Artificial Sequence
  Description of Artificial Sequence: Synthetic oligonucleotide
ccuacagcaccugaaggga

SEQ ID NO: 824359 - RNA, 19 nt, Artificial Sequence
  Description of Artificial Sequence: Synthetic oligonucleotide
cacaguggacucuggcucu

SEQ ID NO: 824360 - RNA, 19 nt, Artificial Sequence
  Description of Artificial Sequence: Synthetic oligonucleotide
guggcggcuuuauguuuuc

SEQ ID NO: 824361 - RNA, 19 nt, Artificial Sequence
  Description of Artificial Sequence: Synthetic oligonucleotide
gcugaauuggugcggugcu

SEQ ID NO: 824362 - RNA, 19 nt, Artificial Sequence
  Description of Artificial Sequence: Synthetic oligonucleotide
gguuuacuaaaggguuaca

SEQ ID NO: 824363 - RNA, 19 nt, Artificial Sequence
  Description of Artificial Sequence: Synthetic oligonucleotide
gugcccacccagggaacag

SEQ ID NO: 824364 - RNA, 19 nt, Artificial Sequence
  Description of Artificial Sequence: Synthetic oligonucleotide
ccaagauguucaaaugccu

SEQ ID NO: 824365 - RNA, 19 nt, Artificial Sequence
  Description of Artificial Sequence: Synthetic oligonucleotide
cugauagcugccacguauu

SEQ ID NO: 824366 - RNA, 19 nt, Artificial Sequence
  Description of Artificial Sequence: Synthetic oligonucleotide
acagcgcacccuggguucu

SEQ ID NO: 824367 - RNA, 19 nt, Artificial Sequence
  Description of Artificial Sequence: Synthetic oligonucleotide
aggcggaaaaucagugcuu

SEQ ID NO: 824368 - RNA, 19 nt, Artificial Sequence
  Description of Artificial Sequence: Synthetic oligonucleotide
ggaagcgaugguggcuuug

SEQ ID NO: 824369 - RNA, 19 nt, Artificial Sequence
  Description of Artificial Sequence: Synthetic oligonucleotide
ggcuccaauggaagcgaug

SEQ ID NO: 824370 - RNA, 19 nt, Artificial Sequence
  Description of Artificial Sequence: Synthetic oligonucleotide
uggaagcgaugguggcuuu

SEQ ID NO: 824371 - RNA, 19 nt, Artificial Sequence
  Description of Artificial Sequence: Synthetic oligonucleotide
cgagaacucuacugcuuuc

SEQ ID NO: 824372 - RNA, 19 nt, Artificial Sequence
  Description of Artificial Sequence: Synthetic oligonucleotide
auacugcugcauagucaaa

SEQ ID NO: 824373 - RNA, 19 nt, Artificial Sequence
  Description of Artificial Sequence: Synthetic oligonucleotide
acccuggguucuguuuuaa

SEQ ID NO: 824374 - RNA, 19 nt, Artificial Sequence
  Description of Artificial Sequence: Synthetic oligonucleotide
gcgagaacucuacugcuuu

SEQ ID NO: 824375 - RNA, 19 nt, Artificial Sequence
  Description of Artificial Sequence: Synthetic oligonucleotide
gcguaagcucucuuggcau

SEQ ID NO: 824376 - RNA, 19 nt, Artificial Sequence
  Description of Artificial Sequence: Synthetic oligonucleotide
ucccucguuccuggaugau

SEQ ID NO: 824377 - RNA, 19 nt, Artificial Sequence
  Description of Artificial Sequence: Synthetic oligonucleotide
ggucguaagucagugcauu

SEQ ID NO: 824378 - RNA, 19 nt, Artificial Sequence
  Description of Artificial Sequence: Synthetic oligonucleotide
caguuagaauggggcuuca

SEQ ID NO: 824379 - RNA, 19 nt, Artificial Sequence
  Description of Artificial Sequence: Synthetic oligonucleotide
caugggcuuuaggcuucuc

SEQ ID NO: 824380 - RNA, 19 nt, Artificial Sequence
  Description of Artificial Sequence: Synthetic oligonucleotide
ggcggacagcuucugcgua

SEQ ID NO: 824381 - RNA, 19 nt, Artificial Sequence
  Description of Artificial Sequence: Synthetic oligonucleotide
ccaaguaauuggcucguuu

SEQ ID NO: 824382 - RNA, 19 nt, Artificial Sequence
  Description of Artificial Sequence: Synthetic oligonucleotide
ggugcggugcuuugacuuu

SEQ ID NO: 824383 - RNA, 19 nt, Artificial Sequence
  Description of Artificial Sequence: Synthetic oligonucleotide
caguggcggcuuuauguuu

SEQ ID NO: 824384 - RNA, 19 nt, Artificial Sequence
  Description of Artificial Sequence: Synthetic oligonucleotide
cugaugcauacugcugcau

SEQ ID NO: 824385 - RNA, 19 nt, Artificial Sequence
  Description of Artificial Sequence: Synthetic oligonucleotide
gcuucugcguaagcucucu

SEQ ID NO: 824386 - RNA, 19 nt, Artificial Sequence
  Description of Artificial Sequence: Synthetic oligonucleotide
cagcgcacccuggguucug

SEQ ID NO: 824387 - RNA, 19 nt, Artificial Sequence
  Description of Artificial Sequence: Synthetic oligonucleotide
gccuauccuagcaugucuu

SEQ ID NO: 824388 - RNA, 19 nt, Artificial Sequence
  Description of Artificial Sequence: Synthetic oligonucleotide
ggcagggucguaagucagu

SEQ ID NO: 824389 - RNA, 19 nt, Artificial Sequence
  Description of Artificial Sequence: Synthetic oligonucleotide
cuucugcguaagcucucuu

SEQ ID NO: 824390 - RNA, 19 nt, Artificial Sequence
  Description of Artificial Sequence: Synthetic oligonucleotide
cugaauuggugcggugcuu

SEQ ID NO: 824391 - RNA, 19 nt, Artificial Sequence
  Description of Artificial Sequence: Synthetic oligonucleotide
cggauauaguggagaugga

SEQ ID NO: 824392 - RNA, 19 nt, Artificial Sequence
  Description of Artificial Sequence: Synthetic oligonucleotide
ccuauccuagcaugucuuu

SEQ ID NO: 824393 - RNA, 19 nt, Artificial Sequence
  Description of Artificial Sequence: Synthetic oligonucleotide
gggucguaagucagugcau

SEQ ID NO: 824394 - RNA, 19 nt, Artificial Sequence
  Description of Artificial Sequence: Synthetic oligonucleotide
gcaugggcuuuaggcuucu

SEQ ID NO: 824395 - RNA, 19 nt, Artificial Sequence
  Description of Artificial Sequence: Synthetic oligonucleotide
uaaauaaggaggcuuaggc

SEQ ID NO: 824396 - RNA, 19 nt, Artificial Sequence
  Description of Artificial Sequence: Synthetic oligonucleotide
aagacgaaucuucuugugc

SEQ ID NO: 824397 - RNA, 19 nt, Artificial Sequence
  Description of Artificial Sequence: Synthetic oligonucleotide
acagacuuguaccagacac

SEQ ID NO: 824398 - RNA, 19 nt, Artificial Sequence
  Description of Artificial Sequence: Synthetic oligonucleotide
uguaguagugagaagagga

SEQ ID NO: 824399 - RNA, 19 nt, Artificial Sequence
  Description of Artificial Sequence: Synthetic oligonucleotide
ugaaguuucacuuugccuc

SEQ ID NO: 824400 - RNA, 19 nt, Artificial Sequence
  Description of Artificial Sequence: Synthetic oligonucleotide
augaucuuggggcugaggc

SEQ ID NO: 824401 - RNA, 19 nt, Artificial Sequence
  Description of Artificial Sequence: Synthetic oligonucleotide
aguuucucacuauaguagc

SEQ ID NO: 824402 - RNA, 19 nt, Artificial Sequence
  Description of Artificial Sequence: Synthetic oligonucleotide
gaucucgccauccaguugg

SEQ ID NO: 824403 - RNA, 19 nt, Artificial Sequence
  Description of Artificial Sequence: Synthetic oligonucleotide
uuugaaccguguaagaugu

SEQ ID NO: 824404 - RNA, 19 nt, Artificial Sequence
  Description of Artificial Sequence: Synthetic oligonucleotide
aaauaaggaggcuuaggca

SEQ ID NO: 824405 - RNA, 19 nt, Artificial Sequence
  Description of Artificial Sequence: Synthetic oligonucleotide
aaaaccguuggccucugag

SEQ ID NO: 824406 - RNA, 19 nt, Artificial Sequence
  Description of Artificial Sequence: Synthetic oligonucleotide
aaccguguaagaugugugg

SEQ ID NO: 824407 - RNA, 19 nt, Artificial Sequence
  Description of Artificial Sequence: Synthetic oligonucleotide
acggugguaggcuaagucc

SEQ ID NO: 824408 - RNA, 19 nt, Artificial Sequence
  Description of Artificial Sequence: Synthetic oligonucleotide
aacggugguaggcuaaguc

SEQ ID NO: 824409 - RNA, 19 nt, Artificial Sequence
  Description of Artificial Sequence: Synthetic oligonucleotide
ugagacccaacccauuggg

SEQ ID NO: 824410 - RNA, 19 nt, Artificial Sequence
  Description of Artificial Sequence: Synthetic oligonucleotide
gaaggugacgguugcaggg

SEQ ID NO: 824411 - RNA, 19 nt, Artificial Sequence
  Description of Artificial Sequence: Synthetic oligonucleotide
ucuguaguagugagaagag

SEQ ID NO: 824412 - RNA, 19 nt, Artificial Sequence
  Description of Artificial Sequence: Synthetic oligonucleotide
cacuauaguagccaggcag

SEQ ID NO: 824413 - RNA, 19 nt, Artificial Sequence
  Description of Artificial Sequence: Synthetic oligonucleotide
uuuccguacaaaaccaugu

SEQ ID NO: 824414 - RNA, 19 nt, Artificial Sequence
  Description of Artificial Sequence: Synthetic oligonucleotide
aagaguaccccaccacuuc

SEQ ID NO: 824415 - RNA, 19 nt, Artificial Sequence
  Description of Artificial Sequence: Synthetic oligonucleotide
agcuguauaaggugcuccc

SEQ ID NO: 824416 - RNA, 19 nt, Artificial Sequence
  Description of Artificial Sequence: Synthetic oligonucleotide
cuuugaaccguguaagaug

SEQ ID NO: 824417 - RNA, 19 nt, Artificial Sequence
  Description of Artificial Sequence: Synthetic oligonucleotide
ugcgaacccacgaugaagc

SEQ ID NO: 824418 - RNA, 19 nt, Artificial Sequence
  Description of Artificial Sequence: Synthetic oligonucleotide
acucgcagcacagagcucc

SEQ ID NO: 824419 - RNA, 19 nt, Artificial Sequence
  Description of Artificial Sequence: Synthetic oligonucleotide
caugucagcacccuagccc

SEQ ID NO: 824420 - RNA, 19 nt, Artificial Sequence
  Description of Artificial Sequence: Synthetic oligonucleotide
acgguugcaggguaggucg

SEQ ID NO: 824421 - RNA, 19 nt, Artificial Sequence
  Description of Artificial Sequence: Synthetic oligonucleotide
cuucuggcggcuaaggugc

SEQ ID NO: 824422 - RNA, 19 nt, Artificial Sequence
  Description of Artificial Sequence: Synthetic oligonucleotide
gguggcuuagcuuuggagg

SEQ ID NO: 824423 - RNA, 19 nt, Artificial Sequence
  Description of Artificial Sequence: Synthetic oligonucleotide
ucugagucggagccgagag

SEQ ID NO: 824424 - RNA, 19 nt, Artificial Sequence
  Description of Artificial Sequence: Synthetic oligonucleotide
uauaaggugcucccgcuca

SEQ ID NO: 824425 - RNA, 19 nt, Artificial Sequence
  Description of Artificial Sequence: Synthetic oligonucleotide
uuacacaaagaguacccca

SEQ ID NO: 824426 - RNA, 19 nt, Artificial Sequence
  Description of Artificial Sequence: Synthetic oligonucleotide
agaguaccccaccacuucc

SEQ ID NO: 824427 - RNA, 19 nt, Artificial Sequence
  Description of Artificial Sequence: Synthetic oligonucleotide
aacauuucccaggaggaug

SEQ ID NO: 824428 - RNA, 19 nt, Artificial Sequence
  Description of Artificial Sequence: Synthetic oligonucleotide
agacgaaucuucuugugcu

SEQ ID NO: 824429 - RNA, 19 nt, Artificial Sequence
  Description of Artificial Sequence: Synthetic oligonucleotide
ugagucggagccgagagag

SEQ ID NO: 824430 - RNA, 19 nt, Artificial Sequence
  Description of Artificial Sequence: Synthetic oligonucleotide
guacacaggaccuggagug

SEQ ID NO: 824431 - RNA, 19 nt, Artificial Sequence
  Description of Artificial Sequence: Synthetic oligonucleotide
acacaaagaguaccccacc

SEQ ID NO: 824432 - RNA, 19 nt, Artificial Sequence
  Description of Artificial Sequence: Synthetic oligonucleotide
gucacguucaaucacaucu

SEQ ID NO: 824433 - RNA, 19 nt, Artificial Sequence
  Description of Artificial Sequence: Synthetic oligonucleotide
cucacuauaguagccaggc

SEQ ID NO: 824434 - RNA, 19 nt, Artificial Sequence
  Description of Artificial Sequence: Synthetic oligonucleotide
ucgccauccaguuggauug

SEQ ID NO: 824435 - RNA, 19 nt, Artificial Sequence
  Description of Artificial Sequence: Synthetic oligonucleotide
ucucacuauaguagccagg

SEQ ID NO: 824436 - RNA, 19 nt, Artificial Sequence
  Description of Artificial Sequence: Synthetic oligonucleotide
uggggacacauccugagga

SEQ ID NO: 824437 - RNA, 19 nt, Artificial Sequence
  Description of Artificial Sequence: Synthetic oligonucleotide
uucagcacacggaacaggu

SEQ ID NO: 824438 - RNA, 19 nt, Artificial Sequence
  Description of Artificial Sequence: Synthetic oligonucleotide
uuuacacaaagaguacccc

SEQ ID NO: 824439 - RNA, 19 nt, Artificial Sequence
  Description of Artificial Sequence: Synthetic oligonucleotide
agcccuggggaacauuucc

SEQ ID NO: 824440 - RNA, 19 nt, Artificial Sequence
  Description of Artificial Sequence: Synthetic oligonucleotide
uggagagcgacacuccagc

SEQ ID NO: 824441 - RNA, 19 nt, Artificial Sequence
  Description of Artificial Sequence: Synthetic oligonucleotide
aaaccguuggccucugagu

SEQ ID NO: 824442 - RNA, 19 nt, Artificial Sequence
  Description of Artificial Sequence: Synthetic oligonucleotide
agugagacccaacccauug

SEQ ID NO: 824443 - RNA, 19 nt, Artificial Sequence
  Description of Artificial Sequence: Synthetic oligonucleotide
acuauaguagccaggcagg

SEQ ID NO: 824444 - RNA, 19 nt, Artificial Sequence
  Description of Artificial Sequence: Synthetic oligonucleotide
guaagauguguggagaccc

SEQ ID NO: 824445 - RNA, 19 nt, Artificial Sequence
  Description of Artificial Sequence: Synthetic oligonucleotide
agagcgacacuccagcuca

SEQ ID NO: 824446 - RNA, 19 nt, Artificial Sequence
  Description of Artificial Sequence: Synthetic oligonucleotide
agagagcugagcucgucgg

SEQ ID NO: 824447 - RNA, 19 nt, Artificial Sequence
  Description of Artificial Sequence: Synthetic oligonucleotide
gagagagcugagcucgucg

SEQ ID NO: 824448 - RNA, 19 nt, Artificial Sequence
  Description of Artificial Sequence: Synthetic oligonucleotide
cguucaaucacaucuagcc

SEQ ID NO: 824449 - RNA, 19 nt, Artificial Sequence
  Description of Artificial Sequence: Synthetic oligonucleotide
uucucacuauaguagccag

SEQ ID NO: 824450 - RNA, 19 nt, Artificial Sequence
  Description of Artificial Sequence: Synthetic oligonucleotide
aacuugacucaagagaaaa

SEQ ID NO: 824451 - RNA, 19 nt, Artificial Sequence
  Description of Artificial Sequence: Synthetic oligonucleotide
ucgaugguuucauacuggc

SEQ ID NO: 824452 - RNA, 19 nt, Artificial Sequence
  Description of Artificial Sequence: Synthetic oligonucleotide
uggaaugcccuucuggcaa

SEQ ID NO: 824453 - RNA, 19 nt, Artificial Sequence
  Description of Artificial Sequence: Synthetic oligonucleotide
cuggcaacgaagacgaauc

SEQ ID NO: 824454 - RNA, 19 nt, Artificial Sequence
  Description of Artificial Sequence: Synthetic oligonucleotide
aaggugcucccgcucaauc

SEQ ID NO: 824455 - RNA, 19 nt, Artificial Sequence
  Description of Artificial Sequence: Synthetic oligonucleotide
ugcccuucuggcaacgaag

SEQ ID NO: 824456 - RNA, 19 nt, Artificial Sequence
  Description of Artificial Sequence: Synthetic oligonucleotide
uuacaaguagguguccuca

SEQ ID NO: 824457 - RNA, 19 nt, Artificial Sequence
  Description of Artificial Sequence: Synthetic oligonucleotide
aguaccccaccacuucccc

SEQ ID NO: 824458 - RNA, 19 nt, Artificial Sequence
  Description of Artificial Sequence: Synthetic oligonucleotide
uguaagauguguggagacc

SEQ ID NO: 824459 - RNA, 19 nt, Artificial Sequence
  Description of Artificial Sequence: Synthetic oligonucleotide
uguauaaggugcucccgcu

SEQ ID NO: 824460 - RNA, 19 nt, Artificial Sequence
  Description of Artificial Sequence: Synthetic oligonucleotide
cucgaugguuucauacugg

SEQ ID NO: 824461 - RNA, 19 nt, Artificial Sequence
  Description of Artificial Sequence: Synthetic oligonucleotide
augaagccgaacuugucga

SEQ ID NO: 824462 - RNA, 19 nt, Artificial Sequence
  Description of Artificial Sequence: Synthetic oligonucleotide
ugaaccguguaagaugugu

SEQ ID NO: 824463 - RNA, 19 nt, Artificial Sequence
  Description of Artificial Sequence: Synthetic oligonucleotide
ucgcagcuguauaaggugc

SEQ ID NO: 824464 - RNA, 19 nt, Artificial Sequence
  Description of Artificial Sequence: Synthetic oligonucleotide
ucggcaaaaccguuggccu

SEQ ID NO: 824465 - RNA, 19 nt, Artificial Sequence
  Description of Artificial Sequence: Synthetic oligonucleotide
uuucuauacaagccuguuu

SEQ ID NO: 824466 - RNA, 19 nt, Artificial Sequence
  Description of Artificial Sequence: Synthetic oligonucleotide
acauuucccaggaggaugg

SEQ ID NO: 824467 - RNA, 19 nt, Artificial Sequence
  Description of Artificial Sequence: Synthetic oligonucleotide
uugauuggggccuggggac

SEQ ID NO: 824468 - RNA, 19 nt, Artificial Sequence
  Description of Artificial Sequence: Synthetic oligonucleotide
ucuuugaaccguguaagau

SEQ ID NO: 824469 - RNA, 19 nt, Artificial Sequence
  Description of Artificial Sequence: Synthetic oligonucleotide
gaggguaggcguauggaag

SEQ ID NO: 824470 - RNA, 19 nt, Artificial Sequence
  Description of Artificial Sequence: Synthetic oligonucleotide
cagacuuguaccagacacc

SEQ ID NO: 824471 - RNA, 19 nt, Artificial Sequence
  Description of Artificial Sequence: Synthetic oligonucleotide
uaggucgaggaccaggcuc

SEQ ID NO: 824472 - RNA, 19 nt, Artificial Sequence
  Description of Artificial Sequence: Synthetic oligonucleotide
gaacuugucgaugcggcgc

SEQ ID NO: 824473 - RNA, 19 nt, Artificial Sequence
  Description of Artificial Sequence: Synthetic oligonucleotide
aggaggguugcaucugagg

SEQ ID NO: 824474 - RNA, 19 nt, Artificial Sequence
  Description of Artificial Sequence: Synthetic oligonucleotide
cucagggcgguauagcgug

SEQ ID NO: 824475 - RNA, 19 nt, Artificial Sequence
  Description of Artificial Sequence: Synthetic oligonucleotide
uauuuccguacaaaaccau

SEQ ID NO: 824476 - RNA, 19 nt, Artificial Sequence
  Description of Artificial Sequence: Synthetic oligonucleotide
ugagugagacccaacccau

SEQ ID NO: 824477 - RNA, 19 nt, Artificial Sequence
  Description of Artificial Sequence: Synthetic oligonucleotide
cucuucgccaucccggccg

SEQ ID NO: 824478 - RNA, 19 nt, Artificial Sequence
  Description of Artificial Sequence: Synthetic oligonucleotide
ugggccauagcuucugccu

SEQ ID NO: 824479 - RNA, 19 nt, Artificial Sequence
  Description of Artificial Sequence: Synthetic oligonucleotide
caaaagaacaugucccaga

SEQ ID NO: 824480 - RNA, 19 nt, Artificial Sequence
  Description of Artificial Sequence: Synthetic oligonucleotide
ugaguagcacagcagcaau

SEQ ID NO: 824481 - RNA, 19 nt, Artificial Sequence
  Description of Artificial Sequence: Synthetic oligonucleotide
gucgcagcuguauaaggug

SEQ ID NO: 824482 - RNA, 19 nt, Artificial Sequence
  Description of Artificial Sequence: Synthetic oligonucleotide
guaggcuaaguccugggga

SEQ ID NO: 824483 - RNA, 19 nt, Artificial Sequence
  Description of Artificial Sequence: Synthetic oligonucleotide
gcagaaucuguacugggcc

SEQ ID NO: 824484 - RNA, 19 nt, Artificial Sequence
  Description of Artificial Sequence: Synthetic oligonucleotide
gcagguacuucucacagac

SEQ ID NO: 824485 - RNA, 19 nt, Artificial Sequence
  Description of Artificial Sequence: Synthetic oligonucleotide
aacgaagacgaaucuucuu

SEQ ID NO: 824486 - RNA, 19 nt, Artificial Sequence
  Description of Artificial Sequence: Synthetic oligonucleotide
ugguaggcuaaguccuggg

SEQ ID NO: 824487 - RNA, 19 nt, Artificial Sequence
  Description of Artificial Sequence: Synthetic oligonucleotide
acguucaaucacaucuagc

SEQ ID NO: 824488 - RNA, 19 nt, Artificial Sequence
  Description of Artificial Sequence: Synthetic oligonucleotide
ucuauacaagccuguuuau

SEQ ID NO: 824489 - RNA, 19 nt, Artificial Sequence
  Description of Artificial Sequence: Synthetic oligonucleotide
cuugugagccacaggggac

SEQ ID NO: 824490 - RNA, 19 nt, Artificial Sequence
  Description of Artificial Sequence: Synthetic oligonucleotide
agaagguggaaugcccuuc

SEQ ID NO: 824491 - RNA, 19 nt, Artificial Sequence
  Description of Artificial Sequence: Synthetic oligonucleotide
uuggcaccaugcauccuag

SEQ ID NO: 824492 - RNA, 19 nt, Artificial Sequence
  Description of Artificial Sequence: Synthetic oligonucleotide
aggauucugcugaaguuuc

SEQ ID NO: 824493 - RNA, 19 nt, Artificial Sequence
  Description of Artificial Sequence: Synthetic oligonucleotide
gugagacccaacccauugg

SEQ ID NO: 824494 - RNA, 19 nt, Artificial Sequence
  Description of Artificial Sequence: Synthetic oligonucleotide
aagccuguuuauuuccgua

SEQ ID NO: 824495 - RNA, 19 nt, Artificial Sequence
  Description of Artificial Sequence: Synthetic oligonucleotide
gcauccuagguggagagcg

SEQ ID NO: 824496 - RNA, 19 nt, Artificial Sequence
  Description of Artificial Sequence: Synthetic oligonucleotide
ucuggcaacgaagacgaau

SEQ ID NO: 824497 - RNA, 19 nt, Artificial Sequence
  Description of Artificial Sequence: Synthetic oligonucleotide
uaguagugagaagaggauc

SEQ ID NO: 824498 - RNA, 19 nt, Artificial Sequence
  Description of Artificial Sequence: Synthetic oligonucleotide
gagcucgucgguaguagcg

SEQ ID NO: 824499 - RNA, 19 nt, Artificial Sequence
  Description of Artificial Sequence: Synthetic oligonucleotide
gaaccguguaagaugugug

SEQ ID NO: 824500 - RNA, 19 nt, Artificial Sequence
  Description of Artificial Sequence: Synthetic oligonucleotide
ugaaccaagaaggcuuccu

SEQ ID NO: 824501 - RNA, 19 nt, Artificial Sequence
  Description of Artificial Sequence: Synthetic oligonucleotide
ggcguauggaaggugacgg

SEQ ID NO: 824502 - RNA, 19 nt, Artificial Sequence
  Description of Artificial Sequence: Synthetic oligonucleotide
cuugacucaagagaaaaua

SEQ ID NO: 824503 - RNA, 19 nt, Artificial Sequence
  Description of Artificial Sequence: Synthetic oligonucleotide
ccguacaaaaccauguuuc

SEQ ID NO: 824504 - RNA, 19 nt, Artificial Sequence
  Description of Artificial Sequence: Synthetic oligonucleotide
guuucucacuauaguagcc

SEQ ID NO: 824505 - RNA, 19 nt, Artificial Sequence
  Description of Artificial Sequence: Synthetic oligonucleotide
accguuggccucugagucg

SEQ ID NO: 824506 - RNA, 19 nt, Artificial Sequence
  Description of Artificial Sequence: Synthetic oligonucleotide
guuacaaguagguguccuc

SEQ ID NO: 824507 - RNA, 19 nt, Artificial Sequence
  Description of Artificial Sequence: Synthetic oligonucleotide
cucccgcucaaucuggcgc

SEQ ID NO: 824508 - RNA, 19 nt, Artificial Sequence
  Description of Artificial Sequence: Synthetic oligonucleotide
agcacccuagcccugggga

SEQ ID NO: 824509 - RNA, 19 nt, Artificial Sequence
  Description of Artificial Sequence: Synthetic oligonucleotide
gagccaacuugacucaaga

SEQ ID NO: 824510 - RNA, 19 nt, Artificial Sequence
  Description of Artificial Sequence: Synthetic oligonucleotide
aaagaguaccccaccacuu

SEQ ID NO: 824511 - RNA, 19 nt, Artificial Sequence
  Description of Artificial Sequence: Synthetic oligonucleotide
ucacuauaguagccaggca

SEQ ID NO: 824512 - RNA, 19 nt, Artificial Sequence
  Description of Artificial Sequence: Synthetic oligonucleotide
cacuuggaggccuggcucc

SEQ ID NO: 824513 - RNA, 19 nt, Artificial Sequence
  Description of Artificial Sequence: Synthetic oligonucleotide
acaagccuguuuauuuccg

SEQ ID NO: 824514 - RNA, 19 nt, Artificial Sequence
  Description of Artificial Sequence: Synthetic oligonucleotide
ggcgguauagcguguaggc

SEQ ID NO: 824515 - RNA, 19 nt, Artificial Sequence
  Description of Artificial Sequence: Synthetic oligonucleotide
ugcaucuccugaagcaguc

SEQ ID NO: 824516 - RNA, 19 nt, Artificial Sequence
  Description of Artificial Sequence: Synthetic oligonucleotide
guaguagcggcgucgggac

SEQ ID NO: 824517 - RNA, 19 nt, Artificial Sequence
  Description of Artificial Sequence: Synthetic oligonucleotide
ucccggguuacaaguaggu

SEQ ID NO: 824518 - RNA, 19 nt, Artificial Sequence
  Description of Artificial Sequence: Synthetic oligonucleotide
gagcugagcucgucgguag

SEQ ID NO: 824519 - RNA, 19 nt, Artificial Sequence
  Description of Artificial Sequence: Synthetic oligonucleotide
uugucgaugcggcgcucgg

SEQ ID NO: 824520 - RNA, 19 nt, Artificial Sequence
  Description of Artificial Sequence: Synthetic oligonucleotide
gagagcgacacuccagcuc

SEQ ID NO: 824521 - RNA, 19 nt, Artificial Sequence
  Description of Artificial Sequence: Synthetic oligonucleotide
gguacugccaggcccgucc

SEQ ID NO: 824522 - RNA, 19 nt, Artificial Sequence
  Description of Artificial Sequence: Synthetic oligonucleotide
auagcguguaggccuucag

SEQ ID NO: 824523 - RNA, 19 nt, Artificial Sequence
  Description of Artificial Sequence: Synthetic oligonucleotide
cucccggguuacaaguagg

SEQ ID NO: 824524 - RNA, 19 nt, Artificial Sequence
  Description of Artificial Sequence: Synthetic oligonucleotide
ugcccgcugucuuuugucc

SEQ ID NO: 824525 - RNA, 19 nt, Artificial Sequence
  Description of Artificial Sequence: Synthetic oligonucleotide
cucgucgguaguagcggcg

SEQ ID NO: 824526 - RNA, 19 nt, Artificial Sequence
  Description of Artificial Sequence: Synthetic oligonucleotide
agccgagagagcugagcuc

SEQ ID NO: 824527 - RNA, 19 nt, Artificial Sequence
  Description of Artificial Sequence: Synthetic oligonucleotide
agucggagccgagagagcu

SEQ ID NO: 824528 - RNA, 19 nt, Artificial Sequence
  Description of Artificial Sequence: Synthetic oligonucleotide
auccuagguggagagcgac

SEQ ID NO: 824529 - RNA, 19 nt, Artificial Sequence
  Description of Artificial Sequence: Synthetic oligonucleotide
ccaacuugacucaagagaa

SEQ ID NO: 824530 - RNA, 19 nt, Artificial Sequence
  Description of Artificial Sequence: Synthetic oligonucleotide
aaggugacgguugcagggu

SEQ ID NO: 824531 - RNA, 19 nt, Artificial Sequence
  Description of Artificial Sequence: Synthetic oligonucleotide
caauggccaagcaguuggg

SEQ ID NO: 824532 - RNA, 19 nt, Artificial Sequence
  Description of Artificial Sequence: Synthetic oligonucleotide
cacuuggacucccucugcc

SEQ ID NO: 824533 - RNA, 19 nt, Artificial Sequence
  Description of Artificial Sequence: Synthetic oligonucleotide
agcucgucgguaguagcgg

SEQ ID NO: 824534 - RNA, 19 nt, Artificial Sequence
  Description of Artificial Sequence: Synthetic oligonucleotide
gucgguaguagcggcgucg

SEQ ID NO: 824535 - RNA, 19 nt, Artificial Sequence
  Description of Artificial Sequence: Synthetic oligonucleotide
uggccaugaccuccucggg

SEQ ID NO: 824536 - RNA, 19 nt, Artificial Sequence
  Description of Artificial Sequence: Synthetic oligonucleotide
uccuagguggagagcgaca

SEQ ID NO: 824537 - RNA, 19 nt, Artificial Sequence
  Description of Artificial Sequence: Synthetic oligonucleotide
uaggcguauggaaggugac

SEQ ID NO: 824538 - RNA, 19 nt, Artificial Sequence
  Description of Artificial Sequence: Synthetic oligonucleotide
uggcugagccaacuugacu

SEQ ID NO: 824539 - RNA, 19 nt, Artificial Sequence
  Description of Artificial Sequence: Synthetic oligonucleotide
gagaagaggaucucgccau

SEQ ID NO: 824540 - RNA, 19 nt, Artificial Sequence
  Description of Artificial Sequence: Synthetic oligonucleotide
caggggaacuuccuccagc

SEQ ID NO: 824541 - RNA, 19 nt, Artificial Sequence
  Description of Artificial Sequence: Synthetic oligonucleotide
aggcguauggaaggugacg

SEQ ID NO: 824542 - RNA, 19 nt, Artificial Sequence
  Description of Artificial Sequence: Synthetic oligonucleotide
gcucgaugguuucauacug

SEQ ID NO: 824543 - RNA, 19 nt, Artificial Sequence
  Description of Artificial Sequence: Synthetic oligonucleotide
augaguagcacagcagcaa

SEQ ID NO: 824544 - RNA, 19 nt, Artificial Sequence
  Description of Artificial Sequence: Synthetic oligonucleotide
ugcaugaucuuggggcuga

SEQ ID NO: 824545 - RNA, 19 nt, Artificial Sequence
  Description of Artificial Sequence: Synthetic oligonucleotide
guaggcguauggaagguga

SEQ ID NO: 824546 - RNA, 19 nt, Artificial Sequence
  Description of Artificial Sequence: Synthetic oligonucleotide
caggucacguucaaucaca

SEQ ID NO: 824547 - RNA, 19 nt, Artificial Sequence
  Description of Artificial Sequence: Synthetic oligonucleotide
ucgaucuucuggcggcuaa

SEQ ID NO: 824548 - RNA, 19 nt, Artificial Sequence
  Description of Artificial Sequence: Synthetic oligonucleotide
accguguaagaugugugga

SEQ ID NO: 824549 - RNA, 19 nt, Artificial Sequence
  Description of Artificial Sequence: Synthetic oligonucleotide
ggaacauuucccaggagga

SEQ ID NO: 824550 - RNA, 19 nt, Artificial Sequence
  Description of Artificial Sequence: Synthetic oligonucleotide
uauagcguguaggccuuca

SEQ ID NO: 824551 - RNA, 19 nt, Artificial Sequence
  Description of Artificial Sequence: Synthetic oligonucleotide
ucccgcucaaucuggcgcu

SEQ ID NO: 824552 - RNA, 19 nt, Artificial Sequence
  Description of Artificial Sequence: Synthetic oligonucleotide
uacacaggaccuggagugc

SEQ ID NO: 824553 - RNA, 19 nt, Artificial Sequence
  Description of Artificial Sequence: Synthetic oligonucleotide
guauaaggugcucccgcuc

SEQ ID NO: 824554 - RNA, 19 nt, Artificial Sequence
  Description of Artificial Sequence: Synthetic oligonucleotide
ucggagccgagagagcuga

SEQ ID NO: 824555 - RNA, 19 nt, Artificial Sequence
  Description of Artificial Sequence: Synthetic oligonucleotide
cuuguaccagacaccagaa

SEQ ID NO: 824556 - RNA, 19 nt, Artificial Sequence
  Description of Artificial Sequence: Synthetic oligonucleotide
agcgacacuccagcucacc

SEQ ID NO: 824557 - RNA, 19 nt, Artificial Sequence
  Description of Artificial Sequence: Synthetic oligonucleotide
uccucgggacacaaacauc

SEQ ID NO: 824558 - RNA, 19 nt, Artificial Sequence
  Description of Artificial Sequence: Synthetic oligonucleotide
gaaugcccuucuggcaacg

SEQ ID NO: 824559 - RNA, 19 nt, Artificial Sequence
  Description of Artificial Sequence: Synthetic oligonucleotide
cauccugaggagggcaugc

SEQ ID NO: 824560 - RNA, 19 nt, Artificial Sequence
  Description of Artificial Sequence: Synthetic oligonucleotide
cugcgaacccacgaugaag

SEQ ID NO: 824561 - RNA, 19 nt, Artificial Sequence
  Description of Artificial Sequence: Synthetic oligonucleotide
gugguaggcuaaguccugg

SEQ ID NO: 824562 - RNA, 19 nt, Artificial Sequence
  Description of Artificial Sequence: Synthetic oligonucleotide
gcuugauuggggccugggg

SEQ ID NO: 824563 - RNA, 19 nt, Artificial Sequence
  Description of Artificial Sequence: Synthetic oligonucleotide
aaccacucugucauguaua

SEQ ID NO: 824564 - RNA, 19 nt, Artificial Sequence
  Description of Artificial Sequence: Synthetic oligonucleotide
gguaggucgaggaccaggc

SEQ ID NO: 824565 - RNA, 19 nt, Artificial Sequence
  Description of Artificial Sequence: Synthetic oligonucleotide
acgaugaagccgaacuugu

SEQ ID NO: 824566 - RNA, 19 nt, Artificial Sequence
  Description of Artificial Sequence: Synthetic oligonucleotide
agcgucgcagcuguauaag

SEQ ID NO: 824567 - RNA, 19 nt, Artificial Sequence
  Description of Artificial Sequence: Synthetic oligonucleotide
uugaaccguguaagaugug

SEQ ID NO: 824568 - RNA, 19 nt, Artificial Sequence
  Description of Artificial Sequence: Synthetic oligonucleotide
uccugggaacggugguagg

SEQ ID NO: 824569 - RNA, 19 nt, Artificial Sequence
  Description of Artificial Sequence: Synthetic oligonucleotide
gugacgguugcaggguagg

SEQ ID NO: 824570 - RNA, 19 nt, Artificial Sequence
  Description of Artificial Sequence: Synthetic oligonucleotide
cagaaucuguacugggcca

SEQ ID NO: 824571 - RNA, 19 nt, Artificial Sequence
  Description of Artificial Sequence: Synthetic oligonucleotide
caccagagcgccagcggcc

SEQ ID NO: 824572 - RNA, 19 nt, Artificial Sequence
  Description of Artificial Sequence: Synthetic oligonucleotide
gcuugugagccacagggga

SEQ ID NO: 824573 - RNA, 19 nt, Artificial Sequence
  Description of Artificial Sequence: Synthetic oligonucleotide
ccgaacuugucgaugcggc

SEQ ID NO: 824574 - RNA, 19 nt, Artificial Sequence
  Description of Artificial Sequence: Synthetic oligonucleotide
cugaaguuucacuuugccu

SEQ ID NO: 824575 - RNA, 19 nt, Artificial Sequence
  Description of Artificial Sequence: Synthetic oligonucleotide
ggggucgaucuucuggcgg

SEQ ID NO: 824576 - RNA, 19 nt, Artificial Sequence
  Description of Artificial Sequence: Synthetic oligonucleotide
guggaaugcccuucuggca

SEQ ID NO: 824577 - RNA, 19 nt, Artificial Sequence
  Description of Artificial Sequence: Synthetic oligonucleotide
gaguaccccaccacuuccc

SEQ ID NO: 824578 - RNA, 19 nt, Artificial Sequence
  Description of Artificial Sequence: Synthetic oligonucleotide
gucgaugcggcgcucggca

SEQ ID NO: 824579 - RNA, 19 nt, Artificial Sequence
  Description of Artificial Sequence: Synthetic oligonucleotide
uccccgacaggcucccgcc

SEQ ID NO: 824580 - RNA, 19 nt, Artificial Sequence
  Description of Artificial Sequence: Synthetic oligonucleotide
gacgguugcaggguagguc

SEQ ID NO: 824581 - RNA, 19 nt, Artificial Sequence
  Description of Artificial Sequence: Synthetic oligonucleotide
ggguggcuuagcuuuggag

SEQ ID NO: 824582 - RNA, 19 nt, Artificial Sequence
  Description of Artificial Sequence: Synthetic oligonucleotide
agggcgguauagcguguag

SEQ ID NO: 824583 - RNA, 19 nt, Artificial Sequence
  Description of Artificial Sequence: Synthetic oligonucleotide
acuugacucaagagaaaau

SEQ ID NO: 824584 - RNA, 19 nt, Artificial Sequence
  Description of Artificial Sequence: Synthetic oligonucleotide
uggcaccaugcauccuagg

SEQ ID NO: 824585 - RNA, 19 nt, Artificial Sequence
  Description of Artificial Sequence: Synthetic oligonucleotide
gcuguauaaggugcucccg

SEQ ID NO: 824586 - RNA, 19 nt, Artificial Sequence
  Description of Artificial Sequence: Synthetic oligonucleotide
ggacugaguccuuugggga

SEQ ID NO: 824587 - RNA, 19 nt, Artificial Sequence
  Description of Artificial Sequence: Synthetic oligonucleotide
gaggaggguugcaucugag

SEQ ID NO: 824588 - RNA, 19 nt, Artificial Sequence
  Description of Artificial Sequence: Synthetic oligonucleotide
uggguggcuuagcuuugga

SEQ ID NO: 824589 - RNA, 19 nt, Artificial Sequence
  Description of Artificial Sequence: Synthetic oligonucleotide
aaugcccuucuggcaacga

SEQ ID NO: 824590 - RNA, 19 nt, Artificial Sequence
  Description of Artificial Sequence: Synthetic oligonucleotide
guaccagccccacacggaa

SEQ ID NO: 824591 - RNA, 19 nt, Artificial Sequence
  Description of Artificial Sequence: Synthetic oligonucleotide
auaaggugcucccgcucaa

SEQ ID NO: 824592 - RNA, 19 nt, Artificial Sequence
  Description of Artificial Sequence: Synthetic oligonucleotide
ccguguaagauguguggag

SEQ ID NO: 824593 - RNA, 19 nt, Artificial Sequence
  Description of Artificial Sequence: Synthetic oligonucleotide
cauugggccauagcuucug

SEQ ID NO: 824594 - RNA, 19 nt, Artificial Sequence
  Description of Artificial Sequence: Synthetic oligonucleotide
ugcauccuagguggagagc

SEQ ID NO: 824595 - RNA, 19 nt, Artificial Sequence
  Description of Artificial Sequence: Synthetic oligonucleotide
caggcaacucuaucaccuc

SEQ ID NO: 824596 - RNA, 19 nt, Artificial Sequence
  Description of Artificial Sequence: Synthetic oligonucleotide
caggagacauguccagcuc

SEQ ID NO: 824597 - RNA, 19 nt, Artificial Sequence
  Description of Artificial Sequence: Synthetic oligonucleotide
uccccgcaugucagcaccc

SEQ ID NO: 824598 - RNA, 19 nt, Artificial Sequence
  Description of Artificial Sequence: Synthetic oligonucleotide
cacgggucucuugccagcg

SEQ ID NO: 824599 - RNA, 19 nt, Artificial Sequence
  Description of Artificial Sequence: Synthetic oligonucleotide
gcgucgcagcuguauaagg

SEQ ID NO: 824600 - RNA, 19 nt, Artificial Sequence
  Description of Artificial Sequence: Synthetic oligonucleotide
caacucuaucaccuccuga

SEQ ID NO: 824601 - RNA, 19 nt, Artificial Sequence
  Description of Artificial Sequence: Synthetic oligonucleotide
gcucccggguuacaaguag

SEQ ID NO: 824602 - RNA, 19 nt, Artificial Sequence
  Description of Artificial Sequence: Synthetic oligonucleotide
ggguaggucgaggaccagg

SEQ ID NO: 824603 - RNA, 19 nt, Artificial Sequence
  Description of Artificial Sequence: Synthetic oligonucleotide
gcggcgcucggcaaaaccg

SEQ ID NO: 824604 - RNA, 19 nt, Artificial Sequence
  Description of Artificial Sequence: Synthetic oligonucleotide
uccccgcagagaaggugga

SEQ ID NO: 824605 - RNA, 19 nt, Artificial Sequence
  Description of Artificial Sequence: Synthetic oligonucleotide
uagcccuggggaacauuuc

SEQ ID NO: 824606 - RNA, 19 nt, Artificial Sequence
  Description of Artificial Sequence: Synthetic oligonucleotide
cugaaccaagaaggcuucc

SEQ ID NO: 824607 - RNA, 19 nt, Artificial Sequence
  Description of Artificial Sequence: Synthetic oligonucleotide
gguacgggcaaaggcacac

SEQ ID NO: 824608 - RNA, 19 nt, Artificial Sequence
  Description of Artificial Sequence: Synthetic oligonucleotide
cugcccgcugucuuuuguc

SEQ ID NO: 824609 - RNA, 19 nt, Artificial Sequence
  Description of Artificial Sequence: Synthetic oligonucleotide
guccccgacaggcucccgc

SEQ ID NO: 824610 - RNA, 19 nt, Artificial Sequence
  Description of Artificial Sequence: Synthetic oligonucleotide
ccgcaugucagcacccuag

SEQ ID NO: 824611 - RNA, 19 nt, Artificial Sequence
  Description of Artificial Sequence: Synthetic oligonucleotide
gcggcuaaggugcuuguga

SEQ ID NO: 824612 - RNA, 19 nt, Artificial Sequence
  Description of Artificial Sequence: Synthetic oligonucleotide
gggccauagcuucugccug

SEQ ID NO: 824613 - RNA, 19 nt, Artificial Sequence
  Description of Artificial Sequence: Synthetic oligonucleotide
gcaguaccagccccacacg

SEQ ID NO: 824614 - RNA, 19 nt, Artificial Sequence
  Description of Artificial Sequence: Synthetic oligonucleotide
gcaugucagcacccuagcc

SEQ ID NO: 824615 - RNA, 19 nt, Artificial Sequence
  Description of Artificial Sequence: Synthetic oligonucleotide
agagcugagcucgucggua

SEQ ID NO: 824616 - RNA, 19 nt, Artificial Sequence
  Description of Artificial Sequence: Synthetic oligonucleotide
cacuuccccgcaugucagc

SEQ ID NO: 824617 - RNA, 19 nt, Artificial Sequence
  Description of Artificial Sequence: Synthetic oligonucleotide
ucagggcgguauagcgugu

SEQ ID NO: 824618 - RNA, 19 nt, Artificial Sequence
  Description of Artificial Sequence: Synthetic oligonucleotide
cuuccccgcaugucagcac

SEQ ID NO: 824619 - RNA, 19 nt, Artificial Sequence
  Description of Artificial Sequence: Synthetic oligonucleotide
ccuggggaacauuucccag

SEQ ID NO: 824620 - RNA, 19 nt, Artificial Sequence
  Description of Artificial Sequence: Synthetic oligonucleotide
ccuagguggagagcgacac

SEQ ID NO: 824621 - RNA, 19 nt, Artificial Sequence
  Description of Artificial Sequence: Synthetic oligonucleotide
guacugccaggcccguccc

SEQ ID NO: 824622 - RNA, 19 nt, Artificial Sequence
  Description of Artificial Sequence: Synthetic oligonucleotide
gccgaacuugucgaugcgg

SEQ ID NO: 824623 - RNA, 19 nt, Artificial Sequence
  Description of Artificial Sequence: Synthetic oligonucleotide
gccuguuuauuuccguaca

SEQ ID NO: 824624 - RNA, 19 nt, Artificial Sequence
  Description of Artificial Sequence: Synthetic oligonucleotide
gggcgguauagcguguagg

SEQ ID NO: 824625 - RNA, 19 nt, Artificial Sequence
  Description of Artificial Sequence: Synthetic oligonucleotide
caacgaagacgaaucuucu

SEQ ID NO: 824626 - RNA, 19 nt, Artificial Sequence
  Description of Artificial Sequence: Synthetic oligonucleotide
gaacuuccuccagcgcgcc

SEQ ID NO: 824627 - RNA, 19 nt, Artificial Sequence
  Description of Artificial Sequence: Synthetic oligonucleotide
acaggaccuggagugcugu

SEQ ID NO: 824628 - RNA, 19 nt, Artificial Sequence
  Description of Artificial Sequence: Synthetic oligonucleotide
ccugaaccaagaaggcuuc

SEQ ID NO: 824629 - RNA, 19 nt, Artificial Sequence
  Description of Artificial Sequence: Synthetic oligonucleotide
guaguagugagaagaggau

SEQ ID NO: 824630 - RNA, 19 nt, Artificial Sequence
  Description of Artificial Sequence: Synthetic oligonucleotide
agcugagcucgucgguagu

SEQ ID NO: 824631 - RNA, 19 nt, Artificial Sequence
  Description of Artificial Sequence: Synthetic oligonucleotide
ggaacggugguaggcuaag

SEQ ID NO: 824632 - RNA, 19 nt, Artificial Sequence
  Description of Artificial Sequence: Synthetic oligonucleotide
gccaccagagcgccagcgg

SEQ ID NO: 824633 - RNA, 19 nt, Artificial Sequence
  Description of Artificial Sequence: Synthetic oligonucleotide
cagcacccuagcccugggg

SEQ ID NO: 824634 - RNA, 19 nt, Artificial Sequence
  Description of Artificial Sequence: Synthetic oligonucleotide
caaugggugccugggccug

SEQ ID NO: 824635 - RNA, 19 nt, Artificial Sequence
  Description of Artificial Sequence: Synthetic oligonucleotide
ccggguuacaaguaggugu

SEQ ID NO: 824636 - RNA, 19 nt, Artificial Sequence
  Description of Artificial Sequence: Synthetic oligonucleotide
cauccuagguggagagcga

SEQ ID NO: 824637 - RNA, 19 nt, Artificial Sequence
  Description of Artificial Sequence: Synthetic oligonucleotide
cacccuagcccuggggaac

SEQ ID NO: 824638 - RNA, 19 nt, Artificial Sequence
  Description of Artificial Sequence: Synthetic oligonucleotide
cuagcccuggggaacauuu

SEQ ID NO: 824639 - RNA, 19 nt, Artificial Sequence
  Description of Artificial Sequence: Synthetic oligonucleotide
ggaaugcccuucuggcaac

SEQ ID NO: 824640 - RNA, 19 nt, Artificial Sequence
  Description of Artificial Sequence: Synthetic oligonucleotide
acccauugggccauagcuu

SEQ ID NO: 824641 - RNA, 19 nt, Artificial Sequence
  Description of Artificial Sequence: Synthetic oligonucleotide
ggugacgguugcaggguag

SEQ ID NO: 824642 - RNA, 19 nt, Artificial Sequence
  Description of Artificial Sequence: Synthetic oligonucleotide
cuccucgggacacaaacau

SEQ ID NO: 824643 - RNA, 19 nt, Artificial Sequence
  Description of Artificial Sequence: Synthetic oligonucleotide
cccguccccgcagagaagg

SEQ ID NO: 824644 - RNA, 19 nt, Artificial Sequence
  Description of Artificial Sequence: Synthetic oligonucleotide
gguaggcguauggaaggug

SEQ ID NO: 824645 - RNA, 19 nt, Artificial Sequence
  Description of Artificial Sequence: Synthetic oligonucleotide
agcaccuccaggggaacuu

SEQ ID NO: 824646 - RNA, 19 nt, Artificial Sequence
  Description of Artificial Sequence: Synthetic oligonucleotide
gaugcggcgcucggcaaaa

SEQ ID NO: 824647 - RNA, 19 nt, Artificial Sequence
  Description of Artificial Sequence: Synthetic oligonucleotide
cgcucggcaaaaccguugg

SEQ ID NO: 824648 - RNA, 19 nt, Artificial Sequence
  Description of Artificial Sequence: Synthetic oligonucleotide
gagucggagccgagagagc

SEQ ID NO: 824649 - RNA, 19 nt, Artificial Sequence
  Description of Artificial Sequence: Synthetic oligonucleotide
gcgguauagcguguaggcc

SEQ ID NO: 824650 - RNA, 19 nt, Artificial Sequence
  Description of Artificial Sequence: Synthetic oligonucleotide
cgaacccacgaugaagccg

SEQ ID NO: 824651 - RNA, 19 nt, Artificial Sequence
  Description of Artificial Sequence: Synthetic oligonucleotide
ucgaugcggcgcucggcaa

SEQ ID NO: 824652 - RNA, 19 nt, Artificial Sequence
  Description of Artificial Sequence: Synthetic oligonucleotide
gcguguaggccuucagcac

SEQ ID NO: 824653 - RNA, 19 nt, Artificial Sequence
  Description of Artificial Sequence: Synthetic oligonucleotide
ggugguaggcuaaguccug

SEQ ID NO: 824654 - RNA, 19 nt, Artificial Sequence
  Description of Artificial Sequence: Synthetic oligonucleotide
gcucgucgguaguagcggc

SEQ ID NO: 824655 - RNA, 19 nt, Artificial Sequence
  Description of Artificial Sequence: Synthetic oligonucleotide
caagccuguuuauuuccgu

SEQ ID NO: 824656 - RNA, 19 nt, Artificial Sequence
  Description of Artificial Sequence: Synthetic oligonucleotide
aggugacgguugcagggua

SEQ ID NO: 824657 - RNA, 19 nt, Artificial Sequence
  Description of Artificial Sequence: Synthetic oligonucleotide
uggcggcuaaggugcuugu

SEQ ID NO: 824658 - RNA, 19 nt, Artificial Sequence
  Description of Artificial Sequence: Synthetic oligonucleotide
ggccaugaccuccucggga

SEQ ID NO: 824659 - RNA, 19 nt, Artificial Sequence
  Description of Artificial Sequence: Synthetic oligonucleotide
gcgaacccacgaugaagcc

SEQ ID NO: 824660 - RNA, 19 nt, Artificial Sequence
  Description of Artificial Sequence: Synthetic oligonucleotide
gguugcaggguaggucgag

SEQ ID NO: 824661 - RNA, 19 nt, Artificial Sequence
  Description of Artificial Sequence: Synthetic oligonucleotide
cugagucggagccgagaga

SEQ ID NO: 824662 - RNA, 19 nt, Artificial Sequence
  Description of Artificial Sequence: Synthetic oligonucleotide
ccguuggccucugagucgg

SEQ ID NO: 824663 - RNA, 19 nt, Artificial Sequence
  Description of Artificial Sequence: Synthetic oligonucleotide
cagcgucgcagcuguauaa

SEQ ID NO: 824664 - RNA, 19 nt, Artificial Sequence
  Description of Artificial Sequence: Synthetic oligonucleotide
gcgacacuccagcucacca

SEQ ID NO: 824665 - RNA, 19 nt, Artificial Sequence
  Description of Artificial Sequence: Synthetic oligonucleotide
caccacgggucucuugcca

SEQ ID NO: 824666 - RNA, 19 nt, Artificial Sequence
  Description of Artificial Sequence: Synthetic oligonucleotide
ggcuuagcuuuggagguga

SEQ ID NO: 824667 - RNA, 19 nt, Artificial Sequence
  Description of Artificial Sequence: Synthetic oligonucleotide
gguuacaaguagguguccu

SEQ ID NO: 824668 - RNA, 19 nt, Artificial Sequence
  Description of Artificial Sequence: Synthetic oligonucleotide
gcccugcgaacccacgaug

SEQ ID NO: 824669 - RNA, 19 nt, Artificial Sequence
  Description of Artificial Sequence: Synthetic oligonucleotide
gaccccacuuggaggccug

SEQ ID NO: 824670 - RNA, 19 nt, Artificial Sequence
  Description of Artificial Sequence: Synthetic oligonucleotide
cuaucaccuccugaaccaa

SEQ ID NO: 824671 - RNA, 19 nt, Artificial Sequence
  Description of Artificial Sequence: Synthetic oligonucleotide
gcccuggggaacauuuccc

SEQ ID NO: 824672 - RNA, 19 nt, Artificial Sequence
  Description of Artificial Sequence: Synthetic oligonucleotide
gcggcgucgggaccuuggg

SEQ ID NO: 824673 - RNA, 19 nt, Artificial Sequence
  Description of Artificial Sequence: Synthetic oligonucleotide
ggguuacaaguaggugucc

SEQ ID NO: 824674 - RNA, 19 nt, Artificial Sequence
  Description of Artificial Sequence: Synthetic oligonucleotide
ccacuuggacucccucugc

SEQ ID NO: 824675 - RNA, 19 nt, Artificial Sequence
  Description of Artificial Sequence: Synthetic oligonucleotide
caccacuuccccgcauguc

SEQ ID NO: 824676 - RNA, 19 nt, Artificial Sequence
  Description of Artificial Sequence: Synthetic oligonucleotide
accccacuuggaggccugg

SEQ ID NO: 824677 - RNA, 19 nt, Artificial Sequence
  Description of Artificial Sequence: Synthetic oligonucleotide
ucucgccauccaguuggau

SEQ ID NO: 824678 - RNA, 19 nt, Artificial Sequence
  Description of Artificial Sequence: Synthetic oligonucleotide
accaugcauccuaggugga

SEQ ID NO: 824679 - RNA, 19 nt, Artificial Sequence
  Description of Artificial Sequence: Synthetic oligonucleotide
guaggucgaggaccaggcu

SEQ ID NO: 824680 - RNA, 19 nt, Artificial Sequence
  Description of Artificial Sequence: Synthetic oligonucleotide
cccugcgaacccacgauga

SEQ ID NO: 824681 - RNA, 19 nt, Artificial Sequence
  Description of Artificial Sequence: Synthetic oligonucleotide
guacgggcaaaggcacaca

SEQ ID NO: 824682 - RNA, 19 nt, Artificial Sequence
  Description of Artificial Sequence: Synthetic oligonucleotide
ggcaaaaccguuggccucu

SEQ ID NO: 824683 - RNA, 19 nt, Artificial Sequence
  Description of Artificial Sequence: Synthetic oligonucleotide
ggauucugcugaaguuuca

SEQ ID NO: 824684 - RNA, 19 nt, Artificial Sequence
  Description of Artificial Sequence: Synthetic oligonucleotide
ccaguuggauugccuccag

SEQ ID NO: 824685 - RNA, 19 nt, Artificial Sequence
  Description of Artificial Sequence: Synthetic oligonucleotide
cugggaacggugguaggcu

SEQ ID NO: 824686 - RNA, 19 nt, Artificial Sequence
  Description of Artificial Sequence: Synthetic oligonucleotide
gcgcggcccauucucuuug

SEQ ID NO: 824687 - RNA, 19 nt, Artificial Sequence
  Description of Artificial Sequence: Synthetic oligonucleotide
cgguauagcguguaggccu

SEQ ID NO: 824688 - RNA, 19 nt, Artificial Sequence
  Description of Artificial Sequence: Synthetic oligonucleotide
caggcccguccccgcagag

SEQ ID NO: 824689 - RNA, 19 nt, Artificial Sequence
  Description of Artificial Sequence: Synthetic oligonucleotide
accccaccacuuccccgca

SEQ ID NO: 824690 - RNA, 19 nt, Artificial Sequence
  Description of Artificial Sequence: Synthetic oligonucleotide
ccccacacggaagaugauc

SEQ ID NO: 824691 - RNA, 19 nt, Artificial Sequence
  Description of Artificial Sequence: Synthetic oligonucleotide
ugcgggcgcgcgcggccca

SEQ ID NO: 824692 - RNA, 19 nt, Artificial Sequence
  Description of Artificial Sequence: Synthetic oligonucleotide
ggcggcuaaggugcuugug

SEQ ID NO: 824693 - RNA, 19 nt, Artificial Sequence
  Description of Artificial Sequence: Synthetic oligonucleotide
gucagucuuugaaccgugu

SEQ ID NO: 824694 - RNA, 19 nt, Artificial Sequence
  Description of Artificial Sequence: Synthetic oligonucleotide
guauagcguguaggccuuc

SEQ ID NO: 824695 - RNA, 19 nt, Artificial Sequence
  Description of Artificial Sequence: Synthetic oligonucleotide
cccggguuacaaguaggug

SEQ ID NO: 824696 - RNA, 19 nt, Artificial Sequence
  Description of Artificial Sequence: Synthetic oligonucleotide
gaacggugguaggcuaagu

SEQ ID NO: 824697 - RNA, 19 nt, Artificial Sequence
  Description of Artificial Sequence: Synthetic oligonucleotide
gagcgacacuccagcucac

SEQ ID NO: 824698 - RNA, 19 nt, Artificial Sequence
  Description of Artificial Sequence: Synthetic oligonucleotide
gcacccuagcccuggggaa

SEQ ID NO: 824699 - RNA, 19 nt, Artificial Sequence
  Description of Artificial Sequence: Synthetic oligonucleotide
ggagagcgacacuccagcu

SEQ ID NO: 824700 - RNA, 19 nt, Artificial Sequence
  Description of Artificial Sequence: Synthetic oligonucleotide
aucucgccauccaguugga

SEQ ID NO: 824701 - RNA, 19 nt, Artificial Sequence
  Description of Artificial Sequence: Synthetic oligonucleotide
gcgcucggcaaaaccguug

SEQ ID NO: 824702 - RNA, 19 nt, Artificial Sequence
  Description of Artificial Sequence: Synthetic oligonucleotide
caguuggauugccuccagu

SEQ ID NO: 824703 - RNA, 19 nt, Artificial Sequence
  Description of Artificial Sequence: Synthetic oligonucleotide
gggaacggugguaggcuaa

SEQ ID NO: 824704 - RNA, 19 nt, Artificial Sequence
  Description of Artificial Sequence: Synthetic oligonucleotide
ccaacccauugggccauag

SEQ ID NO: 824705 - RNA, 19 nt, Artificial Sequence
  Description of Artificial Sequence: Synthetic oligonucleotide
ggguugcaucugaggguag

SEQ ID NO: 824706 - RNA, 19 nt, Artificial Sequence
  Description of Artificial Sequence: Synthetic oligonucleotide
ggcgcccugcgaacccacg

SEQ ID NO: 824707 - RNA, 19 nt, Artificial Sequence
  Description of Artificial Sequence: Synthetic oligonucleotide
gcgcccugcgaacccacga

SEQ ID NO: 824708 - RNA, 19 nt, Artificial Sequence
  Description of Artificial Sequence: Synthetic oligonucleotide
gauuggggccuggggacuu

SEQ ID NO: 824709 - RNA, 19 nt, Artificial Sequence
  Description of Artificial Sequence: Synthetic oligonucleotide
ccggguccccgacaggcuc

SEQ ID NO: 824710 - RNA, 19 nt, Artificial Sequence
  Description of Artificial Sequence: Synthetic oligonucleotide
cggugguaggcuaaguccu

SEQ ID NO: 824711 - RNA, 19 nt, Artificial Sequence
  Description of Artificial Sequence: Synthetic oligonucleotide
gcguauggaaggugacggu

SEQ ID NO: 824712 - RNA, 19 nt, Artificial Sequence
  Description of Artificial Sequence: Synthetic oligonucleotide
gguauagcguguaggccuu

SEQ ID NO: 824713 - RNA, 19 nt, Artificial Sequence
  Description of Artificial Sequence: Synthetic oligonucleotide
uagcggcgucgggaccuug

SEQ ID NO: 824714 - RNA, 19 nt, Artificial Sequence
  Description of Artificial Sequence: Synthetic oligonucleotide
cgucgcagcuguauaaggu

SEQ ID NO: 824715 - RNA, 19 nt, Artificial Sequence
  Description of Artificial Sequence: Synthetic oligonucleotide
gucgaucuucuggcggcua

SEQ ID NO: 824716 - RNA, 19 nt, Artificial Sequence
  Description of Artificial Sequence: Synthetic oligonucleotide
ccugcgaacccacgaugaa

SEQ ID NO: 824717 - RNA, 19 nt, Artificial Sequence
  Description of Artificial Sequence: Synthetic oligonucleotide
cccucggcgcccugcgaac

SEQ ID NO: 824718 - RNA, 19 nt, Artificial Sequence
  Description of Artificial Sequence: Synthetic oligonucleotide
ccucagggcgguauagcgu

SEQ ID NO: 824719 - RNA, 19 nt, Artificial Sequence
  Description of Artificial Sequence: Synthetic oligonucleotide
ggucgaggaccaggcucug

SEQ ID NO: 824720 - RNA, 19 nt, Artificial Sequence
  Description of Artificial Sequence: Synthetic oligonucleotide
ccggugcaggucacguuca

SEQ ID NO: 824721 - RNA, 19 nt, Artificial Sequence
  Description of Artificial Sequence: Synthetic oligonucleotide
ggguccccgacaggcuccc

SEQ ID NO: 824722 - RNA, 19 nt, Artificial Sequence
  Description of Artificial Sequence: Synthetic oligonucleotide
cagggcgguauagcgugua

SEQ ID NO: 824723 - RNA, 19 nt, Artificial Sequence
  Description of Artificial Sequence: Synthetic oligonucleotide
ccucggcgcccugcgaacc

SEQ ID NO: 824724 - RNA, 19 nt, Artificial Sequence
  Description of Artificial Sequence: Synthetic oligonucleotide
cagcucaccacgggucucu

SEQ ID NO: 824725 - RNA, 19 nt, Artificial Sequence
  Description of Artificial Sequence: Synthetic oligonucleotide
ugccagcgucgcagcugua

SEQ ID NO: 824726 - RNA, 19 nt, Artificial Sequence
  Description of Artificial Sequence: Synthetic oligonucleotide
ggccgcgcccgccaccaga

SEQ ID NO: 824727 - RNA, 19 nt, Artificial Sequence
  Description of Artificial Sequence: Synthetic oligonucleotide
ccagcgucgcagcuguaua

SEQ ID NO: 824728 - RNA, 19 nt, Artificial Sequence
  Description of Artificial Sequence: Synthetic oligonucleotide
cugccggugcaggucacgu

SEQ ID NO: 824729 - RNA, 19 nt, Artificial Sequence
  Description of Artificial Sequence: Synthetic oligonucleotide
gggagccuagugcaugcuu

SEQ ID NO: 824730 - RNA, 19 nt, Artificial Sequence
  Description of Artificial Sequence: Synthetic oligonucleotide
gcugcccgcugucuuuugu

SEQ ID NO: 824731 - RNA, 19 nt, Artificial Sequence
  Description of Artificial Sequence: Synthetic oligonucleotide
ccaugaccuccucgggaca

SEQ ID NO: 824732 - RNA, 19 nt, Artificial Sequence
  Description of Artificial Sequence: Synthetic oligonucleotide
gcucaaucuggcgcucugu

SEQ ID NO: 824733 - RNA, 19 nt, Artificial Sequence
  Description of Artificial Sequence: Synthetic oligonucleotide
ggcucccggguuacaagua

SEQ ID NO: 824734 - RNA, 19 nt, Artificial Sequence
  Description of Artificial Sequence: Synthetic oligonucleotide
ccauugggccauagcuucu

SEQ ID NO: 824735 - RNA, 19 nt, Artificial Sequence
  Description of Artificial Sequence: Synthetic oligonucleotide
gggcgcgcgcggcccauuc

SEQ ID NO: 824736 - RNA, 19 nt, Artificial Sequence
  Description of Artificial Sequence: Synthetic oligonucleotide
gguccccgacaggcucccg

SEQ ID NO: 824737 - RNA, 19 nt, Artificial Sequence
  Description of Artificial Sequence: Synthetic oligonucleotide
cccgcagagaagguggaau

SEQ ID NO: 824738 - RNA, 19 nt, Artificial Sequence
  Description of Artificial Sequence: Synthetic oligonucleotide
gcgcucugucacaggcaac

SEQ ID NO: 824739 - RNA, 19 nt, Artificial Sequence
  Description of Artificial Sequence: Synthetic oligonucleotide
gccagcgucgcagcuguau

SEQ ID NO: 824740 - RNA, 19 nt, Artificial Sequence
  Description of Artificial Sequence: Synthetic oligonucleotide
cgucgguaguagcggcguc

SEQ ID NO: 824741 - RNA, 19 nt, Artificial Sequence
  Description of Artificial Sequence: Synthetic oligonucleotide
cagcaccuccaggggaacu

SEQ ID NO: 824742 - RNA, 19 nt, Artificial Sequence
  Description of Artificial Sequence: Synthetic oligonucleotide
gcccguccccgcagagaag

SEQ ID NO: 824743 - RNA, 19 nt, Artificial Sequence
  Description of Artificial Sequence: Synthetic oligonucleotide
cccgcaugucagcacccua

SEQ ID NO: 824744 - RNA, 19 nt, Artificial Sequence
  Description of Artificial Sequence: Synthetic oligonucleotide
ccaggcccguccccgcaga

SEQ ID NO: 824745 - RNA, 19 nt, Artificial Sequence
  Description of Artificial Sequence: Synthetic oligonucleotide
gccaagcaguugggccuuc

SEQ ID NO: 824746 - RNA, 19 nt, Artificial Sequence
  Description of Artificial Sequence: Synthetic oligonucleotide
cagcugcccgcugucuuuu

SEQ ID NO: 824747 - RNA, 19 nt, Artificial Sequence
  Description of Artificial Sequence: Synthetic oligonucleotide
gcccaauggccaagcaguu

SEQ ID NO: 824748 - RNA, 19 nt, Artificial Sequence
  Description of Artificial Sequence: Synthetic oligonucleotide
ggcgcucggcaaaaccguu

SEQ ID NO: 824749 - RNA, 19 nt, Artificial Sequence
  Description of Artificial Sequence: Synthetic oligonucleotide
guagcggcgucgggaccuu

SEQ ID NO: 824750 - RNA, 19 nt, Artificial Sequence
  Description of Artificial Sequence: Synthetic oligonucleotide
cggcgcccugcgaacccac

SEQ ID NO: 824751 - RNA, 19 nt, Artificial Sequence
  Description of Artificial Sequence: Synthetic oligonucleotide
ccgagagagcugagcucgu

SEQ ID NO: 824752 - RNA, 19 nt, Artificial Sequence
  Description of Artificial Sequence: Synthetic oligonucleotide
gcgcgcggcccauucucuu

SEQ ID NO: 824753 - RNA, 19 nt, Artificial Sequence
  Description of Artificial Sequence: Synthetic oligonucleotide
cgcccugcgaacccacgau

SEQ ID NO: 824754 - RNA, 19 nt, Artificial Sequence
  Description of Artificial Sequence: Synthetic oligonucleotide
gccccacacggaagaugau

SEQ ID NO: 824755 - RNA, 19 nt, Artificial Sequence
  Description of Artificial Sequence: Synthetic oligonucleotide
ccuagcccuggggaacauu

SEQ ID NO: 824756 - RNA, 19 nt, Artificial Sequence
  Description of Artificial Sequence: Synthetic oligonucleotide
cgcgcggcccauucucuuu

SEQ ID NO: 824757 - RNA, 19 nt, Artificial Sequence
  Description of Artificial Sequence: Synthetic oligonucleotide
cccaacccauugggccaua

SEQ ID NO: 824758 - RNA, 19 nt, Artificial Sequence
  Description of Artificial Sequence: Synthetic oligonucleotide
ccccaccacuuccccgcau

SEQ ID NO: 824759 - RNA, 19 nt, Artificial Sequence
  Description of Artificial Sequence: Synthetic oligonucleotide
cccuagcccuggggaacau

SEQ ID NO: 824760 - RNA, 19 nt, Artificial Sequence
  Description of Artificial Sequence: Synthetic oligonucleotide
aauacugguuccuggaugc

SEQ ID NO: 824761 - RNA, 19 nt, Artificial Sequence
  Description of Artificial Sequence: Synthetic oligonucleotide
aaggcauggaaccuguugc

SEQ ID NO: 824762 - RNA, 19 nt, Artificial Sequence
  Description of Artificial Sequence: Synthetic oligonucleotide
uccaauagaagcaagaguc

SEQ ID NO: 824763 - RNA, 19 nt, Artificial Sequence
  Description of Artificial Sequence: Synthetic oligonucleotide
auagggaacucacacaugc

SEQ ID NO: 824764 - RNA, 19 nt, Artificial Sequence
  Description of Artificial Sequence: Synthetic oligonucleotide
ucuagagaggcccacaggg

SEQ ID NO: 824765 - RNA, 19 nt, Artificial Sequence
  Description of Artificial Sequence: Synthetic oligonucleotide
aaguccgauacucaagagc

SEQ ID NO: 824766 - RNA, 19 nt, Artificial Sequence
  Description of Artificial Sequence: Synthetic oligonucleotide
ugaacuagauuucugcucc

SEQ ID NO: 824767 - RNA, 19 nt, Artificial Sequence
  Description of Artificial Sequence: Synthetic oligonucleotide
agagcaaacucucucagcg

SEQ ID NO: 824768 - RNA, 19 nt, Artificial Sequence
  Description of Artificial Sequence: Synthetic oligonucleotide
uauacacacacacacacac

SEQ ID NO: 824769 - RNA, 19 nt, Artificial Sequence
  Description of Artificial Sequence: Synthetic oligonucleotide
uguauacacacacacacac

SEQ ID NO: 824770 - RNA, 19 nt, Artificial Sequence
  Description of Artificial Sequence: Synthetic oligonucleotide
aggagcuuugcuuaguccc

SEQ ID NO: 824771 - RNA, 19 nt, Artificial Sequence
  Description of Artificial Sequence: Synthetic oligonucleotide
caugcaaaauacaugugcg

SEQ ID NO: 824772 - RNA, 19 nt, Artificial Sequence
  Description of Artificial Sequence: Synthetic oligonucleotide
uccaccuuagcacagcggg

SEQ ID NO: 824773 - RNA, 19 nt, Artificial Sequence
  Description of Artificial Sequence: Synthetic oligonucleotide
guuaggccaauguugaugg

SEQ ID NO: 824774 - RNA, 19 nt, Artificial Sequence
  Description of Artificial Sequence: Synthetic oligonucleotide
uuuuguuccgaauagggaa

SEQ ID NO: 824775 - RNA, 19 nt, Artificial Sequence
  Description of Artificial Sequence: Synthetic oligonucleotide
caugaugcgaacuucccgg

SEQ ID NO: 824776 - RNA, 19 nt, Artificial Sequence
  Description of Artificial Sequence: Synthetic oligonucleotide
gaaauucucagcugggccc

SEQ ID NO: 824777 - RNA, 19 nt, Artificial Sequence
  Description of Artificial Sequence: Synthetic oligonucleotide
agucuuauuccgcucacgg

SEQ ID NO: 824778 - RNA, 19 nt, Artificial Sequence
  Description of Artificial Sequence: Synthetic oligonucleotide
uacacacacacacacacac

SEQ ID NO: 824779 - RNA, 19 nt, Artificial Sequence
  Description of Artificial Sequence: Synthetic oligonucleotide
aagcgguuuccagagaacc

SEQ ID NO: 824780 - RNA, 19 nt, Artificial Sequence
  Description of Artificial Sequence: Synthetic oligonucleotide
cuuugcuaagcuccgaagg

SEQ ID NO: 824781 - RNA, 19 nt, Artificial Sequence
  Description of Artificial Sequence: Synthetic oligonucleotide
ugcuuuugguaacugacug

SEQ ID NO: 824782 - RNA, 19 nt, Artificial Sequence
  Description of Artificial Sequence: Synthetic oligonucleotide
ucuuauuccgcucacggua

SEQ ID NO: 824783 - RNA, 19 nt, Artificial Sequence
  Description of Artificial Sequence: Synthetic oligonucleotide
gaggaaguugccaacagcc

SEQ ID NO: 824784 - RNA, 19 nt, Artificial Sequence
  Description of Artificial Sequence: Synthetic oligonucleotide
uuauuuuguuccgaauagg

SEQ ID NO: 824785 - RNA, 19 nt, Artificial Sequence
  Description of Artificial Sequence: Synthetic oligonucleotide
aauagaagcaagagucauc

SEQ ID NO: 824786 - RNA, 19 nt, Artificial Sequence
  Description of Artificial Sequence: Synthetic oligonucleotide
gguaguacauccuuggccc

SEQ ID NO: 824787 - RNA, 19 nt, Artificial Sequence
  Description of Artificial Sequence: Synthetic oligonucleotide
cacacacacacacacaccc

SEQ ID NO: 824788 - RNA, 19 nt, Artificial Sequence
  Description of Artificial Sequence: Synthetic oligonucleotide
auagaagcaagagucauca

SEQ ID NO: 824789 - RNA, 19 nt, Artificial Sequence
  Description of Artificial Sequence: Synthetic oligonucleotide
aauugcaugaugcgaacuu

SEQ ID NO: 824790 - RNA, 19 nt, Artificial Sequence
  Description of Artificial Sequence: Synthetic oligonucleotide
agacagguucuagagaggc

SEQ ID NO: 824791 - RNA, 19 nt, Artificial Sequence
  Description of Artificial Sequence: Synthetic oligonucleotide
uuaguucccgccagaaaag

SEQ ID NO: 824792 - RNA, 19 nt, Artificial Sequence
  Description of Artificial Sequence: Synthetic oligonucleotide
aguggcaugacugucagca

SEQ ID NO: 824793 - RNA, 19 nt, Artificial Sequence
  Description of Artificial Sequence: Synthetic oligonucleotide
gaucaugcgaccccgaguc

SEQ ID NO: 824794 - RNA, 19 nt, Artificial Sequence
  Description of Artificial Sequence: Synthetic oligonucleotide
agaucagaggagucaggcc

SEQ ID NO: 824795 - RNA, 19 nt, Artificial Sequence
  Description of Artificial Sequence: Synthetic oligonucleotide
cuuagcauggcuacccggc

SEQ ID NO: 824796 - RNA, 19 nt, Artificial Sequence
  Description of Artificial Sequence: Synthetic oligonucleotide
gguagcucagcucaaagcc

SEQ ID NO: 824797 - RNA, 19 nt, Artificial Sequence
  Description of Artificial Sequence: Synthetic oligonucleotide
cuugaaagcccagaguugc

SEQ ID NO: 824798 - RNA, 19 nt, Artificial Sequence
  Description of Artificial Sequence: Synthetic oligonucleotide
uguacgguaucuucuggcc

SEQ ID NO: 824799 - RNA, 19 nt, Artificial Sequence
  Description of Artificial Sequence: Synthetic oligonucleotide
caaaaggguagccaggaug

SEQ ID NO: 824800 - RNA, 19 nt, Artificial Sequence
  Description of Artificial Sequence: Synthetic oligonucleotide
acucguucccggcaagucc

SEQ ID NO: 824801 - RNA, 19 nt, Artificial Sequence
  Description of Artificial Sequence: Synthetic oligonucleotide
ugcgguugccacgagagcg

SEQ ID NO: 824802 - RNA, 19 nt, Artificial Sequence
  Description of Artificial Sequence: Synthetic oligonucleotide
accuguugcagacucggcg

SEQ ID NO: 824803 - RNA, 19 nt, Artificial Sequence
  Description of Artificial Sequence: Synthetic oligonucleotide
uguguacgguaucuucugg

SEQ ID NO: 824804 - RNA, 19 nt, Artificial Sequence
  Description of Artificial Sequence: Synthetic oligonucleotide
gaagcugaagucuccucag

SEQ ID NO: 824805 - RNA, 19 nt, Artificial Sequence
  Description of Artificial Sequence: Synthetic oligonucleotide
cacacacacacacacacac

SEQ ID NO: 824806 - RNA, 19 nt, Artificial Sequence
  Description of Artificial Sequence: Synthetic oligonucleotide
agauagauuuccuggugug

SEQ ID NO: 824807 - RNA, 19 nt, Artificial Sequence
  Description of Artificial Sequence: Synthetic oligonucleotide
agugguuaggccaauguug

SEQ ID NO: 824808 - RNA, 19 nt, Artificial Sequence
  Description of Artificial Sequence: Synthetic oligonucleotide
cuuaaugacaugcacaggu

SEQ ID NO: 824809 - RNA, 19 nt, Artificial Sequence
  Description of Artificial Sequence: Synthetic oligonucleotide
ucuaggacugcuuuuggua

SEQ ID NO: 824810 - RNA, 19 nt, Artificial Sequence
  Description of Artificial Sequence: Synthetic oligonucleotide
aguccgauacucaagagca

SEQ ID NO: 824811 - RNA, 19 nt, Artificial Sequence
  Description of Artificial Sequence: Synthetic oligonucleotide
agagucaucaggaaauucu

SEQ ID NO: 824812 - RNA, 19 nt, Artificial Sequence
  Description of Artificial Sequence: Synthetic oligonucleotide
uucuagagaggcccacagg

SEQ ID NO: 824813 - RNA, 19 nt, Artificial Sequence
  Description of Artificial Sequence: Synthetic oligonucleotide
uacgguaucuucuggccug

SEQ ID NO: 824814 - RNA, 19 nt, Artificial Sequence
  Description of Artificial Sequence: Synthetic oligonucleotide
auaguggcaugacugucag

SEQ ID NO: 824815 - RNA, 19 nt, Artificial Sequence
  Description of Artificial Sequence: Synthetic oligonucleotide
uacuguucacaauacuggu

SEQ ID NO: 824816 - RNA, 19 nt, Artificial Sequence
  Description of Artificial Sequence: Synthetic oligonucleotide
ucagcgugugacagaauug

SEQ ID NO: 824817 - RNA, 19 nt, Artificial Sequence
  Description of Artificial Sequence: Synthetic oligonucleotide
uuccgaauagggaacucac

SEQ ID NO: 824818 - RNA, 19 nt, Artificial Sequence
  Description of Artificial Sequence: Synthetic oligonucleotide
uuucccgagcagcuaaggc

SEQ ID NO: 824819 - RNA, 19 nt, Artificial Sequence
  Description of Artificial Sequence: Synthetic oligonucleotide
agcgcuuccuuucccgagc

SEQ ID NO: 824820 - RNA, 19 nt, Artificial Sequence
  Description of Artificial Sequence: Synthetic oligonucleotide
cucguucccggcaaguccg

SEQ ID NO: 824821 - RNA, 19 nt, Artificial Sequence
  Description of Artificial Sequence: Synthetic oligonucleotide
aaccauugaggaaguugcc

SEQ ID NO: 824822 - RNA, 19 nt, Artificial Sequence
  Description of Artificial Sequence: Synthetic oligonucleotide
auugcaugaugcgaacuuc

SEQ ID NO: 824823 - RNA, 19 nt, Artificial Sequence
  Description of Artificial Sequence: Synthetic oligonucleotide
guugcuauagcuguaucca

SEQ ID NO: 824824 - RNA, 19 nt, Artificial Sequence
  Description of Artificial Sequence: Synthetic oligonucleotide
uuagcuagguaaacuuuau

SEQ ID NO: 824825 - RNA, 19 nt, Artificial Sequence
  Description of Artificial Sequence: Synthetic oligonucleotide
guacaucaggguuugccag

SEQ ID NO: 824826 - RNA, 19 nt, Artificial Sequence
  Description of Artificial Sequence: Synthetic oligonucleotide
uguucacaauacugguucc

SEQ ID NO: 824827 - RNA, 19 nt, Artificial Sequence
  Description of Artificial Sequence: Synthetic oligonucleotide
acugccggcgcacuguguc

SEQ ID NO: 824828 - RNA, 19 nt, Artificial Sequence
  Description of Artificial Sequence: Synthetic oligonucleotide
aaagcgguuuccagagaac

SEQ ID NO: 824829 - RNA, 19 nt, Artificial Sequence
  Description of Artificial Sequence: Synthetic oligonucleotide
uccgcucacgguauguagc

SEQ ID NO: 824830 - RNA, 19 nt, Artificial Sequence
  Description of Artificial Sequence: Synthetic oligonucleotide
gagagcgcuuccuuucccg

SEQ ID NO: 824831 - RNA, 19 nt, Artificial Sequence
  Description of Artificial Sequence: Synthetic oligonucleotide
uugcuauagcuguauccag

SEQ ID NO: 824832 - RNA, 19 nt, Artificial Sequence
  Description of Artificial Sequence: Synthetic oligonucleotide
acccuuagcauggcuaccc

SEQ ID NO: 824833 - RNA, 19 nt, Artificial Sequence
  Description of Artificial Sequence: Synthetic oligonucleotide
augcaaaauacaugugcgu

SEQ ID NO: 824834 - RNA, 19 nt, Artificial Sequence
  Description of Artificial Sequence: Synthetic oligonucleotide
caauacugguuccuggaug

SEQ ID NO: 824835 - RNA, 19 nt, Artificial Sequence
  Description of Artificial Sequence: Synthetic oligonucleotide
ugggccaucaagugcugag

SEQ ID NO: 824836 - RNA, 19 nt, Artificial Sequence
  Description of Artificial Sequence: Synthetic oligonucleotide
uaagcagacucuucauagu

SEQ ID NO: 824837 - RNA, 19 nt, Artificial Sequence
  Description of Artificial Sequence: Synthetic oligonucleotide
gucagcaguuucucaaugc

SEQ ID NO: 824838 - RNA, 19 nt, Artificial Sequence
  Description of Artificial Sequence: Synthetic oligonucleotide
cuacccuuagcauggcuac

SEQ ID NO: 824839 - RNA, 19 nt, Artificial Sequence
  Description of Artificial Sequence: Synthetic oligonucleotide
augaugcgaacuucccggg

SEQ ID NO: 824840 - RNA, 19 nt, Artificial Sequence
  Description of Artificial Sequence: Synthetic oligonucleotide
aaauucucagcugggccca

SEQ ID NO: 824841 - RNA, 19 nt, Artificial Sequence
  Description of Artificial Sequence: Synthetic oligonucleotide
aucaaauaguggcucugca

SEQ ID NO: 824842 - RNA, 19 nt, Artificial Sequence
  Description of Artificial Sequence: Synthetic oligonucleotide
uggcucugcaauuucccgc

SEQ ID NO: 824843 - RNA, 19 nt, Artificial Sequence
  Description of Artificial Sequence: Synthetic oligonucleotide
ugaucaugcgaccccgagu

SEQ ID NO: 824844 - RNA, 19 nt, Artificial Sequence
  Description of Artificial Sequence: Synthetic oligonucleotide
uucccgccagaaaaguuug

SEQ ID NO: 824845 - RNA, 19 nt, Artificial Sequence
  Description of Artificial Sequence: Synthetic oligonucleotide
aaguuugacugucuuccuu

SEQ ID NO: 824846 - RNA, 19 nt, Artificial Sequence
  Description of Artificial Sequence: Synthetic oligonucleotide
cguguauacacacacacac

SEQ ID NO: 824847 - RNA, 19 nt, Artificial Sequence
  Description of Artificial Sequence: Synthetic oligonucleotide
uccgaauagggaacucaca

SEQ ID NO: 824848 - RNA, 19 nt, Artificial Sequence
  Description of Artificial Sequence: Synthetic oligonucleotide
caaaguccaccuuagcaca

SEQ ID NO: 824849 - RNA, 19 nt, Artificial Sequence
  Description of Artificial Sequence: Synthetic oligonucleotide
acccuaauacuguucacaa

SEQ ID NO: 824850 - RNA, 19 nt, Artificial Sequence
  Description of Artificial Sequence: Synthetic oligonucleotide
caugcccacuuucagauca

SEQ ID NO: 824851 - RNA, 19 nt, Artificial Sequence
  Description of Artificial Sequence: Synthetic oligonucleotide
uggguaguacauccuuggc

SEQ ID NO: 824852 - RNA, 19 nt, Artificial Sequence
  Description of Artificial Sequence: Synthetic oligonucleotide
ggguaguacauccuuggcc

SEQ ID NO: 824853 - RNA, 19 nt, Artificial Sequence
  Description of Artificial Sequence: Synthetic oligonucleotide
uggcaugacugucagcauc

SEQ ID NO: 824854 - RNA, 19 nt, Artificial Sequence
  Description of Artificial Sequence: Synthetic oligonucleotide
cagcgugugacagaauugc

SEQ ID NO: 824855 - RNA, 19 nt, Artificial Sequence
  Description of Artificial Sequence: Synthetic oligonucleotide
uuaucucaucugauguguc

SEQ ID NO: 824856 - RNA, 19 nt, Artificial Sequence
  Description of Artificial Sequence: Synthetic oligonucleotide
ugugacaggggaacugcuc

SEQ ID NO: 824857 - RNA, 19 nt, Artificial Sequence
  Description of Artificial Sequence: Synthetic oligonucleotide
auuuuguuccgaauaggga

SEQ ID NO: 824858 - RNA, 19 nt, Artificial Sequence
  Description of Artificial Sequence: Synthetic oligonucleotide
uccaguugccccagguucu

SEQ ID NO: 824859 - RNA, 19 nt, Artificial Sequence
  Description of Artificial Sequence: Synthetic oligonucleotide
agcgguuuccagagaaccc

SEQ ID NO: 824860 - RNA, 19 nt, Artificial Sequence
  Description of Artificial Sequence: Synthetic oligonucleotide
acgguauguagcccucuuc

SEQ ID NO: 824861 - RNA, 19 nt, Artificial Sequence
  Description of Artificial Sequence: Synthetic oligonucleotide
agguguuccagccgggcug

SEQ ID NO: 824862 - RNA, 19 nt, Artificial Sequence
  Description of Artificial Sequence: Synthetic oligonucleotide
uuuugguaacugacugcac

SEQ ID NO: 824863 - RNA, 19 nt, Artificial Sequence
  Description of Artificial Sequence: Synthetic oligonucleotide
aauagggaacucacacaug

SEQ ID NO: 824864 - RNA, 19 nt, Artificial Sequence
  Description of Artificial Sequence: Synthetic oligonucleotide
acacccuaauacuguucac

SEQ ID NO: 824865 - RNA, 19 nt, Artificial Sequence
  Description of Artificial Sequence: Synthetic oligonucleotide
guaguacauccuuggcccg

SEQ ID NO: 824866 - RNA, 19 nt, Artificial Sequence
  Description of Artificial Sequence: Synthetic oligonucleotide
caauguccgucucaaggac

SEQ ID NO: 824867 - RNA, 19 nt, Artificial Sequence
  Description of Artificial Sequence: Synthetic oligonucleotide
gucaggccgagucuggagc

SEQ ID NO: 824868 - RNA, 19 nt, Artificial Sequence
  Description of Artificial Sequence: Synthetic oligonucleotide
agccggggcuagcucaugc

SEQ ID NO: 824869 - RNA, 19 nt, Artificial Sequence
  Description of Artificial Sequence: Synthetic oligonucleotide
gcucuuggaaccauugagg

SEQ ID NO: 824870 - RNA, 19 nt, Artificial Sequence
  Description of Artificial Sequence: Synthetic oligonucleotide
acacacacacacacacacc

SEQ ID NO: 824871 - RNA, 19 nt, Artificial Sequence
  Description of Artificial Sequence: Synthetic oligonucleotide
gaugcagacuucugaacua

SEQ ID NO: 824872 - RNA, 19 nt, Artificial Sequence
  Description of Artificial Sequence: Synthetic oligonucleotide
uugcuaagcuccgaaggcu

SEQ ID NO: 824873 - RNA, 19 nt, Artificial Sequence
  Description of Artificial Sequence: Synthetic oligonucleotide
acagccaaaaggguagcca

SEQ ID NO: 824874 - RNA, 19 nt, Artificial Sequence
  Description of Artificial Sequence: Synthetic oligonucleotide
ccgaauagggaacucacac

SEQ ID NO: 824875 - RNA, 19 nt, Artificial Sequence
  Description of Artificial Sequence: Synthetic oligonucleotide
cuacccggcggguacacug

SEQ ID NO: 824876 - RNA, 19 nt, Artificial Sequence
  Description of Artificial Sequence: Synthetic oligonucleotide
aaccuguugcagacucggc

SEQ ID NO: 824877 - RNA, 19 nt, Artificial Sequence
  Description of Artificial Sequence: Synthetic oligonucleotide
agccuuaaugacaugcaca

SEQ ID NO: 824878 - RNA, 19 nt, Artificial Sequence
  Description of Artificial Sequence: Synthetic oligonucleotide
gagucuuauuccgcucacg

SEQ ID NO: 824879 - RNA, 19 nt, Artificial Sequence
  Description of Artificial Sequence: Synthetic oligonucleotide
ccuguugcagacucggcgg

SEQ ID NO: 824880 - RNA, 19 nt, Artificial Sequence
  Description of Artificial Sequence: Synthetic oligonucleotide
uagaagcaagagucaucag

SEQ ID NO: 824881 - RNA, 19 nt, Artificial Sequence
  Description of Artificial Sequence: Synthetic oligonucleotide
caaguccgauacucaagag

SEQ ID NO: 824882 - RNA, 19 nt, Artificial Sequence
  Description of Artificial Sequence: Synthetic oligonucleotide
ugcagacuucugaacuaga

SEQ ID NO: 824883 - RNA, 19 nt, Artificial Sequence
  Description of Artificial Sequence: Synthetic oligonucleotide
cuaggacugcuuuugguaa

SEQ ID NO: 824884 - RNA, 19 nt, Artificial Sequence
  Description of Artificial Sequence: Synthetic oligonucleotide
gugaucaugcgaccccgag

SEQ ID NO: 824885 - RNA, 19 nt, Artificial Sequence
  Description of Artificial Sequence: Synthetic oligonucleotide
ugacaggggaacugcucug

SEQ ID NO: 824886 - RNA, 19 nt, Artificial Sequence
  Description of Artificial Sequence: Synthetic oligonucleotide
gguuaggccaauguugaug

SEQ ID NO: 824887 - RNA, 19 nt, Artificial Sequence
  Description of Artificial Sequence: Synthetic oligonucleotide
cagccuuaaugacaugcac

SEQ ID NO: 824888 - RNA, 19 nt, Artificial Sequence
  Description of Artificial Sequence: Synthetic oligonucleotide
caaagcgguuuccagagaa

SEQ ID NO: 824889 - RNA, 19 nt, Artificial Sequence
  Description of Artificial Sequence: Synthetic oligonucleotide
aguacucguucccggcaag

SEQ ID NO: 824890 - RNA, 19 nt, Artificial Sequence
  Description of Artificial Sequence: Synthetic oligonucleotide
cagggauuucugaguagag

SEQ ID NO: 824891 - RNA, 19 nt, Artificial Sequence
  Description of Artificial Sequence: Synthetic oligonucleotide
uuauuccgcucacgguaug

SEQ ID NO: 824892 - RNA, 19 nt, Artificial Sequence
  Description of Artificial Sequence: Synthetic oligonucleotide
cucucucagcgugugacag

SEQ ID NO: 824893 - RNA, 19 nt, Artificial Sequence
  Description of Artificial Sequence: Synthetic oligonucleotide
ccaggccuccaauagaagc

SEQ ID NO: 824894 - RNA, 19 nt, Artificial Sequence
  Description of Artificial Sequence: Synthetic oligonucleotide
gcaaguccgauacucaaga

SEQ ID NO: 824895 - RNA, 19 nt, Artificial Sequence
  Description of Artificial Sequence: Synthetic oligonucleotide
cacgagagcgcuuccuuuc

SEQ ID NO: 824896 - RNA, 19 nt, Artificial Sequence
  Description of Artificial Sequence: Synthetic oligonucleotide
aguggguaaggcgggcacg

SEQ ID NO: 824897 - RNA, 19 nt, Artificial Sequence
  Description of Artificial Sequence: Synthetic oligonucleotide
ugcuccgucggcuguguac

SEQ ID NO: 824898 - RNA, 19 nt, Artificial Sequence
  Description of Artificial Sequence: Synthetic oligonucleotide
aggaugcaacggaaggugg

SEQ ID NO: 824899 - RNA, 19 nt, Artificial Sequence
  Description of Artificial Sequence: Synthetic oligonucleotide
aagcuccgaaggcuguccu

SEQ ID NO: 824900 - RNA, 19 nt, Artificial Sequence
  Description of Artificial Sequence: Synthetic oligonucleotide
guguuagcacccucacacc

SEQ ID NO: 824901 - RNA, 19 nt, Artificial Sequence
  Description of Artificial Sequence: Synthetic oligonucleotide
caccuuagcacagcgggug

SEQ ID NO: 824902 - RNA, 19 nt, Artificial Sequence
  Description of Artificial Sequence: Synthetic oligonucleotide
cagugaucaugcgaccccg

SEQ ID NO: 824903 - RNA, 19 nt, Artificial Sequence
  Description of Artificial Sequence: Synthetic oligonucleotide
acacacacacacccuaaua

SEQ ID NO: 824904 - RNA, 19 nt, Artificial Sequence
  Description of Artificial Sequence: Synthetic oligonucleotide
cagaguugcaggcgugcag

SEQ ID NO: 824905 - RNA, 19 nt, Artificial Sequence
  Description of Artificial Sequence: Synthetic oligonucleotide
guugccacgagagcgcuuc

SEQ ID NO: 824906 - RNA, 19 nt, Artificial Sequence
  Description of Artificial Sequence: Synthetic oligonucleotide
uuaggccaauguugauggc

SEQ ID NO: 824907 - RNA, 19 nt, Artificial Sequence
  Description of Artificial Sequence: Synthetic oligonucleotide
gacagguucuagagaggcc

SEQ ID NO: 824908 - RNA, 19 nt, Artificial Sequence
  Description of Artificial Sequence: Synthetic oligonucleotide
auagcuguauccagauaga

SEQ ID NO: 824909 - RNA, 19 nt, Artificial Sequence
  Description of Artificial Sequence: Synthetic oligonucleotide
guuccgaauagggaacuca

SEQ ID NO: 824910 - RNA, 19 nt, Artificial Sequence
  Description of Artificial Sequence: Synthetic oligonucleotide
uauuccgcucacgguaugu

SEQ ID NO: 824911 - RNA, 19 nt, Artificial Sequence
  Description of Artificial Sequence: Synthetic oligonucleotide
uaaggcucuaggacugcuu

SEQ ID NO: 824912 - RNA, 19 nt, Artificial Sequence
  Description of Artificial Sequence: Synthetic oligonucleotide
agggaacagagaugauaca

SEQ ID NO: 824913 - RNA, 19 nt, Artificial Sequence
  Description of Artificial Sequence: Synthetic oligonucleotide
acuacccuuagcauggcua

SEQ ID NO: 824914 - RNA, 19 nt, Artificial Sequence
  Description of Artificial Sequence: Synthetic oligonucleotide
gaugugucacuggguaaac

SEQ ID NO: 824915 - RNA, 19 nt, Artificial Sequence
  Description of Artificial Sequence: Synthetic oligonucleotide
guugcagacucggcggugc

SEQ ID NO: 824916 - RNA, 19 nt, Artificial Sequence
  Description of Artificial Sequence: Synthetic oligonucleotide
ugacaugcacagguggcaa

SEQ ID NO: 824917 - RNA, 19 nt, Artificial Sequence
  Description of Artificial Sequence: Synthetic oligonucleotide
agagcgcuuccuuucccga

SEQ ID NO: 824918 - RNA, 19 nt, Artificial Sequence
  Description of Artificial Sequence: Synthetic oligonucleotide
uugcgguugccacgagagc

SEQ ID NO: 824919 - RNA, 19 nt, Artificial Sequence
  Description of Artificial Sequence: Synthetic oligonucleotide
ggguacaucaggguuugcc

SEQ ID NO: 824920 - RNA, 19 nt, Artificial Sequence
  Description of Artificial Sequence: Synthetic oligonucleotide
agguucuagagaggcccac

SEQ ID NO: 824921 - RNA, 19 nt, Artificial Sequence
  Description of Artificial Sequence: Synthetic oligonucleotide
ggaacugcucugcaccaug

SEQ ID NO: 824922 - RNA, 19 nt, Artificial Sequence
  Description of Artificial Sequence: Synthetic oligonucleotide
uuguccggcggcccucacc

SEQ ID NO: 824923 - RNA, 19 nt, Artificial Sequence
  Description of Artificial Sequence: Synthetic oligonucleotide
cagcuuucuugguggguag

SEQ ID NO: 824924 - RNA, 19 nt, Artificial Sequence
  Description of Artificial Sequence: Synthetic oligonucleotide
guauacacacacacacaca

SEQ ID NO: 824925 - RNA, 19 nt, Artificial Sequence
  Description of Artificial Sequence: Synthetic oligonucleotide
ggaugcagacuucugaacu

SEQ ID NO: 824926 - RNA, 19 nt, Artificial Sequence
  Description of Artificial Sequence: Synthetic oligonucleotide
gccaucaagugcugagcgg

SEQ ID NO: 824927 - RNA, 19 nt, Artificial Sequence
  Description of Artificial Sequence: Synthetic oligonucleotide
gccagcuuuaguucccgcc

SEQ ID NO: 824928 - RNA, 19 nt, Artificial Sequence
  Description of Artificial Sequence: Synthetic oligonucleotide
gccaauguugauggcauug

SEQ ID NO: 824929 - RNA, 19 nt, Artificial Sequence
  Description of Artificial Sequence: Synthetic oligonucleotide
agcuuuaguucccgccaga

SEQ ID NO: 824930 - RNA, 19 nt, Artificial Sequence
  Description of Artificial Sequence: Synthetic oligonucleotide
aggccgagucuggagcacc

SEQ ID NO: 824931 - RNA, 19 nt, Artificial Sequence
  Description of Artificial Sequence: Synthetic oligonucleotide
gguguguuagcacccucac

SEQ ID NO: 824932 - RNA, 19 nt, Artificial Sequence
  Description of Artificial Sequence: Synthetic oligonucleotide
gugacaggggaacugcucu

SEQ ID NO: 824933 - RNA, 19 nt, Artificial Sequence
  Description of Artificial Sequence: Synthetic oligonucleotide
uccggcacuccaguugccc

SEQ ID NO: 824934 - RNA, 19 nt, Artificial Sequence
  Description of Artificial Sequence: Synthetic oligonucleotide
guguauacacacacacaca

SEQ ID NO: 824935 - RNA, 19 nt, Artificial Sequence
  Description of Artificial Sequence: Synthetic oligonucleotide
aggacugcuuuugguaacu

SEQ ID NO: 824936 - RNA, 19 nt, Artificial Sequence
  Description of Artificial Sequence: Synthetic oligonucleotide
acaggggaacugcucugca

SEQ ID NO: 824937 - RNA, 19 nt, Artificial Sequence
  Description of Artificial Sequence: Synthetic oligonucleotide
uguugcagacucggcggug

SEQ ID NO: 824938 - RNA, 19 nt, Artificial Sequence
  Description of Artificial Sequence: Synthetic oligonucleotide
ugggacggacagguuacug

SEQ ID NO: 824939 - RNA, 19 nt, Artificial Sequence
  Description of Artificial Sequence: Synthetic oligonucleotide
auacacacacacacacaca

SEQ ID NO: 824940 - RNA, 19 nt, Artificial Sequence
  Description of Artificial Sequence: Synthetic oligonucleotide
accuuagcacagcggguga

SEQ ID NO: 824941 - RNA, 19 nt, Artificial Sequence
  Description of Artificial Sequence: Synthetic oligonucleotide
cagauagauuuccuggugu

SEQ ID NO: 824942 - RNA, 19 nt, Artificial Sequence
  Description of Artificial Sequence: Synthetic oligonucleotide
acuguucacaauacugguu

SEQ ID NO: 824943 - RNA, 19 nt, Artificial Sequence
  Description of Artificial Sequence: Synthetic oligonucleotide
gcuccgucggcuguguacg

SEQ ID NO: 824944 - RNA, 19 nt, Artificial Sequence
  Description of Artificial Sequence: Synthetic oligonucleotide
ccuuagcauggcuacccgg

SEQ ID NO: 824945 - RNA, 19 nt, Artificial Sequence
  Description of Artificial Sequence: Synthetic oligonucleotide
cugugucuacugagacagg

SEQ ID NO: 824946 - RNA, 19 nt, Artificial Sequence
  Description of Artificial Sequence: Synthetic oligonucleotide
cucacgguauguagcccuc

SEQ ID NO: 824947 - RNA, 19 nt, Artificial Sequence
  Description of Artificial Sequence: Synthetic oligonucleotide
uacccuuagcauggcuacc

SEQ ID NO: 824948 - RNA, 19 nt, Artificial Sequence
  Description of Artificial Sequence: Synthetic oligonucleotide
guuagcacccucacaccuc

SEQ ID NO: 824949 - RNA, 19 nt, Artificial Sequence
  Description of Artificial Sequence: Synthetic oligonucleotide
uacucguucccggcaaguc

SEQ ID NO: 824950 - RNA, 19 nt, Artificial Sequence
  Description of Artificial Sequence: Synthetic oligonucleotide
agacucggcggugcacuac

SEQ ID NO: 824951 - RNA, 19 nt, Artificial Sequence
  Description of Artificial Sequence: Synthetic oligonucleotide
ggaugcaacggaagguggc

SEQ ID NO: 824952 - RNA, 19 nt, Artificial Sequence
  Description of Artificial Sequence: Synthetic oligonucleotide
cacacacacacacacccua

SEQ ID NO: 824953 - RNA, 19 nt, Artificial Sequence
  Description of Artificial Sequence: Synthetic oligonucleotide
ggcuguguacgguaucuuc

SEQ ID NO: 824954 - RNA, 19 nt, Artificial Sequence
  Description of Artificial Sequence: Synthetic oligonucleotide
agcuuugcuuagucccagu

SEQ ID NO: 824955 - RNA, 19 nt, Artificial Sequence
  Description of Artificial Sequence: Synthetic oligonucleotide
gaauugcaugaugcgaacu

SEQ ID NO: 824956 - RNA, 19 nt, Artificial Sequence
  Description of Artificial Sequence: Synthetic oligonucleotide
uaguggcaugacugucagc

SEQ ID NO: 824957 - RNA, 19 nt, Artificial Sequence
  Description of Artificial Sequence: Synthetic oligonucleotide
gcgaccccgagucuuauuc

SEQ ID NO: 824958 - RNA, 19 nt, Artificial Sequence
  Description of Artificial Sequence: Synthetic oligonucleotide
gcauggaaccuguugcaga

SEQ ID NO: 824959 - RNA, 19 nt, Artificial Sequence
  Description of Artificial Sequence: Synthetic oligonucleotide
augugucacuggguaaacu

SEQ ID NO: 824960 - RNA, 19 nt, Artificial Sequence
  Description of Artificial Sequence: Synthetic oligonucleotide
cucucagcgugugacagaa

SEQ ID NO: 824961 - RNA, 19 nt, Artificial Sequence
  Description of Artificial Sequence: Synthetic oligonucleotide
cucagcgugugacagaauu

SEQ ID NO: 824962 - RNA, 19 nt, Artificial Sequence
  Description of Artificial Sequence: Synthetic oligonucleotide
uuggcccgggacucaaaua

SEQ ID NO: 824963 - RNA, 19 nt, Artificial Sequence
  Description of Artificial Sequence: Synthetic oligonucleotide
cacugggacggacagguua

SEQ ID NO: 824964 - RNA, 19 nt, Artificial Sequence
  Description of Artificial Sequence: Synthetic oligonucleotide
ugcgaacuucccgggcugc

SEQ ID NO: 824965 - RNA, 19 nt, Artificial Sequence
  Description of Artificial Sequence: Synthetic oligonucleotide
aucaugcgaccccgagucu

SEQ ID NO: 824966 - RNA, 19 nt, Artificial Sequence
  Description of Artificial Sequence: Synthetic oligonucleotide
acacacacacacacacaca

SEQ ID NO: 824967 - RNA, 19 nt, Artificial Sequence
  Description of Artificial Sequence: Synthetic oligonucleotide
guacgguaucuucuggccu

SEQ ID NO: 824968 - RNA, 19 nt, Artificial Sequence
  Description of Artificial Sequence: Synthetic oligonucleotide
cuuauuccgcucacgguau

SEQ ID NO: 824969 - RNA, 19 nt, Artificial Sequence
  Description of Artificial Sequence: Synthetic oligonucleotide
auuguccggcggcccucac

SEQ ID NO: 824970 - RNA, 19 nt, Artificial Sequence
  Description of Artificial Sequence: Synthetic oligonucleotide
cugcuuuugguaacugacu

SEQ ID NO: 824971 - RNA, 19 nt, Artificial Sequence
  Description of Artificial Sequence: Synthetic oligonucleotide
cugccggcgcacugugucc

SEQ ID NO: 824972 - RNA, 19 nt, Artificial Sequence
  Description of Artificial Sequence: Synthetic oligonucleotide
auguccgucucaaggacuu

SEQ ID NO: 824973 - RNA, 19 nt, Artificial Sequence
  Description of Artificial Sequence: Synthetic oligonucleotide
ccgcucacgguauguagcc

SEQ ID NO: 824974 - RNA, 19 nt, Artificial Sequence
  Description of Artificial Sequence: Synthetic oligonucleotide
acucggcggugcacuaccc

SEQ ID NO: 824975 - RNA, 19 nt, Artificial Sequence
  Description of Artificial Sequence: Synthetic oligonucleotide
gucuuauuccgcucacggu

SEQ ID NO: 824976 - RNA, 19 nt, Artificial Sequence
  Description of Artificial Sequence: Synthetic oligonucleotide
acacacacacacacacccu

SEQ ID NO: 824977 - RNA, 19 nt, Artificial Sequence
  Description of Artificial Sequence: Synthetic oligonucleotide
uugccacgagagcgcuucc

SEQ ID NO: 824978 - RNA, 19 nt, Artificial Sequence
  Description of Artificial Sequence: Synthetic oligonucleotide
agcgugugacagaauugca

SEQ ID NO: 824979 - RNA, 19 nt, Artificial Sequence
  Description of Artificial Sequence: Synthetic oligonucleotide
aguugcaggcgugcagcca

SEQ ID NO: 824980 - RNA, 19 nt, Artificial Sequence
  Description of Artificial Sequence: Synthetic oligonucleotide
ucguucccggcaaguccga

SEQ ID NO: 824981 - RNA, 19 nt, Artificial Sequence
  Description of Artificial Sequence: Synthetic oligonucleotide
uguccgucucaaggacuug

SEQ ID NO: 824982 - RNA, 19 nt, Artificial Sequence
  Description of Artificial Sequence: Synthetic oligonucleotide
cuccgucggcuguguacgg

SEQ ID NO: 824983 - RNA, 19 nt, Artificial Sequence
  Description of Artificial Sequence: Synthetic oligonucleotide
caagcccacucuucaaugu

SEQ ID NO: 824984 - RNA, 19 nt, Artificial Sequence
  Description of Artificial Sequence: Synthetic oligonucleotide
ccggcggguacacugggcc

SEQ ID NO: 824985 - RNA, 19 nt, Artificial Sequence
  Description of Artificial Sequence: Synthetic oligonucleotide
ugccacgagagcgcuuccu

SEQ ID NO: 824986 - RNA, 19 nt, Artificial Sequence
  Description of Artificial Sequence: Synthetic oligonucleotide
gcuagcucaugcuuugcua

SEQ ID NO: 824987 - RNA, 19 nt, Artificial Sequence
  Description of Artificial Sequence: Synthetic oligonucleotide
ucauuguccggcggcccuc

SEQ ID NO: 824988 - RNA, 19 nt, Artificial Sequence
  Description of Artificial Sequence: Synthetic oligonucleotide
cagguucuagagaggccca

SEQ ID NO: 824989 - RNA, 19 nt, Artificial Sequence
  Description of Artificial Sequence: Synthetic oligonucleotide
ugcaggcgugcagccaggc

SEQ ID NO: 824990 - RNA, 19 nt, Artificial Sequence
  Description of Artificial Sequence: Synthetic oligonucleotide
cucuaggacugcuuuuggu

SEQ ID NO: 824991 - RNA, 19 nt, Artificial Sequence
  Description of Artificial Sequence: Synthetic oligonucleotide
gcgguuuccagagaaccca

SEQ ID NO: 824992 - RNA, 19 nt, Artificial Sequence
  Description of Artificial Sequence: Synthetic oligonucleotide
acacacacacacacccuaa

SEQ ID NO: 824993 - RNA, 19 nt, Artificial Sequence
  Description of Artificial Sequence: Synthetic oligonucleotide
guucccgccagaaaaguuu

SEQ ID NO: 824994 - RNA, 19 nt, Artificial Sequence
  Description of Artificial Sequence: Synthetic oligonucleotide
auuccgcucacgguaugua

SEQ ID NO: 824995 - RNA, 19 nt, Artificial Sequence
  Description of Artificial Sequence: Synthetic oligonucleotide
gggaacucacacaugcaaa

SEQ ID NO: 824996 - RNA, 19 nt, Artificial Sequence
  Description of Artificial Sequence: Synthetic oligonucleotide
ggcggguacacugggccag

SEQ ID NO: 824997 - RNA, 19 nt, Artificial Sequence
  Description of Artificial Sequence: Synthetic oligonucleotide
aguucccgccagaaaaguu

SEQ ID NO: 824998 - RNA, 19 nt, Artificial Sequence
  Description of Artificial Sequence: Synthetic oligonucleotide
gcaguacucguucccggca

SEQ ID NO: 824999 - RNA, 19 nt, Artificial Sequence
  Description of Artificial Sequence: Synthetic oligonucleotide
agugaucaugcgaccccga

SEQ ID NO: 825000 - RNA, 19 nt, Artificial Sequence
  Description of Artificial Sequence: Synthetic oligonucleotide
caguacucguucccggcaa

SEQ ID NO: 825001 - RNA, 19 nt, Artificial Sequence
  Description of Artificial Sequence: Synthetic oligonucleotide
cgaauagggaacucacaca

SEQ ID NO: 825002 - RNA, 19 nt, Artificial Sequence
  Description of Artificial Sequence: Synthetic oligonucleotide
guucccggcaaguccgaua

SEQ ID NO: 825003 - RNA, 19 nt, Artificial Sequence
  Description of Artificial Sequence: Synthetic oligonucleotide
cccgggacucaaauaggug

SEQ ID NO: 825004 - RNA, 19 nt, Artificial Sequence
  Description of Artificial Sequence: Synthetic oligonucleotide
cccgccagaaaaguuugac

SEQ ID NO: 825005 - RNA, 19 nt, Artificial Sequence
  Description of Artificial Sequence: Synthetic oligonucleotide
gucauuguccggcggcccu

SEQ ID NO: 825006 - RNA, 19 nt, Artificial Sequence
  Description of Artificial Sequence: Synthetic oligonucleotide
cacagcgggugagggcagg

SEQ ID NO: 825007 - RNA, 19 nt, Artificial Sequence
  Description of Artificial Sequence: Synthetic oligonucleotide
ccgggacucaaauaggugu

SEQ ID NO: 825008 - RNA, 19 nt, Artificial Sequence
  Description of Artificial Sequence: Synthetic oligonucleotide
ggcccgggacucaaauagg

SEQ ID NO: 825009 - RNA, 19 nt, Artificial Sequence
  Description of Artificial Sequence: Synthetic oligonucleotide
ccuuucccgagcagcuaag

SEQ ID NO: 825010 - RNA, 19 nt, Artificial Sequence
  Description of Artificial Sequence: Synthetic oligonucleotide
augcuuugcuaagcuccga

SEQ ID NO: 825011 - RNA, 19 nt, Artificial Sequence
  Description of Artificial Sequence: Synthetic oligonucleotide
gcucacgguauguagcccu

SEQ ID NO: 825012 - RNA, 19 nt, Artificial Sequence
  Description of Artificial Sequence: Synthetic oligonucleotide
cccggcaaguccgauacuc

SEQ ID NO: 825013 - RNA, 19 nt, Artificial Sequence
  Description of Artificial Sequence: Synthetic oligonucleotide
ucccggcaaguccgauacu

SEQ ID NO: 825014 - RNA, 19 nt, Artificial Sequence
  Description of Artificial Sequence: Synthetic oligonucleotide
ccgagucuuauuccgcuca

SEQ ID NO: 825015 - RNA, 19 nt, Artificial Sequence
  Description of Artificial Sequence: Synthetic oligonucleotide
agucuccucaggggauaca

SEQ ID NO: 825016 - RNA, 19 nt, Artificial Sequence
  Description of Artificial Sequence: Synthetic oligonucleotide
gcugguaagcagacucuuc

SEQ ID NO: 825017 - RNA, 19 nt, Artificial Sequence
  Description of Artificial Sequence: Synthetic oligonucleotide
cacugcugugugugugaca

SEQ ID NO: 825018 - RNA, 19 nt, Artificial Sequence
  Description of Artificial Sequence: Synthetic oligonucleotide
ggacugcuuuugguaacug

SEQ ID NO: 825019 - RNA, 19 nt, Artificial Sequence
  Description of Artificial Sequence: Synthetic oligonucleotide
gcgguugccacgagagcgc

SEQ ID NO: 825020 - RNA, 19 nt, Artificial Sequence
  Description of Artificial Sequence: Synthetic oligonucleotide
guugccccagguucucagu

SEQ ID NO: 825021 - RNA, 19 nt, Artificial Sequence
  Description of Artificial Sequence: Synthetic oligonucleotide
ugcgaccccgagucuuauu

SEQ ID NO: 825022 - RNA, 19 nt, Artificial Sequence
  Description of Artificial Sequence: Synthetic oligonucleotide
gcuaaggcucuaggacugc

SEQ ID NO: 825023 - RNA, 19 nt, Artificial Sequence
  Description of Artificial Sequence: Synthetic oligonucleotide
cgaccccgagucuuauucc

SEQ ID NO: 825024 - RNA, 19 nt, Artificial Sequence
  Description of Artificial Sequence: Synthetic oligonucleotide
caggccgagucuggagcac

SEQ ID NO: 825025 - RNA, 19 nt, Artificial Sequence
  Description of Artificial Sequence: Synthetic oligonucleotide
cacacacacacacccuaau

SEQ ID NO: 825026 - RNA, 19 nt, Artificial Sequence
  Description of Artificial Sequence: Synthetic oligonucleotide
guccgauacucaagagcaa

SEQ ID NO: 825027 - RNA, 19 nt, Artificial Sequence
  Description of Artificial Sequence: Synthetic oligonucleotide
ggguuugccagcugggcuu

SEQ ID NO: 825028 - RNA, 19 nt, Artificial Sequence
  Description of Artificial Sequence: Synthetic oligonucleotide
uggcuccggcacuccaguu

SEQ ID NO: 825029 - RNA, 19 nt, Artificial Sequence
  Description of Artificial Sequence: Synthetic oligonucleotide
cgucucaaggacuugcggu

SEQ ID NO: 825030 - RNA, 19 nt, Artificial Sequence
  Description of Artificial Sequence: Synthetic oligonucleotide
cauuguccggcggcccuca

SEQ ID NO: 825031 - RNA, 19 nt, Artificial Sequence
  Description of Artificial Sequence: Synthetic oligonucleotide
guacucguucccggcaagu

SEQ ID NO: 825032 - RNA, 19 nt, Artificial Sequence
  Description of Artificial Sequence: Synthetic oligonucleotide
ccggcaaguccgauacuca

SEQ ID NO: 825033 - RNA, 19 nt, Artificial Sequence
  Description of Artificial Sequence: Synthetic oligonucleotide
caugcacagguggcaaagu

SEQ ID NO: 825034 - RNA, 19 nt, Artificial Sequence
  Description of Artificial Sequence: Synthetic oligonucleotide
gggauacaguggaggcccc

SEQ ID NO: 825035 - RNA, 19 nt, Artificial Sequence
  Description of Artificial Sequence: Synthetic oligonucleotide
gcgaacuucccgggcugcc

SEQ ID NO: 825036 - RNA, 19 nt, Artificial Sequence
  Description of Artificial Sequence: Synthetic oligonucleotide
cgguauguagcccucuucu

SEQ ID NO: 825037 - RNA, 19 nt, Artificial Sequence
  Description of Artificial Sequence: Synthetic oligonucleotide
gagccggggcuagcucaug

SEQ ID NO: 825038 - RNA, 19 nt, Artificial Sequence
  Description of Artificial Sequence: Synthetic oligonucleotide
guccggcggcccucaccag

SEQ ID NO: 825039 - RNA, 19 nt, Artificial Sequence
  Description of Artificial Sequence: Synthetic oligonucleotide
cacuacccuuagcauggcu

SEQ ID NO: 825040 - RNA, 19 nt, Artificial Sequence
  Description of Artificial Sequence: Synthetic oligonucleotide
ccgccagaaaaguuugacu

SEQ ID NO: 825041 - RNA, 19 nt, Artificial Sequence
  Description of Artificial Sequence: Synthetic oligonucleotide
augcgaccccgagucuuau

SEQ ID NO: 825042 - RNA, 19 nt, Artificial Sequence
  Description of Artificial Sequence: Synthetic oligonucleotide
cagacucggcggugcacua

SEQ ID NO: 825043 - RNA, 19 nt, Artificial Sequence
  Description of Artificial Sequence: Synthetic oligonucleotide
cccggcggguacacugggc

SEQ ID NO: 825044 - RNA, 19 nt, Artificial Sequence
  Description of Artificial Sequence: Synthetic oligonucleotide
gcggugcacuacccuuagc

SEQ ID NO: 825045 - RNA, 19 nt, Artificial Sequence
  Description of Artificial Sequence: Synthetic oligonucleotide
caacggaagguggcauugu

SEQ ID NO: 825046 - RNA, 19 nt, Artificial Sequence
  Description of Artificial Sequence: Synthetic oligonucleotide
gcccgggacucaaauaggu

SEQ ID NO: 825047 - RNA, 19 nt, Artificial Sequence
  Description of Artificial Sequence: Synthetic oligonucleotide
gcacuacccuuagcauggc

SEQ ID NO: 825048 - RNA, 19 nt, Artificial Sequence
  Description of Artificial Sequence: Synthetic oligonucleotide
ggccgagucuggagcacca

SEQ ID NO: 825049 - RNA, 19 nt, Artificial Sequence
  Description of Artificial Sequence: Synthetic oligonucleotide
gcggcccucaccagcuuuc

SEQ ID NO: 825050 - RNA, 19 nt, Artificial Sequence
  Description of Artificial Sequence: Synthetic oligonucleotide
ggcuacccggcggguacac

SEQ ID NO: 825051 - RNA, 19 nt, Artificial Sequence
  Description of Artificial Sequence: Synthetic oligonucleotide
ccccgagucuuauuccgcu

SEQ ID NO: 825052 - RNA, 19 nt, Artificial Sequence
  Description of Artificial Sequence: Synthetic oligonucleotide
ccgucggcuguguacggua

SEQ ID NO: 825053 - RNA, 19 nt, Artificial Sequence
  Description of Artificial Sequence: Synthetic oligonucleotide
ccaccuuagcacagcgggu

SEQ ID NO: 825054 - RNA, 19 nt, Artificial Sequence
  Description of Artificial Sequence: Synthetic oligonucleotide
gacugccggcgcacugugu

SEQ ID NO: 825055 - RNA, 19 nt, Artificial Sequence
  Description of Artificial Sequence: Synthetic oligonucleotide
ccuuuugguggggaggguu

SEQ ID NO: 825056 - RNA, 19 nt, Artificial Sequence
  Description of Artificial Sequence: Synthetic oligonucleotide
cgggcacgcagagccgggg

SEQ ID NO: 825057 - RNA, 19 nt, Artificial Sequence
  Description of Artificial Sequence: Synthetic oligonucleotide
ccugguguguuagcacccu

SEQ ID NO: 825058 - RNA, 19 nt, Artificial Sequence
  Description of Artificial Sequence: Synthetic oligonucleotide
cggcggguacacugggcca

SEQ ID NO: 825059 - RNA, 19 nt, Artificial Sequence
  Description of Artificial Sequence: Synthetic oligonucleotide
ccggggcuagcucaugcuu

SEQ ID NO: 825060 - RNA, 19 nt, Artificial Sequence
  Description of Artificial Sequence: Synthetic oligonucleotide
cggggcuagcucaugcuuu

SEQ ID NO: 825061 - RNA, 19 nt, Artificial Sequence
  Description of Artificial Sequence: Synthetic oligonucleotide
cccgagcagcuaaggcucu

SEQ ID NO: 825062 - RNA, 19 nt, Artificial Sequence
  Description of Artificial Sequence: Synthetic oligonucleotide
gcuacccggcggguacacu

SEQ ID NO: 825063 - RNA, 19 nt, Artificial Sequence
  Description of Artificial Sequence: Synthetic oligonucleotide
gcauggcuacccggcgggu

SEQ ID NO: 825064 - RNA, 19 nt, Artificial Sequence
  Description of Artificial Sequence: Synthetic oligonucleotide
gguugccacgagagcgcuu

SEQ ID NO: 825065 - RNA, 19 nt, Artificial Sequence
  Description of Artificial Sequence: Synthetic oligonucleotide
cgucggcuguguacgguau

SEQ ID NO: 825066 - RNA, 19 nt, Artificial Sequence
  Description of Artificial Sequence: Synthetic oligonucleotide
cgguugccacgagagcgcu

SEQ ID NO: 825067 - RNA, 19 nt, Artificial Sequence
  Description of Artificial Sequence: Synthetic oligonucleotide
auaauuagcaauaacuucc

SEQ ID NO: 825068 - RNA, 19 nt, Artificial Sequence
  Description of Artificial Sequence: Synthetic oligonucleotide
uguuaguucaagccgaucg

SEQ ID NO: 825069 - RNA, 19 nt, Artificial Sequence
  Description of Artificial Sequence: Synthetic oligonucleotide
uuuuauuugaccaucggga

SEQ ID NO: 825070 - RNA, 19 nt, Artificial Sequence
  Description of Artificial Sequence: Synthetic oligonucleotide
aauuaguaauugcagauca

SEQ ID NO: 825071 - RNA, 19 nt, Artificial Sequence
  Description of Artificial Sequence: Synthetic oligonucleotide
aauuauaccagaaagaaua

SEQ ID NO: 825072 - RNA, 19 nt, Artificial Sequence
  Description of Artificial Sequence: Synthetic oligonucleotide
aaaauuauaccagaaagaa

SEQ ID NO: 825073 - RNA, 19 nt, Artificial Sequence
  Description of Artificial Sequence: Synthetic oligonucleotide
uuaugagcagcuuugaucu

SEQ ID NO: 825074 - RNA, 19 nt, Artificial Sequence
  Description of Artificial Sequence: Synthetic oligonucleotide
uuuaauuaguaauugcaga

SEQ ID NO: 825075 - RNA, 19 nt, Artificial Sequence
  Description of Artificial Sequence: Synthetic oligonucleotide
uaguauuucauucaagcac

SEQ ID NO: 825076 - RNA, 19 nt, Artificial Sequence
  Description of Artificial Sequence: Synthetic oligonucleotide
aaaucguucugauggugcc

SEQ ID NO: 825077 - RNA, 19 nt, Artificial Sequence
  Description of Artificial Sequence: Synthetic oligonucleotide
aacacgaucugccucauug

SEQ ID NO: 825078 - RNA, 19 nt, Artificial Sequence
  Description of Artificial Sequence: Synthetic oligonucleotide
uuaaacuuaucaaaagccu

SEQ ID NO: 825079 - RNA, 19 nt, Artificial Sequence
  Description of Artificial Sequence: Synthetic oligonucleotide
uuuaguuauacaagugaag

SEQ ID NO: 825080 - RNA, 19 nt, Artificial Sequence
  Description of Artificial Sequence: Synthetic oligonucleotide
aguuauacaagugaaguag

SEQ ID NO: 825081 - RNA, 19 nt, Artificial Sequence
  Description of Artificial Sequence: Synthetic oligonucleotide
cauuuuaacacgaucugcc

SEQ ID NO: 825082 - RNA, 19 nt, Artificial Sequence
  Description of Artificial Sequence: Synthetic oligonucleotide
uuauccuugggucacagcu

SEQ ID NO: 825083 - RNA, 19 nt, Artificial Sequence
  Description of Artificial Sequence: Synthetic oligonucleotide
aagaaaauucucuccaaga

SEQ ID NO: 825084 - RNA, 19 nt, Artificial Sequence
  Description of Artificial Sequence: Synthetic oligonucleotide
uuaguuauacaagugaagu

SEQ ID NO: 825085 - RNA, 19 nt, Artificial Sequence
  Description of Artificial Sequence: Synthetic oligonucleotide
uauaauuagcaauaacuuc

SEQ ID NO: 825086 - RNA, 19 nt, Artificial Sequence
  Description of Artificial Sequence: Synthetic oligonucleotide
uuaauuaguaauugcagau

SEQ ID NO: 825087 - RNA, 19 nt, Artificial Sequence
  Description of Artificial Sequence: Synthetic oligonucleotide
ucaaaugaggaguucaugu

SEQ ID NO: 825088 - RNA, 19 nt, Artificial Sequence
  Description of Artificial Sequence: Synthetic oligonucleotide
agcuuuaauuaguaauugc

SEQ ID NO: 825089 - RNA, 19 nt, Artificial Sequence
  Description of Artificial Sequence: Synthetic oligonucleotide
aguucuugaaaugaugugg

SEQ ID NO: 825090 - RNA, 19 nt, Artificial Sequence
  Description of Artificial Sequence: Synthetic oligonucleotide
ugcagggaccuucaaaucg

SEQ ID NO: 825091 - RNA, 19 nt, Artificial Sequence
  Description of Artificial Sequence: Synthetic oligonucleotide
uuuugaugccagaagaaga

SEQ ID NO: 825092 - RNA, 19 nt, Artificial Sequence
  Description of Artificial Sequence: Synthetic oligonucleotide
uuggcaguucuuuugaugc

SEQ ID NO: 825093 - RNA, 19 nt, Artificial Sequence
  Description of Artificial Sequence: Synthetic oligonucleotide
uuuaacacgaucugccuca

SEQ ID NO: 825094 - RNA, 19 nt, Artificial Sequence
  Description of Artificial Sequence: Synthetic oligonucleotide
caacgaguuccuuauaucg

SEQ ID NO: 825095 - RNA, 19 nt, Artificial Sequence
  Description of Artificial Sequence: Synthetic oligonucleotide
aacucuucuaacuguaacu

SEQ ID NO: 825096 - RNA, 19 nt, Artificial Sequence
  Description of Artificial Sequence: Synthetic oligonucleotide
ugauguuuuaggaccauug

SEQ ID NO: 825097 - RNA, 19 nt, Artificial Sequence
  Description of Artificial Sequence: Synthetic oligonucleotide
cagacaacaucucauaggc

SEQ ID NO: 825098 - RNA, 19 nt, Artificial Sequence
  Description of Artificial Sequence: Synthetic oligonucleotide
gauggugccgcuuugucag

SEQ ID NO: 825099 - RNA, 19 nt, Artificial Sequence
  Description of Artificial Sequence: Synthetic oligonucleotide
ccaagaaucaaaauuauac

SEQ ID NO: 825100 - RNA, 19 nt, Artificial Sequence
  Description of Artificial Sequence: Synthetic oligonucleotide
auaggcuuuaguuauacaa

SEQ ID NO: 825101 - RNA, 19 nt, Artificial Sequence
  Description of Artificial Sequence: Synthetic oligonucleotide
uuuaccaucucaacgaguu

SEQ ID NO: 825102 - RNA, 19 nt, Artificial Sequence
  Description of Artificial Sequence: Synthetic oligonucleotide
guucaugucaccaaguuug

SEQ ID NO: 825103 - RNA, 19 nt, Artificial Sequence
  Description of Artificial Sequence: Synthetic oligonucleotide
uuagcaauaacuucccauc

SEQ ID NO: 825104 - RNA, 19 nt, Artificial Sequence
  Description of Artificial Sequence: Synthetic oligonucleotide
cuuauaucgucucaugcag

SEQ ID NO: 825105 - RNA, 19 nt, Artificial Sequence
  Description of Artificial Sequence: Synthetic oligonucleotide
ucuugcaugaguuccgaag

SEQ ID NO: 825106 - RNA, 19 nt, Artificial Sequence
  Description of Artificial Sequence: Synthetic oligonucleotide
agcuuguuaguucaagccg

SEQ ID NO: 825107 - RNA, 19 nt, Artificial Sequence
  Description of Artificial Sequence: Synthetic oligonucleotide
ucugacguggccaagucca

SEQ ID NO: 825108 - RNA, 19 nt, Artificial Sequence
  Description of Artificial Sequence: Synthetic oligonucleotide
cuaacuguaacucuucauc

SEQ ID NO: 825109 - RNA, 19 nt, Artificial Sequence
  Description of Artificial Sequence: Synthetic oligonucleotide
ucaaagguaggaucuacgc

SEQ ID NO: 825110 - RNA, 19 nt, Artificial Sequence
  Description of Artificial Sequence: Synthetic oligonucleotide
uucuccuuagccaaccgag

SEQ ID NO: 825111 - RNA, 19 nt, Artificial Sequence
  Description of Artificial Sequence: Synthetic oligonucleotide
ugacaacucuuucuuaucc

SEQ ID NO: 825112 - RNA, 19 nt, Artificial Sequence
  Description of Artificial Sequence: Synthetic oligonucleotide
uguuuuaggaccauugcuu

SEQ ID NO: 825113 - RNA, 19 nt, Artificial Sequence
  Description of Artificial Sequence: Synthetic oligonucleotide
uaguaauugcagaucaucu

SEQ ID NO: 825114 - RNA, 19 nt, Artificial Sequence
  Description of Artificial Sequence: Synthetic oligonucleotide
ugaugccagaagaagaaug

SEQ ID NO: 825115 - RNA, 19 nt, Artificial Sequence
  Description of Artificial Sequence: Synthetic oligonucleotide
ucugaaaagugauuccagc

SEQ ID NO: 825116 - RNA, 19 nt, Artificial Sequence
  Description of Artificial Sequence: Synthetic oligonucleotide
ugauagagugcagaggccg

SEQ ID NO: 825117 - RNA, 19 nt, Artificial Sequence
  Description of Artificial Sequence: Synthetic oligonucleotide
ucuaacuuccuccucuucu

SEQ ID NO: 825118 - RNA, 19 nt, Artificial Sequence
  Description of Artificial Sequence: Synthetic oligonucleotide
aaccaacaucauuucuugc

SEQ ID NO: 825119 - RNA, 19 nt, Artificial Sequence
  Description of Artificial Sequence: Synthetic oligonucleotide
uguuaguauuucauucaag

SEQ ID NO: 825120 - RNA, 19 nt, Artificial Sequence
  Description of Artificial Sequence: Synthetic oligonucleotide
uccuuauaucgucucaugc

SEQ ID NO: 825121 - RNA, 19 nt, Artificial Sequence
  Description of Artificial Sequence: Synthetic oligonucleotide
uaagcuuguuaguucaagc

SEQ ID NO: 825122 - RNA, 19 nt, Artificial Sequence
  Description of Artificial Sequence: Synthetic oligonucleotide
aguguuuucagcaugggga

SEQ ID NO: 825123 - RNA, 19 nt, Artificial Sequence
  Description of Artificial Sequence: Synthetic oligonucleotide
uauacaagugaaguaguca

SEQ ID NO: 825124 - RNA, 19 nt, Artificial Sequence
  Description of Artificial Sequence: Synthetic oligonucleotide
uaacuguaacucuucaucu

SEQ ID NO: 825125 - RNA, 19 nt, Artificial Sequence
  Description of Artificial Sequence: Synthetic oligonucleotide
uuauaaaagugcacacaca

SEQ ID NO: 825126 - RNA, 19 nt, Artificial Sequence
  Description of Artificial Sequence: Synthetic oligonucleotide
auacaagugaaguagucau

SEQ ID NO: 825127 - RNA, 19 nt, Artificial Sequence
  Description of Artificial Sequence: Synthetic oligonucleotide
ucucauaggcuuuaguuau

SEQ ID NO: 825128 - RNA, 19 nt, Artificial Sequence
  Description of Artificial Sequence: Synthetic oligonucleotide
cuggguauguuuucaaagc

SEQ ID NO: 825129 - RNA, 19 nt, Artificial Sequence
  Description of Artificial Sequence: Synthetic oligonucleotide
uuuauuugaccaucgggaa

SEQ ID NO: 825130 - RNA, 19 nt, Artificial Sequence
  Description of Artificial Sequence: Synthetic oligonucleotide
gaucuacgcuguuaaaugc

SEQ ID NO: 825131 - RNA, 19 nt, Artificial Sequence
  Description of Artificial Sequence: Synthetic oligonucleotide
uuagaugcuugccgcaucc

SEQ ID NO: 825132 - RNA, 19 nt, Artificial Sequence
  Description of Artificial Sequence: Synthetic oligonucleotide
ucuacgcuguuaaaugccc

SEQ ID NO: 825133 - RNA, 19 nt, Artificial Sequence
  Description of Artificial Sequence: Synthetic oligonucleotide
ucgggaauuccuuucaaac

SEQ ID NO: 825134 - RNA, 19 nt, Artificial Sequence
  Description of Artificial Sequence: Synthetic oligonucleotide
gucgggaugauguuuuagg

SEQ ID NO: 825135 - RNA, 19 nt, Artificial Sequence
  Description of Artificial Sequence: Synthetic oligonucleotide
caaaucguucugauggugc

SEQ ID NO: 825136 - RNA, 19 nt, Artificial Sequence
  Description of Artificial Sequence: Synthetic oligonucleotide
uuuggcaguucuuuugaug

SEQ ID NO: 825137 - RNA, 19 nt, Artificial Sequence
  Description of Artificial Sequence: Synthetic oligonucleotide
uaacuucccaucuugaguu

SEQ ID NO: 825138 - RNA, 19 nt, Artificial Sequence
  Description of Artificial Sequence: Synthetic oligonucleotide
ucguuuacuucuucuaucu

SEQ ID NO: 825139 - RNA, 19 nt, Artificial Sequence
  Description of Artificial Sequence: Synthetic oligonucleotide
ugaaaucugugcagggacc

SEQ ID NO: 825140 - RNA, 19 nt, Artificial Sequence
  Description of Artificial Sequence: Synthetic oligonucleotide
aguauuucauucaagcacu

SEQ ID NO: 825141 - RNA, 19 nt, Artificial Sequence
  Description of Artificial Sequence: Synthetic oligonucleotide
uuauacaagugaaguaguc

SEQ ID NO: 825142 - RNA, 19 nt, Artificial Sequence
  Description of Artificial Sequence: Synthetic oligonucleotide
ucugacaacucuuucuuau

SEQ ID NO: 825143 - RNA, 19 nt, Artificial Sequence
  Description of Artificial Sequence: Synthetic oligonucleotide
uuaguaauugcagaucauc

SEQ ID NO: 825144 - RNA, 19 nt, Artificial Sequence
  Description of Artificial Sequence: Synthetic oligonucleotide
auauaauuagcaauaacuu

SEQ ID NO: 825145 - RNA, 19 nt, Artificial Sequence
  Description of Artificial Sequence: Synthetic oligonucleotide
uauaucgucucaugcaguc

SEQ ID NO: 825146 - RNA, 19 nt, Artificial Sequence
  Description of Artificial Sequence: Synthetic oligonucleotide
uggguauguuuucaaagcu

SEQ ID NO: 825147 - RNA, 19 nt, Artificial Sequence
  Description of Artificial Sequence: Synthetic oligonucleotide
aagccgaucgcacaguuuu

SEQ ID NO: 825148 - RNA, 19 nt, Artificial Sequence
  Description of Artificial Sequence: Synthetic oligonucleotide
agcuucaaaccaucuuccc

SEQ ID NO: 825149 - RNA, 19 nt, Artificial Sequence
  Description of Artificial Sequence: Synthetic oligonucleotide
acuggaucagacaacaucu

SEQ ID NO: 825150 - RNA, 19 nt, Artificial Sequence
  Description of Artificial Sequence: Synthetic oligonucleotide
uggaucagacaacaucuca

SEQ ID NO: 825151 - RNA, 19 nt, Artificial Sequence
  Description of Artificial Sequence: Synthetic oligonucleotide
caaggggugaaaucugugc

SEQ ID NO: 825152 - RNA, 19 nt, Artificial Sequence
  Description of Artificial Sequence: Synthetic oligonucleotide
aaugcccgucuuuucacug

SEQ ID NO: 825153 - RNA, 19 nt, Artificial Sequence
  Description of Artificial Sequence: Synthetic oligonucleotide
agguugacagcuuuaauua

SEQ ID NO: 825154 - RNA, 19 nt, Artificial Sequence
  Description of Artificial Sequence: Synthetic oligonucleotide
gauccaucuccucucauca

SEQ ID NO: 825155 - RNA, 19 nt, Artificial Sequence
  Description of Artificial Sequence: Synthetic oligonucleotide
uuuacuggguauguuuuca

SEQ ID NO: 825156 - RNA, 19 nt, Artificial Sequence
  Description of Artificial Sequence: Synthetic oligonucleotide
guuaguucaagccgaucgc

SEQ ID NO: 825157 - RNA, 19 nt, Artificial Sequence
  Description of Artificial Sequence: Synthetic oligonucleotide
aauuagcaauaacuuccca

SEQ ID NO: 825158 - RNA, 19 nt, Artificial Sequence
  Description of Artificial Sequence: Synthetic oligonucleotide
uuugcgcccuuguugcucg

SEQ ID NO: 825159 - RNA, 19 nt, Artificial Sequence
  Description of Artificial Sequence: Synthetic oligonucleotide
aucuacgcuguuaaaugcc

SEQ ID NO: 825160 - RNA, 19 nt, Artificial Sequence
  Description of Artificial Sequence: Synthetic oligonucleotide
gaggcuuuuagccuugcca

SEQ ID NO: 825161 - RNA, 19 nt, Artificial Sequence
  Description of Artificial Sequence: Synthetic oligonucleotide
gauuccagcucuugcauga

SEQ ID NO: 825162 - RNA, 19 nt, Artificial Sequence
  Description of Artificial Sequence: Synthetic oligonucleotide
uccgcuaucuuuucccacc

SEQ ID NO: 825163 - RNA, 19 nt, Artificial Sequence
  Description of Artificial Sequence: Synthetic oligonucleotide
ugaucggcuccccagcugc

SEQ ID NO: 825164 - RNA, 19 nt, Artificial Sequence
  Description of Artificial Sequence: Synthetic oligonucleotide
agcuucuaauucugcuugc

SEQ ID NO: 825165 - RNA, 19 nt, Artificial Sequence
  Description of Artificial Sequence: Synthetic oligonucleotide
uaauuaguaauugcagauc

SEQ ID NO: 825166 - RNA, 19 nt, Artificial Sequence
  Description of Artificial Sequence: Synthetic oligonucleotide
uguagauguuguuaguauu

SEQ ID NO: 825167 - RNA, 19 nt, Artificial Sequence
  Description of Artificial Sequence: Synthetic oligonucleotide
aucugacguggccaagucc

SEQ ID NO: 825168 - RNA, 19 nt, Artificial Sequence
  Description of Artificial Sequence: Synthetic oligonucleotide
aaauuauaccagaaagaau

SEQ ID NO: 825169 - RNA, 19 nt, Artificial Sequence
  Description of Artificial Sequence: Synthetic oligonucleotide
agccuugccaauaacaucu

SEQ ID NO: 825170 - RNA, 19 nt, Artificial Sequence
  Description of Artificial Sequence: Synthetic oligonucleotide
uagcaauaacuucccaucu

SEQ ID NO: 825171 - RNA, 19 nt, Artificial Sequence
  Description of Artificial Sequence: Synthetic oligonucleotide
cucggcaggagcagcaugg

SEQ ID NO: 825172 - RNA, 19 nt, Artificial Sequence
  Description of Artificial Sequence: Synthetic oligonucleotide
uuauccuccaguucuugaa

SEQ ID NO: 825173 - RNA, 19 nt, Artificial Sequence
  Description of Artificial Sequence: Synthetic oligonucleotide
uauuugaccaucgggaauu

SEQ ID NO: 825174 - RNA, 19 nt, Artificial Sequence
  Description of Artificial Sequence: Synthetic oligonucleotide
augcuugccgcauccgagc

SEQ ID NO: 825175 - RNA, 19 nt, Artificial Sequence
  Description of Artificial Sequence: Synthetic oligonucleotide
aucucauaggcuuuaguua

SEQ ID NO: 825176 - RNA, 19 nt, Artificial Sequence
  Description of Artificial Sequence: Synthetic oligonucleotide
uuauuugaccaucgggaau

SEQ ID NO: 825177 - RNA, 19 nt, Artificial Sequence
  Description of Artificial Sequence: Synthetic oligonucleotide
aaucguucugauggugccg

SEQ ID NO: 825178 - RNA, 19 nt, Artificial Sequence
  Description of Artificial Sequence: Synthetic oligonucleotide
aguugacuucucugcauuc

SEQ ID NO: 825179 - RNA, 19 nt, Artificial Sequence
  Description of Artificial Sequence: Synthetic oligonucleotide
uccuuagccaaccgagcag

SEQ ID NO: 825180 - RNA, 19 nt, Artificial Sequence
  Description of Artificial Sequence: Synthetic oligonucleotide
agaauaaaaugcaucuaca

SEQ ID NO: 825181 - RNA, 19 nt, Artificial Sequence
  Description of Artificial Sequence: Synthetic oligonucleotide
accaucgggaauuccuuuc

SEQ ID NO: 825182 - RNA, 19 nt, Artificial Sequence
  Description of Artificial Sequence: Synthetic oligonucleotide
ugaguuugucccagcagga

SEQ ID NO: 825183 - RNA, 19 nt, Artificial Sequence
  Description of Artificial Sequence: Synthetic oligonucleotide
gaucuugauucuuccaauc

SEQ ID NO: 825184 - RNA, 19 nt, Artificial Sequence
  Description of Artificial Sequence: Synthetic oligonucleotide
accgaguugucaaagguag

SEQ ID NO: 825185 - RNA, 19 nt, Artificial Sequence
  Description of Artificial Sequence: Synthetic oligonucleotide
ggaucuacgcuguuaaaug

SEQ ID NO: 825186 - RNA, 19 nt, Artificial Sequence
  Description of Artificial Sequence: Synthetic oligonucleotide
gcuuuuaccaucucaacga

SEQ ID NO: 825187 - RNA, 19 nt, Artificial Sequence
  Description of Artificial Sequence: Synthetic oligonucleotide
uuauaucgucucaugcagu

SEQ ID NO: 825188 - RNA, 19 nt, Artificial Sequence
  Description of Artificial Sequence: Synthetic oligonucleotide
uuuuaccaucucaacgagu

SEQ ID NO: 825189 - RNA, 19 nt, Artificial Sequence
  Description of Artificial Sequence: Synthetic oligonucleotide
ugcauucuuagaugcuugc

SEQ ID NO: 825190 - RNA, 19 nt, Artificial Sequence
  Description of Artificial Sequence: Synthetic oligonucleotide
auugcagaucaucuucuga

SEQ ID NO: 825191 - RNA, 19 nt, Artificial Sequence
  Description of Artificial Sequence: Synthetic oligonucleotide
acuaauguucuuauucugu

SEQ ID NO: 825192 - RNA, 19 nt, Artificial Sequence
  Description of Artificial Sequence: Synthetic oligonucleotide
gaagaagaauguauauuca

SEQ ID NO: 825193 - RNA, 19 nt, Artificial Sequence
  Description of Artificial Sequence: Synthetic oligonucleotide
ucaacgaguuccuuauauc

SEQ ID NO: 825194 - RNA, 19 nt, Artificial Sequence
  Description of Artificial Sequence: Synthetic oligonucleotide
aacuguaacucuucaucuu

SEQ ID NO: 825195 - RNA, 19 nt, Artificial Sequence
  Description of Artificial Sequence: Synthetic oligonucleotide
aucucaacgaguuccuuau

SEQ ID NO: 825196 - RNA, 19 nt, Artificial Sequence
  Description of Artificial Sequence: Synthetic oligonucleotide
cuuccaaucuuuggggucc

SEQ ID NO: 825197 - RNA, 19 nt, Artificial Sequence
  Description of Artificial Sequence: Synthetic oligonucleotide
aaaugcccgucuuuucacu

SEQ ID NO: 825198 - RNA, 19 nt, Artificial Sequence
  Description of Artificial Sequence: Synthetic oligonucleotide
gacaacaucucauaggcuu

SEQ ID NO: 825199 - RNA, 19 nt, Artificial Sequence
  Description of Artificial Sequence: Synthetic oligonucleotide
guucaagccgaucgcacag

SEQ ID NO: 825200 - RNA, 19 nt, Artificial Sequence
  Description of Artificial Sequence: Synthetic oligonucleotide
uuaguucaagccgaucgca

SEQ ID NO: 825201 - RNA, 19 nt, Artificial Sequence
  Description of Artificial Sequence: Synthetic oligonucleotide
cacuggaucagacaacauc

SEQ ID NO: 825202 - RNA, 19 nt, Artificial Sequence
  Description of Artificial Sequence: Synthetic oligonucleotide
caguguuuucagcaugggg

SEQ ID NO: 825203 - RNA, 19 nt, Artificial Sequence
  Description of Artificial Sequence: Synthetic oligonucleotide
uuuccguuugucgggauga

SEQ ID NO: 825204 - RNA, 19 nt, Artificial Sequence
  Description of Artificial Sequence: Synthetic oligonucleotide
gcaauaacuucccaucuug

SEQ ID NO: 825205 - RNA, 19 nt, Artificial Sequence
  Description of Artificial Sequence: Synthetic oligonucleotide
ugcucgguucugcuuuucg

SEQ ID NO: 825206 - RNA, 19 nt, Artificial Sequence
  Description of Artificial Sequence: Synthetic oligonucleotide
uuccuuauaucgucucaug

SEQ ID NO: 825207 - RNA, 19 nt, Artificial Sequence
  Description of Artificial Sequence: Synthetic oligonucleotide
aggggugaaaucugugcag

SEQ ID NO: 825208 - RNA, 19 nt, Artificial Sequence
  Description of Artificial Sequence: Synthetic oligonucleotide
ugauggugccgcuuuguca

SEQ ID NO: 825209 - RNA, 19 nt, Artificial Sequence
  Description of Artificial Sequence: Synthetic oligonucleotide
uaucgucucaugcagucuu

SEQ ID NO: 825210 - RNA, 19 nt, Artificial Sequence
  Description of Artificial Sequence: Synthetic oligonucleotide
uuucgauccaucuccucuc

SEQ ID NO: 825211 - RNA, 19 nt, Artificial Sequence
  Description of Artificial Sequence: Synthetic oligonucleotide
gucaaagguaggaucuacg

SEQ ID NO: 825212 - RNA, 19 nt, Artificial Sequence
  Description of Artificial Sequence: Synthetic oligonucleotide
gaugcuugccgcauccgag

SEQ ID NO: 825213 - RNA, 19 nt, Artificial Sequence
  Description of Artificial Sequence: Synthetic oligonucleotide
cucguuuacuucuucuauc

SEQ ID NO: 825214 - RNA, 19 nt, Artificial Sequence
  Description of Artificial Sequence: Synthetic oligonucleotide
ugcuugccgcauccgagcg

SEQ ID NO: 825215 - RNA, 19 nt, Artificial Sequence
  Description of Artificial Sequence: Synthetic oligonucleotide
aguucaagccgaucgcaca

SEQ ID NO: 825216 - RNA, 19 nt, Artificial Sequence
  Description of Artificial Sequence: Synthetic oligonucleotide
uccuacuucucuuguagau

SEQ ID NO: 825217 - RNA, 19 nt, Artificial Sequence
  Description of Artificial Sequence: Synthetic oligonucleotide
ucaaaucguucugauggug

SEQ ID NO: 825218 - RNA, 19 nt, Artificial Sequence
  Description of Artificial Sequence: Synthetic oligonucleotide
ucuuccaaucuuugggguc

SEQ ID NO: 825219 - RNA, 19 nt, Artificial Sequence
  Description of Artificial Sequence: Synthetic oligonucleotide
uguguggcuuuguaucuga

SEQ ID NO: 825220 - RNA, 19 nt, Artificial Sequence
  Description of Artificial Sequence: Synthetic oligonucleotide
cuacgcuguuaaaugcccg

SEQ ID NO: 825221 - RNA, 19 nt, Artificial Sequence
  Description of Artificial Sequence: Synthetic oligonucleotide
ugaaaugauguggaagcau

SEQ ID NO: 825222 - RNA, 19 nt, Artificial Sequence
  Description of Artificial Sequence: Synthetic oligonucleotide
uguuucuucucuugacaaa

SEQ ID NO: 825223 - RNA, 19 nt, Artificial Sequence
  Description of Artificial Sequence: Synthetic oligonucleotide
uaguucaagccgaucgcac

SEQ ID NO: 825224 - RNA, 19 nt, Artificial Sequence
  Description of Artificial Sequence: Synthetic oligonucleotide
aguuccgaagcuucugccu

SEQ ID NO: 825225 - RNA, 19 nt, Artificial Sequence
  Description of Artificial Sequence: Synthetic oligonucleotide
aguuccuuauaucgucuca

SEQ ID NO: 825226 - RNA, 19 nt, Artificial Sequence
  Description of Artificial Sequence: Synthetic oligonucleotide
caugcagucuuucuucguc

SEQ ID NO: 825227 - RNA, 19 nt, Artificial Sequence
  Description of Artificial Sequence: Synthetic oligonucleotide
uuauaccagaaagaauaaa

SEQ ID NO: 825228 - RNA, 19 nt, Artificial Sequence
  Description of Artificial Sequence: Synthetic oligonucleotide
ucccaucuugaguuugucc

SEQ ID NO: 825229 - RNA, 19 nt, Artificial Sequence
  Description of Artificial Sequence: Synthetic oligonucleotide
aauuguccuuugcuucacu

SEQ ID NO: 825230 - RNA, 19 nt, Artificial Sequence
  Description of Artificial Sequence: Synthetic oligonucleotide
cuguaagcuuguuaguuca

SEQ ID NO: 825231 - RNA, 19 nt, Artificial Sequence
  Description of Artificial Sequence: Synthetic oligonucleotide
uacgcuguuaaaugcccgu

SEQ ID NO: 825232 - RNA, 19 nt, Artificial Sequence
  Description of Artificial Sequence: Synthetic oligonucleotide
guaggaucuacgcuguuaa

SEQ ID NO: 825233 - RNA, 19 nt, Artificial Sequence
  Description of Artificial Sequence: Synthetic oligonucleotide
ggcuuuguaucugacgugg

SEQ ID NO: 825234 - RNA, 19 nt, Artificial Sequence
  Description of Artificial Sequence: Synthetic oligonucleotide
auuaucaacuaauguucuu

SEQ ID NO: 825235 - RNA, 19 nt, Artificial Sequence
  Description of Artificial Sequence: Synthetic oligonucleotide
gagguugacagcuuuaauu

SEQ ID NO: 825236 - RNA, 19 nt, Artificial Sequence
  Description of Artificial Sequence: Synthetic oligonucleotide
uugcaugaguuccgaagcu

SEQ ID NO: 825237 - RNA, 19 nt, Artificial Sequence
  Description of Artificial Sequence: Synthetic oligonucleotide
gauguggaagcauuucugu

SEQ ID NO: 825238 - RNA, 19 nt, Artificial Sequence
  Description of Artificial Sequence: Synthetic oligonucleotide
uucuuagaugcuugccgca

SEQ ID NO: 825239 - RNA, 19 nt, Artificial Sequence
  Description of Artificial Sequence: Synthetic oligonucleotide
cauucaagcacuguaagcu

SEQ ID NO: 825240 - RNA, 19 nt, Artificial Sequence
  Description of Artificial Sequence: Synthetic oligonucleotide
ugcugucuaacuuccuccu

SEQ ID NO: 825241 - RNA, 19 nt, Artificial Sequence
  Description of Artificial Sequence: Synthetic oligonucleotide
agaagaauguauauucaua

SEQ ID NO: 825242 - RNA, 19 nt, Artificial Sequence
  Description of Artificial Sequence: Synthetic oligonucleotide
uuuauccuugggucacagc

SEQ ID NO: 825243 - RNA, 19 nt, Artificial Sequence
  Description of Artificial Sequence: Synthetic oligonucleotide
uugcuuuuaccaucucaac

SEQ ID NO: 825244 - RNA, 19 nt, Artificial Sequence
  Description of Artificial Sequence: Synthetic oligonucleotide
cugcuuuccguuugucggg

SEQ ID NO: 825245 - RNA, 19 nt, Artificial Sequence
  Description of Artificial Sequence: Synthetic oligonucleotide
auaacaucuuuggcaguuc

SEQ ID NO: 825246 - RNA, 19 nt, Artificial Sequence
  Description of Artificial Sequence: Synthetic oligonucleotide
ggaaccgaguugucaaagg

SEQ ID NO: 825247 - RNA, 19 nt, Artificial Sequence
  Description of Artificial Sequence: Synthetic oligonucleotide
uuaggaccauugcuuuaug

SEQ ID NO: 825248 - RNA, 19 nt, Artificial Sequence
  Description of Artificial Sequence: Synthetic oligonucleotide
aggaucuacgcuguuaaau

SEQ ID NO: 825249 - RNA, 19 nt, Artificial Sequence
  Description of Artificial Sequence: Synthetic oligonucleotide
augcccgucuuuucacugg

SEQ ID NO: 825250 - RNA, 19 nt, Artificial Sequence
  Description of Artificial Sequence: Synthetic oligonucleotide
uccaucauuuuaacacgau

SEQ ID NO: 825251 - RNA, 19 nt, Artificial Sequence
  Description of Artificial Sequence: Synthetic oligonucleotide
uguaagcuuguuaguucaa

SEQ ID NO: 825252 - RNA, 19 nt, Artificial Sequence
  Description of Artificial Sequence: Synthetic oligonucleotide
cauggggaacucuucuaac

SEQ ID NO: 825253 - RNA, 19 nt, Artificial Sequence
  Description of Artificial Sequence: Synthetic oligonucleotide
uuccuacuucucuuguaga

SEQ ID NO: 825254 - RNA, 19 nt, Artificial Sequence
  Description of Artificial Sequence: Synthetic oligonucleotide
uuugcucguuuacuucuuc

SEQ ID NO: 825255 - RNA, 19 nt, Artificial Sequence
  Description of Artificial Sequence: Synthetic oligonucleotide
uaucugacguggccaaguc

SEQ ID NO: 825256 - RNA, 19 nt, Artificial Sequence
  Description of Artificial Sequence: Synthetic oligonucleotide
cucucaucacgacauucug

SEQ ID NO: 825257 - RNA, 19 nt, Artificial Sequence
  Description of Artificial Sequence: Synthetic oligonucleotide
auuguccuuugcuucacuu

SEQ ID NO: 825258 - RNA, 19 nt, Artificial Sequence
  Description of Artificial Sequence: Synthetic oligonucleotide
ugucgggaugauguuuuag

SEQ ID NO: 825259 - RNA, 19 nt, Artificial Sequence
  Description of Artificial Sequence: Synthetic oligonucleotide
uucuuugaucggcucccca

SEQ ID NO: 825260 - RNA, 19 nt, Artificial Sequence
  Description of Artificial Sequence: Synthetic oligonucleotide
acaucucauaggcuuuagu

SEQ ID NO: 825261 - RNA, 19 nt, Artificial Sequence
  Description of Artificial Sequence: Synthetic oligonucleotide
agcaauaacuucccaucuu

SEQ ID NO: 825262 - RNA, 19 nt, Artificial Sequence
  Description of Artificial Sequence: Synthetic oligonucleotide
acugcauaaugaucuugau

SEQ ID NO: 825263 - RNA, 19 nt, Artificial Sequence
  Description of Artificial Sequence: Synthetic oligonucleotide
ugaccaucgggaauuccuu

SEQ ID NO: 825264 - RNA, 19 nt, Artificial Sequence
  Description of Artificial Sequence: Synthetic oligonucleotide
aggaaccgaguugucaaag

SEQ ID NO: 825265 - RNA, 19 nt, Artificial Sequence
  Description of Artificial Sequence: Synthetic oligonucleotide
caauaacuucccaucuuga

SEQ ID NO: 825266 - RNA, 19 nt, Artificial Sequence
  Description of Artificial Sequence: Synthetic oligonucleotide
uuaccaucucaacgaguuc

SEQ ID NO: 825267 - RNA, 19 nt, Artificial Sequence
  Description of Artificial Sequence: Synthetic oligonucleotide
gacggcggugcccuggccc

SEQ ID NO: 825268 - RNA, 19 nt, Artificial Sequence
  Description of Artificial Sequence: Synthetic oligonucleotide
guguuuucagcauggggaa

SEQ ID NO: 825269 - RNA, 19 nt, Artificial Sequence
  Description of Artificial Sequence: Synthetic oligonucleotide
acacgaucugccucauugu

SEQ ID NO: 825270 - RNA, 19 nt, Artificial Sequence
  Description of Artificial Sequence: Synthetic oligonucleotide
uucugauggugccgcuuug

SEQ ID NO: 825271 - RNA, 19 nt, Artificial Sequence
  Description of Artificial Sequence: Synthetic oligonucleotide
ugguccaaggggugaaauc

SEQ ID NO: 825272 - RNA, 19 nt, Artificial Sequence
  Description of Artificial Sequence: Synthetic oligonucleotide
ugcccgucuuuucacugga

SEQ ID NO: 825273 - RNA, 19 nt, Artificial Sequence
  Description of Artificial Sequence: Synthetic oligonucleotide
cacgaucugccucauuguc

SEQ ID NO: 825274 - RNA, 19 nt, Artificial Sequence
  Description of Artificial Sequence: Synthetic oligonucleotide
aaccgaguugucaaaggua

SEQ ID NO: 825275 - RNA, 19 nt, Artificial Sequence
  Description of Artificial Sequence: Synthetic oligonucleotide
cuuagaugcuugccgcauc

SEQ ID NO: 825276 - RNA, 19 nt, Artificial Sequence
  Description of Artificial Sequence: Synthetic oligonucleotide
ccuuauaucgucucaugca

SEQ ID NO: 825277 - RNA, 19 nt, Artificial Sequence
  Description of Artificial Sequence: Synthetic oligonucleotide
agcucuugcaugaguuccg

SEQ ID NO: 825278 - RNA, 19 nt, Artificial Sequence
  Description of Artificial Sequence: Synthetic oligonucleotide
cuggaucagacaacaucuc

SEQ ID NO: 825279 - RNA, 19 nt, Artificial Sequence
  Description of Artificial Sequence: Synthetic oligonucleotide
uuugaccaucgggaauucc

SEQ ID NO: 825280 - RNA, 19 nt, Artificial Sequence
  Description of Artificial Sequence: Synthetic oligonucleotide
ucaagccgaucgcacaguu

SEQ ID NO: 825281 - RNA, 19 nt, Artificial Sequence
  Description of Artificial Sequence: Synthetic oligonucleotide
cauuugcucguuuacuucu

SEQ ID NO: 825282 - RNA, 19 nt, Artificial Sequence
  Description of Artificial Sequence: Synthetic oligonucleotide
aaagagguugacagcuuua

SEQ ID NO: 825283 - RNA, 19 nt, Artificial Sequence
  Description of Artificial Sequence: Synthetic oligonucleotide
gcuugcauucagcacuugc

SEQ ID NO: 825284 - RNA, 19 nt, Artificial Sequence
  Description of Artificial Sequence: Synthetic oligonucleotide
uguaucugacguggccaag

SEQ ID NO: 825285 - RNA, 19 nt, Artificial Sequence
  Description of Artificial Sequence: Synthetic oligonucleotide
ugaggggccacuccauguu

SEQ ID NO: 825286 - RNA, 19 nt, Artificial Sequence
  Description of Artificial Sequence: Synthetic oligonucleotide
auuugaccaucgggaauuc

SEQ ID NO: 825287 - RNA, 19 nt, Artificial Sequence
  Description of Artificial Sequence: Synthetic oligonucleotide
ucugauggugccgcuuugu

SEQ ID NO: 825288 - RNA, 19 nt, Artificial Sequence
  Description of Artificial Sequence: Synthetic oligonucleotide
uagaugcuugccgcauccg

SEQ ID NO: 825289 - RNA, 19 nt, Artificial Sequence
  Description of Artificial Sequence: Synthetic oligonucleotide
aggaacugccuccgcuauc

SEQ ID NO: 825290 - RNA, 19 nt, Artificial Sequence
  Description of Artificial Sequence: Synthetic oligonucleotide
ggguccaguguuuucagca

SEQ ID NO: 825291 - RNA, 19 nt, Artificial Sequence
  Description of Artificial Sequence: Synthetic oligonucleotide
ggaccuucaaaucguucug

SEQ ID NO: 825292 - RNA, 19 nt, Artificial Sequence
  Description of Artificial Sequence: Synthetic oligonucleotide
cugcuuuucgauccaucuc

SEQ ID NO: 825293 - RNA, 19 nt, Artificial Sequence
  Description of Artificial Sequence: Synthetic oligonucleotide
uucuuauccuccaguucuu

SEQ ID NO: 825294 - RNA, 19 nt, Artificial Sequence
  Description of Artificial Sequence: Synthetic oligonucleotide
uuccgucuggcuucugccu

SEQ ID NO: 825295 - RNA, 19 nt, Artificial Sequence
  Description of Artificial Sequence: Synthetic oligonucleotide
aucacgacauucugcuuuu

SEQ ID NO: 825296 - RNA, 19 nt, Artificial Sequence
  Description of Artificial Sequence: Synthetic oligonucleotide
uccucucaucacgacauuc

SEQ ID NO: 825297 - RNA, 19 nt, Artificial Sequence
  Description of Artificial Sequence: Synthetic oligonucleotide
gacaaaagcuucaaaccau

SEQ ID NO: 825298 - RNA, 19 nt, Artificial Sequence
  Description of Artificial Sequence: Synthetic oligonucleotide
cacuuuuagaaggaaccga

SEQ ID NO: 825299 - RNA, 19 nt, Artificial Sequence
  Description of Artificial Sequence: Synthetic oligonucleotide
gauagagugcagaggccga

SEQ ID NO: 825300 - RNA, 19 nt, Artificial Sequence
  Description of Artificial Sequence: Synthetic oligonucleotide
acgcuguuaaaugcccguc

SEQ ID NO: 825301 - RNA, 19 nt, Artificial Sequence
  Description of Artificial Sequence: Synthetic oligonucleotide
cuugccgcauccgagcguc

SEQ ID NO: 825302 - RNA, 19 nt, Artificial Sequence
  Description of Artificial Sequence: Synthetic oligonucleotide
gaaaucugugcagggaccu

SEQ ID NO: 825303 - RNA, 19 nt, Artificial Sequence
  Description of Artificial Sequence: Synthetic oligonucleotide
ccaucauuuuaacacgauc

SEQ ID NO: 825304 - RNA, 19 nt, Artificial Sequence
  Description of Artificial Sequence: Synthetic oligonucleotide
ugacguggccaaguccaag

SEQ ID NO: 825305 - RNA, 19 nt, Artificial Sequence
  Description of Artificial Sequence: Synthetic oligonucleotide
uugaugccagaagaagaau

SEQ ID NO: 825306 - RNA, 19 nt, Artificial Sequence
  Description of Artificial Sequence: Synthetic oligonucleotide
caucucaacgaguuccuua

SEQ ID NO: 825307 - RNA, 19 nt, Artificial Sequence
  Description of Artificial Sequence: Synthetic oligonucleotide
acgaucugccucauugucu

SEQ ID NO: 825308 - RNA, 19 nt, Artificial Sequence
  Description of Artificial Sequence: Synthetic oligonucleotide
uccguuugucgggaugaug

SEQ ID NO: 825309 - RNA, 19 nt, Artificial Sequence
  Description of Artificial Sequence: Synthetic oligonucleotide
ugcaugaguuccgaagcuu

SEQ ID NO: 825310 - RNA, 19 nt, Artificial Sequence
  Description of Artificial Sequence: Synthetic oligonucleotide
cugccuucgcuuucuuuuc

SEQ ID NO: 825311 - RNA, 19 nt, Artificial Sequence
  Description of Artificial Sequence: Synthetic oligonucleotide
gcuuguuaguucaagccga

SEQ ID NO: 825312 - RNA, 19 nt, Artificial Sequence
  Description of Artificial Sequence: Synthetic oligonucleotide
uaggaucuacgcuguuaaa

SEQ ID NO: 825313 - RNA, 19 nt, Artificial Sequence
  Description of Artificial Sequence: Synthetic oligonucleotide
ugcuuuccguuugucggga

SEQ ID NO: 825314 - RNA, 19 nt, Artificial Sequence
  Description of Artificial Sequence: Synthetic oligonucleotide
uuucuucguccugccagga

SEQ ID NO: 825315 - RNA, 19 nt, Artificial Sequence
  Description of Artificial Sequence: Synthetic oligonucleotide
cuccgcuaucuuuucccac

SEQ ID NO: 825316 - RNA, 19 nt, Artificial Sequence
  Description of Artificial Sequence: Synthetic oligonucleotide
uucaagccgaucgcacagu

SEQ ID NO: 825317 - RNA, 19 nt, Artificial Sequence
  Description of Artificial Sequence: Synthetic oligonucleotide
ucucaacgaguuccuuaua

SEQ ID NO: 825318 - RNA, 19 nt, Artificial Sequence
  Description of Artificial Sequence: Synthetic oligonucleotide
ggugaaaucugugcaggga

SEQ ID NO: 825319 - RNA, 19 nt, Artificial Sequence
  Description of Artificial Sequence: Synthetic oligonucleotide
ucguccugccaggaacugc

SEQ ID NO: 825320 - RNA, 19 nt, Artificial Sequence
  Description of Artificial Sequence: Synthetic oligonucleotide
cuuugcgcccuuguugcuc

SEQ ID NO: 825321 - RNA, 19 nt, Artificial Sequence
  Description of Artificial Sequence: Synthetic oligonucleotide
caucacgacauucugcuuu

SEQ ID NO: 825322 - RNA, 19 nt, Artificial Sequence
  Description of Artificial Sequence: Synthetic oligonucleotide
uuguuaguucaagccgauc

SEQ ID NO: 825323 - RNA, 19 nt, Artificial Sequence
  Description of Artificial Sequence: Synthetic oligonucleotide
guccaaggggugaaaucug

SEQ ID NO: 825324 - RNA, 19 nt, Artificial Sequence
  Description of Artificial Sequence: Synthetic oligonucleotide
gucuuuucacuggaucaga

SEQ ID NO: 825325 - RNA, 19 nt, Artificial Sequence
  Description of Artificial Sequence: Synthetic oligonucleotide
gguccaaggggugaaaucu

SEQ ID NO: 825326 - RNA, 19 nt, Artificial Sequence
  Description of Artificial Sequence: Synthetic oligonucleotide
acguggccaaguccaagaa

SEQ ID NO: 825327 - RNA, 19 nt, Artificial Sequence
  Description of Artificial Sequence: Synthetic oligonucleotide
ccuacuucucuuguagaug

SEQ ID NO: 825328 - RNA, 19 nt, Artificial Sequence
  Description of Artificial Sequence: Synthetic oligonucleotide
uucguccugccaggaacug

SEQ ID NO: 825329 - RNA, 19 nt, Artificial Sequence
  Description of Artificial Sequence: Synthetic oligonucleotide
ucaucacgacauucugcuu

SEQ ID NO: 825330 - RNA, 19 nt, Artificial Sequence
  Description of Artificial Sequence: Synthetic oligonucleotide
agacaacaucucauaggcu

SEQ ID NO: 825331 - RNA, 19 nt, Artificial Sequence
  Description of Artificial Sequence: Synthetic oligonucleotide
ccgucuuuucacuggauca

SEQ ID NO: 825332 - RNA, 19 nt, Artificial Sequence
  Description of Artificial Sequence: Synthetic oligonucleotide
augauguuuuaggaccauu

SEQ ID NO: 825333 - RNA, 19 nt, Artificial Sequence
  Description of Artificial Sequence: Synthetic oligonucleotide
uuaacacgaucugccucau

SEQ ID NO: 825334 - RNA, 19 nt, Artificial Sequence
  Description of Artificial Sequence: Synthetic oligonucleotide
caaccgagcagcuucuaau

SEQ ID NO: 825335 - RNA, 19 nt, Artificial Sequence
  Description of Artificial Sequence: Synthetic oligonucleotide
augccagaagaagaaugua

SEQ ID NO: 825336 - RNA, 19 nt, Artificial Sequence
  Description of Artificial Sequence: Synthetic oligonucleotide
cagccugaggggccacucc

SEQ ID NO: 825337 - RNA, 19 nt, Artificial Sequence
  Description of Artificial Sequence: Synthetic oligonucleotide
gcaugaguuccgaagcuuc

SEQ ID NO: 825338 - RNA, 19 nt, Artificial Sequence
  Description of Artificial Sequence: Synthetic oligonucleotide
cucgguucugcuuuucgau

SEQ ID NO: 825339 - RNA, 19 nt, Artificial Sequence
  Description of Artificial Sequence: Synthetic oligonucleotide
cccacuuccgccaguugac

SEQ ID NO: 825340 - RNA, 19 nt, Artificial Sequence
  Description of Artificial Sequence: Synthetic oligonucleotide
uugucgggaugauguuuua

SEQ ID NO: 825341 - RNA, 19 nt, Artificial Sequence
  Description of Artificial Sequence: Synthetic oligonucleotide
gugacggcggugcccuggc

SEQ ID NO: 825342 - RNA, 19 nt, Artificial Sequence
  Description of Artificial Sequence: Synthetic oligonucleotide
gaguugucaaagguaggau

SEQ ID NO: 825343 - RNA, 19 nt, Artificial Sequence
  Description of Artificial Sequence: Synthetic oligonucleotide
guaucugacguggccaagu

SEQ ID NO: 825344 - RNA, 19 nt, Artificial Sequence
  Description of Artificial Sequence: Synthetic oligonucleotide
cccgucuuuucacuggauc

SEQ ID NO: 825345 - RNA, 19 nt, Artificial Sequence
  Description of Artificial Sequence: Synthetic oligonucleotide
cauaaugaucuugauucuu

SEQ ID NO: 825346 - RNA, 19 nt, Artificial Sequence
  Description of Artificial Sequence: Synthetic oligonucleotide
auuugcucguuuacuucuu

SEQ ID NO: 825347 - RNA, 19 nt, Artificial Sequence
  Description of Artificial Sequence: Synthetic oligonucleotide
ggugacggcggugcccugg

SEQ ID NO: 825348 - RNA, 19 nt, Artificial Sequence
  Description of Artificial Sequence: Synthetic oligonucleotide
cucauaggcuuuaguuaua

SEQ ID NO: 825349 - RNA, 19 nt, Artificial Sequence
  Description of Artificial Sequence: Synthetic oligonucleotide
cgucuuuucacuggaucag

SEQ ID NO: 825350 - RNA, 19 nt, Artificial Sequence
  Description of Artificial Sequence: Synthetic oligonucleotide
uugcgcccuuguugcucgg

SEQ ID NO: 825351 - RNA, 19 nt, Artificial Sequence
  Description of Artificial Sequence: Synthetic oligonucleotide
ggaacugccuccgcuaucu

SEQ ID NO: 825352 - RNA, 19 nt, Artificial Sequence
  Description of Artificial Sequence: Synthetic oligonucleotide
gugggugacggcggugccc

SEQ ID NO: 825353 - RNA, 19 nt, Artificial Sequence
  Description of Artificial Sequence: Synthetic oligonucleotide
gggguccaguguuuucagc

SEQ ID NO: 825354 - RNA, 19 nt, Artificial Sequence
  Description of Artificial Sequence: Synthetic oligonucleotide
cgggaauuccuuucaaaca

SEQ ID NO: 825355 - RNA, 19 nt, Artificial Sequence
  Description of Artificial Sequence: Synthetic oligonucleotide
gguaggaucuacgcuguua

SEQ ID NO: 825356 - RNA, 19 nt, Artificial Sequence
  Description of Artificial Sequence: Synthetic oligonucleotide
ggggaacucuucuaacugu

SEQ ID NO: 825357 - RNA, 19 nt, Artificial Sequence
  Description of Artificial Sequence: Synthetic oligonucleotide
gaugauguuuuaggaccau

SEQ ID NO: 825358 - RNA, 19 nt, Artificial Sequence
  Description of Artificial Sequence: Synthetic oligonucleotide
gccgaggucagggcguggg

SEQ ID NO: 825359 - RNA, 19 nt, Artificial Sequence
  Description of Artificial Sequence: Synthetic oligonucleotide
cgauccaucuccucucauc

SEQ ID NO: 825360 - RNA, 19 nt, Artificial Sequence
  Description of Artificial Sequence: Synthetic oligonucleotide
gcuuuaugagcagcuuuga

SEQ ID NO: 825361 - RNA, 19 nt, Artificial Sequence
  Description of Artificial Sequence: Synthetic oligonucleotide
ccgccaguugacuucucug

SEQ ID NO: 825362 - RNA, 19 nt, Artificial Sequence
  Description of Artificial Sequence: Synthetic oligonucleotide
guguggcuuuguaucugac

SEQ ID NO: 825363 - RNA, 19 nt, Artificial Sequence
  Description of Artificial Sequence: Synthetic oligonucleotide
uuccguuugucgggaugau

SEQ ID NO: 825364 - RNA, 19 nt, Artificial Sequence
  Description of Artificial Sequence: Synthetic oligonucleotide
gaccaucgggaauuccuuu

SEQ ID NO: 825365 - RNA, 19 nt, Artificial Sequence
  Description of Artificial Sequence: Synthetic oligonucleotide
gcucguuuacuucuucuau

SEQ ID NO: 825366 - RNA, 19 nt, Artificial Sequence
  Description of Artificial Sequence: Synthetic oligonucleotide
cagcauggggaacucuucu

SEQ ID NO: 825367 - RNA, 19 nt, Artificial Sequence
  Description of Artificial Sequence: Synthetic oligonucleotide
gccgcuuugucagccugag

SEQ ID NO: 825368 - RNA, 19 nt, Artificial Sequence
  Description of Artificial Sequence: Synthetic oligonucleotide
ggaacucuucuaacuguaa

SEQ ID NO: 825369 - RNA, 19 nt, Artificial Sequence
  Description of Artificial Sequence: Synthetic oligonucleotide
uugccgcauccgagcguca

SEQ ID NO: 825370 - RNA, 19 nt, Artificial Sequence
  Description of Artificial Sequence: Synthetic oligonucleotide
gcucggcaggagcagcaug

SEQ ID NO: 825371 - RNA, 19 nt, Artificial Sequence
  Description of Artificial Sequence: Synthetic oligonucleotide
ccugaggggccacuccaug

SEQ ID NO: 825372 - RNA, 19 nt, Artificial Sequence
  Description of Artificial Sequence: Synthetic oligonucleotide
ccucucaucacgacauucu

SEQ ID NO: 825373 - RNA, 19 nt, Artificial Sequence
  Description of Artificial Sequence: Synthetic oligonucleotide
ugcgcccuuguugcucggu

SEQ ID NO: 825374 - RNA, 19 nt, Artificial Sequence
  Description of Artificial Sequence: Synthetic oligonucleotide
cuguuaaaugcccgucuuu

SEQ ID NO: 825375 - RNA, 19 nt, Artificial Sequence
  Description of Artificial Sequence: Synthetic oligonucleotide
cugacguggccaaguccaa

SEQ ID NO: 825376 - RNA, 19 nt, Artificial Sequence
  Description of Artificial Sequence: Synthetic oligonucleotide
gcuguuaaaugcccgucuu

SEQ ID NO: 825377 - RNA, 19 nt, Artificial Sequence
  Description of Artificial Sequence: Synthetic oligonucleotide
uugcucgguucugcuuuuc

SEQ ID NO: 825378 - RNA, 19 nt, Artificial Sequence
  Description of Artificial Sequence: Synthetic oligonucleotide
aucgucucaugcagucuuu

SEQ ID NO: 825379 - RNA, 19 nt, Artificial Sequence
  Description of Artificial Sequence: Synthetic oligonucleotide
auccgagcgucagcuuccu

SEQ ID NO: 825380 - RNA, 19 nt, Artificial Sequence
  Description of Artificial Sequence: Synthetic oligonucleotide
gccgcauccgagcgucagc

SEQ ID NO: 825381 - RNA, 19 nt, Artificial Sequence
  Description of Artificial Sequence: Synthetic oligonucleotide
ggaagcauuucuguuucuu

SEQ ID NO: 825382 - RNA, 19 nt, Artificial Sequence
  Description of Artificial Sequence: Synthetic oligonucleotide
ccgagcagcuucuaauucu

SEQ ID NO: 825383 - RNA, 19 nt, Artificial Sequence
  Description of Artificial Sequence: Synthetic oligonucleotide
ggguauguuuucaaagcuu

SEQ ID NO: 825384 - RNA, 19 nt, Artificial Sequence
  Description of Artificial Sequence: Synthetic oligonucleotide
gcagggaccuucaaaucgu

SEQ ID NO: 825385 - RNA, 19 nt, Artificial Sequence
  Description of Artificial Sequence: Synthetic oligonucleotide
ccuccgcuaucuuuuccca

SEQ ID NO: 825386 - RNA, 19 nt, Artificial Sequence
  Description of Artificial Sequence: Synthetic oligonucleotide
guugcucgguucugcuuuu

SEQ ID NO: 825387 - RNA, 19 nt, Artificial Sequence
  Description of Artificial Sequence: Synthetic oligonucleotide
ccaaccgagcagcuucuaa

SEQ ID NO: 825388 - RNA, 19 nt, Artificial Sequence
  Description of Artificial Sequence: Synthetic oligonucleotide
ggcgcucggcaggagcagc

SEQ ID NO: 825389 - RNA, 19 nt, Artificial Sequence
  Description of Artificial Sequence: Synthetic oligonucleotide
caagccgaucgcacaguuu

SEQ ID NO: 825390 - RNA, 19 nt, Artificial Sequence
  Description of Artificial Sequence: Synthetic oligonucleotide
ccaguugacuucucugcau

SEQ ID NO: 825391 - RNA, 19 nt, Artificial Sequence
  Description of Artificial Sequence: Synthetic oligonucleotide
ggugccgcuuugucagccu

SEQ ID NO: 825392 - RNA, 19 nt, Artificial Sequence
  Description of Artificial Sequence: Synthetic oligonucleotide
gaacugccuccgcuaucuu

SEQ ID NO: 825393 - RNA, 19 nt, Artificial Sequence
  Description of Artificial Sequence: Synthetic oligonucleotide
cgcuguuaaaugcccgucu

SEQ ID NO: 825394 - RNA, 19 nt, Artificial Sequence
  Description of Artificial Sequence: Synthetic oligonucleotide
gcgcucggcaggagcagca

SEQ ID NO: 825395 - RNA, 19 nt, Artificial Sequence
  Description of Artificial Sequence: Synthetic oligonucleotide
gcuugccgcauccgagcgu

SEQ ID NO: 825396 - RNA, 19 nt, Artificial Sequence
  Description of Artificial Sequence: Synthetic oligonucleotide
ccgcuaucuuuucccaccu

SEQ ID NO: 825397 - RNA, 19 nt, Artificial Sequence
  Description of Artificial Sequence: Synthetic oligonucleotide
cuccucucaucacgacauu

SEQ ID NO: 825398 - RNA, 19 nt, Artificial Sequence
  Description of Artificial Sequence: Synthetic oligonucleotide
ccgcauccgagcgucagcu

SEQ ID NO: 825399 - RNA, 19 nt, Artificial Sequence
  Description of Artificial Sequence: Synthetic oligonucleotide
gcgcccuuguugcucgguu

SEQ ID NO: 825400 - RNA, 19 nt, Artificial Sequence
  Description of Artificial Sequence: Synthetic oligonucleotide
ccgaggucagggcgugggu

SEQ ID NO: 825401 - RNA, 19 nt, Artificial Sequence
  Description of Artificial Sequence: Synthetic oligonucleotide
gcccgucuuuucacuggau

SEQ ID NO: 825402 - RNA, 19 nt, Artificial Sequence
  Description of Artificial Sequence: Synthetic oligonucleotide
cgcauccgagcgucagcuu

SEQ ID NO: 825403 - RNA, 19 nt, Artificial Sequence
  Description of Artificial Sequence: Synthetic oligonucleotide
uuuauaucggccuagagug

SEQ ID NO: 825404 - RNA, 19 nt, Artificial Sequence
  Description of Artificial Sequence: Synthetic oligonucleotide
ugagcauuguauaacagcg

SEQ ID NO: 825405 - RNA, 19 nt, Artificial Sequence
  Description of Artificial Sequence: Synthetic oligonucleotide
aacagacacacacacacac

SEQ ID NO: 825406 - RNA, 19 nt, Artificial Sequence
  Description of Artificial Sequence: Synthetic oligonucleotide
aaagcagugacacacugag

SEQ ID NO: 825407 - RNA, 19 nt, Artificial Sequence
  Description of Artificial Sequence: Synthetic oligonucleotide
aaacauauccacuaaggca

SEQ ID NO: 825408 - RNA, 19 nt, Artificial Sequence
  Description of Artificial Sequence: Synthetic oligonucleotide
auaacagcggccuaugugg

SEQ ID NO: 825409 - RNA, 19 nt, Artificial Sequence
  Description of Artificial Sequence: Synthetic oligonucleotide
uggccauucacuuagacug

SEQ ID NO: 825410 - RNA, 19 nt, Artificial Sequence
  Description of Artificial Sequence: Synthetic oligonucleotide
agcauuguauaacagcggc

SEQ ID NO: 825411 - RNA, 19 nt, Artificial Sequence
  Description of Artificial Sequence: Synthetic oligonucleotide
aaaauaaucguaccacuga

SEQ ID NO: 825412 - RNA, 19 nt, Artificial Sequence
  Description of Artificial Sequence: Synthetic oligonucleotide
uaaacauauccacuaaggc

SEQ ID NO: 825413 - RNA, 19 nt, Artificial Sequence
  Description of Artificial Sequence: Synthetic oligonucleotide
uguaguuccuuaaaggcug

SEQ ID NO: 825414 - RNA, 19 nt, Artificial Sequence
  Description of Artificial Sequence: Synthetic oligonucleotide
auaaucguaccacugaaug

SEQ ID NO: 825415 - RNA, 19 nt, Artificial Sequence
  Description of Artificial Sequence: Synthetic oligonucleotide
auuuauaucggccuagagu

SEQ ID NO: 825416 - RNA, 19 nt, Artificial Sequence
  Description of Artificial Sequence: Synthetic oligonucleotide
uuuaucucauuuuaguuaa

SEQ ID NO: 825417 - RNA, 19 nt, Artificial Sequence
  Description of Artificial Sequence: Synthetic oligonucleotide
gacuguaguuccuuaaagg

SEQ ID NO: 825418 - RNA, 19 nt, Artificial Sequence
  Description of Artificial Sequence: Synthetic oligonucleotide
ucuugcucggcuuugaucu

SEQ ID NO: 825419 - RNA, 19 nt, Artificial Sequence
  Description of Artificial Sequence: Synthetic oligonucleotide
acaguuuagauuucaguag

SEQ ID NO: 825420 - RNA, 19 nt, Artificial Sequence
  Description of Artificial Sequence: Synthetic oligonucleotide
auaaacauauccacuaagg

SEQ ID NO: 825421 - RNA, 19 nt, Artificial Sequence
  Description of Artificial Sequence: Synthetic oligonucleotide
uuuuaucucauuuuaguua

SEQ ID NO: 825422 - RNA, 19 nt, Artificial Sequence
  Description of Artificial Sequence: Synthetic oligonucleotide
gacacacacacacacauac

SEQ ID NO: 825423 - RNA, 19 nt, Artificial Sequence
  Description of Artificial Sequence: Synthetic oligonucleotide
uagggugucagaaagugac

SEQ ID NO: 825424 - RNA, 19 nt, Artificial Sequence
  Description of Artificial Sequence: Synthetic oligonucleotide
uaacccgugagguagauuc

SEQ ID NO: 825425 - RNA, 19 nt, Artificial Sequence
  Description of Artificial Sequence: Synthetic oligonucleotide
agaguuaucaaguuucaaa

SEQ ID NO: 825426 - RNA, 19 nt, Artificial Sequence
  Description of Artificial Sequence: Synthetic oligonucleotide
aauggcacggguuucacua

SEQ ID NO: 825427 - RNA, 19 nt, Artificial Sequence
  Description of Artificial Sequence: Synthetic oligonucleotide
aguuaucaaguuucaaaag

SEQ ID NO: 825428 - RNA, 19 nt, Artificial Sequence
  Description of Artificial Sequence: Synthetic oligonucleotide
ucgucgguggccauggugg

SEQ ID NO: 825429 - RNA, 19 nt, Artificial Sequence
  Description of Artificial Sequence: Synthetic oligonucleotide
ugaguuugcugucaaaauc

SEQ ID NO: 825430 - RNA, 19 nt, Artificial Sequence
  Description of Artificial Sequence: Synthetic oligonucleotide
gacaguuuagauuucagua

SEQ ID NO: 825431 - RNA, 19 nt, Artificial Sequence
  Description of Artificial Sequence: Synthetic oligonucleotide
cuaagcagaguguaacccg

SEQ ID NO: 825432 - RNA, 19 nt, Artificial Sequence
  Description of Artificial Sequence: Synthetic oligonucleotide
caucaugaguuucaguucc

SEQ ID NO: 825433 - RNA, 19 nt, Artificial Sequence
  Description of Artificial Sequence: Synthetic oligonucleotide
aaaucggcuggacacguug

SEQ ID NO: 825434 - RNA, 19 nt, Artificial Sequence
  Description of Artificial Sequence: Synthetic oligonucleotide
cacacacacacauacacac

SEQ ID NO: 825435 - RNA, 19 nt, Artificial Sequence
  Description of Artificial Sequence: Synthetic oligonucleotide
aaucguaccacugaaugaa

SEQ ID NO: 825436 - RNA, 19 nt, Artificial Sequence
  Description of Artificial Sequence: Synthetic oligonucleotide
uauccacuaaggcaaacac

SEQ ID NO: 825437 - RNA, 19 nt, Artificial Sequence
  Description of Artificial Sequence: Synthetic oligonucleotide
aguguaacccgugagguag

SEQ ID NO: 825438 - RNA, 19 nt, Artificial Sequence
  Description of Artificial Sequence: Synthetic oligonucleotide
uugaacuccguguaggggu

SEQ ID NO: 825439 - RNA, 19 nt, Artificial Sequence
  Description of Artificial Sequence: Synthetic oligonucleotide
acuccuauggguucuaaga

SEQ ID NO: 825440 - RNA, 19 nt, Artificial Sequence
  Description of Artificial Sequence: Synthetic oligonucleotide
ucgaagaaguucuuggcac

SEQ ID NO: 825441 - RNA, 19 nt, Artificial Sequence
  Description of Artificial Sequence: Synthetic oligonucleotide
cacaugagagcgauggagg

SEQ ID NO: 825442 - RNA, 19 nt, Artificial Sequence
  Description of Artificial Sequence: Synthetic oligonucleotide
ugucaaaauccucauccac

SEQ ID NO: 825443 - RNA, 19 nt, Artificial Sequence
  Description of Artificial Sequence: Synthetic oligonucleotide
aguaaagggaauuuauauu

SEQ ID NO: 825444 - RNA, 19 nt, Artificial Sequence
  Description of Artificial Sequence: Synthetic oligonucleotide
cuuggcacccuuaacgccc

SEQ ID NO: 825445 - RNA, 19 nt, Artificial Sequence
  Description of Artificial Sequence: Synthetic oligonucleotide
ucagaaagugacaugucua

SEQ ID NO: 825446 - RNA, 19 nt, Artificial Sequence
  Description of Artificial Sequence: Synthetic oligonucleotide
agagcgauggaggaauggc

SEQ ID NO: 825447 - RNA, 19 nt, Artificial Sequence
  Description of Artificial Sequence: Synthetic oligonucleotide
cacacacacacacauacac

SEQ ID NO: 825448 - RNA, 19 nt, Artificial Sequence
  Description of Artificial Sequence: Synthetic oligonucleotide
ucucccacaagucuccugu

SEQ ID NO: 825449 - RNA, 19 nt, Artificial Sequence
  Description of Artificial Sequence: Synthetic oligonucleotide
uccuauggguucuaagacc

SEQ ID NO: 825450 - RNA, 19 nt, Artificial Sequence
  Description of Artificial Sequence: Synthetic oligonucleotide
auucacuuagacuggguga

SEQ ID NO: 825451 - RNA, 19 nt, Artificial Sequence
  Description of Artificial Sequence: Synthetic oligonucleotide
uaaucguaccacugaauga

SEQ ID NO: 825452 - RNA, 19 nt, Artificial Sequence
  Description of Artificial Sequence: Synthetic oligonucleotide
gguuucacaacacagcaac

SEQ ID NO: 825453 - RNA, 19 nt, Artificial Sequence
  Description of Artificial Sequence: Synthetic oligonucleotide
agggccaaucccuuggcac

SEQ ID NO: 825454 - RNA, 19 nt, Artificial Sequence
  Description of Artificial Sequence: Synthetic oligonucleotide
cacacacacauacacacac

SEQ ID NO: 825455 - RNA, 19 nt, Artificial Sequence
  Description of Artificial Sequence: Synthetic oligonucleotide
aacuccuauggguucuaag

SEQ ID NO: 825456 - RNA, 19 nt, Artificial Sequence
  Description of Artificial Sequence: Synthetic oligonucleotide
gcaacagacacacacacac

SEQ ID NO: 825457 - RNA, 19 nt, Artificial Sequence
  Description of Artificial Sequence: Synthetic oligonucleotide
caggugacaaacucagggg

SEQ ID NO: 825458 - RNA, 19 nt, Artificial Sequence
  Description of Artificial Sequence: Synthetic oligonucleotide
cagaguguaacccgugagg

SEQ ID NO: 825459 - RNA, 19 nt, Artificial Sequence
  Description of Artificial Sequence: Synthetic oligonucleotide
ucaguaguggucccggcac

SEQ ID NO: 825460 - RNA, 19 nt, Artificial Sequence
  Description of Artificial Sequence: Synthetic oligonucleotide
cacauauaggccaggacuc

SEQ ID NO: 825461 - RNA, 19 nt, Artificial Sequence
  Description of Artificial Sequence: Synthetic oligonucleotide
gucacucacguucccaugg

SEQ ID NO: 825462 - RNA, 19 nt, Artificial Sequence
  Description of Artificial Sequence: Synthetic oligonucleotide
acgguuucacaacacagca

SEQ ID NO: 825463 - RNA, 19 nt, Artificial Sequence
  Description of Artificial Sequence: Synthetic oligonucleotide
uccguguagggguugaaga

SEQ ID NO: 825464 - RNA, 19 nt, Artificial Sequence
  Description of Artificial Sequence: Synthetic oligonucleotide
ugucuaagcagaguguaac

SEQ ID NO: 825465 - RNA, 19 nt, Artificial Sequence
  Description of Artificial Sequence: Synthetic oligonucleotide
ugugaaaggggugccggcg

SEQ ID NO: 825466 - RNA, 19 nt, Artificial Sequence
  Description of Artificial Sequence: Synthetic oligonucleotide
uucacuuagacugggugac

SEQ ID NO: 825467 - RNA, 19 nt, Artificial Sequence
  Description of Artificial Sequence: Synthetic oligonucleotide
uggguucuaagaccgaaaa

SEQ ID NO: 825468 - RNA, 19 nt, Artificial Sequence
  Description of Artificial Sequence: Synthetic oligonucleotide
gagauccguucacagacag

SEQ ID NO: 825469 - RNA, 19 nt, Artificial Sequence
  Description of Artificial Sequence: Synthetic oligonucleotide
ugucccaacuacuggggag

SEQ ID NO: 825470 - RNA, 19 nt, Artificial Sequence
  Description of Artificial Sequence: Synthetic oligonucleotide
aggugacaaacucagggga

SEQ ID NO: 825471 - RNA, 19 nt, Artificial Sequence
  Description of Artificial Sequence: Synthetic oligonucleotide
cacgugaacaagcacauga

SEQ ID NO: 825472 - RNA, 19 nt, Artificial Sequence
  Description of Artificial Sequence: Synthetic oligonucleotide
uucaguaguggucccggca

SEQ ID NO: 825473 - RNA, 19 nt, Artificial Sequence
  Description of Artificial Sequence: Synthetic oligonucleotide
ucgaucucagagaggcggg

SEQ ID NO: 825474 - RNA, 19 nt, Artificial Sequence
  Description of Artificial Sequence: Synthetic oligonucleotide
aaagaguuaucaaguuuca

SEQ ID NO: 825475 - RNA, 19 nt, Artificial Sequence
  Description of Artificial Sequence: Synthetic oligonucleotide
gauuucaguaguggucccg

SEQ ID NO: 825476 - RNA, 19 nt, Artificial Sequence
  Description of Artificial Sequence: Synthetic oligonucleotide
uuauaucggccuagagugc

SEQ ID NO: 825477 - RNA, 19 nt, Artificial Sequence
  Description of Artificial Sequence: Synthetic oligonucleotide
ugacaugucuaccucucuc

SEQ ID NO: 825478 - RNA, 19 nt, Artificial Sequence
  Description of Artificial Sequence: Synthetic oligonucleotide
ggucccggcacauauaggc

SEQ ID NO: 825479 - RNA, 19 nt, Artificial Sequence
  Description of Artificial Sequence: Synthetic oligonucleotide
ucguaccacugaaugaaga

SEQ ID NO: 825480 - RNA, 19 nt, Artificial Sequence
  Description of Artificial Sequence: Synthetic oligonucleotide
ucggccuagagugcuaggg

SEQ ID NO: 825481 - RNA, 19 nt, Artificial Sequence
  Description of Artificial Sequence: Synthetic oligonucleotide
ugacaaacucaggggaggg

SEQ ID NO: 825482 - RNA, 19 nt, Artificial Sequence
  Description of Artificial Sequence: Synthetic oligonucleotide
cacggguuucacuauggcc

SEQ ID NO: 825483 - RNA, 19 nt, Artificial Sequence
  Description of Artificial Sequence: Synthetic oligonucleotide
gcuacuugaagguggacug

SEQ ID NO: 825484 - RNA, 19 nt, Artificial Sequence
  Description of Artificial Sequence: Synthetic oligonucleotide
uauaucggccuagagugcu

SEQ ID NO: 825485 - RNA, 19 nt, Artificial Sequence
  Description of Artificial Sequence: Synthetic oligonucleotide
acccuuaacgcccucugug

SEQ ID NO: 825486 - RNA, 19 nt, Artificial Sequence
  Description of Artificial Sequence: Synthetic oligonucleotide
cuccuauggguucuaagac

SEQ ID NO: 825487 - RNA, 19 nt, Artificial Sequence
  Description of Artificial Sequence: Synthetic oligonucleotide
aauaaucguaccacugaau

SEQ ID NO: 825488 - RNA, 19 nt, Artificial Sequence
  Description of Artificial Sequence: Synthetic oligonucleotide
ucuuggcacccuuaacgcc

SEQ ID NO: 825489 - RNA, 19 nt, Artificial Sequence
  Description of Artificial Sequence: Synthetic oligonucleotide
gagcauuguauaacagcgg

SEQ ID NO: 825490 - RNA, 19 nt, Artificial Sequence
  Description of Artificial Sequence: Synthetic oligonucleotide
cuuaacgcccucuguggag

SEQ ID NO: 825491 - RNA, 19 nt, Artificial Sequence
  Description of Artificial Sequence: Synthetic oligonucleotide
agugacaugucuaccucuc

SEQ ID NO: 825492 - RNA, 19 nt, Artificial Sequence
  Description of Artificial Sequence: Synthetic oligonucleotide
acuauggccugcccaugcg

SEQ ID NO: 825493 - RNA, 19 nt, Artificial Sequence
  Description of Artificial Sequence: Synthetic oligonucleotide
gagggugugaaaggggugc

SEQ ID NO: 825494 - RNA, 19 nt, Artificial Sequence
  Description of Artificial Sequence: Synthetic oligonucleotide
guggucccggcacauauag

SEQ ID NO: 825495 - RNA, 19 nt, Artificial Sequence
  Description of Artificial Sequence: Synthetic oligonucleotide
caugaguuucaguuccaug

SEQ ID NO: 825496 - RNA, 19 nt, Artificial Sequence
  Description of Artificial Sequence: Synthetic oligonucleotide
ugacgucacgguuucacaa

SEQ ID NO: 825497 - RNA, 19 nt, Artificial Sequence
  Description of Artificial Sequence: Synthetic oligonucleotide
uagacugggugacgucacg

SEQ ID NO: 825498 - RNA, 19 nt, Artificial Sequence
  Description of Artificial Sequence: Synthetic oligonucleotide
cuugaacuccguguagggg

SEQ ID NO: 825499 - RNA, 19 nt, Artificial Sequence
  Description of Artificial Sequence: Synthetic oligonucleotide
agaucaguaggaacucccg

SEQ ID NO: 825500 - RNA, 19 nt, Artificial Sequence
  Description of Artificial Sequence: Synthetic oligonucleotide
auauccacuaaggcaaaca

SEQ ID NO: 825501 - RNA, 19 nt, Artificial Sequence
  Description of Artificial Sequence: Synthetic oligonucleotide
uaacagcggccuauguggc

SEQ ID NO: 825502 - RNA, 19 nt, Artificial Sequence
  Description of Artificial Sequence: Synthetic oligonucleotide
gacgucacgguuucacaac

SEQ ID NO: 825503 - RNA, 19 nt, Artificial Sequence
  Description of Artificial Sequence: Synthetic oligonucleotide
ugagauccguucacagaca

SEQ ID NO: 825504 - RNA, 19 nt, Artificial Sequence
  Description of Artificial Sequence: Synthetic oligonucleotide
aguuugucucccacaaguc

SEQ ID NO: 825505 - RNA, 19 nt, Artificial Sequence
  Description of Artificial Sequence: Synthetic oligonucleotide
ggcauuuguaguaaaauaa

SEQ ID NO: 825506 - RNA, 19 nt, Artificial Sequence
  Description of Artificial Sequence: Synthetic oligonucleotide
gccggcaucauacuguuug

SEQ ID NO: 825507 - RNA, 19 nt, Artificial Sequence
  Description of Artificial Sequence: Synthetic oligonucleotide
ucccggcacauauaggcca

SEQ ID NO: 825508 - RNA, 19 nt, Artificial Sequence
  Description of Artificial Sequence: Synthetic oligonucleotide
uuaacgcccucuguggaga

SEQ ID NO: 825509 - RNA, 19 nt, Artificial Sequence
  Description of Artificial Sequence: Synthetic oligonucleotide
ccucaaaucggcuggacac

SEQ ID NO: 825510 - RNA, 19 nt, Artificial Sequence
  Description of Artificial Sequence: Synthetic oligonucleotide
gggguagggugucagaaag

SEQ ID NO: 825511 - RNA, 19 nt, Artificial Sequence
  Description of Artificial Sequence: Synthetic oligonucleotide
cuuuagcaagucccauagg

SEQ ID NO: 825512 - RNA, 19 nt, Artificial Sequence
  Description of Artificial Sequence: Synthetic oligonucleotide
cucaaaucggcuggacacg

SEQ ID NO: 825513 - RNA, 19 nt, Artificial Sequence
  Description of Artificial Sequence: Synthetic oligonucleotide
aggacucaguuugucuccc

SEQ ID NO: 825514 - RNA, 19 nt, Artificial Sequence
  Description of Artificial Sequence: Synthetic oligonucleotide
cucgaagaaguucuuggca

SEQ ID NO: 825515 - RNA, 19 nt, Artificial Sequence
  Description of Artificial Sequence: Synthetic oligonucleotide
cucacguucccauggcaug

SEQ ID NO: 825516 - RNA, 19 nt, Artificial Sequence
  Description of Artificial Sequence: Synthetic oligonucleotide
uaguggucccggcacauau

SEQ ID NO: 825517 - RNA, 19 nt, Artificial Sequence
  Description of Artificial Sequence: Synthetic oligonucleotide
gguagggugucagaaagug

SEQ ID NO: 825518 - RNA, 19 nt, Artificial Sequence
  Description of Artificial Sequence: Synthetic oligonucleotide
ucccacaagucuccuguac

SEQ ID NO: 825519 - RNA, 19 nt, Artificial Sequence
  Description of Artificial Sequence: Synthetic oligonucleotide
gagagcgauggaggaaugg

SEQ ID NO: 825520 - RNA, 19 nt, Artificial Sequence
  Description of Artificial Sequence: Synthetic oligonucleotide
aguuuagauuucaguagug

SEQ ID NO: 825521 - RNA, 19 nt, Artificial Sequence
  Description of Artificial Sequence: Synthetic oligonucleotide
augcagaaagccaaaagua

SEQ ID NO: 825522 - RNA, 19 nt, Artificial Sequence
  Description of Artificial Sequence: Synthetic oligonucleotide
aagaguuaucaaguuucaa

SEQ ID NO: 825523 - RNA, 19 nt, Artificial Sequence
  Description of Artificial Sequence: Synthetic oligonucleotide
cacugagcauuguauaaca

SEQ ID NO: 825524 - RNA, 19 nt, Artificial Sequence
  Description of Artificial Sequence: Synthetic oligonucleotide
uccuguacccacccaugcu

SEQ ID NO: 825525 - RNA, 19 nt, Artificial Sequence
  Description of Artificial Sequence: Synthetic oligonucleotide
cuaccucucuccacagagc

SEQ ID NO: 825526 - RNA, 19 nt, Artificial Sequence
  Description of Artificial Sequence: Synthetic oligonucleotide
aggacaugcaagccacugu

SEQ ID NO: 825527 - RNA, 19 nt, Artificial Sequence
  Description of Artificial Sequence: Synthetic oligonucleotide
ugggucucuucaccaaaac

SEQ ID NO: 825528 - RNA, 19 nt, Artificial Sequence
  Description of Artificial Sequence: Synthetic oligonucleotide
augagagcgauggaggaau

SEQ ID NO: 825529 - RNA, 19 nt, Artificial Sequence
  Description of Artificial Sequence: Synthetic oligonucleotide
agcagaguguaacccguga

SEQ ID NO: 825530 - RNA, 19 nt, Artificial Sequence
  Description of Artificial Sequence: Synthetic oligonucleotide
acaugcaagccacugucuu

SEQ ID NO: 825531 - RNA, 19 nt, Artificial Sequence
  Description of Artificial Sequence: Synthetic oligonucleotide
gguagauucaguggccugc

SEQ ID NO: 825532 - RNA, 19 nt, Artificial Sequence
  Description of Artificial Sequence: Synthetic oligonucleotide
acugagcauuguauaacag

SEQ ID NO: 825533 - RNA, 19 nt, Artificial Sequence
  Description of Artificial Sequence: Synthetic oligonucleotide
caugcucccagacugcaca

SEQ ID NO: 825534 - RNA, 19 nt, Artificial Sequence
  Description of Artificial Sequence: Synthetic oligonucleotide
uaucggccuagagugcuag

SEQ ID NO: 825535 - RNA, 19 nt, Artificial Sequence
  Description of Artificial Sequence: Synthetic oligonucleotide
agucucgucgggaaccccg

SEQ ID NO: 825536 - RNA, 19 nt, Artificial Sequence
  Description of Artificial Sequence: Synthetic oligonucleotide
acgugaacaagcacaugag

SEQ ID NO: 825537 - RNA, 19 nt, Artificial Sequence
  Description of Artificial Sequence: Synthetic oligonucleotide
cauuguauaacagcggccu

SEQ ID NO: 825538 - RNA, 19 nt, Artificial Sequence
  Description of Artificial Sequence: Synthetic oligonucleotide
ucacuuagacugggugacg

SEQ ID NO: 825539 - RNA, 19 nt, Artificial Sequence
  Description of Artificial Sequence: Synthetic oligonucleotide
cugcccaacgccugggcag

SEQ ID NO: 825540 - RNA, 19 nt, Artificial Sequence
  Description of Artificial Sequence: Synthetic oligonucleotide
ugagagcgauggaggaaug

SEQ ID NO: 825541 - RNA, 19 nt, Artificial Sequence
  Description of Artificial Sequence: Synthetic oligonucleotide
ggcaacuggggacucgggg

SEQ ID NO: 825542 - RNA, 19 nt, Artificial Sequence
  Description of Artificial Sequence: Synthetic oligonucleotide
acacacacauacacacacg

SEQ ID NO: 825543 - RNA, 19 nt, Artificial Sequence
  Description of Artificial Sequence: Synthetic oligonucleotide
uuaucucauuuuaguuaaa

SEQ ID NO: 825544 - RNA, 19 nt, Artificial Sequence
  Description of Artificial Sequence: Synthetic oligonucleotide
cuccuguacccacccaugc

SEQ ID NO: 825545 - RNA, 19 nt, Artificial Sequence
  Description of Artificial Sequence: Synthetic oligonucleotide
cacuauggccugcccaugc

SEQ ID NO: 825546 - RNA, 19 nt, Artificial Sequence
  Description of Artificial Sequence: Synthetic oligonucleotide
ggacaugcaagccacuguc

SEQ ID NO: 825547 - RNA, 19 nt, Artificial Sequence
  Description of Artificial Sequence: Synthetic oligonucleotide
gacuccugcaugagauccg

SEQ ID NO: 825548 - RNA, 19 nt, Artificial Sequence
  Description of Artificial Sequence: Synthetic oligonucleotide
agggugugaaaggggugcc

SEQ ID NO: 825549 - RNA, 19 nt, Artificial Sequence
  Description of Artificial Sequence: Synthetic oligonucleotide
gacugcggcucgccgaugc

SEQ ID NO: 825550 - RNA, 19 nt, Artificial Sequence
  Description of Artificial Sequence: Synthetic oligonucleotide
ggugugaaaggggugccgg

SEQ ID NO: 825551 - RNA, 19 nt, Artificial Sequence
  Description of Artificial Sequence: Synthetic oligonucleotide
uggucccggcacauauagg

SEQ ID NO: 825552 - RNA, 19 nt, Artificial Sequence
  Description of Artificial Sequence: Synthetic oligonucleotide
ggacugucccaacuacugg

SEQ ID NO: 825553 - RNA, 19 nt, Artificial Sequence
  Description of Artificial Sequence: Synthetic oligonucleotide
ggacucggggcauuuguag

SEQ ID NO: 825554 - RNA, 19 nt, Artificial Sequence
  Description of Artificial Sequence: Synthetic oligonucleotide
uguacccacccaugcuccc

SEQ ID NO: 825555 - RNA, 19 nt, Artificial Sequence
  Description of Artificial Sequence: Synthetic oligonucleotide
ucccuccaacuccuauggg

SEQ ID NO: 825556 - RNA, 19 nt, Artificial Sequence
  Description of Artificial Sequence: Synthetic oligonucleotide
ugggugacgucacgguuuc

SEQ ID NO: 825557 - RNA, 19 nt, Artificial Sequence
  Description of Artificial Sequence: Synthetic oligonucleotide
ugaacuccguguagggguu

SEQ ID NO: 825558 - RNA, 19 nt, Artificial Sequence
  Description of Artificial Sequence: Synthetic oligonucleotide
ggugacaaacucaggggag

SEQ ID NO: 825559 - RNA, 19 nt, Artificial Sequence
  Description of Artificial Sequence: Synthetic oligonucleotide
cuguaguuccuuaaaggcu

SEQ ID NO: 825560 - RNA, 19 nt, Artificial Sequence
  Description of Artificial Sequence: Synthetic oligonucleotide
caucgaucucagagaggcg

SEQ ID NO: 825561 - RNA, 19 nt, Artificial Sequence
  Description of Artificial Sequence: Synthetic oligonucleotide
ugcaacuccccugccgcag

SEQ ID NO: 825562 - RNA, 19 nt, Artificial Sequence
  Description of Artificial Sequence: Synthetic oligonucleotide
ggccuagagugcuaggggc

SEQ ID NO: 825563 - RNA, 19 nt, Artificial Sequence
  Description of Artificial Sequence: Synthetic oligonucleotide
gaaaggggugccggcggcg

SEQ ID NO: 825564 - RNA, 19 nt, Artificial Sequence
  Description of Artificial Sequence: Synthetic oligonucleotide
gcagaguguaacccgugag

SEQ ID NO: 825565 - RNA, 19 nt, Artificial Sequence
  Description of Artificial Sequence: Synthetic oligonucleotide
ugcguucuaggggugggca

SEQ ID NO: 825566 - RNA, 19 nt, Artificial Sequence
  Description of Artificial Sequence: Synthetic oligonucleotide
aaucggcuggacacguuga

SEQ ID NO: 825567 - RNA, 19 nt, Artificial Sequence
  Description of Artificial Sequence: Synthetic oligonucleotide
caaggcagggugcgugagg

SEQ ID NO: 825568 - RNA, 19 nt, Artificial Sequence
  Description of Artificial Sequence: Synthetic oligonucleotide
caguuuagauuucaguagu

SEQ ID NO: 825569 - RNA, 19 nt, Artificial Sequence
  Description of Artificial Sequence: Synthetic oligonucleotide
aguuugcugucaaaauccu

SEQ ID NO: 825570 - RNA, 19 nt, Artificial Sequence
  Description of Artificial Sequence: Synthetic oligonucleotide
auuguauaacagcggccua

SEQ ID NO: 825571 - RNA, 19 nt, Artificial Sequence
  Description of Artificial Sequence: Synthetic oligonucleotide
agcucgucgguggccaugg

SEQ ID NO: 825572 - RNA, 19 nt, Artificial Sequence
  Description of Artificial Sequence: Synthetic oligonucleotide
uugcucggcuuugaucucc

SEQ ID NO: 825573 - RNA, 19 nt, Artificial Sequence
  Description of Artificial Sequence: Synthetic oligonucleotide
caugcguucuagggguggg

SEQ ID NO: 825574 - RNA, 19 nt, Artificial Sequence
  Description of Artificial Sequence: Synthetic oligonucleotide
aacaagcacaugagagcga

SEQ ID NO: 825575 - RNA, 19 nt, Artificial Sequence
  Description of Artificial Sequence: Synthetic oligonucleotide
acacacacacacauacaca

SEQ ID NO: 825576 - RNA, 19 nt, Artificial Sequence
  Description of Artificial Sequence: Synthetic oligonucleotide
acauauaggccaggacuca

SEQ ID NO: 825577 - RNA, 19 nt, Artificial Sequence
  Description of Artificial Sequence: Synthetic oligonucleotide
ugcggaagaucaguaggaa

SEQ ID NO: 825578 - RNA, 19 nt, Artificial Sequence
  Description of Artificial Sequence: Synthetic oligonucleotide
cagggacugucccaacuac

SEQ ID NO: 825579 - RNA, 19 nt, Artificial Sequence
  Description of Artificial Sequence: Synthetic oligonucleotide
gacccucagcuuguucugg

SEQ ID NO: 825580 - RNA, 19 nt, Artificial Sequence
  Description of Artificial Sequence: Synthetic oligonucleotide
cacacacauacacacacgu

SEQ ID NO: 825581 - RNA, 19 nt, Artificial Sequence
  Description of Artificial Sequence: Synthetic oligonucleotide
cccuuaacgcccucugugg

SEQ ID NO: 825582 - RNA, 19 nt, Artificial Sequence
  Description of Artificial Sequence: Synthetic oligonucleotide
augcguucuaggggugggc

SEQ ID NO: 825583 - RNA, 19 nt, Artificial Sequence
  Description of Artificial Sequence: Synthetic oligonucleotide
gcucucacaggugacaaac

SEQ ID NO: 825584 - RNA, 19 nt, Artificial Sequence
  Description of Artificial Sequence: Synthetic oligonucleotide
guccgcgcgccgcagaagc

SEQ ID NO: 825585 - RNA, 19 nt, Artificial Sequence
  Description of Artificial Sequence: Synthetic oligonucleotide
gugugaaaggggugccggc

SEQ ID NO: 825586 - RNA, 19 nt, Artificial Sequence
  Description of Artificial Sequence: Synthetic oligonucleotide
uugagguccgcgcgccgca

SEQ ID NO: 825587 - RNA, 19 nt, Artificial Sequence
  Description of Artificial Sequence: Synthetic oligonucleotide
agccccgggugcucggucg

SEQ ID NO: 825588 - RNA, 19 nt, Artificial Sequence
  Description of Artificial Sequence: Synthetic oligonucleotide
caacuacuggggagacucc

SEQ ID NO: 825589 - RNA, 19 nt, Artificial Sequence
  Description of Artificial Sequence: Synthetic oligonucleotide
gcgauggaggaauggcacg

SEQ ID NO: 825590 - RNA, 19 nt, Artificial Sequence
  Description of Artificial Sequence: Synthetic oligonucleotide
ugaagccaucuuugccggc

SEQ ID NO: 825591 - RNA, 19 nt, Artificial Sequence
  Description of Artificial Sequence: Synthetic oligonucleotide
cucgucgguggccauggug

SEQ ID NO: 825592 - RNA, 19 nt, Artificial Sequence
  Description of Artificial Sequence: Synthetic oligonucleotide
uuggcacccuuaacgcccu

SEQ ID NO: 825593 - RNA, 19 nt, Artificial Sequence
  Description of Artificial Sequence: Synthetic oligonucleotide
uagauucaguggccugcac

SEQ ID NO: 825594 - RNA, 19 nt, Artificial Sequence
  Description of Artificial Sequence: Synthetic oligonucleotide
ucggcuggacacguugaug

SEQ ID NO: 825595 - RNA, 19 nt, Artificial Sequence
  Description of Artificial Sequence: Synthetic oligonucleotide
cacccugccuggcugggcc

SEQ ID NO: 825596 - RNA, 19 nt, Artificial Sequence
  Description of Artificial Sequence: Synthetic oligonucleotide
aucggccuagagugcuagg

SEQ ID NO: 825597 - RNA, 19 nt, Artificial Sequence
  Description of Artificial Sequence: Synthetic oligonucleotide
acccgugagguagauucag

SEQ ID NO: 825598 - RNA, 19 nt, Artificial Sequence
  Description of Artificial Sequence: Synthetic oligonucleotide
gggcauuuguaguaaaaua

SEQ ID NO: 825599 - RNA, 19 nt, Artificial Sequence
  Description of Artificial Sequence: Synthetic oligonucleotide
aagcagaguguaacccgug

SEQ ID NO: 825600 - RNA, 19 nt, Artificial Sequence
  Description of Artificial Sequence: Synthetic oligonucleotide
aggucgaugaagccaucuu

SEQ ID NO: 825601 - RNA, 19 nt, Artificial Sequence
  Description of Artificial Sequence: Synthetic oligonucleotide
cccacaagucuccuguacc

SEQ ID NO: 825602 - RNA, 19 nt, Artificial Sequence
  Description of Artificial Sequence: Synthetic oligonucleotide
acagacacacacacacaca

SEQ ID NO: 825603 - RNA, 19 nt, Artificial Sequence
  Description of Artificial Sequence: Synthetic oligonucleotide
guggccauucacuuagacu

SEQ ID NO: 825604 - RNA, 19 nt, Artificial Sequence
  Description of Artificial Sequence: Synthetic oligonucleotide
cagcuuugcggaagaucag

SEQ ID NO: 825605 - RNA, 19 nt, Artificial Sequence
  Description of Artificial Sequence: Synthetic oligonucleotide
caacgccugggcagucucg

SEQ ID NO: 825606 - RNA, 19 nt, Artificial Sequence
  Description of Artificial Sequence: Synthetic oligonucleotide
cagacacacacacacacau

SEQ ID NO: 825607 - RNA, 19 nt, Artificial Sequence
  Description of Artificial Sequence: Synthetic oligonucleotide
aacuccguguagggguuga

SEQ ID NO: 825608 - RNA, 19 nt, Artificial Sequence
  Description of Artificial Sequence: Synthetic oligonucleotide
ugguugagguccgcgcgcc

SEQ ID NO: 825609 - RNA, 19 nt, Artificial Sequence
  Description of Artificial Sequence: Synthetic oligonucleotide
caacagacacacacacaca

SEQ ID NO: 825610 - RNA, 19 nt, Artificial Sequence
  Description of Artificial Sequence: Synthetic oligonucleotide
caggugcucucacagguga

SEQ ID NO: 825611 - RNA, 19 nt, Artificial Sequence
  Description of Artificial Sequence: Synthetic oligonucleotide
ccugguugagguccgcgcg

SEQ ID NO: 825612 - RNA, 19 nt, Artificial Sequence
  Description of Artificial Sequence: Synthetic oligonucleotide
ccgugagguagauucagug

SEQ ID NO: 825613 - RNA, 19 nt, Artificial Sequence
  Description of Artificial Sequence: Synthetic oligonucleotide
ggugacgucacgguuucac

SEQ ID NO: 825614 - RNA, 19 nt, Artificial Sequence
  Description of Artificial Sequence: Synthetic oligonucleotide
aguuccuuaaaggcugcuu

SEQ ID NO: 825615 - RNA, 19 nt, Artificial Sequence
  Description of Artificial Sequence: Synthetic oligonucleotide
gugacgucacgguuucaca

SEQ ID NO: 825616 - RNA, 19 nt, Artificial Sequence
  Description of Artificial Sequence: Synthetic oligonucleotide
gcauuguauaacagcggcc

SEQ ID NO: 825617 - RNA, 19 nt, Artificial Sequence
  Description of Artificial Sequence: Synthetic oligonucleotide
ucucgucgggaaccccggc

SEQ ID NO: 825618 - RNA, 19 nt, Artificial Sequence
  Description of Artificial Sequence: Synthetic oligonucleotide
guugagguccgcgcgccgc

SEQ ID NO: 825619 - RNA, 19 nt, Artificial Sequence
  Description of Artificial Sequence: Synthetic oligonucleotide
guagauucaguggccugca

SEQ ID NO: 825620 - RNA, 19 nt, Artificial Sequence
  Description of Artificial Sequence: Synthetic oligonucleotide
gcggaagaucaguaggaac

SEQ ID NO: 825621 - RNA, 19 nt, Artificial Sequence
  Description of Artificial Sequence: Synthetic oligonucleotide
gggguugaagacgcggcgg

SEQ ID NO: 825622 - RNA, 19 nt, Artificial Sequence
  Description of Artificial Sequence: Synthetic oligonucleotide
ugggcucggucccuccaac

SEQ ID NO: 825623 - RNA, 19 nt, Artificial Sequence
  Description of Artificial Sequence: Synthetic oligonucleotide
uggcaugucuaagcagagu

SEQ ID NO: 825624 - RNA, 19 nt, Artificial Sequence
  Description of Artificial Sequence: Synthetic oligonucleotide
guccgcgcugcccaacgcc

SEQ ID NO: 825625 - RNA, 19 nt, Artificial Sequence
  Description of Artificial Sequence: Synthetic oligonucleotide
cugcacccugccuggcugg

SEQ ID NO: 825626 - RNA, 19 nt, Artificial Sequence
  Description of Artificial Sequence: Synthetic oligonucleotide
aacccgugagguagauuca

SEQ ID NO: 825627 - RNA, 19 nt, Artificial Sequence
  Description of Artificial Sequence: Synthetic oligonucleotide
cacagacaguuuagauuuc

SEQ ID NO: 825628 - RNA, 19 nt, Artificial Sequence
  Description of Artificial Sequence: Synthetic oligonucleotide
aucggcuggacacguugau

SEQ ID NO: 825629 - RNA, 19 nt, Artificial Sequence
  Description of Artificial Sequence: Synthetic oligonucleotide
acacacacacauacacaca

SEQ ID NO: 825630 - RNA, 19 nt, Artificial Sequence
  Description of Artificial Sequence: Synthetic oligonucleotide
ggcagucucgucgggaacc

SEQ ID NO: 825631 - RNA, 19 nt, Artificial Sequence
  Description of Artificial Sequence: Synthetic oligonucleotide
gucucgucgggaaccccgg

SEQ ID NO: 825632 - RNA, 19 nt, Artificial Sequence
  Description of Artificial Sequence: Synthetic oligonucleotide
acguucccauggcaugucu

SEQ ID NO: 825633 - RNA, 19 nt, Artificial Sequence
  Description of Artificial Sequence: Synthetic oligonucleotide
ccguguagggguugaagac

SEQ ID NO: 825634 - RNA, 19 nt, Artificial Sequence
  Description of Artificial Sequence: Synthetic oligonucleotide
acacacacacacacauaca

SEQ ID NO: 825635 - RNA, 19 nt, Artificial Sequence
  Description of Artificial Sequence: Synthetic oligonucleotide
gucccggcacauauaggcc

SEQ ID NO: 825636 - RNA, 19 nt, Artificial Sequence
  Description of Artificial Sequence: Synthetic oligonucleotide
gccauucacuuagacuggg

SEQ ID NO: 825637 - RNA, 19 nt, Artificial Sequence
  Description of Artificial Sequence: Synthetic oligonucleotide
uguaacccgugagguagau

SEQ ID NO: 825638 - RNA, 19 nt, Artificial Sequence
  Description of Artificial Sequence: Synthetic oligonucleotide
uaacgcccucuguggagac

SEQ ID NO: 825639 - RNA, 19 nt, Artificial Sequence
  Description of Artificial Sequence: Synthetic oligonucleotide
ccauggcaugucuaagcag

SEQ ID NO: 825640 - RNA, 19 nt, Artificial Sequence
  Description of Artificial Sequence: Synthetic oligonucleotide
cugaguuugcugucaaaau

SEQ ID NO: 825641 - RNA, 19 nt, Artificial Sequence
  Description of Artificial Sequence: Synthetic oligonucleotide
gggacccucagcuuguucu

SEQ ID NO: 825642 - RNA, 19 nt, Artificial Sequence
  Description of Artificial Sequence: Synthetic oligonucleotide
ggacccucagcuuguucug

SEQ ID NO: 825643 - RNA, 19 nt, Artificial Sequence
  Description of Artificial Sequence: Synthetic oligonucleotide
aguaguggucccggcacau

SEQ ID NO: 825644 - RNA, 19 nt, Artificial Sequence
  Description of Artificial Sequence: Synthetic oligonucleotide
augucuaagcagaguguaa

SEQ ID NO: 825645 - RNA, 19 nt, Artificial Sequence
  Description of Artificial Sequence: Synthetic oligonucleotide
auggcacggguuucacuau

SEQ ID NO: 825646 - RNA, 19 nt, Artificial Sequence
  Description of Artificial Sequence: Synthetic oligonucleotide
auggguucuaagaccgaaa

SEQ ID NO: 825647 - RNA, 19 nt, Artificial Sequence
  Description of Artificial Sequence: Synthetic oligonucleotide
caugguggcccgcgcgcag

SEQ ID NO: 825648 - RNA, 19 nt, Artificial Sequence
  Description of Artificial Sequence: Synthetic oligonucleotide
cccauuuauaucggccuag

SEQ ID NO: 825649 - RNA, 19 nt, Artificial Sequence
  Description of Artificial Sequence: Synthetic oligonucleotide
gacacguugauggccugua

SEQ ID NO: 825650 - RNA, 19 nt, Artificial Sequence
  Description of Artificial Sequence: Synthetic oligonucleotide
gaauggcacggguuucacu

SEQ ID NO: 825651 - RNA, 19 nt, Artificial Sequence
  Description of Artificial Sequence: Synthetic oligonucleotide
acucaggggagggugugaa

SEQ ID NO: 825652 - RNA, 19 nt, Artificial Sequence
  Description of Artificial Sequence: Synthetic oligonucleotide
agggugucagaaagugaca

SEQ ID NO: 825653 - RNA, 19 nt, Artificial Sequence
  Description of Artificial Sequence: Synthetic oligonucleotide
cuauggguucuaagaccga

SEQ ID NO: 825654 - RNA, 19 nt, Artificial Sequence
  Description of Artificial Sequence: Synthetic oligonucleotide
ugggacccucagcuuguuc

SEQ ID NO: 825655 - RNA, 19 nt, Artificial Sequence
  Description of Artificial Sequence: Synthetic oligonucleotide
gcaaggccgggucucggcc

SEQ ID NO: 825656 - RNA, 19 nt, Artificial Sequence
  Description of Artificial Sequence: Synthetic oligonucleotide
ugcccaacgccugggcagu

SEQ ID NO: 825657 - RNA, 19 nt, Artificial Sequence
  Description of Artificial Sequence: Synthetic oligonucleotide
cacaagucuccuguaccca

SEQ ID NO: 825658 - RNA, 19 nt, Artificial Sequence
  Description of Artificial Sequence: Synthetic oligonucleotide
aacgcccucuguggagaca

SEQ ID NO: 825659 - RNA, 19 nt, Artificial Sequence
  Description of Artificial Sequence: Synthetic oligonucleotide
ggccuauguggccauucac

SEQ ID NO: 825660 - RNA, 19 nt, Artificial Sequence
  Description of Artificial Sequence: Synthetic oligonucleotide
cgccgcagaagcuuggcgc

SEQ ID NO: 825661 - RNA, 19 nt, Artificial Sequence
  Description of Artificial Sequence: Synthetic oligonucleotide
acgcccucuguggagacau

SEQ ID NO: 825662 - RNA, 19 nt, Artificial Sequence
  Description of Artificial Sequence: Synthetic oligonucleotide
cugggguagggugucagaa

SEQ ID NO: 825663 - RNA, 19 nt, Artificial Sequence
  Description of Artificial Sequence: Synthetic oligonucleotide
caugagagcgauggaggaa

SEQ ID NO: 825664 - RNA, 19 nt, Artificial Sequence
  Description of Artificial Sequence: Synthetic oligonucleotide
gaacuccguguagggguug

SEQ ID NO: 825665 - RNA, 19 nt, Artificial Sequence
  Description of Artificial Sequence: Synthetic oligonucleotide
auucaguggccugcacccu

SEQ ID NO: 825666 - RNA, 19 nt, Artificial Sequence
  Description of Artificial Sequence: Synthetic oligonucleotide
ggugcucggucgcuucacc

SEQ ID NO: 825667 - RNA, 19 nt, Artificial Sequence
  Description of Artificial Sequence: Synthetic oligonucleotide
agauccguucacagacagu

SEQ ID NO: 825668 - RNA, 19 nt, Artificial Sequence
  Description of Artificial Sequence: Synthetic oligonucleotide
gggugugaaaggggugccg

SEQ ID NO: 825669 - RNA, 19 nt, Artificial Sequence
  Description of Artificial Sequence: Synthetic oligonucleotide
gucuaccucucuccacaga

SEQ ID NO: 825670 - RNA, 19 nt, Artificial Sequence
  Description of Artificial Sequence: Synthetic oligonucleotide
ugggcgacugcggcucgcc

SEQ ID NO: 825671 - RNA, 19 nt, Artificial Sequence
  Description of Artificial Sequence: Synthetic oligonucleotide
cacucacguucccauggca

SEQ ID NO: 825672 - RNA, 19 nt, Artificial Sequence
  Description of Artificial Sequence: Synthetic oligonucleotide
ugagguccgcgcgccgcag

SEQ ID NO: 825673 - RNA, 19 nt, Artificial Sequence
  Description of Artificial Sequence: Synthetic oligonucleotide
ugguggcccgcgcgcagcu

SEQ ID NO: 825674 - RNA, 19 nt, Artificial Sequence
  Description of Artificial Sequence: Synthetic oligonucleotide
cccugguugagguccgcgc

SEQ ID NO: 825675 - RNA, 19 nt, Artificial Sequence
  Description of Artificial Sequence: Synthetic oligonucleotide
cauacuguuugaacaucuu

SEQ ID NO: 825676 - RNA, 19 nt, Artificial Sequence
  Description of Artificial Sequence: Synthetic oligonucleotide
ggcaaggccgggucucggc

SEQ ID NO: 825677 - RNA, 19 nt, Artificial Sequence
  Description of Artificial Sequence: Synthetic oligonucleotide
gcggccguguccuacugca

SEQ ID NO: 825678 - RNA, 19 nt, Artificial Sequence
  Description of Artificial Sequence: Synthetic oligonucleotide
ucggucgcuucaccgccuu

SEQ ID NO: 825679 - RNA, 19 nt, Artificial Sequence
  Description of Artificial Sequence: Synthetic oligonucleotide
cccguugagccccgggugc

SEQ ID NO: 825680 - RNA, 19 nt, Artificial Sequence
  Description of Artificial Sequence: Synthetic oligonucleotide
agacacacacacacacaua

SEQ ID NO: 825681 - RNA, 19 nt, Artificial Sequence
  Description of Artificial Sequence: Synthetic oligonucleotide
caguaguggucccggcaca

SEQ ID NO: 825682 - RNA, 19 nt, Artificial Sequence
  Description of Artificial Sequence: Synthetic oligonucleotide
agguccgcgcgccgcagaa

SEQ ID NO: 825683 - RNA, 19 nt, Artificial Sequence
  Description of Artificial Sequence: Synthetic oligonucleotide
cccggcacauauaggccag

SEQ ID NO: 825684 - RNA, 19 nt, Artificial Sequence
  Description of Artificial Sequence: Synthetic oligonucleotide
gugacaugucuaccucucu

SEQ ID NO: 825685 - RNA, 19 nt, Artificial Sequence
  Description of Artificial Sequence: Synthetic oligonucleotide
ggccaaucccuuggcaccc

SEQ ID NO: 825686 - RNA, 19 nt, Artificial Sequence
  Description of Artificial Sequence: Synthetic oligonucleotide
uggggacucggggcauuug

SEQ ID NO: 825687 - RNA, 19 nt, Artificial Sequence
  Description of Artificial Sequence: Synthetic oligonucleotide
gcgccgcagaagcuuggcg

SEQ ID NO: 825688 - RNA, 19 nt, Artificial Sequence
  Description of Artificial Sequence: Synthetic oligonucleotide
cacuuagacugggugacgu

SEQ ID NO: 825689 - RNA, 19 nt, Artificial Sequence
  Description of Artificial Sequence: Synthetic oligonucleotide
guacccacccaugcuccca

SEQ ID NO: 825690 - RNA, 19 nt, Artificial Sequence
  Description of Artificial Sequence: Synthetic oligonucleotide
gcaccccaccuccucuccg

SEQ ID NO: 825691 - RNA, 19 nt, Artificial Sequence
  Description of Artificial Sequence: Synthetic oligonucleotide
agggugcgugaggcucucc

SEQ ID NO: 825692 - RNA, 19 nt, Artificial Sequence
  Description of Artificial Sequence: Synthetic oligonucleotide
gguggacuguaguuccuua

SEQ ID NO: 825693 - RNA, 19 nt, Artificial Sequence
  Description of Artificial Sequence: Synthetic oligonucleotide
cuauggccugcccaugcgu

SEQ ID NO: 825694 - RNA, 19 nt, Artificial Sequence
  Description of Artificial Sequence: Synthetic oligonucleotide
ccaugcguucuaggggugg

SEQ ID NO: 825695 - RNA, 19 nt, Artificial Sequence
  Description of Artificial Sequence: Synthetic oligonucleotide
gccuauguggccauucacu

SEQ ID NO: 825696 - RNA, 19 nt, Artificial Sequence
  Description of Artificial Sequence: Synthetic oligonucleotide
uucuaggggugggcaugac

SEQ ID NO: 825697 - RNA, 19 nt, Artificial Sequence
  Description of Artificial Sequence: Synthetic oligonucleotide
cacguucccauggcauguc

SEQ ID NO: 825698 - RNA, 19 nt, Artificial Sequence
  Description of Artificial Sequence: Synthetic oligonucleotide
ggggcauuuguaguaaaau

SEQ ID NO: 825699 - RNA, 19 nt, Artificial Sequence
  Description of Artificial Sequence: Synthetic oligonucleotide
ggcgacugcggcucgccga

SEQ ID NO: 825700 - RNA, 19 nt, Artificial Sequence
  Description of Artificial Sequence: Synthetic oligonucleotide
ccuuaacgcccucugugga

SEQ ID NO: 825701 - RNA, 19 nt, Artificial Sequence
  Description of Artificial Sequence: Synthetic oligonucleotide
gcugggccccauuuauauc

SEQ ID NO: 825702 - RNA, 19 nt, Artificial Sequence
  Description of Artificial Sequence: Synthetic oligonucleotide
guguaacccgugagguaga

SEQ ID NO: 825703 - RNA, 19 nt, Artificial Sequence
  Description of Artificial Sequence: Synthetic oligonucleotide
gcagaagcuuggcgcucag

SEQ ID NO: 825704 - RNA, 19 nt, Artificial Sequence
  Description of Artificial Sequence: Synthetic oligonucleotide
cuggcugggccccauuuau

SEQ ID NO: 825705 - RNA, 19 nt, Artificial Sequence
  Description of Artificial Sequence: Synthetic oligonucleotide
ccguguccuacugcaauac

SEQ ID NO: 825706 - RNA, 19 nt, Artificial Sequence
  Description of Artificial Sequence: Synthetic oligonucleotide
cagucucgucgggaacccc

SEQ ID NO: 825707 - RNA, 19 nt, Artificial Sequence
  Description of Artificial Sequence: Synthetic oligonucleotide
gagguccgcgcgccgcaga

SEQ ID NO: 825708 - RNA, 19 nt, Artificial Sequence
  Description of Artificial Sequence: Synthetic oligonucleotide
aguggucccggcacauaua

SEQ ID NO: 825709 - RNA, 19 nt, Artificial Sequence
  Description of Artificial Sequence: Synthetic oligonucleotide
ggccuguaccuuggccucg

SEQ ID NO: 825710 - RNA, 19 nt, Artificial Sequence
  Description of Artificial Sequence: Synthetic oligonucleotide
auaucggccuagagugcua

SEQ ID NO: 825711 - RNA, 19 nt, Artificial Sequence
  Description of Artificial Sequence: Synthetic oligonucleotide
gcuuugcggaagaucagua

SEQ ID NO: 825712 - RNA, 19 nt, Artificial Sequence
  Description of Artificial Sequence: Synthetic oligonucleotide
cccacccaugcucccagac

SEQ ID NO: 825713 - RNA, 19 nt, Artificial Sequence
  Description of Artificial Sequence: Synthetic oligonucleotide
ggacucaguuugucuccca

SEQ ID NO: 825714 - RNA, 19 nt, Artificial Sequence
  Description of Artificial Sequence: Synthetic oligonucleotide
gggcgacugcggcucgccg

SEQ ID NO: 825715 - RNA, 19 nt, Artificial Sequence
  Description of Artificial Sequence: Synthetic oligonucleotide
agaggcgggccaggacaug

SEQ ID NO: 825716 - RNA, 19 nt, Artificial Sequence
  Description of Artificial Sequence: Synthetic oligonucleotide
cguucuaggggugggcaug

SEQ ID NO: 825717 - RNA, 19 nt, Artificial Sequence
  Description of Artificial Sequence: Synthetic oligonucleotide
ccuauguggccauucacuu

SEQ ID NO: 825718 - RNA, 19 nt, Artificial Sequence
  Description of Artificial Sequence: Synthetic oligonucleotide
ggcggccguguccuacugc

SEQ ID NO: 825719 - RNA, 19 nt, Artificial Sequence
  Description of Artificial Sequence: Synthetic oligonucleotide
cagcucgucgguggccaug

SEQ ID NO: 825720 - RNA, 19 nt, Artificial Sequence
  Description of Artificial Sequence: Synthetic oligonucleotide
ccaacgccugggcagucuc

SEQ ID NO: 825721 - RNA, 19 nt, Artificial Sequence
  Description of Artificial Sequence: Synthetic oligonucleotide
cgucacgguuucacaacac

SEQ ID NO: 825722 - RNA, 19 nt, Artificial Sequence
  Description of Artificial Sequence: Synthetic oligonucleotide
ccaaaaguaaagggaauuu

SEQ ID NO: 825723 - RNA, 19 nt, Artificial Sequence
  Description of Artificial Sequence: Synthetic oligonucleotide
gccgcagaagcuuggcgcu

SEQ ID NO: 825724 - RNA, 19 nt, Artificial Sequence
  Description of Artificial Sequence: Synthetic oligonucleotide
gccgcagcuuugcggaaga

SEQ ID NO: 825725 - RNA, 19 nt, Artificial Sequence
  Description of Artificial Sequence: Synthetic oligonucleotide
gggcagucucgucgggaac

SEQ ID NO: 825726 - RNA, 19 nt, Artificial Sequence
  Description of Artificial Sequence: Synthetic oligonucleotide
cugggcgacugcggcucgc

SEQ ID NO: 825727 - RNA, 19 nt, Artificial Sequence
  Description of Artificial Sequence: Synthetic oligonucleotide
cucccacaagucuccugua

SEQ ID NO: 825728 - RNA, 19 nt, Artificial Sequence
  Description of Artificial Sequence: Synthetic oligonucleotide
gcugggcgacugcggcucg

SEQ ID NO: 825729 - RNA, 19 nt, Artificial Sequence
  Description of Artificial Sequence: Synthetic oligonucleotide
gggcaacuggggacucggg

SEQ ID NO: 825730 - RNA, 19 nt, Artificial Sequence
  Description of Artificial Sequence: Synthetic oligonucleotide
gcccuggcuacuugaaggu

SEQ ID NO: 825731 - RNA, 19 nt, Artificial Sequence
  Description of Artificial Sequence: Synthetic oligonucleotide
ccuccaacuccuauggguu

SEQ ID NO: 825732 - RNA, 19 nt, Artificial Sequence
  Description of Artificial Sequence: Synthetic oligonucleotide
cacccuuaacgcccucugu

SEQ ID NO: 825733 - RNA, 19 nt, Artificial Sequence
  Description of Artificial Sequence: Synthetic oligonucleotide
aggcgggccaggacaugca

SEQ ID NO: 825734 - RNA, 19 nt, Artificial Sequence
  Description of Artificial Sequence: Synthetic oligonucleotide
guaguggucccggcacaua

SEQ ID NO: 825735 - RNA, 19 nt, Artificial Sequence
  Description of Artificial Sequence: Synthetic oligonucleotide
ggccguguccuacugcaau

SEQ ID NO: 825736 - RNA, 19 nt, Artificial Sequence
  Description of Artificial Sequence: Synthetic oligonucleotide
uggcacccuuaacgcccuc

SEQ ID NO: 825737 - RNA, 19 nt, Artificial Sequence
  Description of Artificial Sequence: Synthetic oligonucleotide
cccaugcguucuaggggug

SEQ ID NO: 825738 - RNA, 19 nt, Artificial Sequence
  Description of Artificial Sequence: Synthetic oligonucleotide
cgaucucagagaggcgggc

SEQ ID NO: 825739 - RNA, 19 nt, Artificial Sequence
  Description of Artificial Sequence: Synthetic oligonucleotide
cgcagcuuugcggaagauc

SEQ ID NO: 825740 - RNA, 19 nt, Artificial Sequence
  Description of Artificial Sequence: Synthetic oligonucleotide
caacuccuauggguucuaa

SEQ ID NO: 825741 - RNA, 19 nt, Artificial Sequence
  Description of Artificial Sequence: Synthetic oligonucleotide
gaacucccggaagcugagu

SEQ ID NO: 825742 - RNA, 19 nt, Artificial Sequence
  Description of Artificial Sequence: Synthetic oligonucleotide
ggcgggccaggacaugcaa

SEQ ID NO: 825743 - RNA, 19 nt, Artificial Sequence
  Description of Artificial Sequence: Synthetic oligonucleotide
cagggugcgugaggcucuc

SEQ ID NO: 825744 - RNA, 19 nt, Artificial Sequence
  Description of Artificial Sequence: Synthetic oligonucleotide
ccuccggcucagcuugcug

SEQ ID NO: 825745 - RNA, 19 nt, Artificial Sequence
  Description of Artificial Sequence: Synthetic oligonucleotide
cgcgcugcccaacgccugg

SEQ ID NO: 825746 - RNA, 19 nt, Artificial Sequence
  Description of Artificial Sequence: Synthetic oligonucleotide
gcggccuauguggccauuc

SEQ ID NO: 825747 - RNA, 19 nt, Artificial Sequence
  Description of Artificial Sequence: Synthetic oligonucleotide
gggacucggggcauuugua

SEQ ID NO: 825748 - RNA, 19 nt, Artificial Sequence
  Description of Artificial Sequence: Synthetic oligonucleotide
ccccauuuauaucggccua

SEQ ID NO: 825749 - RNA, 19 nt, Artificial Sequence
  Description of Artificial Sequence: Synthetic oligonucleotide
gguccgcgcgccgcagaag

SEQ ID NO: 825750 - RNA, 19 nt, Artificial Sequence
  Description of Artificial Sequence: Synthetic oligonucleotide
cggggcauuuguaguaaaa

SEQ ID NO: 825751 - RNA, 19 nt, Artificial Sequence
  Description of Artificial Sequence: Synthetic oligonucleotide
ccauucacuuagacugggu

SEQ ID NO: 825752 - RNA, 19 nt, Artificial Sequence
  Description of Artificial Sequence: Synthetic oligonucleotide
ggguagggugucagaaagu

SEQ ID NO: 825753 - RNA, 19 nt, Artificial Sequence
  Description of Artificial Sequence: Synthetic oligonucleotide
cugccgcagcuuugcggaa

SEQ ID NO: 825754 - RNA, 19 nt, Artificial Sequence
  Description of Artificial Sequence: Synthetic oligonucleotide
ccgaugcccugguugaggu

SEQ ID NO: 825755 - RNA, 19 nt, Artificial Sequence
  Description of Artificial Sequence: Synthetic oligonucleotide
gccccguugagccccgggu

SEQ ID NO: 825756 - RNA, 19 nt, Artificial Sequence
  Description of Artificial Sequence: Synthetic oligonucleotide
cgcgcgccgcagaagcuug

SEQ ID NO: 825757 - RNA, 19 nt, Artificial Sequence
  Description of Artificial Sequence: Synthetic oligonucleotide
guaacccgugagguagauu

SEQ ID NO: 825758 - RNA, 19 nt, Artificial Sequence
  Description of Artificial Sequence: Synthetic oligonucleotide
ggacacguugauggccugu

SEQ ID NO: 825759 - RNA, 19 nt, Artificial Sequence
  Description of Artificial Sequence: Synthetic oligonucleotide
gccuguaccuuggccucga

SEQ ID NO: 825760 - RNA, 19 nt, Artificial Sequence
  Description of Artificial Sequence: Synthetic oligonucleotide
gggcucggucccuccaacu

SEQ ID NO: 825761 - RNA, 19 nt, Artificial Sequence
  Description of Artificial Sequence: Synthetic oligonucleotide
gcgcgccgcagaagcuugg

SEQ ID NO: 825762 - RNA, 19 nt, Artificial Sequence
  Description of Artificial Sequence: Synthetic oligonucleotide
gccgccgccgccgccgccc

SEQ ID NO: 825763 - RNA, 19 nt, Artificial Sequence
  Description of Artificial Sequence: Synthetic oligonucleotide
gcguucuaggggugggcau

SEQ ID NO: 825764 - RNA, 19 nt, Artificial Sequence
  Description of Artificial Sequence: Synthetic oligonucleotide
gcacccugccuggcugggc

SEQ ID NO: 825765 - RNA, 19 nt, Artificial Sequence
  Description of Artificial Sequence: Synthetic oligonucleotide
cguccgcgcugcccaacgc

SEQ ID NO: 825766 - RNA, 19 nt, Artificial Sequence
  Description of Artificial Sequence: Synthetic oligonucleotide
cccgugagguagauucagu

SEQ ID NO: 825767 - RNA, 19 nt, Artificial Sequence
  Description of Artificial Sequence: Synthetic oligonucleotide
cggccuauguggccauuca

SEQ ID NO: 825768 - RNA, 19 nt, Artificial Sequence
  Description of Artificial Sequence: Synthetic oligonucleotide
gcagggugcgugaggcucu

SEQ ID NO: 825769 - RNA, 19 nt, Artificial Sequence
  Description of Artificial Sequence: Synthetic oligonucleotide
gcccgcgcgcagcugccuc

SEQ ID NO: 825770 - RNA, 19 nt, Artificial Sequence
  Description of Artificial Sequence: Synthetic oligonucleotide
ccgcagaagcuuggcgcuc

SEQ ID NO: 825771 - RNA, 19 nt, Artificial Sequence
  Description of Artificial Sequence: Synthetic oligonucleotide
cgccccguugagccccggg

SEQ ID NO: 825772 - RNA, 19 nt, Artificial Sequence
  Description of Artificial Sequence: Synthetic oligonucleotide
ggcucgccgaugcccuggu

SEQ ID NO: 825773 - RNA, 19 nt, Artificial Sequence
  Description of Artificial Sequence: Synthetic oligonucleotide
gccgccccguugagccccg

SEQ ID NO: 825774 - RNA, 19 nt, Artificial Sequence
  Description of Artificial Sequence: Synthetic oligonucleotide
cuggggacucggggcauuu

SEQ ID NO: 825775 - RNA, 19 nt, Artificial Sequence
  Description of Artificial Sequence: Synthetic oligonucleotide
gggugacgucacgguuuca

SEQ ID NO: 825776 - RNA, 19 nt, Artificial Sequence
  Description of Artificial Sequence: Synthetic oligonucleotide
cguugagccccgggugcuc

SEQ ID NO: 825777 - RNA, 19 nt, Artificial Sequence
  Description of Artificial Sequence: Synthetic oligonucleotide
cgggugcucggucgcuuca

SEQ ID NO: 825778 - RNA, 19 nt, Artificial Sequence
  Description of Artificial Sequence: Synthetic oligonucleotide
ccuguaccuuggccucgaa

SEQ ID NO: 825779 - RNA, 19 nt, Artificial Sequence
  Description of Artificial Sequence: Synthetic oligonucleotide
cgcccucuguggagacauc

SEQ ID NO: 825780 - RNA, 19 nt, Artificial Sequence
  Description of Artificial Sequence: Synthetic oligonucleotide
gcccaacgccugggcaguc

SEQ ID NO: 825781 - RNA, 19 nt, Artificial Sequence
  Description of Artificial Sequence: Synthetic oligonucleotide
cggucgcuucaccgccuuc

SEQ ID NO: 825782 - RNA, 19 nt, Artificial Sequence
  Description of Artificial Sequence: Synthetic oligonucleotide
ggccgccgccgccgccgcc

SEQ ID NO: 825783 - RNA, 19 nt, Artificial Sequence
  Description of Artificial Sequence: Synthetic oligonucleotide
ccgccgccgccgccgcccc

SEQ ID NO: 825784 - RNA, 19 nt, Artificial Sequence
  Description of Artificial Sequence: Synthetic oligonucleotide
gcucgucgguggccauggu

SEQ ID NO: 825785 - RNA, 19 nt, Artificial Sequence
  Description of Artificial Sequence: Synthetic oligonucleotide
cccaacgccugggcagucu

SEQ ID NO: 825786 - RNA, 19 nt, Artificial Sequence
  Description of Artificial Sequence: Synthetic oligonucleotide
cggccguguccuacugcaa

SEQ ID NO: 825787 - RNA, 19 nt, Artificial Sequence
  Description of Artificial Sequence: Synthetic oligonucleotide
cgacugcggcucgccgaug

SEQ ID NO: 825788 - RNA, 19 nt, Artificial Sequence
  Description of Artificial Sequence: Synthetic oligonucleotide
cgucguccgcgcugcccaa

SEQ ID NO: 825789 - RNA, 19 nt, Artificial Sequence
  Description of Artificial Sequence: Synthetic oligonucleotide
gcucgccgaugcccugguu

SEQ ID NO: 825790 - RNA, 19 nt, Artificial Sequence
  Description of Artificial Sequence: Synthetic oligonucleotide
ccgccccguugagccccgg

SEQ ID NO: 825791 - RNA, 19 nt, Artificial Sequence
  Description of Artificial Sequence: Synthetic oligonucleotide
cggccgccgccgccgccgc

SEQ ID NO: 825792 - RNA, 19 nt, Artificial Sequence
  Description of Artificial Sequence: Synthetic oligonucleotide
ccgcgcgccgcagaagcuu

SEQ ID NO: 825793 - RNA, 19 nt, Artificial Sequence
  Description of Artificial Sequence: Synthetic oligonucleotide
ccgcagcuuugcggaagau

SEQ ID NO: 825794 - RNA, 19 nt, Artificial Sequence
  Description of Artificial Sequence: Synthetic oligonucleotide
cccgggugcucggucgcuu

SEQ ID NO: 825795 - RNA, 19 nt, Artificial Sequence
  Description of Artificial Sequence: Synthetic oligonucleotide
ccccgggugcucggucgcu

SEQ ID NO: 825796 - RNA, 19 nt, Artificial Sequence
  Description of Artificial Sequence: Synthetic oligonucleotide
aaaagugagauacugcguc

SEQ ID NO: 825797 - RNA, 19 nt, Artificial Sequence
  Description of Artificial Sequence: Synthetic oligonucleotide
uuuuaauucacaccgaaga

SEQ ID NO: 825798 - RNA, 19 nt, Artificial Sequence
  Description of Artificial Sequence: Synthetic oligonucleotide
uuauugucuguacauaugg

SEQ ID NO: 825799 - RNA, 19 nt, Artificial Sequence
  Description of Artificial Sequence: Synthetic oligonucleotide
agauauuuuaacuacauaa

SEQ ID NO: 825800 - RNA, 19 nt, Artificial Sequence
  Description of Artificial Sequence: Synthetic oligonucleotide
gugucuaugacauugggcg

SEQ ID NO: 825801 - RNA, 19 nt, Artificial Sequence
  Description of Artificial Sequence: Synthetic oligonucleotide
auuucuaucacuaaggaca

SEQ ID NO: 825802 - RNA, 19 nt, Artificial Sequence
  Description of Artificial Sequence: Synthetic oligonucleotide
auuuuaacuacauaaggga

SEQ ID NO: 825803 - RNA, 19 nt, Artificial Sequence
  Description of Artificial Sequence: Synthetic oligonucleotide
aguuguuaaaccuggcagc

SEQ ID NO: 825804 - RNA, 19 nt, Artificial Sequence
  Description of Artificial Sequence: Synthetic oligonucleotide
agcuagauauuuuaacuac

SEQ ID NO: 825805 - RNA, 19 nt, Artificial Sequence
  Description of Artificial Sequence: Synthetic oligonucleotide
agcgcagucauuugaaacc

SEQ ID NO: 825806 - RNA, 19 nt, Artificial Sequence
  Description of Artificial Sequence: Synthetic oligonucleotide
uauaacuauuagcacagug

SEQ ID NO: 825807 - RNA, 19 nt, Artificial Sequence
  Description of Artificial Sequence: Synthetic oligonucleotide
cauaaaucugaaugcagcg

SEQ ID NO: 825808 - RNA, 19 nt, Artificial Sequence
  Description of Artificial Sequence: Synthetic oligonucleotide
aacaguaugacuuccugau

SEQ ID NO: 825809 - RNA, 19 nt, Artificial Sequence
  Description of Artificial Sequence: Synthetic oligonucleotide
caagauuaauaucuaacag

SEQ ID NO: 825810 - RNA, 19 nt, Artificial Sequence
  Description of Artificial Sequence: Synthetic oligonucleotide
aagauuaagcaguuugcca

SEQ ID NO: 825811 - RNA, 19 nt, Artificial Sequence
  Description of Artificial Sequence: Synthetic oligonucleotide
augguugaaauacugguug

SEQ ID NO: 825812 - RNA, 19 nt, Artificial Sequence
  Description of Artificial Sequence: Synthetic oligonucleotide
aaauccggcauguaguggu

SEQ ID NO: 825813 - RNA, 19 nt, Artificial Sequence
  Description of Artificial Sequence: Synthetic oligonucleotide
uaugugcucgcccaugagg

SEQ ID NO: 825814 - RNA, 19 nt, Artificial Sequence
  Description of Artificial Sequence: Synthetic oligonucleotide
ucacuaaggacauaagcac

SEQ ID NO: 825815 - RNA, 19 nt, Artificial Sequence
  Description of Artificial Sequence: Synthetic oligonucleotide
agggugauuucuuucgccc

SEQ ID NO: 825816 - RNA, 19 nt, Artificial Sequence
  Description of Artificial Sequence: Synthetic oligonucleotide
auaaaucugaaugcagcgc

SEQ ID NO: 825817 - RNA, 19 nt, Artificial Sequence
  Description of Artificial Sequence: Synthetic oligonucleotide
aaugaagcgagauggcagu

SEQ ID NO: 825818 - RNA, 19 nt, Artificial Sequence
  Description of Artificial Sequence: Synthetic oligonucleotide
uuuaauucacaccgaagaa

SEQ ID NO: 825819 - RNA, 19 nt, Artificial Sequence
  Description of Artificial Sequence: Synthetic oligonucleotide
aaaucagugucuaugacau

SEQ ID NO: 825820 - RNA, 19 nt, Artificial Sequence
  Description of Artificial Sequence: Synthetic oligonucleotide
uccgucauaaaaucaaacu

SEQ ID NO: 825821 - RNA, 19 nt, Artificial Sequence
  Description of Artificial Sequence: Synthetic oligonucleotide
ucuaucacuaaggacauaa

SEQ ID NO: 825822 - RNA, 19 nt, Artificial Sequence
  Description of Artificial Sequence: Synthetic oligonucleotide
aucuguuuaaucuuccagu

SEQ ID NO: 825823 - RNA, 19 nt, Artificial Sequence
  Description of Artificial Sequence: Synthetic oligonucleotide
uuaacuacauaagggaggu

SEQ ID NO: 825824 - RNA, 19 nt, Artificial Sequence
  Description of Artificial Sequence: Synthetic oligonucleotide
uacauaagggaggugaaug

SEQ ID NO: 825825 - RNA, 19 nt, Artificial Sequence
  Description of Artificial Sequence: Synthetic oligonucleotide
aaccaauuuguacaaguuu

SEQ ID NO: 825826 - RNA, 19 nt, Artificial Sequence
  Description of Artificial Sequence: Synthetic oligonucleotide
aaagugagauacugcgucu

SEQ ID NO: 825827 - RNA, 19 nt, Artificial Sequence
  Description of Artificial Sequence: Synthetic oligonucleotide
agauuaauaucuaacaguu

SEQ ID NO: 825828 - RNA, 19 nt, Artificial Sequence
  Description of Artificial Sequence: Synthetic oligonucleotide
agauacugcgucuaaggga

SEQ ID NO: 825829 - RNA, 19 nt, Artificial Sequence
  Description of Artificial Sequence: Synthetic oligonucleotide
aguuuacuuuguuuccagg

SEQ ID NO: 825830 - RNA, 19 nt, Artificial Sequence
  Description of Artificial Sequence: Synthetic oligonucleotide
uuagcauauuugaaaacuu

SEQ ID NO: 825831 - RNA, 19 nt, Artificial Sequence
  Description of Artificial Sequence: Synthetic oligonucleotide
acuauuagcacagugucaa

SEQ ID NO: 825832 - RNA, 19 nt, Artificial Sequence
  Description of Artificial Sequence: Synthetic oligonucleotide
ugucuaugacauugggcgg

SEQ ID NO: 825833 - RNA, 19 nt, Artificial Sequence
  Description of Artificial Sequence: Synthetic oligonucleotide
guaguaucuuuucauguac

SEQ ID NO: 825834 - RNA, 19 nt, Artificial Sequence
  Description of Artificial Sequence: Synthetic oligonucleotide
caagauuaagcaguuugcc

SEQ ID NO: 825835 - RNA, 19 nt, Artificial Sequence
  Description of Artificial Sequence: Synthetic oligonucleotide
agguuaaccgagucaacag

SEQ ID NO: 825836 - RNA, 19 nt, Artificial Sequence
  Description of Artificial Sequence: Synthetic oligonucleotide
uugggcggcagcauugccg

SEQ ID NO: 825837 - RNA, 19 nt, Artificial Sequence
  Description of Artificial Sequence: Synthetic oligonucleotide
acugggaguuguuaaaccu

SEQ ID NO: 825838 - RNA, 19 nt, Artificial Sequence
  Description of Artificial Sequence: Synthetic oligonucleotide
gauacugcgucuaagggaa

SEQ ID NO: 825839 - RNA, 19 nt, Artificial Sequence
  Description of Artificial Sequence: Synthetic oligonucleotide
ugcagcggggugcaaaucc

SEQ ID NO: 825840 - RNA, 19 nt, Artificial Sequence
  Description of Artificial Sequence: Synthetic oligonucleotide
gaagcgagauggcaguuug

SEQ ID NO: 825841 - RNA, 19 nt, Artificial Sequence
  Description of Artificial Sequence: Synthetic oligonucleotide
uguacauauggggagggga

SEQ ID NO: 825842 - RNA, 19 nt, Artificial Sequence
  Description of Artificial Sequence: Synthetic oligonucleotide
gaaugucaaggcuacaaaa

SEQ ID NO: 825843 - RNA, 19 nt, Artificial Sequence
  Description of Artificial Sequence: Synthetic oligonucleotide
uuucuaucacuaaggacau

SEQ ID NO: 825844 - RNA, 19 nt, Artificial Sequence
  Description of Artificial Sequence: Synthetic oligonucleotide
uuaaccgagucaacagcug

SEQ ID NO: 825845 - RNA, 19 nt, Artificial Sequence
  Description of Artificial Sequence: Synthetic oligonucleotide
aguaguaucuuuucaugua

SEQ ID NO: 825846 - RNA, 19 nt, Artificial Sequence
  Description of Artificial Sequence: Synthetic oligonucleotide
auucacaccgaagaaguug

SEQ ID NO: 825847 - RNA, 19 nt, Artificial Sequence
  Description of Artificial Sequence: Synthetic oligonucleotide
uguaugugcucgcccauga

SEQ ID NO: 825848 - RNA, 19 nt, Artificial Sequence
  Description of Artificial Sequence: Synthetic oligonucleotide
aaugcagcgcagucauuug

SEQ ID NO: 825849 - RNA, 19 nt, Artificial Sequence
  Description of Artificial Sequence: Synthetic oligonucleotide
aguccuuccgucuuugcga

SEQ ID NO: 825850 - RNA, 19 nt, Artificial Sequence
  Description of Artificial Sequence: Synthetic oligonucleotide
ucuuugcgauuucugcucc

SEQ ID NO: 825851 - RNA, 19 nt, Artificial Sequence
  Description of Artificial Sequence: Synthetic oligonucleotide
acauaagggaggugaaugu

SEQ ID NO: 825852 - RNA, 19 nt, Artificial Sequence
  Description of Artificial Sequence: Synthetic oligonucleotide
uaguguaugugcucgccca

SEQ ID NO: 825853 - RNA, 19 nt, Artificial Sequence
  Description of Artificial Sequence: Synthetic oligonucleotide
aguugagcacuggagaaag

SEQ ID NO: 825854 - RNA, 19 nt, Artificial Sequence
  Description of Artificial Sequence: Synthetic oligonucleotide
ugccugaugccgcucgugg

SEQ ID NO: 825855 - RNA, 19 nt, Artificial Sequence
  Description of Artificial Sequence: Synthetic oligonucleotide
ugggguugcaaucucggaa

SEQ ID NO: 825856 - RNA, 19 nt, Artificial Sequence
  Description of Artificial Sequence: Synthetic oligonucleotide
acgugagccaccgaggccg

SEQ ID NO: 825857 - RNA, 19 nt, Artificial Sequence
  Description of Artificial Sequence: Synthetic oligonucleotide
cuccgaacaccgaaggcgg

SEQ ID NO: 825858 - RNA, 19 nt, Artificial Sequence
  Description of Artificial Sequence: Synthetic oligonucleotide
auugacauuggcaaauuaa

SEQ ID NO: 825859 - RNA, 19 nt, Artificial Sequence
  Description of Artificial Sequence: Synthetic oligonucleotide
gugaugguugaaauacugg

SEQ ID NO: 825860 - RNA, 19 nt, Artificial Sequence
  Description of Artificial Sequence: Synthetic oligonucleotide
auguuugccacugacgaca

SEQ ID NO: 825861 - RNA, 19 nt, Artificial Sequence
  Description of Artificial Sequence: Synthetic oligonucleotide
acaguaugacuuccugauc

SEQ ID NO: 825862 - RNA, 19 nt, Artificial Sequence
  Description of Artificial Sequence: Synthetic oligonucleotide
uccagaacgguuuggcccu

SEQ ID NO: 825863 - RNA, 19 nt, Artificial Sequence
  Description of Artificial Sequence: Synthetic oligonucleotide
cucguggcauucauguugc

SEQ ID NO: 825864 - RNA, 19 nt, Artificial Sequence
  Description of Artificial Sequence: Synthetic oligonucleotide
acccuauuauugucuguac

SEQ ID NO: 825865 - RNA, 19 nt, Artificial Sequence
  Description of Artificial Sequence: Synthetic oligonucleotide
aacaccgaaggcgggcucg

SEQ ID NO: 825866 - RNA, 19 nt, Artificial Sequence
  Description of Artificial Sequence: Synthetic oligonucleotide
augugcucgcccaugaggg

SEQ ID NO: 825867 - RNA, 19 nt, Artificial Sequence
  Description of Artificial Sequence: Synthetic oligonucleotide
gagggugauuucuuucgcc

SEQ ID NO: 825868 - RNA, 19 nt, Artificial Sequence
  Description of Artificial Sequence: Synthetic oligonucleotide
acaguugagcacuggagaa

SEQ ID NO: 825869 - RNA, 19 nt, Artificial Sequence
  Description of Artificial Sequence: Synthetic oligonucleotide
ugcgauuucugcuccgaac

SEQ ID NO: 825870 - RNA, 19 nt, Artificial Sequence
  Description of Artificial Sequence: Synthetic oligonucleotide
uccgucuuugcgauuucug

SEQ ID NO: 825871 - RNA, 19 nt, Artificial Sequence
  Description of Artificial Sequence: Synthetic oligonucleotide
cuaucacuaaggacauaag

SEQ ID NO: 825872 - RNA, 19 nt, Artificial Sequence
  Description of Artificial Sequence: Synthetic oligonucleotide
uauugacauuggcaaauua

SEQ ID NO: 825873 - RNA, 19 nt, Artificial Sequence
  Description of Artificial Sequence: Synthetic oligonucleotide
uuaagcaguuugccaagau

SEQ ID NO: 825874 - RNA, 19 nt, Artificial Sequence
  Description of Artificial Sequence: Synthetic oligonucleotide
gguuaaccgagucaacagc

SEQ ID NO: 825875 - RNA, 19 nt, Artificial Sequence
  Description of Artificial Sequence: Synthetic oligonucleotide
guaguguaugugcucgccc

SEQ ID NO: 825876 - RNA, 19 nt, Artificial Sequence
  Description of Artificial Sequence: Synthetic oligonucleotide
aagcgcccgugguucaugg

SEQ ID NO: 825877 - RNA, 19 nt, Artificial Sequence
  Description of Artificial Sequence: Synthetic oligonucleotide
ucaccgcuccgcaggaccg

SEQ ID NO: 825878 - RNA, 19 nt, Artificial Sequence
  Description of Artificial Sequence: Synthetic oligonucleotide
aagggaggugaaugucaag

SEQ ID NO: 825879 - RNA, 19 nt, Artificial Sequence
  Description of Artificial Sequence: Synthetic oligonucleotide
auaagggaggugaauguca

SEQ ID NO: 825880 - RNA, 19 nt, Artificial Sequence
  Description of Artificial Sequence: Synthetic oligonucleotide
aagaccaaguuagcuagau

SEQ ID NO: 825881 - RNA, 19 nt, Artificial Sequence
  Description of Artificial Sequence: Synthetic oligonucleotide
gggguugcaaucucggaag

SEQ ID NO: 825882 - RNA, 19 nt, Artificial Sequence
  Description of Artificial Sequence: Synthetic oligonucleotide
uggugcgcucgcuugugcg

SEQ ID NO: 825883 - RNA, 19 nt, Artificial Sequence
  Description of Artificial Sequence: Synthetic oligonucleotide
ucucggaagugcugguuug

SEQ ID NO: 825884 - RNA, 19 nt, Artificial Sequence
  Description of Artificial Sequence: Synthetic oligonucleotide
gucuuugcgauuucugcuc

SEQ ID NO: 825885 - RNA, 19 nt, Artificial Sequence
  Description of Artificial Sequence: Synthetic oligonucleotide
accgaagaaguuggggugg

SEQ ID NO: 825886 - RNA, 19 nt, Artificial Sequence
  Description of Artificial Sequence: Synthetic oligonucleotide
auugggcggcagcauugcc

SEQ ID NO: 825887 - RNA, 19 nt, Artificial Sequence
  Description of Artificial Sequence: Synthetic oligonucleotide
cagcgcagucauuugaaac

SEQ ID NO: 825888 - RNA, 19 nt, Artificial Sequence
  Description of Artificial Sequence: Synthetic oligonucleotide
ugcaguaauaucugcccuu

SEQ ID NO: 825889 - RNA, 19 nt, Artificial Sequence
  Description of Artificial Sequence: Synthetic oligonucleotide
ccgucauaaaaucaaacuc

SEQ ID NO: 825890 - RNA, 19 nt, Artificial Sequence
  Description of Artificial Sequence: Synthetic oligonucleotide
caccgaagaaguuggggug

SEQ ID NO: 825891 - RNA, 19 nt, Artificial Sequence
  Description of Artificial Sequence: Synthetic oligonucleotide
ugccaagauuaauaucuaa

SEQ ID NO: 825892 - RNA, 19 nt, Artificial Sequence
  Description of Artificial Sequence: Synthetic oligonucleotide
cagauugcgagccguuccc

SEQ ID NO: 825893 - RNA, 19 nt, Artificial Sequence
  Description of Artificial Sequence: Synthetic oligonucleotide
gcuccgaacaccgaaggcg

SEQ ID NO: 825894 - RNA, 19 nt, Artificial Sequence
  Description of Artificial Sequence: Synthetic oligonucleotide
cucgucggguccaggaccg

SEQ ID NO: 825895 - RNA, 19 nt, Artificial Sequence
  Description of Artificial Sequence: Synthetic oligonucleotide
ucgggaacugccccaugcc

SEQ ID NO: 825896 - RNA, 19 nt, Artificial Sequence
  Description of Artificial Sequence: Synthetic oligonucleotide
gcuugugcgagguuggcgc

SEQ ID NO: 825897 - RNA, 19 nt, Artificial Sequence
  Description of Artificial Sequence: Synthetic oligonucleotide
cucgcuugugcgagguugg

SEQ ID NO: 825898 - RNA, 19 nt, Artificial Sequence
  Description of Artificial Sequence: Synthetic oligonucleotide
auagagcggcagccgaggg

SEQ ID NO: 825899 - RNA, 19 nt, Artificial Sequence
  Description of Artificial Sequence: Synthetic oligonucleotide
ggggugaugguugaaauac

SEQ ID NO: 825900 - RNA, 19 nt, Artificial Sequence
  Description of Artificial Sequence: Synthetic oligonucleotide
cacaccgaagaaguugggg

SEQ ID NO: 825901 - RNA, 19 nt, Artificial Sequence
  Description of Artificial Sequence: Synthetic oligonucleotide
cacacccuauuauugucug

SEQ ID NO: 825902 - RNA, 19 nt, Artificial Sequence
  Description of Artificial Sequence: Synthetic oligonucleotide
ugcgucuaagggaauguuu

SEQ ID NO: 825903 - RNA, 19 nt, Artificial Sequence
  Description of Artificial Sequence: Synthetic oligonucleotide
gucuaugacauugggcggc

SEQ ID NO: 825904 - RNA, 19 nt, Artificial Sequence
  Description of Artificial Sequence: Synthetic oligonucleotide
cucgggaacugccccaugc

SEQ ID NO: 825905 - RNA, 19 nt, Artificial Sequence
  Description of Artificial Sequence: Synthetic oligonucleotide
ugauuucuuucgcccgccc

SEQ ID NO: 825906 - RNA, 19 nt, Artificial Sequence
  Description of Artificial Sequence: Synthetic oligonucleotide
uugaugcgguccaaaccca

SEQ ID NO: 825907 - RNA, 19 nt, Artificial Sequence
  Description of Artificial Sequence: Synthetic oligonucleotide
gcucguggcauucauguug

SEQ ID NO: 825908 - RNA, 19 nt, Artificial Sequence
  Description of Artificial Sequence: Synthetic oligonucleotide
ugcuccgaacaccgaaggc

SEQ ID NO: 825909 - RNA, 19 nt, Artificial Sequence
  Description of Artificial Sequence: Synthetic oligonucleotide
guaucuuuucauguacuga

SEQ ID NO: 825910 - RNA, 19 nt, Artificial Sequence
  Description of Artificial Sequence: Synthetic oligonucleotide
uuugcgauuucugcuccga

SEQ ID NO: 825911 - RNA, 19 nt, Artificial Sequence
  Description of Artificial Sequence: Synthetic oligonucleotide
cauucauguugcccgcgcc

SEQ ID NO: 825912 - RNA, 19 nt, Artificial Sequence
  Description of Artificial Sequence: Synthetic oligonucleotide
gaaguccgucauaaaauca

SEQ ID NO: 825913 - RNA, 19 nt, Artificial Sequence
  Description of Artificial Sequence: Synthetic oligonucleotide
cacgaaguccgucauaaaa

SEQ ID NO: 825914 - RNA, 19 nt, Artificial Sequence
  Description of Artificial Sequence: Synthetic oligonucleotide
cuagauauuuuaacuacau

SEQ ID NO: 825915 - RNA, 19 nt, Artificial Sequence
  Description of Artificial Sequence: Synthetic oligonucleotide
cauagagcggcagccgagg

SEQ ID NO: 825916 - RNA, 19 nt, Artificial Sequence
  Description of Artificial Sequence: Synthetic oligonucleotide
cucaccgcuccgcaggacc

SEQ ID NO: 825917 - RNA, 19 nt, Artificial Sequence
  Description of Artificial Sequence: Synthetic oligonucleotide
acgaaguccgucauaaaau

SEQ ID NO: 825918 - RNA, 19 nt, Artificial Sequence
  Description of Artificial Sequence: Synthetic oligonucleotide
cugcuccgaacaccgaagg

SEQ ID NO: 825919 - RNA, 19 nt, Artificial Sequence
  Description of Artificial Sequence: Synthetic oligonucleotide
acucguuuuggcccagcca

SEQ ID NO: 825920 - RNA, 19 nt, Artificial Sequence
  Description of Artificial Sequence: Synthetic oligonucleotide
gaggugaaugucaaggcua

SEQ ID NO: 825921 - RNA, 19 nt, Artificial Sequence
  Description of Artificial Sequence: Synthetic oligonucleotide
caaauccggcauguagugg

SEQ ID NO: 825922 - RNA, 19 nt, Artificial Sequence
  Description of Artificial Sequence: Synthetic oligonucleotide
agugagauacugcgucuaa

SEQ ID NO: 825923 - RNA, 19 nt, Artificial Sequence
  Description of Artificial Sequence: Synthetic oligonucleotide
auauggucugccauuucca

SEQ ID NO: 825924 - RNA, 19 nt, Artificial Sequence
  Description of Artificial Sequence: Synthetic oligonucleotide
uccggcauguagugguugu

SEQ ID NO: 825925 - RNA, 19 nt, Artificial Sequence
  Description of Artificial Sequence: Synthetic oligonucleotide
gacgacauuccacacccua

SEQ ID NO: 825926 - RNA, 19 nt, Artificial Sequence
  Description of Artificial Sequence: Synthetic oligonucleotide
ucuaugacauugggcggca

SEQ ID NO: 825927 - RNA, 19 nt, Artificial Sequence
  Description of Artificial Sequence: Synthetic oligonucleotide
uuucuuucgcccgcccgcc

SEQ ID NO: 825928 - RNA, 19 nt, Artificial Sequence
  Description of Artificial Sequence: Synthetic oligonucleotide
cuugugcgagguuggcgcc

SEQ ID NO: 825929 - RNA, 19 nt, Artificial Sequence
  Description of Artificial Sequence: Synthetic oligonucleotide
guaugacuuccugauccag

SEQ ID NO: 825930 - RNA, 19 nt, Artificial Sequence
  Description of Artificial Sequence: Synthetic oligonucleotide
aagugagauacugcgucua

SEQ ID NO: 825931 - RNA, 19 nt, Artificial Sequence
  Description of Artificial Sequence: Synthetic oligonucleotide
uuauugacauuggcaaauu

SEQ ID NO: 825932 - RNA, 19 nt, Artificial Sequence
  Description of Artificial Sequence: Synthetic oligonucleotide
gcgauuucugcuccgaaca

SEQ ID NO: 825933 - RNA, 19 nt, Artificial Sequence
  Description of Artificial Sequence: Synthetic oligonucleotide
gacgugagccaccgaggcc

SEQ ID NO: 825934 - RNA, 19 nt, Artificial Sequence
  Description of Artificial Sequence: Synthetic oligonucleotide
uguuugccacugacgacau

SEQ ID NO: 825935 - RNA, 19 nt, Artificial Sequence
  Description of Artificial Sequence: Synthetic oligonucleotide
gcgucuaagggaauguuug

SEQ ID NO: 825936 - RNA, 19 nt, Artificial Sequence
  Description of Artificial Sequence: Synthetic oligonucleotide
agcggggugcaaauccggc

SEQ ID NO: 825937 - RNA, 19 nt, Artificial Sequence
  Description of Artificial Sequence: Synthetic oligonucleotide
uucuuucgcccgcccgccg

SEQ ID NO: 825938 - RNA, 19 nt, Artificial Sequence
  Description of Artificial Sequence: Synthetic oligonucleotide
aaagaccaaguuagcuaga

SEQ ID NO: 825939 - RNA, 19 nt, Artificial Sequence
  Description of Artificial Sequence: Synthetic oligonucleotide
guuaaccgagucaacagcu

SEQ ID NO: 825940 - RNA, 19 nt, Artificial Sequence
  Description of Artificial Sequence: Synthetic oligonucleotide
ugugcucgcccaugagggc

SEQ ID NO: 825941 - RNA, 19 nt, Artificial Sequence
  Description of Artificial Sequence: Synthetic oligonucleotide
agcccguuggugccgucgg

SEQ ID NO: 825942 - RNA, 19 nt, Artificial Sequence
  Description of Artificial Sequence: Synthetic oligonucleotide
ugcgguccaaacccauuuc

SEQ ID NO: 825943 - RNA, 19 nt, Artificial Sequence
  Description of Artificial Sequence: Synthetic oligonucleotide
guaugugcucgcccaugag

SEQ ID NO: 825944 - RNA, 19 nt, Artificial Sequence
  Description of Artificial Sequence: Synthetic oligonucleotide
ucguuuuggcccagccaga

SEQ ID NO: 825945 - RNA, 19 nt, Artificial Sequence
  Description of Artificial Sequence: Synthetic oligonucleotide
ugaugcgguccaaacccau

SEQ ID NO: 825946 - RNA, 19 nt, Artificial Sequence
  Description of Artificial Sequence: Synthetic oligonucleotide
ugcagccaacaaaugcaau

SEQ ID NO: 825947 - RNA, 19 nt, Artificial Sequence
  Description of Artificial Sequence: Synthetic oligonucleotide
gcagauugcgagccguucc

SEQ ID NO: 825948 - RNA, 19 nt, Artificial Sequence
  Description of Artificial Sequence: Synthetic oligonucleotide
gaaaagugagauacugcgu

SEQ ID NO: 825949 - RNA, 19 nt, Artificial Sequence
  Description of Artificial Sequence: Synthetic oligonucleotide
augcgguccaaacccauuu

SEQ ID NO: 825950 - RNA, 19 nt, Artificial Sequence
  Description of Artificial Sequence: Synthetic oligonucleotide
uugugcgagguuggcgccg

SEQ ID NO: 825951 - RNA, 19 nt, Artificial Sequence
  Description of Artificial Sequence: Synthetic oligonucleotide
acgguuuggcccucaucug

SEQ ID NO: 825952 - RNA, 19 nt, Artificial Sequence
  Description of Artificial Sequence: Synthetic oligonucleotide
aggaccggcucagcaacac

SEQ ID NO: 825953 - RNA, 19 nt, Artificial Sequence
  Description of Artificial Sequence: Synthetic oligonucleotide
agucuguacucaaaugcau

SEQ ID NO: 825954 - RNA, 19 nt, Artificial Sequence
  Description of Artificial Sequence: Synthetic oligonucleotide
auugcgagccguucccuuu

SEQ ID NO: 825955 - RNA, 19 nt, Artificial Sequence
  Description of Artificial Sequence: Synthetic oligonucleotide
aguguaugugcucgcccau

SEQ ID NO: 825956 - RNA, 19 nt, Artificial Sequence
  Description of Artificial Sequence: Synthetic oligonucleotide
agcauugccgcggggacgu

SEQ ID NO: 825957 - RNA, 19 nt, Artificial Sequence
  Description of Artificial Sequence: Synthetic oligonucleotide
uguugcccgcgccguagug

SEQ ID NO: 825958 - RNA, 19 nt, Artificial Sequence
  Description of Artificial Sequence: Synthetic oligonucleotide
cuauuauugucuguacaua

SEQ ID NO: 825959 - RNA, 19 nt, Artificial Sequence
  Description of Artificial Sequence: Synthetic oligonucleotide
acacccuauuauugucugu

SEQ ID NO: 825960 - RNA, 19 nt, Artificial Sequence
  Description of Artificial Sequence: Synthetic oligonucleotide
gcuagauauuuuaacuaca

SEQ ID NO: 825961 - RNA, 19 nt, Artificial Sequence
  Description of Artificial Sequence: Synthetic oligonucleotide
acuacauaagggaggugaa

SEQ ID NO: 825962 - RNA, 19 nt, Artificial Sequence
  Description of Artificial Sequence: Synthetic oligonucleotide
cagcggggugcaaauccgg

SEQ ID NO: 825963 - RNA, 19 nt, Artificial Sequence
  Description of Artificial Sequence: Synthetic oligonucleotide
cauguugcccgcgccguag

SEQ ID NO: 825964 - RNA, 19 nt, Artificial Sequence
  Description of Artificial Sequence: Synthetic oligonucleotide
gaaugcagcgcagucauuu

SEQ ID NO: 825965 - RNA, 19 nt, Artificial Sequence
  Description of Artificial Sequence: Synthetic oligonucleotide
guuuauaguuuacuuuguu

SEQ ID NO: 825966 - RNA, 19 nt, Artificial Sequence
  Description of Artificial Sequence: Synthetic oligonucleotide
aagugcugguuugucccgu

SEQ ID NO: 825967 - RNA, 19 nt, Artificial Sequence
  Description of Artificial Sequence: Synthetic oligonucleotide
ggagggugauuucuuucgc

SEQ ID NO: 825968 - RNA, 19 nt, Artificial Sequence
  Description of Artificial Sequence: Synthetic oligonucleotide
gaugguugaaauacugguu

SEQ ID NO: 825969 - RNA, 19 nt, Artificial Sequence
  Description of Artificial Sequence: Synthetic oligonucleotide
auauaacuauuagcacagu

SEQ ID NO: 825970 - RNA, 19 nt, Artificial Sequence
  Description of Artificial Sequence: Synthetic oligonucleotide
agaccaaguuagcuagaua

SEQ ID NO: 825971 - RNA, 19 nt, Artificial Sequence
  Description of Artificial Sequence: Synthetic oligonucleotide
agcgcccgugguucauggc

SEQ ID NO: 825972 - RNA, 19 nt, Artificial Sequence
  Description of Artificial Sequence: Synthetic oligonucleotide
cacauagagcggcagccga

SEQ ID NO: 825973 - RNA, 19 nt, Artificial Sequence
  Description of Artificial Sequence: Synthetic oligonucleotide
gugauuucuuucgcccgcc

SEQ ID NO: 825974 - RNA, 19 nt, Artificial Sequence
  Description of Artificial Sequence: Synthetic oligonucleotide
ugaagcgagauggcaguuu

SEQ ID NO: 825975 - RNA, 19 nt, Artificial Sequence
  Description of Artificial Sequence: Synthetic oligonucleotide
cauugggcggcagcauugc

SEQ ID NO: 825976 - RNA, 19 nt, Artificial Sequence
  Description of Artificial Sequence: Synthetic oligonucleotide
uaacuacauaagggaggug

SEQ ID NO: 825977 - RNA, 19 nt, Artificial Sequence
  Description of Artificial Sequence: Synthetic oligonucleotide
guuggcgccgaggucuugc

SEQ ID NO: 825978 - RNA, 19 nt, Artificial Sequence
  Description of Artificial Sequence: Synthetic oligonucleotide
uuccgucuuugcgauuucu

SEQ ID NO: 825979 - RNA, 19 nt, Artificial Sequence
  Description of Artificial Sequence: Synthetic oligonucleotide
ugcgcucgcuugugcgagg

SEQ ID NO: 825980 - RNA, 19 nt, Artificial Sequence
  Description of Artificial Sequence: Synthetic oligonucleotide
guaggggugaugguugaaa

SEQ ID NO: 825981 - RNA, 19 nt, Artificial Sequence
  Description of Artificial Sequence: Synthetic oligonucleotide
gcauucauguugcccgcgc

SEQ ID NO: 825982 - RNA, 19 nt, Artificial Sequence
  Description of Artificial Sequence: Synthetic oligonucleotide
ucccguucaucugguggcc

SEQ ID NO: 825983 - RNA, 19 nt, Artificial Sequence
  Description of Artificial Sequence: Synthetic oligonucleotide
gcucgucggguccaggacc

SEQ ID NO: 825984 - RNA, 19 nt, Artificial Sequence
  Description of Artificial Sequence: Synthetic oligonucleotide
ccuauuauugucuguacau

SEQ ID NO: 825985 - RNA, 19 nt, Artificial Sequence
  Description of Artificial Sequence: Synthetic oligonucleotide
uugcccgcgccguagugua

SEQ ID NO: 825986 - RNA, 19 nt, Artificial Sequence
  Description of Artificial Sequence: Synthetic oligonucleotide
ucggaagugcugguuuguc

SEQ ID NO: 825987 - RNA, 19 nt, Artificial Sequence
  Description of Artificial Sequence: Synthetic oligonucleotide
uugcgagccguucccuuuu

SEQ ID NO: 825988 - RNA, 19 nt, Artificial Sequence
  Description of Artificial Sequence: Synthetic oligonucleotide
guguaugugcucgcccaug

SEQ ID NO: 825989 - RNA, 19 nt, Artificial Sequence
  Description of Artificial Sequence: Synthetic oligonucleotide
uugucccguucaucuggug

SEQ ID NO: 825990 - RNA, 19 nt, Artificial Sequence
  Description of Artificial Sequence: Synthetic oligonucleotide
gagggcguugaaggcgugc

SEQ ID NO: 825991 - RNA, 19 nt, Artificial Sequence
  Description of Artificial Sequence: Synthetic oligonucleotide
gcucgcuugugcgagguug

SEQ ID NO: 825992 - RNA, 19 nt, Artificial Sequence
  Description of Artificial Sequence: Synthetic oligonucleotide
augcagccaacaaaugcaa

SEQ ID NO: 825993 - RNA, 19 nt, Artificial Sequence
  Description of Artificial Sequence: Synthetic oligonucleotide
ggagacagccaacuuuaaa

SEQ ID NO: 825994 - RNA, 19 nt, Artificial Sequence
  Description of Artificial Sequence: Synthetic oligonucleotide
ugcccucaccgcuccgcag

SEQ ID NO: 825995 - RNA, 19 nt, Artificial Sequence
  Description of Artificial Sequence: Synthetic oligonucleotide
gcaacacauagagcggcag

SEQ ID NO: 825996 - RNA, 19 nt, Artificial Sequence
  Description of Artificial Sequence: Synthetic oligonucleotide
gcgcccgugguucauggcc

SEQ ID NO: 825997 - RNA, 19 nt, Artificial Sequence
  Description of Artificial Sequence: Synthetic oligonucleotide
aagcgagauggcaguuugu

SEQ ID NO: 825998 - RNA, 19 nt, Artificial Sequence
  Description of Artificial Sequence: Synthetic oligonucleotide
gugcaguaauaucugcccu

SEQ ID NO: 825999 - RNA, 19 nt, Artificial Sequence
  Description of Artificial Sequence: Synthetic oligonucleotide
agaacgguuuggcccucau

SEQ ID NO: 826000 - RNA, 19 nt, Artificial Sequence
  Description of Artificial Sequence: Synthetic oligonucleotide
gaagcgcccgugguucaug

SEQ ID NO: 826001 - RNA, 19 nt, Artificial Sequence
  Description of Artificial Sequence: Synthetic oligonucleotide
cuuucgcccgcccgccgag

SEQ ID NO: 826002 - RNA, 19 nt, Artificial Sequence
  Description of Artificial Sequence: Synthetic oligonucleotide
gguugcaaucucggaagug

SEQ ID NO: 826003 - RNA, 19 nt, Artificial Sequence
  Description of Artificial Sequence: Synthetic oligonucleotide
gaacaccgaaggcgggcuc

SEQ ID NO: 826004 - RNA, 19 nt, Artificial Sequence
  Description of Artificial Sequence: Synthetic oligonucleotide
agauugcgagccguucccu

SEQ ID NO: 826005 - RNA, 19 nt, Artificial Sequence
  Description of Artificial Sequence: Synthetic oligonucleotide
ggggcccaugaacugggag

SEQ ID NO: 826006 - RNA, 19 nt, Artificial Sequence
  Description of Artificial Sequence: Synthetic oligonucleotide
gcagcggggugcaaauccg

SEQ ID NO: 826007 - RNA, 19 nt, Artificial Sequence
  Description of Artificial Sequence: Synthetic oligonucleotide
ggggagggugauuucuuuc

SEQ ID NO: 826008 - RNA, 19 nt, Artificial Sequence
  Description of Artificial Sequence: Synthetic oligonucleotide
ucguggcauucauguugcc

SEQ ID NO: 826009 - RNA, 19 nt, Artificial Sequence
  Description of Artificial Sequence: Synthetic oligonucleotide
auccggcauguagugguug

SEQ ID NO: 826010 - RNA, 19 nt, Artificial Sequence
  Description of Artificial Sequence: Synthetic oligonucleotide
cagccgaggggcuguggug

SEQ ID NO: 826011 - RNA, 19 nt, Artificial Sequence
  Description of Artificial Sequence: Synthetic oligonucleotide
guggugcgcucgcuugugc

SEQ ID NO: 826012 - RNA, 19 nt, Artificial Sequence
  Description of Artificial Sequence: Synthetic oligonucleotide
aauccggcauguagugguu

SEQ ID NO: 826013 - RNA, 19 nt, Artificial Sequence
  Description of Artificial Sequence: Synthetic oligonucleotide
cagcccguuggugccgucg

SEQ ID NO: 826014 - RNA, 19 nt, Artificial Sequence
  Description of Artificial Sequence: Synthetic oligonucleotide
auguugcccgcgccguagu

SEQ ID NO: 826015 - RNA, 19 nt, Artificial Sequence
  Description of Artificial Sequence: Synthetic oligonucleotide
ugccgcucguggcauucau

SEQ ID NO: 826016 - RNA, 19 nt, Artificial Sequence
  Description of Artificial Sequence: Synthetic oligonucleotide
ugcgagccguucccuuuuc

SEQ ID NO: 826017 - RNA, 19 nt, Artificial Sequence
  Description of Artificial Sequence: Synthetic oligonucleotide
uuucgcccgcccgccgagg

SEQ ID NO: 826018 - RNA, 19 nt, Artificial Sequence
  Description of Artificial Sequence: Synthetic oligonucleotide
gcgugccugaugccgcucg

SEQ ID NO: 826019 - RNA, 19 nt, Artificial Sequence
  Description of Artificial Sequence: Synthetic oligonucleotide
cuaugacauugggcggcag

SEQ ID NO: 826020 - RNA, 19 nt, Artificial Sequence
  Description of Artificial Sequence: Synthetic oligonucleotide
uggcgugccugaugccgcu

SEQ ID NO: 826021 - RNA, 19 nt, Artificial Sequence
  Description of Artificial Sequence: Synthetic oligonucleotide
caguugagcacuggagaaa

SEQ ID NO: 826022 - RNA, 19 nt, Artificial Sequence
  Description of Artificial Sequence: Synthetic oligonucleotide
ggggugcaaauccggcaug

SEQ ID NO: 826023 - RNA, 19 nt, Artificial Sequence
  Description of Artificial Sequence: Synthetic oligonucleotide
uucuaucacuaaggacaua

SEQ ID NO: 826024 - RNA, 19 nt, Artificial Sequence
  Description of Artificial Sequence: Synthetic oligonucleotide
ggugcgcucgcuugugcga

SEQ ID NO: 826025 - RNA, 19 nt, Artificial Sequence
  Description of Artificial Sequence: Synthetic oligonucleotide
gauugcgagccguucccuu

SEQ ID NO: 826026 - RNA, 19 nt, Artificial Sequence
  Description of Artificial Sequence: Synthetic oligonucleotide
ggcaguuugugcaguaaua

SEQ ID NO: 826027 - RNA, 19 nt, Artificial Sequence
  Description of Artificial Sequence: Synthetic oligonucleotide
ccgagguuaaccgagucaa

SEQ ID NO: 826028 - RNA, 19 nt, Artificial Sequence
  Description of Artificial Sequence: Synthetic oligonucleotide
gucuaagggaauguuuguu

SEQ ID NO: 826029 - RNA, 19 nt, Artificial Sequence
  Description of Artificial Sequence: Synthetic oligonucleotide
ccgagucaacagcugacuc

SEQ ID NO: 826030 - RNA, 19 nt, Artificial Sequence
  Description of Artificial Sequence: Synthetic oligonucleotide
cuguuuaaucuuccaguuu

SEQ ID NO: 826031 - RNA, 19 nt, Artificial Sequence
  Description of Artificial Sequence: Synthetic oligonucleotide
cucccuggcuggccaccgg

SEQ ID NO: 826032 - RNA, 19 nt, Artificial Sequence
  Description of Artificial Sequence: Synthetic oligonucleotide
augaagcgagauggcaguu

SEQ ID NO: 826033 - RNA, 19 nt, Artificial Sequence
  Description of Artificial Sequence: Synthetic oligonucleotide
gcgcagucauuugaaacca

SEQ ID NO: 826034 - RNA, 19 nt, Artificial Sequence
  Description of Artificial Sequence: Synthetic oligonucleotide
cguaguguaugugcucgcc

SEQ ID NO: 826035 - RNA, 19 nt, Artificial Sequence
  Description of Artificial Sequence: Synthetic oligonucleotide
cuguacucaaaugcauagu

SEQ ID NO: 826036 - RNA, 19 nt, Artificial Sequence
  Description of Artificial Sequence: Synthetic oligonucleotide
gcggcagcauugccgcggg

SEQ ID NO: 826037 - RNA, 19 nt, Artificial Sequence
  Description of Artificial Sequence: Synthetic oligonucleotide
cagaguucgggcagcuccu

SEQ ID NO: 826038 - RNA, 19 nt, Artificial Sequence
  Description of Artificial Sequence: Synthetic oligonucleotide
gugccugaugccgcucgug

SEQ ID NO: 826039 - RNA, 19 nt, Artificial Sequence
  Description of Artificial Sequence: Synthetic oligonucleotide
ucgucggguccaggaccgg

SEQ ID NO: 826040 - RNA, 19 nt, Artificial Sequence
  Description of Artificial Sequence: Synthetic oligonucleotide
ccguaguguaugugcucgc

SEQ ID NO: 826041 - RNA, 19 nt, Artificial Sequence
  Description of Artificial Sequence: Synthetic oligonucleotide
gccgcugugcuugggguug

SEQ ID NO: 826042 - RNA, 19 nt, Artificial Sequence
  Description of Artificial Sequence: Synthetic oligonucleotide
cgauuucugcuccgaacac

SEQ ID NO: 826043 - RNA, 19 nt, Artificial Sequence
  Description of Artificial Sequence: Synthetic oligonucleotide
cccguuggugccgucgggg

SEQ ID NO: 826044 - RNA, 19 nt, Artificial Sequence
  Description of Artificial Sequence: Synthetic oligonucleotide
cuuccugauccagaacggu

SEQ ID NO: 826045 - RNA, 19 nt, Artificial Sequence
  Description of Artificial Sequence: Synthetic oligonucleotide
ccgaacaccgaaggcgggc

SEQ ID NO: 826046 - RNA, 19 nt, Artificial Sequence
  Description of Artificial Sequence: Synthetic oligonucleotide
ggcagauugcgagccguuc

SEQ ID NO: 826047 - RNA, 19 nt, Artificial Sequence
  Description of Artificial Sequence: Synthetic oligonucleotide
acaccgaaggcgggcucgu

SEQ ID NO: 826048 - RNA, 19 nt, Artificial Sequence
  Description of Artificial Sequence: Synthetic oligonucleotide
ccccaugcccaugcggugg

SEQ ID NO: 826049 - RNA, 19 nt, Artificial Sequence
  Description of Artificial Sequence: Synthetic oligonucleotide
gcgguccaaacccauuucu

SEQ ID NO: 826050 - RNA, 19 nt, Artificial Sequence
  Description of Artificial Sequence: Synthetic oligonucleotide
gccgaggggcuguggugcg

SEQ ID NO: 826051 - RNA, 19 nt, Artificial Sequence
  Description of Artificial Sequence: Synthetic oligonucleotide
ugaugccgcucguggcauu

SEQ ID NO: 826052 - RNA, 19 nt, Artificial Sequence
  Description of Artificial Sequence: Synthetic oligonucleotide
gcagcgcagucauuugaaa

SEQ ID NO: 826053 - RNA, 19 nt, Artificial Sequence
  Description of Artificial Sequence: Synthetic oligonucleotide
gggcucgucggguccagga

SEQ ID NO: 826054 - RNA, 19 nt, Artificial Sequence
  Description of Artificial Sequence: Synthetic oligonucleotide
ggaggggagacagccaacu

SEQ ID NO: 826055 - RNA, 19 nt, Artificial Sequence
  Description of Artificial Sequence: Synthetic oligonucleotide
ccaaguuagcuagauauuu

SEQ ID NO: 826056 - RNA, 19 nt, Artificial Sequence
  Description of Artificial Sequence: Synthetic oligonucleotide
cgcccgccgagguuaaccg

SEQ ID NO: 826057 - RNA, 19 nt, Artificial Sequence
  Description of Artificial Sequence: Synthetic oligonucleotide
cauugccgcggggacguga

SEQ ID NO: 826058 - RNA, 19 nt, Artificial Sequence
  Description of Artificial Sequence: Synthetic oligonucleotide
gaugcgguccaaacccauu

SEQ ID NO: 826059 - RNA, 19 nt, Artificial Sequence
  Description of Artificial Sequence: Synthetic oligonucleotide
cugcccucaccgcuccgca

SEQ ID NO: 826060 - RNA, 19 nt, Artificial Sequence
  Description of Artificial Sequence: Synthetic oligonucleotide
guugcccgcgccguagugu

SEQ ID NO: 826061 - RNA, 19 nt, Artificial Sequence
  Description of Artificial Sequence: Synthetic oligonucleotide
cccagccagaguucgggca

SEQ ID NO: 826062 - RNA, 19 nt, Artificial Sequence
  Description of Artificial Sequence: Synthetic oligonucleotide
ggugaaugucaaggcuaca

SEQ ID NO: 826063 - RNA, 19 nt, Artificial Sequence
  Description of Artificial Sequence: Synthetic oligonucleotide
caccgcuccgcaggaccgc

SEQ ID NO: 826064 - RNA, 19 nt, Artificial Sequence
  Description of Artificial Sequence: Synthetic oligonucleotide
ccgcucguggcauucaugu

SEQ ID NO: 826065 - RNA, 19 nt, Artificial Sequence
  Description of Artificial Sequence: Synthetic oligonucleotide
cgcgccacugccgccagcg

SEQ ID NO: 826066 - RNA, 19 nt, Artificial Sequence
  Description of Artificial Sequence: Synthetic oligonucleotide
gccccaugcccaugcggug

SEQ ID NO: 826067 - RNA, 19 nt, Artificial Sequence
  Description of Artificial Sequence: Synthetic oligonucleotide
cugcagcggggugcaaauc

SEQ ID NO: 826068 - RNA, 19 nt, Artificial Sequence
  Description of Artificial Sequence: Synthetic oligonucleotide
cgucuuugcgauuucugcu

SEQ ID NO: 826069 - RNA, 19 nt, Artificial Sequence
  Description of Artificial Sequence: Synthetic oligonucleotide
gcccguuggugccgucggg

SEQ ID NO: 826070 - RNA, 19 nt, Artificial Sequence
  Description of Artificial Sequence: Synthetic oligonucleotide
cgcuugugcgagguuggcg

SEQ ID NO: 826071 - RNA, 19 nt, Artificial Sequence
  Description of Artificial Sequence: Synthetic oligonucleotide
ggguugcaaucucggaagu

SEQ ID NO: 826072 - RNA, 19 nt, Artificial Sequence
  Description of Artificial Sequence: Synthetic oligonucleotide
augccgcucguggcauuca

SEQ ID NO: 826073 - RNA, 19 nt, Artificial Sequence
  Description of Artificial Sequence: Synthetic oligonucleotide
gcaguuugccaagauuaau

SEQ ID NO: 826074 - RNA, 19 nt, Artificial Sequence
  Description of Artificial Sequence: Synthetic oligonucleotide
cucggaagugcugguuugu

SEQ ID NO: 826075 - RNA, 19 nt, Artificial Sequence
  Description of Artificial Sequence: Synthetic oligonucleotide
ccgcccgccgagguuaacc

SEQ ID NO: 826076 - RNA, 19 nt, Artificial Sequence
  Description of Artificial Sequence: Synthetic oligonucleotide
auacugcgucuaagggaau

SEQ ID NO: 826077 - RNA, 19 nt, Artificial Sequence
  Description of Artificial Sequence: Synthetic oligonucleotide
gggaagcgcccgugguuca

SEQ ID NO: 826078 - RNA, 19 nt, Artificial Sequence
  Description of Artificial Sequence: Synthetic oligonucleotide
gcccgcgccguaguguaug

SEQ ID NO: 826079 - RNA, 19 nt, Artificial Sequence
  Description of Artificial Sequence: Synthetic oligonucleotide
ucgcccgcccgccgagguu

SEQ ID NO: 826080 - RNA, 19 nt, Artificial Sequence
  Description of Artificial Sequence: Synthetic oligonucleotide
gggugcaaauccggcaugu

SEQ ID NO: 826081 - RNA, 19 nt, Artificial Sequence
  Description of Artificial Sequence: Synthetic oligonucleotide
ggugcaaauccggcaugua

SEQ ID NO: 826082 - RNA, 19 nt, Artificial Sequence
  Description of Artificial Sequence: Synthetic oligonucleotide
cagaacgguuuggcccuca

SEQ ID NO: 826083 - RNA, 19 nt, Artificial Sequence
  Description of Artificial Sequence: Synthetic oligonucleotide
ccggcauguagugguugug

SEQ ID NO: 826084 - RNA, 19 nt, Artificial Sequence
  Description of Artificial Sequence: Synthetic oligonucleotide
gcucgggaacugccccaug

SEQ ID NO: 826085 - RNA, 19 nt, Artificial Sequence
  Description of Artificial Sequence: Synthetic oligonucleotide
ccguuggugccgucgggga

SEQ ID NO: 826086 - RNA, 19 nt, Artificial Sequence
  Description of Artificial Sequence: Synthetic oligonucleotide
cccaugaacugggaguugu

SEQ ID NO: 826087 - RNA, 19 nt, Artificial Sequence
  Description of Artificial Sequence: Synthetic oligonucleotide
cgccguaguguaugugcuc

SEQ ID NO: 826088 - RNA, 19 nt, Artificial Sequence
  Description of Artificial Sequence: Synthetic oligonucleotide
agguuggcgccgaggucuu

SEQ ID NO: 826089 - RNA, 19 nt, Artificial Sequence
  Description of Artificial Sequence: Synthetic oligonucleotide
cgucuaagggaauguuugu

SEQ ID NO: 826090 - RNA, 19 nt, Artificial Sequence
  Description of Artificial Sequence: Synthetic oligonucleotide
gcccgccgagguuaaccga

SEQ ID NO: 826091 - RNA, 19 nt, Artificial Sequence
  Description of Artificial Sequence: Synthetic oligonucleotide
cugcgucuaagggaauguu

SEQ ID NO: 826092 - RNA, 19 nt, Artificial Sequence
  Description of Artificial Sequence: Synthetic oligonucleotide
gcgccguaguguaugugcu

SEQ ID NO: 826093 - RNA, 19 nt, Artificial Sequence
  Description of Artificial Sequence: Synthetic oligonucleotide
cgccgagguuaaccgaguc

SEQ ID NO: 826094 - RNA, 19 nt, Artificial Sequence
  Description of Artificial Sequence: Synthetic oligonucleotide
gguuggcgccgaggucuug

SEQ ID NO: 826095 - RNA, 19 nt, Artificial Sequence
  Description of Artificial Sequence: Synthetic oligonucleotide
ggcgggcucgucgggucca

SEQ ID NO: 826096 - RNA, 19 nt, Artificial Sequence
  Description of Artificial Sequence: Synthetic oligonucleotide
gcgagccguucccuuuucu

SEQ ID NO: 826097 - RNA, 19 nt, Artificial Sequence
  Description of Artificial Sequence: Synthetic oligonucleotide
cccucaccgcuccgcagga

SEQ ID NO: 826098 - RNA, 19 nt, Artificial Sequence
  Description of Artificial Sequence: Synthetic oligonucleotide
ggccggcaugguguugcca

SEQ ID NO: 826099 - RNA, 19 nt, Artificial Sequence
  Description of Artificial Sequence: Synthetic oligonucleotide
ccgcggggacgugagccac

SEQ ID NO: 826100 - RNA, 19 nt, Artificial Sequence
  Description of Artificial Sequence: Synthetic oligonucleotide
ggcgugccugaugccgcuc

SEQ ID NO: 826101 - RNA, 19 nt, Artificial Sequence
  Description of Artificial Sequence: Synthetic oligonucleotide
cggggugcaaauccggcau

SEQ ID NO: 826102 - RNA, 19 nt, Artificial Sequence
  Description of Artificial Sequence: Synthetic oligonucleotide
ccagaacgguuuggcccuc

SEQ ID NO: 826103 - RNA, 19 nt, Artificial Sequence
  Description of Artificial Sequence: Synthetic oligonucleotide
gcgggcucgucggguccag

SEQ ID NO: 826104 - RNA, 19 nt, Artificial Sequence
  Description of Artificial Sequence: Synthetic oligonucleotide
ggaagcgcccgugguucau

SEQ ID NO: 826105 - RNA, 19 nt, Artificial Sequence
  Description of Artificial Sequence: Synthetic oligonucleotide
cgaacaccgaaggcgggcu

SEQ ID NO: 826106 - RNA, 19 nt, Artificial Sequence
  Description of Artificial Sequence: Synthetic oligonucleotide
ccgccgcugugcuuggggu

SEQ ID NO: 826107 - RNA, 19 nt, Artificial Sequence
  Description of Artificial Sequence: Synthetic oligonucleotide
gcauugccgcggggacgug

SEQ ID NO: 826108 - RNA, 19 nt, Artificial Sequence
  Description of Artificial Sequence: Synthetic oligonucleotide
gcgcucgcuugugcgaggu

SEQ ID NO: 826109 - RNA, 19 nt, Artificial Sequence
  Description of Artificial Sequence: Synthetic oligonucleotide
gggcagauugcgagccguu

SEQ ID NO: 826110 - RNA, 19 nt, Artificial Sequence
  Description of Artificial Sequence: Synthetic oligonucleotide
ccgccgagguuaaccgagu

SEQ ID NO: 826111 - RNA, 19 nt, Artificial Sequence
  Description of Artificial Sequence: Synthetic oligonucleotide
gccgcccgaggugcugcca

SEQ ID NO: 826112 - RNA, 19 nt, Artificial Sequence
  Description of Artificial Sequence: Synthetic oligonucleotide
cccgcgccguaguguaugu

SEQ ID NO: 826113 - RNA, 19 nt, Artificial Sequence
  Description of Artificial Sequence: Synthetic oligonucleotide
cgcccgaggugcugccaga

SEQ ID NO: 826114 - RNA, 19 nt, Artificial Sequence
  Description of Artificial Sequence: Synthetic oligonucleotide
ccgaggccggcaugguguu

SEQ ID NO: 826115 - RNA, 19 nt, Artificial Sequence
  Description of Artificial Sequence: Synthetic oligonucleotide
cgcccgcccgccgagguua

SEQ ID NO: 826116 - RNA, 19 nt, Artificial Sequence
  Description of Artificial Sequence: Synthetic oligonucleotide
ccgucggggaagcgcccgu

SEQ ID NO: 826117 - RNA, 19 nt, Artificial Sequence
  Description of Artificial Sequence: Synthetic oligonucleotide
cgcucguggcauucauguu

SEQ ID NO: 826118 - RNA, 19 nt, Artificial Sequence
  Description of Artificial Sequence: Synthetic oligonucleotide
gcccgcccgccgagguuaa

SEQ ID NO: 826119 - RNA, 19 nt, Artificial Sequence
  Description of Artificial Sequence: Synthetic oligonucleotide
cggggacgugagccaccga

SEQ ID NO: 826120 - RNA, 19 nt, Artificial Sequence
  Description of Artificial Sequence: Synthetic oligonucleotide
cgcucgcuugugcgagguu

SEQ ID NO: 826121 - RNA, 19 nt, Artificial Sequence
  Description of Artificial Sequence: Synthetic oligonucleotide
auauccuuccaauugaccc

SEQ ID NO: 826122 - RNA, 19 nt, Artificial Sequence
  Description of Artificial Sequence: Synthetic oligonucleotide
aagcuaagaggucagaagg

SEQ ID NO: 826123 - RNA, 19 nt, Artificial Sequence
  Description of Artificial Sequence: Synthetic oligonucleotide
aaguucaacauucuaguag

SEQ ID NO: 826124 - RNA, 19 nt, Artificial Sequence
  Description of Artificial Sequence: Synthetic oligonucleotide
uccuucaagaauaacauug

SEQ ID NO: 826125 - RNA, 19 nt, Artificial Sequence
  Description of Artificial Sequence: Synthetic oligonucleotide
acuaauauguaacauucuc

SEQ ID NO: 826126 - RNA, 19 nt, Artificial Sequence
  Description of Artificial Sequence: Synthetic oligonucleotide
ucaagaauaacauugugaa

SEQ ID NO: 826127 - RNA, 19 nt, Artificial Sequence
  Description of Artificial Sequence: Synthetic oligonucleotide
ugucaaauaaaacugcaca

SEQ ID NO: 826128 - RNA, 19 nt, Artificial Sequence
  Description of Artificial Sequence: Synthetic oligonucleotide
aagauuauucuugugauug

SEQ ID NO: 826129 - RNA, 19 nt, Artificial Sequence
  Description of Artificial Sequence: Synthetic oligonucleotide
ugagaagauaccucaaggg

SEQ ID NO: 826130 - RNA, 19 nt, Artificial Sequence
  Description of Artificial Sequence: Synthetic oligonucleotide
uuauuaguucacuauagug

SEQ ID NO: 826131 - RNA, 19 nt, Artificial Sequence
  Description of Artificial Sequence: Synthetic oligonucleotide
aaagcuaagaggucagaag

SEQ ID NO: 826132 - RNA, 19 nt, Artificial Sequence
  Description of Artificial Sequence: Synthetic oligonucleotide
aaauaaucuagccagcaaa

SEQ ID NO: 826133 - RNA, 19 nt, Artificial Sequence
  Description of Artificial Sequence: Synthetic oligonucleotide
uaaaauuccacaacagaga

SEQ ID NO: 826134 - RNA, 19 nt, Artificial Sequence
  Description of Artificial Sequence: Synthetic oligonucleotide
uauaaggcaauauauguaa

SEQ ID NO: 826135 - RNA, 19 nt, Artificial Sequence
  Description of Artificial Sequence: Synthetic oligonucleotide
uacuauguccaucaaaaca

SEQ ID NO: 826136 - RNA, 19 nt, Artificial Sequence
  Description of Artificial Sequence: Synthetic oligonucleotide
aaaucaacuuucuuguagu

SEQ ID NO: 826137 - RNA, 19 nt, Artificial Sequence
  Description of Artificial Sequence: Synthetic oligonucleotide
aagggauuaagauuauucu

SEQ ID NO: 826138 - RNA, 19 nt, Artificial Sequence
  Description of Artificial Sequence: Synthetic oligonucleotide
acuacagucgaugacaagg

SEQ ID NO: 826139 - RNA, 19 nt, Artificial Sequence
  Description of Artificial Sequence: Synthetic oligonucleotide
uuuuacuuuagacugcggu

SEQ ID NO: 826140 - RNA, 19 nt, Artificial Sequence
  Description of Artificial Sequence: Synthetic oligonucleotide
acauuuaggagucucaaca

SEQ ID NO: 826141 - RNA, 19 nt, Artificial Sequence
  Description of Artificial Sequence: Synthetic oligonucleotide
uaagggauuaagauuauuc

SEQ ID NO: 826142 - RNA, 19 nt, Artificial Sequence
  Description of Artificial Sequence: Synthetic oligonucleotide
aaauugauccuucaagaau

SEQ ID NO: 826143 - RNA, 19 nt, Artificial Sequence
  Description of Artificial Sequence: Synthetic oligonucleotide
aguaugagaagauaccuca

SEQ ID NO: 826144 - RNA, 19 nt, Artificial Sequence
  Description of Artificial Sequence: Synthetic oligonucleotide
  modified_base (2)..(2): a, c, u, g, unknown or other
unugggacagaacucacug

SEQ ID NO: 826145 - RNA, 19 nt, Artificial Sequence
  Description of Artificial Sequence: Synthetic oligonucleotide
ucaacauucuaguagccgc

SEQ ID NO: 826146 - RNA, 19 nt, Artificial Sequence
  Description of Artificial Sequence: Synthetic oligonucleotide
auuaucauuuaauuuguga

SEQ ID NO: 826147 - RNA, 19 nt, Artificial Sequence
  Description of Artificial Sequence: Synthetic oligonucleotide
auuaguucacuauagugcu

SEQ ID NO: 826148 - RNA, 19 nt, Artificial Sequence
  Description of Artificial Sequence: Synthetic oligonucleotide
auaauguguuucuuauccc

SEQ ID NO: 826149 - RNA, 19 nt, Artificial Sequence
  Description of Artificial Sequence: Synthetic oligonucleotide
acugccaggacuuuucgac

SEQ ID NO: 826150 - RNA, 19 nt, Artificial Sequence
  Description of Artificial Sequence: Synthetic oligonucleotide
augagaagauaccucaagg

SEQ ID NO: 826151 - RNA, 19 nt, Artificial Sequence
  Description of Artificial Sequence: Synthetic oligonucleotide
ugcucuaccaaacaggauc

SEQ ID NO: 826152 - RNA, 19 nt, Artificial Sequence
  Description of Artificial Sequence: Synthetic oligonucleotide
uuuaauuugugacaagauu

SEQ ID NO: 826153 - RNA, 19 nt, Artificial Sequence
  Description of Artificial Sequence: Synthetic oligonucleotide
uuccguugggguaagauug

SEQ ID NO: 826154 - RNA, 19 nt, Artificial Sequence
  Description of Artificial Sequence: Synthetic oligonucleotide
uaaucuagccagcaaaacu

SEQ ID NO: 826155 - RNA, 19 nt, Artificial Sequence
  Description of Artificial Sequence: Synthetic oligonucleotide
uugugaaauaaucuagcca

SEQ ID NO: 826156 - RNA, 19 nt, Artificial Sequence
  Description of Artificial Sequence: Synthetic oligonucleotide
acacuaauauguaacauuc

SEQ ID NO: 826157 - RNA, 19 nt, Artificial Sequence
  Description of Artificial Sequence: Synthetic oligonucleotide
gagaagaguuuucauaggc

SEQ ID NO: 826158 - RNA, 19 nt, Artificial Sequence
  Description of Artificial Sequence: Synthetic oligonucleotide
uaucccaaguucaacauuc

SEQ ID NO: 826159 - RNA, 19 nt, Artificial Sequence
  Description of Artificial Sequence: Synthetic oligonucleotide
uguagucugaguauccugu

SEQ ID NO: 826160 - RNA, 19 nt, Artificial Sequence
  Description of Artificial Sequence: Synthetic oligonucleotide
ucucaacagacacuggcag

SEQ ID NO: 826161 - RNA, 19 nt, Artificial Sequence
  Description of Artificial Sequence: Synthetic oligonucleotide
auuacuauguccaucaaaa

SEQ ID NO: 826162 - RNA, 19 nt, Artificial Sequence
  Description of Artificial Sequence: Synthetic oligonucleotide
uagacucccggaauggagg

SEQ ID NO: 826163 - RNA, 19 nt, Artificial Sequence
  Description of Artificial Sequence: Synthetic oligonucleotide
ugauuugauguggauaucc

SEQ ID NO: 826164 - RNA, 19 nt, Artificial Sequence
  Description of Artificial Sequence: Synthetic oligonucleotide
ugacgucagauaaaccagg

SEQ ID NO: 826165 - RNA, 19 nt, Artificial Sequence
  Description of Artificial Sequence: Synthetic oligonucleotide
uuauucuugugauuguuuc

SEQ ID NO: 826166 - RNA, 19 nt, Artificial Sequence
  Description of Artificial Sequence: Synthetic oligonucleotide
guaacauucuccaugacuc

SEQ ID NO: 826167 - RNA, 19 nt, Artificial Sequence
  Description of Artificial Sequence: Synthetic oligonucleotide
cacaaaacguucaugaaca

SEQ ID NO: 826168 - RNA, 19 nt, Artificial Sequence
  Description of Artificial Sequence: Synthetic oligonucleotide
ucugauuugaggguuagaa

SEQ ID NO: 826169 - RNA, 19 nt, Artificial Sequence
  Description of Artificial Sequence: Synthetic oligonucleotide
uucaacauucuaguagccg

SEQ ID NO: 826170 - RNA, 19 nt, Artificial Sequence
  Description of Artificial Sequence: Synthetic oligonucleotide
  modified_base (7)..(7): a, c, u, g, unknown or other
gucacunugggacagaacu

SEQ ID NO: 826171 - RNA, 19 nt, Artificial Sequence
  Description of Artificial Sequence: Synthetic oligonucleotide
ucaaaacuacagucgauga

SEQ ID NO: 826172 - RNA, 19 nt, Artificial Sequence
  Description of Artificial Sequence: Synthetic oligonucleotide
ucuaguagccgcacaaaac

SEQ ID NO: 826173 - RNA, 19 nt, Artificial Sequence
  Description of Artificial Sequence: Synthetic oligonucleotide
aaguaugagaagauaccuc

SEQ ID NO: 826174 - RNA, 19 nt, Artificial Sequence
  Description of Artificial Sequence: Synthetic oligonucleotide
gagaagauaccucaaggga

SEQ ID NO: 826175 - RNA, 19 nt, Artificial Sequence
  Description of Artificial Sequence: Synthetic oligonucleotide
uuuacuuuagacugcggua

SEQ ID NO: 826176 - RNA, 19 nt, Artificial Sequence
  Description of Artificial Sequence: Synthetic oligonucleotide
ucauuaagggauuaagauu

SEQ ID NO: 826177 - RNA, 19 nt, Artificial Sequence
  Description of Artificial Sequence: Synthetic oligonucleotide
uuugucgcuuagauauugg

SEQ ID NO: 826178 - RNA, 19 nt, Artificial Sequence
  Description of Artificial Sequence: Synthetic oligonucleotide
uccuuacagaauaaugugu

SEQ ID NO: 826179 - RNA, 19 nt, Artificial Sequence
  Description of Artificial Sequence: Synthetic oligonucleotide
uggauauccuuccaauuga

SEQ ID NO: 826180 - RNA, 19 nt, Artificial Sequence
  Description of Artificial Sequence: Synthetic oligonucleotide
aaggacagaauuacuaugu

SEQ ID NO: 826181 - RNA, 19 nt, Artificial Sequence
  Description of Artificial Sequence: Synthetic oligonucleotide
uaauuugugacaagauuua

SEQ ID NO: 826182 - RNA, 19 nt, Artificial Sequence
  Description of Artificial Sequence: Synthetic oligonucleotide
agaagauaccucaagggag

SEQ ID NO: 826183 - RNA, 19 nt, Artificial Sequence
  Description of Artificial Sequence: Synthetic oligonucleotide
uugucaaauaaaacugcac

SEQ ID NO: 826184 - RNA, 19 nt, Artificial Sequence
  Description of Artificial Sequence: Synthetic oligonucleotide
ucuaaucuuggcuuguguc

SEQ ID NO: 826185 - RNA, 19 nt, Artificial Sequence
  Description of Artificial Sequence: Synthetic oligonucleotide
ugcguuuccugucacuucc

SEQ ID NO: 826186 - RNA, 19 nt, Artificial Sequence
  Description of Artificial Sequence: Synthetic oligonucleotide
auguugucguucuaauuuc

SEQ ID NO: 826187 - RNA, 19 nt, Artificial Sequence
  Description of Artificial Sequence: Synthetic oligonucleotide
aucaaaacuacagucgaug

SEQ ID NO: 826188 - RNA, 19 nt, Artificial Sequence
  Description of Artificial Sequence: Synthetic oligonucleotide
uaggagucucaacagacac

SEQ ID NO: 826189 - RNA, 19 nt, Artificial Sequence
  Description of Artificial Sequence: Synthetic oligonucleotide
aauauguaacauucuccau

SEQ ID NO: 826190 - RNA, 19 nt, Artificial Sequence
  Description of Artificial Sequence: Synthetic oligonucleotide
agucugacgucagauaaac

SEQ ID NO: 826191 - RNA, 19 nt, Artificial Sequence
  Description of Artificial Sequence: Synthetic oligonucleotide
ugaaauaaucuagccagca

SEQ ID NO: 826192 - RNA, 19 nt, Artificial Sequence
  Description of Artificial Sequence: Synthetic oligonucleotide
aaucauaccuuuaagucuu

SEQ ID NO: 826193 - RNA, 19 nt, Artificial Sequence
  Description of Artificial Sequence: Synthetic oligonucleotide
auagcaucguugaaucugc

SEQ ID NO: 826194 - RNA, 19 nt, Artificial Sequence
  Description of Artificial Sequence: Synthetic oligonucleotide
ugucguucuaauuucuuuc

SEQ ID NO: 826195 - RNA, 19 nt, Artificial Sequence
  Description of Artificial Sequence: Synthetic oligonucleotide
uccaccaacccuccaauca

SEQ ID NO: 826196 - RNA, 19 nt, Artificial Sequence
  Description of Artificial Sequence: Synthetic oligonucleotide
ucuuguagucugaguaucc

SEQ ID NO: 826197 - RNA, 19 nt, Artificial Sequence
  Description of Artificial Sequence: Synthetic oligonucleotide
uggacgcuugcuuaaaugu

SEQ ID NO: 826198 - RNA, 19 nt, Artificial Sequence
  Description of Artificial Sequence: Synthetic oligonucleotide
uccacaaggacagaauuac

SEQ ID NO: 826199 - RNA, 19 nt, Artificial Sequence
  Description of Artificial Sequence: Synthetic oligonucleotide
aauaaucuagccagcaaaa

SEQ ID NO: 826200 - RNA, 19 nt, Artificial Sequence
  Description of Artificial Sequence: Synthetic oligonucleotide
acauauaaggcaauauaug

SEQ ID NO: 826201 - RNA, 19 nt, Artificial Sequence
  Description of Artificial Sequence: Synthetic oligonucleotide
auaaucuagccagcaaaac

SEQ ID NO: 826202 - RNA, 19 nt, Artificial Sequence
  Description of Artificial Sequence: Synthetic oligonucleotide
gauaccucaagggaggcac

SEQ ID NO: 826203 - RNA, 19 nt, Artificial Sequence
  Description of Artificial Sequence: Synthetic oligonucleotide
uacagucgaugacaaggcg

SEQ ID NO: 826204 - RNA, 19 nt, Artificial Sequence
  Description of Artificial Sequence: Synthetic oligonucleotide
agagucugacgucagauaa

SEQ ID NO: 826205 - RNA, 19 nt, Artificial Sequence
  Description of Artificial Sequence: Synthetic oligonucleotide
ugcucaauuccaugacugg

SEQ ID NO: 826206 - RNA, 19 nt, Artificial Sequence
  Description of Artificial Sequence: Synthetic oligonucleotide
cugacgucagauaaaccag

SEQ ID NO: 826207 - RNA, 19 nt, Artificial Sequence
  Description of Artificial Sequence: Synthetic oligonucleotide
uauucacauuaaaagcuaa

SEQ ID NO: 826208 - RNA, 19 nt, Artificial Sequence
  Description of Artificial Sequence: Synthetic oligonucleotide
gaauagacucccggaaugg

SEQ ID NO: 826209 - RNA, 19 nt, Artificial Sequence
  Description of Artificial Sequence: Synthetic oligonucleotide
uuaggagucucaacagaca

SEQ ID NO: 826210 - RNA, 19 nt, Artificial Sequence
  Description of Artificial Sequence: Synthetic oligonucleotide
agcauuucagaugacauau

SEQ ID NO: 826211 - RNA, 19 nt, Artificial Sequence
  Description of Artificial Sequence: Synthetic oligonucleotide
uugcuuaaaugugaguccc

SEQ ID NO: 826212 - RNA, 19 nt, Artificial Sequence
  Description of Artificial Sequence: Synthetic oligonucleotide
aacauucuaguagccgcac

SEQ ID NO: 826213 - RNA, 19 nt, Artificial Sequence
  Description of Artificial Sequence: Synthetic oligonucleotide
aggacuuuucgacuguuca

SEQ ID NO: 826214 - RNA, 19 nt, Artificial Sequence
  Description of Artificial Sequence: Synthetic oligonucleotide
augcucgccgguuuucugc

SEQ ID NO: 826215 - RNA, 19 nt, Artificial Sequence
  Description of Artificial Sequence: Synthetic oligonucleotide
acuauagugcucugauuug

SEQ ID NO: 826216 - RNA, 19 nt, Artificial Sequence
  Description of Artificial Sequence: Synthetic oligonucleotide
aagucugcaagagggagcu

SEQ ID NO: 826217 - RNA, 19 nt, Artificial Sequence
  Description of Artificial Sequence: Synthetic oligonucleotide
aggcacacuaauauguaac

SEQ ID NO: 826218 - RNA, 19 nt, Artificial Sequence
  Description of Artificial Sequence: Synthetic oligonucleotide
gggauuaagauuauucuug

SEQ ID NO: 826219 - RNA, 19 nt, Artificial Sequence
  Description of Artificial Sequence: Synthetic oligonucleotide
uaccaaacaggaucagacc

SEQ ID NO: 826220 - RNA, 19 nt, Artificial Sequence
  Description of Artificial Sequence: Synthetic oligonucleotide
ucguugaaucugcuuauga

SEQ ID NO: 826221 - RNA, 19 nt, Artificial Sequence
  Description of Artificial Sequence: Synthetic oligonucleotide
uugucgcuuagauauuggc

SEQ ID NO: 826222 - RNA, 19 nt, Artificial Sequence
  Description of Artificial Sequence: Synthetic oligonucleotide
acaacugcuauuccuuaca

SEQ ID NO: 826223 - RNA, 19 nt, Artificial Sequence
  Description of Artificial Sequence: Synthetic oligonucleotide
uaguucacuauagugcucu

SEQ ID NO: 826224 - RNA, 19 nt, Artificial Sequence
  Description of Artificial Sequence: Synthetic oligonucleotide
aggaaugggcuccacuguc

SEQ ID NO: 826225 - RNA, 19 nt, Artificial Sequence
  Description of Artificial Sequence: Synthetic oligonucleotide
agcuaagaggucagaaggc

SEQ ID NO: 826226 - RNA, 19 nt, Artificial Sequence
  Description of Artificial Sequence: Synthetic oligonucleotide
accggauuccagcugaugu

SEQ ID NO: 826227 - RNA, 19 nt, Artificial Sequence
  Description of Artificial Sequence: Synthetic oligonucleotide
agggauuaagauuauucuu

SEQ ID NO: 826228 - RNA, 19 nt, Artificial Sequence
  Description of Artificial Sequence: Synthetic oligonucleotide
cuucaagaauaacauugug

SEQ ID NO: 826229 - RNA, 19 nt, Artificial Sequence
  Description of Artificial Sequence: Synthetic oligonucleotide
gagaugagagaaaaucaac

SEQ ID NO: 826230 - RNA, 19 nt, Artificial Sequence
  Description of Artificial Sequence: Synthetic oligonucleotide
auaaggcaauauauguaac

SEQ ID NO: 826231 - RNA, 19 nt, Artificial Sequence
  Description of Artificial Sequence: Synthetic oligonucleotide
uuucgacuguucaucuuca

SEQ ID NO: 826232 - RNA, 19 nt, Artificial Sequence
  Description of Artificial Sequence: Synthetic oligonucleotide
uguugucguucuaauuucu

SEQ ID NO: 826233 - RNA, 19 nt, Artificial Sequence
  Description of Artificial Sequence: Synthetic oligonucleotide
uuacuauguccaucaaaac

SEQ ID NO: 826234 - RNA, 19 nt, Artificial Sequence
  Description of Artificial Sequence: Synthetic oligonucleotide
agaauaacauugugaaaua

SEQ ID NO: 826235 - RNA, 19 nt, Artificial Sequence
  Description of Artificial Sequence: Synthetic oligonucleotide
guugggguaagauuguaaa

SEQ ID NO: 826236 - RNA, 19 nt, Artificial Sequence
  Description of Artificial Sequence: Synthetic oligonucleotide
gucauuaagggauuaagau

SEQ ID NO: 826237 - RNA, 19 nt, Artificial Sequence
  Description of Artificial Sequence: Synthetic oligonucleotide
aaugcguuuccugucacuu

SEQ ID NO: 826238 - RNA, 19 nt, Artificial Sequence
  Description of Artificial Sequence: Synthetic oligonucleotide
auuugaggguuagaacaac

SEQ ID NO: 826239 - RNA, 19 nt, Artificial Sequence
  Description of Artificial Sequence: Synthetic oligonucleotide
acuuuucgacuguucaucu

SEQ ID NO: 826240 - RNA, 19 nt, Artificial Sequence
  Description of Artificial Sequence: Synthetic oligonucleotide
auagugcucugauuugaug

SEQ ID NO: 826241 - RNA, 19 nt, Artificial Sequence
  Description of Artificial Sequence: Synthetic oligonucleotide
caauuccaugacuggacgc

SEQ ID NO: 826242 - RNA, 19 nt, Artificial Sequence
  Description of Artificial Sequence: Synthetic oligonucleotide
acgucagauaaaccagguc

SEQ ID NO: 826243 - RNA, 19 nt, Artificial Sequence
  Description of Artificial Sequence: Synthetic oligonucleotide
auuugucgcuuagauauug

SEQ ID NO: 826244 - RNA, 19 nt, Artificial Sequence
  Description of Artificial Sequence: Synthetic oligonucleotide
agauuauucuugugauugu

SEQ ID NO: 826245 - RNA, 19 nt, Artificial Sequence
  Description of Artificial Sequence: Synthetic oligonucleotide
cauuaucauuuaauuugug

SEQ ID NO: 826246 - RNA, 19 nt, Artificial Sequence
  Description of Artificial Sequence: Synthetic oligonucleotide
  modified_base (6)..(6): a, c, u, g, unknown or other
ucacunugggacagaacuc

SEQ ID NO: 826247 - RNA, 19 nt, Artificial Sequence
  Description of Artificial Sequence: Synthetic oligonucleotide
cuaugaacaccaucucuuc

SEQ ID NO: 826248 - RNA, 19 nt, Artificial Sequence
  Description of Artificial Sequence: Synthetic oligonucleotide
agagaugagagaaaaucaa

SEQ ID NO: 826249 - RNA, 19 nt, Artificial Sequence
  Description of Artificial Sequence: Synthetic oligonucleotide
ugguugugguccaccaacc

SEQ ID NO: 826250 - RNA, 19 nt, Artificial Sequence
  Description of Artificial Sequence: Synthetic oligonucleotide
aauagacucccggaaugga

SEQ ID NO: 826251 - RNA, 19 nt, Artificial Sequence
  Description of Artificial Sequence: Synthetic oligonucleotide
ugccaggacuuuucgacug

SEQ ID NO: 826252 - RNA, 19 nt, Artificial Sequence
  Description of Artificial Sequence: Synthetic oligonucleotide
uugggguaagauuguaaaa

SEQ ID NO: 826253 - RNA, 19 nt, Artificial Sequence
  Description of Artificial Sequence: Synthetic oligonucleotide
gcacaaaacguucaugaac

SEQ ID NO: 826254 - RNA, 19 nt, Artificial Sequence
  Description of Artificial Sequence: Synthetic oligonucleotide
ucgcuuagauauuggcuca

SEQ ID NO: 826255 - RNA, 19 nt, Artificial Sequence
  Description of Artificial Sequence: Synthetic oligonucleotide
acguucaugaacaucugcu

SEQ ID NO: 826256 - RNA, 19 nt, Artificial Sequence
  Description of Artificial Sequence: Synthetic oligonucleotide
uuuccguugggguaagauu

SEQ ID NO: 826257 - RNA, 19 nt, Artificial Sequence
  Description of Artificial Sequence: Synthetic oligonucleotide
uccaugacuggacgcuugc

SEQ ID NO: 826258 - RNA, 19 nt, Artificial Sequence
  Description of Artificial Sequence: Synthetic oligonucleotide
caacugcuauuccuuacag

SEQ ID NO: 826259 - RNA, 19 nt, Artificial Sequence
  Description of Artificial Sequence: Synthetic oligonucleotide
aacugccaggacuuuucga

SEQ ID NO: 826260 - RNA, 19 nt, Artificial Sequence
  Description of Artificial Sequence: Synthetic oligonucleotide
uucuuguagucugaguauc

SEQ ID NO: 826261 - RNA, 19 nt, Artificial Sequence
  Description of Artificial Sequence: Synthetic oligonucleotide
  modified_base (4)..(4): a, c, u, g, unknown or other
acunugggacagaacucac

SEQ ID NO: 826262 - RNA, 19 nt, Artificial Sequence
  Description of Artificial Sequence: Synthetic oligonucleotide
uucgaaugcguuuccuguc

SEQ ID NO: 826263 - RNA, 19 nt, Artificial Sequence
  Description of Artificial Sequence: Synthetic oligonucleotide
auagacucccggaauggag

SEQ ID NO: 826264 - RNA, 19 nt, Artificial Sequence
  Description of Artificial Sequence: Synthetic oligonucleotide
uuaguucacuauagugcuc

SEQ ID NO: 826265 - RNA, 19 nt, Artificial Sequence
  Description of Artificial Sequence: Synthetic oligonucleotide
gguuuucugcauagcaucg

SEQ ID NO: 826266 - RNA, 19 nt, Artificial Sequence
  Description of Artificial Sequence: Synthetic oligonucleotide
ucugcauagcaucguugaa

SEQ ID NO: 826267 - RNA, 19 nt, Artificial Sequence
  Description of Artificial Sequence: Synthetic oligonucleotide
acuuuagacugcgguaaag

SEQ ID NO: 826268 - RNA, 19 nt, Artificial Sequence
  Description of Artificial Sequence: Synthetic oligonucleotide
guagucugaguauccugug

SEQ ID NO: 826269 - RNA, 19 nt, Artificial Sequence
  Description of Artificial Sequence: Synthetic oligonucleotide
augcguuuccugucacuuc

SEQ ID NO: 826270 - RNA, 19 nt, Artificial Sequence
  Description of Artificial Sequence: Synthetic oligonucleotide
ugugguccaccaacccucc

SEQ ID NO: 826271 - RNA, 19 nt, Artificial Sequence
  Description of Artificial Sequence: Synthetic oligonucleotide
ugauguugucguucuaauu

SEQ ID NO: 826272 - RNA, 19 nt, Artificial Sequence
  Description of Artificial Sequence: Synthetic oligonucleotide
cuuuagacugcgguaaaga

SEQ ID NO: 826273 - RNA, 19 nt, Artificial Sequence
  Description of Artificial Sequence: Synthetic oligonucleotide
ugcuuaaaugugagucccu

SEQ ID NO: 826274 - RNA, 19 nt, Artificial Sequence
  Description of Artificial Sequence: Synthetic oligonucleotide
cagaauaauguguuucuua

SEQ ID NO: 826275 - RNA, 19 nt, Artificial Sequence
  Description of Artificial Sequence: Synthetic oligonucleotide
aggcaauauauguaacaua

SEQ ID NO: 826276 - RNA, 19 nt, Artificial Sequence
  Description of Artificial Sequence: Synthetic oligonucleotide
agucccuugugaugguugu

SEQ ID NO: 826277 - RNA, 19 nt, Artificial Sequence
  Description of Artificial Sequence: Synthetic oligonucleotide
uacuuuagacugcgguaaa

SEQ ID NO: 826278 - RNA, 19 nt, Artificial Sequence
  Description of Artificial Sequence: Synthetic oligonucleotide
ucgccgguuuucugcauag

SEQ ID NO: 826279 - RNA, 19 nt, Artificial Sequence
  Description of Artificial Sequence: Synthetic oligonucleotide
uagccgcacaaaacguuca

SEQ ID NO: 826280 - RNA, 19 nt, Artificial Sequence
  Description of Artificial Sequence: Synthetic oligonucleotide
uugacccauccucugucgu

SEQ ID NO: 826281 - RNA, 19 nt, Artificial Sequence
  Description of Artificial Sequence: Synthetic oligonucleotide
agggugugaugcucgccgg

SEQ ID NO: 826282 - RNA, 19 nt, Artificial Sequence
  Description of Artificial Sequence: Synthetic oligonucleotide
  modified_base (5)..(5): a, c, u, g, unknown or other
cacunugggacagaacuca

SEQ ID NO: 826283 - RNA, 19 nt, Artificial Sequence
  Description of Artificial Sequence: Synthetic oligonucleotide
ggagaaugaaggcacacua

SEQ ID NO: 826284 - RNA, 19 nt, Artificial Sequence
  Description of Artificial Sequence: Synthetic oligonucleotide
cacuauagugcucugauuu

SEQ ID NO: 826285 - RNA, 19 nt, Artificial Sequence
  Description of Artificial Sequence: Synthetic oligonucleotide
uucaacacauuaggagagu

SEQ ID NO: 826286 - RNA, 19 nt, Artificial Sequence
  Description of Artificial Sequence: Synthetic oligonucleotide
ggcacacuaauauguaaca

SEQ ID NO: 826287 - RNA, 19 nt, Artificial Sequence
  Description of Artificial Sequence: Synthetic oligonucleotide
uccguugggguaagauugu

SEQ ID NO: 826288 - RNA, 19 nt, Artificial Sequence
  Description of Artificial Sequence: Synthetic oligonucleotide
caacauucuaguagccgca

SEQ ID NO: 826289 - RNA, 19 nt, Artificial Sequence
  Description of Artificial Sequence: Synthetic oligonucleotide
gaugcucgccgguuuucug

SEQ ID NO: 826290 - RNA, 19 nt, Artificial Sequence
  Description of Artificial Sequence: Synthetic oligonucleotide
acauucuaguagccgcaca

SEQ ID NO: 826291 - RNA, 19 nt, Artificial Sequence
  Description of Artificial Sequence: Synthetic oligonucleotide
ucccaaguucaacauucua

SEQ ID NO: 826292 - RNA, 19 nt, Artificial Sequence
  Description of Artificial Sequence: Synthetic oligonucleotide
acaaaacguucaugaacau

SEQ ID NO: 826293 - RNA, 19 nt, Artificial Sequence
  Description of Artificial Sequence: Synthetic oligonucleotide
gcaucguugaaucugcuua

SEQ ID NO: 826294 - RNA, 19 nt, Artificial Sequence
  Description of Artificial Sequence: Synthetic oligonucleotide
ugugaugcucgccgguuuu

SEQ ID NO: 826295 - RNA, 19 nt, Artificial Sequence
  Description of Artificial Sequence: Synthetic oligonucleotide
guuuuacuuuagacugcgg

SEQ ID NO: 826296 - RNA, 19 nt, Artificial Sequence
  Description of Artificial Sequence: Synthetic oligonucleotide
gaguauccugugaaggguc

SEQ ID NO: 826297 - RNA, 19 nt, Artificial Sequence
  Description of Artificial Sequence: Synthetic oligonucleotide
agacucccggaauggagga

SEQ ID NO: 826298 - RNA, 19 nt, Artificial Sequence
  Description of Artificial Sequence: Synthetic oligonucleotide
gagucccuugugaugguug

SEQ ID NO: 826299 - RNA, 19 nt, Artificial Sequence
  Description of Artificial Sequence: Synthetic oligonucleotide
ucauaccuuuaagucuucu

SEQ ID NO: 826300 - RNA, 19 nt, Artificial Sequence
  Description of Artificial Sequence: Synthetic oligonucleotide
uuaagggauuaagauuauu

SEQ ID NO: 826301 - RNA, 19 nt, Artificial Sequence
  Description of Artificial Sequence: Synthetic oligonucleotide
ugcucgccgguuuucugca

SEQ ID NO: 826302 - RNA, 19 nt, Artificial Sequence
  Description of Artificial Sequence: Synthetic oligonucleotide
uucgacuguucaucuucac

SEQ ID NO: 826303 - RNA, 19 nt, Artificial Sequence
  Description of Artificial Sequence: Synthetic oligonucleotide
aguucacuauagugcucug

SEQ ID NO: 826304 - RNA, 19 nt, Artificial Sequence
  Description of Artificial Sequence: Synthetic oligonucleotide
cuucauuugucgcuuagau

SEQ ID NO: 826305 - RNA, 19 nt, Artificial Sequence
  Description of Artificial Sequence: Synthetic oligonucleotide
aguucucucccucgcugga

SEQ ID NO: 826306 - RNA, 19 nt, Artificial Sequence
  Description of Artificial Sequence: Synthetic oligonucleotide
gucguucuaauuucuuucu

SEQ ID NO: 826307 - RNA, 19 nt, Artificial Sequence
  Description of Artificial Sequence: Synthetic oligonucleotide
acucccggaauggaggaga

SEQ ID NO: 826308 - RNA, 19 nt, Artificial Sequence
  Description of Artificial Sequence: Synthetic oligonucleotide
ggauuaagauuauucuugu

SEQ ID NO: 826309 - RNA, 19 nt, Artificial Sequence
  Description of Artificial Sequence: Synthetic oligonucleotide
uuucuguggugaggcgggg

SEQ ID NO: 826310 - RNA, 19 nt, Artificial Sequence
  Description of Artificial Sequence: Synthetic oligonucleotide
ccuccaaucacauaagccu

SEQ ID NO: 826311 - RNA, 19 nt, Artificial Sequence
  Description of Artificial Sequence: Synthetic oligonucleotide
acugcgguaaagacaaauu

SEQ ID NO: 826312 - RNA, 19 nt, Artificial Sequence
  Description of Artificial Sequence: Synthetic oligonucleotide
aucguugaaucugcuuaug

SEQ ID NO: 826313 - RNA, 19 nt, Artificial Sequence
  Description of Artificial Sequence: Synthetic oligonucleotide
accuucacucacgccuggc

SEQ ID NO: 826314 - RNA, 19 nt, Artificial Sequence
  Description of Artificial Sequence: Synthetic oligonucleotide
uaggcuuugugugcaggaa

SEQ ID NO: 826315 - RNA, 19 nt, Artificial Sequence
  Description of Artificial Sequence: Synthetic oligonucleotide
guugugguccaccaacccu

SEQ ID NO: 826316 - RNA, 19 nt, Artificial Sequence
  Description of Artificial Sequence: Synthetic oligonucleotide
cuuaucccaaguucaacau

SEQ ID NO: 826317 - RNA, 19 nt, Artificial Sequence
  Description of Artificial Sequence: Synthetic oligonucleotide
agccuuugacucaucuaag

SEQ ID NO: 826318 - RNA, 19 nt, Artificial Sequence
  Description of Artificial Sequence: Synthetic oligonucleotide
acgcuugcuuaaaugugag

SEQ ID NO: 826319 - RNA, 19 nt, Artificial Sequence
  Description of Artificial Sequence: Synthetic oligonucleotide
  modified_base (18)..(18): a, c, u, g, unknown or other
uccugugaagggucacunu

SEQ ID NO: 826320 - RNA, 19 nt, Artificial Sequence
  Description of Artificial Sequence: Synthetic oligonucleotide
cccggaauggaggagaaug

SEQ ID NO: 826321 - RNA, 19 nt, Artificial Sequence
  Description of Artificial Sequence: Synthetic oligonucleotide
ugaugcucgccgguuuucu

SEQ ID NO: 826322 - RNA, 19 nt, Artificial Sequence
  Description of Artificial Sequence: Synthetic oligonucleotide
caucuaaucuuggcuugug

SEQ ID NO: 826323 - RNA, 19 nt, Artificial Sequence
  Description of Artificial Sequence: Synthetic oligonucleotide
caaguucaacauucuagua

SEQ ID NO: 826324 - RNA, 19 nt, Artificial Sequence
  Description of Artificial Sequence: Synthetic oligonucleotide
acgccuggcuucuuuucca

SEQ ID NO: 826325 - RNA, 19 nt, Artificial Sequence
  Description of Artificial Sequence: Synthetic oligonucleotide
ccgcacaaaacguucauga

SEQ ID NO: 826326 - RNA, 19 nt, Artificial Sequence
  Description of Artificial Sequence: Synthetic oligonucleotide
ugacccauccucugucguu

SEQ ID NO: 826327 - RNA, 19 nt, Artificial Sequence
  Description of Artificial Sequence: Synthetic oligonucleotide
ggcggggucauuccugcag

SEQ ID NO: 826328 - RNA, 19 nt, Artificial Sequence
  Description of Artificial Sequence: Synthetic oligonucleotide
cuaacauauaaggcaauau

SEQ ID NO: 826329 - RNA, 19 nt, Artificial Sequence
  Description of Artificial Sequence: Synthetic oligonucleotide
agauauuggcucagucccu

SEQ ID NO: 826330 - RNA, 19 nt, Artificial Sequence
  Description of Artificial Sequence: Synthetic oligonucleotide
auuaagggauuaagauuau

SEQ ID NO: 826331 - RNA, 19 nt, Artificial Sequence
  Description of Artificial Sequence: Synthetic oligonucleotide
aggagucucaacagacacu

SEQ ID NO: 826332 - RNA, 19 nt, Artificial Sequence
  Description of Artificial Sequence: Synthetic oligonucleotide
ggacgcuugcuuaaaugug

SEQ ID NO: 826333 - RNA, 19 nt, Artificial Sequence
  Description of Artificial Sequence: Synthetic oligonucleotide
aguagccgcacaaaacguu

SEQ ID NO: 826334 - RNA, 19 nt, Artificial Sequence
  Description of Artificial Sequence: Synthetic oligonucleotide
ccaaguucaacauucuagu

SEQ ID NO: 826335 - RNA, 19 nt, Artificial Sequence
  Description of Artificial Sequence: Synthetic oligonucleotide
gccgguuuucugcauagca

SEQ ID NO: 826336 - RNA, 19 nt, Artificial Sequence
  Description of Artificial Sequence: Synthetic oligonucleotide
aucauaccuuuaagucuuc

SEQ ID NO: 826337 - RNA, 19 nt, Artificial Sequence
  Description of Artificial Sequence: Synthetic oligonucleotide
ccaauugacccauccucug

SEQ ID NO: 826338 - RNA, 19 nt, Artificial Sequence
  Description of Artificial Sequence: Synthetic oligonucleotide
ggugaggcggggucauucc

SEQ ID NO: 826339 - RNA, 19 nt, Artificial Sequence
  Description of Artificial Sequence: Synthetic oligonucleotide
cgucagauaaaccaggucu

SEQ ID NO: 826340 - RNA, 19 nt, Artificial Sequence
  Description of Artificial Sequence: Synthetic oligonucleotide
cacuaauauguaacauucu

SEQ ID NO: 826341 - RNA, 19 nt, Artificial Sequence
  Description of Artificial Sequence: Synthetic oligonucleotide
guaugagaagauaccucaa

SEQ ID NO: 826342 - RNA, 19 nt, Artificial Sequence
  Description of Artificial Sequence: Synthetic oligonucleotide
caaacaggaucagaccaaa

SEQ ID NO: 826343 - RNA, 19 nt, Artificial Sequence
  Description of Artificial Sequence: Synthetic oligonucleotide
agccgcacaaaacguucau

SEQ ID NO: 826344 - RNA, 19 nt, Artificial Sequence
  Description of Artificial Sequence: Synthetic oligonucleotide
cgguuuucugcauagcauc

SEQ ID NO: 826345 - RNA, 19 nt, Artificial Sequence
  Description of Artificial Sequence: Synthetic oligonucleotide
gaaugcguuuccugucacu

SEQ ID NO: 826346 - RNA, 19 nt, Artificial Sequence
  Description of Artificial Sequence: Synthetic oligonucleotide
  modified_base (3)..(3): a, c, u, g, unknown or other
cunugggacagaacucacu

SEQ ID NO: 826347 - RNA, 19 nt, Artificial Sequence
  Description of Artificial Sequence: Synthetic oligonucleotide
cucuaccaaacaggaucag

SEQ ID NO: 826348 - RNA, 19 nt, Artificial Sequence
  Description of Artificial Sequence: Synthetic oligonucleotide
gacgucagauaaaccaggu

SEQ ID NO: 826349 - RNA, 19 nt, Artificial Sequence
  Description of Artificial Sequence: Synthetic oligonucleotide
gacucccggaauggaggag

SEQ ID NO: 826350 - RNA, 19 nt, Artificial Sequence
  Description of Artificial Sequence: Synthetic oligonucleotide
cugauuugauguggauauc

SEQ ID NO: 826351 - RNA, 19 nt, Artificial Sequence
  Description of Artificial Sequence: Synthetic oligonucleotide
  modified_base (19)..(19): a, c, u, g, unknown or other
auccugugaagggucacun

SEQ ID NO: 826352 - RNA, 19 nt, Artificial Sequence
  Description of Artificial Sequence: Synthetic oligonucleotide
gcucaauuccaugacugga

SEQ ID NO: 826353 - RNA, 19 nt, Artificial Sequence
  Description of Artificial Sequence: Synthetic oligonucleotide
cauccauguucugucuuca

SEQ ID NO: 826354 - RNA, 19 nt, Artificial Sequence
  Description of Artificial Sequence: Synthetic oligonucleotide
agucgaugacaaggcggag

SEQ ID NO: 826355 - RNA, 19 nt, Artificial Sequence
  Description of Artificial Sequence: Synthetic oligonucleotide
ucugcggacccugcucuuc

SEQ ID NO: 826356 - RNA, 19 nt, Artificial Sequence
  Description of Artificial Sequence: Synthetic oligonucleotide
guauccugugaagggucac

SEQ ID NO: 826357 - RNA, 19 nt, Artificial Sequence
  Description of Artificial Sequence: Synthetic oligonucleotide
gcuaacauauaaggcaaua

SEQ ID NO: 826358 - RNA, 19 nt, Artificial Sequence
  Description of Artificial Sequence: Synthetic oligonucleotide
ggcugcuaugaacaccauc

SEQ ID NO: 826359 - RNA, 19 nt, Artificial Sequence
  Description of Artificial Sequence: Synthetic oligonucleotide
ccucaagggaggcacagga

SEQ ID NO: 826360 - RNA, 19 nt, Artificial Sequence
  Description of Artificial Sequence: Synthetic oligonucleotide
acucacgccuggcuucuuu

SEQ ID NO: 826361 - RNA, 19 nt, Artificial Sequence
  Description of Artificial Sequence: Synthetic oligonucleotide
caucguugaaucugcuuau

SEQ ID NO: 826362 - RNA, 19 nt, Artificial Sequence
  Description of Artificial Sequence: Synthetic oligonucleotide
cuuguagucugaguauccu

SEQ ID NO: 826363 - RNA, 19 nt, Artificial Sequence
  Description of Artificial Sequence: Synthetic oligonucleotide
caauugacccauccucugu

SEQ ID NO: 826364 - RNA, 19 nt, Artificial Sequence
  Description of Artificial Sequence: Synthetic oligonucleotide
uccuuuccguugggguaag

SEQ ID NO: 826365 - RNA, 19 nt, Artificial Sequence
  Description of Artificial Sequence: Synthetic oligonucleotide
caucaaaacuacagucgau

SEQ ID NO: 826366 - RNA, 19 nt, Artificial Sequence
  Description of Artificial Sequence: Synthetic oligonucleotide
cgguaaagacaaauugauc

SEQ ID NO: 826367 - RNA, 19 nt, Artificial Sequence
  Description of Artificial Sequence: Synthetic oligonucleotide
ccuucaagaauaacauugu

SEQ ID NO: 826368 - RNA, 19 nt, Artificial Sequence
  Description of Artificial Sequence: Synthetic oligonucleotide
ugagucccuugugaugguu

SEQ ID NO: 826369 - RNA, 19 nt, Artificial Sequence
  Description of Artificial Sequence: Synthetic oligonucleotide
cugcauagcaucguugaau

SEQ ID NO: 826370 - RNA, 19 nt, Artificial Sequence
  Description of Artificial Sequence: Synthetic oligonucleotide
cagauaaaccaggucuucu

SEQ ID NO: 826371 - RNA, 19 nt, Artificial Sequence
  Description of Artificial Sequence: Synthetic oligonucleotide
auaccucaagggaggcaca

SEQ ID NO: 826372 - RNA, 19 nt, Artificial Sequence
  Description of Artificial Sequence: Synthetic oligonucleotide
gccuuugacucaucuaagu

SEQ ID NO: 826373 - RNA, 19 nt, Artificial Sequence
  Description of Artificial Sequence: Synthetic oligonucleotide
cucccucgcuggaacuguc

SEQ ID NO: 826374 - RNA, 19 nt, Artificial Sequence
  Description of Artificial Sequence: Synthetic oligonucleotide
gucccuugugaugguugug

SEQ ID NO: 826375 - RNA, 19 nt, Artificial Sequence
  Description of Artificial Sequence: Synthetic oligonucleotide
cauccuucuggccggggcu

SEQ ID NO: 826376 - RNA, 19 nt, Artificial Sequence
  Description of Artificial Sequence: Synthetic oligonucleotide
cuuuccguugggguaagau

SEQ ID NO: 826377 - RNA, 19 nt, Artificial Sequence
  Description of Artificial Sequence: Synthetic oligonucleotide
ggacuuuucgacuguucau

SEQ ID NO: 826378 - RNA, 19 nt, Artificial Sequence
  Description of Artificial Sequence: Synthetic oligonucleotide
guuaacugccaggacuuuu

SEQ ID NO: 826379 - RNA, 19 nt, Artificial Sequence
  Description of Artificial Sequence: Synthetic oligonucleotide
  modified_base (8)..(8): a, c, u, g, unknown or other
ggucacunugggacagaac

SEQ ID NO: 826380 - RNA, 19 nt, Artificial Sequence
  Description of Artificial Sequence: Synthetic oligonucleotide
cucccggaauggaggagaa

SEQ ID NO: 826381 - RNA, 19 nt, Artificial Sequence
  Description of Artificial Sequence: Synthetic oligonucleotide
ucgcuggaacugucccauc

SEQ ID NO: 826382 - RNA, 19 nt, Artificial Sequence
  Description of Artificial Sequence: Synthetic oligonucleotide
cucugauuugaggguuaga

SEQ ID NO: 826383 - RNA, 19 nt, Artificial Sequence
  Description of Artificial Sequence: Synthetic oligonucleotide
gacccauccucugucguuu

SEQ ID NO: 826384 - RNA, 19 nt, Artificial Sequence
  Description of Artificial Sequence: Synthetic oligonucleotide
cucgccgguuuucugcaua

SEQ ID NO: 826385 - RNA, 19 nt, Artificial Sequence
  Description of Artificial Sequence: Synthetic oligonucleotide
aggcggggucauuccugca

SEQ ID NO: 826386 - RNA, 19 nt, Artificial Sequence
  Description of Artificial Sequence: Synthetic oligonucleotide
gcaaagcuaagaggucaga

SEQ ID NO: 826387 - RNA, 19 nt, Artificial Sequence
  Description of Artificial Sequence: Synthetic oligonucleotide
cauuugucgcuuagauauu

SEQ ID NO: 826388 - RNA, 19 nt, Artificial Sequence
  Description of Artificial Sequence: Synthetic oligonucleotide
  modified_base (9)..(9): a, c, u, g, unknown or other
gggucacunugggacagaa

SEQ ID NO: 826389 - RNA, 19 nt, Artificial Sequence
  Description of Artificial Sequence: Synthetic oligonucleotide
cuggccggggcugcugguc

SEQ ID NO: 826390 - RNA, 19 nt, Artificial Sequence
  Description of Artificial Sequence: Synthetic oligonucleotide
gcuuaaaugugagucccuu

SEQ ID NO: 826391 - RNA, 19 nt, Artificial Sequence
  Description of Artificial Sequence: Synthetic oligonucleotide
gugguccaccaacccucca

SEQ ID NO: 826392 - RNA, 19 nt, Artificial Sequence
  Description of Artificial Sequence: Synthetic oligonucleotide
gugugaugcucgccgguuu

SEQ ID NO: 826393 - RNA, 19 nt, Artificial Sequence
  Description of Artificial Sequence: Synthetic oligonucleotide
cguugggguaagauuguaa

SEQ ID NO: 826394 - RNA, 19 nt, Artificial Sequence
  Description of Artificial Sequence: Synthetic oligonucleotide
cucacgccuggcuucuuuu

SEQ ID NO: 826395 - RNA, 19 nt, Artificial Sequence
  Description of Artificial Sequence: Synthetic oligonucleotide
ccgguuuucugcauagcau

SEQ ID NO: 826396 - RNA, 19 nt, Artificial Sequence
  Description of Artificial Sequence: Synthetic oligonucleotide
cgcuuagauauuggcucag

SEQ ID NO: 826397 - RNA, 19 nt, Artificial Sequence
  Description of Artificial Sequence: Synthetic oligonucleotide
gcaucuaaucuuggcuugu

SEQ ID NO: 826398 - RNA, 19 nt, Artificial Sequence
  Description of Artificial Sequence: Synthetic oligonucleotide
gcggggucauuccugcagu

SEQ ID NO: 826399 - RNA, 19 nt, Artificial Sequence
  Description of Artificial Sequence: Synthetic oligonucleotide
gaaccggauuccagcugau

SEQ ID NO: 826400 - RNA, 19 nt, Artificial Sequence
  Description of Artificial Sequence: Synthetic oligonucleotide
ccacaaggacagaauuacu

SEQ ID NO: 826401 - RNA, 19 nt, Artificial Sequence
  Description of Artificial Sequence: Synthetic oligonucleotide
gggugugaugcucgccggu

SEQ ID NO: 826402 - RNA, 19 nt, Artificial Sequence
  Description of Artificial Sequence: Synthetic oligonucleotide
ggugugaugcucgccgguu

SEQ ID NO: 826403 - RNA, 19 nt, Artificial Sequence
  Description of Artificial Sequence: Synthetic oligonucleotide
agacugcgguaaagacaaa

SEQ ID NO: 826404 - RNA, 19 nt, Artificial Sequence
  Description of Artificial Sequence: Synthetic oligonucleotide
aggcugcuaugaacaccau

SEQ ID NO: 826405 - RNA, 19 nt, Artificial Sequence
  Description of Artificial Sequence: Synthetic oligonucleotide
ccggauuccagcugauguu

SEQ ID NO: 826406 - RNA, 19 nt, Artificial Sequence
  Description of Artificial Sequence: Synthetic oligonucleotide
ccaucucuucgaaugcguu

SEQ ID NO: 826407 - RNA, 19 nt, Artificial Sequence
  Description of Artificial Sequence: Synthetic oligonucleotide
ccuccauggcuugucaaau

SEQ ID NO: 826408 - RNA, 19 nt, Artificial Sequence
  Description of Artificial Sequence: Synthetic oligonucleotide
gguuaacugccaggacuuu

SEQ ID NO: 826409 - RNA, 19 nt, Artificial Sequence
  Description of Artificial Sequence: Synthetic oligonucleotide
cgccgguuuucugcauagc

SEQ ID NO: 826410 - RNA, 19 nt, Artificial Sequence
  Description of Artificial Sequence: Synthetic oligonucleotide
cucugcggacccugcucuu

SEQ ID NO: 826411 - RNA, 19 nt, Artificial Sequence
  Description of Artificial Sequence: Synthetic oligonucleotide
ccguugggguaagauugua

SEQ ID NO: 826412 - RNA, 19 nt, Artificial Sequence
  Description of Artificial Sequence: Synthetic oligonucleotide
ccaugacuggacgcuugcu

SEQ ID NO: 826413 - RNA, 19 nt, Artificial Sequence
  Description of Artificial Sequence: Synthetic oligonucleotide
cguuuccugucacuuccau

SEQ ID NO: 826414 - RNA, 19 nt, Artificial Sequence
  Description of Artificial Sequence: Synthetic oligonucleotide
ccuuuccguugggguaaga

SEQ ID NO: 826415 - RNA, 19 nt, Artificial Sequence
  Description of Artificial Sequence: Synthetic oligonucleotide
cggggucauuccugcaguu

SEQ ID NO: 826416 - RNA, 19 nt, Artificial Sequence
  Description of Artificial Sequence: Synthetic oligonucleotide
aacaagguaagccagaagc

SEQ ID NO: 826417 - RNA, 19 nt, Artificial Sequence
  Description of Artificial Sequence: Synthetic oligonucleotide
aaaccgaacaaauacaggg

SEQ ID NO: 826418 - RNA, 19 nt, Artificial Sequence
  Description of Artificial Sequence: Synthetic oligonucleotide
ucuauuuuaacuauugacc

SEQ ID NO: 826419 - RNA, 19 nt, Artificial Sequence
  Description of Artificial Sequence: Synthetic oligonucleotide
uuaaacaauauuuacagga

SEQ ID NO: 826420 - RNA, 19 nt, Artificial Sequence
  Description of Artificial Sequence: Synthetic oligonucleotide
uuaauagacagacaaaaga

SEQ ID NO: 826421 - RNA, 19 nt, Artificial Sequence
  Description of Artificial Sequence: Synthetic oligonucleotide
ugauguaccaacaagguaa

SEQ ID NO: 826422 - RNA, 19 nt, Artificial Sequence
  Description of Artificial Sequence: Synthetic oligonucleotide
aauuaacucuugcugcugc

SEQ ID NO: 826423 - RNA, 19 nt, Artificial Sequence
  Description of Artificial Sequence: Synthetic oligonucleotide
aaagagaguaacuuguuga

SEQ ID NO: 826424 - RNA, 19 nt, Artificial Sequence
  Description of Artificial Sequence: Synthetic oligonucleotide
ucagaagagaauaaggcca

SEQ ID NO: 826425 - RNA, 19 nt, Artificial Sequence
  Description of Artificial Sequence: Synthetic oligonucleotide
uauaacuacacauccauga

SEQ ID NO: 826426 - RNA, 19 nt, Artificial Sequence
  Description of Artificial Sequence: Synthetic oligonucleotide
acauuaauuuucuaauugg

SEQ ID NO: 826427 - RNA, 19 nt, Artificial Sequence
  Description of Artificial Sequence: Synthetic oligonucleotide
aaucuuauagcaaaauauc

SEQ ID NO: 826428 - RNA, 19 nt, Artificial Sequence
  Description of Artificial Sequence: Synthetic oligonucleotide
uuuuaaacgauacauuuau

SEQ ID NO: 826429 - RNA, 19 nt, Artificial Sequence
  Description of Artificial Sequence: Synthetic oligonucleotide
uauagaaagaaauuauccu

SEQ ID NO: 826430 - RNA, 19 nt, Artificial Sequence
  Description of Artificial Sequence: Synthetic oligonucleotide
acauuuaugaauguaacag

SEQ ID NO: 826431 - RNA, 19 nt, Artificial Sequence
  Description of Artificial Sequence: Synthetic oligonucleotide
uuuauuugcucaaauggca

SEQ ID NO: 826432 - RNA, 19 nt, Artificial Sequence
  Description of Artificial Sequence: Synthetic oligonucleotide
uucucccugacuaacaagg

SEQ ID NO: 826433 - RNA, 19 nt, Artificial Sequence
  Description of Artificial Sequence: Synthetic oligonucleotide
ucuacuauugugaaaugug

SEQ ID NO: 826434 - RNA, 19 nt, Artificial Sequence
  Description of Artificial Sequence: Synthetic oligonucleotide
gagaauaaggccaaguucc

SEQ ID NO: 826435 - RNA, 19 nt, Artificial Sequence
  Description of Artificial Sequence: Synthetic oligonucleotide
aagggguucacaugaacac

SEQ ID NO: 826436 - RNA, 19 nt, Artificial Sequence
  Description of Artificial Sequence: Synthetic oligonucleotide
uuuuaugccaucuugcagu

SEQ ID NO: 826437 - RNA, 19 nt, Artificial Sequence
  Description of Artificial Sequence: Synthetic oligonucleotide
aaauaggucuacuauugug

SEQ ID NO: 826438 - RNA, 19 nt, Artificial Sequence
  Description of Artificial Sequence: Synthetic oligonucleotide
uuuaugaauguaacagcgg

SEQ ID NO: 826439 - RNA, 19 nt, Artificial Sequence
  Description of Artificial Sequence: Synthetic oligonucleotide
aacgauacauuuaugaaug

SEQ ID NO: 826440 - RNA, 19 nt, Artificial Sequence
  Description of Artificial Sequence: Synthetic oligonucleotide
auuuaugaauguaacagcg

SEQ ID NO: 826441 - RNA, 19 nt, Artificial Sequence
  Description of Artificial Sequence: Synthetic oligonucleotide
ugggaaaugaaucuuggca

SEQ ID NO: 826442 - RNA, 19 nt, Artificial Sequence
  Description of Artificial Sequence: Synthetic oligonucleotide
aauauguauuaugagaagu

SEQ ID NO: 826443 - RNA, 19 nt, Artificial Sequence
  Description of Artificial Sequence: Synthetic oligonucleotide
uaauuggaaauucucauaa

SEQ ID NO: 826444 - RNA, 19 nt, Artificial Sequence
  Description of Artificial Sequence: Synthetic oligonucleotide
aaacgauacauuuaugaau

SEQ ID NO: 826445 - RNA, 19 nt, Artificial Sequence
  Description of Artificial Sequence: Synthetic oligonucleotide
agagaauaaggccaaguuc

SEQ ID NO: 826446 - RNA, 19 nt, Artificial Sequence
  Description of Artificial Sequence: Synthetic oligonucleotide
uuggaaauucucauaagug

SEQ ID NO: 826447 - RNA, 19 nt, Artificial Sequence
  Description of Artificial Sequence: Synthetic oligonucleotide
aacuauugacccauaaugg

SEQ ID NO: 826448 - RNA, 19 nt, Artificial Sequence
  Description of Artificial Sequence: Synthetic oligonucleotide
uuaugaauguaacagcggu

SEQ ID NO: 826449 - RNA, 19 nt, Artificial Sequence
  Description of Artificial Sequence: Synthetic oligonucleotide
aaaagagaguaacuuguug

SEQ ID NO: 826450 - RNA, 19 nt, Artificial Sequence
  Description of Artificial Sequence: Synthetic oligonucleotide
ugaaauggaucaaaaugcc

SEQ ID NO: 826451 - RNA, 19 nt, Artificial Sequence
  Description of Artificial Sequence: Synthetic oligonucleotide
uggaaauucucauaaguga

SEQ ID NO: 826452 - RNA, 19 nt, Artificial Sequence
  Description of Artificial Sequence: Synthetic oligonucleotide
uaugggaaggagauuuugg

SEQ ID NO: 826453 - RNA, 19 nt, Artificial Sequence
  Description of Artificial Sequence: Synthetic oligonucleotide
augcuuaucugauagagcu

SEQ ID NO: 826454 - RNA, 19 nt, Artificial Sequence
  Description of Artificial Sequence: Synthetic oligonucleotide
aaagggaucuguaaauagg

SEQ ID NO: 826455 - RNA, 19 nt, Artificial Sequence
  Description of Artificial Sequence: Synthetic oligonucleotide
gaagcaggaccauuaauag

SEQ ID NO: 826456 - RNA, 19 nt, Artificial Sequence
  Description of Artificial Sequence: Synthetic oligonucleotide
ugauuuaugggaaggagau

SEQ ID NO: 826457 - RNA, 19 nt, Artificial Sequence
  Description of Artificial Sequence: Synthetic oligonucleotide
gaaggaugaacucuuugag

SEQ ID NO: 826458 - RNA, 19 nt, Artificial Sequence
  Description of Artificial Sequence: Synthetic oligonucleotide
uuuucuaccaaaauaccuu

SEQ ID NO: 826459 - RNA, 19 nt, Artificial Sequence
  Description of Artificial Sequence: Synthetic oligonucleotide
uucagauuguguagcauag

SEQ ID NO: 826460 - RNA, 19 nt, Artificial Sequence
  Description of Artificial Sequence: Synthetic oligonucleotide
cauuuaugaauguaacagc

SEQ ID NO: 826461 - RNA, 19 nt, Artificial Sequence
  Description of Artificial Sequence: Synthetic oligonucleotide
ucuugguuaaauccauucc

SEQ ID NO: 826462 - RNA, 19 nt, Artificial Sequence
  Description of Artificial Sequence: Synthetic oligonucleotide
augaauguaacagcggugg

SEQ ID NO: 826463 - RNA, 19 nt, Artificial Sequence
  Description of Artificial Sequence: Synthetic oligonucleotide
aauaggucuacuauuguga

SEQ ID NO: 826464 - RNA, 19 nt, Artificial Sequence
  Description of Artificial Sequence: Synthetic oligonucleotide
uuuagcuuuaguccagucu

SEQ ID NO: 826465 - RNA, 19 nt, Artificial Sequence
  Description of Artificial Sequence: Synthetic oligonucleotide
gauuuaaccauuuaacccu

SEQ ID NO: 826466 - RNA, 19 nt, Artificial Sequence
  Description of Artificial Sequence: Synthetic oligonucleotide
ucucauaagugagaaaugc

SEQ ID NO: 826467 - RNA, 19 nt, Artificial Sequence
  Description of Artificial Sequence: Synthetic oligonucleotide
uuagcuuuaguccagucuu

SEQ ID NO: 826468 - RNA, 19 nt, Artificial Sequence
  Description of Artificial Sequence: Synthetic oligonucleotide
ucuaauuggaaauucucau

SEQ ID NO: 826469 - RNA, 19 nt, Artificial Sequence
  Description of Artificial Sequence: Synthetic oligonucleotide
aacccuaucaauauaauuu

SEQ ID NO: 826470 - RNA, 19 nt, Artificial Sequence
  Description of Artificial Sequence: Synthetic oligonucleotide
aaccauuuaacccuaucaa

SEQ ID NO: 826471 - RNA, 19 nt, Artificial Sequence
  Description of Artificial Sequence: Synthetic oligonucleotide
agcaaaaggaagcccauag

SEQ ID NO: 826472 - RNA, 19 nt, Artificial Sequence
  Description of Artificial Sequence: Synthetic oligonucleotide
accaaaauaccuucaccac

SEQ ID NO: 826473 - RNA, 19 nt, Artificial Sequence
  Description of Artificial Sequence: Synthetic oligonucleotide
uccaacauuacacuaccac

SEQ ID NO: 826474 - RNA, 19 nt, Artificial Sequence
  Description of Artificial Sequence: Synthetic oligonucleotide
auuauccugugccaguuuc

SEQ ID NO: 826475 - RNA, 19 nt, Artificial Sequence
  Description of Artificial Sequence: Synthetic oligonucleotide
aaugccuugucagugagga

SEQ ID NO: 826476 - RNA, 19 nt, Artificial Sequence
  Description of Artificial Sequence: Synthetic oligonucleotide
caagugaaugccuuugugc

SEQ ID NO: 826477 - RNA, 19 nt, Artificial Sequence
  Description of Artificial Sequence: Synthetic oligonucleotide
uguguauugggaaaugaau

SEQ ID NO: 826478 - RNA, 19 nt, Artificial Sequence
  Description of Artificial Sequence: Synthetic oligonucleotide
gaauauguauuaugagaag

SEQ ID NO: 826479 - RNA, 19 nt, Artificial Sequence
  Description of Artificial Sequence: Synthetic oligonucleotide
guuaaaguaacauucagau

SEQ ID NO: 826480 - RNA, 19 nt, Artificial Sequence
  Description of Artificial Sequence: Synthetic oligonucleotide
uacauuuaugaauguaaca

SEQ ID NO: 826481 - RNA, 19 nt, Artificial Sequence
  Description of Artificial Sequence: Synthetic oligonucleotide
auccauuccccucugcagc

SEQ ID NO: 826482 - RNA, 19 nt, Artificial Sequence
  Description of Artificial Sequence: Synthetic oligonucleotide
agcgguggcaguuuaaaag

SEQ ID NO: 826483 - RNA, 19 nt, Artificial Sequence
  Description of Artificial Sequence: Synthetic oligonucleotide
ucuaccaaaauaccuucac

SEQ ID NO: 826484 - RNA, 19 nt, Artificial Sequence
  Description of Artificial Sequence: Synthetic oligonucleotide
uaugaauguaacagcggug

SEQ ID NO: 826485 - RNA, 19 nt, Artificial Sequence
  Description of Artificial Sequence: Synthetic oligonucleotide
uauguauuaugagaaguga

SEQ ID NO: 826486 - RNA, 19 nt, Artificial Sequence
  Description of Artificial Sequence: Synthetic oligonucleotide
acuauugacccauaaugga

SEQ ID NO: 826487 - RNA, 19 nt, Artificial Sequence
  Description of Artificial Sequence: Synthetic oligonucleotide
aguauacuucaguuuacag

SEQ ID NO: 826488 - RNA, 19 nt, Artificial Sequence
  Description of Artificial Sequence: Synthetic oligonucleotide
uugcuaagaagcaggacca

SEQ ID NO: 826489 - RNA, 19 nt, Artificial Sequence
  Description of Artificial Sequence: Synthetic oligonucleotide
aggucauauaacuacacau

SEQ ID NO: 826490 - RNA, 19 nt, Artificial Sequence
  Description of Artificial Sequence: Synthetic oligonucleotide
aaggucauauaacuacaca

SEQ ID NO: 826491 - RNA, 19 nt, Artificial Sequence
  Description of Artificial Sequence: Synthetic oligonucleotide
uuaaugucagcuguaucag

SEQ ID NO: 826492 - RNA, 19 nt, Artificial Sequence
  Description of Artificial Sequence: Synthetic oligonucleotide
aacaauauuuacaggauua

SEQ ID NO: 826493 - RNA, 19 nt, Artificial Sequence
  Description of Artificial Sequence: Synthetic oligonucleotide
cagauuguguagcauaggc

SEQ ID NO: 826494 - RNA, 19 nt, Artificial Sequence
  Description of Artificial Sequence: Synthetic oligonucleotide
uuuaaacgauacauuuaug

SEQ ID NO: 826495 - RNA, 19 nt, Artificial Sequence
  Description of Artificial Sequence: Synthetic oligonucleotide
uuuucaagggagacugcag

SEQ ID NO: 826496 - RNA, 19 nt, Artificial Sequence
  Description of Artificial Sequence: Synthetic oligonucleotide
gguuaaauacuauacauaa

SEQ ID NO: 826497 - RNA, 19 nt, Artificial Sequence
  Description of Artificial Sequence: Synthetic oligonucleotide
guauacuucaguuuacaga

SEQ ID NO: 826498 - RNA, 19 nt, Artificial Sequence
  Description of Artificial Sequence: Synthetic oligonucleotide
aagagaguaacuuguugau

SEQ ID NO: 826499 - RNA, 19 nt, Artificial Sequence
  Description of Artificial Sequence: Synthetic oligonucleotide
uuuaguccagucuuugacu

SEQ ID NO: 826500 - RNA, 19 nt, Artificial Sequence
  Description of Artificial Sequence: Synthetic oligonucleotide
uuucccuacguauacgugu

SEQ ID NO: 826501 - RNA, 19 nt, Artificial Sequence
  Description of Artificial Sequence: Synthetic oligonucleotide
uuuaacuauugacccauaa

SEQ ID NO: 826502 - RNA, 19 nt, Artificial Sequence
  Description of Artificial Sequence: Synthetic oligonucleotide
uacuauugugaaauguggu

SEQ ID NO: 826503 - RNA, 19 nt, Artificial Sequence
  Description of Artificial Sequence: Synthetic oligonucleotide
aauggcaugaaaagaccag

SEQ ID NO: 826504 - RNA, 19 nt, Artificial Sequence
  Description of Artificial Sequence: Synthetic oligonucleotide
aguuccaacauuacacuac

SEQ ID NO: 826505 - RNA, 19 nt, Artificial Sequence
  Description of Artificial Sequence: Synthetic oligonucleotide
aaauucucauaagugagaa

SEQ ID NO: 826506 - RNA, 19 nt, Artificial Sequence
  Description of Artificial Sequence: Synthetic oligonucleotide
uucgauugucagaagagaa

SEQ ID NO: 826507 - RNA, 19 nt, Artificial Sequence
  Description of Artificial Sequence: Synthetic oligonucleotide
uauggcucgaacaaacaau

SEQ ID NO: 826508 - RNA, 19 nt, Artificial Sequence
  Description of Artificial Sequence: Synthetic oligonucleotide
cagugguuaaauacuauac

SEQ ID NO: 826509 - RNA, 19 nt, Artificial Sequence
  Description of Artificial Sequence: Synthetic oligonucleotide
cuuuaguccagucuuugac

SEQ ID NO: 826510 - RNA, 19 nt, Artificial Sequence
  Description of Artificial Sequence: Synthetic oligonucleotide
auuacuguucuuuugugua

SEQ ID NO: 826511 - RNA, 19 nt, Artificial Sequence
  Description of Artificial Sequence: Synthetic oligonucleotide
uauugacccauaauggaau

SEQ ID NO: 826512 - RNA, 19 nt, Artificial Sequence
  Description of Artificial Sequence: Synthetic oligonucleotide
ucccugacuaacaaggcac

SEQ ID NO: 826513 - RNA, 19 nt, Artificial Sequence
  Description of Artificial Sequence: Synthetic oligonucleotide
ugguuaaauacuauacaua

SEQ ID NO: 826514 - RNA, 19 nt, Artificial Sequence
  Description of Artificial Sequence: Synthetic oligonucleotide
ccacauguaaucuugaaug

SEQ ID NO: 826515 - RNA, 19 nt, Artificial Sequence
  Description of Artificial Sequence: Synthetic oligonucleotide
cagucauacaagugaaugc

SEQ ID NO: 826516 - RNA, 19 nt, Artificial Sequence
  Description of Artificial Sequence: Synthetic oligonucleotide
guauacgugucuguuaucc

SEQ ID NO: 826517 - RNA, 19 nt, Artificial Sequence
  Description of Artificial Sequence: Synthetic oligonucleotide
ugccucuuugauuuauggg

SEQ ID NO: 826518 - RNA, 19 nt, Artificial Sequence
  Description of Artificial Sequence: Synthetic oligonucleotide
uuauuugcucaaauggcau

SEQ ID NO: 826519 - RNA, 19 nt, Artificial Sequence
  Description of Artificial Sequence: Synthetic oligonucleotide
auauguauuaugagaagug

SEQ ID NO: 826520 - RNA, 19 nt, Artificial Sequence
  Description of Artificial Sequence: Synthetic oligonucleotide
cugcaauuaacucuugcug

SEQ ID NO: 826521 - RNA, 19 nt, Artificial Sequence
  Description of Artificial Sequence: Synthetic oligonucleotide
cauuaauuuucuaauugga

SEQ ID NO: 826522 - RNA, 19 nt, Artificial Sequence
  Description of Artificial Sequence: Synthetic oligonucleotide
agaaagaaauuauccugug

SEQ ID NO: 826523 - RNA, 19 nt, Artificial Sequence
  Description of Artificial Sequence: Synthetic oligonucleotide
uucuuuuguguauugggaa

SEQ ID NO: 826524 - RNA, 19 nt, Artificial Sequence
  Description of Artificial Sequence: Synthetic oligonucleotide
agaauaugccaacauuacu

SEQ ID NO: 826525 - RNA, 19 nt, Artificial Sequence
  Description of Artificial Sequence: Synthetic oligonucleotide
guuuuaugccaucuugcag

SEQ ID NO: 826526 - RNA, 19 nt, Artificial Sequence
  Description of Artificial Sequence: Synthetic oligonucleotide
ucuguaaauaggucuacua

SEQ ID NO: 826527 - RNA, 19 nt, Artificial Sequence
  Description of Artificial Sequence: Synthetic oligonucleotide
caaaccgaacaaauacagg

SEQ ID NO: 826528 - RNA, 19 nt, Artificial Sequence
  Description of Artificial Sequence: Synthetic oligonucleotide
uuuugcuggggcuuaauua

SEQ ID NO: 826529 - RNA, 19 nt, Artificial Sequence
  Description of Artificial Sequence: Synthetic oligonucleotide
uagagcuugugguaaauuc

SEQ ID NO: 826530 - RNA, 19 nt, Artificial Sequence
  Description of Artificial Sequence: Synthetic oligonucleotide
acuaacaaggcaccaauuu

SEQ ID NO: 826531 - RNA, 19 nt, Artificial Sequence
  Description of Artificial Sequence: Synthetic oligonucleotide
cuugucgccuucuuaauuc

SEQ ID NO: 826532 - RNA, 19 nt, Artificial Sequence
  Description of Artificial Sequence: Synthetic oligonucleotide
auaacauauggauguaaaa

SEQ ID NO: 826533 - RNA, 19 nt, Artificial Sequence
  Description of Artificial Sequence: Synthetic oligonucleotide
aaauuuagcuuuaguccag

SEQ ID NO: 826534 - RNA, 19 nt, Artificial Sequence
  Description of Artificial Sequence: Synthetic oligonucleotide
gcccauagcagauacaucc

SEQ ID NO: 826535 - RNA, 19 nt, Artificial Sequence
  Description of Artificial Sequence: Synthetic oligonucleotide
aaauggcaugaaaagacca

SEQ ID NO: 826536 - RNA, 19 nt, Artificial Sequence
  Description of Artificial Sequence: Synthetic oligonucleotide
aagggaucuguaaauaggu

SEQ ID NO: 826537 - RNA, 19 nt, Artificial Sequence
  Description of Artificial Sequence: Synthetic oligonucleotide
guuccaacauuacacuacc

SEQ ID NO: 826538 - RNA, 19 nt, Artificial Sequence
  Description of Artificial Sequence: Synthetic oligonucleotide
uuguguauugggaaaugaa

SEQ ID NO: 826539 - RNA, 19 nt, Artificial Sequence
  Description of Artificial Sequence: Synthetic oligonucleotide
ugugccaguuuccuucucc

SEQ ID NO: 826540 - RNA, 19 nt, Artificial Sequence
  Description of Artificial Sequence: Synthetic oligonucleotide
ugcaguugcaucuuguauu

SEQ ID NO: 826541 - RNA, 19 nt, Artificial Sequence
  Description of Artificial Sequence: Synthetic oligonucleotide
cauuaauagacagacaaaa

SEQ ID NO: 826542 - RNA, 19 nt, Artificial Sequence
  Description of Artificial Sequence: Synthetic oligonucleotide
auuuuaacuauugacccau

SEQ ID NO: 826543 - RNA, 19 nt, Artificial Sequence
  Description of Artificial Sequence: Synthetic oligonucleotide
ugcuggggcuuaauuauag

SEQ ID NO: 826544 - RNA, 19 nt, Artificial Sequence
  Description of Artificial Sequence: Synthetic oligonucleotide
ugacuaacaaggcaccaau

SEQ ID NO: 826545 - RNA, 19 nt, Artificial Sequence
  Description of Artificial Sequence: Synthetic oligonucleotide
ggaaauucucauaagugag

SEQ ID NO: 826546 - RNA, 19 nt, Artificial Sequence
  Description of Artificial Sequence: Synthetic oligonucleotide
aguuaaaguaacauucaga

SEQ ID NO: 826547 - RNA, 19 nt, Artificial Sequence
  Description of Artificial Sequence: Synthetic oligonucleotide
uuuguguauugggaaauga

SEQ ID NO: 826548 - RNA, 19 nt, Artificial Sequence
  Description of Artificial Sequence: Synthetic oligonucleotide
uugauaacuuaaugucagc

SEQ ID NO: 826549 - RNA, 19 nt, Artificial Sequence
  Description of Artificial Sequence: Synthetic oligonucleotide
cucuugguuaaauccauuc

SEQ ID NO: 826550 - RNA, 19 nt, Artificial Sequence
  Description of Artificial Sequence: Synthetic oligonucleotide
acaagugaaugccuuugug

SEQ ID NO: 826551 - RNA, 19 nt, Artificial Sequence
  Description of Artificial Sequence: Synthetic oligonucleotide
uuacacuaccacauguaau

SEQ ID NO: 826552 - RNA, 19 nt, Artificial Sequence
  Description of Artificial Sequence: Synthetic oligonucleotide
agucuuugacuuugaaaug

SEQ ID NO: 826553 - RNA, 19 nt, Artificial Sequence
  Description of Artificial Sequence: Synthetic oligonucleotide
aagcaggaccauuaauaga

SEQ ID NO: 826554 - RNA, 19 nt, Artificial Sequence
  Description of Artificial Sequence: Synthetic oligonucleotide
agacagacaaaagaauaug

SEQ ID NO: 826555 - RNA, 19 nt, Artificial Sequence
  Description of Artificial Sequence: Synthetic oligonucleotide
acuaccacauguaaucuug

SEQ ID NO: 826556 - RNA, 19 nt, Artificial Sequence
  Description of Artificial Sequence: Synthetic oligonucleotide
uuuucccuacguauacgug

SEQ ID NO: 826557 - RNA, 19 nt, Artificial Sequence
  Description of Artificial Sequence: Synthetic oligonucleotide
aaguaacaugaauugcuuu

SEQ ID NO: 826558 - RNA, 19 nt, Artificial Sequence
  Description of Artificial Sequence: Synthetic oligonucleotide
aaugucagcuguaucagua

SEQ ID NO: 826559 - RNA, 19 nt, Artificial Sequence
  Description of Artificial Sequence: Synthetic oligonucleotide
auuuagcuuuaguccaguc

SEQ ID NO: 826560 - RNA, 19 nt, Artificial Sequence
  Description of Artificial Sequence: Synthetic oligonucleotide
aagaacacagaugguggug

SEQ ID NO: 826561 - RNA, 19 nt, Artificial Sequence
  Description of Artificial Sequence: Synthetic oligonucleotide
aaggggaccuucaccaagg

SEQ ID NO: 826562 - RNA, 19 nt, Artificial Sequence
  Description of Artificial Sequence: Synthetic oligonucleotide
gauguaccaacaagguaag

SEQ ID NO: 826563 - RNA, 19 nt, Artificial Sequence
  Description of Artificial Sequence: Synthetic oligonucleotide
augccuuugugcgugguac

SEQ ID NO: 826564 - RNA, 19 nt, Artificial Sequence
  Description of Artificial Sequence: Synthetic oligonucleotide
auauggcucgaacaaacaa

SEQ ID NO: 826565 - RNA, 19 nt, Artificial Sequence
  Description of Artificial Sequence: Synthetic oligonucleotide
uuaguccagucuuugacuu

SEQ ID NO: 826566 - RNA, 19 nt, Artificial Sequence
  Description of Artificial Sequence: Synthetic oligonucleotide
uaucaguauacuucaguuu

SEQ ID NO: 826567 - RNA, 19 nt, Artificial Sequence
  Description of Artificial Sequence: Synthetic oligonucleotide
auugacccauaauggaaug

SEQ ID NO: 826568 - RNA, 19 nt, Artificial Sequence
  Description of Artificial Sequence: Synthetic oligonucleotide
ugaauguaacagcgguggc

SEQ ID NO: 826569 - RNA, 19 nt, Artificial Sequence
  Description of Artificial Sequence: Synthetic oligonucleotide
ucgaacaaacaauuucuua

SEQ ID NO: 826570 - RNA, 19 nt, Artificial Sequence
  Description of Artificial Sequence: Synthetic oligonucleotide
acguauacgugucuguuau

SEQ ID NO: 826571 - RNA, 19 nt, Artificial Sequence
  Description of Artificial Sequence: Synthetic oligonucleotide
uuaugggaaggagauuuug

SEQ ID NO: 826572 - RNA, 19 nt, Artificial Sequence
  Description of Artificial Sequence: Synthetic oligonucleotide
ugcaccaaucuuauagcaa

SEQ ID NO: 826573 - RNA, 19 nt, Artificial Sequence
  Description of Artificial Sequence: Synthetic oligonucleotide
aacugacucuuaaacuguc

SEQ ID NO: 826574 - RNA, 19 nt, Artificial Sequence
  Description of Artificial Sequence: Synthetic oligonucleotide
caggaccauuaauagacag

SEQ ID NO: 826575 - RNA, 19 nt, Artificial Sequence
  Description of Artificial Sequence: Synthetic oligonucleotide
ugguaaauucucccugacu

SEQ ID NO: 826576 - RNA, 19 nt, Artificial Sequence
  Description of Artificial Sequence: Synthetic oligonucleotide
agaagcaggaccauuaaua

SEQ ID NO: 826577 - RNA, 19 nt, Artificial Sequence
  Description of Artificial Sequence: Synthetic oligonucleotide
auuuucaagggagacugca

SEQ ID NO: 826578 - RNA, 19 nt, Artificial Sequence
  Description of Artificial Sequence: Synthetic oligonucleotide
aguaacauucagauugugu

SEQ ID NO: 826579 - RNA, 19 nt, Artificial Sequence
  Description of Artificial Sequence: Synthetic oligonucleotide
auuugcucaaauggcauga

SEQ ID NO: 826580 - RNA, 19 nt, Artificial Sequence
  Description of Artificial Sequence: Synthetic oligonucleotide
uaacccuaucaauauaauu

SEQ ID NO: 826581 - RNA, 19 nt, Artificial Sequence
  Description of Artificial Sequence: Synthetic oligonucleotide
ggaccauuaauagacagac

SEQ ID NO: 826582 - RNA, 19 nt, Artificial Sequence
  Description of Artificial Sequence: Synthetic oligonucleotide
guuaaauccauuccccucu

SEQ ID NO: 826583 - RNA, 19 nt, Artificial Sequence
  Description of Artificial Sequence: Synthetic oligonucleotide
ucagauuguguagcauagg

SEQ ID NO: 826584 - RNA, 19 nt, Artificial Sequence
  Description of Artificial Sequence: Synthetic oligonucleotide
aaccgaacaaauacaggga

SEQ ID NO: 826585 - RNA, 19 nt, Artificial Sequence
  Description of Artificial Sequence: Synthetic oligonucleotide
uuaucugauagagcuugug

SEQ ID NO: 826586 - RNA, 19 nt, Artificial Sequence
  Description of Artificial Sequence: Synthetic oligonucleotide
acccuaucaauauaauuua

SEQ ID NO: 826587 - RNA, 19 nt, Artificial Sequence
  Description of Artificial Sequence: Synthetic oligonucleotide
gccucuuugauuuauggga

SEQ ID NO: 826588 - RNA, 19 nt, Artificial Sequence
  Description of Artificial Sequence: Synthetic oligonucleotide
uuuaugccaucuugcaguc

SEQ ID NO: 826589 - RNA, 19 nt, Artificial Sequence
  Description of Artificial Sequence: Synthetic oligonucleotide
auaggucuacuauugugaa

SEQ ID NO: 826590 - RNA, 19 nt, Artificial Sequence
  Description of Artificial Sequence: Synthetic oligonucleotide
uguaaucuugaaugcuuau

SEQ ID NO: 826591 - RNA, 19 nt, Artificial Sequence
  Description of Artificial Sequence: Synthetic oligonucleotide
gcgguggcaguuuaaaagg

SEQ ID NO: 826592 - RNA, 19 nt, Artificial Sequence
  Description of Artificial Sequence: Synthetic oligonucleotide
cucguugugaaggaugaac

SEQ ID NO: 826593 - RNA, 19 nt, Artificial Sequence
  Description of Artificial Sequence: Synthetic oligonucleotide
gacaagacagacuucuagu

SEQ ID NO: 826594 - RNA, 19 nt, Artificial Sequence
  Description of Artificial Sequence: Synthetic oligonucleotide
acuucucagcaaaaggaag

SEQ ID NO: 826595 - RNA, 19 nt, Artificial Sequence
  Description of Artificial Sequence: Synthetic oligonucleotide
guaggaauuaaagaagugu

SEQ ID NO: 826596 - RNA, 19 nt, Artificial Sequence
  Description of Artificial Sequence: Synthetic oligonucleotide
cuaagaagcaggaccauua

SEQ ID NO: 826597 - RNA, 19 nt, Artificial Sequence
  Description of Artificial Sequence: Synthetic oligonucleotide
caugagacaagacagacuu

SEQ ID NO: 826598 - RNA, 19 nt, Artificial Sequence
  Description of Artificial Sequence: Synthetic oligonucleotide
aaauuauccugugccaguu

SEQ ID NO: 826599 - RNA, 19 nt, Artificial Sequence
  Description of Artificial Sequence: Synthetic oligonucleotide
cucauaagugagaaaugca

SEQ ID NO: 826600 - RNA, 19 nt, Artificial Sequence
  Description of Artificial Sequence: Synthetic oligonucleotide
uggugguguugucuugggg

SEQ ID NO: 826601 - RNA, 19 nt, Artificial Sequence
  Description of Artificial Sequence: Synthetic oligonucleotide
uggcacugcaguugcaucu

SEQ ID NO: 826602 - RNA, 19 nt, Artificial Sequence
  Description of Artificial Sequence: Synthetic oligonucleotide
acuauaaguuaaaguaaca

SEQ ID NO: 826603 - RNA, 19 nt, Artificial Sequence
  Description of Artificial Sequence: Synthetic oligonucleotide
uucccuacguauacguguc

SEQ ID NO: 826604 - RNA, 19 nt, Artificial Sequence
  Description of Artificial Sequence: Synthetic oligonucleotide
aggagauuuuggguccugc

SEQ ID NO: 826605 - RNA, 19 nt, Artificial Sequence
  Description of Artificial Sequence: Synthetic oligonucleotide
agcagauacaucccaguua

SEQ ID NO: 826606 - RNA, 19 nt, Artificial Sequence
  Description of Artificial Sequence: Synthetic oligonucleotide
ugcaugguauacucccucu

SEQ ID NO: 826607 - RNA, 19 nt, Artificial Sequence
  Description of Artificial Sequence: Synthetic oligonucleotide
auuuaacccuaucaauaua

SEQ ID NO: 826608 - RNA, 19 nt, Artificial Sequence
  Description of Artificial Sequence: Synthetic oligonucleotide
cuauugugaaaugugguaa

SEQ ID NO: 826609 - RNA, 19 nt, Artificial Sequence
  Description of Artificial Sequence: Synthetic oligonucleotide
uuuaugggaaggagauuuu

SEQ ID NO: 826610 - RNA, 19 nt, Artificial Sequence
  Description of Artificial Sequence: Synthetic oligonucleotide
aacuugucgccuucuuaau

SEQ ID NO: 826611 - RNA, 19 nt, Artificial Sequence
  Description of Artificial Sequence: Synthetic oligonucleotide
aauuauccugugccaguuu

SEQ ID NO: 826612 - RNA, 19 nt, Artificial Sequence
  Description of Artificial Sequence: Synthetic oligonucleotide
agauuguguagcauaggcu

SEQ ID NO: 826613 - RNA, 19 nt, Artificial Sequence
  Description of Artificial Sequence: Synthetic oligonucleotide
auauaacuacacauccaug

SEQ ID NO: 826614 - RNA, 19 nt, Artificial Sequence
  Description of Artificial Sequence: Synthetic oligonucleotide
cagccuugauaacuuaaug

SEQ ID NO: 826615 - RNA, 19 nt, Artificial Sequence
  Description of Artificial Sequence: Synthetic oligonucleotide
ugggguuuucuaccaaaau

SEQ ID NO: 826616 - RNA, 19 nt, Artificial Sequence
  Description of Artificial Sequence: Synthetic oligonucleotide
aaugccuuugugcguggua

SEQ ID NO: 826617 - RNA, 19 nt, Artificial Sequence
  Description of Artificial Sequence: Synthetic oligonucleotide
ugaaugccuuugugcgugg

SEQ ID NO: 826618 - RNA, 19 nt, Artificial Sequence
  Description of Artificial Sequence: Synthetic oligonucleotide
agggugggccauaaggaac

SEQ ID NO: 826619 - RNA, 19 nt, Artificial Sequence
  Description of Artificial Sequence: Synthetic oligonucleotide
caaaaugccuugucaguga

SEQ ID NO: 826620 - RNA, 19 nt, Artificial Sequence
  Description of Artificial Sequence: Synthetic oligonucleotide
auauacugauguaccaaca

SEQ ID NO: 826621 - RNA, 19 nt, Artificial Sequence
  Description of Artificial Sequence: Synthetic oligonucleotide
uuccaacauuacacuacca

SEQ ID NO: 826622 - RNA, 19 nt, Artificial Sequence
  Description of Artificial Sequence: Synthetic oligonucleotide
ccuucgauugucagaagag

SEQ ID NO: 826623 - RNA, 19 nt, Artificial Sequence
  Description of Artificial Sequence: Synthetic oligonucleotide
uacguauacgugucuguua

SEQ ID NO: 826624 - RNA, 19 nt, Artificial Sequence
  Description of Artificial Sequence: Synthetic oligonucleotide
gguuaaauccauuccccuc

SEQ ID NO: 826625 - RNA, 19 nt, Artificial Sequence
  Description of Artificial Sequence: Synthetic oligonucleotide
ugacccauaauggaauguu

SEQ ID NO: 826626 - RNA, 19 nt, Artificial Sequence
  Description of Artificial Sequence: Synthetic oligonucleotide
guaaauucucccugacuaa

SEQ ID NO: 826627 - RNA, 19 nt, Artificial Sequence
  Description of Artificial Sequence: Synthetic oligonucleotide
ugauagagcuugugguaaa

SEQ ID NO: 826628 - RNA, 19 nt, Artificial Sequence
  Description of Artificial Sequence: Synthetic oligonucleotide
aggacccuucgauugucag

SEQ ID NO: 826629 - RNA, 19 nt, Artificial Sequence
  Description of Artificial Sequence: Synthetic oligonucleotide
uguguagcauaggcuguag

SEQ ID NO: 826630 - RNA, 19 nt, Artificial Sequence
  Description of Artificial Sequence: Synthetic oligonucleotide
uaaggccaaguuccaacau

SEQ ID NO: 826631 - RNA, 19 nt, Artificial Sequence
  Description of Artificial Sequence: Synthetic oligonucleotide
uuuaaccauuuaacccuau

SEQ ID NO: 826632 - RNA, 19 nt, Artificial Sequence
  Description of Artificial Sequence: Synthetic oligonucleotide
cagacuucuaguggcacug

SEQ ID NO: 826633 - RNA, 19 nt, Artificial Sequence
  Description of Artificial Sequence: Synthetic oligonucleotide
caacauuacacuaccacau

SEQ ID NO: 826634 - RNA, 19 nt, Artificial Sequence
  Description of Artificial Sequence: Synthetic oligonucleotide
gucgccuucuuaauucugc

SEQ ID NO: 826635 - RNA, 19 nt, Artificial Sequence
  Description of Artificial Sequence: Synthetic oligonucleotide
ugugcgugguacccuuaca

SEQ ID NO: 826636 - RNA, 19 nt, Artificial Sequence
  Description of Artificial Sequence: Synthetic oligonucleotide
gcgugguacccuuacacag

SEQ ID NO: 826637 - RNA, 19 nt, Artificial Sequence
  Description of Artificial Sequence: Synthetic oligonucleotide
ggccauaaggaacaaucac

SEQ ID NO: 826638 - RNA, 19 nt, Artificial Sequence
  Description of Artificial Sequence: Synthetic oligonucleotide
acgauacauuuaugaaugu

SEQ ID NO: 826639 - RNA, 19 nt, Artificial Sequence
  Description of Artificial Sequence: Synthetic oligonucleotide
uugacccauaauggaaugu

SEQ ID NO: 826640 - RNA, 19 nt, Artificial Sequence
  Description of Artificial Sequence: Synthetic oligonucleotide
uuuuaacuauugacccaua

SEQ ID NO: 826641 - RNA, 19 nt, Artificial Sequence
  Description of Artificial Sequence: Synthetic oligonucleotide
aaaugaaucuuggcauguu

SEQ ID NO: 826642 - RNA, 19 nt, Artificial Sequence
  Description of Artificial Sequence: Synthetic oligonucleotide
gaagaacacagaugguggu

SEQ ID NO: 826643 - RNA, 19 nt, Artificial Sequence
  Description of Artificial Sequence: Synthetic oligonucleotide
aggaccauuaauagacaga

SEQ ID NO: 826644 - RNA, 19 nt, Artificial Sequence
  Description of Artificial Sequence: Synthetic oligonucleotide
cuguaucaguauacuucag

SEQ ID NO: 826645 - RNA, 19 nt, Artificial Sequence
  Description of Artificial Sequence: Synthetic oligonucleotide
auguaccaacaagguaagc

SEQ ID NO: 826646 - RNA, 19 nt, Artificial Sequence
  Description of Artificial Sequence: Synthetic oligonucleotide
agcuuuaguccagucuuug

SEQ ID NO: 826647 - RNA, 19 nt, Artificial Sequence
  Description of Artificial Sequence: Synthetic oligonucleotide
ccaacauuacacuaccaca

SEQ ID NO: 826648 - RNA, 19 nt, Artificial Sequence
  Description of Artificial Sequence: Synthetic oligonucleotide
uccuuaacuugucgccuuc

SEQ ID NO: 826649 - RNA, 19 nt, Artificial Sequence
  Description of Artificial Sequence: Synthetic oligonucleotide
cugcaccaaucuuauagca

SEQ ID NO: 826650 - RNA, 19 nt, Artificial Sequence
  Description of Artificial Sequence: Synthetic oligonucleotide
gaaaugaaucuuggcaugu

SEQ ID NO: 826651 - RNA, 19 nt, Artificial Sequence
  Description of Artificial Sequence: Synthetic oligonucleotide
cuguuauccuuaacuuguc

SEQ ID NO: 826652 - RNA, 19 nt, Artificial Sequence
  Description of Artificial Sequence: Synthetic oligonucleotide
acaggauuacccagggacu

SEQ ID NO: 826653 - RNA, 19 nt, Artificial Sequence
  Description of Artificial Sequence: Synthetic oligonucleotide
agaauaaggccaaguucca

SEQ ID NO: 826654 - RNA, 19 nt, Artificial Sequence
  Description of Artificial Sequence: Synthetic oligonucleotide
auggcucgaacaaacaauu

SEQ ID NO: 826655 - RNA, 19 nt, Artificial Sequence
  Description of Artificial Sequence: Synthetic oligonucleotide
cuucgauugucagaagaga

SEQ ID NO: 826656 - RNA, 19 nt, Artificial Sequence
  Description of Artificial Sequence: Synthetic oligonucleotide
ccuaucaauauaauuuaaa

SEQ ID NO: 826657 - RNA, 19 nt, Artificial Sequence
  Description of Artificial Sequence: Synthetic oligonucleotide
aggggaccuucaccaaggg

SEQ ID NO: 826658 - RNA, 19 nt, Artificial Sequence
  Description of Artificial Sequence: Synthetic oligonucleotide
gcuuucacaaaccgaacaa

SEQ ID NO: 826659 - RNA, 19 nt, Artificial Sequence
  Description of Artificial Sequence: Synthetic oligonucleotide
caauuucuauuuuaacuau

SEQ ID NO: 826660 - RNA, 19 nt, Artificial Sequence
  Description of Artificial Sequence: Synthetic oligonucleotide
ggugguguugucuuggggu

SEQ ID NO: 826661 - RNA, 19 nt, Artificial Sequence
  Description of Artificial Sequence: Synthetic oligonucleotide
cuucuaguggcacugcagu

SEQ ID NO: 826662 - RNA, 19 nt, Artificial Sequence
  Description of Artificial Sequence: Synthetic oligonucleotide
cugacucuuaaacuguccu

SEQ ID NO: 826663 - RNA, 19 nt, Artificial Sequence
  Description of Artificial Sequence: Synthetic oligonucleotide
agagaguaacuuguugaua

SEQ ID NO: 826664 - RNA, 19 nt, Artificial Sequence
  Description of Artificial Sequence: Synthetic oligonucleotide
uagcuuuaguccagucuuu

SEQ ID NO: 826665 - RNA, 19 nt, Artificial Sequence
  Description of Artificial Sequence: Synthetic oligonucleotide
uugcccucguugugaagga

SEQ ID NO: 826666 - RNA, 19 nt, Artificial Sequence
  Description of Artificial Sequence: Synthetic oligonucleotide
agggacuuagguaggaauu

SEQ ID NO: 826667 - RNA, 19 nt, Artificial Sequence
  Description of Artificial Sequence: Synthetic oligonucleotide
gccaaguuccaacauuaca

SEQ ID NO: 826668 - RNA, 19 nt, Artificial Sequence
  Description of Artificial Sequence: Synthetic oligonucleotide
gauuuuggguccugcugcu

SEQ ID NO: 826669 - RNA, 19 nt, Artificial Sequence
  Description of Artificial Sequence: Synthetic oligonucleotide
gaauaaggccaaguuccaa

SEQ ID NO: 826670 - RNA, 19 nt, Artificial Sequence
  Description of Artificial Sequence: Synthetic oligonucleotide
caguauacuucaguuuaca

SEQ ID NO: 826671 - RNA, 19 nt, Artificial Sequence
  Description of Artificial Sequence: Synthetic oligonucleotide
gucuacuauugugaaaugu

SEQ ID NO: 826672 - RNA, 19 nt, Artificial Sequence
  Description of Artificial Sequence: Synthetic oligonucleotide
cccauagcagauacauccc

SEQ ID NO: 826673 - RNA, 19 nt, Artificial Sequence
  Description of Artificial Sequence: Synthetic oligonucleotide
gaccauuaauagacagaca

SEQ ID NO: 826674 - RNA, 19 nt, Artificial Sequence
  Description of Artificial Sequence: Synthetic oligonucleotide
ucccuacguauacgugucu

SEQ ID NO: 826675 - RNA, 19 nt, Artificial Sequence
  Description of Artificial Sequence: Synthetic oligonucleotide
aaggacccuucgauuguca

SEQ ID NO: 826676 - RNA, 19 nt, Artificial Sequence
  Description of Artificial Sequence: Synthetic oligonucleotide
ggucuacuauugugaaaug

SEQ ID NO: 826677 - RNA, 19 nt, Artificial Sequence
  Description of Artificial Sequence: Synthetic oligonucleotide
gcucgaacaaacaauuucu

SEQ ID NO: 826678 - RNA, 19 nt, Artificial Sequence
  Description of Artificial Sequence: Synthetic oligonucleotide
ccaaucuuauagcaaaaua

SEQ ID NO: 826679 - RNA, 19 nt, Artificial Sequence
  Description of Artificial Sequence: Synthetic oligonucleotide
uaguccagucuuugacuuu

SEQ ID NO: 826680 - RNA, 19 nt, Artificial Sequence
  Description of Artificial Sequence: Synthetic oligonucleotide
augagagcuuguuccuguu

SEQ ID NO: 826681 - RNA, 19 nt, Artificial Sequence
  Description of Artificial Sequence: Synthetic oligonucleotide
cugacuaacaaggcaccaa

SEQ ID NO: 826682 - RNA, 19 nt, Artificial Sequence
  Description of Artificial Sequence: Synthetic oligonucleotide
cgaacaaauacagggaaga

SEQ ID NO: 826683 - RNA, 19 nt, Artificial Sequence
  Description of Artificial Sequence: Synthetic oligonucleotide
acgugucuguuauccuuaa

SEQ ID NO: 826684 - RNA, 19 nt, Artificial Sequence
  Description of Artificial Sequence: Synthetic oligonucleotide
gcuuuaguccagucuuuga

SEQ ID NO: 826685 - RNA, 19 nt, Artificial Sequence
  Description of Artificial Sequence: Synthetic oligonucleotide
gcaauucagccuugauaac

SEQ ID NO: 826686 - RNA, 19 nt, Artificial Sequence
  Description of Artificial Sequence: Synthetic oligonucleotide
guggcaguuuaaaagggau

SEQ ID NO: 826687 - RNA, 19 nt, Artificial Sequence
  Description of Artificial Sequence: Synthetic oligonucleotide
acccuucgauugucagaag

SEQ ID NO: 826688 - RNA, 19 nt, Artificial Sequence
  Description of Artificial Sequence: Synthetic oligonucleotide
aacagcgguggcaguuuaa

SEQ ID NO: 826689 - RNA, 19 nt, Artificial Sequence
  Description of Artificial Sequence: Synthetic oligonucleotide
ccuuguuacaaguccuuaa

SEQ ID NO: 826690 - RNA, 19 nt, Artificial Sequence
  Description of Artificial Sequence: Synthetic oligonucleotide
guauugggaaaugaaucuu

SEQ ID NO: 826691 - RNA, 19 nt, Artificial Sequence
  Description of Artificial Sequence: Synthetic oligonucleotide
ggagauuuuggguccugcu

SEQ ID NO: 826692 - RNA, 19 nt, Artificial Sequence
  Description of Artificial Sequence: Synthetic oligonucleotide
gggccauaaggaacaauca

SEQ ID NO: 826693 - RNA, 19 nt, Artificial Sequence
  Description of Artificial Sequence: Synthetic oligonucleotide
cccuucgauugucagaaga

SEQ ID NO: 826694 - RNA, 19 nt, Artificial Sequence
  Description of Artificial Sequence: Synthetic oligonucleotide
cagggacuuagguaggaau

SEQ ID NO: 826695 - RNA, 19 nt, Artificial Sequence
  Description of Artificial Sequence: Synthetic oligonucleotide
gugguguugucuugggguu

SEQ ID NO: 826696 - RNA, 19 nt, Artificial Sequence
  Description of Artificial Sequence: Synthetic oligonucleotide
gcccucguugugaaggaug

SEQ ID NO: 826697 - RNA, 19 nt, Artificial Sequence
  Description of Artificial Sequence: Synthetic oligonucleotide
cccuaucaauauaauuuaa

SEQ ID NO: 826698 - RNA, 19 nt, Artificial Sequence
  Description of Artificial Sequence: Synthetic oligonucleotide
aacuguccuuguaguuaaa

SEQ ID NO: 826699 - RNA, 19 nt, Artificial Sequence
  Description of Artificial Sequence: Synthetic oligonucleotide
gacccauaauggaauguuu

SEQ ID NO: 826700 - RNA, 19 nt, Artificial Sequence
  Description of Artificial Sequence: Synthetic oligonucleotide
cagcgguggcaguuuaaaa

SEQ ID NO: 826701 - RNA, 19 nt, Artificial Sequence
  Description of Artificial Sequence: Synthetic oligonucleotide
gacuaacaaggcaccaauu

SEQ ID NO: 826702 - RNA, 19 nt, Artificial Sequence
  Description of Artificial Sequence: Synthetic oligonucleotide
cccuacguauacgugucug

SEQ ID NO: 826703 - RNA, 19 nt, Artificial Sequence
  Description of Artificial Sequence: Synthetic oligonucleotide
cgauugucagaagagaaua

SEQ ID NO: 826704 - RNA, 19 nt, Artificial Sequence
  Description of Artificial Sequence: Synthetic oligonucleotide
cacuaccacauguaaucuu

SEQ ID NO: 826705 - RNA, 19 nt, Artificial Sequence
  Description of Artificial Sequence: Synthetic oligonucleotide
cuacguauacgugucuguu

SEQ ID NO: 826706 - RNA, 19 nt, Artificial Sequence
  Description of Artificial Sequence: Synthetic oligonucleotide
ugcccucguugugaaggau

SEQ ID NO: 826707 - RNA, 19 nt, Artificial Sequence
  Description of Artificial Sequence: Synthetic oligonucleotide
ccaggaaaccagggugggc

SEQ ID NO: 826708 - RNA, 19 nt, Artificial Sequence
  Description of Artificial Sequence: Synthetic oligonucleotide
gaaugccuuugugcguggu

SEQ ID NO: 826709 - RNA, 19 nt, Artificial Sequence
  Description of Artificial Sequence: Synthetic oligonucleotide
ccuucuuaauucugcaauu

SEQ ID NO: 826710 - RNA, 19 nt, Artificial Sequence
  Description of Artificial Sequence: Synthetic oligonucleotide
ccuacguauacgugucugu

SEQ ID NO: 826711 - RNA, 19 nt, Artificial Sequence
  Description of Artificial Sequence: Synthetic oligonucleotide
caggauuacccagggacuu

SEQ ID NO: 826712 - RNA, 19 nt, Artificial Sequence
  Description of Artificial Sequence: Synthetic oligonucleotide
cgugucuguuauccuuaac

SEQ ID NO: 826713 - RNA, 19 nt, Artificial Sequence
  Description of Artificial Sequence: Synthetic oligonucleotide
gcuaagaagcaggaccauu

SEQ ID NO: 826714 - RNA, 19 nt, Artificial Sequence
  Description of Artificial Sequence: Synthetic oligonucleotide
gcaugguauacucccucuu

SEQ ID NO: 826715 - RNA, 19 nt, Artificial Sequence
  Description of Artificial Sequence: Synthetic oligonucleotide
gguguugucuugggguuuu

SEQ ID NO: 826716 - RNA, 19 nt, Artificial Sequence
  Description of Artificial Sequence: Synthetic oligonucleotide
cccuuguuacaaguccuua

SEQ ID NO: 826717 - RNA, 19 nt, Artificial Sequence
  Description of Artificial Sequence: Synthetic oligonucleotide
ggaaaccagggugggccau

SEQ ID NO: 826718 - RNA, 19 nt, Artificial Sequence
  Description of Artificial Sequence: Synthetic oligonucleotide
ccuuugugcgugguacccu

SEQ ID NO: 826719 - RNA, 19 nt, Artificial Sequence
  Description of Artificial Sequence: Synthetic oligonucleotide
aauacuucuggucagugcc

SEQ ID NO: 826720 - RNA, 19 nt, Artificial Sequence
  Description of Artificial Sequence: Synthetic oligonucleotide
aauaccuggggacguaagc

SEQ ID NO: 826721 - RNA, 19 nt, Artificial Sequence
  Description of Artificial Sequence: Synthetic oligonucleotide
caaagucucggcaagaggg

SEQ ID NO: 826722 - RNA, 19 nt, Artificial Sequence
  Description of Artificial Sequence: Synthetic oligonucleotide
uuaaucucacugaaggugc

SEQ ID NO: 826723 - RNA, 19 nt, Artificial Sequence
  Description of Artificial Sequence: Synthetic oligonucleotide
ucauuggugaaauuguuca

SEQ ID NO: 826724 - RNA, 19 nt, Artificial Sequence
  Description of Artificial Sequence: Synthetic oligonucleotide
ugacauaucugccaggcug

SEQ ID NO: 826725 - RNA, 19 nt, Artificial Sequence
  Description of Artificial Sequence: Synthetic oligonucleotide
ugagcuaccaggcugggcc

SEQ ID NO: 826726 - RNA, 19 nt, Artificial Sequence
  Description of Artificial Sequence: Synthetic oligonucleotide
ugaucacucaguacggugg

SEQ ID NO: 826727 - RNA, 19 nt, Artificial Sequence
  Description of Artificial Sequence: Synthetic oligonucleotide
uagugcgggaggaagagcg

SEQ ID NO: 826728 - RNA, 19 nt, Artificial Sequence
  Description of Artificial Sequence: Synthetic oligonucleotide
cuuaaacucaaaugucucc

SEQ ID NO: 826729 - RNA, 19 nt, Artificial Sequence
  Description of Artificial Sequence: Synthetic oligonucleotide
aaaccgagugagcuugcgc

SEQ ID NO: 826730 - RNA, 19 nt, Artificial Sequence
  Description of Artificial Sequence: Synthetic oligonucleotide
aaugaaucucugcagcaga

SEQ ID NO: 826731 - RNA, 19 nt, Artificial Sequence
  Description of Artificial Sequence: Synthetic oligonucleotide
gaugaaacgagagcggucc

SEQ ID NO: 826732 - RNA, 19 nt, Artificial Sequence
  Description of Artificial Sequence: Synthetic oligonucleotide
uuaaugaaucucugcagca

SEQ ID NO: 826733 - RNA, 19 nt, Artificial Sequence
  Description of Artificial Sequence: Synthetic oligonucleotide
accguacaaaggcacaggc

SEQ ID NO: 826734 - RNA, 19 nt, Artificial Sequence
  Description of Artificial Sequence: Synthetic oligonucleotide
aaccgagugagcuugcgca

SEQ ID NO: 826735 - RNA, 19 nt, Artificial Sequence
  Description of Artificial Sequence: Synthetic oligonucleotide
agcuggaugaaacgagagc

SEQ ID NO: 826736 - RNA, 19 nt, Artificial Sequence
  Description of Artificial Sequence: Synthetic oligonucleotide
gaacuccuuaccccgaagg

SEQ ID NO: 826737 - RNA, 19 nt, Artificial Sequence
  Description of Artificial Sequence: Synthetic oligonucleotide
aggcuaaauaccuggggac

SEQ ID NO: 826738 - RNA, 19 nt, Artificial Sequence
  Description of Artificial Sequence: Synthetic oligonucleotide
uccggguagauguagauuc

SEQ ID NO: 826739 - RNA, 19 nt, Artificial Sequence
  Description of Artificial Sequence: Synthetic oligonucleotide
aguagcucaggccuggcag

SEQ ID NO: 826740 - RNA, 19 nt, Artificial Sequence
  Description of Artificial Sequence: Synthetic oligonucleotide
uguuaguuccuucccaaac

SEQ ID NO: 826741 - RNA, 19 nt, Artificial Sequence
  Description of Artificial Sequence: Synthetic oligonucleotide
uauagccguggcaugaagc

SEQ ID NO: 826742 - RNA, 19 nt, Artificial Sequence
  Description of Artificial Sequence: Synthetic oligonucleotide
aagugaccaagaaagaugu

SEQ ID NO: 826743 - RNA, 19 nt, Artificial Sequence
  Description of Artificial Sequence: Synthetic oligonucleotide
cuugcuugacguaccaucc

SEQ ID NO: 826744 - RNA, 19 nt, Artificial Sequence
  Description of Artificial Sequence: Synthetic oligonucleotide
aggaaucaguuccaccacc

SEQ ID NO: 826745 - RNA, 19 nt, Artificial Sequence
  Description of Artificial Sequence: Synthetic oligonucleotide
gacgaguagggcuugugag

SEQ ID NO: 826746 - RNA, 19 nt, Artificial Sequence
  Description of Artificial Sequence: Synthetic oligonucleotide
auaccuggggacguaagcc

SEQ ID NO: 826747 - RNA, 19 nt, Artificial Sequence
  Description of Artificial Sequence: Synthetic oligonucleotide
uuuugaugacaccaaacuu

SEQ ID NO: 826748 - RNA, 19 nt, Artificial Sequence
  Description of Artificial Sequence: Synthetic oligonucleotide
gguacaauacuucugguca

SEQ ID NO: 826749 - RNA, 19 nt, Artificial Sequence
  Description of Artificial Sequence: Synthetic oligonucleotide
caaugcaaccguacaaagg

SEQ ID NO: 826750 - RNA, 19 nt, Artificial Sequence
  Description of Artificial Sequence: Synthetic oligonucleotide
agaggcuaaauaccugggg

SEQ ID NO: 826751 - RNA, 19 nt, Artificial Sequence
  Description of Artificial Sequence: Synthetic oligonucleotide
ugacguaccauccuaucaa

SEQ ID NO: 826752 - RNA, 19 nt, Artificial Sequence
  Description of Artificial Sequence: Synthetic oligonucleotide
ucggcaagagggauuaggc

SEQ ID NO: 826753 - RNA, 19 nt, Artificial Sequence
  Description of Artificial Sequence: Synthetic oligonucleotide
gcuggaugaaacgagagcg

SEQ ID NO: 826754 - RNA, 19 nt, Artificial Sequence
  Description of Artificial Sequence: Synthetic oligonucleotide
gagcgugacaugcugagug

SEQ ID NO: 826755 - RNA, 19 nt, Artificial Sequence
  Description of Artificial Sequence: Synthetic oligonucleotide
agggauuaggcacauacau

SEQ ID NO: 826756 - RNA, 19 nt, Artificial Sequence
  Description of Artificial Sequence: Synthetic oligonucleotide
ugauguauagccguggcau

SEQ ID NO: 826757 - RNA, 19 nt, Artificial Sequence
  Description of Artificial Sequence: Synthetic oligonucleotide
uuaaacauuuugagccaug

SEQ ID NO: 826758 - RNA, 19 nt, Artificial Sequence
  Description of Artificial Sequence: Synthetic oligonucleotide
uucagcgccucccaaaagu

SEQ ID NO: 826759 - RNA, 19 nt, Artificial Sequence
  Description of Artificial Sequence: Synthetic oligonucleotide
acccgugucaacucauggc

SEQ ID NO: 826760 - RNA, 19 nt, Artificial Sequence
  Description of Artificial Sequence: Synthetic oligonucleotide
guagauguagauucgagcu

SEQ ID NO: 826761 - RNA, 19 nt, Artificial Sequence
  Description of Artificial Sequence: Synthetic oligonucleotide
acuugcuuaaucucacuga

SEQ ID NO: 826762 - RNA, 19 nt, Artificial Sequence
  Description of Artificial Sequence: Synthetic oligonucleotide
gagagcgguccucauaucc

SEQ ID NO: 826763 - RNA, 19 nt, Artificial Sequence
  Description of Artificial Sequence: Synthetic oligonucleotide
gaggcuaaauaccugggga

SEQ ID NO: 826764 - RNA, 19 nt, Artificial Sequence
  Description of Artificial Sequence: Synthetic oligonucleotide
gguggugaauguuaguucc

SEQ ID NO: 826765 - RNA, 19 nt, Artificial Sequence
  Description of Artificial Sequence: Synthetic oligonucleotide
uuugccgugcgcacaaaga

SEQ ID NO: 826766 - RNA, 19 nt, Artificial Sequence
  Description of Artificial Sequence: Synthetic oligonucleotide
ggacguaagccccaggacg

SEQ ID NO: 826767 - RNA, 19 nt, Artificial Sequence
  Description of Artificial Sequence: Synthetic oligonucleotide
uacccgugucaacucaugg

SEQ ID NO: 826768 - RNA, 19 nt, Artificial Sequence
  Description of Artificial Sequence: Synthetic oligonucleotide
uuccgaaucccgcaggcac

SEQ ID NO: 826769 - RNA, 19 nt, Artificial Sequence
  Description of Artificial Sequence: Synthetic oligonucleotide
gauucgagcugggaggcgg

SEQ ID NO: 826770 - RNA, 19 nt, Artificial Sequence
  Description of Artificial Sequence: Synthetic oligonucleotide
agucuagcacagcuugugg

SEQ ID NO: 826771 - RNA, 19 nt, Artificial Sequence
  Description of Artificial Sequence: Synthetic oligonucleotide
cucaguacgguggugaaug

SEQ ID NO: 826772 - RNA, 19 nt, Artificial Sequence
  Description of Artificial Sequence: Synthetic oligonucleotide
uugauguauagccguggca

SEQ ID NO: 826773 - RNA, 19 nt, Artificial Sequence
  Description of Artificial Sequence: Synthetic oligonucleotide
ucgggugucagaugguuca

SEQ ID NO: 826774 - RNA, 19 nt, Artificial Sequence
  Description of Artificial Sequence: Synthetic oligonucleotide
aagucuagcacagcuugug

SEQ ID NO: 826775 - RNA, 19 nt, Artificial Sequence
  Description of Artificial Sequence: Synthetic oligonucleotide
cuugcugcuuuccgaaucc

SEQ ID NO: 826776 - RNA, 19 nt, Artificial Sequence
  Description of Artificial Sequence: Synthetic oligonucleotide
gaauguuaguuccuuccca

SEQ ID NO: 826777 - RNA, 19 nt, Artificial Sequence
  Description of Artificial Sequence: Synthetic oligonucleotide
guaggaacuguuucacuug

SEQ ID NO: 826778 - RNA, 19 nt, Artificial Sequence
  Description of Artificial Sequence: Synthetic oligonucleotide
uggacuacccgugucaacu

SEQ ID NO: 826779 - RNA, 19 nt, Artificial Sequence
  Description of Artificial Sequence: Synthetic oligonucleotide
aggagcuucaccagcacgg

SEQ ID NO: 826780 - RNA, 19 nt, Artificial Sequence
  Description of Artificial Sequence: Synthetic oligonucleotide
auggcucucaaugcaaccg

SEQ ID NO: 826781 - RNA, 19 nt, Artificial Sequence
  Description of Artificial Sequence: Synthetic oligonucleotide
uccucacauaccuuggcac

SEQ ID NO: 826782 - RNA, 19 nt, Artificial Sequence
  Description of Artificial Sequence: Synthetic oligonucleotide
cucauuggugaaauuguuc

SEQ ID NO: 826783 - RNA, 19 nt, Artificial Sequence
  Description of Artificial Sequence: Synthetic oligonucleotide
agcucuucgguacaauacu

SEQ ID NO: 826784 - RNA, 19 nt, Artificial Sequence
  Description of Artificial Sequence: Synthetic oligonucleotide
acaccaaacuugguuggcc

SEQ ID NO: 826785 - RNA, 19 nt, Artificial Sequence
  Description of Artificial Sequence: Synthetic oligonucleotide
guugauguauagccguggc

SEQ ID NO: 826786 - RNA, 19 nt, Artificial Sequence
  Description of Artificial Sequence: Synthetic oligonucleotide
gauguauagccguggcaug

SEQ ID NO: 826787 - RNA, 19 nt, Artificial Sequence
  Description of Artificial Sequence: Synthetic oligonucleotide
acggaaaccaccaccuugg

SEQ ID NO: 826788 - RNA, 19 nt, Artificial Sequence
  Description of Artificial Sequence: Synthetic oligonucleotide
aguccucaaaccgagugag

SEQ ID NO: 826789 - RNA, 19 nt, Artificial Sequence
  Description of Artificial Sequence: Synthetic oligonucleotide
ugcggccagugacaaagcg

SEQ ID NO: 826790 - RNA, 19 nt, Artificial Sequence
  Description of Artificial Sequence: Synthetic oligonucleotide
aggaucuuaaugaaucucu

SEQ ID NO: 826791 - RNA, 19 nt, Artificial Sequence
  Description of Artificial Sequence: Synthetic oligonucleotide
aaucccgcaggcacugagc

SEQ ID NO: 826792 - RNA, 19 nt, Artificial Sequence
  Description of Artificial Sequence: Synthetic oligonucleotide
aaccguacaaaggcacagg

SEQ ID NO: 826793 - RNA, 19 nt, Artificial Sequence
  Description of Artificial Sequence: Synthetic oligonucleotide
agagcgguccucauauccc

SEQ ID NO: 826794 - RNA, 19 nt, Artificial Sequence
  Description of Artificial Sequence: Synthetic oligonucleotide
cuuuugaugacaccaaacu

SEQ ID NO: 826795 - RNA, 19 nt, Artificial Sequence
  Description of Artificial Sequence: Synthetic oligonucleotide
ugcuuccacacgaacccag

SEQ ID NO: 826796 - RNA, 19 nt, Artificial Sequence
  Description of Artificial Sequence: Synthetic oligonucleotide
agcuugugguaccaccuuc

SEQ ID NO: 826797 - RNA, 19 nt, Artificial Sequence
  Description of Artificial Sequence: Synthetic oligonucleotide
uugccgugcgcacaaagaa

SEQ ID NO: 826798 - RNA, 19 nt, Artificial Sequence
  Description of Artificial Sequence: Synthetic oligonucleotide
cuaggcguggguaucgcac

SEQ ID NO: 826799 - RNA, 19 nt, Artificial Sequence
  Description of Artificial Sequence: Synthetic oligonucleotide
ugccgugcgcacaaagaag

SEQ ID NO: 826800 - RNA, 19 nt, Artificial Sequence
  Description of Artificial Sequence: Synthetic oligonucleotide
ggauuaggcacauacaugu

SEQ ID NO: 826801 - RNA, 19 nt, Artificial Sequence
  Description of Artificial Sequence: Synthetic oligonucleotide
uccucauaucccaccacga

SEQ ID NO: 826802 - RNA, 19 nt, Artificial Sequence
  Description of Artificial Sequence: Synthetic oligonucleotide
uaccuggggacguaagccc

SEQ ID NO: 826803 - RNA, 19 nt, Artificial Sequence
  Description of Artificial Sequence: Synthetic oligonucleotide
cugaucacucaguacggug

SEQ ID NO: 826804 - RNA, 19 nt, Artificial Sequence
  Description of Artificial Sequence: Synthetic oligonucleotide
uagcgcaugggccaccugu

SEQ ID NO: 826805 - RNA, 19 nt, Artificial Sequence
  Description of Artificial Sequence: Synthetic oligonucleotide
acgagagcgguccucauau

SEQ ID NO: 826806 - RNA, 19 nt, Artificial Sequence
  Description of Artificial Sequence: Synthetic oligonucleotide
cuuuccgaaucccgcaggc

SEQ ID NO: 826807 - RNA, 19 nt, Artificial Sequence
  Description of Artificial Sequence: Synthetic oligonucleotide
cagcucuucgguacaauac

SEQ ID NO: 826808 - RNA, 19 nt, Artificial Sequence
  Description of Artificial Sequence: Synthetic oligonucleotide
agagcguccacagugacuu

SEQ ID NO: 826809 - RNA, 19 nt, Artificial Sequence
  Description of Artificial Sequence: Synthetic oligonucleotide
gaaucccgcaggcacugag

SEQ ID NO: 826810 - RNA, 19 nt, Artificial Sequence
  Description of Artificial Sequence: Synthetic oligonucleotide
gaaucaguuccaccaccug

SEQ ID NO: 826811 - RNA, 19 nt, Artificial Sequence
  Description of Artificial Sequence: Synthetic oligonucleotide
uagauucgagcugggaggc

SEQ ID NO: 826812 - RNA, 19 nt, Artificial Sequence
  Description of Artificial Sequence: Synthetic oligonucleotide
uggaugaaacgagagcggu

SEQ ID NO: 826813 - RNA, 19 nt, Artificial Sequence
  Description of Artificial Sequence: Synthetic oligonucleotide
guaccaggaacuccuuacc

SEQ ID NO: 826814 - RNA, 19 nt, Artificial Sequence
  Description of Artificial Sequence: Synthetic oligonucleotide
acgaguagggcuugugagu

SEQ ID NO: 826815 - RNA, 19 nt, Artificial Sequence
  Description of Artificial Sequence: Synthetic oligonucleotide
aaauaccuggggacguaag

SEQ ID NO: 826816 - RNA, 19 nt, Artificial Sequence
  Description of Artificial Sequence: Synthetic oligonucleotide
ggcacauacaugucccggg

SEQ ID NO: 826817 - RNA, 19 nt, Artificial Sequence
  Description of Artificial Sequence: Synthetic oligonucleotide
cucggcaagagggauuagg

SEQ ID NO: 826818 - RNA, 19 nt, Artificial Sequence
  Description of Artificial Sequence: Synthetic oligonucleotide
cucuagucgugccuucugc

SEQ ID NO: 826819 - RNA, 19 nt, Artificial Sequence
  Description of Artificial Sequence: Synthetic oligonucleotide
uugcuuuccucuagucgug

SEQ ID NO: 826820 - RNA, 19 nt, Artificial Sequence
  Description of Artificial Sequence: Synthetic oligonucleotide
cauagugcgggaggaagag

SEQ ID NO: 826821 - RNA, 19 nt, Artificial Sequence
  Description of Artificial Sequence: Synthetic oligonucleotide
agccguggcaugaagcugg

SEQ ID NO: 826822 - RNA, 19 nt, Artificial Sequence
  Description of Artificial Sequence: Synthetic oligonucleotide
cacgaacccaggcaaggcc

SEQ ID NO: 826823 - RNA, 19 nt, Artificial Sequence
  Description of Artificial Sequence: Synthetic oligonucleotide
acacgaacccaggcaaggc

SEQ ID NO: 826824 - RNA, 19 nt, Artificial Sequence
  Description of Artificial Sequence: Synthetic oligonucleotide
uugcgcagagcguccacag

SEQ ID NO: 826825 - RNA, 19 nt, Artificial Sequence
  Description of Artificial Sequence: Synthetic oligonucleotide
gaaacgagagcgguccuca

SEQ ID NO: 826826 - RNA, 19 nt, Artificial Sequence
  Description of Artificial Sequence: Synthetic oligonucleotide
auagugcgggaggaagagc

SEQ ID NO: 826827 - RNA, 19 nt, Artificial Sequence
  Description of Artificial Sequence: Synthetic oligonucleotide
guuugccgugcgcacaaag

SEQ ID NO: 826828 - RNA, 19 nt, Artificial Sequence
  Description of Artificial Sequence: Synthetic oligonucleotide
gauguagauucgagcuggg

SEQ ID NO: 826829 - RNA, 19 nt, Artificial Sequence
  Description of Artificial Sequence: Synthetic oligonucleotide
ggcuaaauaccuggggacg

SEQ ID NO: 826830 - RNA, 19 nt, Artificial Sequence
  Description of Artificial Sequence: Synthetic oligonucleotide
cauuuugagccauggcuga

SEQ ID NO: 826831 - RNA, 19 nt, Artificial Sequence
  Description of Artificial Sequence: Synthetic oligonucleotide
ccuuacuccucccaggggc

SEQ ID NO: 826832 - RNA, 19 nt, Artificial Sequence
  Description of Artificial Sequence: Synthetic oligonucleotide
agucgugccuucugcacca

SEQ ID NO: 826833 - RNA, 19 nt, Artificial Sequence
  Description of Artificial Sequence: Synthetic oligonucleotide
uacaauacuucuggucagu

SEQ ID NO: 826834 - RNA, 19 nt, Artificial Sequence
  Description of Artificial Sequence: Synthetic oligonucleotide
cuggcgugacagcaguagg

SEQ ID NO: 826835 - RNA, 19 nt, Artificial Sequence
  Description of Artificial Sequence: Synthetic oligonucleotide
acaauacuucuggucagug

SEQ ID NO: 826836 - RNA, 19 nt, Artificial Sequence
  Description of Artificial Sequence: Synthetic oligonucleotide
aggcacauacaugucccgg

SEQ ID NO: 826837 - RNA, 19 nt, Artificial Sequence
  Description of Artificial Sequence: Synthetic oligonucleotide
ucagcgccucccaaaagua

SEQ ID NO: 826838 - RNA, 19 nt, Artificial Sequence
  Description of Artificial Sequence: Synthetic oligonucleotide
ugaaauuguucagcgccuc

SEQ ID NO: 826839 - RNA, 19 nt, Artificial Sequence
  Description of Artificial Sequence: Synthetic oligonucleotide
cuucuaggcguggguaucg

SEQ ID NO: 826840 - RNA, 19 nt, Artificial Sequence
  Description of Artificial Sequence: Synthetic oligonucleotide
gagcuaccaggcugggccg

SEQ ID NO: 826841 - RNA, 19 nt, Artificial Sequence
  Description of Artificial Sequence: Synthetic oligonucleotide
agugccuucuaggcguggg

SEQ ID NO: 826842 - RNA, 19 nt, Artificial Sequence
  Description of Artificial Sequence: Synthetic oligonucleotide
aacgagagcgguccucaua

SEQ ID NO: 826843 - RNA, 19 nt, Artificial Sequence
  Description of Artificial Sequence: Synthetic oligonucleotide
uccgaaucccgcaggcacu

SEQ ID NO: 826844 - RNA, 19 nt, Artificial Sequence
  Description of Artificial Sequence: Synthetic oligonucleotide
uaaauaccuggggacguaa

SEQ ID NO: 826845 - RNA, 19 nt, Artificial Sequence
  Description of Artificial Sequence: Synthetic oligonucleotide
aguacgguggugaauguua

SEQ ID NO: 826846 - RNA, 19 nt, Artificial Sequence
  Description of Artificial Sequence: Synthetic oligonucleotide
auguauagccguggcauga

SEQ ID NO: 826847 - RNA, 19 nt, Artificial Sequence
  Description of Artificial Sequence: Synthetic oligonucleotide
guauagccguggcaugaag

SEQ ID NO: 826848 - RNA, 19 nt, Artificial Sequence
  Description of Artificial Sequence: Synthetic oligonucleotide
acagcucuucgguacaaua

SEQ ID NO: 826849 - RNA, 19 nt, Artificial Sequence
  Description of Artificial Sequence: Synthetic oligonucleotide
aaaccaccaccuuggucaa

SEQ ID NO: 826850 - RNA, 19 nt, Artificial Sequence
  Description of Artificial Sequence: Synthetic oligonucleotide
accuggggacguaagcccc

SEQ ID NO: 826851 - RNA, 19 nt, Artificial Sequence
  Description of Artificial Sequence: Synthetic oligonucleotide
gguugauguauagccgugg

SEQ ID NO: 826852 - RNA, 19 nt, Artificial Sequence
  Description of Artificial Sequence: Synthetic oligonucleotide
acgguguuccauggcaagg

SEQ ID NO: 826853 - RNA, 19 nt, Artificial Sequence
  Description of Artificial Sequence: Synthetic oligonucleotide
ucgguacaauacuucuggu

SEQ ID NO: 826854 - RNA, 19 nt, Artificial Sequence
  Description of Artificial Sequence: Synthetic oligonucleotide
cacgguguuccauggcaag

SEQ ID NO: 826855 - RNA, 19 nt, Artificial Sequence
  Description of Artificial Sequence: Synthetic oligonucleotide
acgguggugaauguuaguu

SEQ ID NO: 826856 - RNA, 19 nt, Artificial Sequence
  Description of Artificial Sequence: Synthetic oligonucleotide
ugguuugccgugcgcacaa

SEQ ID NO: 826857 - RNA, 19 nt, Artificial Sequence
  Description of Artificial Sequence: Synthetic oligonucleotide
ucuaggcguggguaucgca

SEQ ID NO: 826858 - RNA, 19 nt, Artificial Sequence
  Description of Artificial Sequence: Synthetic oligonucleotide
gccgugcgcacaaagaagg

SEQ ID NO: 826859 - RNA, 19 nt, Artificial Sequence
  Description of Artificial Sequence: Synthetic oligonucleotide
uguccggguagauguagau

SEQ ID NO: 826860 - RNA, 19 nt, Artificial Sequence
  Description of Artificial Sequence: Synthetic oligonucleotide
cucacauaccuuggcacug

SEQ ID NO: 826861 - RNA, 19 nt, Artificial Sequence
  Description of Artificial Sequence: Synthetic oligonucleotide
agcgugacaugcugaguga

SEQ ID NO: 826862 - RNA, 19 nt, Artificial Sequence
  Description of Artificial Sequence: Synthetic oligonucleotide
gacuuccggauccccacac

SEQ ID NO: 826863 - RNA, 19 nt, Artificial Sequence
  Description of Artificial Sequence: Synthetic oligonucleotide
guacgguggugaauguuag

SEQ ID NO: 826864 - RNA, 19 nt, Artificial Sequence
  Description of Artificial Sequence: Synthetic oligonucleotide
ucaacucauggcucucaau

SEQ ID NO: 826865 - RNA, 19 nt, Artificial Sequence
  Description of Artificial Sequence: Synthetic oligonucleotide
ugacuuccggauccccaca

SEQ ID NO: 826866 - RNA, 19 nt, Artificial Sequence
  Description of Artificial Sequence: Synthetic oligonucleotide
ugucccgggccucaccagu

SEQ ID NO: 826867 - RNA, 19 nt, Artificial Sequence
  Description of Artificial Sequence: Synthetic oligonucleotide
ggaucuuaaugaaucucug

SEQ ID NO: 826868 - RNA, 19 nt, Artificial Sequence
  Description of Artificial Sequence: Synthetic oligonucleotide
ccuugcuugacguaccauc

SEQ ID NO: 826869 - RNA, 19 nt, Artificial Sequence
  Description of Artificial Sequence: Synthetic oligonucleotide
ucauguccgugucgauggc

SEQ ID NO: 826870 - RNA, 19 nt, Artificial Sequence
  Description of Artificial Sequence: Synthetic oligonucleotide
auagcccaguuuguccggg

SEQ ID NO: 826871 - RNA, 19 nt, Artificial Sequence
  Description of Artificial Sequence: Synthetic oligonucleotide
gauuccggcagagcaucug

SEQ ID NO: 826872 - RNA, 19 nt, Artificial Sequence
  Description of Artificial Sequence: Synthetic oligonucleotide
gacuacccgugucaacuca

SEQ ID NO: 826873 - RNA, 19 nt, Artificial Sequence
  Description of Artificial Sequence: Synthetic oligonucleotide
gagcgguccucauauccca

SEQ ID NO: 826874 - RNA, 19 nt, Artificial Sequence
  Description of Artificial Sequence: Synthetic oligonucleotide
caaaccgagugagcuugcg

SEQ ID NO: 826875 - RNA, 19 nt, Artificial Sequence
  Description of Artificial Sequence: Synthetic oligonucleotide
cuugguuggccugggugag

SEQ ID NO: 826876 - RNA, 19 nt, Artificial Sequence
  Description of Artificial Sequence: Synthetic oligonucleotide
uguauagccguggcaugaa

SEQ ID NO: 826877 - RNA, 19 nt, Artificial Sequence
  Description of Artificial Sequence: Synthetic oligonucleotide
cuacccgugucaacucaug

SEQ ID NO: 826878 - RNA, 19 nt, Artificial Sequence
  Description of Artificial Sequence: Synthetic oligonucleotide
gagggauuaggcacauaca

SEQ ID NO: 826879 - RNA, 19 nt, Artificial Sequence
  Description of Artificial Sequence: Synthetic oligonucleotide
auucgagcugggaggcggc

SEQ ID NO: 826880 - RNA, 19 nt, Artificial Sequence
  Description of Artificial Sequence: Synthetic oligonucleotide
gaaagauguaccacucuau

SEQ ID NO: 826881 - RNA, 19 nt, Artificial Sequence
  Description of Artificial Sequence: Synthetic oligonucleotide
uacgguggugaauguuagu

SEQ ID NO: 826882 - RNA, 19 nt, Artificial Sequence
  Description of Artificial Sequence: Synthetic oligonucleotide
cauguccgugucgauggcc

SEQ ID NO: 826883 - RNA, 19 nt, Artificial Sequence
  Description of Artificial Sequence: Synthetic oligonucleotide
agcgccucccaaaaguacu

SEQ ID NO: 826884 - RNA, 19 nt, Artificial Sequence
  Description of Artificial Sequence: Synthetic oligonucleotide
aaacgagagcgguccucau

SEQ ID NO: 826885 - RNA, 19 nt, Artificial Sequence
  Description of Artificial Sequence: Synthetic oligonucleotide
cacauaccuuggcacuggc

SEQ ID NO: 826886 - RNA, 19 nt, Artificial Sequence
  Description of Artificial Sequence: Synthetic oligonucleotide
uggugaauguuaguuccuu

SEQ ID NO: 826887 - RNA, 19 nt, Artificial Sequence
  Description of Artificial Sequence: Synthetic oligonucleotide
gacacuguccaggaucuua

SEQ ID NO: 826888 - RNA, 19 nt, Artificial Sequence
  Description of Artificial Sequence: Synthetic oligonucleotide
gcacauacaugucccgggc

SEQ ID NO: 826889 - RNA, 19 nt, Artificial Sequence
  Description of Artificial Sequence: Synthetic oligonucleotide
guucagcgccucccaaaag

SEQ ID NO: 826890 - RNA, 19 nt, Artificial Sequence
  Description of Artificial Sequence: Synthetic oligonucleotide
gguaucgcaccagacuggc

SEQ ID NO: 826891 - RNA, 19 nt, Artificial Sequence
  Description of Artificial Sequence: Synthetic oligonucleotide
gcuuuccgaaucccgcagg

SEQ ID NO: 826892 - RNA, 19 nt, Artificial Sequence
  Description of Artificial Sequence: Synthetic oligonucleotide
acgaacccaggcaaggcca

SEQ ID NO: 826893 - RNA, 19 nt, Artificial Sequence
  Description of Artificial Sequence: Synthetic oligonucleotide
ggguagauguagauucgag

SEQ ID NO: 826894 - RNA, 19 nt, Artificial Sequence
  Description of Artificial Sequence: Synthetic oligonucleotide
cucgggugucagaugguuc

SEQ ID NO: 826895 - RNA, 19 nt, Artificial Sequence
  Description of Artificial Sequence: Synthetic oligonucleotide
augaaacgagagcgguccu

SEQ ID NO: 826896 - RNA, 19 nt, Artificial Sequence
  Description of Artificial Sequence: Synthetic oligonucleotide
auaucccaccacgaugccu

SEQ ID NO: 826897 - RNA, 19 nt, Artificial Sequence
  Description of Artificial Sequence: Synthetic oligonucleotide
uggggacguaagccccagg

SEQ ID NO: 826898 - RNA, 19 nt, Artificial Sequence
  Description of Artificial Sequence: Synthetic oligonucleotide
guggguaucgcaccagacu

SEQ ID NO: 826899 - RNA, 19 nt, Artificial Sequence
  Description of Artificial Sequence: Synthetic oligonucleotide
gacauaucugccaggcugu

SEQ ID NO: 826900 - RNA, 19 nt, Artificial Sequence
  Description of Artificial Sequence: Synthetic oligonucleotide
caugucccgggccucacca

SEQ ID NO: 826901 - RNA, 19 nt, Artificial Sequence
  Description of Artificial Sequence: Synthetic oligonucleotide
cagcgccucccaaaaguac

SEQ ID NO: 826902 - RNA, 19 nt, Artificial Sequence
  Description of Artificial Sequence: Synthetic oligonucleotide
uagccguggcaugaagcug

SEQ ID NO: 826903 - RNA, 19 nt, Artificial Sequence
  Description of Artificial Sequence: Synthetic oligonucleotide
ggcagcgagcgugacaugc

SEQ ID NO: 826904 - RNA, 19 nt, Artificial Sequence
  Description of Artificial Sequence: Synthetic oligonucleotide
uucuaggcguggguaucgc

SEQ ID NO: 826905 - RNA, 19 nt, Artificial Sequence
  Description of Artificial Sequence: Synthetic oligonucleotide
gcgagcgugacaugcugag

SEQ ID NO: 826906 - RNA, 19 nt, Artificial Sequence
  Description of Artificial Sequence: Synthetic oligonucleotide
ggggacguaagccccagga

SEQ ID NO: 826907 - RNA, 19 nt, Artificial Sequence
  Description of Artificial Sequence: Synthetic oligonucleotide
ucgugccuucugcaccagc

SEQ ID NO: 826908 - RNA, 19 nt, Artificial Sequence
  Description of Artificial Sequence: Synthetic oligonucleotide
auguagauucgagcuggga

SEQ ID NO: 826909 - RNA, 19 nt, Artificial Sequence
  Description of Artificial Sequence: Synthetic oligonucleotide
acucucacagaggcuaaau

SEQ ID NO: 826910 - RNA, 19 nt, Artificial Sequence
  Description of Artificial Sequence: Synthetic oligonucleotide
caugcugagugaggcgcag

SEQ ID NO: 826911 - RNA, 19 nt, Artificial Sequence
  Description of Artificial Sequence: Synthetic oligonucleotide
gaaacggcuccgguccuca

SEQ ID NO: 826912 - RNA, 19 nt, Artificial Sequence
  Description of Artificial Sequence: Synthetic oligonucleotide
ggaacuccuuaccccgaag

SEQ ID NO: 826913 - RNA, 19 nt, Artificial Sequence
  Description of Artificial Sequence: Synthetic oligonucleotide
guaccauccuaucaauuuu

SEQ ID NO: 826914 - RNA, 19 nt, Artificial Sequence
  Description of Artificial Sequence: Synthetic oligonucleotide
acggaguccacagcuggga

SEQ ID NO: 826915 - RNA, 19 nt, Artificial Sequence
  Description of Artificial Sequence: Synthetic oligonucleotide
gcuggcgugacagcaguag

SEQ ID NO: 826916 - RNA, 19 nt, Artificial Sequence
  Description of Artificial Sequence: Synthetic oligonucleotide
cuggacuacccgugucaac

SEQ ID NO: 826917 - RNA, 19 nt, Artificial Sequence
  Description of Artificial Sequence: Synthetic oligonucleotide
ucacggaaaccaccaccuu

SEQ ID NO: 826918 - RNA, 19 nt, Artificial Sequence
  Description of Artificial Sequence: Synthetic oligonucleotide
cagcgagcgugacaugcug

SEQ ID NO: 826919 - RNA, 19 nt, Artificial Sequence
  Description of Artificial Sequence: Synthetic oligonucleotide
cucucacagaggcuaaaua

SEQ ID NO: 826920 - RNA, 19 nt, Artificial Sequence
  Description of Artificial Sequence: Synthetic oligonucleotide
ggacgaguagggcuuguga

SEQ ID NO: 826921 - RNA, 19 nt, Artificial Sequence
  Description of Artificial Sequence: Synthetic oligonucleotide
agcgguccucauaucccac

SEQ ID NO: 826922 - RNA, 19 nt, Artificial Sequence
  Description of Artificial Sequence: Synthetic oligonucleotide
gaagauuccggcagagcau

SEQ ID NO: 826923 - RNA, 19 nt, Artificial Sequence
  Description of Artificial Sequence: Synthetic oligonucleotide
gaagagcgugcuggagcag

SEQ ID NO: 826924 - RNA, 19 nt, Artificial Sequence
  Description of Artificial Sequence: Synthetic oligonucleotide
gggacguaagccccaggac

SEQ ID NO: 826925 - RNA, 19 nt, Artificial Sequence
  Description of Artificial Sequence: Synthetic oligonucleotide
auuuugagccauggcugaa

SEQ ID NO: 826926 - RNA, 19 nt, Artificial Sequence
  Description of Artificial Sequence: Synthetic oligonucleotide
ccggguagauguagauucg

SEQ ID NO: 826927 - RNA, 19 nt, Artificial Sequence
  Description of Artificial Sequence: Synthetic oligonucleotide
gacguaccauccuaucaau

SEQ ID NO: 826928 - RNA, 19 nt, Artificial Sequence
  Description of Artificial Sequence: Synthetic oligonucleotide
gguggaagauuccggcaga

SEQ ID NO: 826929 - RNA, 19 nt, Artificial Sequence
  Description of Artificial Sequence: Synthetic oligonucleotide
aucacucaguacgguggug

SEQ ID NO: 826930 - RNA, 19 nt, Artificial Sequence
  Description of Artificial Sequence: Synthetic oligonucleotide
aggacgaguagggcuugug

SEQ ID NO: 826931 - RNA, 19 nt, Artificial Sequence
  Description of Artificial Sequence: Synthetic oligonucleotide
ucauagcgcaugggccacc

SEQ ID NO: 826932 - RNA, 19 nt, Artificial Sequence
  Description of Artificial Sequence: Synthetic oligonucleotide
gugcgggaggaagagcgug

SEQ ID NO: 826933 - RNA, 19 nt, Artificial Sequence
  Description of Artificial Sequence: Synthetic oligonucleotide
cauggguuggggagcuaga

SEQ ID NO: 826934 - RNA, 19 nt, Artificial Sequence
  Description of Artificial Sequence: Synthetic oligonucleotide
agcacggaguccacagcug

SEQ ID NO: 826935 - RNA, 19 nt, Artificial Sequence
  Description of Artificial Sequence: Synthetic oligonucleotide
gucauagcgcaugggccac

SEQ ID NO: 826936 - RNA, 19 nt, Artificial Sequence
  Description of Artificial Sequence: Synthetic oligonucleotide
gugaaauuguucagcgccu

SEQ ID NO: 826937 - RNA, 19 nt, Artificial Sequence
  Description of Artificial Sequence: Synthetic oligonucleotide
ggcggcauagcggagcuuc

SEQ ID NO: 826938 - RNA, 19 nt, Artificial Sequence
  Description of Artificial Sequence: Synthetic oligonucleotide
gggaaaacggggaaaccaa

SEQ ID NO: 826939 - RNA, 19 nt, Artificial Sequence
  Description of Artificial Sequence: Synthetic oligonucleotide
ggugucagccgagcugggg

SEQ ID NO: 826940 - RNA, 19 nt, Artificial Sequence
  Description of Artificial Sequence: Synthetic oligonucleotide
ggacccagugugcugaugu

SEQ ID NO: 826941 - RNA, 19 nt, Artificial Sequence
  Description of Artificial Sequence: Synthetic oligonucleotide
caguuguaggcggcauagc

SEQ ID NO: 826942 - RNA, 19 nt, Artificial Sequence
  Description of Artificial Sequence: Synthetic oligonucleotide
cgguacaauacuucugguc

SEQ ID NO: 826943 - RNA, 19 nt, Artificial Sequence
  Description of Artificial Sequence: Synthetic oligonucleotide
aguccacagcugggaaguc

SEQ ID NO: 826944 - RNA, 19 nt, Artificial Sequence
  Description of Artificial Sequence: Synthetic oligonucleotide
gggcuuguggaagauucac

SEQ ID NO: 826945 - RNA, 19 nt, Artificial Sequence
  Description of Artificial Sequence: Synthetic oligonucleotide
acucgggugucagaugguu

SEQ ID NO: 826946 - RNA, 19 nt, Artificial Sequence
  Description of Artificial Sequence: Synthetic oligonucleotide
cuuacuccucccaggggcu

SEQ ID NO: 826947 - RNA, 19 nt, Artificial Sequence
  Description of Artificial Sequence: Synthetic oligonucleotide
caaguagcucaggccuggc

SEQ ID NO: 826948 - RNA, 19 nt, Artificial Sequence
  Description of Artificial Sequence: Synthetic oligonucleotide
gcggccagugacaaagcgc

SEQ ID NO: 826949 - RNA, 19 nt, Artificial Sequence
  Description of Artificial Sequence: Synthetic oligonucleotide
acguaagccccaggacgag

SEQ ID NO: 826950 - RNA, 19 nt, Artificial Sequence
  Description of Artificial Sequence: Synthetic oligonucleotide
acucaguacgguggugaau

SEQ ID NO: 826951 - RNA, 19 nt, Artificial Sequence
  Description of Artificial Sequence: Synthetic oligonucleotide
uuaccccgaagggcagccc

SEQ ID NO: 826952 - RNA, 19 nt, Artificial Sequence
  Description of Artificial Sequence: Synthetic oligonucleotide
ggaugaaacgagagcgguc

SEQ ID NO: 826953 - RNA, 19 nt, Artificial Sequence
  Description of Artificial Sequence: Synthetic oligonucleotide
agcgagcgugacaugcuga

SEQ ID NO: 826954 - RNA, 19 nt, Artificial Sequence
  Description of Artificial Sequence: Synthetic oligonucleotide
gcucucaaugcaaccguac

SEQ ID NO: 826955 - RNA, 19 nt, Artificial Sequence
  Description of Artificial Sequence: Synthetic oligonucleotide
cagugacuuccggaucccc

SEQ ID NO: 826956 - RNA, 19 nt, Artificial Sequence
  Description of Artificial Sequence: Synthetic oligonucleotide
cacacaguuguaggcggca

SEQ ID NO: 826957 - RNA, 19 nt, Artificial Sequence
  Description of Artificial Sequence: Synthetic oligonucleotide
cagcacggaguccacagcu

SEQ ID NO: 826958 - RNA, 19 nt, Artificial Sequence
  Description of Artificial Sequence: Synthetic oligonucleotide
uccuugcuugacguaccau

SEQ ID NO: 826959 - RNA, 19 nt, Artificial Sequence
  Description of Artificial Sequence: Synthetic oligonucleotide
cuccuugcuugacguacca

SEQ ID NO: 826960 - RNA, 19 nt, Artificial Sequence
  Description of Artificial Sequence: Synthetic oligonucleotide
cuaaauaccuggggacgua

SEQ ID NO: 826961 - RNA, 19 nt, Artificial Sequence
  Description of Artificial Sequence: Synthetic oligonucleotide
ccacacaguuguaggcggc

SEQ ID NO: 826962 - RNA, 19 nt, Artificial Sequence
  Description of Artificial Sequence: Synthetic oligonucleotide
ggaaaacggggaaaccaaa

SEQ ID NO: 826963 - RNA, 19 nt, Artificial Sequence
  Description of Artificial Sequence: Synthetic oligonucleotide
caagucuagcacagcuugu

SEQ ID NO: 826964 - RNA, 19 nt, Artificial Sequence
  Description of Artificial Sequence: Synthetic oligonucleotide
cacucaguacgguggugaa

SEQ ID NO: 826965 - RNA, 19 nt, Artificial Sequence
  Description of Artificial Sequence: Synthetic oligonucleotide
ccgugcgcacaaagaaggg

SEQ ID NO: 826966 - RNA, 19 nt, Artificial Sequence
  Description of Artificial Sequence: Synthetic oligonucleotide
agugcgggaggaagagcgu

SEQ ID NO: 826967 - RNA, 19 nt, Artificial Sequence
  Description of Artificial Sequence: Synthetic oligonucleotide
ggacuacccgugucaacuc

SEQ ID NO: 826968 - RNA, 19 nt, Artificial Sequence
  Description of Artificial Sequence: Synthetic oligonucleotide
gcgugacagcaguaggaac

SEQ ID NO: 826969 - RNA, 19 nt, Artificial Sequence
  Description of Artificial Sequence: Synthetic oligonucleotide
cuggggacguaagccccag

SEQ ID NO: 826970 - RNA, 19 nt, Artificial Sequence
  Description of Artificial Sequence: Synthetic oligonucleotide
cauugcccugguuugccgu

SEQ ID NO: 826971 - RNA, 19 nt, Artificial Sequence
  Description of Artificial Sequence: Synthetic oligonucleotide
acguaccauccuaucaauu

SEQ ID NO: 826972 - RNA, 19 nt, Artificial Sequence
  Description of Artificial Sequence: Synthetic oligonucleotide
cacaguuguaggcggcaua

SEQ ID NO: 826973 - RNA, 19 nt, Artificial Sequence
  Description of Artificial Sequence: Synthetic oligonucleotide
accagacuggcuggcugga

SEQ ID NO: 826974 - RNA, 19 nt, Artificial Sequence
  Description of Artificial Sequence: Synthetic oligonucleotide
cgugcgcacaaagaagggc

SEQ ID NO: 826975 - RNA, 19 nt, Artificial Sequence
  Description of Artificial Sequence: Synthetic oligonucleotide
gcaaccguacaaaggcaca

SEQ ID NO: 826976 - RNA, 19 nt, Artificial Sequence
  Description of Artificial Sequence: Synthetic oligonucleotide
agucucggcaagagggauu

SEQ ID NO: 826977 - RNA, 19 nt, Artificial Sequence
  Description of Artificial Sequence: Synthetic oligonucleotide
cgaguagggcuugugaguc

SEQ ID NO: 826978 - RNA, 19 nt, Artificial Sequence
  Description of Artificial Sequence: Synthetic oligonucleotide
gugucaacucauggcucuc

SEQ ID NO: 826979 - RNA, 19 nt, Artificial Sequence
  Description of Artificial Sequence: Synthetic oligonucleotide
ccgugucaacucauggcuc

SEQ ID NO: 826980 - RNA, 19 nt, Artificial Sequence
  Description of Artificial Sequence: Synthetic oligonucleotide
gcggcgguugauguauagc

SEQ ID NO: 826981 - RNA, 19 nt, Artificial Sequence
  Description of Artificial Sequence: Synthetic oligonucleotide
gcuaaauaccuggggacgu

SEQ ID NO: 826982 - RNA, 19 nt, Artificial Sequence
  Description of Artificial Sequence: Synthetic oligonucleotide
guggugaauguuaguuccu

SEQ ID NO: 826983 - RNA, 19 nt, Artificial Sequence
  Description of Artificial Sequence: Synthetic oligonucleotide
cagagcguccacagugacu

SEQ ID NO: 826984 - RNA, 19 nt, Artificial Sequence
  Description of Artificial Sequence: Synthetic oligonucleotide
ccaaccccaucucuuuuga

SEQ ID NO: 826985 - RNA, 19 nt, Artificial Sequence
  Description of Artificial Sequence: Synthetic oligonucleotide
cgguugauguauagccgug

SEQ ID NO: 826986 - RNA, 19 nt, Artificial Sequence
  Description of Artificial Sequence: Synthetic oligonucleotide
agcgcaugggccaccugua

SEQ ID NO: 826987 - RNA, 19 nt, Artificial Sequence
  Description of Artificial Sequence: Synthetic oligonucleotide
gcgccucccaaaaguacug

SEQ ID NO: 826988 - RNA, 19 nt, Artificial Sequence
  Description of Artificial Sequence: Synthetic oligonucleotide
guuuguccggguagaugua

SEQ ID NO: 826989 - RNA, 19 nt, Artificial Sequence
  Description of Artificial Sequence: Synthetic oligonucleotide
cguaccauccuaucaauuu

SEQ ID NO: 826990 - RNA, 19 nt, Artificial Sequence
  Description of Artificial Sequence: Synthetic oligonucleotide
ccucacauaccuuggcacu

SEQ ID NO: 826991 - RNA, 19 nt, Artificial Sequence
  Description of Artificial Sequence: Synthetic oligonucleotide
gcguggguaucgcaccaga

SEQ ID NO: 826992 - RNA, 19 nt, Artificial Sequence
  Description of Artificial Sequence: Synthetic oligonucleotide
gcaaggcggcgguugaugu

SEQ ID NO: 826993 - RNA, 19 nt, Artificial Sequence
  Description of Artificial Sequence: Synthetic oligonucleotide
cuaccaggcugggccgcug

SEQ ID NO: 826994 - RNA, 19 nt, Artificial Sequence
  Description of Artificial Sequence: Synthetic oligonucleotide
cugcacucgggugucagau

SEQ ID NO: 826995 - RNA, 19 nt, Artificial Sequence
  Description of Artificial Sequence: Synthetic oligonucleotide
ggcuuguggaagauucacu

SEQ ID NO: 826996 - RNA, 19 nt, Artificial Sequence
  Description of Artificial Sequence: Synthetic oligonucleotide
gucgugccuucugcaccag

SEQ ID NO: 826997 - RNA, 19 nt, Artificial Sequence
  Description of Artificial Sequence: Synthetic oligonucleotide
ccgaaucccgcaggcacug

SEQ ID NO: 826998 - RNA, 19 nt, Artificial Sequence
  Description of Artificial Sequence: Synthetic oligonucleotide
gcuggacuacccgugucaa

SEQ ID NO: 826999 - RNA, 19 nt, Artificial Sequence
  Description of Artificial Sequence: Synthetic oligonucleotide
gcgcaggaaacggcuccgg

SEQ ID NO: 827000 - RNA, 19 nt, Artificial Sequence
  Description of Artificial Sequence: Synthetic oligonucleotide
gccgcuggcgugacagcag

SEQ ID NO: 827001 - RNA, 19 nt, Artificial Sequence
  Description of Artificial Sequence: Synthetic oligonucleotide
gugagcuugcgcagagcgu

SEQ ID NO: 827002 - RNA, 19 nt, Artificial Sequence
  Description of Artificial Sequence: Synthetic oligonucleotide
cauagcgcaugggccaccu

SEQ ID NO: 827003 - RNA, 19 nt, Artificial Sequence
  Description of Artificial Sequence: Synthetic oligonucleotide
cacucucacagaggcuaaa

SEQ ID NO: 827004 - RNA, 19 nt, Artificial Sequence
  Description of Artificial Sequence: Synthetic oligonucleotide
cauucccaccacuggucau

SEQ ID NO: 827005 - RNA, 19 nt, Artificial Sequence
  Description of Artificial Sequence: Synthetic oligonucleotide
cgugucaacucauggcucu

SEQ ID NO: 827006 - RNA, 19 nt, Artificial Sequence
  Description of Artificial Sequence: Synthetic oligonucleotide
ggcucucaaugcaaccgua

SEQ ID NO: 827007 - RNA, 19 nt, Artificial Sequence
  Description of Artificial Sequence: Synthetic oligonucleotide
guccggguagauguagauu

SEQ ID NO: 827008 - RNA, 19 nt, Artificial Sequence
  Description of Artificial Sequence: Synthetic oligonucleotide
gccuucuaggcguggguau

SEQ ID NO: 827009 - RNA, 19 nt, Artificial Sequence
  Description of Artificial Sequence: Synthetic oligonucleotide
gcugaucacucaguacggu

SEQ ID NO: 827010 - RNA, 19 nt, Artificial Sequence
  Description of Artificial Sequence: Synthetic oligonucleotide
ccuggggacguaagcccca

SEQ ID NO: 827011 - RNA, 19 nt, Artificial Sequence
  Description of Artificial Sequence: Synthetic oligonucleotide
gcggcugcggccagugaca

SEQ ID NO: 827012 - RNA, 19 nt, Artificial Sequence
  Description of Artificial Sequence: Synthetic oligonucleotide
ccccaggacgaguagggcu

SEQ ID NO: 827013 - RNA, 19 nt, Artificial Sequence
  Description of Artificial Sequence: Synthetic oligonucleotide
cacucgggugucagauggu

SEQ ID NO: 827014 - RNA, 19 nt, Artificial Sequence
  Description of Artificial Sequence: Synthetic oligonucleotide
guaucgcaccagacuggcu

SEQ ID NO: 827015 - RNA, 19 nt, Artificial Sequence
  Description of Artificial Sequence: Synthetic oligonucleotide
gcucuucgguacaauacuu

SEQ ID NO: 827016 - RNA, 19 nt, Artificial Sequence
  Description of Artificial Sequence: Synthetic oligonucleotide
cagguggugaagggacacu

SEQ ID NO: 827017 - RNA, 19 nt, Artificial Sequence
  Description of Artificial Sequence: Synthetic oligonucleotide
cccaggacgaguagggcuu

SEQ ID NO: 827018 - RNA, 19 nt, Artificial Sequence
  Description of Artificial Sequence: Synthetic oligonucleotide
gcgcagccuuacuccuccc

SEQ ID NO: 827019 - RNA, 19 nt, Artificial Sequence
  Description of Artificial Sequence: Synthetic oligonucleotide
caguacgguggugaauguu

SEQ ID NO: 827020 - RNA, 19 nt, Artificial Sequence
  Description of Artificial Sequence: Synthetic oligonucleotide
ccgcaggcacugagcuacc

SEQ ID NO: 827021 - RNA, 19 nt, Artificial Sequence
  Description of Artificial Sequence: Synthetic oligonucleotide
cggguagauguagauucga

SEQ ID NO: 827022 - RNA, 19 nt, Artificial Sequence
  Description of Artificial Sequence: Synthetic oligonucleotide
gcagcgagcgugacaugcu

SEQ ID NO: 827023 - RNA, 19 nt, Artificial Sequence
  Description of Artificial Sequence: Synthetic oligonucleotide
gcauucuugcaggcagggu

SEQ ID NO: 827024 - RNA, 19 nt, Artificial Sequence
  Description of Artificial Sequence: Synthetic oligonucleotide
gcgggaggaagagcgugcu

SEQ ID NO: 827025 - RNA, 19 nt, Artificial Sequence
  Description of Artificial Sequence: Synthetic oligonucleotide
aggcggcgguugauguaua

SEQ ID NO: 827026 - RNA, 19 nt, Artificial Sequence
  Description of Artificial Sequence: Synthetic oligonucleotide
ccguggcaugaagcugggc

SEQ ID NO: 827027 - RNA, 19 nt, Artificial Sequence
  Description of Artificial Sequence: Synthetic oligonucleotide
gguuugccgugcgcacaaa

SEQ ID NO: 827028 - RNA, 19 nt, Artificial Sequence
  Description of Artificial Sequence: Synthetic oligonucleotide
aggcggcauagcggagcuu

SEQ ID NO: 827029 - RNA, 19 nt, Artificial Sequence
  Description of Artificial Sequence: Synthetic oligonucleotide
cguaagccccaggacgagu

SEQ ID NO: 827030 - RNA, 19 nt, Artificial Sequence
  Description of Artificial Sequence: Synthetic oligonucleotide
ccgugucgauggccacaca

SEQ ID NO: 827031 - RNA, 19 nt, Artificial Sequence
  Description of Artificial Sequence: Synthetic oligonucleotide
cgaaucccgcaggcacuga

SEQ ID NO: 827032 - RNA, 19 nt, Artificial Sequence
  Description of Artificial Sequence: Synthetic oligonucleotide
cgagcgugacaugcugagu

SEQ ID NO: 827033 - RNA, 19 nt, Artificial Sequence
  Description of Artificial Sequence: Synthetic oligonucleotide
cgcuggcgugacagcagua

SEQ ID NO: 827034 - RNA, 19 nt, Artificial Sequence
  Description of Artificial Sequence: Synthetic oligonucleotide
ccggauccccacacaccuu

SEQ ID NO: 827035 - RNA, 19 nt, Artificial Sequence
  Description of Artificial Sequence: Synthetic oligonucleotide
aacauuacugcauuuaccc

SEQ ID NO: 827036 - RNA, 19 nt, Artificial Sequence
  Description of Artificial Sequence: Synthetic oligonucleotide
cuaacagucaccuagaacc

SEQ ID NO: 827037 - RNA, 19 nt, Artificial Sequence
  Description of Artificial Sequence: Synthetic oligonucleotide
aauuaaaccagguuuaugu

SEQ ID NO: 827038 - RNA, 19 nt, Artificial Sequence
  Description of Artificial Sequence: Synthetic oligonucleotide
ucaauaaucaaauugacaa

SEQ ID NO: 827039 - RNA, 19 nt, Artificial Sequence
  Description of Artificial Sequence: Synthetic oligonucleotide
uguguuacaaguaaccugg

SEQ ID NO: 827040 - RNA, 19 nt, Artificial Sequence
  Description of Artificial Sequence: Synthetic oligonucleotide
aaaccuaacagucaccuag

SEQ ID NO: 827041 - RNA, 19 nt, Artificial Sequence
  Description of Artificial Sequence: Synthetic oligonucleotide
aacgcuacaagacaaaaug

SEQ ID NO: 827042 - RNA, 19 nt, Artificial Sequence
  Description of Artificial Sequence: Synthetic oligonucleotide
uuuuaagcuauaaagucag

SEQ ID NO: 827043 - RNA, 19 nt, Artificial Sequence
  Description of Artificial Sequence: Synthetic oligonucleotide
ucaccuagaaccuauaaag

SEQ ID NO: 827044 - RNA, 19 nt, Artificial Sequence
  Description of Artificial Sequence: Synthetic oligonucleotide
aauugacaacacuuuauac

SEQ ID NO: 827045 - RNA, 19 nt, Artificial Sequence
  Description of Artificial Sequence: Synthetic oligonucleotide
aaugagacacgcgacagcc

SEQ ID NO: 827046 - RNA, 19 nt, Artificial Sequence
  Description of Artificial Sequence: Synthetic oligonucleotide
aaguuaaggacuuguagag

SEQ ID NO: 827047 - RNA, 19 nt, Artificial Sequence
  Description of Artificial Sequence: Synthetic oligonucleotide
aaugaaugugaauggcagc

SEQ ID NO: 827048 - RNA, 19 nt, Artificial Sequence
  Description of Artificial Sequence: Synthetic oligonucleotide
aaacuguuaggcuccaugg

SEQ ID NO: 827049 - RNA, 19 nt, Artificial Sequence
  Description of Artificial Sequence: Synthetic oligonucleotide
ucuacuuuuccauaaagac

SEQ ID NO: 827050 - RNA, 19 nt, Artificial Sequence
  Description of Artificial Sequence: Synthetic oligonucleotide
guuacaaguaaccuggucc

SEQ ID NO: 827051 - RNA, 19 nt, Artificial Sequence
  Description of Artificial Sequence: Synthetic oligonucleotide
acucuaugaaaauauaaag

SEQ ID NO: 827052 - RNA, 19 nt, Artificial Sequence
  Description of Artificial Sequence: Synthetic oligonucleotide
ucauuguauaauauuaaca

SEQ ID NO: 827053 - RNA, 19 nt, Artificial Sequence
  Description of Artificial Sequence: Synthetic oligonucleotide
augaauagucaguugagac

SEQ ID NO: 827054 - RNA, 19 nt, Artificial Sequence
  Description of Artificial Sequence: Synthetic oligonucleotide
aacuacaacuguucaauuc

SEQ ID NO: 827055 - RNA, 19 nt, Artificial Sequence
  Description of Artificial Sequence: Synthetic oligonucleotide
aguugaagcaccuuccugg

SEQ ID NO: 827056 - RNA, 19 nt, Artificial Sequence
  Description of Artificial Sequence: Synthetic oligonucleotide
ugagugaacaaaguuaagg

SEQ ID NO: 827057 - RNA, 19 nt, Artificial Sequence
  Description of Artificial Sequence: Synthetic oligonucleotide
uuacacaccaugcugacug

SEQ ID NO: 827058 - RNA, 19 nt, Artificial Sequence
  Description of Artificial Sequence: Synthetic oligonucleotide
uuauaaaccuaacagucac

SEQ ID NO: 827059 - RNA, 19 nt, Artificial Sequence
  Description of Artificial Sequence: Synthetic oligonucleotide
aacaccacaguuuauuugu

SEQ ID NO: 827060 - RNA, 19 nt, Artificial Sequence
  Description of Artificial Sequence: Synthetic oligonucleotide
aguuaacucaaacaaagca

SEQ ID NO: 827061 - RNA, 19 nt, Artificial Sequence
  Description of Artificial Sequence: Synthetic oligonucleotide
agacaaaccugacauacac

SEQ ID NO: 827062 - RNA, 19 nt, Artificial Sequence
  Description of Artificial Sequence: Synthetic oligonucleotide
augucguuagaguuggugc

SEQ ID NO: 827063 - RNA, 19 nt, Artificial Sequence
  Description of Artificial Sequence: Synthetic oligonucleotide
uuacguauuugaaacaaga

SEQ ID NO: 827064 - RNA, 19 nt, Artificial Sequence
  Description of Artificial Sequence: Synthetic oligonucleotide
uuacaaaccaaggugaagc

SEQ ID NO: 827065 - RNA, 19 nt, Artificial Sequence
  Description of Artificial Sequence: Synthetic oligonucleotide
aguaaccugguccaaaauc

SEQ ID NO: 827066 - RNA, 19 nt, Artificial Sequence
  Description of Artificial Sequence: Synthetic oligonucleotide
uguaaucaaauuacugcag

SEQ ID NO: 827067 - RNA, 19 nt, Artificial Sequence
  Description of Artificial Sequence: Synthetic oligonucleotide
gacaaaaugagacacgcga

SEQ ID NO: 827068 - RNA, 19 nt, Artificial Sequence
  Description of Artificial Sequence: Synthetic oligonucleotide
ugaauagucaguugagacc

SEQ ID NO: 827069 - RNA, 19 nt, Artificial Sequence
  Description of Artificial Sequence: Synthetic oligonucleotide
aaaugagacacgcgacagc

SEQ ID NO: 827070 - RNA, 19 nt, Artificial Sequence
  Description of Artificial Sequence: Synthetic oligonucleotide
uaagacgugcaacacuacg

SEQ ID NO: 827071 - RNA, 19 nt, Artificial Sequence
  Description of Artificial Sequence: Synthetic oligonucleotide
aucguuuaauguuacuacg

SEQ ID NO: 827072 - RNA, 19 nt, Artificial Sequence
  Description of Artificial Sequence: Synthetic oligonucleotide
gguguaaucaaauuacugc

SEQ ID NO: 827073 - RNA, 19 nt, Artificial Sequence
  Description of Artificial Sequence: Synthetic oligonucleotide
aaauugacaacacuuuaua

SEQ ID NO: 827074 - RNA, 19 nt, Artificial Sequence
  Description of Artificial Sequence: Synthetic oligonucleotide
aaaggcauauacuuccaga

SEQ ID NO: 827075 - RNA, 19 nt, Artificial Sequence
  Description of Artificial Sequence: Synthetic oligonucleotide
cugagcacuuccuauagcg

SEQ ID NO: 827076 - RNA, 19 nt, Artificial Sequence
  Description of Artificial Sequence: Synthetic oligonucleotide
gaccuuacaaaccaaggug

SEQ ID NO: 827077 - RNA, 19 nt, Artificial Sequence
  Description of Artificial Sequence: Synthetic oligonucleotide
aaucaaauuacugcaggug

SEQ ID NO: 827078 - RNA, 19 nt, Artificial Sequence
  Description of Artificial Sequence: Synthetic oligonucleotide
aaugagugaacaaaguuaa

SEQ ID NO: 827079 - RNA, 19 nt, Artificial Sequence
  Description of Artificial Sequence: Synthetic oligonucleotide
gaucguuuaauguuacuac

SEQ ID NO: 827080 - RNA, 19 nt, Artificial Sequence
  Description of Artificial Sequence: Synthetic oligonucleotide
uuaagcuauaaagucagca

SEQ ID NO: 827081 - RNA, 19 nt, Artificial Sequence
  Description of Artificial Sequence: Synthetic oligonucleotide
uggcauacauaauucacag

SEQ ID NO: 827082 - RNA, 19 nt, Artificial Sequence
  Description of Artificial Sequence: Synthetic oligonucleotide
aaucaaauugacaacacuu

SEQ ID NO: 827083 - RNA, 19 nt, Artificial Sequence
  Description of Artificial Sequence: Synthetic oligonucleotide
aaaaugagacacgcgacag

SEQ ID NO: 827084 - RNA, 19 nt, Artificial Sequence
  Description of Artificial Sequence: Synthetic oligonucleotide
uuuaugugaaacuaaccua

SEQ ID NO: 827085 - RNA, 19 nt, Artificial Sequence
  Description of Artificial Sequence: Synthetic oligonucleotide
acacggaacccuuaaugcc

SEQ ID NO: 827086 - RNA, 19 nt, Artificial Sequence
  Description of Artificial Sequence: Synthetic oligonucleotide
agacgugcaacacuacggc

SEQ ID NO: 827087 - RNA, 19 nt, Artificial Sequence
  Description of Artificial Sequence: Synthetic oligonucleotide
aaagucagcaauaacugga

SEQ ID NO: 827088 - RNA, 19 nt, Artificial Sequence
  Description of Artificial Sequence: Synthetic oligonucleotide
ugcucaacugcuaauacaa

SEQ ID NO: 827089 - RNA, 19 nt, Artificial Sequence
  Description of Artificial Sequence: Synthetic oligonucleotide
aagcuauaaagucagcaau

SEQ ID NO: 827090 - RNA, 19 nt, Artificial Sequence
  Description of Artificial Sequence: Synthetic oligonucleotide
gcauacauaauucacagac

SEQ ID NO: 827091 - RNA, 19 nt, Artificial Sequence
  Description of Artificial Sequence: Synthetic oligonucleotide
caaaguuaaggacuuguag

SEQ ID NO: 827092 - RNA, 19 nt, Artificial Sequence
  Description of Artificial Sequence: Synthetic oligonucleotide
uguuauuugugucaauaau

SEQ ID NO: 827093 - RNA, 19 nt, Artificial Sequence
  Description of Artificial Sequence: Synthetic oligonucleotide
acaaggauaaauaccacag

SEQ ID NO: 827094 - RNA, 19 nt, Artificial Sequence
  Description of Artificial Sequence: Synthetic oligonucleotide
auuuaccccaaacacagca

SEQ ID NO: 827095 - RNA, 19 nt, Artificial Sequence
  Description of Artificial Sequence: Synthetic oligonucleotide
uuacaaguaaccuggucca

SEQ ID NO: 827096 - RNA, 19 nt, Artificial Sequence
  Description of Artificial Sequence: Synthetic oligonucleotide
auacacaccuuauacaaga

SEQ ID NO: 827097 - RNA, 19 nt, Artificial Sequence
  Description of Artificial Sequence: Synthetic oligonucleotide
uaagcuauaaagucagcaa

SEQ ID NO: 827098 - RNA, 19 nt, Artificial Sequence
  Description of Artificial Sequence: Synthetic oligonucleotide
cuuccuauagcgagcacgg

SEQ ID NO: 827099 - RNA, 19 nt, Artificial Sequence
  Description of Artificial Sequence: Synthetic oligonucleotide
aagacgugcaacacuacgg

SEQ ID NO: 827100 - RNA, 19 nt, Artificial Sequence
  Description of Artificial Sequence: Synthetic oligonucleotide
ugguguaaucaaauuacug

SEQ ID NO: 827101 - RNA, 19 nt, Artificial Sequence
  Description of Artificial Sequence: Synthetic oligonucleotide
auagagaucguuuaauguu

SEQ ID NO: 827102 - RNA, 19 nt, Artificial Sequence
  Description of Artificial Sequence: Synthetic oligonucleotide
acuguuaggcuccauggag

SEQ ID NO: 827103 - RNA, 19 nt, Artificial Sequence
  Description of Artificial Sequence: Synthetic oligonucleotide
uaaaccagguuuaugugaa

SEQ ID NO: 827104 - RNA, 19 nt, Artificial Sequence
  Description of Artificial Sequence: Synthetic oligonucleotide
acuagaaugguuccaagaa

SEQ ID NO: 827105 - RNA, 19 nt, Artificial Sequence
  Description of Artificial Sequence: Synthetic oligonucleotide
aacuaaccuagaaaacuac

SEQ ID NO: 827106 - RNA, 19 nt, Artificial Sequence
  Description of Artificial Sequence: Synthetic oligonucleotide
guuuaugugaaacuaaccu

SEQ ID NO: 827107 - RNA, 19 nt, Artificial Sequence
  Description of Artificial Sequence: Synthetic oligonucleotide
ucaguugagaccuuacaaa

SEQ ID NO: 827108 - RNA, 19 nt, Artificial Sequence
  Description of Artificial Sequence: Synthetic oligonucleotide
ucaaauuacugcaggugga

SEQ ID NO: 827109 - RNA, 19 nt, Artificial Sequence
  Description of Artificial Sequence: Synthetic oligonucleotide
acguauuugaaacaagaaa

SEQ ID NO: 827110 - RNA, 19 nt, Artificial Sequence
  Description of Artificial Sequence: Synthetic oligonucleotide
ucuacagauaggccauggg

SEQ ID NO: 827111 - RNA, 19 nt, Artificial Sequence
  Description of Artificial Sequence: Synthetic oligonucleotide
cucaaguacaaguagaaaa

SEQ ID NO: 827112 - RNA, 19 nt, Artificial Sequence
  Description of Artificial Sequence: Synthetic oligonucleotide
uauaaagcccaaaguugag

SEQ ID NO: 827113 - RNA, 19 nt, Artificial Sequence
  Description of Artificial Sequence: Synthetic oligonucleotide
ucaacuucccucaaacaaa

SEQ ID NO: 827114 - RNA, 19 nt, Artificial Sequence
  Description of Artificial Sequence: Synthetic oligonucleotide
acguacuuuuccuuuacag

SEQ ID NO: 827115 - RNA, 19 nt, Artificial Sequence
  Description of Artificial Sequence: Synthetic oligonucleotide
aauccucaguucuacagau

SEQ ID NO: 827116 - RNA, 19 nt, Artificial Sequence
  Description of Artificial Sequence: Synthetic oligonucleotide
uguauaauauuaacaucau

SEQ ID NO: 827117 - RNA, 19 nt, Artificial Sequence
  Description of Artificial Sequence: Synthetic oligonucleotide
uauaaaccuaacagucacc

SEQ ID NO: 827118 - RNA, 19 nt, Artificial Sequence
  Description of Artificial Sequence: Synthetic oligonucleotide
ucguuuaauguuacuacgu

SEQ ID NO: 827119 - RNA, 19 nt, Artificial Sequence
  Description of Artificial Sequence: Synthetic oligonucleotide
ucaaauugacaacacuuua

SEQ ID NO: 827120 - RNA, 19 nt, Artificial Sequence
  Description of Artificial Sequence: Synthetic oligonucleotide
uccuauagcgagcacgggc

SEQ ID NO: 827121 - RNA, 19 nt, Artificial Sequence
  Description of Artificial Sequence: Synthetic oligonucleotide
guguaaucaaauuacugca

SEQ ID NO: 827122 - RNA, 19 nt, Artificial Sequence
  Description of Artificial Sequence: Synthetic oligonucleotide
ugacauuucccaauccugu

SEQ ID NO: 827123 - RNA, 19 nt, Artificial Sequence
  Description of Artificial Sequence: Synthetic oligonucleotide
aaugaauagucaguugaga

SEQ ID NO: 827124 - RNA, 19 nt, Artificial Sequence
  Description of Artificial Sequence: Synthetic oligonucleotide
uuucacgagaugucaauga

SEQ ID NO: 827125 - RNA, 19 nt, Artificial Sequence
  Description of Artificial Sequence: Synthetic oligonucleotide
ucugguuacguauuugaaa

SEQ ID NO: 827126 - RNA, 19 nt, Artificial Sequence
  Description of Artificial Sequence: Synthetic oligonucleotide
ucacuuggcauacauaauu

SEQ ID NO: 827127 - RNA, 19 nt, Artificial Sequence
  Description of Artificial Sequence: Synthetic oligonucleotide
acuuccuauagcgagcacg

SEQ ID NO: 827128 - RNA, 19 nt, Artificial Sequence
  Description of Artificial Sequence: Synthetic oligonucleotide
acuacacugcaauauucag

SEQ ID NO: 827129 - RNA, 19 nt, Artificial Sequence
  Description of Artificial Sequence: Synthetic oligonucleotide
gagauucgcaaggagaaag

SEQ ID NO: 827130 - RNA, 19 nt, Artificial Sequence
  Description of Artificial Sequence: Synthetic oligonucleotide
cacacggaacccuuaaugc

SEQ ID NO: 827131 - RNA, 19 nt, Artificial Sequence
  Description of Artificial Sequence: Synthetic oligonucleotide
aagauccagaguugaagca

SEQ ID NO: 827132 - RNA, 19 nt, Artificial Sequence
  Description of Artificial Sequence: Synthetic oligonucleotide
uguuguaacuacaacuguu

SEQ ID NO: 827133 - RNA, 19 nt, Artificial Sequence
  Description of Artificial Sequence: Synthetic oligonucleotide
auaaaccuaacagucaccu

SEQ ID NO: 827134 - RNA, 19 nt, Artificial Sequence
  Description of Artificial Sequence: Synthetic oligonucleotide
agaccuuacaaaccaaggu

SEQ ID NO: 827135 - RNA, 19 nt, Artificial Sequence
  Description of Artificial Sequence: Synthetic oligonucleotide
uacguauuugaaacaagaa

SEQ ID NO: 827136 - RNA, 19 nt, Artificial Sequence
  Description of Artificial Sequence: Synthetic oligonucleotide
gugucaauaaucaaauuga

SEQ ID NO: 827137 - RNA, 19 nt, Artificial Sequence
  Description of Artificial Sequence: Synthetic oligonucleotide
uagagaucguuuaauguua

SEQ ID NO: 827138 - RNA, 19 nt, Artificial Sequence
  Description of Artificial Sequence: Synthetic oligonucleotide
aaugcauggccacuagaau

SEQ ID NO: 827139 - RNA, 19 nt, Artificial Sequence
  Description of Artificial Sequence: Synthetic oligonucleotide
gagaccuuacaaaccaagg

SEQ ID NO: 827140 - RNA, 19 nt, Artificial Sequence
  Description of Artificial Sequence: Synthetic oligonucleotide
aaaugcauggccacuagaa

SEQ ID NO: 827141 - RNA, 19 nt, Artificial Sequence
  Description of Artificial Sequence: Synthetic oligonucleotide
agaaccuauaaaguacauc

SEQ ID NO: 827142 - RNA, 19 nt, Artificial Sequence
  Description of Artificial Sequence: Synthetic oligonucleotide
cuguguuacaaguaaccug

SEQ ID NO: 827143 - RNA, 19 nt, Artificial Sequence
  Description of Artificial Sequence: Synthetic oligonucleotide
aaguacaaguagaaaauaa

SEQ ID NO: 827144 - RNA, 19 nt, Artificial Sequence
  Description of Artificial Sequence: Synthetic oligonucleotide
ucaacuguccuaacaguuc

SEQ ID NO: 827145 - RNA, 19 nt, Artificial Sequence
  Description of Artificial Sequence: Synthetic oligonucleotide
cacggaacccuuaaugccc

SEQ ID NO: 827146 - RNA, 19 nt, Artificial Sequence
  Description of Artificial Sequence: Synthetic oligonucleotide
gaaugagugaacaaaguua

SEQ ID NO: 827147 - RNA, 19 nt, Artificial Sequence
  Description of Artificial Sequence: Synthetic oligonucleotide
ugucguuagaguuggugcu

SEQ ID NO: 827148 - RNA, 19 nt, Artificial Sequence
  Description of Artificial Sequence: Synthetic oligonucleotide
ugagcaaucaaugguguaa

SEQ ID NO: 827149 - RNA, 19 nt, Artificial Sequence
  Description of Artificial Sequence: Synthetic oligonucleotide
guuaacucaaacaaagcaa

SEQ ID NO: 827150 - RNA, 19 nt, Artificial Sequence
  Description of Artificial Sequence: Synthetic oligonucleotide
acgugugagcaaucaaugg

SEQ ID NO: 827151 - RNA, 19 nt, Artificial Sequence
  Description of Artificial Sequence: Synthetic oligonucleotide
aacuguuaggcuccaugga

SEQ ID NO: 827152 - RNA, 19 nt, Artificial Sequence
  Description of Artificial Sequence: Synthetic oligonucleotide
acagacauaccacacggaa

SEQ ID NO: 827153 - RNA, 19 nt, Artificial Sequence
  Description of Artificial Sequence: Synthetic oligonucleotide
aguacauccuuaguuuuag

SEQ ID NO: 827154 - RNA, 19 nt, Artificial Sequence
  Description of Artificial Sequence: Synthetic oligonucleotide
caccuuauacaagacaaag

SEQ ID NO: 827155 - RNA, 19 nt, Artificial Sequence
  Description of Artificial Sequence: Synthetic oligonucleotide
uuaggcuccauggagcuga

SEQ ID NO: 827156 - RNA, 19 nt, Artificial Sequence
  Description of Artificial Sequence: Synthetic oligonucleotide
aaggcgagcguccacucca

SEQ ID NO: 827157 - RNA, 19 nt, Artificial Sequence
  Description of Artificial Sequence: Synthetic oligonucleotide
aagcccaaaguugaguuga

SEQ ID NO: 827158 - RNA, 19 nt, Artificial Sequence
  Description of Artificial Sequence: Synthetic oligonucleotide
cacaccuuauacaagacaa

SEQ ID NO: 827159 - RNA, 19 nt, Artificial Sequence
  Description of Artificial Sequence: Synthetic oligonucleotide
cagaguugaagcaccuucc

SEQ ID NO: 827160 - RNA, 19 nt, Artificial Sequence
  Description of Artificial Sequence: Synthetic oligonucleotide
uuuucacgagaugucaaug

SEQ ID NO: 827161 - RNA, 19 nt, Artificial Sequence
  Description of Artificial Sequence: Synthetic oligonucleotide
auauuaacaucaugacaga

SEQ ID NO: 827162 - RNA, 19 nt, Artificial Sequence
  Description of Artificial Sequence: Synthetic oligonucleotide
gaauagucaguugagaccu

SEQ ID NO: 827163 - RNA, 19 nt, Artificial Sequence
  Description of Artificial Sequence: Synthetic oligonucleotide
caguuaacucaaacaaagc

SEQ ID NO: 827164 - RNA, 19 nt, Artificial Sequence
  Description of Artificial Sequence: Synthetic oligonucleotide
aacauguuauuugugucaa

SEQ ID NO: 827165 - RNA, 19 nt, Artificial Sequence
  Description of Artificial Sequence: Synthetic oligonucleotide
aaacuaaccuagaaaacua

SEQ ID NO: 827166 - RNA, 19 nt, Artificial Sequence
  Description of Artificial Sequence: Synthetic oligonucleotide
cagcaaaacuguuaggcuc

SEQ ID NO: 827167 - RNA, 19 nt, Artificial Sequence
  Description of Artificial Sequence: Synthetic oligonucleotide
cuagaaccuauaaaguaca

SEQ ID NO: 827168 - RNA, 19 nt, Artificial Sequence
  Description of Artificial Sequence: Synthetic oligonucleotide
aagcggaacucccgugucg

SEQ ID NO: 827169 - RNA, 19 nt, Artificial Sequence
  Description of Artificial Sequence: Synthetic oligonucleotide
ugagacacgcgacagccuc

SEQ ID NO: 827170 - RNA, 19 nt, Artificial Sequence
  Description of Artificial Sequence: Synthetic oligonucleotide
aucgugguuagguuccauc

SEQ ID NO: 827171 - RNA, 19 nt, Artificial Sequence
  Description of Artificial Sequence: Synthetic oligonucleotide
cuguuaggcuccauggagc

SEQ ID NO: 827172 - RNA, 19 nt, Artificial Sequence
  Description of Artificial Sequence: Synthetic oligonucleotide
ccuagaaccuauaaaguac

SEQ ID NO: 827173 - RNA, 19 nt, Artificial Sequence
  Description of Artificial Sequence: Synthetic oligonucleotide
ucgugguuagguuccaucu

SEQ ID NO: 827174 - RNA, 19 nt, Artificial Sequence
  Description of Artificial Sequence: Synthetic oligonucleotide
ugguaacgcuacaagacaa

SEQ ID NO: 827175 - RNA, 19 nt, Artificial Sequence
  Description of Artificial Sequence: Synthetic oligonucleotide
uaacagucaccuagaaccu

SEQ ID NO: 827176 - RNA, 19 nt, Artificial Sequence
  Description of Artificial Sequence: Synthetic oligonucleotide
cuuuauuaguguacauguc

SEQ ID NO: 827177 - RNA, 19 nt, Artificial Sequence
  Description of Artificial Sequence: Synthetic oligonucleotide
acuguucaauucuuuauua

SEQ ID NO: 827178 - RNA, 19 nt, Artificial Sequence
  Description of Artificial Sequence: Synthetic oligonucleotide
cagaaguuuguuaaauaca

SEQ ID NO: 827179 - RNA, 19 nt, Artificial Sequence
  Description of Artificial Sequence: Synthetic oligonucleotide
ucccuuaguguagauaaca

SEQ ID NO: 827180 - RNA, 19 nt, Artificial Sequence
  Description of Artificial Sequence: Synthetic oligonucleotide
uucuacagauaggccaugg

SEQ ID NO: 827181 - RNA, 19 nt, Artificial Sequence
  Description of Artificial Sequence: Synthetic oligonucleotide
gauaaauaccacaguuaac

SEQ ID NO: 827182 - RNA, 19 nt, Artificial Sequence
  Description of Artificial Sequence: Synthetic oligonucleotide
caaucaaugguguaaucaa

SEQ ID NO: 827183 - RNA, 19 nt, Artificial Sequence
  Description of Artificial Sequence: Synthetic oligonucleotide
uaacgcuacaagacaaaau

SEQ ID NO: 827184 - RNA, 19 nt, Artificial Sequence
  Description of Artificial Sequence: Synthetic oligonucleotide
ucggaaaaccggcaggcuc

SEQ ID NO: 827185 - RNA, 19 nt, Artificial Sequence
  Description of Artificial Sequence: Synthetic oligonucleotide
agaucguuuaauguuacua

SEQ ID NO: 827186 - RNA, 19 nt, Artificial Sequence
  Description of Artificial Sequence: Synthetic oligonucleotide
gguauuaaaugcauggcca

SEQ ID NO: 827187 - RNA, 19 nt, Artificial Sequence
  Description of Artificial Sequence: Synthetic oligonucleotide
acagauaggccauggguau

SEQ ID NO: 827188 - RNA, 19 nt, Artificial Sequence
  Description of Artificial Sequence: Synthetic oligonucleotide
acgagaugucaaugaauag

SEQ ID NO: 827189 - RNA, 19 nt, Artificial Sequence
  Description of Artificial Sequence: Synthetic oligonucleotide
aguguacaugucguuagag

SEQ ID NO: 827190 - RNA, 19 nt, Artificial Sequence
  Description of Artificial Sequence: Synthetic oligonucleotide
caaaaugagacacgcgaca

SEQ ID NO: 827191 - RNA, 19 nt, Artificial Sequence
  Description of Artificial Sequence: Synthetic oligonucleotide
acacaccuuauacaagaca

SEQ ID NO: 827192 - RNA, 19 nt, Artificial Sequence
  Description of Artificial Sequence: Synthetic oligonucleotide
acacgcgacagccucaagu

SEQ ID NO: 827193 - RNA, 19 nt, Artificial Sequence
  Description of Artificial Sequence: Synthetic oligonucleotide
agucaguugagaccuuaca

SEQ ID NO: 827194 - RNA, 19 nt, Artificial Sequence
  Description of Artificial Sequence: Synthetic oligonucleotide
ucacgagaugucaaugaau

SEQ ID NO: 827195 - RNA, 19 nt, Artificial Sequence
  Description of Artificial Sequence: Synthetic oligonucleotide
aguucacugguaacgcuac

SEQ ID NO: 827196 - RNA, 19 nt, Artificial Sequence
  Description of Artificial Sequence: Synthetic oligonucleotide
ggaauuauagcagcaaauc

SEQ ID NO: 827197 - RNA, 19 nt, Artificial Sequence
  Description of Artificial Sequence: Synthetic oligonucleotide
gaguugaagcaccuuccug

SEQ ID NO: 827198 - RNA, 19 nt, Artificial Sequence
  Description of Artificial Sequence: Synthetic oligonucleotide
caaaccaaggugaagcuua

SEQ ID NO: 827199 - RNA, 19 nt, Artificial Sequence
  Description of Artificial Sequence: Synthetic oligonucleotide
guuacguauuugaaacaag

SEQ ID NO: 827200 - RNA, 19 nt, Artificial Sequence
  Description of Artificial Sequence: Synthetic oligonucleotide
agagaucguuuaauguuac

SEQ ID NO: 827201 - RNA, 19 nt, Artificial Sequence
  Description of Artificial Sequence: Synthetic oligonucleotide
cuucggaaaaccggcaggc

SEQ ID NO: 827202 - RNA, 19 nt, Artificial Sequence
  Description of Artificial Sequence: Synthetic oligonucleotide
agauucgcaaggagaaagg

SEQ ID NO: 827203 - RNA, 19 nt, Artificial Sequence
  Description of Artificial Sequence: Synthetic oligonucleotide
auucgcaaggagaaaggag

SEQ ID NO: 827204 - RNA, 19 nt, Artificial Sequence
  Description of Artificial Sequence: Synthetic oligonucleotide
uccaaaauccucaguucua

SEQ ID NO: 827205 - RNA, 19 nt, Artificial Sequence
  Description of Artificial Sequence: Synthetic oligonucleotide
uacggcuuccuucggaaaa

SEQ ID NO: 827206 - RNA, 19 nt, Artificial Sequence
  Description of Artificial Sequence: Synthetic oligonucleotide
gucaguugagaccuuacaa

SEQ ID NO: 827207 - RNA, 19 nt, Artificial Sequence
  Description of Artificial Sequence: Synthetic oligonucleotide
uacacaccuuauacaagac

SEQ ID NO: 827208 - RNA, 19 nt, Artificial Sequence
  Description of Artificial Sequence: Synthetic oligonucleotide
gaagcaucugguuacguau

SEQ ID NO: 827209 - RNA, 19 nt, Artificial Sequence
  Description of Artificial Sequence: Synthetic oligonucleotide
aagaccgcccugacgcugc

SEQ ID NO: 827210 - RNA, 19 nt, Artificial Sequence
  Description of Artificial Sequence: Synthetic oligonucleotide
auuaguguacaugucguua

SEQ ID NO: 827211 - RNA, 19 nt, Artificial Sequence
  Description of Artificial Sequence: Synthetic oligonucleotide
ugguuacguauuugaaaca

SEQ ID NO: 827212 - RNA, 19 nt, Artificial Sequence
  Description of Artificial Sequence: Synthetic oligonucleotide
caucugguuacguauuuga

SEQ ID NO: 827213 - RNA, 19 nt, Artificial Sequence
  Description of Artificial Sequence: Synthetic oligonucleotide
auaaagcccaaaguugagu

SEQ ID NO: 827214 - RNA, 19 nt, Artificial Sequence
  Description of Artificial Sequence: Synthetic oligonucleotide
agucauagagaucguuuaa

SEQ ID NO: 827215 - RNA, 19 nt, Artificial Sequence
  Description of Artificial Sequence: Synthetic oligonucleotide
uacguacuuuuccuuuaca

SEQ ID NO: 827216 - RNA, 19 nt, Artificial Sequence
  Description of Artificial Sequence: Synthetic oligonucleotide
acuaaccuagaaaacuaca

SEQ ID NO: 827217 - RNA, 19 nt, Artificial Sequence
  Description of Artificial Sequence: Synthetic oligonucleotide
acaccaugcugacugacau

SEQ ID NO: 827218 - RNA, 19 nt, Artificial Sequence
  Description of Artificial Sequence: Synthetic oligonucleotide
accgcccugacgcugcgac

SEQ ID NO: 827219 - RNA, 19 nt, Artificial Sequence
  Description of Artificial Sequence: Synthetic oligonucleotide
uacuacguacuuuuccuuu

SEQ ID NO: 827220 - RNA, 19 nt, Artificial Sequence
  Description of Artificial Sequence: Synthetic oligonucleotide
uucacugguaacgcuacaa

SEQ ID NO: 827221 - RNA, 19 nt, Artificial Sequence
  Description of Artificial Sequence: Synthetic oligonucleotide
aacuguccuaacaguucac

SEQ ID NO: 827222 - RNA, 19 nt, Artificial Sequence
  Description of Artificial Sequence: Synthetic oligonucleotide
uucacuuggcauacauaau

SEQ ID NO: 827223 - RNA, 19 nt, Artificial Sequence
  Description of Artificial Sequence: Synthetic oligonucleotide
uggacucacuguuguaacu

SEQ ID NO: 827224 - RNA, 19 nt, Artificial Sequence
  Description of Artificial Sequence: Synthetic oligonucleotide
uaacgcugugucccugaag

SEQ ID NO: 827225 - RNA, 19 nt, Artificial Sequence
  Description of Artificial Sequence: Synthetic oligonucleotide
gauucgcaaggagaaagga

SEQ ID NO: 827226 - RNA, 19 nt, Artificial Sequence
  Description of Artificial Sequence: Synthetic oligonucleotide
acuacggcuuccuucggaa

SEQ ID NO: 827227 - RNA, 19 nt, Artificial Sequence
  Description of Artificial Sequence: Synthetic oligonucleotide
cuggacucacuguuguaac

SEQ ID NO: 827228 - RNA, 19 nt, Artificial Sequence
  Description of Artificial Sequence: Synthetic oligonucleotide
cacuagaaugguuccaaga

SEQ ID NO: 827229 - RNA, 19 nt, Artificial Sequence
  Description of Artificial Sequence: Synthetic oligonucleotide
acuacguacuuuuccuuua

SEQ ID NO: 827230 - RNA, 19 nt, Artificial Sequence
  Description of Artificial Sequence: Synthetic oligonucleotide
aaagaccgcccugacgcug

SEQ ID NO: 827231 - RNA, 19 nt, Artificial Sequence
  Description of Artificial Sequence: Synthetic oligonucleotide
cuagaaugguuccaagaaa

SEQ ID NO: 827232 - RNA, 19 nt, Artificial Sequence
  Description of Artificial Sequence: Synthetic oligonucleotide
acgcgacagccucaaguac

SEQ ID NO: 827233 - RNA, 19 nt, Artificial Sequence
  Description of Artificial Sequence: Synthetic oligonucleotide
ucccaauccuguucacuug

SEQ ID NO: 827234 - RNA, 19 nt, Artificial Sequence
  Description of Artificial Sequence: Synthetic oligonucleotide
cacugguaacgcuacaaga

SEQ ID NO: 827235 - RNA, 19 nt, Artificial Sequence
  Description of Artificial Sequence: Synthetic oligonucleotide
aaccuaacagucaccuaga

SEQ ID NO: 827236 - RNA, 19 nt, Artificial Sequence
  Description of Artificial Sequence: Synthetic oligonucleotide
aguuaaggacuuguagaga

SEQ ID NO: 827237 - RNA, 19 nt, Artificial Sequence
  Description of Artificial Sequence: Synthetic oligonucleotide
agcggaacucccgugucgg

SEQ ID NO: 827238 - RNA, 19 nt, Artificial Sequence
  Description of Artificial Sequence: Synthetic oligonucleotide
agaacgugugagcaaucaa

SEQ ID NO: 827239 - RNA, 19 nt, Artificial Sequence
  Description of Artificial Sequence: Synthetic oligonucleotide
agucaccuagaaccuauaa

SEQ ID NO: 827240 - RNA, 19 nt, Artificial Sequence
  Description of Artificial Sequence: Synthetic oligonucleotide
cgcuacaagacaaaaugag

SEQ ID NO: 827241 - RNA, 19 nt, Artificial Sequence
  Description of Artificial Sequence: Synthetic oligonucleotide
uggccacuagaaugguucc

SEQ ID NO: 827242 - RNA, 19 nt, Artificial Sequence
  Description of Artificial Sequence: Synthetic oligonucleotide
gccaguaagagaaaucaac

SEQ ID NO: 827243 - RNA, 19 nt, Artificial Sequence
  Description of Artificial Sequence: Synthetic oligonucleotide
ugcacuguucugaguuaca

SEQ ID NO: 827244 - RNA, 19 nt, Artificial Sequence
  Description of Artificial Sequence: Synthetic oligonucleotide
gacgcugcgacugggcagc

SEQ ID NO: 827245 - RNA, 19 nt, Artificial Sequence
  Description of Artificial Sequence: Synthetic oligonucleotide
acggcuuccuucggaaaac

SEQ ID NO: 827246 - RNA, 19 nt, Artificial Sequence
  Description of Artificial Sequence: Synthetic oligonucleotide
guugaagcaccuuccugga

SEQ ID NO: 827247 - RNA, 19 nt, Artificial Sequence
  Description of Artificial Sequence: Synthetic oligonucleotide
cuauagcgagcacgggcgg

SEQ ID NO: 827248 - RNA, 19 nt, Artificial Sequence
  Description of Artificial Sequence: Synthetic oligonucleotide
cacuccacucugacaagag

SEQ ID NO: 827249 - RNA, 19 nt, Artificial Sequence
  Description of Artificial Sequence: Synthetic oligonucleotide
caccaucgugguuagguuc

SEQ ID NO: 827250 - RNA, 19 nt, Artificial Sequence
  Description of Artificial Sequence: Synthetic oligonucleotide
aaaccagguuuaugugaaa

SEQ ID NO: 827251 - RNA, 19 nt, Artificial Sequence
  Description of Artificial Sequence: Synthetic oligonucleotide
gaaggcgagcguccacucc

SEQ ID NO: 827252 - RNA, 19 nt, Artificial Sequence
  Description of Artificial Sequence: Synthetic oligonucleotide
uaccacacggaacccuuaa

SEQ ID NO: 827253 - RNA, 19 nt, Artificial Sequence
  Description of Artificial Sequence: Synthetic oligonucleotide
uaaaccuaacagucaccua

SEQ ID NO: 827254 - RNA, 19 nt, Artificial Sequence
  Description of Artificial Sequence: Synthetic oligonucleotide
ucguuagaguuggugcuca

SEQ ID NO: 827255 - RNA, 19 nt, Artificial Sequence
  Description of Artificial Sequence: Synthetic oligonucleotide
gcacuaacuguguuacaag

SEQ ID NO: 827256 - RNA, 19 nt, Artificial Sequence
  Description of Artificial Sequence: Synthetic oligonucleotide
uauagcgagcacgggcggc

SEQ ID NO: 827257 - RNA, 19 nt, Artificial Sequence
  Description of Artificial Sequence: Synthetic oligonucleotide
gaagcggaacucccguguc

SEQ ID NO: 827258 - RNA, 19 nt, Artificial Sequence
  Description of Artificial Sequence: Synthetic oligonucleotide
acuaacuguguuacaagua

SEQ ID NO: 827259 - RNA, 19 nt, Artificial Sequence
  Description of Artificial Sequence: Synthetic oligonucleotide
acgcuacaagacaaaauga

SEQ ID NO: 827260 - RNA, 19 nt, Artificial Sequence
  Description of Artificial Sequence: Synthetic oligonucleotide
gcuacaagacaaaaugaga

SEQ ID NO: 827261 - RNA, 19 nt, Artificial Sequence
  Description of Artificial Sequence: Synthetic oligonucleotide
agaugucaaugaauaguca

SEQ ID NO: 827262 - RNA, 19 nt, Artificial Sequence
  Description of Artificial Sequence: Synthetic oligonucleotide
gaacgugugagcaaucaau

SEQ ID NO: 827263 - RNA, 19 nt, Artificial Sequence
  Description of Artificial Sequence: Synthetic oligonucleotide
ccagaguugaagcaccuuc

SEQ ID NO: 827264 - RNA, 19 nt, Artificial Sequence
  Description of Artificial Sequence: Synthetic oligonucleotide
gcagguggagauucgcaag

SEQ ID NO: 827265 - RNA, 19 nt, Artificial Sequence
  Description of Artificial Sequence: Synthetic oligonucleotide
gacauaccacacggaaccc

SEQ ID NO: 827266 - RNA, 19 nt, Artificial Sequence
  Description of Artificial Sequence: Synthetic oligonucleotide
cacuaacuguguuacaagu

SEQ ID NO: 827267 - RNA, 19 nt, Artificial Sequence
  Description of Artificial Sequence: Synthetic oligonucleotide
guaacgcuacaagacaaaa

SEQ ID NO: 827268 - RNA, 19 nt, Artificial Sequence
  Description of Artificial Sequence: Synthetic oligonucleotide
cccaauccuguucacuugg

SEQ ID NO: 827269 - RNA, 19 nt, Artificial Sequence
  Description of Artificial Sequence: Synthetic oligonucleotide
aggaagcggaacucccgug

SEQ ID NO: 827270 - RNA, 19 nt, Artificial Sequence
  Description of Artificial Sequence: Synthetic oligonucleotide
uuccuauagcgagcacggg

SEQ ID NO: 827271 - RNA, 19 nt, Artificial Sequence
  Description of Artificial Sequence: Synthetic oligonucleotide
agaaaggcauauacuucca

SEQ ID NO: 827272 - RNA, 19 nt, Artificial Sequence
  Description of Artificial Sequence: Synthetic oligonucleotide
guccuaacaguucacuggu

SEQ ID NO: 827273 - RNA, 19 nt, Artificial Sequence
  Description of Artificial Sequence: Synthetic oligonucleotide
ccacacggaacccuuaaug

SEQ ID NO: 827274 - RNA, 19 nt, Artificial Sequence
  Description of Artificial Sequence: Synthetic oligonucleotide
augagugaacaaaguuaag

SEQ ID NO: 827275 - RNA, 19 nt, Artificial Sequence
  Description of Artificial Sequence: Synthetic oligonucleotide
ucaccaucgugguuagguu

SEQ ID NO: 827276 - RNA, 19 nt, Artificial Sequence
  Description of Artificial Sequence: Synthetic oligonucleotide
cccgugucggcccaggacg

SEQ ID NO: 827277 - RNA, 19 nt, Artificial Sequence
  Description of Artificial Sequence: Synthetic oligonucleotide
aucccuuaguguagauaac

SEQ ID NO: 827278 - RNA, 19 nt, Artificial Sequence
  Description of Artificial Sequence: Synthetic oligonucleotide
accugacauacacaccuua

SEQ ID NO: 827279 - RNA, 19 nt, Artificial Sequence
  Description of Artificial Sequence: Synthetic oligonucleotide
ucccgugucggcccaggac

SEQ ID NO: 827280 - RNA, 19 nt, Artificial Sequence
  Description of Artificial Sequence: Synthetic oligonucleotide
acauaccacacggaacccu

SEQ ID NO: 827281 - RNA, 19 nt, Artificial Sequence
  Description of Artificial Sequence: Synthetic oligonucleotide
agcaucugguuacguauuu

SEQ ID NO: 827282 - RNA, 19 nt, Artificial Sequence
  Description of Artificial Sequence: Synthetic oligonucleotide
agcaauaacuggacucacu

SEQ ID NO: 827283 - RNA, 19 nt, Artificial Sequence
  Description of Artificial Sequence: Synthetic oligonucleotide
ugggaucccuuaguguaga

SEQ ID NO: 827284 - RNA, 19 nt, Artificial Sequence
  Description of Artificial Sequence: Synthetic oligonucleotide
ccuaacagucaccuagaac

SEQ ID NO: 827285 - RNA, 19 nt, Artificial Sequence
  Description of Artificial Sequence: Synthetic oligonucleotide
ggaacccuuaaugcccugg

SEQ ID NO: 827286 - RNA, 19 nt, Artificial Sequence
  Description of Artificial Sequence: Synthetic oligonucleotide
agcgagcacgggcggcacc

SEQ ID NO: 827287 - RNA, 19 nt, Artificial Sequence
  Description of Artificial Sequence: Synthetic oligonucleotide
accuaacagucaccuagaa

SEQ ID NO: 827288 - RNA, 19 nt, Artificial Sequence
  Description of Artificial Sequence: Synthetic oligonucleotide
ccaaaauccucaguucuac

SEQ ID NO: 827289 - RNA, 19 nt, Artificial Sequence
  Description of Artificial Sequence: Synthetic oligonucleotide
acauguuauuugugucaau

SEQ ID NO: 827290 - RNA, 19 nt, Artificial Sequence
  Description of Artificial Sequence: Synthetic oligonucleotide
uucggaaaaccggcaggcu

SEQ ID NO: 827291 - RNA, 19 nt, Artificial Sequence
  Description of Artificial Sequence: Synthetic oligonucleotide
ccuauaaaguacauccuua

SEQ ID NO: 827292 - RNA, 19 nt, Artificial Sequence
  Description of Artificial Sequence: Synthetic oligonucleotide
acaaaccaaggugaagcuu

SEQ ID NO: 827293 - RNA, 19 nt, Artificial Sequence
  Description of Artificial Sequence: Synthetic oligonucleotide
cacgcgacagccucaagua

SEQ ID NO: 827294 - RNA, 19 nt, Artificial Sequence
  Description of Artificial Sequence: Synthetic oligonucleotide
acacuacggcuuccuucgg

SEQ ID NO: 827295 - RNA, 19 nt, Artificial Sequence
  Description of Artificial Sequence: Synthetic oligonucleotide
cccaggacgacugggaaag

SEQ ID NO: 827296 - RNA, 19 nt, Artificial Sequence
  Description of Artificial Sequence: Synthetic oligonucleotide
gagcguccacuccacucug

SEQ ID NO: 827297 - RNA, 19 nt, Artificial Sequence
  Description of Artificial Sequence: Synthetic oligonucleotide
aagcaucugguuacguauu

SEQ ID NO: 827298 - RNA, 19 nt, Artificial Sequence
  Description of Artificial Sequence: Synthetic oligonucleotide
uacaaguaaccugguccaa

SEQ ID NO: 827299 - RNA, 19 nt, Artificial Sequence
  Description of Artificial Sequence: Synthetic oligonucleotide
caccuagaaccuauaaagu

SEQ ID NO: 827300 - RNA, 19 nt, Artificial Sequence
  Description of Artificial Sequence: Synthetic oligonucleotide
aaccaaggugaagcuuaca

SEQ ID NO: 827301 - RNA, 19 nt, Artificial Sequence
  Description of Artificial Sequence: Synthetic oligonucleotide
acgugcaacacuacggcuu

SEQ ID NO: 827302 - RNA, 19 nt, Artificial Sequence
  Description of Artificial Sequence: Synthetic oligonucleotide
caaggauaaauaccacagu

SEQ ID NO: 827303 - RNA, 19 nt, Artificial Sequence
  Description of Artificial Sequence: Synthetic oligonucleotide
aucugguuacguauuugaa

SEQ ID NO: 827304 - RNA, 19 nt, Artificial Sequence
  Description of Artificial Sequence: Synthetic oligonucleotide
guacauccuuaguuuuaga

SEQ ID NO: 827305 - RNA, 19 nt, Artificial Sequence
  Description of Artificial Sequence: Synthetic oligonucleotide
gcuuacacaccaugcugac

SEQ ID NO: 827306 - RNA, 19 nt, Artificial Sequence
  Description of Artificial Sequence: Synthetic oligonucleotide
acaccuuauacaagacaaa

SEQ ID NO: 827307 - RNA, 19 nt, Artificial Sequence
  Description of Artificial Sequence: Synthetic oligonucleotide
cagaacgugugagcaauca

SEQ ID NO: 827308 - RNA, 19 nt, Artificial Sequence
  Description of Artificial Sequence: Synthetic oligonucleotide
cacagacauaccacacgga

SEQ ID NO: 827309 - RNA, 19 nt, Artificial Sequence
  Description of Artificial Sequence: Synthetic oligonucleotide
accacacggaacccuuaau

SEQ ID NO: 827310 - RNA, 19 nt, Artificial Sequence
  Description of Artificial Sequence: Synthetic oligonucleotide
gucguuagaguuggugcuc

SEQ ID NO: 827311 - RNA, 19 nt, Artificial Sequence
  Description of Artificial Sequence: Synthetic oligonucleotide
gacgugcaacacuacggcu

SEQ ID NO: 827312 - RNA, 19 nt, Artificial Sequence
  Description of Artificial Sequence: Synthetic oligonucleotide
guaagacgugcaacacuac

SEQ ID NO: 827313 - RNA, 19 nt, Artificial Sequence
  Description of Artificial Sequence: Synthetic oligonucleotide
caacuucccucaaacaaau

SEQ ID NO: 827314 - RNA, 19 nt, Artificial Sequence
  Description of Artificial Sequence: Synthetic oligonucleotide
cagcaauaacuggacucac

SEQ ID NO: 827315 - RNA, 19 nt, Artificial Sequence
  Description of Artificial Sequence: Synthetic oligonucleotide
ccuuaguguagauaacaaa

SEQ ID NO: 827316 - RNA, 19 nt, Artificial Sequence
  Description of Artificial Sequence: Synthetic oligonucleotide
cuguuguaacuacaacugu

SEQ ID NO: 827317 - RNA, 19 nt, Artificial Sequence
  Description of Artificial Sequence: Synthetic oligonucleotide
guucuacagauaggccaug

SEQ ID NO: 827318 - RNA, 19 nt, Artificial Sequence
  Description of Artificial Sequence: Synthetic oligonucleotide
uccuaacgcugugucccug

SEQ ID NO: 827319 - RNA, 19 nt, Artificial Sequence
  Description of Artificial Sequence: Synthetic oligonucleotide
gugagcaaucaauggugua

SEQ ID NO: 827320 - RNA, 19 nt, Artificial Sequence
  Description of Artificial Sequence: Synthetic oligonucleotide
aauagucaguugagaccuu

SEQ ID NO: 827321 - RNA, 19 nt, Artificial Sequence
  Description of Artificial Sequence: Synthetic oligonucleotide
auacuuccagaaguuuguu

SEQ ID NO: 827322 - RNA, 19 nt, Artificial Sequence
  Description of Artificial Sequence: Synthetic oligonucleotide
caacugcuaauacaaggau

SEQ ID NO: 827323 - RNA, 19 nt, Artificial Sequence
  Description of Artificial Sequence: Synthetic oligonucleotide
acggaacccuuaaugcccu

SEQ ID NO: 827324 - RNA, 19 nt, Artificial Sequence
  Description of Artificial Sequence: Synthetic oligonucleotide
guuaggcuccauggagcug

SEQ ID NO: 827325 - RNA, 19 nt, Artificial Sequence
  Description of Artificial Sequence: Synthetic oligonucleotide
guucacugguaacgcuaca

SEQ ID NO: 827326 - RNA, 19 nt, Artificial Sequence
  Description of Artificial Sequence: Synthetic oligonucleotide
ccaauccuguucacuuggc

SEQ ID NO: 827327 - RNA, 19 nt, Artificial Sequence
  Description of Artificial Sequence: Synthetic oligonucleotide
aaccugacauacacaccuu

SEQ ID NO: 827328 - RNA, 19 nt, Artificial Sequence
  Description of Artificial Sequence: Synthetic oligonucleotide
ggcaggaagcggaacuccc

SEQ ID NO: 827329 - RNA, 19 nt, Artificial Sequence
  Description of Artificial Sequence: Synthetic oligonucleotide
ccacuagaaugguuccaag

SEQ ID NO: 827330 - RNA, 19 nt, Artificial Sequence
  Description of Artificial Sequence: Synthetic oligonucleotide
caggacgacugggaaagca

SEQ ID NO: 827331 - RNA, 19 nt, Artificial Sequence
  Description of Artificial Sequence: Synthetic oligonucleotide
gcucaacugcuaauacaag

SEQ ID NO: 827332 - RNA, 19 nt, Artificial Sequence
  Description of Artificial Sequence: Synthetic oligonucleotide
gacacgcgacagccucaag

SEQ ID NO: 827333 - RNA, 19 nt, Artificial Sequence
  Description of Artificial Sequence: Synthetic oligonucleotide
agaccgcccugacgcugcg

SEQ ID NO: 827334 - RNA, 19 nt, Artificial Sequence
  Description of Artificial Sequence: Synthetic oligonucleotide
uccagaguugaagcaccuu

SEQ ID NO: 827335 - RNA, 19 nt, Artificial Sequence
  Description of Artificial Sequence: Synthetic oligonucleotide
gcaucugguuacguauuug

SEQ ID NO: 827336 - RNA, 19 nt, Artificial Sequence
  Description of Artificial Sequence: Synthetic oligonucleotide
cacuacggcuuccuucgga

SEQ ID NO: 827337 - RNA, 19 nt, Artificial Sequence
  Description of Artificial Sequence: Synthetic oligonucleotide
agaggccgucuuugaacau

SEQ ID NO: 827338 - RNA, 19 nt, Artificial Sequence
  Description of Artificial Sequence: Synthetic oligonucleotide
cauaccacacggaacccuu

SEQ ID NO: 827339 - RNA, 19 nt, Artificial Sequence
  Description of Artificial Sequence: Synthetic oligonucleotide
agcacgggcggcaccgcag

SEQ ID NO: 827340 - RNA, 19 nt, Artificial Sequence
  Description of Artificial Sequence: Synthetic oligonucleotide
ggacucacuguuguaacua

SEQ ID NO: 827341 - RNA, 19 nt, Artificial Sequence
  Description of Artificial Sequence: Synthetic oligonucleotide
acucccgugucggcccagg

SEQ ID NO: 827342 - RNA, 19 nt, Artificial Sequence
  Description of Artificial Sequence: Synthetic oligonucleotide
gguaacgcuacaagacaaa

SEQ ID NO: 827343 - RNA, 19 nt, Artificial Sequence
  Description of Artificial Sequence: Synthetic oligonucleotide
agacacgcgacagccucaa

SEQ ID NO: 827344 - RNA, 19 nt, Artificial Sequence
  Description of Artificial Sequence: Synthetic oligonucleotide
aggcgagcguccacuccac

SEQ ID NO: 827345 - RNA, 19 nt, Artificial Sequence
  Description of Artificial Sequence: Synthetic oligonucleotide
cccuuaguguagauaacaa

SEQ ID NO: 827346 - RNA, 19 nt, Artificial Sequence
  Description of Artificial Sequence: Synthetic oligonucleotide
gggcuccgugugaagaucc

SEQ ID NO: 827347 - RNA, 19 nt, Artificial Sequence
  Description of Artificial Sequence: Synthetic oligonucleotide
gaacucccgugucggccca

SEQ ID NO: 827348 - RNA, 19 nt, Artificial Sequence
  Description of Artificial Sequence: Synthetic oligonucleotide
gccacuagaaugguuccaa

SEQ ID NO: 827349 - RNA, 19 nt, Artificial Sequence
  Description of Artificial Sequence: Synthetic oligonucleotide
gcuccgugugaagauccag

SEQ ID NO: 827350 - RNA, 19 nt, Artificial Sequence
  Description of Artificial Sequence: Synthetic oligonucleotide
gcguccacuccacucugac

SEQ ID NO: 827351 - RNA, 19 nt, Artificial Sequence
  Description of Artificial Sequence: Synthetic oligonucleotide
gagcacgggcggcaccgca

SEQ ID NO: 827352 - RNA, 19 nt, Artificial Sequence
  Description of Artificial Sequence: Synthetic oligonucleotide
caggaagcggaacucccgu

SEQ ID NO: 827353 - RNA, 19 nt, Artificial Sequence
  Description of Artificial Sequence: Synthetic oligonucleotide
gaaaaccggcaggcucuga

SEQ ID NO: 827354 - RNA, 19 nt, Artificial Sequence
  Description of Artificial Sequence: Synthetic oligonucleotide
cgagaugucaaugaauagu

SEQ ID NO: 827355 - RNA, 19 nt, Artificial Sequence
  Description of Artificial Sequence: Synthetic oligonucleotide
cgcgacagccucaaguaca

SEQ ID NO: 827356 - RNA, 19 nt, Artificial Sequence
  Description of Artificial Sequence: Synthetic oligonucleotide
auaccacaguuaacucaaa

SEQ ID NO: 827357 - RNA, 19 nt, Artificial Sequence
  Description of Artificial Sequence: Synthetic oligonucleotide
ggaucccuuaguguagaua

SEQ ID NO: 827358 - RNA, 19 nt, Artificial Sequence
  Description of Artificial Sequence: Synthetic oligonucleotide
ggagauucgcaaggagaaa

SEQ ID NO: 827359 - RNA, 19 nt, Artificial Sequence
  Description of Artificial Sequence: Synthetic oligonucleotide
ccuaacgcugugucccuga

SEQ ID NO: 827360 - RNA, 19 nt, Artificial Sequence
  Description of Artificial Sequence: Synthetic oligonucleotide
ggaaagccgggcuccgugu

SEQ ID NO: 827361 - RNA, 19 nt, Artificial Sequence
  Description of Artificial Sequence: Synthetic oligonucleotide
caaagaccgcccugacgcu

SEQ ID NO: 827362 - RNA, 19 nt, Artificial Sequence
  Description of Artificial Sequence: Synthetic oligonucleotide
gcccugacgcugcgacugg

SEQ ID NO: 827363 - RNA, 19 nt, Artificial Sequence
  Description of Artificial Sequence: Synthetic oligonucleotide
ggccacuagaaugguucca

SEQ ID NO: 827364 - RNA, 19 nt, Artificial Sequence
  Description of Artificial Sequence: Synthetic oligonucleotide
ccugacauacacaccuuau

SEQ ID NO: 827365 - RNA, 19 nt, Artificial Sequence
  Description of Artificial Sequence: Synthetic oligonucleotide
gcgacagccucaaguacaa

SEQ ID NO: 827366 - RNA, 19 nt, Artificial Sequence
  Description of Artificial Sequence: Synthetic oligonucleotide
gcccaaaguugaguugaca

SEQ ID NO: 827367 - RNA, 19 nt, Artificial Sequence
  Description of Artificial Sequence: Synthetic oligonucleotide
gcggaacucccgugucggc

SEQ ID NO: 827368 - RNA, 19 nt, Artificial Sequence
  Description of Artificial Sequence: Synthetic oligonucleotide
cggaaaaccggcaggcucu

SEQ ID NO: 827369 - RNA, 19 nt, Artificial Sequence
  Description of Artificial Sequence: Synthetic oligonucleotide
cgcccugacgcugcgacug

SEQ ID NO: 827370 - RNA, 19 nt, Artificial Sequence
  Description of Artificial Sequence: Synthetic oligonucleotide
cucccgugucggcccagga

SEQ ID NO: 827371 - RNA, 19 nt, Artificial Sequence
  Description of Artificial Sequence: Synthetic oligonucleotide
cccugacgcugcgacuggg

SEQ ID NO: 827372 - RNA, 19 nt, Artificial Sequence
  Description of Artificial Sequence: Synthetic oligonucleotide
ccaggacgacugggaaagc

SEQ ID NO: 827373 - RNA, 19 nt, Artificial Sequence
  Description of Artificial Sequence: Synthetic oligonucleotide
gaccgcccugacgcugcga

SEQ ID NO: 827374 - RNA, 19 nt, Artificial Sequence
  Description of Artificial Sequence: Synthetic oligonucleotide
caaaacuguuaggcuccau

SEQ ID NO: 827375 - RNA, 19 nt, Artificial Sequence
  Description of Artificial Sequence: Synthetic oligonucleotide
ccgugucggcccaggacga

SEQ ID NO: 827376 - RNA, 19 nt, Artificial Sequence
  Description of Artificial Sequence: Synthetic oligonucleotide
ccgugugaagauccagagu

SEQ ID NO: 827377 - RNA, 19 nt, Artificial Sequence
  Description of Artificial Sequence: Synthetic oligonucleotide
cagauaggccauggguauu

SEQ ID NO: 827378 - RNA, 19 nt, Artificial Sequence
  Description of Artificial Sequence: Synthetic oligonucleotide
acgcugcgacugggcagcu

SEQ ID NO: 827379 - RNA, 19 nt, Artificial Sequence
  Description of Artificial Sequence: Synthetic oligonucleotide
cggaacccuuaaugcccug

SEQ ID NO: 827380 - RNA, 19 nt, Artificial Sequence
  Description of Artificial Sequence: Synthetic oligonucleotide
cguuagaguuggugcucaa

SEQ ID NO: 827381 - RNA, 19 nt, Artificial Sequence
  Description of Artificial Sequence: Synthetic oligonucleotide
ggcgagcguccacuccacu

SEQ ID NO: 827382 - RNA, 19 nt, Artificial Sequence
  Description of Artificial Sequence: Synthetic oligonucleotide
cgugucggcccaggacgac

SEQ ID NO: 827383 - RNA, 19 nt, Artificial Sequence
  Description of Artificial Sequence: Synthetic oligonucleotide
ccgcccugacgcugcgacu

SEQ ID NO: 827384 - RNA, 19 nt, Artificial Sequence
  Description of Artificial Sequence: Synthetic oligonucleotide
cgcugcgacugggcagcuc

SEQ ID NO: 827385 - RNA, 19 nt, Artificial Sequence
  Description of Artificial Sequence: Synthetic oligonucleotide
aguaagaaaaccucccugc

SEQ ID NO: 827386 - RNA, 19 nt, Artificial Sequence
  Description of Artificial Sequence: Synthetic oligonucleotide
uguaguuagcuccagaggc

SEQ ID NO: 827387 - RNA, 19 nt, Artificial Sequence
  Description of Artificial Sequence: Synthetic oligonucleotide
ugcauugauggucacaugg

SEQ ID NO: 827388 - RNA, 19 nt, Artificial Sequence
  Description of Artificial Sequence: Synthetic oligonucleotide
ucgcacaucauucacaccc

SEQ ID NO: 827389 - RNA, 19 nt, Artificial Sequence
  Description of Artificial Sequence: Synthetic oligonucleotide
gaaguuacauuccuggaag

SEQ ID NO: 827390 - RNA, 19 nt, Artificial Sequence
  Description of Artificial Sequence: Synthetic oligonucleotide
auagaugcaaacaaccacc

SEQ ID NO: 827391 - RNA, 19 nt, Artificial Sequence
  Description of Artificial Sequence: Synthetic oligonucleotide
caagauuucgcuaaaagca

SEQ ID NO: 827392 - RNA, 19 nt, Artificial Sequence
  Description of Artificial Sequence: Synthetic oligonucleotide
aaagcaauucucuuaaguu

SEQ ID NO: 827393 - RNA, 19 nt, Artificial Sequence
  Description of Artificial Sequence: Synthetic oligonucleotide
uuaagcuuggcucaacaug

SEQ ID NO: 827394 - RNA, 19 nt, Artificial Sequence
  Description of Artificial Sequence: Synthetic oligonucleotide
aaaagagcccagucggucg

SEQ ID NO: 827395 - RNA, 19 nt, Artificial Sequence
  Description of Artificial Sequence: Synthetic oligonucleotide
uugucaauguguauggagc

SEQ ID NO: 827396 - RNA, 19 nt, Artificial Sequence
  Description of Artificial Sequence: Synthetic oligonucleotide
ucagauauggcguuagucu

SEQ ID NO: 827397 - RNA, 19 nt, Artificial Sequence
  Description of Artificial Sequence: Synthetic oligonucleotide
uguguauggagccagcccc

SEQ ID NO: 827398 - RNA, 19 nt, Artificial Sequence
  Description of Artificial Sequence: Synthetic oligonucleotide
cugaucuugagacaguggg

SEQ ID NO: 827399 - RNA, 19 nt, Artificial Sequence
  Description of Artificial Sequence: Synthetic oligonucleotide
auggcugccgucuuuagac

SEQ ID NO: 827400 - RNA, 19 nt, Artificial Sequence
  Description of Artificial Sequence: Synthetic oligonucleotide
uucgcuaaaagcaauucuc

SEQ ID NO: 827401 - RNA, 19 nt, Artificial Sequence
  Description of Artificial Sequence: Synthetic oligonucleotide
aauguguauggagccagcc

SEQ ID NO: 827402 - RNA, 19 nt, Artificial Sequence
  Description of Artificial Sequence: Synthetic oligonucleotide
caagugugagucuaguagg

SEQ ID NO: 827403 - RNA, 19 nt, Artificial Sequence
  Description of Artificial Sequence: Synthetic oligonucleotide
cuugaaaaucucucguggg

SEQ ID NO: 827404 - RNA, 19 nt, Artificial Sequence
  Description of Artificial Sequence: Synthetic oligonucleotide
uugaucucagauauggcgu

SEQ ID NO: 827405 - RNA, 19 nt, Artificial Sequence
  Description of Artificial Sequence: Synthetic oligonucleotide
aaaugaagguagggaagcc

SEQ ID NO: 827406 - RNA, 19 nt, Artificial Sequence
  Description of Artificial Sequence: Synthetic oligonucleotide
uaguaagaaaaccucccug

SEQ ID NO: 827407 - RNA, 19 nt, Artificial Sequence
  Description of Artificial Sequence: Synthetic oligonucleotide
uucuaaauagaugcaaaca

SEQ ID NO: 827408 - RNA, 19 nt, Artificial Sequence
  Description of Artificial Sequence: Synthetic oligonucleotide
uugccaacccucuugaucu

SEQ ID NO: 827409 - RNA, 19 nt, Artificial Sequence
  Description of Artificial Sequence: Synthetic oligonucleotide
gaagcuaucuuugccaacc

SEQ ID NO: 827410 - RNA, 19 nt, Artificial Sequence
  Description of Artificial Sequence: Synthetic oligonucleotide
uguccaauugaugaggaca

SEQ ID NO: 827411 - RNA, 19 nt, Artificial Sequence
  Description of Artificial Sequence: Synthetic oligonucleotide
gaaaugaagguagggaagc

SEQ ID NO: 827412 - RNA, 19 nt, Artificial Sequence
  Description of Artificial Sequence: Synthetic oligonucleotide
uuccaugaugcacucaggc

SEQ ID NO: 827413 - RNA, 19 nt, Artificial Sequence
  Description of Artificial Sequence: Synthetic oligonucleotide
aaauagaugcaaacaacca

SEQ ID NO: 827414 - RNA, 19 nt, Artificial Sequence
  Description of Artificial Sequence: Synthetic oligonucleotide
gucaagauuucgcuaaaag

SEQ ID NO: 827415 - RNA, 19 nt, Artificial Sequence
  Description of Artificial Sequence: Synthetic oligonucleotide
ugugucgucagcugccugg

SEQ ID NO: 827416 - RNA, 19 nt, Artificial Sequence
  Description of Artificial Sequence: Synthetic oligonucleotide
auguguauggagccagccc

SEQ ID NO: 827417 - RNA, 19 nt, Artificial Sequence
  Description of Artificial Sequence: Synthetic oligonucleotide
ucuuuagacagagaucacc

SEQ ID NO: 827418 - RNA, 19 nt, Artificial Sequence
  Description of Artificial Sequence: Synthetic oligonucleotide
uuucgcuaaaagcaauucu

SEQ ID NO: 827419 - RNA, 19 nt, Artificial Sequence
  Description of Artificial Sequence: Synthetic oligonucleotide
uagggaagccccuaguaag

SEQ ID NO: 827420 - RNA, 19 nt, Artificial Sequence
  Description of Artificial Sequence: Synthetic oligonucleotide
ugucaauguguauggagcc

SEQ ID NO: 827421 - RNA, 19 nt, Artificial Sequence
  Description of Artificial Sequence: Synthetic oligonucleotide
uugaaaaucucucgugggu

SEQ ID NO: 827422 - RNA, 19 nt, Artificial Sequence
  Description of Artificial Sequence: Synthetic oligonucleotide
aaagagcccagucggucgg

SEQ ID NO: 827423 - RNA, 19 nt, Artificial Sequence
  Description of Artificial Sequence: Synthetic oligonucleotide
ugguagucguacaaggccc

SEQ ID NO: 827424 - RNA, 19 nt, Artificial Sequence
  Description of Artificial Sequence: Synthetic oligonucleotide
uuugacuuuggucaagauu

SEQ ID NO: 827425 - RNA, 19 nt, Artificial Sequence
  Description of Artificial Sequence: Synthetic oligonucleotide
uuggcaaccuuuuccauga

SEQ ID NO: 827426 - RNA, 19 nt, Artificial Sequence
  Description of Artificial Sequence: Synthetic oligonucleotide
agaugucccugcuuugacc

SEQ ID NO: 827427 - RNA, 19 nt, Artificial Sequence
  Description of Artificial Sequence: Synthetic oligonucleotide
agucguacaaggcccgggc

SEQ ID NO: 827428 - RNA, 19 nt, Artificial Sequence
  Description of Artificial Sequence: Synthetic oligonucleotide
ucgccuguccaauugauga

SEQ ID NO: 827429 - RNA, 19 nt, Artificial Sequence
  Description of Artificial Sequence: Synthetic oligonucleotide
aaggcccgggcgcacaacc

SEQ ID NO: 827430 - RNA, 19 nt, Artificial Sequence
  Description of Artificial Sequence: Synthetic oligonucleotide
augaagguagggaagcccc

SEQ ID NO: 827431 - RNA, 19 nt, Artificial Sequence
  Description of Artificial Sequence: Synthetic oligonucleotide
cacagguuaagcuuggcuc

SEQ ID NO: 827432 - RNA, 19 nt, Artificial Sequence
  Description of Artificial Sequence: Synthetic oligonucleotide
uuggucaagauuucgcuaa

SEQ ID NO: 827433 - RNA, 19 nt, Artificial Sequence
  Description of Artificial Sequence: Synthetic oligonucleotide
ugccaaaguggccaucagg

SEQ ID NO: 827434 - RNA, 19 nt, Artificial Sequence
  Description of Artificial Sequence: Synthetic oligonucleotide
ugaaaaucucucgugggug

SEQ ID NO: 827435 - RNA, 19 nt, Artificial Sequence
  Description of Artificial Sequence: Synthetic oligonucleotide
caggaaacaugccaaagug

SEQ ID NO: 827436 - RNA, 19 nt, Artificial Sequence
  Description of Artificial Sequence: Synthetic oligonucleotide
ugaggacaaacuugggcag

SEQ ID NO: 827437 - RNA, 19 nt, Artificial Sequence
  Description of Artificial Sequence: Synthetic oligonucleotide
cugguagucguacaaggcc

SEQ ID NO: 827438 - RNA, 19 nt, Artificial Sequence
  Description of Artificial Sequence: Synthetic oligonucleotide
ucaauguguauggagccag

SEQ ID NO: 827439 - RNA, 19 nt, Artificial Sequence
  Description of Artificial Sequence: Synthetic oligonucleotide
ugauuagguuuucaggauc

SEQ ID NO: 827440 - RNA, 19 nt, Artificial Sequence
  Description of Artificial Sequence: Synthetic oligonucleotide
ucgcuaaaagcaauucucu

SEQ ID NO: 827441 - RNA, 19 nt, Artificial Sequence
  Description of Artificial Sequence: Synthetic oligonucleotide
ggagguuccucguacaggg

SEQ ID NO: 827442 - RNA, 19 nt, Artificial Sequence
  Description of Artificial Sequence: Synthetic oligonucleotide
acgacguuccuccuccagc

SEQ ID NO: 827443 - RNA, 19 nt, Artificial Sequence
  Description of Artificial Sequence: Synthetic oligonucleotide
acucaaggcagagggagcc

SEQ ID NO: 827444 - RNA, 19 nt, Artificial Sequence
  Description of Artificial Sequence: Synthetic oligonucleotide
gcuugaaaaucucucgugg

SEQ ID NO: 827445 - RNA, 19 nt, Artificial Sequence
  Description of Artificial Sequence: Synthetic oligonucleotide
agguguuggcuccucacac

SEQ ID NO: 827446 - RNA, 19 nt, Artificial Sequence
  Description of Artificial Sequence: Synthetic oligonucleotide
gucuauuuugacuuugguc

SEQ ID NO: 827447 - RNA, 19 nt, Artificial Sequence
  Description of Artificial Sequence: Synthetic oligonucleotide
acagguuaagcuuggcuca

SEQ ID NO: 827448 - RNA, 19 nt, Artificial Sequence
  Description of Artificial Sequence: Synthetic oligonucleotide
acacggauaucauugcugu

SEQ ID NO: 827449 - RNA, 19 nt, Artificial Sequence
  Description of Artificial Sequence: Synthetic oligonucleotide
uaccaguggagguuccucg

SEQ ID NO: 827450 - RNA, 19 nt, Artificial Sequence
  Description of Artificial Sequence: Synthetic oligonucleotide
ggaaacaugccaaaguggc

SEQ ID NO: 827451 - RNA, 19 nt, Artificial Sequence
  Description of Artificial Sequence: Synthetic oligonucleotide
gagaucacccaggagcugg

SEQ ID NO: 827452 - RNA, 19 nt, Artificial Sequence
  Description of Artificial Sequence: Synthetic oligonucleotide
ugagucuaguaggaggucc

SEQ ID NO: 827453 - RNA, 19 nt, Artificial Sequence
  Description of Artificial Sequence: Synthetic oligonucleotide
uucugguacacagagccca

SEQ ID NO: 827454 - RNA, 19 nt, Artificial Sequence
  Description of Artificial Sequence: Synthetic oligonucleotide
cugcuccugaucuugagac

SEQ ID NO: 827455 - RNA, 19 nt, Artificial Sequence
  Description of Artificial Sequence: Synthetic oligonucleotide
cuguaguuagcuccagagg

SEQ ID NO: 827456 - RNA, 19 nt, Artificial Sequence
  Description of Artificial Sequence: Synthetic oligonucleotide
agguucaccgccauggcac

SEQ ID NO: 827457 - RNA, 19 nt, Artificial Sequence
  Description of Artificial Sequence: Synthetic oligonucleotide
aagauuucgcuaaaagcaa

SEQ ID NO: 827458 - RNA, 19 nt, Artificial Sequence
  Description of Artificial Sequence: Synthetic oligonucleotide
ucccuuucgcacaucauuc

SEQ ID NO: 827459 - RNA, 19 nt, Artificial Sequence
  Description of Artificial Sequence: Synthetic oligonucleotide
gauuagguuuucaggauca

SEQ ID NO: 827460 - RNA, 19 nt, Artificial Sequence
  Description of Artificial Sequence: Synthetic oligonucleotide
agccccuaguaagaaaacc

SEQ ID NO: 827461 - RNA, 19 nt, Artificial Sequence
  Description of Artificial Sequence: Synthetic oligonucleotide
acaacccuugcccacugag

SEQ ID NO: 827462 - RNA, 19 nt, Artificial Sequence
  Description of Artificial Sequence: Synthetic oligonucleotide
aggaaacaugccaaagugg

SEQ ID NO: 827463 - RNA, 19 nt, Artificial Sequence
  Description of Artificial Sequence: Synthetic oligonucleotide
agaagcuaucuuugccaac

SEQ ID NO: 827464 - RNA, 19 nt, Artificial Sequence
  Description of Artificial Sequence: Synthetic oligonucleotide
cacacggauaucauugcug

SEQ ID NO: 827465 - RNA, 19 nt, Artificial Sequence
  Description of Artificial Sequence: Synthetic oligonucleotide
cauugaaguuacauuccug

SEQ ID NO: 827466 - RNA, 19 nt, Artificial Sequence
  Description of Artificial Sequence: Synthetic oligonucleotide
aaucucucguggguguggg

SEQ ID NO: 827467 - RNA, 19 nt, Artificial Sequence
  Description of Artificial Sequence: Synthetic oligonucleotide
acaugggacagaaaugaag

SEQ ID NO: 827468 - RNA, 19 nt, Artificial Sequence
  Description of Artificial Sequence: Synthetic oligonucleotide
ucguacaaggcccgggcgc

SEQ ID NO: 827469 - RNA, 19 nt, Artificial Sequence
  Description of Artificial Sequence: Synthetic oligonucleotide
uucucggugaccacgcgaa

SEQ ID NO: 827470 - RNA, 19 nt, Artificial Sequence
  Description of Artificial Sequence: Synthetic oligonucleotide
ccagccuucaucaaucacc

SEQ ID NO: 827471 - RNA, 19 nt, Artificial Sequence
  Description of Artificial Sequence: Synthetic oligonucleotide
cccuguaccagccacacgg

SEQ ID NO: 827472 - RNA, 19 nt, Artificial Sequence
  Description of Artificial Sequence: Synthetic oligonucleotide
cucacgacguuccuccucc

SEQ ID NO: 827473 - RNA, 19 nt, Artificial Sequence
  Description of Artificial Sequence: Synthetic oligonucleotide
gaagcuacuuccaguggag

SEQ ID NO: 827474 - RNA, 19 nt, Artificial Sequence
  Description of Artificial Sequence: Synthetic oligonucleotide
caaacaaccaccccauaga

SEQ ID NO: 827475 - RNA, 19 nt, Artificial Sequence
  Description of Artificial Sequence: Synthetic oligonucleotide
auggcguuagucuucuggu

SEQ ID NO: 827476 - RNA, 19 nt, Artificial Sequence
  Description of Artificial Sequence: Synthetic oligonucleotide
cauggcacgccccacaguc

SEQ ID NO: 827477 - RNA, 19 nt, Artificial Sequence
  Description of Artificial Sequence: Synthetic oligonucleotide
acaaacuugggcaggccgg

SEQ ID NO: 827478 - RNA, 19 nt, Artificial Sequence
  Description of Artificial Sequence: Synthetic oligonucleotide
ucacucgaugagcuccacg

SEQ ID NO: 827479 - RNA, 19 nt, Artificial Sequence
  Description of Artificial Sequence: Synthetic oligonucleotide
uuucucggugaccacgcga

SEQ ID NO: 827480 - RNA, 19 nt, Artificial Sequence
  Description of Artificial Sequence: Synthetic oligonucleotide
agccccuugcugcuguacc

SEQ ID NO: 827481 - RNA, 19 nt, Artificial Sequence
  Description of Artificial Sequence: Synthetic oligonucleotide
ccauagaaaccacacagag

SEQ ID NO: 827482 - RNA, 19 nt, Artificial Sequence
  Description of Artificial Sequence: Synthetic oligonucleotide
gauuucucggugaccacgc

SEQ ID NO: 827483 - RNA, 19 nt, Artificial Sequence
  Description of Artificial Sequence: Synthetic oligonucleotide
ucggucggggauuucucgg

SEQ ID NO: 827484 - RNA, 19 nt, Artificial Sequence
  Description of Artificial Sequence: Synthetic oligonucleotide
aggcguacaucaccuuccc

SEQ ID NO: 827485 - RNA, 19 nt, Artificial Sequence
  Description of Artificial Sequence: Synthetic oligonucleotide
acgugguuggcgcaugcuc

SEQ ID NO: 827486 - RNA, 19 nt, Artificial Sequence
  Description of Artificial Sequence: Synthetic oligonucleotide
cucuuaaguucaugauucc

SEQ ID NO: 827487 - RNA, 19 nt, Artificial Sequence
  Description of Artificial Sequence: Synthetic oligonucleotide
agguuccucguacagggug

SEQ ID NO: 827488 - RNA, 19 nt, Artificial Sequence
  Description of Artificial Sequence: Synthetic oligonucleotide
agccacacggauaucauug

SEQ ID NO: 827489 - RNA, 19 nt, Artificial Sequence
  Description of Artificial Sequence: Synthetic oligonucleotide
gaggcaaaugaagacucug

SEQ ID NO: 827490 - RNA, 19 nt, Artificial Sequence
  Description of Artificial Sequence: Synthetic oligonucleotide
ucucucguggguguggggc

SEQ ID NO: 827491 - RNA, 19 nt, Artificial Sequence
  Description of Artificial Sequence: Synthetic oligonucleotide
ucugcuacaucugggguaa

SEQ ID NO: 827492 - RNA, 19 nt, Artificial Sequence
  Description of Artificial Sequence: Synthetic oligonucleotide
acagucccagcuaugcuac

SEQ ID NO: 827493 - RNA, 19 nt, Artificial Sequence
  Description of Artificial Sequence: Synthetic oligonucleotide
acguaggccuccugcagcg

SEQ ID NO: 827494 - RNA, 19 nt, Artificial Sequence
  Description of Artificial Sequence: Synthetic oligonucleotide
cauucccagagaugggagc

SEQ ID NO: 827495 - RNA, 19 nt, Artificial Sequence
  Description of Artificial Sequence: Synthetic oligonucleotide
ucggugaccacgcgaacgu

SEQ ID NO: 827496 - RNA, 19 nt, Artificial Sequence
  Description of Artificial Sequence: Synthetic oligonucleotide
uggagguuccucguacagg

SEQ ID NO: 827497 - RNA, 19 nt, Artificial Sequence
  Description of Artificial Sequence: Synthetic oligonucleotide
caccccauagaaaccacac

SEQ ID NO: 827498 - RNA, 19 nt, Artificial Sequence
  Description of Artificial Sequence: Synthetic oligonucleotide
gaugucccugcuuugaccu

SEQ ID NO: 827499 - RNA, 19 nt, Artificial Sequence
  Description of Artificial Sequence: Synthetic oligonucleotide
uugagacagugggaguugg

SEQ ID NO: 827500 - RNA, 19 nt, Artificial Sequence
  Description of Artificial Sequence: Synthetic oligonucleotide
accagccuucaucaaucac

SEQ ID NO: 827501 - RNA, 19 nt, Artificial Sequence
  Description of Artificial Sequence: Synthetic oligonucleotide
agauauggcguuagucuuc

SEQ ID NO: 827502 - RNA, 19 nt, Artificial Sequence
  Description of Artificial Sequence: Synthetic oligonucleotide
acagagugcuagguguugg

SEQ ID NO: 827503 - RNA, 19 nt, Artificial Sequence
  Description of Artificial Sequence: Synthetic oligonucleotide
caacccuugcccacugagg

SEQ ID NO: 827504 - RNA, 19 nt, Artificial Sequence
  Description of Artificial Sequence: Synthetic oligonucleotide
ucgaugcccgugauuaggu

SEQ ID NO: 827505 - RNA, 19 nt, Artificial Sequence
  Description of Artificial Sequence: Synthetic oligonucleotide
guaguuagcuccagaggcc

SEQ ID NO: 827506 - RNA, 19 nt, Artificial Sequence
  Description of Artificial Sequence: Synthetic oligonucleotide
cucagauauggcguuaguc

SEQ ID NO: 827507 - RNA, 19 nt, Artificial Sequence
  Description of Artificial Sequence: Synthetic oligonucleotide
aauuaacucuuaggccucu

SEQ ID NO: 827508 - RNA, 19 nt, Artificial Sequence
  Description of Artificial Sequence: Synthetic oligonucleotide
cuucccgcuguugagcucc

SEQ ID NO: 827509 - RNA, 19 nt, Artificial Sequence
  Description of Artificial Sequence: Synthetic oligonucleotide
uguggggccugcuggcccg

SEQ ID NO: 827510 - RNA, 19 nt, Artificial Sequence
  Description of Artificial Sequence: Synthetic oligonucleotide
cucgaugcccgugauuagg

SEQ ID NO: 827511 - RNA, 19 nt, Artificial Sequence
  Description of Artificial Sequence: Synthetic oligonucleotide
uggcacgccccacaguccc

SEQ ID NO: 827512 - RNA, 19 nt, Artificial Sequence
  Description of Artificial Sequence: Synthetic oligonucleotide
ucggcgggcagccuccugc

SEQ ID NO: 827513 - RNA, 19 nt, Artificial Sequence
  Description of Artificial Sequence: Synthetic oligonucleotide
gaaaaucucucgugggugu

SEQ ID NO: 827514 - RNA, 19 nt, Artificial Sequence
  Description of Artificial Sequence: Synthetic oligonucleotide
auuucucggugaccacgcg

SEQ ID NO: 827515 - RNA, 19 nt, Artificial Sequence
  Description of Artificial Sequence: Synthetic oligonucleotide
ugaucucagauauggcguu

SEQ ID NO: 827516 - RNA, 19 nt, Artificial Sequence
  Description of Artificial Sequence: Synthetic oligonucleotide
uggcccagaagcuaucuuu

SEQ ID NO: 827517 - RNA, 19 nt, Artificial Sequence
  Description of Artificial Sequence: Synthetic oligonucleotide
gucggucggggauuucucg

SEQ ID NO: 827518 - RNA, 19 nt, Artificial Sequence
  Description of Artificial Sequence: Synthetic oligonucleotide
gaagcagcugcuuucccua

SEQ ID NO: 827519 - RNA, 19 nt, Artificial Sequence
  Description of Artificial Sequence: Synthetic oligonucleotide
ggauuucucggugaccacg

SEQ ID NO: 827520 - RNA, 19 nt, Artificial Sequence
  Description of Artificial Sequence: Synthetic oligonucleotide
agaccucccuccccuguac

SEQ ID NO: 827521 - RNA, 19 nt, Artificial Sequence
  Description of Artificial Sequence: Synthetic oligonucleotide
gaccacgcgaacguaggcc

SEQ ID NO: 827522 - RNA, 19 nt, Artificial Sequence
  Description of Artificial Sequence: Synthetic oligonucleotide
gucguacaaggcccgggcg

SEQ ID NO: 827523 - RNA, 19 nt, Artificial Sequence
  Description of Artificial Sequence: Synthetic oligonucleotide
aucucagauauggcguuag

SEQ ID NO: 827524 - RNA, 19 nt, Artificial Sequence
  Description of Artificial Sequence: Synthetic oligonucleotide
gccugguagucguacaagg

SEQ ID NO: 827525 - RNA, 19 nt, Artificial Sequence
  Description of Artificial Sequence: Synthetic oligonucleotide
uccuggaagagugccaaaa

SEQ ID NO: 827526 - RNA, 19 nt, Artificial Sequence
  Description of Artificial Sequence: Synthetic oligonucleotide
ugacuuuggucaagauuuc

SEQ ID NO: 827527 - RNA, 19 nt, Artificial Sequence
  Description of Artificial Sequence: Synthetic oligonucleotide
ccgugauuagguuuucagg

SEQ ID NO: 827528 - RNA, 19 nt, Artificial Sequence
  Description of Artificial Sequence: Synthetic oligonucleotide
caauguguauggagccagc

SEQ ID NO: 827529 - RNA, 19 nt, Artificial Sequence
  Description of Artificial Sequence: Synthetic oligonucleotide
ugaccacgcgaacguaggc

SEQ ID NO: 827530 - RNA, 19 nt, Artificial Sequence
  Description of Artificial Sequence: Synthetic oligonucleotide
ggcucaacaugccauuccc

SEQ ID NO: 827531 - RNA, 19 nt, Artificial Sequence
  Description of Artificial Sequence: Synthetic oligonucleotide
uagucguacaaggcccggg

SEQ ID NO: 827532 - RNA, 19 nt, Artificial Sequence
  Description of Artificial Sequence: Synthetic oligonucleotide
ggcguuagucuucugguac

SEQ ID NO: 827533 - RNA, 19 nt, Artificial Sequence
  Description of Artificial Sequence: Synthetic oligonucleotide
ucucagauauggcguuagu

SEQ ID NO: 827534 - RNA, 19 nt, Artificial Sequence
  Description of Artificial Sequence: Synthetic oligonucleotide
agcaggguucugcuacauc

SEQ ID NO: 827535 - RNA, 19 nt, Artificial Sequence
  Description of Artificial Sequence: Synthetic oligonucleotide
caaccaccccauagaaacc

SEQ ID NO: 827536 - RNA, 19 nt, Artificial Sequence
  Description of Artificial Sequence: Synthetic oligonucleotide
guagggaagccccuaguaa

SEQ ID NO: 827537 - RNA, 19 nt, Artificial Sequence
  Description of Artificial Sequence: Synthetic oligonucleotide
ggaguugggguccuucacc

SEQ ID NO: 827538 - RNA, 19 nt, Artificial Sequence
  Description of Artificial Sequence: Synthetic oligonucleotide
ugccauucccauugggguc

SEQ ID NO: 827539 - RNA, 19 nt, Artificial Sequence
  Description of Artificial Sequence: Synthetic oligonucleotide
cacucaaggcagagggagc

SEQ ID NO: 827540 - RNA, 19 nt, Artificial Sequence
  Description of Artificial Sequence: Synthetic oligonucleotide
cgugauuagguuuucagga

SEQ ID NO: 827541 - RNA, 19 nt, Artificial Sequence
  Description of Artificial Sequence: Synthetic oligonucleotide
gugaccacgcgaacguagg

SEQ ID NO: 827542 - RNA, 19 nt, Artificial Sequence
  Description of Artificial Sequence: Synthetic oligonucleotide
gcauugauggucacauggg

SEQ ID NO: 827543 - RNA, 19 nt, Artificial Sequence
  Description of Artificial Sequence: Synthetic oligonucleotide
ugcuacaucugggguaaca

SEQ ID NO: 827544 - RNA, 19 nt, Artificial Sequence
  Description of Artificial Sequence: Synthetic oligonucleotide
aggcccauagccacgccac

SEQ ID NO: 827545 - RNA, 19 nt, Artificial Sequence
  Description of Artificial Sequence: Synthetic oligonucleotide
cucagccucacucgaugag

SEQ ID NO: 827546 - RNA, 19 nt, Artificial Sequence
  Description of Artificial Sequence: Synthetic oligonucleotide
ccagcuaugcuacagccuc

SEQ ID NO: 827547 - RNA, 19 nt, Artificial Sequence
  Description of Artificial Sequence: Synthetic oligonucleotide
agcuaugcuacagccucag

SEQ ID NO: 827548 - RNA, 19 nt, Artificial Sequence
  Description of Artificial Sequence: Synthetic oligonucleotide
gugcugacgugguuggcgc

SEQ ID NO: 827549 - RNA, 19 nt, Artificial Sequence
  Description of Artificial Sequence: Synthetic oligonucleotide
uggucaagauuucgcuaaa

SEQ ID NO: 827550 - RNA, 19 nt, Artificial Sequence
  Description of Artificial Sequence: Synthetic oligonucleotide
cacguaguugucaaugugu

SEQ ID NO: 827551 - RNA, 19 nt, Artificial Sequence
  Description of Artificial Sequence: Synthetic oligonucleotide
caguggagguuccucguac

SEQ ID NO: 827552 - RNA, 19 nt, Artificial Sequence
  Description of Artificial Sequence: Synthetic oligonucleotide
ugacgugguuggcgcaugc

SEQ ID NO: 827553 - RNA, 19 nt, Artificial Sequence
  Description of Artificial Sequence: Synthetic oligonucleotide
gacagagugcuagguguug

SEQ ID NO: 827554 - RNA, 19 nt, Artificial Sequence
  Description of Artificial Sequence: Synthetic oligonucleotide
cucgccuguccaauugaug

SEQ ID NO: 827555 - RNA, 19 nt, Artificial Sequence
  Description of Artificial Sequence: Synthetic oligonucleotide
ccaauugaugaggacaaac

SEQ ID NO: 827556 - RNA, 19 nt, Artificial Sequence
  Description of Artificial Sequence: Synthetic oligonucleotide
cgucuuuagacagagauca

SEQ ID NO: 827557 - RNA, 19 nt, Artificial Sequence
  Description of Artificial Sequence: Synthetic oligonucleotide
ccugguagucguacaaggc

SEQ ID NO: 827558 - RNA, 19 nt, Artificial Sequence
  Description of Artificial Sequence: Synthetic oligonucleotide
agggccuuucuaaauagau

SEQ ID NO: 827559 - RNA, 19 nt, Artificial Sequence
  Description of Artificial Sequence: Synthetic oligonucleotide
agcuguaguuagcuccaga

SEQ ID NO: 827560 - RNA, 19 nt, Artificial Sequence
  Description of Artificial Sequence: Synthetic oligonucleotide
agugggaguuggcucucug

SEQ ID NO: 827561 - RNA, 19 nt, Artificial Sequence
  Description of Artificial Sequence: Synthetic oligonucleotide
accaguggagguuccucgu

SEQ ID NO: 827562 - RNA, 19 nt, Artificial Sequence
  Description of Artificial Sequence: Synthetic oligonucleotide
uucaccgccauggcacgcc

SEQ ID NO: 827563 - RNA, 19 nt, Artificial Sequence
  Description of Artificial Sequence: Synthetic oligonucleotide
gguuaagcuuggcucaaca

SEQ ID NO: 827564 - RNA, 19 nt, Artificial Sequence
  Description of Artificial Sequence: Synthetic oligonucleotide
gguagucguacaaggcccg

SEQ ID NO: 827565 - RNA, 19 nt, Artificial Sequence
  Description of Artificial Sequence: Synthetic oligonucleotide
cccgugauuagguuuucag

SEQ ID NO: 827566 - RNA, 19 nt, Artificial Sequence
  Description of Artificial Sequence: Synthetic oligonucleotide
cuaucuuugccaacccucu

SEQ ID NO: 827567 - RNA, 19 nt, Artificial Sequence
  Description of Artificial Sequence: Synthetic oligonucleotide
gcucacacguucugcuugg

SEQ ID NO: 827568 - RNA, 19 nt, Artificial Sequence
  Description of Artificial Sequence: Synthetic oligonucleotide
cugccgucuuuagacagag

SEQ ID NO: 827569 - RNA, 19 nt, Artificial Sequence
  Description of Artificial Sequence: Synthetic oligonucleotide
gcgaacguaggccuccugc

SEQ ID NO: 827570 - RNA, 19 nt, Artificial Sequence
  Description of Artificial Sequence: Synthetic oligonucleotide
gcuaucuuugccaacccuc

SEQ ID NO: 827571 - RNA, 19 nt, Artificial Sequence
  Description of Artificial Sequence: Synthetic oligonucleotide
agauuucgcuaaaagcaau

SEQ ID NO: 827572 - RNA, 19 nt, Artificial Sequence
  Description of Artificial Sequence: Synthetic oligonucleotide
ccucccugcugucaaaacc

SEQ ID NO: 827573 - RNA, 19 nt, Artificial Sequence
  Description of Artificial Sequence: Synthetic oligonucleotide
uguaccaguggagguuccu

SEQ ID NO: 827574 - RNA, 19 nt, Artificial Sequence
  Description of Artificial Sequence: Synthetic oligonucleotide
aaaccucccugcugucaaa

SEQ ID NO: 827575 - RNA, 19 nt, Artificial Sequence
  Description of Artificial Sequence: Synthetic oligonucleotide
acccucgccuguccaauug

SEQ ID NO: 827576 - RNA, 19 nt, Artificial Sequence
  Description of Artificial Sequence: Synthetic oligonucleotide
cacauucccagagauggga

SEQ ID NO: 827577 - RNA, 19 nt, Artificial Sequence
  Description of Artificial Sequence: Synthetic oligonucleotide
gggguucuucauauguggg

SEQ ID NO: 827578 - RNA, 19 nt, Artificial Sequence
  Description of Artificial Sequence: Synthetic oligonucleotide
augucccugcuuugaccuc

SEQ ID NO: 827579 - RNA, 19 nt, Artificial Sequence
  Description of Artificial Sequence: Synthetic oligonucleotide
aagcuguaguuagcuccag

SEQ ID NO: 827580 - RNA, 19 nt, Artificial Sequence
  Description of Artificial Sequence: Synthetic oligonucleotide
gauauggcguuagucuucu

SEQ ID NO: 827581 - RNA, 19 nt, Artificial Sequence
  Description of Artificial Sequence: Synthetic oligonucleotide
agccucacucgaugagcuc

SEQ ID NO: 827582 - RNA, 19 nt, Artificial Sequence
  Description of Artificial Sequence: Synthetic oligonucleotide
gaugcccgugauuagguuu

SEQ ID NO: 827583 - RNA, 19 nt, Artificial Sequence
  Description of Artificial Sequence: Synthetic oligonucleotide
ggcugccgucuuuagacag

SEQ ID NO: 827584 - RNA, 19 nt, Artificial Sequence
  Description of Artificial Sequence: Synthetic oligonucleotide
gguucaccgccauggcacg

SEQ ID NO: 827585 - RNA, 19 nt, Artificial Sequence
  Description of Artificial Sequence: Synthetic oligonucleotide
aucucucgugggugugggg

SEQ ID NO: 827586 - RNA, 19 nt, Artificial Sequence
  Description of Artificial Sequence: Synthetic oligonucleotide
aguugucaauguguaugga

SEQ ID NO: 827587 - RNA, 19 nt, Artificial Sequence
  Description of Artificial Sequence: Synthetic oligonucleotide
uguccucauugaaguuaca

SEQ ID NO: 827588 - RNA, 19 nt, Artificial Sequence
  Description of Artificial Sequence: Synthetic oligonucleotide
guagucguacaaggcccgg

SEQ ID NO: 827589 - RNA, 19 nt, Artificial Sequence
  Description of Artificial Sequence: Synthetic oligonucleotide
cucagcccgugcauugaug

SEQ ID NO: 827590 - RNA, 19 nt, Artificial Sequence
  Description of Artificial Sequence: Synthetic oligonucleotide
uggcguuagucuucuggua

SEQ ID NO: 827591 - RNA, 19 nt, Artificial Sequence
  Description of Artificial Sequence: Synthetic oligonucleotide
gcacguaguugucaaugug

SEQ ID NO: 827592 - RNA, 19 nt, Artificial Sequence
  Description of Artificial Sequence: Synthetic oligonucleotide
uuggcucaacaugccauuc

SEQ ID NO: 827593 - RNA, 19 nt, Artificial Sequence
  Description of Artificial Sequence: Synthetic oligonucleotide
guauggagccagccccuug

SEQ ID NO: 827594 - RNA, 19 nt, Artificial Sequence
  Description of Artificial Sequence: Synthetic oligonucleotide
acguaguugucaaugugua

SEQ ID NO: 827595 - RNA, 19 nt, Artificial Sequence
  Description of Artificial Sequence: Synthetic oligonucleotide
agucggucggggauuucuc

SEQ ID NO: 827596 - RNA, 19 nt, Artificial Sequence
  Description of Artificial Sequence: Synthetic oligonucleotide
gugauuagguuuucaggau

SEQ ID NO: 827597 - RNA, 19 nt, Artificial Sequence
  Description of Artificial Sequence: Synthetic oligonucleotide
uggggucaagugugagucu

SEQ ID NO: 827598 - RNA, 19 nt, Artificial Sequence
  Description of Artificial Sequence: Synthetic oligonucleotide
ccccuaguaagaaaaccuc

SEQ ID NO: 827599 - RNA, 19 nt, Artificial Sequence
  Description of Artificial Sequence: Synthetic oligonucleotide
ugguggacauagcccuuuc

SEQ ID NO: 827600 - RNA, 19 nt, Artificial Sequence
  Description of Artificial Sequence: Synthetic oligonucleotide
ugcagcucucgcucacgac

SEQ ID NO: 827601 - RNA, 19 nt, Artificial Sequence
  Description of Artificial Sequence: Synthetic oligonucleotide
gggccuuucuaaauagaug

SEQ ID NO: 827602 - RNA, 19 nt, Artificial Sequence
  Description of Artificial Sequence: Synthetic oligonucleotide
cacgacguuccuccuccag

SEQ ID NO: 827603 - RNA, 19 nt, Artificial Sequence
  Description of Artificial Sequence: Synthetic oligonucleotide
gccgucuuuagacagagau

SEQ ID NO: 827604 - RNA, 19 nt, Artificial Sequence
  Description of Artificial Sequence: Synthetic oligonucleotide
agucuaguaggagguccug

SEQ ID NO: 827605 - RNA, 19 nt, Artificial Sequence
  Description of Artificial Sequence: Synthetic oligonucleotide
cgugguuggcgcaugcucc

SEQ ID NO: 827606 - RNA, 19 nt, Artificial Sequence
  Description of Artificial Sequence: Synthetic oligonucleotide
agcccagucggucggggau

SEQ ID NO: 827607 - RNA, 19 nt, Artificial Sequence
  Description of Artificial Sequence: Synthetic oligonucleotide
cacgcgaacguaggccucc

SEQ ID NO: 827608 - RNA, 19 nt, Artificial Sequence
  Description of Artificial Sequence: Synthetic oligonucleotide
cuguaccaguggagguucc

SEQ ID NO: 827609 - RNA, 19 nt, Artificial Sequence
  Description of Artificial Sequence: Synthetic oligonucleotide
auuagguuuucaggaucaa

SEQ ID NO: 827610 - RNA, 19 nt, Artificial Sequence
  Description of Artificial Sequence: Synthetic oligonucleotide
gauuucgcuaaaagcaauu

SEQ ID NO: 827611 - RNA, 19 nt, Artificial Sequence
  Description of Artificial Sequence: Synthetic oligonucleotide
cuuucccuauggaagcugu

SEQ ID NO: 827612 - RNA, 19 nt, Artificial Sequence
  Description of Artificial Sequence: Synthetic oligonucleotide
uucucauggcugccgucuu

SEQ ID NO: 827613 - RNA, 19 nt, Artificial Sequence
  Description of Artificial Sequence: Synthetic oligonucleotide
ccuuucgcacaucauucac

SEQ ID NO: 827614 - RNA, 19 nt, Artificial Sequence
  Description of Artificial Sequence: Synthetic oligonucleotide
cugggguaacagagcacuc

SEQ ID NO: 827615 - RNA, 19 nt, Artificial Sequence
  Description of Artificial Sequence: Synthetic oligonucleotide
ugcugacgugguuggcgca

SEQ ID NO: 827616 - RNA, 19 nt, Artificial Sequence
  Description of Artificial Sequence: Synthetic oligonucleotide
guacaggguguccugcucu

SEQ ID NO: 827617 - RNA, 19 nt, Artificial Sequence
  Description of Artificial Sequence: Synthetic oligonucleotide
ggcguacaucaccuucccg

SEQ ID NO: 827618 - RNA, 19 nt, Artificial Sequence
  Description of Artificial Sequence: Synthetic oligonucleotide
gguguuggcuccucacaca

SEQ ID NO: 827619 - RNA, 19 nt, Artificial Sequence
  Description of Artificial Sequence: Synthetic oligonucleotide
guaccaguggagguuccuc

SEQ ID NO: 827620 - RNA, 19 nt, Artificial Sequence
  Description of Artificial Sequence: Synthetic oligonucleotide
cagauauggcguuagucuu

SEQ ID NO: 827621 - RNA, 19 nt, Artificial Sequence
  Description of Artificial Sequence: Synthetic oligonucleotide
caggccggaguuggggucc

SEQ ID NO: 827622 - RNA, 19 nt, Artificial Sequence
  Description of Artificial Sequence: Synthetic oligonucleotide
cugucaaaaccaucauggu

SEQ ID NO: 827623 - RNA, 19 nt, Artificial Sequence
  Description of Artificial Sequence: Synthetic oligonucleotide
ccgucuuuagacagagauc

SEQ ID NO: 827624 - RNA, 19 nt, Artificial Sequence
  Description of Artificial Sequence: Synthetic oligonucleotide
uacaaggcccgggcgcaca

SEQ ID NO: 827625 - RNA, 19 nt, Artificial Sequence
  Description of Artificial Sequence: Synthetic oligonucleotide
gagucuaguaggagguccu

SEQ ID NO: 827626 - RNA, 19 nt, Artificial Sequence
  Description of Artificial Sequence: Synthetic oligonucleotide
cccgcuguugagcuccucc

SEQ ID NO: 827627 - RNA, 19 nt, Artificial Sequence
  Description of Artificial Sequence: Synthetic oligonucleotide
cagagggagccuuguccuc

SEQ ID NO: 827628 - RNA, 19 nt, Artificial Sequence
  Description of Artificial Sequence: Synthetic oligonucleotide
ucucguggguguggggccu

SEQ ID NO: 827629 - RNA, 19 nt, Artificial Sequence
  Description of Artificial Sequence: Synthetic oligonucleotide
ggucggggauuucucggug

SEQ ID NO: 827630 - RNA, 19 nt, Artificial Sequence
  Description of Artificial Sequence: Synthetic oligonucleotide
cucacacguucugcuuggg

SEQ ID NO: 827631 - RNA, 19 nt, Artificial Sequence
  Description of Artificial Sequence: Synthetic oligonucleotide
auauggcguuagucuucug

SEQ ID NO: 827632 - RNA, 19 nt, Artificial Sequence
  Description of Artificial Sequence: Synthetic oligonucleotide
cuucucauggcugccgucu

SEQ ID NO: 827633 - RNA, 19 nt, Artificial Sequence
  Description of Artificial Sequence: Synthetic oligonucleotide
ucacgacguuccuccucca

SEQ ID NO: 827634 - RNA, 19 nt, Artificial Sequence
  Description of Artificial Sequence: Synthetic oligonucleotide
ugauucccaagggccuuuc

SEQ ID NO: 827635 - RNA, 19 nt, Artificial Sequence
  Description of Artificial Sequence: Synthetic oligonucleotide
gcguuagucuucugguaca

SEQ ID NO: 827636 - RNA, 19 nt, Artificial Sequence
  Description of Artificial Sequence: Synthetic oligonucleotide
gaucucagauauggcguua

SEQ ID NO: 827637 - RNA, 19 nt, Artificial Sequence
  Description of Artificial Sequence: Synthetic oligonucleotide
ggguucuucauaugugggu

SEQ ID NO: 827638 - RNA, 19 nt, Artificial Sequence
  Description of Artificial Sequence: Synthetic oligonucleotide
gcaugcucccuuucgcaca

SEQ ID NO: 827639 - RNA, 19 nt, Artificial Sequence
  Description of Artificial Sequence: Synthetic oligonucleotide
cugcucucggcgggcagcc

SEQ ID NO: 827640 - RNA, 19 nt, Artificial Sequence
  Description of Artificial Sequence: Synthetic oligonucleotide
acaaggcccgggcgcacaa

SEQ ID NO: 827641 - RNA, 19 nt, Artificial Sequence
  Description of Artificial Sequence: Synthetic oligonucleotide
cacccugcagaaggcguac

SEQ ID NO: 827642 - RNA, 19 nt, Artificial Sequence
  Description of Artificial Sequence: Synthetic oligonucleotide
ggcgcacaacccuugccca

SEQ ID NO: 827643 - RNA, 19 nt, Artificial Sequence
  Description of Artificial Sequence: Synthetic oligonucleotide
caccagccuucaucaauca

SEQ ID NO: 827644 - RNA, 19 nt, Artificial Sequence
  Description of Artificial Sequence: Synthetic oligonucleotide
cugugucgucagcugccug

SEQ ID NO: 827645 - RNA, 19 nt, Artificial Sequence
  Description of Artificial Sequence: Synthetic oligonucleotide
cagcuaugcuacagccuca

SEQ ID NO: 827646 - RNA, 19 nt, Artificial Sequence
  Description of Artificial Sequence: Synthetic oligonucleotide
gagcccagucggucgggga

SEQ ID NO: 827647 - RNA, 19 nt, Artificial Sequence
  Description of Artificial Sequence: Synthetic oligonucleotide
cagccucacucgaugagcu

SEQ ID NO: 827648 - RNA, 19 nt, Artificial Sequence
  Description of Artificial Sequence: Synthetic oligonucleotide
cucugccauaggagacuuc

SEQ ID NO: 827649 - RNA, 19 nt, Artificial Sequence
  Description of Artificial Sequence: Synthetic oligonucleotide
gggucaagugugagucuag

SEQ ID NO: 827650 - RNA, 19 nt, Artificial Sequence
  Description of Artificial Sequence: Synthetic oligonucleotide
gccauucccauugggguca

SEQ ID NO: 827651 - RNA, 19 nt, Artificial Sequence
  Description of Artificial Sequence: Synthetic oligonucleotide
gccccuaguaagaaaaccu

SEQ ID NO: 827652 - RNA, 19 nt, Artificial Sequence
  Description of Artificial Sequence: Synthetic oligonucleotide
guuccucguacaggguguc

SEQ ID NO: 827653 - RNA, 19 nt, Artificial Sequence
  Description of Artificial Sequence: Synthetic oligonucleotide
acacccucgccuguccaau

SEQ ID NO: 827654 - RNA, 19 nt, Artificial Sequence
  Description of Artificial Sequence: Synthetic oligonucleotide
cauugcuguugccuucaua

SEQ ID NO: 827655 - RNA, 19 nt, Artificial Sequence
  Description of Artificial Sequence: Synthetic oligonucleotide
guucaccgccauggcacgc

SEQ ID NO: 827656 - RNA, 19 nt, Artificial Sequence
  Description of Artificial Sequence: Synthetic oligonucleotide
cugacgugguuggcgcaug

SEQ ID NO: 827657 - RNA, 19 nt, Artificial Sequence
  Description of Artificial Sequence: Synthetic oligonucleotide
gggauuucucggugaccac

SEQ ID NO: 827658 - RNA, 19 nt, Artificial Sequence
  Description of Artificial Sequence: Synthetic oligonucleotide
ggcccgcagacucccauuc

SEQ ID NO: 827659 - RNA, 19 nt, Artificial Sequence
  Description of Artificial Sequence: Synthetic oligonucleotide
uucccgcuguugagcuccu

SEQ ID NO: 827660 - RNA, 19 nt, Artificial Sequence
  Description of Artificial Sequence: Synthetic oligonucleotide
ugcuagguguuggcuccuc

SEQ ID NO: 827661 - RNA, 19 nt, Artificial Sequence
  Description of Artificial Sequence: Synthetic oligonucleotide
ccuauggaagcuguaguua

SEQ ID NO: 827662 - RNA, 19 nt, Artificial Sequence
  Description of Artificial Sequence: Synthetic oligonucleotide
cucacucgaugagcuccac

SEQ ID NO: 827663 - RNA, 19 nt, Artificial Sequence
  Description of Artificial Sequence: Synthetic oligonucleotide
cgcaugcucccuuucgcac

SEQ ID NO: 827664 - RNA, 19 nt, Artificial Sequence
  Description of Artificial Sequence: Synthetic oligonucleotide
gcgcaugcucccuuucgca

SEQ ID NO: 827665 - RNA, 19 nt, Artificial Sequence
  Description of Artificial Sequence: Synthetic oligonucleotide
gucggcgguucuccucuuc

SEQ ID NO: 827666 - RNA, 19 nt, Artificial Sequence
  Description of Artificial Sequence: Synthetic oligonucleotide
gcucacgacguuccuccuc

SEQ ID NO: 827667 - RNA, 19 nt, Artificial Sequence
  Description of Artificial Sequence: Synthetic oligonucleotide
gcacaacccuugcccacug

SEQ ID NO: 827668 - RNA, 19 nt, Artificial Sequence
  Description of Artificial Sequence: Synthetic oligonucleotide
ccgcagacucccauuccug

SEQ ID NO: 827669 - RNA, 19 nt, Artificial Sequence
  Description of Artificial Sequence: Synthetic oligonucleotide
ggggucaagugugagucua

SEQ ID NO: 827670 - RNA, 19 nt, Artificial Sequence
  Description of Artificial Sequence: Synthetic oligonucleotide
cccuuucgcacaucauuca

SEQ ID NO: 827671 - RNA, 19 nt, Artificial Sequence
  Description of Artificial Sequence: Synthetic oligonucleotide
gcagcgccggcccguuccg

SEQ ID NO: 827672 - RNA, 19 nt, Artificial Sequence
  Description of Artificial Sequence: Synthetic oligonucleotide
gcucucggcgggcagccuc

SEQ ID NO: 827673 - RNA, 19 nt, Artificial Sequence
  Description of Artificial Sequence: Synthetic oligonucleotide
gguuccucguacagggugu

SEQ ID NO: 827674 - RNA, 19 nt, Artificial Sequence
  Description of Artificial Sequence: Synthetic oligonucleotide
gcgcacaacccuugcccac

SEQ ID NO: 827675 - RNA, 19 nt, Artificial Sequence
  Description of Artificial Sequence: Synthetic oligonucleotide
cccugcugucaaaaccauc

SEQ ID NO: 827676 - RNA, 19 nt, Artificial Sequence
  Description of Artificial Sequence: Synthetic oligonucleotide
gacgugguuggcgcaugcu

SEQ ID NO: 827677 - RNA, 19 nt, Artificial Sequence
  Description of Artificial Sequence: Synthetic oligonucleotide
gcccgcagacucccauucc

SEQ ID NO: 827678 - RNA, 19 nt, Artificial Sequence
  Description of Artificial Sequence: Synthetic oligonucleotide
cagucggucggggauuucu

SEQ ID NO: 827679 - RNA, 19 nt, Artificial Sequence
  Description of Artificial Sequence: Synthetic oligonucleotide
cuccugaucuugagacagu

SEQ ID NO: 827680 - RNA, 19 nt, Artificial Sequence
  Description of Artificial Sequence: Synthetic oligonucleotide
cagaccucccuccccugua

SEQ ID NO: 827681 - RNA, 19 nt, Artificial Sequence
  Description of Artificial Sequence: Synthetic oligonucleotide
augcucccuuucgcacauc

SEQ ID NO: 827682 - RNA, 19 nt, Artificial Sequence
  Description of Artificial Sequence: Synthetic oligonucleotide
caaggcccgggcgcacaac

SEQ ID NO: 827683 - RNA, 19 nt, Artificial Sequence
  Description of Artificial Sequence: Synthetic oligonucleotide
acgcgaacguaggccuccu

SEQ ID NO: 827684 - RNA, 19 nt, Artificial Sequence
  Description of Artificial Sequence: Synthetic oligonucleotide
caugauucccaagggccuu

SEQ ID NO: 827685 - RNA, 19 nt, Artificial Sequence
  Description of Artificial Sequence: Synthetic oligonucleotide
cucguggguguggggccug

SEQ ID NO: 827686 - RNA, 19 nt, Artificial Sequence
  Description of Artificial Sequence: Synthetic oligonucleotide
gagguuccucguacagggu

SEQ ID NO: 827687 - RNA, 19 nt, Artificial Sequence
  Description of Artificial Sequence: Synthetic oligonucleotide
cucggcgggcagccuccug

SEQ ID NO: 827688 - RNA, 19 nt, Artificial Sequence
  Description of Artificial Sequence: Synthetic oligonucleotide
cguacaucaccuucccgcu

SEQ ID NO: 827689 - RNA, 19 nt, Artificial Sequence
  Description of Artificial Sequence: Synthetic oligonucleotide
ccccuguaccagccacacg

SEQ ID NO: 827690 - RNA, 19 nt, Artificial Sequence
  Description of Artificial Sequence: Synthetic oligonucleotide
cacggauaucauugcuguu

SEQ ID NO: 827691 - RNA, 19 nt, Artificial Sequence
  Description of Artificial Sequence: Synthetic oligonucleotide
cugcuacaucugggguaac

SEQ ID NO: 827692 - RNA, 19 nt, Artificial Sequence
  Description of Artificial Sequence: Synthetic oligonucleotide
ccacgcgaacguaggccuc

SEQ ID NO: 827693 - RNA, 19 nt, Artificial Sequence
  Description of Artificial Sequence: Synthetic oligonucleotide
cagcgccggcccguuccgg

SEQ ID NO: 827694 - RNA, 19 nt, Artificial Sequence
  Description of Artificial Sequence: Synthetic oligonucleotide
cagcccgugcauugauggu

SEQ ID NO: 827695 - RNA, 19 nt, Artificial Sequence
  Description of Artificial Sequence: Synthetic oligonucleotide
cccgggcgcacaacccuug

SEQ ID NO: 827696 - RNA, 19 nt, Artificial Sequence
  Description of Artificial Sequence: Synthetic oligonucleotide
ccgggcgcacaacccuugc

SEQ ID NO: 827697 - RNA, 19 nt, Artificial Sequence
  Description of Artificial Sequence: Synthetic oligonucleotide
caaucaccucgaugcccgu

SEQ ID NO: 827698 - RNA, 19 nt, Artificial Sequence
  Description of Artificial Sequence: Synthetic oligonucleotide
ccacacggauaucauugcu

SEQ ID NO: 827699 - RNA, 19 nt, Artificial Sequence
  Description of Artificial Sequence: Synthetic oligonucleotide
aggccggaguugggguccu

SEQ ID NO: 827700 - RNA, 19 nt, Artificial Sequence
  Description of Artificial Sequence: Synthetic oligonucleotide
cccucgccuguccaauuga

SEQ ID NO: 827701 - RNA, 19 nt, Artificial Sequence
  Description of Artificial Sequence: Synthetic oligonucleotide
cguacaaggcccgggcgca

SEQ ID NO: 827702 - RNA, 19 nt, Artificial Sequence
  Description of Artificial Sequence: Synthetic oligonucleotide
ccuccagucggcgguucuc

SEQ ID NO: 827703 - RNA, 19 nt, Artificial Sequence
  Description of Artificial Sequence: Synthetic oligonucleotide
ggcccgggcgcacaacccu

SEQ ID NO: 827704 - RNA, 19 nt, Artificial Sequence
  Description of Artificial Sequence: Synthetic oligonucleotide
gcccgugauuagguuuuca

SEQ ID NO: 827705 - RNA, 19 nt, Artificial Sequence
  Description of Artificial Sequence: Synthetic oligonucleotide
ccaguggagguuccucgua

SEQ ID NO: 827706 - RNA, 19 nt, Artificial Sequence
  Description of Artificial Sequence: Synthetic oligonucleotide
cggggauuucucggugacc

SEQ ID NO: 827707 - RNA, 19 nt, Artificial Sequence
  Description of Artificial Sequence: Synthetic oligonucleotide
cguaguugucaauguguau

SEQ ID NO: 827708 - RNA, 19 nt, Artificial Sequence
  Description of Artificial Sequence: Synthetic oligonucleotide
gcugacgugguuggcgcau

SEQ ID NO: 827709 - RNA, 19 nt, Artificial Sequence
  Description of Artificial Sequence: Synthetic oligonucleotide
cugguugagugagcugcuu

SEQ ID NO: 827710 - RNA, 19 nt, Artificial Sequence
  Description of Artificial Sequence: Synthetic oligonucleotide
ccucgccuguccaauugau

SEQ ID NO: 827711 - RNA, 19 nt, Artificial Sequence
  Description of Artificial Sequence: Synthetic oligonucleotide
gccggcccguuccggcuca

SEQ ID NO: 827712 - RNA, 19 nt, Artificial Sequence
  Description of Artificial Sequence: Synthetic oligonucleotide
caccucgaugcccgugauu

SEQ ID NO: 827713 - RNA, 19 nt, Artificial Sequence
  Description of Artificial Sequence: Synthetic oligonucleotide
ccguuccggcucagguuca

SEQ ID NO: 827714 - RNA, 19 nt, Artificial Sequence
  Description of Artificial Sequence: Synthetic oligonucleotide
cacccucgccuguccaauu

SEQ ID NO: 827715 - RNA, 19 nt, Artificial Sequence
  Description of Artificial Sequence: Synthetic oligonucleotide
gccugaggcccaguauccu

SEQ ID NO: 827716 - RNA, 19 nt, Artificial Sequence
  Description of Artificial Sequence: Synthetic oligonucleotide
cagugggaguuggcucucu

SEQ ID NO: 827717 - RNA, 19 nt, Artificial Sequence
  Description of Artificial Sequence: Synthetic oligonucleotide
cggucggggauuucucggu

SEQ ID NO: 827718 - RNA, 19 nt, Artificial Sequence
  Description of Artificial Sequence: Synthetic oligonucleotide
ccagucggucggggauuuc

SEQ ID NO: 827719 - RNA, 19 nt, Artificial Sequence
  Description of Artificial Sequence: Synthetic oligonucleotide
gcgcugcucucggcgggca

SEQ ID NO: 827720 - RNA, 19 nt, Artificial Sequence
  Description of Artificial Sequence: Synthetic oligonucleotide
cgccggcccguuccggcuc

SEQ ID NO: 827721 - RNA, 19 nt, Artificial Sequence
  Description of Artificial Sequence: Synthetic oligonucleotide
cggcgguucuccucuuccu

SEQ ID NO: 827722 - RNA, 19 nt, Artificial Sequence
  Description of Artificial Sequence: Synthetic oligonucleotide
ccggcgcuucuccuccagu

SEQ ID NO: 827723 - RNA, 19 nt, Artificial Sequence
  Description of Artificial Sequence: Synthetic oligonucleotide
ccggcccguuccggcucag

SEQ ID NO: 827724 - RNA, 19 nt, Artificial Sequence
  Description of Artificial Sequence: Synthetic oligonucleotide
gcccgggcgcacaacccuu

SEQ ID NO: 827725 - RNA, 19 nt, Artificial Sequence
  Description of Artificial Sequence: Synthetic oligonucleotide
cgcucacgacguuccuccu

SEQ ID NO: 827726 - RNA, 19 nt, Artificial Sequence
  Description of Artificial Sequence: Synthetic oligonucleotide
cccagucggucggggauuu

SEQ ID NO: 827727 - RNA, 19 nt, Artificial Sequence
  Description of Artificial Sequence: Synthetic oligonucleotide
gggcacccuucaggaaguu

SEQ ID NO: 827728 - RNA, 19 nt, Artificial Sequence
  Description of Artificial Sequence: Synthetic oligonucleotide
augucauggacauugaucc

SEQ ID NO: 827729 - RNA, 19 nt, Artificial Sequence
  Description of Artificial Sequence: Synthetic oligonucleotide
aaaucgaaaagcuucaaaa

SEQ ID NO: 827730 - RNA, 19 nt, Artificial Sequence
  Description of Artificial Sequence: Synthetic oligonucleotide
aacaugucgaaguucuggc

SEQ ID NO: 827731 - RNA, 19 nt, Artificial Sequence
  Description of Artificial Sequence: Synthetic oligonucleotide
aguaaccuuauacaggugg

SEQ ID NO: 827732 - RNA, 19 nt, Artificial Sequence
  Description of Artificial Sequence: Synthetic oligonucleotide
ucaugaaugacgaagggcu

SEQ ID NO: 827733 - RNA, 19 nt, Artificial Sequence
  Description of Artificial Sequence: Synthetic oligonucleotide
ucauacgccauccacacag

SEQ ID NO: 827734 - RNA, 19 nt, Artificial Sequence
  Description of Artificial Sequence: Synthetic oligonucleotide
aagauuacaaaacgcaaga

SEQ ID NO: 827735 - RNA, 19 nt, Artificial Sequence
  Description of Artificial Sequence: Synthetic oligonucleotide
uauacagguggcaaaagcc

SEQ ID NO: 827736 - RNA, 19 nt, Artificial Sequence
  Description of Artificial Sequence: Synthetic oligonucleotide
uagacaaagagcacagugg

SEQ ID NO: 827737 - RNA, 19 nt, Artificial Sequence
  Description of Artificial Sequence: Synthetic oligonucleotide
uccaccuuggggaagaggg

SEQ ID NO: 827738 - RNA, 19 nt, Artificial Sequence
  Description of Artificial Sequence: Synthetic oligonucleotide
uuuaaguuccacaguaacc

SEQ ID NO: 827739 - RNA, 19 nt, Artificial Sequence
  Description of Artificial Sequence: Synthetic oligonucleotide
uuaaacucaucuucugugg

SEQ ID NO: 827740 - RNA, 19 nt, Artificial Sequence
  Description of Artificial Sequence: Synthetic oligonucleotide
aaguacaccagcuucgucu

SEQ ID NO: 827741 - RNA, 19 nt, Artificial Sequence
  Description of Artificial Sequence: Synthetic oligonucleotide
aaagauuacaaaacgcaag

SEQ ID NO: 827742 - RNA, 19 nt, Artificial Sequence
  Description of Artificial Sequence: Synthetic oligonucleotide
aaaacgcaagaaaagcagc

SEQ ID NO: 827743 - RNA, 19 nt, Artificial Sequence
  Description of Artificial Sequence: Synthetic oligonucleotide
auacuucucggccacauac

SEQ ID NO: 827744 - RNA, 19 nt, Artificial Sequence
  Description of Artificial Sequence: Synthetic oligonucleotide
aaucuugggauucuugcug

SEQ ID NO: 827745 - RNA, 19 nt, Artificial Sequence
  Description of Artificial Sequence: Synthetic oligonucleotide
agccgaagguacuugaugc

SEQ ID NO: 827746 - RNA, 19 nt, Artificial Sequence
  Description of Artificial Sequence: Synthetic oligonucleotide
uuuuaaguuccacaguaac

SEQ ID NO: 827747 - RNA, 19 nt, Artificial Sequence
  Description of Artificial Sequence: Synthetic oligonucleotide
ucgaaguucuggcucaugg

SEQ ID NO: 827748 - RNA, 19 nt, Artificial Sequence
  Description of Artificial Sequence: Synthetic oligonucleotide
caaaacgcaagaaaagcag

SEQ ID NO: 827749 - RNA, 19 nt, Artificial Sequence
  Description of Artificial Sequence: Synthetic oligonucleotide
acaguaaccuuauacaggu

SEQ ID NO: 827750 - RNA, 19 nt, Artificial Sequence
  Description of Artificial Sequence: Synthetic oligonucleotide
uccacaguaaccuuauaca

SEQ ID NO: 827751 - RNA, 19 nt, Artificial Sequence
  Description of Artificial Sequence: Synthetic oligonucleotide
uacaaaacgcaagaaaagc

SEQ ID NO: 827752 - RNA, 19 nt, Artificial Sequence
  Description of Artificial Sequence: Synthetic oligonucleotide
aaacgcaagaaaagcagcg

SEQ ID NO: 827753 - RNA, 19 nt, Artificial Sequence
  Description of Artificial Sequence: Synthetic oligonucleotide
auagucacugguuuuaagu

SEQ ID NO: 827754 - RNA, 19 nt, Artificial Sequence
  Description of Artificial Sequence: Synthetic oligonucleotide
cuugauugggcacuuaaac

SEQ ID NO: 827755 - RNA, 19 nt, Artificial Sequence
  Description of Artificial Sequence: Synthetic oligonucleotide
auaucugccaucccguguc

SEQ ID NO: 827756 - RNA, 19 nt, Artificial Sequence
  Description of Artificial Sequence: Synthetic oligonucleotide
uucagggacauccauguac

SEQ ID NO: 827757 - RNA, 19 nt, Artificial Sequence
  Description of Artificial Sequence: Synthetic oligonucleotide
ugacucacgaacaugucga

SEQ ID NO: 827758 - RNA, 19 nt, Artificial Sequence
  Description of Artificial Sequence: Synthetic oligonucleotide
guugauaaggcuucccugc

SEQ ID NO: 827759 - RNA, 19 nt, Artificial Sequence
  Description of Artificial Sequence: Synthetic oligonucleotide
gaagccauacuucucggcc

SEQ ID NO: 827760 - RNA, 19 nt, Artificial Sequence
  Description of Artificial Sequence: Synthetic oligonucleotide
agaucuggaguugauaagg

SEQ ID NO: 827761 - RNA, 19 nt, Artificial Sequence
  Description of Artificial Sequence: Synthetic oligonucleotide
ugggacacgaggaaguuug

SEQ ID NO: 827762 - RNA, 19 nt, Artificial Sequence
  Description of Artificial Sequence: Synthetic oligonucleotide
uacacgugcacgcagggug

SEQ ID NO: 827763 - RNA, 19 nt, Artificial Sequence
  Description of Artificial Sequence: Synthetic oligonucleotide
uaugaaaguggaaaaucuc

SEQ ID NO: 827764 - RNA, 19 nt, Artificial Sequence
  Description of Artificial Sequence: Synthetic oligonucleotide
gauaaagagggcuggcggc

SEQ ID NO: 827765 - RNA, 19 nt, Artificial Sequence
  Description of Artificial Sequence: Synthetic oligonucleotide
uagugacucacgaacaugu

SEQ ID NO: 827766 - RNA, 19 nt, Artificial Sequence
  Description of Artificial Sequence: Synthetic oligonucleotide
aaucucaccggccgacucg

SEQ ID NO: 827767 - RNA, 19 nt, Artificial Sequence
  Description of Artificial Sequence: Synthetic oligonucleotide
aaaagauuacaaaacgcaa

SEQ ID NO: 827768 - RNA, 19 nt, Artificial Sequence
  Description of Artificial Sequence: Synthetic oligonucleotide
uugauugggcacuuaaacu

SEQ ID NO: 827769 - RNA, 19 nt, Artificial Sequence
  Description of Artificial Sequence: Synthetic oligonucleotide
gugacucacgaacaugucg

SEQ ID NO: 827770 - RNA, 19 nt, Artificial Sequence
  Description of Artificial Sequence: Synthetic oligonucleotide
acugguuuuaaguuccaca

SEQ ID NO: 827771 - RNA, 19 nt, Artificial Sequence
  Description of Artificial Sequence: Synthetic oligonucleotide
aaaucgcaggccccgcugg

SEQ ID NO: 827772 - RNA, 19 nt, Artificial Sequence
  Description of Artificial Sequence: Synthetic oligonucleotide
ugggcacuuaaacucaucu

SEQ ID NO: 827773 - RNA, 19 nt, Artificial Sequence
  Description of Artificial Sequence: Synthetic oligonucleotide
aguugauaaggcuucccug

SEQ ID NO: 827774 - RNA, 19 nt, Artificial Sequence
  Description of Artificial Sequence: Synthetic oligonucleotide
auacugcaagccuuccacc

SEQ ID NO: 827775 - RNA, 19 nt, Artificial Sequence
  Description of Artificial Sequence: Synthetic oligonucleotide
gaugucauggacauugauc

SEQ ID NO: 827776 - RNA, 19 nt, Artificial Sequence
  Description of Artificial Sequence: Synthetic oligonucleotide
ugucauacgccauccacac

SEQ ID NO: 827777 - RNA, 19 nt, Artificial Sequence
  Description of Artificial Sequence: Synthetic oligonucleotide
uggguggaagaugucaugg

SEQ ID NO: 827778 - RNA, 19 nt, Artificial Sequence
  Description of Artificial Sequence: Synthetic oligonucleotide
augaaugacgaagggcugc

SEQ ID NO: 827779 - RNA, 19 nt, Artificial Sequence
  Description of Artificial Sequence: Synthetic oligonucleotide
caggggacgggauaaagag

SEQ ID NO: 827780 - RNA, 19 nt, Artificial Sequence
  Description of Artificial Sequence: Synthetic oligonucleotide
aaagcagcgacggcguuag

SEQ ID NO: 827781 - RNA, 19 nt, Artificial Sequence
  Description of Artificial Sequence: Synthetic oligonucleotide
uguacacgugcacgcaggg

SEQ ID NO: 827782 - RNA, 19 nt, Artificial Sequence
  Description of Artificial Sequence: Synthetic oligonucleotide
auuaggcucauugggcagc

SEQ ID NO: 827783 - RNA, 19 nt, Artificial Sequence
  Description of Artificial Sequence: Synthetic oligonucleotide
acacgaggaaguuugugug

SEQ ID NO: 827784 - RNA, 19 nt, Artificial Sequence
  Description of Artificial Sequence: Synthetic oligonucleotide
gagccgcacaaucucaccg

SEQ ID NO: 827785 - RNA, 19 nt, Artificial Sequence
  Description of Artificial Sequence: Synthetic oligonucleotide
aucgaucaccaccacggcg

SEQ ID NO: 827786 - RNA, 19 nt, Artificial Sequence
  Description of Artificial Sequence: Synthetic oligonucleotide
uagaucuggaguugauaag

SEQ ID NO: 827787 - RNA, 19 nt, Artificial Sequence
  Description of Artificial Sequence: Synthetic oligonucleotide
ggauaaagagggcuggcgg

SEQ ID NO: 827788 - RNA, 19 nt, Artificial Sequence
  Description of Artificial Sequence: Synthetic oligonucleotide
uugauaaggcuucccugcc

SEQ ID NO: 827789 - RNA, 19 nt, Artificial Sequence
  Description of Artificial Sequence: Synthetic oligonucleotide
gauuaggcucauugggcag

SEQ ID NO: 827790 - RNA, 19 nt, Artificial Sequence
  Description of Artificial Sequence: Synthetic oligonucleotide
aaucgcaggccccgcuggc

SEQ ID NO: 827791 - RNA, 19 nt, Artificial Sequence
  Description of Artificial Sequence: Synthetic oligonucleotide
acaaaacgcaagaaaagca

SEQ ID NO: 827792 - RNA, 19 nt, Artificial Sequence
  Description of Artificial Sequence: Synthetic oligonucleotide
ucaggggacgggauaaaga

SEQ ID NO: 827793 - RNA, 19 nt, Artificial Sequence
  Description of Artificial Sequence: Synthetic oligonucleotide
uguaccguucuguguaccc

SEQ ID NO: 827794 - RNA, 19 nt, Artificial Sequence
  Description of Artificial Sequence: Synthetic oligonucleotide
aguacaccagcuucgucug

SEQ ID NO: 827795 - RNA, 19 nt, Artificial Sequence
  Description of Artificial Sequence: Synthetic oligonucleotide
aguguucagccgaagguac

SEQ ID NO: 827796 - RNA, 19 nt, Artificial Sequence
  Description of Artificial Sequence: Synthetic oligonucleotide
gcuguagugacucacgaac

SEQ ID NO: 827797 - RNA, 19 nt, Artificial Sequence
  Description of Artificial Sequence: Synthetic oligonucleotide
ugugccuuggaaguacacc

SEQ ID NO: 827798 - RNA, 19 nt, Artificial Sequence
  Description of Artificial Sequence: Synthetic oligonucleotide
gcaagaaaagcagcgacgg

SEQ ID NO: 827799 - RNA, 19 nt, Artificial Sequence
  Description of Artificial Sequence: Synthetic oligonucleotide
uacgccauccacacaguga

SEQ ID NO: 827800 - RNA, 19 nt, Artificial Sequence
  Description of Artificial Sequence: Synthetic oligonucleotide
ugugcucacacugcuguag

SEQ ID NO: 827801 - RNA, 19 nt, Artificial Sequence
  Description of Artificial Sequence: Synthetic oligonucleotide
agcucgacacgaucuugcc

SEQ ID NO: 827802 - RNA, 19 nt, Artificial Sequence
  Description of Artificial Sequence: Synthetic oligonucleotide
acgguccaggaacauggcc

SEQ ID NO: 827803 - RNA, 19 nt, Artificial Sequence
  Description of Artificial Sequence: Synthetic oligonucleotide
acggcguuagggcagaggu

SEQ ID NO: 827804 - RNA, 19 nt, Artificial Sequence
  Description of Artificial Sequence: Synthetic oligonucleotide
augagcgagaggaagccac

SEQ ID NO: 827805 - RNA, 19 nt, Artificial Sequence
  Description of Artificial Sequence: Synthetic oligonucleotide
gaagagggagcugaauggc

SEQ ID NO: 827806 - RNA, 19 nt, Artificial Sequence
  Description of Artificial Sequence: Synthetic oligonucleotide
ucauggacauugauccaga

SEQ ID NO: 827807 - RNA, 19 nt, Artificial Sequence
  Description of Artificial Sequence: Synthetic oligonucleotide
cuggaguugauaaggcuuc

SEQ ID NO: 827808 - RNA, 19 nt, Artificial Sequence
  Description of Artificial Sequence: Synthetic oligonucleotide
auggcgagacaagaccucc

SEQ ID NO: 827809 - RNA, 19 nt, Artificial Sequence
  Description of Artificial Sequence: Synthetic oligonucleotide
agacaagaccucccacucg

SEQ ID NO: 827810 - RNA, 19 nt, Artificial Sequence
  Description of Artificial Sequence: Synthetic oligonucleotide
ggcguuagggcagaggucg

SEQ ID NO: 827811 - RNA, 19 nt, Artificial Sequence
  Description of Artificial Sequence: Synthetic oligonucleotide
gugggucaucaucagagcc

SEQ ID NO: 827812 - RNA, 19 nt, Artificial Sequence
  Description of Artificial Sequence: Synthetic oligonucleotide
uacacucauuggcacggag

SEQ ID NO: 827813 - RNA, 19 nt, Artificial Sequence
  Description of Artificial Sequence: Synthetic oligonucleotide
uuggcacggaggaaggaga

SEQ ID NO: 827814 - RNA, 19 nt, Artificial Sequence
  Description of Artificial Sequence: Synthetic oligonucleotide
ggucggaggucacagaugc

SEQ ID NO: 827815 - RNA, 19 nt, Artificial Sequence
  Description of Artificial Sequence: Synthetic oligonucleotide
gguuuuaaguuccacagua

SEQ ID NO: 827816 - RNA, 19 nt, Artificial Sequence
  Description of Artificial Sequence: Synthetic oligonucleotide
uugggguagaucuggaguu

SEQ ID NO: 827817 - RNA, 19 nt, Artificial Sequence
  Description of Artificial Sequence: Synthetic oligonucleotide
guaaccuuauacagguggc

SEQ ID NO: 827818 - RNA, 19 nt, Artificial Sequence
  Description of Artificial Sequence: Synthetic oligonucleotide
acuccuccuaaccagccca

SEQ ID NO: 827819 - RNA, 19 nt, Artificial Sequence
  Description of Artificial Sequence: Synthetic oligonucleotide
agagccgcucagcuuguac

SEQ ID NO: 827820 - RNA, 19 nt, Artificial Sequence
  Description of Artificial Sequence: Synthetic oligonucleotide
aaguggacguucucaucca

SEQ ID NO: 827821 - RNA, 19 nt, Artificial Sequence
  Description of Artificial Sequence: Synthetic oligonucleotide
gacacgaggaaguuugugu

SEQ ID NO: 827822 - RNA, 19 nt, Artificial Sequence
  Description of Artificial Sequence: Synthetic oligonucleotide
agcagcgacggcguuaggg

SEQ ID NO: 827823 - RNA, 19 nt, Artificial Sequence
  Description of Artificial Sequence: Synthetic oligonucleotide
gaucuuggagccauggcga

SEQ ID NO: 827824 - RNA, 19 nt, Artificial Sequence
  Description of Artificial Sequence: Synthetic oligonucleotide
ugaauggcugcaccaguuc

SEQ ID NO: 827825 - RNA, 19 nt, Artificial Sequence
  Description of Artificial Sequence: Synthetic oligonucleotide
gaagcguggcugcuugugc

SEQ ID NO: 827826 - RNA, 19 nt, Artificial Sequence
  Description of Artificial Sequence: Synthetic oligonucleotide
ugagcgagaggaagccacc

SEQ ID NO: 827827 - RNA, 19 nt, Artificial Sequence
  Description of Artificial Sequence: Synthetic oligonucleotide
gacgggauaaagagggcug

SEQ ID NO: 827828 - RNA, 19 nt, Artificial Sequence
  Description of Artificial Sequence: Synthetic oligonucleotide
caugaaugacgaagggcug

SEQ ID NO: 827829 - RNA, 19 nt, Artificial Sequence
  Description of Artificial Sequence: Synthetic oligonucleotide
cauugguaacuucuucaug

SEQ ID NO: 827830 - RNA, 19 nt, Artificial Sequence
  Description of Artificial Sequence: Synthetic oligonucleotide
uguacuccaccuuggggaa

SEQ ID NO: 827831 - RNA, 19 nt, Artificial Sequence
  Description of Artificial Sequence: Synthetic oligonucleotide
cacggcguagcccagggac

SEQ ID NO: 827832 - RNA, 19 nt, Artificial Sequence
  Description of Artificial Sequence: Synthetic oligonucleotide
ggacgguccaggaacaugg

SEQ ID NO: 827833 - RNA, 19 nt, Artificial Sequence
  Description of Artificial Sequence: Synthetic oligonucleotide
gccagucuuacacucauug

SEQ ID NO: 827834 - RNA, 19 nt, Artificial Sequence
  Description of Artificial Sequence: Synthetic oligonucleotide
uacuucucggccacauacu

SEQ ID NO: 827835 - RNA, 19 nt, Artificial Sequence
  Description of Artificial Sequence: Synthetic oligonucleotide
uccgucuggaucucagcca

SEQ ID NO: 827836 - RNA, 19 nt, Artificial Sequence
  Description of Artificial Sequence: Synthetic oligonucleotide
uaccguucuguguacccug

SEQ ID NO: 827837 - RNA, 19 nt, Artificial Sequence
  Description of Artificial Sequence: Synthetic oligonucleotide
ugaaugacgaagggcugca

SEQ ID NO: 827838 - RNA, 19 nt, Artificial Sequence
  Description of Artificial Sequence: Synthetic oligonucleotide
aauggcugcaccaguuccu

SEQ ID NO: 827839 - RNA, 19 nt, Artificial Sequence
  Description of Artificial Sequence: Synthetic oligonucleotide
gucggcgcggguaugaaag

SEQ ID NO: 827840 - RNA, 19 nt, Artificial Sequence
  Description of Artificial Sequence: Synthetic oligonucleotide
acaugucgaaguucuggcu

SEQ ID NO: 827841 - RNA, 19 nt, Artificial Sequence
  Description of Artificial Sequence: Synthetic oligonucleotide
gucuuacacucauuggcac

SEQ ID NO: 827842 - RNA, 19 nt, Artificial Sequence
  Description of Artificial Sequence: Synthetic oligonucleotide
cagcucgacacgaucuugc

SEQ ID NO: 827843 - RNA, 19 nt, Artificial Sequence
  Description of Artificial Sequence: Synthetic oligonucleotide
guaugaaaguggaaaaucu

SEQ ID NO: 827844 - RNA, 19 nt, Artificial Sequence
  Description of Artificial Sequence: Synthetic oligonucleotide
cucacgaacaugucgaagu

SEQ ID NO: 827845 - RNA, 19 nt, Artificial Sequence
  Description of Artificial Sequence: Synthetic oligonucleotide
cacgaucuugcccugugug

SEQ ID NO: 827846 - RNA, 19 nt, Artificial Sequence
  Description of Artificial Sequence: Synthetic oligonucleotide
ucguagcugaccacauaga

SEQ ID NO: 827847 - RNA, 19 nt, Artificial Sequence
  Description of Artificial Sequence: Synthetic oligonucleotide
ugcgggaauggguggaaga

SEQ ID NO: 827848 - RNA, 19 nt, Artificial Sequence
  Description of Artificial Sequence: Synthetic oligonucleotide
ucaaaucgcaggccccgcu

SEQ ID NO: 827849 - RNA, 19 nt, Artificial Sequence
  Description of Artificial Sequence: Synthetic oligonucleotide
ugucauggacauugaucca

SEQ ID NO: 827850 - RNA, 19 nt, Artificial Sequence
  Description of Artificial Sequence: Synthetic oligonucleotide
aguggacguucucauccag

SEQ ID NO: 827851 - RNA, 19 nt, Artificial Sequence
  Description of Artificial Sequence: Synthetic oligonucleotide
agggugugcggcuuguaga

SEQ ID NO: 827852 - RNA, 19 nt, Artificial Sequence
  Description of Artificial Sequence: Synthetic oligonucleotide
ucaccggccgacucguagc

SEQ ID NO: 827853 - RNA, 19 nt, Artificial Sequence
  Description of Artificial Sequence: Synthetic oligonucleotide
acgaucuugcccugugugu

SEQ ID NO: 827854 - RNA, 19 nt, Artificial Sequence
  Description of Artificial Sequence: Synthetic oligonucleotide
gugugcggcuuguagauca

SEQ ID NO: 827855 - RNA, 19 nt, Artificial Sequence
  Description of Artificial Sequence: Synthetic oligonucleotide
ugagccgcacaaucucacc

SEQ ID NO: 827856 - RNA, 19 nt, Artificial Sequence
  Description of Artificial Sequence: Synthetic oligonucleotide
augccguagagcugcacgu

SEQ ID NO: 827857 - RNA, 19 nt, Artificial Sequence
  Description of Artificial Sequence: Synthetic oligonucleotide
auggguggaagaugucaug

SEQ ID NO: 827858 - RNA, 19 nt, Artificial Sequence
  Description of Artificial Sequence: Synthetic oligonucleotide
cucgacacgaucuugcccu

SEQ ID NO: 827859 - RNA, 19 nt, Artificial Sequence
  Description of Artificial Sequence: Synthetic oligonucleotide
cuccuaaccagcccaagga

SEQ ID NO: 827860 - RNA, 19 nt, Artificial Sequence
  Description of Artificial Sequence: Synthetic oligonucleotide
ucuguguacccugugucau

SEQ ID NO: 827861 - RNA, 19 nt, Artificial Sequence
  Description of Artificial Sequence: Synthetic oligonucleotide
cucggccacauacugcaag

SEQ ID NO: 827862 - RNA, 19 nt, Artificial Sequence
  Description of Artificial Sequence: Synthetic oligonucleotide
ucuuggggacagcucuagc

SEQ ID NO: 827863 - RNA, 19 nt, Artificial Sequence
  Description of Artificial Sequence: Synthetic oligonucleotide
guugggguagaucuggagu

SEQ ID NO: 827864 - RNA, 19 nt, Artificial Sequence
  Description of Artificial Sequence: Synthetic oligonucleotide
cuucucgcagcucgacacg

SEQ ID NO: 827865 - RNA, 19 nt, Artificial Sequence
  Description of Artificial Sequence: Synthetic oligonucleotide
agcuucgucugcucguuga

SEQ ID NO: 827866 - RNA, 19 nt, Artificial Sequence
  Description of Artificial Sequence: Synthetic oligonucleotide
caaaucgaaaagcuucaaa

SEQ ID NO: 827867 - RNA, 19 nt, Artificial Sequence
  Description of Artificial Sequence: Synthetic oligonucleotide
agauuacaaaacgcaagaa

SEQ ID NO: 827868 - RNA, 19 nt, Artificial Sequence
  Description of Artificial Sequence: Synthetic oligonucleotide
accuuauacagguggcaaa

SEQ ID NO: 827869 - RNA, 19 nt, Artificial Sequence
  Description of Artificial Sequence: Synthetic oligonucleotide
auguaccguucuguguacc

SEQ ID NO: 827870 - RNA, 19 nt, Artificial Sequence
  Description of Artificial Sequence: Synthetic oligonucleotide
uccuucucgcagcucgaca

SEQ ID NO: 827871 - RNA, 19 nt, Artificial Sequence
  Description of Artificial Sequence: Synthetic oligonucleotide
aaaagcagcgacggcguua

SEQ ID NO: 827872 - RNA, 19 nt, Artificial Sequence
  Description of Artificial Sequence: Synthetic oligonucleotide
gccauccacacagugacgg

SEQ ID NO: 827873 - RNA, 19 nt, Artificial Sequence
  Description of Artificial Sequence: Synthetic oligonucleotide
ggcaacacggcugagguca

SEQ ID NO: 827874 - RNA, 19 nt, Artificial Sequence
  Description of Artificial Sequence: Synthetic oligonucleotide
accacggcguagcccaggg

SEQ ID NO: 827875 - RNA, 19 nt, Artificial Sequence
  Description of Artificial Sequence: Synthetic oligonucleotide
aaguuccacaguaaccuua

SEQ ID NO: 827876 - RNA, 19 nt, Artificial Sequence
  Description of Artificial Sequence: Synthetic oligonucleotide
gccauggcgagacaagacc

SEQ ID NO: 827877 - RNA, 19 nt, Artificial Sequence
  Description of Artificial Sequence: Synthetic oligonucleotide
ugcuguagugacucacgaa

SEQ ID NO: 827878 - RNA, 19 nt, Artificial Sequence
  Description of Artificial Sequence: Synthetic oligonucleotide
gcugguuguuuucagggac

SEQ ID NO: 827879 - RNA, 19 nt, Artificial Sequence
  Description of Artificial Sequence: Synthetic oligonucleotide
cuguagugacucacgaaca

SEQ ID NO: 827880 - RNA, 19 nt, Artificial Sequence
  Description of Artificial Sequence: Synthetic oligonucleotide
guagagcugcacgucggcg

SEQ ID NO: 827881 - RNA, 19 nt, Artificial Sequence
  Description of Artificial Sequence: Synthetic oligonucleotide
ucagccgaagguacuugau

SEQ ID NO: 827882 - RNA, 19 nt, Artificial Sequence
  Description of Artificial Sequence: Synthetic oligonucleotide
uaaagagggcuggcggcag

SEQ ID NO: 827883 - RNA, 19 nt, Artificial Sequence
  Description of Artificial Sequence: Synthetic oligonucleotide
gggauaaagagggcuggcg

SEQ ID NO: 827884 - RNA, 19 nt, Artificial Sequence
  Description of Artificial Sequence: Synthetic oligonucleotide
ggaugagcaggcgauuagg

SEQ ID NO: 827885 - RNA, 19 nt, Artificial Sequence
  Description of Artificial Sequence: Synthetic oligonucleotide
acucacgaacaugucgaag

SEQ ID NO: 827886 - RNA, 19 nt, Artificial Sequence
  Description of Artificial Sequence: Synthetic oligonucleotide
gugcagcaaugucaccucg

SEQ ID NO: 827887 - RNA, 19 nt, Artificial Sequence
  Description of Artificial Sequence: Synthetic oligonucleotide
acgccagaguguucagccg

SEQ ID NO: 827888 - RNA, 19 nt, Artificial Sequence
  Description of Artificial Sequence: Synthetic oligonucleotide
ugccaucccguguccagcc

SEQ ID NO: 827889 - RNA, 19 nt, Artificial Sequence
  Description of Artificial Sequence: Synthetic oligonucleotide
cauguaccguucuguguac

SEQ ID NO: 827890 - RNA, 19 nt, Artificial Sequence
  Description of Artificial Sequence: Synthetic oligonucleotide
cagcaaugucaccucguag

SEQ ID NO: 827891 - RNA, 19 nt, Artificial Sequence
  Description of Artificial Sequence: Synthetic oligonucleotide
gcuaccuugaacacuugug

SEQ ID NO: 827892 - RNA, 19 nt, Artificial Sequence
  Description of Artificial Sequence: Synthetic oligonucleotide
acagugacgggagcacccg

SEQ ID NO: 827893 - RNA, 19 nt, Artificial Sequence
  Description of Artificial Sequence: Synthetic oligonucleotide
acacggcugaggucaauga

SEQ ID NO: 827894 - RNA, 19 nt, Artificial Sequence
  Description of Artificial Sequence: Synthetic oligonucleotide
cauggcgagacaagaccuc

SEQ ID NO: 827895 - RNA, 19 nt, Artificial Sequence
  Description of Artificial Sequence: Synthetic oligonucleotide
gcaaugucaccucguagug

SEQ ID NO: 827896 - RNA, 19 nt, Artificial Sequence
  Description of Artificial Sequence: Synthetic oligonucleotide
cucaccggccgacucguag

SEQ ID NO: 827897 - RNA, 19 nt, Artificial Sequence
  Description of Artificial Sequence: Synthetic oligonucleotide
caagcuggcgccguugcug

SEQ ID NO: 827898 - RNA, 19 nt, Artificial Sequence
  Description of Artificial Sequence: Synthetic oligonucleotide
uugugccuuggaaguacac

SEQ ID NO: 827899 - RNA, 19 nt, Artificial Sequence
  Description of Artificial Sequence: Synthetic oligonucleotide
gaaauccugcuggcccucg

SEQ ID NO: 827900 - RNA, 19 nt, Artificial Sequence
  Description of Artificial Sequence: Synthetic oligonucleotide
aacauggcccaggcauauc

SEQ ID NO: 827901 - RNA, 19 nt, Artificial Sequence
  Description of Artificial Sequence: Synthetic oligonucleotide
ugagggguuccguccaguc

SEQ ID NO: 827902 - RNA, 19 nt, Artificial Sequence
  Description of Artificial Sequence: Synthetic oligonucleotide
gaaguacaccagcuucguc

SEQ ID NO: 827903 - RNA, 19 nt, Artificial Sequence
  Description of Artificial Sequence: Synthetic oligonucleotide
cccguguccagccagcccg

SEQ ID NO: 827904 - RNA, 19 nt, Artificial Sequence
  Description of Artificial Sequence: Synthetic oligonucleotide
ugcacgucggcgcggguau

SEQ ID NO: 827905 - RNA, 19 nt, Artificial Sequence
  Description of Artificial Sequence: Synthetic oligonucleotide
gcagcgacggcguuagggc

SEQ ID NO: 827906 - RNA, 19 nt, Artificial Sequence
  Description of Artificial Sequence: Synthetic oligonucleotide
caucgaucaccaccacggc

SEQ ID NO: 827907 - RNA, 19 nt, Artificial Sequence
  Description of Artificial Sequence: Synthetic oligonucleotide
aggggacgggauaaagagg

SEQ ID NO: 827908 - RNA, 19 nt, Artificial Sequence
  Description of Artificial Sequence: Synthetic oligonucleotide
cugguuguuuucagggaca

SEQ ID NO: 827909 - RNA, 19 nt, Artificial Sequence
  Description of Artificial Sequence: Synthetic oligonucleotide
uggggacgguccaggaaca

SEQ ID NO: 827910 - RNA, 19 nt, Artificial Sequence
  Description of Artificial Sequence: Synthetic oligonucleotide
agggacauccauguaccgu

SEQ ID NO: 827911 - RNA, 19 nt, Artificial Sequence
  Description of Artificial Sequence: Synthetic oligonucleotide
cuucgucugcucguugacc

SEQ ID NO: 827912 - RNA, 19 nt, Artificial Sequence
  Description of Artificial Sequence: Synthetic oligonucleotide
uggcacggaggaaggagaa

SEQ ID NO: 827913 - RNA, 19 nt, Artificial Sequence
  Description of Artificial Sequence: Synthetic oligonucleotide
auccacacagugacgggag

SEQ ID NO: 827914 - RNA, 19 nt, Artificial Sequence
  Description of Artificial Sequence: Synthetic oligonucleotide
gaguuggucaccagcugca

SEQ ID NO: 827915 - RNA, 19 nt, Artificial Sequence
  Description of Artificial Sequence: Synthetic oligonucleotide
uucucgcagcucgacacga

SEQ ID NO: 827916 - RNA, 19 nt, Artificial Sequence
  Description of Artificial Sequence: Synthetic oligonucleotide
acucgccacuggucagugc

SEQ ID NO: 827917 - RNA, 19 nt, Artificial Sequence
  Description of Artificial Sequence: Synthetic oligonucleotide
aguggggugcuuccuuccu

SEQ ID NO: 827918 - RNA, 19 nt, Artificial Sequence
  Description of Artificial Sequence: Synthetic oligonucleotide
ccuucucgcagcucgacac

SEQ ID NO: 827919 - RNA, 19 nt, Artificial Sequence
  Description of Artificial Sequence: Synthetic oligonucleotide
uugggcacuuaaacucauc

SEQ ID NO: 827920 - RNA, 19 nt, Artificial Sequence
  Description of Artificial Sequence: Synthetic oligonucleotide
aacggcugugggccuggug

SEQ ID NO: 827921 - RNA, 19 nt, Artificial Sequence
  Description of Artificial Sequence: Synthetic oligonucleotide
uccagacauugguaacuuc

SEQ ID NO: 827922 - RNA, 19 nt, Artificial Sequence
  Description of Artificial Sequence: Synthetic oligonucleotide
uagccuugcugguuguuuu

SEQ ID NO: 827923 - RNA, 19 nt, Artificial Sequence
  Description of Artificial Sequence: Synthetic oligonucleotide
ucauagccuugcugguugu

SEQ ID NO: 827924 - RNA, 19 nt, Artificial Sequence
  Description of Artificial Sequence: Synthetic oligonucleotide
gacggcguuagggcagagg

SEQ ID NO: 827925 - RNA, 19 nt, Artificial Sequence
  Description of Artificial Sequence: Synthetic oligonucleotide
gagaagccgggugugguga

SEQ ID NO: 827926 - RNA, 19 nt, Artificial Sequence
  Description of Artificial Sequence: Synthetic oligonucleotide
agaagccggguguggugag

SEQ ID NO: 827927 - RNA, 19 nt, Artificial Sequence
  Description of Artificial Sequence: Synthetic oligonucleotide
agcacccgcaauggcuacc

SEQ ID NO: 827928 - RNA, 19 nt, Artificial Sequence
  Description of Artificial Sequence: Synthetic oligonucleotide
gccaucgaucaccaccacg

SEQ ID NO: 827929 - RNA, 19 nt, Artificial Sequence
  Description of Artificial Sequence: Synthetic oligonucleotide
ucguucucaggggacggga

SEQ ID NO: 827930 - RNA, 19 nt, Artificial Sequence
  Description of Artificial Sequence: Synthetic oligonucleotide
ucguugggguagaucugga

SEQ ID NO: 827931 - RNA, 19 nt, Artificial Sequence
  Description of Artificial Sequence: Synthetic oligonucleotide
cccaugagcgagaggaagc

SEQ ID NO: 827932 - RNA, 19 nt, Artificial Sequence
  Description of Artificial Sequence: Synthetic oligonucleotide
ccauggauggcaacacggc

SEQ ID NO: 827933 - RNA, 19 nt, Artificial Sequence
  Description of Artificial Sequence: Synthetic oligonucleotide
acgaggaaguuugugugaa

SEQ ID NO: 827934 - RNA, 19 nt, Artificial Sequence
  Description of Artificial Sequence: Synthetic oligonucleotide
agaccucccacucgccacu

SEQ ID NO: 827935 - RNA, 19 nt, Artificial Sequence
  Description of Artificial Sequence: Synthetic oligonucleotide
cgcacaaucucaccggccg

SEQ ID NO: 827936 - RNA, 19 nt, Artificial Sequence
  Description of Artificial Sequence: Synthetic oligonucleotide
gcgauuaggcucauugggc

SEQ ID NO: 827937 - RNA, 19 nt, Artificial Sequence
  Description of Artificial Sequence: Synthetic oligonucleotide
aucccguguccagccagcc

SEQ ID NO: 827938 - RNA, 19 nt, Artificial Sequence
  Description of Artificial Sequence: Synthetic oligonucleotide
gcggacuccuccuaaccag

SEQ ID NO: 827939 - RNA, 19 nt, Artificial Sequence
  Description of Artificial Sequence: Synthetic oligonucleotide
cacuuguggcuuguggaug

SEQ ID NO: 827940 - RNA, 19 nt, Artificial Sequence
  Description of Artificial Sequence: Synthetic oligonucleotide
ccuccuaaccagcccaagg

SEQ ID NO: 827941 - RNA, 19 nt, Artificial Sequence
  Description of Artificial Sequence: Synthetic oligonucleotide
caaucucaccggccgacuc

SEQ ID NO: 827942 - RNA, 19 nt, Artificial Sequence
  Description of Artificial Sequence: Synthetic oligonucleotide
acacgaucuugcccugugu

SEQ ID NO: 827943 - RNA, 19 nt, Artificial Sequence
  Description of Artificial Sequence: Synthetic oligonucleotide
cacugcuguagugacucac

SEQ ID NO: 827944 - RNA, 19 nt, Artificial Sequence
  Description of Artificial Sequence: Synthetic oligonucleotide
ucccguguccagccagccc

SEQ ID NO: 827945 - RNA, 19 nt, Artificial Sequence
  Description of Artificial Sequence: Synthetic oligonucleotide
cccguaacggcugugggcc

SEQ ID NO: 827946 - RNA, 19 nt, Artificial Sequence
  Description of Artificial Sequence: Synthetic oligonucleotide
ggcgcggguaugaaagugg

SEQ ID NO: 827947 - RNA, 19 nt, Artificial Sequence
  Description of Artificial Sequence: Synthetic oligonucleotide
acaaaucgaaaagcuucaa

SEQ ID NO: 827948 - RNA, 19 nt, Artificial Sequence
  Description of Artificial Sequence: Synthetic oligonucleotide
cucgcagcucgacacgauc

SEQ ID NO: 827949 - RNA, 19 nt, Artificial Sequence
  Description of Artificial Sequence: Synthetic oligonucleotide
cacgaacaugucgaaguuc

SEQ ID NO: 827950 - RNA, 19 nt, Artificial Sequence
  Description of Artificial Sequence: Synthetic oligonucleotide
ucgucugcucguugaccca

SEQ ID NO: 827951 - RNA, 19 nt, Artificial Sequence
  Description of Artificial Sequence: Synthetic oligonucleotide
guguacccugugucauacg

SEQ ID NO: 827952 - RNA, 19 nt, Artificial Sequence
  Description of Artificial Sequence: Synthetic oligonucleotide
ucgacacgaucuugcccug

SEQ ID NO: 827953 - RNA, 19 nt, Artificial Sequence
  Description of Artificial Sequence: Synthetic oligonucleotide
cacauacugcaagccuucc

SEQ ID NO: 827954 - RNA, 19 nt, Artificial Sequence
  Description of Artificial Sequence: Synthetic oligonucleotide
agcgagaggaagccaccau

SEQ ID NO: 827955 - RNA, 19 nt, Artificial Sequence
  Description of Artificial Sequence: Synthetic oligonucleotide
gcggguaugaaaguggaaa

SEQ ID NO: 827956 - RNA, 19 nt, Artificial Sequence
  Description of Artificial Sequence: Synthetic oligonucleotide
gguguggugagccgcacaa

SEQ ID NO: 827957 - RNA, 19 nt, Artificial Sequence
  Description of Artificial Sequence: Synthetic oligonucleotide
ggugugcucacacugcugu

SEQ ID NO: 827958 - RNA, 19 nt, Artificial Sequence
  Description of Artificial Sequence: Synthetic oligonucleotide
guaacggcugugggccugg

SEQ ID NO: 827959 - RNA, 19 nt, Artificial Sequence
  Description of Artificial Sequence: Synthetic oligonucleotide
uccuccuaaccagcccaag

SEQ ID NO: 827960 - RNA, 19 nt, Artificial Sequence
  Description of Artificial Sequence: Synthetic oligonucleotide
cugcuguagugacucacga

SEQ ID NO: 827961 - RNA, 19 nt, Artificial Sequence
  Description of Artificial Sequence: Synthetic oligonucleotide
gacucacgaacaugucgaa

SEQ ID NO: 827962 - RNA, 19 nt, Artificial Sequence
  Description of Artificial Sequence: Synthetic oligonucleotide
cagggguguguccuuugug

SEQ ID NO: 827963 - RNA, 19 nt, Artificial Sequence
  Description of Artificial Sequence: Synthetic oligonucleotide
ugugcggcuuguagaucau

SEQ ID NO: 827964 - RNA, 19 nt, Artificial Sequence
  Description of Artificial Sequence: Synthetic oligonucleotide
ggagaagccggguguggug

SEQ ID NO: 827965 - RNA, 19 nt, Artificial Sequence
  Description of Artificial Sequence: Synthetic oligonucleotide
gguggugugcucacacugc

SEQ ID NO: 827966 - RNA, 19 nt, Artificial Sequence
  Description of Artificial Sequence: Synthetic oligonucleotide
ccgagcaauguacuccacc

SEQ ID NO: 827967 - RNA, 19 nt, Artificial Sequence
  Description of Artificial Sequence: Synthetic oligonucleotide
uuacacucauuggcacgga

SEQ ID NO: 827968 - RNA, 19 nt, Artificial Sequence
  Description of Artificial Sequence: Synthetic oligonucleotide
gcucgacacgaucuugccc

SEQ ID NO: 827969 - RNA, 19 nt, Artificial Sequence
  Description of Artificial Sequence: Synthetic oligonucleotide
gacgguccaggaacauggc

SEQ ID NO: 827970 - RNA, 19 nt, Artificial Sequence
  Description of Artificial Sequence: Synthetic oligonucleotide
acaaucucaccggccgacu

SEQ ID NO: 827971 - RNA, 19 nt, Artificial Sequence
  Description of Artificial Sequence: Synthetic oligonucleotide
gcauaucugccaucccgug

SEQ ID NO: 827972 - RNA, 19 nt, Artificial Sequence
  Description of Artificial Sequence: Synthetic oligonucleotide
ugacgggagcacccgcaau

SEQ ID NO: 827973 - RNA, 19 nt, Artificial Sequence
  Description of Artificial Sequence: Synthetic oligonucleotide
gaucaccaccacggcguag

SEQ ID NO: 827974 - RNA, 19 nt, Artificial Sequence
  Description of Artificial Sequence: Synthetic oligonucleotide
ucggcgcggguaugaaagu

SEQ ID NO: 827975 - RNA, 19 nt, Artificial Sequence
  Description of Artificial Sequence: Synthetic oligonucleotide
gaaugacgaagggcugcac

SEQ ID NO: 827976 - RNA, 19 nt, Artificial Sequence
  Description of Artificial Sequence: Synthetic oligonucleotide
gacccugccucauagccuu

SEQ ID NO: 827977 - RNA, 19 nt, Artificial Sequence
  Description of Artificial Sequence: Synthetic oligonucleotide
cugccaucccguguccagc

SEQ ID NO: 827978 - RNA, 19 nt, Artificial Sequence
  Description of Artificial Sequence: Synthetic oligonucleotide
gaagccggguguggugagc

SEQ ID NO: 827979 - RNA, 19 nt, Artificial Sequence
  Description of Artificial Sequence: Synthetic oligonucleotide
gagccccggccaucgauca

SEQ ID NO: 827980 - RNA, 19 nt, Artificial Sequence
  Description of Artificial Sequence: Synthetic oligonucleotide
guggcggacuccuccuaac

SEQ ID NO: 827981 - RNA, 19 nt, Artificial Sequence
  Description of Artificial Sequence: Synthetic oligonucleotide
gccgacucguagcugacca

SEQ ID NO: 827982 - RNA, 19 nt, Artificial Sequence
  Description of Artificial Sequence: Synthetic oligonucleotide
ggcgagacaagaccuccca

SEQ ID NO: 827983 - RNA, 19 nt, Artificial Sequence
  Description of Artificial Sequence: Synthetic oligonucleotide
uggcuaccuugaacacuug

SEQ ID NO: 827984 - RNA, 19 nt, Artificial Sequence
  Description of Artificial Sequence: Synthetic oligonucleotide
uguguccgucuggaucuca

SEQ ID NO: 827985 - RNA, 19 nt, Artificial Sequence
  Description of Artificial Sequence: Synthetic oligonucleotide
cagugacgggagcacccgc

SEQ ID NO: 827986 - RNA, 19 nt, Artificial Sequence
  Description of Artificial Sequence: Synthetic oligonucleotide
gagcgagaggaagccacca

SEQ ID NO: 827987 - RNA, 19 nt, Artificial Sequence
  Description of Artificial Sequence: Synthetic oligonucleotide
guguccagccagcccgagc

SEQ ID NO: 827988 - RNA, 19 nt, Artificial Sequence
  Description of Artificial Sequence: Synthetic oligonucleotide
uggcggcaggaggacaagc

SEQ ID NO: 827989 - RNA, 19 nt, Artificial Sequence
  Description of Artificial Sequence: Synthetic oligonucleotide
auugggcacuuaaacucau

SEQ ID NO: 827990 - RNA, 19 nt, Artificial Sequence
  Description of Artificial Sequence: Synthetic oligonucleotide
ccagaagcguggcugcuug

SEQ ID NO: 827991 - RNA, 19 nt, Artificial Sequence
  Description of Artificial Sequence: Synthetic oligonucleotide
cauaucugccaucccgugu

SEQ ID NO: 827992 - RNA, 19 nt, Artificial Sequence
  Description of Artificial Sequence: Synthetic oligonucleotide
ccguagagcugcacgucgg

SEQ ID NO: 827993 - RNA, 19 nt, Artificial Sequence
  Description of Artificial Sequence: Synthetic oligonucleotide
augcuggcccagaagcgug

SEQ ID NO: 827994 - RNA, 19 nt, Artificial Sequence
  Description of Artificial Sequence: Synthetic oligonucleotide
ucucggccacauacugcaa

SEQ ID NO: 827995 - RNA, 19 nt, Artificial Sequence
  Description of Artificial Sequence: Synthetic oligonucleotide
cagcccgagcaauguacuc

SEQ ID NO: 827996 - RNA, 19 nt, Artificial Sequence
  Description of Artificial Sequence: Synthetic oligonucleotide
ggcggacuccuccuaacca

SEQ ID NO: 827997 - RNA, 19 nt, Artificial Sequence
  Description of Artificial Sequence: Synthetic oligonucleotide
guggcaaaagccagucuua

SEQ ID NO: 827998 - RNA, 19 nt, Artificial Sequence
  Description of Artificial Sequence: Synthetic oligonucleotide
cacggcugaggucaaugaa

SEQ ID NO: 827999 - RNA, 19 nt, Artificial Sequence
  Description of Artificial Sequence: Synthetic oligonucleotide
uggcaacacggcugagguc

SEQ ID NO: 828000 - RNA, 19 nt, Artificial Sequence
  Description of Artificial Sequence: Synthetic oligonucleotide
gcccggaucagcugggaca

SEQ ID NO: 828001 - RNA, 19 nt, Artificial Sequence
  Description of Artificial Sequence: Synthetic oligonucleotide
cuuggaaguacaccagcuu

SEQ ID NO: 828002 - RNA, 19 nt, Artificial Sequence
  Description of Artificial Sequence: Synthetic oligonucleotide
cauccauguaccguucugu

SEQ ID NO: 828003 - RNA, 19 nt, Artificial Sequence
  Description of Artificial Sequence: Synthetic oligonucleotide
ggcccagaagcguggcugc

SEQ ID NO: 828004 - RNA, 19 nt, Artificial Sequence
  Description of Artificial Sequence: Synthetic oligonucleotide
ggcgccguugcuggggacg

SEQ ID NO: 828005 - RNA, 19 nt, Artificial Sequence
  Description of Artificial Sequence: Synthetic oligonucleotide
gccgcacaaucucaccggc

SEQ ID NO: 828006 - RNA, 19 nt, Artificial Sequence
  Description of Artificial Sequence: Synthetic oligonucleotide
gucauacgccauccacaca

SEQ ID NO: 828007 - RNA, 19 nt, Artificial Sequence
  Description of Artificial Sequence: Synthetic oligonucleotide
gcuucgucugcucguugac

SEQ ID NO: 828008 - RNA, 19 nt, Artificial Sequence
  Description of Artificial Sequence: Synthetic oligonucleotide
ccccguaacggcugugggc

SEQ ID NO: 828009 - RNA, 19 nt, Artificial Sequence
  Description of Artificial Sequence: Synthetic oligonucleotide
gcccgagcaauguacucca

SEQ ID NO: 828010 - RNA, 19 nt, Artificial Sequence
  Description of Artificial Sequence: Synthetic oligonucleotide
cagacauugguaacuucuu

SEQ ID NO: 828011 - RNA, 19 nt, Artificial Sequence
  Description of Artificial Sequence: Synthetic oligonucleotide
cagcgacggcguuagggca

SEQ ID NO: 828012 - RNA, 19 nt, Artificial Sequence
  Description of Artificial Sequence: Synthetic oligonucleotide
cugaauggcugcaccaguu

SEQ ID NO: 828013 - RNA, 19 nt, Artificial Sequence
  Description of Artificial Sequence: Synthetic oligonucleotide
caugagcgagaggaagcca

SEQ ID NO: 828014 - RNA, 19 nt, Artificial Sequence
  Description of Artificial Sequence: Synthetic oligonucleotide
accguucuguguacccugu

SEQ ID NO: 828015 - RNA, 19 nt, Artificial Sequence
  Description of Artificial Sequence: Synthetic oligonucleotide
aggacaagcuggcgccguu

SEQ ID NO: 828016 - RNA, 19 nt, Artificial Sequence
  Description of Artificial Sequence: Synthetic oligonucleotide
gcgagacaagaccucccac

SEQ ID NO: 828017 - RNA, 19 nt, Artificial Sequence
  Description of Artificial Sequence: Synthetic oligonucleotide
gugacgggagcacccgcaa

SEQ ID NO: 828018 - RNA, 19 nt, Artificial Sequence
  Description of Artificial Sequence: Synthetic oligonucleotide
gccuuugaaggaguugguc

SEQ ID NO: 828019 - RNA, 19 nt, Artificial Sequence
  Description of Artificial Sequence: Synthetic oligonucleotide
ccaucccguguccagccag

SEQ ID NO: 828020 - RNA, 19 nt, Artificial Sequence
  Description of Artificial Sequence: Synthetic oligonucleotide
gggacgguccaggaacaug

SEQ ID NO: 828021 - RNA, 19 nt, Artificial Sequence
  Description of Artificial Sequence: Synthetic oligonucleotide
cuccgggcagcggaugcug

SEQ ID NO: 828022 - RNA, 19 nt, Artificial Sequence
  Description of Artificial Sequence: Synthetic oligonucleotide
aucgcaggccccgcuggca

SEQ ID NO: 828023 - RNA, 19 nt, Artificial Sequence
  Description of Artificial Sequence: Synthetic oligonucleotide
caugcuggcccagaagcgu

SEQ ID NO: 828024 - RNA, 19 nt, Artificial Sequence
  Description of Artificial Sequence: Synthetic oligonucleotide
guaccguucuguguacccu

SEQ ID NO: 828025 - RNA, 19 nt, Artificial Sequence
  Description of Artificial Sequence: Synthetic oligonucleotide
ugcugggauggugcugcaa

SEQ ID NO: 828026 - RNA, 19 nt, Artificial Sequence
  Description of Artificial Sequence: Synthetic oligonucleotide
gcagcucgacacgaucuug

SEQ ID NO: 828027 - RNA, 19 nt, Artificial Sequence
  Description of Artificial Sequence: Synthetic oligonucleotide
ccccauagacaaagagcac

SEQ ID NO: 828028 - RNA, 19 nt, Artificial Sequence
  Description of Artificial Sequence: Synthetic oligonucleotide
caccacggcguagcccagg

SEQ ID NO: 828029 - RNA, 19 nt, Artificial Sequence
  Description of Artificial Sequence: Synthetic oligonucleotide
ggacgggauaaagagggcu

SEQ ID NO: 828030 - RNA, 19 nt, Artificial Sequence
  Description of Artificial Sequence: Synthetic oligonucleotide
cggacuccuccuaaccagc

SEQ ID NO: 828031 - RNA, 19 nt, Artificial Sequence
  Description of Artificial Sequence: Synthetic oligonucleotide
gcagcggaugcugugucuc

SEQ ID NO: 828032 - RNA, 19 nt, Artificial Sequence
  Description of Artificial Sequence: Synthetic oligonucleotide
ggacaagcuggcgccguug

SEQ ID NO: 828033 - RNA, 19 nt, Artificial Sequence
  Description of Artificial Sequence: Synthetic oligonucleotide
cacgcaggguggugugcuc

SEQ ID NO: 828034 - RNA, 19 nt, Artificial Sequence
  Description of Artificial Sequence: Synthetic oligonucleotide
ccgcacaaucucaccggcc

SEQ ID NO: 828035 - RNA, 19 nt, Artificial Sequence
  Description of Artificial Sequence: Synthetic oligonucleotide
ggguuccguccagucauag

SEQ ID NO: 828036 - RNA, 19 nt, Artificial Sequence
  Description of Artificial Sequence: Synthetic oligonucleotide
ggcauaucugccaucccgu

SEQ ID NO: 828037 - RNA, 19 nt, Artificial Sequence
  Description of Artificial Sequence: Synthetic oligonucleotide
gccccggccaucgaucacc

SEQ ID NO: 828038 - RNA, 19 nt, Artificial Sequence
  Description of Artificial Sequence: Synthetic oligonucleotide
cauuggcacggaggaagga

SEQ ID NO: 828039 - RNA, 19 nt, Artificial Sequence
  Description of Artificial Sequence: Synthetic oligonucleotide
ggagcacccgcaauggcua

SEQ ID NO: 828040 - RNA, 19 nt, Artificial Sequence
  Description of Artificial Sequence: Synthetic oligonucleotide
cuccuccuaaccagcccaa

SEQ ID NO: 828041 - RNA, 19 nt, Artificial Sequence
  Description of Artificial Sequence: Synthetic oligonucleotide
cauacgccauccacacagu

SEQ ID NO: 828042 - RNA, 19 nt, Artificial Sequence
  Description of Artificial Sequence: Synthetic oligonucleotide
ccauggcgagacaagaccu

SEQ ID NO: 828043 - RNA, 19 nt, Artificial Sequence
  Description of Artificial Sequence: Synthetic oligonucleotide
gggugugcggcuuguagau

SEQ ID NO: 828044 - RNA, 19 nt, Artificial Sequence
  Description of Artificial Sequence: Synthetic oligonucleotide
gggccucguucucagggga

SEQ ID NO: 828045 - RNA, 19 nt, Artificial Sequence
  Description of Artificial Sequence: Synthetic oligonucleotide
cggguaugaaaguggaaaa

SEQ ID NO: 828046 - RNA, 19 nt, Artificial Sequence
  Description of Artificial Sequence: Synthetic oligonucleotide
gugugcucacacugcugua

SEQ ID NO: 828047 - RNA, 19 nt, Artificial Sequence
  Description of Artificial Sequence: Synthetic oligonucleotide
gccggguguggugagccgc

SEQ ID NO: 828048 - RNA, 19 nt, Artificial Sequence
  Description of Artificial Sequence: Synthetic oligonucleotide
cuggcgccguugcugggga

SEQ ID NO: 828049 - RNA, 19 nt, Artificial Sequence
  Description of Artificial Sequence: Synthetic oligonucleotide
ucucaccggccgacucgua

SEQ ID NO: 828050 - RNA, 19 nt, Artificial Sequence
  Description of Artificial Sequence: Synthetic oligonucleotide
ccggccgacucguagcuga

SEQ ID NO: 828051 - RNA, 19 nt, Artificial Sequence
  Description of Artificial Sequence: Synthetic oligonucleotide
cugguggcggacuccuccu

SEQ ID NO: 828052 - RNA, 19 nt, Artificial Sequence
  Description of Artificial Sequence: Synthetic oligonucleotide
cacgucggcgcggguauga

SEQ ID NO: 828053 - RNA, 19 nt, Artificial Sequence
  Description of Artificial Sequence: Synthetic oligonucleotide
gguuccguccagucauagu

SEQ ID NO: 828054 - RNA, 19 nt, Artificial Sequence
  Description of Artificial Sequence: Synthetic oligonucleotide
ccgacucguagcugaccac

SEQ ID NO: 828055 - RNA, 19 nt, Artificial Sequence
  Description of Artificial Sequence: Synthetic oligonucleotide
gcgccguugcuggggacgg

SEQ ID NO: 828056 - RNA, 19 nt, Artificial Sequence
  Description of Artificial Sequence: Synthetic oligonucleotide
gggauggugcugcaaguuu

SEQ ID NO: 828057 - RNA, 19 nt, Artificial Sequence
  Description of Artificial Sequence: Synthetic oligonucleotide
gcguuagggcagaggucgg

SEQ ID NO: 828058 - RNA, 19 nt, Artificial Sequence
  Description of Artificial Sequence: Synthetic oligonucleotide
aucaugccguagagcugca

SEQ ID NO: 828059 - RNA, 19 nt, Artificial Sequence
  Description of Artificial Sequence: Synthetic oligonucleotide
accggccgacucguagcug

SEQ ID NO: 828060 - RNA, 19 nt, Artificial Sequence
  Description of Artificial Sequence: Synthetic oligonucleotide
caucagagccgcucagcuu

SEQ ID NO: 828061 - RNA, 19 nt, Artificial Sequence
  Description of Artificial Sequence: Synthetic oligonucleotide
gcgcggguaugaaagugga

SEQ ID NO: 828062 - RNA, 19 nt, Artificial Sequence
  Description of Artificial Sequence: Synthetic oligonucleotide
uaacggcugugggccuggu

SEQ ID NO: 828063 - RNA, 19 nt, Artificial Sequence
  Description of Artificial Sequence: Synthetic oligonucleotide
ccaccuuggggaagaggga

SEQ ID NO: 828064 - RNA, 19 nt, Artificial Sequence
  Description of Artificial Sequence: Synthetic oligonucleotide
cgggauaaagagggcuggc

SEQ ID NO: 828065 - RNA, 19 nt, Artificial Sequence
  Description of Artificial Sequence: Synthetic oligonucleotide
ccucguagugcuccccgga

SEQ ID NO: 828066 - RNA, 19 nt, Artificial Sequence
  Description of Artificial Sequence: Synthetic oligonucleotide
ggccgacucguagcugacc

SEQ ID NO: 828067 - RNA, 19 nt, Artificial Sequence
  Description of Artificial Sequence: Synthetic oligonucleotide
ggccucguucucaggggac

SEQ ID NO: 828068 - RNA, 19 nt, Artificial Sequence
  Description of Artificial Sequence: Synthetic oligonucleotide
ccguucuguguacccugug

SEQ ID NO: 828069 - RNA, 19 nt, Artificial Sequence
  Description of Artificial Sequence: Synthetic oligonucleotide
cugcacgucggcgcgggua

SEQ ID NO: 828070 - RNA, 19 nt, Artificial Sequence
  Description of Artificial Sequence: Synthetic oligonucleotide
cagcggaugcugugucucu

SEQ ID NO: 828071 - RNA, 19 nt, Artificial Sequence
  Description of Artificial Sequence: Synthetic oligonucleotide
caccggccgacucguagcu

SEQ ID NO: 828072 - RNA, 19 nt, Artificial Sequence
  Description of Artificial Sequence: Synthetic oligonucleotide
cccgagcaauguacuccac

SEQ ID NO: 828073 - RNA, 19 nt, Artificial Sequence
  Description of Artificial Sequence: Synthetic oligonucleotide
ggcagcggaugcugugucu

SEQ ID NO: 828074 - RNA, 19 nt, Artificial Sequence
  Description of Artificial Sequence: Synthetic oligonucleotide
gggagaagccggguguggu

SEQ ID NO: 828075 - RNA, 19 nt, Artificial Sequence
  Description of Artificial Sequence: Synthetic oligonucleotide
ccgaagguacuugaugccu

SEQ ID NO: 828076 - RNA, 19 nt, Artificial Sequence
  Description of Artificial Sequence: Synthetic oligonucleotide
gcgggaauggguggaagau

SEQ ID NO: 828077 - RNA, 19 nt, Artificial Sequence
  Description of Artificial Sequence: Synthetic oligonucleotide
ggcacggaggaaggagaaa

SEQ ID NO: 828078 - RNA, 19 nt, Artificial Sequence
  Description of Artificial Sequence: Synthetic oligonucleotide
gcguagcccagggacgcca

SEQ ID NO: 828079 - RNA, 19 nt, Artificial Sequence
  Description of Artificial Sequence: Synthetic oligonucleotide
ccagcccgagcaauguacu

SEQ ID NO: 828080 - RNA, 19 nt, Artificial Sequence
  Description of Artificial Sequence: Synthetic oligonucleotide
ggcguagcccagggacgcc

SEQ ID NO: 828081 - RNA, 19 nt, Artificial Sequence
  Description of Artificial Sequence: Synthetic oligonucleotide
gccaucccguguccagcca

SEQ ID NO: 828082 - RNA, 19 nt, Artificial Sequence
  Description of Artificial Sequence: Synthetic oligonucleotide
cguaacggcugugggccug

SEQ ID NO: 828083 - RNA, 19 nt, Artificial Sequence
  Description of Artificial Sequence: Synthetic oligonucleotide
cgggagcacccgcaauggc

SEQ ID NO: 828084 - RNA, 19 nt, Artificial Sequence
  Description of Artificial Sequence: Synthetic oligonucleotide
cggcguuagggcagagguc

SEQ ID NO: 828085 - RNA, 19 nt, Artificial Sequence
  Description of Artificial Sequence: Synthetic oligonucleotide
cagccagcccgagcaaugu

SEQ ID NO: 828086 - RNA, 19 nt, Artificial Sequence
  Description of Artificial Sequence: Synthetic oligonucleotide
caggccccgcuggcaggag

SEQ ID NO: 828087 - RNA, 19 nt, Artificial Sequence
  Description of Artificial Sequence: Synthetic oligonucleotide
gcacccgcaauggcuaccu

SEQ ID NO: 828088 - RNA, 19 nt, Artificial Sequence
  Description of Artificial Sequence: Synthetic oligonucleotide
gucggaggucacagaugcu

SEQ ID NO: 828089 - RNA, 19 nt, Artificial Sequence
  Description of Artificial Sequence: Synthetic oligonucleotide
cggcgcggguaugaaagug

SEQ ID NO: 828090 - RNA, 19 nt, Artificial Sequence
  Description of Artificial Sequence: Synthetic oligonucleotide
guguggugagccgcacaau

SEQ ID NO: 828091 - RNA, 19 nt, Artificial Sequence
  Description of Artificial Sequence: Synthetic oligonucleotide
ccccggacuccgggcagcg

SEQ ID NO: 828092 - RNA, 19 nt, Artificial Sequence
  Description of Artificial Sequence: Synthetic oligonucleotide
cgaggaaguuugugugaaa

SEQ ID NO: 828093 - RNA, 19 nt, Artificial Sequence
  Description of Artificial Sequence: Synthetic oligonucleotide
ccccgcuggcaggagcccc

SEQ ID NO: 828094 - RNA, 19 nt, Artificial Sequence
  Description of Artificial Sequence: Synthetic oligonucleotide
gccauacuucucggccaca

SEQ ID NO: 828095 - RNA, 19 nt, Artificial Sequence
  Description of Artificial Sequence: Synthetic oligonucleotide
gcgacggcguuagggcaga

SEQ ID NO: 828096 - RNA, 19 nt, Artificial Sequence
  Description of Artificial Sequence: Synthetic oligonucleotide
ccccggccaucgaucacca

SEQ ID NO: 828097 - RNA, 19 nt, Artificial Sequence
  Description of Artificial Sequence: Synthetic oligonucleotide
gcaacacggcugaggucaa

SEQ ID NO: 828098 - RNA, 19 nt, Artificial Sequence
  Description of Artificial Sequence: Synthetic oligonucleotide
gggacacgaggaaguuugu

SEQ ID NO: 828099 - RNA, 19 nt, Artificial Sequence
  Description of Artificial Sequence: Synthetic oligonucleotide
cguuagggcagaggucgga

SEQ ID NO: 828100 - RNA, 19 nt, Artificial Sequence
  Description of Artificial Sequence: Synthetic oligonucleotide
gccccaugagcgagaggaa

SEQ ID NO: 828101 - RNA, 19 nt, Artificial Sequence
  Description of Artificial Sequence: Synthetic oligonucleotide
gcacgucggcgcggguaug

SEQ ID NO: 828102 - RNA, 19 nt, Artificial Sequence
  Description of Artificial Sequence: Synthetic oligonucleotide
cgcggguaugaaaguggaa

SEQ ID NO: 828103 - RNA, 19 nt, Artificial Sequence
  Description of Artificial Sequence: Synthetic oligonucleotide
cccggccaucgaucaccac

SEQ ID NO: 828104 - RNA, 19 nt, Artificial Sequence
  Description of Artificial Sequence: Synthetic oligonucleotide
ccugcgggaauggguggaa

SEQ ID NO: 828105 - RNA, 19 nt, Artificial Sequence
  Description of Artificial Sequence: Synthetic oligonucleotide
ccgcaauggcuaccuugaa

SEQ ID NO: 828106 - RNA, 19 nt, Artificial Sequence
  Description of Artificial Sequence: Synthetic oligonucleotide
gggguuccguccagucaua

SEQ ID NO: 828107 - RNA, 19 nt, Artificial Sequence
  Description of Artificial Sequence: Synthetic oligonucleotide
gucucucguugggguagau

SEQ ID NO: 828108 - RNA, 19 nt, Artificial Sequence
  Description of Artificial Sequence: Synthetic oligonucleotide
ccacggcguagcccaggga

SEQ ID NO: 828109 - RNA, 19 nt, Artificial Sequence
  Description of Artificial Sequence: Synthetic oligonucleotide
cgucggcgcggguaugaaa

SEQ ID NO: 828110 - RNA, 19 nt, Artificial Sequence
  Description of Artificial Sequence: Synthetic oligonucleotide
ccacucgccacuggucagu

SEQ ID NO: 828111 - RNA, 19 nt, Artificial Sequence
  Description of Artificial Sequence: Synthetic oligonucleotide
cacccgcaauggcuaccuu

SEQ ID NO: 828112 - RNA, 19 nt, Artificial Sequence
  Description of Artificial Sequence: Synthetic oligonucleotide
ccguaacggcugugggccu

SEQ ID NO: 828113 - RNA, 19 nt, Artificial Sequence
  Description of Artificial Sequence: Synthetic oligonucleotide
cgcagcucgacacgaucuu

SEQ ID NO: 828114 - RNA, 19 nt, Artificial Sequence
  Description of Artificial Sequence: Synthetic oligonucleotide
gcugcacgucggcgcgggu

SEQ ID NO: 828115 - RNA, 19 nt, Artificial Sequence
  Description of Artificial Sequence: Synthetic oligonucleotide
cgggcagcggaugcugugu

SEQ ID NO: 828116 - RNA, 19 nt, Artificial Sequence
  Description of Artificial Sequence: Synthetic oligonucleotide
cgacggcguuagggcagag

SEQ ID NO: 828117 - RNA, 19 nt, Artificial Sequence
  Description of Artificial Sequence: Synthetic oligonucleotide
cggacuccgggcagcggau

SEQ ID NO: 828118 - RNA, 19 nt, Artificial Sequence
  Description of Artificial Sequence: Synthetic oligonucleotide
cgccguugcuggggacggu

SEQ ID NO: 828119 - RNA, 19 nt, Artificial Sequence
  Description of Artificial Sequence: Synthetic oligonucleotide
aaagcguucaguuagaccc

SEQ ID NO: 828120 - RNA, 19 nt, Artificial Sequence
  Description of Artificial Sequence: Synthetic oligonucleotide
aauuauaucuccccgccgc

SEQ ID NO: 828121 - RNA, 19 nt, Artificial Sequence
  Description of Artificial Sequence: Synthetic oligonucleotide
aauuucauaaacucgguca

SEQ ID NO: 828122 - RNA, 19 nt, Artificial Sequence
  Description of Artificial Sequence: Synthetic oligonucleotide
gauacgaacaaauucuucc

SEQ ID NO: 828123 - RNA, 19 nt, Artificial Sequence
  Description of Artificial Sequence: Synthetic oligonucleotide
aauuccuucguuccggaac

SEQ ID NO: 828124 - RNA, 19 nt, Artificial Sequence
  Description of Artificial Sequence: Synthetic oligonucleotide
aauuccuugaguuagccau

SEQ ID NO: 828125 - RNA, 19 nt, Artificial Sequence
  Description of Artificial Sequence: Synthetic oligonucleotide
aaucucauaggcuucaccu

SEQ ID NO: 828126 - RNA, 19 nt, Artificial Sequence
  Description of Artificial Sequence: Synthetic oligonucleotide
aaaucaaucucauaggcuu

SEQ ID NO: 828127 - RNA, 19 nt, Artificial Sequence
  Description of Artificial Sequence: Synthetic oligonucleotide
aaucucuagaaaucccagc

SEQ ID NO: 828128 - RNA, 19 nt, Artificial Sequence
  Description of Artificial Sequence: Synthetic oligonucleotide
uugacuacggaucuuguag

SEQ ID NO: 828129 - RNA, 19 nt, Artificial Sequence
  Description of Artificial Sequence: Synthetic oligonucleotide
ugaaaucaaucucauaggc

SEQ ID NO: 828130 - RNA, 19 nt, Artificial Sequence
  Description of Artificial Sequence: Synthetic oligonucleotide
ucauucaauaucaagucca

SEQ ID NO: 828131 - RNA, 19 nt, Artificial Sequence
  Description of Artificial Sequence: Synthetic oligonucleotide
uauugauacgaacaaauuc

SEQ ID NO: 828132 - RNA, 19 nt, Artificial Sequence
  Description of Artificial Sequence: Synthetic oligonucleotide
aacaacgccugacagcagc

SEQ ID NO: 828133 - RNA, 19 nt, Artificial Sequence
  Description of Artificial Sequence: Synthetic oligonucleotide
uuauaauuccuugaguuag

SEQ ID NO: 828134 - RNA, 19 nt, Artificial Sequence
  Description of Artificial Sequence: Synthetic oligonucleotide
aacucauugugauagguga

SEQ ID NO: 828135 - RNA, 19 nt, Artificial Sequence
  Description of Artificial Sequence: Synthetic oligonucleotide
ucaucuaugaacauggcuu

SEQ ID NO: 828136 - RNA, 19 nt, Artificial Sequence
  Description of Artificial Sequence: Synthetic oligonucleotide
uauaaguucauguccaacu

SEQ ID NO: 828137 - RNA, 19 nt, Artificial Sequence
  Description of Artificial Sequence: Synthetic oligonucleotide
uuaguuguuucucaaugag

SEQ ID NO: 828138 - RNA, 19 nt, Artificial Sequence
  Description of Artificial Sequence: Synthetic oligonucleotide
uaugcaagcagggagacag

SEQ ID NO: 828139 - RNA, 19 nt, Artificial Sequence
  Description of Artificial Sequence: Synthetic oligonucleotide
ucgaaguucccucugaccc

SEQ ID NO: 828140 - RNA, 19 nt, Artificial Sequence
  Description of Artificial Sequence: Synthetic oligonucleotide
uucaguuucaaagaggcug

SEQ ID NO: 828141 - RNA, 19 nt, Artificial Sequence
  Description of Artificial Sequence: Synthetic oligonucleotide
aagucauucaauaucaagu

SEQ ID NO: 828142 - RNA, 19 nt, Artificial Sequence
  Description of Artificial Sequence: Synthetic oligonucleotide
uaugugaugaucuuagcuc

SEQ ID NO: 828143 - RNA, 19 nt, Artificial Sequence
  Description of Artificial Sequence: Synthetic oligonucleotide
aggaaacagaaguacuucc

SEQ ID NO: 828144 - RNA, 19 nt, Artificial Sequence
  Description of Artificial Sequence: Synthetic oligonucleotide
accuguaaugcuuuucacc

SEQ ID NO: 828145 - RNA, 19 nt, Artificial Sequence
  Description of Artificial Sequence: Synthetic oligonucleotide
ugugauaggugaugaaagg

SEQ ID NO: 828146 - RNA, 19 nt, Artificial Sequence
  Description of Artificial Sequence: Synthetic oligonucleotide
uuucauuuaucuucuagac

SEQ ID NO: 828147 - RNA, 19 nt, Artificial Sequence
  Description of Artificial Sequence: Synthetic oligonucleotide
uugacuguauucuuggaug

SEQ ID NO: 828148 - RNA, 19 nt, Artificial Sequence
  Description of Artificial Sequence: Synthetic oligonucleotide
ucugcauaagccauguaga

SEQ ID NO: 828149 - RNA, 19 nt, Artificial Sequence
  Description of Artificial Sequence: Synthetic oligonucleotide
uuuaaggugaugucaguca

SEQ ID NO: 828150 - RNA, 19 nt, Artificial Sequence
  Description of Artificial Sequence: Synthetic oligonucleotide
cuuguuauugauacgaaca

SEQ ID NO: 828151 - RNA, 19 nt, Artificial Sequence
  Description of Artificial Sequence: Synthetic oligonucleotide
auaaguucauguccaacuc

SEQ ID NO: 828152 - RNA, 19 nt, Artificial Sequence
  Description of Artificial Sequence: Synthetic oligonucleotide
cuuucuaguguuucagugg

SEQ ID NO: 828153 - RNA, 19 nt, Artificial Sequence
  Description of Artificial Sequence: Synthetic oligonucleotide
uuugaggccaaagugaaga

SEQ ID NO: 828154 - RNA, 19 nt, Artificial Sequence
  Description of Artificial Sequence: Synthetic oligonucleotide
uugguuuggguccagaguc

SEQ ID NO: 828155 - RNA, 19 nt, Artificial Sequence
  Description of Artificial Sequence: Synthetic oligonucleotide
gaugaacugagugagugag

SEQ ID NO: 828156 - RNA, 19 nt, Artificial Sequence
  Description of Artificial Sequence: Synthetic oligonucleotide
uugaguuagccauaacuug

SEQ ID NO: 828157 - RNA, 19 nt, Artificial Sequence
  Description of Artificial Sequence: Synthetic oligonucleotide
ucaguuagacccucuuugg

SEQ ID NO: 828158 - RNA, 19 nt, Artificial Sequence
  Description of Artificial Sequence: Synthetic oligonucleotide
aguuagacccucuuuggag

SEQ ID NO: 828159 - RNA, 19 nt, Artificial Sequence
  Description of Artificial Sequence: Synthetic oligonucleotide
ucuaucagaaaguggcuug

SEQ ID NO: 828160 - RNA, 19 nt, Artificial Sequence
  Description of Artificial Sequence: Synthetic oligonucleotide
uaacuuguaacuugacccc

SEQ ID NO: 828161 - RNA, 19 nt, Artificial Sequence
  Description of Artificial Sequence: Synthetic oligonucleotide
gaugcaugucacuucgagg

SEQ ID NO: 828162 - RNA, 19 nt, Artificial Sequence
  Description of Artificial Sequence: Synthetic oligonucleotide
uuucaaucucuagaaaucc

SEQ ID NO: 828163 - RNA, 19 nt, Artificial Sequence
  Description of Artificial Sequence: Synthetic oligonucleotide
uggggugaaaucaaucuca

SEQ ID NO: 828164 - RNA, 19 nt, Artificial Sequence
  Description of Artificial Sequence: Synthetic oligonucleotide
acucggucgauacccaugc

SEQ ID NO: 828165 - RNA, 19 nt, Artificial Sequence
  Description of Artificial Sequence: Synthetic oligonucleotide
ugcugaaaugcagagaagc

SEQ ID NO: 828166 - RNA, 19 nt, Artificial Sequence
  Description of Artificial Sequence: Synthetic oligonucleotide
ugaugcaugucacuucgag

SEQ ID NO: 828167 - RNA, 19 nt, Artificial Sequence
  Description of Artificial Sequence: Synthetic oligonucleotide
aucucuagaaaucccagcu

SEQ ID NO: 828168 - RNA, 19 nt, Artificial Sequence
  Description of Artificial Sequence: Synthetic oligonucleotide
aguccaaguaccucugacg

SEQ ID NO: 828169 - RNA, 19 nt, Artificial Sequence
  Description of Artificial Sequence: Synthetic oligonucleotide
uuguggagcguugugaagg

SEQ ID NO: 828170 - RNA, 19 nt, Artificial Sequence
  Description of Artificial Sequence: Synthetic oligonucleotide
uuuaguucacuucuucuau

SEQ ID NO: 828171 - RNA, 19 nt, Artificial Sequence
  Description of Artificial Sequence: Synthetic oligonucleotide
caugggaucauucagcuca

SEQ ID NO: 828172 - RNA, 19 nt, Artificial Sequence
  Description of Artificial Sequence: Synthetic oligonucleotide
ucuuaugguagaguucugg

SEQ ID NO: 828173 - RNA, 19 nt, Artificial Sequence
  Description of Artificial Sequence: Synthetic oligonucleotide
uuuauaauuccuugaguua

SEQ ID NO: 828174 - RNA, 19 nt, Artificial Sequence
  Description of Artificial Sequence: Synthetic oligonucleotide
uuguuauugauacgaacaa

SEQ ID NO: 828175 - RNA, 19 nt, Artificial Sequence
  Description of Artificial Sequence: Synthetic oligonucleotide
cauaaucugugggugaucg

SEQ ID NO: 828176 - RNA, 19 nt, Artificial Sequence
  Description of Artificial Sequence: Synthetic oligonucleotide
acuuguguggguaaggguc

SEQ ID NO: 828177 - RNA, 19 nt, Artificial Sequence
  Description of Artificial Sequence: Synthetic oligonucleotide
gauauuguuggaaucugug

SEQ ID NO: 828178 - RNA, 19 nt, Artificial Sequence
  Description of Artificial Sequence: Synthetic oligonucleotide
ugaucgcagaugaauguag

SEQ ID NO: 828179 - RNA, 19 nt, Artificial Sequence
  Description of Artificial Sequence: Synthetic oligonucleotide
ucauaaacucggucaaugc

SEQ ID NO: 828180 - RNA, 19 nt, Artificial Sequence
  Description of Artificial Sequence: Synthetic oligonucleotide
gaugaggcaacauaugcaa

SEQ ID NO: 828181 - RNA, 19 nt, Artificial Sequence
  Description of Artificial Sequence: Synthetic oligonucleotide
uucauaaacucggucaaug

SEQ ID NO: 828182 - RNA, 19 nt, Artificial Sequence
  Description of Artificial Sequence: Synthetic oligonucleotide
gaugaugcucagcucaccc

SEQ ID NO: 828183 - RNA, 19 nt, Artificial Sequence
  Description of Artificial Sequence: Synthetic oligonucleotide
auacccaugccccagccag

SEQ ID NO: 828184 - RNA, 19 nt, Artificial Sequence
  Description of Artificial Sequence: Synthetic oligonucleotide
uguaacuaccuguaaugcu

SEQ ID NO: 828185 - RNA, 19 nt, Artificial Sequence
  Description of Artificial Sequence: Synthetic oligonucleotide
auugcagauuuccuucuuc

SEQ ID NO: 828186 - RNA, 19 nt, Artificial Sequence
  Description of Artificial Sequence: Synthetic oligonucleotide
guaggauugaugcauguca

SEQ ID NO: 828187 - RNA, 19 nt, Artificial Sequence
  Description of Artificial Sequence: Synthetic oligonucleotide
accaacaagcuuaucaagg

SEQ ID NO: 828188 - RNA, 19 nt, Artificial Sequence
  Description of Artificial Sequence: Synthetic oligonucleotide
caaaucaauuccuucguuc

SEQ ID NO: 828189 - RNA, 19 nt, Artificial Sequence
  Description of Artificial Sequence: Synthetic oligonucleotide
ucugacgauaccuugucuc

SEQ ID NO: 828190 - RNA, 19 nt, Artificial Sequence
  Description of Artificial Sequence: Synthetic oligonucleotide
uauugguuuggguccagag

SEQ ID NO: 828191 - RNA, 19 nt, Artificial Sequence
  Description of Artificial Sequence: Synthetic oligonucleotide
uggagcguugugaagggag

SEQ ID NO: 828192 - RNA, 19 nt, Artificial Sequence
  Description of Artificial Sequence: Synthetic oligonucleotide
cuuuuagacgucucuuuag

SEQ ID NO: 828193 - RNA, 19 nt, Artificial Sequence
  Description of Artificial Sequence: Synthetic oligonucleotide
auuucauaaacucggucaa

SEQ ID NO: 828194 - RNA, 19 nt, Artificial Sequence
  Description of Artificial Sequence: Synthetic oligonucleotide
auugcuugacuacggaucu

SEQ ID NO: 828195 - RNA, 19 nt, Artificial Sequence
  Description of Artificial Sequence: Synthetic oligonucleotide
gaugaucuuagcucggaca

SEQ ID NO: 828196 - RNA, 19 nt, Artificial Sequence
  Description of Artificial Sequence: Synthetic oligonucleotide
agcgugauuucauagggga

SEQ ID NO: 828197 - RNA, 19 nt, Artificial Sequence
  Description of Artificial Sequence: Synthetic oligonucleotide
acuguauucuuggaugaac

SEQ ID NO: 828198 - RNA, 19 nt, Artificial Sequence
  Description of Artificial Sequence: Synthetic oligonucleotide
aggagcgugauuucauagg

SEQ ID NO: 828199 - RNA, 19 nt, Artificial Sequence
  Description of Artificial Sequence: Synthetic oligonucleotide
auacgaacaaauucuuccu

SEQ ID NO: 828200 - RNA, 19 nt, Artificial Sequence
  Description of Artificial Sequence: Synthetic oligonucleotide
uuauugauacgaacaaauu

SEQ ID NO: 828201 - RNA, 19 nt, Artificial Sequence
  Description of Artificial Sequence: Synthetic oligonucleotide
ucuaguguuucaguggcug

SEQ ID NO: 828202 - RNA, 19 nt, Artificial Sequence
  Description of Artificial Sequence: Synthetic oligonucleotide
ucucauauauaaguucaug

SEQ ID NO: 828203 - RNA, 19 nt, Artificial Sequence
  Description of Artificial Sequence: Synthetic oligonucleotide
agggcucauaaucuguggg

SEQ ID NO: 828204 - RNA, 19 nt, Artificial Sequence
  Description of Artificial Sequence: Synthetic oligonucleotide
auauaaguucauguccaac

SEQ ID NO: 828205 - RNA, 19 nt, Artificial Sequence
  Description of Artificial Sequence: Synthetic oligonucleotide
ucggucgauacccaugccc

SEQ ID NO: 828206 - RNA, 19 nt, Artificial Sequence
  Description of Artificial Sequence: Synthetic oligonucleotide
auggugacucggucgauac

SEQ ID NO: 828207 - RNA, 19 nt, Artificial Sequence
  Description of Artificial Sequence: Synthetic oligonucleotide
ugauauuguuggaaucugu

SEQ ID NO: 828208 - RNA, 19 nt, Artificial Sequence
  Description of Artificial Sequence: Synthetic oligonucleotide
uuguaacuaccuguaaugc

SEQ ID NO: 828209 - RNA, 19 nt, Artificial Sequence
  Description of Artificial Sequence: Synthetic oligonucleotide
uaggugaucuuguaacuac

SEQ ID NO: 828210 - RNA, 19 nt, Artificial Sequence
  Description of Artificial Sequence: Synthetic oligonucleotide
uaggauugaugcaugucac

SEQ ID NO: 828211 - RNA, 19 nt, Artificial Sequence
  Description of Artificial Sequence: Synthetic oligonucleotide
gauugcuugacuacggauc

SEQ ID NO: 828212 - RNA, 19 nt, Artificial Sequence
  Description of Artificial Sequence: Synthetic oligonucleotide
augaucuuagcucggacaa

SEQ ID NO: 828213 - RNA, 19 nt, Artificial Sequence
  Description of Artificial Sequence: Synthetic oligonucleotide
uuuuaaggugaugucaguc

SEQ ID NO: 828214 - RNA, 19 nt, Artificial Sequence
  Description of Artificial Sequence: Synthetic oligonucleotide
uuagcauggauccgaccug

SEQ ID NO: 828215 - RNA, 19 nt, Artificial Sequence
  Description of Artificial Sequence: Synthetic oligonucleotide
cuaccaugcugauucuucg

SEQ ID NO: 828216 - RNA, 19 nt, Artificial Sequence
  Description of Artificial Sequence: Synthetic oligonucleotide
gaggccaaagugaagauga

SEQ ID NO: 828217 - RNA, 19 nt, Artificial Sequence
  Description of Artificial Sequence: Synthetic oligonucleotide
ugacuguauucuuggauga

SEQ ID NO: 828218 - RNA, 19 nt, Artificial Sequence
  Description of Artificial Sequence: Synthetic oligonucleotide
auaaacucggucaaugcca

SEQ ID NO: 828219 - RNA, 19 nt, Artificial Sequence
  Description of Artificial Sequence: Synthetic oligonucleotide
uaaacucggucaaugccac

SEQ ID NO: 828220 - RNA, 19 nt, Artificial Sequence
  Description of Artificial Sequence: Synthetic oligonucleotide
agccauaacuuguaacuug

SEQ ID NO: 828221 - RNA, 19 nt, Artificial Sequence
  Description of Artificial Sequence: Synthetic oligonucleotide
auaaucugugggugaucgc

SEQ ID NO: 828222 - RNA, 19 nt, Artificial Sequence
  Description of Artificial Sequence: Synthetic oligonucleotide
acaauaaauuucugccuca

SEQ ID NO: 828223 - RNA, 19 nt, Artificial Sequence
  Description of Artificial Sequence: Synthetic oligonucleotide
ggagcgugauuucauaggg

SEQ ID NO: 828224 - RNA, 19 nt, Artificial Sequence
  Description of Artificial Sequence: Synthetic oligonucleotide
cuaacaacgccugacagca

SEQ ID NO: 828225 - RNA, 19 nt, Artificial Sequence
  Description of Artificial Sequence: Synthetic oligonucleotide
agucgaaguucccucugac

SEQ ID NO: 828226 - RNA, 19 nt, Artificial Sequence
  Description of Artificial Sequence: Synthetic oligonucleotide
aguaccucugacgauaccu

SEQ ID NO: 828227 - RNA, 19 nt, Artificial Sequence
  Description of Artificial Sequence: Synthetic oligonucleotide
aaguaccucugacgauacc

SEQ ID NO: 828228 - RNA, 19 nt, Artificial Sequence
  Description of Artificial Sequence: Synthetic oligonucleotide
aacacccacgccauuauca

SEQ ID NO: 828229 - RNA, 19 nt, Artificial Sequence
  Description of Artificial Sequence: Synthetic oligonucleotide
guugcaguugacuguauuc

SEQ ID NO: 828230 - RNA, 19 nt, Artificial Sequence
  Description of Artificial Sequence: Synthetic oligonucleotide
ugauacgaacaaauucuuc

SEQ ID NO: 828231 - RNA, 19 nt, Artificial Sequence
  Description of Artificial Sequence: Synthetic oligonucleotide
uauaucuccccgccgcagc

SEQ ID NO: 828232 - RNA, 19 nt, Artificial Sequence
  Description of Artificial Sequence: Synthetic oligonucleotide
auuccuucguuccggaacu

SEQ ID NO: 828233 - RNA, 19 nt, Artificial Sequence
  Description of Artificial Sequence: Synthetic oligonucleotide
augaggucgugauagucug

SEQ ID NO: 828234 - RNA, 19 nt, Artificial Sequence
  Description of Artificial Sequence: Synthetic oligonucleotide
cuucguuccggaacuggcg

SEQ ID NO: 828235 - RNA, 19 nt, Artificial Sequence
  Description of Artificial Sequence: Synthetic oligonucleotide
caaagcguucaguuagacc

SEQ ID NO: 828236 - RNA, 19 nt, Artificial Sequence
  Description of Artificial Sequence: Synthetic oligonucleotide
uuucauaggggaugaugcu

SEQ ID NO: 828237 - RNA, 19 nt, Artificial Sequence
  Description of Artificial Sequence: Synthetic oligonucleotide
uacggaucuuguaguauug

SEQ ID NO: 828238 - RNA, 19 nt, Artificial Sequence
  Description of Artificial Sequence: Synthetic oligonucleotide
aacagcuuuugcaacacaa

SEQ ID NO: 828239 - RNA, 19 nt, Artificial Sequence
  Description of Artificial Sequence: Synthetic oligonucleotide
uugauauuguuggaaucug

SEQ ID NO: 828240 - RNA, 19 nt, Artificial Sequence
  Description of Artificial Sequence: Synthetic oligonucleotide
ggugaugaaaggcuuggcc

SEQ ID NO: 828241 - RNA, 19 nt, Artificial Sequence
  Description of Artificial Sequence: Synthetic oligonucleotide
ucuucggaaagguggggug

SEQ ID NO: 828242 - RNA, 19 nt, Artificial Sequence
  Description of Artificial Sequence: Synthetic oligonucleotide
cuuaguuguuucucaauga

SEQ ID NO: 828243 - RNA, 19 nt, Artificial Sequence
  Description of Artificial Sequence: Synthetic oligonucleotide
uacgaacaaauucuuccuc

SEQ ID NO: 828244 - RNA, 19 nt, Artificial Sequence
  Description of Artificial Sequence: Synthetic oligonucleotide
cauggauccgaccugccac

SEQ ID NO: 828245 - RNA, 19 nt, Artificial Sequence
  Description of Artificial Sequence: Synthetic oligonucleotide
caucuaugaacauggcuuc

SEQ ID NO: 828246 - RNA, 19 nt, Artificial Sequence
  Description of Artificial Sequence: Synthetic oligonucleotide
uauauaaguucauguccaa

SEQ ID NO: 828247 - RNA, 19 nt, Artificial Sequence
  Description of Artificial Sequence: Synthetic oligonucleotide
cuucgaggaacucaccaac

SEQ ID NO: 828248 - RNA, 19 nt, Artificial Sequence
  Description of Artificial Sequence: Synthetic oligonucleotide
ucucuuagcauggauccga

SEQ ID NO: 828249 - RNA, 19 nt, Artificial Sequence
  Description of Artificial Sequence: Synthetic oligonucleotide
gagucaaaucaauuccuuc

SEQ ID NO: 828250 - RNA, 19 nt, Artificial Sequence
  Description of Artificial Sequence: Synthetic oligonucleotide
uggguaagggucuucccca

SEQ ID NO: 828251 - RNA, 19 nt, Artificial Sequence
  Description of Artificial Sequence: Synthetic oligonucleotide
gcuuaguuguuucucaaug

SEQ ID NO: 828252 - RNA, 19 nt, Artificial Sequence
  Description of Artificial Sequence: Synthetic oligonucleotide
gauaccuugucuccuuguc

SEQ ID NO: 828253 - RNA, 19 nt, Artificial Sequence
  Description of Artificial Sequence: Synthetic oligonucleotide
ugcugauucuucggaaagg

SEQ ID NO: 828254 - RNA, 19 nt, Artificial Sequence
  Description of Artificial Sequence: Synthetic oligonucleotide
caacucauugugauaggug

SEQ ID NO: 828255 - RNA, 19 nt, Artificial Sequence
  Description of Artificial Sequence: Synthetic oligonucleotide
gauuuauaauuccuugagu

SEQ ID NO: 828256 - RNA, 19 nt, Artificial Sequence
  Description of Artificial Sequence: Synthetic oligonucleotide
cuucaaacagcugucgcug

SEQ ID NO: 828257 - RNA, 19 nt, Artificial Sequence
  Description of Artificial Sequence: Synthetic oligonucleotide
ucuuagcucggacaauaaa

SEQ ID NO: 828258 - RNA, 19 nt, Artificial Sequence
  Description of Artificial Sequence: Synthetic oligonucleotide
ugacuacggaucuuguagu

SEQ ID NO: 828259 - RNA, 19 nt, Artificial Sequence
  Description of Artificial Sequence: Synthetic oligonucleotide
ugagucaaaucaauuccuu

SEQ ID NO: 828260 - RNA, 19 nt, Artificial Sequence
  Description of Artificial Sequence: Synthetic oligonucleotide
cugcccacgagguuuggcg

SEQ ID NO: 828261 - RNA, 19 nt, Artificial Sequence
  Description of Artificial Sequence: Synthetic oligonucleotide
cuggcguccaauuucauaa

SEQ ID NO: 828262 - RNA, 19 nt, Artificial Sequence
  Description of Artificial Sequence: Synthetic oligonucleotide
caauuauaucuccccgccg

SEQ ID NO: 828263 - RNA, 19 nt, Artificial Sequence
  Description of Artificial Sequence: Synthetic oligonucleotide
uaucaaggagccuggcugu

SEQ ID NO: 828264 - RNA, 19 nt, Artificial Sequence
  Description of Artificial Sequence: Synthetic oligonucleotide
auguccaacucauugugau

SEQ ID NO: 828265 - RNA, 19 nt, Artificial Sequence
  Description of Artificial Sequence: Synthetic oligonucleotide
uugcaacacaaauaucauc

SEQ ID NO: 828266 - RNA, 19 nt, Artificial Sequence
  Description of Artificial Sequence: Synthetic oligonucleotide
uucguuccggaacuggcgu

SEQ ID NO: 828267 - RNA, 19 nt, Artificial Sequence
  Description of Artificial Sequence: Synthetic oligonucleotide
gaugucagucagguggucc

SEQ ID NO: 828268 - RNA, 19 nt, Artificial Sequence
  Description of Artificial Sequence: Synthetic oligonucleotide
guaagggucuuccccacug

SEQ ID NO: 828269 - RNA, 19 nt, Artificial Sequence
  Description of Artificial Sequence: Synthetic oligonucleotide
acacccacgccauuaucag

SEQ ID NO: 828270 - RNA, 19 nt, Artificial Sequence
  Description of Artificial Sequence: Synthetic oligonucleotide
cuuagcauggauccgaccu

SEQ ID NO: 828271 - RNA, 19 nt, Artificial Sequence
  Description of Artificial Sequence: Synthetic oligonucleotide
cucuccucgaaggucauag

SEQ ID NO: 828272 - RNA, 19 nt, Artificial Sequence
  Description of Artificial Sequence: Synthetic oligonucleotide
auaccuugucuccuugucu

SEQ ID NO: 828273 - RNA, 19 nt, Artificial Sequence
  Description of Artificial Sequence: Synthetic oligonucleotide
uuuagacgucucuuuaguu

SEQ ID NO: 828274 - RNA, 19 nt, Artificial Sequence
  Description of Artificial Sequence: Synthetic oligonucleotide
uggauugcuugacuacgga

SEQ ID NO: 828275 - RNA, 19 nt, Artificial Sequence
  Description of Artificial Sequence: Synthetic oligonucleotide
cuucuagacagaggggccg

SEQ ID NO: 828276 - RNA, 19 nt, Artificial Sequence
  Description of Artificial Sequence: Synthetic oligonucleotide
aucgcagaugaauguagga

SEQ ID NO: 828277 - RNA, 19 nt, Artificial Sequence
  Description of Artificial Sequence: Synthetic oligonucleotide
auuauaucuccccgccgca

SEQ ID NO: 828278 - RNA, 19 nt, Artificial Sequence
  Description of Artificial Sequence: Synthetic oligonucleotide
cauucagcucaguguaggc

SEQ ID NO: 828279 - RNA, 19 nt, Artificial Sequence
  Description of Artificial Sequence: Synthetic oligonucleotide
gcauaagccauguagaacu

SEQ ID NO: 828280 - RNA, 19 nt, Artificial Sequence
  Description of Artificial Sequence: Synthetic oligonucleotide
gucgugauagucugcauaa

SEQ ID NO: 828281 - RNA, 19 nt, Artificial Sequence
  Description of Artificial Sequence: Synthetic oligonucleotide
gucacuucgaggaacucac

SEQ ID NO: 828282 - RNA, 19 nt, Artificial Sequence
  Description of Artificial Sequence: Synthetic oligonucleotide
gcuguugugcuuucuagug

SEQ ID NO: 828283 - RNA, 19 nt, Artificial Sequence
  Description of Artificial Sequence: Synthetic oligonucleotide
acauaugcaagcagggaga

SEQ ID NO: 828284 - RNA, 19 nt, Artificial Sequence
  Description of Artificial Sequence: Synthetic oligonucleotide
gguggauugcuugacuacg

SEQ ID NO: 828285 - RNA, 19 nt, Artificial Sequence
  Description of Artificial Sequence: Synthetic oligonucleotide
ucaauuccuucguuccgga

SEQ ID NO: 828286 - RNA, 19 nt, Artificial Sequence
  Description of Artificial Sequence: Synthetic oligonucleotide
acuucgaggaacucaccaa

SEQ ID NO: 828287 - RNA, 19 nt, Artificial Sequence
  Description of Artificial Sequence: Synthetic oligonucleotide
gugaagaugaggcaacaua

SEQ ID NO: 828288 - RNA, 19 nt, Artificial Sequence
  Description of Artificial Sequence: Synthetic oligonucleotide
uuauaucuccccgccgcag

SEQ ID NO: 828289 - RNA, 19 nt, Artificial Sequence
  Description of Artificial Sequence: Synthetic oligonucleotide
ugguggauugcuugacuac

SEQ ID NO: 828290 - RNA, 19 nt, Artificial Sequence
  Description of Artificial Sequence: Synthetic oligonucleotide
ucgcagaugaauguaggau

SEQ ID NO: 828291 - RNA, 19 nt, Artificial Sequence
  Description of Artificial Sequence: Synthetic oligonucleotide
uucuagacagaggggccgg

SEQ ID NO: 828292 - RNA, 19 nt, Artificial Sequence
  Description of Artificial Sequence: Synthetic oligonucleotide
cuugaguuagccauaacuu

SEQ ID NO: 828293 - RNA, 19 nt, Artificial Sequence
  Description of Artificial Sequence: Synthetic oligonucleotide
gucgaaguucccucugacc

SEQ ID NO: 828294 - RNA, 19 nt, Artificial Sequence
  Description of Artificial Sequence: Synthetic oligonucleotide
uguaggauugaugcauguc

SEQ ID NO: 828295 - RNA, 19 nt, Artificial Sequence
  Description of Artificial Sequence: Synthetic oligonucleotide
gaaaucaaucucauaggcu

SEQ ID NO: 828296 - RNA, 19 nt, Artificial Sequence
  Description of Artificial Sequence: Synthetic oligonucleotide
ucuuagcauggauccgacc

SEQ ID NO: 828297 - RNA, 19 nt, Artificial Sequence
  Description of Artificial Sequence: Synthetic oligonucleotide
aacucaggguugugaguca

SEQ ID NO: 828298 - RNA, 19 nt, Artificial Sequence
  Description of Artificial Sequence: Synthetic oligonucleotide
cauauuccagggcaguaca

SEQ ID NO: 828299 - RNA, 19 nt, Artificial Sequence
  Description of Artificial Sequence: Synthetic oligonucleotide
ggaacuggcguccaauuuc

SEQ ID NO: 828300 - RNA, 19 nt, Artificial Sequence
  Description of Artificial Sequence: Synthetic oligonucleotide
cuaugaacauggcuucauc

SEQ ID NO: 828301 - RNA, 19 nt, Artificial Sequence
  Description of Artificial Sequence: Synthetic oligonucleotide
aggauugaugcaugucacu

SEQ ID NO: 828302 - RNA, 19 nt, Artificial Sequence
  Description of Artificial Sequence: Synthetic oligonucleotide
gggcaguccauauuccagg

SEQ ID NO: 828303 - RNA, 19 nt, Artificial Sequence
  Description of Artificial Sequence: Synthetic oligonucleotide
uaacuaccuguaaugcuuu

SEQ ID NO: 828304 - RNA, 19 nt, Artificial Sequence
  Description of Artificial Sequence: Synthetic oligonucleotide
cuuguggagcguugugaag

SEQ ID NO: 828305 - RNA, 19 nt, Artificial Sequence
  Description of Artificial Sequence: Synthetic oligonucleotide
guggauugcuugacuacgg

SEQ ID NO: 828306 - RNA, 19 nt, Artificial Sequence
  Description of Artificial Sequence: Synthetic oligonucleotide
uucuucggaaagguggggu

SEQ ID NO: 828307 - RNA, 19 nt, Artificial Sequence
  Description of Artificial Sequence: Synthetic oligonucleotide
caucuuaugguagaguucu

SEQ ID NO: 828308 - RNA, 19 nt, Artificial Sequence
  Description of Artificial Sequence: Synthetic oligonucleotide
gaguucuggagcaauucuc

SEQ ID NO: 828309 - RNA, 19 nt, Artificial Sequence
  Description of Artificial Sequence: Synthetic oligonucleotide
gaucuuguaacuaccugua

SEQ ID NO: 828310 - RNA, 19 nt, Artificial Sequence
  Description of Artificial Sequence: Synthetic oligonucleotide
uccuucguuccggaacugg

SEQ ID NO: 828311 - RNA, 19 nt, Artificial Sequence
  Description of Artificial Sequence: Synthetic oligonucleotide
agguuuggcgcaggggccc

SEQ ID NO: 828312 - RNA, 19 nt, Artificial Sequence
  Description of Artificial Sequence: Synthetic oligonucleotide
ucaggguugugagucaaau

SEQ ID NO: 828313 - RNA, 19 nt, Artificial Sequence
  Description of Artificial Sequence: Synthetic oligonucleotide
agaaacauggugacucggu

SEQ ID NO: 828314 - RNA, 19 nt, Artificial Sequence
  Description of Artificial Sequence: Synthetic oligonucleotide
gcuuguuauugauacgaac

SEQ ID NO: 828315 - RNA, 19 nt, Artificial Sequence
  Description of Artificial Sequence: Synthetic oligonucleotide
cauaagccauguagaacuc

SEQ ID NO: 828316 - RNA, 19 nt, Artificial Sequence
  Description of Artificial Sequence: Synthetic oligonucleotide
uagcucggacaauaaauuu

SEQ ID NO: 828317 - RNA, 19 nt, Artificial Sequence
  Description of Artificial Sequence: Synthetic oligonucleotide
ccuaacaacgccugacagc

SEQ ID NO: 828318 - RNA, 19 nt, Artificial Sequence
  Description of Artificial Sequence: Synthetic oligonucleotide
gaacugagugagugagaug

SEQ ID NO: 828319 - RNA, 19 nt, Artificial Sequence
  Description of Artificial Sequence: Synthetic oligonucleotide
guggggugaaaucaaucuc

SEQ ID NO: 828320 - RNA, 19 nt, Artificial Sequence
  Description of Artificial Sequence: Synthetic oligonucleotide
gaucuuagcucggacaaua

SEQ ID NO: 828321 - RNA, 19 nt, Artificial Sequence
  Description of Artificial Sequence: Synthetic oligonucleotide
ugccgcaugggaucauuca

SEQ ID NO: 828322 - RNA, 19 nt, Artificial Sequence
  Description of Artificial Sequence: Synthetic oligonucleotide
caccauuccugacagcauc

SEQ ID NO: 828323 - RNA, 19 nt, Artificial Sequence
  Description of Artificial Sequence: Synthetic oligonucleotide
cauaugcaagcagggagac

SEQ ID NO: 828324 - RNA, 19 nt, Artificial Sequence
  Description of Artificial Sequence: Synthetic oligonucleotide
ugaggucgugauagucugc

SEQ ID NO: 828325 - RNA, 19 nt, Artificial Sequence
  Description of Artificial Sequence: Synthetic oligonucleotide
ugguuuggguccagagucu

SEQ ID NO: 828326 - RNA, 19 nt, Artificial Sequence
  Description of Artificial Sequence: Synthetic oligonucleotide
acccacgccauuaucagca

SEQ ID NO: 828327 - RNA, 19 nt, Artificial Sequence
  Description of Artificial Sequence: Synthetic oligonucleotide
uggcccaucugggugguag

SEQ ID NO: 828328 - RNA, 19 nt, Artificial Sequence
  Description of Artificial Sequence: Synthetic oligonucleotide
ucgauacccaugccccagc

SEQ ID NO: 828329 - RNA, 19 nt, Artificial Sequence
  Description of Artificial Sequence: Synthetic oligonucleotide
ugcccacgagguuuggcgc

SEQ ID NO: 828330 - RNA, 19 nt, Artificial Sequence
  Description of Artificial Sequence: Synthetic oligonucleotide
gaacuggcguccaauuuca

SEQ ID NO: 828331 - RNA, 19 nt, Artificial Sequence
  Description of Artificial Sequence: Synthetic oligonucleotide
gaggucgugauagucugca

SEQ ID NO: 828332 - RNA, 19 nt, Artificial Sequence
  Description of Artificial Sequence: Synthetic oligonucleotide
ucacuucgaggaacucacc

SEQ ID NO: 828333 - RNA, 19 nt, Artificial Sequence
  Description of Artificial Sequence: Synthetic oligonucleotide
auggauccgaccugccacu

SEQ ID NO: 828334 - RNA, 19 nt, Artificial Sequence
  Description of Artificial Sequence: Synthetic oligonucleotide
gcugaaaugcagagaagcc

SEQ ID NO: 828335 - RNA, 19 nt, Artificial Sequence
  Description of Artificial Sequence: Synthetic oligonucleotide
cacuucgaggaacucacca

SEQ ID NO: 828336 - RNA, 19 nt, Artificial Sequence
  Description of Artificial Sequence: Synthetic oligonucleotide
uguccaacucauugugaua

SEQ ID NO: 828337 - RNA, 19 nt, Artificial Sequence
  Description of Artificial Sequence: Synthetic oligonucleotide
auaucuccccgccgcagcu

SEQ ID NO: 828338 - RNA, 19 nt, Artificial Sequence
  Description of Artificial Sequence: Synthetic oligonucleotide
auaagccauguagaacuca

SEQ ID NO: 828339 - RNA, 19 nt, Artificial Sequence
  Description of Artificial Sequence: Synthetic oligonucleotide
uuucauaaacucggucaau

SEQ ID NO: 828340 - RNA, 19 nt, Artificial Sequence
  Description of Artificial Sequence: Synthetic oligonucleotide
ugacgauaccuugucuccu

SEQ ID NO: 828341 - RNA, 19 nt, Artificial Sequence
  Description of Artificial Sequence: Synthetic oligonucleotide
caugaggucgugauagucu

SEQ ID NO: 828342 - RNA, 19 nt, Artificial Sequence
  Description of Artificial Sequence: Synthetic oligonucleotide
cauuuaucuucuagacaga

SEQ ID NO: 828343 - RNA, 19 nt, Artificial Sequence
  Description of Artificial Sequence: Synthetic oligonucleotide
acuggcguccaauuucaua

SEQ ID NO: 828344 - RNA, 19 nt, Artificial Sequence
  Description of Artificial Sequence: Synthetic oligonucleotide
aucuuguaacuaccuguaa

SEQ ID NO: 828345 - RNA, 19 nt, Artificial Sequence
  Description of Artificial Sequence: Synthetic oligonucleotide
gagcguugugaagggagcc

SEQ ID NO: 828346 - RNA, 19 nt, Artificial Sequence
  Description of Artificial Sequence: Synthetic oligonucleotide
agacgcucucuuagcaugg

SEQ ID NO: 828347 - RNA, 19 nt, Artificial Sequence
  Description of Artificial Sequence: Synthetic oligonucleotide
gagacaggagcgugauuuc

SEQ ID NO: 828348 - RNA, 19 nt, Artificial Sequence
  Description of Artificial Sequence: Synthetic oligonucleotide
guaacuaccuguaaugcuu

SEQ ID NO: 828349 - RNA, 19 nt, Artificial Sequence
  Description of Artificial Sequence: Synthetic oligonucleotide
ucgugauagucugcauaag

SEQ ID NO: 828350 - RNA, 19 nt, Artificial Sequence
  Description of Artificial Sequence: Synthetic oligonucleotide
ggaaagguggggugaaauc

SEQ ID NO: 828351 - RNA, 19 nt, Artificial Sequence
  Description of Artificial Sequence: Synthetic oligonucleotide
gacucggucgauacccaug

SEQ ID NO: 828352 - RNA, 19 nt, Artificial Sequence
  Description of Artificial Sequence: Synthetic oligonucleotide
gauacccaugccccagcca

SEQ ID NO: 828353 - RNA, 19 nt, Artificial Sequence
  Description of Artificial Sequence: Synthetic oligonucleotide
cugcauaagccauguagaa

SEQ ID NO: 828354 - RNA, 19 nt, Artificial Sequence
  Description of Artificial Sequence: Synthetic oligonucleotide
uccgaccugccacuuuuaa

SEQ ID NO: 828355 - RNA, 19 nt, Artificial Sequence
  Description of Artificial Sequence: Synthetic oligonucleotide
aacuaccuguaaugcuuuu

SEQ ID NO: 828356 - RNA, 19 nt, Artificial Sequence
  Description of Artificial Sequence: Synthetic oligonucleotide
uccaaguaccucugacgau

SEQ ID NO: 828357 - RNA, 19 nt, Artificial Sequence
  Description of Artificial Sequence: Synthetic oligonucleotide
guguggguaagggucuucc

SEQ ID NO: 828358 - RNA, 19 nt, Artificial Sequence
  Description of Artificial Sequence: Synthetic oligonucleotide
uuucaccauuccugacagc

SEQ ID NO: 828359 - RNA, 19 nt, Artificial Sequence
  Description of Artificial Sequence: Synthetic oligonucleotide
ggugccauuuggccagagg

SEQ ID NO: 828360 - RNA, 19 nt, Artificial Sequence
  Description of Artificial Sequence: Synthetic oligonucleotide
gucgcugccgcaugggauc

SEQ ID NO: 828361 - RNA, 19 nt, Artificial Sequence
  Description of Artificial Sequence: Synthetic oligonucleotide
ggcucauaaucugugggug

SEQ ID NO: 828362 - RNA, 19 nt, Artificial Sequence
  Description of Artificial Sequence: Synthetic oligonucleotide
aagcguucaguuagacccu

SEQ ID NO: 828363 - RNA, 19 nt, Artificial Sequence
  Description of Artificial Sequence: Synthetic oligonucleotide
gacuacggaucuuguagua

SEQ ID NO: 828364 - RNA, 19 nt, Artificial Sequence
  Description of Artificial Sequence: Synthetic oligonucleotide
agacaggagcgugauuuca

SEQ ID NO: 828365 - RNA, 19 nt, Artificial Sequence
  Description of Artificial Sequence: Synthetic oligonucleotide
gcaguugacuguauucuug

SEQ ID NO: 828366 - RNA, 19 nt, Artificial Sequence
  Description of Artificial Sequence: Synthetic oligonucleotide
agcguucaguuagacccuc

SEQ ID NO: 828367 - RNA, 19 nt, Artificial Sequence
  Description of Artificial Sequence: Synthetic oligonucleotide
cacccacgccauuaucagc

SEQ ID NO: 828368 - RNA, 19 nt, Artificial Sequence
  Description of Artificial Sequence: Synthetic oligonucleotide
ccuucguuccggaacuggc

SEQ ID NO: 828369 - RNA, 19 nt, Artificial Sequence
  Description of Artificial Sequence: Synthetic oligonucleotide
cuugacuacggaucuugua

SEQ ID NO: 828370 - RNA, 19 nt, Artificial Sequence
  Description of Artificial Sequence: Synthetic oligonucleotide
caugggaguuucaaucucu

SEQ ID NO: 828371 - RNA, 19 nt, Artificial Sequence
  Description of Artificial Sequence: Synthetic oligonucleotide
uggcagcagcagcagcagc

SEQ ID NO: 828372 - RNA, 19 nt, Artificial Sequence
  Description of Artificial Sequence: Synthetic oligonucleotide
cugguggauugcuugacua

SEQ ID NO: 828373 - RNA, 19 nt, Artificial Sequence
  Description of Artificial Sequence: Synthetic oligonucleotide
gugagucaaaucaauuccu

SEQ ID NO: 828374 - RNA, 19 nt, Artificial Sequence
  Description of Artificial Sequence: Synthetic oligonucleotide
uggcguccaauuucauaaa

SEQ ID NO: 828375 - RNA, 19 nt, Artificial Sequence
  Description of Artificial Sequence: Synthetic oligonucleotide
ggcauucaacagcuuuugc

SEQ ID NO: 828376 - RNA, 19 nt, Artificial Sequence
  Description of Artificial Sequence: Synthetic oligonucleotide
cuuguguggguaagggucu

SEQ ID NO: 828377 - RNA, 19 nt, Artificial Sequence
  Description of Artificial Sequence: Synthetic oligonucleotide
cauugugauaggugaugaa

SEQ ID NO: 828378 - RNA, 19 nt, Artificial Sequence
  Description of Artificial Sequence: Synthetic oligonucleotide
gaguuagccauaacuugua

SEQ ID NO: 828379 - RNA, 19 nt, Artificial Sequence
  Description of Artificial Sequence: Synthetic oligonucleotide
ugaucuuagcucggacaau

SEQ ID NO: 828380 - RNA, 19 nt, Artificial Sequence
  Description of Artificial Sequence: Synthetic oligonucleotide
ccgcaugggaucauucagc

SEQ ID NO: 828381 - RNA, 19 nt, Artificial Sequence
  Description of Artificial Sequence: Synthetic oligonucleotide
gccauaacuuguaacuuga

SEQ ID NO: 828382 - RNA, 19 nt, Artificial Sequence
  Description of Artificial Sequence: Synthetic oligonucleotide
cuucuaucagaaaguggcu

SEQ ID NO: 828383 - RNA, 19 nt, Artificial Sequence
  Description of Artificial Sequence: Synthetic oligonucleotide
ugacucggucgauacccau

SEQ ID NO: 828384 - RNA, 19 nt, Artificial Sequence
  Description of Artificial Sequence: Synthetic oligonucleotide
ggucgugauagucugcaua

SEQ ID NO: 828385 - RNA, 19 nt, Artificial Sequence
  Description of Artificial Sequence: Synthetic oligonucleotide
ggggcaguccauauuccag

SEQ ID NO: 828386 - RNA, 19 nt, Artificial Sequence
  Description of Artificial Sequence: Synthetic oligonucleotide
ggugaacucaggguuguga

SEQ ID NO: 828387 - RNA, 19 nt, Artificial Sequence
  Description of Artificial Sequence: Synthetic oligonucleotide
guguaggcauugcagauuu

SEQ ID NO: 828388 - RNA, 19 nt, Artificial Sequence
  Description of Artificial Sequence: Synthetic oligonucleotide
gcucauaaucuguggguga

SEQ ID NO: 828389 - RNA, 19 nt, Artificial Sequence
  Description of Artificial Sequence: Synthetic oligonucleotide
ggugaucgcagaugaaugu

SEQ ID NO: 828390 - RNA, 19 nt, Artificial Sequence
  Description of Artificial Sequence: Synthetic oligonucleotide
auucugcccacgagguuug

SEQ ID NO: 828391 - RNA, 19 nt, Artificial Sequence
  Description of Artificial Sequence: Synthetic oligonucleotide
ucguuccggaacuggcguc

SEQ ID NO: 828392 - RNA, 19 nt, Artificial Sequence
  Description of Artificial Sequence: Synthetic oligonucleotide
cuucggaaaggugggguga

SEQ ID NO: 828393 - RNA, 19 nt, Artificial Sequence
  Description of Artificial Sequence: Synthetic oligonucleotide
ggagcguugugaagggagc

SEQ ID NO: 828394 - RNA, 19 nt, Artificial Sequence
  Description of Artificial Sequence: Synthetic oligonucleotide
auaugcaagcagggagaca

SEQ ID NO: 828395 - RNA, 19 nt, Artificial Sequence
  Description of Artificial Sequence: Synthetic oligonucleotide
augaacugagugagugaga

SEQ ID NO: 828396 - RNA, 19 nt, Artificial Sequence
  Description of Artificial Sequence: Synthetic oligonucleotide
cuacggaucuuguaguauu

SEQ ID NO: 828397 - RNA, 19 nt, Artificial Sequence
  Description of Artificial Sequence: Synthetic oligonucleotide
acaacgccugacagcagcu

SEQ ID NO: 828398 - RNA, 19 nt, Artificial Sequence
  Description of Artificial Sequence: Synthetic oligonucleotide
gugaucgcagaugaaugua

SEQ ID NO: 828399 - RNA, 19 nt, Artificial Sequence
  Description of Artificial Sequence: Synthetic oligonucleotide
ccauauuccagggcaguac

SEQ ID NO: 828400 - RNA, 19 nt, Artificial Sequence
  Description of Artificial Sequence: Synthetic oligonucleotide
cugccgcaugggaucauuc

SEQ ID NO: 828401 - RNA, 19 nt, Artificial Sequence
  Description of Artificial Sequence: Synthetic oligonucleotide
cucggucgauacccaugcc

SEQ ID NO: 828402 - RNA, 19 nt, Artificial Sequence
  Description of Artificial Sequence: Synthetic oligonucleotide
ccgaccugccacuuuuaag

SEQ ID NO: 828403 - RNA, 19 nt, Artificial Sequence
  Description of Artificial Sequence: Synthetic oligonucleotide
gcguugugaagggagccag

SEQ ID NO: 828404 - RNA, 19 nt, Artificial Sequence
  Description of Artificial Sequence: Synthetic oligonucleotide
auuccuugaguuagccaua

SEQ ID NO: 828405 - RNA, 19 nt, Artificial Sequence
  Description of Artificial Sequence: Synthetic oligonucleotide
gcaucuuaugguagaguuc

SEQ ID NO: 828406 - RNA, 19 nt, Artificial Sequence
  Description of Artificial Sequence: Synthetic oligonucleotide
ggcccaucugggugguagg

SEQ ID NO: 828407 - RNA, 19 nt, Artificial Sequence
  Description of Artificial Sequence: Synthetic oligonucleotide
aucuuagcucggacaauaa

SEQ ID NO: 828408 - RNA, 19 nt, Artificial Sequence
  Description of Artificial Sequence: Synthetic oligonucleotide
gacgauaccuugucuccuu

SEQ ID NO: 828409 - RNA, 19 nt, Artificial Sequence
  Description of Artificial Sequence: Synthetic oligonucleotide
uuccuucguuccggaacug

SEQ ID NO: 828410 - RNA, 19 nt, Artificial Sequence
  Description of Artificial Sequence: Synthetic oligonucleotide
uggugaacucaggguugug

SEQ ID NO: 828411 - RNA, 19 nt, Artificial Sequence
  Description of Artificial Sequence: Synthetic oligonucleotide
ccucugacgauaccuuguc

SEQ ID NO: 828412 - RNA, 19 nt, Artificial Sequence
  Description of Artificial Sequence: Synthetic oligonucleotide
gacaggagcgugauuucau

SEQ ID NO: 828413 - RNA, 19 nt, Artificial Sequence
  Description of Artificial Sequence: Synthetic oligonucleotide
gaaguacuuccuugauauu

SEQ ID NO: 828414 - RNA, 19 nt, Artificial Sequence
  Description of Artificial Sequence: Synthetic oligonucleotide
caauuccuucguuccggaa

SEQ ID NO: 828415 - RNA, 19 nt, Artificial Sequence
  Description of Artificial Sequence: Synthetic oligonucleotide
ggauugcuugacuacggau

SEQ ID NO: 828416 - RNA, 19 nt, Artificial Sequence
  Description of Artificial Sequence: Synthetic oligonucleotide
cucauaaucugugggugau

SEQ ID NO: 828417 - RNA, 19 nt, Artificial Sequence
  Description of Artificial Sequence: Synthetic oligonucleotide
ccuuguggagcguugugaa

SEQ ID NO: 828418 - RNA, 19 nt, Artificial Sequence
  Description of Artificial Sequence: Synthetic oligonucleotide
ucggaaagguggggugaaa

SEQ ID NO: 828419 - RNA, 19 nt, Artificial Sequence
  Description of Artificial Sequence: Synthetic oligonucleotide
gacgucucuuuaguucacu

SEQ ID NO: 828420 - RNA, 19 nt, Artificial Sequence
  Description of Artificial Sequence: Synthetic oligonucleotide
gcuuaucaaggagccuggc

SEQ ID NO: 828421 - RNA, 19 nt, Artificial Sequence
  Description of Artificial Sequence: Synthetic oligonucleotide
ccagucgaaguucccucug

SEQ ID NO: 828422 - RNA, 19 nt, Artificial Sequence
  Description of Artificial Sequence: Synthetic oligonucleotide
ucuccccgccgcagcuugu

SEQ ID NO: 828423 - RNA, 19 nt, Artificial Sequence
  Description of Artificial Sequence: Synthetic oligonucleotide
cagcugucgcugccgcaug

SEQ ID NO: 828424 - RNA, 19 nt, Artificial Sequence
  Description of Artificial Sequence: Synthetic oligonucleotide
ccccagacgcucucuuagc

SEQ ID NO: 828425 - RNA, 19 nt, Artificial Sequence
  Description of Artificial Sequence: Synthetic oligonucleotide
ggcagcagcagcagcagcu

SEQ ID NO: 828426 - RNA, 19 nt, Artificial Sequence
  Description of Artificial Sequence: Synthetic oligonucleotide
cucugacgauaccuugucu

SEQ ID NO: 828427 - RNA, 19 nt, Artificial Sequence
  Description of Artificial Sequence: Synthetic oligonucleotide
cgccauuaucagcagugug

SEQ ID NO: 828428 - RNA, 19 nt, Artificial Sequence
  Description of Artificial Sequence: Synthetic oligonucleotide
uggauccgaccugccacuu

SEQ ID NO: 828429 - RNA, 19 nt, Artificial Sequence
  Description of Artificial Sequence: Synthetic oligonucleotide
gggugaaaucaaucucaua

SEQ ID NO: 828430 - RNA, 19 nt, Artificial Sequence
  Description of Artificial Sequence: Synthetic oligonucleotide
ggcuuaguuguuucucaau

SEQ ID NO: 828431 - RNA, 19 nt, Artificial Sequence
  Description of Artificial Sequence: Synthetic oligonucleotide
uccccgccgcagcuuguua

SEQ ID NO: 828432 - RNA, 19 nt, Artificial Sequence
  Description of Artificial Sequence: Synthetic oligonucleotide
cccagacgcucucuuagca

SEQ ID NO: 828433 - RNA, 19 nt, Artificial Sequence
  Description of Artificial Sequence: Synthetic oligonucleotide
ccccuaacaacgccugaca

SEQ ID NO: 828434 - RNA, 19 nt, Artificial Sequence
  Description of Artificial Sequence: Synthetic oligonucleotide
gcccacgagguuuggcgca

SEQ ID NO: 828435 - RNA, 19 nt, Artificial Sequence
  Description of Artificial Sequence: Synthetic oligonucleotide
guggagcguugugaaggga

SEQ ID NO: 828436 - RNA, 19 nt, Artificial Sequence
  Description of Artificial Sequence: Synthetic oligonucleotide
cuagacagaggggccggcu

SEQ ID NO: 828437 - RNA, 19 nt, Artificial Sequence
  Description of Artificial Sequence: Synthetic oligonucleotide
gguaagggucuuccccacu

SEQ ID NO: 828438 - RNA, 19 nt, Artificial Sequence
  Description of Artificial Sequence: Synthetic oligonucleotide
gguuuggcgcaggggcccc

SEQ ID NO: 828439 - RNA, 19 nt, Artificial Sequence
  Description of Artificial Sequence: Synthetic oligonucleotide
cuuguccuuguggagcguu

SEQ ID NO: 828440 - RNA, 19 nt, Artificial Sequence
  Description of Artificial Sequence: Synthetic oligonucleotide
cccacgagguuuggcgcag

SEQ ID NO: 828441 - RNA, 19 nt, Artificial Sequence
  Description of Artificial Sequence: Synthetic oligonucleotide
cgcaugggaucauucagcu

SEQ ID NO: 828442 - RNA, 19 nt, Artificial Sequence
  Description of Artificial Sequence: Synthetic oligonucleotide
caguuucaaagaggcuggu

SEQ ID NO: 828443 - RNA, 19 nt, Artificial Sequence
  Description of Artificial Sequence: Synthetic oligonucleotide
cugccacuuuuaaggugau

SEQ ID NO: 828444 - RNA, 19 nt, Artificial Sequence
  Description of Artificial Sequence: Synthetic oligonucleotide
ccagacgcucucuuagcau

SEQ ID NO: 828445 - RNA, 19 nt, Artificial Sequence
  Description of Artificial Sequence: Synthetic oligonucleotide
ccacgagguuuggcgcagg

SEQ ID NO: 828446 - RNA, 19 nt, Artificial Sequence
  Description of Artificial Sequence: Synthetic oligonucleotide
gcgugauuucauaggggau

SEQ ID NO: 828447 - RNA, 19 nt, Artificial Sequence
  Description of Artificial Sequence: Synthetic oligonucleotide
ggauccgaccugccacuuu

SEQ ID NO: 828448 - RNA, 19 nt, Artificial Sequence
  Description of Artificial Sequence: Synthetic oligonucleotide
cgauaccuugucuccuugu

SEQ ID NO: 828449 - RNA, 19 nt, Artificial Sequence
  Description of Artificial Sequence: Synthetic oligonucleotide
gcagcagcagcagcagcuu

SEQ ID NO: 828450 - RNA, 19 nt, Artificial Sequence
  Description of Artificial Sequence: Synthetic oligonucleotide
gcucacccuucuugguuuu

SEQ ID NO: 828451 - RNA, 19 nt, Artificial Sequence
  Description of Artificial Sequence: Synthetic oligonucleotide
ccggaacuggcguccaauu

SEQ ID NO: 828452 - RNA, 19 nt, Artificial Sequence
  Description of Artificial Sequence: Synthetic oligonucleotide
gcguucaguuagacccucu

SEQ ID NO: 828453 - RNA, 19 nt, Artificial Sequence
  Description of Artificial Sequence: Synthetic oligonucleotide
gggagacaggagcgugauu

SEQ ID NO: 828454 - RNA, 19 nt, Artificial Sequence
  Description of Artificial Sequence: Synthetic oligonucleotide
gcugccgcaugggaucauu

SEQ ID NO: 828455 - RNA, 19 nt, Artificial Sequence
  Description of Artificial Sequence: Synthetic oligonucleotide
cuccccgccgcagcuuguu

SEQ ID NO: 828456 - RNA, 19 nt, Artificial Sequence
  Description of Artificial Sequence: Synthetic oligonucleotide
gcggugccauuuggccaga

SEQ ID NO: 828457 - RNA, 19 nt, Artificial Sequence
  Description of Artificial Sequence: Synthetic oligonucleotide
cuggcccaucuggguggua

SEQ ID NO: 828458 - RNA, 19 nt, Artificial Sequence
  Description of Artificial Sequence: Synthetic oligonucleotide
caccaaccaccagcaucuu

SEQ ID NO: 828459 - RNA, 19 nt, Artificial Sequence
  Description of Artificial Sequence: Synthetic oligonucleotide
cgcugccgcaugggaucau

SEQ ID NO: 828460 - RNA, 19 nt, Artificial Sequence
  Description of Artificial Sequence: Synthetic oligonucleotide
aguagcaggauuuacagcc

SEQ ID NO: 828461 - RNA, 19 nt, Artificial Sequence
  Description of Artificial Sequence: Synthetic oligonucleotide
aaugaugugguuguaaacc

SEQ ID NO: 828462 - RNA, 19 nt, Artificial Sequence
  Description of Artificial Sequence: Synthetic oligonucleotide
aauaauaagcaucgacucc

SEQ ID NO: 828463 - RNA, 19 nt, Artificial Sequence
  Description of Artificial Sequence: Synthetic oligonucleotide
uuguaaaccucuaagauag

SEQ ID NO: 828464 - RNA, 19 nt, Artificial Sequence
  Description of Artificial Sequence: Synthetic oligonucleotide
aaggguguugcauacaccc

SEQ ID NO: 828465 - RNA, 19 nt, Artificial Sequence
  Description of Artificial Sequence: Synthetic oligonucleotide
uggaauuaaauccagagga

SEQ ID NO: 828466 - RNA, 19 nt, Artificial Sequence
  Description of Artificial Sequence: Synthetic oligonucleotide
uuuacagccaguaagaguc

SEQ ID NO: 828467 - RNA, 19 nt, Artificial Sequence
  Description of Artificial Sequence: Synthetic oligonucleotide
acuacaauaaaguuuccac

SEQ ID NO: 828468 - RNA, 19 nt, Artificial Sequence
  Description of Artificial Sequence: Synthetic oligonucleotide
aguuuccacacuuagacac

SEQ ID NO: 828469 - RNA, 19 nt, Artificial Sequence
  Description of Artificial Sequence: Synthetic oligonucleotide
aaugcaaacguaccgcugg

SEQ ID NO: 828470 - RNA, 19 nt, Artificial Sequence
  Description of Artificial Sequence: Synthetic oligonucleotide
aaauccagaggacagacug

SEQ ID NO: 828471 - RNA, 19 nt, Artificial Sequence
  Description of Artificial Sequence: Synthetic oligonucleotide
ucuaagauagaacugcuga

SEQ ID NO: 828472 - RNA, 19 nt, Artificial Sequence
  Description of Artificial Sequence: Synthetic oligonucleotide
uaccaugacauguaaaugg

SEQ ID NO: 828473 - RNA, 19 nt, Artificial Sequence
  Description of Artificial Sequence: Synthetic oligonucleotide
uagagcauacacaugcugg

SEQ ID NO: 828474 - RNA, 19 nt, Artificial Sequence
  Description of Artificial Sequence: Synthetic oligonucleotide
uguaaacacggucugaaug

SEQ ID NO: 828475 - RNA, 19 nt, Artificial Sequence
  Description of Artificial Sequence: Synthetic oligonucleotide
aaaugguagagugucaauc

SEQ ID NO: 828476 - RNA, 19 nt, Artificial Sequence
  Description of Artificial Sequence: Synthetic oligonucleotide
agauguucaggcuugccgc

SEQ ID NO: 828477 - RNA, 19 nt, Artificial Sequence
  Description of Artificial Sequence: Synthetic oligonucleotide
aagggcgugaguuggaagg

SEQ ID NO: 828478 - RNA, 19 nt, Artificial Sequence
  Description of Artificial Sequence: Synthetic oligonucleotide
aacuaucucacacauacau

SEQ ID NO: 828479 - RNA, 19 nt, Artificial Sequence
  Description of Artificial Sequence: Synthetic oligonucleotide
ucuucaguaguaaacgccc

SEQ ID NO: 828480 - RNA, 19 nt, Artificial Sequence
  Description of Artificial Sequence: Synthetic oligonucleotide
uuuaccaugacauguaaau

SEQ ID NO: 828481 - RNA, 19 nt, Artificial Sequence
  Description of Artificial Sequence: Synthetic oligonucleotide
aaugguagagugucaauca

SEQ ID NO: 828482 - RNA, 19 nt, Artificial Sequence
  Description of Artificial Sequence: Synthetic oligonucleotide
acuaauccauuauaacagc

SEQ ID NO: 828483 - RNA, 19 nt, Artificial Sequence
  Description of Artificial Sequence: Synthetic oligonucleotide
uucauacacacuucgaagc

SEQ ID NO: 828484 - RNA, 19 nt, Artificial Sequence
  Description of Artificial Sequence: Synthetic oligonucleotide
ucaaauuuccaccggaggu

SEQ ID NO: 828485 - RNA, 19 nt, Artificial Sequence
  Description of Artificial Sequence: Synthetic oligonucleotide
uaauccauuauaacagccc

SEQ ID NO: 828486 - RNA, 19 nt, Artificial Sequence
  Description of Artificial Sequence: Synthetic oligonucleotide
auaaaguuuccacacuuag

SEQ ID NO: 828487 - RNA, 19 nt, Artificial Sequence
  Description of Artificial Sequence: Synthetic oligonucleotide
auggaucuuauuccuaggc

SEQ ID NO: 828488 - RNA, 19 nt, Artificial Sequence
  Description of Artificial Sequence: Synthetic oligonucleotide
aguuggaagguguuucugc

SEQ ID NO: 828489 - RNA, 19 nt, Artificial Sequence
  Description of Artificial Sequence: Synthetic oligonucleotide
guuguugacuuucaggucc

SEQ ID NO: 828490 - RNA, 19 nt, Artificial Sequence
  Description of Artificial Sequence: Synthetic oligonucleotide
gucuagagcauacacaugc

SEQ ID NO: 828491 - RNA, 19 nt, Artificial Sequence
  Description of Artificial Sequence: Synthetic oligonucleotide
guagucuaaauauaucuug

SEQ ID NO: 828492 - RNA, 19 nt, Artificial Sequence
  Description of Artificial Sequence: Synthetic oligonucleotide
uuuaguacuuguguguuag

SEQ ID NO: 828493 - RNA, 19 nt, Artificial Sequence
  Description of Artificial Sequence: Synthetic oligonucleotide
cacccaauaauaagcaucg

SEQ ID NO: 828494 - RNA, 19 nt, Artificial Sequence
  Description of Artificial Sequence: Synthetic oligonucleotide
uaagcaucgacucccagac

SEQ ID NO: 828495 - RNA, 19 nt, Artificial Sequence
  Description of Artificial Sequence: Synthetic oligonucleotide
ccuaacuuaguuaaaagcc

SEQ ID NO: 828496 - RNA, 19 nt, Artificial Sequence
  Description of Artificial Sequence: Synthetic oligonucleotide
agugggagccgauauacac

SEQ ID NO: 828497 - RNA, 19 nt, Artificial Sequence
  Description of Artificial Sequence: Synthetic oligonucleotide
uagucucaaauuuccaccg

SEQ ID NO: 828498 - RNA, 19 nt, Artificial Sequence
  Description of Artificial Sequence: Synthetic oligonucleotide
uacauggcgaugaaaagac

SEQ ID NO: 828499 - RNA, 19 nt, Artificial Sequence
  Description of Artificial Sequence: Synthetic oligonucleotide
aacuuaguuaaaagccucc

SEQ ID NO: 828500 - RNA, 19 nt, Artificial Sequence
  Description of Artificial Sequence: Synthetic oligonucleotide
uuguguguaaacacggucu

SEQ ID NO: 828501 - RNA, 19 nt, Artificial Sequence
  Description of Artificial Sequence: Synthetic oligonucleotide
gacguuuccaacuaucuca

SEQ ID NO: 828502 - RNA, 19 nt, Artificial Sequence
  Description of Artificial Sequence: Synthetic oligonucleotide
caauaauaagcaucgacuc

SEQ ID NO: 828503 - RNA, 19 nt, Artificial Sequence
  Description of Artificial Sequence: Synthetic oligonucleotide
agaauaugcuccaggagcc

SEQ ID NO: 828504 - RNA, 19 nt, Artificial Sequence
  Description of Artificial Sequence: Synthetic oligonucleotide
guggaauuaaauccagagg

SEQ ID NO: 828505 - RNA, 19 nt, Artificial Sequence
  Description of Artificial Sequence: Synthetic oligonucleotide
guagucucaaauuuccacc

SEQ ID NO: 828506 - RNA, 19 nt, Artificial Sequence
  Description of Artificial Sequence: Synthetic oligonucleotide
cuaauccauuauaacagcc

SEQ ID NO: 828507 - RNA, 19 nt, Artificial Sequence
  Description of Artificial Sequence: Synthetic oligonucleotide
aacucuuuaaagauguggu

SEQ ID NO: 828508 - RNA, 19 nt, Artificial Sequence
  Description of Artificial Sequence: Synthetic oligonucleotide
uagucuaaauauaucuugu

SEQ ID NO: 828509 - RNA, 19 nt, Artificial Sequence
  Description of Artificial Sequence: Synthetic oligonucleotide
auaaaugucuagagcauac

SEQ ID NO: 828510 - RNA, 19 nt, Artificial Sequence
  Description of Artificial Sequence: Synthetic oligonucleotide
aagauagaacugcugagaa

SEQ ID NO: 828511 - RNA, 19 nt, Artificial Sequence
  Description of Artificial Sequence: Synthetic oligonucleotide
uuuauguagucuaaauaua

SEQ ID NO: 828512 - RNA, 19 nt, Artificial Sequence
  Description of Artificial Sequence: Synthetic oligonucleotide
uaaaugaguccugugguag

SEQ ID NO: 828513 - RNA, 19 nt, Artificial Sequence
  Description of Artificial Sequence: Synthetic oligonucleotide
cacacuuagacacgcaugc

SEQ ID NO: 828514 - RNA, 19 nt, Artificial Sequence
  Description of Artificial Sequence: Synthetic oligonucleotide
guugcauacacccucgcug

SEQ ID NO: 828515 - RNA, 19 nt, Artificial Sequence
  Description of Artificial Sequence: Synthetic oligonucleotide
cuaagauagaacugcugag

SEQ ID NO: 828516 - RNA, 19 nt, Artificial Sequence
  Description of Artificial Sequence: Synthetic oligonucleotide
uccgacauaaaugaguccu

SEQ ID NO: 828517 - RNA, 19 nt, Artificial Sequence
  Description of Artificial Sequence: Synthetic oligonucleotide
ugugaguuuauguagucua

SEQ ID NO: 828518 - RNA, 19 nt, Artificial Sequence
  Description of Artificial Sequence: Synthetic oligonucleotide
guuuauguagucuaaauau

SEQ ID NO: 828519 - RNA, 19 nt, Artificial Sequence
  Description of Artificial Sequence: Synthetic oligonucleotide
augcggaggauucaauucg

SEQ ID NO: 828520 - RNA, 19 nt, Artificial Sequence
  Description of Artificial Sequence: Synthetic oligonucleotide
ucaauuuuaccaugacaug

SEQ ID NO: 828521 - RNA, 19 nt, Artificial Sequence
  Description of Artificial Sequence: Synthetic oligonucleotide
uacccagagacaaaagcug

SEQ ID NO: 828522 - RNA, 19 nt, Artificial Sequence
  Description of Artificial Sequence: Synthetic oligonucleotide
aaaagagcgucccuccgca

SEQ ID NO: 828523 - RNA, 19 nt, Artificial Sequence
  Description of Artificial Sequence: Synthetic oligonucleotide
cauggcgaugaaaagacug

SEQ ID NO: 828524 - RNA, 19 nt, Artificial Sequence
  Description of Artificial Sequence: Synthetic oligonucleotide
uguguguaaacacggucug

SEQ ID NO: 828525 - RNA, 19 nt, Artificial Sequence
  Description of Artificial Sequence: Synthetic oligonucleotide
acugcuacagcucugguua

SEQ ID NO: 828526 - RNA, 19 nt, Artificial Sequence
  Description of Artificial Sequence: Synthetic oligonucleotide
guuuccaacuaucucacac

SEQ ID NO: 828527 - RNA, 19 nt, Artificial Sequence
  Description of Artificial Sequence: Synthetic oligonucleotide
uaagauagaacugcugaga

SEQ ID NO: 828528 - RNA, 19 nt, Artificial Sequence
  Description of Artificial Sequence: Synthetic oligonucleotide
auaacagcccacuacaaua

SEQ ID NO: 828529 - RNA, 19 nt, Artificial Sequence
  Description of Artificial Sequence: Synthetic oligonucleotide
gugguuguaaaccucuaag

SEQ ID NO: 828530 - RNA, 19 nt, Artificial Sequence
  Description of Artificial Sequence: Synthetic oligonucleotide
ugguuguaaaccucuaaga

SEQ ID NO: 828531 - RNA, 19 nt, Artificial Sequence
  Description of Artificial Sequence: Synthetic oligonucleotide
uguagucuaaauauaucuu

SEQ ID NO: 828532 - RNA, 19 nt, Artificial Sequence
  Description of Artificial Sequence: Synthetic oligonucleotide
aguacuuguguguuagucu

SEQ ID NO: 828533 - RNA, 19 nt, Artificial Sequence
  Description of Artificial Sequence: Synthetic oligonucleotide
ugaaugaugugguuguaaa

SEQ ID NO: 828534 - RNA, 19 nt, Artificial Sequence
  Description of Artificial Sequence: Synthetic oligonucleotide
agcuuuauaaagacguuuc

SEQ ID NO: 828535 - RNA, 19 nt, Artificial Sequence
  Description of Artificial Sequence: Synthetic oligonucleotide
uaacuuaguuaaaagccuc

SEQ ID NO: 828536 - RNA, 19 nt, Artificial Sequence
  Description of Artificial Sequence: Synthetic oligonucleotide
ugggagccgauauacacag

SEQ ID NO: 828537 - RNA, 19 nt, Artificial Sequence
  Description of Artificial Sequence: Synthetic oligonucleotide
acagccaaugcaaacguac

SEQ ID NO: 828538 - RNA, 19 nt, Artificial Sequence
  Description of Artificial Sequence: Synthetic oligonucleotide
uuggcuuacaacgaagaga

SEQ ID NO: 828539 - RNA, 19 nt, Artificial Sequence
  Description of Artificial Sequence: Synthetic oligonucleotide
ugaccuuccaugcuacagc

SEQ ID NO: 828540 - RNA, 19 nt, Artificial Sequence
  Description of Artificial Sequence: Synthetic oligonucleotide
agcaucgacucccagacca

SEQ ID NO: 828541 - RNA, 19 nt, Artificial Sequence
  Description of Artificial Sequence: Synthetic oligonucleotide
ucucgcaacaccaucgaaa

SEQ ID NO: 828542 - RNA, 19 nt, Artificial Sequence
  Description of Artificial Sequence: Synthetic oligonucleotide
cagauguucaggcuugccg

SEQ ID NO: 828543 - RNA, 19 nt, Artificial Sequence
  Description of Artificial Sequence: Synthetic oligonucleotide
auucgucucacuguugugg

SEQ ID NO: 828544 - RNA, 19 nt, Artificial Sequence
  Description of Artificial Sequence: Synthetic oligonucleotide
cacuuagacacgcaugcgg

SEQ ID NO: 828545 - RNA, 19 nt, Artificial Sequence
  Description of Artificial Sequence: Synthetic oligonucleotide
aaggacuacacuugauuau

SEQ ID NO: 828546 - RNA, 19 nt, Artificial Sequence
  Description of Artificial Sequence: Synthetic oligonucleotide
ugugguccuuuaauaaccc

SEQ ID NO: 828547 - RNA, 19 nt, Artificial Sequence
  Description of Artificial Sequence: Synthetic oligonucleotide
ucauaaaugucuagagcau

SEQ ID NO: 828548 - RNA, 19 nt, Artificial Sequence
  Description of Artificial Sequence: Synthetic oligonucleotide
agccaaugcaaacguaccg

SEQ ID NO: 828549 - RNA, 19 nt, Artificial Sequence
  Description of Artificial Sequence: Synthetic oligonucleotide
uuagacacgcaugcggagg

SEQ ID NO: 828550 - RNA, 19 nt, Artificial Sequence
  Description of Artificial Sequence: Synthetic oligonucleotide
uucgucucacuguuguggg

SEQ ID NO: 828551 - RNA, 19 nt, Artificial Sequence
  Description of Artificial Sequence: Synthetic oligonucleotide
uauaacagcccacuacaau

SEQ ID NO: 828552 - RNA, 19 nt, Artificial Sequence
  Description of Artificial Sequence: Synthetic oligonucleotide
auaagcaucgacucccaga

SEQ ID NO: 828553 - RNA, 19 nt, Artificial Sequence
  Description of Artificial Sequence: Synthetic oligonucleotide
aauaagcaucgacucccag

SEQ ID NO: 828554 - RNA, 19 nt, Artificial Sequence
  Description of Artificial Sequence: Synthetic oligonucleotide
auuauuucugcacccaaua

SEQ ID NO: 828555 - RNA, 19 nt, Artificial Sequence
  Description of Artificial Sequence: Synthetic oligonucleotide
acauaaacuaauccauuau

SEQ ID NO: 828556 - RNA, 19 nt, Artificial Sequence
  Description of Artificial Sequence: Synthetic oligonucleotide
cucucucgcaacaccaucg

SEQ ID NO: 828557 - RNA, 19 nt, Artificial Sequence
  Description of Artificial Sequence: Synthetic oligonucleotide
agccauauagcuuuauaaa

SEQ ID NO: 828558 - RNA, 19 nt, Artificial Sequence
  Description of Artificial Sequence: Synthetic oligonucleotide
uucgaagcauuccacucug

SEQ ID NO: 828559 - RNA, 19 nt, Artificial Sequence
  Description of Artificial Sequence: Synthetic oligonucleotide
agacguuuccaacuaucuc

SEQ ID NO: 828560 - RNA, 19 nt, Artificial Sequence
  Description of Artificial Sequence: Synthetic oligonucleotide
agaaaagagcgucccuccg

SEQ ID NO: 828561 - RNA, 19 nt, Artificial Sequence
  Description of Artificial Sequence: Synthetic oligonucleotide
cucgcaacaccaucgaaac

SEQ ID NO: 828562 - RNA, 19 nt, Artificial Sequence
  Description of Artificial Sequence: Synthetic oligonucleotide
guagagacgauguggacuc

SEQ ID NO: 828563 - RNA, 19 nt, Artificial Sequence
  Description of Artificial Sequence: Synthetic oligonucleotide
gaaugaugugguuguaaac

SEQ ID NO: 828564 - RNA, 19 nt, Artificial Sequence
  Description of Artificial Sequence: Synthetic oligonucleotide
agacaguaaauguaauuau

SEQ ID NO: 828565 - RNA, 19 nt, Artificial Sequence
  Description of Artificial Sequence: Synthetic oligonucleotide
gagaagaaaagagcguccc

SEQ ID NO: 828566 - RNA, 19 nt, Artificial Sequence
  Description of Artificial Sequence: Synthetic oligonucleotide
gauccgacauaaaugaguc

SEQ ID NO: 828567 - RNA, 19 nt, Artificial Sequence
  Description of Artificial Sequence: Synthetic oligonucleotide
uauuuacaaggacuacacu

SEQ ID NO: 828568 - RNA, 19 nt, Artificial Sequence
  Description of Artificial Sequence: Synthetic oligonucleotide
auauagcuuuauaaagacg

SEQ ID NO: 828569 - RNA, 19 nt, Artificial Sequence
  Description of Artificial Sequence: Synthetic oligonucleotide
agccgauauacacaguugu

SEQ ID NO: 828570 - RNA, 19 nt, Artificial Sequence
  Description of Artificial Sequence: Synthetic oligonucleotide
augaugugguuguaaaccu

SEQ ID NO: 828571 - RNA, 19 nt, Artificial Sequence
  Description of Artificial Sequence: Synthetic oligonucleotide
gcgaugaaaagacuggucc

SEQ ID NO: 828572 - RNA, 19 nt, Artificial Sequence
  Description of Artificial Sequence: Synthetic oligonucleotide
cccacuacaauaaaguuuc

SEQ ID NO: 828573 - RNA, 19 nt, Artificial Sequence
  Description of Artificial Sequence: Synthetic oligonucleotide
aucucacacauacauauuu

SEQ ID NO: 828574 - RNA, 19 nt, Artificial Sequence
  Description of Artificial Sequence: Synthetic oligonucleotide
aggguuucacugcuacagc

SEQ ID NO: 828575 - RNA, 19 nt, Artificial Sequence
  Description of Artificial Sequence: Synthetic oligonucleotide
aguaagaguccccgaagug

SEQ ID NO: 828576 - RNA, 19 nt, Artificial Sequence
  Description of Artificial Sequence: Synthetic oligonucleotide
auaaagacguuuccaacua

SEQ ID NO: 828577 - RNA, 19 nt, Artificial Sequence
  Description of Artificial Sequence: Synthetic oligonucleotide
aaacguaccgcuggcagca

SEQ ID NO: 828578 - RNA, 19 nt, Artificial Sequence
  Description of Artificial Sequence: Synthetic oligonucleotide
aguagagacgauguggacu

SEQ ID NO: 828579 - RNA, 19 nt, Artificial Sequence
  Description of Artificial Sequence: Synthetic oligonucleotide
uuaccaugacauguaaaug

SEQ ID NO: 828580 - RNA, 19 nt, Artificial Sequence
  Description of Artificial Sequence: Synthetic oligonucleotide
uguguaaacacggucugaa

SEQ ID NO: 828581 - RNA, 19 nt, Artificial Sequence
  Description of Artificial Sequence: Synthetic oligonucleotide
uaacagcccacuacaauaa

SEQ ID NO: 828582 - RNA, 19 nt, Artificial Sequence
  Description of Artificial Sequence: Synthetic oligonucleotide
ugguagagugucaaucaac

SEQ ID NO: 828583 - RNA, 19 nt, Artificial Sequence
  Description of Artificial Sequence: Synthetic oligonucleotide
gcuacagcaguagagaaag

SEQ ID NO: 828584 - RNA, 19 nt, Artificial Sequence
  Description of Artificial Sequence: Synthetic oligonucleotide
uccaaguacccagagacaa

SEQ ID NO: 828585 - RNA, 19 nt, Artificial Sequence
  Description of Artificial Sequence: Synthetic oligonucleotide
aacuuuggcuuacaacgaa

SEQ ID NO: 828586 - RNA, 19 nt, Artificial Sequence
  Description of Artificial Sequence: Synthetic oligonucleotide
aauuuuaccaugacaugua

SEQ ID NO: 828587 - RNA, 19 nt, Artificial Sequence
  Description of Artificial Sequence: Synthetic oligonucleotide
aaauuuccaccggagguga

SEQ ID NO: 828588 - RNA, 19 nt, Artificial Sequence
  Description of Artificial Sequence: Synthetic oligonucleotide
caaucaaagcauucgucuc

SEQ ID NO: 828589 - RNA, 19 nt, Artificial Sequence
  Description of Artificial Sequence: Synthetic oligonucleotide
aacccuaacuuuggcuuac

SEQ ID NO: 828590 - RNA, 19 nt, Artificial Sequence
  Description of Artificial Sequence: Synthetic oligonucleotide
auccgacauaaaugagucc

SEQ ID NO: 828591 - RNA, 19 nt, Artificial Sequence
  Description of Artificial Sequence: Synthetic oligonucleotide
acaaaagcugacucccucu

SEQ ID NO: 828592 - RNA, 19 nt, Artificial Sequence
  Description of Artificial Sequence: Synthetic oligonucleotide
caugcggaggauucaauuc

SEQ ID NO: 828593 - RNA, 19 nt, Artificial Sequence
  Description of Artificial Sequence: Synthetic oligonucleotide
uuaaagaugugguccuuua

SEQ ID NO: 828594 - RNA, 19 nt, Artificial Sequence
  Description of Artificial Sequence: Synthetic oligonucleotide
aguaguaaacgcccaguau

SEQ ID NO: 828595 - RNA, 19 nt, Artificial Sequence
  Description of Artificial Sequence: Synthetic oligonucleotide
auugaggagccacguggac

SEQ ID NO: 828596 - RNA, 19 nt, Artificial Sequence
  Description of Artificial Sequence: Synthetic oligonucleotide
agagcaugacuguuguuga

SEQ ID NO: 828597 - RNA, 19 nt, Artificial Sequence
  Description of Artificial Sequence: Synthetic oligonucleotide
cauggaucuuauuccuagg

SEQ ID NO: 828598 - RNA, 19 nt, Artificial Sequence
  Description of Artificial Sequence: Synthetic oligonucleotide
caggguuucacugcuacag

SEQ ID NO: 828599 - RNA, 19 nt, Artificial Sequence
  Description of Artificial Sequence: Synthetic oligonucleotide
uaguaaacgcccaguauuu

SEQ ID NO: 828600 - RNA, 19 nt, Artificial Sequence
  Description of Artificial Sequence: Synthetic oligonucleotide
acacacuucgaagcauucc

SEQ ID NO: 828601 - RNA, 19 nt, Artificial Sequence
  Description of Artificial Sequence: Synthetic oligonucleotide
aagcaucgacucccagacc

SEQ ID NO: 828602 - RNA, 19 nt, Artificial Sequence
  Description of Artificial Sequence: Synthetic oligonucleotide
cacuauuacuuuucagaac

SEQ ID NO: 828603 - RNA, 19 nt, Artificial Sequence
  Description of Artificial Sequence: Synthetic oligonucleotide
agcaaucaaagcauucguc

SEQ ID NO: 828604 - RNA, 19 nt, Artificial Sequence
  Description of Artificial Sequence: Synthetic oligonucleotide
augcaaacguaccgcuggc

SEQ ID NO: 828605 - RNA, 19 nt, Artificial Sequence
  Description of Artificial Sequence: Synthetic oligonucleotide
cuagagcauacacaugcug

SEQ ID NO: 828606 - RNA, 19 nt, Artificial Sequence
  Description of Artificial Sequence: Synthetic oligonucleotide
uguugcauacacccucgcu

SEQ ID NO: 828607 - RNA, 19 nt, Artificial Sequence
  Description of Artificial Sequence: Synthetic oligonucleotide
caaauuuccaccggaggug

SEQ ID NO: 828608 - RNA, 19 nt, Artificial Sequence
  Description of Artificial Sequence: Synthetic oligonucleotide
ucaauucgaucucccaaaa

SEQ ID NO: 828609 - RNA, 19 nt, Artificial Sequence
  Description of Artificial Sequence: Synthetic oligonucleotide
ucgacucccagaccacagg

SEQ ID NO: 828610 - RNA, 19 nt, Artificial Sequence
  Description of Artificial Sequence: Synthetic oligonucleotide
uccgcauuuuagcuuccag

SEQ ID NO: 828611 - RNA, 19 nt, Artificial Sequence
  Description of Artificial Sequence: Synthetic oligonucleotide
agggagacucagaauagac

SEQ ID NO: 828612 - RNA, 19 nt, Artificial Sequence
  Description of Artificial Sequence: Synthetic oligonucleotide
cuuuucaucaggaggugga

SEQ ID NO: 828613 - RNA, 19 nt, Artificial Sequence
  Description of Artificial Sequence: Synthetic oligonucleotide
uaauaagcaucgacuccca

SEQ ID NO: 828614 - RNA, 19 nt, Artificial Sequence
  Description of Artificial Sequence: Synthetic oligonucleotide
uccacacuuagacacgcau

SEQ ID NO: 828615 - RNA, 19 nt, Artificial Sequence
  Description of Artificial Sequence: Synthetic oligonucleotide
agauccgacauaaaugagu

SEQ ID NO: 828616 - RNA, 19 nt, Artificial Sequence
  Description of Artificial Sequence: Synthetic oligonucleotide
cauaaacuaauccauuaua

SEQ ID NO: 828617 - RNA, 19 nt, Artificial Sequence
  Description of Artificial Sequence: Synthetic oligonucleotide
aaaaccagccauauagcuu

SEQ ID NO: 828618 - RNA, 19 nt, Artificial Sequence
  Description of Artificial Sequence: Synthetic oligonucleotide
cuaacuuaguuaaaagccu

SEQ ID NO: 828619 - RNA, 19 nt, Artificial Sequence
  Description of Artificial Sequence: Synthetic oligonucleotide
gacaaaagcugacucccuc

SEQ ID NO: 828620 - RNA, 19 nt, Artificial Sequence
  Description of Artificial Sequence: Synthetic oligonucleotide
auaaaugaguccuguggua

SEQ ID NO: 828621 - RNA, 19 nt, Artificial Sequence
  Description of Artificial Sequence: Synthetic oligonucleotide
uagacacgcaugcggagga

SEQ ID NO: 828622 - RNA, 19 nt, Artificial Sequence
  Description of Artificial Sequence: Synthetic oligonucleotide
auuuuaccaugacauguaa

SEQ ID NO: 828623 - RNA, 19 nt, Artificial Sequence
  Description of Artificial Sequence: Synthetic oligonucleotide
uaaaugucuagagcauaca

SEQ ID NO: 828624 - RNA, 19 nt, Artificial Sequence
  Description of Artificial Sequence: Synthetic oligonucleotide
acuuccauaaaugcuguaa

SEQ ID NO: 828625 - RNA, 19 nt, Artificial Sequence
  Description of Artificial Sequence: Synthetic oligonucleotide
cucuaagauagaacugcug

SEQ ID NO: 828626 - RNA, 19 nt, Artificial Sequence
  Description of Artificial Sequence: Synthetic oligonucleotide
uaguacuuguguguuaguc

SEQ ID NO: 828627 - RNA, 19 nt, Artificial Sequence
  Description of Artificial Sequence: Synthetic oligonucleotide
caaacguaccgcuggcagc

SEQ ID NO: 828628 - RNA, 19 nt, Artificial Sequence
  Description of Artificial Sequence: Synthetic oligonucleotide
cuuagacacgcaugcggag

SEQ ID NO: 828629 - RNA, 19 nt, Artificial Sequence
  Description of Artificial Sequence: Synthetic oligonucleotide
ugaugugguuguaaaccuc

SEQ ID NO: 828630 - RNA, 19 nt, Artificial Sequence
  Description of Artificial Sequence: Synthetic oligonucleotide
ucgcuguagucucaaauuu

SEQ ID NO: 828631 - RNA, 19 nt, Artificial Sequence
  Description of Artificial Sequence: Synthetic oligonucleotide
agagaagagugguuuucca

SEQ ID NO: 828632 - RNA, 19 nt, Artificial Sequence
  Description of Artificial Sequence: Synthetic oligonucleotide
acguuuccaacuaucucac

SEQ ID NO: 828633 - RNA, 19 nt, Artificial Sequence
  Description of Artificial Sequence: Synthetic oligonucleotide
cagccaaugcaaacguacc

SEQ ID NO: 828634 - RNA, 19 nt, Artificial Sequence
  Description of Artificial Sequence: Synthetic oligonucleotide
ugucuagagcauacacaug

SEQ ID NO: 828635 - RNA, 19 nt, Artificial Sequence
  Description of Artificial Sequence: Synthetic oligonucleotide
ucaguaguaaacgcccagu

SEQ ID NO: 828636 - RNA, 19 nt, Artificial Sequence
  Description of Artificial Sequence: Synthetic oligonucleotide
cucagaauagacuuccaua

SEQ ID NO: 828637 - RNA, 19 nt, Artificial Sequence
  Description of Artificial Sequence: Synthetic oligonucleotide
agcacaguagagacgaugu

SEQ ID NO: 828638 - RNA, 19 nt, Artificial Sequence
  Description of Artificial Sequence: Synthetic oligonucleotide
ugaguuuauguagucuaaa

SEQ ID NO: 828639 - RNA, 19 nt, Artificial Sequence
  Description of Artificial Sequence: Synthetic oligonucleotide
ucucucgcaacaccaucga

SEQ ID NO: 828640 - RNA, 19 nt, Artificial Sequence
  Description of Artificial Sequence: Synthetic oligonucleotide
acuuaguuaaaagccucca

SEQ ID NO: 828641 - RNA, 19 nt, Artificial Sequence
  Description of Artificial Sequence: Synthetic oligonucleotide
cagccauauagcuuuauaa

SEQ ID NO: 828642 - RNA, 19 nt, Artificial Sequence
  Description of Artificial Sequence: Synthetic oligonucleotide
ugcggaggauucaauucga

SEQ ID NO: 828643 - RNA, 19 nt, Artificial Sequence
  Description of Artificial Sequence: Synthetic oligonucleotide
uagcacaguagagacgaug

SEQ ID NO: 828644 - RNA, 19 nt, Artificial Sequence
  Description of Artificial Sequence: Synthetic oligonucleotide
aggagugcuuccaaacuuc

SEQ ID NO: 828645 - RNA, 19 nt, Artificial Sequence
  Description of Artificial Sequence: Synthetic oligonucleotide
guaguaaacgcccaguauu

SEQ ID NO: 828646 - RNA, 19 nt, Artificial Sequence
  Description of Artificial Sequence: Synthetic oligonucleotide
ucagagcaaucaaagcauu

SEQ ID NO: 828647 - RNA, 19 nt, Artificial Sequence
  Description of Artificial Sequence: Synthetic oligonucleotide
uagcuuuauaaagacguuu

SEQ ID NO: 828648 - RNA, 19 nt, Artificial Sequence
  Description of Artificial Sequence: Synthetic oligonucleotide
gaagggcgugaguuggaag

SEQ ID NO: 828649 - RNA, 19 nt, Artificial Sequence
  Description of Artificial Sequence: Synthetic oligonucleotide
aguaaaggucaacugccuu

SEQ ID NO: 828650 - RNA, 19 nt, Artificial Sequence
  Description of Artificial Sequence: Synthetic oligonucleotide
acacaguuguggaugacug

SEQ ID NO: 828651 - RNA, 19 nt, Artificial Sequence
  Description of Artificial Sequence: Synthetic oligonucleotide
uuuaaagaugugguccuuu

SEQ ID NO: 828652 - RNA, 19 nt, Artificial Sequence
  Description of Artificial Sequence: Synthetic oligonucleotide
ugacuguuguugacuuuca

SEQ ID NO: 828653 - RNA, 19 nt, Artificial Sequence
  Description of Artificial Sequence: Synthetic oligonucleotide
ugacugauuggcagcugcu

SEQ ID NO: 828654 - RNA, 19 nt, Artificial Sequence
  Description of Artificial Sequence: Synthetic oligonucleotide
ucuuauuccuaggcuguga

SEQ ID NO: 828655 - RNA, 19 nt, Artificial Sequence
  Description of Artificial Sequence: Synthetic oligonucleotide
ugagauacauggcgaugaa

SEQ ID NO: 828656 - RNA, 19 nt, Artificial Sequence
  Description of Artificial Sequence: Synthetic oligonucleotide
ccgauauacacaguugugg

SEQ ID NO: 828657 - RNA, 19 nt, Artificial Sequence
  Description of Artificial Sequence: Synthetic oligonucleotide
caaggacuacacuugauua

SEQ ID NO: 828658 - RNA, 19 nt, Artificial Sequence
  Description of Artificial Sequence: Synthetic oligonucleotide
caaucaacaccaugucauc

SEQ ID NO: 828659 - RNA, 19 nt, Artificial Sequence
  Description of Artificial Sequence: Synthetic oligonucleotide
ccauauagcuuuauaaaga

SEQ ID NO: 828660 - RNA, 19 nt, Artificial Sequence
  Description of Artificial Sequence: Synthetic oligonucleotide
cccaauaauaagcaucgac

SEQ ID NO: 828661 - RNA, 19 nt, Artificial Sequence
  Description of Artificial Sequence: Synthetic oligonucleotide
agcccagguauggacgugc

SEQ ID NO: 828662 - RNA, 19 nt, Artificial Sequence
  Description of Artificial Sequence: Synthetic oligonucleotide
caugcuacagcaguagaga

SEQ ID NO: 828663 - RNA, 19 nt, Artificial Sequence
  Description of Artificial Sequence: Synthetic oligonucleotide
acuuagacacgcaugcgga

SEQ ID NO: 828664 - RNA, 19 nt, Artificial Sequence
  Description of Artificial Sequence: Synthetic oligonucleotide
uguuagucuguggaauuaa

SEQ ID NO: 828665 - RNA, 19 nt, Artificial Sequence
  Description of Artificial Sequence: Synthetic oligonucleotide
caaugcaaacguaccgcug

SEQ ID NO: 828666 - RNA, 19 nt, Artificial Sequence
  Description of Artificial Sequence: Synthetic oligonucleotide
uguaaaccucuaagauaga

SEQ ID NO: 828667 - RNA, 19 nt, Artificial Sequence
  Description of Artificial Sequence: Synthetic oligonucleotide
agcugcuaucacaagcagg

SEQ ID NO: 828668 - RNA, 19 nt, Artificial Sequence
  Description of Artificial Sequence: Synthetic oligonucleotide
ccuaacuuuggcuuacaac

SEQ ID NO: 828669 - RNA, 19 nt, Artificial Sequence
  Description of Artificial Sequence: Synthetic oligonucleotide
agcaugacuguuguugacu

SEQ ID NO: 828670 - RNA, 19 nt, Artificial Sequence
  Description of Artificial Sequence: Synthetic oligonucleotide
gcaaacguaccgcuggcag

SEQ ID NO: 828671 - RNA, 19 nt, Artificial Sequence
  Description of Artificial Sequence: Synthetic oligonucleotide
caauuuuaccaugacaugu

SEQ ID NO: 828672 - RNA, 19 nt, Artificial Sequence
  Description of Artificial Sequence: Synthetic oligonucleotide
caugagauccgacauaaau

SEQ ID NO: 828673 - RNA, 19 nt, Artificial Sequence
  Description of Artificial Sequence: Synthetic oligonucleotide
gauccacaguuucccauca

SEQ ID NO: 828674 - RNA, 19 nt, Artificial Sequence
  Description of Artificial Sequence: Synthetic oligonucleotide
cuuaguuaaaagccuccaa

SEQ ID NO: 828675 - RNA, 19 nt, Artificial Sequence
  Description of Artificial Sequence: Synthetic oligonucleotide
augguagagugucaaucaa

SEQ ID NO: 828676 - RNA, 19 nt, Artificial Sequence
  Description of Artificial Sequence: Synthetic oligonucleotide
ccaauaauaagcaucgacu

SEQ ID NO: 828677 - RNA, 19 nt, Artificial Sequence
  Description of Artificial Sequence: Synthetic oligonucleotide
uggcgggugagcuuuucac

SEQ ID NO: 828678 - RNA, 19 nt, Artificial Sequence
  Description of Artificial Sequence: Synthetic oligonucleotide
cuuuaauaacccuaacuuu

SEQ ID NO: 828679 - RNA, 19 nt, Artificial Sequence
  Description of Artificial Sequence: Synthetic oligonucleotide
ggaauuaaauccagaggac

SEQ ID NO: 828680 - RNA, 19 nt, Artificial Sequence
  Description of Artificial Sequence: Synthetic oligonucleotide
gagauccgacauaaaugag

SEQ ID NO: 828681 - RNA, 19 nt, Artificial Sequence
  Description of Artificial Sequence: Synthetic oligonucleotide
uguggguaaggggcaaggc

SEQ ID NO: 828682 - RNA, 19 nt, Artificial Sequence
  Description of Artificial Sequence: Synthetic oligonucleotide
acguaccgcuggcagcacc

SEQ ID NO: 828683 - RNA, 19 nt, Artificial Sequence
  Description of Artificial Sequence: Synthetic oligonucleotide
cagccaguaagaguccccg

SEQ ID NO: 828684 - RNA, 19 nt, Artificial Sequence
  Description of Artificial Sequence: Synthetic oligonucleotide
ugagugagugaagcagagc

SEQ ID NO: 828685 - RNA, 19 nt, Artificial Sequence
  Description of Artificial Sequence: Synthetic oligonucleotide
guaggauccauggcgggug

SEQ ID NO: 828686 - RNA, 19 nt, Artificial Sequence
  Description of Artificial Sequence: Synthetic oligonucleotide
augcuacagcaguagagaa

SEQ ID NO: 828687 - RNA, 19 nt, Artificial Sequence
  Description of Artificial Sequence: Synthetic oligonucleotide
aaacacggucugaaugaug

SEQ ID NO: 828688 - RNA, 19 nt, Artificial Sequence
  Description of Artificial Sequence: Synthetic oligonucleotide
acacuuagacacgcaugcg

SEQ ID NO: 828689 - RNA, 19 nt, Artificial Sequence
  Description of Artificial Sequence: Synthetic oligonucleotide
gcaaucaaagcauucgucu

SEQ ID NO: 828690 - RNA, 19 nt, Artificial Sequence
  Description of Artificial Sequence: Synthetic oligonucleotide
gaauaugcuccaggagccc

SEQ ID NO: 828691 - RNA, 19 nt, Artificial Sequence
  Description of Artificial Sequence: Synthetic oligonucleotide
uuaguacuuguguguuagu

SEQ ID NO: 828692 - RNA, 19 nt, Artificial Sequence
  Description of Artificial Sequence: Synthetic oligonucleotide
ugcacccaauaauaagcau

SEQ ID NO: 828693 - RNA, 19 nt, Artificial Sequence
  Description of Artificial Sequence: Synthetic oligonucleotide
cugcacccaauaauaagca

SEQ ID NO: 828694 - RNA, 19 nt, Artificial Sequence
  Description of Artificial Sequence: Synthetic oligonucleotide
aucuggaagggcgugaguu

SEQ ID NO: 828695 - RNA, 19 nt, Artificial Sequence
  Description of Artificial Sequence: Synthetic oligonucleotide
ccaugcuacagcaguagag

SEQ ID NO: 828696 - RNA, 19 nt, Artificial Sequence
  Description of Artificial Sequence: Synthetic oligonucleotide
acacgcaugcggaggauuc

SEQ ID NO: 828697 - RNA, 19 nt, Artificial Sequence
  Description of Artificial Sequence: Synthetic oligonucleotide
gagcaaucaaagcauucgu

SEQ ID NO: 828698 - RNA, 19 nt, Artificial Sequence
  Description of Artificial Sequence: Synthetic oligonucleotide
auacacccucgcuguaguc

SEQ ID NO: 828699 - RNA, 19 nt, Artificial Sequence
  Description of Artificial Sequence: Synthetic oligonucleotide
uccauggaucuuauuccua

SEQ ID NO: 828700 - RNA, 19 nt, Artificial Sequence
  Description of Artificial Sequence: Synthetic oligonucleotide
agagacgauguggacucag

SEQ ID NO: 828701 - RNA, 19 nt, Artificial Sequence
  Description of Artificial Sequence: Synthetic oligonucleotide
gguuguaaaccucuaagau

SEQ ID NO: 828702 - RNA, 19 nt, Artificial Sequence
  Description of Artificial Sequence: Synthetic oligonucleotide
agcccacuacaauaaaguu

SEQ ID NO: 828703 - RNA, 19 nt, Artificial Sequence
  Description of Artificial Sequence: Synthetic oligonucleotide
ggagaagaaaagagcgucc

SEQ ID NO: 828704 - RNA, 19 nt, Artificial Sequence
  Description of Artificial Sequence: Synthetic oligonucleotide
uaaacacggucugaaugau

SEQ ID NO: 828705 - RNA, 19 nt, Artificial Sequence
  Description of Artificial Sequence: Synthetic oligonucleotide
gguguugcauacacccucg

SEQ ID NO: 828706 - RNA, 19 nt, Artificial Sequence
  Description of Artificial Sequence: Synthetic oligonucleotide
cauugaggagccacgugga

SEQ ID NO: 828707 - RNA, 19 nt, Artificial Sequence
  Description of Artificial Sequence: Synthetic oligonucleotide
ugugucugaccuccaccuc

SEQ ID NO: 828708 - RNA, 19 nt, Artificial Sequence
  Description of Artificial Sequence: Synthetic oligonucleotide
cauccacacagccaaugca

SEQ ID NO: 828709 - RNA, 19 nt, Artificial Sequence
  Description of Artificial Sequence: Synthetic oligonucleotide
ggagugggagccgauauac

SEQ ID NO: 828710 - RNA, 19 nt, Artificial Sequence
  Description of Artificial Sequence: Synthetic oligonucleotide
uccaaacuucacucccagu

SEQ ID NO: 828711 - RNA, 19 nt, Artificial Sequence
  Description of Artificial Sequence: Synthetic oligonucleotide
cauucgucucacuguugug

SEQ ID NO: 828712 - RNA, 19 nt, Artificial Sequence
  Description of Artificial Sequence: Synthetic oligonucleotide
guaagaguccccgaagugu

SEQ ID NO: 828713 - RNA, 19 nt, Artificial Sequence
  Description of Artificial Sequence: Synthetic oligonucleotide
cuucaguaguaaacgccca

SEQ ID NO: 828714 - RNA, 19 nt, Artificial Sequence
  Description of Artificial Sequence: Synthetic oligonucleotide
gccaaugcaaacguaccgc

SEQ ID NO: 828715 - RNA, 19 nt, Artificial Sequence
  Description of Artificial Sequence: Synthetic oligonucleotide
auggacgugccagugaguu

SEQ ID NO: 828716 - RNA, 19 nt, Artificial Sequence
  Description of Artificial Sequence: Synthetic oligonucleotide
aggugaccuuccaugcuac

SEQ ID NO: 828717 - RNA, 19 nt, Artificial Sequence
  Description of Artificial Sequence: Synthetic oligonucleotide
auacacaguuguggaugac

SEQ ID NO: 828718 - RNA, 19 nt, Artificial Sequence
  Description of Artificial Sequence: Synthetic oligonucleotide
cgcaacaccaucgaaacug

SEQ ID NO: 828719 - RNA, 19 nt, Artificial Sequence
  Description of Artificial Sequence: Synthetic oligonucleotide
gaguucauacacacuucga

SEQ ID NO: 828720 - RNA, 19 nt, Artificial Sequence
  Description of Artificial Sequence: Synthetic oligonucleotide
ucgaagcauuccacucuga

SEQ ID NO: 828721 - RNA, 19 nt, Artificial Sequence
  Description of Artificial Sequence: Synthetic oligonucleotide
ucaugagauccgacauaaa

SEQ ID NO: 828722 - RNA, 19 nt, Artificial Sequence
  Description of Artificial Sequence: Synthetic oligonucleotide
uaccgcuggcagcaccgag

SEQ ID NO: 828723 - RNA, 19 nt, Artificial Sequence
  Description of Artificial Sequence: Synthetic oligonucleotide
caguagagacgauguggac

SEQ ID NO: 828724 - RNA, 19 nt, Artificial Sequence
  Description of Artificial Sequence: Synthetic oligonucleotide
ugcaaacguaccgcuggca

SEQ ID NO: 828725 - RNA, 19 nt, Artificial Sequence
  Description of Artificial Sequence: Synthetic oligonucleotide
agacuuccauaaaugcugu

SEQ ID NO: 828726 - RNA, 19 nt, Artificial Sequence
  Description of Artificial Sequence: Synthetic oligonucleotide
agagcgucccuccgcauuu

SEQ ID NO: 828727 - RNA, 19 nt, Artificial Sequence
  Description of Artificial Sequence: Synthetic oligonucleotide
cauaaaugucuagagcaua

SEQ ID NO: 828728 - RNA, 19 nt, Artificial Sequence
  Description of Artificial Sequence: Synthetic oligonucleotide
ggguguugcauacacccuc

SEQ ID NO: 828729 - RNA, 19 nt, Artificial Sequence
  Description of Artificial Sequence: Synthetic oligonucleotide
cuguggaauuaaauccaga

SEQ ID NO: 828730 - RNA, 19 nt, Artificial Sequence
  Description of Artificial Sequence: Synthetic oligonucleotide
guccccgaaguguagcaca

SEQ ID NO: 828731 - RNA, 19 nt, Artificial Sequence
  Description of Artificial Sequence: Synthetic oligonucleotide
auaugcuccaggagcccag

SEQ ID NO: 828732 - RNA, 19 nt, Artificial Sequence
  Description of Artificial Sequence: Synthetic oligonucleotide
aucgacucccagaccacag

SEQ ID NO: 828733 - RNA, 19 nt, Artificial Sequence
  Description of Artificial Sequence: Synthetic oligonucleotide
acucccaguagcaggauuu

SEQ ID NO: 828734 - RNA, 19 nt, Artificial Sequence
  Description of Artificial Sequence: Synthetic oligonucleotide
uccaccggaggugaccuuc

SEQ ID NO: 828735 - RNA, 19 nt, Artificial Sequence
  Description of Artificial Sequence: Synthetic oligonucleotide
cuucacucugugggagugg

SEQ ID NO: 828736 - RNA, 19 nt, Artificial Sequence
  Description of Artificial Sequence: Synthetic oligonucleotide
gauguucaggcuugccgcu

SEQ ID NO: 828737 - RNA, 19 nt, Artificial Sequence
  Description of Artificial Sequence: Synthetic oligonucleotide
auagcuuuauaaagacguu

SEQ ID NO: 828738 - RNA, 19 nt, Artificial Sequence
  Description of Artificial Sequence: Synthetic oligonucleotide
agguauggacgugccagug

SEQ ID NO: 828739 - RNA, 19 nt, Artificial Sequence
  Description of Artificial Sequence: Synthetic oligonucleotide
cagaauagacuuccauaaa

SEQ ID NO: 828740 - RNA, 19 nt, Artificial Sequence
  Description of Artificial Sequence: Synthetic oligonucleotide
gaacauaaacuaauccauu

SEQ ID NO: 828741 - RNA, 19 nt, Artificial Sequence
  Description of Artificial Sequence: Synthetic oligonucleotide
ugcuggucaugagauccga

SEQ ID NO: 828742 - RNA, 19 nt, Artificial Sequence
  Description of Artificial Sequence: Synthetic oligonucleotide
auggcgggugagcuuuuca

SEQ ID NO: 828743 - RNA, 19 nt, Artificial Sequence
  Description of Artificial Sequence: Synthetic oligonucleotide
cuucgaagcauuccacucu

SEQ ID NO: 828744 - RNA, 19 nt, Artificial Sequence
  Description of Artificial Sequence: Synthetic oligonucleotide
aacguaccgcuggcagcac

SEQ ID NO: 828745 - RNA, 19 nt, Artificial Sequence
  Description of Artificial Sequence: Synthetic oligonucleotide
guuagucuguggaauuaaa

SEQ ID NO: 828746 - RNA, 19 nt, Artificial Sequence
  Description of Artificial Sequence: Synthetic oligonucleotide
gagauacauggcgaugaaa

SEQ ID NO: 828747 - RNA, 19 nt, Artificial Sequence
  Description of Artificial Sequence: Synthetic oligonucleotide
auagaacugcugagaauau

SEQ ID NO: 828748 - RNA, 19 nt, Artificial Sequence
  Description of Artificial Sequence: Synthetic oligonucleotide
ucgucucacuguugugggu

SEQ ID NO: 828749 - RNA, 19 nt, Artificial Sequence
  Description of Artificial Sequence: Synthetic oligonucleotide
caguaguaaacgcccagua

SEQ ID NO: 828750 - RNA, 19 nt, Artificial Sequence
  Description of Artificial Sequence: Synthetic oligonucleotide
gcauuuuagcuuccagaca

SEQ ID NO: 828751 - RNA, 19 nt, Artificial Sequence
  Description of Artificial Sequence: Synthetic oligonucleotide
gugucugaccuccaccucu

SEQ ID NO: 828752 - RNA, 19 nt, Artificial Sequence
  Description of Artificial Sequence: Synthetic oligonucleotide
gugggagccgauauacaca

SEQ ID NO: 828753 - RNA, 19 nt, Artificial Sequence
  Description of Artificial Sequence: Synthetic oligonucleotide
guguugcauacacccucgc

SEQ ID NO: 828754 - RNA, 19 nt, Artificial Sequence
  Description of Artificial Sequence: Synthetic oligonucleotide
cugaaugaugugguuguaa

SEQ ID NO: 828755 - RNA, 19 nt, Artificial Sequence
  Description of Artificial Sequence: Synthetic oligonucleotide
gugaguuuauguagucuaa

SEQ ID NO: 828756 - RNA, 19 nt, Artificial Sequence
  Description of Artificial Sequence: Synthetic oligonucleotide
guagcaggauuuacagcca

SEQ ID NO: 828757 - RNA, 19 nt, Artificial Sequence
  Description of Artificial Sequence: Synthetic oligonucleotide
aguaaacgcccaguauuuu

SEQ ID NO: 828758 - RNA, 19 nt, Artificial Sequence
  Description of Artificial Sequence: Synthetic oligonucleotide
gcugugaguuuauguaguc

SEQ ID NO: 828759 - RNA, 19 nt, Artificial Sequence
  Description of Artificial Sequence: Synthetic oligonucleotide
cgaagcauuccacucugag

SEQ ID NO: 828760 - RNA, 19 nt, Artificial Sequence
  Description of Artificial Sequence: Synthetic oligonucleotide
gguauggacgugccaguga

SEQ ID NO: 828761 - RNA, 19 nt, Artificial Sequence
  Description of Artificial Sequence: Synthetic oligonucleotide
agacaaaagcugacucccu

SEQ ID NO: 828762 - RNA, 19 nt, Artificial Sequence
  Description of Artificial Sequence: Synthetic oligonucleotide
cucgcuguagucucaaauu

SEQ ID NO: 828763 - RNA, 19 nt, Artificial Sequence
  Description of Artificial Sequence: Synthetic oligonucleotide
caguaagaguccccgaagu

SEQ ID NO: 828764 - RNA, 19 nt, Artificial Sequence
  Description of Artificial Sequence: Synthetic oligonucleotide
gaguaaaggucaacugccu

SEQ ID NO: 828765 - RNA, 19 nt, Artificial Sequence
  Description of Artificial Sequence: Synthetic oligonucleotide
ggagccgauauacacaguu

SEQ ID NO: 828766 - RNA, 19 nt, Artificial Sequence
  Description of Artificial Sequence: Synthetic oligonucleotide
cuccugagugagugaagca

SEQ ID NO: 828767 - RNA, 19 nt, Artificial Sequence
  Description of Artificial Sequence: Synthetic oligonucleotide
accggaggugaccuuccau

SEQ ID NO: 828768 - RNA, 19 nt, Artificial Sequence
  Description of Artificial Sequence: Synthetic oligonucleotide
gccgauauacacaguugug

SEQ ID NO: 828769 - RNA, 19 nt, Artificial Sequence
  Description of Artificial Sequence: Synthetic oligonucleotide
cacuucgaagcauuccacu

SEQ ID NO: 828770 - RNA, 19 nt, Artificial Sequence
  Description of Artificial Sequence: Synthetic oligonucleotide
gcugagauacauggcgaug

SEQ ID NO: 828771 - RNA, 19 nt, Artificial Sequence
  Description of Artificial Sequence: Synthetic oligonucleotide
agggcgugaguuggaaggu

SEQ ID NO: 828772 - RNA, 19 nt, Artificial Sequence
  Description of Artificial Sequence: Synthetic oligonucleotide
ccgcauuuuagcuuccaga

SEQ ID NO: 828773 - RNA, 19 nt, Artificial Sequence
  Description of Artificial Sequence: Synthetic oligonucleotide
cgucccuccgcauuuuagc

SEQ ID NO: 828774 - RNA, 19 nt, Artificial Sequence
  Description of Artificial Sequence: Synthetic oligonucleotide
guucaggcuugccgcuggc

SEQ ID NO: 828775 - RNA, 19 nt, Artificial Sequence
  Description of Artificial Sequence: Synthetic oligonucleotide
gaagggcaguguccuaacu

SEQ ID NO: 828776 - RNA, 19 nt, Artificial Sequence
  Description of Artificial Sequence: Synthetic oligonucleotide
guguguaaacacggucuga

SEQ ID NO: 828777 - RNA, 19 nt, Artificial Sequence
  Description of Artificial Sequence: Synthetic oligonucleotide
guguuagucuguggaauua

SEQ ID NO: 828778 - RNA, 19 nt, Artificial Sequence
  Description of Artificial Sequence: Synthetic oligonucleotide
caucuacacauuugccugu

SEQ ID NO: 828779 - RNA, 19 nt, Artificial Sequence
  Description of Artificial Sequence: Synthetic oligonucleotide
ggcgaugaaaagacugguc

SEQ ID NO: 828780 - RNA, 19 nt, Artificial Sequence
  Description of Artificial Sequence: Synthetic oligonucleotide
aggguguugcauacacccu

SEQ ID NO: 828781 - RNA, 19 nt, Artificial Sequence
  Description of Artificial Sequence: Synthetic oligonucleotide
uggacgugccagugaguuu

SEQ ID NO: 828782 - RNA, 19 nt, Artificial Sequence
  Description of Artificial Sequence: Synthetic oligonucleotide
gucaucuggaagggcguga

SEQ ID NO: 828783 - RNA, 19 nt, Artificial Sequence
  Description of Artificial Sequence: Synthetic oligonucleotide
gagugggagccgauauaca

SEQ ID NO: 828784 - RNA, 19 nt, Artificial Sequence
  Description of Artificial Sequence: Synthetic oligonucleotide
acccaauaauaagcaucga

SEQ ID NO: 828785 - RNA, 19 nt, Artificial Sequence
  Description of Artificial Sequence: Synthetic oligonucleotide
uagagacgauguggacuca

SEQ ID NO: 828786 - RNA, 19 nt, Artificial Sequence
  Description of Artificial Sequence: Synthetic oligonucleotide
ccaccucucucgcaacacc

SEQ ID NO: 828787 - RNA, 19 nt, Artificial Sequence
  Description of Artificial Sequence: Synthetic oligonucleotide
ggagugcuuccaaacuuca

SEQ ID NO: 828788 - RNA, 19 nt, Artificial Sequence
  Description of Artificial Sequence: Synthetic oligonucleotide
guguaaacacggucugaau

SEQ ID NO: 828789 - RNA, 19 nt, Artificial Sequence
  Description of Artificial Sequence: Synthetic oligonucleotide
gauguggacucaggcucaa

SEQ ID NO: 828790 - RNA, 19 nt, Artificial Sequence
  Description of Artificial Sequence: Synthetic oligonucleotide
cugugaguuuauguagucu

SEQ ID NO: 828791 - RNA, 19 nt, Artificial Sequence
  Description of Artificial Sequence: Synthetic oligonucleotide
acgcaugcggaggauucaa

SEQ ID NO: 828792 - RNA, 19 nt, Artificial Sequence
  Description of Artificial Sequence: Synthetic oligonucleotide
caucgacucccagaccaca

SEQ ID NO: 828793 - RNA, 19 nt, Artificial Sequence
  Description of Artificial Sequence: Synthetic oligonucleotide
ccacaguuucccaucagua

SEQ ID NO: 828794 - RNA, 19 nt, Artificial Sequence
  Description of Artificial Sequence: Synthetic oligonucleotide
caggagugcuuccaaacuu

SEQ ID NO: 828795 - RNA, 19 nt, Artificial Sequence
  Description of Artificial Sequence: Synthetic oligonucleotide
gagcccagguauggacgug

SEQ ID NO: 828796 - RNA, 19 nt, Artificial Sequence
  Description of Artificial Sequence: Synthetic oligonucleotide
cacagccaaugcaaacgua

SEQ ID NO: 828797 - RNA, 19 nt, Artificial Sequence
  Description of Artificial Sequence: Synthetic oligonucleotide
ggagccacguggacuucag

SEQ ID NO: 828798 - RNA, 19 nt, Artificial Sequence
  Description of Artificial Sequence: Synthetic oligonucleotide
cucucgcaacaccaucgaa

SEQ ID NO: 828799 - RNA, 19 nt, Artificial Sequence
  Description of Artificial Sequence: Synthetic oligonucleotide
ccucucucgcaacaccauc

SEQ ID NO: 828800 - RNA, 19 nt, Artificial Sequence
  Description of Artificial Sequence: Synthetic oligonucleotide
caccaucgaaacugguggu

SEQ ID NO: 828801 - RNA, 19 nt, Artificial Sequence
  Description of Artificial Sequence: Synthetic oligonucleotide
gcaggguuucacugcuaca

SEQ ID NO: 828802 - RNA, 19 nt, Artificial Sequence
  Description of Artificial Sequence: Synthetic oligonucleotide
acccuaacuuuggcuuaca

SEQ ID NO: 828803 - RNA, 19 nt, Artificial Sequence
  Description of Artificial Sequence: Synthetic oligonucleotide
cagguauggacgugccagu

SEQ ID NO: 828804 - RNA, 19 nt, Artificial Sequence
  Description of Artificial Sequence: Synthetic oligonucleotide
ggacgugccagugaguuuu

SEQ ID NO: 828805 - RNA, 19 nt, Artificial Sequence
  Description of Artificial Sequence: Synthetic oligonucleotide
gcucaaacauggagaagaa

SEQ ID NO: 828806 - RNA, 19 nt, Artificial Sequence
  Description of Artificial Sequence: Synthetic oligonucleotide
ccagauguucaggcuugcc

SEQ ID NO: 828807 - RNA, 19 nt, Artificial Sequence
  Description of Artificial Sequence: Synthetic oligonucleotide
ccaccggaggugaccuucc

SEQ ID NO: 828808 - RNA, 19 nt, Artificial Sequence
  Description of Artificial Sequence: Synthetic oligonucleotide
cccgaaguguagcacagua

SEQ ID NO: 828809 - RNA, 19 nt, Artificial Sequence
  Description of Artificial Sequence: Synthetic oligonucleotide
cauggcgggugagcuuuuc

SEQ ID NO: 828810 - RNA, 19 nt, Artificial Sequence
  Description of Artificial Sequence: Synthetic oligonucleotide
cacgcaugcggaggauuca

SEQ ID NO: 828811 - RNA, 19 nt, Artificial Sequence
  Description of Artificial Sequence: Synthetic oligonucleotide
ggaggugaccuuccaugcu

SEQ ID NO: 828812 - RNA, 19 nt, Artificial Sequence
  Description of Artificial Sequence: Synthetic oligonucleotide
gcgucccuccgcauuuuag

SEQ ID NO: 828813 - RNA, 19 nt, Artificial Sequence
  Description of Artificial Sequence: Synthetic oligonucleotide
gggcgugaguuggaaggug

SEQ ID NO: 828814 - RNA, 19 nt, Artificial Sequence
  Description of Artificial Sequence: Synthetic oligonucleotide
gcaugcggaggauucaauu

SEQ ID NO: 828815 - RNA, 19 nt, Artificial Sequence
  Description of Artificial Sequence: Synthetic oligonucleotide
agacacgcaugcggaggau

SEQ ID NO: 828816 - RNA, 19 nt, Artificial Sequence
  Description of Artificial Sequence: Synthetic oligonucleotide
gguaggauccauggcgggu

SEQ ID NO: 828817 - RNA, 19 nt, Artificial Sequence
  Description of Artificial Sequence: Synthetic oligonucleotide
ggaagggcgugaguuggaa

SEQ ID NO: 828818 - RNA, 19 nt, Artificial Sequence
  Description of Artificial Sequence: Synthetic oligonucleotide
cugacucccucugcucaga

SEQ ID NO: 828819 - RNA, 19 nt, Artificial Sequence
  Description of Artificial Sequence: Synthetic oligonucleotide
caaucucauugaggagcca

SEQ ID NO: 828820 - RNA, 19 nt, Artificial Sequence
  Description of Artificial Sequence: Synthetic oligonucleotide
gacacgcaugcggaggauu

SEQ ID NO: 828821 - RNA, 19 nt, Artificial Sequence
  Description of Artificial Sequence: Synthetic oligonucleotide
cuccgcauuuuagcuucca

SEQ ID NO: 828822 - RNA, 19 nt, Artificial Sequence
  Description of Artificial Sequence: Synthetic oligonucleotide
ccuaggcugugaguuuaug

SEQ ID NO: 828823 - RNA, 19 nt, Artificial Sequence
  Description of Artificial Sequence: Synthetic oligonucleotide
acccucgcuguagucucaa

SEQ ID NO: 828824 - RNA, 19 nt, Artificial Sequence
  Description of Artificial Sequence: Synthetic oligonucleotide
gcaucgacucccagaccac

SEQ ID NO: 828825 - RNA, 19 nt, Artificial Sequence
  Description of Artificial Sequence: Synthetic oligonucleotide
ggcgugaguuggaaggugu

SEQ ID NO: 828826 - RNA, 19 nt, Artificial Sequence
  Description of Artificial Sequence: Synthetic oligonucleotide
auguggacucaggcucaaa

SEQ ID NO: 828827 - RNA, 19 nt, Artificial Sequence
  Description of Artificial Sequence: Synthetic oligonucleotide
guaccgcuggcagcaccga

SEQ ID NO: 828828 - RNA, 19 nt, Artificial Sequence
  Description of Artificial Sequence: Synthetic oligonucleotide
caccggaggugaccuucca

SEQ ID NO: 828829 - RNA, 19 nt, Artificial Sequence
  Description of Artificial Sequence: Synthetic oligonucleotide
gcccagguauggacgugcc

SEQ ID NO: 828830 - RNA, 19 nt, Artificial Sequence
  Description of Artificial Sequence: Synthetic oligonucleotide
ccucgcuguagucucaaau

SEQ ID NO: 828831 - RNA, 19 nt, Artificial Sequence
  Description of Artificial Sequence: Synthetic oligonucleotide
cccuaacuuuggcuuacaa

SEQ ID NO: 828832 - RNA, 19 nt, Artificial Sequence
  Description of Artificial Sequence: Synthetic oligonucleotide
cgucucacuguugugggua

SEQ ID NO: 828833 - RNA, 19 nt, Artificial Sequence
  Description of Artificial Sequence: Synthetic oligonucleotide
cguuuccaacuaucucaca

SEQ ID NO: 828834 - RNA, 19 nt, Artificial Sequence
  Description of Artificial Sequence: Synthetic oligonucleotide
gcggaggauucaauucgau

SEQ ID NO: 828835 - RNA, 19 nt, Artificial Sequence
  Description of Artificial Sequence: Synthetic oligonucleotide
gcgugaguuggaagguguu

SEQ ID NO: 828836 - RNA, 19 nt, Artificial Sequence
  Description of Artificial Sequence: Synthetic oligonucleotide
cgaucucccaaaagcuguu

SEQ ID NO: 828837 - RNA, 19 nt, Artificial Sequence
  Description of Artificial Sequence: Synthetic oligonucleotide
cccucgcuguagucucaaa

SEQ ID NO: 828838 - RNA, 19 nt, Artificial Sequence
  Description of Artificial Sequence: Synthetic oligonucleotide
cgugaguuggaagguguuu

SEQ ID NO: 828839 - RNA, 19 nt, Artificial Sequence
  Description of Artificial Sequence: Synthetic oligonucleotide
cgcaugcggaggauucaau

SEQ ID NO: 828840 - RNA, 19 nt, Artificial Sequence
  Description of Artificial Sequence: Synthetic oligonucleotide
ccccgaaguguagcacagu

SEQ ID NO: 828841 - RNA, 19 nt, Artificial Sequence
  Description of Artificial Sequence: Synthetic oligonucleotide
ggcuugccgcuggcuuccu

SEQ ID NO: 828842 - RNA, 19 nt, Artificial Sequence
  Description of Artificial Sequence: Synthetic oligonucleotide
aaaguaauuggagauggcc

SEQ ID NO: 828843 - RNA, 19 nt, Artificial Sequence
  Description of Artificial Sequence: Synthetic oligonucleotide
uccuaggucaucuuuaagg

SEQ ID NO: 828844 - RNA, 19 nt, Artificial Sequence
  Description of Artificial Sequence: Synthetic oligonucleotide
aaaagaacgccacugggug

SEQ ID NO: 828845 - RNA, 19 nt, Artificial Sequence
  Description of Artificial Sequence: Synthetic oligonucleotide
cuuaacagggacaaugccg

SEQ ID NO: 828846 - RNA, 19 nt, Artificial Sequence
  Description of Artificial Sequence: Synthetic oligonucleotide
acuucguuaaaguaaaacu

SEQ ID NO: 828847 - RNA, 19 nt, Artificial Sequence
  Description of Artificial Sequence: Synthetic oligonucleotide
ugaacucacacaaauuuca

SEQ ID NO: 828848 - RNA, 19 nt, Artificial Sequence
  Description of Artificial Sequence: Synthetic oligonucleotide
accaauccgauauuuaggg

SEQ ID NO: 828849 - RNA, 19 nt, Artificial Sequence
  Description of Artificial Sequence: Synthetic oligonucleotide
auuuuagaaggccgaaagc

SEQ ID NO: 828850 - RNA, 19 nt, Artificial Sequence
  Description of Artificial Sequence: Synthetic oligonucleotide
uggauauucggcaacacac

SEQ ID NO: 828851 - RNA, 19 nt, Artificial Sequence
  Description of Artificial Sequence: Synthetic oligonucleotide
uaaagcgucacaacacacg

SEQ ID NO: 828852 - RNA, 19 nt, Artificial Sequence
  Description of Artificial Sequence: Synthetic oligonucleotide
aggacgacauaguagacac

SEQ ID NO: 828853 - RNA, 19 nt, Artificial Sequence
  Description of Artificial Sequence: Synthetic oligonucleotide
uuaacagggacaaugccga

SEQ ID NO: 828854 - RNA, 19 nt, Artificial Sequence
  Description of Artificial Sequence: Synthetic oligonucleotide
caaaaguuaggucuguugc

SEQ ID NO: 828855 - RNA, 19 nt, Artificial Sequence
  Description of Artificial Sequence: Synthetic oligonucleotide
guaaacaaaaguuaggucu

SEQ ID NO: 828856 - RNA, 19 nt, Artificial Sequence
  Description of Artificial Sequence: Synthetic oligonucleotide
ucaaaucuaucauuaagac

SEQ ID NO: 828857 - RNA, 19 nt, Artificial Sequence
  Description of Artificial Sequence: Synthetic oligonucleotide
uuaaggacaacagauucag

SEQ ID NO: 828858 - RNA, 19 nt, Artificial Sequence
  Description of Artificial Sequence: Synthetic oligonucleotide
uuacuaaaugaacucacac

SEQ ID NO: 828859 - RNA, 19 nt, Artificial Sequence
  Description of Artificial Sequence: Synthetic oligonucleotide
acagcuaacaggaugugcc

SEQ ID NO: 828860 - RNA, 19 nt, Artificial Sequence
  Description of Artificial Sequence: Synthetic oligonucleotide
aaacuuggcgggcaggccg

SEQ ID NO: 828861 - RNA, 19 nt, Artificial Sequence
  Description of Artificial Sequence: Synthetic oligonucleotide
uggacuauuacagugaauc

SEQ ID NO: 828862 - RNA, 19 nt, Artificial Sequence
  Description of Artificial Sequence: Synthetic oligonucleotide
aacgcagugcuuaacaggg

SEQ ID NO: 828863 - RNA, 19 nt, Artificial Sequence
  Description of Artificial Sequence: Synthetic oligonucleotide
aacuggaaccacucgcggc

SEQ ID NO: 828864 - RNA, 19 nt, Artificial Sequence
  Description of Artificial Sequence: Synthetic oligonucleotide
uacuaaaugaacucacaca

SEQ ID NO: 828865 - RNA, 19 nt, Artificial Sequence
  Description of Artificial Sequence: Synthetic oligonucleotide
aaagcgucacaacacacgu

SEQ ID NO: 828866 - RNA, 19 nt, Artificial Sequence
  Description of Artificial Sequence: Synthetic oligonucleotide
aaugccgacuaucagugcu

SEQ ID NO: 828867 - RNA, 19 nt, Artificial Sequence
  Description of Artificial Sequence: Synthetic oligonucleotide
uggaggacgacauaguaga

SEQ ID NO: 828868 - RNA, 19 nt, Artificial Sequence
  Description of Artificial Sequence: Synthetic oligonucleotide
uugguaggauugauuaugg

SEQ ID NO: 828869 - RNA, 19 nt, Artificial Sequence
  Description of Artificial Sequence: Synthetic oligonucleotide
caauccgauauuuagggug

SEQ ID NO: 828870 - RNA, 19 nt, Artificial Sequence
  Description of Artificial Sequence: Synthetic oligonucleotide
acaguaaagcgucacaaca

SEQ ID NO: 828871 - RNA, 19 nt, Artificial Sequence
  Description of Artificial Sequence: Synthetic oligonucleotide
acugauuucacugugaaua

SEQ ID NO: 828872 - RNA, 19 nt, Artificial Sequence
  Description of Artificial Sequence: Synthetic oligonucleotide
aauccgauauuuagggugg

SEQ ID NO: 828873 - RNA, 19 nt, Artificial Sequence
  Description of Artificial Sequence: Synthetic oligonucleotide
gauauucggcaacacaccc

SEQ ID NO: 828874 - RNA, 19 nt, Artificial Sequence
  Description of Artificial Sequence: Synthetic oligonucleotide
cuuuacuaaaugaacucac

SEQ ID NO: 828875 - RNA, 19 nt, Artificial Sequence
  Description of Artificial Sequence: Synthetic oligonucleotide
gaugccuaugcucucacug

SEQ ID NO: 828876 - RNA, 19 nt, Artificial Sequence
  Description of Artificial Sequence: Synthetic oligonucleotide
uuucccuagaugaaugaga

SEQ ID NO: 828877 - RNA, 19 nt, Artificial Sequence
  Description of Artificial Sequence: Synthetic oligonucleotide
gguaggauugauuauggcc

SEQ ID NO: 828878 - RNA, 19 nt, Artificial Sequence
  Description of Artificial Sequence: Synthetic oligonucleotide
gguuaacuaagucagacac

SEQ ID NO: 828879 - RNA, 19 nt, Artificial Sequence
  Description of Artificial Sequence: Synthetic oligonucleotide
ucgcuagcaacucaggaug

SEQ ID NO: 828880 - RNA, 19 nt, Artificial Sequence
  Description of Artificial Sequence: Synthetic oligonucleotide
uuacagugaaucacaaacu

SEQ ID NO: 828881 - RNA, 19 nt, Artificial Sequence
  Description of Artificial Sequence: Synthetic oligonucleotide
uacacgguuuugauggagg

SEQ ID NO: 828882 - RNA, 19 nt, Artificial Sequence
  Description of Artificial Sequence: Synthetic oligonucleotide
uguguuaaucaggacuucg

SEQ ID NO: 828883 - RNA, 19 nt, Artificial Sequence
  Description of Artificial Sequence: Synthetic oligonucleotide
uucccuagaugaaugagac

SEQ ID NO: 828884 - RNA, 19 nt, Artificial Sequence
  Description of Artificial Sequence: Synthetic oligonucleotide
gaacgcagugcuuaacagg

SEQ ID NO: 828885 - RNA, 19 nt, Artificial Sequence
  Description of Artificial Sequence: Synthetic oligonucleotide
acgguuuugauggaggacg

SEQ ID NO: 828886 - RNA, 19 nt, Artificial Sequence
  Description of Artificial Sequence: Synthetic oligonucleotide
acuggguguacaguaaagc

SEQ ID NO: 828887 - RNA, 19 nt, Artificial Sequence
  Description of Artificial Sequence: Synthetic oligonucleotide
auugguaggauugauuaug

SEQ ID NO: 828888 - RNA, 19 nt, Artificial Sequence
  Description of Artificial Sequence: Synthetic oligonucleotide
ugcuuaacagggacaaugc

SEQ ID NO: 828889 - RNA, 19 nt, Artificial Sequence
  Description of Artificial Sequence: Synthetic oligonucleotide
uuuagaaggccgaaagcaa

SEQ ID NO: 828890 - RNA, 19 nt, Artificial Sequence
  Description of Artificial Sequence: Synthetic oligonucleotide
ccuagguuaacuaagucag

SEQ ID NO: 828891 - RNA, 19 nt, Artificial Sequence
  Description of Artificial Sequence: Synthetic oligonucleotide
aguuuaacacuuuacuaaa

SEQ ID NO: 828892 - RNA, 19 nt, Artificial Sequence
  Description of Artificial Sequence: Synthetic oligonucleotide
uucuucgcuagcaacucag

SEQ ID NO: 828893 - RNA, 19 nt, Artificial Sequence
  Description of Artificial Sequence: Synthetic oligonucleotide
cacacguuacaaauggggc

SEQ ID NO: 828894 - RNA, 19 nt, Artificial Sequence
  Description of Artificial Sequence: Synthetic oligonucleotide
uaugcucucacugucaaaa

SEQ ID NO: 828895 - RNA, 19 nt, Artificial Sequence
  Description of Artificial Sequence: Synthetic oligonucleotide
agacuggacuauuacagug

SEQ ID NO: 828896 - RNA, 19 nt, Artificial Sequence
  Description of Artificial Sequence: Synthetic oligonucleotide
aaguaauuggagauggccu

SEQ ID NO: 828897 - RNA, 19 nt, Artificial Sequence
  Description of Artificial Sequence: Synthetic oligonucleotide
ucaaagccggcuaaauuac

SEQ ID NO: 828898 - RNA, 19 nt, Artificial Sequence
  Description of Artificial Sequence: Synthetic oligonucleotide
uugauguaccgcagcaucc

SEQ ID NO: 828899 - RNA, 19 nt, Artificial Sequence
  Description of Artificial Sequence: Synthetic oligonucleotide
gaccgagaggucuugguag

SEQ ID NO: 828900 - RNA, 19 nt, Artificial Sequence
  Description of Artificial Sequence: Synthetic oligonucleotide
uucuggccgaggaagaggc

SEQ ID NO: 828901 - RNA, 19 nt, Artificial Sequence
  Description of Artificial Sequence: Synthetic oligonucleotide
uggaacgcagugcuuaaca

SEQ ID NO: 828902 - RNA, 19 nt, Artificial Sequence
  Description of Artificial Sequence: Synthetic oligonucleotide
aacucacacaaauuucaaa

SEQ ID NO: 828903 - RNA, 19 nt, Artificial Sequence
  Description of Artificial Sequence: Synthetic oligonucleotide
aggauggauauucggcaac

SEQ ID NO: 828904 - RNA, 19 nt, Artificial Sequence
  Description of Artificial Sequence: Synthetic oligonucleotide
gauuauggccuccaccuca

SEQ ID NO: 828905 - RNA, 19 nt, Artificial Sequence
  Description of Artificial Sequence: Synthetic oligonucleotide
uuuucccuagaugaaugag

SEQ ID NO: 828906 - RNA, 19 nt, Artificial Sequence
  Description of Artificial Sequence: Synthetic oligonucleotide
uguuguacugucugcgcug

SEQ ID NO: 828907 - RNA, 19 nt, Artificial Sequence
  Description of Artificial Sequence: Synthetic oligonucleotide
guuaacuaagucagacacg

SEQ ID NO: 828908 - RNA, 19 nt, Artificial Sequence
  Description of Artificial Sequence: Synthetic oligonucleotide
ugauguaccgcagcauccg

SEQ ID NO: 828909 - RNA, 19 nt, Artificial Sequence
  Description of Artificial Sequence: Synthetic oligonucleotide
acacguuacaaauggggcu

SEQ ID NO: 828910 - RNA, 19 nt, Artificial Sequence
  Description of Artificial Sequence: Synthetic oligonucleotide
gacuucguuaaaguaaaac

SEQ ID NO: 828911 - RNA, 19 nt, Artificial Sequence
  Description of Artificial Sequence: Synthetic oligonucleotide
aaagccggcuaaauuacug

SEQ ID NO: 828912 - RNA, 19 nt, Artificial Sequence
  Description of Artificial Sequence: Synthetic oligonucleotide
caguaaagcgucacaacac

SEQ ID NO: 828913 - RNA, 19 nt, Artificial Sequence
  Description of Artificial Sequence: Synthetic oligonucleotide
uguuaaucaggacuucguu

SEQ ID NO: 828914 - RNA, 19 nt, Artificial Sequence
  Description of Artificial Sequence: Synthetic oligonucleotide
ccgaaagcaaucaaacugg

SEQ ID NO: 828915 - RNA, 19 nt, Artificial Sequence
  Description of Artificial Sequence: Synthetic oligonucleotide
cacauagaugccuaugcuc

SEQ ID NO: 828916 - RNA, 19 nt, Artificial Sequence
  Description of Artificial Sequence: Synthetic oligonucleotide
ucuucgcuagcaacucagg

SEQ ID NO: 828917 - RNA, 19 nt, Artificial Sequence
  Description of Artificial Sequence: Synthetic oligonucleotide
aguaauuggagauggccuu

SEQ ID NO: 828918 - RNA, 19 nt, Artificial Sequence
  Description of Artificial Sequence: Synthetic oligonucleotide
gguucuagggaucacuggc

SEQ ID NO: 828919 - RNA, 19 nt, Artificial Sequence
  Description of Artificial Sequence: Synthetic oligonucleotide
uucgcuagcaacucaggau

SEQ ID NO: 828920 - RNA, 19 nt, Artificial Sequence
  Description of Artificial Sequence: Synthetic oligonucleotide
uacaguaaagcgucacaac

SEQ ID NO: 828921 - RNA, 19 nt, Artificial Sequence
  Description of Artificial Sequence: Synthetic oligonucleotide
aagccggcuaaauuacuga

SEQ ID NO: 828922 - RNA, 19 nt, Artificial Sequence
  Description of Artificial Sequence: Synthetic oligonucleotide
aaagaacgccacugggugu

SEQ ID NO: 828923 - RNA, 19 nt, Artificial Sequence
  Description of Artificial Sequence: Synthetic oligonucleotide
auauucggcaacacacccc

SEQ ID NO: 828924 - RNA, 19 nt, Artificial Sequence
  Description of Artificial Sequence: Synthetic oligonucleotide
uccugcuacuuccaagggc

SEQ ID NO: 828925 - RNA, 19 nt, Artificial Sequence
  Description of Artificial Sequence: Synthetic oligonucleotide
uucuuagacuuccgggccc

SEQ ID NO: 828926 - RNA, 19 nt, Artificial Sequence
  Description of Artificial Sequence: Synthetic oligonucleotide
agcgucacaacacacguua

SEQ ID NO: 828927 - RNA, 19 nt, Artificial Sequence
  Description of Artificial Sequence: Synthetic oligonucleotide
uccuuuuagcagcugguuc

SEQ ID NO: 828928 - RNA, 19 nt, Artificial Sequence
  Description of Artificial Sequence: Synthetic oligonucleotide
aaauccccuagguuaacua

SEQ ID NO: 828929 - RNA, 19 nt, Artificial Sequence
  Description of Artificial Sequence: Synthetic oligonucleotide
ugguucuagggaucacugg

SEQ ID NO: 828930 - RNA, 19 nt, Artificial Sequence
  Description of Artificial Sequence: Synthetic oligonucleotide
aggccgaaagcaaucaaac

SEQ ID NO: 828931 - RNA, 19 nt, Artificial Sequence
  Description of Artificial Sequence: Synthetic oligonucleotide
gacgacauaguagacacaa

SEQ ID NO: 828932 - RNA, 19 nt, Artificial Sequence
  Description of Artificial Sequence: Synthetic oligonucleotide
auggauauucggcaacaca

SEQ ID NO: 828933 - RNA, 19 nt, Artificial Sequence
  Description of Artificial Sequence: Synthetic oligonucleotide
gugcuuaacagggacaaug

SEQ ID NO: 828934 - RNA, 19 nt, Artificial Sequence
  Description of Artificial Sequence: Synthetic oligonucleotide
cugccaauggaugggaagg

SEQ ID NO: 828935 - RNA, 19 nt, Artificial Sequence
  Description of Artificial Sequence: Synthetic oligonucleotide
uucuagggaucacuggccu

SEQ ID NO: 828936 - RNA, 19 nt, Artificial Sequence
  Description of Artificial Sequence: Synthetic oligonucleotide
auuaaggacaacagauuca

SEQ ID NO: 828937 - RNA, 19 nt, Artificial Sequence
  Description of Artificial Sequence: Synthetic oligonucleotide
agguuaacuaagucagaca

SEQ ID NO: 828938 - RNA, 19 nt, Artificial Sequence
  Description of Artificial Sequence: Synthetic oligonucleotide
guaggauugauuauggccu

SEQ ID NO: 828939 - RNA, 19 nt, Artificial Sequence
  Description of Artificial Sequence: Synthetic oligonucleotide
acuaagucagacacggucu

SEQ ID NO: 828940 - RNA, 19 nt, Artificial Sequence
  Description of Artificial Sequence: Synthetic oligonucleotide
uuucacugugaauaagguu

SEQ ID NO: 828941 - RNA, 19 nt, Artificial Sequence
  Description of Artificial Sequence: Synthetic oligonucleotide
cugugaauaagguucagcu

SEQ ID NO: 828942 - RNA, 19 nt, Artificial Sequence
  Description of Artificial Sequence: Synthetic oligonucleotide
acgguaaagccaucugcag

SEQ ID NO: 828943 - RNA, 19 nt, Artificial Sequence
  Description of Artificial Sequence: Synthetic oligonucleotide
cuagggaucacuggccuag

SEQ ID NO: 828944 - RNA, 19 nt, Artificial Sequence
  Description of Artificial Sequence: Synthetic oligonucleotide
auauuuaggguggccuuuc

SEQ ID NO: 828945 - RNA, 19 nt, Artificial Sequence
  Description of Artificial Sequence: Synthetic oligonucleotide
gacgguaaagccaucugca

SEQ ID NO: 828946 - RNA, 19 nt, Artificial Sequence
  Description of Artificial Sequence: Synthetic oligonucleotide
ugcuucgggaacccauucc

SEQ ID NO: 828947 - RNA, 19 nt, Artificial Sequence
  Description of Artificial Sequence: Synthetic oligonucleotide
ggaaaggagucccaccucc

SEQ ID NO: 828948 - RNA, 19 nt, Artificial Sequence
  Description of Artificial Sequence: Synthetic oligonucleotide
ccucauuuucccuagauga

SEQ ID NO: 828949 - RNA, 19 nt, Artificial Sequence
  Description of Artificial Sequence: Synthetic oligonucleotide
cuauggugacuccuuuuag

SEQ ID NO: 828950 - RNA, 19 nt, Artificial Sequence
  Description of Artificial Sequence: Synthetic oligonucleotide
cacaaaguaauuggagaug

SEQ ID NO: 828951 - RNA, 19 nt, Artificial Sequence
  Description of Artificial Sequence: Synthetic oligonucleotide
aacagggacaaugccgacu

SEQ ID NO: 828952 - RNA, 19 nt, Artificial Sequence
  Description of Artificial Sequence: Synthetic oligonucleotide
uccccuagguuaacuaagu

SEQ ID NO: 828953 - RNA, 19 nt, Artificial Sequence
  Description of Artificial Sequence: Synthetic oligonucleotide
agggacaaugccgacuauc

SEQ ID NO: 828954 - RNA, 19 nt, Artificial Sequence
  Description of Artificial Sequence: Synthetic oligonucleotide
ucaucguuggccacagcua

SEQ ID NO: 828955 - RNA, 19 nt, Artificial Sequence
  Description of Artificial Sequence: Synthetic oligonucleotide
aggaaaggagucccaccuc

SEQ ID NO: 828956 - RNA, 19 nt, Artificial Sequence
  Description of Artificial Sequence: Synthetic oligonucleotide
auggaggacgacauaguag

SEQ ID NO: 828957 - RNA, 19 nt, Artificial Sequence
  Description of Artificial Sequence: Synthetic oligonucleotide
uccgcuggaaccagugaac

SEQ ID NO: 828958 - RNA, 19 nt, Artificial Sequence
  Description of Artificial Sequence: Synthetic oligonucleotide
aaagcacaaaguacacggu

SEQ ID NO: 828959 - RNA, 19 nt, Artificial Sequence
  Description of Artificial Sequence: Synthetic oligonucleotide
acuggacuauuacagugaa

SEQ ID NO: 828960 - RNA, 19 nt, Artificial Sequence
  Description of Artificial Sequence: Synthetic oligonucleotide
auaaaauccccuagguuaa

SEQ ID NO: 828961 - RNA, 19 nt, Artificial Sequence
  Description of Artificial Sequence: Synthetic oligonucleotide
ugguaggauugauuauggc

SEQ ID NO: 828962 - RNA, 19 nt, Artificial Sequence
  Description of Artificial Sequence: Synthetic oligonucleotide
uagcaacucaggauggaua

SEQ ID NO: 828963 - RNA, 19 nt, Artificial Sequence
  Description of Artificial Sequence: Synthetic oligonucleotide
gcuaacagaaaacauuuua

SEQ ID NO: 828964 - RNA, 19 nt, Artificial Sequence
  Description of Artificial Sequence: Synthetic oligonucleotide
guuguacugucugcgcugg

SEQ ID NO: 828965 - RNA, 19 nt, Artificial Sequence
  Description of Artificial Sequence: Synthetic oligonucleotide
ggacgguaaagccaucugc

SEQ ID NO: 828966 - RNA, 19 nt, Artificial Sequence
  Description of Artificial Sequence: Synthetic oligonucleotide
gauguaccgcagcauccgc

SEQ ID NO: 828967 - RNA, 19 nt, Artificial Sequence
  Description of Artificial Sequence: Synthetic oligonucleotide
uccgaaguuccagaacagc

SEQ ID NO: 828968 - RNA, 19 nt, Artificial Sequence
  Description of Artificial Sequence: Synthetic oligonucleotide
ugaccgagaggucuuggua

SEQ ID NO: 828969 - RNA, 19 nt, Artificial Sequence
  Description of Artificial Sequence: Synthetic oligonucleotide
guugcaaauuuuaugauuu

SEQ ID NO: 828970 - RNA, 19 nt, Artificial Sequence
  Description of Artificial Sequence: Synthetic oligonucleotide
acggucuggaacgcagugc

SEQ ID NO: 828971 - RNA, 19 nt, Artificial Sequence
  Description of Artificial Sequence: Synthetic oligonucleotide
ggaacgcagugcuuaacag

SEQ ID NO: 828972 - RNA, 19 nt, Artificial Sequence
  Description of Artificial Sequence: Synthetic oligonucleotide
uauuuaggguggccuuucu

SEQ ID NO: 828973 - RNA, 19 nt, Artificial Sequence
  Description of Artificial Sequence: Synthetic oligonucleotide
gucagacacggucuggaac

SEQ ID NO: 828974 - RNA, 19 nt, Artificial Sequence
  Description of Artificial Sequence: Synthetic oligonucleotide
ugcuacuuccaagggcccg

SEQ ID NO: 828975 - RNA, 19 nt, Artificial Sequence
  Description of Artificial Sequence: Synthetic oligonucleotide
cacuggguguacaguaaag

SEQ ID NO: 828976 - RNA, 19 nt, Artificial Sequence
  Description of Artificial Sequence: Synthetic oligonucleotide
aggacgguaaagccaucug

SEQ ID NO: 828977 - RNA, 19 nt, Artificial Sequence
  Description of Artificial Sequence: Synthetic oligonucleotide
augugccggggagugaccc

SEQ ID NO: 828978 - RNA, 19 nt, Artificial Sequence
  Description of Artificial Sequence: Synthetic oligonucleotide
guucuagggaucacuggcc

SEQ ID NO: 828979 - RNA, 19 nt, Artificial Sequence
  Description of Artificial Sequence: Synthetic oligonucleotide
ucguuggccacagcuaaca

SEQ ID NO: 828980 - RNA, 19 nt, Artificial Sequence
  Description of Artificial Sequence: Synthetic oligonucleotide
gaggacgacauaguagaca

SEQ ID NO: 828981 - RNA, 19 nt, Artificial Sequence
  Description of Artificial Sequence: Synthetic oligonucleotide
guacaguaaagcgucacaa

SEQ ID NO: 828982 - RNA, 19 nt, Artificial Sequence
  Description of Artificial Sequence: Synthetic oligonucleotide
aagaacgccacugggugua

SEQ ID NO: 828983 - RNA, 19 nt, Artificial Sequence
  Description of Artificial Sequence: Synthetic oligonucleotide
guaaagcgucacaacacac

SEQ ID NO: 828984 - RNA, 19 nt, Artificial Sequence
  Description of Artificial Sequence: Synthetic oligonucleotide
gaugacuccugccuuggcu

SEQ ID NO: 828985 - RNA, 19 nt, Artificial Sequence
  Description of Artificial Sequence: Synthetic oligonucleotide
accgcggcucgacauggcg

SEQ ID NO: 828986 - RNA, 19 nt, Artificial Sequence
  Description of Artificial Sequence: Synthetic oligonucleotide
ugugccggggagugacccg

SEQ ID NO: 828987 - RNA, 19 nt, Artificial Sequence
  Description of Artificial Sequence: Synthetic oligonucleotide
gauggauauucggcaacac

SEQ ID NO: 828988 - RNA, 19 nt, Artificial Sequence
  Description of Artificial Sequence: Synthetic oligonucleotide
cucgcuucccgcccgcgcg

SEQ ID NO: 828989 - RNA, 19 nt, Artificial Sequence
  Description of Artificial Sequence: Synthetic oligonucleotide
ucuggaacgcagugcuuaa

SEQ ID NO: 828990 - RNA, 19 nt, Artificial Sequence
  Description of Artificial Sequence: Synthetic oligonucleotide
uacugauuucacugugaau

SEQ ID NO: 828991 - RNA, 19 nt, Artificial Sequence
  Description of Artificial Sequence: Synthetic oligonucleotide
ucgcuucuucgcuagcaac

SEQ ID NO: 828992 - RNA, 19 nt, Artificial Sequence
  Description of Artificial Sequence: Synthetic oligonucleotide
cauagaugccuaugcucuc

SEQ ID NO: 828993 - RNA, 19 nt, Artificial Sequence
  Description of Artificial Sequence: Synthetic oligonucleotide
gcuuaacagggacaaugcc

SEQ ID NO: 828994 - RNA, 19 nt, Artificial Sequence
  Description of Artificial Sequence: Synthetic oligonucleotide
ggauauucggcaacacacc

SEQ ID NO: 828995 - RNA, 19 nt, Artificial Sequence
  Description of Artificial Sequence: Synthetic oligonucleotide
accgagaggucuugguaga

SEQ ID NO: 828996 - RNA, 19 nt, Artificial Sequence
  Description of Artificial Sequence: Synthetic oligonucleotide
cuucgcuagcaacucagga

SEQ ID NO: 828997 - RNA, 19 nt, Artificial Sequence
  Description of Artificial Sequence: Synthetic oligonucleotide
agccggcuaaauuacugau

SEQ ID NO: 828998 - RNA, 19 nt, Artificial Sequence
  Description of Artificial Sequence: Synthetic oligonucleotide
gcuaaauuacugauuucac

SEQ ID NO: 828999 - RNA, 19 nt, Artificial Sequence
  Description of Artificial Sequence: Synthetic oligonucleotide
aaucuaucauuaagacaaa

SEQ ID NO: 829000 - RNA, 19 nt, Artificial Sequence
  Description of Artificial Sequence: Synthetic oligonucleotide
auuuaggguggccuuucuu

SEQ ID NO: 829001 - RNA, 19 nt, Artificial Sequence
  Description of Artificial Sequence: Synthetic oligonucleotide
auccgauauuuaggguggc

SEQ ID NO: 829002 - RNA, 19 nt, Artificial Sequence
  Description of Artificial Sequence: Synthetic oligonucleotide
cucaucguuggccacagcu

SEQ ID NO: 829003 - RNA, 19 nt, Artificial Sequence
  Description of Artificial Sequence: Synthetic oligonucleotide
aggacggcagccauguaca

SEQ ID NO: 829004 - RNA, 19 nt, Artificial Sequence
  Description of Artificial Sequence: Synthetic oligonucleotide
ggacuauuacagugaauca

SEQ ID NO: 829005 - RNA, 19 nt, Artificial Sequence
  Description of Artificial Sequence: Synthetic oligonucleotide
guacacgguuuugauggag

SEQ ID NO: 829006 - RNA, 19 nt, Artificial Sequence
  Description of Artificial Sequence: Synthetic oligonucleotide
cuagguuaacuaagucaga

SEQ ID NO: 829007 - RNA, 19 nt, Artificial Sequence
  Description of Artificial Sequence: Synthetic oligonucleotide
cuuagccaccgguuucuuc

SEQ ID NO: 829008 - RNA, 19 nt, Artificial Sequence
  Description of Artificial Sequence: Synthetic oligonucleotide
caucguuggccacagcuaa

SEQ ID NO: 829009 - RNA, 19 nt, Artificial Sequence
  Description of Artificial Sequence: Synthetic oligonucleotide
gaagaggcucuugguggag

SEQ ID NO: 829010 - RNA, 19 nt, Artificial Sequence
  Description of Artificial Sequence: Synthetic oligonucleotide
gggacgaggccugugcugg

SEQ ID NO: 829011 - RNA, 19 nt, Artificial Sequence
  Description of Artificial Sequence: Synthetic oligonucleotide
ggacaaugccgacuaucag

SEQ ID NO: 829012 - RNA, 19 nt, Artificial Sequence
  Description of Artificial Sequence: Synthetic oligonucleotide
agccaccgguuucuucugg

SEQ ID NO: 829013 - RNA, 19 nt, Artificial Sequence
  Description of Artificial Sequence: Synthetic oligonucleotide
ucuagggaucacuggccua

SEQ ID NO: 829014 - RNA, 19 nt, Artificial Sequence
  Description of Artificial Sequence: Synthetic oligonucleotide
caagcucacgggcggcugc

SEQ ID NO: 829015 - RNA, 19 nt, Artificial Sequence
  Description of Artificial Sequence: Synthetic oligonucleotide
cuagaugaaugagacugaa

SEQ ID NO: 829016 - RNA, 19 nt, Artificial Sequence
  Description of Artificial Sequence: Synthetic oligonucleotide
cugucggccgcucgcgccg

SEQ ID NO: 829017 - RNA, 19 nt, Artificial Sequence
  Description of Artificial Sequence: Synthetic oligonucleotide
cguuaaaguaaaacuauaa

SEQ ID NO: 829018 - RNA, 19 nt, Artificial Sequence
  Description of Artificial Sequence: Synthetic oligonucleotide
uaacagggacaaugccgac

SEQ ID NO: 829019 - RNA, 19 nt, Artificial Sequence
  Description of Artificial Sequence: Synthetic oligonucleotide
acguuacaaauggggcuuc

SEQ ID NO: 829020 - RNA, 19 nt, Artificial Sequence
  Description of Artificial Sequence: Synthetic oligonucleotide
aucguuggccacagcuaac

SEQ ID NO: 829021 - RNA, 19 nt, Artificial Sequence
  Description of Artificial Sequence: Synthetic oligonucleotide
agaugccuaugcucucacu

SEQ ID NO: 829022 - RNA, 19 nt, Artificial Sequence
  Description of Artificial Sequence: Synthetic oligonucleotide
ugucagcauugguaggauu

SEQ ID NO: 829023 - RNA, 19 nt, Artificial Sequence
  Description of Artificial Sequence: Synthetic oligonucleotide
cacgguuuugauggaggac

SEQ ID NO: 829024 - RNA, 19 nt, Artificial Sequence
  Description of Artificial Sequence: Synthetic oligonucleotide
cuaacagcggcuccugcua

SEQ ID NO: 829025 - RNA, 19 nt, Artificial Sequence
  Description of Artificial Sequence: Synthetic oligonucleotide
uuguacugucugcgcuggc

SEQ ID NO: 829026 - RNA, 19 nt, Artificial Sequence
  Description of Artificial Sequence: Synthetic oligonucleotide
gcuauggugacuccuuuua

SEQ ID NO: 829027 - RNA, 19 nt, Artificial Sequence
  Description of Artificial Sequence: Synthetic oligonucleotide
cacuaacagcggcuccugc

SEQ ID NO: 829028 - RNA, 19 nt, Artificial Sequence
  Description of Artificial Sequence: Synthetic oligonucleotide
gccaauggaugggaaggcg

SEQ ID NO: 829029 - RNA, 19 nt, Artificial Sequence
  Description of Artificial Sequence: Synthetic oligonucleotide
gauauuuaggguggccuuu

SEQ ID NO: 829030 - RNA, 19 nt, Artificial Sequence
  Description of Artificial Sequence: Synthetic oligonucleotide
cuucuucgcuagcaacuca

SEQ ID NO: 829031 - RNA, 19 nt, Artificial Sequence
  Description of Artificial Sequence: Synthetic oligonucleotide
agaacgccacuggguguac

SEQ ID NO: 829032 - RNA, 19 nt, Artificial Sequence
  Description of Artificial Sequence: Synthetic oligonucleotide
ggauggauauucggcaaca

SEQ ID NO: 829033 - RNA, 19 nt, Artificial Sequence
  Description of Artificial Sequence: Synthetic oligonucleotide
guuggaggcaggggacgag

SEQ ID NO: 829034 - RNA, 19 nt, Artificial Sequence
  Description of Artificial Sequence: Synthetic oligonucleotide
uacuuccaagggcccguuc

SEQ ID NO: 829035 - RNA, 19 nt, Artificial Sequence
  Description of Artificial Sequence: Synthetic oligonucleotide
uccucgcuucuucgcuagc

SEQ ID NO: 829036 - RNA, 19 nt, Artificial Sequence
  Description of Artificial Sequence: Synthetic oligonucleotide
aagcucacgggcggcugca

SEQ ID NO: 829037 - RNA, 19 nt, Artificial Sequence
  Description of Artificial Sequence: Synthetic oligonucleotide
ugccgacuaucagugcuaa

SEQ ID NO: 829038 - RNA, 19 nt, Artificial Sequence
  Description of Artificial Sequence: Synthetic oligonucleotide
cuggaaccacucgcggcgg

SEQ ID NO: 829039 - RNA, 19 nt, Artificial Sequence
  Description of Artificial Sequence: Synthetic oligonucleotide
gaugugccggggagugacc

SEQ ID NO: 829040 - RNA, 19 nt, Artificial Sequence
  Description of Artificial Sequence: Synthetic oligonucleotide
uucccaccgcggcucgaca

SEQ ID NO: 829041 - RNA, 19 nt, Artificial Sequence
  Description of Artificial Sequence: Synthetic oligonucleotide
ccaauggaugggaaggcga

SEQ ID NO: 829042 - RNA, 19 nt, Artificial Sequence
  Description of Artificial Sequence: Synthetic oligonucleotide
gaggacgguaaagccaucu

SEQ ID NO: 829043 - RNA, 19 nt, Artificial Sequence
  Description of Artificial Sequence: Synthetic oligonucleotide
cugcauuaccagccagcuc

SEQ ID NO: 829044 - RNA, 19 nt, Artificial Sequence
  Description of Artificial Sequence: Synthetic oligonucleotide
cagacacggucuggaacgc

SEQ ID NO: 829045 - RNA, 19 nt, Artificial Sequence
  Description of Artificial Sequence: Synthetic oligonucleotide
uggcugaccgagaggucuu

SEQ ID NO: 829046 - RNA, 19 nt, Artificial Sequence
  Description of Artificial Sequence: Synthetic oligonucleotide
caauggaugggaaggcgau

SEQ ID NO: 829047 - RNA, 19 nt, Artificial Sequence
  Description of Artificial Sequence: Synthetic oligonucleotide
ucccaccgcggcucgacau

SEQ ID NO: 829048 - RNA, 19 nt, Artificial Sequence
  Description of Artificial Sequence: Synthetic oligonucleotide
aguuggcguccagcuuggc

SEQ ID NO: 829049 - RNA, 19 nt, Artificial Sequence
  Description of Artificial Sequence: Synthetic oligonucleotide
cuccgcccggcuccgcugg

SEQ ID NO: 829050 - RNA, 19 nt, Artificial Sequence
  Description of Artificial Sequence: Synthetic oligonucleotide
cuggaacgcagugcuuaac

SEQ ID NO: 829051 - RNA, 19 nt, Artificial Sequence
  Description of Artificial Sequence: Synthetic oligonucleotide
aagcgucacaacacacguu

SEQ ID NO: 829052 - RNA, 19 nt, Artificial Sequence
  Description of Artificial Sequence: Synthetic oligonucleotide
caccgucuuuuccagaagu

SEQ ID NO: 829053 - RNA, 19 nt, Artificial Sequence
  Description of Artificial Sequence: Synthetic oligonucleotide
gcuucgggaacccauuccu

SEQ ID NO: 829054 - RNA, 19 nt, Artificial Sequence
  Description of Artificial Sequence: Synthetic oligonucleotide
uucccgcccgcgcgucccg

SEQ ID NO: 829055 - RNA, 19 nt, Artificial Sequence
  Description of Artificial Sequence: Synthetic oligonucleotide
cauuaccagccagcuccag

SEQ ID NO: 829056 - RNA, 19 nt, Artificial Sequence
  Description of Artificial Sequence: Synthetic oligonucleotide
ugcaggcgugcccucuguu

SEQ ID NO: 829057 - RNA, 19 nt, Artificial Sequence
  Description of Artificial Sequence: Synthetic oligonucleotide
accgucuuuuccagaaguu

SEQ ID NO: 829058 - RNA, 19 nt, Artificial Sequence
  Description of Artificial Sequence: Synthetic oligonucleotide
cuaugcucucacugucaaa

SEQ ID NO: 829059 - RNA, 19 nt, Artificial Sequence
  Description of Artificial Sequence: Synthetic oligonucleotide
ccgucuuuuccagaaguuc

SEQ ID NO: 829060 - RNA, 19 nt, Artificial Sequence
  Description of Artificial Sequence: Synthetic oligonucleotide
caggccguggccugcacua

SEQ ID NO: 829061 - RNA, 19 nt, Artificial Sequence
  Description of Artificial Sequence: Synthetic oligonucleotide
uccucgcuucccgcccgcg

SEQ ID NO: 829062 - RNA, 19 nt, Artificial Sequence
  Description of Artificial Sequence: Synthetic oligonucleotide
ccgaaguuccagaacagcu

SEQ ID NO: 829063 - RNA, 19 nt, Artificial Sequence
  Description of Artificial Sequence: Synthetic oligonucleotide
uagggaucacuggccuagu

SEQ ID NO: 829064 - RNA, 19 nt, Artificial Sequence
  Description of Artificial Sequence: Synthetic oligonucleotide
agaggacgguaaagccauc

SEQ ID NO: 829065 - RNA, 19 nt, Artificial Sequence
  Description of Artificial Sequence: Synthetic oligonucleotide
gcacauagaugccuaugcu

SEQ ID NO: 829066 - RNA, 19 nt, Artificial Sequence
  Description of Artificial Sequence: Synthetic oligonucleotide
caaagccggcuaaauuacu

SEQ ID NO: 829067 - RNA, 19 nt, Artificial Sequence
  Description of Artificial Sequence: Synthetic oligonucleotide
gguuuugauggaggacgac

SEQ ID NO: 829068 - RNA, 19 nt, Artificial Sequence
  Description of Artificial Sequence: Synthetic oligonucleotide
cucgcgccgguccgcuccg

SEQ ID NO: 829069 - RNA, 19 nt, Artificial Sequence
  Description of Artificial Sequence: Synthetic oligonucleotide
acgacauaguagacacaaa

SEQ ID NO: 829070 - RNA, 19 nt, Artificial Sequence
  Description of Artificial Sequence: Synthetic oligonucleotide
ccacggggaagaugacucc

SEQ ID NO: 829071 - RNA, 19 nt, Artificial Sequence
  Description of Artificial Sequence: Synthetic oligonucleotide
ccccagacuggacuauuac

SEQ ID NO: 829072 - RNA, 19 nt, Artificial Sequence
  Description of Artificial Sequence: Synthetic oligonucleotide
gcucgcgccgguccgcucc

SEQ ID NO: 829073 - RNA, 19 nt, Artificial Sequence
  Description of Artificial Sequence: Synthetic oligonucleotide
ggccgaaagcaaucaaacu

SEQ ID NO: 829074 - RNA, 19 nt, Artificial Sequence
  Description of Artificial Sequence: Synthetic oligonucleotide
cugaccgagaggucuuggu

SEQ ID NO: 829075 - RNA, 19 nt, Artificial Sequence
  Description of Artificial Sequence: Synthetic oligonucleotide
ccugucggccgcucgcgcc

SEQ ID NO: 829076 - RNA, 19 nt, Artificial Sequence
  Description of Artificial Sequence: Synthetic oligonucleotide
augccgacuaucagugcua

SEQ ID NO: 829077 - RNA, 19 nt, Artificial Sequence
  Description of Artificial Sequence: Synthetic oligonucleotide
gccuaguuggcguccagcu

SEQ ID NO: 829078 - RNA, 19 nt, Artificial Sequence
  Description of Artificial Sequence: Synthetic oligonucleotide
ggccuaguuggcguccagc

SEQ ID NO: 829079 - RNA, 19 nt, Artificial Sequence
  Description of Artificial Sequence: Synthetic oligonucleotide
gcucacgggcggcugcaag

SEQ ID NO: 829080 - RNA, 19 nt, Artificial Sequence
  Description of Artificial Sequence: Synthetic oligonucleotide
ccggcuaaauuacugauuu

SEQ ID NO: 829081 - RNA, 19 nt, Artificial Sequence
  Description of Artificial Sequence: Synthetic oligonucleotide
gaacgccacuggguguaca

SEQ ID NO: 829082 - RNA, 19 nt, Artificial Sequence
  Description of Artificial Sequence: Synthetic oligonucleotide
ggaggacgacauaguagac

SEQ ID NO: 829083 - RNA, 19 nt, Artificial Sequence
  Description of Artificial Sequence: Synthetic oligonucleotide
auccgccccacggggaaga

SEQ ID NO: 829084 - RNA, 19 nt, Artificial Sequence
  Description of Artificial Sequence: Synthetic oligonucleotide
gcugcauuaccagccagcu

SEQ ID NO: 829085 - RNA, 19 nt, Artificial Sequence
  Description of Artificial Sequence: Synthetic oligonucleotide
gguguacaguaaagcguca

SEQ ID NO: 829086 - RNA, 19 nt, Artificial Sequence
  Description of Artificial Sequence: Synthetic oligonucleotide
ccccuagguuaacuaaguc

SEQ ID NO: 829087 - RNA, 19 nt, Artificial Sequence
  Description of Artificial Sequence: Synthetic oligonucleotide
caccgcggcucgacauggc

SEQ ID NO: 829088 - RNA, 19 nt, Artificial Sequence
  Description of Artificial Sequence: Synthetic oligonucleotide
agcauccgccccacgggga

SEQ ID NO: 829089 - RNA, 19 nt, Artificial Sequence
  Description of Artificial Sequence: Synthetic oligonucleotide
gcuagcaacucaggaugga

SEQ ID NO: 829090 - RNA, 19 nt, Artificial Sequence
  Description of Artificial Sequence: Synthetic oligonucleotide
aggcgugcccucuguugua

SEQ ID NO: 829091 - RNA, 19 nt, Artificial Sequence
  Description of Artificial Sequence: Synthetic oligonucleotide
cacgggcggcugcaaggug

SEQ ID NO: 829092 - RNA, 19 nt, Artificial Sequence
  Description of Artificial Sequence: Synthetic oligonucleotide
ccgcuguucuguguuaauc

SEQ ID NO: 829093 - RNA, 19 nt, Artificial Sequence
  Description of Artificial Sequence: Synthetic oligonucleotide
ggacggcagccauguacac

SEQ ID NO: 829094 - RNA, 19 nt, Artificial Sequence
  Description of Artificial Sequence: Synthetic oligonucleotide
acgcagugcuuaacaggga

SEQ ID NO: 829095 - RNA, 19 nt, Artificial Sequence
  Description of Artificial Sequence: Synthetic oligonucleotide
cauccgccccacggggaag

SEQ ID NO: 829096 - RNA, 19 nt, Artificial Sequence
  Description of Artificial Sequence: Synthetic oligonucleotide
ccccacaccaauccgauau

SEQ ID NO: 829097 - RNA, 19 nt, Artificial Sequence
  Description of Artificial Sequence: Synthetic oligonucleotide
gugacccgucccuucuugu

SEQ ID NO: 829098 - RNA, 19 nt, Artificial Sequence
  Description of Artificial Sequence: Synthetic oligonucleotide
ccaccgcggcucgacaugg

SEQ ID NO: 829099 - RNA, 19 nt, Artificial Sequence
  Description of Artificial Sequence: Synthetic oligonucleotide
caccgguuucuucugggau

SEQ ID NO: 829100 - RNA, 19 nt, Artificial Sequence
  Description of Artificial Sequence: Synthetic oligonucleotide
ccggggagugacccguccc

SEQ ID NO: 829101 - RNA, 19 nt, Artificial Sequence
  Description of Artificial Sequence: Synthetic oligonucleotide
cacggggaagaugacuccu

SEQ ID NO: 829102 - RNA, 19 nt, Artificial Sequence
  Description of Artificial Sequence: Synthetic oligonucleotide
cguuacaaauggggcuucc

SEQ ID NO: 829103 - RNA, 19 nt, Artificial Sequence
  Description of Artificial Sequence: Synthetic oligonucleotide
agcuagggccaagcaguuu

SEQ ID NO: 829104 - RNA, 19 nt, Artificial Sequence
  Description of Artificial Sequence: Synthetic oligonucleotide
ggcgugcccucuguuguac

SEQ ID NO: 829105 - RNA, 19 nt, Artificial Sequence
  Description of Artificial Sequence: Synthetic oligonucleotide
cuuccaagggcccguucuu

SEQ ID NO: 829106 - RNA, 19 nt, Artificial Sequence
  Description of Artificial Sequence: Synthetic oligonucleotide
cuggccuaguuggcgucca

SEQ ID NO: 829107 - RNA, 19 nt, Artificial Sequence
  Description of Artificial Sequence: Synthetic oligonucleotide
gcgucacaacacacguuac

SEQ ID NO: 829108 - RNA, 19 nt, Artificial Sequence
  Description of Artificial Sequence: Synthetic oligonucleotide
gccgacuaucagugcuaac

SEQ ID NO: 829109 - RNA, 19 nt, Artificial Sequence
  Description of Artificial Sequence: Synthetic oligonucleotide
ggacgacauaguagacaca

SEQ ID NO: 829110 - RNA, 19 nt, Artificial Sequence
  Description of Artificial Sequence: Synthetic oligonucleotide
ccaccgguuucuucuggga

SEQ ID NO: 829111 - RNA, 19 nt, Artificial Sequence
  Description of Artificial Sequence: Synthetic oligonucleotide
gcuacuuccaagggcccgu

SEQ ID NO: 829112 - RNA, 19 nt, Artificial Sequence
  Description of Artificial Sequence: Synthetic oligonucleotide
cuggccgcuuugcugacuu

SEQ ID NO: 829113 - RNA, 19 nt, Artificial Sequence
  Description of Artificial Sequence: Synthetic oligonucleotide
cccaccgcggcucgacaug

SEQ ID NO: 829114 - RNA, 19 nt, Artificial Sequence
  Description of Artificial Sequence: Synthetic oligonucleotide
gcauccgccccacggggaa

SEQ ID NO: 829115 - RNA, 19 nt, Artificial Sequence
  Description of Artificial Sequence: Synthetic oligonucleotide
gcccugucggccgcucgcg

SEQ ID NO: 829116 - RNA, 19 nt, Artificial Sequence
  Description of Artificial Sequence: Synthetic oligonucleotide
cgguuuugauggaggacga

SEQ ID NO: 829117 - RNA, 19 nt, Artificial Sequence
  Description of Artificial Sequence: Synthetic oligonucleotide
gggcccgagcccugucggc

SEQ ID NO: 829118 - RNA, 19 nt, Artificial Sequence
  Description of Artificial Sequence: Synthetic oligonucleotide
ggcuauggugacuccuuuu

SEQ ID NO: 829119 - RNA, 19 nt, Artificial Sequence
  Description of Artificial Sequence: Synthetic oligonucleotide
gcaagguguggggcccgag

SEQ ID NO: 829120 - RNA, 19 nt, Artificial Sequence
  Description of Artificial Sequence: Synthetic oligonucleotide
gcgccgguccgcuccgcgc

SEQ ID NO: 829121 - RNA, 19 nt, Artificial Sequence
  Description of Artificial Sequence: Synthetic oligonucleotide
aggccguggccugcacuaa

SEQ ID NO: 829122 - RNA, 19 nt, Artificial Sequence
  Description of Artificial Sequence: Synthetic oligonucleotide
gcuucccgcccgcgcgucc

SEQ ID NO: 829123 - RNA, 19 nt, Artificial Sequence
  Description of Artificial Sequence: Synthetic oligonucleotide
gccugcacuaacagcggcu

SEQ ID NO: 829124 - RNA, 19 nt, Artificial Sequence
  Description of Artificial Sequence: Synthetic oligonucleotide
agcucacgggcggcugcaa

SEQ ID NO: 829125 - RNA, 19 nt, Artificial Sequence
  Description of Artificial Sequence: Synthetic oligonucleotide
ccucaaagccggcuaaauu

SEQ ID NO: 829126 - RNA, 19 nt, Artificial Sequence
  Description of Artificial Sequence: Synthetic oligonucleotide
cccugucggccgcucgcgc

SEQ ID NO: 829127 - RNA, 19 nt, Artificial Sequence
  Description of Artificial Sequence: Synthetic oligonucleotide
gccggcuaaauuacugauu

SEQ ID NO: 829128 - RNA, 19 nt, Artificial Sequence
  Description of Artificial Sequence: Synthetic oligonucleotide
ccggcuccgcuggaaccag

SEQ ID NO: 829129 - RNA, 19 nt, Artificial Sequence
  Description of Artificial Sequence: Synthetic oligonucleotide
cgcgucccgcgcucgcgcc

SEQ ID NO: 829130 - RNA, 19 nt, Artificial Sequence
  Description of Artificial Sequence: Synthetic oligonucleotide
ccgcuggaaccagugaacu

SEQ ID NO: 829131 - RNA, 19 nt, Artificial Sequence
  Description of Artificial Sequence: Synthetic oligonucleotide
ccuaguuggcguccagcuu

SEQ ID NO: 829132 - RNA, 19 nt, Artificial Sequence
  Description of Artificial Sequence: Synthetic oligonucleotide
gcggcucgacauggcggug

SEQ ID NO: 829133 - RNA, 19 nt, Artificial Sequence
  Description of Artificial Sequence: Synthetic oligonucleotide
gcgugcccucuguuguacu

SEQ ID NO: 829134 - RNA, 19 nt, Artificial Sequence
  Description of Artificial Sequence: Synthetic oligonucleotide
cgcggcucgacauggcggu

SEQ ID NO: 829135 - RNA, 19 nt, Artificial Sequence
  Description of Artificial Sequence: Synthetic oligonucleotide
cccgcgcgucccgcgcucg

SEQ ID NO: 829136 - RNA, 19 nt, Artificial Sequence
  Description of Artificial Sequence: Synthetic oligonucleotide
ccgccccacggggaagaug

SEQ ID NO: 829137 - RNA, 19 nt, Artificial Sequence
  Description of Artificial Sequence: Synthetic oligonucleotide
ccgcgcgucccgcgcucgc

SEQ ID NO: 829138 - RNA, 19 nt, Artificial Sequence
  Description of Artificial Sequence: Synthetic oligonucleotide
cggggagugacccgucccu

SEQ ID NO: 829139 - RNA, 19 nt, Artificial Sequence
  Description of Artificial Sequence: Synthetic oligonucleotide
ggggagugacccgucccuu

SEQ ID NO: 829140 - RNA, 19 nt, Artificial Sequence
  Description of Artificial Sequence: Synthetic oligonucleotide
ccccacggggaagaugacu

SEQ ID NO: 829141 - RNA, 19 nt, Artificial Sequence
  Description of Artificial Sequence: Synthetic oligonucleotide
cccuuggauccucgcuucu

SEQ ID NO: 829142 - RNA, 19 nt, Artificial Sequence
  Description of Artificial Sequence: Synthetic oligonucleotide
cccgcuguucuguguuaau

SEQ ID NO: 829143 - RNA, 19 nt, Artificial Sequence
  Description of Artificial Sequence: Synthetic oligonucleotide
cgcuucccgcccgcgcguc

SEQ ID NO: 829144 - RNA, 19 nt, Artificial Sequence
  Description of Artificial Sequence: Synthetic oligonucleotide
cgcccacgccuccucgcuu

SEQ ID NO: 829145 - RNA, 19 nt, Artificial Sequence
  Description of Artificial Sequence: Synthetic oligonucleotide
uuaucuaucaggaagaaag

SEQ ID NO: 829146 - RNA, 19 nt, Artificial Sequence
  Description of Artificial Sequence: Synthetic oligonucleotide
augagcuuaucacugaucc

SEQ ID NO: 829147 - RNA, 19 nt, Artificial Sequence
  Description of Artificial Sequence: Synthetic oligonucleotide
uccagaagaacucugaagu

SEQ ID NO: 829148 - RNA, 19 nt, Artificial Sequence
  Description of Artificial Sequence: Synthetic oligonucleotide
uacuauggcaguaaugucc

SEQ ID NO: 829149 - RNA, 19 nt, Artificial Sequence
  Description of Artificial Sequence: Synthetic oligonucleotide
uguacuauggcaguaaugu

SEQ ID NO: 829150 - RNA, 19 nt, Artificial Sequence
  Description of Artificial Sequence: Synthetic oligonucleotide
aagcuucagacuuagagga

SEQ ID NO: 829151 - RNA, 19 nt, Artificial Sequence
  Description of Artificial Sequence: Synthetic oligonucleotide
aauguuuuguaguucacaa

SEQ ID NO: 829152 - RNA, 19 nt, Artificial Sequence
  Description of Artificial Sequence: Synthetic oligonucleotide
ugaaagugaagucggauca

SEQ ID NO: 829153 - RNA, 19 nt, Artificial Sequence
  Description of Artificial Sequence: Synthetic oligonucleotide
aggaaauuuggcuagccgg

SEQ ID NO: 829154 - RNA, 19 nt, Artificial Sequence
  Description of Artificial Sequence: Synthetic oligonucleotide
uuuauuugauuuucuaaca

SEQ ID NO: 829155 - RNA, 19 nt, Artificial Sequence
  Description of Artificial Sequence: Synthetic oligonucleotide
uuaaccaggaaauuuggcu

SEQ ID NO: 829156 - RNA, 19 nt, Artificial Sequence
  Description of Artificial Sequence: Synthetic oligonucleotide
uugacuaccauguagcccu

SEQ ID NO: 829157 - RNA, 19 nt, Artificial Sequence
  Description of Artificial Sequence: Synthetic oligonucleotide
aauuuggcuagccggcggc

SEQ ID NO: 829158 - RNA, 19 nt, Artificial Sequence
  Description of Artificial Sequence: Synthetic oligonucleotide
gauuuucuaacagaggcag

SEQ ID NO: 829159 - RNA, 19 nt, Artificial Sequence
  Description of Artificial Sequence: Synthetic oligonucleotide
ucuguaaagcuucagacuu

SEQ ID NO: 829160 - RNA, 19 nt, Artificial Sequence
  Description of Artificial Sequence: Synthetic oligonucleotide
uuacagaugugugagauga

SEQ ID NO: 829161 - RNA, 19 nt, Artificial Sequence
  Description of Artificial Sequence: Synthetic oligonucleotide
gaugaucaaaggaaugugg

SEQ ID NO: 829162 - RNA, 19 nt, Artificial Sequence
  Description of Artificial Sequence: Synthetic oligonucleotide
uauuugauuuucuaacaga

SEQ ID NO: 829163 - RNA, 19 nt, Artificial Sequence
  Description of Artificial Sequence: Synthetic oligonucleotide
cuuaugauguucucaaaug

SEQ ID NO: 829164 - RNA, 19 nt, Artificial Sequence
  Description of Artificial Sequence: Synthetic oligonucleotide
aucucauuacuccacgacg

SEQ ID NO: 829165 - RNA, 19 nt, Artificial Sequence
  Description of Artificial Sequence: Synthetic oligonucleotide
uggaaauuauccucaaucu

SEQ ID NO: 829166 - RNA, 19 nt, Artificial Sequence
  Description of Artificial Sequence: Synthetic oligonucleotide
uugaugagucucuugaucu

SEQ ID NO: 829167 - RNA, 19 nt, Artificial Sequence
  Description of Artificial Sequence: Synthetic oligonucleotide
uguaguucacaaacccugg

SEQ ID NO: 829168 - RNA, 19 nt, Artificial Sequence
  Description of Artificial Sequence: Synthetic oligonucleotide
ugaacaggcgacauucucc

SEQ ID NO: 829169 - RNA, 19 nt, Artificial Sequence
  Description of Artificial Sequence: Synthetic oligonucleotide
aauguccucguuaaaagug

SEQ ID NO: 829170 - RNA, 19 nt, Artificial Sequence
  Description of Artificial Sequence: Synthetic oligonucleotide
uccucaaucucauuacucc

SEQ ID NO: 829171 - RNA, 19 nt, Artificial Sequence
  Description of Artificial Sequence: Synthetic oligonucleotide
aucccuauggucccugucc

SEQ ID NO: 829172 - RNA, 19 nt, Artificial Sequence
  Description of Artificial Sequence: Synthetic oligonucleotide
augaucaaaggaauguggc

SEQ ID NO: 829173 - RNA, 19 nt, Artificial Sequence
  Description of Artificial Sequence: Synthetic oligonucleotide
ucucauuacuccacgacga

SEQ ID NO: 829174 - RNA, 19 nt, Artificial Sequence
  Description of Artificial Sequence: Synthetic oligonucleotide
gguaaaggcaucucgaacc

SEQ ID NO: 829175 - RNA, 19 nt, Artificial Sequence
  Description of Artificial Sequence: Synthetic oligonucleotide
ucuaucaggaagaaaguuu

SEQ ID NO: 829176 - RNA, 19 nt, Artificial Sequence
  Description of Artificial Sequence: Synthetic oligonucleotide
agauuuacagaugugugag

SEQ ID NO: 829177 - RNA, 19 nt, Artificial Sequence
  Description of Artificial Sequence: Synthetic oligonucleotide
aaccauuucaguaacccug

SEQ ID NO: 829178 - RNA, 19 nt, Artificial Sequence
  Description of Artificial Sequence: Synthetic oligonucleotide
aaauuuggcuagccggcgg

SEQ ID NO: 829179 - RNA, 19 nt, Artificial Sequence
  Description of Artificial Sequence: Synthetic oligonucleotide
aacaauaccacugccucug

SEQ ID NO: 829180 - RNA, 19 nt, Artificial Sequence
  Description of Artificial Sequence: Synthetic oligonucleotide
caucugaaagugaagucgg

SEQ ID NO: 829181 - RNA, 19 nt, Artificial Sequence
  Description of Artificial Sequence: Synthetic oligonucleotide
aggacuuugauuugccguc

SEQ ID NO: 829182 - RNA, 19 nt, Artificial Sequence
  Description of Artificial Sequence: Synthetic oligonucleotide
aaaucucagccauggauga

SEQ ID NO: 829183 - RNA, 19 nt, Artificial Sequence
  Description of Artificial Sequence: Synthetic oligonucleotide
uccccuuguacuauggcag

SEQ ID NO: 829184 - RNA, 19 nt, Artificial Sequence
  Description of Artificial Sequence: Synthetic oligonucleotide
cacuugacuaccauguagc

SEQ ID NO: 829185 - RNA, 19 nt, Artificial Sequence
  Description of Artificial Sequence: Synthetic oligonucleotide
gagcuuaucacugaucccc

SEQ ID NO: 829186 - RNA, 19 nt, Artificial Sequence
  Description of Artificial Sequence: Synthetic oligonucleotide
ucguuaaaaguguugauuu

SEQ ID NO: 829187 - RNA, 19 nt, Artificial Sequence
  Description of Artificial Sequence: Synthetic oligonucleotide
agucucuugaucugguauc

SEQ ID NO: 829188 - RNA, 19 nt, Artificial Sequence
  Description of Artificial Sequence: Synthetic oligonucleotide
acuucguuguccucauagc

SEQ ID NO: 829189 - RNA, 19 nt, Artificial Sequence
  Description of Artificial Sequence: Synthetic oligonucleotide
caaugguaaaggcaucucg

SEQ ID NO: 829190 - RNA, 19 nt, Artificial Sequence
  Description of Artificial Sequence: Synthetic oligonucleotide
agucggaucaucuucucug

SEQ ID NO: 829191 - RNA, 19 nt, Artificial Sequence
  Description of Artificial Sequence: Synthetic oligonucleotide
guugugagcuuccuggcgg

SEQ ID NO: 829192 - RNA, 19 nt, Artificial Sequence
  Description of Artificial Sequence: Synthetic oligonucleotide
aagaaaguuuucucauugu

SEQ ID NO: 829193 - RNA, 19 nt, Artificial Sequence
  Description of Artificial Sequence: Synthetic oligonucleotide
ucugguaacaguucuuuau

SEQ ID NO: 829194 - RNA, 19 nt, Artificial Sequence
  Description of Artificial Sequence: Synthetic oligonucleotide
ugacaaucgcuccuucagg

SEQ ID NO: 829195 - RNA, 19 nt, Artificial Sequence
  Description of Artificial Sequence: Synthetic oligonucleotide
ucauacugccugcagaggu

SEQ ID NO: 829196 - RNA, 19 nt, Artificial Sequence
  Description of Artificial Sequence: Synthetic oligonucleotide
uguaaagcuucagacuuag

SEQ ID NO: 829197 - RNA, 19 nt, Artificial Sequence
  Description of Artificial Sequence: Synthetic oligonucleotide
uuuccagacuucuuuauau

SEQ ID NO: 829198 - RNA, 19 nt, Artificial Sequence
  Description of Artificial Sequence: Synthetic oligonucleotide
aaauguuuuguaguucaca

SEQ ID NO: 829199 - RNA, 19 nt, Artificial Sequence
  Description of Artificial Sequence: Synthetic oligonucleotide
gucauuguguuccuucagg

SEQ ID NO: 829200 - RNA, 19 nt, Artificial Sequence
  Description of Artificial Sequence: Synthetic oligonucleotide
gaacaggcgacauucuccc

SEQ ID NO: 829201 - RNA, 19 nt, Artificial Sequence
  Description of Artificial Sequence: Synthetic oligonucleotide
ugaagucggaucaucuucu

SEQ ID NO: 829202 - RNA, 19 nt, Artificial Sequence
  Description of Artificial Sequence: Synthetic oligonucleotide
cuuagaggaagugaagaag

SEQ ID NO: 829203 - RNA, 19 nt, Artificial Sequence
  Description of Artificial Sequence: Synthetic oligonucleotide
aacaaugguaaaggcaucu

SEQ ID NO: 829204 - RNA, 19 nt, Artificial Sequence
  Description of Artificial Sequence: Synthetic oligonucleotide
ucauagcugacuuugccuc

SEQ ID NO: 829205 - RNA, 19 nt, Artificial Sequence
  Description of Artificial Sequence: Synthetic oligonucleotide
ucauuguguuccuucagga

SEQ ID NO: 829206 - RNA, 19 nt, Artificial Sequence
  Description of Artificial Sequence: Synthetic oligonucleotide
ugugcagcauuucuacagc

SEQ ID NO: 829207 - RNA, 19 nt, Artificial Sequence
  Description of Artificial Sequence: Synthetic oligonucleotide
ucucgaaccauuucaguaa

SEQ ID NO: 829208 - RNA, 19 nt, Artificial Sequence
  Description of Artificial Sequence: Synthetic oligonucleotide
uaaccaggaaauuuggcua

SEQ ID NO: 829209 - RNA, 19 nt, Artificial Sequence
  Description of Artificial Sequence: Synthetic oligonucleotide
uccacgacgagaacuggcc

SEQ ID NO: 829210 - RNA, 19 nt, Artificial Sequence
  Description of Artificial Sequence: Synthetic oligonucleotide
uggaugaucaaaggaaugu

SEQ ID NO: 829211 - RNA, 19 nt, Artificial Sequence
  Description of Artificial Sequence: Synthetic oligonucleotide
uacuccacgacgagaacug

SEQ ID NO: 829212 - RNA, 19 nt, Artificial Sequence
  Description of Artificial Sequence: Synthetic oligonucleotide
ucugguauccgaugucugc

SEQ ID NO: 829213 - RNA, 19 nt, Artificial Sequence
  Description of Artificial Sequence: Synthetic oligonucleotide
cuuugcguuguucuucucc

SEQ ID NO: 829214 - RNA, 19 nt, Artificial Sequence
  Description of Artificial Sequence: Synthetic oligonucleotide
auggaugaguucuguaaag

SEQ ID NO: 829215 - RNA, 19 nt, Artificial Sequence
  Description of Artificial Sequence: Synthetic oligonucleotide
aaggaauguggcuggagau

SEQ ID NO: 829216 - RNA, 19 nt, Artificial Sequence
  Description of Artificial Sequence: Synthetic oligonucleotide
uccucguuaaaaguguuga

SEQ ID NO: 829217 - RNA, 19 nt, Artificial Sequence
  Description of Artificial Sequence: Synthetic oligonucleotide
caucugguaacaauaccac

SEQ ID NO: 829218 - RNA, 19 nt, Artificial Sequence
  Description of Artificial Sequence: Synthetic oligonucleotide
cugacaguagaugaucugc

SEQ ID NO: 829219 - RNA, 19 nt, Artificial Sequence
  Description of Artificial Sequence: Synthetic oligonucleotide
gauuugccgucuuaugaug

SEQ ID NO: 829220 - RNA, 19 nt, Artificial Sequence
  Description of Artificial Sequence: Synthetic oligonucleotide
aguaauguccucguuaaaa

SEQ ID NO: 829221 - RNA, 19 nt, Artificial Sequence
  Description of Artificial Sequence: Synthetic oligonucleotide
acaggcgacauucucccuc

SEQ ID NO: 829222 - RNA, 19 nt, Artificial Sequence
  Description of Artificial Sequence: Synthetic oligonucleotide
uccuguuucuggauguaug

SEQ ID NO: 829223 - RNA, 19 nt, Artificial Sequence
  Description of Artificial Sequence: Synthetic oligonucleotide
ucaagaucccuaugguccc

SEQ ID NO: 829224 - RNA, 19 nt, Artificial Sequence
  Description of Artificial Sequence: Synthetic oligonucleotide
ugauuugccgucuuaugau

SEQ ID NO: 829225 - RNA, 19 nt, Artificial Sequence
  Description of Artificial Sequence: Synthetic oligonucleotide
uucaguaccucuguccacc

SEQ ID NO: 829226 - RNA, 19 nt, Artificial Sequence
  Description of Artificial Sequence: Synthetic oligonucleotide
uuguacuauggcaguaaug

SEQ ID NO: 829227 - RNA, 19 nt, Artificial Sequence
  Description of Artificial Sequence: Synthetic oligonucleotide
cacuucguuguccucauag

SEQ ID NO: 829228 - RNA, 19 nt, Artificial Sequence
  Description of Artificial Sequence: Synthetic oligonucleotide
uucaaguuuggacuuggua

SEQ ID NO: 829229 - RNA, 19 nt, Artificial Sequence
  Description of Artificial Sequence: Synthetic oligonucleotide
aggaagaaaguuuucucau

SEQ ID NO: 829230 - RNA, 19 nt, Artificial Sequence
  Description of Artificial Sequence: Synthetic oligonucleotide
auuuacagaugugugagau

SEQ ID NO: 829231 - RNA, 19 nt, Artificial Sequence
  Description of Artificial Sequence: Synthetic oligonucleotide
uauccucaaucucauuacu

SEQ ID NO: 829232 - RNA, 19 nt, Artificial Sequence
  Description of Artificial Sequence: Synthetic oligonucleotide
acuuagaggaagugaagaa

SEQ ID NO: 829233 - RNA, 19 nt, Artificial Sequence
  Description of Artificial Sequence: Synthetic oligonucleotide
gcgauguccacauuacugg

SEQ ID NO: 829234 - RNA, 19 nt, Artificial Sequence
  Description of Artificial Sequence: Synthetic oligonucleotide
gacaaucgcuccuucagga

SEQ ID NO: 829235 - RNA, 19 nt, Artificial Sequence
  Description of Artificial Sequence: Synthetic oligonucleotide
agcuuaaccaggaaauuug

SEQ ID NO: 829236 - RNA, 19 nt, Artificial Sequence
  Description of Artificial Sequence: Synthetic oligonucleotide
aggugguacaccagguucc

SEQ ID NO: 829237 - RNA, 19 nt, Artificial Sequence
  Description of Artificial Sequence: Synthetic oligonucleotide
auguccacauuacugggga

SEQ ID NO: 829238 - RNA, 19 nt, Artificial Sequence
  Description of Artificial Sequence: Synthetic oligonucleotide
uaaacuugguccugacagu

SEQ ID NO: 829239 - RNA, 19 nt, Artificial Sequence
  Description of Artificial Sequence: Synthetic oligonucleotide
auuacuccacgacgagaac

SEQ ID NO: 829240 - RNA, 19 nt, Artificial Sequence
  Description of Artificial Sequence: Synthetic oligonucleotide
gagcaugccuuucugcagc

SEQ ID NO: 829241 - RNA, 19 nt, Artificial Sequence
  Description of Artificial Sequence: Synthetic oligonucleotide
aguguugauuuuaucuauc

SEQ ID NO: 829242 - RNA, 19 nt, Artificial Sequence
  Description of Artificial Sequence: Synthetic oligonucleotide
cauuacuccacgacgagaa

SEQ ID NO: 829243 - RNA, 19 nt, Artificial Sequence
  Description of Artificial Sequence: Synthetic oligonucleotide
uuacuccacgacgagaacu

SEQ ID NO: 829244 - RNA, 19 nt, Artificial Sequence
  Description of Artificial Sequence: Synthetic oligonucleotide
ugagcuuaucacugauccc

SEQ ID NO: 829245 - RNA, 19 nt, Artificial Sequence
  Description of Artificial Sequence: Synthetic oligonucleotide
agaacucugaagugugggu

SEQ ID NO: 829246 - RNA, 19 nt, Artificial Sequence
  Description of Artificial Sequence: Synthetic oligonucleotide
uggucaagaucccuauggu

SEQ ID NO: 829247 - RNA, 19 nt, Artificial Sequence
  Description of Artificial Sequence: Synthetic oligonucleotide
augucaugcugaccccugc

SEQ ID NO: 829248 - RNA, 19 nt, Artificial Sequence
  Description of Artificial Sequence: Synthetic oligonucleotide
uccaucugaaagugaaguc

SEQ ID NO: 829249 - RNA, 19 nt, Artificial Sequence
  Description of Artificial Sequence: Synthetic oligonucleotide
acagagcuccacuucguug

SEQ ID NO: 829250 - RNA, 19 nt, Artificial Sequence
  Description of Artificial Sequence: Synthetic oligonucleotide
uaacaauaccacugccucu

SEQ ID NO: 829251 - RNA, 19 nt, Artificial Sequence
  Description of Artificial Sequence: Synthetic oligonucleotide
aagugaagucggaucaucu

SEQ ID NO: 829252 - RNA, 19 nt, Artificial Sequence
  Description of Artificial Sequence: Synthetic oligonucleotide
uugguaguucuguggaggu

SEQ ID NO: 829253 - RNA, 19 nt, Artificial Sequence
  Description of Artificial Sequence: Synthetic oligonucleotide
ugagcucugguccccgaug

SEQ ID NO: 829254 - RNA, 19 nt, Artificial Sequence
  Description of Artificial Sequence: Synthetic oligonucleotide
ucggccucgauauugcuuu

SEQ ID NO: 829255 - RNA, 19 nt, Artificial Sequence
  Description of Artificial Sequence: Synthetic oligonucleotide
ugccgucuuaugauguucu

SEQ ID NO: 829256 - RNA, 19 nt, Artificial Sequence
  Description of Artificial Sequence: Synthetic oligonucleotide
augagcuccguggucaguc

SEQ ID NO: 829257 - RNA, 19 nt, Artificial Sequence
  Description of Artificial Sequence: Synthetic oligonucleotide
ugguaugucugugccauac

SEQ ID NO: 829258 - RNA, 19 nt, Artificial Sequence
  Description of Artificial Sequence: Synthetic oligonucleotide
ugguauccgaugucugcag

SEQ ID NO: 829259 - RNA, 19 nt, Artificial Sequence
  Description of Artificial Sequence: Synthetic oligonucleotide
ugucaugcugaccccugca

SEQ ID NO: 829260 - RNA, 19 nt, Artificial Sequence
  Description of Artificial Sequence: Synthetic oligonucleotide
uucuaaucugaggucuuca

SEQ ID NO: 829261 - RNA, 19 nt, Artificial Sequence
  Description of Artificial Sequence: Synthetic oligonucleotide
gauuuacagaugugugaga

SEQ ID NO: 829262 - RNA, 19 nt, Artificial Sequence
  Description of Artificial Sequence: Synthetic oligonucleotide
augguaaaggcaucucgaa

SEQ ID NO: 829263 - RNA, 19 nt, Artificial Sequence
  Description of Artificial Sequence: Synthetic oligonucleotide
ucgaaccauuucaguaacc

SEQ ID NO: 829264 - RNA, 19 nt, Artificial Sequence
  Description of Artificial Sequence: Synthetic oligonucleotide
ugacugcaauggcaggcag

SEQ ID NO: 829265 - RNA, 19 nt, Artificial Sequence
  Description of Artificial Sequence: Synthetic oligonucleotide
ucauuacuccacgacgaga

SEQ ID NO: 829266 - RNA, 19 nt, Artificial Sequence
  Description of Artificial Sequence: Synthetic oligonucleotide
cucgaaccauuucaguaac

SEQ ID NO: 829267 - RNA, 19 nt, Artificial Sequence
  Description of Artificial Sequence: Synthetic oligonucleotide
caggugguacaccagguuc

SEQ ID NO: 829268 - RNA, 19 nt, Artificial Sequence
  Description of Artificial Sequence: Synthetic oligonucleotide
ggaaauuuggcuagccggc

SEQ ID NO: 829269 - RNA, 19 nt, Artificial Sequence
  Description of Artificial Sequence: Synthetic oligonucleotide
acgacgagaacuggccucg

SEQ ID NO: 829270 - RNA, 19 nt, Artificial Sequence
  Description of Artificial Sequence: Synthetic oligonucleotide
auguuuuguaguucacaaa

SEQ ID NO: 829271 - RNA, 19 nt, Artificial Sequence
  Description of Artificial Sequence: Synthetic oligonucleotide
cucauuacuccacgacgag

SEQ ID NO: 829272 - RNA, 19 nt, Artificial Sequence
  Description of Artificial Sequence: Synthetic oligonucleotide
gcacuugacuaccauguag

SEQ ID NO: 829273 - RNA, 19 nt, Artificial Sequence
  Description of Artificial Sequence: Synthetic oligonucleotide
ucucuugaucugguauccg

SEQ ID NO: 829274 - RNA, 19 nt, Artificial Sequence
  Description of Artificial Sequence: Synthetic oligonucleotide
agugaagucggaucaucuu

SEQ ID NO: 829275 - RNA, 19 nt, Artificial Sequence
  Description of Artificial Sequence: Synthetic oligonucleotide
aaucucagccauggaugag

SEQ ID NO: 829276 - RNA, 19 nt, Artificial Sequence
  Description of Artificial Sequence: Synthetic oligonucleotide
ugacuuugcguuguucuuc

SEQ ID NO: 829277 - RNA, 19 nt, Artificial Sequence
  Description of Artificial Sequence: Synthetic oligonucleotide
caauaccacugccucuggg

SEQ ID NO: 829278 - RNA, 19 nt, Artificial Sequence
  Description of Artificial Sequence: Synthetic oligonucleotide
accccugcacuugacuacc

SEQ ID NO: 829279 - RNA, 19 nt, Artificial Sequence
  Description of Artificial Sequence: Synthetic oligonucleotide
ggugaucccaggcagguca

SEQ ID NO: 829280 - RNA, 19 nt, Artificial Sequence
  Description of Artificial Sequence: Synthetic oligonucleotide
cuccacgacgagaacuggc

SEQ ID NO: 829281 - RNA, 19 nt, Artificial Sequence
  Description of Artificial Sequence: Synthetic oligonucleotide
cuggagcaugccuuucugc

SEQ ID NO: 829282 - RNA, 19 nt, Artificial Sequence
  Description of Artificial Sequence: Synthetic oligonucleotide
cuacagcuggcucuuccag

SEQ ID NO: 829283 - RNA, 19 nt, Artificial Sequence
  Description of Artificial Sequence: Synthetic oligonucleotide
ugaccccugcacuugacua

SEQ ID NO: 829284 - RNA, 19 nt, Artificial Sequence
  Description of Artificial Sequence: Synthetic oligonucleotide
ucauugucgucuucuggua

SEQ ID NO: 829285 - RNA, 19 nt, Artificial Sequence
  Description of Artificial Sequence: Synthetic oligonucleotide
acgagaacuggccucggau

SEQ ID NO: 829286 - RNA, 19 nt, Artificial Sequence
  Description of Artificial Sequence: Synthetic oligonucleotide
auagcugacuuugccucuc

SEQ ID NO: 829287 - RNA, 19 nt, Artificial Sequence
  Description of Artificial Sequence: Synthetic oligonucleotide
gucucuugaucugguaucc

SEQ ID NO: 829288 - RNA, 19 nt, Artificial Sequence
  Description of Artificial Sequence: Synthetic oligonucleotide
cauggaugaguucuguaaa

SEQ ID NO: 829289 - RNA, 19 nt, Artificial Sequence
  Description of Artificial Sequence: Synthetic oligonucleotide
aggcaucucgaaccauuuc

SEQ ID NO: 829290 - RNA, 19 nt, Artificial Sequence
  Description of Artificial Sequence: Synthetic oligonucleotide
agaugcgguugugagcuuc

SEQ ID NO: 829291 - RNA, 19 nt, Artificial Sequence
  Description of Artificial Sequence: Synthetic oligonucleotide
ugcgguugugagcuuccug

SEQ ID NO: 829292 - RNA, 19 nt, Artificial Sequence
  Description of Artificial Sequence: Synthetic oligonucleotide
uauccgaugucugcaggcu

SEQ ID NO: 829293 - RNA, 19 nt, Artificial Sequence
  Description of Artificial Sequence: Synthetic oligonucleotide
uuggcuagccggcggcgag

SEQ ID NO: 829294 - RNA, 19 nt, Artificial Sequence
  Description of Artificial Sequence: Synthetic oligonucleotide
uccucaauuuuagcaccag

SEQ ID NO: 829295 - RNA, 19 nt, Artificial Sequence
  Description of Artificial Sequence: Synthetic oligonucleotide
caggcgacauucucccucc

SEQ ID NO: 829296 - RNA, 19 nt, Artificial Sequence
  Description of Artificial Sequence: Synthetic oligonucleotide
ggugucauuguguuccuuc

SEQ ID NO: 829297 - RNA, 19 nt, Artificial Sequence
  Description of Artificial Sequence: Synthetic oligonucleotide
ggcgauguccacauuacug

SEQ ID NO: 829298 - RNA, 19 nt, Artificial Sequence
  Description of Artificial Sequence: Synthetic oligonucleotide
guaugucuugaugagucuc

SEQ ID NO: 829299 - RNA, 19 nt, Artificial Sequence
  Description of Artificial Sequence: Synthetic oligonucleotide
gaccccugcacuugacuac

SEQ ID NO: 829300 - RNA, 19 nt, Artificial Sequence
  Description of Artificial Sequence: Synthetic oligonucleotide
ccuacagccacccugguga

SEQ ID NO: 829301 - RNA, 19 nt, Artificial Sequence
  Description of Artificial Sequence: Synthetic oligonucleotide
ucuuggugaacaggcgaca

SEQ ID NO: 829302 - RNA, 19 nt, Artificial Sequence
  Description of Artificial Sequence: Synthetic oligonucleotide
agggccguaccuucuccuc

SEQ ID NO: 829303 - RNA, 19 nt, Artificial Sequence
  Description of Artificial Sequence: Synthetic oligonucleotide
cauuucuacagcuggcucu

SEQ ID NO: 829304 - RNA, 19 nt, Artificial Sequence
  Description of Artificial Sequence: Synthetic oligonucleotide
ucggaucaucuucucugcu

SEQ ID NO: 829305 - RNA, 19 nt, Artificial Sequence
  Description of Artificial Sequence: Synthetic oligonucleotide
auuugccgucuuaugaugu

SEQ ID NO: 829306 - RNA, 19 nt, Artificial Sequence
  Description of Artificial Sequence: Synthetic oligonucleotide
cacgacgagaacuggccuc

SEQ ID NO: 829307 - RNA, 19 nt, Artificial Sequence
  Description of Artificial Sequence: Synthetic oligonucleotide
agcccuaucccagcaauga

SEQ ID NO: 829308 - RNA, 19 nt, Artificial Sequence
  Description of Artificial Sequence: Synthetic oligonucleotide
cuuggucaagaucccuaug

SEQ ID NO: 829309 - RNA, 19 nt, Artificial Sequence
  Description of Artificial Sequence: Synthetic oligonucleotide
ucaguaccucuguccacca

SEQ ID NO: 829310 - RNA, 19 nt, Artificial Sequence
  Description of Artificial Sequence: Synthetic oligonucleotide
uuugccgucuuaugauguu

SEQ ID NO: 829311 - RNA, 19 nt, Artificial Sequence
  Description of Artificial Sequence: Synthetic oligonucleotide
aguaacccugugcagcauu

SEQ ID NO: 829312 - RNA, 19 nt, Artificial Sequence
  Description of Artificial Sequence: Synthetic oligonucleotide
gaagucggaucaucuucuc

SEQ ID NO: 829313 - RNA, 19 nt, Artificial Sequence
  Description of Artificial Sequence: Synthetic oligonucleotide
cuguaaacuugguccugac

SEQ ID NO: 829314 - RNA, 19 nt, Artificial Sequence
  Description of Artificial Sequence: Synthetic oligonucleotide
gcaguaauguccucguuaa

SEQ ID NO: 829315 - RNA, 19 nt, Artificial Sequence
  Description of Artificial Sequence: Synthetic oligonucleotide
caaaggaauguggcuggag

SEQ ID NO: 829316 - RNA, 19 nt, Artificial Sequence
  Description of Artificial Sequence: Synthetic oligonucleotide
uggcgauguccacauuacu

SEQ ID NO: 829317 - RNA, 19 nt, Artificial Sequence
  Description of Artificial Sequence: Synthetic oligonucleotide
agaucaggcuuggucaaga

SEQ ID NO: 829318 - RNA, 19 nt, Artificial Sequence
  Description of Artificial Sequence: Synthetic oligonucleotide
ggucaagaucccuaugguc

SEQ ID NO: 829319 - RNA, 19 nt, Artificial Sequence
  Description of Artificial Sequence: Synthetic oligonucleotide
augacugcaauggcaggca

SEQ ID NO: 829320 - RNA, 19 nt, Artificial Sequence
  Description of Artificial Sequence: Synthetic oligonucleotide
auuuggcuagccggcggcg

SEQ ID NO: 829321 - RNA, 19 nt, Artificial Sequence
  Description of Artificial Sequence: Synthetic oligonucleotide
aacaggcgacauucucccu

SEQ ID NO: 829322 - RNA, 19 nt, Artificial Sequence
  Description of Artificial Sequence: Synthetic oligonucleotide
gacuuugcguuguucuucu

SEQ ID NO: 829323 - RNA, 19 nt, Artificial Sequence
  Description of Artificial Sequence: Synthetic oligonucleotide
cuucguuguccucauagcu

SEQ ID NO: 829324 - RNA, 19 nt, Artificial Sequence
  Description of Artificial Sequence: Synthetic oligonucleotide
agggaucacagagcuccac

SEQ ID NO: 829325 - RNA, 19 nt, Artificial Sequence
  Description of Artificial Sequence: Synthetic oligonucleotide
ugagucucuugaucuggua

SEQ ID NO: 829326 - RNA, 19 nt, Artificial Sequence
  Description of Artificial Sequence: Synthetic oligonucleotide
ugcugaccccugcacuuga

SEQ ID NO: 829327 - RNA, 19 nt, Artificial Sequence
  Description of Artificial Sequence: Synthetic oligonucleotide
gaucccuauggucccuguc

SEQ ID NO: 829328 - RNA, 19 nt, Artificial Sequence
  Description of Artificial Sequence: Synthetic oligonucleotide
ccagaagaacucugaagug

SEQ ID NO: 829329 - RNA, 19 nt, Artificial Sequence
  Description of Artificial Sequence: Synthetic oligonucleotide
caggacuuugauuugccgu

SEQ ID NO: 829330 - RNA, 19 nt, Artificial Sequence
  Description of Artificial Sequence: Synthetic oligonucleotide
cagagcuccacuucguugu

SEQ ID NO: 829331 - RNA, 19 nt, Artificial Sequence
  Description of Artificial Sequence: Synthetic oligonucleotide
ggaugaguucuguaaagcu

SEQ ID NO: 829332 - RNA, 19 nt, Artificial Sequence
  Description of Artificial Sequence: Synthetic oligonucleotide
gcaucucgaaccauuucag

SEQ ID NO: 829333 - RNA, 19 nt, Artificial Sequence
  Description of Artificial Sequence: Synthetic oligonucleotide
aggaagugaagaagcuuga

SEQ ID NO: 829334 - RNA, 19 nt, Artificial Sequence
  Description of Artificial Sequence: Synthetic oligonucleotide
guccucguuaaaaguguug

SEQ ID NO: 829335 - RNA, 19 nt, Artificial Sequence
  Description of Artificial Sequence: Synthetic oligonucleotide
uugccgucuuaugauguuc

SEQ ID NO: 829336 - RNA, 19 nt, Artificial Sequence
  Description of Artificial Sequence: Synthetic oligonucleotide
uuuggcuagccggcggcga

SEQ ID NO: 829337 - RNA, 19 nt, Artificial Sequence
  Description of Artificial Sequence: Synthetic oligonucleotide
guccccgaugacugcaaug

SEQ ID NO: 829338 - RNA, 19 nt, Artificial Sequence
  Description of Artificial Sequence: Synthetic oligonucleotide
cuagccggcggcgagccug

SEQ ID NO: 829339 - RNA, 19 nt, Artificial Sequence
  Description of Artificial Sequence: Synthetic oligonucleotide
ucgcugguacucugguaac

SEQ ID NO: 829340 - RNA, 19 nt, Artificial Sequence
  Description of Artificial Sequence: Synthetic oligonucleotide
guggcgauguccacauuac

SEQ ID NO: 829341 - RNA, 19 nt, Artificial Sequence
  Description of Artificial Sequence: Synthetic oligonucleotide
cagaagaacucugaagugu

SEQ ID NO: 829342 - RNA, 19 nt, Artificial Sequence
  Description of Artificial Sequence: Synthetic oligonucleotide
acuggccucggaucuuggu

SEQ ID NO: 829343 - RNA, 19 nt, Artificial Sequence
  Description of Artificial Sequence: Synthetic oligonucleotide
ugcagggccguaccuucuc

SEQ ID NO: 829344 - RNA, 19 nt, Artificial Sequence
  Description of Artificial Sequence: Synthetic oligonucleotide
cugguauccgaugucugca

SEQ ID NO: 829345 - RNA, 19 nt, Artificial Sequence
  Description of Artificial Sequence: Synthetic oligonucleotide
aggcgacauucucccuccc

SEQ ID NO: 829346 - RNA, 19 nt, Artificial Sequence
  Description of Artificial Sequence: Synthetic oligonucleotide
agugugggugcuccuugaa

SEQ ID NO: 829347 - RNA, 19 nt, Artificial Sequence
  Description of Artificial Sequence: Synthetic oligonucleotide
guaugucugugccauacuu

SEQ ID NO: 829348 - RNA, 19 nt, Artificial Sequence
  Description of Artificial Sequence: Synthetic oligonucleotide
ggagcugaccuccaggcua

SEQ ID NO: 829349 - RNA, 19 nt, Artificial Sequence
  Description of Artificial Sequence: Synthetic oligonucleotide
aucugguauccgaugucug

SEQ ID NO: 829350 - RNA, 19 nt, Artificial Sequence
  Description of Artificial Sequence: Synthetic oligonucleotide
gguacucugguaacaguuc

SEQ ID NO: 829351 - RNA, 19 nt, Artificial Sequence
  Description of Artificial Sequence: Synthetic oligonucleotide
ccauggaugaguucuguaa

SEQ ID NO: 829352 - RNA, 19 nt, Artificial Sequence
  Description of Artificial Sequence: Synthetic oligonucleotide
cagcccuaucccagcaaug

SEQ ID NO: 829353 - RNA, 19 nt, Artificial Sequence
  Description of Artificial Sequence: Synthetic oligonucleotide
ccgcaccacaucaaugacc

SEQ ID NO: 829354 - RNA, 19 nt, Artificial Sequence
  Description of Artificial Sequence: Synthetic oligonucleotide
cucguuaaaaguguugauu

SEQ ID NO: 829355 - RNA, 19 nt, Artificial Sequence
  Description of Artificial Sequence: Synthetic oligonucleotide
gugagaugagcuccguggu

SEQ ID NO: 829356 - RNA, 19 nt, Artificial Sequence
  Description of Artificial Sequence: Synthetic oligonucleotide
cucgcuggugucauugugu

SEQ ID NO: 829357 - RNA, 19 nt, Artificial Sequence
  Description of Artificial Sequence: Synthetic oligonucleotide
cuuugauuugccgucuuau

SEQ ID NO: 829358 - RNA, 19 nt, Artificial Sequence
  Description of Artificial Sequence: Synthetic oligonucleotide
gccucgauauugcuuuuca

SEQ ID NO: 829359 - RNA, 19 nt, Artificial Sequence
  Description of Artificial Sequence: Synthetic oligonucleotide
ugguccccgaugacugcaa

SEQ ID NO: 829360 - RNA, 19 nt, Artificial Sequence
  Description of Artificial Sequence: Synthetic oligonucleotide
cugguaacaguucuuuauu

SEQ ID NO: 829361 - RNA, 19 nt, Artificial Sequence
  Description of Artificial Sequence: Synthetic oligonucleotide
caguaccucuguccaccag

SEQ ID NO: 829362 - RNA, 19 nt, Artificial Sequence
  Description of Artificial Sequence: Synthetic oligonucleotide
uaacccugugcagcauuuc

SEQ ID NO: 829363 - RNA, 19 nt, Artificial Sequence
  Description of Artificial Sequence: Synthetic oligonucleotide
cucggucaggcucagcugu

SEQ ID NO: 829364 - RNA, 19 nt, Artificial Sequence
  Description of Artificial Sequence: Synthetic oligonucleotide
cugccugcagagguuguuc

SEQ ID NO: 829365 - RNA, 19 nt, Artificial Sequence
  Description of Artificial Sequence: Synthetic oligonucleotide
augcugaccccugcacuug

SEQ ID NO: 829366 - RNA, 19 nt, Artificial Sequence
  Description of Artificial Sequence: Synthetic oligonucleotide
gcucucggccucgauauug

SEQ ID NO: 829367 - RNA, 19 nt, Artificial Sequence
  Description of Artificial Sequence: Synthetic oligonucleotide
cuauggcaguaauguccuc

SEQ ID NO: 829368 - RNA, 19 nt, Artificial Sequence
  Description of Artificial Sequence: Synthetic oligonucleotide
cuuguacuauggcaguaau

SEQ ID NO: 829369 - RNA, 19 nt, Artificial Sequence
  Description of Artificial Sequence: Synthetic oligonucleotide
cauagcugacuuugccucu

SEQ ID NO: 829370 - RNA, 19 nt, Artificial Sequence
  Description of Artificial Sequence: Synthetic oligonucleotide
gagcugaccuccaggcuaa

SEQ ID NO: 829371 - RNA, 19 nt, Artificial Sequence
  Description of Artificial Sequence: Synthetic oligonucleotide
ggcacuguggccuucccau

SEQ ID NO: 829372 - RNA, 19 nt, Artificial Sequence
  Description of Artificial Sequence: Synthetic oligonucleotide
ucggucaggcucagcuguu

SEQ ID NO: 829373 - RNA, 19 nt, Artificial Sequence
  Description of Artificial Sequence: Synthetic oligonucleotide
ucccugagcucuggucccc

SEQ ID NO: 829374 - RNA, 19 nt, Artificial Sequence
  Description of Artificial Sequence: Synthetic oligonucleotide
gaucaggcuuggucaagau

SEQ ID NO: 829375 - RNA, 19 nt, Artificial Sequence
  Description of Artificial Sequence: Synthetic oligonucleotide
agggagucgaugaggucaa

SEQ ID NO: 829376 - RNA, 19 nt, Artificial Sequence
  Description of Artificial Sequence: Synthetic oligonucleotide
ccguggucagucucucugc

SEQ ID NO: 829377 - RNA, 19 nt, Artificial Sequence
  Description of Artificial Sequence: Synthetic oligonucleotide
ugacuaccauguagcccuu

SEQ ID NO: 829378 - RNA, 19 nt, Artificial Sequence
  Description of Artificial Sequence: Synthetic oligonucleotide
uggcuagccggcggcgagc

SEQ ID NO: 829379 - RNA, 19 nt, Artificial Sequence
  Description of Artificial Sequence: Synthetic oligonucleotide
guaguucuguggagguuaa

SEQ ID NO: 829380 - RNA, 19 nt, Artificial Sequence
  Description of Artificial Sequence: Synthetic oligonucleotide
ccugagccaugcucagugc

SEQ ID NO: 829381 - RNA, 19 nt, Artificial Sequence
  Description of Artificial Sequence: Synthetic oligonucleotide
gccagcuuaaccaggaaau

SEQ ID NO: 829382 - RNA, 19 nt, Artificial Sequence
  Description of Artificial Sequence: Synthetic oligonucleotide
ggcggcgagccugagccag

SEQ ID NO: 829383 - RNA, 19 nt, Artificial Sequence
  Description of Artificial Sequence: Synthetic oligonucleotide
cauugucgucuucugguau

SEQ ID NO: 829384 - RNA, 19 nt, Artificial Sequence
  Description of Artificial Sequence: Synthetic oligonucleotide
gggaucacagagcuccacu

SEQ ID NO: 829385 - RNA, 19 nt, Artificial Sequence
  Description of Artificial Sequence: Synthetic oligonucleotide
agcuugacuuugcguuguu

SEQ ID NO: 829386 - RNA, 19 nt, Artificial Sequence
  Description of Artificial Sequence: Synthetic oligonucleotide
agaacuggccucggaucuu

SEQ ID NO: 829387 - RNA, 19 nt, Artificial Sequence
  Description of Artificial Sequence: Synthetic oligonucleotide
gagggaucacagagcucca

SEQ ID NO: 829388 - RNA, 19 nt, Artificial Sequence
  Description of Artificial Sequence: Synthetic oligonucleotide
ccuccccuuguacuauggc

SEQ ID NO: 829389 - RNA, 19 nt, Artificial Sequence
  Description of Artificial Sequence: Synthetic oligonucleotide
cagcuuaaccaggaaauuu

SEQ ID NO: 829390 - RNA, 19 nt, Artificial Sequence
  Description of Artificial Sequence: Synthetic oligonucleotide
caguaauguccucguuaaa

SEQ ID NO: 829391 - RNA, 19 nt, Artificial Sequence
  Description of Artificial Sequence: Synthetic oligonucleotide
cugguccccgaugacugca

SEQ ID NO: 829392 - RNA, 19 nt, Artificial Sequence
  Description of Artificial Sequence: Synthetic oligonucleotide
gggccguaccuucuccuca

SEQ ID NO: 829393 - RNA, 19 nt, Artificial Sequence
  Description of Artificial Sequence: Synthetic oligonucleotide
gcuggagaugcgguuguga

SEQ ID NO: 829394 - RNA, 19 nt, Artificial Sequence
  Description of Artificial Sequence: Synthetic oligonucleotide
cacauucuccuccccuugu

SEQ ID NO: 829395 - RNA, 19 nt, Artificial Sequence
  Description of Artificial Sequence: Synthetic oligonucleotide
gccgucuuaugauguucuc

SEQ ID NO: 829396 - RNA, 19 nt, Artificial Sequence
  Description of Artificial Sequence: Synthetic oligonucleotide
augcgguugugagcuuccu

SEQ ID NO: 829397 - RNA, 19 nt, Artificial Sequence
  Description of Artificial Sequence: Synthetic oligonucleotide
gcuugacuuugcguuguuc

SEQ ID NO: 829398 - RNA, 19 nt, Artificial Sequence
  Description of Artificial Sequence: Synthetic oligonucleotide
guaccucuguccaccagau

SEQ ID NO: 829399 - RNA, 19 nt, Artificial Sequence
  Description of Artificial Sequence: Synthetic oligonucleotide
ccuggaugucaugcugacc

SEQ ID NO: 829400 - RNA, 19 nt, Artificial Sequence
  Description of Artificial Sequence: Synthetic oligonucleotide
ccgucuuaugauguucuca

SEQ ID NO: 829401 - RNA, 19 nt, Artificial Sequence
  Description of Artificial Sequence: Synthetic oligonucleotide
ggcuuggucaagaucccua

SEQ ID NO: 829402 - RNA, 19 nt, Artificial Sequence
  Description of Artificial Sequence: Synthetic oligonucleotide
cugaccccugcacuugacu

SEQ ID NO: 829403 - RNA, 19 nt, Artificial Sequence
  Description of Artificial Sequence: Synthetic oligonucleotide
ccuugacaaucgcuccuuc

SEQ ID NO: 829404 - RNA, 19 nt, Artificial Sequence
  Description of Artificial Sequence: Synthetic oligonucleotide
cagccacccuggugauccc

SEQ ID NO: 829405 - RNA, 19 nt, Artificial Sequence
  Description of Artificial Sequence: Synthetic oligonucleotide
guaacccugugcagcauuu

SEQ ID NO: 829406 - RNA, 19 nt, Artificial Sequence
  Description of Artificial Sequence: Synthetic oligonucleotide
ggcugguugccuacagcca

SEQ ID NO: 829407 - RNA, 19 nt, Artificial Sequence
  Description of Artificial Sequence: Synthetic oligonucleotide
ggcuagccggcggcgagcc

SEQ ID NO: 829408 - RNA, 19 nt, Artificial Sequence
  Description of Artificial Sequence: Synthetic oligonucleotide
agcucucggccucgauauu

SEQ ID NO: 829409 - RNA, 19 nt, Artificial Sequence
  Description of Artificial Sequence: Synthetic oligonucleotide
cucggccucgauauugcuu

SEQ ID NO: 829410 - RNA, 19 nt, Artificial Sequence
  Description of Artificial Sequence: Synthetic oligonucleotide
ggccucgauauugcuuuuc

SEQ ID NO: 829411 - RNA, 19 nt, Artificial Sequence
  Description of Artificial Sequence: Synthetic oligonucleotide
cauaaccacuuuggaaauu

SEQ ID NO: 829412 - RNA, 19 nt, Artificial Sequence
  Description of Artificial Sequence: Synthetic oligonucleotide
cgauauugcuuuucaaauu

SEQ ID NO: 829413 - RNA, 19 nt, Artificial Sequence
  Description of Artificial Sequence: Synthetic oligonucleotide
gcugaccccugcacuugac

SEQ ID NO: 829414 - RNA, 19 nt, Artificial Sequence
  Description of Artificial Sequence: Synthetic oligonucleotide
gcuccguggucagucucuc

SEQ ID NO: 829415 - RNA, 19 nt, Artificial Sequence
  Description of Artificial Sequence: Synthetic oligonucleotide
ccucguuaaaaguguugau

SEQ ID NO: 829416 - RNA, 19 nt, Artificial Sequence
  Description of Artificial Sequence: Synthetic oligonucleotide
gccggcggcgagccugagc

SEQ ID NO: 829417 - RNA, 19 nt, Artificial Sequence
  Description of Artificial Sequence: Synthetic oligonucleotide
ggccguaccuucuccucau

SEQ ID NO: 829418 - RNA, 19 nt, Artificial Sequence
  Description of Artificial Sequence: Synthetic oligonucleotide
cuccguggucagucucucu

SEQ ID NO: 829419 - RNA, 19 nt, Artificial Sequence
  Description of Artificial Sequence: Synthetic oligonucleotide
ccagcccuaucccagcaau

SEQ ID NO: 829420 - RNA, 19 nt, Artificial Sequence
  Description of Artificial Sequence: Synthetic oligonucleotide
gcguuguucuucuccucuu

SEQ ID NO: 829421 - RNA, 19 nt, Artificial Sequence
  Description of Artificial Sequence: Synthetic oligonucleotide
ccacgacgagaacuggccu

SEQ ID NO: 829422 - RNA, 19 nt, Artificial Sequence
  Description of Artificial Sequence: Synthetic oligonucleotide
gcggcgagccugagccagc

SEQ ID NO: 829423 - RNA, 19 nt, Artificial Sequence
  Description of Artificial Sequence: Synthetic oligonucleotide
gguccccgaugacugcaau

SEQ ID NO: 829424 - RNA, 19 nt, Artificial Sequence
  Description of Artificial Sequence: Synthetic oligonucleotide
ccagcuuaaccaggaaauu

SEQ ID NO: 829425 - RNA, 19 nt, Artificial Sequence
  Description of Artificial Sequence: Synthetic oligonucleotide
cgacgagaacuggccucgg

SEQ ID NO: 829426 - RNA, 19 nt, Artificial Sequence
  Description of Artificial Sequence: Synthetic oligonucleotide
agccggcggcgagccugag

SEQ ID NO: 829427 - RNA, 19 nt, Artificial Sequence
  Description of Artificial Sequence: Synthetic oligonucleotide
ccuccaggcuaaugagcuu

SEQ ID NO: 829428 - RNA, 19 nt, Artificial Sequence
  Description of Artificial Sequence: Synthetic oligonucleotide
gcuagccggcggcgagccu

SEQ ID NO: 829429 - RNA, 19 nt, Artificial Sequence
  Description of Artificial Sequence: Synthetic oligonucleotide
gggagucgaugaggucaau

SEQ ID NO: 829430 - RNA, 19 nt, Artificial Sequence
  Description of Artificial Sequence: Synthetic oligonucleotide
cggcggcgagccugagcca

SEQ ID NO: 829431 - RNA, 19 nt, Artificial Sequence
  Description of Artificial Sequence: Synthetic oligonucleotide
ggccccgcagggagucgau

SEQ ID NO: 829432 - RNA, 19 nt, Artificial Sequence
  Description of Artificial Sequence: Synthetic oligonucleotide
cggccucgauauugcuuuu

SEQ ID NO: 829433 - RNA, 19 nt, Artificial Sequence
  Description of Artificial Sequence: Synthetic oligonucleotide
uuugagaggaauaagaacu

SEQ ID NO: 829434 - RNA, 19 nt, Artificial Sequence
  Description of Artificial Sequence: Synthetic oligonucleotide
uugaggaucuccaaaaugg

SEQ ID NO: 829435 - RNA, 19 nt, Artificial Sequence
  Description of Artificial Sequence: Synthetic oligonucleotide
auugacuucagacagaagu

SEQ ID NO: 829436 - RNA, 19 nt, Artificial Sequence
  Description of Artificial Sequence: Synthetic oligonucleotide
agauugaugaauuuccggg

SEQ ID NO: 829437 - RNA, 19 nt, Artificial Sequence
  Description of Artificial Sequence: Synthetic oligonucleotide
caaaauugacuucagacag

SEQ ID NO: 829438 - RNA, 19 nt, Artificial Sequence
  Description of Artificial Sequence: Synthetic oligonucleotide
uugagaauguuugugacgg

SEQ ID NO: 829439 - RNA, 19 nt, Artificial Sequence
  Description of Artificial Sequence: Synthetic oligonucleotide
ucauggaacggucaguggg

SEQ ID NO: 829440 - RNA, 19 nt, Artificial Sequence
  Description of Artificial Sequence: Synthetic oligonucleotide
aaggacuuaagcuucccag

SEQ ID NO: 829441 - RNA, 19 nt, Artificial Sequence
  Description of Artificial Sequence: Synthetic oligonucleotide
uuuacuaguuccgacacag

SEQ ID NO: 829442 - RNA, 19 nt, Artificial Sequence
  Description of Artificial Sequence: Synthetic oligonucleotide
uucugaugauuuuagcugg

SEQ ID NO: 829443 - RNA, 19 nt, Artificial Sequence
  Description of Artificial Sequence: Synthetic oligonucleotide
uguacuagcuucaucucag

SEQ ID NO: 829444 - RNA, 19 nt, Artificial Sequence
  Description of Artificial Sequence: Synthetic oligonucleotide
ugacggaucaucugcagcg

SEQ ID NO: 829445 - RNA, 19 nt, Artificial Sequence
  Description of Artificial Sequence: Synthetic oligonucleotide
ucaggguucaaaaucuugc

SEQ ID NO: 829446 - RNA, 19 nt, Artificial Sequence
  Description of Artificial Sequence: Synthetic oligonucleotide
uguuccaagauugaguuca

SEQ ID NO: 829447 - RNA, 19 nt, Artificial Sequence
  Description of Artificial Sequence: Synthetic oligonucleotide
agaagucccugcuuguugc

SEQ ID NO: 829448 - RNA, 19 nt, Artificial Sequence
  Description of Artificial Sequence: Synthetic oligonucleotide
gauggaggaaaugagcagg

SEQ ID NO: 829449 - RNA, 19 nt, Artificial Sequence
  Description of Artificial Sequence: Synthetic oligonucleotide
ucuacuuugguggagucag

SEQ ID NO: 829450 - RNA, 19 nt, Artificial Sequence
  Description of Artificial Sequence: Synthetic oligonucleotide
uacuaguuccgacacagug

SEQ ID NO: 829451 - RNA, 19 nt, Artificial Sequence
  Description of Artificial Sequence: Synthetic oligonucleotide
agucgcaucagcuucgaag

SEQ ID NO: 829452 - RNA, 19 nt, Artificial Sequence
  Description of Artificial Sequence: Synthetic oligonucleotide
ucugcagcgacuucucacg

SEQ ID NO: 829453 - RNA, 19 nt, Artificial Sequence
  Description of Artificial Sequence: Synthetic oligonucleotide
cuaggauauggauggagcg

SEQ ID NO: 829454 - RNA, 19 nt, Artificial Sequence
  Description of Artificial Sequence: Synthetic oligonucleotide
gucgcaucagcuucgaagg

SEQ ID NO: 829455 - RNA, 19 nt, Artificial Sequence
  Description of Artificial Sequence: Synthetic oligonucleotide
auagcagacaccuuuacua

SEQ ID NO: 829456 - RNA, 19 nt, Artificial Sequence
  Description of Artificial Sequence: Synthetic oligonucleotide
aaucaccacucucucauug

SEQ ID NO: 829457 - RNA, 19 nt, Artificial Sequence
  Description of Artificial Sequence: Synthetic oligonucleotide
ucaguaagcagaccgggca

SEQ ID NO: 829458 - RNA, 19 nt, Artificial Sequence
  Description of Artificial Sequence: Synthetic oligonucleotide
gaaacuugaucuguguugc

SEQ ID NO: 829459 - RNA, 19 nt, Artificial Sequence
  Description of Artificial Sequence: Synthetic oligonucleotide
augucgaagagcaaggcac

SEQ ID NO: 829460 - RNA, 19 nt, Artificial Sequence
  Description of Artificial Sequence: Synthetic oligonucleotide
uguugcagaaccaguagac

SEQ ID NO: 829461 - RNA, 19 nt, Artificial Sequence
  Description of Artificial Sequence: Synthetic oligonucleotide
cuaguuccgacacaguggc

SEQ ID NO: 829462 - RNA, 19 nt, Artificial Sequence
  Description of Artificial Sequence: Synthetic oligonucleotide
gaauguuugugacgguggg

SEQ ID NO: 829463 - RNA, 19 nt, Artificial Sequence
  Description of Artificial Sequence: Synthetic oligonucleotide
uuaaucagguuguugcaga

SEQ ID NO: 829464 - RNA, 19 nt, Artificial Sequence
  Description of Artificial Sequence: Synthetic oligonucleotide
gaagcaaggguggucaggg

SEQ ID NO: 829465 - RNA, 19 nt, Artificial Sequence
  Description of Artificial Sequence: Synthetic oligonucleotide
ugucgaagagcaaggcacg

SEQ ID NO: 829466 - RNA, 19 nt, Artificial Sequence
  Description of Artificial Sequence: Synthetic oligonucleotide
agaaccaguagacgccgcc

SEQ ID NO: 829467 - RNA, 19 nt, Artificial Sequence
  Description of Artificial Sequence: Synthetic oligonucleotide
cacaagccaagccacagcg

SEQ ID NO: 829468 - RNA, 19 nt, Artificial Sequence
  Description of Artificial Sequence: Synthetic oligonucleotide
ucuguugugcgcuugccca

SEQ ID NO: 829469 - RNA, 19 nt, Artificial Sequence
  Description of Artificial Sequence: Synthetic oligonucleotide
aaauugacuucagacagaa

SEQ ID NO: 829470 - RNA, 19 nt, Artificial Sequence
  Description of Artificial Sequence: Synthetic oligonucleotide
cagauugaugaauuuccgg

SEQ ID NO: 829471 - RNA, 19 nt, Artificial Sequence
  Description of Artificial Sequence: Synthetic oligonucleotide
aagacuggcaaaauugacu

SEQ ID NO: 829472 - RNA, 19 nt, Artificial Sequence
  Description of Artificial Sequence: Synthetic oligonucleotide
agcacguccgcacacaugu

SEQ ID NO: 829473 - RNA, 19 nt, Artificial Sequence
  Description of Artificial Sequence: Synthetic oligonucleotide
aguaccuccuugauggggc

SEQ ID NO: 829474 - RNA, 19 nt, Artificial Sequence
  Description of Artificial Sequence: Synthetic oligonucleotide
agaggaauaagaacucagg

SEQ ID NO: 829475 - RNA, 19 nt, Artificial Sequence
  Description of Artificial Sequence: Synthetic oligonucleotide
uggucaggguucaaaaucu

SEQ ID NO: 829476 - RNA, 19 nt, Artificial Sequence
  Description of Artificial Sequence: Synthetic oligonucleotide
aucuguugugcgcuugccc

SEQ ID NO: 829477 - RNA, 19 nt, Artificial Sequence
  Description of Artificial Sequence: Synthetic oligonucleotide
agcuaguuuggcuagugca

SEQ ID NO: 829478 - RNA, 19 nt, Artificial Sequence
  Description of Artificial Sequence: Synthetic oligonucleotide
aauaagaacucagggcgca

SEQ ID NO: 829479 - RNA, 19 nt, Artificial Sequence
  Description of Artificial Sequence: Synthetic oligonucleotide
gacaccuuuacuaguuccg

SEQ ID NO: 829480 - RNA, 19 nt, Artificial Sequence
  Description of Artificial Sequence: Synthetic oligonucleotide
ugugcgcuugcccacaaga

SEQ ID NO: 829481 - RNA, 19 nt, Artificial Sequence
  Description of Artificial Sequence: Synthetic oligonucleotide
agacuggcaaaauugacuu

SEQ ID NO: 829482 - RNA, 19 nt, Artificial Sequence
  Description of Artificial Sequence: Synthetic oligonucleotide
aacuugaucuguguugcug

SEQ ID NO: 829483 - RNA, 19 nt, Artificial Sequence
  Description of Artificial Sequence: Synthetic oligonucleotide
ugugauggccagcacuacc

SEQ ID NO: 829484 - RNA, 19 nt, Artificial Sequence
  Description of Artificial Sequence: Synthetic oligonucleotide
agggugaggucugugaugg

SEQ ID NO: 829485 - RNA, 19 nt, Artificial Sequence
  Description of Artificial Sequence: Synthetic oligonucleotide
gagcaaggcacgaacagag

SEQ ID NO: 829486 - RNA, 19 nt, Artificial Sequence
  Description of Artificial Sequence: Synthetic oligonucleotide
uugagaggaauaagaacuc

SEQ ID NO: 829487 - RNA, 19 nt, Artificial Sequence
  Description of Artificial Sequence: Synthetic oligonucleotide
ugucaguaccuccuugaug

SEQ ID NO: 829488 - RNA, 19 nt, Artificial Sequence
  Description of Artificial Sequence: Synthetic oligonucleotide
ugauggggcgcuugggagg

SEQ ID NO: 829489 - RNA, 19 nt, Artificial Sequence
  Description of Artificial Sequence: Synthetic oligonucleotide
gagaauguuugugacggug

SEQ ID NO: 829490 - RNA, 19 nt, Artificial Sequence
  Description of Artificial Sequence: Synthetic oligonucleotide
gcaaaauugacuucagaca

SEQ ID NO: 829491 - RNA, 19 nt, Artificial Sequence
  Description of Artificial Sequence: Synthetic oligonucleotide
uugacuguguggaguuggg

SEQ ID NO: 829492 - RNA, 19 nt, Artificial Sequence
  Description of Artificial Sequence: Synthetic oligonucleotide
cuuuugagaggaauaagaa

SEQ ID NO: 829493 - RNA, 19 nt, Artificial Sequence
  Description of Artificial Sequence: Synthetic oligonucleotide
augaauuuccgggcaaagg

SEQ ID NO: 829494 - RNA, 19 nt, Artificial Sequence
  Description of Artificial Sequence: Synthetic oligonucleotide
uguacugcccucagugugu

SEQ ID NO: 829495 - RNA, 19 nt, Artificial Sequence
  Description of Artificial Sequence: Synthetic oligonucleotide
guagacgccgcccaugcgc

SEQ ID NO: 829496 - RNA, 19 nt, Artificial Sequence
  Description of Artificial Sequence: Synthetic oligonucleotide
acucuguucagaggguccc

SEQ ID NO: 829497 - RNA, 19 nt, Artificial Sequence
  Description of Artificial Sequence: Synthetic oligonucleotide
ucugcccggaggaucagcc

SEQ ID NO: 829498 - RNA, 19 nt, Artificial Sequence
  Description of Artificial Sequence: Synthetic oligonucleotide
accugcggcaaguccaggc

SEQ ID NO: 829499 - RNA, 19 nt, Artificial Sequence
  Description of Artificial Sequence: Synthetic oligonucleotide
guugacuguguggaguugg

SEQ ID NO: 829500 - RNA, 19 nt, Artificial Sequence
  Description of Artificial Sequence: Synthetic oligonucleotide
guugcagaaccaguagacg

SEQ ID NO: 829501 - RNA, 19 nt, Artificial Sequence
  Description of Artificial Sequence: Synthetic oligonucleotide
aguucauaaucaccacucu

SEQ ID NO: 829502 - RNA, 19 nt, Artificial Sequence
  Description of Artificial Sequence: Synthetic oligonucleotide
aaaauugacuucagacaga

SEQ ID NO: 829503 - RNA, 19 nt, Artificial Sequence
  Description of Artificial Sequence: Synthetic oligonucleotide
cagggugucuaggauaugg

SEQ ID NO: 829504 - RNA, 19 nt, Artificial Sequence
  Description of Artificial Sequence: Synthetic oligonucleotide
caagacuggcaaaauugac

SEQ ID NO: 829505 - RNA, 19 nt, Artificial Sequence
  Description of Artificial Sequence: Synthetic oligonucleotide
cugugucucuucuuguggc

SEQ ID NO: 829506 - RNA, 19 nt, Artificial Sequence
  Description of Artificial Sequence: Synthetic oligonucleotide
cugagcuugccucggagag

SEQ ID NO: 829507 - RNA, 19 nt, Artificial Sequence
  Description of Artificial Sequence: Synthetic oligonucleotide
ugcgcuugcccacaagacu

SEQ ID NO: 829508 - RNA, 19 nt, Artificial Sequence
  Description of Artificial Sequence: Synthetic oligonucleotide
guucauaaucaccacucuc

SEQ ID NO: 829509 - RNA, 19 nt, Artificial Sequence
  Description of Artificial Sequence: Synthetic oligonucleotide
accccguccaggcuacucc

SEQ ID NO: 829510 - RNA, 19 nt, Artificial Sequence
  Description of Artificial Sequence: Synthetic oligonucleotide
gcauccaucgucuugagaa

SEQ ID NO: 829511 - RNA, 19 nt, Artificial Sequence
  Description of Artificial Sequence: Synthetic oligonucleotide
ucagguuguugcagaacca

SEQ ID NO: 829512 - RNA, 19 nt, Artificial Sequence
  Description of Artificial Sequence: Synthetic oligonucleotide
ugagaggaauaagaacuca

SEQ ID NO: 829513 - RNA, 19 nt, Artificial Sequence
  Description of Artificial Sequence: Synthetic oligonucleotide
gacucgacagaauguuggc

SEQ ID NO: 829514 - RNA, 19 nt, Artificial Sequence
  Description of Artificial Sequence: Synthetic oligonucleotide
auauggauggagcggcugu

SEQ ID NO: 829515 - RNA, 19 nt, Artificial Sequence
  Description of Artificial Sequence: Synthetic oligonucleotide
cagacugcauaccuuuccc

SEQ ID NO: 829516 - RNA, 19 nt, Artificial Sequence
  Description of Artificial Sequence: Synthetic oligonucleotide
uugaguucauaaucaccac

SEQ ID NO: 829517 - RNA, 19 nt, Artificial Sequence
  Description of Artificial Sequence: Synthetic oligonucleotide
cagcugacggaucaucugc

SEQ ID NO: 829518 - RNA, 19 nt, Artificial Sequence
  Description of Artificial Sequence: Synthetic oligonucleotide
ggguagugaacucauucag

SEQ ID NO: 829519 - RNA, 19 nt, Artificial Sequence
  Description of Artificial Sequence: Synthetic oligonucleotide
ugccacuucaucuguacua

SEQ ID NO: 829520 - RNA, 19 nt, Artificial Sequence
  Description of Artificial Sequence: Synthetic oligonucleotide
aacucagggcgcaccacac

SEQ ID NO: 829521 - RNA, 19 nt, Artificial Sequence
  Description of Artificial Sequence: Synthetic oligonucleotide
gaacucauucagauugaug

SEQ ID NO: 829522 - RNA, 19 nt, Artificial Sequence
  Description of Artificial Sequence: Synthetic oligonucleotide
aguaagcagaccgggcagg

SEQ ID NO: 829523 - RNA, 19 nt, Artificial Sequence
  Description of Artificial Sequence: Synthetic oligonucleotide
ggacucgacagaauguugg

SEQ ID NO: 829524 - RNA, 19 nt, Artificial Sequence
  Description of Artificial Sequence: Synthetic oligonucleotide
ucuguacuagcuucaucuc

SEQ ID NO: 829525 - RNA, 19 nt, Artificial Sequence
  Description of Artificial Sequence: Synthetic oligonucleotide
ugugccacuuggaggaguc

SEQ ID NO: 829526 - RNA, 19 nt, Artificial Sequence
  Description of Artificial Sequence: Synthetic oligonucleotide
gcaaggcacgaacagaggc

SEQ ID NO: 829527 - RNA, 19 nt, Artificial Sequence
  Description of Artificial Sequence: Synthetic oligonucleotide
ugcccggaggaucagccca

SEQ ID NO: 829528 - RNA, 19 nt, Artificial Sequence
  Description of Artificial Sequence: Synthetic oligonucleotide
acagcgcacacugccagac

SEQ ID NO: 829529 - RNA, 19 nt, Artificial Sequence
  Description of Artificial Sequence: Synthetic oligonucleotide
uccugagcuugccucggag

SEQ ID NO: 829530 - RNA, 19 nt, Artificial Sequence
  Description of Artificial Sequence: Synthetic oligonucleotide
aguagggcauuguguccac

SEQ ID NO: 829531 - RNA, 19 nt, Artificial Sequence
  Description of Artificial Sequence: Synthetic oligonucleotide
ggucagugggacucgacag

SEQ ID NO: 829532 - RNA, 19 nt, Artificial Sequence
  Description of Artificial Sequence: Synthetic oligonucleotide
aguuccgacacaguggcaa

SEQ ID NO: 829533 - RNA, 19 nt, Artificial Sequence
  Description of Artificial Sequence: Synthetic oligonucleotide
agugcagcgauggcuuugg

SEQ ID NO: 829534 - RNA, 19 nt, Artificial Sequence
  Description of Artificial Sequence: Synthetic oligonucleotide
ugugacggugggcucugcc

SEQ ID NO: 829535 - RNA, 19 nt, Artificial Sequence
  Description of Artificial Sequence: Synthetic oligonucleotide
gauauggauggagcggcug

SEQ ID NO: 829536 - RNA, 19 nt, Artificial Sequence
  Description of Artificial Sequence: Synthetic oligonucleotide
agcggcuguccacccagcc

SEQ ID NO: 829537 - RNA, 19 nt, Artificial Sequence
  Description of Artificial Sequence: Synthetic oligonucleotide
gggcgcaccacacagcuag

SEQ ID NO: 829538 - RNA, 19 nt, Artificial Sequence
  Description of Artificial Sequence: Synthetic oligonucleotide
auguguuccaagauugagu

SEQ ID NO: 829539 - RNA, 19 nt, Artificial Sequence
  Description of Artificial Sequence: Synthetic oligonucleotide
gaacagguuggccaggacu

SEQ ID NO: 829540 - RNA, 19 nt, Artificial Sequence
  Description of Artificial Sequence: Synthetic oligonucleotide
gucuaggauauggauggag

SEQ ID NO: 829541 - RNA, 19 nt, Artificial Sequence
  Description of Artificial Sequence: Synthetic oligonucleotide
cacucucucauuguagaac

SEQ ID NO: 829542 - RNA, 19 nt, Artificial Sequence
  Description of Artificial Sequence: Synthetic oligonucleotide
uggaguagaguagcuguac

SEQ ID NO: 829543 - RNA, 19 nt, Artificial Sequence
  Description of Artificial Sequence: Synthetic oligonucleotide
gguggagucaggccggaag

SEQ ID NO: 829544 - RNA, 19 nt, Artificial Sequence
  Description of Artificial Sequence: Synthetic oligonucleotide
cuuggggcuggacauagca

SEQ ID NO: 829545 - RNA, 19 nt, Artificial Sequence
  Description of Artificial Sequence: Synthetic oligonucleotide
cuccaaaauggcugcugag

SEQ ID NO: 829546 - RNA, 19 nt, Artificial Sequence
  Description of Artificial Sequence: Synthetic oligonucleotide
ccaggcuacuccaagcucc

SEQ ID NO: 829547 - RNA, 19 nt, Artificial Sequence
  Description of Artificial Sequence: Synthetic oligonucleotide
cagguuguugcagaaccag

SEQ ID NO: 829548 - RNA, 19 nt, Artificial Sequence
  Description of Artificial Sequence: Synthetic oligonucleotide
caccacucucucauuguag

SEQ ID NO: 829549 - RNA, 19 nt, Artificial Sequence
  Description of Artificial Sequence: Synthetic oligonucleotide
gaagagcaaggcacgaaca

SEQ ID NO: 829550 - RNA, 19 nt, Artificial Sequence
  Description of Artificial Sequence: Synthetic oligonucleotide
ucccggacagcaugugucc

SEQ ID NO: 829551 - RNA, 19 nt, Artificial Sequence
  Description of Artificial Sequence: Synthetic oligonucleotide
gggucccucauguugacug

SEQ ID NO: 829552 - RNA, 19 nt, Artificial Sequence
  Description of Artificial Sequence: Synthetic oligonucleotide
gaaccaguagacgccgccc

SEQ ID NO: 829553 - RNA, 19 nt, Artificial Sequence
  Description of Artificial Sequence: Synthetic oligonucleotide
ugccucggagagaaucacc

SEQ ID NO: 829554 - RNA, 19 nt, Artificial Sequence
  Description of Artificial Sequence: Synthetic oligonucleotide
gacucuguucagagggucc

SEQ ID NO: 829555 - RNA, 19 nt, Artificial Sequence
  Description of Artificial Sequence: Synthetic oligonucleotide
gugacggugggcucugccc

SEQ ID NO: 829556 - RNA, 19 nt, Artificial Sequence
  Description of Artificial Sequence: Synthetic oligonucleotide
cauaaucaccacucucuca

SEQ ID NO: 829557 - RNA, 19 nt, Artificial Sequence
  Description of Artificial Sequence: Synthetic oligonucleotide
cuugccucggagagaauca

SEQ ID NO: 829558 - RNA, 19 nt, Artificial Sequence
  Description of Artificial Sequence: Synthetic oligonucleotide
gcuaguuuggcuagugcag

SEQ ID NO: 829559 - RNA, 19 nt, Artificial Sequence
  Description of Artificial Sequence: Synthetic oligonucleotide
cuuguggcgggaagcugcc

SEQ ID NO: 829560 - RNA, 19 nt, Artificial Sequence
  Description of Artificial Sequence: Synthetic oligonucleotide
uuacuaguuccgacacagu

SEQ ID NO: 829561 - RNA, 19 nt, Artificial Sequence
  Description of Artificial Sequence: Synthetic oligonucleotide
guagcuguacugcccucag

SEQ ID NO: 829562 - RNA, 19 nt, Artificial Sequence
  Description of Artificial Sequence: Synthetic oligonucleotide
gggagcuguucauggaacg

SEQ ID NO: 829563 - RNA, 19 nt, Artificial Sequence
  Description of Artificial Sequence: Synthetic oligonucleotide
aagauggaguagaguagcu

SEQ ID NO: 829564 - RNA, 19 nt, Artificial Sequence
  Description of Artificial Sequence: Synthetic oligonucleotide
ucgacagaauguuggcauc

SEQ ID NO: 829565 - RNA, 19 nt, Artificial Sequence
  Description of Artificial Sequence: Synthetic oligonucleotide
auaccuuucccuugauauu

SEQ ID NO: 829566 - RNA, 19 nt, Artificial Sequence
  Description of Artificial Sequence: Synthetic oligonucleotide
ugcggcaaguccaggcaga

SEQ ID NO: 829567 - RNA, 19 nt, Artificial Sequence
  Description of Artificial Sequence: Synthetic oligonucleotide
guucaaaaucuugcccucc

SEQ ID NO: 829568 - RNA, 19 nt, Artificial Sequence
  Description of Artificial Sequence: Synthetic oligonucleotide
cuguacuagcuucaucuca

SEQ ID NO: 829569 - RNA, 19 nt, Artificial Sequence
  Description of Artificial Sequence: Synthetic oligonucleotide
caccuuuacuaguuccgac

SEQ ID NO: 829570 - RNA, 19 nt, Artificial Sequence
  Description of Artificial Sequence: Synthetic oligonucleotide
cacguggcacagcaugagg

SEQ ID NO: 829571 - RNA, 19 nt, Artificial Sequence
  Description of Artificial Sequence: Synthetic oligonucleotide
ccucauguugacugugugg

SEQ ID NO: 829572 - RNA, 19 nt, Artificial Sequence
  Description of Artificial Sequence: Synthetic oligonucleotide
aguagacgccgcccaugcg

SEQ ID NO: 829573 - RNA, 19 nt, Artificial Sequence
  Description of Artificial Sequence: Synthetic oligonucleotide
agucaggccggaagcaagg

SEQ ID NO: 829574 - RNA, 19 nt, Artificial Sequence
  Description of Artificial Sequence: Synthetic oligonucleotide
ggcauuguguccacgcccg

SEQ ID NO: 829575 - RNA, 19 nt, Artificial Sequence
  Description of Artificial Sequence: Synthetic oligonucleotide
uccaggcuacuccaagcuc

SEQ ID NO: 829576 - RNA, 19 nt, Artificial Sequence
  Description of Artificial Sequence: Synthetic oligonucleotide
cuacuuugguggagucagg

SEQ ID NO: 829577 - RNA, 19 nt, Artificial Sequence
  Description of Artificial Sequence: Synthetic oligonucleotide
ugaacucauucagauugau

SEQ ID NO: 829578 - RNA, 19 nt, Artificial Sequence
  Description of Artificial Sequence: Synthetic oligonucleotide
ugaagcacguccgcacaca

SEQ ID NO: 829579 - RNA, 19 nt, Artificial Sequence
  Description of Artificial Sequence: Synthetic oligonucleotide
caguaccuccuugaugggg

SEQ ID NO: 829580 - RNA, 19 nt, Artificial Sequence
  Description of Artificial Sequence: Synthetic oligonucleotide
ccuuuacuaguuccgacac

SEQ ID NO: 829581 - RNA, 19 nt, Artificial Sequence
  Description of Artificial Sequence: Synthetic oligonucleotide
ugggacucgacagaauguu

SEQ ID NO: 829582 - RNA, 19 nt, Artificial Sequence
  Description of Artificial Sequence: Synthetic oligonucleotide
uucccuugauauugucagu

SEQ ID NO: 829583 - RNA, 19 nt, Artificial Sequence
  Description of Artificial Sequence: Synthetic oligonucleotide
acagcuaguuuggcuagug

SEQ ID NO: 829584 - RNA, 19 nt, Artificial Sequence
  Description of Artificial Sequence: Synthetic oligonucleotide
caaaggacuuaagcuuccc

SEQ ID NO: 829585 - RNA, 19 nt, Artificial Sequence
  Description of Artificial Sequence: Synthetic oligonucleotide
gcauugaggaucuccaaaa

SEQ ID NO: 829586 - RNA, 19 nt, Artificial Sequence
  Description of Artificial Sequence: Synthetic oligonucleotide
cagcuaguuuggcuagugc

SEQ ID NO: 829587 - RNA, 19 nt, Artificial Sequence
  Description of Artificial Sequence: Synthetic oligonucleotide
uuugugacggugggcucug

SEQ ID NO: 829588 - RNA, 19 nt, Artificial Sequence
  Description of Artificial Sequence: Synthetic oligonucleotide
acacuccuccaugaaccac

SEQ ID NO: 829589 - RNA, 19 nt, Artificial Sequence
  Description of Artificial Sequence: Synthetic oligonucleotide
augccacuucaucuguacu

SEQ ID NO: 829590 - RNA, 19 nt, Artificial Sequence
  Description of Artificial Sequence: Synthetic oligonucleotide
gucaguaagcagaccgggc

SEQ ID NO: 829591 - RNA, 19 nt, Artificial Sequence
  Description of Artificial Sequence: Synthetic oligonucleotide
caccucugagccauagguc

SEQ ID NO: 829592 - RNA, 19 nt, Artificial Sequence
  Description of Artificial Sequence: Synthetic oligonucleotide
gucccgaucuguugugcgc

SEQ ID NO: 829593 - RNA, 19 nt, Artificial Sequence
  Description of Artificial Sequence: Synthetic oligonucleotide
ggaacggucagugggacuc

SEQ ID NO: 829594 - RNA, 19 nt, Artificial Sequence
  Description of Artificial Sequence: Synthetic oligonucleotide
acucgacagaauguuggca

SEQ ID NO: 829595 - RNA, 19 nt, Artificial Sequence
  Description of Artificial Sequence: Synthetic oligonucleotide
uggcuagugcagugccagg

SEQ ID NO: 829596 - RNA, 19 nt, Artificial Sequence
  Description of Artificial Sequence: Synthetic oligonucleotide
guccgcacacauguguucc

SEQ ID NO: 829597 - RNA, 19 nt, Artificial Sequence
  Description of Artificial Sequence: Synthetic oligonucleotide
guuaggcuggauguuggca

SEQ ID NO: 829598 - RNA, 19 nt, Artificial Sequence
  Description of Artificial Sequence: Synthetic oligonucleotide
ggucccgaucuguugugcg

SEQ ID NO: 829599 - RNA, 19 nt, Artificial Sequence
  Description of Artificial Sequence: Synthetic oligonucleotide
ucacuguacaguggcccug

SEQ ID NO: 829600 - RNA, 19 nt, Artificial Sequence
  Description of Artificial Sequence: Synthetic oligonucleotide
acguggcacagcaugagga

SEQ ID NO: 829601 - RNA, 19 nt, Artificial Sequence
  Description of Artificial Sequence: Synthetic oligonucleotide
uguugacuguguggaguug

SEQ ID NO: 829602 - RNA, 19 nt, Artificial Sequence
  Description of Artificial Sequence: Synthetic oligonucleotide
gucagugggacucgacaga

SEQ ID NO: 829603 - RNA, 19 nt, Artificial Sequence
  Description of Artificial Sequence: Synthetic oligonucleotide
accuuggggcuggacauag

SEQ ID NO: 829604 - RNA, 19 nt, Artificial Sequence
  Description of Artificial Sequence: Synthetic oligonucleotide
agcaaggcacgaacagagg

SEQ ID NO: 829605 - RNA, 19 nt, Artificial Sequence
  Description of Artificial Sequence: Synthetic oligonucleotide
ccgggcaaaggacuuaagc

SEQ ID NO: 829606 - RNA, 19 nt, Artificial Sequence
  Description of Artificial Sequence: Synthetic oligonucleotide
gccacuucaucuguacuag

SEQ ID NO: 829607 - RNA, 19 nt, Artificial Sequence
  Description of Artificial Sequence: Synthetic oligonucleotide
ucccgaucuguugugcgcu

SEQ ID NO: 829608 - RNA, 19 nt, Artificial Sequence
  Description of Artificial Sequence: Synthetic oligonucleotide
gagcuugccucggagagaa

SEQ ID NO: 829609 - RNA, 19 nt, Artificial Sequence
  Description of Artificial Sequence: Synthetic oligonucleotide
caucuguacuagcuucauc

SEQ ID NO: 829610 - RNA, 19 nt, Artificial Sequence
  Description of Artificial Sequence: Synthetic oligonucleotide
ugacuguguggaguuggga

SEQ ID NO: 829611 - RNA, 19 nt, Artificial Sequence
  Description of Artificial Sequence: Synthetic oligonucleotide
uccgggcaaaggacuuaag

SEQ ID NO: 829612 - RNA, 19 nt, Artificial Sequence
  Description of Artificial Sequence: Synthetic oligonucleotide
cucgacagaauguuggcau

SEQ ID NO: 829613 - RNA, 19 nt, Artificial Sequence
  Description of Artificial Sequence: Synthetic oligonucleotide
ggcaugcaggucugcaucc

SEQ ID NO: 829614 - RNA, 19 nt, Artificial Sequence
  Description of Artificial Sequence: Synthetic oligonucleotide
uguugugcgcuugcccaca

SEQ ID NO: 829615 - RNA, 19 nt, Artificial Sequence
  Description of Artificial Sequence: Synthetic oligonucleotide
uugugcgcuugcccacaag

SEQ ID NO: 829616 - RNA, 19 nt, Artificial Sequence
  Description of Artificial Sequence: Synthetic oligonucleotide
uccgcacacauguguucca

SEQ ID NO: 829617 - RNA, 19 nt, Artificial Sequence
  Description of Artificial Sequence: Synthetic oligonucleotide
cuuuacuaguuccgacaca

SEQ ID NO: 829618 - RNA, 19 nt, Artificial Sequence
  Description of Artificial Sequence: Synthetic oligonucleotide
caguguguguuccuugcga

SEQ ID NO: 829619 - RNA, 19 nt, Artificial Sequence
  Description of Artificial Sequence: Synthetic oligonucleotide
cuguugugcgcuugcccac

SEQ ID NO: 829620 - RNA, 19 nt, Artificial Sequence
  Description of Artificial Sequence: Synthetic oligonucleotide
ugcucaggagucgcaucag

SEQ ID NO: 829621 - RNA, 19 nt, Artificial Sequence
  Description of Artificial Sequence: Synthetic oligonucleotide
cugcagcgacuucucacgc

SEQ ID NO: 829622 - RNA, 19 nt, Artificial Sequence
  Description of Artificial Sequence: Synthetic oligonucleotide
ugauauugucagugaucuu

SEQ ID NO: 829623 - RNA, 19 nt, Artificial Sequence
  Description of Artificial Sequence: Synthetic oligonucleotide
ggcuacuccaagcuccuca

SEQ ID NO: 829624 - RNA, 19 nt, Artificial Sequence
  Description of Artificial Sequence: Synthetic oligonucleotide
cagcauccggacgugggcc

SEQ ID NO: 829625 - RNA, 19 nt, Artificial Sequence
  Description of Artificial Sequence: Synthetic oligonucleotide
gauggggcgcuugggagga

SEQ ID NO: 829626 - RNA, 19 nt, Artificial Sequence
  Description of Artificial Sequence: Synthetic oligonucleotide
ccucagagugcagcgaugg

SEQ ID NO: 829627 - RNA, 19 nt, Artificial Sequence
  Description of Artificial Sequence: Synthetic oligonucleotide
ggcauugaggaucuccaaa

SEQ ID NO: 829628 - RNA, 19 nt, Artificial Sequence
  Description of Artificial Sequence: Synthetic oligonucleotide
uccaugaggcugugccacu

SEQ ID NO: 829629 - RNA, 19 nt, Artificial Sequence
  Description of Artificial Sequence: Synthetic oligonucleotide
cauuguguccacgcccgug

SEQ ID NO: 829630 - RNA, 19 nt, Artificial Sequence
  Description of Artificial Sequence: Synthetic oligonucleotide
uuccgggcaaaggacuuaa

SEQ ID NO: 829631 - RNA, 19 nt, Artificial Sequence
  Description of Artificial Sequence: Synthetic oligonucleotide
cugcauaccuuucccuuga

SEQ ID NO: 829632 - RNA, 19 nt, Artificial Sequence
  Description of Artificial Sequence: Synthetic oligonucleotide
gaccgggcaggauguggcc

SEQ ID NO: 829633 - RNA, 19 nt, Artificial Sequence
  Description of Artificial Sequence: Synthetic oligonucleotide
aggccggaagcaagggugg

SEQ ID NO: 829634 - RNA, 19 nt, Artificial Sequence
  Description of Artificial Sequence: Synthetic oligonucleotide
caaggcacgaacagaggcu

SEQ ID NO: 829635 - RNA, 19 nt, Artificial Sequence
  Description of Artificial Sequence: Synthetic oligonucleotide
gagugcagcgauggcuuug

SEQ ID NO: 829636 - RNA, 19 nt, Artificial Sequence
  Description of Artificial Sequence: Synthetic oligonucleotide
gucaggccggaagcaaggg

SEQ ID NO: 829637 - RNA, 19 nt, Artificial Sequence
  Description of Artificial Sequence: Synthetic oligonucleotide
cauagcagacaccuuuacu

SEQ ID NO: 829638 - RNA, 19 nt, Artificial Sequence
  Description of Artificial Sequence: Synthetic oligonucleotide
cauuguagaacugcagggu

SEQ ID NO: 829639 - RNA, 19 nt, Artificial Sequence
  Description of Artificial Sequence: Synthetic oligonucleotide
uugccucggagagaaucac

SEQ ID NO: 829640 - RNA, 19 nt, Artificial Sequence
  Description of Artificial Sequence: Synthetic oligonucleotide
ugccauggguagugaacuc

SEQ ID NO: 829641 - RNA, 19 nt, Artificial Sequence
  Description of Artificial Sequence: Synthetic oligonucleotide
ggguuaggcuggauguugg

SEQ ID NO: 829642 - RNA, 19 nt, Artificial Sequence
  Description of Artificial Sequence: Synthetic oligonucleotide
agaggcugauauaguccuc

SEQ ID NO: 829643 - RNA, 19 nt, Artificial Sequence
  Description of Artificial Sequence: Synthetic oligonucleotide
guacuagcuucaucucaga

SEQ ID NO: 829644 - RNA, 19 nt, Artificial Sequence
  Description of Artificial Sequence: Synthetic oligonucleotide
cagcuucgaaggcugcaug

SEQ ID NO: 829645 - RNA, 19 nt, Artificial Sequence
  Description of Artificial Sequence: Synthetic oligonucleotide
aagcacguccgcacacaug

SEQ ID NO: 829646 - RNA, 19 nt, Artificial Sequence
  Description of Artificial Sequence: Synthetic oligonucleotide
gacucuacuuugguggagu

SEQ ID NO: 829647 - RNA, 19 nt, Artificial Sequence
  Description of Artificial Sequence: Synthetic oligonucleotide
agcagaccgggcaggaugu

SEQ ID NO: 829648 - RNA, 19 nt, Artificial Sequence
  Description of Artificial Sequence: Synthetic oligonucleotide
ugucuaggauauggaugga

SEQ ID NO: 829649 - RNA, 19 nt, Artificial Sequence
  Description of Artificial Sequence: Synthetic oligonucleotide
uggaggaaaugagcaggaa

SEQ ID NO: 829650 - RNA, 19 nt, Artificial Sequence
  Description of Artificial Sequence: Synthetic oligonucleotide
agcgacuucucacgcucau

SEQ ID NO: 829651 - RNA, 19 nt, Artificial Sequence
  Description of Artificial Sequence: Synthetic oligonucleotide
uggggcgcuugggaggaag

SEQ ID NO: 829652 - RNA, 19 nt, Artificial Sequence
  Description of Artificial Sequence: Synthetic oligonucleotide
gaugcucaggcaggcuuca

SEQ ID NO: 829653 - RNA, 19 nt, Artificial Sequence
  Description of Artificial Sequence: Synthetic oligonucleotide
cauguugacuguguggagu

SEQ ID NO: 829654 - RNA, 19 nt, Artificial Sequence
  Description of Artificial Sequence: Synthetic oligonucleotide
ccaguagggcauugugucc

SEQ ID NO: 829655 - RNA, 19 nt, Artificial Sequence
  Description of Artificial Sequence: Synthetic oligonucleotide
cauccagccccagcauccg

SEQ ID NO: 829656 - RNA, 19 nt, Artificial Sequence
  Description of Artificial Sequence: Synthetic oligonucleotide
agggugucuaggauaugga

SEQ ID NO: 829657 - RNA, 19 nt, Artificial Sequence
  Description of Artificial Sequence: Synthetic oligonucleotide
ccgacacaguggcaaaggg

SEQ ID NO: 829658 - RNA, 19 nt, Artificial Sequence
  Description of Artificial Sequence: Synthetic oligonucleotide
aacggucagugggacucga

SEQ ID NO: 829659 - RNA, 19 nt, Artificial Sequence
  Description of Artificial Sequence: Synthetic oligonucleotide
ggugggcucugcccggagg

SEQ ID NO: 829660 - RNA, 19 nt, Artificial Sequence
  Description of Artificial Sequence: Synthetic oligonucleotide
ggucaccugcggcaagucc

SEQ ID NO: 829661 - RNA, 19 nt, Artificial Sequence
  Description of Artificial Sequence: Synthetic oligonucleotide
cuugccgaccgaggggcag

SEQ ID NO: 829662 - RNA, 19 nt, Artificial Sequence
  Description of Artificial Sequence: Synthetic oligonucleotide
aggcugauauaguccucaa

SEQ ID NO: 829663 - RNA, 19 nt, Artificial Sequence
  Description of Artificial Sequence: Synthetic oligonucleotide
cuucgaaggcugcaugucu

SEQ ID NO: 829664 - RNA, 19 nt, Artificial Sequence
  Description of Artificial Sequence: Synthetic oligonucleotide
cguggauggaaacuugauc

SEQ ID NO: 829665 - RNA, 19 nt, Artificial Sequence
  Description of Artificial Sequence: Synthetic oligonucleotide
gacgugggccacaagccaa

SEQ ID NO: 829666 - RNA, 19 nt, Artificial Sequence
  Description of Artificial Sequence: Synthetic oligonucleotide
cacgcccguggauggaaac

SEQ ID NO: 829667 - RNA, 19 nt, Artificial Sequence
  Description of Artificial Sequence: Synthetic oligonucleotide
guccaggcuacuccaagcu

SEQ ID NO: 829668 - RNA, 19 nt, Artificial Sequence
  Description of Artificial Sequence: Synthetic oligonucleotide
cugcauccaucgucuugag

SEQ ID NO: 829669 - RNA, 19 nt, Artificial Sequence
  Description of Artificial Sequence: Synthetic oligonucleotide
gagcuguucauggaacggu

SEQ ID NO: 829670 - RNA, 19 nt, Artificial Sequence
  Description of Artificial Sequence: Synthetic oligonucleotide
auuuccgggcaaaggacuu

SEQ ID NO: 829671 - RNA, 19 nt, Artificial Sequence
  Description of Artificial Sequence: Synthetic oligonucleotide
gcuugccucggagagaauc

SEQ ID NO: 829672 - RNA, 19 nt, Artificial Sequence
  Description of Artificial Sequence: Synthetic oligonucleotide
uuuccgggcaaaggacuua

SEQ ID NO: 829673 - RNA, 19 nt, Artificial Sequence
  Description of Artificial Sequence: Synthetic oligonucleotide
guaagcagaccgggcagga

SEQ ID NO: 829674 - RNA, 19 nt, Artificial Sequence
  Description of Artificial Sequence: Synthetic oligonucleotide
ggcgcuugggaggaagcag

SEQ ID NO: 829675 - RNA, 19 nt, Artificial Sequence
  Description of Artificial Sequence: Synthetic oligonucleotide
gugcgcuugcccacaagac

SEQ ID NO: 829676 - RNA, 19 nt, Artificial Sequence
  Description of Artificial Sequence: Synthetic oligonucleotide
uaccuccuugauggggcgc

SEQ ID NO: 829677 - RNA, 19 nt, Artificial Sequence
  Description of Artificial Sequence: Synthetic oligonucleotide
cugcccucaguguguguuc

SEQ ID NO: 829678 - RNA, 19 nt, Artificial Sequence
  Description of Artificial Sequence: Synthetic oligonucleotide
guacugcccucagugugug

SEQ ID NO: 829679 - RNA, 19 nt, Artificial Sequence
  Description of Artificial Sequence: Synthetic oligonucleotide
guuccgacacaguggcaaa

SEQ ID NO: 829680 - RNA, 19 nt, Artificial Sequence
  Description of Artificial Sequence: Synthetic oligonucleotide
gacgccgcccaugcgcagc

SEQ ID NO: 829681 - RNA, 19 nt, Artificial Sequence
  Description of Artificial Sequence: Synthetic oligonucleotide
gccgagagggagcuguuca

SEQ ID NO: 829682 - RNA, 19 nt, Artificial Sequence
  Description of Artificial Sequence: Synthetic oligonucleotide
gaccgaggggcagggugag

SEQ ID NO: 829683 - RNA, 19 nt, Artificial Sequence
  Description of Artificial Sequence: Synthetic oligonucleotide
guuugugacggugggcucu

SEQ ID NO: 829684 - RNA, 19 nt, Artificial Sequence
  Description of Artificial Sequence: Synthetic oligonucleotide
acggucagugggacucgac

SEQ ID NO: 829685 - RNA, 19 nt, Artificial Sequence
  Description of Artificial Sequence: Synthetic oligonucleotide
aggccaccaaggacucuac

SEQ ID NO: 829686 - RNA, 19 nt, Artificial Sequence
  Description of Artificial Sequence: Synthetic oligonucleotide
cauugaggaucuccaaaau

SEQ ID NO: 829687 - RNA, 19 nt, Artificial Sequence
  Description of Artificial Sequence: Synthetic oligonucleotide
ggacgugggccacaagcca

SEQ ID NO: 829688 - RNA, 19 nt, Artificial Sequence
  Description of Artificial Sequence: Synthetic oligonucleotide
acgcccguggauggaaacu

SEQ ID NO: 829689 - RNA, 19 nt, Artificial Sequence
  Description of Artificial Sequence: Synthetic oligonucleotide
gggacucgacagaauguug

SEQ ID NO: 829690 - RNA, 19 nt, Artificial Sequence
  Description of Artificial Sequence: Synthetic oligonucleotide
cguccaggcuacuccaagc

SEQ ID NO: 829691 - RNA, 19 nt, Artificial Sequence
  Description of Artificial Sequence: Synthetic oligonucleotide
gcggcuguccacccagccc

SEQ ID NO: 829692 - RNA, 19 nt, Artificial Sequence
  Description of Artificial Sequence: Synthetic oligonucleotide
cacguccgcacacaugugu

SEQ ID NO: 829693 - RNA, 19 nt, Artificial Sequence
  Description of Artificial Sequence: Synthetic oligonucleotide
uccggacgugggccacaag

SEQ ID NO: 829694 - RNA, 19 nt, Artificial Sequence
  Description of Artificial Sequence: Synthetic oligonucleotide
gccauggguagugaacuca

SEQ ID NO: 829695 - RNA, 19 nt, Artificial Sequence
  Description of Artificial Sequence: Synthetic oligonucleotide
ggcgggaagcugccugucc

SEQ ID NO: 829696 - RNA, 19 nt, Artificial Sequence
  Description of Artificial Sequence: Synthetic oligonucleotide
cagaggaguuguugagcaa

SEQ ID NO: 829697 - RNA, 19 nt, Artificial Sequence
  Description of Artificial Sequence: Synthetic oligonucleotide
ccaggguuaggcuggaugu

SEQ ID NO: 829698 - RNA, 19 nt, Artificial Sequence
  Description of Artificial Sequence: Synthetic oligonucleotide
guguuccuugcgagucucc

SEQ ID NO: 829699 - RNA, 19 nt, Artificial Sequence
  Description of Artificial Sequence: Synthetic oligonucleotide
gcuucgaaggcugcauguc

SEQ ID NO: 829700 - RNA, 19 nt, Artificial Sequence
  Description of Artificial Sequence: Synthetic oligonucleotide
ccaagcuccucagagugca

SEQ ID NO: 829701 - RNA, 19 nt, Artificial Sequence
  Description of Artificial Sequence: Synthetic oligonucleotide
cauccaucgucuugagaau

SEQ ID NO: 829702 - RNA, 19 nt, Artificial Sequence
  Description of Artificial Sequence: Synthetic oligonucleotide
ucccugcuuguugcauucu

SEQ ID NO: 829703 - RNA, 19 nt, Artificial Sequence
  Description of Artificial Sequence: Synthetic oligonucleotide
acguccgcacacauguguu

SEQ ID NO: 829704 - RNA, 19 nt, Artificial Sequence
  Description of Artificial Sequence: Synthetic oligonucleotide
ugcgggagcccaggaugga

SEQ ID NO: 829705 - RNA, 19 nt, Artificial Sequence
  Description of Artificial Sequence: Synthetic oligonucleotide
ccuugcgagucuccuucag

SEQ ID NO: 829706 - RNA, 19 nt, Artificial Sequence
  Description of Artificial Sequence: Synthetic oligonucleotide
ggggucccgaucuguugug

SEQ ID NO: 829707 - RNA, 19 nt, Artificial Sequence
  Description of Artificial Sequence: Synthetic oligonucleotide
gguggucaggguucaaaau

SEQ ID NO: 829708 - RNA, 19 nt, Artificial Sequence
  Description of Artificial Sequence: Synthetic oligonucleotide
cgaucuguugugcgcuugc

SEQ ID NO: 829709 - RNA, 19 nt, Artificial Sequence
  Description of Artificial Sequence: Synthetic oligonucleotide
aggcuacuccaagcuccuc

SEQ ID NO: 829710 - RNA, 19 nt, Artificial Sequence
  Description of Artificial Sequence: Synthetic oligonucleotide
gggccacaagccaagccac

SEQ ID NO: 829711 - RNA, 19 nt, Artificial Sequence
  Description of Artificial Sequence: Synthetic oligonucleotide
gugggacucgacagaaugu

SEQ ID NO: 829712 - RNA, 19 nt, Artificial Sequence
  Description of Artificial Sequence: Synthetic oligonucleotide
guguguuccuugcgagucu

SEQ ID NO: 829713 - RNA, 19 nt, Artificial Sequence
  Description of Artificial Sequence: Synthetic oligonucleotide
gggugucuaggauauggau

SEQ ID NO: 829714 - RNA, 19 nt, Artificial Sequence
  Description of Artificial Sequence: Synthetic oligonucleotide
guugugcgcuugcccacaa

SEQ ID NO: 829715 - RNA, 19 nt, Artificial Sequence
  Description of Artificial Sequence: Synthetic oligonucleotide
agggucccucauguugacu

SEQ ID NO: 829716 - RNA, 19 nt, Artificial Sequence
  Description of Artificial Sequence: Synthetic oligonucleotide
ccguccaggcuacuccaag

SEQ ID NO: 829717 - RNA, 19 nt, Artificial Sequence
  Description of Artificial Sequence: Synthetic oligonucleotide
ccugagcuugccucggaga

SEQ ID NO: 829718 - RNA, 19 nt, Artificial Sequence
  Description of Artificial Sequence: Synthetic oligonucleotide
cuccucagagugcagcgau

SEQ ID NO: 829719 - RNA, 19 nt, Artificial Sequence
  Description of Artificial Sequence: Synthetic oligonucleotide
cacgaacagaggcuguuuu

SEQ ID NO: 829720 - RNA, 19 nt, Artificial Sequence
  Description of Artificial Sequence: Synthetic oligonucleotide
gccucggagagaaucaccu

SEQ ID NO: 829721 - RNA, 19 nt, Artificial Sequence
  Description of Artificial Sequence: Synthetic oligonucleotide
cccguggauggaaacuuga

SEQ ID NO: 829722 - RNA, 19 nt, Artificial Sequence
  Description of Artificial Sequence: Synthetic oligonucleotide
ccugcggcaaguccaggca

SEQ ID NO: 829723 - RNA, 19 nt, Artificial Sequence
  Description of Artificial Sequence: Synthetic oligonucleotide
ccggaagcaagggugguca

SEQ ID NO: 829724 - RNA, 19 nt, Artificial Sequence
  Description of Artificial Sequence: Synthetic oligonucleotide
caggcuacuccaagcuccu

SEQ ID NO: 829725 - RNA, 19 nt, Artificial Sequence
  Description of Artificial Sequence: Synthetic oligonucleotide
cagcaaguccaggcucuuc

SEQ ID NO: 829726 - RNA, 19 nt, Artificial Sequence
  Description of Artificial Sequence: Synthetic oligonucleotide
ccucaggcaugcaggucug

SEQ ID NO: 829727 - RNA, 19 nt, Artificial Sequence
  Description of Artificial Sequence: Synthetic oligonucleotide
ccggaggaucagcccaggg

SEQ ID NO: 829728 - RNA, 19 nt, Artificial Sequence
  Description of Artificial Sequence: Synthetic oligonucleotide
aagccgagagggagcuguu

SEQ ID NO: 829729 - RNA, 19 nt, Artificial Sequence
  Description of Artificial Sequence: Synthetic oligonucleotide
uggcgggaagcugccuguc

SEQ ID NO: 829730 - RNA, 19 nt, Artificial Sequence
  Description of Artificial Sequence: Synthetic oligonucleotide
ggcggugcgggagcccagg

SEQ ID NO: 829731 - RNA, 19 nt, Artificial Sequence
  Description of Artificial Sequence: Synthetic oligonucleotide
caccugcggcaaguccagg

SEQ ID NO: 829732 - RNA, 19 nt, Artificial Sequence
  Description of Artificial Sequence: Synthetic oligonucleotide
auccggacgugggccacaa

SEQ ID NO: 829733 - RNA, 19 nt, Artificial Sequence
  Description of Artificial Sequence: Synthetic oligonucleotide
gccacguggcacagcauga

SEQ ID NO: 829734 - RNA, 19 nt, Artificial Sequence
  Description of Artificial Sequence: Synthetic oligonucleotide
ggggcgcuugggaggaagc

SEQ ID NO: 829735 - RNA, 19 nt, Artificial Sequence
  Description of Artificial Sequence: Synthetic oligonucleotide
acuugccgaccgaggggca

SEQ ID NO: 829736 - RNA, 19 nt, Artificial Sequence
  Description of Artificial Sequence: Synthetic oligonucleotide
ccacucucucauuguagaa

SEQ ID NO: 829737 - RNA, 19 nt, Artificial Sequence
  Description of Artificial Sequence: Synthetic oligonucleotide
gcccguggauggaaacuug

SEQ ID NO: 829738 - RNA, 19 nt, Artificial Sequence
  Description of Artificial Sequence: Synthetic oligonucleotide
ccggacagcauguguccca

SEQ ID NO: 829739 - RNA, 19 nt, Artificial Sequence
  Description of Artificial Sequence: Synthetic oligonucleotide
cggucagugggacucgaca

SEQ ID NO: 829740 - RNA, 19 nt, Artificial Sequence
  Description of Artificial Sequence: Synthetic oligonucleotide
cccggacagcauguguccc

SEQ ID NO: 829741 - RNA, 19 nt, Artificial Sequence
  Description of Artificial Sequence: Synthetic oligonucleotide
gcccggaggaucagcccag

SEQ ID NO: 829742 - RNA, 19 nt, Artificial Sequence
  Description of Artificial Sequence: Synthetic oligonucleotide
ggagucgcaucagcuucga

SEQ ID NO: 829743 - RNA, 19 nt, Artificial Sequence
  Description of Artificial Sequence: Synthetic oligonucleotide
gaaucaccucugagccaua

SEQ ID NO: 829744 - RNA, 19 nt, Artificial Sequence
  Description of Artificial Sequence: Synthetic oligonucleotide
gggcgcuugggaggaagca

SEQ ID NO: 829745 - RNA, 19 nt, Artificial Sequence
  Description of Artificial Sequence: Synthetic oligonucleotide
ccgaucuguugugcgcuug

SEQ ID NO: 829746 - RNA, 19 nt, Artificial Sequence
  Description of Artificial Sequence: Synthetic oligonucleotide
gccagcugacggaucaucu

SEQ ID NO: 829747 - RNA, 19 nt, Artificial Sequence
  Description of Artificial Sequence: Synthetic oligonucleotide
gggaccccguccaggcuac

SEQ ID NO: 829748 - RNA, 19 nt, Artificial Sequence
  Description of Artificial Sequence: Synthetic oligonucleotide
ccagcacuaccuuggggcu

SEQ ID NO: 829749 - RNA, 19 nt, Artificial Sequence
  Description of Artificial Sequence: Synthetic oligonucleotide
ccgggcaggauguggccca

SEQ ID NO: 829750 - RNA, 19 nt, Artificial Sequence
  Description of Artificial Sequence: Synthetic oligonucleotide
cauccggacgugggccaca

SEQ ID NO: 829751 - RNA, 19 nt, Artificial Sequence
  Description of Artificial Sequence: Synthetic oligonucleotide
cgaccgaggggcaggguga

SEQ ID NO: 829752 - RNA, 19 nt, Artificial Sequence
  Description of Artificial Sequence: Synthetic oligonucleotide
ggauauggauggagcggcu

SEQ ID NO: 829753 - RNA, 19 nt, Artificial Sequence
  Description of Artificial Sequence: Synthetic oligonucleotide
ggaagccgagagggagcug

SEQ ID NO: 829754 - RNA, 19 nt, Artificial Sequence
  Description of Artificial Sequence: Synthetic oligonucleotide
ccccguccaggcuacucca

SEQ ID NO: 829755 - RNA, 19 nt, Artificial Sequence
  Description of Artificial Sequence: Synthetic oligonucleotide
cacagcuaguuuggcuagu

SEQ ID NO: 829756 - RNA, 19 nt, Artificial Sequence
  Description of Artificial Sequence: Synthetic oligonucleotide
gcacguccgcacacaugug

SEQ ID NO: 829757 - RNA, 19 nt, Artificial Sequence
  Description of Artificial Sequence: Synthetic oligonucleotide
cugugccacuuggaggagu

SEQ ID NO: 829758 - RNA, 19 nt, Artificial Sequence
  Description of Artificial Sequence: Synthetic oligonucleotide
cccggaggaucagcccagg

SEQ ID NO: 829759 - RNA, 19 nt, Artificial Sequence
  Description of Artificial Sequence: Synthetic oligonucleotide
gcauccggacgugggccac

SEQ ID NO: 829760 - RNA, 19 nt, Artificial Sequence
  Description of Artificial Sequence: Synthetic oligonucleotide
gggucaccugcggcaaguc

SEQ ID NO: 829761 - RNA, 19 nt, Artificial Sequence
  Description of Artificial Sequence: Synthetic oligonucleotide
gcagaccgggcaggaugug

SEQ ID NO: 829762 - RNA, 19 nt, Artificial Sequence
  Description of Artificial Sequence: Synthetic oligonucleotide
ggcacgaacagaggcuguu

SEQ ID NO: 829763 - RNA, 19 nt, Artificial Sequence
  Description of Artificial Sequence: Synthetic oligonucleotide
caggguuaggcuggauguu

SEQ ID NO: 829764 - RNA, 19 nt, Artificial Sequence
  Description of Artificial Sequence: Synthetic oligonucleotide
cagcgcacacugccagacu

SEQ ID NO: 829765 - RNA, 19 nt, Artificial Sequence
  Description of Artificial Sequence: Synthetic oligonucleotide
agggcgcaccacacagcua

SEQ ID NO: 829766 - RNA, 19 nt, Artificial Sequence
  Description of Artificial Sequence: Synthetic oligonucleotide
cggaucaucugcagcgacu

SEQ ID NO: 829767 - RNA, 19 nt, Artificial Sequence
  Description of Artificial Sequence: Synthetic oligonucleotide
cgugggccacaagccaagc

SEQ ID NO: 829768 - RNA, 19 nt, Artificial Sequence
  Description of Artificial Sequence: Synthetic oligonucleotide
cacggggaagaggcugaua

SEQ ID NO: 829769 - RNA, 19 nt, Artificial Sequence
  Description of Artificial Sequence: Synthetic oligonucleotide
cgcaucagcuucgaaggcu

SEQ ID NO: 829770 - RNA, 19 nt, Artificial Sequence
  Description of Artificial Sequence: Synthetic oligonucleotide
ggucugcauccaggucuca

SEQ ID NO: 829771 - RNA, 19 nt, Artificial Sequence
  Description of Artificial Sequence: Synthetic oligonucleotide
agcuugccucggagagaau

SEQ ID NO: 829772 - RNA, 19 nt, Artificial Sequence
  Description of Artificial Sequence: Synthetic oligonucleotide
ccgcacacauguguuccaa

SEQ ID NO: 829773 - RNA, 19 nt, Artificial Sequence
  Description of Artificial Sequence: Synthetic oligonucleotide
ccgagagggagcuguucau

SEQ ID NO: 829774 - RNA, 19 nt, Artificial Sequence
  Description of Artificial Sequence: Synthetic oligonucleotide
gcacgaacagaggcuguuu

SEQ ID NO: 829775 - RNA, 19 nt, Artificial Sequence
  Description of Artificial Sequence: Synthetic oligonucleotide
gcuguccacccagccccuc

SEQ ID NO: 829776 - RNA, 19 nt, Artificial Sequence
  Description of Artificial Sequence: Synthetic oligonucleotide
ccacgcccguggauggaaa

SEQ ID NO: 829777 - RNA, 19 nt, Artificial Sequence
  Description of Artificial Sequence: Synthetic oligonucleotide
cccguccaggcuacuccaa

SEQ ID NO: 829778 - RNA, 19 nt, Artificial Sequence
  Description of Artificial Sequence: Synthetic oligonucleotide
gccggcggugcgggagccc

SEQ ID NO: 829779 - RNA, 19 nt, Artificial Sequence
  Description of Artificial Sequence: Synthetic oligonucleotide
gcgcaccacacagcuaguu

SEQ ID NO: 829780 - RNA, 19 nt, Artificial Sequence
  Description of Artificial Sequence: Synthetic oligonucleotide
gcagcaaguccaggcucuu

SEQ ID NO: 829781 - RNA, 19 nt, Artificial Sequence
  Description of Artificial Sequence: Synthetic oligonucleotide
ggcuguccacccagccccu

SEQ ID NO: 829782 - RNA, 19 nt, Artificial Sequence
  Description of Artificial Sequence: Synthetic oligonucleotide
cgcccguggauggaaacuu

SEQ ID NO: 829783 - RNA, 19 nt, Artificial Sequence
  Description of Artificial Sequence: Synthetic oligonucleotide
ggaccccguccaggcuacu

SEQ ID NO: 829784 - RNA, 19 nt, Artificial Sequence
  Description of Artificial Sequence: Synthetic oligonucleotide
gccgaccgaggggcagggu

SEQ ID NO: 829785 - RNA, 19 nt, Artificial Sequence
  Description of Artificial Sequence: Synthetic oligonucleotide
ucaaauacggacuaaacug

SEQ ID NO: 829786 - RNA, 19 nt, Artificial Sequence
  Description of Artificial Sequence: Synthetic oligonucleotide
aauuaacugaauugcauuc

SEQ ID NO: 829787 - RNA, 19 nt, Artificial Sequence
  Description of Artificial Sequence: Synthetic oligonucleotide
aggcauauuaaauuguucc

SEQ ID NO: 829788 - RNA, 19 nt, Artificial Sequence
  Description of Artificial Sequence: Synthetic oligonucleotide
aauacguagcuauaagcac

SEQ ID NO: 829789 - RNA, 19 nt, Artificial Sequence
  Description of Artificial Sequence: Synthetic oligonucleotide
auaauacguagcuauaagc

SEQ ID NO: 829790 - RNA, 19 nt, Artificial Sequence
  Description of Artificial Sequence: Synthetic oligonucleotide
uguuauuccagccagguca

SEQ ID NO: 829791 - RNA, 19 nt, Artificial Sequence
  Description of Artificial Sequence: Synthetic oligonucleotide
uguaacugaagcuauaugu

SEQ ID NO: 829792 - RNA, 19 nt, Artificial Sequence
  Description of Artificial Sequence: Synthetic oligonucleotide
auacaaaagaaacugcuuc

SEQ ID NO: 829793 - RNA, 19 nt, Artificial Sequence
  Description of Artificial Sequence: Synthetic oligonucleotide
uacugcaagguaaugagcg

SEQ ID NO: 829794 - RNA, 19 nt, Artificial Sequence
  Description of Artificial Sequence: Synthetic oligonucleotide
acaauuuugagguccauuc

SEQ ID NO: 829795 - RNA, 19 nt, Artificial Sequence
  Description of Artificial Sequence: Synthetic oligonucleotide
aaugcaucauaaaauggcc

SEQ ID NO: 829796 - RNA, 19 nt, Artificial Sequence
  Description of Artificial Sequence: Synthetic oligonucleotide
cucaauucuaacuuuagag

SEQ ID NO: 829797 - RNA, 19 nt, Artificial Sequence
  Description of Artificial Sequence: Synthetic oligonucleotide
uaccuuaacacauaaagga

SEQ ID NO: 829798 - RNA, 19 nt, Artificial Sequence
  Description of Artificial Sequence: Synthetic oligonucleotide
aacuauaagaguuuccaga

SEQ ID NO: 829799 - RNA, 19 nt, Artificial Sequence
  Description of Artificial Sequence: Synthetic oligonucleotide
uuaaugauagacaggauaa

SEQ ID NO: 829800 - RNA, 19 nt, Artificial Sequence
  Description of Artificial Sequence: Synthetic oligonucleotide
ugauagacaugcaagacug

SEQ ID NO: 829801 - RNA, 19 nt, Artificial Sequence
  Description of Artificial Sequence: Synthetic oligonucleotide
uucggaaugaucaaagaug

SEQ ID NO: 829802 - RNA, 19 nt, Artificial Sequence
  Description of Artificial Sequence: Synthetic oligonucleotide
auaacuuauauacauuuga

SEQ ID NO: 829803 - RNA, 19 nt, Artificial Sequence
  Description of Artificial Sequence: Synthetic oligonucleotide
acuauaagaguuuccagag

SEQ ID NO: 829804 - RNA, 19 nt, Artificial Sequence
  Description of Artificial Sequence: Synthetic oligonucleotide
ugugcaaugcaucauaaaa

SEQ ID NO: 829805 - RNA, 19 nt, Artificial Sequence
  Description of Artificial Sequence: Synthetic oligonucleotide
aaugauagacaggauaaag

SEQ ID NO: 829806 - RNA, 19 nt, Artificial Sequence
  Description of Artificial Sequence: Synthetic oligonucleotide
gaugauacuccacagaguc

SEQ ID NO: 829807 - RNA, 19 nt, Artificial Sequence
  Description of Artificial Sequence: Synthetic oligonucleotide
uaaaguaacacaccauuac

SEQ ID NO: 829808 - RNA, 19 nt, Artificial Sequence
  Description of Artificial Sequence: Synthetic oligonucleotide
uuuaguuuucuccucugag

SEQ ID NO: 829809 - RNA, 19 nt, Artificial Sequence
  Description of Artificial Sequence: Synthetic oligonucleotide
aaguuauuauaacaaagau

SEQ ID NO: 829810 - RNA, 19 nt, Artificial Sequence
  Description of Artificial Sequence: Synthetic oligonucleotide
aaaaggggaucuuccuucc

SEQ ID NO: 829811 - RNA, 19 nt, Artificial Sequence
  Description of Artificial Sequence: Synthetic oligonucleotide
aaucauuugugacaagccu

SEQ ID NO: 829812 - RNA, 19 nt, Artificial Sequence
  Description of Artificial Sequence: Synthetic oligonucleotide
guaacacaccauuacaacg

SEQ ID NO: 829813 - RNA, 19 nt, Artificial Sequence
  Description of Artificial Sequence: Synthetic oligonucleotide
uugaaaguaacagaaggcc

SEQ ID NO: 829814 - RNA, 19 nt, Artificial Sequence
  Description of Artificial Sequence: Synthetic oligonucleotide
uguuacacgucucugguca

SEQ ID NO: 829815 - RNA, 19 nt, Artificial Sequence
  Description of Artificial Sequence: Synthetic oligonucleotide
aacgcuuugacgaugccac

SEQ ID NO: 829816 - RNA, 19 nt, Artificial Sequence
  Description of Artificial Sequence: Synthetic oligonucleotide
uuuugaacugccaguuucg

SEQ ID NO: 829817 - RNA, 19 nt, Artificial Sequence
  Description of Artificial Sequence: Synthetic oligonucleotide
ugugccauggaguuaauga

SEQ ID NO: 829818 - RNA, 19 nt, Artificial Sequence
  Description of Artificial Sequence: Synthetic oligonucleotide
uaaaggaaaagugugccag

SEQ ID NO: 829819 - RNA, 19 nt, Artificial Sequence
  Description of Artificial Sequence: Synthetic oligonucleotide
agggaaauuaacugaauug

SEQ ID NO: 829820 - RNA, 19 nt, Artificial Sequence
  Description of Artificial Sequence: Synthetic oligonucleotide
uaacacaccauuacaacga

SEQ ID NO: 829821 - RNA, 19 nt, Artificial Sequence
  Description of Artificial Sequence: Synthetic oligonucleotide
uuaaugauugcuuuuccaa

SEQ ID NO: 829822 - RNA, 19 nt, Artificial Sequence
  Description of Artificial Sequence: Synthetic oligonucleotide
ucggaaugaucaaagaugu

SEQ ID NO: 829823 - RNA, 19 nt, Artificial Sequence
  Description of Artificial Sequence: Synthetic oligonucleotide
ucauaagcagcuaauguaa

SEQ ID NO: 829824 - RNA, 19 nt, Artificial Sequence
  Description of Artificial Sequence: Synthetic oligonucleotide
acaugcaagacugguaucc

SEQ ID NO: 829825 - RNA, 19 nt, Artificial Sequence
  Description of Artificial Sequence: Synthetic oligonucleotide
ugauagacaggauaaagua

SEQ ID NO: 829826 - RNA, 19 nt, Artificial Sequence
  Description of Artificial Sequence: Synthetic oligonucleotide
aacgguacgaggaaguguc

SEQ ID NO: 829827 - RNA, 19 nt, Artificial Sequence
  Description of Artificial Sequence: Synthetic oligonucleotide
caaauacggacuaaacugc

SEQ ID NO: 829828 - RNA, 19 nt, Artificial Sequence
  Description of Artificial Sequence: Synthetic oligonucleotide
uuuagagcguuuugugugg

SEQ ID NO: 829829 - RNA, 19 nt, Artificial Sequence
  Description of Artificial Sequence: Synthetic oligonucleotide
gaaacucccauuaugcugc

SEQ ID NO: 829830 - RNA, 19 nt, Artificial Sequence
  Description of Artificial Sequence: Synthetic oligonucleotide
uuuaaugauugcuuuucca

SEQ ID NO: 829831 - RNA, 19 nt, Artificial Sequence
  Description of Artificial Sequence: Synthetic oligonucleotide
aggauaaaguaacacacca

SEQ ID NO: 829832 - RNA, 19 nt, Artificial Sequence
  Description of Artificial Sequence: Synthetic oligonucleotide
auacggacuaaacugcuuc

SEQ ID NO: 829833 - RNA, 19 nt, Artificial Sequence
  Description of Artificial Sequence: Synthetic oligonucleotide
cuuuagagcguuuugugug

SEQ ID NO: 829834 - RNA, 19 nt, Artificial Sequence
  Description of Artificial Sequence: Synthetic oligonucleotide
uguguaauccuguuccaag

SEQ ID NO: 829835 - RNA, 19 nt, Artificial Sequence
  Description of Artificial Sequence: Synthetic oligonucleotide
aacacaccauuacaacgac

SEQ ID NO: 829836 - RNA, 19 nt, Artificial Sequence
  Description of Artificial Sequence: Synthetic oligonucleotide
uagcuauaagcacagcgag

SEQ ID NO: 829837 - RNA, 19 nt, Artificial Sequence
  Description of Artificial Sequence: Synthetic oligonucleotide
acauaaaggaaaagugugc

SEQ ID NO: 829838 - RNA, 19 nt, Artificial Sequence
  Description of Artificial Sequence: Synthetic oligonucleotide
aaaauaauacaggauggaa

SEQ ID NO: 829839 - RNA, 19 nt, Artificial Sequence
  Description of Artificial Sequence: Synthetic oligonucleotide
aacugaagcuauauguggg

SEQ ID NO: 829840 - RNA, 19 nt, Artificial Sequence
  Description of Artificial Sequence: Synthetic oligonucleotide
ucuucucauguacugaaga

SEQ ID NO: 829841 - RNA, 19 nt, Artificial Sequence
  Description of Artificial Sequence: Synthetic oligonucleotide
ugaacugccaguuucgcuc

SEQ ID NO: 829842 - RNA, 19 nt, Artificial Sequence
  Description of Artificial Sequence: Synthetic oligonucleotide
aacgaccagcuucucaaac

SEQ ID NO: 829843 - RNA, 19 nt, Artificial Sequence
  Description of Artificial Sequence: Synthetic oligonucleotide
aauuguuccaugauagaca

SEQ ID NO: 829844 - RNA, 19 nt, Artificial Sequence
  Description of Artificial Sequence: Synthetic oligonucleotide
cauuguuacacgucucugg

SEQ ID NO: 829845 - RNA, 19 nt, Artificial Sequence
  Description of Artificial Sequence: Synthetic oligonucleotide
caacagaggacaaaauccc

SEQ ID NO: 829846 - RNA, 19 nt, Artificial Sequence
  Description of Artificial Sequence: Synthetic oligonucleotide
cauuacaacgaccagcuuc

SEQ ID NO: 829847 - RNA, 19 nt, Artificial Sequence
  Description of Artificial Sequence: Synthetic oligonucleotide
aaauggugugcucauuugu

SEQ ID NO: 829848 - RNA, 19 nt, Artificial Sequence
  Description of Artificial Sequence: Synthetic oligonucleotide
uuucggaaugaucaaagau

SEQ ID NO: 829849 - RNA, 19 nt, Artificial Sequence
  Description of Artificial Sequence: Synthetic oligonucleotide
auaugcauuuuaaugauug

SEQ ID NO: 829850 - RNA, 19 nt, Artificial Sequence
  Description of Artificial Sequence: Synthetic oligonucleotide
uguucuacgaugugcuugc

SEQ ID NO: 829851 - RNA, 19 nt, Artificial Sequence
  Description of Artificial Sequence: Synthetic oligonucleotide
uaacuuauauacauuugau

SEQ ID NO: 829852 - RNA, 19 nt, Artificial Sequence
  Description of Artificial Sequence: Synthetic oligonucleotide
cauagaucaguaacucugg

SEQ ID NO: 829853 - RNA, 19 nt, Artificial Sequence
  Description of Artificial Sequence: Synthetic oligonucleotide
cagcuaauguaacugaagc

SEQ ID NO: 829854 - RNA, 19 nt, Artificial Sequence
  Description of Artificial Sequence: Synthetic oligonucleotide
cauaauacguagcuauaag

SEQ ID NO: 829855 - RNA, 19 nt, Artificial Sequence
  Description of Artificial Sequence: Synthetic oligonucleotide
acgacuucauucuaaauau

SEQ ID NO: 829856 - RNA, 19 nt, Artificial Sequence
  Description of Artificial Sequence: Synthetic oligonucleotide
gaaaaggggaucuuccuuc

SEQ ID NO: 829857 - RNA, 19 nt, Artificial Sequence
  Description of Artificial Sequence: Synthetic oligonucleotide
caaucauuugugacaagcc

SEQ ID NO: 829858 - RNA, 19 nt, Artificial Sequence
  Description of Artificial Sequence: Synthetic oligonucleotide
guuaaugauagacaggaua

SEQ ID NO: 829859 - RNA, 19 nt, Artificial Sequence
  Description of Artificial Sequence: Synthetic oligonucleotide
aagccuauccaguaggcau

SEQ ID NO: 829860 - RNA, 19 nt, Artificial Sequence
  Description of Artificial Sequence: Synthetic oligonucleotide
auucguuuggcguaacucu

SEQ ID NO: 829861 - RNA, 19 nt, Artificial Sequence
  Description of Artificial Sequence: Synthetic oligonucleotide
cauacuguuggugugcucc

SEQ ID NO: 829862 - RNA, 19 nt, Artificial Sequence
  Description of Artificial Sequence: Synthetic oligonucleotide
aauucuaacuuuagagaug

SEQ ID NO: 829863 - RNA, 19 nt, Artificial Sequence
  Description of Artificial Sequence: Synthetic oligonucleotide
ccaacagaggacaaaaucc

SEQ ID NO: 829864 - RNA, 19 nt, Artificial Sequence
  Description of Artificial Sequence: Synthetic oligonucleotide
uuaacauacuuuagagcgu

SEQ ID NO: 829865 - RNA, 19 nt, Artificial Sequence
  Description of Artificial Sequence: Synthetic oligonucleotide
uacuuuagagcguuuugug

SEQ ID NO: 829866 - RNA, 19 nt, Artificial Sequence
  Description of Artificial Sequence: Synthetic oligonucleotide
ugugggcccagauaaagca

SEQ ID NO: 829867 - RNA, 19 nt, Artificial Sequence
  Description of Artificial Sequence: Synthetic oligonucleotide
uccacccuaacaaaauaca

SEQ ID NO: 829868 - RNA, 19 nt, Artificial Sequence
  Description of Artificial Sequence: Synthetic oligonucleotide
ucauuugugacaagccuaa

SEQ ID NO: 829869 - RNA, 19 nt, Artificial Sequence
  Description of Artificial Sequence: Synthetic oligonucleotide
caaaacuauaagaguuucc

SEQ ID NO: 829870 - RNA, 19 nt, Artificial Sequence
  Description of Artificial Sequence: Synthetic oligonucleotide
uguaauccuguuccaagac

SEQ ID NO: 829871 - RNA, 19 nt, Artificial Sequence
  Description of Artificial Sequence: Synthetic oligonucleotide
ugaaauauggagguagcuc

SEQ ID NO: 829872 - RNA, 19 nt, Artificial Sequence
  Description of Artificial Sequence: Synthetic oligonucleotide
aaacaggggauuuggaaua

SEQ ID NO: 829873 - RNA, 19 nt, Artificial Sequence
  Description of Artificial Sequence: Synthetic oligonucleotide
agaagcacaggccaaaauu

SEQ ID NO: 829874 - RNA, 19 nt, Artificial Sequence
  Description of Artificial Sequence: Synthetic oligonucleotide
ugaagcuauaugugggccc

SEQ ID NO: 829875 - RNA, 19 nt, Artificial Sequence
  Description of Artificial Sequence: Synthetic oligonucleotide
agacaugcaagacugguau

SEQ ID NO: 829876 - RNA, 19 nt, Artificial Sequence
  Description of Artificial Sequence: Synthetic oligonucleotide
cacaccauuacaacgacca

SEQ ID NO: 829877 - RNA, 19 nt, Artificial Sequence
  Description of Artificial Sequence: Synthetic oligonucleotide
ucauguacugaagaggggu

SEQ ID NO: 829878 - RNA, 19 nt, Artificial Sequence
  Description of Artificial Sequence: Synthetic oligonucleotide
uccaagaccaacagaggac

SEQ ID NO: 829879 - RNA, 19 nt, Artificial Sequence
  Description of Artificial Sequence: Synthetic oligonucleotide
ucuaacuuuagagaugaua

SEQ ID NO: 829880 - RNA, 19 nt, Artificial Sequence
  Description of Artificial Sequence: Synthetic oligonucleotide
ugcagagacggaccuaugc

SEQ ID NO: 829881 - RNA, 19 nt, Artificial Sequence
  Description of Artificial Sequence: Synthetic oligonucleotide
guaacugaagcuauaugug

SEQ ID NO: 829882 - RNA, 19 nt, Artificial Sequence
  Description of Artificial Sequence: Synthetic oligonucleotide
gauaaaguaacacaccauu

SEQ ID NO: 829883 - RNA, 19 nt, Artificial Sequence
  Description of Artificial Sequence: Synthetic oligonucleotide
guaacucugugccauggag

SEQ ID NO: 829884 - RNA, 19 nt, Artificial Sequence
  Description of Artificial Sequence: Synthetic oligonucleotide
agagcguuuuguguggccc

SEQ ID NO: 829885 - RNA, 19 nt, Artificial Sequence
  Description of Artificial Sequence: Synthetic oligonucleotide
gacaccacaacgcuuugac

SEQ ID NO: 829886 - RNA, 19 nt, Artificial Sequence
  Description of Artificial Sequence: Synthetic oligonucleotide
acaacgaccagcuucucaa

SEQ ID NO: 829887 - RNA, 19 nt, Artificial Sequence
  Description of Artificial Sequence: Synthetic oligonucleotide
cacccuaacaaaauacaug

SEQ ID NO: 829888 - RNA, 19 nt, Artificial Sequence
  Description of Artificial Sequence: Synthetic oligonucleotide
acuuuagagcguuuugugu

SEQ ID NO: 829889 - RNA, 19 nt, Artificial Sequence
  Description of Artificial Sequence: Synthetic oligonucleotide
aacccuccaugcuaacuuc

SEQ ID NO: 829890 - RNA, 19 nt, Artificial Sequence
  Description of Artificial Sequence: Synthetic oligonucleotide
uaaugauugcuuuuccaau

SEQ ID NO: 829891 - RNA, 19 nt, Artificial Sequence
  Description of Artificial Sequence: Synthetic oligonucleotide
auaaaggaaaagugugcca

SEQ ID NO: 829892 - RNA, 19 nt, Artificial Sequence
  Description of Artificial Sequence: Synthetic oligonucleotide
cagauaaagcagaaaggug

SEQ ID NO: 829893 - RNA, 19 nt, Artificial Sequence
  Description of Artificial Sequence: Synthetic oligonucleotide
aaaagugugccagugucaa

SEQ ID NO: 829894 - RNA, 19 nt, Artificial Sequence
  Description of Artificial Sequence: Synthetic oligonucleotide
agcuaauguaacugaagcu

SEQ ID NO: 829895 - RNA, 19 nt, Artificial Sequence
  Description of Artificial Sequence: Synthetic oligonucleotide
uucguuuggcguaacucug

SEQ ID NO: 829896 - RNA, 19 nt, Artificial Sequence
  Description of Artificial Sequence: Synthetic oligonucleotide
gcccagauaaagcagaaag

SEQ ID NO: 829897 - RNA, 19 nt, Artificial Sequence
  Description of Artificial Sequence: Synthetic oligonucleotide
aaugaucaaagaugucuuu

SEQ ID NO: 829898 - RNA, 19 nt, Artificial Sequence
  Description of Artificial Sequence: Synthetic oligonucleotide
auuacaacgaccagcuucu

SEQ ID NO: 829899 - RNA, 19 nt, Artificial Sequence
  Description of Artificial Sequence: Synthetic oligonucleotide
aaguaacacaccauuacaa

SEQ ID NO: 829900 - RNA, 19 nt, Artificial Sequence
  Description of Artificial Sequence: Synthetic oligonucleotide
uucauagaucaguaacucu

SEQ ID NO: 829901 - RNA, 19 nt, Artificial Sequence
  Description of Artificial Sequence: Synthetic oligonucleotide
ugcucuuuacucauuguua

SEQ ID NO: 829902 - RNA, 19 nt, Artificial Sequence
  Description of Artificial Sequence: Synthetic oligonucleotide
uauccaguaggcauacaaa

SEQ ID NO: 829903 - RNA, 19 nt, Artificial Sequence
  Description of Artificial Sequence: Synthetic oligonucleotide
uuugacgaugccacaauuu

SEQ ID NO: 829904 - RNA, 19 nt, Artificial Sequence
  Description of Artificial Sequence: Synthetic oligonucleotide
gaagcacaggccaaaauuc

SEQ ID NO: 829905 - RNA, 19 nt, Artificial Sequence
  Description of Artificial Sequence: Synthetic oligonucleotide
acgaugugcuugcugaaag

SEQ ID NO: 829906 - RNA, 19 nt, Artificial Sequence
  Description of Artificial Sequence: Synthetic oligonucleotide
aagugugccagugucaaau

SEQ ID NO: 829907 - RNA, 19 nt, Artificial Sequence
  Description of Artificial Sequence: Synthetic oligonucleotide
cauguggucgagcggaggg

SEQ ID NO: 829908 - RNA, 19 nt, Artificial Sequence
  Description of Artificial Sequence: Synthetic oligonucleotide
ucaguaacucuggaggagc

SEQ ID NO: 829909 - RNA, 19 nt, Artificial Sequence
  Description of Artificial Sequence: Synthetic oligonucleotide
cauacuuuagagcguuuug

SEQ ID NO: 829910 - RNA, 19 nt, Artificial Sequence
  Description of Artificial Sequence: Synthetic oligonucleotide
ugccauuucauagaucagu

SEQ ID NO: 829911 - RNA, 19 nt, Artificial Sequence
  Description of Artificial Sequence: Synthetic oligonucleotide
aaaacgguacgaggaagug

SEQ ID NO: 829912 - RNA, 19 nt, Artificial Sequence
  Description of Artificial Sequence: Synthetic oligonucleotide
ucuggauaugcauuuuaau

SEQ ID NO: 829913 - RNA, 19 nt, Artificial Sequence
  Description of Artificial Sequence: Synthetic oligonucleotide
auccacccuaacaaaauac

SEQ ID NO: 829914 - RNA, 19 nt, Artificial Sequence
  Description of Artificial Sequence: Synthetic oligonucleotide
augauagacaggauaaagu

SEQ ID NO: 829915 - RNA, 19 nt, Artificial Sequence
  Description of Artificial Sequence: Synthetic oligonucleotide
ggacagauaaucuggucag

SEQ ID NO: 829916 - RNA, 19 nt, Artificial Sequence
  Description of Artificial Sequence: Synthetic oligonucleotide
gaacugccaguuucgcucg

SEQ ID NO: 829917 - RNA, 19 nt, Artificial Sequence
  Description of Artificial Sequence: Synthetic oligonucleotide
gaaaguaacagaaggccaa

SEQ ID NO: 829918 - RNA, 19 nt, Artificial Sequence
  Description of Artificial Sequence: Synthetic oligonucleotide
auacuuuagagcguuuugu

SEQ ID NO: 829919 - RNA, 19 nt, Artificial Sequence
  Description of Artificial Sequence: Synthetic oligonucleotide
auacauguggucgagcgga

SEQ ID NO: 829920 - RNA, 19 nt, Artificial Sequence
  Description of Artificial Sequence: Synthetic oligonucleotide
uuacucauuguuacacguc

SEQ ID NO: 829921 - RNA, 19 nt, Artificial Sequence
  Description of Artificial Sequence: Synthetic oligonucleotide
ucgcucgugaugcaaaguc

SEQ ID NO: 829922 - RNA, 19 nt, Artificial Sequence
  Description of Artificial Sequence: Synthetic oligonucleotide
accauuacaacgaccagcu

SEQ ID NO: 829923 - RNA, 19 nt, Artificial Sequence
  Description of Artificial Sequence: Synthetic oligonucleotide
gauucguuuggcguaacuc

SEQ ID NO: 829924 - RNA, 19 nt, Artificial Sequence
  Description of Artificial Sequence: Synthetic oligonucleotide
aauaucacauccacccuaa

SEQ ID NO: 829925 - RNA, 19 nt, Artificial Sequence
  Description of Artificial Sequence: Synthetic oligonucleotide
ugcuggauucguuuggcgu

SEQ ID NO: 829926 - RNA, 19 nt, Artificial Sequence
  Description of Artificial Sequence: Synthetic oligonucleotide
uccaaaacgguacgaggaa

SEQ ID NO: 829927 - RNA, 19 nt, Artificial Sequence
  Description of Artificial Sequence: Synthetic oligonucleotide
guagcuauaagcacagcga

SEQ ID NO: 829928 - RNA, 19 nt, Artificial Sequence
  Description of Artificial Sequence: Synthetic oligonucleotide
ugcaagacugguauccaau

SEQ ID NO: 829929 - RNA, 19 nt, Artificial Sequence
  Description of Artificial Sequence: Synthetic oligonucleotide
ugcaagguaaugagcggcu

SEQ ID NO: 829930 - RNA, 19 nt, Artificial Sequence
  Description of Artificial Sequence: Synthetic oligonucleotide
auaauacaggauggaaaag

SEQ ID NO: 829931 - RNA, 19 nt, Artificial Sequence
  Description of Artificial Sequence: Synthetic oligonucleotide
gcagcaguaaagaagacac

SEQ ID NO: 829932 - RNA, 19 nt, Artificial Sequence
  Description of Artificial Sequence: Synthetic oligonucleotide
cauaagcagcuaauguaac

SEQ ID NO: 829933 - RNA, 19 nt, Artificial Sequence
  Description of Artificial Sequence: Synthetic oligonucleotide
gaauaucacauccacccua

SEQ ID NO: 829934 - RNA, 19 nt, Artificial Sequence
  Description of Artificial Sequence: Synthetic oligonucleotide
aaauacggacuaaacugcu

SEQ ID NO: 829935 - RNA, 19 nt, Artificial Sequence
  Description of Artificial Sequence: Synthetic oligonucleotide
uuucgcucgugaugcaaag

SEQ ID NO: 829936 - RNA, 19 nt, Artificial Sequence
  Description of Artificial Sequence: Synthetic oligonucleotide
cugguuagagcccucccag

SEQ ID NO: 829937 - RNA, 19 nt, Artificial Sequence
  Description of Artificial Sequence: Synthetic oligonucleotide
cacaacgcuuugacgaugc

SEQ ID NO: 829938 - RNA, 19 nt, Artificial Sequence
  Description of Artificial Sequence: Synthetic oligonucleotide
uucuccggaucucaggauc

SEQ ID NO: 829939 - RNA, 19 nt, Artificial Sequence
  Description of Artificial Sequence: Synthetic oligonucleotide
uaugccggggacagcacca

SEQ ID NO: 829940 - RNA, 19 nt, Artificial Sequence
  Description of Artificial Sequence: Synthetic oligonucleotide
aacaaucauuugugacaag

SEQ ID NO: 829941 - RNA, 19 nt, Artificial Sequence
  Description of Artificial Sequence: Synthetic oligonucleotide
auacguagcuauaagcaca

SEQ ID NO: 829942 - RNA, 19 nt, Artificial Sequence
  Description of Artificial Sequence: Synthetic oligonucleotide
uuugagggugggaaaggaa

SEQ ID NO: 829943 - RNA, 19 nt, Artificial Sequence
  Description of Artificial Sequence: Synthetic oligonucleotide
gguccaaaacgguacgagg

SEQ ID NO: 829944 - RNA, 19 nt, Artificial Sequence
  Description of Artificial Sequence: Synthetic oligonucleotide
uucuacgaugugcuugcug

SEQ ID NO: 829945 - RNA, 19 nt, Artificial Sequence
  Description of Artificial Sequence: Synthetic oligonucleotide
aaucuggucaggauacggu

SEQ ID NO: 829946 - RNA, 19 nt, Artificial Sequence
  Description of Artificial Sequence: Synthetic oligonucleotide
ggaaaagugugccaguguc

SEQ ID NO: 829947 - RNA, 19 nt, Artificial Sequence
  Description of Artificial Sequence: Synthetic oligonucleotide
cacgacuucauucuaaaua

SEQ ID NO: 829948 - RNA, 19 nt, Artificial Sequence
  Description of Artificial Sequence: Synthetic oligonucleotide
aaacgguacgaggaagugu

SEQ ID NO: 829949 - RNA, 19 nt, Artificial Sequence
  Description of Artificial Sequence: Synthetic oligonucleotide
ucauuguuacacgucucug

SEQ ID NO: 829950 - RNA, 19 nt, Artificial Sequence
  Description of Artificial Sequence: Synthetic oligonucleotide
uuugaacugccaguuucgc

SEQ ID NO: 829951 - RNA, 19 nt, Artificial Sequence
  Description of Artificial Sequence: Synthetic oligonucleotide
uauuccagccaggucaaac

SEQ ID NO: 829952 - RNA, 19 nt, Artificial Sequence
  Description of Artificial Sequence: Synthetic oligonucleotide
uacggacuaaacugcuuca

SEQ ID NO: 829953 - RNA, 19 nt, Artificial Sequence
  Description of Artificial Sequence: Synthetic oligonucleotide
acagcgagcagcaguaaag

SEQ ID NO: 829954 - RNA, 19 nt, Artificial Sequence
  Description of Artificial Sequence: Synthetic oligonucleotide
gagguagcucuccaauggc

SEQ ID NO: 829955 - RNA, 19 nt, Artificial Sequence
  Description of Artificial Sequence: Synthetic oligonucleotide
cguagcuauaagcacagcg

SEQ ID NO: 829956 - RNA, 19 nt, Artificial Sequence
  Description of Artificial Sequence: Synthetic oligonucleotide
uaaugagcggcugucucca

SEQ ID NO: 829957 - RNA, 19 nt, Artificial Sequence
  Description of Artificial Sequence: Synthetic oligonucleotide
uaacauacuuuagagcguu

SEQ ID NO: 829958 - RNA, 19 nt, Artificial Sequence
  Description of Artificial Sequence: Synthetic oligonucleotide
aucaguaacucuggaggag

SEQ ID NO: 829959 - RNA, 19 nt, Artificial Sequence
  Description of Artificial Sequence: Synthetic oligonucleotide
gagggugugcaaugcauca

SEQ ID NO: 829960 - RNA, 19 nt, Artificial Sequence
  Description of Artificial Sequence: Synthetic oligonucleotide
ugcucauuugugagacacc

SEQ ID NO: 829961 - RNA, 19 nt, Artificial Sequence
  Description of Artificial Sequence: Synthetic oligonucleotide
aaaguaacagaaggccaau

SEQ ID NO: 829962 - RNA, 19 nt, Artificial Sequence
  Description of Artificial Sequence: Synthetic oligonucleotide
uugaacugccaguuucgcu

SEQ ID NO: 829963 - RNA, 19 nt, Artificial Sequence
  Description of Artificial Sequence: Synthetic oligonucleotide
ggcccuuugaaaguaacag

SEQ ID NO: 829964 - RNA, 19 nt, Artificial Sequence
  Description of Artificial Sequence: Synthetic oligonucleotide
ucugcagagacggaccuau

SEQ ID NO: 829965 - RNA, 19 nt, Artificial Sequence
  Description of Artificial Sequence: Synthetic oligonucleotide
agaccuuaccuuaacacau

SEQ ID NO: 829966 - RNA, 19 nt, Artificial Sequence
  Description of Artificial Sequence: Synthetic oligonucleotide
cugaagcuauaugugggcc

SEQ ID NO: 829967 - RNA, 19 nt, Artificial Sequence
  Description of Artificial Sequence: Synthetic oligonucleotide
gaagcuauaugugggccca

SEQ ID NO: 829968 - RNA, 19 nt, Artificial Sequence
  Description of Artificial Sequence: Synthetic oligonucleotide
cugcaagguaaugagcggc

SEQ ID NO: 829969 - RNA, 19 nt, Artificial Sequence
  Description of Artificial Sequence: Synthetic oligonucleotide
acaacgcuuugacgaugcc

SEQ ID NO: 829970 - RNA, 19 nt, Artificial Sequence
  Description of Artificial Sequence: Synthetic oligonucleotide
auaucacauccacccuaac

SEQ ID NO: 829971 - RNA, 19 nt, Artificial Sequence
  Description of Artificial Sequence: Synthetic oligonucleotide
ugagaggcgagcugcccug

SEQ ID NO: 829972 - RNA, 19 nt, Artificial Sequence
  Description of Artificial Sequence: Synthetic oligonucleotide
auacauuugaugacuuaga

SEQ ID NO: 829973 - RNA, 19 nt, Artificial Sequence
  Description of Artificial Sequence: Synthetic oligonucleotide
augugggcccagauaaagc

SEQ ID NO: 829974 - RNA, 19 nt, Artificial Sequence
  Description of Artificial Sequence: Synthetic oligonucleotide
ucaagcgcugcuggauucg

SEQ ID NO: 829975 - RNA, 19 nt, Artificial Sequence
  Description of Artificial Sequence: Synthetic oligonucleotide
uaaugauagacaggauaaa

SEQ ID NO: 829976 - RNA, 19 nt, Artificial Sequence
  Description of Artificial Sequence: Synthetic oligonucleotide
aaagucuugugcgcccucu

SEQ ID NO: 829977 - RNA, 19 nt, Artificial Sequence
  Description of Artificial Sequence: Synthetic oligonucleotide
guguaauccuguuccaaga

SEQ ID NO: 829978 - RNA, 19 nt, Artificial Sequence
  Description of Artificial Sequence: Synthetic oligonucleotide
auaaaguaacacaccauua

SEQ ID NO: 829979 - RNA, 19 nt, Artificial Sequence
  Description of Artificial Sequence: Synthetic oligonucleotide
ucucaggauccuggaagcg

SEQ ID NO: 829980 - RNA, 19 nt, Artificial Sequence
  Description of Artificial Sequence: Synthetic oligonucleotide
agaccaacagaggacaaaa

SEQ ID NO: 829981 - RNA, 19 nt, Artificial Sequence
  Description of Artificial Sequence: Synthetic oligonucleotide
aaaggggaucuuccuuccu

SEQ ID NO: 829982 - RNA, 19 nt, Artificial Sequence
  Description of Artificial Sequence: Synthetic oligonucleotide
aggacaauauucugucuuu

SEQ ID NO: 829983 - RNA, 19 nt, Artificial Sequence
  Description of Artificial Sequence: Synthetic oligonucleotide
gugcucauuugugagacac

SEQ ID NO: 829984 - RNA, 19 nt, Artificial Sequence
  Description of Artificial Sequence: Synthetic oligonucleotide
gagacggaccuaugccggg

SEQ ID NO: 829985 - RNA, 19 nt, Artificial Sequence
  Description of Artificial Sequence: Synthetic oligonucleotide
uacauguggucgagcggag

SEQ ID NO: 829986 - RNA, 19 nt, Artificial Sequence
  Description of Artificial Sequence: Synthetic oligonucleotide
ucguuuggcguaacucugu

SEQ ID NO: 829987 - RNA, 19 nt, Artificial Sequence
  Description of Artificial Sequence: Synthetic oligonucleotide
gcuaauguaacugaagcua

SEQ ID NO: 829988 - RNA, 19 nt, Artificial Sequence
  Description of Artificial Sequence: Synthetic oligonucleotide
aagaccaacagaggacaaa

SEQ ID NO: 829989 - RNA, 19 nt, Artificial Sequence
  Description of Artificial Sequence: Synthetic oligonucleotide
augaucaaagaugucuuua

SEQ ID NO: 829990 - RNA, 19 nt, Artificial Sequence
  Description of Artificial Sequence: Synthetic oligonucleotide
gguuagagcccucccagug

SEQ ID NO: 829991 - RNA, 19 nt, Artificial Sequence
  Description of Artificial Sequence: Synthetic oligonucleotide
guuuggcguaacucugugc

SEQ ID NO: 829992 - RNA, 19 nt, Artificial Sequence
  Description of Artificial Sequence: Synthetic oligonucleotide
uucaagcgcugcuggauuc

SEQ ID NO: 829993 - RNA, 19 nt, Artificial Sequence
  Description of Artificial Sequence: Synthetic oligonucleotide
accuuaacacauaaaggaa

SEQ ID NO: 829994 - RNA, 19 nt, Artificial Sequence
  Description of Artificial Sequence: Synthetic oligonucleotide
accuuaccuuaacacauaa

SEQ ID NO: 829995 - RNA, 19 nt, Artificial Sequence
  Description of Artificial Sequence: Synthetic oligonucleotide
cuaugccggggacagcacc

SEQ ID NO: 829996 - RNA, 19 nt, Artificial Sequence
  Description of Artificial Sequence: Synthetic oligonucleotide
uacgaggaaguguccacau

SEQ ID NO: 829997 - RNA, 19 nt, Artificial Sequence
  Description of Artificial Sequence: Synthetic oligonucleotide
uccuuccacauaauacgua

SEQ ID NO: 829998 - RNA, 19 nt, Artificial Sequence
  Description of Artificial Sequence: Synthetic oligonucleotide
accuaugccggggacagca

SEQ ID NO: 829999 - RNA, 19 nt, Artificial Sequence
  Description of Artificial Sequence: Synthetic oligonucleotide
uuagagcguuuuguguggc

SEQ ID NO: 830000 - RNA, 19 nt, Artificial Sequence
  Description of Artificial Sequence: Synthetic oligonucleotide
uagagcguuuuguguggcc

SEQ ID NO: 830001 - RNA, 19 nt, Artificial Sequence
  Description of Artificial Sequence: Synthetic oligonucleotide
acggacuaaacugcuucag

SEQ ID NO: 830002 - RNA, 19 nt, Artificial Sequence
  Description of Artificial Sequence: Synthetic oligonucleotide
cuauaagaguuuccagaga

SEQ ID NO: 830003 - RNA, 19 nt, Artificial Sequence
  Description of Artificial Sequence: Synthetic oligonucleotide
caaacaggggauuuggaau

SEQ ID NO: 830004 - RNA, 19 nt, Artificial Sequence
  Description of Artificial Sequence: Synthetic oligonucleotide
acucauuguuacacgucuc

SEQ ID NO: 830005 - RNA, 19 nt, Artificial Sequence
  Description of Artificial Sequence: Synthetic oligonucleotide
uugcaccaaagaaggucca

SEQ ID NO: 830006 - RNA, 19 nt, Artificial Sequence
  Description of Artificial Sequence: Synthetic oligonucleotide
aaagugugccagugucaaa

SEQ ID NO: 830007 - RNA, 19 nt, Artificial Sequence
  Description of Artificial Sequence: Synthetic oligonucleotide
aauacggacuaaacugcuu

SEQ ID NO: 830008 - RNA, 19 nt, Artificial Sequence
  Description of Artificial Sequence: Synthetic oligonucleotide
ucuugugcgcccucugcau

SEQ ID NO: 830009 - RNA, 19 nt, Artificial Sequence
  Description of Artificial Sequence: Synthetic oligonucleotide
acauacuguuggugugcuc

SEQ ID NO: 830010 - RNA, 19 nt, Artificial Sequence
  Description of Artificial Sequence: Synthetic oligonucleotide
uuguuacacgucucugguc

SEQ ID NO: 830011 - RNA, 19 nt, Artificial Sequence
  Description of Artificial Sequence: Synthetic oligonucleotide
caggacaaccaguuuucuc

SEQ ID NO: 830012 - RNA, 19 nt, Artificial Sequence
  Description of Artificial Sequence: Synthetic oligonucleotide
gacaugcaagacugguauc

SEQ ID NO: 830013 - RNA, 19 nt, Artificial Sequence
  Description of Artificial Sequence: Synthetic oligonucleotide
gucacggcuccuucagugc

SEQ ID NO: 830014 - RNA, 19 nt, Artificial Sequence
  Description of Artificial Sequence: Synthetic oligonucleotide
agcggcucucagcaccgac

SEQ ID NO: 830015 - RNA, 19 nt, Artificial Sequence
  Description of Artificial Sequence: Synthetic oligonucleotide
auccgcugcacauacuguu

SEQ ID NO: 830016 - RNA, 19 nt, Artificial Sequence
  Description of Artificial Sequence: Synthetic oligonucleotide
aaacucccauuaugcugcu

SEQ ID NO: 830017 - RNA, 19 nt, Artificial Sequence
  Description of Artificial Sequence: Synthetic oligonucleotide
accacaacgcuuugacgau

SEQ ID NO: 830018 - RNA, 19 nt, Artificial Sequence
  Description of Artificial Sequence: Synthetic oligonucleotide
acgaggaaguguccacaug

SEQ ID NO: 830019 - RNA, 19 nt, Artificial Sequence
  Description of Artificial Sequence: Synthetic oligonucleotide
gaauagaagcacaggccaa

SEQ ID NO: 830020 - RNA, 19 nt, Artificial Sequence
  Description of Artificial Sequence: Synthetic oligonucleotide
aguucaagcgcugcuggau

SEQ ID NO: 830021 - RNA, 19 nt, Artificial Sequence
  Description of Artificial Sequence: Synthetic oligonucleotide
uggugugcuccuuccacau

SEQ ID NO: 830022 - RNA, 19 nt, Artificial Sequence
  Description of Artificial Sequence: Synthetic oligonucleotide
ucacgacuucauucuaaau

SEQ ID NO: 830023 - RNA, 19 nt, Artificial Sequence
  Description of Artificial Sequence: Synthetic oligonucleotide
ugccagugucaaauacgga

SEQ ID NO: 830024 - RNA, 19 nt, Artificial Sequence
  Description of Artificial Sequence: Synthetic oligonucleotide
acggaccuaugccggggac

SEQ ID NO: 830025 - RNA, 19 nt, Artificial Sequence
  Description of Artificial Sequence: Synthetic oligonucleotide
aaguaacagaaggccaauu

SEQ ID NO: 830026 - RNA, 19 nt, Artificial Sequence
  Description of Artificial Sequence: Synthetic oligonucleotide
guaccugagaggcgagcug

SEQ ID NO: 830027 - RNA, 19 nt, Artificial Sequence
  Description of Artificial Sequence: Synthetic oligonucleotide
caaaacgguacgaggaagu

SEQ ID NO: 830028 - RNA, 19 nt, Artificial Sequence
  Description of Artificial Sequence: Synthetic oligonucleotide
ucuauccgcugcacauacu

SEQ ID NO: 830029 - RNA, 19 nt, Artificial Sequence
  Description of Artificial Sequence: Synthetic oligonucleotide
cuugugcgcccucugcaug

SEQ ID NO: 830030 - RNA, 19 nt, Artificial Sequence
  Description of Artificial Sequence: Synthetic oligonucleotide
gguagcucuccaauggcug

SEQ ID NO: 830031 - RNA, 19 nt, Artificial Sequence
  Description of Artificial Sequence: Synthetic oligonucleotide
gguacgaggaaguguccac

SEQ ID NO: 830032 - RNA, 19 nt, Artificial Sequence
  Description of Artificial Sequence: Synthetic oligonucleotide
uuacacgucucuggucaca

SEQ ID NO: 830033 - RNA, 19 nt, Artificial Sequence
  Description of Artificial Sequence: Synthetic oligonucleotide
cuauaugugggcccagaua

SEQ ID NO: 830034 - RNA, 19 nt, Artificial Sequence
  Description of Artificial Sequence: Synthetic oligonucleotide
gcucauuugugagacacca

SEQ ID NO: 830035 - RNA, 19 nt, Artificial Sequence
  Description of Artificial Sequence: Synthetic oligonucleotide
augcaagacugguauccaa

SEQ ID NO: 830036 - RNA, 19 nt, Artificial Sequence
  Description of Artificial Sequence: Synthetic oligonucleotide
gaaggcauauuaaauuguu

SEQ ID NO: 830037 - RNA, 19 nt, Artificial Sequence
  Description of Artificial Sequence: Synthetic oligonucleotide
uacacgucucuggucacaa

SEQ ID NO: 830038 - RNA, 19 nt, Artificial Sequence
  Description of Artificial Sequence: Synthetic oligonucleotide
agacggaccuaugccgggg

SEQ ID NO: 830039 - RNA, 19 nt, Artificial Sequence
  Description of Artificial Sequence: Synthetic oligonucleotide
cucuggaggagccgcucag

SEQ ID NO: 830040 - RNA, 19 nt, Artificial Sequence
  Description of Artificial Sequence: Synthetic oligonucleotide
acauguggucgagcggagg

SEQ ID NO: 830041 - RNA, 19 nt, Artificial Sequence
  Description of Artificial Sequence: Synthetic oligonucleotide
ccggaucucaggauccugg

SEQ ID NO: 830042 - RNA, 19 nt, Artificial Sequence
  Description of Artificial Sequence: Synthetic oligonucleotide
gcagaauaucacauccacc

SEQ ID NO: 830043 - RNA, 19 nt, Artificial Sequence
  Description of Artificial Sequence: Synthetic oligonucleotide
ccaauauauaauaacuuau

SEQ ID NO: 830044 - RNA, 19 nt, Artificial Sequence
  Description of Artificial Sequence: Synthetic oligonucleotide
cucauuguuacacgucucu

SEQ ID NO: 830045 - RNA, 19 nt, Artificial Sequence
  Description of Artificial Sequence: Synthetic oligonucleotide
cagaccccggcuucuccgg

SEQ ID NO: 830046 - RNA, 19 nt, Artificial Sequence
  Description of Artificial Sequence: Synthetic oligonucleotide
guuacacgucucuggucac

SEQ ID NO: 830047 - RNA, 19 nt, Artificial Sequence
  Description of Artificial Sequence: Synthetic oligonucleotide
gguauccaauauauaauaa

SEQ ID NO: 830048 - RNA, 19 nt, Artificial Sequence
  Description of Artificial Sequence: Synthetic oligonucleotide
cacauaauacguagcuaua

SEQ ID NO: 830049 - RNA, 19 nt, Artificial Sequence
  Description of Artificial Sequence: Synthetic oligonucleotide
agucugcagcagaauauca

SEQ ID NO: 830050 - RNA, 19 nt, Artificial Sequence
  Description of Artificial Sequence: Synthetic oligonucleotide
aacucccauuaugcugcuc

SEQ ID NO: 830051 - RNA, 19 nt, Artificial Sequence
  Description of Artificial Sequence: Synthetic oligonucleotide
ggaccuaugccggggacag

SEQ ID NO: 830052 - RNA, 19 nt, Artificial Sequence
  Description of Artificial Sequence: Synthetic oligonucleotide
ggauaugcauuuuaaugau

SEQ ID NO: 830053 - RNA, 19 nt, Artificial Sequence
  Description of Artificial Sequence: Synthetic oligonucleotide
guguaaggcaggaacccuc

SEQ ID NO: 830054 - RNA, 19 nt, Artificial Sequence
  Description of Artificial Sequence: Synthetic oligonucleotide
gugcaaugcaucauaaaau

SEQ ID NO: 830055 - RNA, 19 nt, Artificial Sequence
  Description of Artificial Sequence: Synthetic oligonucleotide
ugcaccaaagaagguccaa

SEQ ID NO: 830056 - RNA, 19 nt, Artificial Sequence
  Description of Artificial Sequence: Synthetic oligonucleotide
acgguacgaggaagugucc

SEQ ID NO: 830057 - RNA, 19 nt, Artificial Sequence
  Description of Artificial Sequence: Synthetic oligonucleotide
uucgcucgugaugcaaagu

SEQ ID NO: 830058 - RNA, 19 nt, Artificial Sequence
  Description of Artificial Sequence: Synthetic oligonucleotide
gaugugcuugcugaaaguu

SEQ ID NO: 830059 - RNA, 19 nt, Artificial Sequence
  Description of Artificial Sequence: Synthetic oligonucleotide
ugccaguuucgcucgugau

SEQ ID NO: 830060 - RNA, 19 nt, Artificial Sequence
  Description of Artificial Sequence: Synthetic oligonucleotide
augauacuccacagaguca

SEQ ID NO: 830061 - RNA, 19 nt, Artificial Sequence
  Description of Artificial Sequence: Synthetic oligonucleotide
guggcucagggaaauuaac

SEQ ID NO: 830062 - RNA, 19 nt, Artificial Sequence
  Description of Artificial Sequence: Synthetic oligonucleotide
guacgaggaaguguccaca

SEQ ID NO: 830063 - RNA, 19 nt, Artificial Sequence
  Description of Artificial Sequence: Synthetic oligonucleotide
caacgcuuugacgaugcca

SEQ ID NO: 830064 - RNA, 19 nt, Artificial Sequence
  Description of Artificial Sequence: Synthetic oligonucleotide
ggacaaaauccccaagccu

SEQ ID NO: 830065 - RNA, 19 nt, Artificial Sequence
  Description of Artificial Sequence: Synthetic oligonucleotide
agguaaugagcggcugucu

SEQ ID NO: 830066 - RNA, 19 nt, Artificial Sequence
  Description of Artificial Sequence: Synthetic oligonucleotide
ccacauaauacguagcuau

SEQ ID NO: 830067 - RNA, 19 nt, Artificial Sequence
  Description of Artificial Sequence: Synthetic oligonucleotide
ccaaaacgguacgaggaag

SEQ ID NO: 830068 - RNA, 19 nt, Artificial Sequence
  Description of Artificial Sequence: Synthetic oligonucleotide
ccauuaugcugcucuuuac

SEQ ID NO: 830069 - RNA, 19 nt, Artificial Sequence
  Description of Artificial Sequence: Synthetic oligonucleotide
gagaggcgagcugcccugg

SEQ ID NO: 830070 - RNA, 19 nt, Artificial Sequence
  Description of Artificial Sequence: Synthetic oligonucleotide
gguguguaauccuguucca

SEQ ID NO: 830071 - RNA, 19 nt, Artificial Sequence
  Description of Artificial Sequence: Synthetic oligonucleotide
gacggaccuaugccgggga

SEQ ID NO: 830072 - RNA, 19 nt, Artificial Sequence
  Description of Artificial Sequence: Synthetic oligonucleotide
caugcaagacugguaucca

SEQ ID NO: 830073 - RNA, 19 nt, Artificial Sequence
  Description of Artificial Sequence: Synthetic oligonucleotide
uggcuguaccaaugcccca

SEQ ID NO: 830074 - RNA, 19 nt, Artificial Sequence
  Description of Artificial Sequence: Synthetic oligonucleotide
cagugucaaauacggacua

SEQ ID NO: 830075 - RNA, 19 nt, Artificial Sequence
  Description of Artificial Sequence: Synthetic oligonucleotide
gauaugcauuuuaaugauu

SEQ ID NO: 830076 - RNA, 19 nt, Artificial Sequence
  Description of Artificial Sequence: Synthetic oligonucleotide
agacaccacaacgcuuuga

SEQ ID NO: 830077 - RNA, 19 nt, Artificial Sequence
  Description of Artificial Sequence: Synthetic oligonucleotide
uggucgagcggagggugga

SEQ ID NO: 830078 - RNA, 19 nt, Artificial Sequence
  Description of Artificial Sequence: Synthetic oligonucleotide
aacauacuuuagagcguuu

SEQ ID NO: 830079 - RNA, 19 nt, Artificial Sequence
  Description of Artificial Sequence: Synthetic oligonucleotide
gcuggauucguuuggcgua

SEQ ID NO: 830080 - RNA, 19 nt, Artificial Sequence
  Description of Artificial Sequence: Synthetic oligonucleotide
gcguaacucugugccaugg

SEQ ID NO: 830081 - RNA, 19 nt, Artificial Sequence
  Description of Artificial Sequence: Synthetic oligonucleotide
guguguaauccuguuccaa

SEQ ID NO: 830082 - RNA, 19 nt, Artificial Sequence
  Description of Artificial Sequence: Synthetic oligonucleotide
ggcuguaccaaugccccac

SEQ ID NO: 830083 - RNA, 19 nt, Artificial Sequence
  Description of Artificial Sequence: Synthetic oligonucleotide
acgucucuggucacaauuu

SEQ ID NO: 830084 - RNA, 19 nt, Artificial Sequence
  Description of Artificial Sequence: Synthetic oligonucleotide
gcaagacugguauccaaua

SEQ ID NO: 830085 - RNA, 19 nt, Artificial Sequence
  Description of Artificial Sequence: Synthetic oligonucleotide
caagaccaacagaggacaa

SEQ ID NO: 830086 - RNA, 19 nt, Artificial Sequence
  Description of Artificial Sequence: Synthetic oligonucleotide
auguggucgagcggagggu

SEQ ID NO: 830087 - RNA, 19 nt, Artificial Sequence
  Description of Artificial Sequence: Synthetic oligonucleotide
ccuuauacugucucaaaau

SEQ ID NO: 830088 - RNA, 19 nt, Artificial Sequence
  Description of Artificial Sequence: Synthetic oligonucleotide
gagcguuuuguguggcccu

SEQ ID NO: 830089 - RNA, 19 nt, Artificial Sequence
  Description of Artificial Sequence: Synthetic oligonucleotide
gaccuuaccuuaacacaua

SEQ ID NO: 830090 - RNA, 19 nt, Artificial Sequence
  Description of Artificial Sequence: Synthetic oligonucleotide
cugcagagacggaccuaug

SEQ ID NO: 830091 - RNA, 19 nt, Artificial Sequence
  Description of Artificial Sequence: Synthetic oligonucleotide
agggugugcaaugcaucau

SEQ ID NO: 830092 - RNA, 19 nt, Artificial Sequence
  Description of Artificial Sequence: Synthetic oligonucleotide
acccuccaugcuaacuucu

SEQ ID NO: 830093 - RNA, 19 nt, Artificial Sequence
  Description of Artificial Sequence: Synthetic oligonucleotide
ggugugcaaugcaucauaa

SEQ ID NO: 830094 - RNA, 19 nt, Artificial Sequence
  Description of Artificial Sequence: Synthetic oligonucleotide
auaugugggcccagauaaa

SEQ ID NO: 830095 - RNA, 19 nt, Artificial Sequence
  Description of Artificial Sequence: Synthetic oligonucleotide
augcaggccucaauucuaa

SEQ ID NO: 830096 - RNA, 19 nt, Artificial Sequence
  Description of Artificial Sequence: Synthetic oligonucleotide
ccagugucaaauacggacu

SEQ ID NO: 830097 - RNA, 19 nt, Artificial Sequence
  Description of Artificial Sequence: Synthetic oligonucleotide
ggauacgguggcucaggga

SEQ ID NO: 830098 - RNA, 19 nt, Artificial Sequence
  Description of Artificial Sequence: Synthetic oligonucleotide
ccaugcuaacuucugcaga

SEQ ID NO: 830099 - RNA, 19 nt, Artificial Sequence
  Description of Artificial Sequence: Synthetic oligonucleotide
uuauuccagccaggucaaa

SEQ ID NO: 830100 - RNA, 19 nt, Artificial Sequence
  Description of Artificial Sequence: Synthetic oligonucleotide
ggcguaacucugugccaug

SEQ ID NO: 830101 - RNA, 19 nt, Artificial Sequence
  Description of Artificial Sequence: Synthetic oligonucleotide
cuuugacgaugccacaauu

SEQ ID NO: 830102 - RNA, 19 nt, Artificial Sequence
  Description of Artificial Sequence: Synthetic oligonucleotide
augcuaacuucugcagaua

SEQ ID NO: 830103 - RNA, 19 nt, Artificial Sequence
  Description of Artificial Sequence: Synthetic oligonucleotide
ccugguuagagcccuccca

SEQ ID NO: 830104 - RNA, 19 nt, Artificial Sequence
  Description of Artificial Sequence: Synthetic oligonucleotide
uggauucguuuggcguaac

SEQ ID NO: 830105 - RNA, 19 nt, Artificial Sequence
  Description of Artificial Sequence: Synthetic oligonucleotide
uuacaacgaccagcuucuc

SEQ ID NO: 830106 - RNA, 19 nt, Artificial Sequence
  Description of Artificial Sequence: Synthetic oligonucleotide
cuggauucguuuggcguaa

SEQ ID NO: 830107 - RNA, 19 nt, Artificial Sequence
  Description of Artificial Sequence: Synthetic oligonucleotide
ggauaaaguaacacaccau

SEQ ID NO: 830108 - RNA, 19 nt, Artificial Sequence
  Description of Artificial Sequence: Synthetic oligonucleotide
cucccugcggggugcccac

SEQ ID NO: 830109 - RNA, 19 nt, Artificial Sequence
  Description of Artificial Sequence: Synthetic oligonucleotide
caacgaccagcuucucaaa

SEQ ID NO: 830110 - RNA, 19 nt, Artificial Sequence
  Description of Artificial Sequence: Synthetic oligonucleotide
agcguuuuguguggcccuu

SEQ ID NO: 830111 - RNA, 19 nt, Artificial Sequence
  Description of Artificial Sequence: Synthetic oligonucleotide
auacgguggcucagggaaa

SEQ ID NO: 830112 - RNA, 19 nt, Artificial Sequence
  Description of Artificial Sequence: Synthetic oligonucleotide
gaccaacagaggacaaaau

SEQ ID NO: 830113 - RNA, 19 nt, Artificial Sequence
  Description of Artificial Sequence: Synthetic oligonucleotide
cguuuggcguaacucugug

SEQ ID NO: 830114 - RNA, 19 nt, Artificial Sequence
  Description of Artificial Sequence: Synthetic oligonucleotide
gccuauccaguaggcauac

SEQ ID NO: 830115 - RNA, 19 nt, Artificial Sequence
  Description of Artificial Sequence: Synthetic oligonucleotide
ccuuaccuuaacacauaaa

SEQ ID NO: 830116 - RNA, 19 nt, Artificial Sequence
  Description of Artificial Sequence: Synthetic oligonucleotide
guugagucugcagcagaau

SEQ ID NO: 830117 - RNA, 19 nt, Artificial Sequence
  Description of Artificial Sequence: Synthetic oligonucleotide
gaccuaugccggggacagc

SEQ ID NO: 830118 - RNA, 19 nt, Artificial Sequence
  Description of Artificial Sequence: Synthetic oligonucleotide
gcuauaugugggcccagau

SEQ ID NO: 830119 - RNA, 19 nt, Artificial Sequence
  Description of Artificial Sequence: Synthetic oligonucleotide
ggauucguuuggcguaacu

SEQ ID NO: 830120 - RNA, 19 nt, Artificial Sequence
  Description of Artificial Sequence: Synthetic oligonucleotide
ccacccuaacaaaauacau

SEQ ID NO: 830121 - RNA, 19 nt, Artificial Sequence
  Description of Artificial Sequence: Synthetic oligonucleotide
ggcaggaacccuccaugcu

SEQ ID NO: 830122 - RNA, 19 nt, Artificial Sequence
  Description of Artificial Sequence: Synthetic oligonucleotide
gcuuugacgaugccacaau

SEQ ID NO: 830123 - RNA, 19 nt, Artificial Sequence
  Description of Artificial Sequence: Synthetic oligonucleotide
cuucuccggaucucaggau

SEQ ID NO: 830124 - RNA, 19 nt, Artificial Sequence
  Description of Artificial Sequence: Synthetic oligonucleotide
ggucgagcggaggguggag

SEQ ID NO: 830125 - RNA, 19 nt, Artificial Sequence
  Description of Artificial Sequence: Synthetic oligonucleotide
ccacaacgcuuugacgaug

SEQ ID NO: 830126 - RNA, 19 nt, Artificial Sequence
  Description of Artificial Sequence: Synthetic oligonucleotide
augccggggacagcaccaa

SEQ ID NO: 830127 - RNA, 19 nt, Artificial Sequence
  Description of Artificial Sequence: Synthetic oligonucleotide
ccgaucccuuuucuucuuc

SEQ ID NO: 830128 - RNA, 19 nt, Artificial Sequence
  Description of Artificial Sequence: Synthetic oligonucleotide
gcucgugaugcaaagucuu

SEQ ID NO: 830129 - RNA, 19 nt, Artificial Sequence
  Description of Artificial Sequence: Synthetic oligonucleotide
ccacaugcaggccucaauu

SEQ ID NO: 830130 - RNA, 19 nt, Artificial Sequence
  Description of Artificial Sequence: Synthetic oligonucleotide
ggcccagauaaagcagaaa

SEQ ID NO: 830131 - RNA, 19 nt, Artificial Sequence
  Description of Artificial Sequence: Synthetic oligonucleotide
cguaacucugugccaugga

SEQ ID NO: 830132 - RNA, 19 nt, Artificial Sequence
  Description of Artificial Sequence: Synthetic oligonucleotide
acgguggcucagggaaauu

SEQ ID NO: 830133 - RNA, 19 nt, Artificial Sequence
  Description of Artificial Sequence: Synthetic oligonucleotide
gcgcccucugcauguucca

SEQ ID NO: 830134 - RNA, 19 nt, Artificial Sequence
  Description of Artificial Sequence: Synthetic oligonucleotide
caagcgcugcuggauucgu

SEQ ID NO: 830135 - RNA, 19 nt, Artificial Sequence
  Description of Artificial Sequence: Synthetic oligonucleotide
guucuacgaugugcuugcu

SEQ ID NO: 830136 - RNA, 19 nt, Artificial Sequence
  Description of Artificial Sequence: Synthetic oligonucleotide
ccaccaucuguucuacgau

SEQ ID NO: 830137 - RNA, 19 nt, Artificial Sequence
  Description of Artificial Sequence: Synthetic oligonucleotide
cgguacgaggaagugucca

SEQ ID NO: 830138 - RNA, 19 nt, Artificial Sequence
  Description of Artificial Sequence: Synthetic oligonucleotide
cgcucgugaugcaaagucu

SEQ ID NO: 830139 - RNA, 19 nt, Artificial Sequence
  Description of Artificial Sequence: Synthetic oligonucleotide
cgcuuugacgaugccacaa

SEQ ID NO: 830140 - RNA, 19 nt, Artificial Sequence
  Description of Artificial Sequence: Synthetic oligonucleotide
gcggcucucagcaccgacu

SEQ ID NO: 830141 - RNA, 19 nt, Artificial Sequence
  Description of Artificial Sequence: Synthetic oligonucleotide
agcggaggguggagaccuu

SEQ ID NO: 830142 - RNA, 19 nt, Artificial Sequence
  Description of Artificial Sequence: Synthetic oligonucleotide
cggaccuaugccggggaca

SEQ ID NO: 830143 - RNA, 19 nt, Artificial Sequence
  Description of Artificial Sequence: Synthetic oligonucleotide
ccauuacaacgaccagcuu

SEQ ID NO: 830144 - RNA, 19 nt, Artificial Sequence
  Description of Artificial Sequence: Synthetic oligonucleotide
gcguuuuguguggcccuuu

SEQ ID NO: 830145 - RNA, 19 nt, Artificial Sequence
  Description of Artificial Sequence: Synthetic oligonucleotide
aauagugauucccugaagc

SEQ ID NO: 830146 - RNA, 19 nt, Artificial Sequence
  Description of Artificial Sequence: Synthetic oligonucleotide
uauucuguaacuuuaauag

SEQ ID NO: 830147 - RNA, 19 nt, Artificial Sequence
  Description of Artificial Sequence: Synthetic oligonucleotide
uuauuaauaaccuuuuggg

SEQ ID NO: 830148 - RNA, 19 nt, Artificial Sequence
  Description of Artificial Sequence: Synthetic oligonucleotide
aaaaguuccagguacguuc

SEQ ID NO: 830149 - RNA, 19 nt, Artificial Sequence
  Description of Artificial Sequence: Synthetic oligonucleotide
uauguuaacagaaacuucc

SEQ ID NO: 830150 - RNA, 19 nt, Artificial Sequence
  Description of Artificial Sequence: Synthetic oligonucleotide
uuuauuagcauacagguau

SEQ ID NO: 830151 - RNA, 19 nt, Artificial Sequence
  Description of Artificial Sequence: Synthetic oligonucleotide
aauaucuuaauggggaagc

SEQ ID NO: 830152 - RNA, 19 nt, Artificial Sequence
  Description of Artificial Sequence: Synthetic oligonucleotide
aaggcuuaaguuuauuuac

SEQ ID NO: 830153 - RNA, 19 nt, Artificial Sequence
  Description of Artificial Sequence: Synthetic oligonucleotide
ugcauuaugauuuccaaag

SEQ ID NO: 830154 - RNA, 19 nt, Artificial Sequence
  Description of Artificial Sequence: Synthetic oligonucleotide
aauauuauaggccuuucgu

SEQ ID NO: 830155 - RNA, 19 nt, Artificial Sequence
  Description of Artificial Sequence: Synthetic oligonucleotide
gacaugucaaaguacaagg

SEQ ID NO: 830156 - RNA, 19 nt, Artificial Sequence
  Description of Artificial Sequence: Synthetic oligonucleotide
aaaguugagaucgaucucg

SEQ ID NO: 830157 - RNA, 19 nt, Artificial Sequence
  Description of Artificial Sequence: Synthetic oligonucleotide
aauauuagcgagugauggg

SEQ ID NO: 830158 - RNA, 19 nt, Artificial Sequence
  Description of Artificial Sequence: Synthetic oligonucleotide
uugucgaacauccagaccu

SEQ ID NO: 830159 - RNA, 19 nt, Artificial Sequence
  Description of Artificial Sequence: Synthetic oligonucleotide
gauugaaauaaacaauccc

SEQ ID NO: 830160 - RNA, 19 nt, Artificial Sequence
  Description of Artificial Sequence: Synthetic oligonucleotide
ucaguaaucgccuucauaa

SEQ ID NO: 830161 - RNA, 19 nt, Artificial Sequence
  Description of Artificial Sequence: Synthetic oligonucleotide
cauggaauaucuuaauggg

SEQ ID NO: 830162 - RNA, 19 nt, Artificial Sequence
  Description of Artificial Sequence: Synthetic oligonucleotide
gaauauuagcgagugaugg

SEQ ID NO: 830163 - RNA, 19 nt, Artificial Sequence
  Description of Artificial Sequence: Synthetic oligonucleotide
uaucuaugcuagcagaccg

SEQ ID NO: 830164 - RNA, 19 nt, Artificial Sequence
  Description of Artificial Sequence: Synthetic oligonucleotide
gaugugucggguuugacag

SEQ ID NO: 830165 - RNA, 19 nt, Artificial Sequence
  Description of Artificial Sequence: Synthetic oligonucleotide
agagaauaacagcuaaagc

SEQ ID NO: 830166 - RNA, 19 nt, Artificial Sequence
  Description of Artificial Sequence: Synthetic oligonucleotide
uccguagacacccagaucu

SEQ ID NO: 830167 - RNA, 19 nt, Artificial Sequence
  Description of Artificial Sequence: Synthetic oligonucleotide
uuuuaggagguaaaagucc

SEQ ID NO: 830168 - RNA, 19 nt, Artificial Sequence
  Description of Artificial Sequence: Synthetic oligonucleotide
uuucuauggaaucguaagg

SEQ ID NO: 830169 - RNA, 19 nt, Artificial Sequence
  Description of Artificial Sequence: Synthetic oligonucleotide
uauuaucagucccacgucg

SEQ ID NO: 830170 - RNA, 19 nt, Artificial Sequence
  Description of Artificial Sequence: Synthetic oligonucleotide
uuuaauagcuauguuaaca

SEQ ID NO: 830171 - RNA, 19 nt, Artificial Sequence
  Description of Artificial Sequence: Synthetic oligonucleotide
ugcaguauucuauaaaaca

SEQ ID NO: 830172 - RNA, 19 nt, Artificial Sequence
  Description of Artificial Sequence: Synthetic oligonucleotide
uuaacuaauaagccguucu

SEQ ID NO: 830173 - RNA, 19 nt, Artificial Sequence
  Description of Artificial Sequence: Synthetic oligonucleotide
ucuauucugauaucugagg

SEQ ID NO: 830174 - RNA, 19 nt, Artificial Sequence
  Description of Artificial Sequence: Synthetic oligonucleotide
uccaauuauaacugaaggc

SEQ ID NO: 830175 - RNA, 19 nt, Artificial Sequence
  Description of Artificial Sequence: Synthetic oligonucleotide
uuugacagagaauaacagc

SEQ ID NO: 830176 - RNA, 19 nt, Artificial Sequence
  Description of Artificial Sequence: Synthetic oligonucleotide
uccacaauugaucugacau

SEQ ID NO: 830177 - RNA, 19 nt, Artificial Sequence
  Description of Artificial Sequence: Synthetic oligonucleotide
ugucaaaguacaaggagug

SEQ ID NO: 830178 - RNA, 19 nt, Artificial Sequence
  Description of Artificial Sequence: Synthetic oligonucleotide
guuucuauggaaucguaag

SEQ ID NO: 830179 - RNA, 19 nt, Artificial Sequence
  Description of Artificial Sequence: Synthetic oligonucleotide
aauauaugcauuguuuccu

SEQ ID NO: 830180 - RNA, 19 nt, Artificial Sequence
  Description of Artificial Sequence: Synthetic oligonucleotide
ugagauugaaauaaacaau

SEQ ID NO: 830181 - RNA, 19 nt, Artificial Sequence
  Description of Artificial Sequence: Synthetic oligonucleotide
cuuaaguuuauuuacugca

SEQ ID NO: 830182 - RNA, 19 nt, Artificial Sequence
  Description of Artificial Sequence: Synthetic oligonucleotide
ucgauuauuuucuuaagaa

SEQ ID NO: 830183 - RNA, 19 nt, Artificial Sequence
  Description of Artificial Sequence: Synthetic oligonucleotide
uuugauuacgccaggagua

SEQ ID NO: 830184 - RNA, 19 nt, Artificial Sequence
  Description of Artificial Sequence: Synthetic oligonucleotide
aucagucccacgucgauac

SEQ ID NO: 830185 - RNA, 19 nt, Artificial Sequence
  Description of Artificial Sequence: Synthetic oligonucleotide
agauugaaauaaacaaucc

SEQ ID NO: 830186 - RNA, 19 nt, Artificial Sequence
  Description of Artificial Sequence: Synthetic oligonucleotide
auuuuaggagguaaaaguc

SEQ ID NO: 830187 - RNA, 19 nt, Artificial Sequence
  Description of Artificial Sequence: Synthetic oligonucleotide
uauucuuucuuuaacuaua

SEQ ID NO: 830188 - RNA, 19 nt, Artificial Sequence
  Description of Artificial Sequence: Synthetic oligonucleotide
agugacaauggcucuuacc

SEQ ID NO: 830189 - RNA, 19 nt, Artificial Sequence
  Description of Artificial Sequence: Synthetic oligonucleotide
aaugcauuaugauuuccaa

SEQ ID NO: 830190 - RNA, 19 nt, Artificial Sequence
  Description of Artificial Sequence: Synthetic oligonucleotide
uuacuaucuaugcuagcag

SEQ ID NO: 830191 - RNA, 19 nt, Artificial Sequence
  Description of Artificial Sequence: Synthetic oligonucleotide
uacaauuggcaucagacuu

SEQ ID NO: 830192 - RNA, 19 nt, Artificial Sequence
  Description of Artificial Sequence: Synthetic oligonucleotide
agaugcucggcccuggcgc

SEQ ID NO: 830193 - RNA, 19 nt, Artificial Sequence
  Description of Artificial Sequence: Synthetic oligonucleotide
agaucaucaauuaaaguug

SEQ ID NO: 830194 - RNA, 19 nt, Artificial Sequence
  Description of Artificial Sequence: Synthetic oligonucleotide
uaacguaaaugccauuccc

SEQ ID NO: 830195 - RNA, 19 nt, Artificial Sequence
  Description of Artificial Sequence: Synthetic oligonucleotide
uucuauggaaucguaaggc

SEQ ID NO: 830196 - RNA, 19 nt, Artificial Sequence
  Description of Artificial Sequence: Synthetic oligonucleotide
uuugcaauuccaagugcag

SEQ ID NO: 830197 - RNA, 19 nt, Artificial Sequence
  Description of Artificial Sequence: Synthetic oligonucleotide
uucaauagugcuuuauuau

SEQ ID NO: 830198 - RNA, 19 nt, Artificial Sequence
  Description of Artificial Sequence: Synthetic oligonucleotide
acuaauaagccguucuugu

SEQ ID NO: 830199 - RNA, 19 nt, Artificial Sequence
  Description of Artificial Sequence: Synthetic oligonucleotide
caauugaucugacaugacc

SEQ ID NO: 830200 - RNA, 19 nt, Artificial Sequence
  Description of Artificial Sequence: Synthetic oligonucleotide
ugaauauuagcgagugaug

SEQ ID NO: 830201 - RNA, 19 nt, Artificial Sequence
  Description of Artificial Sequence: Synthetic oligonucleotide
uaaccuuuuggguugcaag

SEQ ID NO: 830202 - RNA, 19 nt, Artificial Sequence
  Description of Artificial Sequence: Synthetic oligonucleotide
ucgaucucgcuucugauac

SEQ ID NO: 830203 - RNA, 19 nt, Artificial Sequence
  Description of Artificial Sequence: Synthetic oligonucleotide
uuucaauagugcuuuauua

SEQ ID NO: 830204 - RNA, 19 nt, Artificial Sequence
  Description of Artificial Sequence: Synthetic oligonucleotide
aagucgcggcgcuacagcc

SEQ ID NO: 830205 - RNA, 19 nt, Artificial Sequence
  Description of Artificial Sequence: Synthetic oligonucleotide
gaagcuucuauucugauau

SEQ ID NO: 830206 - RNA, 19 nt, Artificial Sequence
  Description of Artificial Sequence: Synthetic oligonucleotide
aacuauauuuggccuuguc

SEQ ID NO: 830207 - RNA, 19 nt, Artificial Sequence
  Description of Artificial Sequence: Synthetic oligonucleotide
aauaagccguucuugucga

SEQ ID NO: 830208 - RNA, 19 nt, Artificial Sequence
  Description of Artificial Sequence: Synthetic oligonucleotide
acaaagcuuuccuacgggg

SEQ ID NO: 830209 - RNA, 19 nt, Artificial Sequence
  Description of Artificial Sequence: Synthetic oligonucleotide
uguaacguaaaugccauuc

SEQ ID NO: 830210 - RNA, 19 nt, Artificial Sequence
  Description of Artificial Sequence: Synthetic oligonucleotide
aaauagugauucccugaag

SEQ ID NO: 830211 - RNA, 19 nt, Artificial Sequence
  Description of Artificial Sequence: Synthetic oligonucleotide
aacuaauaagccguucuug

SEQ ID NO: 830212 - RNA, 19 nt, Artificial Sequence
  Description of Artificial Sequence: Synthetic oligonucleotide
uaugcauuguuuccuuggc

SEQ ID NO: 830213 - RNA, 19 nt, Artificial Sequence
  Description of Artificial Sequence: Synthetic oligonucleotide
agacugguuuauuaauaac

SEQ ID NO: 830214 - RNA, 19 nt, Artificial Sequence
  Description of Artificial Sequence: Synthetic oligonucleotide
uuaacuauauuuggccuug

SEQ ID NO: 830215 - RNA, 19 nt, Artificial Sequence
  Description of Artificial Sequence: Synthetic oligonucleotide
uugcaagaagaccugacaa

SEQ ID NO: 830216 - RNA, 19 nt, Artificial Sequence
  Description of Artificial Sequence: Synthetic oligonucleotide
aaugaguguguuccggcca

SEQ ID NO: 830217 - RNA, 19 nt, Artificial Sequence
  Description of Artificial Sequence: Synthetic oligonucleotide
gaaucguaaggcuugaaua

SEQ ID NO: 830218 - RNA, 19 nt, Artificial Sequence
  Description of Artificial Sequence: Synthetic oligonucleotide
agacauaacuauaagauuu

SEQ ID NO: 830219 - RNA, 19 nt, Artificial Sequence
  Description of Artificial Sequence: Synthetic oligonucleotide
cuugucagugccuuugcag

SEQ ID NO: 830220 - RNA, 19 nt, Artificial Sequence
  Description of Artificial Sequence: Synthetic oligonucleotide
ugugcacucagccugcgcu

SEQ ID NO: 830221 - RNA, 19 nt, Artificial Sequence
  Description of Artificial Sequence: Synthetic oligonucleotide
cuuaggucuucuaaagaug

SEQ ID NO: 830222 - RNA, 19 nt, Artificial Sequence
  Description of Artificial Sequence: Synthetic oligonucleotide
uugugucucuauuuuagga

SEQ ID NO: 830223 - RNA, 19 nt, Artificial Sequence
  Description of Artificial Sequence: Synthetic oligonucleotide
guguauaugcuucuucagc

SEQ ID NO: 830224 - RNA, 19 nt, Artificial Sequence
  Description of Artificial Sequence: Synthetic oligonucleotide
uuucuaaggggcuagucua

SEQ ID NO: 830225 - RNA, 19 nt, Artificial Sequence
  Description of Artificial Sequence: Synthetic oligonucleotide
auaggccuuucguugauag

SEQ ID NO: 830226 - RNA, 19 nt, Artificial Sequence
  Description of Artificial Sequence: Synthetic oligonucleotide
ugaugugucggguuugaca

SEQ ID NO: 830227 - RNA, 19 nt, Artificial Sequence
  Description of Artificial Sequence: Synthetic oligonucleotide
ucugagacugguuuauuaa

SEQ ID NO: 830228 - RNA, 19 nt, Artificial Sequence
  Description of Artificial Sequence: Synthetic oligonucleotide
auagugauucccugaagca

SEQ ID NO: 830229 - RNA, 19 nt, Artificial Sequence
  Description of Artificial Sequence: Synthetic oligonucleotide
uacuaucuaugcuagcaga

SEQ ID NO: 830230 - RNA, 19 nt, Artificial Sequence
  Description of Artificial Sequence: Synthetic oligonucleotide
aaugguuccugguuacuau

SEQ ID NO: 830231 - RNA, 19 nt, Artificial Sequence
  Description of Artificial Sequence: Synthetic oligonucleotide
uugagaucgaucucgcuuc

SEQ ID NO: 830232 - RNA, 19 nt, Artificial Sequence
  Description of Artificial Sequence: Synthetic oligonucleotide
uuccugguuacuaucuaug

SEQ ID NO: 830233 - RNA, 19 nt, Artificial Sequence
  Description of Artificial Sequence: Synthetic oligonucleotide
ucguaaggcuugaauaucu

SEQ ID NO: 830234 - RNA, 19 nt, Artificial Sequence
  Description of Artificial Sequence: Synthetic oligonucleotide
aacaugagugguuugccuu

SEQ ID NO: 830235 - RNA, 19 nt, Artificial Sequence
  Description of Artificial Sequence: Synthetic oligonucleotide
auuauaggccuuucguuga

SEQ ID NO: 830236 - RNA, 19 nt, Artificial Sequence
  Description of Artificial Sequence: Synthetic oligonucleotide
gaaggcuuaaguuuauuua

SEQ ID NO: 830237 - RNA, 19 nt, Artificial Sequence
  Description of Artificial Sequence: Synthetic oligonucleotide
gaauaucuuaauggggaag

SEQ ID NO: 830238 - RNA, 19 nt, Artificial Sequence
  Description of Artificial Sequence: Synthetic oligonucleotide
guuacuaucuaugcuagca

SEQ ID NO: 830239 - RNA, 19 nt, Artificial Sequence
  Description of Artificial Sequence: Synthetic oligonucleotide
uaucugucaguaaucgccu

SEQ ID NO: 830240 - RNA, 19 nt, Artificial Sequence
  Description of Artificial Sequence: Synthetic oligonucleotide
ucccuuaggucuucuaaag

SEQ ID NO: 830241 - RNA, 19 nt, Artificial Sequence
  Description of Artificial Sequence: Synthetic oligonucleotide
aguaaucgccuucauaaau

SEQ ID NO: 830242 - RNA, 19 nt, Artificial Sequence
  Description of Artificial Sequence: Synthetic oligonucleotide
ucaacugacuugucagugc

SEQ ID NO: 830243 - RNA, 19 nt, Artificial Sequence
  Description of Artificial Sequence: Synthetic oligonucleotide
caguuauccacaauugauc

SEQ ID NO: 830244 - RNA, 19 nt, Artificial Sequence
  Description of Artificial Sequence: Synthetic oligonucleotide
ugagacugguuuauuaaua

SEQ ID NO: 830245 - RNA, 19 nt, Artificial Sequence
  Description of Artificial Sequence: Synthetic oligonucleotide
auauuauaggccuuucguu

SEQ ID NO: 830246 - RNA, 19 nt, Artificial Sequence
  Description of Artificial Sequence: Synthetic oligonucleotide
guaacguaaaugccauucc

SEQ ID NO: 830247 - RNA, 19 nt, Artificial Sequence
  Description of Artificial Sequence: Synthetic oligonucleotide
uuuccuacggggaucccca

SEQ ID NO: 830248 - RNA, 19 nt, Artificial Sequence
  Description of Artificial Sequence: Synthetic oligonucleotide
acugguuuauuaauaaccu

SEQ ID NO: 830249 - RNA, 19 nt, Artificial Sequence
  Description of Artificial Sequence: Synthetic oligonucleotide
auauuagcgagugaugggu

SEQ ID NO: 830250 - RNA, 19 nt, Artificial Sequence
  Description of Artificial Sequence: Synthetic oligonucleotide
gcaguauucuauaaaacag

SEQ ID NO: 830251 - RNA, 19 nt, Artificial Sequence
  Description of Artificial Sequence: Synthetic oligonucleotide
ucuugucgaacauccagac

SEQ ID NO: 830252 - RNA, 19 nt, Artificial Sequence
  Description of Artificial Sequence: Synthetic oligonucleotide
ucguugauagaggccaugg

SEQ ID NO: 830253 - RNA, 19 nt, Artificial Sequence
  Description of Artificial Sequence: Synthetic oligonucleotide
aacguaaaugccauucccu

SEQ ID NO: 830254 - RNA, 19 nt, Artificial Sequence
  Description of Artificial Sequence: Synthetic oligonucleotide
cuauguuaacagaaacuuc

SEQ ID NO: 830255 - RNA, 19 nt, Artificial Sequence
  Description of Artificial Sequence: Synthetic oligonucleotide
auuugucguuccuguaacg

SEQ ID NO: 830256 - RNA, 19 nt, Artificial Sequence
  Description of Artificial Sequence: Synthetic oligonucleotide
uuauuaucagucccacguc

SEQ ID NO: 830257 - RNA, 19 nt, Artificial Sequence
  Description of Artificial Sequence: Synthetic oligonucleotide
uauaugcauuguuuccuug

SEQ ID NO: 830258 - RNA, 19 nt, Artificial Sequence
  Description of Artificial Sequence: Synthetic oligonucleotide
caucaguuaccacaacagc

SEQ ID NO: 830259 - RNA, 19 nt, Artificial Sequence
  Description of Artificial Sequence: Synthetic oligonucleotide
ugugucggguuugacagag

SEQ ID NO: 830260 - RNA, 19 nt, Artificial Sequence
  Description of Artificial Sequence: Synthetic oligonucleotide
guccauauugggaacaggc

SEQ ID NO: 830261 - RNA, 19 nt, Artificial Sequence
  Description of Artificial Sequence: Synthetic oligonucleotide
aauuaaaguugagaucgau

SEQ ID NO: 830262 - RNA, 19 nt, Artificial Sequence
  Description of Artificial Sequence: Synthetic oligonucleotide
agguacguucucuggggcc

SEQ ID NO: 830263 - RNA, 19 nt, Artificial Sequence
  Description of Artificial Sequence: Synthetic oligonucleotide
ucucucuccaucaguuacc

SEQ ID NO: 830264 - RNA, 19 nt, Artificial Sequence
  Description of Artificial Sequence: Synthetic oligonucleotide
aagccguucuugucgaaca

SEQ ID NO: 830265 - RNA, 19 nt, Artificial Sequence
  Description of Artificial Sequence: Synthetic oligonucleotide
gacgacaugucaaaguaca

SEQ ID NO: 830266 - RNA, 19 nt, Artificial Sequence
  Description of Artificial Sequence: Synthetic oligonucleotide
ucgaacauccagaccuucc

SEQ ID NO: 830267 - RNA, 19 nt, Artificial Sequence
  Description of Artificial Sequence: Synthetic oligonucleotide
cagaucaucaauuaaaguu

SEQ ID NO: 830268 - RNA, 19 nt, Artificial Sequence
  Description of Artificial Sequence: Synthetic oligonucleotide
aauuauaacugaaggcuua

SEQ ID NO: 830269 - RNA, 19 nt, Artificial Sequence
  Description of Artificial Sequence: Synthetic oligonucleotide
uaaucgccuucauaaauuc

SEQ ID NO: 830270 - RNA, 19 nt, Artificial Sequence
  Description of Artificial Sequence: Synthetic oligonucleotide
caacugacuugucagugcc

SEQ ID NO: 830271 - RNA, 19 nt, Artificial Sequence
  Description of Artificial Sequence: Synthetic oligonucleotide
uacuuagugcaaauauuau

SEQ ID NO: 830272 - RNA, 19 nt, Artificial Sequence
  Description of Artificial Sequence: Synthetic oligonucleotide
aagccgaccagcaccugcc

SEQ ID NO: 830273 - RNA, 19 nt, Artificial Sequence
  Description of Artificial Sequence: Synthetic oligonucleotide
uaacuaauaagccguucuu

SEQ ID NO: 830274 - RNA, 19 nt, Artificial Sequence
  Description of Artificial Sequence: Synthetic oligonucleotide
uauuuacugcaucuucaaa

SEQ ID NO: 830275 - RNA, 19 nt, Artificial Sequence
  Description of Artificial Sequence: Synthetic oligonucleotide
gcaagaagaccugacaagg

SEQ ID NO: 830276 - RNA, 19 nt, Artificial Sequence
  Description of Artificial Sequence: Synthetic oligonucleotide
gugcuuuauuaucaguccc

SEQ ID NO: 830277 - RNA, 19 nt, Artificial Sequence
  Description of Artificial Sequence: Synthetic oligonucleotide
agaucgaucucgcuucuga

SEQ ID NO: 830278 - RNA, 19 nt, Artificial Sequence
  Description of Artificial Sequence: Synthetic oligonucleotide
ugaagacucuggccaauca

SEQ ID NO: 830279 - RNA, 19 nt, Artificial Sequence
  Description of Artificial Sequence: Synthetic oligonucleotide
uucccuuguuuguucuugg

SEQ ID NO: 830280 - RNA, 19 nt, Artificial Sequence
  Description of Artificial Sequence: Synthetic oligonucleotide
cuucaggugcaaaugacga

SEQ ID NO: 830281 - RNA, 19 nt, Artificial Sequence
  Description of Artificial Sequence: Synthetic oligonucleotide
cauuugucguuccuguaac

SEQ ID NO: 830282 - RNA, 19 nt, Artificial Sequence
  Description of Artificial Sequence: Synthetic oligonucleotide
uacggggauccccauuccg

SEQ ID NO: 830283 - RNA, 19 nt, Artificial Sequence
  Description of Artificial Sequence: Synthetic oligonucleotide
acagccuuaacaugguuuu

SEQ ID NO: 830284 - RNA, 19 nt, Artificial Sequence
  Description of Artificial Sequence: Synthetic oligonucleotide
ugggcuaacucuucaucug

SEQ ID NO: 830285 - RNA, 19 nt, Artificial Sequence
  Description of Artificial Sequence: Synthetic oligonucleotide
caucauugaagguacagua

SEQ ID NO: 830286 - RNA, 19 nt, Artificial Sequence
  Description of Artificial Sequence: Synthetic oligonucleotide
agagaagucgcggcgcuac

SEQ ID NO: 830287 - RNA, 19 nt, Artificial Sequence
  Description of Artificial Sequence: Synthetic oligonucleotide
ucuaugcuagcagaccggc

SEQ ID NO: 830288 - RNA, 19 nt, Artificial Sequence
  Description of Artificial Sequence: Synthetic oligonucleotide
auuccguagacacccagau

SEQ ID NO: 830289 - RNA, 19 nt, Artificial Sequence
  Description of Artificial Sequence: Synthetic oligonucleotide
aauaacagcuaaagccaca

SEQ ID NO: 830290 - RNA, 19 nt, Artificial Sequence
  Description of Artificial Sequence: Synthetic oligonucleotide
uuauaacugaaggcuuaag

SEQ ID NO: 830291 - RNA, 19 nt, Artificial Sequence
  Description of Artificial Sequence: Synthetic oligonucleotide
aaccggaaugcauuaugau

SEQ ID NO: 830292 - RNA, 19 nt, Artificial Sequence
  Description of Artificial Sequence: Synthetic oligonucleotide
cucgauuauuuucuuaaga

SEQ ID NO: 830293 - RNA, 19 nt, Artificial Sequence
  Description of Artificial Sequence: Synthetic oligonucleotide
gguaaagccucccuugggc

SEQ ID NO: 830294 - RNA, 19 nt, Artificial Sequence
  Description of Artificial Sequence: Synthetic oligonucleotide
caaaguacaaggagugaca

SEQ ID NO: 830295 - RNA, 19 nt, Artificial Sequence
  Description of Artificial Sequence: Synthetic oligonucleotide
auuagcauacagguauucu

SEQ ID NO: 830296 - RNA, 19 nt, Artificial Sequence
  Description of Artificial Sequence: Synthetic oligonucleotide
gaauaacagcuaaagccac

SEQ ID NO: 830297 - RNA, 19 nt, Artificial Sequence
  Description of Artificial Sequence: Synthetic oligonucleotide
aucguaaggcuugaauauc

SEQ ID NO: 830298 - RNA, 19 nt, Artificial Sequence
  Description of Artificial Sequence: Synthetic oligonucleotide
uugcaauuccaagugcagc

SEQ ID NO: 830299 - RNA, 19 nt, Artificial Sequence
  Description of Artificial Sequence: Synthetic oligonucleotide
cugguuacuaucuaugcua

SEQ ID NO: 830300 - RNA, 19 nt, Artificial Sequence
  Description of Artificial Sequence: Synthetic oligonucleotide
acagguauucuguaacuuu

SEQ ID NO: 830301 - RNA, 19 nt, Artificial Sequence
  Description of Artificial Sequence: Synthetic oligonucleotide
accggaaugcauuaugauu

SEQ ID NO: 830302 - RNA, 19 nt, Artificial Sequence
  Description of Artificial Sequence: Synthetic oligonucleotide
ucugauaucugaggaggcu

SEQ ID NO: 830303 - RNA, 19 nt, Artificial Sequence
  Description of Artificial Sequence: Synthetic oligonucleotide
ucucuauuuuaggagguaa

SEQ ID NO: 830304 - RNA, 19 nt, Artificial Sequence
  Description of Artificial Sequence: Synthetic oligonucleotide
caguguauaugcuucuuca

SEQ ID NO: 830305 - RNA, 19 nt, Artificial Sequence
  Description of Artificial Sequence: Synthetic oligonucleotide
gucgauacacacagguagg

SEQ ID NO: 830306 - RNA, 19 nt, Artificial Sequence
  Description of Artificial Sequence: Synthetic oligonucleotide
ucaaaaguuccagguacgu

SEQ ID NO: 830307 - RNA, 19 nt, Artificial Sequence
  Description of Artificial Sequence: Synthetic oligonucleotide
cuggggugaagacucgucc

SEQ ID NO: 830308 - RNA, 19 nt, Artificial Sequence
  Description of Artificial Sequence: Synthetic oligonucleotide
ggcuuaaguuuauuuacug

SEQ ID NO: 830309 - RNA, 19 nt, Artificial Sequence
  Description of Artificial Sequence: Synthetic oligonucleotide
ccaaucauacacauccggc

SEQ ID NO: 830310 - RNA, 19 nt, Artificial Sequence
  Description of Artificial Sequence: Synthetic oligonucleotide
cugaaugaguguguuccgg

SEQ ID NO: 830311 - RNA, 19 nt, Artificial Sequence
  Description of Artificial Sequence: Synthetic oligonucleotide
uucaggugcaaaugacgac

SEQ ID NO: 830312 - RNA, 19 nt, Artificial Sequence
  Description of Artificial Sequence: Synthetic oligonucleotide
augcauuaugauuuccaaa

SEQ ID NO: 830313 - RNA, 19 nt, Artificial Sequence
  Description of Artificial Sequence: Synthetic oligonucleotide
agcagaccggcccuuaacu

SEQ ID NO: 830314 - RNA, 19 nt, Artificial Sequence
  Description of Artificial Sequence: Synthetic oligonucleotide
gaagucgcggcgcuacagc

SEQ ID NO: 830315 - RNA, 19 nt, Artificial Sequence
  Description of Artificial Sequence: Synthetic oligonucleotide
uuucucucaccggaccccg

SEQ ID NO: 830316 - RNA, 19 nt, Artificial Sequence
  Description of Artificial Sequence: Synthetic oligonucleotide
aaguacaaggagugacaau

SEQ ID NO: 830317 - RNA, 19 nt, Artificial Sequence
  Description of Artificial Sequence: Synthetic oligonucleotide
guaaaugccauucccuugu

SEQ ID NO: 830318 - RNA, 19 nt, Artificial Sequence
  Description of Artificial Sequence: Synthetic oligonucleotide
accauagacauaacuauaa

SEQ ID NO: 830319 - RNA, 19 nt, Artificial Sequence
  Description of Artificial Sequence: Synthetic oligonucleotide
cuugaauaucuugugucuc

SEQ ID NO: 830320 - RNA, 19 nt, Artificial Sequence
  Description of Artificial Sequence: Synthetic oligonucleotide
ucgauacacacagguaggc

SEQ ID NO: 830321 - RNA, 19 nt, Artificial Sequence
  Description of Artificial Sequence: Synthetic oligonucleotide
cuugucgaacauccagacc

SEQ ID NO: 830322 - RNA, 19 nt, Artificial Sequence
  Description of Artificial Sequence: Synthetic oligonucleotide
cugauacaagcccauauaa

SEQ ID NO: 830323 - RNA, 19 nt, Artificial Sequence
  Description of Artificial Sequence: Synthetic oligonucleotide
aaaugguuccugguuacua

SEQ ID NO: 830324 - RNA, 19 nt, Artificial Sequence
  Description of Artificial Sequence: Synthetic oligonucleotide
gagaugcucggcccuggcg

SEQ ID NO: 830325 - RNA, 19 nt, Artificial Sequence
  Description of Artificial Sequence: Synthetic oligonucleotide
agcgagugauggguaaagc

SEQ ID NO: 830326 - RNA, 19 nt, Artificial Sequence
  Description of Artificial Sequence: Synthetic oligonucleotide
uggggugaagacucgucca

SEQ ID NO: 830327 - RNA, 19 nt, Artificial Sequence
  Description of Artificial Sequence: Synthetic oligonucleotide
auauaugcauuguuuccuu

SEQ ID NO: 830328 - RNA, 19 nt, Artificial Sequence
  Description of Artificial Sequence: Synthetic oligonucleotide
ucuuacccgggaaaacauc

SEQ ID NO: 830329 - RNA, 19 nt, Artificial Sequence
  Description of Artificial Sequence: Synthetic oligonucleotide
auuagcgagugauggguaa

SEQ ID NO: 830330 - RNA, 19 nt, Artificial Sequence
  Description of Artificial Sequence: Synthetic oligonucleotide
uauuagcgagugaugggua

SEQ ID NO: 830331 - RNA, 19 nt, Artificial Sequence
  Description of Artificial Sequence: Synthetic oligonucleotide
guaucggaaagccauuuua

SEQ ID NO: 830332 - RNA, 19 nt, Artificial Sequence
  Description of Artificial Sequence: Synthetic oligonucleotide
agaccuuccuccgugccuc

SEQ ID NO: 830333 - RNA, 19 nt, Artificial Sequence
  Description of Artificial Sequence: Synthetic oligonucleotide
caaaugacgacaugucaaa

SEQ ID NO: 830334 - RNA, 19 nt, Artificial Sequence
  Description of Artificial Sequence: Synthetic oligonucleotide
gauuuuguguucugagacu

SEQ ID NO: 830335 - RNA, 19 nt, Artificial Sequence
  Description of Artificial Sequence: Synthetic oligonucleotide
uguucugagacugguuuau

SEQ ID NO: 830336 - RNA, 19 nt, Artificial Sequence
  Description of Artificial Sequence: Synthetic oligonucleotide
gcagcagggaaacauaauc

SEQ ID NO: 830337 - RNA, 19 nt, Artificial Sequence
  Description of Artificial Sequence: Synthetic oligonucleotide
uuaucagucccacgucgau

SEQ ID NO: 830338 - RNA, 19 nt, Artificial Sequence
  Description of Artificial Sequence: Synthetic oligonucleotide
aagacucuggccaaucaua

SEQ ID NO: 830339 - RNA, 19 nt, Artificial Sequence
  Description of Artificial Sequence: Synthetic oligonucleotide
aguguguuccggccauauc

SEQ ID NO: 830340 - RNA, 19 nt, Artificial Sequence
  Description of Artificial Sequence: Synthetic oligonucleotide
cccacgucgauacacacag

SEQ ID NO: 830341 - RNA, 19 nt, Artificial Sequence
  Description of Artificial Sequence: Synthetic oligonucleotide
gaaccggaaugcauuauga

SEQ ID NO: 830342 - RNA, 19 nt, Artificial Sequence
  Description of Artificial Sequence: Synthetic oligonucleotide
cgucgauacacacagguag

SEQ ID NO: 830343 - RNA, 19 nt, Artificial Sequence
  Description of Artificial Sequence: Synthetic oligonucleotide
cuguauauagacaaagcuu

SEQ ID NO: 830344 - RNA, 19 nt, Artificial Sequence
  Description of Artificial Sequence: Synthetic oligonucleotide
gcuguauauagacaaagcu

SEQ ID NO: 830345 - RNA, 19 nt, Artificial Sequence
  Description of Artificial Sequence: Synthetic oligonucleotide
caaagcuuuccuacgggga

SEQ ID NO: 830346 - RNA, 19 nt, Artificial Sequence
  Description of Artificial Sequence: Synthetic oligonucleotide
uagugauucccugaagcau

SEQ ID NO: 830347 - RNA, 19 nt, Artificial Sequence
  Description of Artificial Sequence: Synthetic oligonucleotide
auagcuauguuaacagaaa

SEQ ID NO: 830348 - RNA, 19 nt, Artificial Sequence
  Description of Artificial Sequence: Synthetic oligonucleotide
cuuuccuacggggaucccc

SEQ ID NO: 830349 - RNA, 19 nt, Artificial Sequence
  Description of Artificial Sequence: Synthetic oligonucleotide
gcgagugauggguaaagcc

SEQ ID NO: 830350 - RNA, 19 nt, Artificial Sequence
  Description of Artificial Sequence: Synthetic oligonucleotide
aucuaugcuagcagaccgg

SEQ ID NO: 830351 - RNA, 19 nt, Artificial Sequence
  Description of Artificial Sequence: Synthetic oligonucleotide
cggcccuuaacuaauaagc

SEQ ID NO: 830352 - RNA, 19 nt, Artificial Sequence
  Description of Artificial Sequence: Synthetic oligonucleotide
ugcgcuguaggguuacuua

SEQ ID NO: 830353 - RNA, 19 nt, Artificial Sequence
  Description of Artificial Sequence: Synthetic oligonucleotide
auucaacaugagugguuug

SEQ ID NO: 830354 - RNA, 19 nt, Artificial Sequence
  Description of Artificial Sequence: Synthetic oligonucleotide
uggaguuucacuggcucaa

SEQ ID NO: 830355 - RNA, 19 nt, Artificial Sequence
  Description of Artificial Sequence: Synthetic oligonucleotide
cugaauauuagcgagugau

SEQ ID NO: 830356 - RNA, 19 nt, Artificial Sequence
  Description of Artificial Sequence: Synthetic oligonucleotide
ccauaucugucaguaaucg

SEQ ID NO: 830357 - RNA, 19 nt, Artificial Sequence
  Description of Artificial Sequence: Synthetic oligonucleotide
cuuucucucaccggacccc

SEQ ID NO: 830358 - RNA, 19 nt, Artificial Sequence
  Description of Artificial Sequence: Synthetic oligonucleotide
acaauugaucugacaugac

SEQ ID NO: 830359 - RNA, 19 nt, Artificial Sequence
  Description of Artificial Sequence: Synthetic oligonucleotide
uagcgagugauggguaaag

SEQ ID NO: 830360 - RNA, 19 nt, Artificial Sequence
  Description of Artificial Sequence: Synthetic oligonucleotide
uaucuuaauggggaagcuu

SEQ ID NO: 830361 - RNA, 19 nt, Artificial Sequence
  Description of Artificial Sequence: Synthetic oligonucleotide
cugucacugaugugucggg

SEQ ID NO: 830362 - RNA, 19 nt, Artificial Sequence
  Description of Artificial Sequence: Synthetic oligonucleotide
ucgccuucauaaauucauc

SEQ ID NO: 830363 - RNA, 19 nt, Artificial Sequence
  Description of Artificial Sequence: Synthetic oligonucleotide
auaaucacuccuccauauu

SEQ ID NO: 830364 - RNA, 19 nt, Artificial Sequence
  Description of Artificial Sequence: Synthetic oligonucleotide
uugauuacgccaggaguaa

SEQ ID NO: 830365 - RNA, 19 nt, Artificial Sequence
  Description of Artificial Sequence: Synthetic oligonucleotide
agaccaagcauuugucguu

SEQ ID NO: 830366 - RNA, 19 nt, Artificial Sequence
  Description of Artificial Sequence: Synthetic oligonucleotide
ucccacgucgauacacaca

SEQ ID NO: 830367 - RNA, 19 nt, Artificial Sequence
  Description of Artificial Sequence: Synthetic oligonucleotide
cuaugcuagcagaccggcc

SEQ ID NO: 830368 - RNA, 19 nt, Artificial Sequence
  Description of Artificial Sequence: Synthetic oligonucleotide
caggcaagaccaacuguug

SEQ ID NO: 830369 - RNA, 19 nt, Artificial Sequence
  Description of Artificial Sequence: Synthetic oligonucleotide
ugagaucgaucucgcuucu

SEQ ID NO: 830370 - RNA, 19 nt, Artificial Sequence
  Description of Artificial Sequence: Synthetic oligonucleotide
uccccauuccguagacacc

SEQ ID NO: 830371 - RNA, 19 nt, Artificial Sequence
  Description of Artificial Sequence: Synthetic oligonucleotide
gauuacgccaggaguaaaa

SEQ ID NO: 830372 - RNA, 19 nt, Artificial Sequence
  Description of Artificial Sequence: Synthetic oligonucleotide
gguuacuuagugcaaauau

SEQ ID NO: 830373 - RNA, 19 nt, Artificial Sequence
  Description of Artificial Sequence: Synthetic oligonucleotide
auuaucagucccacgucga

SEQ ID NO: 830374 - RNA, 19 nt, Artificial Sequence
  Description of Artificial Sequence: Synthetic oligonucleotide
acaugagugguuugccuuu

SEQ ID NO: 830375 - RNA, 19 nt, Artificial Sequence
  Description of Artificial Sequence: Synthetic oligonucleotide
ccaauuauaacugaaggcu

SEQ ID NO: 830376 - RNA, 19 nt, Artificial Sequence
  Description of Artificial Sequence: Synthetic oligonucleotide
aucgaucucgcuucugaua

SEQ ID NO: 830377 - RNA, 19 nt, Artificial Sequence
  Description of Artificial Sequence: Synthetic oligonucleotide
aggguuacuuagugcaaau

SEQ ID NO: 830378 - RNA, 19 nt, Artificial Sequence
  Description of Artificial Sequence: Synthetic oligonucleotide
aagacucguccauccugga

SEQ ID NO: 830379 - RNA, 19 nt, Artificial Sequence
  Description of Artificial Sequence: Synthetic oligonucleotide
aggcuuaaguuuauuuacu

SEQ ID NO: 830380 - RNA, 19 nt, Artificial Sequence
  Description of Artificial Sequence: Synthetic oligonucleotide
uagcagaccggcccuuaac

SEQ ID NO: 830381 - RNA, 19 nt, Artificial Sequence
  Description of Artificial Sequence: Synthetic oligonucleotide
uccggcagcagggaaacau

SEQ ID NO: 830382 - RNA, 19 nt, Artificial Sequence
  Description of Artificial Sequence: Synthetic oligonucleotide
auggcucuuacccgggaaa

SEQ ID NO: 830383 - RNA, 19 nt, Artificial Sequence
  Description of Artificial Sequence: Synthetic oligonucleotide
uucguugauagaggccaug

SEQ ID NO: 830384 - RNA, 19 nt, Artificial Sequence
  Description of Artificial Sequence: Synthetic oligonucleotide
cuuguaugcccauuauaua

SEQ ID NO: 830385 - RNA, 19 nt, Artificial Sequence
  Description of Artificial Sequence: Synthetic oligonucleotide
ucccuuguuuguucuugga

SEQ ID NO: 830386 - RNA, 19 nt, Artificial Sequence
  Description of Artificial Sequence: Synthetic oligonucleotide
ccauagacauaacuauaag

SEQ ID NO: 830387 - RNA, 19 nt, Artificial Sequence
  Description of Artificial Sequence: Synthetic oligonucleotide
aaacaaucccuuaggucuu

SEQ ID NO: 830388 - RNA, 19 nt, Artificial Sequence
  Description of Artificial Sequence: Synthetic oligonucleotide
ggcccuuaacuaauaagcc

SEQ ID NO: 830389 - RNA, 19 nt, Artificial Sequence
  Description of Artificial Sequence: Synthetic oligonucleotide
gaucucgcuucugauacaa

SEQ ID NO: 830390 - RNA, 19 nt, Artificial Sequence
  Description of Artificial Sequence: Synthetic oligonucleotide
cuggguaucggaaagccau

SEQ ID NO: 830391 - RNA, 19 nt, Artificial Sequence
  Description of Artificial Sequence: Synthetic oligonucleotide
agaagucgcggcgcuacag

SEQ ID NO: 830392 - RNA, 19 nt, Artificial Sequence
  Description of Artificial Sequence: Synthetic oligonucleotide
uuccguagacacccagauc

SEQ ID NO: 830393 - RNA, 19 nt, Artificial Sequence
  Description of Artificial Sequence: Synthetic oligonucleotide
uuagcgagugauggguaaa

SEQ ID NO: 830394 - RNA, 19 nt, Artificial Sequence
  Description of Artificial Sequence: Synthetic oligonucleotide
ggagguaaaaguccuugaa

SEQ ID NO: 830395 - RNA, 19 nt, Artificial Sequence
  Description of Artificial Sequence: Synthetic oligonucleotide
gccuuucguugauagaggc

SEQ ID NO: 830396 - RNA, 19 nt, Artificial Sequence
  Description of Artificial Sequence: Synthetic oligonucleotide
cagguacguucucuggggc

SEQ ID NO: 830397 - RNA, 19 nt, Artificial Sequence
  Description of Artificial Sequence: Synthetic oligonucleotide
uucucucaccggaccccgg

SEQ ID NO: 830398 - RNA, 19 nt, Artificial Sequence
  Description of Artificial Sequence: Synthetic oligonucleotide
caauuaaaguugagaucga

SEQ ID NO: 830399 - RNA, 19 nt, Artificial Sequence
  Description of Artificial Sequence: Synthetic oligonucleotide
cauuccguagacacccaga

SEQ ID NO: 830400 - RNA, 19 nt, Artificial Sequence
  Description of Artificial Sequence: Synthetic oligonucleotide
gucgcggcgcuacagcccc

SEQ ID NO: 830401 - RNA, 19 nt, Artificial Sequence
  Description of Artificial Sequence: Synthetic oligonucleotide
uauugggaacaggcaagac

SEQ ID NO: 830402 - RNA, 19 nt, Artificial Sequence
  Description of Artificial Sequence: Synthetic oligonucleotide
gaagacucuggccaaucau

SEQ ID NO: 830403 - RNA, 19 nt, Artificial Sequence
  Description of Artificial Sequence: Synthetic oligonucleotide
agucgcggcgcuacagccc

SEQ ID NO: 830404 - RNA, 19 nt, Artificial Sequence
  Description of Artificial Sequence: Synthetic oligonucleotide
cccgugagcaaaugguucc

SEQ ID NO: 830405 - RNA, 19 nt, Artificial Sequence
  Description of Artificial Sequence: Synthetic oligonucleotide
ggcucaaaugggcugccgc

SEQ ID NO: 830406 - RNA, 19 nt, Artificial Sequence
  Description of Artificial Sequence: Synthetic oligonucleotide
ugccgcuggcaaacaaaca

SEQ ID NO: 830407 - RNA, 19 nt, Artificial Sequence
  Description of Artificial Sequence: Synthetic oligonucleotide
ugucgaacauccagaccuu

SEQ ID NO: 830408 - RNA, 19 nt, Artificial Sequence
  Description of Artificial Sequence: Synthetic oligonucleotide
guucuggguaucggaaagc

SEQ ID NO: 830409 - RNA, 19 nt, Artificial Sequence
  Description of Artificial Sequence: Synthetic oligonucleotide
gguacguucucuggggccc

SEQ ID NO: 830410 - RNA, 19 nt, Artificial Sequence
  Description of Artificial Sequence: Synthetic oligonucleotide
gaccaagcauuugucguuc

SEQ ID NO: 830411 - RNA, 19 nt, Artificial Sequence
  Description of Artificial Sequence: Synthetic oligonucleotide
auaaccuuuuggguugcaa

SEQ ID NO: 830412 - RNA, 19 nt, Artificial Sequence
  Description of Artificial Sequence: Synthetic oligonucleotide
cacgucgauacacacaggu

SEQ ID NO: 830413 - RNA, 19 nt, Artificial Sequence
  Description of Artificial Sequence: Synthetic oligonucleotide
cugccacuccaauuauaac

SEQ ID NO: 830414 - RNA, 19 nt, Artificial Sequence
  Description of Artificial Sequence: Synthetic oligonucleotide
gauggguaaagccucccuu

SEQ ID NO: 830415 - RNA, 19 nt, Artificial Sequence
  Description of Artificial Sequence: Synthetic oligonucleotide
caauuauaacugaaggcuu

SEQ ID NO: 830416 - RNA, 19 nt, Artificial Sequence
  Description of Artificial Sequence: Synthetic oligonucleotide
uaucagucccacgucgaua

SEQ ID NO: 830417 - RNA, 19 nt, Artificial Sequence
  Description of Artificial Sequence: Synthetic oligonucleotide
agaccaacuguuggugugu

SEQ ID NO: 830418 - RNA, 19 nt, Artificial Sequence
  Description of Artificial Sequence: Synthetic oligonucleotide
aaguuucuauggaaucgua

SEQ ID NO: 830419 - RNA, 19 nt, Artificial Sequence
  Description of Artificial Sequence: Synthetic oligonucleotide
caaaugggcugccgcuggc

SEQ ID NO: 830420 - RNA, 19 nt, Artificial Sequence
  Description of Artificial Sequence: Synthetic oligonucleotide
augcuagcagaccggcccu

SEQ ID NO: 830421 - RNA, 19 nt, Artificial Sequence
  Description of Artificial Sequence: Synthetic oligonucleotide
ggaaugcauuaugauuucc

SEQ ID NO: 830422 - RNA, 19 nt, Artificial Sequence
  Description of Artificial Sequence: Synthetic oligonucleotide
cagucccacgucgauacac

SEQ ID NO: 830423 - RNA, 19 nt, Artificial Sequence
  Description of Artificial Sequence: Synthetic oligonucleotide
gcuuuauuaucagucccac

SEQ ID NO: 830424 - RNA, 19 nt, Artificial Sequence
  Description of Artificial Sequence: Synthetic oligonucleotide
gcauuugucguuccuguaa

SEQ ID NO: 830425 - RNA, 19 nt, Artificial Sequence
  Description of Artificial Sequence: Synthetic oligonucleotide
cucaccggaccccggcccg

SEQ ID NO: 830426 - RNA, 19 nt, Artificial Sequence
  Description of Artificial Sequence: Synthetic oligonucleotide
uggguaucggaaagccauu

SEQ ID NO: 830427 - RNA, 19 nt, Artificial Sequence
  Description of Artificial Sequence: Synthetic oligonucleotide
cugucaguaaucgccuuca

SEQ ID NO: 830428 - RNA, 19 nt, Artificial Sequence
  Description of Artificial Sequence: Synthetic oligonucleotide
ccuuuuggguugcaagaag

SEQ ID NO: 830429 - RNA, 19 nt, Artificial Sequence
  Description of Artificial Sequence: Synthetic oligonucleotide
acugaugugucggguuuga

SEQ ID NO: 830430 - RNA, 19 nt, Artificial Sequence
  Description of Artificial Sequence: Synthetic oligonucleotide
ugauuacgccaggaguaaa

SEQ ID NO: 830431 - RNA, 19 nt, Artificial Sequence
  Description of Artificial Sequence: Synthetic oligonucleotide
gccaguuauccacaauuga

SEQ ID NO: 830432 - RNA, 19 nt, Artificial Sequence
  Description of Artificial Sequence: Synthetic oligonucleotide
uaacuauauuuggccuugu

SEQ ID NO: 830433 - RNA, 19 nt, Artificial Sequence
  Description of Artificial Sequence: Synthetic oligonucleotide
ucuuucuuguaugcccauu

SEQ ID NO: 830434 - RNA, 19 nt, Artificial Sequence
  Description of Artificial Sequence: Synthetic oligonucleotide
ccuacggggauccccauuc

SEQ ID NO: 830435 - RNA, 19 nt, Artificial Sequence
  Description of Artificial Sequence: Synthetic oligonucleotide
ccgcuggcaaacaaacacc

SEQ ID NO: 830436 - RNA, 19 nt, Artificial Sequence
  Description of Artificial Sequence: Synthetic oligonucleotide
cagaccggcccuuaacuaa

SEQ ID NO: 830437 - RNA, 19 nt, Artificial Sequence
  Description of Artificial Sequence: Synthetic oligonucleotide
caucugucaacugacuugu

SEQ ID NO: 830438 - RNA, 19 nt, Artificial Sequence
  Description of Artificial Sequence: Synthetic oligonucleotide
ucgggcuguaugccugcac

SEQ ID NO: 830439 - RNA, 19 nt, Artificial Sequence
  Description of Artificial Sequence: Synthetic oligonucleotide
ucagucccacgucgauaca

SEQ ID NO: 830440 - RNA, 19 nt, Artificial Sequence
  Description of Artificial Sequence: Synthetic oligonucleotide
cucucaccggaccccggcc

SEQ ID NO: 830441 - RNA, 19 nt, Artificial Sequence
  Description of Artificial Sequence: Synthetic oligonucleotide
ggccuuucguugauagagg

SEQ ID NO: 830442 - RNA, 19 nt, Artificial Sequence
  Description of Artificial Sequence: Synthetic oligonucleotide
guaaucgccuucauaaauu

SEQ ID NO: 830443 - RNA, 19 nt, Artificial Sequence
  Description of Artificial Sequence: Synthetic oligonucleotide
agucccacgucgauacaca

SEQ ID NO: 830444 - RNA, 19 nt, Artificial Sequence
  Description of Artificial Sequence: Synthetic oligonucleotide
gguugcaagaagaccugac

SEQ ID NO: 830445 - RNA, 19 nt, Artificial Sequence
  Description of Artificial Sequence: Synthetic oligonucleotide
caguaaucgccuucauaaa

SEQ ID NO: 830446 - RNA, 19 nt, Artificial Sequence
  Description of Artificial Sequence: Synthetic oligonucleotide
ccggcccuuaacuaauaag

SEQ ID NO: 830447 - RNA, 19 nt, Artificial Sequence
  Description of Artificial Sequence: Synthetic oligonucleotide
ggaaucguaaggcuugaau

SEQ ID NO: 830448 - RNA, 19 nt, Artificial Sequence
  Description of Artificial Sequence: Synthetic oligonucleotide
cgcuacagccccgagaugc

SEQ ID NO: 830449 - RNA, 19 nt, Artificial Sequence
  Description of Artificial Sequence: Synthetic oligonucleotide
cugagacugguuuauuaau

SEQ ID NO: 830450 - RNA, 19 nt, Artificial Sequence
  Description of Artificial Sequence: Synthetic oligonucleotide
augugucggguuugacaga

SEQ ID NO: 830451 - RNA, 19 nt, Artificial Sequence
  Description of Artificial Sequence: Synthetic oligonucleotide
auggaaucguaaggcuuga

SEQ ID NO: 830452 - RNA, 19 nt, Artificial Sequence
  Description of Artificial Sequence: Synthetic oligonucleotide
acggggauccccauuccgu

SEQ ID NO: 830453 - RNA, 19 nt, Artificial Sequence
  Description of Artificial Sequence: Synthetic oligonucleotide
accggcccuuaacuaauaa

SEQ ID NO: 830454 - RNA, 19 nt, Artificial Sequence
  Description of Artificial Sequence: Synthetic oligonucleotide
guucucuggggccccguga

SEQ ID NO: 830455 - RNA, 19 nt, Artificial Sequence
  Description of Artificial Sequence: Synthetic oligonucleotide
gaucgaucucgcuucugau

SEQ ID NO: 830456 - RNA, 19 nt, Artificial Sequence
  Description of Artificial Sequence: Synthetic oligonucleotide
agccguucuugucgaacau

SEQ ID NO: 830457 - RNA, 19 nt, Artificial Sequence
  Description of Artificial Sequence: Synthetic oligonucleotide
acauccggcagcagggaaa

SEQ ID NO: 830458 - RNA, 19 nt, Artificial Sequence
  Description of Artificial Sequence: Synthetic oligonucleotide
ccggaaugcauuaugauuu

SEQ ID NO: 830459 - RNA, 19 nt, Artificial Sequence
  Description of Artificial Sequence: Synthetic oligonucleotide
uccuacggggauccccauu

SEQ ID NO: 830460 - RNA, 19 nt, Artificial Sequence
  Description of Artificial Sequence: Synthetic oligonucleotide
auaagccguucuugucgaa

SEQ ID NO: 830461 - RNA, 19 nt, Artificial Sequence
  Description of Artificial Sequence: Synthetic oligonucleotide
ggcagagaagucgcggcgc

SEQ ID NO: 830462 - RNA, 19 nt, Artificial Sequence
  Description of Artificial Sequence: Synthetic oligonucleotide
gagaagucgcggcgcuaca

SEQ ID NO: 830463 - RNA, 19 nt, Artificial Sequence
  Description of Artificial Sequence: Synthetic oligonucleotide
ggcgcuacagccccgagau

SEQ ID NO: 830464 - RNA, 19 nt, Artificial Sequence
  Description of Artificial Sequence: Synthetic oligonucleotide
gggccccgugagcaaaugg

SEQ ID NO: 830465 - RNA, 19 nt, Artificial Sequence
  Description of Artificial Sequence: Synthetic oligonucleotide
ggaacaggcaagaccaacu

SEQ ID NO: 830466 - RNA, 19 nt, Artificial Sequence
  Description of Artificial Sequence: Synthetic oligonucleotide
agaccggcccuuaacuaau

SEQ ID NO: 830467 - RNA, 19 nt, Artificial Sequence
  Description of Artificial Sequence: Synthetic oligonucleotide
gauccccauuccguagaca

SEQ ID NO: 830468 - RNA, 19 nt, Artificial Sequence
  Description of Artificial Sequence: Synthetic oligonucleotide
aucucgcuucugauacaag

SEQ ID NO: 830469 - RNA, 19 nt, Artificial Sequence
  Description of Artificial Sequence: Synthetic oligonucleotide
gucgaacauccagaccuuc

SEQ ID NO: 830470 - RNA, 19 nt, Artificial Sequence
  Description of Artificial Sequence: Synthetic oligonucleotide
ccauuccguagacacccag

SEQ ID NO: 830471 - RNA, 19 nt, Artificial Sequence
  Description of Artificial Sequence: Synthetic oligonucleotide
cugaugugucggguuugac

SEQ ID NO: 830472 - RNA, 19 nt, Artificial Sequence
  Description of Artificial Sequence: Synthetic oligonucleotide
augggcugccgcuggcaaa

SEQ ID NO: 830473 - RNA, 19 nt, Artificial Sequence
  Description of Artificial Sequence: Synthetic oligonucleotide
gucacugaugugucggguu

SEQ ID NO: 830474 - RNA, 19 nt, Artificial Sequence
  Description of Artificial Sequence: Synthetic oligonucleotide
ggauccccauuccguagac

SEQ ID NO: 830475 - RNA, 19 nt, Artificial Sequence
  Description of Artificial Sequence: Synthetic oligonucleotide
ccccgugagcaaaugguuc

SEQ ID NO: 830476 - RNA, 19 nt, Artificial Sequence
  Description of Artificial Sequence: Synthetic oligonucleotide
gucucuauuuuaggaggua

SEQ ID NO: 830477 - RNA, 19 nt, Artificial Sequence
  Description of Artificial Sequence: Synthetic oligonucleotide
acgucgauacacacaggua

SEQ ID NO: 830478 - RNA, 19 nt, Artificial Sequence
  Description of Artificial Sequence: Synthetic oligonucleotide
cagccuuaacaugguuuuc

SEQ ID NO: 830479 - RNA, 19 nt, Artificial Sequence
  Description of Artificial Sequence: Synthetic oligonucleotide
agccgaccagcaccugcca

SEQ ID NO: 830480 - RNA, 19 nt, Artificial Sequence
  Description of Artificial Sequence: Synthetic oligonucleotide
guacguucucuggggcccc

SEQ ID NO: 830481 - RNA, 19 nt, Artificial Sequence
  Description of Artificial Sequence: Synthetic oligonucleotide
ccuggggugaagacucguc

SEQ ID NO: 830482 - RNA, 19 nt, Artificial Sequence
  Description of Artificial Sequence: Synthetic oligonucleotide
gcucaaaugggcugccgcu

SEQ ID NO: 830483 - RNA, 19 nt, Artificial Sequence
  Description of Artificial Sequence: Synthetic oligonucleotide
uggggccccgugagcaaau

SEQ ID NO: 830484 - RNA, 19 nt, Artificial Sequence
  Description of Artificial Sequence: Synthetic oligonucleotide
ccuguaacguaaaugccau

SEQ ID NO: 830485 - RNA, 19 nt, Artificial Sequence
  Description of Artificial Sequence: Synthetic oligonucleotide
cuagcagaccggcccuuaa

SEQ ID NO: 830486 - RNA, 19 nt, Artificial Sequence
  Description of Artificial Sequence: Synthetic oligonucleotide
uuccuacggggauccccau

SEQ ID NO: 830487 - RNA, 19 nt, Artificial Sequence
  Description of Artificial Sequence: Synthetic oligonucleotide
cugauaucugaggaggcuu

SEQ ID NO: 830488 - RNA, 19 nt, Artificial Sequence
  Description of Artificial Sequence: Synthetic oligonucleotide
caggugcaaaugacgacau

SEQ ID NO: 830489 - RNA, 19 nt, Artificial Sequence
  Description of Artificial Sequence: Synthetic oligonucleotide
gaccaacuguuggugugua

SEQ ID NO: 830490 - RNA, 19 nt, Artificial Sequence
  Description of Artificial Sequence: Synthetic oligonucleotide
ggagugacaauggcucuua

SEQ ID NO: 830491 - RNA, 19 nt, Artificial Sequence
  Description of Artificial Sequence: Synthetic oligonucleotide
caaaaguuccagguacguu

SEQ ID NO: 830492 - RNA, 19 nt, Artificial Sequence
  Description of Artificial Sequence: Synthetic oligonucleotide
ccaagaaaacacugucacu

SEQ ID NO: 830493 - RNA, 19 nt, Artificial Sequence
  Description of Artificial Sequence: Synthetic oligonucleotide
gcagaccggcccuuaacua

SEQ ID NO: 830494 - RNA, 19 nt, Artificial Sequence
  Description of Artificial Sequence: Synthetic oligonucleotide
ccacgucgauacacacagg

SEQ ID NO: 830495 - RNA, 19 nt, Artificial Sequence
  Description of Artificial Sequence: Synthetic oligonucleotide
gguaucggaaagccauuuu

SEQ ID NO: 830496 - RNA, 19 nt, Artificial Sequence
  Description of Artificial Sequence: Synthetic oligonucleotide
ggguuacuuagugcaaaua

SEQ ID NO: 830497 - RNA, 19 nt, Artificial Sequence
  Description of Artificial Sequence: Synthetic oligonucleotide
caaaugguuccugguuacu

SEQ ID NO: 830498 - RNA, 19 nt, Artificial Sequence
  Description of Artificial Sequence: Synthetic oligonucleotide
ccguagacacccagaucuc

SEQ ID NO: 830499 - RNA, 19 nt, Artificial Sequence
  Description of Artificial Sequence: Synthetic oligonucleotide
ugcuagcagaccggcccuu

SEQ ID NO: 830500 - RNA, 19 nt, Artificial Sequence
  Description of Artificial Sequence: Synthetic oligonucleotide
ggguugcaagaagaccuga

SEQ ID NO: 830501 - RNA, 19 nt, Artificial Sequence
  Description of Artificial Sequence: Synthetic oligonucleotide
cccggcccgcgccaggugg

SEQ ID NO: 830502 - RNA, 19 nt, Artificial Sequence
  Description of Artificial Sequence: Synthetic oligonucleotide
gccgaccagcaccugccac

SEQ ID NO: 830503 - RNA, 19 nt, Artificial Sequence
  Description of Artificial Sequence: Synthetic oligonucleotide
cagccugcgcuguaggguu

SEQ ID NO: 830504 - RNA, 19 nt, Artificial Sequence
  Description of Artificial Sequence: Synthetic oligonucleotide
cagaaacuuccugaauauu

SEQ ID NO: 830505 - RNA, 19 nt, Artificial Sequence
  Description of Artificial Sequence: Synthetic oligonucleotide
ggaguuucacuggcucaaa

SEQ ID NO: 830506 - RNA, 19 nt, Artificial Sequence
  Description of Artificial Sequence: Synthetic oligonucleotide
gucggguuugacagagaau

SEQ ID NO: 830507 - RNA, 19 nt, Artificial Sequence
  Description of Artificial Sequence: Synthetic oligonucleotide
gaccggcccuuaacuaaua

SEQ ID NO: 830508 - RNA, 19 nt, Artificial Sequence
  Description of Artificial Sequence: Synthetic oligonucleotide
ccgagaugcucggcccugg

SEQ ID NO: 830509 - RNA, 19 nt, Artificial Sequence
  Description of Artificial Sequence: Synthetic oligonucleotide
gcuucugauacaagcccau

SEQ ID NO: 830510 - RNA, 19 nt, Artificial Sequence
  Description of Artificial Sequence: Synthetic oligonucleotide
gugucggguuugacagaga

SEQ ID NO: 830511 - RNA, 19 nt, Artificial Sequence
  Description of Artificial Sequence: Synthetic oligonucleotide
cuguaacguaaaugccauu

SEQ ID NO: 830512 - RNA, 19 nt, Artificial Sequence
  Description of Artificial Sequence: Synthetic oligonucleotide
cucgggcuguaugccugca

SEQ ID NO: 830513 - RNA, 19 nt, Artificial Sequence
  Description of Artificial Sequence: Synthetic oligonucleotide
agccucccuugggcuaacu

SEQ ID NO: 830514 - RNA, 19 nt, Artificial Sequence
  Description of Artificial Sequence: Synthetic oligonucleotide
ccggcagcagggaaacaua

SEQ ID NO: 830515 - RNA, 19 nt, Artificial Sequence
  Description of Artificial Sequence: Synthetic oligonucleotide
cccgagaugcucggcccug

SEQ ID NO: 830516 - RNA, 19 nt, Artificial Sequence
  Description of Artificial Sequence: Synthetic oligonucleotide
cggguuugacagagaauaa

SEQ ID NO: 830517 - RNA, 19 nt, Artificial Sequence
  Description of Artificial Sequence: Synthetic oligonucleotide
gccugcgcuguaggguuac

SEQ ID NO: 830518 - RNA, 19 nt, Artificial Sequence
  Description of Artificial Sequence: Synthetic oligonucleotide
ccggaccccggcccgcgcc

SEQ ID NO: 830519 - RNA, 19 nt, Artificial Sequence
  Description of Artificial Sequence: Synthetic oligonucleotide
gcgcuacagccccgagaug

SEQ ID NO: 830520 - RNA, 19 nt, Artificial Sequence
  Description of Artificial Sequence: Synthetic oligonucleotide
gcuuuccuacggggauccc

SEQ ID NO: 830521 - RNA, 19 nt, Artificial Sequence
  Description of Artificial Sequence: Synthetic oligonucleotide
ggggccccgugagcaaaug

SEQ ID NO: 830522 - RNA, 19 nt, Artificial Sequence
  Description of Artificial Sequence: Synthetic oligonucleotide
gcuacagccccgagaugcu

SEQ ID NO: 830523 - RNA, 19 nt, Artificial Sequence
  Description of Artificial Sequence: Synthetic oligonucleotide
cugcgcuguaggguuacuu

SEQ ID NO: 830524 - RNA, 19 nt, Artificial Sequence
  Description of Artificial Sequence: Synthetic oligonucleotide
gcuagcagaccggcccuua

SEQ ID NO: 830525 - RNA, 19 nt, Artificial Sequence
  Description of Artificial Sequence: Synthetic oligonucleotide
cgaucucgcuucugauaca

SEQ ID NO: 830526 - RNA, 19 nt, Artificial Sequence
  Description of Artificial Sequence: Synthetic oligonucleotide
cggggauccccauuccgua

SEQ ID NO: 830527 - RNA, 19 nt, Artificial Sequence
  Description of Artificial Sequence: Synthetic oligonucleotide
gccccgugagcaaaugguu

SEQ ID NO: 830528 - RNA, 19 nt, Artificial Sequence
  Description of Artificial Sequence: Synthetic oligonucleotide
gcccucugucaguguauau

SEQ ID NO: 830529 - RNA, 19 nt, Artificial Sequence
  Description of Artificial Sequence: Synthetic oligonucleotide
gggcugccgcuggcaaaca

SEQ ID NO: 830530 - RNA, 19 nt, Artificial Sequence
  Description of Artificial Sequence: Synthetic oligonucleotide
ccccgagaugcucggcccu

SEQ ID NO: 830531 - RNA, 19 nt, Artificial Sequence
  Description of Artificial Sequence: Synthetic oligonucleotide
ccccggcccgcgccaggug

SEQ ID NO: 830532 - RNA, 19 nt, Artificial Sequence
  Description of Artificial Sequence: Synthetic oligonucleotide
cgcggcgcuacagccccga

SEQ ID NO: 830533 - RNA, 19 nt, Artificial Sequence
  Description of Artificial Sequence: Synthetic oligonucleotide
ccggcccgcgccagguggu

SEQ ID NO: 830534 - RNA, 19 nt, Artificial Sequence
  Description of Artificial Sequence: Synthetic oligonucleotide
cggcccgcgccagguggug

SEQ ID NO: 830535 - RNA, 19 nt, Artificial Sequence
  Description of Artificial Sequence: Synthetic oligonucleotide
ccugcgcuguaggguuacu

SEQ ID NO: 830536 - RNA, 19 nt, Artificial Sequence
  Description of Artificial Sequence: Synthetic oligonucleotide
aauuuuggcuccuaagucc

SEQ ID NO: 830537 - RNA, 19 nt, Artificial Sequence
  Description of Artificial Sequence: Synthetic oligonucleotide
ugaauaaaaugcaaggagc

SEQ ID NO: 830538 - RNA, 19 nt, Artificial Sequence
  Description of Artificial Sequence: Synthetic oligonucleotide
acaaauuccucauagguag

SEQ ID NO: 830539 - RNA, 19 nt, Artificial Sequence
  Description of Artificial Sequence: Synthetic oligonucleotide
augaauaaaaugcaaggag

SEQ ID NO: 830540 - RNA, 19 nt, Artificial Sequence
  Description of Artificial Sequence: Synthetic oligonucleotide
uuagcuauugccuuggcug

SEQ ID NO: 830541 - RNA, 19 nt, Artificial Sequence
  Description of Artificial Sequence: Synthetic oligonucleotide
acacauuggaaauaucagc

SEQ ID NO: 830542 - RNA, 19 nt, Artificial Sequence
  Description of Artificial Sequence: Synthetic oligonucleotide
uggaccuugaaaauagagg

SEQ ID NO: 830543 - RNA, 19 nt, Artificial Sequence
  Description of Artificial Sequence: Synthetic oligonucleotide
aguauagacuacugcagcc

SEQ ID NO: 830544 - RNA, 19 nt, Artificial Sequence
  Description of Artificial Sequence: Synthetic oligonucleotide
ucugcauguuccaagaacc

SEQ ID NO: 830545 - RNA, 19 nt, Artificial Sequence
  Description of Artificial Sequence: Synthetic oligonucleotide
accaauguagaucuggcgg

SEQ ID NO: 830546 - RNA, 19 nt, Artificial Sequence
  Description of Artificial Sequence: Synthetic oligonucleotide
auagccaaguccuuugccc

SEQ ID NO: 830547 - RNA, 19 nt, Artificial Sequence
  Description of Artificial Sequence: Synthetic oligonucleotide
agaucuggcggucaaaccg

SEQ ID NO: 830548 - RNA, 19 nt, Artificial Sequence
  Description of Artificial Sequence: Synthetic oligonucleotide
auaucagggcgauuggugc

SEQ ID NO: 830549 - RNA, 19 nt, Artificial Sequence
  Description of Artificial Sequence: Synthetic oligonucleotide
aaggauaucagggcgauug

SEQ ID NO: 830550 - RNA, 19 nt, Artificial Sequence
  Description of Artificial Sequence: Synthetic oligonucleotide
uuuucauuggguuguagca

SEQ ID NO: 830551 - RNA, 19 nt, Artificial Sequence
  Description of Artificial Sequence: Synthetic oligonucleotide
aauuuggcuucuucacagc

SEQ ID NO: 830552 - RNA, 19 nt, Artificial Sequence
  Description of Artificial Sequence: Synthetic oligonucleotide
uuaccuaaaacauuuguuu

SEQ ID NO: 830553 - RNA, 19 nt, Artificial Sequence
  Description of Artificial Sequence: Synthetic oligonucleotide
uuugcaagaaguguuuugc

SEQ ID NO: 830554 - RNA, 19 nt, Artificial Sequence
  Description of Artificial Sequence: Synthetic oligonucleotide
aucagcaccagugaagccc

SEQ ID NO: 830555 - RNA, 19 nt, Artificial Sequence
  Description of Artificial Sequence: Synthetic oligonucleotide
uuuuguuacucugacagcu

SEQ ID NO: 830556 - RNA, 19 nt, Artificial Sequence
  Description of Artificial Sequence: Synthetic oligonucleotide
gaaagagcaucuuugguga

SEQ ID NO: 830557 - RNA, 19 nt, Artificial Sequence
  Description of Artificial Sequence: Synthetic oligonucleotide
cuuuucauuggguuguagc

SEQ ID NO: 830558 - RNA, 19 nt, Artificial Sequence
  Description of Artificial Sequence: Synthetic oligonucleotide
aaagugucguuccuggaca

SEQ ID NO: 830559 - RNA, 19 nt, Artificial Sequence
  Description of Artificial Sequence: Synthetic oligonucleotide
uugaaaauagaggaccugc

SEQ ID NO: 830560 - RNA, 19 nt, Artificial Sequence
  Description of Artificial Sequence: Synthetic oligonucleotide
ucuuaccuaaaacauuugu

SEQ ID NO: 830561 - RNA, 19 nt, Artificial Sequence
  Description of Artificial Sequence: Synthetic oligonucleotide
cuugaguggacgcaagugg

SEQ ID NO: 830562 - RNA, 19 nt, Artificial Sequence
  Description of Artificial Sequence: Synthetic oligonucleotide
cauuggaaauaucagcacc

SEQ ID NO: 830563 - RNA, 19 nt, Artificial Sequence
  Description of Artificial Sequence: Synthetic oligonucleotide
uaguauagacuacugcagc

SEQ ID NO: 830564 - RNA, 19 nt, Artificial Sequence
  Description of Artificial Sequence: Synthetic oligonucleotide
cauagguagacuucucugc

SEQ ID NO: 830565 - RNA, 19 nt, Artificial Sequence
  Description of Artificial Sequence: Synthetic oligonucleotide
ugucucaccaacacugaag

SEQ ID NO: 830566 - RNA, 19 nt, Artificial Sequence
  Description of Artificial Sequence: Synthetic oligonucleotide
guuuaaaguguucuccugc

SEQ ID NO: 830567 - RNA, 19 nt, Artificial Sequence
  Description of Artificial Sequence: Synthetic oligonucleotide
gaggcguucgucuagcuug

SEQ ID NO: 830568 - RNA, 19 nt, Artificial Sequence
  Description of Artificial Sequence: Synthetic oligonucleotide
uuuaaaguguucuccugcu

SEQ ID NO: 830569 - RNA, 19 nt, Artificial Sequence
  Description of Artificial Sequence: Synthetic oligonucleotide
cagguggucacccacaggc

SEQ ID NO: 830570 - RNA, 19 nt, Artificial Sequence
  Description of Artificial Sequence: Synthetic oligonucleotide
cacacauuggaaauaucag

SEQ ID NO: 830571 - RNA, 19 nt, Artificial Sequence
  Description of Artificial Sequence: Synthetic oligonucleotide
auuggguuguagcaccugg

SEQ ID NO: 830572 - RNA, 19 nt, Artificial Sequence
  Description of Artificial Sequence: Synthetic oligonucleotide
aaguccuuugccccgaggu

SEQ ID NO: 830573 - RNA, 19 nt, Artificial Sequence
  Description of Artificial Sequence: Synthetic oligonucleotide
uguaagcagcuccagaguc

SEQ ID NO: 830574 - RNA, 19 nt, Artificial Sequence
  Description of Artificial Sequence: Synthetic oligonucleotide
uacacaugcggucgaagag

SEQ ID NO: 830575 - RNA, 19 nt, Artificial Sequence
  Description of Artificial Sequence: Synthetic oligonucleotide
aucgcauagaggaggaugc

SEQ ID NO: 830576 - RNA, 19 nt, Artificial Sequence
  Description of Artificial Sequence: Synthetic oligonucleotide
aaacaugucacgaacccgu

SEQ ID NO: 830577 - RNA, 19 nt, Artificial Sequence
  Description of Artificial Sequence: Synthetic oligonucleotide
ugcaaacaugucacgaacc

SEQ ID NO: 830578 - RNA, 19 nt, Artificial Sequence
  Description of Artificial Sequence: Synthetic oligonucleotide
cuagcuuccuugaaagagc

SEQ ID NO: 830579 - RNA, 19 nt, Artificial Sequence
  Description of Artificial Sequence: Synthetic oligonucleotide
uguagugaucugaccaaag

SEQ ID NO: 830580 - RNA, 19 nt, Artificial Sequence
  Description of Artificial Sequence: Synthetic oligonucleotide
auaggcagaccugacaagg

SEQ ID NO: 830581 - RNA, 19 nt, Artificial Sequence
  Description of Artificial Sequence: Synthetic oligonucleotide
uagugaucugaccaaagaa

SEQ ID NO: 830582 - RNA, 19 nt, Artificial Sequence
  Description of Artificial Sequence: Synthetic oligonucleotide
uggaauuuuggcuccuaag

SEQ ID NO: 830583 - RNA, 19 nt, Artificial Sequence
  Description of Artificial Sequence: Synthetic oligonucleotide
uauagacuacugcagccug

SEQ ID NO: 830584 - RNA, 19 nt, Artificial Sequence
  Description of Artificial Sequence: Synthetic oligonucleotide
aaguccuaacucuucuucu

SEQ ID NO: 830585 - RNA, 19 nt, Artificial Sequence
  Description of Artificial Sequence: Synthetic oligonucleotide
uccgaucauaggcagaccu

SEQ ID NO: 830586 - RNA, 19 nt, Artificial Sequence
  Description of Artificial Sequence: Synthetic oligonucleotide
uucucaaggccuccaauga

SEQ ID NO: 830587 - RNA, 19 nt, Artificial Sequence
  Description of Artificial Sequence: Synthetic oligonucleotide
aaacauuuguuugcaguug

SEQ ID NO: 830588 - RNA, 19 nt, Artificial Sequence
  Description of Artificial Sequence: Synthetic oligonucleotide
uugcaaacaugucacgaac

SEQ ID NO: 830589 - RNA, 19 nt, Artificial Sequence
  Description of Artificial Sequence: Synthetic oligonucleotide
gucguuccuggacagaagg

SEQ ID NO: 830590 - RNA, 19 nt, Artificial Sequence
  Description of Artificial Sequence: Synthetic oligonucleotide
aguccgaucauaggcagac

SEQ ID NO: 830591 - RNA, 19 nt, Artificial Sequence
  Description of Artificial Sequence: Synthetic oligonucleotide
guaguauagacuacugcag

SEQ ID NO: 830592 - RNA, 19 nt, Artificial Sequence
  Description of Artificial Sequence: Synthetic oligonucleotide
ugaauggucuuaccuaaaa

SEQ ID NO: 830593 - RNA, 19 nt, Artificial Sequence
  Description of Artificial Sequence: Synthetic oligonucleotide
acacaugcggucgaagagc

SEQ ID NO: 830594 - RNA, 19 nt, Artificial Sequence
  Description of Artificial Sequence: Synthetic oligonucleotide
cugguuuaaaguguucucc

SEQ ID NO: 830595 - RNA, 19 nt, Artificial Sequence
  Description of Artificial Sequence: Synthetic oligonucleotide
ucugcaaagggccgagggc

SEQ ID NO: 830596 - RNA, 19 nt, Artificial Sequence
  Description of Artificial Sequence: Synthetic oligonucleotide
auagguagacuucucugca

SEQ ID NO: 830597 - RNA, 19 nt, Artificial Sequence
  Description of Artificial Sequence: Synthetic oligonucleotide
uuuuaagauucuuggccgu

SEQ ID NO: 830598 - RNA, 19 nt, Artificial Sequence
  Description of Artificial Sequence: Synthetic oligonucleotide
uucugaauggucuuaccua

SEQ ID NO: 830599 - RNA, 19 nt, Artificial Sequence
  Description of Artificial Sequence: Synthetic oligonucleotide
acaugucacgaacccgugc

SEQ ID NO: 830600 - RNA, 19 nt, Artificial Sequence
  Description of Artificial Sequence: Synthetic oligonucleotide
auugcaaacaugucacgaa

SEQ ID NO: 830601 - RNA, 19 nt, Artificial Sequence
  Description of Artificial Sequence: Synthetic oligonucleotide
guuguguccuccucuaggc

SEQ ID NO: 830602 - RNA, 19 nt, Artificial Sequence
  Description of Artificial Sequence: Synthetic oligonucleotide
gucaaaggauaccuggccc

SEQ ID NO: 830603 - RNA, 19 nt, Artificial Sequence
  Description of Artificial Sequence: Synthetic oligonucleotide
ucgugauaggcuacaguug

SEQ ID NO: 830604 - RNA, 19 nt, Artificial Sequence
  Description of Artificial Sequence: Synthetic oligonucleotide
uugaauccauccaucucca

SEQ ID NO: 830605 - RNA, 19 nt, Artificial Sequence
  Description of Artificial Sequence: Synthetic oligonucleotide
caaagugucguuccuggac

SEQ ID NO: 830606 - RNA, 19 nt, Artificial Sequence
  Description of Artificial Sequence: Synthetic oligonucleotide
ucugguuuaaaguguucuc

SEQ ID NO: 830607 - RNA, 19 nt, Artificial Sequence
  Description of Artificial Sequence: Synthetic oligonucleotide
aguccuaacucuucuucug

SEQ ID NO: 830608 - RNA, 19 nt, Artificial Sequence
  Description of Artificial Sequence: Synthetic oligonucleotide
uauugccuuggcugaaugc

SEQ ID NO: 830609 - RNA, 19 nt, Artificial Sequence
  Description of Artificial Sequence: Synthetic oligonucleotide
aagugucguuccuggacag

SEQ ID NO: 830610 - RNA, 19 nt, Artificial Sequence
  Description of Artificial Sequence: Synthetic oligonucleotide
agaguccgaucauaggcag

SEQ ID NO: 830611 - RNA, 19 nt, Artificial Sequence
  Description of Artificial Sequence: Synthetic oligonucleotide
ucguuccuggacagaaggg

SEQ ID NO: 830612 - RNA, 19 nt, Artificial Sequence
  Description of Artificial Sequence: Synthetic oligonucleotide
ugucacgaacccgugcugg

SEQ ID NO: 830613 - RNA, 19 nt, Artificial Sequence
  Description of Artificial Sequence: Synthetic oligonucleotide
cucgcuuccugccaauugc

SEQ ID NO: 830614 - RNA, 19 nt, Artificial Sequence
  Description of Artificial Sequence: Synthetic oligonucleotide
ucgguaguauagacuacug

SEQ ID NO: 830615 - RNA, 19 nt, Artificial Sequence
  Description of Artificial Sequence: Synthetic oligonucleotide
ugcgaaucgcacaucaauu

SEQ ID NO: 830616 - RNA, 19 nt, Artificial Sequence
  Description of Artificial Sequence: Synthetic oligonucleotide
aagggcuaagauggcgggc

SEQ ID NO: 830617 - RNA, 19 nt, Artificial Sequence
  Description of Artificial Sequence: Synthetic oligonucleotide
uuaagauucuuggccguug

SEQ ID NO: 830618 - RNA, 19 nt, Artificial Sequence
  Description of Artificial Sequence: Synthetic oligonucleotide
agaaacucugacccauuca

SEQ ID NO: 830619 - RNA, 19 nt, Artificial Sequence
  Description of Artificial Sequence: Synthetic oligonucleotide
cucugcaaagggccgaggg

SEQ ID NO: 830620 - RNA, 19 nt, Artificial Sequence
  Description of Artificial Sequence: Synthetic oligonucleotide
agaguugaauccauccauc

SEQ ID NO: 830621 - RNA, 19 nt, Artificial Sequence
  Description of Artificial Sequence: Synthetic oligonucleotide
uggaaauaucagcaccagu

SEQ ID NO: 830622 - RNA, 19 nt, Artificial Sequence
  Description of Artificial Sequence: Synthetic oligonucleotide
uaucagggcgauuggugcc

SEQ ID NO: 830623 - RNA, 19 nt, Artificial Sequence
  Description of Artificial Sequence: Synthetic oligonucleotide
uuugaucccuuagcuauug

SEQ ID NO: 830624 - RNA, 19 nt, Artificial Sequence
  Description of Artificial Sequence: Synthetic oligonucleotide
caaguccuaacucuucuuc

SEQ ID NO: 830625 - RNA, 19 nt, Artificial Sequence
  Description of Artificial Sequence: Synthetic oligonucleotide
ucacucauuccaaacugua

SEQ ID NO: 830626 - RNA, 19 nt, Artificial Sequence
  Description of Artificial Sequence: Synthetic oligonucleotide
agccacaucugcgaaucgc

SEQ ID NO: 830627 - RNA, 19 nt, Artificial Sequence
  Description of Artificial Sequence: Synthetic oligonucleotide
uccuaacucuucuucugug

SEQ ID NO: 830628 - RNA, 19 nt, Artificial Sequence
  Description of Artificial Sequence: Synthetic oligonucleotide
augcuaaccaggaccaggg

SEQ ID NO: 830629 - RNA, 19 nt, Artificial Sequence
  Description of Artificial Sequence: Synthetic oligonucleotide
uagcuauugccuuggcuga

SEQ ID NO: 830630 - RNA, 19 nt, Artificial Sequence
  Description of Artificial Sequence: Synthetic oligonucleotide
gugaucugaccaaagaaca

SEQ ID NO: 830631 - RNA, 19 nt, Artificial Sequence
  Description of Artificial Sequence: Synthetic oligonucleotide
aucacucucgguaguauag

SEQ ID NO: 830632 - RNA, 19 nt, Artificial Sequence
  Description of Artificial Sequence: Synthetic oligonucleotide
cucucgguaguauagacua

SEQ ID NO: 830633 - RNA, 19 nt, Artificial Sequence
  Description of Artificial Sequence: Synthetic oligonucleotide
uguaagcaccgcucagugc

SEQ ID NO: 830634 - RNA, 19 nt, Artificial Sequence
  Description of Artificial Sequence: Synthetic oligonucleotide
uggaccagugagcauugcu

SEQ ID NO: 830635 - RNA, 19 nt, Artificial Sequence
  Description of Artificial Sequence: Synthetic oligonucleotide
ucuagcuugaguggacgca

SEQ ID NO: 830636 - RNA, 19 nt, Artificial Sequence
  Description of Artificial Sequence: Synthetic oligonucleotide
uaggcagaccugacaaggc

SEQ ID NO: 830637 - RNA, 19 nt, Artificial Sequence
  Description of Artificial Sequence: Synthetic oligonucleotide
cacucauuccaaacuguac

SEQ ID NO: 830638 - RNA, 19 nt, Artificial Sequence
  Description of Artificial Sequence: Synthetic oligonucleotide
ucaggccacaccuuugauc

SEQ ID NO: 830639 - RNA, 19 nt, Artificial Sequence
  Description of Artificial Sequence: Synthetic oligonucleotide
agcaucauacacaugcggu

SEQ ID NO: 830640 - RNA, 19 nt, Artificial Sequence
  Description of Artificial Sequence: Synthetic oligonucleotide
guggaccuugaaaauagag

SEQ ID NO: 830641 - RNA, 19 nt, Artificial Sequence
  Description of Artificial Sequence: Synthetic oligonucleotide
uagaucuggcggucaaacc

SEQ ID NO: 830642 - RNA, 19 nt, Artificial Sequence
  Description of Artificial Sequence: Synthetic oligonucleotide
ugauauugcuuuggguucu

SEQ ID NO: 830643 - RNA, 19 nt, Artificial Sequence
  Description of Artificial Sequence: Synthetic oligonucleotide
uucgucuagcuugagugga

SEQ ID NO: 830644 - RNA, 19 nt, Artificial Sequence
  Description of Artificial Sequence: Synthetic oligonucleotide
uccugauauugcuuugggu

SEQ ID NO: 830645 - RNA, 19 nt, Artificial Sequence
  Description of Artificial Sequence: Synthetic oligonucleotide
uggucuuaccuaaaacauu

SEQ ID NO: 830646 - RNA, 19 nt, Artificial Sequence
  Description of Artificial Sequence: Synthetic oligonucleotide
caucgcauagaggaggaug

SEQ ID NO: 830647 - RNA, 19 nt, Artificial Sequence
  Description of Artificial Sequence: Synthetic oligonucleotide
ugaguggacgcaaguggac

SEQ ID NO: 830648 - RNA, 19 nt, Artificial Sequence
  Description of Artificial Sequence: Synthetic oligonucleotide
cucccguguguaaagguac

SEQ ID NO: 830649 - RNA, 19 nt, Artificial Sequence
  Description of Artificial Sequence: Synthetic oligonucleotide
auggucuuaccuaaaacau

SEQ ID NO: 830650 - RNA, 19 nt, Artificial Sequence
  Description of Artificial Sequence: Synthetic oligonucleotide
aguggacgcaaguggaccu

SEQ ID NO: 830651 - RNA, 19 nt, Artificial Sequence
  Description of Artificial Sequence: Synthetic oligonucleotide
gcugaaugcugccaagucc

SEQ ID NO: 830652 - RNA, 19 nt, Artificial Sequence
  Description of Artificial Sequence: Synthetic oligonucleotide
auuagugguagaguugaau

SEQ ID NO: 830653 - RNA, 19 nt, Artificial Sequence
  Description of Artificial Sequence: Synthetic oligonucleotide
agcauugcucccuuuggaa

SEQ ID NO: 830654 - RNA, 19 nt, Artificial Sequence
  Description of Artificial Sequence: Synthetic oligonucleotide
aaaccggccaggacguguc

SEQ ID NO: 830655 - RNA, 19 nt, Artificial Sequence
  Description of Artificial Sequence: Synthetic oligonucleotide
aaucgcacaucaauuguuu

SEQ ID NO: 830656 - RNA, 19 nt, Artificial Sequence
  Description of Artificial Sequence: Synthetic oligonucleotide
uagaggaccugccuuugau

SEQ ID NO: 830657 - RNA, 19 nt, Artificial Sequence
  Description of Artificial Sequence: Synthetic oligonucleotide
guucccggcacuguguaag

SEQ ID NO: 830658 - RNA, 19 nt, Artificial Sequence
  Description of Artificial Sequence: Synthetic oligonucleotide
ggcgauuggugccagcuag

SEQ ID NO: 830659 - RNA, 19 nt, Artificial Sequence
  Description of Artificial Sequence: Synthetic oligonucleotide
ugagccccuguagugaucu

SEQ ID NO: 830660 - RNA, 19 nt, Artificial Sequence
  Description of Artificial Sequence: Synthetic oligonucleotide
gaguggacgcaaguggacc

SEQ ID NO: 830661 - RNA, 19 nt, Artificial Sequence
  Description of Artificial Sequence: Synthetic oligonucleotide
uccagaaacucugacccau

SEQ ID NO: 830662 - RNA, 19 nt, Artificial Sequence
  Description of Artificial Sequence: Synthetic oligonucleotide
aaacucugacccauucaca

SEQ ID NO: 830663 - RNA, 19 nt, Artificial Sequence
  Description of Artificial Sequence: Synthetic oligonucleotide
ugcaaagggccgagggccc

SEQ ID NO: 830664 - RNA, 19 nt, Artificial Sequence
  Description of Artificial Sequence: Synthetic oligonucleotide
auagacuacugcagccugg

SEQ ID NO: 830665 - RNA, 19 nt, Artificial Sequence
  Description of Artificial Sequence: Synthetic oligonucleotide
cguucgucuagcuugagug

SEQ ID NO: 830666 - RNA, 19 nt, Artificial Sequence
  Description of Artificial Sequence: Synthetic oligonucleotide
ucugacccauucacaguga

SEQ ID NO: 830667 - RNA, 19 nt, Artificial Sequence
  Description of Artificial Sequence: Synthetic oligonucleotide
ucauuggguuguagcaccu

SEQ ID NO: 830668 - RNA, 19 nt, Artificial Sequence
  Description of Artificial Sequence: Synthetic oligonucleotide
guaagagcugcuagcuucc

SEQ ID NO: 830669 - RNA, 19 nt, Artificial Sequence
  Description of Artificial Sequence: Synthetic oligonucleotide
ucuuuucauuggguuguag

SEQ ID NO: 830670 - RNA, 19 nt, Artificial Sequence
  Description of Artificial Sequence: Synthetic oligonucleotide
cacucucgguaguauagac

SEQ ID NO: 830671 - RNA, 19 nt, Artificial Sequence
  Description of Artificial Sequence: Synthetic oligonucleotide
guaagcagcuccagagucc

SEQ ID NO: 830672 - RNA, 19 nt, Artificial Sequence
  Description of Artificial Sequence: Synthetic oligonucleotide
ugucagggcugggucaagg

SEQ ID NO: 830673 - RNA, 19 nt, Artificial Sequence
  Description of Artificial Sequence: Synthetic oligonucleotide
ggccauugcaaacauguca

SEQ ID NO: 830674 - RNA, 19 nt, Artificial Sequence
  Description of Artificial Sequence: Synthetic oligonucleotide
gaagcccggaguaagagcu

SEQ ID NO: 830675 - RNA, 19 nt, Artificial Sequence
  Description of Artificial Sequence: Synthetic oligonucleotide
gggaccaauguagaucugg

SEQ ID NO: 830676 - RNA, 19 nt, Artificial Sequence
  Description of Artificial Sequence: Synthetic oligonucleotide
ucuguggauucugaauggu

SEQ ID NO: 830677 - RNA, 19 nt, Artificial Sequence
  Description of Artificial Sequence: Synthetic oligonucleotide
gauuggugccagcuagcac

SEQ ID NO: 830678 - RNA, 19 nt, Artificial Sequence
  Description of Artificial Sequence: Synthetic oligonucleotide
uugaucccuuagcuauugc

SEQ ID NO: 830679 - RNA, 19 nt, Artificial Sequence
  Description of Artificial Sequence: Synthetic oligonucleotide
ggacaccuucagcagaggg

SEQ ID NO: 830680 - RNA, 19 nt, Artificial Sequence
  Description of Artificial Sequence: Synthetic oligonucleotide
uggcggucaaaccggccag

SEQ ID NO: 830681 - RNA, 19 nt, Artificial Sequence
  Description of Artificial Sequence: Synthetic oligonucleotide
cauugcaaacaugucacga

SEQ ID NO: 830682 - RNA, 19 nt, Artificial Sequence
  Description of Artificial Sequence: Synthetic oligonucleotide
agaccugacaaggcgccgg

SEQ ID NO: 830683 - RNA, 19 nt, Artificial Sequence
  Description of Artificial Sequence: Synthetic oligonucleotide
aggaugcuaaccaggacca

SEQ ID NO: 830684 - RNA, 19 nt, Artificial Sequence
  Description of Artificial Sequence: Synthetic oligonucleotide
gcgaaucgcacaucaauug

SEQ ID NO: 830685 - RNA, 19 nt, Artificial Sequence
  Description of Artificial Sequence: Synthetic oligonucleotide
uagcuugaguggacgcaag

SEQ ID NO: 830686 - RNA, 19 nt, Artificial Sequence
  Description of Artificial Sequence: Synthetic oligonucleotide
gacgugucagggcuggguc

SEQ ID NO: 830687 - RNA, 19 nt, Artificial Sequence
  Description of Artificial Sequence: Synthetic oligonucleotide
aucauacacaugcggucga

SEQ ID NO: 830688 - RNA, 19 nt, Artificial Sequence
  Description of Artificial Sequence: Synthetic oligonucleotide
acccgugcuggcccaacac

SEQ ID NO: 830689 - RNA, 19 nt, Artificial Sequence
  Description of Artificial Sequence: Synthetic oligonucleotide
gguagacuucucugcaaag

SEQ ID NO: 830690 - RNA, 19 nt, Artificial Sequence
  Description of Artificial Sequence: Synthetic oligonucleotide
ucucgguaguauagacuac

SEQ ID NO: 830691 - RNA, 19 nt, Artificial Sequence
  Description of Artificial Sequence: Synthetic oligonucleotide
cuauugccuuggcugaaug

SEQ ID NO: 830692 - RNA, 19 nt, Artificial Sequence
  Description of Artificial Sequence: Synthetic oligonucleotide
aagaaccagcccaccacug

SEQ ID NO: 830693 - RNA, 19 nt, Artificial Sequence
  Description of Artificial Sequence: Synthetic oligonucleotide
agcccaccacugcaugccc

SEQ ID NO: 830694 - RNA, 19 nt, Artificial Sequence
  Description of Artificial Sequence: Synthetic oligonucleotide
gguuguagcaccugggucu

SEQ ID NO: 830695 - RNA, 19 nt, Artificial Sequence
  Description of Artificial Sequence: Synthetic oligonucleotide
acgcaaguggaccuugaaa

SEQ ID NO: 830696 - RNA, 19 nt, Artificial Sequence
  Description of Artificial Sequence: Synthetic oligonucleotide
gucuagcuugaguggacgc

SEQ ID NO: 830697 - RNA, 19 nt, Artificial Sequence
  Description of Artificial Sequence: Synthetic oligonucleotide
ucugcgaaucgcacaucaa

SEQ ID NO: 830698 - RNA, 19 nt, Artificial Sequence
  Description of Artificial Sequence: Synthetic oligonucleotide
aucuuuggugaggcguucg

SEQ ID NO: 830699 - RNA, 19 nt, Artificial Sequence
  Description of Artificial Sequence: Synthetic oligonucleotide
agcuagcacuaccacauua

SEQ ID NO: 830700 - RNA, 19 nt, Artificial Sequence
  Description of Artificial Sequence: Synthetic oligonucleotide
uuuaagauucuuggccguu

SEQ ID NO: 830701 - RNA, 19 nt, Artificial Sequence
  Description of Artificial Sequence: Synthetic oligonucleotide
cucgugauaggcuacaguu

SEQ ID NO: 830702 - RNA, 19 nt, Artificial Sequence
  Description of Artificial Sequence: Synthetic oligonucleotide
aacaugucacgaacccgug

SEQ ID NO: 830703 - RNA, 19 nt, Artificial Sequence
  Description of Artificial Sequence: Synthetic oligonucleotide
ucgucuagcuugaguggac

SEQ ID NO: 830704 - RNA, 19 nt, Artificial Sequence
  Description of Artificial Sequence: Synthetic oligonucleotide
cacgaacccgugcuggccc

SEQ ID NO: 830705 - RNA, 19 nt, Artificial Sequence
  Description of Artificial Sequence: Synthetic oligonucleotide
cagcucuaccaugucagcc

SEQ ID NO: 830706 - RNA, 19 nt, Artificial Sequence
  Description of Artificial Sequence: Synthetic oligonucleotide
ucacucucgguaguauaga

SEQ ID NO: 830707 - RNA, 19 nt, Artificial Sequence
  Description of Artificial Sequence: Synthetic oligonucleotide
gugaagcccggaguaagag

SEQ ID NO: 830708 - RNA, 19 nt, Artificial Sequence
  Description of Artificial Sequence: Synthetic oligonucleotide
ucccguguguaaagguacu

SEQ ID NO: 830709 - RNA, 19 nt, Artificial Sequence
  Description of Artificial Sequence: Synthetic oligonucleotide
cucuaggcugccagugccc

SEQ ID NO: 830710 - RNA, 19 nt, Artificial Sequence
  Description of Artificial Sequence: Synthetic oligonucleotide
guuucaccuugucugggga

SEQ ID NO: 830711 - RNA, 19 nt, Artificial Sequence
  Description of Artificial Sequence: Synthetic oligonucleotide
ggcuucggagaagagaacc

SEQ ID NO: 830712 - RNA, 19 nt, Artificial Sequence
  Description of Artificial Sequence: Synthetic oligonucleotide
gacaaggcgccggaccucc

SEQ ID NO: 830713 - RNA, 19 nt, Artificial Sequence
  Description of Artificial Sequence: Synthetic oligonucleotide
accuguucccggcacugug

SEQ ID NO: 830714 - RNA, 19 nt, Artificial Sequence
  Description of Artificial Sequence: Synthetic oligonucleotide
cauacacaugcggucgaag

SEQ ID NO: 830715 - RNA, 19 nt, Artificial Sequence
  Description of Artificial Sequence: Synthetic oligonucleotide
agcuugaguggacgcaagu

SEQ ID NO: 830716 - RNA, 19 nt, Artificial Sequence
  Description of Artificial Sequence: Synthetic oligonucleotide
aauuuccaauuuggcuucu

SEQ ID NO: 830717 - RNA, 19 nt, Artificial Sequence
  Description of Artificial Sequence: Synthetic oligonucleotide
uucuuggccguugucucac

SEQ ID NO: 830718 - RNA, 19 nt, Artificial Sequence
  Description of Artificial Sequence: Synthetic oligonucleotide
ucuggcggucaaaccggcc

SEQ ID NO: 830719 - RNA, 19 nt, Artificial Sequence
  Description of Artificial Sequence: Synthetic oligonucleotide
gcaucauacacaugcgguc

SEQ ID NO: 830720 - RNA, 19 nt, Artificial Sequence
  Description of Artificial Sequence: Synthetic oligonucleotide
ugccagcuagcacuaccac

SEQ ID NO: 830721 - RNA, 19 nt, Artificial Sequence
  Description of Artificial Sequence: Synthetic oligonucleotide
cacaucugcgaaucgcaca

SEQ ID NO: 830722 - RNA, 19 nt, Artificial Sequence
  Description of Artificial Sequence: Synthetic oligonucleotide
augucacgaacccgugcug

SEQ ID NO: 830723 - RNA, 19 nt, Artificial Sequence
  Description of Artificial Sequence: Synthetic oligonucleotide
ucacgaacccgugcuggcc

SEQ ID NO: 830724 - RNA, 19 nt, Artificial Sequence
  Description of Artificial Sequence: Synthetic oligonucleotide
cacuguguaagcagcucca

SEQ ID NO: 830725 - RNA, 19 nt, Artificial Sequence
  Description of Artificial Sequence: Synthetic oligonucleotide
agguggaccagugagcauu

SEQ ID NO: 830726 - RNA, 19 nt, Artificial Sequence
  Description of Artificial Sequence: Synthetic oligonucleotide
aaagggccgagggcccaac

SEQ ID NO: 830727 - RNA, 19 nt, Artificial Sequence
  Description of Artificial Sequence: Synthetic oligonucleotide
ccugcucaccuucucaacc

SEQ ID NO: 830728 - RNA, 19 nt, Artificial Sequence
  Description of Artificial Sequence: Synthetic oligonucleotide
caucugguuuaaaguguuc

SEQ ID NO: 830729 - RNA, 19 nt, Artificial Sequence
  Description of Artificial Sequence: Synthetic oligonucleotide
caugucacgaacccgugcu

SEQ ID NO: 830730 - RNA, 19 nt, Artificial Sequence
  Description of Artificial Sequence: Synthetic oligonucleotide
gucacgaacccgugcuggc

SEQ ID NO: 830731 - RNA, 19 nt, Artificial Sequence
  Description of Artificial Sequence: Synthetic oligonucleotide
ugcuaaccaggaccagggu

SEQ ID NO: 830732 - RNA, 19 nt, Artificial Sequence
  Description of Artificial Sequence: Synthetic oligonucleotide
accacgaccaguccccauu

SEQ ID NO: 830733 - RNA, 19 nt, Artificial Sequence
  Description of Artificial Sequence: Synthetic oligonucleotide
agcugcucagccacccuac

SEQ ID NO: 830734 - RNA, 19 nt, Artificial Sequence
  Description of Artificial Sequence: Synthetic oligonucleotide
acucucgguaguauagacu

SEQ ID NO: 830735 - RNA, 19 nt, Artificial Sequence
  Description of Artificial Sequence: Synthetic oligonucleotide
agaggaccugccuuugaua

SEQ ID NO: 830736 - RNA, 19 nt, Artificial Sequence
  Description of Artificial Sequence: Synthetic oligonucleotide
uucccggcacuguguaagc

SEQ ID NO: 830737 - RNA, 19 nt, Artificial Sequence
  Description of Artificial Sequence: Synthetic oligonucleotide
cuggcggucaaaccggcca

SEQ ID NO: 830738 - RNA, 19 nt, Artificial Sequence
  Description of Artificial Sequence: Synthetic oligonucleotide
ugcccucuacaaauuccuc

SEQ ID NO: 830739 - RNA, 19 nt, Artificial Sequence
  Description of Artificial Sequence: Synthetic oligonucleotide
agggcgauuggugccagcu

SEQ ID NO: 830740 - RNA, 19 nt, Artificial Sequence
  Description of Artificial Sequence: Synthetic oligonucleotide
cugcauguuccaagaacca

SEQ ID NO: 830741 - RNA, 19 nt, Artificial Sequence
  Description of Artificial Sequence: Synthetic oligonucleotide
ccaagaaccagcccaccac

SEQ ID NO: 830742 - RNA, 19 nt, Artificial Sequence
  Description of Artificial Sequence: Synthetic oligonucleotide
ggcugggucaaggauauca

SEQ ID NO: 830743 - RNA, 19 nt, Artificial Sequence
  Description of Artificial Sequence: Synthetic oligonucleotide
gucuuaccuaaaacauuug

SEQ ID NO: 830744 - RNA, 19 nt, Artificial Sequence
  Description of Artificial Sequence: Synthetic oligonucleotide
ccugacaaggcgccggacc

SEQ ID NO: 830745 - RNA, 19 nt, Artificial Sequence
  Description of Artificial Sequence: Synthetic oligonucleotide
gccuccaaugacccucucg

SEQ ID NO: 830746 - RNA, 19 nt, Artificial Sequence
  Description of Artificial Sequence: Synthetic oligonucleotide
ucgggccauugcaaacaug

SEQ ID NO: 830747 - RNA, 19 nt, Artificial Sequence
  Description of Artificial Sequence: Synthetic oligonucleotide
gacaccuucagcagagggu

SEQ ID NO: 830748 - RNA, 19 nt, Artificial Sequence
  Description of Artificial Sequence: Synthetic oligonucleotide
guauagacuacugcagccu

SEQ ID NO: 830749 - RNA, 19 nt, Artificial Sequence
  Description of Artificial Sequence: Synthetic oligonucleotide
accacggccucgcuuccug

SEQ ID NO: 830750 - RNA, 19 nt, Artificial Sequence
  Description of Artificial Sequence: Synthetic oligonucleotide
caaugacccucucgauggc

SEQ ID NO: 830751 - RNA, 19 nt, Artificial Sequence
  Description of Artificial Sequence: Synthetic oligonucleotide
ggaccagugagcauugcuc

SEQ ID NO: 830752 - RNA, 19 nt, Artificial Sequence
  Description of Artificial Sequence: Synthetic oligonucleotide
cagcccaccacugcaugcc

SEQ ID NO: 830753 - RNA, 19 nt, Artificial Sequence
  Description of Artificial Sequence: Synthetic oligonucleotide
uggacgcaaguggaccuug

SEQ ID NO: 830754 - RNA, 19 nt, Artificial Sequence
  Description of Artificial Sequence: Synthetic oligonucleotide
ucauacacaugcggucgaa

SEQ ID NO: 830755 - RNA, 19 nt, Artificial Sequence
  Description of Artificial Sequence: Synthetic oligonucleotide
gcuugaguggacgcaagug

SEQ ID NO: 830756 - RNA, 19 nt, Artificial Sequence
  Description of Artificial Sequence: Synthetic oligonucleotide
gggcccaacagcucuacca

SEQ ID NO: 830757 - RNA, 19 nt, Artificial Sequence
  Description of Artificial Sequence: Synthetic oligonucleotide
cacgaccaguccccauucg

SEQ ID NO: 830758 - RNA, 19 nt, Artificial Sequence
  Description of Artificial Sequence: Synthetic oligonucleotide
ucccugauuccagucuuuc

SEQ ID NO: 830759 - RNA, 19 nt, Artificial Sequence
  Description of Artificial Sequence: Synthetic oligonucleotide
agugaagcccggaguaaga

SEQ ID NO: 830760 - RNA, 19 nt, Artificial Sequence
  Description of Artificial Sequence: Synthetic oligonucleotide
aggguuguguccuccucua

SEQ ID NO: 830761 - RNA, 19 nt, Artificial Sequence
  Description of Artificial Sequence: Synthetic oligonucleotide
cgcaaguggaccuugaaaa

SEQ ID NO: 830762 - RNA, 19 nt, Artificial Sequence
  Description of Artificial Sequence: Synthetic oligonucleotide
ugaccacggccucgcuucc

SEQ ID NO: 830763 - RNA, 19 nt, Artificial Sequence
  Description of Artificial Sequence: Synthetic oligonucleotide
gcugcuagcuuccuugaaa

SEQ ID NO: 830764 - RNA, 19 nt, Artificial Sequence
  Description of Artificial Sequence: Synthetic oligonucleotide
gacgcaaguggaccuugaa

SEQ ID NO: 830765 - RNA, 19 nt, Artificial Sequence
  Description of Artificial Sequence: Synthetic oligonucleotide
cggaguaagagcugcuagc

SEQ ID NO: 830766 - RNA, 19 nt, Artificial Sequence
  Description of Artificial Sequence: Synthetic oligonucleotide
aagggccgagggcccaaca

SEQ ID NO: 830767 - RNA, 19 nt, Artificial Sequence
  Description of Artificial Sequence: Synthetic oligonucleotide
ucuuggccguugucucacc

SEQ ID NO: 830768 - RNA, 19 nt, Artificial Sequence
  Description of Artificial Sequence: Synthetic oligonucleotide
ucaccuugucuggggaggu

SEQ ID NO: 830769 - RNA, 19 nt, Artificial Sequence
  Description of Artificial Sequence: Synthetic oligonucleotide
cuagcuugaguggacgcaa

SEQ ID NO: 830770 - RNA, 19 nt, Artificial Sequence
  Description of Artificial Sequence: Synthetic oligonucleotide
guacugcucccggggaagg

SEQ ID NO: 830771 - RNA, 19 nt, Artificial Sequence
  Description of Artificial Sequence: Synthetic oligonucleotide
uggcuccuaaguccugaua

SEQ ID NO: 830772 - RNA, 19 nt, Artificial Sequence
  Description of Artificial Sequence: Synthetic oligonucleotide
ccuuugaucccuuagcuau

SEQ ID NO: 830773 - RNA, 19 nt, Artificial Sequence
  Description of Artificial Sequence: Synthetic oligonucleotide
ggguuguagcaccuggguc

SEQ ID NO: 830774 - RNA, 19 nt, Artificial Sequence
  Description of Artificial Sequence: Synthetic oligonucleotide
gaaucgcacaucaauuguu

SEQ ID NO: 830775 - RNA, 19 nt, Artificial Sequence
  Description of Artificial Sequence: Synthetic oligonucleotide
gcggucgaagagcugcucc

SEQ ID NO: 830776 - RNA, 19 nt, Artificial Sequence
  Description of Artificial Sequence: Synthetic oligonucleotide
uguucccggcacuguguaa

SEQ ID NO: 830777 - RNA, 19 nt, Artificial Sequence
  Description of Artificial Sequence: Synthetic oligonucleotide
uuccuugaaagagcaucuu

SEQ ID NO: 830778 - RNA, 19 nt, Artificial Sequence
  Description of Artificial Sequence: Synthetic oligonucleotide
aaccggccaggacguguca

SEQ ID NO: 830779 - RNA, 19 nt, Artificial Sequence
  Description of Artificial Sequence: Synthetic oligonucleotide
gaccugacaaggcgccgga

SEQ ID NO: 830780 - RNA, 19 nt, Artificial Sequence
  Description of Artificial Sequence: Synthetic oligonucleotide
aguggaccuugaaaauaga

SEQ ID NO: 830781 - RNA, 19 nt, Artificial Sequence
  Description of Artificial Sequence: Synthetic oligonucleotide
caucacucucgguaguaua

SEQ ID NO: 830782 - RNA, 19 nt, Artificial Sequence
  Description of Artificial Sequence: Synthetic oligonucleotide
cauuggguuguagcaccug

SEQ ID NO: 830783 - RNA, 19 nt, Artificial Sequence
  Description of Artificial Sequence: Synthetic oligonucleotide
cuagcacuaccacauuagu

SEQ ID NO: 830784 - RNA, 19 nt, Artificial Sequence
  Description of Artificial Sequence: Synthetic oligonucleotide
ccguguguaaagguacugc

SEQ ID NO: 830785 - RNA, 19 nt, Artificial Sequence
  Description of Artificial Sequence: Synthetic oligonucleotide
gcuacaguugucuuuucau

SEQ ID NO: 830786 - RNA, 19 nt, Artificial Sequence
  Description of Artificial Sequence: Synthetic oligonucleotide
cucgguaguauagacuacu

SEQ ID NO: 830787 - RNA, 19 nt, Artificial Sequence
  Description of Artificial Sequence: Synthetic oligonucleotide
guaccagguggaccaguga

SEQ ID NO: 830788 - RNA, 19 nt, Artificial Sequence
  Description of Artificial Sequence: Synthetic oligonucleotide
cugaauggucuuaccuaaa

SEQ ID NO: 830789 - RNA, 19 nt, Artificial Sequence
  Description of Artificial Sequence: Synthetic oligonucleotide
cuuggccguugucucacca

SEQ ID NO: 830790 - RNA, 19 nt, Artificial Sequence
  Description of Artificial Sequence: Synthetic oligonucleotide
agcugcuagcuuccuugaa

SEQ ID NO: 830791 - RNA, 19 nt, Artificial Sequence
  Description of Artificial Sequence: Synthetic oligonucleotide
ucccgucccugauuccagu

SEQ ID NO: 830792 - RNA, 19 nt, Artificial Sequence
  Description of Artificial Sequence: Synthetic oligonucleotide
cugcgaaucgcacaucaau

SEQ ID NO: 830793 - RNA, 19 nt, Artificial Sequence
  Description of Artificial Sequence: Synthetic oligonucleotide
cugacaaggcgccggaccu

SEQ ID NO: 830794 - RNA, 19 nt, Artificial Sequence
  Description of Artificial Sequence: Synthetic oligonucleotide
ugacccucucgauggcuuu

SEQ ID NO: 830795 - RNA, 19 nt, Artificial Sequence
  Description of Artificial Sequence: Synthetic oligonucleotide
ggugaggcguucgucuagc

SEQ ID NO: 830796 - RNA, 19 nt, Artificial Sequence
  Description of Artificial Sequence: Synthetic oligonucleotide
gauaccuggcccagcuucu

SEQ ID NO: 830797 - RNA, 19 nt, Artificial Sequence
  Description of Artificial Sequence: Synthetic oligonucleotide
agugucguuccuggacaga

SEQ ID NO: 830798 - RNA, 19 nt, Artificial Sequence
  Description of Artificial Sequence: Synthetic oligonucleotide
cagccucgugauaggcuac

SEQ ID NO: 830799 - RNA, 19 nt, Artificial Sequence
  Description of Artificial Sequence: Synthetic oligonucleotide
acgaacccgugcuggccca

SEQ ID NO: 830800 - RNA, 19 nt, Artificial Sequence
  Description of Artificial Sequence: Synthetic oligonucleotide
accggccaggacgugucag

SEQ ID NO: 830801 - RNA, 19 nt, Artificial Sequence
  Description of Artificial Sequence: Synthetic oligonucleotide
ggggaggucaaaggauacc

SEQ ID NO: 830802 - RNA, 19 nt, Artificial Sequence
  Description of Artificial Sequence: Synthetic oligonucleotide
agugagcauugcucccuuu

SEQ ID NO: 830803 - RNA, 19 nt, Artificial Sequence
  Description of Artificial Sequence: Synthetic oligonucleotide
accaucacucucgguagua

SEQ ID NO: 830804 - RNA, 19 nt, Artificial Sequence
  Description of Artificial Sequence: Synthetic oligonucleotide
gugauaggcuacaguuguc

SEQ ID NO: 830805 - RNA, 19 nt, Artificial Sequence
  Description of Artificial Sequence: Synthetic oligonucleotide
cauuagugguagaguugaa

SEQ ID NO: 830806 - RNA, 19 nt, Artificial Sequence
  Description of Artificial Sequence: Synthetic oligonucleotide
ucaaaccggccaggacgug

SEQ ID NO: 830807 - RNA, 19 nt, Artificial Sequence
  Description of Artificial Sequence: Synthetic oligonucleotide
gaguccgaucauaggcaga

SEQ ID NO: 830808 - RNA, 19 nt, Artificial Sequence
  Description of Artificial Sequence: Synthetic oligonucleotide
agccucgugauaggcuaca

SEQ ID NO: 830809 - RNA, 19 nt, Artificial Sequence
  Description of Artificial Sequence: Synthetic oligonucleotide
ccuguagugaucugaccaa

SEQ ID NO: 830810 - RNA, 19 nt, Artificial Sequence
  Description of Artificial Sequence: Synthetic oligonucleotide
gcuucggagaagagaacca

SEQ ID NO: 830811 - RNA, 19 nt, Artificial Sequence
  Description of Artificial Sequence: Synthetic oligonucleotide
cuguagugaucugaccaaa

SEQ ID NO: 830812 - RNA, 19 nt, Artificial Sequence
  Description of Artificial Sequence: Synthetic oligonucleotide
gugcccucuacaaauuccu

SEQ ID NO: 830813 - RNA, 19 nt, Artificial Sequence
  Description of Artificial Sequence: Synthetic oligonucleotide
cuaggcugccagugcccuc

SEQ ID NO: 830814 - RNA, 19 nt, Artificial Sequence
  Description of Artificial Sequence: Synthetic oligonucleotide
cugagccccuguagugauc

SEQ ID NO: 830815 - RNA, 19 nt, Artificial Sequence
  Description of Artificial Sequence: Synthetic oligonucleotide
gacccucucgauggcuuuc

SEQ ID NO: 830816 - RNA, 19 nt, Artificial Sequence
  Description of Artificial Sequence: Synthetic oligonucleotide
guccgaucauaggcagacc

SEQ ID NO: 830817 - RNA, 19 nt, Artificial Sequence
  Description of Artificial Sequence: Synthetic oligonucleotide
gagaaccaucacucucggu

SEQ ID NO: 830818 - RNA, 19 nt, Artificial Sequence
  Description of Artificial Sequence: Synthetic oligonucleotide
ggcuaagauggcgggcagc

SEQ ID NO: 830819 - RNA, 19 nt, Artificial Sequence
  Description of Artificial Sequence: Synthetic oligonucleotide
cgucuagcuugaguggacg

SEQ ID NO: 830820 - RNA, 19 nt, Artificial Sequence
  Description of Artificial Sequence: Synthetic oligonucleotide
ggaugcuaaccaggaccag

SEQ ID NO: 830821 - RNA, 19 nt, Artificial Sequence
  Description of Artificial Sequence: Synthetic oligonucleotide
ggcggucaaaccggccagg

SEQ ID NO: 830822 - RNA, 19 nt, Artificial Sequence
  Description of Artificial Sequence: Synthetic oligonucleotide
aggacgugucagggcuggg

SEQ ID NO: 830823 - RNA, 19 nt, Artificial Sequence
  Description of Artificial Sequence: Synthetic oligonucleotide
ggucuucuucucaaggccu

SEQ ID NO: 830824 - RNA, 19 nt, Artificial Sequence
  Description of Artificial Sequence: Synthetic oligonucleotide
cuuugaucccuuagcuauu

SEQ ID NO: 830825 - RNA, 19 nt, Artificial Sequence
  Description of Artificial Sequence: Synthetic oligonucleotide
ccgcucagugccuccuucc

SEQ ID NO: 830826 - RNA, 19 nt, Artificial Sequence
  Description of Artificial Sequence: Synthetic oligonucleotide
ccagccucgugauaggcua

SEQ ID NO: 830827 - RNA, 19 nt, Artificial Sequence
  Description of Artificial Sequence: Synthetic oligonucleotide
ccccuguagugaucugacc

SEQ ID NO: 830828 - RNA, 19 nt, Artificial Sequence
  Description of Artificial Sequence: Synthetic oligonucleotide
augcggucgaagagcugcu

SEQ ID NO: 830829 - RNA, 19 nt, Artificial Sequence
  Description of Artificial Sequence: Synthetic oligonucleotide
caaucagugcugcuucauu

SEQ ID NO: 830830 - RNA, 19 nt, Artificial Sequence
  Description of Artificial Sequence: Synthetic oligonucleotide
ccaggcuucggagaagaga

SEQ ID NO: 830831 - RNA, 19 nt, Artificial Sequence
  Description of Artificial Sequence: Synthetic oligonucleotide
gccccuguagugaucugac

SEQ ID NO: 830832 - RNA, 19 nt, Artificial Sequence
  Description of Artificial Sequence: Synthetic oligonucleotide
gcgauuggugccagcuagc

SEQ ID NO: 830833 - RNA, 19 nt, Artificial Sequence
  Description of Artificial Sequence: Synthetic oligonucleotide
ggauaucagggcgauuggu

SEQ ID NO: 830834 - RNA, 19 nt, Artificial Sequence
  Description of Artificial Sequence: Synthetic oligonucleotide
ggucacagguggucaccca

SEQ ID NO: 830835 - RNA, 19 nt, Artificial Sequence
  Description of Artificial Sequence: Synthetic oligonucleotide
acaugcggucgaagagcug

SEQ ID NO: 830836 - RNA, 19 nt, Artificial Sequence
  Description of Artificial Sequence: Synthetic oligonucleotide
caaaccggccaggacgugu

SEQ ID NO: 830837 - RNA, 19 nt, Artificial Sequence
  Description of Artificial Sequence: Synthetic oligonucleotide
ggaaggguuguguccuccu

SEQ ID NO: 830838 - RNA, 19 nt, Artificial Sequence
  Description of Artificial Sequence: Synthetic oligonucleotide
ccacgaccaguccccauuc

SEQ ID NO: 830839 - RNA, 19 nt, Artificial Sequence
  Description of Artificial Sequence: Synthetic oligonucleotide
cuaagauggcgggcagcaa

SEQ ID NO: 830840 - RNA, 19 nt, Artificial Sequence
  Description of Artificial Sequence: Synthetic oligonucleotide
cccguguguaaagguacug

SEQ ID NO: 830841 - RNA, 19 nt, Artificial Sequence
  Description of Artificial Sequence: Synthetic oligonucleotide
cccugauuccagucuuuca

SEQ ID NO: 830842 - RNA, 19 nt, Artificial Sequence
  Description of Artificial Sequence: Synthetic oligonucleotide
caccuugucuggggagguc

SEQ ID NO: 830843 - RNA, 19 nt, Artificial Sequence
  Description of Artificial Sequence: Synthetic oligonucleotide
gcucccguguguaaaggua

SEQ ID NO: 830844 - RNA, 19 nt, Artificial Sequence
  Description of Artificial Sequence: Synthetic oligonucleotide
gccucgugauaggcuacag

SEQ ID NO: 830845 - RNA, 19 nt, Artificial Sequence
  Description of Artificial Sequence: Synthetic oligonucleotide
guuguagcaccugggucuu

SEQ ID NO: 830846 - RNA, 19 nt, Artificial Sequence
  Description of Artificial Sequence: Synthetic oligonucleotide
cuccaaugacccucucgau

SEQ ID NO: 830847 - RNA, 19 nt, Artificial Sequence
  Description of Artificial Sequence: Synthetic oligonucleotide
ggccguugucucaccaaca

SEQ ID NO: 830848 - RNA, 19 nt, Artificial Sequence
  Description of Artificial Sequence: Synthetic oligonucleotide
cgaaucgcacaucaauugu

SEQ ID NO: 830849 - RNA, 19 nt, Artificial Sequence
  Description of Artificial Sequence: Synthetic oligonucleotide
gugaggcguucgucuagcu

SEQ ID NO: 830850 - RNA, 19 nt, Artificial Sequence
  Description of Artificial Sequence: Synthetic oligonucleotide
gcguucgucuagcuugagu

SEQ ID NO: 830851 - RNA, 19 nt, Artificial Sequence
  Description of Artificial Sequence: Synthetic oligonucleotide
ggacgcaaguggaccuuga

SEQ ID NO: 830852 - RNA, 19 nt, Artificial Sequence
  Description of Artificial Sequence: Synthetic oligonucleotide
ccucccgucccugauucca

SEQ ID NO: 830853 - RNA, 19 nt, Artificial Sequence
  Description of Artificial Sequence: Synthetic oligonucleotide
gcggucaaaccggccagga

SEQ ID NO: 830854 - RNA, 19 nt, Artificial Sequence
  Description of Artificial Sequence: Synthetic oligonucleotide
gccaaguccuuugccccga

SEQ ID NO: 830855 - RNA, 19 nt, Artificial Sequence
  Description of Artificial Sequence: Synthetic oligonucleotide
cggucaaaccggccaggac

SEQ ID NO: 830856 - RNA, 19 nt, Artificial Sequence
  Description of Artificial Sequence: Synthetic oligonucleotide
ggacgugucagggcugggu

SEQ ID NO: 830857 - RNA, 19 nt, Artificial Sequence
  Description of Artificial Sequence: Synthetic oligonucleotide
ggggaccaauguagaucug

SEQ ID NO: 830858 - RNA, 19 nt, Artificial Sequence
  Description of Artificial Sequence: Synthetic oligonucleotide
ggcgccggaccuccucauc

SEQ ID NO: 830859 - RNA, 19 nt, Artificial Sequence
  Description of Artificial Sequence: Synthetic oligonucleotide
cgauuggugccagcuagca

SEQ ID NO: 830860 - RNA, 19 nt, Artificial Sequence
  Description of Artificial Sequence: Synthetic oligonucleotide
gggcgauuggugccagcua

SEQ ID NO: 830861 - RNA, 19 nt, Artificial Sequence
  Description of Artificial Sequence: Synthetic oligonucleotide
acaaggcgccggaccuccu

SEQ ID NO: 830862 - RNA, 19 nt, Artificial Sequence
  Description of Artificial Sequence: Synthetic oligonucleotide
ggcguucgucuagcuugag

SEQ ID NO: 830863 - RNA, 19 nt, Artificial Sequence
  Description of Artificial Sequence: Synthetic oligonucleotide
ccgagggcccaacagcucu

SEQ ID NO: 830864 - RNA, 19 nt, Artificial Sequence
  Description of Artificial Sequence: Synthetic oligonucleotide
ccucgugauaggcuacagu

SEQ ID NO: 830865 - RNA, 19 nt, Artificial Sequence
  Description of Artificial Sequence: Synthetic oligonucleotide
cuuugccccgagguaugau

SEQ ID NO: 830866 - RNA, 19 nt, Artificial Sequence
  Description of Artificial Sequence: Synthetic oligonucleotide
gcccaccacugcaugccca

SEQ ID NO: 830867 - RNA, 19 nt, Artificial Sequence
  Description of Artificial Sequence: Synthetic oligonucleotide
gaccacggccucgcuuccu

SEQ ID NO: 830868 - RNA, 19 nt, Artificial Sequence
  Description of Artificial Sequence: Synthetic oligonucleotide
ccguugucucaccaacacu

SEQ ID NO: 830869 - RNA, 19 nt, Artificial Sequence
  Description of Artificial Sequence: Synthetic oligonucleotide
ccugagccccuguagugau

SEQ ID NO: 830870 - RNA, 19 nt, Artificial Sequence
  Description of Artificial Sequence: Synthetic oligonucleotide
ccgucccugauuccagucu

SEQ ID NO: 830871 - RNA, 19 nt, Artificial Sequence
  Description of Artificial Sequence: Synthetic oligonucleotide
gucccugauuccagucuuu

SEQ ID NO: 830872 - RNA, 19 nt, Artificial Sequence
  Description of Artificial Sequence: Synthetic oligonucleotide
ccuuugccccgagguauga

SEQ ID NO: 830873 - RNA, 19 nt, Artificial Sequence
  Description of Artificial Sequence: Synthetic oligonucleotide
cccggaguaagagcugcua

SEQ ID NO: 830874 - RNA, 19 nt, Artificial Sequence
  Description of Artificial Sequence: Synthetic oligonucleotide
cagcuagcacuaccacauu

SEQ ID NO: 830875 - RNA, 19 nt, Artificial Sequence
  Description of Artificial Sequence: Synthetic oligonucleotide
caaggauaucagggcgauu

SEQ ID NO: 830876 - RNA, 19 nt, Artificial Sequence
  Description of Artificial Sequence: Synthetic oligonucleotide
ccagaaacucugacccauu

SEQ ID NO: 830877 - RNA, 19 nt, Artificial Sequence
  Description of Artificial Sequence: Synthetic oligonucleotide
cgucccugauuccagucuu

SEQ ID NO: 830878 - RNA, 19 nt, Artificial Sequence
  Description of Artificial Sequence: Synthetic oligonucleotide
cgagggcccaacagcucua

SEQ ID NO: 830879 - RNA, 19 nt, Artificial Sequence
  Description of Artificial Sequence: Synthetic oligonucleotide
ggccucgcuuccugccaau

SEQ ID NO: 830880 - RNA, 19 nt, Artificial Sequence
  Description of Artificial Sequence: Synthetic oligonucleotide
ucuuaaguggagaaaaggg

SEQ ID NO: 830881 - RNA, 19 nt, Artificial Sequence
  Description of Artificial Sequence: Synthetic oligonucleotide
cauaaaguaaacuuggcug

SEQ ID NO: 830882 - RNA, 19 nt, Artificial Sequence
  Description of Artificial Sequence: Synthetic oligonucleotide
ucuuuauuaacaaacgggu

SEQ ID NO: 830883 - RNA, 19 nt, Artificial Sequence
  Description of Artificial Sequence: Synthetic oligonucleotide
auuaacguugaccacagag

SEQ ID NO: 830884 - RNA, 19 nt, Artificial Sequence
  Description of Artificial Sequence: Synthetic oligonucleotide
uuaaguggagaaaaggggc

SEQ ID NO: 830885 - RNA, 19 nt, Artificial Sequence
  Description of Artificial Sequence: Synthetic oligonucleotide
aaucuuauuccgcagccag

SEQ ID NO: 830886 - RNA, 19 nt, Artificial Sequence
  Description of Artificial Sequence: Synthetic oligonucleotide
gaaaaugaggacauggucc

SEQ ID NO: 830887 - RNA, 19 nt, Artificial Sequence
  Description of Artificial Sequence: Synthetic oligonucleotide
uauacagaugcaagcaagg

SEQ ID NO: 830888 - RNA, 19 nt, Artificial Sequence
  Description of Artificial Sequence: Synthetic oligonucleotide
aggggaaucauuaaagugc

SEQ ID NO: 830889 - RNA, 19 nt, Artificial Sequence
  Description of Artificial Sequence: Synthetic oligonucleotide
gauuccuagauccacaaac

SEQ ID NO: 830890 - RNA, 19 nt, Artificial Sequence
  Description of Artificial Sequence: Synthetic oligonucleotide
auugaaucgcuucuuguac

SEQ ID NO: 830891 - RNA, 19 nt, Artificial Sequence
  Description of Artificial Sequence: Synthetic oligonucleotide
uuaacguugaccacagagc

SEQ ID NO: 830892 - RNA, 19 nt, Artificial Sequence
  Description of Artificial Sequence: Synthetic oligonucleotide
aaggccacuacauugagaa

SEQ ID NO: 830893 - RNA, 19 nt, Artificial Sequence
  Description of Artificial Sequence: Synthetic oligonucleotide
aaauaaagggguacagggc

SEQ ID NO: 830894 - RNA, 19 nt, Artificial Sequence
  Description of Artificial Sequence: Synthetic oligonucleotide
ugugcagaaucuuauuccg

SEQ ID NO: 830895 - RNA, 19 nt, Artificial Sequence
  Description of Artificial Sequence: Synthetic oligonucleotide
aggaucuccgaauugaauc

SEQ ID NO: 830896 - RNA, 19 nt, Artificial Sequence
  Description of Artificial Sequence: Synthetic oligonucleotide
aaaacaccuuaucauuccg

SEQ ID NO: 830897 - RNA, 19 nt, Artificial Sequence
  Description of Artificial Sequence: Synthetic oligonucleotide
ugaccaggaacuuaauacg

SEQ ID NO: 830898 - RNA, 19 nt, Artificial Sequence
  Description of Artificial Sequence: Synthetic oligonucleotide
aauacgcucauauuucaca

SEQ ID NO: 830899 - RNA, 19 nt, Artificial Sequence
  Description of Artificial Sequence: Synthetic oligonucleotide
uaacguugaccacagagcc

SEQ ID NO: 830900 - RNA, 19 nt, Artificial Sequence
  Description of Artificial Sequence: Synthetic oligonucleotide
acaaguuggggacaggcac

SEQ ID NO: 830901 - RNA, 19 nt, Artificial Sequence
  Description of Artificial Sequence: Synthetic oligonucleotide
uucacaacacgauaguggc

SEQ ID NO: 830902 - RNA, 19 nt, Artificial Sequence
  Description of Artificial Sequence: Synthetic oligonucleotide
gugaugagcaaguugagcc

SEQ ID NO: 830903 - RNA, 19 nt, Artificial Sequence
  Description of Artificial Sequence: Synthetic oligonucleotide
ugaugauccgcccauaagu

SEQ ID NO: 830904 - RNA, 19 nt, Artificial Sequence
  Description of Artificial Sequence: Synthetic oligonucleotide
cugguagauuccuagaucc

SEQ ID NO: 830905 - RNA, 19 nt, Artificial Sequence
  Description of Artificial Sequence: Synthetic oligonucleotide
gaagaccccgucuaggugg

SEQ ID NO: 830906 - RNA, 19 nt, Artificial Sequence
  Description of Artificial Sequence: Synthetic oligonucleotide
acuuaauacgcucauauuu

SEQ ID NO: 830907 - RNA, 19 nt, Artificial Sequence
  Description of Artificial Sequence: Synthetic oligonucleotide
aggaacuuaagccucuggg

SEQ ID NO: 830908 - RNA, 19 nt, Artificial Sequence
  Description of Artificial Sequence: Synthetic oligonucleotide
uauacccgaaguuuguucc

SEQ ID NO: 830909 - RNA, 19 nt, Artificial Sequence
  Description of Artificial Sequence: Synthetic oligonucleotide
auuccgcucacacaggaac

SEQ ID NO: 830910 - RNA, 19 nt, Artificial Sequence
  Description of Artificial Sequence: Synthetic oligonucleotide
agucauaaaguaaacuugg

SEQ ID NO: 830911 - RNA, 19 nt, Artificial Sequence
  Description of Artificial Sequence: Synthetic oligonucleotide
caugccgucaguauugggg

SEQ ID NO: 830912 - RNA, 19 nt, Artificial Sequence
  Description of Artificial Sequence: Synthetic oligonucleotide
uggcgugcaaauaaagggg

SEQ ID NO: 830913 - RNA, 19 nt, Artificial Sequence
  Description of Artificial Sequence: Synthetic oligonucleotide
cuuaauacgcucauauuuc

SEQ ID NO: 830914 - RNA, 19 nt, Artificial Sequence
  Description of Artificial Sequence: Synthetic oligonucleotide
aaagcuucagggaucagag

SEQ ID NO: 830915 - RNA, 19 nt, Artificial Sequence
  Description of Artificial Sequence: Synthetic oligonucleotide
auagaugaccuugagccgc

SEQ ID NO: 830916 - RNA, 19 nt, Artificial Sequence
  Description of Artificial Sequence: Synthetic oligonucleotide
aauugaaucgcuucuugua

SEQ ID NO: 830917 - RNA, 19 nt, Artificial Sequence
  Description of Artificial Sequence: Synthetic oligonucleotide
agagcccuuccuuacaucg

SEQ ID NO: 830918 - RNA, 19 nt, Artificial Sequence
  Description of Artificial Sequence: Synthetic oligonucleotide
aacaccuuaucauuccgcu

SEQ ID NO: 830919 - RNA, 19 nt, Artificial Sequence
  Description of Artificial Sequence: Synthetic oligonucleotide
aacuuaagccucugggcuc

SEQ ID NO: 830920 - RNA, 19 nt, Artificial Sequence
  Description of Artificial Sequence: Synthetic oligonucleotide
aacauguugggagaaagga

SEQ ID NO: 830921 - RNA, 19 nt, Artificial Sequence
  Description of Artificial Sequence: Synthetic oligonucleotide
ugugauagggaugguaucc

SEQ ID NO: 830922 - RNA, 19 nt, Artificial Sequence
  Description of Artificial Sequence: Synthetic oligonucleotide
aaguuuguuccuuuucccu

SEQ ID NO: 830923 - RNA, 19 nt, Artificial Sequence
  Description of Artificial Sequence: Synthetic oligonucleotide
auauacccgaaguuuguuc

SEQ ID NO: 830924 - RNA, 19 nt, Artificial Sequence
  Description of Artificial Sequence: Synthetic oligonucleotide
uuaacaaacggguuuccaa

SEQ ID NO: 830925 - RNA, 19 nt, Artificial Sequence
  Description of Artificial Sequence: Synthetic oligonucleotide
gaggggaaucauuaaagug

SEQ ID NO: 830926 - RNA, 19 nt, Artificial Sequence
  Description of Artificial Sequence: Synthetic oligonucleotide
uuaauacgcucauauuuca

SEQ ID NO: 830927 - RNA, 19 nt, Artificial Sequence
  Description of Artificial Sequence: Synthetic oligonucleotide
cuacauugagaaaggauac

SEQ ID NO: 830928 - RNA, 19 nt, Artificial Sequence
  Description of Artificial Sequence: Synthetic oligonucleotide
cacgauaguggccacagcc

SEQ ID NO: 830929 - RNA, 19 nt, Artificial Sequence
  Description of Artificial Sequence: Synthetic oligonucleotide
gauguguacagggauguag

SEQ ID NO: 830930 - RNA, 19 nt, Artificial Sequence
  Description of Artificial Sequence: Synthetic oligonucleotide
auagggaugguauccccac

SEQ ID NO: 830931 - RNA, 19 nt, Artificial Sequence
  Description of Artificial Sequence: Synthetic oligonucleotide
aaucauuaaagugcuuuca

SEQ ID NO: 830932 - RNA, 19 nt, Artificial Sequence
  Description of Artificial Sequence: Synthetic oligonucleotide
ugugguaggguuugggagc

SEQ ID NO: 830933 - RNA, 19 nt, Artificial Sequence
  Description of Artificial Sequence: Synthetic oligonucleotide
cucaauggcuuucucaccc

SEQ ID NO: 830934 - RNA, 19 nt, Artificial Sequence
  Description of Artificial Sequence: Synthetic oligonucleotide
caguucaugaugcaguuac

SEQ ID NO: 830935 - RNA, 19 nt, Artificial Sequence
  Description of Artificial Sequence: Synthetic oligonucleotide
aaacauggugaaugagcuc

SEQ ID NO: 830936 - RNA, 19 nt, Artificial Sequence
  Description of Artificial Sequence: Synthetic oligonucleotide
agucugguacauucaaggg

SEQ ID NO: 830937 - RNA, 19 nt, Artificial Sequence
  Description of Artificial Sequence: Synthetic oligonucleotide
aaucucgggagucucgcug

SEQ ID NO: 830938 - RNA, 19 nt, Artificial Sequence
  Description of Artificial Sequence: Synthetic oligonucleotide
guaauauacccgaaguuug

SEQ ID NO: 830939 - RNA, 19 nt, Artificial Sequence
  Description of Artificial Sequence: Synthetic oligonucleotide
cauaaguguugacauagac

SEQ ID NO: 830940 - RNA, 19 nt, Artificial Sequence
  Description of Artificial Sequence: Synthetic oligonucleotide
acuacauugagaaaggaua

SEQ ID NO: 830941 - RNA, 19 nt, Artificial Sequence
  Description of Artificial Sequence: Synthetic oligonucleotide
gaaucauuaaagugcuuuc

SEQ ID NO: 830942 - RNA, 19 nt, Artificial Sequence
  Description of Artificial Sequence: Synthetic oligonucleotide
aaacauguugggagaaagg

SEQ ID NO: 830943 - RNA, 19 nt, Artificial Sequence
  Description of Artificial Sequence: Synthetic oligonucleotide
ugcaguuacgguucaaagu

SEQ ID NO: 830944 - RNA, 19 nt, Artificial Sequence
  Description of Artificial Sequence: Synthetic oligonucleotide
cucaguuccugguaagggg

SEQ ID NO: 830945 - RNA, 19 nt, Artificial Sequence
  Description of Artificial Sequence: Synthetic oligonucleotide
ugcugcucacacuauauac

SEQ ID NO: 830946 - RNA, 19 nt, Artificial Sequence
  Description of Artificial Sequence: Synthetic oligonucleotide
acaccuucgucuucauagc

SEQ ID NO: 830947 - RNA, 19 nt, Artificial Sequence
  Description of Artificial Sequence: Synthetic oligonucleotide
gacauagacaccuucgucu

SEQ ID NO: 830948 - RNA, 19 nt, Artificial Sequence
  Description of Artificial Sequence: Synthetic oligonucleotide
ggaucuccgaauugaaucg

SEQ ID NO: 830949 - RNA, 19 nt, Artificial Sequence
  Description of Artificial Sequence: Synthetic oligonucleotide
uugaugauccgcccauaag

SEQ ID NO: 830950 - RNA, 19 nt, Artificial Sequence
  Description of Artificial Sequence: Synthetic oligonucleotide
uggguagucuggcuguggg

SEQ ID NO: 830951 - RNA, 19 nt, Artificial Sequence
  Description of Artificial Sequence: Synthetic oligonucleotide
ugggaaagaaggaauguuu

SEQ ID NO: 830952 - RNA, 19 nt, Artificial Sequence
  Description of Artificial Sequence: Synthetic oligonucleotide
uuaucauuccgcucacaca

SEQ ID NO: 830953 - RNA, 19 nt, Artificial Sequence
  Description of Artificial Sequence: Synthetic oligonucleotide
acgcucauauuucacaaca

SEQ ID NO: 830954 - RNA, 19 nt, Artificial Sequence
  Description of Artificial Sequence: Synthetic oligonucleotide
ucuuauuccgcagccagga

SEQ ID NO: 830955 - RNA, 19 nt, Artificial Sequence
  Description of Artificial Sequence: Synthetic oligonucleotide
gcucauauuucacaacacg

SEQ ID NO: 830956 - RNA, 19 nt, Artificial Sequence
  Description of Artificial Sequence: Synthetic oligonucleotide
uacaucgaacugcagcuga

SEQ ID NO: 830957 - RNA, 19 nt, Artificial Sequence
  Description of Artificial Sequence: Synthetic oligonucleotide
auaaguguugacauagaca

SEQ ID NO: 830958 - RNA, 19 nt, Artificial Sequence
  Description of Artificial Sequence: Synthetic oligonucleotide
gucaguauuggggaggaag

SEQ ID NO: 830959 - RNA, 19 nt, Artificial Sequence
  Description of Artificial Sequence: Synthetic oligonucleotide
gaacuuaauacgcucauau

SEQ ID NO: 830960 - RNA, 19 nt, Artificial Sequence
  Description of Artificial Sequence: Synthetic oligonucleotide
ggaaggaagggcuacuugc

SEQ ID NO: 830961 - RNA, 19 nt, Artificial Sequence
  Description of Artificial Sequence: Synthetic oligonucleotide
aacguugaccacagagccc

SEQ ID NO: 830962 - RNA, 19 nt, Artificial Sequence
  Description of Artificial Sequence: Synthetic oligonucleotide
gaugauccgcccauaagug

SEQ ID NO: 830963 - RNA, 19 nt, Artificial Sequence
  Description of Artificial Sequence: Synthetic oligonucleotide
auacagaugcaagcaaggg

SEQ ID NO: 830964 - RNA, 19 nt, Artificial Sequence
  Description of Artificial Sequence: Synthetic oligonucleotide
uccucuuaaguggagaaaa

SEQ ID NO: 830965 - RNA, 19 nt, Artificial Sequence
  Description of Artificial Sequence: Synthetic oligonucleotide
uaauacgcucauauuucac

SEQ ID NO: 830966 - RNA, 19 nt, Artificial Sequence
  Description of Artificial Sequence: Synthetic oligonucleotide
gaacccagggcccagugac

SEQ ID NO: 830967 - RNA, 19 nt, Artificial Sequence
  Description of Artificial Sequence: Synthetic oligonucleotide
uuccacggaguucuucagg

SEQ ID NO: 830968 - RNA, 19 nt, Artificial Sequence
  Description of Artificial Sequence: Synthetic oligonucleotide
gaugucauagcuguuccca

SEQ ID NO: 830969 - RNA, 19 nt, Artificial Sequence
  Description of Artificial Sequence: Synthetic oligonucleotide
augcaguuacgguucaaag

SEQ ID NO: 830970 - RNA, 19 nt, Artificial Sequence
  Description of Artificial Sequence: Synthetic oligonucleotide
gcaguuacgguucaaaguc

SEQ ID NO: 830971 - RNA, 19 nt, Artificial Sequence
  Description of Artificial Sequence: Synthetic oligonucleotide
aacuuaauacgcucauauu

SEQ ID NO: 830972 - RNA, 19 nt, Artificial Sequence
  Description of Artificial Sequence: Synthetic oligonucleotide
cagaaucuuauuccgcagc

SEQ ID NO: 830973 - RNA, 19 nt, Artificial Sequence
  Description of Artificial Sequence: Synthetic oligonucleotide
uugaaucgcuucuuguacu

SEQ ID NO: 830974 - RNA, 19 nt, Artificial Sequence
  Description of Artificial Sequence: Synthetic oligonucleotide
ugcaugaagaccccgucua

SEQ ID NO: 830975 - RNA, 19 nt, Artificial Sequence
  Description of Artificial Sequence: Synthetic oligonucleotide
uuuccccacaaguugggga

SEQ ID NO: 830976 - RNA, 19 nt, Artificial Sequence
  Description of Artificial Sequence: Synthetic oligonucleotide
auaaagggguacagggccc

SEQ ID NO: 830977 - RNA, 19 nt, Artificial Sequence
  Description of Artificial Sequence: Synthetic oligonucleotide
ugacauagacaccuucguc

SEQ ID NO: 830978 - RNA, 19 nt, Artificial Sequence
  Description of Artificial Sequence: Synthetic oligonucleotide
acgauaguggccacagccc

SEQ ID NO: 830979 - RNA, 19 nt, Artificial Sequence
  Description of Artificial Sequence: Synthetic oligonucleotide
aguugagcccuuccagcac

SEQ ID NO: 830980 - RNA, 19 nt, Artificial Sequence
  Description of Artificial Sequence: Synthetic oligonucleotide
aggacagguaauauacccg

SEQ ID NO: 830981 - RNA, 19 nt, Artificial Sequence
  Description of Artificial Sequence: Synthetic oligonucleotide
cuuacaucgaacugcagcu

SEQ ID NO: 830982 - RNA, 19 nt, Artificial Sequence
  Description of Artificial Sequence: Synthetic oligonucleotide
gaccaggaacuuaauacgc

SEQ ID NO: 830983 - RNA, 19 nt, Artificial Sequence
  Description of Artificial Sequence: Synthetic oligonucleotide
ucgggagucucgcugugag

SEQ ID NO: 830984 - RNA, 19 nt, Artificial Sequence
  Description of Artificial Sequence: Synthetic oligonucleotide
ucgucaccaguucaugaug

SEQ ID NO: 830985 - RNA, 19 nt, Artificial Sequence
  Description of Artificial Sequence: Synthetic oligonucleotide
auacgcucauauuucacaa

SEQ ID NO: 830986 - RNA, 19 nt, Artificial Sequence
  Description of Artificial Sequence: Synthetic oligonucleotide
augaagaccccgucuaggu

SEQ ID NO: 830987 - RNA, 19 nt, Artificial Sequence
  Description of Artificial Sequence: Synthetic oligonucleotide
uacuuccgaaucucgggag

SEQ ID NO: 830988 - RNA, 19 nt, Artificial Sequence
  Description of Artificial Sequence: Synthetic oligonucleotide
ccuuacaucgaacugcagc

SEQ ID NO: 830989 - RNA, 19 nt, Artificial Sequence
  Description of Artificial Sequence: Synthetic oligonucleotide
ugaagaccccgucuaggug

SEQ ID NO: 830990 - RNA, 19 nt, Artificial Sequence
  Description of Artificial Sequence: Synthetic oligonucleotide
gauacaggaaggaagggcu

SEQ ID NO: 830991 - RNA, 19 nt, Artificial Sequence
  Description of Artificial Sequence: Synthetic oligonucleotide
caaacggguuuccaaggcc

SEQ ID NO: 830992 - RNA, 19 nt, Artificial Sequence
  Description of Artificial Sequence: Synthetic oligonucleotide
ugauagggaugguaucccc

SEQ ID NO: 830993 - RNA, 19 nt, Artificial Sequence
  Description of Artificial Sequence: Synthetic oligonucleotide
ggaauguuuuggcuguggg

SEQ ID NO: 830994 - RNA, 19 nt, Artificial Sequence
  Description of Artificial Sequence: Synthetic oligonucleotide
uuccuagauccacaaacau

SEQ ID NO: 830995 - RNA, 19 nt, Artificial Sequence
  Description of Artificial Sequence: Synthetic oligonucleotide
guaagggaguccaagcccc

SEQ ID NO: 830996 - RNA, 19 nt, Artificial Sequence
  Description of Artificial Sequence: Synthetic oligonucleotide
uagauuccuagauccacaa

SEQ ID NO: 830997 - RNA, 19 nt, Artificial Sequence
  Description of Artificial Sequence: Synthetic oligonucleotide
uccuccauucccugggacc

SEQ ID NO: 830998 - RNA, 19 nt, Artificial Sequence
  Description of Artificial Sequence: Synthetic oligonucleotide
caggcugguagauuccuag

SEQ ID NO: 830999 - RNA, 19 nt, Artificial Sequence
  Description of Artificial Sequence: Synthetic oligonucleotide
aguauuggggaggaagaug

SEQ ID NO: 831000 - RNA, 19 nt, Artificial Sequence
  Description of Artificial Sequence: Synthetic oligonucleotide
caccuuaucauuccgcuca

SEQ ID NO: 831001 - RNA, 19 nt, Artificial Sequence
  Description of Artificial Sequence: Synthetic oligonucleotide
agggaugguauccccacug

SEQ ID NO: 831002 - RNA, 19 nt, Artificial Sequence
  Description of Artificial Sequence: Synthetic oligonucleotide
agcagcaaugggguaaggg

SEQ ID NO: 831003 - RNA, 19 nt, Artificial Sequence
  Description of Artificial Sequence: Synthetic oligonucleotide
aaaaggggcggggcaaguc

SEQ ID NO: 831004 - RNA, 19 nt, Artificial Sequence
  Description of Artificial Sequence: Synthetic oligonucleotide
acaccuuaucauuccgcuc

SEQ ID NO: 831005 - RNA, 19 nt, Artificial Sequence
  Description of Artificial Sequence: Synthetic oligonucleotide
acuuaagccucugggcucg

SEQ ID NO: 831006 - RNA, 19 nt, Artificial Sequence
  Description of Artificial Sequence: Synthetic oligonucleotide
cccauuaucugguuggagc

SEQ ID NO: 831007 - RNA, 19 nt, Artificial Sequence
  Description of Artificial Sequence: Synthetic oligonucleotide
uaccagggcugugauaggg

SEQ ID NO: 831008 - RNA, 19 nt, Artificial Sequence
  Description of Artificial Sequence: Synthetic oligonucleotide
gguuggagcagauguaggc

SEQ ID NO: 831009 - RNA, 19 nt, Artificial Sequence
  Description of Artificial Sequence: Synthetic oligonucleotide
acgugaucacaaaagcuuc

SEQ ID NO: 831010 - RNA, 19 nt, Artificial Sequence
  Description of Artificial Sequence: Synthetic oligonucleotide
ugugcaugaagaccccguc

SEQ ID NO: 831011 - RNA, 19 nt, Artificial Sequence
  Description of Artificial Sequence: Synthetic oligonucleotide
caugaagaccccgucuagg

SEQ ID NO: 831012 - RNA, 19 nt, Artificial Sequence
  Description of Artificial Sequence: Synthetic oligonucleotide
ucacaacacgauaguggcc

SEQ ID NO: 831013 - RNA, 19 nt, Artificial Sequence
  Description of Artificial Sequence: Synthetic oligonucleotide
agguaauauacccgaaguu

SEQ ID NO: 831014 - RNA, 19 nt, Artificial Sequence
  Description of Artificial Sequence: Synthetic oligonucleotide
auguuuuggcugugggguc

SEQ ID NO: 831015 - RNA, 19 nt, Artificial Sequence
  Description of Artificial Sequence: Synthetic oligonucleotide
cucgcugugagcccgggug

SEQ ID NO: 831016 - RNA, 19 nt, Artificial Sequence
  Description of Artificial Sequence: Synthetic oligonucleotide
ucacguucccagcaggcuc

SEQ ID NO: 831017 - RNA, 19 nt, Artificial Sequence
  Description of Artificial Sequence: Synthetic oligonucleotide
ugguagauuccuagaucca

SEQ ID NO: 831018 - RNA, 19 nt, Artificial Sequence
  Description of Artificial Sequence: Synthetic oligonucleotide
acguugaccacagagcccu

SEQ ID NO: 831019 - RNA, 19 nt, Artificial Sequence
  Description of Artificial Sequence: Synthetic oligonucleotide
uccccuggcgugcaaauaa

SEQ ID NO: 831020 - RNA, 19 nt, Artificial Sequence
  Description of Artificial Sequence: Synthetic oligonucleotide
auuccuagauccacaaaca

SEQ ID NO: 831021 - RNA, 19 nt, Artificial Sequence
  Description of Artificial Sequence: Synthetic oligonucleotide
ggugggauuaacguugacc

SEQ ID NO: 831022 - RNA, 19 nt, Artificial Sequence
  Description of Artificial Sequence: Synthetic oligonucleotide
aauauacccgaaguuuguu

SEQ ID NO: 831023 - RNA, 19 nt, Artificial Sequence
  Description of Artificial Sequence: Synthetic oligonucleotide
uggucacgugaucacaaaa

SEQ ID NO: 831024 - RNA, 19 nt, Artificial Sequence
  Description of Artificial Sequence: Synthetic oligonucleotide
acagaggaucuccgaauug

SEQ ID NO: 831025 - RNA, 19 nt, Artificial Sequence
  Description of Artificial Sequence: Synthetic oligonucleotide
cuccgaauugaaucgcuuc

SEQ ID NO: 831026 - RNA, 19 nt, Artificial Sequence
  Description of Artificial Sequence: Synthetic oligonucleotide
gugaucacaaaagcuucag

SEQ ID NO: 831027 - RNA, 19 nt, Artificial Sequence
  Description of Artificial Sequence: Synthetic oligonucleotide
aguggagaaaaggggcggg

SEQ ID NO: 831028 - RNA, 19 nt, Artificial Sequence
  Description of Artificial Sequence: Synthetic oligonucleotide
aggaacuuaauacgcucau

SEQ ID NO: 831029 - RNA, 19 nt, Artificial Sequence
  Description of Artificial Sequence: Synthetic oligonucleotide
gaauugaaucgcuucuugu

SEQ ID NO: 831030 - RNA, 19 nt, Artificial Sequence
  Description of Artificial Sequence: Synthetic oligonucleotide
ucuccaugccgucaguauu

SEQ ID NO: 831031 - RNA, 19 nt, Artificial Sequence
  Description of Artificial Sequence: Synthetic oligonucleotide
ggucacgugaucacaaaag

SEQ ID NO: 831032 - RNA, 19 nt, Artificial Sequence
  Description of Artificial Sequence: Synthetic oligonucleotide
gauggcauggggugugauc

SEQ ID NO: 831033 - RNA, 19 nt, Artificial Sequence
  Description of Artificial Sequence: Synthetic oligonucleotide
accuucgucuucauagcac

SEQ ID NO: 831034 - RNA, 19 nt, Artificial Sequence
  Description of Artificial Sequence: Synthetic oligonucleotide
auuaucugguuggagcaga

SEQ ID NO: 831035 - RNA, 19 nt, Artificial Sequence
  Description of Artificial Sequence: Synthetic oligonucleotide
cacguucccagcaggcucc

SEQ ID NO: 831036 - RNA, 19 nt, Artificial Sequence
  Description of Artificial Sequence: Synthetic oligonucleotide
uacgcucauauuucacaac

SEQ ID NO: 831037 - RNA, 19 nt, Artificial Sequence
  Description of Artificial Sequence: Synthetic oligonucleotide
ugaaucgcuucuuguacuu

SEQ ID NO: 831038 - RNA, 19 nt, Artificial Sequence
  Description of Artificial Sequence: Synthetic oligonucleotide
gaucagaggucacguuccc

SEQ ID NO: 831039 - RNA, 19 nt, Artificial Sequence
  Description of Artificial Sequence: Synthetic oligonucleotide
gaucuccgaauugaaucgc

SEQ ID NO: 831040 - RNA, 19 nt, Artificial Sequence
  Description of Artificial Sequence: Synthetic oligonucleotide
uuggugggauuaacguuga

SEQ ID NO: 831041 - RNA, 19 nt, Artificial Sequence
  Description of Artificial Sequence: Synthetic oligonucleotide
ggacagguaauauacccga

SEQ ID NO: 831042 - RNA, 19 nt, Artificial Sequence
  Description of Artificial Sequence: Synthetic oligonucleotide
uuacaucgaacugcagcug

SEQ ID NO: 831043 - RNA, 19 nt, Artificial Sequence
  Description of Artificial Sequence: Synthetic oligonucleotide
acacgauaguggccacagc

SEQ ID NO: 831044 - RNA, 19 nt, Artificial Sequence
  Description of Artificial Sequence: Synthetic oligonucleotide
acuuccgaaucucgggagu

SEQ ID NO: 831045 - RNA, 19 nt, Artificial Sequence
  Description of Artificial Sequence: Synthetic oligonucleotide
ggguaagggaguccaagcc

SEQ ID NO: 831046 - RNA, 19 nt, Artificial Sequence
  Description of Artificial Sequence: Synthetic oligonucleotide
ugggauuaacguugaccac

SEQ ID NO: 831047 - RNA, 19 nt, Artificial Sequence
  Description of Artificial Sequence: Synthetic oligonucleotide
aguucaugaugcaguuacg

SEQ ID NO: 831048 - RNA, 19 nt, Artificial Sequence
  Description of Artificial Sequence: Synthetic oligonucleotide
gaugcaguuacgguucaaa

SEQ ID NO: 831049 - RNA, 19 nt, Artificial Sequence
  Description of Artificial Sequence: Synthetic oligonucleotide
ggcccgucuccacagagcg

SEQ ID NO: 831050 - RNA, 19 nt, Artificial Sequence
  Description of Artificial Sequence: Synthetic oligonucleotide
uuaucugguuggagcagau

SEQ ID NO: 831051 - RNA, 19 nt, Artificial Sequence
  Description of Artificial Sequence: Synthetic oligonucleotide
auauggagggugggagcgc

SEQ ID NO: 831052 - RNA, 19 nt, Artificial Sequence
  Description of Artificial Sequence: Synthetic oligonucleotide
gccuuuaccaacccacgag

SEQ ID NO: 831053 - RNA, 19 nt, Artificial Sequence
  Description of Artificial Sequence: Synthetic oligonucleotide
ggugaaugagcucuuccca

SEQ ID NO: 831054 - RNA, 19 nt, Artificial Sequence
  Description of Artificial Sequence: Synthetic oligonucleotide
ucauagcuguucccagagu

SEQ ID NO: 831055 - RNA, 19 nt, Artificial Sequence
  Description of Artificial Sequence: Synthetic oligonucleotide
gagcaaguugagcccuucc

SEQ ID NO: 831056 - RNA, 19 nt, Artificial Sequence
  Description of Artificial Sequence: Synthetic oligonucleotide
aacccagggcccagugacc

SEQ ID NO: 831057 - RNA, 19 nt, Artificial Sequence
  Description of Artificial Sequence: Synthetic oligonucleotide
ucuccgaauugaaucgcuu

SEQ ID NO: 831058 - RNA, 19 nt, Artificial Sequence
  Description of Artificial Sequence: Synthetic oligonucleotide
gaugcaagcaaggggauau

SEQ ID NO: 831059 - RNA, 19 nt, Artificial Sequence
  Description of Artificial Sequence: Synthetic oligonucleotide
aucuuauuccgcagccagg

SEQ ID NO: 831060 - RNA, 19 nt, Artificial Sequence
  Description of Artificial Sequence: Synthetic oligonucleotide
agggaguccaagccccgag

SEQ ID NO: 831061 - RNA, 19 nt, Artificial Sequence
  Description of Artificial Sequence: Synthetic oligonucleotide
guagucuggcuguggggag

SEQ ID NO: 831062 - RNA, 19 nt, Artificial Sequence
  Description of Artificial Sequence: Synthetic oligonucleotide
aucucgggagucucgcugu

SEQ ID NO: 831063 - RNA, 19 nt, Artificial Sequence
  Description of Artificial Sequence: Synthetic oligonucleotide
gggaucagaggucacguuc

SEQ ID NO: 831064 - RNA, 19 nt, Artificial Sequence
  Description of Artificial Sequence: Synthetic oligonucleotide
cugauccagacgaccgccc

SEQ ID NO: 831065 - RNA, 19 nt, Artificial Sequence
  Description of Artificial Sequence: Synthetic oligonucleotide
guugagcccuuccagcaca

SEQ ID NO: 831066 - RNA, 19 nt, Artificial Sequence
  Description of Artificial Sequence: Synthetic oligonucleotide
gccauagaugaccuugagc

SEQ ID NO: 831067 - RNA, 19 nt, Artificial Sequence
  Description of Artificial Sequence: Synthetic oligonucleotide
gggauuaacguugaccaca

SEQ ID NO: 831068 - RNA, 19 nt, Artificial Sequence
  Description of Artificial Sequence: Synthetic oligonucleotide
ggcauacacuuccacggag

SEQ ID NO: 831069 - RNA, 19 nt, Artificial Sequence
  Description of Artificial Sequence: Synthetic oligonucleotide
gaugguauccccacugccu

SEQ ID NO: 831070 - RNA, 19 nt, Artificial Sequence
  Description of Artificial Sequence: Synthetic oligonucleotide
cacgugaucacaaaagcuu

SEQ ID NO: 831071 - RNA, 19 nt, Artificial Sequence
  Description of Artificial Sequence: Synthetic oligonucleotide
cuacugucagguccaccag

SEQ ID NO: 831072 - RNA, 19 nt, Artificial Sequence
  Description of Artificial Sequence: Synthetic oligonucleotide
cagguaauauacccgaagu

SEQ ID NO: 831073 - RNA, 19 nt, Artificial Sequence
  Description of Artificial Sequence: Synthetic oligonucleotide
gggauauggagggugggag

SEQ ID NO: 831074 - RNA, 19 nt, Artificial Sequence
  Description of Artificial Sequence: Synthetic oligonucleotide
ggauauggagggugggagc

SEQ ID NO: 831075 - RNA, 19 nt, Artificial Sequence
  Description of Artificial Sequence: Synthetic oligonucleotide
ggaugguauccccacugcc

SEQ ID NO: 831076 - RNA, 19 nt, Artificial Sequence
  Description of Artificial Sequence: Synthetic oligonucleotide
aggcauacacuuccacgga

SEQ ID NO: 831077 - RNA, 19 nt, Artificial Sequence
  Description of Artificial Sequence: Synthetic oligonucleotide
agcccuuccuuacaucgaa

SEQ ID NO: 831078 - RNA, 19 nt, Artificial Sequence
  Description of Artificial Sequence: Synthetic oligonucleotide
cagaggaucuccgaauuga

SEQ ID NO: 831079 - RNA, 19 nt, Artificial Sequence
  Description of Artificial Sequence: Synthetic oligonucleotide
ugccgucaguauuggggag

SEQ ID NO: 831080 - RNA, 19 nt, Artificial Sequence
  Description of Artificial Sequence: Synthetic oligonucleotide
gguaauauacccgaaguuu

SEQ ID NO: 831081 - RNA, 19 nt, Artificial Sequence
  Description of Artificial Sequence: Synthetic oligonucleotide
cagacgaccgcccucucca

SEQ ID NO: 831082 - RNA, 19 nt, Artificial Sequence
  Description of Artificial Sequence: Synthetic oligonucleotide
aguuacgguucaaagucau

SEQ ID NO: 831083 - RNA, 19 nt, Artificial Sequence
  Description of Artificial Sequence: Synthetic oligonucleotide
agagcggaucucaauggcu

SEQ ID NO: 831084 - RNA, 19 nt, Artificial Sequence
  Description of Artificial Sequence: Synthetic oligonucleotide
accccgucuagguggcccg

SEQ ID NO: 831085 - RNA, 19 nt, Artificial Sequence
  Description of Artificial Sequence: Synthetic oligonucleotide
ugcagcugauccagacgac

SEQ ID NO: 831086 - RNA, 19 nt, Artificial Sequence
  Description of Artificial Sequence: Synthetic oligonucleotide
agauuccuagauccacaaa

SEQ ID NO: 831087 - RNA, 19 nt, Artificial Sequence
  Description of Artificial Sequence: Synthetic oligonucleotide
gauccgcccauaaguguug

SEQ ID NO: 831088 - RNA, 19 nt, Artificial Sequence
  Description of Artificial Sequence: Synthetic oligonucleotide
gcugguagauuccuagauc

SEQ ID NO: 831089 - RNA, 19 nt, Artificial Sequence
  Description of Artificial Sequence: Synthetic oligonucleotide
gcccaaugaggccauacac

SEQ ID NO: 831090 - RNA, 19 nt, Artificial Sequence
  Description of Artificial Sequence: Synthetic oligonucleotide
uggggucccuccuccauuc

SEQ ID NO: 831091 - RNA, 19 nt, Artificial Sequence
  Description of Artificial Sequence: Synthetic oligonucleotide
agcaggcuccagugaauca

SEQ ID NO: 831092 - RNA, 19 nt, Artificial Sequence
  Description of Artificial Sequence: Synthetic oligonucleotide
gauccagacgaccgcccuc

SEQ ID NO: 831093 - RNA, 19 nt, Artificial Sequence
  Description of Artificial Sequence: Synthetic oligonucleotide
ucucgggagucucgcugug

SEQ ID NO: 831094 - RNA, 19 nt, Artificial Sequence
  Description of Artificial Sequence: Synthetic oligonucleotide
gagcccggguguugguggg

SEQ ID NO: 831095 - RNA, 19 nt, Artificial Sequence
  Description of Artificial Sequence: Synthetic oligonucleotide
gacauggucccugccucug

SEQ ID NO: 831096 - RNA, 19 nt, Artificial Sequence
  Description of Artificial Sequence: Synthetic oligonucleotide
ccauuaucugguuggagca

SEQ ID NO: 831097 - RNA, 19 nt, Artificial Sequence
  Description of Artificial Sequence: Synthetic oligonucleotide
caguuacgguucaaaguca

SEQ ID NO: 831098 - RNA, 19 nt, Artificial Sequence
  Description of Artificial Sequence: Synthetic oligonucleotide
agacgaccgcccucuccac

SEQ ID NO: 831099 - RNA, 19 nt, Artificial Sequence
  Description of Artificial Sequence: Synthetic oligonucleotide
gacgaccgcccucuccacc

SEQ ID NO: 831100 - RNA, 19 nt, Artificial Sequence
  Description of Artificial Sequence: Synthetic oligonucleotide
cuuccgaaucucgggaguc

SEQ ID NO: 831101 - RNA, 19 nt, Artificial Sequence
  Description of Artificial Sequence: Synthetic oligonucleotide
gagcacucuccucuuaagu

SEQ ID NO: 831102 - RNA, 19 nt, Artificial Sequence
  Description of Artificial Sequence: Synthetic oligonucleotide
cuaccagggcugugauagg

SEQ ID NO: 831103 - RNA, 19 nt, Artificial Sequence
  Description of Artificial Sequence: Synthetic oligonucleotide
aggggauauggaggguggg

SEQ ID NO: 831104 - RNA, 19 nt, Artificial Sequence
  Description of Artificial Sequence: Synthetic oligonucleotide
gaaggaagggcuacuugcu

SEQ ID NO: 831105 - RNA, 19 nt, Artificial Sequence
  Description of Artificial Sequence: Synthetic oligonucleotide
cagggcugugauagggaug

SEQ ID NO: 831106 - RNA, 19 nt, Artificial Sequence
  Description of Artificial Sequence: Synthetic oligonucleotide
cauagacaccuucgucuuc

SEQ ID NO: 831107 - RNA, 19 nt, Artificial Sequence
  Description of Artificial Sequence: Synthetic oligonucleotide
cacuacauugagaaaggau

SEQ ID NO: 831108 - RNA, 19 nt, Artificial Sequence
  Description of Artificial Sequence: Synthetic oligonucleotide
ccccagagcggacugaggc

SEQ ID NO: 831109 - RNA, 19 nt, Artificial Sequence
  Description of Artificial Sequence: Synthetic oligonucleotide
ggguagucuggcugugggg

SEQ ID NO: 831110 - RNA, 19 nt, Artificial Sequence
  Description of Artificial Sequence: Synthetic oligonucleotide
gauaguggccacagcccuc

SEQ ID NO: 831111 - RNA, 19 nt, Artificial Sequence
  Description of Artificial Sequence: Synthetic oligonucleotide
ccuuccuuacaucgaacug

SEQ ID NO: 831112 - RNA, 19 nt, Artificial Sequence
  Description of Artificial Sequence: Synthetic oligonucleotide
gucaccaguucaugaugca

SEQ ID NO: 831113 - RNA, 19 nt, Artificial Sequence
  Description of Artificial Sequence: Synthetic oligonucleotide
cagagucugguacauucaa

SEQ ID NO: 831114 - RNA, 19 nt, Artificial Sequence
  Description of Artificial Sequence: Synthetic oligonucleotide
uccgaaucucgggagucuc

SEQ ID NO: 831115 - RNA, 19 nt, Artificial Sequence
  Description of Artificial Sequence: Synthetic oligonucleotide
gggaugguauccccacugc

SEQ ID NO: 831116 - RNA, 19 nt, Artificial Sequence
  Description of Artificial Sequence: Synthetic oligonucleotide
gcaugaagaccccgucuag

SEQ ID NO: 831117 - RNA, 19 nt, Artificial Sequence
  Description of Artificial Sequence: Synthetic oligonucleotide
cauucuccgugcccaccag

SEQ ID NO: 831118 - RNA, 19 nt, Artificial Sequence
  Description of Artificial Sequence: Synthetic oligonucleotide
gcugcucacacuauauaca

SEQ ID NO: 831119 - RNA, 19 nt, Artificial Sequence
  Description of Artificial Sequence: Synthetic oligonucleotide
aucuccgaauugaaucgcu

SEQ ID NO: 831120 - RNA, 19 nt, Artificial Sequence
  Description of Artificial Sequence: Synthetic oligonucleotide
gauuaacguugaccacaga

SEQ ID NO: 831121 - RNA, 19 nt, Artificial Sequence
  Description of Artificial Sequence: Synthetic oligonucleotide
ugagcaaguugagcccuuc

SEQ ID NO: 831122 - RNA, 19 nt, Artificial Sequence
  Description of Artificial Sequence: Synthetic oligonucleotide
caucgaacugcagcugauc

SEQ ID NO: 831123 - RNA, 19 nt, Artificial Sequence
  Description of Artificial Sequence: Synthetic oligonucleotide
ggcaagucccacucaguuc

SEQ ID NO: 831124 - RNA, 19 nt, Artificial Sequence
  Description of Artificial Sequence: Synthetic oligonucleotide
ggacgggcggccuggguag

SEQ ID NO: 831125 - RNA, 19 nt, Artificial Sequence
  Description of Artificial Sequence: Synthetic oligonucleotide
ccuuuaccaacccacgaga

SEQ ID NO: 831126 - RNA, 19 nt, Artificial Sequence
  Description of Artificial Sequence: Synthetic oligonucleotide
ccaucugcuggaagcgccg

SEQ ID NO: 831127 - RNA, 19 nt, Artificial Sequence
  Description of Artificial Sequence: Synthetic oligonucleotide
cgaauugaaucgcuucuug

SEQ ID NO: 831128 - RNA, 19 nt, Artificial Sequence
  Description of Artificial Sequence: Synthetic oligonucleotide
gacagguaauauacccgaa

SEQ ID NO: 831129 - RNA, 19 nt, Artificial Sequence
  Description of Artificial Sequence: Synthetic oligonucleotide
gccgucaguauuggggagg

SEQ ID NO: 831130 - RNA, 19 nt, Artificial Sequence
  Description of Artificial Sequence: Synthetic oligonucleotide
caccuucgucuucauagca

SEQ ID NO: 831131 - RNA, 19 nt, Artificial Sequence
  Description of Artificial Sequence: Synthetic oligonucleotide
ucucgcugugagcccgggu

SEQ ID NO: 831132 - RNA, 19 nt, Artificial Sequence
  Description of Artificial Sequence: Synthetic oligonucleotide
cgugcaaauaaagggguac

SEQ ID NO: 831133 - RNA, 19 nt, Artificial Sequence
  Description of Artificial Sequence: Synthetic oligonucleotide
uggugggauuaacguugac

SEQ ID NO: 831134 - RNA, 19 nt, Artificial Sequence
  Description of Artificial Sequence: Synthetic oligonucleotide
ggcucuggauguguacagg

SEQ ID NO: 831135 - RNA, 19 nt, Artificial Sequence
  Description of Artificial Sequence: Synthetic oligonucleotide
guaggguuugggagcccag

SEQ ID NO: 831136 - RNA, 19 nt, Artificial Sequence
  Description of Artificial Sequence: Synthetic oligonucleotide
aagcgccgccgcccaauga

SEQ ID NO: 831137 - RNA, 19 nt, Artificial Sequence
  Description of Artificial Sequence: Synthetic oligonucleotide
gcagcgggcggugagggag

SEQ ID NO: 831138 - RNA, 19 nt, Artificial Sequence
  Description of Artificial Sequence: Synthetic oligonucleotide
cagagcccuuccuuacauc

SEQ ID NO: 831139 - RNA, 19 nt, Artificial Sequence
  Description of Artificial Sequence: Synthetic oligonucleotide
cucuccucuuaaguggaga

SEQ ID NO: 831140 - RNA, 19 nt, Artificial Sequence
  Description of Artificial Sequence: Synthetic oligonucleotide
cucgucaccaguucaugau

SEQ ID NO: 831141 - RNA, 19 nt, Artificial Sequence
  Description of Artificial Sequence: Synthetic oligonucleotide
uccgcccauaaguguugac

SEQ ID NO: 831142 - RNA, 19 nt, Artificial Sequence
  Description of Artificial Sequence: Synthetic oligonucleotide
uacccgaaguuuguuccuu

SEQ ID NO: 831143 - RNA, 19 nt, Artificial Sequence
  Description of Artificial Sequence: Synthetic oligonucleotide
cagcgggcggugagggagg

SEQ ID NO: 831144 - RNA, 19 nt, Artificial Sequence
  Description of Artificial Sequence: Synthetic oligonucleotide
agaugcaagcaaggggaua

SEQ ID NO: 831145 - RNA, 19 nt, Artificial Sequence
  Description of Artificial Sequence: Synthetic oligonucleotide
ggagucucgcugugagccc

SEQ ID NO: 831146 - RNA, 19 nt, Artificial Sequence
  Description of Artificial Sequence: Synthetic oligonucleotide
cacagagcccuuccuuaca

SEQ ID NO: 831147 - RNA, 19 nt, Artificial Sequence
  Description of Artificial Sequence: Synthetic oligonucleotide
augcaagcaaggggauaug

SEQ ID NO: 831148 - RNA, 19 nt, Artificial Sequence
  Description of Artificial Sequence: Synthetic oligonucleotide
acggaguucuucagggcaa

SEQ ID NO: 831149 - RNA, 19 nt, Artificial Sequence
  Description of Artificial Sequence: Synthetic oligonucleotide
agcccauuaucugguugga

SEQ ID NO: 831150 - RNA, 19 nt, Artificial Sequence
  Description of Artificial Sequence: Synthetic oligonucleotide
ugaugcaguuacgguucaa

SEQ ID NO: 831151 - RNA, 19 nt, Artificial Sequence
  Description of Artificial Sequence: Synthetic oligonucleotide
ggggaaucauuaaagugcu

SEQ ID NO: 831152 - RNA, 19 nt, Artificial Sequence
  Description of Artificial Sequence: Synthetic oligonucleotide
ggguuugggagcccaggca

SEQ ID NO: 831153 - RNA, 19 nt, Artificial Sequence
  Description of Artificial Sequence: Synthetic oligonucleotide
auacaggaaggaagggcua

SEQ ID NO: 831154 - RNA, 19 nt, Artificial Sequence
  Description of Artificial Sequence: Synthetic oligonucleotide
gaaucucgggagucucgcu

SEQ ID NO: 831155 - RNA, 19 nt, Artificial Sequence
  Description of Artificial Sequence: Synthetic oligonucleotide
acaucgaacugcagcugau

SEQ ID NO: 831156 - RNA, 19 nt, Artificial Sequence
  Description of Artificial Sequence: Synthetic oligonucleotide
cauuccgcucacacaggaa

SEQ ID NO: 831157 - RNA, 19 nt, Artificial Sequence
  Description of Artificial Sequence: Synthetic oligonucleotide
uccaccuaccagggcugug

SEQ ID NO: 831158 - RNA, 19 nt, Artificial Sequence
  Description of Artificial Sequence: Synthetic oligonucleotide
cucccacggugguccaccc

SEQ ID NO: 831159 - RNA, 19 nt, Artificial Sequence
  Description of Artificial Sequence: Synthetic oligonucleotide
cugagauggugaugagcaa

SEQ ID NO: 831160 - RNA, 19 nt, Artificial Sequence
  Description of Artificial Sequence: Synthetic oligonucleotide
gagcccuuccuuacaucga

SEQ ID NO: 831161 - RNA, 19 nt, Artificial Sequence
  Description of Artificial Sequence: Synthetic oligonucleotide
ggcggggcaagucccacuc

SEQ ID NO: 831162 - RNA, 19 nt, Artificial Sequence
  Description of Artificial Sequence: Synthetic oligonucleotide
caaaagcuucagggaucag

SEQ ID NO: 831163 - RNA, 19 nt, Artificial Sequence
  Description of Artificial Sequence: Synthetic oligonucleotide
gagcggaucucaauggcuu

SEQ ID NO: 831164 - RNA, 19 nt, Artificial Sequence
  Description of Artificial Sequence: Synthetic oligonucleotide
cgcucauauuucacaacac

SEQ ID NO: 831165 - RNA, 19 nt, Artificial Sequence
  Description of Artificial Sequence: Synthetic oligonucleotide
agucucgcugugagcccgg

SEQ ID NO: 831166 - RNA, 19 nt, Artificial Sequence
  Description of Artificial Sequence: Synthetic oligonucleotide
gcuucagggaucagagguc

SEQ ID NO: 831167 - RNA, 19 nt, Artificial Sequence
  Description of Artificial Sequence: Synthetic oligonucleotide
ggugggaaagaaggaaugu

SEQ ID NO: 831168 - RNA, 19 nt, Artificial Sequence
  Description of Artificial Sequence: Synthetic oligonucleotide
guuacgguucaaagucaua

SEQ ID NO: 831169 - RNA, 19 nt, Artificial Sequence
  Description of Artificial Sequence: Synthetic oligonucleotide
auccgcccauaaguguuga

SEQ ID NO: 831170 - RNA, 19 nt, Artificial Sequence
  Description of Artificial Sequence: Synthetic oligonucleotide
cgaaucucgggagucucgc

SEQ ID NO: 831171 - RNA, 19 nt, Artificial Sequence
  Description of Artificial Sequence: Synthetic oligonucleotide
ggcgugcaaauaaaggggu

SEQ ID NO: 831172 - RNA, 19 nt, Artificial Sequence
  Description of Artificial Sequence: Synthetic oligonucleotide
gguauccccacugccucca

SEQ ID NO: 831173 - RNA, 19 nt, Artificial Sequence
  Description of Artificial Sequence: Synthetic oligonucleotide
ccauaaguguugacauaga

SEQ ID NO: 831174 - RNA, 19 nt, Artificial Sequence
  Description of Artificial Sequence: Synthetic oligonucleotide
cuuaagccucugggcucgc

SEQ ID NO: 831175 - RNA, 19 nt, Artificial Sequence
  Description of Artificial Sequence: Synthetic oligonucleotide
ccaugccgucaguauuggg

SEQ ID NO: 831176 - RNA, 19 nt, Artificial Sequence
  Description of Artificial Sequence: Synthetic oligonucleotide
cuggaagcgccgccgccca

SEQ ID NO: 831177 - RNA, 19 nt, Artificial Sequence
  Description of Artificial Sequence: Synthetic oligonucleotide
gcagggacgggcggccugg

SEQ ID NO: 831178 - RNA, 19 nt, Artificial Sequence
  Description of Artificial Sequence: Synthetic oligonucleotide
guacagggauguagauguc

SEQ ID NO: 831179 - RNA, 19 nt, Artificial Sequence
  Description of Artificial Sequence: Synthetic oligonucleotide
gucucgcugugagcccggg

SEQ ID NO: 831180 - RNA, 19 nt, Artificial Sequence
  Description of Artificial Sequence: Synthetic oligonucleotide
ccucgucaccaguucauga

SEQ ID NO: 831181 - RNA, 19 nt, Artificial Sequence
  Description of Artificial Sequence: Synthetic oligonucleotide
cagggaucagaggucacgu

SEQ ID NO: 831182 - RNA, 19 nt, Artificial Sequence
  Description of Artificial Sequence: Synthetic oligonucleotide
ugagcccuuccagcacauc

SEQ ID NO: 831183 - RNA, 19 nt, Artificial Sequence
  Description of Artificial Sequence: Synthetic oligonucleotide
cccgucuccacagagcgga

SEQ ID NO: 831184 - RNA, 19 nt, Artificial Sequence
  Description of Artificial Sequence: Synthetic oligonucleotide
caucuccaugccgucagua

SEQ ID NO: 831185 - RNA, 19 nt, Artificial Sequence
  Description of Artificial Sequence: Synthetic oligonucleotide
ccgcccauaaguguugaca

SEQ ID NO: 831186 - RNA, 19 nt, Artificial Sequence
  Description of Artificial Sequence: Synthetic oligonucleotide
gggacgggcggccugggua

SEQ ID NO: 831187 - RNA, 19 nt, Artificial Sequence
  Description of Artificial Sequence: Synthetic oligonucleotide
ggggccucgucaccaguuc

SEQ ID NO: 831188 - RNA, 19 nt, Artificial Sequence
  Description of Artificial Sequence: Synthetic oligonucleotide
ccacagcccuccaugucuc

SEQ ID NO: 831189 - RNA, 19 nt, Artificial Sequence
  Description of Artificial Sequence: Synthetic oligonucleotide
gcggugagggaggucagca

SEQ ID NO: 831190 - RNA, 19 nt, Artificial Sequence
  Description of Artificial Sequence: Synthetic oligonucleotide
agggacgggcggccugggu

SEQ ID NO: 831191 - RNA, 19 nt, Artificial Sequence
  Description of Artificial Sequence: Synthetic oligonucleotide
gggccucgucaccaguuca

SEQ ID NO: 831192 - RNA, 19 nt, Artificial Sequence
  Description of Artificial Sequence: Synthetic oligonucleotide
gggcaagucccacucaguu

SEQ ID NO: 831193 - RNA, 19 nt, Artificial Sequence
  Description of Artificial Sequence: Synthetic oligonucleotide
gcggaucucaauggcuuuc

SEQ ID NO: 831194 - RNA, 19 nt, Artificial Sequence
  Description of Artificial Sequence: Synthetic oligonucleotide
gggugugaucuggcucugg

SEQ ID NO: 831195 - RNA, 19 nt, Artificial Sequence
  Description of Artificial Sequence: Synthetic oligonucleotide
cccuuccuuacaucgaacu

SEQ ID NO: 831196 - RNA, 19 nt, Artificial Sequence
  Description of Artificial Sequence: Synthetic oligonucleotide
ggcggccuggguagucugg

SEQ ID NO: 831197 - RNA, 19 nt, Artificial Sequence
  Description of Artificial Sequence: Synthetic oligonucleotide
cacuuugcccuguccacuu

SEQ ID NO: 831198 - RNA, 19 nt, Artificial Sequence
  Description of Artificial Sequence: Synthetic oligonucleotide
cccagagcggacugaggca

SEQ ID NO: 831199 - RNA, 19 nt, Artificial Sequence
  Description of Artificial Sequence: Synthetic oligonucleotide
caguauuggggaggaagau

SEQ ID NO: 831200 - RNA, 19 nt, Artificial Sequence
  Description of Artificial Sequence: Synthetic oligonucleotide
gcccauaaguguugacaua

SEQ ID NO: 831201 - RNA, 19 nt, Artificial Sequence
  Description of Artificial Sequence: Synthetic oligonucleotide
ccaccuaccagggcuguga

SEQ ID NO: 831202 - RNA, 19 nt, Artificial Sequence
  Description of Artificial Sequence: Synthetic oligonucleotide
ccaggggccucgucaccag

SEQ ID NO: 831203 - RNA, 19 nt, Artificial Sequence
  Description of Artificial Sequence: Synthetic oligonucleotide
gccuggguagucuggcugu

SEQ ID NO: 831204 - RNA, 19 nt, Artificial Sequence
  Description of Artificial Sequence: Synthetic oligonucleotide
cugcucagucagcagcaau

SEQ ID NO: 831205 - RNA, 19 nt, Artificial Sequence
  Description of Artificial Sequence: Synthetic oligonucleotide
ggucccuccuccauucccu

SEQ ID NO: 831206 - RNA, 19 nt, Artificial Sequence
  Description of Artificial Sequence: Synthetic oligonucleotide
acguucccagcaggcucca

SEQ ID NO: 831207 - RNA, 19 nt, Artificial Sequence
  Description of Artificial Sequence: Synthetic oligonucleotide
gcccgucuccacagagcgg

SEQ ID NO: 831208 - RNA, 19 nt, Artificial Sequence
  Description of Artificial Sequence: Synthetic oligonucleotide
ccuggguagucuggcugug

SEQ ID NO: 831209 - RNA, 19 nt, Artificial Sequence
  Description of Artificial Sequence: Synthetic oligonucleotide
ccgcccaaugaggccauac

SEQ ID NO: 831210 - RNA, 19 nt, Artificial Sequence
  Description of Artificial Sequence: Synthetic oligonucleotide
gcgugcaaauaaaggggua

SEQ ID NO: 831211 - RNA, 19 nt, Artificial Sequence
  Description of Artificial Sequence: Synthetic oligonucleotide
cgcccauaaguguugacau

SEQ ID NO: 831212 - RNA, 19 nt, Artificial Sequence
  Description of Artificial Sequence: Synthetic oligonucleotide
cgcccaaugaggccauaca

SEQ ID NO: 831213 - RNA, 19 nt, Artificial Sequence
  Description of Artificial Sequence: Synthetic oligonucleotide
cgucuagguggcccgucuc

SEQ ID NO: 831214 - RNA, 19 nt, Artificial Sequence
  Description of Artificial Sequence: Synthetic oligonucleotide
gggcggugagggaggucag

SEQ ID NO: 831215 - RNA, 19 nt, Artificial Sequence
  Description of Artificial Sequence: Synthetic oligonucleotide
caccuaccagggcugugau

SEQ ID NO: 831216 - RNA, 19 nt, Artificial Sequence
  Description of Artificial Sequence: Synthetic oligonucleotide
cuccccuggcgugcaaaua

SEQ ID NO: 831217 - RNA, 19 nt, Artificial Sequence
  Description of Artificial Sequence: Synthetic oligonucleotide
gcggggcaagucccacuca

SEQ ID NO: 831218 - RNA, 19 nt, Artificial Sequence
  Description of Artificial Sequence: Synthetic oligonucleotide
ccccuggcgugcaaauaaa

SEQ ID NO: 831219 - RNA, 19 nt, Artificial Sequence
  Description of Artificial Sequence: Synthetic oligonucleotide
cgucuccacagagcggauc

SEQ ID NO: 831220 - RNA, 19 nt, Artificial Sequence
  Description of Artificial Sequence: Synthetic oligonucleotide
gcuccccuggcgugcaaau

SEQ ID NO: 831221 - RNA, 19 nt, Artificial Sequence
  Description of Artificial Sequence: Synthetic oligonucleotide
ccgcccucuccaccuacca

SEQ ID NO: 831222 - RNA, 19 nt, Artificial Sequence
  Description of Artificial Sequence: Synthetic oligonucleotide
ccaugucucccacgguggu

SEQ ID NO: 831223 - RNA, 19 nt, Artificial Sequence
  Description of Artificial Sequence: Synthetic oligonucleotide
gcaaggggauauggagggu

SEQ ID NO: 831224 - RNA, 19 nt, Artificial Sequence
  Description of Artificial Sequence: Synthetic oligonucleotide
gacgggcggccuggguagu

SEQ ID NO: 831225 - RNA, 19 nt, Artificial Sequence
  Description of Artificial Sequence: Synthetic oligonucleotide
cccgucuagguggcccguc

SEQ ID NO: 831226 - RNA, 19 nt, Artificial Sequence
  Description of Artificial Sequence: Synthetic oligonucleotide
cggugagggaggucagcaa

SEQ ID NO: 831227 - RNA, 19 nt, Artificial Sequence
  Description of Artificial Sequence: Synthetic oligonucleotide
ccgucuagguggcccgucu

SEQ ID NO: 831228 - RNA, 19 nt, Artificial Sequence
  Description of Artificial Sequence: Synthetic oligonucleotide
cugggucauugugcagaau

SEQ ID NO: 831229 - RNA, 19 nt, Artificial Sequence
  Description of Artificial Sequence: Synthetic oligonucleotide
cagcuccccuggcgugcaa

SEQ ID NO: 831230 - RNA, 19 nt, Artificial Sequence
  Description of Artificial Sequence: Synthetic oligonucleotide
cgucaguauuggggaggaa

SEQ ID NO: 831231 - RNA, 19 nt, Artificial Sequence
  Description of Artificial Sequence: Synthetic oligonucleotide
ccgucuccacagagcggau

SEQ ID NO: 831232 - RNA, 19 nt, Artificial Sequence
  Description of Artificial Sequence: Synthetic oligonucleotide
ccccgucuagguggcccgu

SEQ ID NO: 831233 - RNA, 19 nt, Artificial Sequence
  Description of Artificial Sequence: Synthetic oligonucleotide
aaugauaucagacgguucg

SEQ ID NO: 831234 - RNA, 19 nt, Artificial Sequence
  Description of Artificial Sequence: Synthetic oligonucleotide
aaauauaccaaguugacua

SEQ ID NO: 831235 - RNA, 19 nt, Artificial Sequence
  Description of Artificial Sequence: Synthetic oligonucleotide
uuaaacuuaauuucaaagu

SEQ ID NO: 831236 - RNA, 19 nt, Artificial Sequence
  Description of Artificial Sequence: Synthetic oligonucleotide
uauuguuucacauuguagu

SEQ ID NO: 831237 - RNA, 19 nt, Artificial Sequence
  Description of Artificial Sequence: Synthetic oligonucleotide
uuaacuccuguauagaaag

SEQ ID NO: 831238 - RNA, 19 nt, Artificial Sequence
  Description of Artificial Sequence: Synthetic oligonucleotide
uuuucuagccaacuugugg

SEQ ID NO: 831239 - RNA, 19 nt, Artificial Sequence
  Description of Artificial Sequence: Synthetic oligonucleotide
aaugucugcaacugaguac

SEQ ID NO: 831240 - RNA, 19 nt, Artificial Sequence
  Description of Artificial Sequence: Synthetic oligonucleotide
uuuauugagguccagcgga

SEQ ID NO: 831241 - RNA, 19 nt, Artificial Sequence
  Description of Artificial Sequence: Synthetic oligonucleotide
caaauuuuguaucaggaag

SEQ ID NO: 831242 - RNA, 19 nt, Artificial Sequence
  Description of Artificial Sequence: Synthetic oligonucleotide
aacaauauucuguagucga

SEQ ID NO: 831243 - RNA, 19 nt, Artificial Sequence
  Description of Artificial Sequence: Synthetic oligonucleotide
uaauuuucuagccaacuug

SEQ ID NO: 831244 - RNA, 19 nt, Artificial Sequence
  Description of Artificial Sequence: Synthetic oligonucleotide
aaaucuuuaguggaugggg

SEQ ID NO: 831245 - RNA, 19 nt, Artificial Sequence
  Description of Artificial Sequence: Synthetic oligonucleotide
agcagcguuacucuuauac

SEQ ID NO: 831246 - RNA, 19 nt, Artificial Sequence
  Description of Artificial Sequence: Synthetic oligonucleotide
cuguaagaaacucauagag

SEQ ID NO: 831247 - RNA, 19 nt, Artificial Sequence
  Description of Artificial Sequence: Synthetic oligonucleotide
agagacuucauggacacgc

SEQ ID NO: 831248 - RNA, 19 nt, Artificial Sequence
  Description of Artificial Sequence: Synthetic oligonucleotide
uuuaauuccucauuccaca

SEQ ID NO: 831249 - RNA, 19 nt, Artificial Sequence
  Description of Artificial Sequence: Synthetic oligonucleotide
ucaggauuaaacuuaauuu

SEQ ID NO: 831250 - RNA, 19 nt, Artificial Sequence
  Description of Artificial Sequence: Synthetic oligonucleotide
ugaaugugacuccaaauug

SEQ ID NO: 831251 - RNA, 19 nt, Artificial Sequence
  Description of Artificial Sequence: Synthetic oligonucleotide
uuuccaaagacccuacaug

SEQ ID NO: 831252 - RNA, 19 nt, Artificial Sequence
  Description of Artificial Sequence: Synthetic oligonucleotide
uuuauucucucaaugucug

SEQ ID NO: 831253 - RNA, 19 nt, Artificial Sequence
  Description of Artificial Sequence: Synthetic oligonucleotide
uuugacaaggcauuuggca

SEQ ID NO: 831254 - RNA, 19 nt, Artificial Sequence
  Description of Artificial Sequence: Synthetic oligonucleotide
aaacacagcagcguuacuc

SEQ ID NO: 831255 - RNA, 19 nt, Artificial Sequence
  Description of Artificial Sequence: Synthetic oligonucleotide
caggaaguucauaugaugg

SEQ ID NO: 831256 - RNA, 19 nt, Artificial Sequence
  Description of Artificial Sequence: Synthetic oligonucleotide
ucuaucagccacaccaagg

SEQ ID NO: 831257 - RNA, 19 nt, Artificial Sequence
  Description of Artificial Sequence: Synthetic oligonucleotide
uguaucaggaaguucauau

SEQ ID NO: 831258 - RNA, 19 nt, Artificial Sequence
  Description of Artificial Sequence: Synthetic oligonucleotide
uguauagaaagucggccag

SEQ ID NO: 831259 - RNA, 19 nt, Artificial Sequence
  Description of Artificial Sequence: Synthetic oligonucleotide
uguucaguuguucuaaagu

SEQ ID NO: 831260 - RNA, 19 nt, Artificial Sequence
  Description of Artificial Sequence: Synthetic oligonucleotide
guugguaaagaucaucaag

SEQ ID NO: 831261 - RNA, 19 nt, Artificial Sequence
  Description of Artificial Sequence: Synthetic oligonucleotide
aaucuuuaguggauggggc

SEQ ID NO: 831262 - RNA, 19 nt, Artificial Sequence
  Description of Artificial Sequence: Synthetic oligonucleotide
uuuguuguugcucagccuc

SEQ ID NO: 831263 - RNA, 19 nt, Artificial Sequence
  Description of Artificial Sequence: Synthetic oligonucleotide
ucuaaaguauccuccagac

SEQ ID NO: 831264 - RNA, 19 nt, Artificial Sequence
  Description of Artificial Sequence: Synthetic oligonucleotide
ucuagaauggaugaaugug

SEQ ID NO: 831265 - RNA, 19 nt, Artificial Sequence
  Description of Artificial Sequence: Synthetic oligonucleotide
acacgcuacauacauuacc

SEQ ID NO: 831266 - RNA, 19 nt, Artificial Sequence
  Description of Artificial Sequence: Synthetic oligonucleotide
uuugagauguacauacacu

SEQ ID NO: 831267 - RNA, 19 nt, Artificial Sequence
  Description of Artificial Sequence: Synthetic oligonucleotide
aucaacaauauucuguagu

SEQ ID NO: 831268 - RNA, 19 nt, Artificial Sequence
  Description of Artificial Sequence: Synthetic oligonucleotide
aaagggauacccaaggucu

SEQ ID NO: 831269 - RNA, 19 nt, Artificial Sequence
  Description of Artificial Sequence: Synthetic oligonucleotide
uguauaauuccaucuucag

SEQ ID NO: 831270 - RNA, 19 nt, Artificial Sequence
  Description of Artificial Sequence: Synthetic oligonucleotide
uuaucaacaauauucugua

SEQ ID NO: 831271 - RNA, 19 nt, Artificial Sequence
  Description of Artificial Sequence: Synthetic oligonucleotide
ucuaccuuauacaaauccu

SEQ ID NO: 831272 - RNA, 19 nt, Artificial Sequence
  Description of Artificial Sequence: Synthetic oligonucleotide
auaucagacgguucgguuc

SEQ ID NO: 831273 - RNA, 19 nt, Artificial Sequence
  Description of Artificial Sequence: Synthetic oligonucleotide
uucaggauuaaacuuaauu

SEQ ID NO: 831274 - RNA, 19 nt, Artificial Sequence
  Description of Artificial Sequence: Synthetic oligonucleotide
gauuuauucucucaauguc

SEQ ID NO: 831275 - RNA, 19 nt, Artificial Sequence
  Description of Artificial Sequence: Synthetic oligonucleotide
uuucuagccaacuuguggu

SEQ ID NO: 831276 - RNA, 19 nt, Artificial Sequence
  Description of Artificial Sequence: Synthetic oligonucleotide
aaauuuuguaucaggaagu

SEQ ID NO: 831277 - RNA, 19 nt, Artificial Sequence
  Description of Artificial Sequence: Synthetic oligonucleotide
ucaacaauauucuguaguc

SEQ ID NO: 831278 - RNA, 19 nt, Artificial Sequence
  Description of Artificial Sequence: Synthetic oligonucleotide
ugaaucuugaugcagucua

SEQ ID NO: 831279 - RNA, 19 nt, Artificial Sequence
  Description of Artificial Sequence: Synthetic oligonucleotide
aaacucauagagcugucga

SEQ ID NO: 831280 - RNA, 19 nt, Artificial Sequence
  Description of Artificial Sequence: Synthetic oligonucleotide
aacaacuuauuauguauaa

SEQ ID NO: 831281 - RNA, 19 nt, Artificial Sequence
  Description of Artificial Sequence: Synthetic oligonucleotide
uauguauaauuccaucuuc

SEQ ID NO: 831282 - RNA, 19 nt, Artificial Sequence
  Description of Artificial Sequence: Synthetic oligonucleotide
ugcaacugaguacuucugg

SEQ ID NO: 831283 - RNA, 19 nt, Artificial Sequence
  Description of Artificial Sequence: Synthetic oligonucleotide
uuuugccgaauauugagac

SEQ ID NO: 831284 - RNA, 19 nt, Artificial Sequence
  Description of Artificial Sequence: Synthetic oligonucleotide
ugaccuuuggaauucucag

SEQ ID NO: 831285 - RNA, 19 nt, Artificial Sequence
  Description of Artificial Sequence: Synthetic oligonucleotide
auaccaaguugacuauucc

SEQ ID NO: 831286 - RNA, 19 nt, Artificial Sequence
  Description of Artificial Sequence: Synthetic oligonucleotide
uucuaaaguauccuccaga

SEQ ID NO: 831287 - RNA, 19 nt, Artificial Sequence
  Description of Artificial Sequence: Synthetic oligonucleotide
gaugcaucuaccuuauaca

SEQ ID NO: 831288 - RNA, 19 nt, Artificial Sequence
  Description of Artificial Sequence: Synthetic oligonucleotide
gaugcagucuaucagccac

SEQ ID NO: 831289 - RNA, 19 nt, Artificial Sequence
  Description of Artificial Sequence: Synthetic oligonucleotide
ugguacucugcuaacuggg

SEQ ID NO: 831290 - RNA, 19 nt, Artificial Sequence
  Description of Artificial Sequence: Synthetic oligonucleotide
ucaugaaacucucguagca

SEQ ID NO: 831291 - RNA, 19 nt, Artificial Sequence
  Description of Artificial Sequence: Synthetic oligonucleotide
aaguugguauucccgcugg

SEQ ID NO: 831292 - RNA, 19 nt, Artificial Sequence
  Description of Artificial Sequence: Synthetic oligonucleotide
ucucguagcauuuuauggu

SEQ ID NO: 831293 - RNA, 19 nt, Artificial Sequence
  Description of Artificial Sequence: Synthetic oligonucleotide
cuuuggaauucucagcacc

SEQ ID NO: 831294 - RNA, 19 nt, Artificial Sequence
  Description of Artificial Sequence: Synthetic oligonucleotide
uuuggaauucucagcaccu

SEQ ID NO: 831295 - RNA, 19 nt, Artificial Sequence
  Description of Artificial Sequence: Synthetic oligonucleotide
uugagauguacauacacuu

SEQ ID NO: 831296 - RNA, 19 nt, Artificial Sequence
  Description of Artificial Sequence: Synthetic oligonucleotide
aaagacccuacauguguag

SEQ ID NO: 831297 - RNA, 19 nt, Artificial Sequence
  Description of Artificial Sequence: Synthetic oligonucleotide
cuaucagccacaccaaggc

SEQ ID NO: 831298 - RNA, 19 nt, Artificial Sequence
  Description of Artificial Sequence: Synthetic oligonucleotide
ucugcacucucucugauau

SEQ ID NO: 831299 - RNA, 19 nt, Artificial Sequence
  Description of Artificial Sequence: Synthetic oligonucleotide
uauaccaaguugacuauuc

SEQ ID NO: 831300 - RNA, 19 nt, Artificial Sequence
  Description of Artificial Sequence: Synthetic oligonucleotide
cauuguaguucuaaucuac

SEQ ID NO: 831301 - RNA, 19 nt, Artificial Sequence
  Description of Artificial Sequence: Synthetic oligonucleotide
uucuggucuagaauggaug

SEQ ID NO: 831302 - RNA, 19 nt, Artificial Sequence
  Description of Artificial Sequence: Synthetic oligonucleotide
cuuugagauguacauacac

SEQ ID NO: 831303 - RNA, 19 nt, Artificial Sequence
  Description of Artificial Sequence: Synthetic oligonucleotide
uaucauuaaguggucuugg

SEQ ID NO: 831304 - RNA, 19 nt, Artificial Sequence
  Description of Artificial Sequence: Synthetic oligonucleotide
ugagauguacauacacuug

SEQ ID NO: 831305 - RNA, 19 nt, Artificial Sequence
  Description of Artificial Sequence: Synthetic oligonucleotide
uuuuccaaagacccuacau

SEQ ID NO: 831306 - RNA, 19 nt, Artificial Sequence
  Description of Artificial Sequence: Synthetic oligonucleotide
agcauuuuaugguguaguc

SEQ ID NO: 831307 - RNA, 19 nt, Artificial Sequence
  Description of Artificial Sequence: Synthetic oligonucleotide
accuuuggaauucucagca

SEQ ID NO: 831308 - RNA, 19 nt, Artificial Sequence
  Description of Artificial Sequence: Synthetic oligonucleotide
augaaugugacuccaaauu

SEQ ID NO: 831309 - RNA, 19 nt, Artificial Sequence
  Description of Artificial Sequence: Synthetic oligonucleotide
ucuggucuagaauggauga

SEQ ID NO: 831310 - RNA, 19 nt, Artificial Sequence
  Description of Artificial Sequence: Synthetic oligonucleotide
uuaauuuucuagccaacuu

SEQ ID NO: 831311 - RNA, 19 nt, Artificial Sequence
  Description of Artificial Sequence: Synthetic oligonucleotide
uaaaagacgcuguaaguua

SEQ ID NO: 831312 - RNA, 19 nt, Artificial Sequence
  Description of Artificial Sequence: Synthetic oligonucleotide
uuagcaaucuguucuucga

SEQ ID NO: 831313 - RNA, 19 nt, Artificial Sequence
  Description of Artificial Sequence: Synthetic oligonucleotide
gaaaucuuuaguggauggg

SEQ ID NO: 831314 - RNA, 19 nt, Artificial Sequence
  Description of Artificial Sequence: Synthetic oligonucleotide
aaauugcucauguaugcuu

SEQ ID NO: 831315 - RNA, 19 nt, Artificial Sequence
  Description of Artificial Sequence: Synthetic oligonucleotide
aaggcugccacaaugugug

SEQ ID NO: 831316 - RNA, 19 nt, Artificial Sequence
  Description of Artificial Sequence: Synthetic oligonucleotide
aagacccuacauguguagc

SEQ ID NO: 831317 - RNA, 19 nt, Artificial Sequence
  Description of Artificial Sequence: Synthetic oligonucleotide
caacaaguugguauucccg

SEQ ID NO: 831318 - RNA, 19 nt, Artificial Sequence
  Description of Artificial Sequence: Synthetic oligonucleotide
aagacugcauaucaucaaa

SEQ ID NO: 831319 - RNA, 19 nt, Artificial Sequence
  Description of Artificial Sequence: Synthetic oligonucleotide
uaagaaacucauagagcug

SEQ ID NO: 831320 - RNA, 19 nt, Artificial Sequence
  Description of Artificial Sequence: Synthetic oligonucleotide
uuaucauuaaguggucuug

SEQ ID NO: 831321 - RNA, 19 nt, Artificial Sequence
  Description of Artificial Sequence: Synthetic oligonucleotide
caaucuugcaaucuguuca

SEQ ID NO: 831322 - RNA, 19 nt, Artificial Sequence
  Description of Artificial Sequence: Synthetic oligonucleotide
uagaauggaugaaugugac

SEQ ID NO: 831323 - RNA, 19 nt, Artificial Sequence
  Description of Artificial Sequence: Synthetic oligonucleotide
ucuucagacauacaaucuu

SEQ ID NO: 831324 - RNA, 19 nt, Artificial Sequence
  Description of Artificial Sequence: Synthetic oligonucleotide
auacccaaggucuuuaaaa

SEQ ID NO: 831325 - RNA, 19 nt, Artificial Sequence
  Description of Artificial Sequence: Synthetic oligonucleotide
uucaguuguucuaaaguau

SEQ ID NO: 831326 - RNA, 19 nt, Artificial Sequence
  Description of Artificial Sequence: Synthetic oligonucleotide
uugcacaacaaguugguau

SEQ ID NO: 831327 - RNA, 19 nt, Artificial Sequence
  Description of Artificial Sequence: Synthetic oligonucleotide
ugguuugcacaacaaguug

SEQ ID NO: 831328 - RNA, 19 nt, Artificial Sequence
  Description of Artificial Sequence: Synthetic oligonucleotide
gcuaacugggcuucaaucg

SEQ ID NO: 831329 - RNA, 19 nt, Artificial Sequence
  Description of Artificial Sequence: Synthetic oligonucleotide
cuagaauggaugaauguga

SEQ ID NO: 831330 - RNA, 19 nt, Artificial Sequence
  Description of Artificial Sequence: Synthetic oligonucleotide
uguguagcaaccaucucua

SEQ ID NO: 831331 - RNA, 19 nt, Artificial Sequence
  Description of Artificial Sequence: Synthetic oligonucleotide
uuguauuugacaaggcauu

SEQ ID NO: 831332 - RNA, 19 nt, Artificial Sequence
  Description of Artificial Sequence: Synthetic oligonucleotide
uccuguauagaaagucggc

SEQ ID NO: 831333 - RNA, 19 nt, Artificial Sequence
  Description of Artificial Sequence: Synthetic oligonucleotide
gacuuaagcucacuggcac

SEQ ID NO: 831334 - RNA, 19 nt, Artificial Sequence
  Description of Artificial Sequence: Synthetic oligonucleotide
ucauagagcugucgaauac

SEQ ID NO: 831335 - RNA, 19 nt, Artificial Sequence
  Description of Artificial Sequence: Synthetic oligonucleotide
ucauuaaguggucuuggau

SEQ ID NO: 831336 - RNA, 19 nt, Artificial Sequence
  Description of Artificial Sequence: Synthetic oligonucleotide
uucaucaagaccacucaau

SEQ ID NO: 831337 - RNA, 19 nt, Artificial Sequence
  Description of Artificial Sequence: Synthetic oligonucleotide
gauguagguuuguuugugc

SEQ ID NO: 831338 - RNA, 19 nt, Artificial Sequence
  Description of Artificial Sequence: Synthetic oligonucleotide
ucccacuguauacauggag

SEQ ID NO: 831339 - RNA, 19 nt, Artificial Sequence
  Description of Artificial Sequence: Synthetic oligonucleotide
ugguaaagaucaucaagcu

SEQ ID NO: 831340 - RNA, 19 nt, Artificial Sequence
  Description of Artificial Sequence: Synthetic oligonucleotide
cuaacugggcuucaaucgc

SEQ ID NO: 831341 - RNA, 19 nt, Artificial Sequence
  Description of Artificial Sequence: Synthetic oligonucleotide
auuuauucucucaaugucu

SEQ ID NO: 831342 - RNA, 19 nt, Artificial Sequence
  Description of Artificial Sequence: Synthetic oligonucleotide
aaugugacuccaaauugcu

SEQ ID NO: 831343 - RNA, 19 nt, Artificial Sequence
  Description of Artificial Sequence: Synthetic oligonucleotide
uaucagacgguucgguucu

SEQ ID NO: 831344 - RNA, 19 nt, Artificial Sequence
  Description of Artificial Sequence: Synthetic oligonucleotide
uacaaauccuucagcuuug

SEQ ID NO: 831345 - RNA, 19 nt, Artificial Sequence
  Description of Artificial Sequence: Synthetic oligonucleotide
ggcacaggaagccauaaag

SEQ ID NO: 831346 - RNA, 19 nt, Artificial Sequence
  Description of Artificial Sequence: Synthetic oligonucleotide
uguugcucagccucuaggu

SEQ ID NO: 831347 - RNA, 19 nt, Artificial Sequence
  Description of Artificial Sequence: Synthetic oligonucleotide
uacauguguagcaaccauc

SEQ ID NO: 831348 - RNA, 19 nt, Artificial Sequence
  Description of Artificial Sequence: Synthetic oligonucleotide
acuugugguacucugcuaa

SEQ ID NO: 831349 - RNA, 19 nt, Artificial Sequence
  Description of Artificial Sequence: Synthetic oligonucleotide
uaucaacaauauucuguag

SEQ ID NO: 831350 - RNA, 19 nt, Artificial Sequence
  Description of Artificial Sequence: Synthetic oligonucleotide
ucaagaccacucaauuucu

SEQ ID NO: 831351 - RNA, 19 nt, Artificial Sequence
  Description of Artificial Sequence: Synthetic oligonucleotide
uaccaaguugacuauuccu

SEQ ID NO: 831352 - RNA, 19 nt, Artificial Sequence
  Description of Artificial Sequence: Synthetic oligonucleotide
uaguggauggggcuugcag

SEQ ID NO: 831353 - RNA, 19 nt, Artificial Sequence
  Description of Artificial Sequence: Synthetic oligonucleotide
accuuauacaaauccuuca

SEQ ID NO: 831354 - RNA, 19 nt, Artificial Sequence
  Description of Artificial Sequence: Synthetic oligonucleotide
cuucaaucgccucuuugcc

SEQ ID NO: 831355 - RNA, 19 nt, Artificial Sequence
  Description of Artificial Sequence: Synthetic oligonucleotide
ucaaucgccucuuugccuc

SEQ ID NO: 831356 - RNA, 19 nt, Artificial Sequence
  Description of Artificial Sequence: Synthetic oligonucleotide
acuccuguauagaaagucg

SEQ ID NO: 831357 - RNA, 19 nt, Artificial Sequence
  Description of Artificial Sequence: Synthetic oligonucleotide
aggugaauuuucuuucaug

SEQ ID NO: 831358 - RNA, 19 nt, Artificial Sequence
  Description of Artificial Sequence: Synthetic oligonucleotide
acaauguguggccagguau

SEQ ID NO: 831359 - RNA, 19 nt, Artificial Sequence
  Description of Artificial Sequence: Synthetic oligonucleotide
caacaauauucuguagucg

SEQ ID NO: 831360 - RNA, 19 nt, Artificial Sequence
  Description of Artificial Sequence: Synthetic oligonucleotide
acaucugcuugcaaggagg

SEQ ID NO: 831361 - RNA, 19 nt, Artificial Sequence
  Description of Artificial Sequence: Synthetic oligonucleotide
auuugacaaggcauuuggc

SEQ ID NO: 831362 - RNA, 19 nt, Artificial Sequence
  Description of Artificial Sequence: Synthetic oligonucleotide
cucguagcauuuuauggug

SEQ ID NO: 831363 - RNA, 19 nt, Artificial Sequence
  Description of Artificial Sequence: Synthetic oligonucleotide
uuccucauuccacauuugu

SEQ ID NO: 831364 - RNA, 19 nt, Artificial Sequence
  Description of Artificial Sequence: Synthetic oligonucleotide
gguuugaggggugugaagg

SEQ ID NO: 831365 - RNA, 19 nt, Artificial Sequence
  Description of Artificial Sequence: Synthetic oligonucleotide
acucucguagcauuuuaug

SEQ ID NO: 831366 - RNA, 19 nt, Artificial Sequence
  Description of Artificial Sequence: Synthetic oligonucleotide
auuguuucacauuguaguu

SEQ ID NO: 831367 - RNA, 19 nt, Artificial Sequence
  Description of Artificial Sequence: Synthetic oligonucleotide
cuaaaguauccuccagacc

SEQ ID NO: 831368 - RNA, 19 nt, Artificial Sequence
  Description of Artificial Sequence: Synthetic oligonucleotide
ggaugcaucuaccuuauac

SEQ ID NO: 831369 - RNA, 19 nt, Artificial Sequence
  Description of Artificial Sequence: Synthetic oligonucleotide
cugucgaauacauugcuga

SEQ ID NO: 831370 - RNA, 19 nt, Artificial Sequence
  Description of Artificial Sequence: Synthetic oligonucleotide
accaaguugacuauuccug

SEQ ID NO: 831371 - RNA, 19 nt, Artificial Sequence
  Description of Artificial Sequence: Synthetic oligonucleotide
ggcagcaugaaucuugaug

SEQ ID NO: 831372 - RNA, 19 nt, Artificial Sequence
  Description of Artificial Sequence: Synthetic oligonucleotide
gguuugcacaacaaguugg

SEQ ID NO: 831373 - RNA, 19 nt, Artificial Sequence
  Description of Artificial Sequence: Synthetic oligonucleotide
guuaucaacaauauucugu

SEQ ID NO: 831374 - RNA, 19 nt, Artificial Sequence
  Description of Artificial Sequence: Synthetic oligonucleotide
aguggauggggcuugcaga

SEQ ID NO: 831375 - RNA, 19 nt, Artificial Sequence
  Description of Artificial Sequence: Synthetic oligonucleotide
agacgcuguaaguuauuuc

SEQ ID NO: 831376 - RNA, 19 nt, Artificial Sequence
  Description of Artificial Sequence: Synthetic oligonucleotide
cacgcuacauacauuacca

SEQ ID NO: 831377 - RNA, 19 nt, Artificial Sequence
  Description of Artificial Sequence: Synthetic oligonucleotide
gucaugaaacucucguagc

SEQ ID NO: 831378 - RNA, 19 nt, Artificial Sequence
  Description of Artificial Sequence: Synthetic oligonucleotide
ugcuaacugggcuucaauc

SEQ ID NO: 831379 - RNA, 19 nt, Artificial Sequence
  Description of Artificial Sequence: Synthetic oligonucleotide
ucaaugauaucagacgguu

SEQ ID NO: 831380 - RNA, 19 nt, Artificial Sequence
  Description of Artificial Sequence: Synthetic oligonucleotide
aaugaacccuuuaucauua

SEQ ID NO: 831381 - RNA, 19 nt, Artificial Sequence
  Description of Artificial Sequence: Synthetic oligonucleotide
agaguucuuugagauguac

SEQ ID NO: 831382 - RNA, 19 nt, Artificial Sequence
  Description of Artificial Sequence: Synthetic oligonucleotide
uccgcuagucccuuuugcc

SEQ ID NO: 831383 - RNA, 19 nt, Artificial Sequence
  Description of Artificial Sequence: Synthetic oligonucleotide
auuuuguaucaggaaguuc

SEQ ID NO: 831384 - RNA, 19 nt, Artificial Sequence
  Description of Artificial Sequence: Synthetic oligonucleotide
caauguguggccagguaug

SEQ ID NO: 831385 - RNA, 19 nt, Artificial Sequence
  Description of Artificial Sequence: Synthetic oligonucleotide
aaacaacuuauuauguaua

SEQ ID NO: 831386 - RNA, 19 nt, Artificial Sequence
  Description of Artificial Sequence: Synthetic oligonucleotide
uugccgaauauugagacuu

SEQ ID NO: 831387 - RNA, 19 nt, Artificial Sequence
  Description of Artificial Sequence: Synthetic oligonucleotide
cacauuguaguucuaaucu

SEQ ID NO: 831388 - RNA, 19 nt, Artificial Sequence
  Description of Artificial Sequence: Synthetic oligonucleotide
uuaauggucugcugcaauu

SEQ ID NO: 831389 - RNA, 19 nt, Artificial Sequence
  Description of Artificial Sequence: Synthetic oligonucleotide
uguagguuuguuugugcuc

SEQ ID NO: 831390 - RNA, 19 nt, Artificial Sequence
  Description of Artificial Sequence: Synthetic oligonucleotide
gcuucaaucgccucuuugc

SEQ ID NO: 831391 - RNA, 19 nt, Artificial Sequence
  Description of Artificial Sequence: Synthetic oligonucleotide
ugcaucuaccuuauacaaa

SEQ ID NO: 831392 - RNA, 19 nt, Artificial Sequence
  Description of Artificial Sequence: Synthetic oligonucleotide
gcucauguaugcuuuauac

SEQ ID NO: 831393 - RNA, 19 nt, Artificial Sequence
  Description of Artificial Sequence: Synthetic oligonucleotide
acauguguagcaaccaucu

SEQ ID NO: 831394 - RNA, 19 nt, Artificial Sequence
  Description of Artificial Sequence: Synthetic oligonucleotide
aaggcauuuggcaccagcu

SEQ ID NO: 831395 - RNA, 19 nt, Artificial Sequence
  Description of Artificial Sequence: Synthetic oligonucleotide
cuguauagaaagucggcca

SEQ ID NO: 831396 - RNA, 19 nt, Artificial Sequence
  Description of Artificial Sequence: Synthetic oligonucleotide
agguaugaggggcucccac

SEQ ID NO: 831397 - RNA, 19 nt, Artificial Sequence
  Description of Artificial Sequence: Synthetic oligonucleotide
uggucuuggauccuugauu

SEQ ID NO: 831398 - RNA, 19 nt, Artificial Sequence
  Description of Artificial Sequence: Synthetic oligonucleotide
uucauggacacgcuacaua

SEQ ID NO: 831399 - RNA, 19 nt, Artificial Sequence
  Description of Artificial Sequence: Synthetic oligonucleotide
uagucgaguguucuccugu

SEQ ID NO: 831400 - RNA, 19 nt, Artificial Sequence
  Description of Artificial Sequence: Synthetic oligonucleotide
cuuaagcucacuggcacac

SEQ ID NO: 831401 - RNA, 19 nt, Artificial Sequence
  Description of Artificial Sequence: Synthetic oligonucleotide
ucuugggaucucuucuuca

SEQ ID NO: 831402 - RNA, 19 nt, Artificial Sequence
  Description of Artificial Sequence: Synthetic oligonucleotide
agacccuacauguguagca

SEQ ID NO: 831403 - RNA, 19 nt, Artificial Sequence
  Description of Artificial Sequence: Synthetic oligonucleotide
uucaaucgccucuuugccu

SEQ ID NO: 831404 - RNA, 19 nt, Artificial Sequence
  Description of Artificial Sequence: Synthetic oligonucleotide
uugagccuuguauuugaca

SEQ ID NO: 831405 - RNA, 19 nt, Artificial Sequence
  Description of Artificial Sequence: Synthetic oligonucleotide
uguuagcuuuagcaaucug

SEQ ID NO: 831406 - RNA, 19 nt, Artificial Sequence
  Description of Artificial Sequence: Synthetic oligonucleotide
uuugccgaauauugagacu

SEQ ID NO: 831407 - RNA, 19 nt, Artificial Sequence
  Description of Artificial Sequence: Synthetic oligonucleotide
agcguuacucuuauacuuc

SEQ ID NO: 831408 - RNA, 19 nt, Artificial Sequence
  Description of Artificial Sequence: Synthetic oligonucleotide
cuguagucgaguguucucc

SEQ ID NO: 831409 - RNA, 19 nt, Artificial Sequence
  Description of Artificial Sequence: Synthetic oligonucleotide
aucauuaaguggucuugga

SEQ ID NO: 831410 - RNA, 19 nt, Artificial Sequence
  Description of Artificial Sequence: Synthetic oligonucleotide
aauugcucauguaugcuuu

SEQ ID NO: 831411 - RNA, 19 nt, Artificial Sequence
  Description of Artificial Sequence: Synthetic oligonucleotide
agucaugaccuuuggaauu

SEQ ID NO: 831412 - RNA, 19 nt, Artificial Sequence
  Description of Artificial Sequence: Synthetic oligonucleotide
cuuauacuucucugcacuc

SEQ ID NO: 831413 - RNA, 19 nt, Artificial Sequence
  Description of Artificial Sequence: Synthetic oligonucleotide
guagguuuguuugugcuca

SEQ ID NO: 831414 - RNA, 19 nt, Artificial Sequence
  Description of Artificial Sequence: Synthetic oligonucleotide
agccauaaagaaaaggcaa

SEQ ID NO: 831415 - RNA, 19 nt, Artificial Sequence
  Description of Artificial Sequence: Synthetic oligonucleotide
acaaguugguauucccgcu

SEQ ID NO: 831416 - RNA, 19 nt, Artificial Sequence
  Description of Artificial Sequence: Synthetic oligonucleotide
uccacauuuguuguugcuc

SEQ ID NO: 831417 - RNA, 19 nt, Artificial Sequence
  Description of Artificial Sequence: Synthetic oligonucleotide
agucgaguguucuccuguc

SEQ ID NO: 831418 - RNA, 19 nt, Artificial Sequence
  Description of Artificial Sequence: Synthetic oligonucleotide
aauguguggccagguauga

SEQ ID NO: 831419 - RNA, 19 nt, Artificial Sequence
  Description of Artificial Sequence: Synthetic oligonucleotide
caucugcuugcaaggaggc

SEQ ID NO: 831420 - RNA, 19 nt, Artificial Sequence
  Description of Artificial Sequence: Synthetic oligonucleotide
cuuuugccgaauauugaga

SEQ ID NO: 831421 - RNA, 19 nt, Artificial Sequence
  Description of Artificial Sequence: Synthetic oligonucleotide
cucuuauacuucucugcac

SEQ ID NO: 831422 - RNA, 19 nt, Artificial Sequence
  Description of Artificial Sequence: Synthetic oligonucleotide
ggaaguucauaugaugggc

SEQ ID NO: 831423 - RNA, 19 nt, Artificial Sequence
  Description of Artificial Sequence: Synthetic oligonucleotide
uaguucuaaucuaccaauu

SEQ ID NO: 831424 - RNA, 19 nt, Artificial Sequence
  Description of Artificial Sequence: Synthetic oligonucleotide
ugcacucucucugauauuu

SEQ ID NO: 831425 - RNA, 19 nt, Artificial Sequence
  Description of Artificial Sequence: Synthetic oligonucleotide
ugucgaauacauugcugaa

SEQ ID NO: 831426 - RNA, 19 nt, Artificial Sequence
  Description of Artificial Sequence: Synthetic oligonucleotide
agauguagguuuguuugug

SEQ ID NO: 831427 - RNA, 19 nt, Artificial Sequence
  Description of Artificial Sequence: Synthetic oligonucleotide
cccacuguauacauggagc

SEQ ID NO: 831428 - RNA, 19 nt, Artificial Sequence
  Description of Artificial Sequence: Synthetic oligonucleotide
acccuacauguguagcaac

SEQ ID NO: 831429 - RNA, 19 nt, Artificial Sequence
  Description of Artificial Sequence: Synthetic oligonucleotide
ucguagcauuuuauggugu

SEQ ID NO: 831430 - RNA, 19 nt, Artificial Sequence
  Description of Artificial Sequence: Synthetic oligonucleotide
uggucuagaauggaugaau

SEQ ID NO: 831431 - RNA, 19 nt, Artificial Sequence
  Description of Artificial Sequence: Synthetic oligonucleotide
cauaugaugggcacaggaa

SEQ ID NO: 831432 - RNA, 19 nt, Artificial Sequence
  Description of Artificial Sequence: Synthetic oligonucleotide
uccaaucuugcaaucuguu

SEQ ID NO: 831433 - RNA, 19 nt, Artificial Sequence
  Description of Artificial Sequence: Synthetic oligonucleotide
uuuuaugguguaguccaaa

SEQ ID NO: 831434 - RNA, 19 nt, Artificial Sequence
  Description of Artificial Sequence: Synthetic oligonucleotide
uuauugagguccagcggau

SEQ ID NO: 831435 - RNA, 19 nt, Artificial Sequence
  Description of Artificial Sequence: Synthetic oligonucleotide
augauaucagacgguucgg

SEQ ID NO: 831436 - RNA, 19 nt, Artificial Sequence
  Description of Artificial Sequence: Synthetic oligonucleotide
gacugcauaucaucaaaua

SEQ ID NO: 831437 - RNA, 19 nt, Artificial Sequence
  Description of Artificial Sequence: Synthetic oligonucleotide
ucucuaaaagacgcuguaa

SEQ ID NO: 831438 - RNA, 19 nt, Artificial Sequence
  Description of Artificial Sequence: Synthetic oligonucleotide
ugaguacuucugguuauca

SEQ ID NO: 831439 - RNA, 19 nt, Artificial Sequence
  Description of Artificial Sequence: Synthetic oligonucleotide
uugacuauuccuggaucca

SEQ ID NO: 831440 - RNA, 19 nt, Artificial Sequence
  Description of Artificial Sequence: Synthetic oligonucleotide
uaagcucacuggcacacuu

SEQ ID NO: 831441 - RNA, 19 nt, Artificial Sequence
  Description of Artificial Sequence: Synthetic oligonucleotide
agcugucgaauacauugcu

SEQ ID NO: 831442 - RNA, 19 nt, Artificial Sequence
  Description of Artificial Sequence: Synthetic oligonucleotide
guauuugacaaggcauuug

SEQ ID NO: 831443 - RNA, 19 nt, Artificial Sequence
  Description of Artificial Sequence: Synthetic oligonucleotide
acuuaagcucacuggcaca

SEQ ID NO: 831444 - RNA, 19 nt, Artificial Sequence
  Description of Artificial Sequence: Synthetic oligonucleotide
ugauaucagacgguucggu

SEQ ID NO: 831445 - RNA, 19 nt, Artificial Sequence
  Description of Artificial Sequence: Synthetic oligonucleotide
uaauuccucauuccacauu

SEQ ID NO: 831446 - RNA, 19 nt, Artificial Sequence
  Description of Artificial Sequence: Synthetic oligonucleotide
uuguuguugcucagccucu

SEQ ID NO: 831447 - RNA, 19 nt, Artificial Sequence
  Description of Artificial Sequence: Synthetic oligonucleotide
aucucuaaaagacgcugua

SEQ ID NO: 831448 - RNA, 19 nt, Artificial Sequence
  Description of Artificial Sequence: Synthetic oligonucleotide
uccauguccgcuagucccu

SEQ ID NO: 831449 - RNA, 19 nt, Artificial Sequence
  Description of Artificial Sequence: Synthetic oligonucleotide
ugguuugaggggugugaag

SEQ ID NO: 831450 - RNA, 19 nt, Artificial Sequence
  Description of Artificial Sequence: Synthetic oligonucleotide
guaguucuaaucuaccaau

SEQ ID NO: 831451 - RNA, 19 nt, Artificial Sequence
  Description of Artificial Sequence: Synthetic oligonucleotide
uguauuugacaaggcauuu

SEQ ID NO: 831452 - RNA, 19 nt, Artificial Sequence
  Description of Artificial Sequence: Synthetic oligonucleotide
ucuagccaacuugugguac

SEQ ID NO: 831453 - RNA, 19 nt, Artificial Sequence
  Description of Artificial Sequence: Synthetic oligonucleotide
gucuaucagccacaccaag

SEQ ID NO: 831454 - RNA, 19 nt, Artificial Sequence
  Description of Artificial Sequence: Synthetic oligonucleotide
gaaugaacccuuuaucauu

SEQ ID NO: 831455 - RNA, 19 nt, Artificial Sequence
  Description of Artificial Sequence: Synthetic oligonucleotide
ucgaguguucuccugucuu

SEQ ID NO: 831456 - RNA, 19 nt, Artificial Sequence
  Description of Artificial Sequence: Synthetic oligonucleotide
ucuguagucgaguguucuc

SEQ ID NO: 831457 - RNA, 19 nt, Artificial Sequence
  Description of Artificial Sequence: Synthetic oligonucleotide
gacuauuccuggauccaug

SEQ ID NO: 831458 - RNA, 19 nt, Artificial Sequence
  Description of Artificial Sequence: Synthetic oligonucleotide
gagcugucgaauacauugc

SEQ ID NO: 831459 - RNA, 19 nt, Artificial Sequence
  Description of Artificial Sequence: Synthetic oligonucleotide
uauuaauggucugcugcaa

SEQ ID NO: 831460 - RNA, 19 nt, Artificial Sequence
  Description of Artificial Sequence: Synthetic oligonucleotide
aagacgcuguaaguuauuu

SEQ ID NO: 831461 - RNA, 19 nt, Artificial Sequence
  Description of Artificial Sequence: Synthetic oligonucleotide
ccuguauagaaagucggcc

SEQ ID NO: 831462 - RNA, 19 nt, Artificial Sequence
  Description of Artificial Sequence: Synthetic oligonucleotide
agguuuguuugugcucagc

SEQ ID NO: 831463 - RNA, 19 nt, Artificial Sequence
  Description of Artificial Sequence: Synthetic oligonucleotide
uucugcugcuaaugacucc

SEQ ID NO: 831464 - RNA, 19 nt, Artificial Sequence
  Description of Artificial Sequence: Synthetic oligonucleotide
cagggacuuaagcucacug

SEQ ID NO: 831465 - RNA, 19 nt, Artificial Sequence
  Description of Artificial Sequence: Synthetic oligonucleotide
cucugauauuuuccaggag

SEQ ID NO: 831466 - RNA, 19 nt, Artificial Sequence
  Description of Artificial Sequence: Synthetic oligonucleotide
agcuucaggauuaaacuua

SEQ ID NO: 831467 - RNA, 19 nt, Artificial Sequence
  Description of Artificial Sequence: Synthetic oligonucleotide
uguccgcuagucccuuuug

SEQ ID NO: 831468 - RNA, 19 nt, Artificial Sequence
  Description of Artificial Sequence: Synthetic oligonucleotide
ugcuccaaucuugcaaucu

SEQ ID NO: 831469 - RNA, 19 nt, Artificial Sequence
  Description of Artificial Sequence: Synthetic oligonucleotide
auggaugaaugugacucca

SEQ ID NO: 831470 - RNA, 19 nt, Artificial Sequence
  Description of Artificial Sequence: Synthetic oligonucleotide
gcuaaugacuccagcuugg

SEQ ID NO: 831471 - RNA, 19 nt, Artificial Sequence
  Description of Artificial Sequence: Synthetic oligonucleotide
cuugagccuuguauuugac

SEQ ID NO: 831472 - RNA, 19 nt, Artificial Sequence
  Description of Artificial Sequence: Synthetic oligonucleotide
ucuuuaguggauggggcuu

SEQ ID NO: 831473 - RNA, 19 nt, Artificial Sequence
  Description of Artificial Sequence: Synthetic oligonucleotide
cuuaaacacagcagcguua

SEQ ID NO: 831474 - RNA, 19 nt, Artificial Sequence
  Description of Artificial Sequence: Synthetic oligonucleotide
aacuugugguacucugcua

SEQ ID NO: 831475 - RNA, 19 nt, Artificial Sequence
  Description of Artificial Sequence: Synthetic oligonucleotide
uggaugaaugugacuccaa

SEQ ID NO: 831476 - RNA, 19 nt, Artificial Sequence
  Description of Artificial Sequence: Synthetic oligonucleotide
agcggaucuuaacuccugu

SEQ ID NO: 831477 - RNA, 19 nt, Artificial Sequence
  Description of Artificial Sequence: Synthetic oligonucleotide
uguauacauggagcucuug

SEQ ID NO: 831478 - RNA, 19 nt, Artificial Sequence
  Description of Artificial Sequence: Synthetic oligonucleotide
cuuuaguggauggggcuug

SEQ ID NO: 831479 - RNA, 19 nt, Artificial Sequence
  Description of Artificial Sequence: Synthetic oligonucleotide
ggucuagaauggaugaaug

SEQ ID NO: 831480 - RNA, 19 nt, Artificial Sequence
  Description of Artificial Sequence: Synthetic oligonucleotide
agucccuuuugccgaauau

SEQ ID NO: 831481 - RNA, 19 nt, Artificial Sequence
  Description of Artificial Sequence: Synthetic oligonucleotide
uucuagccaacuuguggua

SEQ ID NO: 831482 - RNA, 19 nt, Artificial Sequence
  Description of Artificial Sequence: Synthetic oligonucleotide
ucaagcuuuugaaccucuu

SEQ ID NO: 831483 - RNA, 19 nt, Artificial Sequence
  Description of Artificial Sequence: Synthetic oligonucleotide
ggacagagcaaagggauac

SEQ ID NO: 831484 - RNA, 19 nt, Artificial Sequence
  Description of Artificial Sequence: Synthetic oligonucleotide
cugcaacugaguacuucug

SEQ ID NO: 831485 - RNA, 19 nt, Artificial Sequence
  Description of Artificial Sequence: Synthetic oligonucleotide
gggagccuuaaacacagca

SEQ ID NO: 831486 - RNA, 19 nt, Artificial Sequence
  Description of Artificial Sequence: Synthetic oligonucleotide
gucaugaccuuuggaauuc

SEQ ID NO: 831487 - RNA, 19 nt, Artificial Sequence
  Description of Artificial Sequence: Synthetic oligonucleotide
uuuaguggauggggcuugc

SEQ ID NO: 831488 - RNA, 19 nt, Artificial Sequence
  Description of Artificial Sequence: Synthetic oligonucleotide
ccagcuuggaugcaucuac

SEQ ID NO: 831489 - RNA, 19 nt, Artificial Sequence
  Description of Artificial Sequence: Synthetic oligonucleotide
guccagcggaucuuaacuc

SEQ ID NO: 831490 - RNA, 19 nt, Artificial Sequence
  Description of Artificial Sequence: Synthetic oligonucleotide
ucuaggucuuugguuaauu

SEQ ID NO: 831491 - RNA, 19 nt, Artificial Sequence
  Description of Artificial Sequence: Synthetic oligonucleotide
gucuagaauggaugaaugu

SEQ ID NO: 831492 - RNA, 19 nt, Artificial Sequence
  Description of Artificial Sequence: Synthetic oligonucleotide
aucgccucuuugccucugg

SEQ ID NO: 831493 - RNA, 19 nt, Artificial Sequence
  Description of Artificial Sequence: Synthetic oligonucleotide
uuucuagauguagguuugu

SEQ ID NO: 831494 - RNA, 19 nt, Artificial Sequence
  Description of Artificial Sequence: Synthetic oligonucleotide
guccgcuagucccuuuugc

SEQ ID NO: 831495 - RNA, 19 nt, Artificial Sequence
  Description of Artificial Sequence: Synthetic oligonucleotide
ugcagucuaucagccacac

SEQ ID NO: 831496 - RNA, 19 nt, Artificial Sequence
  Description of Artificial Sequence: Synthetic oligonucleotide
ugacuauuccuggauccau

SEQ ID NO: 831497 - RNA, 19 nt, Artificial Sequence
  Description of Artificial Sequence: Synthetic oligonucleotide
caugaccuuuggaauucuc

SEQ ID NO: 831498 - RNA, 19 nt, Artificial Sequence
  Description of Artificial Sequence: Synthetic oligonucleotide
uugcugaaugaacccuuua

SEQ ID NO: 831499 - RNA, 19 nt, Artificial Sequence
  Description of Artificial Sequence: Synthetic oligonucleotide
agccucuaggucuuugguu

SEQ ID NO: 831500 - RNA, 19 nt, Artificial Sequence
  Description of Artificial Sequence: Synthetic oligonucleotide
cuaccuuauacaaauccuu

SEQ ID NO: 831501 - RNA, 19 nt, Artificial Sequence
  Description of Artificial Sequence: Synthetic oligonucleotide
gauaucagacgguucgguu

SEQ ID NO: 831502 - RNA, 19 nt, Artificial Sequence
  Description of Artificial Sequence: Synthetic oligonucleotide
uuugcacaacaaguuggua

SEQ ID NO: 831503 - RNA, 19 nt, Artificial Sequence
  Description of Artificial Sequence: Synthetic oligonucleotide
cuucaucaagaccacucaa

SEQ ID NO: 831504 - RNA, 19 nt, Artificial Sequence
  Description of Artificial Sequence: Synthetic oligonucleotide
aggucuucagacauacaau

SEQ ID NO: 831505 - RNA, 19 nt, Artificial Sequence
  Description of Artificial Sequence: Synthetic oligonucleotide
aaguggucuuggauccuug

SEQ ID NO: 831506 - RNA, 19 nt, Artificial Sequence
  Description of Artificial Sequence: Synthetic oligonucleotide
gacaaggcauuuggcacca

SEQ ID NO: 831507 - RNA, 19 nt, Artificial Sequence
  Description of Artificial Sequence: Synthetic oligonucleotide
auugcucauguaugcuuua

SEQ ID NO: 831508 - RNA, 19 nt, Artificial Sequence
  Description of Artificial Sequence: Synthetic oligonucleotide
agacugcauaucaucaaau

SEQ ID NO: 831509 - RNA, 19 nt, Artificial Sequence
  Description of Artificial Sequence: Synthetic oligonucleotide
aguugguauucccgcugga

SEQ ID NO: 831510 - RNA, 19 nt, Artificial Sequence
  Description of Artificial Sequence: Synthetic oligonucleotide
acggaggccuuccuucacu

SEQ ID NO: 831511 - RNA, 19 nt, Artificial Sequence
  Description of Artificial Sequence: Synthetic oligonucleotide
caugauuuauucucucaau

SEQ ID NO: 831512 - RNA, 19 nt, Artificial Sequence
  Description of Artificial Sequence: Synthetic oligonucleotide
uccagggacuuaagcucac

SEQ ID NO: 831513 - RNA, 19 nt, Artificial Sequence
  Description of Artificial Sequence: Synthetic oligonucleotide
acuccaaauugcucaugua

SEQ ID NO: 831514 - RNA, 19 nt, Artificial Sequence
  Description of Artificial Sequence: Synthetic oligonucleotide
ccgcuagucccuuuugccg

SEQ ID NO: 831515 - RNA, 19 nt, Artificial Sequence
  Description of Artificial Sequence: Synthetic oligonucleotide
auauaccaaguugacuauu

SEQ ID NO: 831516 - RNA, 19 nt, Artificial Sequence
  Description of Artificial Sequence: Synthetic oligonucleotide
caaagacccuacaugugua

SEQ ID NO: 831517 - RNA, 19 nt, Artificial Sequence
  Description of Artificial Sequence: Synthetic oligonucleotide
agacuucauggacacgcua

SEQ ID NO: 831518 - RNA, 19 nt, Artificial Sequence
  Description of Artificial Sequence: Synthetic oligonucleotide
ccgaauauugagacuuuuc

SEQ ID NO: 831519 - RNA, 19 nt, Artificial Sequence
  Description of Artificial Sequence: Synthetic oligonucleotide
gacacgcuacauacauuac

SEQ ID NO: 831520 - RNA, 19 nt, Artificial Sequence
  Description of Artificial Sequence: Synthetic oligonucleotide
acgcuacauacauuaccau

SEQ ID NO: 831521 - RNA, 19 nt, Artificial Sequence
  Description of Artificial Sequence: Synthetic oligonucleotide
uuaagcucacuggcacacu

SEQ ID NO: 831522 - RNA, 19 nt, Artificial Sequence
  Description of Artificial Sequence: Synthetic oligonucleotide
agccccggucaugaaacuc

SEQ ID NO: 831523 - RNA, 19 nt, Artificial Sequence
  Description of Artificial Sequence: Synthetic oligonucleotide
accaucucuaaaagacgcu

SEQ ID NO: 831524 - RNA, 19 nt, Artificial Sequence
  Description of Artificial Sequence: Synthetic oligonucleotide
gccucuaggucuuugguua

SEQ ID NO: 831525 - RNA, 19 nt, Artificial Sequence
  Description of Artificial Sequence: Synthetic oligonucleotide
ggugugaaggccugguuua

SEQ ID NO: 831526 - RNA, 19 nt, Artificial Sequence
  Description of Artificial Sequence: Synthetic oligonucleotide
aaagacgcuguaaguuauu

SEQ ID NO: 831527 - RNA, 19 nt, Artificial Sequence
  Description of Artificial Sequence: Synthetic oligonucleotide
ucaugaccuuuggaauucu

SEQ ID NO: 831528 - RNA, 19 nt, Artificial Sequence
  Description of Artificial Sequence: Synthetic oligonucleotide
gacccuacauguguagcaa

SEQ ID NO: 831529 - RNA, 19 nt, Artificial Sequence
  Description of Artificial Sequence: Synthetic oligonucleotide
uugcucauguaugcuuuau

SEQ ID NO: 831530 - RNA, 19 nt, Artificial Sequence
  Description of Artificial Sequence: Synthetic oligonucleotide
uagucccuuuugccgaaua

SEQ ID NO: 831531 - RNA, 19 nt, Artificial Sequence
  Description of Artificial Sequence: Synthetic oligonucleotide
cagcggaucuuaacuccug

SEQ ID NO: 831532 - RNA, 19 nt, Artificial Sequence
  Description of Artificial Sequence: Synthetic oligonucleotide
ugccgaauauugagacuuu

SEQ ID NO: 831533 - RNA, 19 nt, Artificial Sequence
  Description of Artificial Sequence: Synthetic oligonucleotide
ggauccauguccgcuaguc

SEQ ID NO: 831534 - RNA, 19 nt, Artificial Sequence
  Description of Artificial Sequence: Synthetic oligonucleotide
guuugcacaacaaguuggu

SEQ ID NO: 831535 - RNA, 19 nt, Artificial Sequence
  Description of Artificial Sequence: Synthetic oligonucleotide
aaucgccucuuugccucug

SEQ ID NO: 831536 - RNA, 19 nt, Artificial Sequence
  Description of Artificial Sequence: Synthetic oligonucleotide
auguccgcuagucccuuuu

SEQ ID NO: 831537 - RNA, 19 nt, Artificial Sequence
  Description of Artificial Sequence: Synthetic oligonucleotide
cuuuaucauuaaguggucu

SEQ ID NO: 831538 - RNA, 19 nt, Artificial Sequence
  Description of Artificial Sequence: Synthetic oligonucleotide
gcugucgaauacauugcug

SEQ ID NO: 831539 - RNA, 19 nt, Artificial Sequence
  Description of Artificial Sequence: Synthetic oligonucleotide
uagccaacuugugguacuc

SEQ ID NO: 831540 - RNA, 19 nt, Artificial Sequence
  Description of Artificial Sequence: Synthetic oligonucleotide
cagcguuacucuuauacuu

SEQ ID NO: 831541 - RNA, 19 nt, Artificial Sequence
  Description of Artificial Sequence: Synthetic oligonucleotide
guacauacacuugagccuu

SEQ ID NO: 831542 - RNA, 19 nt, Artificial Sequence
  Description of Artificial Sequence: Synthetic oligonucleotide
uggauccauguccgcuagu

SEQ ID NO: 831543 - RNA, 19 nt, Artificial Sequence
  Description of Artificial Sequence: Synthetic oligonucleotide
auauucucuguuagcuuua

SEQ ID NO: 831544 - RNA, 19 nt, Artificial Sequence
  Description of Artificial Sequence: Synthetic oligonucleotide
gucugcaacugaguacuuc

SEQ ID NO: 831545 - RNA, 19 nt, Artificial Sequence
  Description of Artificial Sequence: Synthetic oligonucleotide
uguuguugcucagccucua

SEQ ID NO: 831546 - RNA, 19 nt, Artificial Sequence
  Description of Artificial Sequence: Synthetic oligonucleotide
cuaaugacuccagcuugga

SEQ ID NO: 831547 - RNA, 19 nt, Artificial Sequence
  Description of Artificial Sequence: Synthetic oligonucleotide
uauucccgcuggacggcau

SEQ ID NO: 831548 - RNA, 19 nt, Artificial Sequence
  Description of Artificial Sequence: Synthetic oligonucleotide
gucagccccggucaugaaa

SEQ ID NO: 831549 - RNA, 19 nt, Artificial Sequence
  Description of Artificial Sequence: Synthetic oligonucleotide
cgaauauugagacuuuucu

SEQ ID NO: 831550 - RNA, 19 nt, Artificial Sequence
  Description of Artificial Sequence: Synthetic oligonucleotide
cuagccaacuugugguacu

SEQ ID NO: 831551 - RNA, 19 nt, Artificial Sequence
  Description of Artificial Sequence: Synthetic oligonucleotide
gugguuugcacaacaaguu

SEQ ID NO: 831552 - RNA, 19 nt, Artificial Sequence
  Description of Artificial Sequence: Synthetic oligonucleotide
cauugcugaaugaacccuu

SEQ ID NO: 831553 - RNA, 19 nt, Artificial Sequence
  Description of Artificial Sequence: Synthetic oligonucleotide
gucgaauacauugcugaau

SEQ ID NO: 831554 - RNA, 19 nt, Artificial Sequence
  Description of Artificial Sequence: Synthetic oligonucleotide
cuacauguguagcaaccau

SEQ ID NO: 831555 - RNA, 19 nt, Artificial Sequence
  Description of Artificial Sequence: Synthetic oligonucleotide
ugucugcaacugaguacuu

SEQ ID NO: 831556 - RNA, 19 nt, Artificial Sequence
  Description of Artificial Sequence: Synthetic oligonucleotide
gguauucccgcuggacggc

SEQ ID NO: 831557 - RNA, 19 nt, Artificial Sequence
  Description of Artificial Sequence: Synthetic oligonucleotide
cgguggaaacugaacugcg

SEQ ID NO: 831558 - RNA, 19 nt, Artificial Sequence
  Description of Artificial Sequence: Synthetic oligonucleotide
gcagcguuacucuuauacu

SEQ ID NO: 831559 - RNA, 19 nt, Artificial Sequence
  Description of Artificial Sequence: Synthetic oligonucleotide
ucagcaccuuugggaauaa

SEQ ID NO: 831560 - RNA, 19 nt, Artificial Sequence
  Description of Artificial Sequence: Synthetic oligonucleotide
cacggaggccuuccuucac

SEQ ID NO: 831561 - RNA, 19 nt, Artificial Sequence
  Description of Artificial Sequence: Synthetic oligonucleotide
caacugaguacuucugguu

SEQ ID NO: 831562 - RNA, 19 nt, Artificial Sequence
  Description of Artificial Sequence: Synthetic oligonucleotide
caugaaacucucguagcau

SEQ ID NO: 831563 - RNA, 19 nt, Artificial Sequence
  Description of Artificial Sequence: Synthetic oligonucleotide
agccaacuugugguacucu

SEQ ID NO: 831564 - RNA, 19 nt, Artificial Sequence
  Description of Artificial Sequence: Synthetic oligonucleotide
ucagacgguucgguucuuu

SEQ ID NO: 831565 - RNA, 19 nt, Artificial Sequence
  Description of Artificial Sequence: Synthetic oligonucleotide
uggaugcaucuaccuuaua

SEQ ID NO: 831566 - RNA, 19 nt, Artificial Sequence
  Description of Artificial Sequence: Synthetic oligonucleotide
ccaccgguggaaacugaac

SEQ ID NO: 831567 - RNA, 19 nt, Artificial Sequence
  Description of Artificial Sequence: Synthetic oligonucleotide
cauacacuugagccuugua

SEQ ID NO: 831568 - RNA, 19 nt, Artificial Sequence
  Description of Artificial Sequence: Synthetic oligonucleotide
cuggucuagaauggaugaa

SEQ ID NO: 831569 - RNA, 19 nt, Artificial Sequence
  Description of Artificial Sequence: Synthetic oligonucleotide
gucgaguguucuccugucu

SEQ ID NO: 831570 - RNA, 19 nt, Artificial Sequence
  Description of Artificial Sequence: Synthetic oligonucleotide
guguagcaaccaucucuaa

SEQ ID NO: 831571 - RNA, 19 nt, Artificial Sequence
  Description of Artificial Sequence: Synthetic oligonucleotide
gcaaagggauacccaaggu

SEQ ID NO: 831572 - RNA, 19 nt, Artificial Sequence
  Description of Artificial Sequence: Synthetic oligonucleotide
guauucccgcuggacggca

SEQ ID NO: 831573 - RNA, 19 nt, Artificial Sequence
  Description of Artificial Sequence: Synthetic oligonucleotide
gcguuacucuuauacuucu

SEQ ID NO: 831574 - RNA, 19 nt, Artificial Sequence
  Description of Artificial Sequence: Synthetic oligonucleotide
ugucagccccggucaugaa

SEQ ID NO: 831575 - RNA, 19 nt, Artificial Sequence
  Description of Artificial Sequence: Synthetic oligonucleotide
gcacaacaaguugguauuc

SEQ ID NO: 831576 - RNA, 19 nt, Artificial Sequence
  Description of Artificial Sequence: Synthetic oligonucleotide
gacuccagcuuggaugcau

SEQ ID NO: 831577 - RNA, 19 nt, Artificial Sequence
  Description of Artificial Sequence: Synthetic oligonucleotide
gucccuuuugccgaauauu

SEQ ID NO: 831578 - RNA, 19 nt, Artificial Sequence
  Description of Artificial Sequence: Synthetic oligonucleotide
cguuacucuuauacuucuc

SEQ ID NO: 831579 - RNA, 19 nt, Artificial Sequence
  Description of Artificial Sequence: Synthetic oligonucleotide
caggaggucuucagacaua

SEQ ID NO: 831580 - RNA, 19 nt, Artificial Sequence
  Description of Artificial Sequence: Synthetic oligonucleotide
ugcuugcaaggaggcuuuc

SEQ ID NO: 831581 - RNA, 19 nt, Artificial Sequence
  Description of Artificial Sequence: Synthetic oligonucleotide
cgaauacauugcugaauga

SEQ ID NO: 831582 - RNA, 19 nt, Artificial Sequence
  Description of Artificial Sequence: Synthetic oligonucleotide
gcuugcaaggaggcuuuca

SEQ ID NO: 831583 - RNA, 19 nt, Artificial Sequence
  Description of Artificial Sequence: Synthetic oligonucleotide
ggccugguuuauugagguc

SEQ ID NO: 831584 - RNA, 19 nt, Artificial Sequence
  Description of Artificial Sequence: Synthetic oligonucleotide
ccggucaugaaacucucgu

SEQ ID NO: 831585 - RNA, 19 nt, Artificial Sequence
  Description of Artificial Sequence: Synthetic oligonucleotide
ggcucccacuguauacaug

SEQ ID NO: 831586 - RNA, 19 nt, Artificial Sequence
  Description of Artificial Sequence: Synthetic oligonucleotide
gcuagucccuuuugccgaa

SEQ ID NO: 831587 - RNA, 19 nt, Artificial Sequence
  Description of Artificial Sequence: Synthetic oligonucleotide
cgcuagucccuuuugccga

SEQ ID NO: 831588 - RNA, 19 nt, Artificial Sequence
  Description of Artificial Sequence: Synthetic oligonucleotide
caccaccgguggaaacuga

SEQ ID NO: 831589 - RNA, 19 nt, Artificial Sequence
  Description of Artificial Sequence: Synthetic oligonucleotide
cugcuugcaaggaggcuuu

SEQ ID NO: 831590 - RNA, 19 nt, Artificial Sequence
  Description of Artificial Sequence: Synthetic oligonucleotide
cuguauacauggagcucuu

SEQ ID NO: 831591 - RNA, 19 nt, Artificial Sequence
  Description of Artificial Sequence: Synthetic oligonucleotide
cugcuaacugggcuucaau

SEQ ID NO: 831592 - RNA, 19 nt, Artificial Sequence
  Description of Artificial Sequence: Synthetic oligonucleotide
ccaggaggucuucagacau

SEQ ID NO: 831593 - RNA, 19 nt, Artificial Sequence
  Description of Artificial Sequence: Synthetic oligonucleotide
ccccggucaugaaacucuc

SEQ ID NO: 831594 - RNA, 19 nt, Artificial Sequence
  Description of Artificial Sequence: Synthetic oligonucleotide
cagacgguucgguucuuuu

SEQ ID NO: 831595 - RNA, 19 nt, Artificial Sequence
  Description of Artificial Sequence: Synthetic oligonucleotide
cagguaugaggggcuccca

SEQ ID NO: 831596 - RNA, 19 nt, Artificial Sequence
  Description of Artificial Sequence: Synthetic oligonucleotide
cgcuguaaguuauuuccua

SEQ ID NO: 831597 - RNA, 19 nt, Artificial Sequence
  Description of Artificial Sequence: Synthetic oligonucleotide
caaucgccucuuugccucu

SEQ ID NO: 831598 - RNA, 19 nt, Artificial Sequence
  Description of Artificial Sequence: Synthetic oligonucleotide
gccccggucaugaaacucu

SEQ ID NO: 831599 - RNA, 19 nt, Artificial Sequence
  Description of Artificial Sequence: Synthetic oligonucleotide
ccucuaggucuuugguuaa

SEQ ID NO: 831600 - RNA, 19 nt, Artificial Sequence
  Description of Artificial Sequence: Synthetic oligonucleotide
ccacucaauuucuggucua

SEQ ID NO: 831601 - RNA, 19 nt, Artificial Sequence
  Description of Artificial Sequence: Synthetic oligonucleotide
cggucaugaaacucucgua

SEQ ID NO: 831602 - RNA, 19 nt, Artificial Sequence
  Description of Artificial Sequence: Synthetic oligonucleotide
gccgaauauugagacuuuu

SEQ ID NO: 831603 - RNA, 19 nt, Artificial Sequence
  Description of Artificial Sequence: Synthetic oligonucleotide
cagccccggucaugaaacu

SEQ ID NO: 831604 - RNA, 19 nt, Artificial Sequence
  Description of Artificial Sequence: Synthetic oligonucleotide
cagcagcguuacucuuaua

SEQ ID NO: 831605 - RNA, 19 nt, Artificial Sequence
  Description of Artificial Sequence: Synthetic oligonucleotide
ggggugugaaggccugguu

SEQ ID NO: 831606 - RNA, 19 nt, Artificial Sequence
  Description of Artificial Sequence: Synthetic oligonucleotide
cuagucccuuuugccgaau

SEQ ID NO: 831607 - RNA, 19 nt, Artificial Sequence
  Description of Artificial Sequence: Synthetic oligonucleotide
gggcuugcagagacuucau

SEQ ID NO: 831608 - RNA, 19 nt, Artificial Sequence
  Description of Artificial Sequence: Synthetic oligonucleotide
ccagggacuuaagcucacu

SEQ ID NO: 831609 - RNA, 19 nt, Artificial Sequence
  Description of Artificial Sequence: Synthetic oligonucleotide
aguagcuagauccacaugc

SEQ ID NO: 831610 - RNA, 19 nt, Artificial Sequence
  Description of Artificial Sequence: Synthetic oligonucleotide
cuuuagaguagcuagaucc

SEQ ID NO: 831611 - RNA, 19 nt, Artificial Sequence
  Description of Artificial Sequence: Synthetic oligonucleotide
ucacccgucacauugaagg

SEQ ID NO: 831612 - RNA, 19 nt, Artificial Sequence
  Description of Artificial Sequence: Synthetic oligonucleotide
auugcugguaauaugaccc

SEQ ID NO: 831613 - RNA, 19 nt, Artificial Sequence
  Description of Artificial Sequence: Synthetic oligonucleotide
auacaucucaaacucaagg

SEQ ID NO: 831614 - RNA, 19 nt, Artificial Sequence
  Description of Artificial Sequence: Synthetic oligonucleotide
aaguuuugugcccagaaca

SEQ ID NO: 831615 - RNA, 19 nt, Artificial Sequence
  Description of Artificial Sequence: Synthetic oligonucleotide
agaauuaauguuccuuccc

SEQ ID NO: 831616 - RNA, 19 nt, Artificial Sequence
  Description of Artificial Sequence: Synthetic oligonucleotide
aacucaaggaaccucaagu

SEQ ID NO: 831617 - RNA, 19 nt, Artificial Sequence
  Description of Artificial Sequence: Synthetic oligonucleotide
uaguaaaccaguaucgggc

SEQ ID NO: 831618 - RNA, 19 nt, Artificial Sequence
  Description of Artificial Sequence: Synthetic oligonucleotide
aaacaugacaaccuagaca

SEQ ID NO: 831619 - RNA, 19 nt, Artificial Sequence
  Description of Artificial Sequence: Synthetic oligonucleotide
uaaguagguagaaagcugc

SEQ ID NO: 831620 - RNA, 19 nt, Artificial Sequence
  Description of Artificial Sequence: Synthetic oligonucleotide
cauuguaacucacaggagg

SEQ ID NO: 831621 - RNA, 19 nt, Artificial Sequence
  Description of Artificial Sequence: Synthetic oligonucleotide
aaguuaaguuucuccacac

SEQ ID NO: 831622 - RNA, 19 nt, Artificial Sequence
  Description of Artificial Sequence: Synthetic oligonucleotide
acaaccuagacaccaacac

SEQ ID NO: 831623 - RNA, 19 nt, Artificial Sequence
  Description of Artificial Sequence: Synthetic oligonucleotide
ugugugucgaccauaggag

SEQ ID NO: 831624 - RNA, 19 nt, Artificial Sequence
  Description of Artificial Sequence: Synthetic oligonucleotide
auaguaaaccaguaucggg

SEQ ID NO: 831625 - RNA, 19 nt, Artificial Sequence
  Description of Artificial Sequence: Synthetic oligonucleotide
aagcacuauaaacagcaag

SEQ ID NO: 831626 - RNA, 19 nt, Artificial Sequence
  Description of Artificial Sequence: Synthetic oligonucleotide
agucguuccauaguaaacc

SEQ ID NO: 831627 - RNA, 19 nt, Artificial Sequence
  Description of Artificial Sequence: Synthetic oligonucleotide
uaauaugacccucaugugu

SEQ ID NO: 831628 - RNA, 19 nt, Artificial Sequence
  Description of Artificial Sequence: Synthetic oligonucleotide
aaccuagacaccaacacuc

SEQ ID NO: 831629 - RNA, 19 nt, Artificial Sequence
  Description of Artificial Sequence: Synthetic oligonucleotide
ucgaccuagacccucagcc

SEQ ID NO: 831630 - RNA, 19 nt, Artificial Sequence
  Description of Artificial Sequence: Synthetic oligonucleotide
uccacuaugccacaagaug

SEQ ID NO: 831631 - RNA, 19 nt, Artificial Sequence
  Description of Artificial Sequence: Synthetic oligonucleotide
cuagaauuaauguuccuuc

SEQ ID NO: 831632 - RNA, 19 nt, Artificial Sequence
  Description of Artificial Sequence: Synthetic oligonucleotide
cuuccccucaugaugaugg

SEQ ID NO: 831633 - RNA, 19 nt, Artificial Sequence
  Description of Artificial Sequence: Synthetic oligonucleotide
gauggaucacaugugaugc

SEQ ID NO: 831634 - RNA, 19 nt, Artificial Sequence
  Description of Artificial Sequence: Synthetic oligonucleotide
auuaauguuccuuccccuc

SEQ ID NO: 831635 - RNA, 19 nt, Artificial Sequence
  Description of Artificial Sequence: Synthetic oligonucleotide
ucacggaccacucuagaag

SEQ ID NO: 831636 - RNA, 19 nt, Artificial Sequence
  Description of Artificial Sequence: Synthetic oligonucleotide
cagcugucgaccuagaccc

SEQ ID NO: 831637 - RNA, 19 nt, Artificial Sequence
  Description of Artificial Sequence: Synthetic oligonucleotide
ucgucaaaacgauccaugg

SEQ ID NO: 831638 - RNA, 19 nt, Artificial Sequence
  Description of Artificial Sequence: Synthetic oligonucleotide
gguaauaugacccucaugu

SEQ ID NO: 831639 - RNA, 19 nt, Artificial Sequence
  Description of Artificial Sequence: Synthetic oligonucleotide
gucaaaacgauccaugguc

SEQ ID NO: 831640 - RNA, 19 nt, Artificial Sequence
  Description of Artificial Sequence: Synthetic oligonucleotide
cauaggagcccacaggucc

SEQ ID NO: 831641 - RNA, 19 nt, Artificial Sequence
  Description of Artificial Sequence: Synthetic oligonucleotide
uggaagauuugucuaauau

SEQ ID NO: 831642 - RNA, 19 nt, Artificial Sequence
  Description of Artificial Sequence: Synthetic oligonucleotide
gagggagccaaauccaggg

SEQ ID NO: 831643 - RNA, 19 nt, Artificial Sequence
  Description of Artificial Sequence: Synthetic oligonucleotide
ggucuaaguagguagaaag

SEQ ID NO: 831644 - RNA, 19 nt, Artificial Sequence
  Description of Artificial Sequence: Synthetic oligonucleotide
ggaagauucauaaagcuug

SEQ ID NO: 831645 - RNA, 19 nt, Artificial Sequence
  Description of Artificial Sequence: Synthetic oligonucleotide
agucguuccagaaggagcc

SEQ ID NO: 831646 - RNA, 19 nt, Artificial Sequence
  Description of Artificial Sequence: Synthetic oligonucleotide
ucaugugugucgaccauag

SEQ ID NO: 831647 - RNA, 19 nt, Artificial Sequence
  Description of Artificial Sequence: Synthetic oligonucleotide
agaagcacuauaaacagca

SEQ ID NO: 831648 - RNA, 19 nt, Artificial Sequence
  Description of Artificial Sequence: Synthetic oligonucleotide
uagaauuaauguuccuucc

SEQ ID NO: 831649 - RNA, 19 nt, Artificial Sequence
  Description of Artificial Sequence: Synthetic oligonucleotide
augugugucgaccauagga

SEQ ID NO: 831650 - RNA, 19 nt, Artificial Sequence
  Description of Artificial Sequence: Synthetic oligonucleotide
cacgucuuuauuuuauuag

SEQ ID NO: 831651 - RNA, 19 nt, Artificial Sequence
  Description of Artificial Sequence: Synthetic oligonucleotide
ucaaugcuuaacuuguccu

SEQ ID NO: 831652 - RNA, 19 nt, Artificial Sequence
  Description of Artificial Sequence: Synthetic oligonucleotide
ucaaggaaccucaaguuua

SEQ ID NO: 831653 - RNA, 19 nt, Artificial Sequence
  Description of Artificial Sequence: Synthetic oligonucleotide
guggauuucaagucguucc

SEQ ID NO: 831654 - RNA, 19 nt, Artificial Sequence
  Description of Artificial Sequence: Synthetic oligonucleotide
ucaaaacgauccauggucu

SEQ ID NO: 831655 - RNA, 19 nt, Artificial Sequence
  Description of Artificial Sequence: Synthetic oligonucleotide
aagagcugcgguguaaggg

SEQ ID NO: 831656 - RNA, 19 nt, Artificial Sequence
  Description of Artificial Sequence: Synthetic oligonucleotide
gguagaagcgacuagccag

SEQ ID NO: 831657 - RNA, 19 nt, Artificial Sequence
  Description of Artificial Sequence: Synthetic oligonucleotide
ugguucauaggucagugaa

SEQ ID NO: 831658 - RNA, 19 nt, Artificial Sequence
  Description of Artificial Sequence: Synthetic oligonucleotide
acaacagccaagcuggaca

SEQ ID NO: 831659 - RNA, 19 nt, Artificial Sequence
  Description of Artificial Sequence: Synthetic oligonucleotide
cauaggugaagaugaaaag

SEQ ID NO: 831660 - RNA, 19 nt, Artificial Sequence
  Description of Artificial Sequence: Synthetic oligonucleotide
agugaaagcauggcaaagg

SEQ ID NO: 831661 - RNA, 19 nt, Artificial Sequence
  Description of Artificial Sequence: Synthetic oligonucleotide
ugcaaacaugacaaccuag

SEQ ID NO: 831662 - RNA, 19 nt, Artificial Sequence
  Description of Artificial Sequence: Synthetic oligonucleotide
aaacucaaggaaccucaag

SEQ ID NO: 831663 - RNA, 19 nt, Artificial Sequence
  Description of Artificial Sequence: Synthetic oligonucleotide
ugcauaccaguccacagca

SEQ ID NO: 831664 - RNA, 19 nt, Artificial Sequence
  Description of Artificial Sequence: Synthetic oligonucleotide
ugugucgaccauaggagcc

SEQ ID NO: 831665 - RNA, 19 nt, Artificial Sequence
  Description of Artificial Sequence: Synthetic oligonucleotide
ucgaccacaguaccagugg

SEQ ID NO: 831666 - RNA, 19 nt, Artificial Sequence
  Description of Artificial Sequence: Synthetic oligonucleotide
cauggguacaucacggacc

SEQ ID NO: 831667 - RNA, 19 nt, Artificial Sequence
  Description of Artificial Sequence: Synthetic oligonucleotide
uucaagucguuccauagua

SEQ ID NO: 831668 - RNA, 19 nt, Artificial Sequence
  Description of Artificial Sequence: Synthetic oligonucleotide
guucauaggucagugaaag

SEQ ID NO: 831669 - RNA, 19 nt, Artificial Sequence
  Description of Artificial Sequence: Synthetic oligonucleotide
acuguugccgccaucauag

SEQ ID NO: 831670 - RNA, 19 nt, Artificial Sequence
  Description of Artificial Sequence: Synthetic oligonucleotide
acuagccccaagcuucucc

SEQ ID NO: 831671 - RNA, 19 nt, Artificial Sequence
  Description of Artificial Sequence: Synthetic oligonucleotide
agugagggcacguugguca

SEQ ID NO: 831672 - RNA, 19 nt, Artificial Sequence
  Description of Artificial Sequence: Synthetic oligonucleotide
gugucauuguaacucacag

SEQ ID NO: 831673 - RNA, 19 nt, Artificial Sequence
  Description of Artificial Sequence: Synthetic oligonucleotide
ugcaguaagagcugcggug

SEQ ID NO: 831674 - RNA, 19 nt, Artificial Sequence
  Description of Artificial Sequence: Synthetic oligonucleotide
ucaaguuaaguuucuccac

SEQ ID NO: 831675 - RNA, 19 nt, Artificial Sequence
  Description of Artificial Sequence: Synthetic oligonucleotide
uauccacuaugccacaaga

SEQ ID NO: 831676 - RNA, 19 nt, Artificial Sequence
  Description of Artificial Sequence: Synthetic oligonucleotide
gguagaaagcugcauauug

SEQ ID NO: 831677 - RNA, 19 nt, Artificial Sequence
  Description of Artificial Sequence: Synthetic oligonucleotide
cuuguggucgucaaaacga

SEQ ID NO: 831678 - RNA, 19 nt, Artificial Sequence
  Description of Artificial Sequence: Synthetic oligonucleotide
ggggcaagaauaaauaagg

SEQ ID NO: 831679 - RNA, 19 nt, Artificial Sequence
  Description of Artificial Sequence: Synthetic oligonucleotide
caugcuaucgaagagaaaa

SEQ ID NO: 831680 - RNA, 19 nt, Artificial Sequence
  Description of Artificial Sequence: Synthetic oligonucleotide
agcacuauaaacagcaagu

SEQ ID NO: 831681 - RNA, 19 nt, Artificial Sequence
  Description of Artificial Sequence: Synthetic oligonucleotide
ggcuguguagggcagaugg

SEQ ID NO: 831682 - RNA, 19 nt, Artificial Sequence
  Description of Artificial Sequence: Synthetic oligonucleotide
agaauagaugcuggguccc

SEQ ID NO: 831683 - RNA, 19 nt, Artificial Sequence
  Description of Artificial Sequence: Synthetic oligonucleotide
aacuugaaugucaccauug

SEQ ID NO: 831684 - RNA, 19 nt, Artificial Sequence
  Description of Artificial Sequence: Synthetic oligonucleotide
uaaguagucuuuccauaca

SEQ ID NO: 831685 - RNA, 19 nt, Artificial Sequence
  Description of Artificial Sequence: Synthetic oligonucleotide
uggauuucaagucguucca

SEQ ID NO: 831686 - RNA, 19 nt, Artificial Sequence
  Description of Artificial Sequence: Synthetic oligonucleotide
guaucgggcagacacuggg

SEQ ID NO: 831687 - RNA, 19 nt, Artificial Sequence
  Description of Artificial Sequence: Synthetic oligonucleotide
cacaaucugugucaaagug

SEQ ID NO: 831688 - RNA, 19 nt, Artificial Sequence
  Description of Artificial Sequence: Synthetic oligonucleotide
agauagguagucagagugc

SEQ ID NO: 831689 - RNA, 19 nt, Artificial Sequence
  Description of Artificial Sequence: Synthetic oligonucleotide
uggaagauucauaaagcuu

SEQ ID NO: 831690 - RNA, 19 nt, Artificial Sequence
  Description of Artificial Sequence: Synthetic oligonucleotide
uguaagggacaucuucaga

SEQ ID NO: 831691 - RNA, 19 nt, Artificial Sequence
  Description of Artificial Sequence: Synthetic oligonucleotide
cacggaccacucuagaagg

SEQ ID NO: 831692 - RNA, 19 nt, Artificial Sequence
  Description of Artificial Sequence: Synthetic oligonucleotide
ugcgguguaagggacaucu

SEQ ID NO: 831693 - RNA, 19 nt, Artificial Sequence
  Description of Artificial Sequence: Synthetic oligonucleotide
ucccucaguagguugaaga

SEQ ID NO: 831694 - RNA, 19 nt, Artificial Sequence
  Description of Artificial Sequence: Synthetic oligonucleotide
uagguagaaagcugcauau

SEQ ID NO: 831695 - RNA, 19 nt, Artificial Sequence
  Description of Artificial Sequence: Synthetic oligonucleotide
gcuccuuuagaguagcuag

SEQ ID NO: 831696 - RNA, 19 nt, Artificial Sequence
  Description of Artificial Sequence: Synthetic oligonucleotide
uacaucacggaccacucua

SEQ ID NO: 831697 - RNA, 19 nt, Artificial Sequence
  Description of Artificial Sequence: Synthetic oligonucleotide
uuaacuuguccugaaggaa

SEQ ID NO: 831698 - RNA, 19 nt, Artificial Sequence
  Description of Artificial Sequence: Synthetic oligonucleotide
cagagugagggcacguugg

SEQ ID NO: 831699 - RNA, 19 nt, Artificial Sequence
  Description of Artificial Sequence: Synthetic oligonucleotide
ggcauugaguuucagcucc

SEQ ID NO: 831700 - RNA, 19 nt, Artificial Sequence
  Description of Artificial Sequence: Synthetic oligonucleotide
gaagccagucccucaguag

SEQ ID NO: 831701 - RNA, 19 nt, Artificial Sequence
  Description of Artificial Sequence: Synthetic oligonucleotide
ucguuccauaguaaaccag

SEQ ID NO: 831702 - RNA, 19 nt, Artificial Sequence
  Description of Artificial Sequence: Synthetic oligonucleotide
aggggcaagaauaaauaag

SEQ ID NO: 831703 - RNA, 19 nt, Artificial Sequence
  Description of Artificial Sequence: Synthetic oligonucleotide
auggguacaucacggacca

SEQ ID NO: 831704 - RNA, 19 nt, Artificial Sequence
  Description of Artificial Sequence: Synthetic oligonucleotide
agcacagucgcuagcauag

SEQ ID NO: 831705 - RNA, 19 nt, Artificial Sequence
  Description of Artificial Sequence: Synthetic oligonucleotide
uagcuagauccacaugcag

SEQ ID NO: 831706 - RNA, 19 nt, Artificial Sequence
  Description of Artificial Sequence: Synthetic oligonucleotide
acccuagaauuaauguucc

SEQ ID NO: 831707 - RNA, 19 nt, Artificial Sequence
  Description of Artificial Sequence: Synthetic oligonucleotide
aaacgauccauggucuuga

SEQ ID NO: 831708 - RNA, 19 nt, Artificial Sequence
  Description of Artificial Sequence: Synthetic oligonucleotide
guaauaugacccucaugug

SEQ ID NO: 831709 - RNA, 19 nt, Artificial Sequence
  Description of Artificial Sequence: Synthetic oligonucleotide
aaagcaugaagaggguggu

SEQ ID NO: 831710 - RNA, 19 nt, Artificial Sequence
  Description of Artificial Sequence: Synthetic oligonucleotide
accucaaguuuauugcugu

SEQ ID NO: 831711 - RNA, 19 nt, Artificial Sequence
  Description of Artificial Sequence: Synthetic oligonucleotide
aggucagugaaagcauggc

SEQ ID NO: 831712 - RNA, 19 nt, Artificial Sequence
  Description of Artificial Sequence: Synthetic oligonucleotide
guugccgccaucauagccc

SEQ ID NO: 831713 - RNA, 19 nt, Artificial Sequence
  Description of Artificial Sequence: Synthetic oligonucleotide
auuguaacucacaggagga

SEQ ID NO: 831714 - RNA, 19 nt, Artificial Sequence
  Description of Artificial Sequence: Synthetic oligonucleotide
ccacuaugccacaagaugc

SEQ ID NO: 831715 - RNA, 19 nt, Artificial Sequence
  Description of Artificial Sequence: Synthetic oligonucleotide
uagcggaggggcaagaaua

SEQ ID NO: 831716 - RNA, 19 nt, Artificial Sequence
  Description of Artificial Sequence: Synthetic oligonucleotide
ucccuuggugccaucagac

SEQ ID NO: 831717 - RNA, 19 nt, Artificial Sequence
  Description of Artificial Sequence: Synthetic oligonucleotide
gagucguuccagaaggagc

SEQ ID NO: 831718 - RNA, 19 nt, Artificial Sequence
  Description of Artificial Sequence: Synthetic oligonucleotide
aguaccuguccaaugaccu

SEQ ID NO: 831719 - RNA, 19 nt, Artificial Sequence
  Description of Artificial Sequence: Synthetic oligonucleotide
aagggcggacugcaguaag

SEQ ID NO: 831720 - RNA, 19 nt, Artificial Sequence
  Description of Artificial Sequence: Synthetic oligonucleotide
acucaaggaaccucaaguu

SEQ ID NO: 831721 - RNA, 19 nt, Artificial Sequence
  Description of Artificial Sequence: Synthetic oligonucleotide
ggauggaucacaugugaug

SEQ ID NO: 831722 - RNA, 19 nt, Artificial Sequence
  Description of Artificial Sequence: Synthetic oligonucleotide
ugcauauugcugguaauau

SEQ ID NO: 831723 - RNA, 19 nt, Artificial Sequence
  Description of Artificial Sequence: Synthetic oligonucleotide
agccagucaaguuaaguuu

SEQ ID NO: 831724 - RNA, 19 nt, Artificial Sequence
  Description of Artificial Sequence: Synthetic oligonucleotide
guguaagggacaucuucag

SEQ ID NO: 831725 - RNA, 19 nt, Artificial Sequence
  Description of Artificial Sequence: Synthetic oligonucleotide
uucauaggucagugaaagc

SEQ ID NO: 831726 - RNA, 19 nt, Artificial Sequence
  Description of Artificial Sequence: Synthetic oligonucleotide
ucaagucguuccauaguaa

SEQ ID NO: 831727 - RNA, 19 nt, Artificial Sequence
  Description of Artificial Sequence: Synthetic oligonucleotide
acuagccagaaugaacuug

SEQ ID NO: 831728 - RNA, 19 nt, Artificial Sequence
  Description of Artificial Sequence: Synthetic oligonucleotide
gacauacucacaguggaaa

SEQ ID NO: 831729 - RNA, 19 nt, Artificial Sequence
  Description of Artificial Sequence: Synthetic oligonucleotide
gaccuagacccucagccac

SEQ ID NO: 831730 - RNA, 19 nt, Artificial Sequence
  Description of Artificial Sequence: Synthetic oligonucleotide
acccucaugugugucgacc

SEQ ID NO: 831731 - RNA, 19 nt, Artificial Sequence
  Description of Artificial Sequence: Synthetic oligonucleotide
gagugagcauuaauuacac

SEQ ID NO: 831732 - RNA, 19 nt, Artificial Sequence
  Description of Artificial Sequence: Synthetic oligonucleotide
caguagguugaagaggaag

SEQ ID NO: 831733 - RNA, 19 nt, Artificial Sequence
  Description of Artificial Sequence: Synthetic oligonucleotide
gucacucgaccacaguacc

SEQ ID NO: 831734 - RNA, 19 nt, Artificial Sequence
  Description of Artificial Sequence: Synthetic oligonucleotide
gaauagaugcugggucccg

SEQ ID NO: 831735 - RNA, 19 nt, Artificial Sequence
  Description of Artificial Sequence: Synthetic oligonucleotide
gaaauccucaaugcuuaac

SEQ ID NO: 831736 - RNA, 19 nt, Artificial Sequence
  Description of Artificial Sequence: Synthetic oligonucleotide
gcagcugucgaccuagacc

SEQ ID NO: 831737 - RNA, 19 nt, Artificial Sequence
  Description of Artificial Sequence: Synthetic oligonucleotide
acagucgcuagcauaggag

SEQ ID NO: 831738 - RNA, 19 nt, Artificial Sequence
  Description of Artificial Sequence: Synthetic oligonucleotide
uguggauuucaagucguuc

SEQ ID NO: 831739 - RNA, 19 nt, Artificial Sequence
  Description of Artificial Sequence: Synthetic oligonucleotide
aggccauaggugaagauga

SEQ ID NO: 831740 - RNA, 19 nt, Artificial Sequence
  Description of Artificial Sequence: Synthetic oligonucleotide
uccacucgucuuuguaugc

SEQ ID NO: 831741 - RNA, 19 nt, Artificial Sequence
  Description of Artificial Sequence: Synthetic oligonucleotide
auacucacaguggaaagaa

SEQ ID NO: 831742 - RNA, 19 nt, Artificial Sequence
  Description of Artificial Sequence: Synthetic oligonucleotide
ucacucgaccacaguacca

SEQ ID NO: 831743 - RNA, 19 nt, Artificial Sequence
  Description of Artificial Sequence: Synthetic oligonucleotide
gguucaugcuaucgaagag

SEQ ID NO: 831744 - RNA, 19 nt, Artificial Sequence
  Description of Artificial Sequence: Synthetic oligonucleotide
gggcacguuggucacaagg

SEQ ID NO: 831745 - RNA, 19 nt, Artificial Sequence
  Description of Artificial Sequence: Synthetic oligonucleotide
gaguaucaugugcaggcca

SEQ ID NO: 831746 - RNA, 19 nt, Artificial Sequence
  Description of Artificial Sequence: Synthetic oligonucleotide
auagaugcugggucccgug

SEQ ID NO: 831747 - RNA, 19 nt, Artificial Sequence
  Description of Artificial Sequence: Synthetic oligonucleotide
gugugucgaccauaggagc

SEQ ID NO: 831748 - RNA, 19 nt, Artificial Sequence
  Description of Artificial Sequence: Synthetic oligonucleotide
gcuagcauaggagaacugc

SEQ ID NO: 831749 - RNA, 19 nt, Artificial Sequence
  Description of Artificial Sequence: Synthetic oligonucleotide
cacucgaccacaguaccag

SEQ ID NO: 831750 - RNA, 19 nt, Artificial Sequence
  Description of Artificial Sequence: Synthetic oligonucleotide
uccgcaucugagauaccac

SEQ ID NO: 831751 - RNA, 19 nt, Artificial Sequence
  Description of Artificial Sequence: Synthetic oligonucleotide
cagacugcugacauacuca

SEQ ID NO: 831752 - RNA, 19 nt, Artificial Sequence
  Description of Artificial Sequence: Synthetic oligonucleotide
cagcaaguagcggaggggc

SEQ ID NO: 831753 - RNA, 19 nt, Artificial Sequence
  Description of Artificial Sequence: Synthetic oligonucleotide
caagucguuccauaguaaa

SEQ ID NO: 831754 - RNA, 19 nt, Artificial Sequence
  Description of Artificial Sequence: Synthetic oligonucleotide
gcugacauacucacagugg

SEQ ID NO: 831755 - RNA, 19 nt, Artificial Sequence
  Description of Artificial Sequence: Synthetic oligonucleotide
gggcaagaauaaauaaggg

SEQ ID NO: 831756 - RNA, 19 nt, Artificial Sequence
  Description of Artificial Sequence: Synthetic oligonucleotide
ucaagucuuuccacucguc

SEQ ID NO: 831757 - RNA, 19 nt, Artificial Sequence
  Description of Artificial Sequence: Synthetic oligonucleotide
auccgcaucugagauacca

SEQ ID NO: 831758 - RNA, 19 nt, Artificial Sequence
  Description of Artificial Sequence: Synthetic oligonucleotide
gacaaccuagacaccaaca

SEQ ID NO: 831759 - RNA, 19 nt, Artificial Sequence
  Description of Artificial Sequence: Synthetic oligonucleotide
gacaacacgucuuuauuuu

SEQ ID NO: 831760 - RNA, 19 nt, Artificial Sequence
  Description of Artificial Sequence: Synthetic oligonucleotide
ugauugcauaccaguccac

SEQ ID NO: 831761 - RNA, 19 nt, Artificial Sequence
  Description of Artificial Sequence: Synthetic oligonucleotide
gauaccacuguugccgcca

SEQ ID NO: 831762 - RNA, 19 nt, Artificial Sequence
  Description of Artificial Sequence: Synthetic oligonucleotide
ugugaggaccucccuuggu

SEQ ID NO: 831763 - RNA, 19 nt, Artificial Sequence
  Description of Artificial Sequence: Synthetic oligonucleotide
ucgcuagcauaggagaacu

SEQ ID NO: 831764 - RNA, 19 nt, Artificial Sequence
  Description of Artificial Sequence: Synthetic oligonucleotide
agugucauuguaacucaca

SEQ ID NO: 831765 - RNA, 19 nt, Artificial Sequence
  Description of Artificial Sequence: Synthetic oligonucleotide
ugaaauccucaaugcuuaa

SEQ ID NO: 831766 - RNA, 19 nt, Artificial Sequence
  Description of Artificial Sequence: Synthetic oligonucleotide
gagccuggaagauuugucu

SEQ ID NO: 831767 - RNA, 19 nt, Artificial Sequence
  Description of Artificial Sequence: Synthetic oligonucleotide
uccccauccgcaucugaga

SEQ ID NO: 831768 - RNA, 19 nt, Artificial Sequence
  Description of Artificial Sequence: Synthetic oligonucleotide
uggcauugaguuucagcuc

SEQ ID NO: 831769 - RNA, 19 nt, Artificial Sequence
  Description of Artificial Sequence: Synthetic oligonucleotide
aggucccggucacucgacc

SEQ ID NO: 831770 - RNA, 19 nt, Artificial Sequence
  Description of Artificial Sequence: Synthetic oligonucleotide
cacuaugccacaagaugca

SEQ ID NO: 831771 - RNA, 19 nt, Artificial Sequence
  Description of Artificial Sequence: Synthetic oligonucleotide
accaccauaugcugugaaa

SEQ ID NO: 831772 - RNA, 19 nt, Artificial Sequence
  Description of Artificial Sequence: Synthetic oligonucleotide
gagaacugcucacccguca

SEQ ID NO: 831773 - RNA, 19 nt, Artificial Sequence
  Description of Artificial Sequence: Synthetic oligonucleotide
acaacacgucuuuauuuua

SEQ ID NO: 831774 - RNA, 19 nt, Artificial Sequence
  Description of Artificial Sequence: Synthetic oligonucleotide
gaguagcuagauccacaug

SEQ ID NO: 831775 - RNA, 19 nt, Artificial Sequence
  Description of Artificial Sequence: Synthetic oligonucleotide
aggacucgggcccaccgug

SEQ ID NO: 831776 - RNA, 19 nt, Artificial Sequence
  Description of Artificial Sequence: Synthetic oligonucleotide
augcaaacaugacaaccua

SEQ ID NO: 831777 - RNA, 19 nt, Artificial Sequence
  Description of Artificial Sequence: Synthetic oligonucleotide
cagucgcuagcauaggaga

SEQ ID NO: 831778 - RNA, 19 nt, Artificial Sequence
  Description of Artificial Sequence: Synthetic oligonucleotide
cacccgucacauugaaggc

SEQ ID NO: 831779 - RNA, 19 nt, Artificial Sequence
  Description of Artificial Sequence: Synthetic oligonucleotide
gagccagucaaguuaaguu

SEQ ID NO: 831780 - RNA, 19 nt, Artificial Sequence
  Description of Artificial Sequence: Synthetic oligonucleotide
gaagccagcacagucgcua

SEQ ID NO: 831781 - RNA, 19 nt, Artificial Sequence
  Description of Artificial Sequence: Synthetic oligonucleotide
cauacucacaguggaaaga

SEQ ID NO: 831782 - RNA, 19 nt, Artificial Sequence
  Description of Artificial Sequence: Synthetic oligonucleotide
aggggacuagccccaagcu

SEQ ID NO: 831783 - RNA, 19 nt, Artificial Sequence
  Description of Artificial Sequence: Synthetic oligonucleotide
cagugaaagcauggcaaag

SEQ ID NO: 831784 - RNA, 19 nt, Artificial Sequence
  Description of Artificial Sequence: Synthetic oligonucleotide
ggaacccuagaauuaaugu

SEQ ID NO: 831785 - RNA, 19 nt, Artificial Sequence
  Description of Artificial Sequence: Synthetic oligonucleotide
cacaccaaaggugagggaa

SEQ ID NO: 831786 - RNA, 19 nt, Artificial Sequence
  Description of Artificial Sequence: Synthetic oligonucleotide
aagcgacuagccagaauga

SEQ ID NO: 831787 - RNA, 19 nt, Artificial Sequence
  Description of Artificial Sequence: Synthetic oligonucleotide
ugcucacccgucacauuga

SEQ ID NO: 831788 - RNA, 19 nt, Artificial Sequence
  Description of Artificial Sequence: Synthetic oligonucleotide
guagaagcgacuagccaga

SEQ ID NO: 831789 - RNA, 19 nt, Artificial Sequence
  Description of Artificial Sequence: Synthetic oligonucleotide
acaugugaugccaccugag

SEQ ID NO: 831790 - RNA, 19 nt, Artificial Sequence
  Description of Artificial Sequence: Synthetic oligonucleotide
caguaucgggcagacacug

SEQ ID NO: 831791 - RNA, 19 nt, Artificial Sequence
  Description of Artificial Sequence: Synthetic oligonucleotide
ggucagugaaagcauggca

SEQ ID NO: 831792 - RNA, 19 nt, Artificial Sequence
  Description of Artificial Sequence: Synthetic oligonucleotide
caugugugucgaccauagg

SEQ ID NO: 831793 - RNA, 19 nt, Artificial Sequence
  Description of Artificial Sequence: Synthetic oligonucleotide
cacaggucccggucacucg

SEQ ID NO: 831794 - RNA, 19 nt, Artificial Sequence
  Description of Artificial Sequence: Synthetic oligonucleotide
gggacuagccccaagcuuc

SEQ ID NO: 831795 - RNA, 19 nt, Artificial Sequence
  Description of Artificial Sequence: Synthetic oligonucleotide
aacucacaggaggauggau

SEQ ID NO: 831796 - RNA, 19 nt, Artificial Sequence
  Description of Artificial Sequence: Synthetic oligonucleotide
gauccuuggggcaguguca

SEQ ID NO: 831797 - RNA, 19 nt, Artificial Sequence
  Description of Artificial Sequence: Synthetic oligonucleotide
gucgcuagcauaggagaac

SEQ ID NO: 831798 - RNA, 19 nt, Artificial Sequence
  Description of Artificial Sequence: Synthetic oligonucleotide
cucacccgucacauugaag

SEQ ID NO: 831799 - RNA, 19 nt, Artificial Sequence
  Description of Artificial Sequence: Synthetic oligonucleotide
gugucgaccauaggagccc

SEQ ID NO: 831800 - RNA, 19 nt, Artificial Sequence
  Description of Artificial Sequence: Synthetic oligonucleotide
cuaugccacaagaugcaaa

SEQ ID NO: 831801 - RNA, 19 nt, Artificial Sequence
  Description of Artificial Sequence: Synthetic oligonucleotide
gggaacccuagaauuaaug

SEQ ID NO: 831802 - RNA, 19 nt, Artificial Sequence
  Description of Artificial Sequence: Synthetic oligonucleotide
ggagucguuccagaaggag

SEQ ID NO: 831803 - RNA, 19 nt, Artificial Sequence
  Description of Artificial Sequence: Synthetic oligonucleotide
gugcugauugcauaccagu

SEQ ID NO: 831804 - RNA, 19 nt, Artificial Sequence
  Description of Artificial Sequence: Synthetic oligonucleotide
caggguucaugcuaucgaa

SEQ ID NO: 831805 - RNA, 19 nt, Artificial Sequence
  Description of Artificial Sequence: Synthetic oligonucleotide
cagggucuaaguagguaga

SEQ ID NO: 831806 - RNA, 19 nt, Artificial Sequence
  Description of Artificial Sequence: Synthetic oligonucleotide
gccaucagaccggagcugg

SEQ ID NO: 831807 - RNA, 19 nt, Artificial Sequence
  Description of Artificial Sequence: Synthetic oligonucleotide
gacagacaguuaaguaguc

SEQ ID NO: 831808 - RNA, 19 nt, Artificial Sequence
  Description of Artificial Sequence: Synthetic oligonucleotide
gucgaccuagacccucagc

SEQ ID NO: 831809 - RNA, 19 nt, Artificial Sequence
  Description of Artificial Sequence: Synthetic oligonucleotide
aucauagccccagccuuca

SEQ ID NO: 831810 - RNA, 19 nt, Artificial Sequence
  Description of Artificial Sequence: Synthetic oligonucleotide
caaguagcggaggggcaag

SEQ ID NO: 831811 - RNA, 19 nt, Artificial Sequence
  Description of Artificial Sequence: Synthetic oligonucleotide
acggaccacucuagaaggg

SEQ ID NO: 831812 - RNA, 19 nt, Artificial Sequence
  Description of Artificial Sequence: Synthetic oligonucleotide
guuccagaaggagccaguc

SEQ ID NO: 831813 - RNA, 19 nt, Artificial Sequence
  Description of Artificial Sequence: Synthetic oligonucleotide
acucgaccacaguaccagu

SEQ ID NO: 831814 - RNA, 19 nt, Artificial Sequence
  Description of Artificial Sequence: Synthetic oligonucleotide
ccauggguacaucacggac

SEQ ID NO: 831815 - RNA, 19 nt, Artificial Sequence
  Description of Artificial Sequence: Synthetic oligonucleotide
ugucgaccauaggagccca

SEQ ID NO: 831816 - RNA, 19 nt, Artificial Sequence
  Description of Artificial Sequence: Synthetic oligonucleotide
gaagcacuauaaacagcaa

SEQ ID NO: 831817 - RNA, 19 nt, Artificial Sequence
  Description of Artificial Sequence: Synthetic oligonucleotide
agucgcuagcauaggagaa

SEQ ID NO: 831818 - RNA, 19 nt, Artificial Sequence
  Description of Artificial Sequence: Synthetic oligonucleotide
acuaugccacaagaugcaa

SEQ ID NO: 831819 - RNA, 19 nt, Artificial Sequence
  Description of Artificial Sequence: Synthetic oligonucleotide
gccagucaaguuaaguuuc

SEQ ID NO: 831820 - RNA, 19 nt, Artificial Sequence
  Description of Artificial Sequence: Synthetic oligonucleotide
gucccggucacucgaccac

SEQ ID NO: 831821 - RNA, 19 nt, Artificial Sequence
  Description of Artificial Sequence: Synthetic oligonucleotide
ugccaucagaccggagcug

SEQ ID NO: 831822 - RNA, 19 nt, Artificial Sequence
  Description of Artificial Sequence: Synthetic oligonucleotide
agcgacuagccagaaugaa

SEQ ID NO: 831823 - RNA, 19 nt, Artificial Sequence
  Description of Artificial Sequence: Synthetic oligonucleotide
aaguagcggaggggcaaga

SEQ ID NO: 831824 - RNA, 19 nt, Artificial Sequence
  Description of Artificial Sequence: Synthetic oligonucleotide
caacacgucuuuauuuuau

SEQ ID NO: 831825 - RNA, 19 nt, Artificial Sequence
  Description of Artificial Sequence: Synthetic oligonucleotide
ugaugccaccugagucuga

SEQ ID NO: 831826 - RNA, 19 nt, Artificial Sequence
  Description of Artificial Sequence: Synthetic oligonucleotide
agggucuaaguagguagaa

SEQ ID NO: 831827 - RNA, 19 nt, Artificial Sequence
  Description of Artificial Sequence: Synthetic oligonucleotide
cugcauauugcugguaaua

SEQ ID NO: 831828 - RNA, 19 nt, Artificial Sequence
  Description of Artificial Sequence: Synthetic oligonucleotide
ggguagaagcgacuagcca

SEQ ID NO: 831829 - RNA, 19 nt, Artificial Sequence
  Description of Artificial Sequence: Synthetic oligonucleotide
gcggacugcaguaagagcu

SEQ ID NO: 831830 - RNA, 19 nt, Artificial Sequence
  Description of Artificial Sequence: Synthetic oligonucleotide
auccuuggggcagugucau

SEQ ID NO: 831831 - RNA, 19 nt, Artificial Sequence
  Description of Artificial Sequence: Synthetic oligonucleotide
ggaggggcaagaauaaaua

SEQ ID NO: 831832 - RNA, 19 nt, Artificial Sequence
  Description of Artificial Sequence: Synthetic oligonucleotide
ggcggacugcaguaagagc

SEQ ID NO: 831833 - RNA, 19 nt, Artificial Sequence
  Description of Artificial Sequence: Synthetic oligonucleotide
ccagagugagggcacguug

SEQ ID NO: 831834 - RNA, 19 nt, Artificial Sequence
  Description of Artificial Sequence: Synthetic oligonucleotide
gcgacuagccagaaugaac

SEQ ID NO: 831835 - RNA, 19 nt, Artificial Sequence
  Description of Artificial Sequence: Synthetic oligonucleotide
caugugaugccaccugagu

SEQ ID NO: 831836 - RNA, 19 nt, Artificial Sequence
  Description of Artificial Sequence: Synthetic oligonucleotide
cucaaggaaccucaaguuu

SEQ ID NO: 831837 - RNA, 19 nt, Artificial Sequence
  Description of Artificial Sequence: Synthetic oligonucleotide
gggcggacugcaguaagag

SEQ ID NO: 831838 - RNA, 19 nt, Artificial Sequence
  Description of Artificial Sequence: Synthetic oligonucleotide
augacaaccuagacaccaa

SEQ ID NO: 831839 - RNA, 19 nt, Artificial Sequence
  Description of Artificial Sequence: Synthetic oligonucleotide
caucacggaccacucuaga

SEQ ID NO: 831840 - RNA, 19 nt, Artificial Sequence
  Description of Artificial Sequence: Synthetic oligonucleotide
ucccggucacucgaccaca

SEQ ID NO: 831841 - RNA, 19 nt, Artificial Sequence
  Description of Artificial Sequence: Synthetic oligonucleotide
cugucgaccuagacccuca

SEQ ID NO: 831842 - RNA, 19 nt, Artificial Sequence
  Description of Artificial Sequence: Synthetic oligonucleotide
auaccacuguugccgccau

SEQ ID NO: 831843 - RNA, 19 nt, Artificial Sequence
  Description of Artificial Sequence: Synthetic oligonucleotide
ucccgugacuugggaaaca

SEQ ID NO: 831844 - RNA, 19 nt, Artificial Sequence
  Description of Artificial Sequence: Synthetic oligonucleotide
agacaggcugaggguacug

SEQ ID NO: 831845 - RNA, 19 nt, Artificial Sequence
  Description of Artificial Sequence: Synthetic oligonucleotide
agcggaggggcaagaauaa

SEQ ID NO: 831846 - RNA, 19 nt, Artificial Sequence
  Description of Artificial Sequence: Synthetic oligonucleotide
cgguguaagggacaucuuc

SEQ ID NO: 831847 - RNA, 19 nt, Artificial Sequence
  Description of Artificial Sequence: Synthetic oligonucleotide
cgacuagccagaaugaacu

SEQ ID NO: 831848 - RNA, 19 nt, Artificial Sequence
  Description of Artificial Sequence: Synthetic oligonucleotide
ggguacaucacggaccacu

SEQ ID NO: 831849 - RNA, 19 nt, Artificial Sequence
  Description of Artificial Sequence: Synthetic oligonucleotide
ugccagagugagggcacgu

SEQ ID NO: 831850 - RNA, 19 nt, Artificial Sequence
  Description of Artificial Sequence: Synthetic oligonucleotide
cacuguugccgccaucaua

SEQ ID NO: 831851 - RNA, 19 nt, Artificial Sequence
  Description of Artificial Sequence: Synthetic oligonucleotide
ggucccggucacucgacca

SEQ ID NO: 831852 - RNA, 19 nt, Artificial Sequence
  Description of Artificial Sequence: Synthetic oligonucleotide
gucccucaguagguugaag

SEQ ID NO: 831853 - RNA, 19 nt, Artificial Sequence
  Description of Artificial Sequence: Synthetic oligonucleotide
guacaucacggaccacucu

SEQ ID NO: 831854 - RNA, 19 nt, Artificial Sequence
  Description of Artificial Sequence: Synthetic oligonucleotide
gacuagccagaaugaacuu

SEQ ID NO: 831855 - RNA, 19 nt, Artificial Sequence
  Description of Artificial Sequence: Synthetic oligonucleotide
aggagucguuccagaagga

SEQ ID NO: 831856 - RNA, 19 nt, Artificial Sequence
  Description of Artificial Sequence: Synthetic oligonucleotide
cauccgcaucugagauacc

SEQ ID NO: 831857 - RNA, 19 nt, Artificial Sequence
  Description of Artificial Sequence: Synthetic oligonucleotide
augcugggucccgugacuu

SEQ ID NO: 831858 - RNA, 19 nt, Artificial Sequence
  Description of Artificial Sequence: Synthetic oligonucleotide
cagaccggagcuggcugug

SEQ ID NO: 831859 - RNA, 19 nt, Artificial Sequence
  Description of Artificial Sequence: Synthetic oligonucleotide
cgaccauaggagcccacag

SEQ ID NO: 831860 - RNA, 19 nt, Artificial Sequence
  Description of Artificial Sequence: Synthetic oligonucleotide
caaaacgauccauggucuu

SEQ ID NO: 831861 - RNA, 19 nt, Artificial Sequence
  Description of Artificial Sequence: Synthetic oligonucleotide
cccucaugugugucgacca

SEQ ID NO: 831862 - RNA, 19 nt, Artificial Sequence
  Description of Artificial Sequence: Synthetic oligonucleotide
gggucuaaguagguagaaa

SEQ ID NO: 831863 - RNA, 19 nt, Artificial Sequence
  Description of Artificial Sequence: Synthetic oligonucleotide
gcaaguagcggaggggcaa

SEQ ID NO: 831864 - RNA, 19 nt, Artificial Sequence
  Description of Artificial Sequence: Synthetic oligonucleotide
gcugucgaccuagacccuc

SEQ ID NO: 831865 - RNA, 19 nt, Artificial Sequence
  Description of Artificial Sequence: Synthetic oligonucleotide
ggauagccccagggaagcc

SEQ ID NO: 831866 - RNA, 19 nt, Artificial Sequence
  Description of Artificial Sequence: Synthetic oligonucleotide
cccggucacucgaccacag

SEQ ID NO: 831867 - RNA, 19 nt, Artificial Sequence
  Description of Artificial Sequence: Synthetic oligonucleotide
gacuagccccaagcuucuc

SEQ ID NO: 831868 - RNA, 19 nt, Artificial Sequence
  Description of Artificial Sequence: Synthetic oligonucleotide
uggguacaucacggaccac

SEQ ID NO: 831869 - RNA, 19 nt, Artificial Sequence
  Description of Artificial Sequence: Synthetic oligonucleotide
gucgaccauaggagcccac

SEQ ID NO: 831870 - RNA, 19 nt, Artificial Sequence
  Description of Artificial Sequence: Synthetic oligonucleotide
gcucacccgucacauugaa

SEQ ID NO: 831871 - RNA, 19 nt, Artificial Sequence
  Description of Artificial Sequence: Synthetic oligonucleotide
agcugucgaccuagacccu

SEQ ID NO: 831872 - RNA, 19 nt, Artificial Sequence
  Description of Artificial Sequence: Synthetic oligonucleotide
ccgcaucugagauaccacu

SEQ ID NO: 831873 - RNA, 19 nt, Artificial Sequence
  Description of Artificial Sequence: Synthetic oligonucleotide
cgaccuagacccucagcca

SEQ ID NO: 831874 - RNA, 19 nt, Artificial Sequence
  Description of Artificial Sequence: Synthetic oligonucleotide
ggggacuagccccaagcuu

SEQ ID NO: 831875 - RNA, 19 nt, Artificial Sequence
  Description of Artificial Sequence: Synthetic oligonucleotide
cggucacucgaccacagua

SEQ ID NO: 831876 - RNA, 19 nt, Artificial Sequence
  Description of Artificial Sequence: Synthetic oligonucleotide
caggacucgggcccaccgu

SEQ ID NO: 831877 - RNA, 19 nt, Artificial Sequence
  Description of Artificial Sequence: Synthetic oligonucleotide
cugcgguguaagggacauc

SEQ ID NO: 831878 - RNA, 19 nt, Artificial Sequence
  Description of Artificial Sequence: Synthetic oligonucleotide
cgucaaaacgauccauggu

SEQ ID NO: 831879 - RNA, 19 nt, Artificial Sequence
  Description of Artificial Sequence: Synthetic oligonucleotide
ccaguaucgggcagacacu

SEQ ID NO: 831880 - RNA, 19 nt, Artificial Sequence
  Description of Artificial Sequence: Synthetic oligonucleotide
cggaggggcaagaauaaau

SEQ ID NO: 831881 - RNA, 19 nt, Artificial Sequence
  Description of Artificial Sequence: Synthetic oligonucleotide
ccgccaucauagccccagc

SEQ ID NO: 831882 - RNA, 19 nt, Artificial Sequence
  Description of Artificial Sequence: Synthetic oligonucleotide
ccgucacauugaaggccug

SEQ ID NO: 831883 - RNA, 19 nt, Artificial Sequence
  Description of Artificial Sequence: Synthetic oligonucleotide
gcugcgguguaagggacau

SEQ ID NO: 831884 - RNA, 19 nt, Artificial Sequence
  Description of Artificial Sequence: Synthetic oligonucleotide
cagcuccuuuagaguagcu

SEQ ID NO: 831885 - RNA, 19 nt, Artificial Sequence
  Description of Artificial Sequence: Synthetic oligonucleotide
ggggcccuuguggucguca

SEQ ID NO: 831886 - RNA, 19 nt, Artificial Sequence
  Description of Artificial Sequence: Synthetic oligonucleotide
ggacuagccccaagcuucu

SEQ ID NO: 831887 - RNA, 19 nt, Artificial Sequence
  Description of Artificial Sequence: Synthetic oligonucleotide
cccuagaauuaauguuccu

SEQ ID NO: 831888 - RNA, 19 nt, Artificial Sequence
  Description of Artificial Sequence: Synthetic oligonucleotide
gcggaggggcaagaauaaa

SEQ ID NO: 831889 - RNA, 19 nt, Artificial Sequence
  Description of Artificial Sequence: Synthetic oligonucleotide
cccauccgcaucugagaua

SEQ ID NO: 831890 - RNA, 19 nt, Artificial Sequence
  Description of Artificial Sequence: Synthetic oligonucleotide
ccccauccgcaucugagau

SEQ ID NO: 831891 - RNA, 19 nt, Artificial Sequence
  Description of Artificial Sequence: Synthetic oligonucleotide
ggacucgggcccaccgugu

SEQ ID NO: 831892 - RNA, 19 nt, Artificial Sequence
  Description of Artificial Sequence: Synthetic oligonucleotide
ccucaugugugucgaccau

SEQ ID NO: 831893 - RNA, 19 nt, Artificial Sequence
  Description of Artificial Sequence: Synthetic oligonucleotide
ccgugacuugggaaacauu

SEQ ID NO: 831894 - RNA, 19 nt, Artificial Sequence
  Description of Artificial Sequence: Synthetic oligonucleotide
gcgguguaagggacaucuu

SEQ ID NO: 831895 - RNA, 19 nt, Artificial Sequence
  Description of Artificial Sequence: Synthetic oligonucleotide
cguuggucacaaggagauu

SEQ ID NO: 831896 - RNA, 19 nt, Artificial Sequence
  Description of Artificial Sequence: Synthetic oligonucleotide
aacauaaagggugauggcc

SEQ ID NO: 831897 - RNA, 19 nt, Artificial Sequence
  Description of Artificial Sequence: Synthetic oligonucleotide
acugugaccacauagaaca

SEQ ID NO: 831898 - RNA, 19 nt, Artificial Sequence
  Description of Artificial Sequence: Synthetic oligonucleotide
aauaaggaaagugacguag

SEQ ID NO: 831899 - RNA, 19 nt, Artificial Sequence
  Description of Artificial Sequence: Synthetic oligonucleotide
gauagaguugcagugaagg

SEQ ID NO: 831900 - RNA, 19 nt, Artificial Sequence
  Description of Artificial Sequence: Synthetic oligonucleotide
aaucagacaguaucucugg

SEQ ID NO: 831901 - RNA, 19 nt, Artificial Sequence
  Description of Artificial Sequence: Synthetic oligonucleotide
aauagaccacccuuuuggg

SEQ ID NO: 831902 - RNA, 19 nt, Artificial Sequence
  Description of Artificial Sequence: Synthetic oligonucleotide
auggcugacaaguuagggc

SEQ ID NO: 831903 - RNA, 19 nt, Artificial Sequence
  Description of Artificial Sequence: Synthetic oligonucleotide
gaccuuguuauccaugagg

SEQ ID NO: 831904 - RNA, 19 nt, Artificial Sequence
  Description of Artificial Sequence: Synthetic oligonucleotide
guuggaagacaccugaucc

SEQ ID NO: 831905 - RNA, 19 nt, Artificial Sequence
  Description of Artificial Sequence: Synthetic oligonucleotide
agugacguagaagaggagc

SEQ ID NO: 831906 - RNA, 19 nt, Artificial Sequence
  Description of Artificial Sequence: Synthetic oligonucleotide
auauugaaaaugaugccac

SEQ ID NO: 831907 - RNA, 19 nt, Artificial Sequence
  Description of Artificial Sequence: Synthetic oligonucleotide
gaauacagcugccauguag

SEQ ID NO: 831908 - RNA, 19 nt, Artificial Sequence
  Description of Artificial Sequence: Synthetic oligonucleotide
auugaaaaugaugccaccg

SEQ ID NO: 831909 - RNA, 19 nt, Artificial Sequence
  Description of Artificial Sequence: Synthetic oligonucleotide
uguuagauguggcaaagaa

SEQ ID NO: 831910 - RNA, 19 nt, Artificial Sequence
  Description of Artificial Sequence: Synthetic oligonucleotide
uagaccacccuuuugggag

SEQ ID NO: 831911 - RNA, 19 nt, Artificial Sequence
  Description of Artificial Sequence: Synthetic oligonucleotide
agagaaugccauccgaggg

SEQ ID NO: 831912 - RNA, 19 nt, Artificial Sequence
  Description of Artificial Sequence: Synthetic oligonucleotide
ugaagguuaggaauacagc

SEQ ID NO: 831913 - RNA, 19 nt, Artificial Sequence
  Description of Artificial Sequence: Synthetic oligonucleotide
aaagugacguagaagagga

SEQ ID NO: 831914 - RNA, 19 nt, Artificial Sequence
  Description of Artificial Sequence: Synthetic oligonucleotide
agguaaaguagccagaaaa

SEQ ID NO: 831915 - RNA, 19 nt, Artificial Sequence
  Description of Artificial Sequence: Synthetic oligonucleotide
caggauauugaaaaugaug

SEQ ID NO: 831916 - RNA, 19 nt, Artificial Sequence
  Description of Artificial Sequence: Synthetic oligonucleotide
aacacauagaggcccaggu

SEQ ID NO: 831917 - RNA, 19 nt, Artificial Sequence
  Description of Artificial Sequence: Synthetic oligonucleotide
ugugaguaggaccacaaua

SEQ ID NO: 831918 - RNA, 19 nt, Artificial Sequence
  Description of Artificial Sequence: Synthetic oligonucleotide
aagauguucaccaccucgg

SEQ ID NO: 831919 - RNA, 19 nt, Artificial Sequence
  Description of Artificial Sequence: Synthetic oligonucleotide
uggcugacaaguuagggca

SEQ ID NO: 831920 - RNA, 19 nt, Artificial Sequence
  Description of Artificial Sequence: Synthetic oligonucleotide
aguaggaccacaauaagga

SEQ ID NO: 831921 - RNA, 19 nt, Artificial Sequence
  Description of Artificial Sequence: Synthetic oligonucleotide
aggggagucaccccuaaac

SEQ ID NO: 831922 - RNA, 19 nt, Artificial Sequence
  Description of Artificial Sequence: Synthetic oligonucleotide
cauguagaaagcgaugucc

SEQ ID NO: 831923 - RNA, 19 nt, Artificial Sequence
  Description of Artificial Sequence: Synthetic oligonucleotide
aacuuugcugcggugacuc

SEQ ID NO: 831924 - RNA, 19 nt, Artificial Sequence
  Description of Artificial Sequence: Synthetic oligonucleotide
aagcaaccuagcccgacac

SEQ ID NO: 831925 - RNA, 19 nt, Artificial Sequence
  Description of Artificial Sequence: Synthetic oligonucleotide
uggaucucuguugaguucg

SEQ ID NO: 831926 - RNA, 19 nt, Artificial Sequence
  Description of Artificial Sequence: Synthetic oligonucleotide
ccaccaaucucauagaugc

SEQ ID NO: 831927 - RNA, 19 nt, Artificial Sequence
  Description of Artificial Sequence: Synthetic oligonucleotide
uagacccaaguacagagga

SEQ ID NO: 831928 - RNA, 19 nt, Artificial Sequence
  Description of Artificial Sequence: Synthetic oligonucleotide
agaaagagguaaaguagcc

SEQ ID NO: 831929 - RNA, 19 nt, Artificial Sequence
  Description of Artificial Sequence: Synthetic oligonucleotide
agagacaugcuacguugcc

SEQ ID NO: 831930 - RNA, 19 nt, Artificial Sequence
  Description of Artificial Sequence: Synthetic oligonucleotide
auuccgaucguccuuguca

SEQ ID NO: 831931 - RNA, 19 nt, Artificial Sequence
  Description of Artificial Sequence: Synthetic oligonucleotide
cacauagaacacauagagg

SEQ ID NO: 831932 - RNA, 19 nt, Artificial Sequence
  Description of Artificial Sequence: Synthetic oligonucleotide
agcgugaaaucugagaaag

SEQ ID NO: 831933 - RNA, 19 nt, Artificial Sequence
  Description of Artificial Sequence: Synthetic oligonucleotide
cuuccaauuccgaucgucc

SEQ ID NO: 831934 - RNA, 19 nt, Artificial Sequence
  Description of Artificial Sequence: Synthetic oligonucleotide
gucugagaaagccacuagg

SEQ ID NO: 831935 - RNA, 19 nt, Artificial Sequence
  Description of Artificial Sequence: Synthetic oligonucleotide
ucagacaguaucucuggug

SEQ ID NO: 831936 - RNA, 19 nt, Artificial Sequence
  Description of Artificial Sequence: Synthetic oligonucleotide
aaggaaagugacguagaag

SEQ ID NO: 831937 - RNA, 19 nt, Artificial Sequence
  Description of Artificial Sequence: Synthetic oligonucleotide
aguggcagaagaugccucg

SEQ ID NO: 831938 - RNA, 19 nt, Artificial Sequence
  Description of Artificial Sequence: Synthetic oligonucleotide
gaugccucgagguagucca

SEQ ID NO: 831939 - RNA, 19 nt, Artificial Sequence
  Description of Artificial Sequence: Synthetic oligonucleotide
gaugaccagcugcagacag

SEQ ID NO: 831940 - RNA, 19 nt, Artificial Sequence
  Description of Artificial Sequence: Synthetic oligonucleotide
gauguggcaaagaagguca

SEQ ID NO: 831941 - RNA, 19 nt, Artificial Sequence
  Description of Artificial Sequence: Synthetic oligonucleotide
uuaggaauacagcugccau

SEQ ID NO: 831942 - RNA, 19 nt, Artificial Sequence
  Description of Artificial Sequence: Synthetic oligonucleotide
agaccauaggucuugcuga

SEQ ID NO: 831943 - RNA, 19 nt, Artificial Sequence
  Description of Artificial Sequence: Synthetic oligonucleotide
agauguggcaaagaagguc

SEQ ID NO: 831944 - RNA, 19 nt, Artificial Sequence
  Description of Artificial Sequence: Synthetic oligonucleotide
agucagacccucuucaagu

SEQ ID NO: 831945 - RNA, 19 nt, Artificial Sequence
  Description of Artificial Sequence: Synthetic oligonucleotide
aagguuaggaauacagcug

SEQ ID NO: 831946 - RNA, 19 nt, Artificial Sequence
  Description of Artificial Sequence: Synthetic oligonucleotide
accacaauaaggaaaguga

SEQ ID NO: 831947 - RNA, 19 nt, Artificial Sequence
  Description of Artificial Sequence: Synthetic oligonucleotide
agaagaugccucgagguag

SEQ ID NO: 831948 - RNA, 19 nt, Artificial Sequence
  Description of Artificial Sequence: Synthetic oligonucleotide
uuagggcagaagaacuuug

SEQ ID NO: 831949 - RNA, 19 nt, Artificial Sequence
  Description of Artificial Sequence: Synthetic oligonucleotide
aaccuagcccgacacccac

SEQ ID NO: 831950 - RNA, 19 nt, Artificial Sequence
  Description of Artificial Sequence: Synthetic oligonucleotide
cagucuggccuauagagug

SEQ ID NO: 831951 - RNA, 19 nt, Artificial Sequence
  Description of Artificial Sequence: Synthetic oligonucleotide
acggacaccagugagaaga

SEQ ID NO: 831952 - RNA, 19 nt, Artificial Sequence
  Description of Artificial Sequence: Synthetic oligonucleotide
guuagauguggcaaagaag

SEQ ID NO: 831953 - RNA, 19 nt, Artificial Sequence
  Description of Artificial Sequence: Synthetic oligonucleotide
uguuggaagacaccugauc

SEQ ID NO: 831954 - RNA, 19 nt, Artificial Sequence
  Description of Artificial Sequence: Synthetic oligonucleotide
uggcagucgggauucaucc

SEQ ID NO: 831955 - RNA, 19 nt, Artificial Sequence
  Description of Artificial Sequence: Synthetic oligonucleotide
ugcagcaagcaaccuagcc

SEQ ID NO: 831956 - RNA, 19 nt, Artificial Sequence
  Description of Artificial Sequence: Synthetic oligonucleotide
gaaagcgaugucccugagg

SEQ ID NO: 831957 - RNA, 19 nt, Artificial Sequence
  Description of Artificial Sequence: Synthetic oligonucleotide
uugguagacccaaguacag

SEQ ID NO: 831958 - RNA, 19 nt, Artificial Sequence
  Description of Artificial Sequence: Synthetic oligonucleotide
ugauccgccggagauagag

SEQ ID NO: 831959 - RNA, 19 nt, Artificial Sequence
  Description of Artificial Sequence: Synthetic oligonucleotide
auaauagaccacccuuuug

SEQ ID NO: 831960 - RNA, 19 nt, Artificial Sequence
  Description of Artificial Sequence: Synthetic oligonucleotide
uccaugaggagcucucugc

SEQ ID NO: 831961 - RNA, 19 nt, Artificial Sequence
  Description of Artificial Sequence: Synthetic oligonucleotide
aauuccgaucguccuuguc

SEQ ID NO: 831962 - RNA, 19 nt, Artificial Sequence
  Description of Artificial Sequence: Synthetic oligonucleotide
uaaggaaagugacguagaa

SEQ ID NO: 831963 - RNA, 19 nt, Artificial Sequence
  Description of Artificial Sequence: Synthetic oligonucleotide
gaccacaauaaggaaagug

SEQ ID NO: 831964 - RNA, 19 nt, Artificial Sequence
  Description of Artificial Sequence: Synthetic oligonucleotide
ucuguuagauguggcaaag

SEQ ID NO: 831965 - RNA, 19 nt, Artificial Sequence
  Description of Artificial Sequence: Synthetic oligonucleotide
uugguguuggaagacaccu

SEQ ID NO: 831966 - RNA, 19 nt, Artificial Sequence
  Description of Artificial Sequence: Synthetic oligonucleotide
caugcuacguugccguugg

SEQ ID NO: 831967 - RNA, 19 nt, Artificial Sequence
  Description of Artificial Sequence: Synthetic oligonucleotide
gccuacaggacauugacug

SEQ ID NO: 831968 - RNA, 19 nt, Artificial Sequence
  Description of Artificial Sequence: Synthetic oligonucleotide
cuacaggacauugacuggg

SEQ ID NO: 831969 - RNA, 19 nt, Artificial Sequence
  Description of Artificial Sequence: Synthetic oligonucleotide
uuccgaucguccuugucag

SEQ ID NO: 831970 - RNA, 19 nt, Artificial Sequence
  Description of Artificial Sequence: Synthetic oligonucleotide
uaacccagugcccacgcca

SEQ ID NO: 831971 - RNA, 19 nt, Artificial Sequence
  Description of Artificial Sequence: Synthetic oligonucleotide
agacaugcuacguugccgu

SEQ ID NO: 831972 - RNA, 19 nt, Artificial Sequence
  Description of Artificial Sequence: Synthetic oligonucleotide
aauccccagacuaaagcug

SEQ ID NO: 831973 - RNA, 19 nt, Artificial Sequence
  Description of Artificial Sequence: Synthetic oligonucleotide
aaguuagggcagaagaacu

SEQ ID NO: 831974 - RNA, 19 nt, Artificial Sequence
  Description of Artificial Sequence: Synthetic oligonucleotide
agaagaacuuugcugcggu

SEQ ID NO: 831975 - RNA, 19 nt, Artificial Sequence
  Description of Artificial Sequence: Synthetic oligonucleotide
gaggccgguauucaucucc

SEQ ID NO: 831976 - RNA, 19 nt, Artificial Sequence
  Description of Artificial Sequence: Synthetic oligonucleotide
uagaaagcgaugucccuga

SEQ ID NO: 831977 - RNA, 19 nt, Artificial Sequence
  Description of Artificial Sequence: Synthetic oligonucleotide
caaguuagggcagaagaac

SEQ ID NO: 831978 - RNA, 19 nt, Artificial Sequence
  Description of Artificial Sequence: Synthetic oligonucleotide
accccuaaaccaccaggcc

SEQ ID NO: 831979 - RNA, 19 nt, Artificial Sequence
  Description of Artificial Sequence: Synthetic oligonucleotide
aaguacagaggaugacugu

SEQ ID NO: 831980 - RNA, 19 nt, Artificial Sequence
  Description of Artificial Sequence: Synthetic oligonucleotide
aguggccgcuuccaauucc

SEQ ID NO: 831981 - RNA, 19 nt, Artificial Sequence
  Description of Artificial Sequence: Synthetic oligonucleotide
ugugcccacgaucaccacc

SEQ ID NO: 831982 - RNA, 19 nt, Artificial Sequence
  Description of Artificial Sequence: Synthetic oligonucleotide
ggauauugaaaaugaugcc

SEQ ID NO: 831983 - RNA, 19 nt, Artificial Sequence
  Description of Artificial Sequence: Synthetic oligonucleotide
agagcuugagauuggugga

SEQ ID NO: 831984 - RNA, 19 nt, Artificial Sequence
  Description of Artificial Sequence: Synthetic oligonucleotide
auagaguugcagugaaggu

SEQ ID NO: 831985 - RNA, 19 nt, Artificial Sequence
  Description of Artificial Sequence: Synthetic oligonucleotide
uccacgacggguacuguga

SEQ ID NO: 831986 - RNA, 19 nt, Artificial Sequence
  Description of Artificial Sequence: Synthetic oligonucleotide
gagccuacaggacauugac

SEQ ID NO: 831987 - RNA, 19 nt, Artificial Sequence
  Description of Artificial Sequence: Synthetic oligonucleotide
uggccuauagagugagucc

SEQ ID NO: 831988 - RNA, 19 nt, Artificial Sequence
  Description of Artificial Sequence: Synthetic oligonucleotide
caccccuaaaccaccaggc

SEQ ID NO: 831989 - RNA, 19 nt, Artificial Sequence
  Description of Artificial Sequence: Synthetic oligonucleotide
ugcggugacucccaggauc

SEQ ID NO: 831990 - RNA, 19 nt, Artificial Sequence
  Description of Artificial Sequence: Synthetic oligonucleotide
ucagacggaagaccacgcc

SEQ ID NO: 831991 - RNA, 19 nt, Artificial Sequence
  Description of Artificial Sequence: Synthetic oligonucleotide
gcuacguugccguugguag

SEQ ID NO: 831992 - RNA, 19 nt, Artificial Sequence
  Description of Artificial Sequence: Synthetic oligonucleotide
agcaucuccaaugcuguuc

SEQ ID NO: 831993 - RNA, 19 nt, Artificial Sequence
  Description of Artificial Sequence: Synthetic oligonucleotide
gagggugagcccuaguaca

SEQ ID NO: 831994 - RNA, 19 nt, Artificial Sequence
  Description of Artificial Sequence: Synthetic oligonucleotide
agcaaccuagcccgacacc

SEQ ID NO: 831995 - RNA, 19 nt, Artificial Sequence
  Description of Artificial Sequence: Synthetic oligonucleotide
guugguagacccaaguaca

SEQ ID NO: 831996 - RNA, 19 nt, Artificial Sequence
  Description of Artificial Sequence: Synthetic oligonucleotide
cagacggaagaccacgccc

SEQ ID NO: 831997 - RNA, 19 nt, Artificial Sequence
  Description of Artificial Sequence: Synthetic oligonucleotide
agaccacccuuuugggagc

SEQ ID NO: 831998 - RNA, 19 nt, Artificial Sequence
  Description of Artificial Sequence: Synthetic oligonucleotide
acauaaagggugauggcca

SEQ ID NO: 831999 - RNA, 19 nt, Artificial Sequence
  Description of Artificial Sequence: Synthetic oligonucleotide
ccgguauucaucuccauag

SEQ ID NO: 832000 - RNA, 19 nt, Artificial Sequence
  Description of Artificial Sequence: Synthetic oligonucleotide
ucuguggcgugguuccggg

SEQ ID NO: 832001 - RNA, 19 nt, Artificial Sequence
  Description of Artificial Sequence: Synthetic oligonucleotide
uuugcugcggugacuccca

SEQ ID NO: 832002 - RNA, 19 nt, Artificial Sequence
  Description of Artificial Sequence: Synthetic oligonucleotide
acccucuucaagugaauca

SEQ ID NO: 832003 - RNA, 19 nt, Artificial Sequence
  Description of Artificial Sequence: Synthetic oligonucleotide
acuguggcagucgggauuc

SEQ ID NO: 832004 - RNA, 19 nt, Artificial Sequence
  Description of Artificial Sequence: Synthetic oligonucleotide
aaagccacuagggcgcuga

SEQ ID NO: 832005 - RNA, 19 nt, Artificial Sequence
  Description of Artificial Sequence: Synthetic oligonucleotide
acaguugaguggccgcuuc

SEQ ID NO: 832006 - RNA, 19 nt, Artificial Sequence
  Description of Artificial Sequence: Synthetic oligonucleotide
ucaggagccuacaggacau

SEQ ID NO: 832007 - RNA, 19 nt, Artificial Sequence
  Description of Artificial Sequence: Synthetic oligonucleotide
guaucucuggugucucagg

SEQ ID NO: 832008 - RNA, 19 nt, Artificial Sequence
  Description of Artificial Sequence: Synthetic oligonucleotide
uagaguugcagugaagguu

SEQ ID NO: 832009 - RNA, 19 nt, Artificial Sequence
  Description of Artificial Sequence: Synthetic oligonucleotide
uccgaggguagcccuggcg

SEQ ID NO: 832010 - RNA, 19 nt, Artificial Sequence
  Description of Artificial Sequence: Synthetic oligonucleotide
uuccaauuccgaucguccu

SEQ ID NO: 832011 - RNA, 19 nt, Artificial Sequence
  Description of Artificial Sequence: Synthetic oligonucleotide
agaugccucgagguagucc

SEQ ID NO: 832012 - RNA, 19 nt, Artificial Sequence
  Description of Artificial Sequence: Synthetic oligonucleotide
guugcucagacggaagacc

SEQ ID NO: 832013 - RNA, 19 nt, Artificial Sequence
  Description of Artificial Sequence: Synthetic oligonucleotide
gugaguaggaccacaauaa

SEQ ID NO: 832014 - RNA, 19 nt, Artificial Sequence
  Description of Artificial Sequence: Synthetic oligonucleotide
caccgaaacaggcagagaa

SEQ ID NO: 832015 - RNA, 19 nt, Artificial Sequence
  Description of Artificial Sequence: Synthetic oligonucleotide
gugucucaggcauggagug

SEQ ID NO: 832016 - RNA, 19 nt, Artificial Sequence
  Description of Artificial Sequence: Synthetic oligonucleotide
ugaguggccgcuuccaauu

SEQ ID NO: 832017 - RNA, 19 nt, Artificial Sequence
  Description of Artificial Sequence: Synthetic oligonucleotide
agagguaaaguagccagaa

SEQ ID NO: 832018 - RNA, 19 nt, Artificial Sequence
  Description of Artificial Sequence: Synthetic oligonucleotide
gaagaacuuugcugcggug

SEQ ID NO: 832019 - RNA, 19 nt, Artificial Sequence
  Description of Artificial Sequence: Synthetic oligonucleotide
accgaacagagccccaaug

SEQ ID NO: 832020 - RNA, 19 nt, Artificial Sequence
  Description of Artificial Sequence: Synthetic oligonucleotide
aagagguaaaguagccaga

SEQ ID NO: 832021 - RNA, 19 nt, Artificial Sequence
  Description of Artificial Sequence: Synthetic oligonucleotide
uagggcgcugaagauaucu

SEQ ID NO: 832022 - RNA, 19 nt, Artificial Sequence
  Description of Artificial Sequence: Synthetic oligonucleotide
ccacaauaaggaaagugac

SEQ ID NO: 832023 - RNA, 19 nt, Artificial Sequence
  Description of Artificial Sequence: Synthetic oligonucleotide
cccugcaccgaacagagcc

SEQ ID NO: 832024 - RNA, 19 nt, Artificial Sequence
  Description of Artificial Sequence: Synthetic oligonucleotide
cucagacggaagaccacgc

SEQ ID NO: 832025 - RNA, 19 nt, Artificial Sequence
  Description of Artificial Sequence: Synthetic oligonucleotide
uccaaauccccagacuaaa

SEQ ID NO: 832026 - RNA, 19 nt, Artificial Sequence
  Description of Artificial Sequence: Synthetic oligonucleotide
uguuucccauccuuuccac

SEQ ID NO: 832027 - RNA, 19 nt, Artificial Sequence
  Description of Artificial Sequence: Synthetic oligonucleotide
cuuugcugcggugacuccc

SEQ ID NO: 832028 - RNA, 19 nt, Artificial Sequence
  Description of Artificial Sequence: Synthetic oligonucleotide
cagacaguugaguggccgc

SEQ ID NO: 832029 - RNA, 19 nt, Artificial Sequence
  Description of Artificial Sequence: Synthetic oligonucleotide
auaaggaaagugacguaga

SEQ ID NO: 832030 - RNA, 19 nt, Artificial Sequence
  Description of Artificial Sequence: Synthetic oligonucleotide
agaguugcagugaagguua

SEQ ID NO: 832031 - RNA, 19 nt, Artificial Sequence
  Description of Artificial Sequence: Synthetic oligonucleotide
ggaccagagacaugcuacg

SEQ ID NO: 832032 - RNA, 19 nt, Artificial Sequence
  Description of Artificial Sequence: Synthetic oligonucleotide
gaugccaccgaaacaggca

SEQ ID NO: 832033 - RNA, 19 nt, Artificial Sequence
  Description of Artificial Sequence: Synthetic oligonucleotide
agcgaugucccugaggaaa

SEQ ID NO: 832034 - RNA, 19 nt, Artificial Sequence
  Description of Artificial Sequence: Synthetic oligonucleotide
gacugugaccacauagaac

SEQ ID NO: 832035 - RNA, 19 nt, Artificial Sequence
  Description of Artificial Sequence: Synthetic oligonucleotide
gucagacccucuucaagug

SEQ ID NO: 832036 - RNA, 19 nt, Artificial Sequence
  Description of Artificial Sequence: Synthetic oligonucleotide
uccaauuccgaucguccuu

SEQ ID NO: 832037 - RNA, 19 nt, Artificial Sequence
  Description of Artificial Sequence: Synthetic oligonucleotide
ugucaggauccacgacggg

SEQ ID NO: 832038 - RNA, 19 nt, Artificial Sequence
  Description of Artificial Sequence: Synthetic oligonucleotide
gacuaggcugagucccagg

SEQ ID NO: 832039 - RNA, 19 nt, Artificial Sequence
  Description of Artificial Sequence: Synthetic oligonucleotide
acuagggcgcugaagauau

SEQ ID NO: 832040 - RNA, 19 nt, Artificial Sequence
  Description of Artificial Sequence: Synthetic oligonucleotide
gacggguacugugagcagc

SEQ ID NO: 832041 - RNA, 19 nt, Artificial Sequence
  Description of Artificial Sequence: Synthetic oligonucleotide
gugcgugggucugagaaag

SEQ ID NO: 832042 - RNA, 19 nt, Artificial Sequence
  Description of Artificial Sequence: Synthetic oligonucleotide
ccuaguacaguguugcuca

SEQ ID NO: 832043 - RNA, 19 nt, Artificial Sequence
  Description of Artificial Sequence: Synthetic oligonucleotide
augccauccgaggguagcc

SEQ ID NO: 832044 - RNA, 19 nt, Artificial Sequence
  Description of Artificial Sequence: Synthetic oligonucleotide
gcaaucugcagcaagcaac

SEQ ID NO: 832045 - RNA, 19 nt, Artificial Sequence
  Description of Artificial Sequence: Synthetic oligonucleotide
gagcuugagauugguggag

SEQ ID NO: 832046 - RNA, 19 nt, Artificial Sequence
  Description of Artificial Sequence: Synthetic oligonucleotide
agcgugauccgccggagau

SEQ ID NO: 832047 - RNA, 19 nt, Artificial Sequence
  Description of Artificial Sequence: Synthetic oligonucleotide
ugaguccccuugagguagg

SEQ ID NO: 832048 - RNA, 19 nt, Artificial Sequence
  Description of Artificial Sequence: Synthetic oligonucleotide
auccacgacggguacugug

SEQ ID NO: 832049 - RNA, 19 nt, Artificial Sequence
  Description of Artificial Sequence: Synthetic oligonucleotide
ccgaacagagccccaaugg

SEQ ID NO: 832050 - RNA, 19 nt, Artificial Sequence
  Description of Artificial Sequence: Synthetic oligonucleotide
cacgccagcgugauccgcc

SEQ ID NO: 832051 - RNA, 19 nt, Artificial Sequence
  Description of Artificial Sequence: Synthetic oligonucleotide
ggggagucaccccuaaacc

SEQ ID NO: 832052 - RNA, 19 nt, Artificial Sequence
  Description of Artificial Sequence: Synthetic oligonucleotide
gagaaugccauccgagggu

SEQ ID NO: 832053 - RNA, 19 nt, Artificial Sequence
  Description of Artificial Sequence: Synthetic oligonucleotide
gcagaagaacuuugcugcg

SEQ ID NO: 832054 - RNA, 19 nt, Artificial Sequence
  Description of Artificial Sequence: Synthetic oligonucleotide
gccacuagggcgcugaaga

SEQ ID NO: 832055 - RNA, 19 nt, Artificial Sequence
  Description of Artificial Sequence: Synthetic oligonucleotide
agcacccacaccagcaguc

SEQ ID NO: 832056 - RNA, 19 nt, Artificial Sequence
  Description of Artificial Sequence: Synthetic oligonucleotide
accagagacaugcuacguu

SEQ ID NO: 832057 - RNA, 19 nt, Artificial Sequence
  Description of Artificial Sequence: Synthetic oligonucleotide
ugaccagcugcagacaguu

SEQ ID NO: 832058 - RNA, 19 nt, Artificial Sequence
  Description of Artificial Sequence: Synthetic oligonucleotide
gcaaccuagcccgacaccc

SEQ ID NO: 832059 - RNA, 19 nt, Artificial Sequence
  Description of Artificial Sequence: Synthetic oligonucleotide
cauugauccacaaggcacu

SEQ ID NO: 832060 - RNA, 19 nt, Artificial Sequence
  Description of Artificial Sequence: Synthetic oligonucleotide
agcaagaacuccacaggca

SEQ ID NO: 832061 - RNA, 19 nt, Artificial Sequence
  Description of Artificial Sequence: Synthetic oligonucleotide
gacggaagaccacgcccag

SEQ ID NO: 832062 - RNA, 19 nt, Artificial Sequence
  Description of Artificial Sequence: Synthetic oligonucleotide
auccgccggagauagaguu

SEQ ID NO: 832063 - RNA, 19 nt, Artificial Sequence
  Description of Artificial Sequence: Synthetic oligonucleotide
ugcucagacggaagaccac

SEQ ID NO: 832064 - RNA, 19 nt, Artificial Sequence
  Description of Artificial Sequence: Synthetic oligonucleotide
caccaaucucauagaugcc

SEQ ID NO: 832065 - RNA, 19 nt, Artificial Sequence
  Description of Artificial Sequence: Synthetic oligonucleotide
acaugcuacguugccguug

SEQ ID NO: 832066 - RNA, 19 nt, Artificial Sequence
  Description of Artificial Sequence: Synthetic oligonucleotide
agacggaagaccacgccca

SEQ ID NO: 832067 - RNA, 19 nt, Artificial Sequence
  Description of Artificial Sequence: Synthetic oligonucleotide
cguugguagacccaaguac

SEQ ID NO: 832068 - RNA, 19 nt, Artificial Sequence
  Description of Artificial Sequence: Synthetic oligonucleotide
aguguugcucagacggaag

SEQ ID NO: 832069 - RNA, 19 nt, Artificial Sequence
  Description of Artificial Sequence: Synthetic oligonucleotide
gcaagaacuccacaggcaa

SEQ ID NO: 832070 - RNA, 19 nt, Artificial Sequence
  Description of Artificial Sequence: Synthetic oligonucleotide
ugcugcggugacucccagg

SEQ ID NO: 832071 - RNA, 19 nt, Artificial Sequence
  Description of Artificial Sequence: Synthetic oligonucleotide
cagugcgugggucugagaa

SEQ ID NO: 832072 - RNA, 19 nt, Artificial Sequence
  Description of Artificial Sequence: Synthetic oligonucleotide
agggaccucaagauguuca

SEQ ID NO: 832073 - RNA, 19 nt, Artificial Sequence
  Description of Artificial Sequence: Synthetic oligonucleotide
uccgaucguccuugucagg

SEQ ID NO: 832074 - RNA, 19 nt, Artificial Sequence
  Description of Artificial Sequence: Synthetic oligonucleotide
cucacuguggcagucggga

SEQ ID NO: 832075 - RNA, 19 nt, Artificial Sequence
  Description of Artificial Sequence: Synthetic oligonucleotide
guggccgcuuccaauuccg

SEQ ID NO: 832076 - RNA, 19 nt, Artificial Sequence
  Description of Artificial Sequence: Synthetic oligonucleotide
auucugugaguaggaccac

SEQ ID NO: 832077 - RNA, 19 nt, Artificial Sequence
  Description of Artificial Sequence: Synthetic oligonucleotide
auacagcugccauguagaa

SEQ ID NO: 832078 - RNA, 19 nt, Artificial Sequence
  Description of Artificial Sequence: Synthetic oligonucleotide
gggagucaccccuaaacca

SEQ ID NO: 832079 - RNA, 19 nt, Artificial Sequence
  Description of Artificial Sequence: Synthetic oligonucleotide
aggcacuggucaggaagcc

SEQ ID NO: 832080 - RNA, 19 nt, Artificial Sequence
  Description of Artificial Sequence: Synthetic oligonucleotide
guaggaccacaauaaggaa

SEQ ID NO: 832081 - RNA, 19 nt, Artificial Sequence
  Description of Artificial Sequence: Synthetic oligonucleotide
agauaucuggggcuccguu

SEQ ID NO: 832082 - RNA, 19 nt, Artificial Sequence
  Description of Artificial Sequence: Synthetic oligonucleotide
agugcgugggucugagaaa

SEQ ID NO: 832083 - RNA, 19 nt, Artificial Sequence
  Description of Artificial Sequence: Synthetic oligonucleotide
aguugaguggccgcuucca

SEQ ID NO: 832084 - RNA, 19 nt, Artificial Sequence
  Description of Artificial Sequence: Synthetic oligonucleotide
aagugacguagaagaggag

SEQ ID NO: 832085 - RNA, 19 nt, Artificial Sequence
  Description of Artificial Sequence: Synthetic oligonucleotide
gcugcggugacucccagga

SEQ ID NO: 832086 - RNA, 19 nt, Artificial Sequence
  Description of Artificial Sequence: Synthetic oligonucleotide
cucuguuagauguggcaaa

SEQ ID NO: 832087 - RNA, 19 nt, Artificial Sequence
  Description of Artificial Sequence: Synthetic oligonucleotide
gccacuacaguggugacca

SEQ ID NO: 832088 - RNA, 19 nt, Artificial Sequence
  Description of Artificial Sequence: Synthetic oligonucleotide
aggagccuacaggacauug

SEQ ID NO: 832089 - RNA, 19 nt, Artificial Sequence
  Description of Artificial Sequence: Synthetic oligonucleotide
ggagucaccccuaaaccac

SEQ ID NO: 832090 - RNA, 19 nt, Artificial Sequence
  Description of Artificial Sequence: Synthetic oligonucleotide
cauugacuggguccuccac

SEQ ID NO: 832091 - RNA, 19 nt, Artificial Sequence
  Description of Artificial Sequence: Synthetic oligonucleotide
uaguacaguguugcucaga

SEQ ID NO: 832092 - RNA, 19 nt, Artificial Sequence
  Description of Artificial Sequence: Synthetic oligonucleotide
agguaacccagugcccacg

SEQ ID NO: 832093 - RNA, 19 nt, Artificial Sequence
  Description of Artificial Sequence: Synthetic oligonucleotide
cuaaaccaccaggccaagc

SEQ ID NO: 832094 - RNA, 19 nt, Artificial Sequence
  Description of Artificial Sequence: Synthetic oligonucleotide
gacccucuucaagugaauc

SEQ ID NO: 832095 - RNA, 19 nt, Artificial Sequence
  Description of Artificial Sequence: Synthetic oligonucleotide
agggugagcccuaguacag

SEQ ID NO: 832096 - RNA, 19 nt, Artificial Sequence
  Description of Artificial Sequence: Synthetic oligonucleotide
ucccucacuguggcagucg

SEQ ID NO: 832097 - RNA, 19 nt, Artificial Sequence
  Description of Artificial Sequence: Synthetic oligonucleotide
gcagacaguugaguggccg

SEQ ID NO: 832098 - RNA, 19 nt, Artificial Sequence
  Description of Artificial Sequence: Synthetic oligonucleotide
ccgaggguagcccuggcgg

SEQ ID NO: 832099 - RNA, 19 nt, Artificial Sequence
  Description of Artificial Sequence: Synthetic oligonucleotide
ccuccggccacuacagugg

SEQ ID NO: 832100 - RNA, 19 nt, Artificial Sequence
  Description of Artificial Sequence: Synthetic oligonucleotide
cugugaccacauagaacac

SEQ ID NO: 832101 - RNA, 19 nt, Artificial Sequence
  Description of Artificial Sequence: Synthetic oligonucleotide
cagugaagguuaggaauac

SEQ ID NO: 832102 - RNA, 19 nt, Artificial Sequence
  Description of Artificial Sequence: Synthetic oligonucleotide
guacagaggaugacuguga

SEQ ID NO: 832103 - RNA, 19 nt, Artificial Sequence
  Description of Artificial Sequence: Synthetic oligonucleotide
agcggcacggacaccagug

SEQ ID NO: 832104 - RNA, 19 nt, Artificial Sequence
  Description of Artificial Sequence: Synthetic oligonucleotide
ugcuacguugccguuggua

SEQ ID NO: 832105 - RNA, 19 nt, Artificial Sequence
  Description of Artificial Sequence: Synthetic oligonucleotide
agacaguugaguggccgcu

SEQ ID NO: 832106 - RNA, 19 nt, Artificial Sequence
  Description of Artificial Sequence: Synthetic oligonucleotide
caguugaguggccgcuucc

SEQ ID NO: 832107 - RNA, 19 nt, Artificial Sequence
  Description of Artificial Sequence: Synthetic oligonucleotide
ugcgugggucugagaaagc

SEQ ID NO: 832108 - RNA, 19 nt, Artificial Sequence
  Description of Artificial Sequence: Synthetic oligonucleotide
cugcaccgaacagagcccc

SEQ ID NO: 832109 - RNA, 19 nt, Artificial Sequence
  Description of Artificial Sequence: Synthetic oligonucleotide
ggagauagaguugcaguga

SEQ ID NO: 832110 - RNA, 19 nt, Artificial Sequence
  Description of Artificial Sequence: Synthetic oligonucleotide
ggggcucucuguuagaugu

SEQ ID NO: 832111 - RNA, 19 nt, Artificial Sequence
  Description of Artificial Sequence: Synthetic oligonucleotide
aguuagggcagaagaacuu

SEQ ID NO: 832112 - RNA, 19 nt, Artificial Sequence
  Description of Artificial Sequence: Synthetic oligonucleotide
cagacccucuucaagugaa

SEQ ID NO: 832113 - RNA, 19 nt, Artificial Sequence
  Description of Artificial Sequence: Synthetic oligonucleotide
uggugaugccuccggccac

SEQ ID NO: 832114 - RNA, 19 nt, Artificial Sequence
  Description of Artificial Sequence: Synthetic oligonucleotide
cacgacggguacugugagc

SEQ ID NO: 832115 - RNA, 19 nt, Artificial Sequence
  Description of Artificial Sequence: Synthetic oligonucleotide
ugccguugguagacccaag

SEQ ID NO: 832116 - RNA, 19 nt, Artificial Sequence
  Description of Artificial Sequence: Synthetic oligonucleotide
auccgaggguagcccuggc

SEQ ID NO: 832117 - RNA, 19 nt, Artificial Sequence
  Description of Artificial Sequence: Synthetic oligonucleotide
gguaacccagugcccacgc

SEQ ID NO: 832118 - RNA, 19 nt, Artificial Sequence
  Description of Artificial Sequence: Synthetic oligonucleotide
agaaugccauccgagggua

SEQ ID NO: 832119 - RNA, 19 nt, Artificial Sequence
  Description of Artificial Sequence: Synthetic oligonucleotide
ggauccacgacggguacug

SEQ ID NO: 832120 - RNA, 19 nt, Artificial Sequence
  Description of Artificial Sequence: Synthetic oligonucleotide
caagcaaccuagcccgaca

SEQ ID NO: 832121 - RNA, 19 nt, Artificial Sequence
  Description of Artificial Sequence: Synthetic oligonucleotide
ugccauccgaggguagccc

SEQ ID NO: 832122 - RNA, 19 nt, Artificial Sequence
  Description of Artificial Sequence: Synthetic oligonucleotide
ccgaaacaggcagagaaug

SEQ ID NO: 832123 - RNA, 19 nt, Artificial Sequence
  Description of Artificial Sequence: Synthetic oligonucleotide
ccucuucaagugaaucacc

SEQ ID NO: 832124 - RNA, 19 nt, Artificial Sequence
  Description of Artificial Sequence: Synthetic oligonucleotide
uccccagacuaaagcugcu

SEQ ID NO: 832125 - RNA, 19 nt, Artificial Sequence
  Description of Artificial Sequence: Synthetic oligonucleotide
ccuuguuauccaugaggag

SEQ ID NO: 832126 - RNA, 19 nt, Artificial Sequence
  Description of Artificial Sequence: Synthetic oligonucleotide
caauaaggaaagugacgua

SEQ ID NO: 832127 - RNA, 19 nt, Artificial Sequence
  Description of Artificial Sequence: Synthetic oligonucleotide
ugcaccgaacagagcccca

SEQ ID NO: 832128 - RNA, 19 nt, Artificial Sequence
  Description of Artificial Sequence: Synthetic oligonucleotide
cagguaacccagugcccac

SEQ ID NO: 832129 - RNA, 19 nt, Artificial Sequence
  Description of Artificial Sequence: Synthetic oligonucleotide
gggagcuacacaggaacug

SEQ ID NO: 832130 - RNA, 19 nt, Artificial Sequence
  Description of Artificial Sequence: Synthetic oligonucleotide
gccuccggccacuacagug

SEQ ID NO: 832131 - RNA, 19 nt, Artificial Sequence
  Description of Artificial Sequence: Synthetic oligonucleotide
gaaugccauccgaggguag

SEQ ID NO: 832132 - RNA, 19 nt, Artificial Sequence
  Description of Artificial Sequence: Synthetic oligonucleotide
cuacguugccguugguaga

SEQ ID NO: 832133 - RNA, 19 nt, Artificial Sequence
  Description of Artificial Sequence: Synthetic oligonucleotide
gaguugcagugaagguuag

SEQ ID NO: 832134 - RNA, 19 nt, Artificial Sequence
  Description of Artificial Sequence: Synthetic oligonucleotide
caucuccaaugcuguuccc

SEQ ID NO: 832135 - RNA, 19 nt, Artificial Sequence
  Description of Artificial Sequence: Synthetic oligonucleotide
ggcaauaauagaccacccu

SEQ ID NO: 832136 - RNA, 19 nt, Artificial Sequence
  Description of Artificial Sequence: Synthetic oligonucleotide
cccucuucaagugaaucac

SEQ ID NO: 832137 - RNA, 19 nt, Artificial Sequence
  Description of Artificial Sequence: Synthetic oligonucleotide
accuagcccgacacccacc

SEQ ID NO: 832138 - RNA, 19 nt, Artificial Sequence
  Description of Artificial Sequence: Synthetic oligonucleotide
gagcccuaguacaguguug

SEQ ID NO: 832139 - RNA, 19 nt, Artificial Sequence
  Description of Artificial Sequence: Synthetic oligonucleotide
augccuccggccacuacag

SEQ ID NO: 832140 - RNA, 19 nt, Artificial Sequence
  Description of Artificial Sequence: Synthetic oligonucleotide
ccaauuccgaucguccuug

SEQ ID NO: 832141 - RNA, 19 nt, Artificial Sequence
  Description of Artificial Sequence: Synthetic oligonucleotide
acggguacugugagcagca

SEQ ID NO: 832142 - RNA, 19 nt, Artificial Sequence
  Description of Artificial Sequence: Synthetic oligonucleotide
gaguggccgcuuccaauuc

SEQ ID NO: 832143 - RNA, 19 nt, Artificial Sequence
  Description of Artificial Sequence: Synthetic oligonucleotide
ggggcuccguucccaaagg

SEQ ID NO: 832144 - RNA, 19 nt, Artificial Sequence
  Description of Artificial Sequence: Synthetic oligonucleotide
accgaaacaggcagagaau

SEQ ID NO: 832145 - RNA, 19 nt, Artificial Sequence
  Description of Artificial Sequence: Synthetic oligonucleotide
gucaggauccacgacgggu

SEQ ID NO: 832146 - RNA, 19 nt, Artificial Sequence
  Description of Artificial Sequence: Synthetic oligonucleotide
caguggucuccugacccag

SEQ ID NO: 832147 - RNA, 19 nt, Artificial Sequence
  Description of Artificial Sequence: Synthetic oligonucleotide
gaagcggcacggacaccag

SEQ ID NO: 832148 - RNA, 19 nt, Artificial Sequence
  Description of Artificial Sequence: Synthetic oligonucleotide
guggcagucgggauucauc

SEQ ID NO: 832149 - RNA, 19 nt, Artificial Sequence
  Description of Artificial Sequence: Synthetic oligonucleotide
uggccgcuuccaauuccga

SEQ ID NO: 832150 - RNA, 19 nt, Artificial Sequence
  Description of Artificial Sequence: Synthetic oligonucleotide
agggcgcugaagauaucug

SEQ ID NO: 832151 - RNA, 19 nt, Artificial Sequence
  Description of Artificial Sequence: Synthetic oligonucleotide
gaagaugccucgagguagu

SEQ ID NO: 832152 - RNA, 19 nt, Artificial Sequence
  Description of Artificial Sequence: Synthetic oligonucleotide
cugccauguagaaagcgau

SEQ ID NO: 832153 - RNA, 19 nt, Artificial Sequence
  Description of Artificial Sequence: Synthetic oligonucleotide
agccacuagggcgcugaag

SEQ ID NO: 832154 - RNA, 19 nt, Artificial Sequence
  Description of Artificial Sequence: Synthetic oligonucleotide
ggaccucaagauguucacc

SEQ ID NO: 832155 - RNA, 19 nt, Artificial Sequence
  Description of Artificial Sequence: Synthetic oligonucleotide
ggcaaagagccagugaagu

SEQ ID NO: 832156 - RNA, 19 nt, Artificial Sequence
  Description of Artificial Sequence: Synthetic oligonucleotide
caaccuagcccgacaccca

SEQ ID NO: 832157 - RNA, 19 nt, Artificial Sequence
  Description of Artificial Sequence: Synthetic oligonucleotide
agucuggccuauagaguga

SEQ ID NO: 832158 - RNA, 19 nt, Artificial Sequence
  Description of Artificial Sequence: Synthetic oligonucleotide
ggagagcuugagauuggug

SEQ ID NO: 832159 - RNA, 19 nt, Artificial Sequence
  Description of Artificial Sequence: Synthetic oligonucleotide
guugccguugguagaccca

SEQ ID NO: 832160 - RNA, 19 nt, Artificial Sequence
  Description of Artificial Sequence: Synthetic oligonucleotide
ccauguagaaagcgauguc

SEQ ID NO: 832161 - RNA, 19 nt, Artificial Sequence
  Description of Artificial Sequence: Synthetic oligonucleotide
aagccacuagggcgcugaa

SEQ ID NO: 832162 - RNA, 19 nt, Artificial Sequence
  Description of Artificial Sequence: Synthetic oligonucleotide
agcccgacacccaccagga

SEQ ID NO: 832163 - RNA, 19 nt, Artificial Sequence
  Description of Artificial Sequence: Synthetic oligonucleotide
gcuuccaauuccgaucguc

SEQ ID NO: 832164 - RNA, 19 nt, Artificial Sequence
  Description of Artificial Sequence: Synthetic oligonucleotide
ggugucucaggcauggagu

SEQ ID NO: 832165 - RNA, 19 nt, Artificial Sequence
  Description of Artificial Sequence: Synthetic oligonucleotide
gccauguagaaagcgaugu

SEQ ID NO: 832166 - RNA, 19 nt, Artificial Sequence
  Description of Artificial Sequence: Synthetic oligonucleotide
gccgguggaucucuguuga

SEQ ID NO: 832167 - RNA, 19 nt, Artificial Sequence
  Description of Artificial Sequence: Synthetic oligonucleotide
ggcuuggaucaggaucugg

SEQ ID NO: 832168 - RNA, 19 nt, Artificial Sequence
  Description of Artificial Sequence: Synthetic oligonucleotide
cuguuagauguggcaaaga

SEQ ID NO: 832169 - RNA, 19 nt, Artificial Sequence
  Description of Artificial Sequence: Synthetic oligonucleotide
augaccagcugcagacagu

SEQ ID NO: 832170 - RNA, 19 nt, Artificial Sequence
  Description of Artificial Sequence: Synthetic oligonucleotide
cccuaaaccaccaggccaa

SEQ ID NO: 832171 - RNA, 19 nt, Artificial Sequence
  Description of Artificial Sequence: Synthetic oligonucleotide
cacggacaccagugagaag

SEQ ID NO: 832172 - RNA, 19 nt, Artificial Sequence
  Description of Artificial Sequence: Synthetic oligonucleotide
ggggugguccccagcaaag

SEQ ID NO: 832173 - RNA, 19 nt, Artificial Sequence
  Description of Artificial Sequence: Synthetic oligonucleotide
guuagggcagaagaacuuu

SEQ ID NO: 832174 - RNA, 19 nt, Artificial Sequence
  Description of Artificial Sequence: Synthetic oligonucleotide
cuguggcgugguuccgggc

SEQ ID NO: 832175 - RNA, 19 nt, Artificial Sequence
  Description of Artificial Sequence: Synthetic oligonucleotide
ccccuaaaccaccaggcca

SEQ ID NO: 832176 - RNA, 19 nt, Artificial Sequence
  Description of Artificial Sequence: Synthetic oligonucleotide
cuagcccgacacccaccag

SEQ ID NO: 832177 - RNA, 19 nt, Artificial Sequence
  Description of Artificial Sequence: Synthetic oligonucleotide
cccuaguacaguguugcuc

SEQ ID NO: 832178 - RNA, 19 nt, Artificial Sequence
  Description of Artificial Sequence: Synthetic oligonucleotide
ggagccuacaggacauuga

SEQ ID NO: 832179 - RNA, 19 nt, Artificial Sequence
  Description of Artificial Sequence: Synthetic oligonucleotide
aguccccuugagguaggca

SEQ ID NO: 832180 - RNA, 19 nt, Artificial Sequence
  Description of Artificial Sequence: Synthetic oligonucleotide
aggauccacgacggguacu

SEQ ID NO: 832181 - RNA, 19 nt, Artificial Sequence
  Description of Artificial Sequence: Synthetic oligonucleotide
gccuauagagugagucccc

SEQ ID NO: 832182 - RNA, 19 nt, Artificial Sequence
  Description of Artificial Sequence: Synthetic oligonucleotide
gaccagcugcagacaguug

SEQ ID NO: 832183 - RNA, 19 nt, Artificial Sequence
  Description of Artificial Sequence: Synthetic oligonucleotide
aguggaccagagacaugcu

SEQ ID NO: 832184 - RNA, 19 nt, Artificial Sequence
  Description of Artificial Sequence: Synthetic oligonucleotide
ugccuccggccacuacagu

SEQ ID NO: 832185 - RNA, 19 nt, Artificial Sequence
  Description of Artificial Sequence: Synthetic oligonucleotide
cguugccguugguagaccc

SEQ ID NO: 832186 - RNA, 19 nt, Artificial Sequence
  Description of Artificial Sequence: Synthetic oligonucleotide
gcccagggaccucaagaug

SEQ ID NO: 832187 - RNA, 19 nt, Artificial Sequence
  Description of Artificial Sequence: Synthetic oligonucleotide
guggcagaagaugccucga

SEQ ID NO: 832188 - RNA, 19 nt, Artificial Sequence
  Description of Artificial Sequence: Synthetic oligonucleotide
gcgugaaaucugagaaagc

SEQ ID NO: 832189 - RNA, 19 nt, Artificial Sequence
  Description of Artificial Sequence: Synthetic oligonucleotide
cacuagggcgcugaagaua

SEQ ID NO: 832190 - RNA, 19 nt, Artificial Sequence
  Description of Artificial Sequence: Synthetic oligonucleotide
cacgcccagggaccucaag

SEQ ID NO: 832191 - RNA, 19 nt, Artificial Sequence
  Description of Artificial Sequence: Synthetic oligonucleotide
gccgguauucaucuccaua

SEQ ID NO: 832192 - RNA, 19 nt, Artificial Sequence
  Description of Artificial Sequence: Synthetic oligonucleotide
gcaguggucuccugaccca

SEQ ID NO: 832193 - RNA, 19 nt, Artificial Sequence
  Description of Artificial Sequence: Synthetic oligonucleotide
cuagggcgcugaagauauc

SEQ ID NO: 832194 - RNA, 19 nt, Artificial Sequence
  Description of Artificial Sequence: Synthetic oligonucleotide
caguggugaccagcacccc

SEQ ID NO: 832195 - RNA, 19 nt, Artificial Sequence
  Description of Artificial Sequence: Synthetic oligonucleotide
ccacgacggguacugugag

SEQ ID NO: 832196 - RNA, 19 nt, Artificial Sequence
  Description of Artificial Sequence: Synthetic oligonucleotide
gcugacaaguuagggcaga

SEQ ID NO: 832197 - RNA, 19 nt, Artificial Sequence
  Description of Artificial Sequence: Synthetic oligonucleotide
gggugguccccagcaaagc

SEQ ID NO: 832198 - RNA, 19 nt, Artificial Sequence
  Description of Artificial Sequence: Synthetic oligonucleotide
gcaccccugcaccgaacag

SEQ ID NO: 832199 - RNA, 19 nt, Artificial Sequence
  Description of Artificial Sequence: Synthetic oligonucleotide
ccuagcccgacacccacca

SEQ ID NO: 832200 - RNA, 19 nt, Artificial Sequence
  Description of Artificial Sequence: Synthetic oligonucleotide
gcaagcaaccuagcccgac

SEQ ID NO: 832201 - RNA, 19 nt, Artificial Sequence
  Description of Artificial Sequence: Synthetic oligonucleotide
gccagcgugauccgccgga

SEQ ID NO: 832202 - RNA, 19 nt, Artificial Sequence
  Description of Artificial Sequence: Synthetic oligonucleotide
cgagguaguccagguagcc

SEQ ID NO: 832203 - RNA, 19 nt, Artificial Sequence
  Description of Artificial Sequence: Synthetic oligonucleotide
agacccucuucaagugaau

SEQ ID NO: 832204 - RNA, 19 nt, Artificial Sequence
  Description of Artificial Sequence: Synthetic oligonucleotide
cagcaccccugcaccgaac

SEQ ID NO: 832205 - RNA, 19 nt, Artificial Sequence
  Description of Artificial Sequence: Synthetic oligonucleotide
ccgaucguccuugucagga

SEQ ID NO: 832206 - RNA, 19 nt, Artificial Sequence
  Description of Artificial Sequence: Synthetic oligonucleotide
ccacccuuuugggagcuac

SEQ ID NO: 832207 - RNA, 19 nt, Artificial Sequence
  Description of Artificial Sequence: Synthetic oligonucleotide
cuaaagcugcugggugcca

SEQ ID NO: 832208 - RNA, 19 nt, Artificial Sequence
  Description of Artificial Sequence: Synthetic oligonucleotide
caccccaaauucugugagu

SEQ ID NO: 832209 - RNA, 19 nt, Artificial Sequence
  Description of Artificial Sequence: Synthetic oligonucleotide
gauccgccggagauagagu

SEQ ID NO: 832210 - RNA, 19 nt, Artificial Sequence
  Description of Artificial Sequence: Synthetic oligonucleotide
cccgacacccaccaggaua

SEQ ID NO: 832211 - RNA, 19 nt, Artificial Sequence
  Description of Artificial Sequence: Synthetic oligonucleotide
gccguugguagacccaagu

SEQ ID NO: 832212 - RNA, 19 nt, Artificial Sequence
  Description of Artificial Sequence: Synthetic oligonucleotide
cccuuuugggagcuacaca

SEQ ID NO: 832213 - RNA, 19 nt, Artificial Sequence
  Description of Artificial Sequence: Synthetic oligonucleotide
gggccagcgugaaaucuga

SEQ ID NO: 832214 - RNA, 19 nt, Artificial Sequence
  Description of Artificial Sequence: Synthetic oligonucleotide
cacuguggcagucgggauu

SEQ ID NO: 832215 - RNA, 19 nt, Artificial Sequence
  Description of Artificial Sequence: Synthetic oligonucleotide
augcuacguugccguuggu

SEQ ID NO: 832216 - RNA, 19 nt, Artificial Sequence
  Description of Artificial Sequence: Synthetic oligonucleotide
gacaugcuacguugccguu

SEQ ID NO: 832217 - RNA, 19 nt, Artificial Sequence
  Description of Artificial Sequence: Synthetic oligonucleotide
cugugaguaggaccacaau

SEQ ID NO: 832218 - RNA, 19 nt, Artificial Sequence
  Description of Artificial Sequence: Synthetic oligonucleotide
cagcgugauccgccggaga

SEQ ID NO: 832219 - RNA, 19 nt, Artificial Sequence
  Description of Artificial Sequence: Synthetic oligonucleotide
ccuaaaccaccaggccaag

SEQ ID NO: 832220 - RNA, 19 nt, Artificial Sequence
  Description of Artificial Sequence: Synthetic oligonucleotide
ccgacacccaccaggauau

SEQ ID NO: 832221 - RNA, 19 nt, Artificial Sequence
  Description of Artificial Sequence: Synthetic oligonucleotide
ccgguggaucucuguugag

SEQ ID NO: 832222 - RNA, 19 nt, Artificial Sequence
  Description of Artificial Sequence: Synthetic oligonucleotide
ggaauacagcugccaugua

SEQ ID NO: 832223 - RNA, 19 nt, Artificial Sequence
  Description of Artificial Sequence: Synthetic oligonucleotide
ugcccacgccagcgugauc

SEQ ID NO: 832224 - RNA, 19 nt, Artificial Sequence
  Description of Artificial Sequence: Synthetic oligonucleotide
guguuggaagacaccugau

SEQ ID NO: 832225 - RNA, 19 nt, Artificial Sequence
  Description of Artificial Sequence: Synthetic oligonucleotide
uggcgugguuccgggcaau

SEQ ID NO: 832226 - RNA, 19 nt, Artificial Sequence
  Description of Artificial Sequence: Synthetic oligonucleotide
caauuccgaucguccuugu

SEQ ID NO: 832227 - RNA, 19 nt, Artificial Sequence
  Description of Artificial Sequence: Synthetic oligonucleotide
ccagcgugauccgccggag

SEQ ID NO: 832228 - RNA, 19 nt, Artificial Sequence
  Description of Artificial Sequence: Synthetic oligonucleotide
caggggagucaccccuaaa

SEQ ID NO: 832229 - RNA, 19 nt, Artificial Sequence
  Description of Artificial Sequence: Synthetic oligonucleotide
gauccacgacggguacugu

SEQ ID NO: 832230 - RNA, 19 nt, Artificial Sequence
  Description of Artificial Sequence: Synthetic oligonucleotide
gcaccgaacagagccccaa

SEQ ID NO: 832231 - RNA, 19 nt, Artificial Sequence
  Description of Artificial Sequence: Synthetic oligonucleotide
cccacaccagcaguccauc

SEQ ID NO: 832232 - RNA, 19 nt, Artificial Sequence
  Description of Artificial Sequence: Synthetic oligonucleotide
gccauccgaggguagcccu

SEQ ID NO: 832233 - RNA, 19 nt, Artificial Sequence
  Description of Artificial Sequence: Synthetic oligonucleotide
ggugaugccuccggccacu

SEQ ID NO: 832234 - RNA, 19 nt, Artificial Sequence
  Description of Artificial Sequence: Synthetic oligonucleotide
cgacggguacugugagcag

SEQ ID NO: 832235 - RNA, 19 nt, Artificial Sequence
  Description of Artificial Sequence: Synthetic oligonucleotide
ggacauugacuggguccuc

SEQ ID NO: 832236 - RNA, 19 nt, Artificial Sequence
  Description of Artificial Sequence: Synthetic oligonucleotide
gggcuuggaucaggaucug

SEQ ID NO: 832237 - RNA, 19 nt, Artificial Sequence
  Description of Artificial Sequence: Synthetic oligonucleotide
ggcgugguuccgggcaauc

SEQ ID NO: 832238 - RNA, 19 nt, Artificial Sequence
  Description of Artificial Sequence: Synthetic oligonucleotide
caccgaacagagccccaau

SEQ ID NO: 832239 - RNA, 19 nt, Artificial Sequence
  Description of Artificial Sequence: Synthetic oligonucleotide
ccccugcaccgaacagagc

SEQ ID NO: 832240 - RNA, 19 nt, Artificial Sequence
  Description of Artificial Sequence: Synthetic oligonucleotide
cuggcgggccagcgugaaa

SEQ ID NO: 832241 - RNA, 19 nt, Artificial Sequence
  Description of Artificial Sequence: Synthetic oligonucleotide
gugauccgccggagauaga

SEQ ID NO: 832242 - RNA, 19 nt, Artificial Sequence
  Description of Artificial Sequence: Synthetic oligonucleotide
accacccuuuugggagcua

SEQ ID NO: 832243 - RNA, 19 nt, Artificial Sequence
  Description of Artificial Sequence: Synthetic oligonucleotide
ccagcaacagaggccggua

SEQ ID NO: 832244 - RNA, 19 nt, Artificial Sequence
  Description of Artificial Sequence: Synthetic oligonucleotide
gugcccacgccagcgugau

SEQ ID NO: 832245 - RNA, 19 nt, Artificial Sequence
  Description of Artificial Sequence: Synthetic oligonucleotide
ccagcaccccugcaccgaa

SEQ ID NO: 832246 - RNA, 19 nt, Artificial Sequence
  Description of Artificial Sequence: Synthetic oligonucleotide
gcgugauccgccggagaua

SEQ ID NO: 832247 - RNA, 19 nt, Artificial Sequence
  Description of Artificial Sequence: Synthetic oligonucleotide
cuguggcagucgggauuca

SEQ ID NO: 832248 - RNA, 19 nt, Artificial Sequence
  Description of Artificial Sequence: Synthetic oligonucleotide
cgccagcgugauccgccgg

SEQ ID NO: 832249 - RNA, 19 nt, Artificial Sequence
  Description of Artificial Sequence: Synthetic oligonucleotide
ccaccgaaacaggcagaga

SEQ ID NO: 832250 - RNA, 19 nt, Artificial Sequence
  Description of Artificial Sequence: Synthetic oligonucleotide
ccacuagggcgcugaagau

SEQ ID NO: 832251 - RNA, 19 nt, Artificial Sequence
  Description of Artificial Sequence: Synthetic oligonucleotide
ccagggaccucaagauguu

SEQ ID NO: 832252 - RNA, 19 nt, Artificial Sequence
  Description of Artificial Sequence: Synthetic oligonucleotide
gccaggggagucaccccua

SEQ ID NO: 832253 - RNA, 19 nt, Artificial Sequence
  Description of Artificial Sequence: Synthetic oligonucleotide
cgaucguccuugucaggau

SEQ ID NO: 832254 - RNA, 19 nt, Artificial Sequence
  Description of Artificial Sequence: Synthetic oligonucleotide
ccacauugugggagagcuu

SEQ ID NO: 832255 - RNA, 19 nt, Artificial Sequence
  Description of Artificial Sequence: Synthetic oligonucleotide
caggagccuacaggacauu

SEQ ID NO: 832256 - RNA, 19 nt, Artificial Sequence
  Description of Artificial Sequence: Synthetic oligonucleotide
cgacacccaccaggauauu

SEQ ID NO: 832257 - RNA, 19 nt, Artificial Sequence
  Description of Artificial Sequence: Synthetic oligonucleotide
ugugcgaguagccauagcg

SEQ ID NO: 832258 - RNA, 19 nt, Artificial Sequence
  Description of Artificial Sequence: Synthetic oligonucleotide
aguaggaccaccuucacag

SEQ ID NO: 832259 - RNA, 19 nt, Artificial Sequence
  Description of Artificial Sequence: Synthetic oligonucleotide
gaagcgaucuccgagaugg

SEQ ID NO: 832260 - RNA, 19 nt, Artificial Sequence
  Description of Artificial Sequence: Synthetic oligonucleotide
aauuuuacugauggaauuc

SEQ ID NO: 832261 - RNA, 19 nt, Artificial Sequence
  Description of Artificial Sequence: Synthetic oligonucleotide
agaauuguguugcaagugg

SEQ ID NO: 832262 - RNA, 19 nt, Artificial Sequence
  Description of Artificial Sequence: Synthetic oligonucleotide
aauaugacgcuuccucagg

SEQ ID NO: 832263 - RNA, 19 nt, Artificial Sequence
  Description of Artificial Sequence: Synthetic oligonucleotide
uuugcuaccgggcuccugg

SEQ ID NO: 832264 - RNA, 19 nt, Artificial Sequence
  Description of Artificial Sequence: Synthetic oligonucleotide
aacacgucgcgacaggcac

SEQ ID NO: 832265 - RNA, 19 nt, Artificial Sequence
  Description of Artificial Sequence: Synthetic oligonucleotide
uauuaggcguguaaggcag

SEQ ID NO: 832266 - RNA, 19 nt, Artificial Sequence
  Description of Artificial Sequence: Synthetic oligonucleotide
aaucacacuuuggagcucc

SEQ ID NO: 832267 - RNA, 19 nt, Artificial Sequence
  Description of Artificial Sequence: Synthetic oligonucleotide
aacagaaaggcccggaaau

SEQ ID NO: 832268 - RNA, 19 nt, Artificial Sequence
  Description of Artificial Sequence: Synthetic oligonucleotide
ugauaaaacccucugcauc

SEQ ID NO: 832269 - RNA, 19 nt, Artificial Sequence
  Description of Artificial Sequence: Synthetic oligonucleotide
agucacuucauugguagcc

SEQ ID NO: 832270 - RNA, 19 nt, Artificial Sequence
  Description of Artificial Sequence: Synthetic oligonucleotide
uguguugcaaguggaagcg

SEQ ID NO: 832271 - RNA, 19 nt, Artificial Sequence
  Description of Artificial Sequence: Synthetic oligonucleotide
uccuggaacacgaugguca

SEQ ID NO: 832272 - RNA, 19 nt, Artificial Sequence
  Description of Artificial Sequence: Synthetic oligonucleotide
uaguuguaggacagaaggg

SEQ ID NO: 832273 - RNA, 19 nt, Artificial Sequence
  Description of Artificial Sequence: Synthetic oligonucleotide
uuauuaggcguguaaggca

SEQ ID NO: 832274 - RNA, 19 nt, Artificial Sequence
  Description of Artificial Sequence: Synthetic oligonucleotide
aggacggugacgcagaccu

SEQ ID NO: 832275 - RNA, 19 nt, Artificial Sequence
  Description of Artificial Sequence: Synthetic oligonucleotide
uggaauuccgcagagacaa

SEQ ID NO: 832276 - RNA, 19 nt, Artificial Sequence
  Description of Artificial Sequence: Synthetic oligonucleotide
uccacuucgaagcccaggc

SEQ ID NO: 832277 - RNA, 19 nt, Artificial Sequence
  Description of Artificial Sequence: Synthetic oligonucleotide
augacgcuuccucaggagc

SEQ ID NO: 832278 - RNA, 19 nt, Artificial Sequence
  Description of Artificial Sequence: Synthetic oligonucleotide
guuauuaggcguguaaggc

SEQ ID NO: 832279 - RNA, 19 nt, Artificial Sequence
  Description of Artificial Sequence: Synthetic oligonucleotide
aauccguuuugguauccag

SEQ ID NO: 832280 - RNA, 19 nt, Artificial Sequence
  Description of Artificial Sequence: Synthetic oligonucleotide
gauggacugccacucaucc

SEQ ID NO: 832281 - RNA, 19 nt, Artificial Sequence
  Description of Artificial Sequence: Synthetic oligonucleotide
agaaggguuugcuaccggg

SEQ ID NO: 832282 - RNA, 19 nt, Artificial Sequence
  Description of Artificial Sequence: Synthetic oligonucleotide
aguggaagcgaucuccgag

SEQ ID NO: 832283 - RNA, 19 nt, Artificial Sequence
  Description of Artificial Sequence: Synthetic oligonucleotide
aguagccauagcgugaaac

SEQ ID NO: 832284 - RNA, 19 nt, Artificial Sequence
  Description of Artificial Sequence: Synthetic oligonucleotide
acuuugagugccuuggcca

SEQ ID NO: 832285 - RNA, 19 nt, Artificial Sequence
  Description of Artificial Sequence: Synthetic oligonucleotide
gaauuccgcagagacaagg

SEQ ID NO: 832286 - RNA, 19 nt, Artificial Sequence
  Description of Artificial Sequence: Synthetic oligonucleotide
aaaagcuccuucgcggccg

SEQ ID NO: 832287 - RNA, 19 nt, Artificial Sequence
  Description of Artificial Sequence: Synthetic oligonucleotide
ugaaaagcuccuucgcggc

SEQ ID NO: 832288 - RNA, 19 nt, Artificial Sequence
  Description of Artificial Sequence: Synthetic oligonucleotide
aagugugcggggugcaggg

SEQ ID NO: 832289 - RNA, 19 nt, Artificial Sequence
  Description of Artificial Sequence: Synthetic oligonucleotide
uguaaggcagcaucgugga

SEQ ID NO: 832290 - RNA, 19 nt, Artificial Sequence
  Description of Artificial Sequence: Synthetic oligonucleotide
aaaccgcgaagccgagucc

SEQ ID NO: 832291 - RNA, 19 nt, Artificial Sequence
  Description of Artificial Sequence: Synthetic oligonucleotide
caauaugacgcuuccucag

SEQ ID NO: 832292 - RNA, 19 nt, Artificial Sequence
  Description of Artificial Sequence: Synthetic oligonucleotide
aguuguaggacagaagggu

SEQ ID NO: 832293 - RNA, 19 nt, Artificial Sequence
  Description of Artificial Sequence: Synthetic oligonucleotide
ugcgugauaaaacccucug

SEQ ID NO: 832294 - RNA, 19 nt, Artificial Sequence
  Description of Artificial Sequence: Synthetic oligonucleotide
ugguuauuaggcguguaag

SEQ ID NO: 832295 - RNA, 19 nt, Artificial Sequence
  Description of Artificial Sequence: Synthetic oligonucleotide
uggacucuaggugagagac

SEQ ID NO: 832296 - RNA, 19 nt, Artificial Sequence
  Description of Artificial Sequence: Synthetic oligonucleotide
ucaguucuggggcugaguc

SEQ ID NO: 832297 - RNA, 19 nt, Artificial Sequence
  Description of Artificial Sequence: Synthetic oligonucleotide
ggaguuguggcuauguagg

SEQ ID NO: 832298 - RNA, 19 nt, Artificial Sequence
  Description of Artificial Sequence: Synthetic oligonucleotide
acuuucagacucugccagc

SEQ ID NO: 832299 - RNA, 19 nt, Artificial Sequence
  Description of Artificial Sequence: Synthetic oligonucleotide
uggaagugugagcggauag

SEQ ID NO: 832300 - RNA, 19 nt, Artificial Sequence
  Description of Artificial Sequence: Synthetic oligonucleotide
gaacgugaagcgcuccacg

SEQ ID NO: 832301 - RNA, 19 nt, Artificial Sequence
  Description of Artificial Sequence: Synthetic oligonucleotide
ugagcggauaguuguagga

SEQ ID NO: 832302 - RNA, 19 nt, Artificial Sequence
  Description of Artificial Sequence: Synthetic oligonucleotide
aggcguguaaggcagcauc

SEQ ID NO: 832303 - RNA, 19 nt, Artificial Sequence
  Description of Artificial Sequence: Synthetic oligonucleotide
auagcgugaaacuggcgug

SEQ ID NO: 832304 - RNA, 19 nt, Artificial Sequence
  Description of Artificial Sequence: Synthetic oligonucleotide
gauaguuguaggacagaag

SEQ ID NO: 832305 - RNA, 19 nt, Artificial Sequence
  Description of Artificial Sequence: Synthetic oligonucleotide
uccacgugcgugauaaaac

SEQ ID NO: 832306 - RNA, 19 nt, Artificial Sequence
  Description of Artificial Sequence: Synthetic oligonucleotide
caaguggaagcgaucuccg

SEQ ID NO: 832307 - RNA, 19 nt, Artificial Sequence
  Description of Artificial Sequence: Synthetic oligonucleotide
caagccaacacgucgcgac

SEQ ID NO: 832308 - RNA, 19 nt, Artificial Sequence
  Description of Artificial Sequence: Synthetic oligonucleotide
uaugacgcuuccucaggag

SEQ ID NO: 832309 - RNA, 19 nt, Artificial Sequence
  Description of Artificial Sequence: Synthetic oligonucleotide
aaacuggcgugcguggccg

SEQ ID NO: 832310 - RNA, 19 nt, Artificial Sequence
  Description of Artificial Sequence: Synthetic oligonucleotide
uuccgagaagguccaagcc

SEQ ID NO: 832311 - RNA, 19 nt, Artificial Sequence
  Description of Artificial Sequence: Synthetic oligonucleotide
aucuccgagauggacugcc

SEQ ID NO: 832312 - RNA, 19 nt, Artificial Sequence
  Description of Artificial Sequence: Synthetic oligonucleotide
uguaggaacuccguucucu

SEQ ID NO: 832313 - RNA, 19 nt, Artificial Sequence
  Description of Artificial Sequence: Synthetic oligonucleotide
uccucuagggucucacugc

SEQ ID NO: 832314 - RNA, 19 nt, Artificial Sequence
  Description of Artificial Sequence: Synthetic oligonucleotide
aagucggugaagccagcug

SEQ ID NO: 832315 - RNA, 19 nt, Artificial Sequence
  Description of Artificial Sequence: Synthetic oligonucleotide
gaacuuuaggccaggucag

SEQ ID NO: 832316 - RNA, 19 nt, Artificial Sequence
  Description of Artificial Sequence: Synthetic oligonucleotide
gagacguggaacaugaucu

SEQ ID NO: 832317 - RNA, 19 nt, Artificial Sequence
  Description of Artificial Sequence: Synthetic oligonucleotide
aucguggagacguggaaca

SEQ ID NO: 832318 - RNA, 19 nt, Artificial Sequence
  Description of Artificial Sequence: Synthetic oligonucleotide
gguacuguuggcgugugcg

SEQ ID NO: 832319 - RNA, 19 nt, Artificial Sequence
  Description of Artificial Sequence: Synthetic oligonucleotide
ucggcguuggccgcgaagg

SEQ ID NO: 832320 - RNA, 19 nt, Artificial Sequence
  Description of Artificial Sequence: Synthetic oligonucleotide
aacuccguucucucuucag

SEQ ID NO: 832321 - RNA, 19 nt, Artificial Sequence
  Description of Artificial Sequence: Synthetic oligonucleotide
uccguuuugguauccaguu

SEQ ID NO: 832322 - RNA, 19 nt, Artificial Sequence
  Description of Artificial Sequence: Synthetic oligonucleotide
aaaggcccggaaaucggcg

SEQ ID NO: 832323 - RNA, 19 nt, Artificial Sequence
  Description of Artificial Sequence: Synthetic oligonucleotide
ucucugcgaacgugaagcg

SEQ ID NO: 832324 - RNA, 19 nt, Artificial Sequence
  Description of Artificial Sequence: Synthetic oligonucleotide
uugcugguuauuaggcgug

SEQ ID NO: 832325 - RNA, 19 nt, Artificial Sequence
  Description of Artificial Sequence: Synthetic oligonucleotide
guacagaucaagcuggugu

SEQ ID NO: 832326 - RNA, 19 nt, Artificial Sequence
  Description of Artificial Sequence: Synthetic oligonucleotide
uugccaauaugacgcuucc

SEQ ID NO: 832327 - RNA, 19 nt, Artificial Sequence
  Description of Artificial Sequence: Synthetic oligonucleotide
caaaccgcgaagccgaguc

SEQ ID NO: 832328 - RNA, 19 nt, Artificial Sequence
  Description of Artificial Sequence: Synthetic oligonucleotide
cucgcaacaggcgugcucc

SEQ ID NO: 832329 - RNA, 19 nt, Artificial Sequence
  Description of Artificial Sequence: Synthetic oligonucleotide
uguaugaagugugcggggu

SEQ ID NO: 832330 - RNA, 19 nt, Artificial Sequence
  Description of Artificial Sequence: Synthetic oligonucleotide
aucaagcugguguuccgag

SEQ ID NO: 832331 - RNA, 19 nt, Artificial Sequence
  Description of Artificial Sequence: Synthetic oligonucleotide
uacagaucaagcugguguu

SEQ ID NO: 832332 - RNA, 19 nt, Artificial Sequence
  Description of Artificial Sequence: Synthetic oligonucleotide
cuguaugaagugugcgggg

SEQ ID NO: 832333 - RNA, 19 nt, Artificial Sequence
  Description of Artificial Sequence: Synthetic oligonucleotide
acaguuguccgggccaccc

SEQ ID NO: 832334 - RNA, 19 nt, Artificial Sequence
  Description of Artificial Sequence: Synthetic oligonucleotide
uguuccgagaagguccaag

SEQ ID NO: 832335 - RNA, 19 nt, Artificial Sequence
  Description of Artificial Sequence: Synthetic oligonucleotide
gggaguuguggcuauguag

SEQ ID NO: 832336 - RNA, 19 nt, Artificial Sequence
  Description of Artificial Sequence: Synthetic oligonucleotide
cacuuugagugccuuggcc

SEQ ID NO: 832337 - RNA, 19 nt, Artificial Sequence
  Description of Artificial Sequence: Synthetic oligonucleotide
acgugccacgacuucgccc

SEQ ID NO: 832338 - RNA, 19 nt, Artificial Sequence
  Description of Artificial Sequence: Synthetic oligonucleotide
cacgugcgugauaaaaccc

SEQ ID NO: 832339 - RNA, 19 nt, Artificial Sequence
  Description of Artificial Sequence: Synthetic oligonucleotide
gcguguacaacucugaaaa

SEQ ID NO: 832340 - RNA, 19 nt, Artificial Sequence
  Description of Artificial Sequence: Synthetic oligonucleotide
gacgccccacaucagcgcg

SEQ ID NO: 832341 - RNA, 19 nt, Artificial Sequence
  Description of Artificial Sequence: Synthetic oligonucleotide
gaagugugcggggugcagg

SEQ ID NO: 832342 - RNA, 19 nt, Artificial Sequence
  Description of Artificial Sequence: Synthetic oligonucleotide
auaugacgcuuccucagga

SEQ ID NO: 832343 - RNA, 19 nt, Artificial Sequence
  Description of Artificial Sequence: Synthetic oligonucleotide
acacacucgcaacaggcgu

SEQ ID NO: 832344 - RNA, 19 nt, Artificial Sequence
  Description of Artificial Sequence: Synthetic oligonucleotide
gaaggguuugcuaccgggc

SEQ ID NO: 832345 - RNA, 19 nt, Artificial Sequence
  Description of Artificial Sequence: Synthetic oligonucleotide
gugagcggauaguuguagg

SEQ ID NO: 832346 - RNA, 19 nt, Artificial Sequence
  Description of Artificial Sequence: Synthetic oligonucleotide
uagagcgagugugugccgg

SEQ ID NO: 832347 - RNA, 19 nt, Artificial Sequence
  Description of Artificial Sequence: Synthetic oligonucleotide
ucgacagggaguuguggcu

SEQ ID NO: 832348 - RNA, 19 nt, Artificial Sequence
  Description of Artificial Sequence: Synthetic oligonucleotide
cuaggugagagaccuuuuc

SEQ ID NO: 832349 - RNA, 19 nt, Artificial Sequence
  Description of Artificial Sequence: Synthetic oligonucleotide
gacagcguguacaacucug

SEQ ID NO: 832350 - RNA, 19 nt, Artificial Sequence
  Description of Artificial Sequence: Synthetic oligonucleotide
uccgagauggacugccacu

SEQ ID NO: 832351 - RNA, 19 nt, Artificial Sequence
  Description of Artificial Sequence: Synthetic oligonucleotide
gugagagaccuuuucugac

SEQ ID NO: 832352 - RNA, 19 nt, Artificial Sequence
  Description of Artificial Sequence: Synthetic oligonucleotide
cauggacucuaggugagag

SEQ ID NO: 832353 - RNA, 19 nt, Artificial Sequence
  Description of Artificial Sequence: Synthetic oligonucleotide
ucggguggcagcacuuuca

SEQ ID NO: 832354 - RNA, 19 nt, Artificial Sequence
  Description of Artificial Sequence: Synthetic oligonucleotide
agaaaggcccggaaaucgg

SEQ ID NO: 832355 - RNA, 19 nt, Artificial Sequence
  Description of Artificial Sequence: Synthetic oligonucleotide
aggguuugcuaccgggcuc

SEQ ID NO: 832356 - RNA, 19 nt, Artificial Sequence
  Description of Artificial Sequence: Synthetic oligonucleotide
uacuguuggcgugugcgag

SEQ ID NO: 832357 - RNA, 19 nt, Artificial Sequence
  Description of Artificial Sequence: Synthetic oligonucleotide
uuguggcuauguaggaacu

SEQ ID NO: 832358 - RNA, 19 nt, Artificial Sequence
  Description of Artificial Sequence: Synthetic oligonucleotide
acacucgcaacaggcgugc

SEQ ID NO: 832359 - RNA, 19 nt, Artificial Sequence
  Description of Artificial Sequence: Synthetic oligonucleotide
gccaauaugacgcuuccuc

SEQ ID NO: 832360 - RNA, 19 nt, Artificial Sequence
  Description of Artificial Sequence: Synthetic oligonucleotide
gaaaucggcguuggccgcg

SEQ ID NO: 832361 - RNA, 19 nt, Artificial Sequence
  Description of Artificial Sequence: Synthetic oligonucleotide
agcguguacaacucugaaa

SEQ ID NO: 832362 - RNA, 19 nt, Artificial Sequence
  Description of Artificial Sequence: Synthetic oligonucleotide
cagaauuguguugcaagug

SEQ ID NO: 832363 - RNA, 19 nt, Artificial Sequence
  Description of Artificial Sequence: Synthetic oligonucleotide
cauagcgugaaacuggcgu

SEQ ID NO: 832364 - RNA, 19 nt, Artificial Sequence
  Description of Artificial Sequence: Synthetic oligonucleotide
aaggcccggaaaucggcgu

SEQ ID NO: 832365 - RNA, 19 nt, Artificial Sequence
  Description of Artificial Sequence: Synthetic oligonucleotide
ugguguagagcgagugugu

SEQ ID NO: 832366 - RNA, 19 nt, Artificial Sequence
  Description of Artificial Sequence: Synthetic oligonucleotide
acucgcaacaggcgugcuc

SEQ ID NO: 832367 - RNA, 19 nt, Artificial Sequence
  Description of Artificial Sequence: Synthetic oligonucleotide
uuggcgugugcgaguagcc

SEQ ID NO: 832368 - RNA, 19 nt, Artificial Sequence
  Description of Artificial Sequence: Synthetic oligonucleotide
ugacgcagaccuugggcgc

SEQ ID NO: 832369 - RNA, 19 nt, Artificial Sequence
  Description of Artificial Sequence: Synthetic oligonucleotide
ugugccugagguuccgcac

SEQ ID NO: 832370 - RNA, 19 nt, Artificial Sequence
  Description of Artificial Sequence: Synthetic oligonucleotide
agcgaucuccgagauggac

SEQ ID NO: 832371 - RNA, 19 nt, Artificial Sequence
  Description of Artificial Sequence: Synthetic oligonucleotide
aagccaacacgucgcgaca

SEQ ID NO: 832372 - RNA, 19 nt, Artificial Sequence
  Description of Artificial Sequence: Synthetic oligonucleotide
agcgagugugugccggugg

SEQ ID NO: 832373 - RNA, 19 nt, Artificial Sequence
  Description of Artificial Sequence: Synthetic oligonucleotide
aagcgcuccacgugcguga

SEQ ID NO: 832374 - RNA, 19 nt, Artificial Sequence
  Description of Artificial Sequence: Synthetic oligonucleotide
guaugaagugugcggggug

SEQ ID NO: 832375 - RNA, 19 nt, Artificial Sequence
  Description of Artificial Sequence: Synthetic oligonucleotide
ucucgggacagugacucca

SEQ ID NO: 832376 - RNA, 19 nt, Artificial Sequence
  Description of Artificial Sequence: Synthetic oligonucleotide
agacgugccacgacuucgc

SEQ ID NO: 832377 - RNA, 19 nt, Artificial Sequence
  Description of Artificial Sequence: Synthetic oligonucleotide
guuggcgugugcgaguagc

SEQ ID NO: 832378 - RNA, 19 nt, Artificial Sequence
  Description of Artificial Sequence: Synthetic oligonucleotide
ggugacgcagaccuugggc

SEQ ID NO: 832379 - RNA, 19 nt, Artificial Sequence
  Description of Artificial Sequence: Synthetic oligonucleotide
uuaggcguguaaggcagca

SEQ ID NO: 832380 - RNA, 19 nt, Artificial Sequence
  Description of Artificial Sequence: Synthetic oligonucleotide
cuggagccucaucugacag

SEQ ID NO: 832381 - RNA, 19 nt, Artificial Sequence
  Description of Artificial Sequence: Synthetic oligonucleotide
ggagacguggaacaugauc

SEQ ID NO: 832382 - RNA, 19 nt, Artificial Sequence
  Description of Artificial Sequence: Synthetic oligonucleotide
agcgauguaguagucacuu

SEQ ID NO: 832383 - RNA, 19 nt, Artificial Sequence
  Description of Artificial Sequence: Synthetic oligonucleotide
aaccgcgaagccgagucca

SEQ ID NO: 832384 - RNA, 19 nt, Artificial Sequence
  Description of Artificial Sequence: Synthetic oligonucleotide
gagcggauaguuguaggac

SEQ ID NO: 832385 - RNA, 19 nt, Artificial Sequence
  Description of Artificial Sequence: Synthetic oligonucleotide
ucgcgacaggcacaguugu

SEQ ID NO: 832386 - RNA, 19 nt, Artificial Sequence
  Description of Artificial Sequence: Synthetic oligonucleotide
uagcgugaaacuggcgugc

SEQ ID NO: 832387 - RNA, 19 nt, Artificial Sequence
  Description of Artificial Sequence: Synthetic oligonucleotide
ugugggucgacagggaguu

SEQ ID NO: 832388 - RNA, 19 nt, Artificial Sequence
  Description of Artificial Sequence: Synthetic oligonucleotide
ugacagcguguacaacucu

SEQ ID NO: 832389 - RNA, 19 nt, Artificial Sequence
  Description of Artificial Sequence: Synthetic oligonucleotide
acccuguaugaagugugcg

SEQ ID NO: 832390 - RNA, 19 nt, Artificial Sequence
  Description of Artificial Sequence: Synthetic oligonucleotide
ccacgugcgugauaaaacc

SEQ ID NO: 832391 - RNA, 19 nt, Artificial Sequence
  Description of Artificial Sequence: Synthetic oligonucleotide
cacaucagcgcgcccgccg

SEQ ID NO: 832392 - RNA, 19 nt, Artificial Sequence
  Description of Artificial Sequence: Synthetic oligonucleotide
guggaagcgaucuccgaga

SEQ ID NO: 832393 - RNA, 19 nt, Artificial Sequence
  Description of Artificial Sequence: Synthetic oligonucleotide
cacacucgcaacaggcgug

SEQ ID NO: 832394 - RNA, 19 nt, Artificial Sequence
  Description of Artificial Sequence: Synthetic oligonucleotide
guaggaacuccguucucuc

SEQ ID NO: 832395 - RNA, 19 nt, Artificial Sequence
  Description of Artificial Sequence: Synthetic oligonucleotide
aguuguccgggccacccgu

SEQ ID NO: 832396 - RNA, 19 nt, Artificial Sequence
  Description of Artificial Sequence: Synthetic oligonucleotide
ugguauccaguugggcccg

SEQ ID NO: 832397 - RNA, 19 nt, Artificial Sequence
  Description of Artificial Sequence: Synthetic oligonucleotide
cccuguaugaagugugcgg

SEQ ID NO: 832398 - RNA, 19 nt, Artificial Sequence
  Description of Artificial Sequence: Synthetic oligonucleotide
uggaagcgaucuccgagau

SEQ ID NO: 832399 - RNA, 19 nt, Artificial Sequence
  Description of Artificial Sequence: Synthetic oligonucleotide
acgugaagcgcuccacgug

SEQ ID NO: 832400 - RNA, 19 nt, Artificial Sequence
  Description of Artificial Sequence: Synthetic oligonucleotide
auuaggcguguaaggcagc

SEQ ID NO: 832401 - RNA, 19 nt, Artificial Sequence
  Description of Artificial Sequence: Synthetic oligonucleotide
agauggacugccacucauc

SEQ ID NO: 832402 - RNA, 19 nt, Artificial Sequence
  Description of Artificial Sequence: Synthetic oligonucleotide
acagucccauccuguacug

SEQ ID NO: 832403 - RNA, 19 nt, Artificial Sequence
  Description of Artificial Sequence: Synthetic oligonucleotide
ugguacagaucaagcuggu

SEQ ID NO: 832404 - RNA, 19 nt, Artificial Sequence
  Description of Artificial Sequence: Synthetic oligonucleotide
ccacucauccucuaggguc

SEQ ID NO: 832405 - RNA, 19 nt, Artificial Sequence
  Description of Artificial Sequence: Synthetic oligonucleotide
uggaauccguuuugguauc

SEQ ID NO: 832406 - RNA, 19 nt, Artificial Sequence
  Description of Artificial Sequence: Synthetic oligonucleotide
ucuaggugagagaccuuuu

SEQ ID NO: 832407 - RNA, 19 nt, Artificial Sequence
  Description of Artificial Sequence: Synthetic oligonucleotide
uugagugccuuggccaaca

SEQ ID NO: 832408 - RNA, 19 nt, Artificial Sequence
  Description of Artificial Sequence: Synthetic oligonucleotide
augcaguaguugcuuugug

SEQ ID NO: 832409 - RNA, 19 nt, Artificial Sequence
  Description of Artificial Sequence: Synthetic oligonucleotide
gugccugagguuccgcacc

SEQ ID NO: 832410 - RNA, 19 nt, Artificial Sequence
  Description of Artificial Sequence: Synthetic oligonucleotide
ugcgcgcaccacuaagaac

SEQ ID NO: 832411 - RNA, 19 nt, Artificial Sequence
  Description of Artificial Sequence: Synthetic oligonucleotide
gcaacaggcgugcuccggg

SEQ ID NO: 832412 - RNA, 19 nt, Artificial Sequence
  Description of Artificial Sequence: Synthetic oligonucleotide
guagagcgagugugugccg

SEQ ID NO: 832413 - RNA, 19 nt, Artificial Sequence
  Description of Artificial Sequence: Synthetic oligonucleotide
ugaucucaugguccuggua

SEQ ID NO: 832414 - RNA, 19 nt, Artificial Sequence
  Description of Artificial Sequence: Synthetic oligonucleotide
aacuggcgugcguggccgg

SEQ ID NO: 832415 - RNA, 19 nt, Artificial Sequence
  Description of Artificial Sequence: Synthetic oligonucleotide
ggcguguaaggcagcaucg

SEQ ID NO: 832416 - RNA, 19 nt, Artificial Sequence
  Description of Artificial Sequence: Synthetic oligonucleotide
cuuugagugccuuggccaa

SEQ ID NO: 832417 - RNA, 19 nt, Artificial Sequence
  Description of Artificial Sequence: Synthetic oligonucleotide
agcauggacucuaggugag

SEQ ID NO: 832418 - RNA, 19 nt, Artificial Sequence
  Description of Artificial Sequence: Synthetic oligonucleotide
gcgcgcaccacuaagaaca

SEQ ID NO: 832419 - RNA, 19 nt, Artificial Sequence
  Description of Artificial Sequence: Synthetic oligonucleotide
ugccugagguuccgcaccu

SEQ ID NO: 832420 - RNA, 19 nt, Artificial Sequence
  Description of Artificial Sequence: Synthetic oligonucleotide
gaucaagcugguguuccga

SEQ ID NO: 832421 - RNA, 19 nt, Artificial Sequence
  Description of Artificial Sequence: Synthetic oligonucleotide
ugcagacgugccacgacuu

SEQ ID NO: 832422 - RNA, 19 nt, Artificial Sequence
  Description of Artificial Sequence: Synthetic oligonucleotide
cugguuauuaggcguguaa

SEQ ID NO: 832423 - RNA, 19 nt, Artificial Sequence
  Description of Artificial Sequence: Synthetic oligonucleotide
gcgugauaaaacccucugc

SEQ ID NO: 832424 - RNA, 19 nt, Artificial Sequence
  Description of Artificial Sequence: Synthetic oligonucleotide
agcgugaaacuggcgugcg

SEQ ID NO: 832425 - RNA, 19 nt, Artificial Sequence
  Description of Artificial Sequence: Synthetic oligonucleotide
cugugcgcgcaccacuaag

SEQ ID NO: 832426 - RNA, 19 nt, Artificial Sequence
  Description of Artificial Sequence: Synthetic oligonucleotide
gccgaguccagcgauguag

SEQ ID NO: 832427 - RNA, 19 nt, Artificial Sequence
  Description of Artificial Sequence: Synthetic oligonucleotide
guaaggcagcaucguggag

SEQ ID NO: 832428 - RNA, 19 nt, Artificial Sequence
  Description of Artificial Sequence: Synthetic oligonucleotide
auggacugccacucauccu

SEQ ID NO: 832429 - RNA, 19 nt, Artificial Sequence
  Description of Artificial Sequence: Synthetic oligonucleotide
aucggcguuggccgcgaag

SEQ ID NO: 832430 - RNA, 19 nt, Artificial Sequence
  Description of Artificial Sequence: Synthetic oligonucleotide
ugugccgguggaauccguu

SEQ ID NO: 832431 - RNA, 19 nt, Artificial Sequence
  Description of Artificial Sequence: Synthetic oligonucleotide
gucgcgacaggcacaguug

SEQ ID NO: 832432 - RNA, 19 nt, Artificial Sequence
  Description of Artificial Sequence: Synthetic oligonucleotide
cucugcgaacgugaagcgc

SEQ ID NO: 832433 - RNA, 19 nt, Artificial Sequence
  Description of Artificial Sequence: Synthetic oligonucleotide
cuccgagauggacugccac

SEQ ID NO: 832434 - RNA, 19 nt, Artificial Sequence
  Description of Artificial Sequence: Synthetic oligonucleotide
cacgucgcgacaggcacag

SEQ ID NO: 832435 - RNA, 19 nt, Artificial Sequence
  Description of Artificial Sequence: Synthetic oligonucleotide
auggaauuccgcagagaca

SEQ ID NO: 832436 - RNA, 19 nt, Artificial Sequence
  Description of Artificial Sequence: Synthetic oligonucleotide
uguuggcgugugcgaguag

SEQ ID NO: 832437 - RNA, 19 nt, Artificial Sequence
  Description of Artificial Sequence: Synthetic oligonucleotide
cugguguuccgagaagguc

SEQ ID NO: 832438 - RNA, 19 nt, Artificial Sequence
  Description of Artificial Sequence: Synthetic oligonucleotide
uuugagugccuuggccaac

SEQ ID NO: 832439 - RNA, 19 nt, Artificial Sequence
  Description of Artificial Sequence: Synthetic oligonucleotide
aguagucacuucauuggua

SEQ ID NO: 832440 - RNA, 19 nt, Artificial Sequence
  Description of Artificial Sequence: Synthetic oligonucleotide
guacuguuggcgugugcga

SEQ ID NO: 832441 - RNA, 19 nt, Artificial Sequence
  Description of Artificial Sequence: Synthetic oligonucleotide
gugacagcguguacaacuc

SEQ ID NO: 832442 - RNA, 19 nt, Artificial Sequence
  Description of Artificial Sequence: Synthetic oligonucleotide
ccggaaaucggcguuggcc

SEQ ID NO: 832443 - RNA, 19 nt, Artificial Sequence
  Description of Artificial Sequence: Synthetic oligonucleotide
ccuagagccgcgcggacgc

SEQ ID NO: 832444 - RNA, 19 nt, Artificial Sequence
  Description of Artificial Sequence: Synthetic oligonucleotide
ggauaguuguaggacagaa

SEQ ID NO: 832445 - RNA, 19 nt, Artificial Sequence
  Description of Artificial Sequence: Synthetic oligonucleotide
guugcaaguggaagcgauc

SEQ ID NO: 832446 - RNA, 19 nt, Artificial Sequence
  Description of Artificial Sequence: Synthetic oligonucleotide
gcggauaguuguaggacag

SEQ ID NO: 832447 - RNA, 19 nt, Artificial Sequence
  Description of Artificial Sequence: Synthetic oligonucleotide
gguguagagcgagugugug

SEQ ID NO: 832448 - RNA, 19 nt, Artificial Sequence
  Description of Artificial Sequence: Synthetic oligonucleotide
acuggcgugcguggccggc

SEQ ID NO: 832449 - RNA, 19 nt, Artificial Sequence
  Description of Artificial Sequence: Synthetic oligonucleotide
ucgggacagugacuccaga

SEQ ID NO: 832450 - RNA, 19 nt, Artificial Sequence
  Description of Artificial Sequence: Synthetic oligonucleotide
gaacuccguucucucuuca

SEQ ID NO: 832451 - RNA, 19 nt, Artificial Sequence
  Description of Artificial Sequence: Synthetic oligonucleotide
aggaguguccugggugcgg

SEQ ID NO: 832452 - RNA, 19 nt, Artificial Sequence
  Description of Artificial Sequence: Synthetic oligonucleotide
caccacuuugagugccuug

SEQ ID NO: 832453 - RNA, 19 nt, Artificial Sequence
  Description of Artificial Sequence: Synthetic oligonucleotide
caacacgucgcgacaggca

SEQ ID NO: 832454 - RNA, 19 nt, Artificial Sequence
  Description of Artificial Sequence: Synthetic oligonucleotide
cacgacuucgcccacugcu

SEQ ID NO: 832455 - RNA, 19 nt, Artificial Sequence
  Description of Artificial Sequence: Synthetic oligonucleotide
ggaaaucggcguuggccgc

SEQ ID NO: 832456 - RNA, 19 nt, Artificial Sequence
  Description of Artificial Sequence: Synthetic oligonucleotide
ccaacugcagacgugccac

SEQ ID NO: 832457 - RNA, 19 nt, Artificial Sequence
  Description of Artificial Sequence: Synthetic oligonucleotide
ccacccuguaugaagugug

SEQ ID NO: 832458 - RNA, 19 nt, Artificial Sequence
  Description of Artificial Sequence: Synthetic oligonucleotide
ccaauaugacgcuuccuca

SEQ ID NO: 832459 - RNA, 19 nt, Artificial Sequence
  Description of Artificial Sequence: Synthetic oligonucleotide
gaagugugagcggauaguu

SEQ ID NO: 832460 - RNA, 19 nt, Artificial Sequence
  Description of Artificial Sequence: Synthetic oligonucleotide
ggaccaccuucacaguccc

SEQ ID NO: 832461 - RNA, 19 nt, Artificial Sequence
  Description of Artificial Sequence: Synthetic oligonucleotide
cgauguaguagucacuuca

SEQ ID NO: 832462 - RNA, 19 nt, Artificial Sequence
  Description of Artificial Sequence: Synthetic oligonucleotide
aaaucggcguuggccgcga

SEQ ID NO: 832463 - RNA, 19 nt, Artificial Sequence
  Description of Artificial Sequence: Synthetic oligonucleotide
agcaucguggagacgugga

SEQ ID NO: 832464 - RNA, 19 nt, Artificial Sequence
  Description of Artificial Sequence: Synthetic oligonucleotide
acguggaacaugaucucau

SEQ ID NO: 832465 - RNA, 19 nt, Artificial Sequence
  Description of Artificial Sequence: Synthetic oligonucleotide
ugccaauaugacgcuuccu

SEQ ID NO: 832466 - RNA, 19 nt, Artificial Sequence
  Description of Artificial Sequence: Synthetic oligonucleotide
ugcgaacgugaagcgcucc

SEQ ID NO: 832467 - RNA, 19 nt, Artificial Sequence
  Description of Artificial Sequence: Synthetic oligonucleotide
uggcgugugcgaguagcca

SEQ ID NO: 832468 - RNA, 19 nt, Artificial Sequence
  Description of Artificial Sequence: Synthetic oligonucleotide
agggaguuguggcuaugua

SEQ ID NO: 832469 - RNA, 19 nt, Artificial Sequence
  Description of Artificial Sequence: Synthetic oligonucleotide
uggcagcccaaaccgcgaa

SEQ ID NO: 832470 - RNA, 19 nt, Artificial Sequence
  Description of Artificial Sequence: Synthetic oligonucleotide
aggagcuguugcugguuau

SEQ ID NO: 832471 - RNA, 19 nt, Artificial Sequence
  Description of Artificial Sequence: Synthetic oligonucleotide
ugaucgccuccccgcgccc

SEQ ID NO: 832472 - RNA, 19 nt, Artificial Sequence
  Description of Artificial Sequence: Synthetic oligonucleotide
cucucgggacagugacucc

SEQ ID NO: 832473 - RNA, 19 nt, Artificial Sequence
  Description of Artificial Sequence: Synthetic oligonucleotide
gagauggacugccacucau

SEQ ID NO: 832474 - RNA, 19 nt, Artificial Sequence
  Description of Artificial Sequence: Synthetic oligonucleotide
caguaggaccaccuucaca

SEQ ID NO: 832475 - RNA, 19 nt, Artificial Sequence
  Description of Artificial Sequence: Synthetic oligonucleotide
gcagcccaaaccgcgaagc

SEQ ID NO: 832476 - RNA, 19 nt, Artificial Sequence
  Description of Artificial Sequence: Synthetic oligonucleotide
ugcuaccgggcuccuggaa

SEQ ID NO: 832477 - RNA, 19 nt, Artificial Sequence
  Description of Artificial Sequence: Synthetic oligonucleotide
ggcagcaucguggagacgu

SEQ ID NO: 832478 - RNA, 19 nt, Artificial Sequence
  Description of Artificial Sequence: Synthetic oligonucleotide
ggucgacagggaguugugg

SEQ ID NO: 832479 - RNA, 19 nt, Artificial Sequence
  Description of Artificial Sequence: Synthetic oligonucleotide
caggaguguccugggugcg

SEQ ID NO: 832480 - RNA, 19 nt, Artificial Sequence
  Description of Artificial Sequence: Synthetic oligonucleotide
gguacagaucaagcuggug

SEQ ID NO: 832481 - RNA, 19 nt, Artificial Sequence
  Description of Artificial Sequence: Synthetic oligonucleotide
agccgcggcucaccaacug

SEQ ID NO: 832482 - RNA, 19 nt, Artificial Sequence
  Description of Artificial Sequence: Synthetic oligonucleotide
cuccacgugcgugauaaaa

SEQ ID NO: 832483 - RNA, 19 nt, Artificial Sequence
  Description of Artificial Sequence: Synthetic oligonucleotide
cugcgaacgugaagcgcuc

SEQ ID NO: 832484 - RNA, 19 nt, Artificial Sequence
  Description of Artificial Sequence: Synthetic oligonucleotide
cgcgaagccgaguccagcg

SEQ ID NO: 832485 - RNA, 19 nt, Artificial Sequence
  Description of Artificial Sequence: Synthetic oligonucleotide
uugccccggcgccccgucg

SEQ ID NO: 832486 - RNA, 19 nt, Artificial Sequence
  Description of Artificial Sequence: Synthetic oligonucleotide
gucggguggcagcacuuuc

SEQ ID NO: 832487 - RNA, 19 nt, Artificial Sequence
  Description of Artificial Sequence: Synthetic oligonucleotide
gacgcagaccuugggcgca

SEQ ID NO: 832488 - RNA, 19 nt, Artificial Sequence
  Description of Artificial Sequence: Synthetic oligonucleotide
ggaagcgaucuccgagaug

SEQ ID NO: 832489 - RNA, 19 nt, Artificial Sequence
  Description of Artificial Sequence: Synthetic oligonucleotide
uggagacguggaacaugau

SEQ ID NO: 832490 - RNA, 19 nt, Artificial Sequence
  Description of Artificial Sequence: Synthetic oligonucleotide
uucgcggccggccgcucuc

SEQ ID NO: 832491 - RNA, 19 nt, Artificial Sequence
  Description of Artificial Sequence: Synthetic oligonucleotide
gaagucggugaagccagcu

SEQ ID NO: 832492 - RNA, 19 nt, Artificial Sequence
  Description of Artificial Sequence: Synthetic oligonucleotide
gugcgcgcaccacuaagaa

SEQ ID NO: 832493 - RNA, 19 nt, Artificial Sequence
  Description of Artificial Sequence: Synthetic oligonucleotide
ggaauccguuuugguaucc

SEQ ID NO: 832494 - RNA, 19 nt, Artificial Sequence
  Description of Artificial Sequence: Synthetic oligonucleotide
ccacuucgaagcccaggcg

SEQ ID NO: 832495 - RNA, 19 nt, Artificial Sequence
  Description of Artificial Sequence: Synthetic oligonucleotide
ccauagcgugaaacuggcg

SEQ ID NO: 832496 - RNA, 19 nt, Artificial Sequence
  Description of Artificial Sequence: Synthetic oligonucleotide
cgugccacgacuucgccca

SEQ ID NO: 832497 - RNA, 19 nt, Artificial Sequence
  Description of Artificial Sequence: Synthetic oligonucleotide
gugugcgaguagccauagc

SEQ ID NO: 832498 - RNA, 19 nt, Artificial Sequence
  Description of Artificial Sequence: Synthetic oligonucleotide
gcgcggacgccccacauca

SEQ ID NO: 832499 - RNA, 19 nt, Artificial Sequence
  Description of Artificial Sequence: Synthetic oligonucleotide
gcgugaucgccuccccgcg

SEQ ID NO: 832500 - RNA, 19 nt, Artificial Sequence
  Description of Artificial Sequence: Synthetic oligonucleotide
caggacggugacgcagacc

SEQ ID NO: 832501 - RNA, 19 nt, Artificial Sequence
  Description of Artificial Sequence: Synthetic oligonucleotide
gcggacgccccacaucagc

SEQ ID NO: 832502 - RNA, 19 nt, Artificial Sequence
  Description of Artificial Sequence: Synthetic oligonucleotide
cguguaaggcagcaucgug

SEQ ID NO: 832503 - RNA, 19 nt, Artificial Sequence
  Description of Artificial Sequence: Synthetic oligonucleotide
gguguuccgagaaggucca

SEQ ID NO: 832504 - RNA, 19 nt, Artificial Sequence
  Description of Artificial Sequence: Synthetic oligonucleotide
cagcguguacaacucugaa

SEQ ID NO: 832505 - RNA, 19 nt, Artificial Sequence
  Description of Artificial Sequence: Synthetic oligonucleotide
ccaacacgucgcgacaggc

SEQ ID NO: 832506 - RNA, 19 nt, Artificial Sequence
  Description of Artificial Sequence: Synthetic oligonucleotide
caucagcgcgcccgccgcc

SEQ ID NO: 832507 - RNA, 19 nt, Artificial Sequence
  Description of Artificial Sequence: Synthetic oligonucleotide
ccguuuugguauccaguug

SEQ ID NO: 832508 - RNA, 19 nt, Artificial Sequence
  Description of Artificial Sequence: Synthetic oligonucleotide
guaccaggugcugaugggu

SEQ ID NO: 832509 - RNA, 19 nt, Artificial Sequence
  Description of Artificial Sequence: Synthetic oligonucleotide
gcgugcuccgggccgaagc

SEQ ID NO: 832510 - RNA, 19 nt, Artificial Sequence
  Description of Artificial Sequence: Synthetic oligonucleotide
gcccaaaccgcgaagccga

SEQ ID NO: 832511 - RNA, 19 nt, Artificial Sequence
  Description of Artificial Sequence: Synthetic oligonucleotide
ccagaauuguguugcaagu

SEQ ID NO: 832512 - RNA, 19 nt, Artificial Sequence
  Description of Artificial Sequence: Synthetic oligonucleotide
aggcccggaaaucggcguu

SEQ ID NO: 832513 - RNA, 19 nt, Artificial Sequence
  Description of Artificial Sequence: Synthetic oligonucleotide
ggugcggcucacugccacc

SEQ ID NO: 832514 - RNA, 19 nt, Artificial Sequence
  Description of Artificial Sequence: Synthetic oligonucleotide
cugcagacgugccacgacu

SEQ ID NO: 832515 - RNA, 19 nt, Artificial Sequence
  Description of Artificial Sequence: Synthetic oligonucleotide
acgacuucgcccacugcuu

SEQ ID NO: 832516 - RNA, 19 nt, Artificial Sequence
  Description of Artificial Sequence: Synthetic oligonucleotide
ggacucuaggugagagacc

SEQ ID NO: 832517 - RNA, 19 nt, Artificial Sequence
  Description of Artificial Sequence: Synthetic oligonucleotide
ccgagauggacugccacuc

SEQ ID NO: 832518 - RNA, 19 nt, Artificial Sequence
  Description of Artificial Sequence: Synthetic oligonucleotide
aagcgaucuccgagaugga

SEQ ID NO: 832519 - RNA, 19 nt, Artificial Sequence
  Description of Artificial Sequence: Synthetic oligonucleotide
ucgaagcccaggcgaccuu

SEQ ID NO: 832520 - RNA, 19 nt, Artificial Sequence
  Description of Artificial Sequence: Synthetic oligonucleotide
cucuaggugagagaccuuu

SEQ ID NO: 832521 - RNA, 19 nt, Artificial Sequence
  Description of Artificial Sequence: Synthetic oligonucleotide
ggugguguagagcgagugu

SEQ ID NO: 832522 - RNA, 19 nt, Artificial Sequence
  Description of Artificial Sequence: Synthetic oligonucleotide
ggaauuccgcagagacaag

SEQ ID NO: 832523 - RNA, 19 nt, Artificial Sequence
  Description of Artificial Sequence: Synthetic oligonucleotide
aaucggcguuggccgcgaa

SEQ ID NO: 832524 - RNA, 19 nt, Artificial Sequence
  Description of Artificial Sequence: Synthetic oligonucleotide
gcgacccgcgccccuagag

SEQ ID NO: 832525 - RNA, 19 nt, Artificial Sequence
  Description of Artificial Sequence: Synthetic oligonucleotide
uaccgggcuccuggaacac

SEQ ID NO: 832526 - RNA, 19 nt, Artificial Sequence
  Description of Artificial Sequence: Synthetic oligonucleotide
gcuauguaggaacuccguu

SEQ ID NO: 832527 - RNA, 19 nt, Artificial Sequence
  Description of Artificial Sequence: Synthetic oligonucleotide
accgcgaagccgaguccag

SEQ ID NO: 832528 - RNA, 19 nt, Artificial Sequence
  Description of Artificial Sequence: Synthetic oligonucleotide
gugcggggugcagggagcc

SEQ ID NO: 832529 - RNA, 19 nt, Artificial Sequence
  Description of Artificial Sequence: Synthetic oligonucleotide
gcgaacgugaagcgcucca

SEQ ID NO: 832530 - RNA, 19 nt, Artificial Sequence
  Description of Artificial Sequence: Synthetic oligonucleotide
gcgauguaguagucacuuc

SEQ ID NO: 832531 - RNA, 19 nt, Artificial Sequence
  Description of Artificial Sequence: Synthetic oligonucleotide
cugcuugccccggcgcccc

SEQ ID NO: 832532 - RNA, 19 nt, Artificial Sequence
  Description of Artificial Sequence: Synthetic oligonucleotide
ccgucgacgccgcagcgug

SEQ ID NO: 832533 - RNA, 19 nt, Artificial Sequence
  Description of Artificial Sequence: Synthetic oligonucleotide
gcgccugccgcccagagau

SEQ ID NO: 832534 - RNA, 19 nt, Artificial Sequence
  Description of Artificial Sequence: Synthetic oligonucleotide
acacgucgcgacaggcaca

SEQ ID NO: 832535 - RNA, 19 nt, Artificial Sequence
  Description of Artificial Sequence: Synthetic oligonucleotide
gcaucguggagacguggaa

SEQ ID NO: 832536 - RNA, 19 nt, Artificial Sequence
  Description of Artificial Sequence: Synthetic oligonucleotide
ccgcgaaggggccuccacc

SEQ ID NO: 832537 - RNA, 19 nt, Artificial Sequence
  Description of Artificial Sequence: Synthetic oligonucleotide
gcgaguagccauagcguga

SEQ ID NO: 832538 - RNA, 19 nt, Artificial Sequence
  Description of Artificial Sequence: Synthetic oligonucleotide
cgagggguagcccggcgcc

SEQ ID NO: 832539 - RNA, 19 nt, Artificial Sequence
  Description of Artificial Sequence: Synthetic oligonucleotide
cgugcuccgggccgaagcc

SEQ ID NO: 832540 - RNA, 19 nt, Artificial Sequence
  Description of Artificial Sequence: Synthetic oligonucleotide
ccgagggguagcccggcgc

SEQ ID NO: 832541 - RNA, 19 nt, Artificial Sequence
  Description of Artificial Sequence: Synthetic oligonucleotide
agccgcgcggacgccccac

SEQ ID NO: 832542 - RNA, 19 nt, Artificial Sequence
  Description of Artificial Sequence: Synthetic oligonucleotide
ucgacgccgcagcgugauc

SEQ ID NO: 832543 - RNA, 19 nt, Artificial Sequence
  Description of Artificial Sequence: Synthetic oligonucleotide
cuugccccggcgccccguc

SEQ ID NO: 832544 - RNA, 19 nt, Artificial Sequence
  Description of Artificial Sequence: Synthetic oligonucleotide
cccuagagccgcgcggacg

SEQ ID NO: 832545 - RNA, 19 nt, Artificial Sequence
  Description of Artificial Sequence: Synthetic oligonucleotide
cuguuggcgugugcgagua

SEQ ID NO: 832546 - RNA, 19 nt, Artificial Sequence
  Description of Artificial Sequence: Synthetic oligonucleotide
gccccgucgacgccgcagc

SEQ ID NO: 832547 - RNA, 19 nt, Artificial Sequence
  Description of Artificial Sequence: Synthetic oligonucleotide
ggcaggacggugacgcaga

SEQ ID NO: 832548 - RNA, 19 nt, Artificial Sequence
  Description of Artificial Sequence: Synthetic oligonucleotide
gcgaucuccgagauggacu

SEQ ID NO: 832549 - RNA, 19 nt, Artificial Sequence
  Description of Artificial Sequence: Synthetic oligonucleotide
cccggcgccccgucgacgc

SEQ ID NO: 832550 - RNA, 19 nt, Artificial Sequence
  Description of Artificial Sequence: Synthetic oligonucleotide
ggcccggaaaucggcguug

SEQ ID NO: 832551 - RNA, 19 nt, Artificial Sequence
  Description of Artificial Sequence: Synthetic oligonucleotide
ggcgugugcgaguagccau

SEQ ID NO: 832552 - RNA, 19 nt, Artificial Sequence
  Description of Artificial Sequence: Synthetic oligonucleotide
gcgaagccgaguccagcga

SEQ ID NO: 832553 - RNA, 19 nt, Artificial Sequence
  Description of Artificial Sequence: Synthetic oligonucleotide
cggguggcagcacuuucag

SEQ ID NO: 832554 - RNA, 19 nt, Artificial Sequence
  Description of Artificial Sequence: Synthetic oligonucleotide
cagcgauguaguagucacu

SEQ ID NO: 832555 - RNA, 19 nt, Artificial Sequence
  Description of Artificial Sequence: Synthetic oligonucleotide
gggucgacagggaguugug

SEQ ID NO: 832556 - RNA, 19 nt, Artificial Sequence
  Description of Artificial Sequence: Synthetic oligonucleotide
ugcggggugcagggagccu

SEQ ID NO: 832557 - RNA, 19 nt, Artificial Sequence
  Description of Artificial Sequence: Synthetic oligonucleotide
ccauccuguacuggcucug

SEQ ID NO: 832558 - RNA, 19 nt, Artificial Sequence
  Description of Artificial Sequence: Synthetic oligonucleotide
guccagcgauguaguaguc

SEQ ID NO: 832559 - RNA, 19 nt, Artificial Sequence
  Description of Artificial Sequence: Synthetic oligonucleotide
gcaggacggugacgcagac

SEQ ID NO: 832560 - RNA, 19 nt, Artificial Sequence
  Description of Artificial Sequence: Synthetic oligonucleotide
ugggguccucauggcuacu

SEQ ID NO: 832561 - RNA, 19 nt, Artificial Sequence
  Description of Artificial Sequence: Synthetic oligonucleotide
ccgcccagagauggcagcc

SEQ ID NO: 832562 - RNA, 19 nt, Artificial Sequence
  Description of Artificial Sequence: Synthetic oligonucleotide
cgaacgugaagcgcuccac

SEQ ID NO: 832563 - RNA, 19 nt, Artificial Sequence
  Description of Artificial Sequence: Synthetic oligonucleotide
gucuccgcucccgcggcga

SEQ ID NO: 832564 - RNA, 19 nt, Artificial Sequence
  Description of Artificial Sequence: Synthetic oligonucleotide
gcgccccuagagccgcgcg

SEQ ID NO: 832565 - RNA, 19 nt, Artificial Sequence
  Description of Artificial Sequence: Synthetic oligonucleotide
cccaaaccgcgaagccgag

SEQ ID NO: 832566 - RNA, 19 nt, Artificial Sequence
  Description of Artificial Sequence: Synthetic oligonucleotide
gccgcgaaggggccuccac

SEQ ID NO: 832567 - RNA, 19 nt, Artificial Sequence
  Description of Artificial Sequence: Synthetic oligonucleotide
ccacccgucuccgcucccg

SEQ ID NO: 832568 - RNA, 19 nt, Artificial Sequence
  Description of Artificial Sequence: Synthetic oligonucleotide
cgugugcgaguagccauag

SEQ ID NO: 832569 - RNA, 19 nt, Artificial Sequence
  Description of Artificial Sequence: Synthetic oligonucleotide
gggccgaagccccgugguc

SEQ ID NO: 832570 - RNA, 19 nt, Artificial Sequence
  Description of Artificial Sequence: Synthetic oligonucleotide
gugccacgacuucgcccac

SEQ ID NO: 832571 - RNA, 19 nt, Artificial Sequence
  Description of Artificial Sequence: Synthetic oligonucleotide
uggccgcgaaggggccucc

SEQ ID NO: 832572 - RNA, 19 nt, Artificial Sequence
  Description of Artificial Sequence: Synthetic oligonucleotide
gugggucgacagggaguug

SEQ ID NO: 832573 - RNA, 19 nt, Artificial Sequence
  Description of Artificial Sequence: Synthetic oligonucleotide
ccacgacuucgcccacugc

SEQ ID NO: 832574 - RNA, 19 nt, Artificial Sequence
  Description of Artificial Sequence: Synthetic oligonucleotide
cgccccuagagccgcgcgg

SEQ ID NO: 832575 - RNA, 19 nt, Artificial Sequence
  Description of Artificial Sequence: Synthetic oligonucleotide
gcugguguuccgagaaggu

SEQ ID NO: 832576 - RNA, 19 nt, Artificial Sequence
  Description of Artificial Sequence: Synthetic oligonucleotide
cgcuccacgugcgugauaa

SEQ ID NO: 832577 - RNA, 19 nt, Artificial Sequence
  Description of Artificial Sequence: Synthetic oligonucleotide
gccccuagagccgcgcgga

SEQ ID NO: 832578 - RNA, 19 nt, Artificial Sequence
  Description of Artificial Sequence: Synthetic oligonucleotide
gucuggccacacacucgca

SEQ ID NO: 832579 - RNA, 19 nt, Artificial Sequence
  Description of Artificial Sequence: Synthetic oligonucleotide
gcauggacucuaggugaga

SEQ ID NO: 832580 - RNA, 19 nt, Artificial Sequence
  Description of Artificial Sequence: Synthetic oligonucleotide
gucgacgccgcagcgugau

SEQ ID NO: 832581 - RNA, 19 nt, Artificial Sequence
  Description of Artificial Sequence: Synthetic oligonucleotide
cgcaacaggcgugcuccgg

SEQ ID NO: 832582 - RNA, 19 nt, Artificial Sequence
  Description of Artificial Sequence: Synthetic oligonucleotide
gagggguagcccggcgccu

SEQ ID NO: 832583 - RNA, 19 nt, Artificial Sequence
  Description of Artificial Sequence: Synthetic oligonucleotide
ccggccgcucucgucuggg

SEQ ID NO: 832584 - RNA, 19 nt, Artificial Sequence
  Description of Artificial Sequence: Synthetic oligonucleotide
ccgaguccagcgauguagu

SEQ ID NO: 832585 - RNA, 19 nt, Artificial Sequence
  Description of Artificial Sequence: Synthetic oligonucleotide
cggcguuggccgcgaaggg

SEQ ID NO: 832586 - RNA, 19 nt, Artificial Sequence
  Description of Artificial Sequence: Synthetic oligonucleotide
guauccaguugggcccggu

SEQ ID NO: 832587 - RNA, 19 nt, Artificial Sequence
  Description of Artificial Sequence: Synthetic oligonucleotide
gagccgcgcggacgcccca

SEQ ID NO: 832588 - RNA, 19 nt, Artificial Sequence
  Description of Artificial Sequence: Synthetic oligonucleotide
ccccgucgacgccgcagcg

SEQ ID NO: 832589 - RNA, 19 nt, Artificial Sequence
  Description of Artificial Sequence: Synthetic oligonucleotide
guuggccgcgaaggggccu

SEQ ID NO: 832590 - RNA, 19 nt, Artificial Sequence
  Description of Artificial Sequence: Synthetic oligonucleotide
gcguguaaggcagcaucgu

SEQ ID NO: 832591 - RNA, 19 nt, Artificial Sequence
  Description of Artificial Sequence: Synthetic oligonucleotide
cagucggguggcagcacuu

SEQ ID NO: 832592 - RNA, 19 nt, Artificial Sequence
  Description of Artificial Sequence: Synthetic oligonucleotide
gcgugugcgaguagccaua

SEQ ID NO: 832593 - RNA, 19 nt, Artificial Sequence
  Description of Artificial Sequence: Synthetic oligonucleotide
ccccguggucucugcgaac

SEQ ID NO: 832594 - RNA, 19 nt, Artificial Sequence
  Description of Artificial Sequence: Synthetic oligonucleotide
caggcgaccuuggccgucu

SEQ ID NO: 832595 - RNA, 19 nt, Artificial Sequence
  Description of Artificial Sequence: Synthetic oligonucleotide
ccaagccaacacgucgcga

SEQ ID NO: 832596 - RNA, 19 nt, Artificial Sequence
  Description of Artificial Sequence: Synthetic oligonucleotide
cuucgcggccggccgcucu

SEQ ID NO: 832597 - RNA, 19 nt, Artificial Sequence
  Description of Artificial Sequence: Synthetic oligonucleotide
cccagagauggcagcccaa

SEQ ID NO: 832598 - RNA, 19 nt, Artificial Sequence
  Description of Artificial Sequence: Synthetic oligonucleotide
gccugugcgcgcaccacua

SEQ ID NO: 832599 - RNA, 19 nt, Artificial Sequence
  Description of Artificial Sequence: Synthetic oligonucleotide
gcgugaaacuggcgugcgu

SEQ ID NO: 832600 - RNA, 19 nt, Artificial Sequence
  Description of Artificial Sequence: Synthetic oligonucleotide
guguuccgagaagguccaa

SEQ ID NO: 832601 - RNA, 19 nt, Artificial Sequence
  Description of Artificial Sequence: Synthetic oligonucleotide
ggcgugcuccgggccgaag

SEQ ID NO: 832602 - RNA, 19 nt, Artificial Sequence
  Description of Artificial Sequence: Synthetic oligonucleotide
ggcgaccuuggccgucucu

SEQ ID NO: 832603 - RNA, 19 nt, Artificial Sequence
  Description of Artificial Sequence: Synthetic oligonucleotide
ccccuagagccgcgcggac

SEQ ID NO: 832604 - RNA, 19 nt, Artificial Sequence
  Description of Artificial Sequence: Synthetic oligonucleotide
cgucuccgcucccgcggcg

SEQ ID NO: 832605 - RNA, 19 nt, Artificial Sequence
  Description of Artificial Sequence: Synthetic oligonucleotide
gcuccacgugcgugauaaa

SEQ ID NO: 832606 - RNA, 19 nt, Artificial Sequence
  Description of Artificial Sequence: Synthetic oligonucleotide
ggcgacccgcgccccuaga

SEQ ID NO: 832607 - RNA, 19 nt, Artificial Sequence
  Description of Artificial Sequence: Synthetic oligonucleotide
cggauaguuguaggacaga

SEQ ID NO: 832608 - RNA, 19 nt, Artificial Sequence
  Description of Artificial Sequence: Synthetic oligonucleotide
acgucgcgacaggcacagu

SEQ ID NO: 832609 - RNA, 19 nt, Artificial Sequence
  Description of Artificial Sequence: Synthetic oligonucleotide
ccugugcgcgcaccacuaa

SEQ ID NO: 832610 - RNA, 19 nt, Artificial Sequence
  Description of Artificial Sequence: Synthetic oligonucleotide
cgucgcgacaggcacaguu

SEQ ID NO: 832611 - RNA, 19 nt, Artificial Sequence
  Description of Artificial Sequence: Synthetic oligonucleotide
cgcggacgccccacaucag

SEQ ID NO: 832612 - RNA, 19 nt, Artificial Sequence
  Description of Artificial Sequence: Synthetic oligonucleotide
gugugccgguggaauccgu

SEQ ID NO: 832613 - RNA, 19 nt, Artificial Sequence
  Description of Artificial Sequence: Synthetic oligonucleotide
ccaggcgaccuuggccguc

SEQ ID NO: 832614 - RNA, 19 nt, Artificial Sequence
  Description of Artificial Sequence: Synthetic oligonucleotide
aggcgugcuccgggccgaa

SEQ ID NO: 832615 - RNA, 19 nt, Artificial Sequence
  Description of Artificial Sequence: Synthetic oligonucleotide
gccgcgcggacgccccaca

SEQ ID NO: 832616 - RNA, 19 nt, Artificial Sequence
  Description of Artificial Sequence: Synthetic oligonucleotide
gcgaaggggccuccaccau

SEQ ID NO: 832617 - RNA, 19 nt, Artificial Sequence
  Description of Artificial Sequence: Synthetic oligonucleotide
ccggcgccccgucgacgcc

SEQ ID NO: 832618 - RNA, 19 nt, Artificial Sequence
  Description of Artificial Sequence: Synthetic oligonucleotide
ccccggcgccccgucgacg

SEQ ID NO: 832619 - RNA, 19 nt, Artificial Sequence
  Description of Artificial Sequence: Synthetic oligonucleotide
cacucgcaacaggcgugcu

SEQ ID NO: 832620 - RNA, 19 nt, Artificial Sequence
  Description of Artificial Sequence: Synthetic oligonucleotide
cccucucgggacagugacu

SEQ ID NO: 832621 - RNA, 19 nt, Artificial Sequence
  Description of Artificial Sequence: Synthetic oligonucleotide
ccgcgccccuagagccgcg

SEQ ID NO: 832622 - RNA, 19 nt, Artificial Sequence
  Description of Artificial Sequence: Synthetic oligonucleotide
cgcgccccuagagccgcgc

SEQ ID NO: 832623 - RNA, 19 nt, Artificial Sequence
  Description of Artificial Sequence: Synthetic oligonucleotide
ggccgcgaaggggccucca

SEQ ID NO: 832624 - RNA, 19 nt, Artificial Sequence
  Description of Artificial Sequence: Synthetic oligonucleotide
ccaaaccgcgaagccgagu

SEQ ID NO: 832625 - RNA, 19 nt, Artificial Sequence
  Description of Artificial Sequence: Synthetic oligonucleotide
gggcagcgucuggccacac

SEQ ID NO: 832626 - RNA, 19 nt, Artificial Sequence
  Description of Artificial Sequence: Synthetic oligonucleotide
cggccggccgcucucgucu

SEQ ID NO: 832627 - RNA, 19 nt, Artificial Sequence
  Description of Artificial Sequence: Synthetic oligonucleotide
cggcgacccgcgccccuag

SEQ ID NO: 832628 - RNA, 19 nt, Artificial Sequence
  Description of Artificial Sequence: Synthetic oligonucleotide
cgucgacgccgcagcguga

SEQ ID NO: 832629 - RNA, 19 nt, Artificial Sequence
  Description of Artificial Sequence: Synthetic oligonucleotide
cgggccgaagccccguggu

SEQ ID NO: 832630 - RNA, 19 nt, Artificial Sequence
  Description of Artificial Sequence: Synthetic oligonucleotide
cccgucgacgccgcagcgu

SEQ ID NO: 832631 - RNA, 19 nt, Artificial Sequence
  Description of Artificial Sequence: Synthetic oligonucleotide
gcgccccgucgacgccgca

SEQ ID NO: 832632 - RNA, 19 nt, Artificial Sequence
  Description of Artificial Sequence: Synthetic oligonucleotide
ccgcagagacaagguucuu

SEQ ID NO: 832633 - RNA, 19 nt, Artificial Sequence
  Description of Artificial Sequence: Synthetic oligonucleotide
aucaucaacauuuuaagcc

SEQ ID NO: 832634 - RNA, 19 nt, Artificial Sequence
  Description of Artificial Sequence: Synthetic oligonucleotide
ugauuuaaggaaaaggaca

SEQ ID NO: 832635 - RNA, 19 nt, Artificial Sequence
  Description of Artificial Sequence: Synthetic oligonucleotide
uuuguuggcaugaggaugg

SEQ ID NO: 832636 - RNA, 19 nt, Artificial Sequence
  Description of Artificial Sequence: Synthetic oligonucleotide
aacacggcaauguaguggg

SEQ ID NO: 832637 - RNA, 19 nt, Artificial Sequence
  Description of Artificial Sequence: Synthetic oligonucleotide
cuaucuuccagaaaugucc

SEQ ID NO: 832638 - RNA, 19 nt, Artificial Sequence
  Description of Artificial Sequence: Synthetic oligonucleotide
cuagcuuucacucuggagc

SEQ ID NO: 832639 - RNA, 19 nt, Artificial Sequence
  Description of Artificial Sequence: Synthetic oligonucleotide
aguuugaccucauuguccc

SEQ ID NO: 832640 - RNA, 19 nt, Artificial Sequence
  Description of Artificial Sequence: Synthetic oligonucleotide
uucaagggcaguuuguugg

SEQ ID NO: 832641 - RNA, 19 nt, Artificial Sequence
  Description of Artificial Sequence: Synthetic oligonucleotide
uuuaaaagaagugaggcuc

SEQ ID NO: 832642 - RNA, 19 nt, Artificial Sequence
  Description of Artificial Sequence: Synthetic oligonucleotide
uuucaagacgaucuuaucu

SEQ ID NO: 832643 - RNA, 19 nt, Artificial Sequence
  Description of Artificial Sequence: Synthetic oligonucleotide
uuuacuuacuccaagcuuu

SEQ ID NO: 832644 - RNA, 19 nt, Artificial Sequence
  Description of Artificial Sequence: Synthetic oligonucleotide
acuuuauagaaauaggcau

SEQ ID NO: 832645 - RNA, 19 nt, Artificial Sequence
  Description of Artificial Sequence: Synthetic oligonucleotide
uugauuuaaggaaaaggac

SEQ ID NO: 832646 - RNA, 19 nt, Artificial Sequence
  Description of Artificial Sequence: Synthetic oligonucleotide
uuaacaaggaacacggcaa

SEQ ID NO: 832647 - RNA, 19 nt, Artificial Sequence
  Description of Artificial Sequence: Synthetic oligonucleotide
ucauaucugggcaacggag

SEQ ID NO: 832648 - RNA, 19 nt, Artificial Sequence
  Description of Artificial Sequence: Synthetic oligonucleotide
ucugucgugugaauuauug

SEQ ID NO: 832649 - RNA, 19 nt, Artificial Sequence
  Description of Artificial Sequence: Synthetic oligonucleotide
auguuaacaaggaacacgg

SEQ ID NO: 832650 - RNA, 19 nt, Artificial Sequence
  Description of Artificial Sequence: Synthetic oligonucleotide
aacaccuagaguccaaccu

SEQ ID NO: 832651 - RNA, 19 nt, Artificial Sequence
  Description of Artificial Sequence: Synthetic oligonucleotide
uuaccuuuugguacugggg

SEQ ID NO: 832652 - RNA, 19 nt, Artificial Sequence
  Description of Artificial Sequence: Synthetic oligonucleotide
ucaaucgucguuuuauaug

SEQ ID NO: 832653 - RNA, 19 nt, Artificial Sequence
  Description of Artificial Sequence: Synthetic oligonucleotide
uaaccagucgugaucaggc

SEQ ID NO: 832654 - RNA, 19 nt, Artificial Sequence
  Description of Artificial Sequence: Synthetic oligonucleotide
gaauacucggagaaaagcc

SEQ ID NO: 832655 - RNA, 19 nt, Artificial Sequence
  Description of Artificial Sequence: Synthetic oligonucleotide
aauuugguuuugucguguc

SEQ ID NO: 832656 - RNA, 19 nt, Artificial Sequence
  Description of Artificial Sequence: Synthetic oligonucleotide
uuugucgugucauaacuga

SEQ ID NO: 832657 - RNA, 19 nt, Artificial Sequence
  Description of Artificial Sequence: Synthetic oligonucleotide
gguaugauugcacaugucc

SEQ ID NO: 832658 - RNA, 19 nt, Artificial Sequence
  Description of Artificial Sequence: Synthetic oligonucleotide
augcaaugcaaacacacug

SEQ ID NO: 832659 - RNA, 19 nt, Artificial Sequence
  Description of Artificial Sequence: Synthetic oligonucleotide
ugucgugucauaacugaag

SEQ ID NO: 832660 - RNA, 19 nt, Artificial Sequence
  Description of Artificial Sequence: Synthetic oligonucleotide
ugucgugugaauuauuguc

SEQ ID NO: 832661 - RNA, 19 nt, Artificial Sequence
  Description of Artificial Sequence: Synthetic oligonucleotide
ugugaauuauugucaaaga

SEQ ID NO: 832662 - RNA, 19 nt, Artificial Sequence
  Description of Artificial Sequence: Synthetic oligonucleotide
auuacuagauauaugugug

SEQ ID NO: 832663 - RNA, 19 nt, Artificial Sequence
  Description of Artificial Sequence: Synthetic oligonucleotide
uuauaaccagucgugauca

SEQ ID NO: 832664 - RNA, 19 nt, Artificial Sequence
  Description of Artificial Sequence: Synthetic oligonucleotide
caggccauugguaugauug

SEQ ID NO: 832665 - RNA, 19 nt, Artificial Sequence
  Description of Artificial Sequence: Synthetic oligonucleotide
ucagucaugcagaauacuc

SEQ ID NO: 832666 - RNA, 19 nt, Artificial Sequence
  Description of Artificial Sequence: Synthetic oligonucleotide
cuucugcuaaacuggaucc

SEQ ID NO: 832667 - RNA, 19 nt, Artificial Sequence
  Description of Artificial Sequence: Synthetic oligonucleotide
uaccuuuugguacugggga

SEQ ID NO: 832668 - RNA, 19 nt, Artificial Sequence
  Description of Artificial Sequence: Synthetic oligonucleotide
uaugauugcacauguccca

SEQ ID NO: 832669 - RNA, 19 nt, Artificial Sequence
  Description of Artificial Sequence: Synthetic oligonucleotide
aguggggugucauauucac

SEQ ID NO: 832670 - RNA, 19 nt, Artificial Sequence
  Description of Artificial Sequence: Synthetic oligonucleotide
ucggucuugagaauacgag

SEQ ID NO: 832671 - RNA, 19 nt, Artificial Sequence
  Description of Artificial Sequence: Synthetic oligonucleotide
aucaaguugccaccuuacc

SEQ ID NO: 832672 - RNA, 19 nt, Artificial Sequence
  Description of Artificial Sequence: Synthetic oligonucleotide
uuuugucgugucauaacug

SEQ ID NO: 832673 - RNA, 19 nt, Artificial Sequence
  Description of Artificial Sequence: Synthetic oligonucleotide
aaucaaguugccaccuuac

SEQ ID NO: 832674 - RNA, 19 nt, Artificial Sequence
  Description of Artificial Sequence: Synthetic oligonucleotide
aauucggucuugagaauac

SEQ ID NO: 832675 - RNA, 19 nt, Artificial Sequence
  Description of Artificial Sequence: Synthetic oligonucleotide
aauacucggagaaaagcca

SEQ ID NO: 832676 - RNA, 19 nt, Artificial Sequence
  Description of Artificial Sequence: Synthetic oligonucleotide
uuuuacuuacuccaagcuu

SEQ ID NO: 832677 - RNA, 19 nt, Artificial Sequence
  Description of Artificial Sequence: Synthetic oligonucleotide
uuaagaucaucaucaacau

SEQ ID NO: 832678 - RNA, 19 nt, Artificial Sequence
  Description of Artificial Sequence: Synthetic oligonucleotide
aauacgaggggucccaaua

SEQ ID NO: 832679 - RNA, 19 nt, Artificial Sequence
  Description of Artificial Sequence: Synthetic oligonucleotide
aaauaggcauacuggcgug

SEQ ID NO: 832680 - RNA, 19 nt, Artificial Sequence
  Description of Artificial Sequence: Synthetic oligonucleotide
cugcauuugaucgagugcc

SEQ ID NO: 832681 - RNA, 19 nt, Artificial Sequence
  Description of Artificial Sequence: Synthetic oligonucleotide
aaccagucgugaucaggcc

SEQ ID NO: 832682 - RNA, 19 nt, Artificial Sequence
  Description of Artificial Sequence: Synthetic oligonucleotide
aagacgaucuuaucuuccu

SEQ ID NO: 832683 - RNA, 19 nt, Artificial Sequence
  Description of Artificial Sequence: Synthetic oligonucleotide
aaagauuugcccagaccuc

SEQ ID NO: 832684 - RNA, 19 nt, Artificial Sequence
  Description of Artificial Sequence: Synthetic oligonucleotide
agaaauaggcauacuggcg

SEQ ID NO: 832685 - RNA, 19 nt, Artificial Sequence
  Description of Artificial Sequence: Synthetic oligonucleotide
gaacacggcaauguagugg

SEQ ID NO: 832686 - RNA, 19 nt, Artificial Sequence
  Description of Artificial Sequence: Synthetic oligonucleotide
ucauauucacuggggaggg

SEQ ID NO: 832687 - RNA, 19 nt, Artificial Sequence
  Description of Artificial Sequence: Synthetic oligonucleotide
agccugaaaguccuguagg

SEQ ID NO: 832688 - RNA, 19 nt, Artificial Sequence
  Description of Artificial Sequence: Synthetic oligonucleotide
cauaucugggcaacggagc

SEQ ID NO: 832689 - RNA, 19 nt, Artificial Sequence
  Description of Artificial Sequence: Synthetic oligonucleotide
uugaucgagugccauaaaa

SEQ ID NO: 832690 - RNA, 19 nt, Artificial Sequence
  Description of Artificial Sequence: Synthetic oligonucleotide
auaacugaagagaccgccc

SEQ ID NO: 832691 - RNA, 19 nt, Artificial Sequence
  Description of Artificial Sequence: Synthetic oligonucleotide
cucacagcggucaucuucc

SEQ ID NO: 832692 - RNA, 19 nt, Artificial Sequence
  Description of Artificial Sequence: Synthetic oligonucleotide
auacgaggggucccaauac

SEQ ID NO: 832693 - RNA, 19 nt, Artificial Sequence
  Description of Artificial Sequence: Synthetic oligonucleotide
gaaauaggcauacuggcgu

SEQ ID NO: 832694 - RNA, 19 nt, Artificial Sequence
  Description of Artificial Sequence: Synthetic oligonucleotide
cagguuauaaccagucgug

SEQ ID NO: 832695 - RNA, 19 nt, Artificial Sequence
  Description of Artificial Sequence: Synthetic oligonucleotide
aaacucugcauuugaucga

SEQ ID NO: 832696 - RNA, 19 nt, Artificial Sequence
  Description of Artificial Sequence: Synthetic oligonucleotide
ucgcucacacagcagauga

SEQ ID NO: 832697 - RNA, 19 nt, Artificial Sequence
  Description of Artificial Sequence: Synthetic oligonucleotide
uucggucuugagaauacga

SEQ ID NO: 832698 - RNA, 19 nt, Artificial Sequence
  Description of Artificial Sequence: Synthetic oligonucleotide
uuacuagauauaugugugu

SEQ ID NO: 832699 - RNA, 19 nt, Artificial Sequence
  Description of Artificial Sequence: Synthetic oligonucleotide
cucaguaaaaugcaaugca

SEQ ID NO: 832700 - RNA, 19 nt, Artificial Sequence
  Description of Artificial Sequence: Synthetic oligonucleotide
uucgaaguagaguggggug

SEQ ID NO: 832701 - RNA, 19 nt, Artificial Sequence
  Description of Artificial Sequence: Synthetic oligonucleotide
aagauuugcccagaccuca

SEQ ID NO: 832702 - RNA, 19 nt, Artificial Sequence
  Description of Artificial Sequence: Synthetic oligonucleotide
caagacgaucuuaucuucc

SEQ ID NO: 832703 - RNA, 19 nt, Artificial Sequence
  Description of Artificial Sequence: Synthetic oligonucleotide
uguagggcuacgcacucac

SEQ ID NO: 832704 - RNA, 19 nt, Artificial Sequence
  Description of Artificial Sequence: Synthetic oligonucleotide
uugacgagcccguucucgg

SEQ ID NO: 832705 - RNA, 19 nt, Artificial Sequence
  Description of Artificial Sequence: Synthetic oligonucleotide
agcuagaucuuuaaaauaa

SEQ ID NO: 832706 - RNA, 19 nt, Artificial Sequence
  Description of Artificial Sequence: Synthetic oligonucleotide
agggcuacgcacucacagc

SEQ ID NO: 832707 - RNA, 19 nt, Artificial Sequence
  Description of Artificial Sequence: Synthetic oligonucleotide
cauaaaggaaucagggcca

SEQ ID NO: 832708 - RNA, 19 nt, Artificial Sequence
  Description of Artificial Sequence: Synthetic oligonucleotide
uuuggucccauuagggauc

SEQ ID NO: 832709 - RNA, 19 nt, Artificial Sequence
  Description of Artificial Sequence: Synthetic oligonucleotide
auaaccagucgugaucagg

SEQ ID NO: 832710 - RNA, 19 nt, Artificial Sequence
  Description of Artificial Sequence: Synthetic oligonucleotide
cuuuauagaaauaggcaua

SEQ ID NO: 832711 - RNA, 19 nt, Artificial Sequence
  Description of Artificial Sequence: Synthetic oligonucleotide
ucgugucauaacugaagag

SEQ ID NO: 832712 - RNA, 19 nt, Artificial Sequence
  Description of Artificial Sequence: Synthetic oligonucleotide
cccaagcgcaauuugaugg

SEQ ID NO: 832713 - RNA, 19 nt, Artificial Sequence
  Description of Artificial Sequence: Synthetic oligonucleotide
ccaagcuuuauuuucacuc

SEQ ID NO: 832714 - RNA, 19 nt, Artificial Sequence
  Description of Artificial Sequence: Synthetic oligonucleotide
uguuaacaaggaacacggc

SEQ ID NO: 832715 - RNA, 19 nt, Artificial Sequence
  Description of Artificial Sequence: Synthetic oligonucleotide
ugcaucucagagccgcucc

SEQ ID NO: 832716 - RNA, 19 nt, Artificial Sequence
  Description of Artificial Sequence: Synthetic oligonucleotide
uccuguagggcuacgcacu

SEQ ID NO: 832717 - RNA, 19 nt, Artificial Sequence
  Description of Artificial Sequence: Synthetic oligonucleotide
guuuguuggcaugaggaug

SEQ ID NO: 832718 - RNA, 19 nt, Artificial Sequence
  Description of Artificial Sequence: Synthetic oligonucleotide
cagaauacucggagaaaag

SEQ ID NO: 832719 - RNA, 19 nt, Artificial Sequence
  Description of Artificial Sequence: Synthetic oligonucleotide
aguggcuuggagaauucgg

SEQ ID NO: 832720 - RNA, 19 nt, Artificial Sequence
  Description of Artificial Sequence: Synthetic oligonucleotide
ucaagacgaucuuaucuuc

SEQ ID NO: 832721 - RNA, 19 nt, Artificial Sequence
  Description of Artificial Sequence: Synthetic oligonucleotide
uuuucacucugucguguga

SEQ ID NO: 832722 - RNA, 19 nt, Artificial Sequence
  Description of Artificial Sequence: Synthetic oligonucleotide
gccauuguggcacggaccg

SEQ ID NO: 832723 - RNA, 19 nt, Artificial Sequence
  Description of Artificial Sequence: Synthetic oligonucleotide
ucugcuaaacuggauccca

SEQ ID NO: 832724 - RNA, 19 nt, Artificial Sequence
  Description of Artificial Sequence: Synthetic oligonucleotide
agggaucacauuuucccca

SEQ ID NO: 832725 - RNA, 19 nt, Artificial Sequence
  Description of Artificial Sequence: Synthetic oligonucleotide
gaacaccuagaguccaacc

SEQ ID NO: 832726 - RNA, 19 nt, Artificial Sequence
  Description of Artificial Sequence: Synthetic oligonucleotide
auuugaucgagugccauaa

SEQ ID NO: 832727 - RNA, 19 nt, Artificial Sequence
  Description of Artificial Sequence: Synthetic oligonucleotide
agacgaucuuaucuuccuc

SEQ ID NO: 832728 - RNA, 19 nt, Artificial Sequence
  Description of Artificial Sequence: Synthetic oligonucleotide
uauucacuggggagggucu

SEQ ID NO: 832729 - RNA, 19 nt, Artificial Sequence
  Description of Artificial Sequence: Synthetic oligonucleotide
ucccaaugagugcaucuca

SEQ ID NO: 832730 - RNA, 19 nt, Artificial Sequence
  Description of Artificial Sequence: Synthetic oligonucleotide
gucccauaaaggaaucagg

SEQ ID NO: 832731 - RNA, 19 nt, Artificial Sequence
  Description of Artificial Sequence: Synthetic oligonucleotide
ugucuccuagcaaaugcuc

SEQ ID NO: 832732 - RNA, 19 nt, Artificial Sequence
  Description of Artificial Sequence: Synthetic oligonucleotide
ugagcucggaccucaacuc

SEQ ID NO: 832733 - RNA, 19 nt, Artificial Sequence
  Description of Artificial Sequence: Synthetic oligonucleotide
ucacuuuuacuuacuccaa

SEQ ID NO: 832734 - RNA, 19 nt, Artificial Sequence
  Description of Artificial Sequence: Synthetic oligonucleotide
ggcucaguaaaaugcaaug

SEQ ID NO: 832735 - RNA, 19 nt, Artificial Sequence
  Description of Artificial Sequence: Synthetic oligonucleotide
aguuuguuggcaugaggau

SEQ ID NO: 832736 - RNA, 19 nt, Artificial Sequence
  Description of Artificial Sequence: Synthetic oligonucleotide
gucgugucauaacugaaga

SEQ ID NO: 832737 - RNA, 19 nt, Artificial Sequence
  Description of Artificial Sequence: Synthetic oligonucleotide
ucgugugaauuauugucaa

SEQ ID NO: 832738 - RNA, 19 nt, Artificial Sequence
  Description of Artificial Sequence: Synthetic oligonucleotide
ucgucguuuuauauguuuu

SEQ ID NO: 832739 - RNA, 19 nt, Artificial Sequence
  Description of Artificial Sequence: Synthetic oligonucleotide
agaccgcccaccuguaguc

SEQ ID NO: 832740 - RNA, 19 nt, Artificial Sequence
  Description of Artificial Sequence: Synthetic oligonucleotide
uucgcuucacccguacugc

SEQ ID NO: 832741 - RNA, 19 nt, Artificial Sequence
  Description of Artificial Sequence: Synthetic oligonucleotide
ggagaauucggucuugaga

SEQ ID NO: 832742 - RNA, 19 nt, Artificial Sequence
  Description of Artificial Sequence: Synthetic oligonucleotide
uccucguaagugaaagaau

SEQ ID NO: 832743 - RNA, 19 nt, Artificial Sequence
  Description of Artificial Sequence: Synthetic oligonucleotide
guuuugucgugucauaacu

SEQ ID NO: 832744 - RNA, 19 nt, Artificial Sequence
  Description of Artificial Sequence: Synthetic oligonucleotide
agugccuacggcuggucug

SEQ ID NO: 832745 - RNA, 19 nt, Artificial Sequence
  Description of Artificial Sequence: Synthetic oligonucleotide
caaucgucguuuuauaugu

SEQ ID NO: 832746 - RNA, 19 nt, Artificial Sequence
  Description of Artificial Sequence: Synthetic oligonucleotide
gagccugucacuuuuacuu

SEQ ID NO: 832747 - RNA, 19 nt, Artificial Sequence
  Description of Artificial Sequence: Synthetic oligonucleotide
accagagggagccuagagu

SEQ ID NO: 832748 - RNA, 19 nt, Artificial Sequence
  Description of Artificial Sequence: Synthetic oligonucleotide
cuagaucuuuaaaauaacu

SEQ ID NO: 832749 - RNA, 19 nt, Artificial Sequence
  Description of Artificial Sequence: Synthetic oligonucleotide
cuucaagggcaguuuguug

SEQ ID NO: 832750 - RNA, 19 nt, Artificial Sequence
  Description of Artificial Sequence: Synthetic oligonucleotide
auacucggagaaaagccag

SEQ ID NO: 832751 - RNA, 19 nt, Artificial Sequence
  Description of Artificial Sequence: Synthetic oligonucleotide
ugcauuugaucgagugcca

SEQ ID NO: 832752 - RNA, 19 nt, Artificial Sequence
  Description of Artificial Sequence: Synthetic oligonucleotide
cuuacuccaagcuuuauuu

SEQ ID NO: 832753 - RNA, 19 nt, Artificial Sequence
  Description of Artificial Sequence: Synthetic oligonucleotide
uacgaggggucccaauacu

SEQ ID NO: 832754 - RNA, 19 nt, Artificial Sequence
  Description of Artificial Sequence: Synthetic oligonucleotide
aaacccacuguggaucaca

SEQ ID NO: 832755 - RNA, 19 nt, Artificial Sequence
  Description of Artificial Sequence: Synthetic oligonucleotide
aguccuguagggcuacgca

SEQ ID NO: 832756 - RNA, 19 nt, Artificial Sequence
  Description of Artificial Sequence: Synthetic oligonucleotide
ugggaugccggcgcgagcc

SEQ ID NO: 832757 - RNA, 19 nt, Artificial Sequence
  Description of Artificial Sequence: Synthetic oligonucleotide
uauaaccagucgugaucag

SEQ ID NO: 832758 - RNA, 19 nt, Artificial Sequence
  Description of Artificial Sequence: Synthetic oligonucleotide
gggcuacgcacucacagcg

SEQ ID NO: 832759 - RNA, 19 nt, Artificial Sequence
  Description of Artificial Sequence: Synthetic oligonucleotide
ugggcggcucaguaaaaug

SEQ ID NO: 832760 - RNA, 19 nt, Artificial Sequence
  Description of Artificial Sequence: Synthetic oligonucleotide
aucgucguuuuauauguuu

SEQ ID NO: 832761 - RNA, 19 nt, Artificial Sequence
  Description of Artificial Sequence: Synthetic oligonucleotide
uuacuuacuccaagcuuua

SEQ ID NO: 832762 - RNA, 19 nt, Artificial Sequence
  Description of Artificial Sequence: Synthetic oligonucleotide
gaucaggccauugguauga

SEQ ID NO: 832763 - RNA, 19 nt, Artificial Sequence
  Description of Artificial Sequence: Synthetic oligonucleotide
agaaauguccacaguuuga

SEQ ID NO: 832764 - RNA, 19 nt, Artificial Sequence
  Description of Artificial Sequence: Synthetic oligonucleotide
accagucgugaucaggcca

SEQ ID NO: 832765 - RNA, 19 nt, Artificial Sequence
  Description of Artificial Sequence: Synthetic oligonucleotide
acggcaauguagugggcug

SEQ ID NO: 832766 - RNA, 19 nt, Artificial Sequence
  Description of Artificial Sequence: Synthetic oligonucleotide
uucugcuaaacuggauccc

SEQ ID NO: 832767 - RNA, 19 nt, Artificial Sequence
  Description of Artificial Sequence: Synthetic oligonucleotide
cauguguuugcgguaguac

SEQ ID NO: 832768 - RNA, 19 nt, Artificial Sequence
  Description of Artificial Sequence: Synthetic oligonucleotide
guauggcugccagaaagag

SEQ ID NO: 832769 - RNA, 19 nt, Artificial Sequence
  Description of Artificial Sequence: Synthetic oligonucleotide
uugucgugucauaacugaa

SEQ ID NO: 832770 - RNA, 19 nt, Artificial Sequence
  Description of Artificial Sequence: Synthetic oligonucleotide
acaccuagaguccaaccuu

SEQ ID NO: 832771 - RNA, 19 nt, Artificial Sequence
  Description of Artificial Sequence: Synthetic oligonucleotide
caccuagaguccaaccuug

SEQ ID NO: 832772 - RNA, 19 nt, Artificial Sequence
  Description of Artificial Sequence: Synthetic oligonucleotide
uguguugacugaagacauc

SEQ ID NO: 832773 - RNA, 19 nt, Artificial Sequence
  Description of Artificial Sequence: Synthetic oligonucleotide
uuaagccaugggaaaucaa

SEQ ID NO: 832774 - RNA, 19 nt, Artificial Sequence
  Description of Artificial Sequence: Synthetic oligonucleotide
aaaagaagugaggcucuau

SEQ ID NO: 832775 - RNA, 19 nt, Artificial Sequence
  Description of Artificial Sequence: Synthetic oligonucleotide
guccgcugaacaccuagag

SEQ ID NO: 832776 - RNA, 19 nt, Artificial Sequence
  Description of Artificial Sequence: Synthetic oligonucleotide
gugucauauucacugggga

SEQ ID NO: 832777 - RNA, 19 nt, Artificial Sequence
  Description of Artificial Sequence: Synthetic oligonucleotide
ucacccguacugccggaag

SEQ ID NO: 832778 - RNA, 19 nt, Artificial Sequence
  Description of Artificial Sequence: Synthetic oligonucleotide
uguuugcgguaguacuccc

SEQ ID NO: 832779 - RNA, 19 nt, Artificial Sequence
  Description of Artificial Sequence: Synthetic oligonucleotide
uuauagaaauaggcauacu

SEQ ID NO: 832780 - RNA, 19 nt, Artificial Sequence
  Description of Artificial Sequence: Synthetic oligonucleotide
gacaucguacuuccucuuc

SEQ ID NO: 832781 - RNA, 19 nt, Artificial Sequence
  Description of Artificial Sequence: Synthetic oligonucleotide
auucggucuugagaauacg

SEQ ID NO: 832782 - RNA, 19 nt, Artificial Sequence
  Description of Artificial Sequence: Synthetic oligonucleotide
uguccgcugaacaccuaga

SEQ ID NO: 832783 - RNA, 19 nt, Artificial Sequence
  Description of Artificial Sequence: Synthetic oligonucleotide
uuacuccaagcuuuauuuu

SEQ ID NO: 832784 - RNA, 19 nt, Artificial Sequence
  Description of Artificial Sequence: Synthetic oligonucleotide
acccaagcgcaauuugaug

SEQ ID NO: 832785 - RNA, 19 nt, Artificial Sequence
  Description of Artificial Sequence: Synthetic oligonucleotide
cauuguggcacggaccgac

SEQ ID NO: 832786 - RNA, 19 nt, Artificial Sequence
  Description of Artificial Sequence: Synthetic oligonucleotide
uucagucaugcagaauacu

SEQ ID NO: 832787 - RNA, 19 nt, Artificial Sequence
  Description of Artificial Sequence: Synthetic oligonucleotide
aacggagcccucuccucca

SEQ ID NO: 832788 - RNA, 19 nt, Artificial Sequence
  Description of Artificial Sequence: Synthetic oligonucleotide
ccaccuuaccuuuugguac

SEQ ID NO: 832789 - RNA, 19 nt, Artificial Sequence
  Description of Artificial Sequence: Synthetic oligonucleotide
cucggagaaaagccagaag

SEQ ID NO: 832790 - RNA, 19 nt, Artificial Sequence
  Description of Artificial Sequence: Synthetic oligonucleotide
uccuagcaaaugcucuuuc

SEQ ID NO: 832791 - RNA, 19 nt, Artificial Sequence
  Description of Artificial Sequence: Synthetic oligonucleotide
cugaaaguccuguagggcu

SEQ ID NO: 832792 - RNA, 19 nt, Artificial Sequence
  Description of Artificial Sequence: Synthetic oligonucleotide
cccauaaaggaaucagggc

SEQ ID NO: 832793 - RNA, 19 nt, Artificial Sequence
  Description of Artificial Sequence: Synthetic oligonucleotide
ugcuaaacuggaucccaau

SEQ ID NO: 832794 - RNA, 19 nt, Artificial Sequence
  Description of Artificial Sequence: Synthetic oligonucleotide
cacaguuugaccucauugu

SEQ ID NO: 832795 - RNA, 19 nt, Artificial Sequence
  Description of Artificial Sequence: Synthetic oligonucleotide
cuacggcuggucugcagcc

SEQ ID NO: 832796 - RNA, 19 nt, Artificial Sequence
  Description of Artificial Sequence: Synthetic oligonucleotide
guuugcgguaguacucccg

SEQ ID NO: 832797 - RNA, 19 nt, Artificial Sequence
  Description of Artificial Sequence: Synthetic oligonucleotide
uccucauaucugggcaacg

SEQ ID NO: 832798 - RNA, 19 nt, Artificial Sequence
  Description of Artificial Sequence: Synthetic oligonucleotide
guccuguagggcuacgcac

SEQ ID NO: 832799 - RNA, 19 nt, Artificial Sequence
  Description of Artificial Sequence: Synthetic oligonucleotide
gaauucggucuugagaaua

SEQ ID NO: 832800 - RNA, 19 nt, Artificial Sequence
  Description of Artificial Sequence: Synthetic oligonucleotide
ugguacuggggauauuauu

SEQ ID NO: 832801 - RNA, 19 nt, Artificial Sequence
  Description of Artificial Sequence: Synthetic oligonucleotide
gaaaagccagaagcugggc

SEQ ID NO: 832802 - RNA, 19 nt, Artificial Sequence
  Description of Artificial Sequence: Synthetic oligonucleotide
agggaagcuagaucuuuaa

SEQ ID NO: 832803 - RNA, 19 nt, Artificial Sequence
  Description of Artificial Sequence: Synthetic oligonucleotide
uuugaucgagugccauaaa

SEQ ID NO: 832804 - RNA, 19 nt, Artificial Sequence
  Description of Artificial Sequence: Synthetic oligonucleotide
agguuauaaccagucguga

SEQ ID NO: 832805 - RNA, 19 nt, Artificial Sequence
  Description of Artificial Sequence: Synthetic oligonucleotide
gaucccaaugagugcaucu

SEQ ID NO: 832806 - RNA, 19 nt, Artificial Sequence
  Description of Artificial Sequence: Synthetic oligonucleotide
caagcgcaauuugauggcc

SEQ ID NO: 832807 - RNA, 19 nt, Artificial Sequence
  Description of Artificial Sequence: Synthetic oligonucleotide
aguccucguaagugaaaga

SEQ ID NO: 832808 - RNA, 19 nt, Artificial Sequence
  Description of Artificial Sequence: Synthetic oligonucleotide
caagcuuuauuuucacucu

SEQ ID NO: 832809 - RNA, 19 nt, Artificial Sequence
  Description of Artificial Sequence: Synthetic oligonucleotide
gcuagcuuucacucuggag

SEQ ID NO: 832810 - RNA, 19 nt, Artificial Sequence
  Description of Artificial Sequence: Synthetic oligonucleotide
aagcgcaauuugauggcca

SEQ ID NO: 832811 - RNA, 19 nt, Artificial Sequence
  Description of Artificial Sequence: Synthetic oligonucleotide
ugguaugauugcacauguc

SEQ ID NO: 832812 - RNA, 19 nt, Artificial Sequence
  Description of Artificial Sequence: Synthetic oligonucleotide
gagaauacgagggguccca

SEQ ID NO: 832813 - RNA, 19 nt, Artificial Sequence
  Description of Artificial Sequence: Synthetic oligonucleotide
agcgcaauuugauggccau

SEQ ID NO: 832814 - RNA, 19 nt, Artificial Sequence
  Description of Artificial Sequence: Synthetic oligonucleotide
agaauucggucuugagaau

SEQ ID NO: 832815 - RNA, 19 nt, Artificial Sequence
  Description of Artificial Sequence: Synthetic oligonucleotide
agauuugcccagaccucac

SEQ ID NO: 832816 - RNA, 19 nt, Artificial Sequence
  Description of Artificial Sequence: Synthetic oligonucleotide
uaaaggaaucagggccaag

SEQ ID NO: 832817 - RNA, 19 nt, Artificial Sequence
  Description of Artificial Sequence: Synthetic oligonucleotide
uggcugcacucuuuacugc

SEQ ID NO: 832818 - RNA, 19 nt, Artificial Sequence
  Description of Artificial Sequence: Synthetic oligonucleotide
cucauaucugggcaacgga

SEQ ID NO: 832819 - RNA, 19 nt, Artificial Sequence
  Description of Artificial Sequence: Synthetic oligonucleotide
agauccugucaauggcgcu

SEQ ID NO: 832820 - RNA, 19 nt, Artificial Sequence
  Description of Artificial Sequence: Synthetic oligonucleotide
cuuuggucccauuagggau

SEQ ID NO: 832821 - RNA, 19 nt, Artificial Sequence
  Description of Artificial Sequence: Synthetic oligonucleotide
gugaucaggccauugguau

SEQ ID NO: 832822 - RNA, 19 nt, Artificial Sequence
  Description of Artificial Sequence: Synthetic oligonucleotide
gugcaauguuuccccagug

SEQ ID NO: 832823 - RNA, 19 nt, Artificial Sequence
  Description of Artificial Sequence: Synthetic oligonucleotide
auggcgcugucuccuagca

SEQ ID NO: 832824 - RNA, 19 nt, Artificial Sequence
  Description of Artificial Sequence: Synthetic oligonucleotide
ccaagcgcaauuugauggc

SEQ ID NO: 832825 - RNA, 19 nt, Artificial Sequence
  Description of Artificial Sequence: Synthetic oligonucleotide
agagaccgcccaccuguag

SEQ ID NO: 832826 - RNA, 19 nt, Artificial Sequence
  Description of Artificial Sequence: Synthetic oligonucleotide
gacgagcccguucucggca

SEQ ID NO: 832827 - RNA, 19 nt, Artificial Sequence
  Description of Artificial Sequence: Synthetic oligonucleotide
auaggcauacuggcgugcu

SEQ ID NO: 832828 - RNA, 19 nt, Artificial Sequence
  Description of Artificial Sequence: Synthetic oligonucleotide
uucacucugucgugugaau

SEQ ID NO: 832829 - RNA, 19 nt, Artificial Sequence
  Description of Artificial Sequence: Synthetic oligonucleotide
uccuucgcuucacccguac

SEQ ID NO: 832830 - RNA, 19 nt, Artificial Sequence
  Description of Artificial Sequence: Synthetic oligonucleotide
aagggaagcuagaucuuua

SEQ ID NO: 832831 - RNA, 19 nt, Artificial Sequence
  Description of Artificial Sequence: Synthetic oligonucleotide
ggcgcugucuccuagcaaa

SEQ ID NO: 832832 - RNA, 19 nt, Artificial Sequence
  Description of Artificial Sequence: Synthetic oligonucleotide
gaauuugguuuugucgugu

SEQ ID NO: 832833 - RNA, 19 nt, Artificial Sequence
  Description of Artificial Sequence: Synthetic oligonucleotide
auguuuccccaguggcuug

SEQ ID NO: 832834 - RNA, 19 nt, Artificial Sequence
  Description of Artificial Sequence: Synthetic oligonucleotide
cccaaugagugcaucucag

SEQ ID NO: 832835 - RNA, 19 nt, Artificial Sequence
  Description of Artificial Sequence: Synthetic oligonucleotide
guugggaugccggcgcgag

SEQ ID NO: 832836 - RNA, 19 nt, Artificial Sequence
  Description of Artificial Sequence: Synthetic oligonucleotide
augauugcacaugucccau

SEQ ID NO: 832837 - RNA, 19 nt, Artificial Sequence
  Description of Artificial Sequence: Synthetic oligonucleotide
accuagaguccaaccuugg

SEQ ID NO: 832838 - RNA, 19 nt, Artificial Sequence
  Description of Artificial Sequence: Synthetic oligonucleotide
acgaggggucccaauacug

SEQ ID NO: 832839 - RNA, 19 nt, Artificial Sequence
  Description of Artificial Sequence: Synthetic oligonucleotide
auaaaggaaucagggccaa

SEQ ID NO: 832840 - RNA, 19 nt, Artificial Sequence
  Description of Artificial Sequence: Synthetic oligonucleotide
ccuacggcuggucugcagc

SEQ ID NO: 832841 - RNA, 19 nt, Artificial Sequence
  Description of Artificial Sequence: Synthetic oligonucleotide
ugauugcacaugucccaua

SEQ ID NO: 832842 - RNA, 19 nt, Artificial Sequence
  Description of Artificial Sequence: Synthetic oligonucleotide
ugggcaacggagcccucuc

SEQ ID NO: 832843 - RNA, 19 nt, Artificial Sequence
  Description of Artificial Sequence: Synthetic oligonucleotide
uccauguguuugcgguagu

SEQ ID NO: 832844 - RNA, 19 nt, Artificial Sequence
  Description of Artificial Sequence: Synthetic oligonucleotide
ggucacucuccucauaucu

SEQ ID NO: 832845 - RNA, 19 nt, Artificial Sequence
  Description of Artificial Sequence: Synthetic oligonucleotide
ggaacacggcaauguagug

SEQ ID NO: 832846 - RNA, 19 nt, Artificial Sequence
  Description of Artificial Sequence: Synthetic oligonucleotide
aagacucuuuggucccauu

SEQ ID NO: 832847 - RNA, 19 nt, Artificial Sequence
  Description of Artificial Sequence: Synthetic oligonucleotide
agccugucacuuuuacuua

SEQ ID NO: 832848 - RNA, 19 nt, Artificial Sequence
  Description of Artificial Sequence: Synthetic oligonucleotide
caauggcgcugucuccuag

SEQ ID NO: 832849 - RNA, 19 nt, Artificial Sequence
  Description of Artificial Sequence: Synthetic oligonucleotide
acgagcccguucucggcag

SEQ ID NO: 832850 - RNA, 19 nt, Artificial Sequence
  Description of Artificial Sequence: Synthetic oligonucleotide
cauuugaucgagugccaua

SEQ ID NO: 832851 - RNA, 19 nt, Artificial Sequence
  Description of Artificial Sequence: Synthetic oligonucleotide
aguccaaccuuggcuccuc

SEQ ID NO: 832852 - RNA, 19 nt, Artificial Sequence
  Description of Artificial Sequence: Synthetic oligonucleotide
ccucauaucugggcaacgg

SEQ ID NO: 832853 - RNA, 19 nt, Artificial Sequence
  Description of Artificial Sequence: Synthetic oligonucleotide
ccugaaaguccuguagggc

SEQ ID NO: 832854 - RNA, 19 nt, Artificial Sequence
  Description of Artificial Sequence: Synthetic oligonucleotide
uguuggcaugaggaugggu

SEQ ID NO: 832855 - RNA, 19 nt, Artificial Sequence
  Description of Artificial Sequence: Synthetic oligonucleotide
acucugucgugugaauuau

SEQ ID NO: 832856 - RNA, 19 nt, Artificial Sequence
  Description of Artificial Sequence: Synthetic oligonucleotide
uagaguggggugucauauu

SEQ ID NO: 832857 - RNA, 19 nt, Artificial Sequence
  Description of Artificial Sequence: Synthetic oligonucleotide
ccuagaguccaaccuuggc

SEQ ID NO: 832858 - RNA, 19 nt, Artificial Sequence
  Description of Artificial Sequence: Synthetic oligonucleotide
aacccacuguggaucacaa

SEQ ID NO: 832859 - RNA, 19 nt, Artificial Sequence
  Description of Artificial Sequence: Synthetic oligonucleotide
guaguacucccgguucaug

SEQ ID NO: 832860 - RNA, 19 nt, Artificial Sequence
  Description of Artificial Sequence: Synthetic oligonucleotide
uugggaugccggcgcgagc

SEQ ID NO: 832861 - RNA, 19 nt, Artificial Sequence
  Description of Artificial Sequence: Synthetic oligonucleotide
gaguggggugucauauuca

SEQ ID NO: 832862 - RNA, 19 nt, Artificial Sequence
  Description of Artificial Sequence: Synthetic oligonucleotide
gaugccggcgcgagccaag

SEQ ID NO: 832863 - RNA, 19 nt, Artificial Sequence
  Description of Artificial Sequence: Synthetic oligonucleotide
cucaaucgucguuuuauau

SEQ ID NO: 832864 - RNA, 19 nt, Artificial Sequence
  Description of Artificial Sequence: Synthetic oligonucleotide
cuucgaaguagaguggggu

SEQ ID NO: 832865 - RNA, 19 nt, Artificial Sequence
  Description of Artificial Sequence: Synthetic oligonucleotide
gccggcgcgagccaagacc

SEQ ID NO: 832866 - RNA, 19 nt, Artificial Sequence
  Description of Artificial Sequence: Synthetic oligonucleotide
ggcuuggagaauucggucu

SEQ ID NO: 832867 - RNA, 19 nt, Artificial Sequence
  Description of Artificial Sequence: Synthetic oligonucleotide
gccugucacuuuuacuuac

SEQ ID NO: 832868 - RNA, 19 nt, Artificial Sequence
  Description of Artificial Sequence: Synthetic oligonucleotide
cugucuccuagcaaaugcu

SEQ ID NO: 832869 - RNA, 19 nt, Artificial Sequence
  Description of Artificial Sequence: Synthetic oligonucleotide
uguugggaugccggcgcga

SEQ ID NO: 832870 - RNA, 19 nt, Artificial Sequence
  Description of Artificial Sequence: Synthetic oligonucleotide
aaucgucguuuuauauguu

SEQ ID NO: 832871 - RNA, 19 nt, Artificial Sequence
  Description of Artificial Sequence: Synthetic oligonucleotide
cauugguaugauugcacau

SEQ ID NO: 832872 - RNA, 19 nt, Artificial Sequence
  Description of Artificial Sequence: Synthetic oligonucleotide
cucuaucuuccagaaaugu

SEQ ID NO: 832873 - RNA, 19 nt, Artificial Sequence
  Description of Artificial Sequence: Synthetic oligonucleotide
gguuauaaccagucgugau

SEQ ID NO: 832874 - RNA, 19 nt, Artificial Sequence
  Description of Artificial Sequence: Synthetic oligonucleotide
gucaugcagaauacucgga

SEQ ID NO: 832875 - RNA, 19 nt, Artificial Sequence
  Description of Artificial Sequence: Synthetic oligonucleotide
ucaggccauugguaugauu

SEQ ID NO: 832876 - RNA, 19 nt, Artificial Sequence
  Description of Artificial Sequence: Synthetic oligonucleotide
gccaccuuaccuuuuggua

SEQ ID NO: 832877 - RNA, 19 nt, Artificial Sequence
  Description of Artificial Sequence: Synthetic oligonucleotide
ccuagcaaaugcucuuuca

SEQ ID NO: 832878 - RNA, 19 nt, Artificial Sequence
  Description of Artificial Sequence: Synthetic oligonucleotide
ccagguuauaaccagucgu

SEQ ID NO: 832879 - RNA, 19 nt, Artificial Sequence
  Description of Artificial Sequence: Synthetic oligonucleotide
cugcuaaacuggaucccaa

SEQ ID NO: 832880 - RNA, 19 nt, Artificial Sequence
  Description of Artificial Sequence: Synthetic oligonucleotide
acggaccgacaggucaggg

SEQ ID NO: 832881 - RNA, 19 nt, Artificial Sequence
  Description of Artificial Sequence: Synthetic oligonucleotide
uacuuacuccaagcuuuau

SEQ ID NO: 832882 - RNA, 19 nt, Artificial Sequence
  Description of Artificial Sequence: Synthetic oligonucleotide
uucacccguacugccggaa

SEQ ID NO: 832883 - RNA, 19 nt, Artificial Sequence
  Description of Artificial Sequence: Synthetic oligonucleotide
gggaagcuagaucuuuaaa

SEQ ID NO: 832884 - RNA, 19 nt, Artificial Sequence
  Description of Artificial Sequence: Synthetic oligonucleotide
uggcgcugucuccuagcaa

SEQ ID NO: 832885 - RNA, 19 nt, Artificial Sequence
  Description of Artificial Sequence: Synthetic oligonucleotide
cugucgugugaauuauugu

SEQ ID NO: 832886 - RNA, 19 nt, Artificial Sequence
  Description of Artificial Sequence: Synthetic oligonucleotide
guuugaccucauuguccca

SEQ ID NO: 832887 - RNA, 19 nt, Artificial Sequence
  Description of Artificial Sequence: Synthetic oligonucleotide
gagcccguucucggcagcc

SEQ ID NO: 832888 - RNA, 19 nt, Artificial Sequence
  Description of Artificial Sequence: Synthetic oligonucleotide
gagcucggaccucaacucu

SEQ ID NO: 832889 - RNA, 19 nt, Artificial Sequence
  Description of Artificial Sequence: Synthetic oligonucleotide
gaccgcccaccuguagucc

SEQ ID NO: 832890 - RNA, 19 nt, Artificial Sequence
  Description of Artificial Sequence: Synthetic oligonucleotide
gaauacgaggggucccaau

SEQ ID NO: 832891 - RNA, 19 nt, Artificial Sequence
  Description of Artificial Sequence: Synthetic oligonucleotide
cucggaccucaacucuuuc

SEQ ID NO: 832892 - RNA, 19 nt, Artificial Sequence
  Description of Artificial Sequence: Synthetic oligonucleotide
cacggaccgacaggucagg

SEQ ID NO: 832893 - RNA, 19 nt, Artificial Sequence
  Description of Artificial Sequence: Synthetic oligonucleotide
auuguggcacggaccgaca

SEQ ID NO: 832894 - RNA, 19 nt, Artificial Sequence
  Description of Artificial Sequence: Synthetic oligonucleotide
ggccauuguggcacggacc

SEQ ID NO: 832895 - RNA, 19 nt, Artificial Sequence
  Description of Artificial Sequence: Synthetic oligonucleotide
cacccguacugccggaaga

SEQ ID NO: 832896 - RNA, 19 nt, Artificial Sequence
  Description of Artificial Sequence: Synthetic oligonucleotide
ggaaaucaaguugccaccu

SEQ ID NO: 832897 - RNA, 19 nt, Artificial Sequence
  Description of Artificial Sequence: Synthetic oligonucleotide
agaauacgaggggucccaa

SEQ ID NO: 832898 - RNA, 19 nt, Artificial Sequence
  Description of Artificial Sequence: Synthetic oligonucleotide
uacugccggaagacucuuu

SEQ ID NO: 832899 - RNA, 19 nt, Artificial Sequence
  Description of Artificial Sequence: Synthetic oligonucleotide
ggcuacgcacucacagcgg

SEQ ID NO: 832900 - RNA, 19 nt, Artificial Sequence
  Description of Artificial Sequence: Synthetic oligonucleotide
gucccauuagggaucacau

SEQ ID NO: 832901 - RNA, 19 nt, Artificial Sequence
  Description of Artificial Sequence: Synthetic oligonucleotide
ggagccguccucuguggga

SEQ ID NO: 832902 - RNA, 19 nt, Artificial Sequence
  Description of Artificial Sequence: Synthetic oligonucleotide
cugaagagaccgcccaccu

SEQ ID NO: 832903 - RNA, 19 nt, Artificial Sequence
  Description of Artificial Sequence: Synthetic oligonucleotide
gaugggucuggaugacuuu

SEQ ID NO: 832904 - RNA, 19 nt, Artificial Sequence
  Description of Artificial Sequence: Synthetic oligonucleotide
gcugaacaccuagagucca

SEQ ID NO: 832905 - RNA, 19 nt, Artificial Sequence
  Description of Artificial Sequence: Synthetic oligonucleotide
acccacuguggaucacaaa

SEQ ID NO: 832906 - RNA, 19 nt, Artificial Sequence
  Description of Artificial Sequence: Synthetic oligonucleotide
gcacggaccgacaggucag

SEQ ID NO: 832907 - RNA, 19 nt, Artificial Sequence
  Description of Artificial Sequence: Synthetic oligonucleotide
gggucccaauacugaauuc

SEQ ID NO: 832908 - RNA, 19 nt, Artificial Sequence
  Description of Artificial Sequence: Synthetic oligonucleotide
uggcacggaccgacagguc

SEQ ID NO: 832909 - RNA, 19 nt, Artificial Sequence
  Description of Artificial Sequence: Synthetic oligonucleotide
aagagaccgcccaccugua

SEQ ID NO: 832910 - RNA, 19 nt, Artificial Sequence
  Description of Artificial Sequence: Synthetic oligonucleotide
cccauugacgagcccguuc

SEQ ID NO: 832911 - RNA, 19 nt, Artificial Sequence
  Description of Artificial Sequence: Synthetic oligonucleotide
ccuuaccuuuugguacugg

SEQ ID NO: 832912 - RNA, 19 nt, Artificial Sequence
  Description of Artificial Sequence: Synthetic oligonucleotide
ggagcccucuccuccaugu

SEQ ID NO: 832913 - RNA, 19 nt, Artificial Sequence
  Description of Artificial Sequence: Synthetic oligonucleotide
gaugggcggcucaguaaaa

SEQ ID NO: 832914 - RNA, 19 nt, Artificial Sequence
  Description of Artificial Sequence: Synthetic oligonucleotide
ccucauugucccagcugac

SEQ ID NO: 832915 - RNA, 19 nt, Artificial Sequence
  Description of Artificial Sequence: Synthetic oligonucleotide
gcuacgcacucacagcggu

SEQ ID NO: 832916 - RNA, 19 nt, Artificial Sequence
  Description of Artificial Sequence: Synthetic oligonucleotide
ggggucccaauacugaauu

SEQ ID NO: 832917 - RNA, 19 nt, Artificial Sequence
  Description of Artificial Sequence: Synthetic oligonucleotide
gaagacucuuuggucccau

SEQ ID NO: 832918 - RNA, 19 nt, Artificial Sequence
  Description of Artificial Sequence: Synthetic oligonucleotide
cuucacccguacugccgga

SEQ ID NO: 832919 - RNA, 19 nt, Artificial Sequence
  Description of Artificial Sequence: Synthetic oligonucleotide
ccucaacucuuucccagga

SEQ ID NO: 832920 - RNA, 19 nt, Artificial Sequence
  Description of Artificial Sequence: Synthetic oligonucleotide
ggcgcgagccaagaccuca

SEQ ID NO: 832921 - RNA, 19 nt, Artificial Sequence
  Description of Artificial Sequence: Synthetic oligonucleotide
guagggcuacgcacucaca

SEQ ID NO: 832922 - RNA, 19 nt, Artificial Sequence
  Description of Artificial Sequence: Synthetic oligonucleotide
caugaggaugggucuggau

SEQ ID NO: 832923 - RNA, 19 nt, Artificial Sequence
  Description of Artificial Sequence: Synthetic oligonucleotide
guagagccugucacuuuua

SEQ ID NO: 832924 - RNA, 19 nt, Artificial Sequence
  Description of Artificial Sequence: Synthetic oligonucleotide
aucaggccauugguaugau

SEQ ID NO: 832925 - RNA, 19 nt, Artificial Sequence
  Description of Artificial Sequence: Synthetic oligonucleotide
ccucaaucgucguuuuaua

SEQ ID NO: 832926 - RNA, 19 nt, Artificial Sequence
  Description of Artificial Sequence: Synthetic oligonucleotide
ugccuacggcuggucugca

SEQ ID NO: 832927 - RNA, 19 nt, Artificial Sequence
  Description of Artificial Sequence: Synthetic oligonucleotide
ccgguucauggcugcacuc

SEQ ID NO: 832928 - RNA, 19 nt, Artificial Sequence
  Description of Artificial Sequence: Synthetic oligonucleotide
gcccagaccucacuuggcu

SEQ ID NO: 832929 - RNA, 19 nt, Artificial Sequence
  Description of Artificial Sequence: Synthetic oligonucleotide
cagucuccgugaggcucag

SEQ ID NO: 832930 - RNA, 19 nt, Artificial Sequence
  Description of Artificial Sequence: Synthetic oligonucleotide
agccguccucugugggaau

SEQ ID NO: 832931 - RNA, 19 nt, Artificial Sequence
  Description of Artificial Sequence: Synthetic oligonucleotide
gcgcgagccaagaccucag

SEQ ID NO: 832932 - RNA, 19 nt, Artificial Sequence
  Description of Artificial Sequence: Synthetic oligonucleotide
ccagucgugaucaggccau

SEQ ID NO: 832933 - RNA, 19 nt, Artificial Sequence
  Description of Artificial Sequence: Synthetic oligonucleotide
gcaucucagagccgcuccu

SEQ ID NO: 832934 - RNA, 19 nt, Artificial Sequence
  Description of Artificial Sequence: Synthetic oligonucleotide
gcggcucaguaaaaugcaa

SEQ ID NO: 832935 - RNA, 19 nt, Artificial Sequence
  Description of Artificial Sequence: Synthetic oligonucleotide
cgggagccguccucugugg

SEQ ID NO: 832936 - RNA, 19 nt, Artificial Sequence
  Description of Artificial Sequence: Synthetic oligonucleotide
cucugucgugugaauuauu

SEQ ID NO: 832937 - RNA, 19 nt, Artificial Sequence
  Description of Artificial Sequence: Synthetic oligonucleotide
cuccuagcaaaugcucuuu

SEQ ID NO: 832938 - RNA, 19 nt, Artificial Sequence
  Description of Artificial Sequence: Synthetic oligonucleotide
ggcguagagccugucacuu

SEQ ID NO: 832939 - RNA, 19 nt, Artificial Sequence
  Description of Artificial Sequence: Synthetic oligonucleotide
ccggcgcgagccaagaccu

SEQ ID NO: 832940 - RNA, 19 nt, Artificial Sequence
  Description of Artificial Sequence: Synthetic oligonucleotide
gaccgacaggucaggguuu

SEQ ID NO: 832941 - RNA, 19 nt, Artificial Sequence
  Description of Artificial Sequence: Synthetic oligonucleotide
cuccuucgcuucacccgua

SEQ ID NO: 832942 - RNA, 19 nt, Artificial Sequence
  Description of Artificial Sequence: Synthetic oligonucleotide
cgguaguacucccgguuca

SEQ ID NO: 832943 - RNA, 19 nt, Artificial Sequence
  Description of Artificial Sequence: Synthetic oligonucleotide
ccauguguuugcgguagua

SEQ ID NO: 832944 - RNA, 19 nt, Artificial Sequence
  Description of Artificial Sequence: Synthetic oligonucleotide
gcaagugccuacggcuggu

SEQ ID NO: 832945 - RNA, 19 nt, Artificial Sequence
  Description of Artificial Sequence: Synthetic oligonucleotide
cggcucaguaaaaugcaau

SEQ ID NO: 832946 - RNA, 19 nt, Artificial Sequence
  Description of Artificial Sequence: Synthetic oligonucleotide
gcguagagccugucacuuu

SEQ ID NO: 832947 - RNA, 19 nt, Artificial Sequence
  Description of Artificial Sequence: Synthetic oligonucleotide
gcucggaccucaacucuuu

SEQ ID NO: 832948 - RNA, 19 nt, Artificial Sequence
  Description of Artificial Sequence: Synthetic oligonucleotide
ccauuguggcacggaccga

SEQ ID NO: 832949 - RNA, 19 nt, Artificial Sequence
  Description of Artificial Sequence: Synthetic oligonucleotide
cgguucauggcugcacucu

SEQ ID NO: 832950 - RNA, 19 nt, Artificial Sequence
  Description of Artificial Sequence: Synthetic oligonucleotide
cagucgugaucaggccauu

SEQ ID NO: 832951 - RNA, 19 nt, Artificial Sequence
  Description of Artificial Sequence: Synthetic oligonucleotide
gccguccucugugggaauu

SEQ ID NO: 832952 - RNA, 19 nt, Artificial Sequence
  Description of Artificial Sequence: Synthetic oligonucleotide
cccgggagccguccucugu

SEQ ID NO: 832953 - RNA, 19 nt, Artificial Sequence
  Description of Artificial Sequence: Synthetic oligonucleotide
gaaaagaccaaauuguugc

SEQ ID NO: 832954 - RNA, 19 nt, Artificial Sequence
  Description of Artificial Sequence: Synthetic oligonucleotide
cuugaaauggguaggagcc

SEQ ID NO: 832955 - RNA, 19 nt, Artificial Sequence
  Description of Artificial Sequence: Synthetic oligonucleotide
uguacccaaguccagauag

SEQ ID NO: 832956 - RNA, 19 nt, Artificial Sequence
  Description of Artificial Sequence: Synthetic oligonucleotide
aaccccaggguuuuaaugg

SEQ ID NO: 832957 - RNA, 19 nt, Artificial Sequence
  Description of Artificial Sequence: Synthetic oligonucleotide
aggguuuuaauggugaacc

SEQ ID NO: 832958 - RNA, 19 nt, Artificial Sequence
  Description of Artificial Sequence: Synthetic oligonucleotide
agacgaaaagaccaaauug

SEQ ID NO: 832959 - RNA, 19 nt, Artificial Sequence
  Description of Artificial Sequence: Synthetic oligonucleotide
ugcacguacuuccacaggg

SEQ ID NO: 832960 - RNA, 19 nt, Artificial Sequence
  Description of Artificial Sequence: Synthetic oligonucleotide
aacgggauguuguagcuag

SEQ ID NO: 832961 - RNA, 19 nt, Artificial Sequence
  Description of Artificial Sequence: Synthetic oligonucleotide
cauccauugguuauuauac

SEQ ID NO: 832962 - RNA, 19 nt, Artificial Sequence
  Description of Artificial Sequence: Synthetic oligonucleotide
uguguugugugccaccagg

SEQ ID NO: 832963 - RNA, 19 nt, Artificial Sequence
  Description of Artificial Sequence: Synthetic oligonucleotide
ugaagcaugcugcggaacg

SEQ ID NO: 832964 - RNA, 19 nt, Artificial Sequence
  Description of Artificial Sequence: Synthetic oligonucleotide
aaaauggcgcccagaaucc

SEQ ID NO: 832965 - RNA, 19 nt, Artificial Sequence
  Description of Artificial Sequence: Synthetic oligonucleotide
auauugggccaccaagucc

SEQ ID NO: 832966 - RNA, 19 nt, Artificial Sequence
  Description of Artificial Sequence: Synthetic oligonucleotide
ucaaagaacgggauguugu

SEQ ID NO: 832967 - RNA, 19 nt, Artificial Sequence
  Description of Artificial Sequence: Synthetic oligonucleotide
uaccuuaugagccggacca

SEQ ID NO: 832968 - RNA, 19 nt, Artificial Sequence
  Description of Artificial Sequence: Synthetic oligonucleotide
cauugguuauuauacgugc

SEQ ID NO: 832969 - RNA, 19 nt, Artificial Sequence
  Description of Artificial Sequence: Synthetic oligonucleotide
caaagucucagucccaugg

SEQ ID NO: 832970 - RNA, 19 nt, Artificial Sequence
  Description of Artificial Sequence: Synthetic oligonucleotide
aauuguugccagcaaucag

SEQ ID NO: 832971 - RNA, 19 nt, Artificial Sequence
  Description of Artificial Sequence: Synthetic oligonucleotide
aaagucucagucccauggg

SEQ ID NO: 832972 - RNA, 19 nt, Artificial Sequence
  Description of Artificial Sequence: Synthetic oligonucleotide
uuguagcuagcccaguagg

SEQ ID NO: 832973 - RNA, 19 nt, Artificial Sequence
  Description of Artificial Sequence: Synthetic oligonucleotide
aguagguugucuuguagag

SEQ ID NO: 832974 - RNA, 19 nt, Artificial Sequence
  Description of Artificial Sequence: Synthetic oligonucleotide
acuggcguugaacacaauc

SEQ ID NO: 832975 - RNA, 19 nt, Artificial Sequence
  Description of Artificial Sequence: Synthetic oligonucleotide
uguuguaccuuaugagccg

SEQ ID NO: 832976 - RNA, 19 nt, Artificial Sequence
  Description of Artificial Sequence: Synthetic oligonucleotide
uuaauggugaacccuccca

SEQ ID NO: 832977 - RNA, 19 nt, Artificial Sequence
  Description of Artificial Sequence: Synthetic oligonucleotide
auaagcccuaucaaugucc

SEQ ID NO: 832978 - RNA, 19 nt, Artificial Sequence
  Description of Artificial Sequence: Synthetic oligonucleotide
ugggcuucgggauacaggc

SEQ ID NO: 832979 - RNA, 19 nt, Artificial Sequence
  Description of Artificial Sequence: Synthetic oligonucleotide
agaauguccagagaucagg

SEQ ID NO: 832980 - RNA, 19 nt, Artificial Sequence
  Description of Artificial Sequence: Synthetic oligonucleotide
uuauacgugccacuauuga

SEQ ID NO: 832981 - RNA, 19 nt, Artificial Sequence
  Description of Artificial Sequence: Synthetic oligonucleotide
uccauugguuauuauacgu

SEQ ID NO: 832982 - RNA, 19 nt, Artificial Sequence
  Description of Artificial Sequence: Synthetic oligonucleotide
ugaaaagcuggucaccuuc

SEQ ID NO: 832983 - RNA, 19 nt, Artificial Sequence
  Description of Artificial Sequence: Synthetic oligonucleotide
uuuaauggugaacccuccc

SEQ ID NO: 832984 - RNA, 19 nt, Artificial Sequence
  Description of Artificial Sequence: Synthetic oligonucleotide
ugugugacccuacuggcca

SEQ ID NO: 832985 - RNA, 19 nt, Artificial Sequence
  Description of Artificial Sequence: Synthetic oligonucleotide
ugucuuguagagaucuuca

SEQ ID NO: 832986 - RNA, 19 nt, Artificial Sequence
  Description of Artificial Sequence: Synthetic oligonucleotide
uauuauacgugccacuauu

SEQ ID NO: 832987 - RNA, 19 nt, Artificial Sequence
  Description of Artificial Sequence: Synthetic oligonucleotide
auacgugccacuauugaac

SEQ ID NO: 832988 - RNA, 19 nt, Artificial Sequence
  Description of Artificial Sequence: Synthetic oligonucleotide
uuuuaauggugaacccucc

SEQ ID NO: 832989 - RNA, 19 nt, Artificial Sequence
  Description of Artificial Sequence: Synthetic oligonucleotide
cuuaugagccggaccaugg

SEQ ID NO: 832990 - RNA, 19 nt, Artificial Sequence
  Description of Artificial Sequence: Synthetic oligonucleotide
auugguuauuauacgugcc

SEQ ID NO: 832991 - RNA, 19 nt, Artificial Sequence
  Description of Artificial Sequence: Synthetic oligonucleotide
aagucaucgccagagaaga

SEQ ID NO: 832992 - RNA, 19 nt, Artificial Sequence
  Description of Artificial Sequence: Synthetic oligonucleotide
acggcgauaaacuccacug

SEQ ID NO: 832993 - RNA, 19 nt, Artificial Sequence
  Description of Artificial Sequence: Synthetic oligonucleotide
aguccagauaggcccaccc

SEQ ID NO: 832994 - RNA, 19 nt, Artificial Sequence
  Description of Artificial Sequence: Synthetic oligonucleotide
ugccuuguaguccacaauc

SEQ ID NO: 832995 - RNA, 19 nt, Artificial Sequence
  Description of Artificial Sequence: Synthetic oligonucleotide
agcaacaccucagucagcg

SEQ ID NO: 832996 - RNA, 19 nt, Artificial Sequence
  Description of Artificial Sequence: Synthetic oligonucleotide
aaauuguugccagcaauca

SEQ ID NO: 832997 - RNA, 19 nt, Artificial Sequence
  Description of Artificial Sequence: Synthetic oligonucleotide
uucuaggaugguaagcacu

SEQ ID NO: 832998 - RNA, 19 nt, Artificial Sequence
  Description of Artificial Sequence: Synthetic oligonucleotide
ugcggaacggcgauaaacu

SEQ ID NO: 832999 - RNA, 19 nt, Artificial Sequence
  Description of Artificial Sequence: Synthetic oligonucleotide
ucgugaaggaaguuguugu

SEQ ID NO: 833000 - RNA, 19 nt, Artificial Sequence
  Description of Artificial Sequence: Synthetic oligonucleotide
agcaacuugaugauagcgg

SEQ ID NO: 833001 - RNA, 19 nt, Artificial Sequence
  Description of Artificial Sequence: Synthetic oligonucleotide
gaugaaugccuuguagucc

SEQ ID NO: 833002 - RNA, 19 nt, Artificial Sequence
  Description of Artificial Sequence: Synthetic oligonucleotide
cacaaucucaaagaacggg

SEQ ID NO: 833003 - RNA, 19 nt, Artificial Sequence
  Description of Artificial Sequence: Synthetic oligonucleotide
uaagacgaaaagaccaaau

SEQ ID NO: 833004 - RNA, 19 nt, Artificial Sequence
  Description of Artificial Sequence: Synthetic oligonucleotide
aaugccuuguaguccacaa

SEQ ID NO: 833005 - RNA, 19 nt, Artificial Sequence
  Description of Artificial Sequence: Synthetic oligonucleotide
ucuuauucagggcuugcuc

SEQ ID NO: 833006 - RNA, 19 nt, Artificial Sequence
  Description of Artificial Sequence: Synthetic oligonucleotide
uauacgugccacuauugaa

SEQ ID NO: 833007 - RNA, 19 nt, Artificial Sequence
  Description of Artificial Sequence: Synthetic oligonucleotide
ggucaaacggccuucguag

SEQ ID NO: 833008 - RNA, 19 nt, Artificial Sequence
  Description of Artificial Sequence: Synthetic oligonucleotide
gaugaugcguagcauguuc

SEQ ID NO: 833009 - RNA, 19 nt, Artificial Sequence
  Description of Artificial Sequence: Synthetic oligonucleotide
cagcacuaggaaaauggcg

SEQ ID NO: 833010 - RNA, 19 nt, Artificial Sequence
  Description of Artificial Sequence: Synthetic oligonucleotide
aaauggguaggagccauug

SEQ ID NO: 833011 - RNA, 19 nt, Artificial Sequence
  Description of Artificial Sequence: Synthetic oligonucleotide
acaaucauccauugguuau

SEQ ID NO: 833012 - RNA, 19 nt, Artificial Sequence
  Description of Artificial Sequence: Synthetic oligonucleotide
agaccaaauuguugccagc

SEQ ID NO: 833013 - RNA, 19 nt, Artificial Sequence
  Description of Artificial Sequence: Synthetic oligonucleotide
ucgcgaauggcguugguga

SEQ ID NO: 833014 - RNA, 19 nt, Artificial Sequence
  Description of Artificial Sequence: Synthetic oligonucleotide
ugguacagggcuugaaaug

SEQ ID NO: 833015 - RNA, 19 nt, Artificial Sequence
  Description of Artificial Sequence: Synthetic oligonucleotide
gaugcguagcauguucugg

SEQ ID NO: 833016 - RNA, 19 nt, Artificial Sequence
  Description of Artificial Sequence: Synthetic oligonucleotide
guuguagcuagcccaguag

SEQ ID NO: 833017 - RNA, 19 nt, Artificial Sequence
  Description of Artificial Sequence: Synthetic oligonucleotide
uguccucuaggccuuucag

SEQ ID NO: 833018 - RNA, 19 nt, Artificial Sequence
  Description of Artificial Sequence: Synthetic oligonucleotide
caacaccucagucagcgag

SEQ ID NO: 833019 - RNA, 19 nt, Artificial Sequence
  Description of Artificial Sequence: Synthetic oligonucleotide
gcaaugauaagcccuauca

SEQ ID NO: 833020 - RNA, 19 nt, Artificial Sequence
  Description of Artificial Sequence: Synthetic oligonucleotide
gacgaaaagaccaaauugu

SEQ ID NO: 833021 - RNA, 19 nt, Artificial Sequence
  Description of Artificial Sequence: Synthetic oligonucleotide
gguacagggcuugaaaugg

SEQ ID NO: 833022 - RNA, 19 nt, Artificial Sequence
  Description of Artificial Sequence: Synthetic oligonucleotide
aagucucagucccauggga

SEQ ID NO: 833023 - RNA, 19 nt, Artificial Sequence
  Description of Artificial Sequence: Synthetic oligonucleotide
uguuucgaauccacuccag

SEQ ID NO: 833024 - RNA, 19 nt, Artificial Sequence
  Description of Artificial Sequence: Synthetic oligonucleotide
gaaccccaggguuuuaaug

SEQ ID NO: 833025 - RNA, 19 nt, Artificial Sequence
  Description of Artificial Sequence: Synthetic oligonucleotide
agggcagaagacuugggga

SEQ ID NO: 833026 - RNA, 19 nt, Artificial Sequence
  Description of Artificial Sequence: Synthetic oligonucleotide
guuuuaauggugaacccuc

SEQ ID NO: 833027 - RNA, 19 nt, Artificial Sequence
  Description of Artificial Sequence: Synthetic oligonucleotide
uuuguacccaaguccagau

SEQ ID NO: 833028 - RNA, 19 nt, Artificial Sequence
  Description of Artificial Sequence: Synthetic oligonucleotide
aagcccuaucaaugucccc

SEQ ID NO: 833029 - RNA, 19 nt, Artificial Sequence
  Description of Artificial Sequence: Synthetic oligonucleotide
aaauggcgcccagaauccc

SEQ ID NO: 833030 - RNA, 19 nt, Artificial Sequence
  Description of Artificial Sequence: Synthetic oligonucleotide
ugguaggaguuccaugugu

SEQ ID NO: 833031 - RNA, 19 nt, Artificial Sequence
  Description of Artificial Sequence: Synthetic oligonucleotide
gcuugaaauggguaggagc

SEQ ID NO: 833032 - RNA, 19 nt, Artificial Sequence
  Description of Artificial Sequence: Synthetic oligonucleotide
agccuacuggguuuguguc

SEQ ID NO: 833033 - RNA, 19 nt, Artificial Sequence
  Description of Artificial Sequence: Synthetic oligonucleotide
uaugagccggaccauggaa

SEQ ID NO: 833034 - RNA, 19 nt, Artificial Sequence
  Description of Artificial Sequence: Synthetic oligonucleotide
ucgggauacaggcuucaca

SEQ ID NO: 833035 - RNA, 19 nt, Artificial Sequence
  Description of Artificial Sequence: Synthetic oligonucleotide
uucacaucgaugccaccgu

SEQ ID NO: 833036 - RNA, 19 nt, Artificial Sequence
  Description of Artificial Sequence: Synthetic oligonucleotide
cuaguagugacagcaauga

SEQ ID NO: 833037 - RNA, 19 nt, Artificial Sequence
  Description of Artificial Sequence: Synthetic oligonucleotide
uggugcccggguaagacga

SEQ ID NO: 833038 - RNA, 19 nt, Artificial Sequence
  Description of Artificial Sequence: Synthetic oligonucleotide
uggcguugaacacaaucuc

SEQ ID NO: 833039 - RNA, 19 nt, Artificial Sequence
  Description of Artificial Sequence: Synthetic oligonucleotide
guagcuguccucuaggccu

SEQ ID NO: 833040 - RNA, 19 nt, Artificial Sequence
  Description of Artificial Sequence: Synthetic oligonucleotide
ugagcucgaggguucuuag

SEQ ID NO: 833041 - RNA, 19 nt, Artificial Sequence
  Description of Artificial Sequence: Synthetic oligonucleotide
agucucagucccaugggac

SEQ ID NO: 833042 - RNA, 19 nt, Artificial Sequence
  Description of Artificial Sequence: Synthetic oligonucleotide
gaugggugagaauguccag

SEQ ID NO: 833043 - RNA, 19 nt, Artificial Sequence
  Description of Artificial Sequence: Synthetic oligonucleotide
ugaugcguagcauguucug

SEQ ID NO: 833044 - RNA, 19 nt, Artificial Sequence
  Description of Artificial Sequence: Synthetic oligonucleotide
gaagcaugcugcggaacgg
